United States Patent Application Publication US 2018/0126003 A1 - sequence listing, part 7

SEQ ID NO: 7812 - DNA, 636 bp, Artificial Sequence
  derived and/or modified sequence
atgaccccctggctgggcctgatcgtgctgctgggcagctggagcctgggcgactggggcgccgaggcctgcacctgcagccccagccacccccaggacgccttctgcaacagcgacatcgtgatcagagccaaggtggtgggcaagaagctggtgaaggagggccccttcggcaccctggtgtacaccatcaagcagatgaagatgtacagaggcttcaccaagatgccccacgtgcagtacatccacaccgaggccagcgagagcctgtgcggcctgaagctggaggtgaacaagtaccagtacctgctgaccggcagagtgtacgacggcaagatgtacaccggcctgtgcaacttcgtggagagatgggaccagctgaccctgagccagagaaagggcctgaactacagataccacctgggctgcaactgcaagatcaagagctgctactacctgccctgcttcgtgaccagcaagaacgagtgcctgtggaccgacatgctgagcaacttcggctaccccggctaccagagcaagcactacgcctgcatcagacagaagggcggctactgcagctggtacagaggctgggccccccccgacaagagcatcatcaacgccaccgacccctag

SEQ ID NO: 7813 - DNA, 438 bp, Artificial Sequence
  derived and/or modified sequence
atgaagatgtacagaggcttcaccaagatgccccacgtgcagtacatccacaccgaggccagcgagagcctgtgcggcctgaagctggaggtgaacaagtaccagtacctgctgaccggcagagtgtacgacggcaagatgtacaccggcctgtgcaacttcgtggagagatgggaccagctgaccctgagccagagaaagggcctgaactacagataccacctgggctgcaactgcaagatcaagagctgctactacctgccctgcttcgtgaccagcaagaacgagtgcctgtggaccgacatgctgagcaacttcggctaccccggctaccagagcaagcactacgcctgcatcagacagaagggcggctactgcagctggtacagaggctgggccccccccgacaagagcatcatcaacgccaccgacccctag

SEQ ID NO: 7814 - DNA, 636 bp, Artificial Sequence
  derived and/or modified sequence
atgacgccctggctggggctgattgttttattgggcagctggagcttaggggactggggcgctgaagcctgtacttgttccccctcccatccccaagatgcgttctgcaacagtgatatcgtgatccgagcgaaagtcgtgggcaaaaaacttgtgaaggaggggccctttggaactctggtttataccatcaaacagatgaagatgtatagagggtttaccaaaatgcctcatgtgcagtatatacacaccgaggcgtccgagtccctttgcggcttgaagctcgaagtgaacaaataccagtaccttctaacaggccgagtttacgacggtaaaatgtacacaggtctctgcaatttcgtcgaaagatgggaccagttaacactatcccaaagaaagggtctaaattataggtaccacctaggatgtaattgcaagataaagtcttgttattatctgccttgttttgtcacctcaaagaacgaatgcttgtggacagatatgctgagcaactttggctaccctggctatcagtccaagcactatgcctgcatcagacaaaaagggggttattgctcctggtatagagggtgggctcctcctgacaaatctattattaatgctaccgacccttag

SEQ ID NO: 7815 - DNA, 438 bp, Artificial Sequence
  derived and/or modified sequence
atgaagatgtatcgcggattcacaaagatgccacatgtgcagtatatccacaccgaggcctctgagtccttgtgcggtcttaagctggaagtgaacaagtaccagtacctgctgaccggccgcgtctacgatgggaaaatgtataccggcctctgcaatttcgtggagcgttgggaccaactgaccctgagtcagaggaaagggctgaactatcgataccatcttgggtgtaactgcaagatcaagagctgctattacctgccgtgtttcgttacctcaaaaaatgagtgtttatggactgacatgctgagcaattttggatatccaggatatcaatctaagcactatgcttgtatccgccagaaaggcggctattgctcatggtataggggttgggctccaccagacaagagtatcattaacgccactgacccgtag

SEQ ID NO: 7816 - DNA, 636 bp, Artificial Sequence
  derived and/or modified sequence
atgaccccctggctgggcctcatcgtgctgctgggctcctggagcctgggggactggggcgctgaggcctgcacctgcagccccagccacccccaggatgccttctgcaacagcgacatcgtcatccgggccaaggtggtgggcaagaagctggtgaaggagggccccttcggcaccctggtgtacaccatcaagcagatgaagatgtaccggggcttcaccaagatgccccacgtgcagtacatccacacagaggccagcgagagcctgtgtggcctgaagctggaggtgaacaagtaccagtacctgctgaccggccgggtgtatgatggcaagatgtacacaggcctgtgcaactttgtggagcgctgggaccagctgaccctgagccagaggaagggcctgaactaccgctaccacctgggctgcaactgcaagatcaagagctgctactacctgccctgctttgtgaccagcaagaatgaatgtctgtggacagacatgctgagcaactttggctacccaggctaccagagcaagcactacgcctgcatccggcagaagggcggctactgctcctggtaccggggctgggcccccccagacaagagcatcatcaatgccacagacccctag

SEQ ID NO: 7817 - DNA, 438 bp, Artificial Sequence
  derived and/or modified sequence
atgaagatgtaccggggcttcaccaagatgccccacgtgcagtacatccacacagaggccagcgagagcctgtgtggcctgaagctggaggtgaacaagtaccagtacctgctgaccggccgggtgtatgatggcaagatgtacacaggcctgtgcaactttgtggagcgctgggaccagctgaccctgagccagaggaagggcctgaactaccgctaccacctgggctgcaactgcaagatcaagagctgctactacctgccctgctttgtgaccagcaagaatgaatgtctgtggacagacatgctgagcaactttggctacccaggctaccagagcaagcactacgcctgcatccggcagaagggcggctactgctcctggtaccggggctgggcccccccagacaagagcatcatcaatgccacagacccctag

SEQ ID NO: 7818 - DNA, 636 bp, Artificial Sequence
  derived and/or modified sequence
atgaccccctggctgggcctgatcgtgctgctgggcagctggagcttaggggattggggcgccgaagcttgtacatgctcaccgtcacatccacaggatgctttttgtaatagtgatatagtaatcagggcgaaggttgttggcaagaagctcgtcaaggaaggcccattcggtacactggtgtacaccatcaaacaaatgaaaatgtacaggggctttactaaaatgccgcatgtgcagtatattcacactgaagcttcagagtcactttgcggactcaagctggaggttaacaaataccagtacctgctgaccgggagagtgtatgatgggaagatgtataccgggctgtgcaacttcgtggagagatgggaccaactgaccctgagccagagaaaagggctcaactacaggtaccacttgggttgcaattgtaagattaagtcctgttactacctgccttgctttgtaacaagcaagaatgagtgtctgtggaccgacatgctgtcgaatttcggctatcctgggtaccagtccaagcactacgcgtgcatccgtcagaagggcggctactgctcttggtacaggggatgggctccacccgataaatctataattaacgcaacagacccatag

SEQ ID NO: 7819 - DNA, 438 bp, Artificial Sequence
  derived and/or modified sequence
atgaagatgtaccggggcttcaccaagatgccccacgtgcagtacatacacacggaagcttctgagtccctctgcggcctgaagctagaagtgaacaagtatcagtatctgctgacgggcagagtctacgatggcaagatgtatactggactgtgcaactttgtggagagatgggatcagttaacactcagtcaacggaaaggcctgaactataggtatcatctcggttgcaactgcaagatcaagtcatgctattacctaccttgttttgttacatctaagaacgaatgcctatggacggacatgctgagcaactttggctaccccgggtaccagtctaagcattatgcatgcatccgccagaaaggcggatattgctcttggtacaggggatgggccccacccgataagtcaatcatcaacgcaaccgacccatag

SEQ ID NO: 7820 - DNA, 636 bp, Artificial Sequence
  derived and/or modified sequence
atgacaccttggctgggtctgatagtgcttctggggtcttggagcctcggtgactggggcgcagaggcctgtacttgttctcccagccaccctcaggatgcgttttgcaatagcgacattgtgattcgcgctaaagtggtcgggaaaaaactcgttaaagagggcccttttgggaccctagtttataccatcaagcagatgaaaatgtaccgaggcttcacaaaaatgcctcacgttcagtacattcataccgaggcttctgagtcattgtgtgggctcaagcttgaggtgaacaagtatcagtaccttttgacgggcagggtttatgacggtaaaatgtacaccggactttgcaattttgtcgagcggtgggatcagctgaccctgtcacagcgtaaaggattgaattaccgctatcatttaggatgcaattgcaaaatcaagagctgttactacctcccttgcttcgttaccagcaaaaatgaatgcctgtggacagacatgttgagcaacttcggatacccaggatatcagagtaagcactatgcctgtataagacaaaaagggggttattgttcgtggtataggggatgggccccaccagataagtccatcatcaatgccacagatccttag

SEQ ID NO: 7821 - DNA, 438 bp, Artificial Sequence
  derived and/or modified sequence
atgaaaatgtatcgaggttttacaaaaatgcctcatgttcagtacattcacacagaagcttcagaatccttgtgtggtctcaagttagaggttaataaatatcagtatttgcttaccgggagagtgtacgacggcaagatgtatacgggtctgtgtaactttgtagagagatgggaccagctgacactgtcacagagaaagggcctgaactaccggtatcaccttgggtgcaattgtaagattaagagctgttactatctcccatgctttgtcacttccaaaaacgagtgtctctggaccgatatgttgagcaacttcggatacccagggtaccagtcgaaacactatgcctgcatcagacaaaaagggggatattgcagctggtatcggggttgggcccctcccgacaaatccattataaacgccactgacccttag

SEQ ID NO: 7822 - DNA, 4603 bp, Artificial Sequence
  derived and/or modified sequence
gcgcagagcgggcagcaggcaggcggcgggcgctcagacggcttctcctcctcctcttgctcctccagctcctgctccttcgccgggaggccgcccgccgagtcctgcgccagcgccgaggcagcctcgctgcgccccatcccgtcccgccgggcactcggagggcagcgcgccggaggccaaggttgccccgcacggcccggcgggcgagcgagctcgggctgcagcagccccgccggcggcgcgcacggcaactttggagaggcgagcagcagccccggcagcggcggcagcagcggcaatgaccccttggctcgggctcatcgtgctcctgggcagctggagcctgggggactggggcgccgaggcgtgcacatgctcgcccagccacccccaggacgccttctgcaactccgacatcgtgatccgggccaaggtggtggggaagaagctggtaaaggaggggcccttcggcacgctggtctacaccatcaagcagatgaagatgtaccgaggcttcaccaagatgccccatgtgcagtacatccatacggaagcttccgagagtctctgtggccttaagctggaggtcaacaagtaccagtacctgctgacaggtcgcgtctatgatggcaagatgtacacggggctgtgcaacttcgtggagaggtgggaccagctcaccctctcccagcgcaaggggctgaactatcggtatcacctgggttgtaactgcaagatcaagtcctgctactacctgccttgctttgtgacttccaagaacgagtgtctctggaccgacatgctctccaatttcggttaccctggctaccagtccaaacactacgcctgcatccggcagaagggcggctactgcagctggtaccgaggatgggcccccccggataaaagcatcatcaatgccacagacccctgagcgccagaccctgccccacctcacttccctcccttcccgctgagcttcccttggacactaactcttcccagatgatgacaatgaaattagtgcctgttttcttgcaaatttagcacttggaacatttaaagaaaggtctatgctgtcatatggggtttattgggaactatcctcctggccccaccctgccccttctttttggttttgacatcattcatttccacctgggaatttctggtgccatgccagaaagaatgaggaacctgtattcctcttcttcgtgataatataatctctatttttttaggaaaacaaaaatgaaaaactactccatttgaggattgtaattcccacccctcttgcttcttccccacctcaccatctcccagaccctcttccctttgcccttctcctccaatacataaaggacacagacaaggaacttgctgaaaggccaaccatttcaggatcagtcaaaggcagcaagcagatagactcaaggtgtgtgaaagatgttatacaccaggagctgccactgcatgtcccaaccagactgtgtctgtctgtgtctgcatgtaagagtgagggagggaaggaaggaactacaagagagtcggagatgatgcagcacacacacaattccccagcccagtgatgcttgtgttgaccagatgttcctgagtctggagcaagcacccaggccagaataacagagctttcttagttggtgaagacttaaacatctgcctgaggtcaggaggcaatttgcctgccttgtacaaaagctcaggtgaaagactgagatgaatgtctttcctctccctgcctcccaccagacttcctcctggaaaacgctttggtagatttggccaggagctttcttttatgtaaattggataaatacacacaccatacactatccacagatatagccaagtagatttgggtagaggatactatttccagaatagtgtttagctcacctagggggatatgtttgtatacacatttgcatatacccacatggggacataagctaatttttttacaggacacagaattctgttcaatgctgttaaatatgccaatagtttaatctcttctattttgttgtcgttgcttgtttgaagaaaatcatgacattccaagttgacatttttttttcattttaattaaaatttgaaattctgaacaccgtcagcaccctctcttccctatcatgggtcatctgacccctgtccgtctccttgtccctgcttcatgtttgggggcctttctttaactgccttcctggcttagctcagatggcagatgagagtgtagtcaagggcctgggcacaggagggagagctgcagagtgtcctgcctgccttggctggagggacacctctcctgggtgtggagacagcttggttccctttccctagctccctggtgggtgaatgccacctcctgagatcctcacctcttggaattaaaattgttggtcactggggaaagcctgagtttgcaaccagttgtagggtttctgttgtgtttttttttttttttttgaaataaaactataatataaattctcctattaaataaaattattttaagttttagtgtcaaaagtgagatgctgagagtaggtgataatgtatattttacagagtgggggttggcaggatggtgacattgaacatgattgctctctgtctcttttttcagcttatgggtatttatcttctattagtatttgtatcttcagttcattccactttaggaaacagagctgccaattgaaacagaagaagaaaaaaaaaaaaagcagcagacaacacactgtagagtcttgcacacacacaagtgcccaggcaaggtgcttggcagaaccgcagagtgggaagagagtaccggcatcgggtttccttgggatcaatttcattaccgtgtacctttcccattgtggtcatgccatttggcagggggagaatgggaggcttggccttctttgtgaggcagtgtgagcagaagctgatgccagcatgtcactggttttgaagggatgagcccagacttgatgttttgggattgtccttattttaacctcaaggtctcgcatggtggggcccctgaccaacctacacaagttccctcccacaagtggacatcagtgtcttctctgtgaggcatctggccattcgcactccctggtgtggtcagcctctctcacacaaggaggaacttgggtgaaggctgagtgtgaggcacctgaagtttccctgcggagtcgataaattagcagaaccacatccccatctgttaggccttggtgaggaggccctgggcaaagaagggtctttcgcaaagcgatgtcagagggcggttttgagctttctataagctatagctttgtttatttcacccgttcacttactgtataatttaaaatcatttatgtagctgagacacttctgtatttcaatcatatcatgaacattttattttgctaaatcttgtgtcatgtgtaggctgtaatatgtgtacattgtgtttaagagaaaaatgaaacccacatgccgccattttcctgaatcaaattctgcagtggaatggagaggaaaatacttctaggcaagcagctagactggtgaattgggggaaatagaaggaactagtaactgagactcctccagcctcctccctattggaatcccaatggctcctggagtaggaaaaaagtttaaactacattcatgttcttgttctgtgtcactcggccctgggtagtctaccatttacttcaccccaagtcctgctgcccatccagttgggaagccatgattttcctaagaatccagggccatgggagatacaattccaagttctcgcttcctcctttgggcatctcttctgcctcccaatcaaggaagctccatgctcaggctctcagctctcgggccagtgctctgctctgtccagggtaggtaatactgggagactcctgtcttttaccctcccctcgttccagacctgcctcatggtggcaacatggttcttgaacaattaaagaaacaaatgactttttggaatagccctgtctagggcaaactgtggcccccaggagacactacccttccatgccccagacctctgtcttgcatgtgacaattgacaatctggactaccccaagatggcacccaagtgtttggcttctggctacctaaggttaacatgtcactagagtatttttatgagagacaaacattataaaaatctgatggcaaaagcaaaacaaaatggaaagtaggggaggtggatgtgacaacaacttccaaattggctctttggaggcgagaggaaggggagaacttggagaatagtttttgctttgggggtagaggcttcttagattctcccagcatccgcctttccctttagccagtctgctgtcctgaaacccagaagtgatggagagaaaccaacaagagatctcgaaccctgtctagaaggaatgtatttgttgctaaatttcgtagcactgtttacagttttcctccatgttatttatgaattttatattccgtgaatgtatattgtcttgtaatgttgcataatgttcactttttatagtgtgtcctttattctaaacagtaaagtggttttatttctatcacaca

SEQ ID NO: 7823 - DNA, 1446 bp, Artificial Sequence
  derived and/or modified sequence
gggcagcaggcaggcggcgggcgctcagacggcttctcctcctcctcttgctcctccagctcctgctccttcgccgggaggccgcccgccgagccacccccaggacgccttctgcaactccgacatcgtgatccgggccaaggtggtggggaagaagctggtaaaggaggggcccttcggcacgctggtctacaccatcaagcagatgaagatgtaccgaggcttcaccaagatgccccatgtgcagtacatccatacggaagcttccgagagtctctgtggccttaagctggaggtcaacaagtaccagtacctgctgacaggtcgcgtctatgatggcaagatgtacacggggctgtgcaacttcgtggagaggtgggaccagctcaccctctcccagcgcaaggggctgaactatcggtatcacctgggttgtaactgcaagatcaagtcctgctactacctgccttgctttgtgacttccaagaacgagtgtctctggaccgacatgctctccaatttcggttaccctggctaccagtccaaacactacgcctgcatccggcagaagggcggctactgcagctggtaccgaggatgggcccccccggataaaagcatcatcaatgccacagacccctgagcgccagaccctgccccacctcacttccctcccttcccgctgagcttcccttggacactaactcttcccagatgatgacaatgaaattagtgcctgttttcttgcaaatttagcacttggaacatttaaagaaaggtctatgctgtcatatggggtttattgggaactatcctcctggccccaccctgccccttctttttggttttgacatcattcatttccacctgggaatttctggtgccatgccagaaagaatgaggaacctgtattcctcttcttcgtgataatataatctctatttttttaggaaaacaaaaatgaaaaactactccatttgaggattgtaattcccacccctcttgcttcttccccacctcaccatctcccagaccctcttccctttgcccttctcctccaatacataaaggacacagacaaggaacttgctgaaaggccaaccatttcaggatcagtcaaaggcagcaagcagatagactcaaggtgtgtgaaagatgttatacaccaggagctgccactgcatgtcccaaccagactgtgtctgtctgtgtctgcatgtaagagtgagggagggaaggaaggaactacaagagagtcggagatgatgcagcacacacacaattccccagcccagtgatgcttgtgttgaccagatgttcctgagtctggagcaagcacccaggccagaataacagagctttcttagttggtgaagacttaaacatctgcctgaggtcaggaggcaatttgcctgccttgtacaaaagctcaggtgaaagactgag

SEQ ID NO: 7824 - DNA, 189 bp, Artificial Sequence
  derived and/or modified sequence
atgctgcaggtggtgcaggagggcaaccccgcccccttcatcatcaataccgtgaagcggggaagaagagatagggagcgtcagcggactccctgggcaccacatccattgggattccaggaacgcaggtacatctacgagagccccaatcaccggggaaaagactcatcctttctggctcagaagtag

SEQ ID NO: 7825 - protein, 210 aa, Artificial Sequence
  derived and/or modified sequence
MADGSSDAAREPRPAPAPIRRRSSNYRAYATEPHAKKKSKISASRKLQLKTLLLQIAKQELEREAEERRGEKGRALSTRCQPLELAGLGFAELQDLCRQLHARVDKVDEERYDIEAKVTKNITEIADLTQKIFDLRGKFKRPTLRRVRISADAMMQALLGARAKESLDLRAHLKQVKKEDTEKENREVGDWRKNIDALSGMEGRKKKFES

SEQ ID NO: 7826 - DNA, 633 bp, Artificial Sequence
  derived and/or modified sequence
atggccgacggcagcagcgacgccgccagagagcccagacccgcccccgcccccatcagaagaagaagcagcaactacagagcctacgccaccgagccccacgccaagaagaagagcaagatcagcgccagcagaaagctgcagctgaagaccctgctgctgcagatcgccaagcaggagctggagagagaggccgaggagagaagaggcgagaagggcagagccctgagcaccagatgccagcccctggagctggccggcctgggcttcgccgagctgcaggacctgtgcagacagctgcacgccagagtggacaaggtggacgaggagagatacgacatcgaggccaaggtgaccaagaacatcaccgagatcgccgacctgacccagaagatcttcgacctgagaggcaagttcaagagacccaccctgagaagagtgagaatcagcgccgacgccatgatgcaggccctgctgggcgccagagccaaggagagcctggacctgagagcccacctgaagcaggtgaagaaggaggacaccgagaaggagaacagagaggtgggcgactggagaaagaacatcgacgccctgagcggcatggagggcagaaagaagaagttcgagagctag

SEQ ID NO: 7827 - DNA, 633 bp, Artificial Sequence
  derived and/or modified sequence
atggccgatggcagttctgatgcagccagagaacctcgcccagcgccagctcccattaggaggcgctcctccaactatcgtgcctatgctactgagcctcatgcaaagaaaaaatctaaaatcagtgccagccgaaagctgcaactcaagactctattgcttcagatcgctaagcaagagctggagcgcgaagctgaagaaaggagaggcgaaaaggggcgtgctctctcgacacgctgccagccattggagttggcgggcctaggttttgccgaactgcaagatctctgtcgacaactgcatgcacgggttgataaggttgatgaggagcgatacgacatcgaggccaaggtcaccaagaacattacagagatcgccgacctcacccagaaaatatttgaccttcgagggaagttcaaacgcccaaccctgcgcagggtcaggatctctgcagacgcgatgatgcaagcgcttctgggtgctagggccaaggagagcctagacctgcgcgcccatctgaagcaagtgaagaaggaggacacagagaaagagaacagagaagttggggattggagaaagaacatcgacgcccttagcggtatggagggaaggaagaagaagttcgaaagttag

SEQ ID NO: 7828 - DNA, 633 bp, Artificial Sequence
  derived and/or modified sequence
atggctgatggcagcagtgatgctgcccgggagcccaggcctgccccagcccccatcagaagaagaagcagcaactaccgggcctatgccacagagccccacgccaagaagaagagcaagatcagcgccagcaggaagctgcagctgaagaccctgctgctgcagatcgccaagcaggagctggagcgggaggccgaggagcggcggggggagaagggccgggccctgagcacccgctgccagcccctggagctggccggcctgggctttgctgagctgcaggacctgtgccggcagctgcacgcccgggtggacaaggtggatgaggagagatatgacatcgaggccaaggtgaccaagaacatcacagaaattgctgacctgacccagaagatctttgacctgcggggcaagttcaagaggcccaccctgcggcgggtgcgcatctctgcagatgccatgatgcaggccctgctgggcgcccgggccaaggagagcctggacctgcgggcccacctgaagcaggtgaagaaggaggacacagagaaggagaaccgggaggtgggggactggaggaagaacattgatgccctgagcggcatggagggcaggaagaagaagtttgagagctag

SEQ ID NO: 7829 - DNA, 633 bp, Artificial Sequence
  derived and/or modified sequence
atggccgacggcagcagcgacgccgcccgggagccccggcccgcccccgcccccatcagacggaggagtagcaattaccgagcttacgctaccgagccacacgctaaaaagaagagtaagatctctgcctctaggaagcttcagctcaaaactctgttgctacaaatcgctaagcaggagctggagcgagaggccgaagagcgtcggggtgagaaggggcgagcactctctacaagatgccagccactcgagctagcaggacttggatttgccgagcttcaggacctgtgcagacagcttcatgccagagtggataaagttgacgaggaacgatatgacattgaggctaaggtgacgaaaaatattactgaaatcgcagacttgactcaaaagattttcgatcttcggggaaagttcaagcgtccaacattgcgtcgagttaggatttccgccgatgcaatgatgcaggctttactgggggcaagggcaaaagaaagtctggatttgagggctcacctaaagcaggtgaaaaaggaggacacagaaaaggaaaaccgggaggtgggcgattggaggaaaaatattgacgcattatctggcatggaaggccgcaaaaaaaaatttgaatcttag

SEQ ID NO: 7830 - DNA, 633 bp, Artificial Sequence
  derived and/or modified sequence
atggctgacggatctagcgatgcggcaagggagcccagaccggcacccgcacccatacgaaggcgaagtagcaactatcgcgcatacgccactgaaccacacgccaaaaaaaagagtaaaatatctgcaagcaggaaacttcagctgaagaccctccttctgcagatagccaagcaggaattagaacgggaggctgaggagcgccgtggcgagaagggtcgggctttgtctaccagatgtcagccgctggagttagccggactcggattcgcagagctacaagatctttgccggcaattgcatgcgcgagtcgacaaagtggacgaggagcggtacgatattgaggctaaagtcacgaaaaacattactgaaatcgcggacctcacccagaaaatctttgaccttagaggtaaatttaagaggcctacgctgcgtcgcgttcgaatttccgctgacgctatgatgcaagcattgctcggcgcacgcgcaaaagagagcttggacttgagggcccatctgaagcaagtgaagaaagaggacacagagaaggaaaacagagaagtgggagactggcggaagaacatcgacgctctttctggaatggaagggcgtaagaagaagttcgagagttag

SEQ ID NO: 7831 - DNA, 840 bp, Artificial Sequence
  derived and/or modified sequence
agtgtcctcggggagtctcaagcagcccggaggagactgacggtccctgggaccctgaaggtcacccgggcggccccctcactgaccctccaaacgcccctgtcctcgccctgcctcctgccattcccggcctgagtctcagcatggcggatgggagcagcgatgcggctagggaacctcgccctgcaccagccccaatcagacgccgctcctccaactaccgcgcttatgccacggagccgcacgccaagaaaaaatctaagatctccgcctcgagaaaattgcagctgaagactctgctgctgcagattgcaaagcaagagctggagcgagaggcggaggagcggcgcggagagaaggggcgcgctctgagcacccgctgccagccgctggagttggccgggctgggcttcgcggagctgcaggacttgtgccgacagctccacgcccgtgtggacaaggtggatgaagagagatacgacatagaggcaaaagtcaccaagaacatcacggagattgcagatctgactcagaagatctttgaccttcgaggcaagtttaagcggcccaccctgcggagagtgaggatctctgcagatgccatgatgcaggcgctgctgggggcccgggctaaggagtccctggacctgcgggcccacctcaagcaggtgaagaaggaggacaccgagaaggaaaaccgggaggtgggagactggcgcaagaacatcgatgcactgagtggaatggagggccgcaagaaaaagtttgagagctgagccttcctgcctactgcccctgccctgaggagggccctgaggaataaagcttctctctgagctg

SEQ ID NO: 7832 - protein, 167 aa, Artificial Sequence
  derived and/or modified sequence
MIKDCGATWVVLGHSERRHVFGESDELIGQKVAHALAEGLGVIACIGEKLDEREAGITEKVVFEQTKVIADNVKDWSKVVLAYEPVWAIGTGKTATPQQAQEVHEKLRGWLKSNVSDAVAQSTRIIYGGSVTGATCKELASQPDVDGFLVGGASLKPEFVDIINAKQ

SEQ ID NO: 7833 - DNA, 1476 bp, Artificial Sequence
  derived and/or modified sequence
ctcgccggcgtccgcgtccccgcgccgagctgctcgggctccctgagccccagatctgaccccttcccttcggcaacctgaacgactcccgccttccacggaagggaccgagcccgtgccaaacaggctgagcgatttgggagtgaggagccatcctaccgctttccccaacctggaaacagcaaagcgcaaggcctctgagtcagttaggtctctgccacccacgggcaaaggatgctctcctccatcctccttcctccctccaccgaaatcggagagccgcgggcctgatccaaagaggcatccccttctcgttcattccccagaggcctcaatacaaaccccaggagttggcccctctccttttgctacaaatccttgccttgcaaaggggagaggtggtttgtgctccccctactgcctatatcgacttcgcccggcagaagctagatcccaagattgctgtggctgcgcagaactgctacaaagtgactaatggggcttttactggggagatcagccctggcatgatcaaagactgcggagccacgtgggtggtcctggggcactcagagagaaggcatgtctttggggagtcagatgagctgattgggcagaaagtggcccatgctctggcagagggactcggagtaatcgcctgcattggggagaagctagatgaaagggaagctggcatcactgagaaggttgttttcgagcagacaaaggtcatcgcagataacgtgaaggactggagcaaggtcgtcctggcctatgagcctgtgtgggccattggtactggcaagactgcaacaccccaacaggcccaggaagtacacgagaagctccgaggatggctgaagtccaacgtctctgatgcggtggctcagagcacccgtatcatttatggaggctctgtgactggggcaacctgcaaggagctggccagccagcctgatgtggatggcttccttgtgggtggtgcttccctcaagcccgaattcgtggacatcatcaatgccaaacaatgagccccatccatcttccctacccttcctgccaagccagggactaagcagcccagaagcccagtaactgccctttccctgcatatgcttctgatggtgtcatctgctccttcctgtggcctcatccaaactgtatcttcctttactgtttatatcttcaccctgtaatggttgggaccaggccaatcccttctccacttactataatggttggaactaaacgtcaccaaggtggcttctccttggctgagagatggaaggcgtggtgggatttgctcctgggttccctaggccctagtgagggcagaagagaaaccatcctctcccttcttacaccgtgaggccaagatcccctcagaaggcaggagtgctgccctctcccatggtgcccgtgcctctgtgctgtgtatgtgaaccacccatgtgagggaataaacctggcactagg

SEQ ID NO: 7834 - DNA, 750 bp, Artificial Sequence
  derived and/or modified sequence
atggcccccagcagaaagttcttcgtgggcggcaactggaagatgaacggcagaaagcagagcctgggcgagctgatcggcaccctgaacgccgccaaggtgcccgccgacaccgaggtggtgtgcgccccccccaccgcctacatcgacttcgccagacagaagctggaccccaagatcgccgtggccgcccagaactgctacaaggtgaccaacggcgccttcaccggcgagatcagccccggcatgatcaaggactgcggcgccacctgggtggtgctgggccacagcgagagaagacacgtgttcggcgagagcgacgagctgatcggccagaaggtggcccacgccctggccgagggcctgggcgtgatcgcctgcatcggcgagaagctggacgagagagaggccggcatcaccgagaaggtggtgttcgagcagaccaaggtgatcgccgacaacgtgaaggactggagcaaggtggtgctggcctacgagcccgtgtgggccatcggcaccggcaagaccgccaccccccagcaggcccaggaggtgcacgagaagctgagaggctggctgaagagcaacgtgagcgacgccgtggcccagagcaccagaatcatctacggcggcagcgtgaccggcgccacctgcaaggagctggccagccagcccgacgtggacggcttcctggtgggcggcgccagcctgaagcccgagttcgtggacatcatcaacgccaagcagtag

SEQ ID NO: 7835 - DNA, 750 bp, Artificial Sequence
  derived and/or modified sequence
atggccccaagtcggaaattcttcgttgggggaaattggaaaatgaacggtcgcaagcagagcctcggggaattgatcggtacactcaacgcagccaaggtgcctgcagatacagaagtggtgtgcgctccccccaccgcctatatcgacttcgcccgccagaagcttgacccaaaaattgcagtggcagcccagaattgctataaggttacaaacggggcctttaccggtgagatctcgccaggcatgatcaaagactgcggcgccacatgggtggtcctggggcatagcgaacggcggcacgtatttggcgaaagcgatgaactgattggacagaaggtggcccacgcactcgctgagggactgggggtgatagcctgcatcggagaaaaactggacgagagggaagcgggcatcacagagaaagtcgtgtttgagcagacaaaagtgatagctgacaatgtcaaggactggtcaaaggtcgtcttggcttacgaacctgtgtgggcaatcggaacagggaaaaccgcaacccctcaacaggcccaggaagtgcacgaaaagctcaggggttggctgaaatccaacgtctctgacgctgtcgcccagagtactagaattatttacggtgggtcggtcactggggctacttgcaaggaactggcgtcgcagccggatgtggacggctttctcgtggggggcgcttccctgaagcctgagtttgtggacattattaacgccaaacagtag

SEQ ID NO: 7836 - DNA, 750 bp, Artificial Sequence
  derived and/or modified sequence
atggcccccagcaggaagttctttgtgggcggcaactggaagatgaatggaaggaagcagagcctgggggagctgattggcaccctgaatgctgccaaggtgcctgctgacacagaggtggtgtgtgccccacccacagcctacatcgactttgcccggcagaagctggaccccaagattgctgtggccgcccagaactgctacaaggtgaccaacggggccttcaccggggagatcagccctggcatgatcaaggactgtggggccacctgggtggtgctgggccacagcgagaggagacatgtgtttggagagagtgatgagctgattggccagaaggtggcccacgccctggccgagggcctgggcgtgattgcctgcatcggggagaagctggatgagcgggaggccggcatcacagagaaggtggtgtttgagcagaccaaggtgattgctgacaacgtgaaggactggagcaaggtggtgctggcctatgagcctgtgtgggccatcggcaccgggaagacagccaccccccagcaggcccaggaggtgcatgagaagctgcggggctggctgaagagcaatgtgtctgatgctgtggcccagagcacccgcatcatctatggaggctctgtgactggagccacctgcaaggagctggccagccagccagatgtggatggcttcctggtgggcggggccagcctgaagccagagtttgtggacatcatcaatgccaagcagtag

SEQ ID NO: 7837 - DNA, 750 bp, Artificial Sequence
  derived and/or modified sequence
atggcccccagccggaagttcttcgtgggcggcaactggaagatgaacgggcgcaaacagtctctcggtgaattaatcggcaccctaaatgctgccaaggtccctgccgataccgaagtggtttgcgcaccacccaccgcttacattgactttgcccgacagaagctggaccctaagatcgcagtcgctgcccaaaactgctataaagttaccaatggggcttttaccggtgagatcagtcccggtatgatcaaggactgtggggcgacatgggtggtgttgggacacagtgaaagacgccatgtgttcggagagtccgacgagctgattggtcagaaggtggcacacgccttagctgagggcctcggagtcattgcatgcatcggtgaaaaactggacgagcgagaggcaggcatcaccgaaaaggtggtctttgaacagaccaaagttatagcagacaacgtaaaggattggtccaaagtagtgctggcttatgagcctgtctgggccataggcactggaaagacagccacccctcagcaggcccaggaggttcacgaaaagcttagaggctggcttaagagtaacgtttcagatgccgtggcacaatctaccagaattatctatgggggtagcgtgactggggctacctgtaaagagttggccagtcaaccagatgttgatgggttcttggtcggaggagcctctctcaagcccgaattcgtggacatcataaatgcaaagcagtag

SEQ ID NO: 7838 - DNA, 750 bp, Artificial Sequence
  derived and/or modified sequence
atggcaccgagcagaaagttttttgtagggggaaactggaagatgaatgggagaaagcagtctctaggtgaactgattggcactttaaacgcagctaaggtccccgcagacaccgaagtggtgtgcgcccctcctacagcctacatcgacttcgctcgtcagaaactagaccccaaaattgctgtcgctgcacagaactgctacaaagttaccaatggggcttttaccggagaaattagccctggaatgatcaaagattgtggcgctacctgggtcgtcttggggcattcagaaaggcgacacgtgttcggggagtccgacgagctcattggacagaaagtcgctcatgcactcgctgagggactcggcgtcatcgcctgtatcggagaaaagctcgacgagcgcgaggccggtataaccgagaaagtggtctttgaacagacgaaggtcatcgccgataacgtgaaagattggagtaaagtggtgttggcctacgagccggtgtgggccatcggaacgggtaagaccgccacacctcagcaggctcaagaggtgcacgagaagctcagaggctggctgaagtctaacgtgagcgatgctgttgctcaatcaacgcggatcatctacggcggatcagtgactggagcaacttgcaaggaactcgccagccagcctgacgtggacggctttctggtgggcggtgccagtcttaaacctgaattcgtagacattattaatgccaagcagtag

SEQ ID NO: 7839 - protein, 284 aa, Artificial Sequence
  derived and/or modified sequence
MDAIKKKMQMLKLDKENALDRAEQAEADKKAAEDRSKQLEDELVSLQKKLKGTEDELDKYSEALKDAQEKLELAEKKATDAEADVASLNRRIQLVEEELDRAQERLATALQKLEEAEKAADESERGMKVIESRAQKDEEKMEIQEIQLKEAKHIAEDADRKYEEVARKLVIIESDLERAEERAELSEGQVRQLEEQLRIMDQTLKALMAAEDKYSQKEDRYEEEIKVLSDKLKEAETRAEFAERSVTKLEKSIDDLEDELYAQKLKYKAISEELDHALNDMTSM

SEQ ID NO: 7840 - DNA, 855 bp, Artificial Sequence
  derived and/or modified sequence
atggacgccatcaagaagaagatgcagatgctgaagctggacaaggagaacgccctggacagagccgagcaggccgaggccgacaagaaggccgccgaggacagaagcaagcagctggaggacgagctggtgagcctgcagaagaagctgaagggcaccgaggacgagctggacaagtacagcgaggccctgaaggacgcccaggagaagctggagctggccgagaagaaggccaccgacgccgaggccgacgtggccagcctgaacagaagaatccagctggtggaggaggagctggacagagcccaggagagactggccaccgccctgcagaagctggaggaggccgagaaggccgccgacgagagcgagagaggcatgaaggtgatcgagagcagagcccagaaggacgaggagaagatggagatccaggagatccagctgaaggaggccaagcacatcgccgaggacgccgacagaaagtacgaggaggtggccagaaagctggtgatcatcgagagcgacctggagagagccgaggagagagccgagctgagcgagggccaggtgagacagctggaggagcagctgagaatcatggaccagaccctgaaggccctgatggccgccgaggacaagtacagccagaaggaggacagatacgaggaggagatcaaggtgctgagcgacaagctgaaggaggccgagaccagagccgagttcgccgagagaagcgtgaccaagctggagaagagcatcgacgacctggaggacgagctgtacgcccagaagctgaagtacaaggccatcagcgaggagctggaccacgccctgaacgacatgaccagcatgtag

SEQ ID NO: 7841 - DNA, 855 bp, Artificial Sequence
  derived and/or modified sequence
atggacgccataaaaaaaaaaatgcaaatgctcaagcttgacaaagagaacgcactggaccgcgccgaacaagccgaggccgacaaaaaggccgcggaggaccgcagcaagcaattagaggacgagctcgtttccttgcagaagaagttaaaagggactgaggatgaactcgacaaatattccgaggcactgaaggatgcccaggagaagcttgaattggcggagaaaaaggctaccgacgccgaggccgacgtcgcctcattgaacagaagaattcagctggttgaggaggagctggatagggcccaagagagactcgctaccgccctgcagaagctggaagaggcagagaaggcagctgacgagtccgagcgcggcatgaaggtcatagagtccagagcacagaaagatgaagagaagatggagattcaggagatacagctcaaggaggccaagcatatcgcagaagatgccgataggaagtatgaagaggtggcccgcaagcttgtgattatcgagtccgatctcgaacgtgccgaagaacgagctgaactcagtgaggggcaggtacggcagttagaggagcagctccgaatcatggatcaaaccttaaaagccctaatggccgccgaggataagtacagccagaaggaggaccgttatgaagaagagataaaggtactctcagataaattgaaggaggcagaaaccagagccgaattcgctgagcgcagcgtcacaaagctcgagaagagtatagacgatctggaggatgagctatacgcccagaagctcaagtacaaagccatttccgaggagttagatcacgccttgaacgacatgacttctatgtag

SEQ ID NO: 7842 - DNA, 855 bp, Artificial Sequence
  derived and/or modified sequence
atggatgccatcaagaagaagatgcagatgctgaagctggacaaggaaaatgccctggacagagctgagcaggccgaggccgacaagaaggccgcagaagatagaagcaagcagctggaggatgagctggtgtccctgcagaagaagctgaagggcacagaagatgagctggacaagtacagcgaggccctgaaggatgcccaggagaagctggagctggccgagaagaaggccacagatgctgaggctgatgtggccagcctgaacagacgcatccagctggtggaggaggagctggaccgggcccaggagcggctggccacagccctgcagaagctggaggaggccgagaaggccgcagatgaaagtgagcggggcatgaaggtgattgagagccgggcccagaaggatgaggagaagatggagatccaggagatccagctgaaggaggccaagcacatcgccgaggatgctgacagaaaatatgaggaggtggccaggaagctggtgatcatcgagagtgacctggagagagctgaggagagagctgagctgtctgagggccaggtgcggcagctggaggagcagctgcgcatcatggaccagaccctgaaggccctgatggctgctgaggacaagtacagccagaaggaggacagatatgaggaggagatcaaggtgctgagtgacaagctgaaggaggccgagaccagggctgagtttgctgagaggtctgtgaccaagctggagaagagcattgatgacctggaggatgagctgtatgcccagaagctgaagtacaaggccatcagcgaggagctggaccacgccctgaatgacatgacctccatgtag

SEQ ID NO: 7843 - DNA, 855 bp, Artificial Sequence
  derived and/or modified sequence
atggacgccatcaagaagaagatgcagatgctgaagctggacaaggagaacgcgctggaccgggccgagcaggccgaagccgacaaaaaagccgcggaggaccggtctaaacaactggaagacgaactggtgtccctccagaaaaagctgaaaggcacagaggatgagttggataaatactcagaggcattgaaggatgcacaggagaagctcgagctcgctgaaaagaaagccaccgacgctgaggccgatgtggcaagtctgaacagacgtattcaactggtggaggaagagttggaccgggctcaggaacgactggctaccgcacttcaaaaacttgaagaggccgagaaagccgcagatgaatcggaaaggggcatgaaggtgatcgagtctcgtgcccagaaagacgaggaaaaaatggagattcaggagatccagcttaaagaggcaaaacacatcgccgaagacgccgacaggaagtacgaagaggtggcacggaagctggtcataatcgagagtgacctggaacgtgcagaggaaagggccgaattgagcgaggggcaagtgaggcagctggaagagcagctgagaattatggaccaaaccctgaaggccctcatggctgcagaggataaatattctcaaaaggaagaccgctacgaggaggaaatcaaggtcctgagcgataagctcaaggaagctgagacacgcgccgaattcgcggagagaagcgtgaccaagcttgaaaagtctatcgatgacctggaagacgaactttacgctcaaaaactaaaatacaaagctatatccgaagagctggaccacgccctgaacgatatgaccagcatgtag

SEQ ID NO: 7844 - DNA, 855 bp, Artificial Sequence
  derived and/or modified sequence
atggatgccatcaagaagaaaatgcagatgctcaaactggataaggagaacgcccttgatcgagcagagcaagcagaagccgacaaaaaggcagccgaggaccgctcaaagcaattagaggacgaactggtttccttgcagaagaaactgaaggggaccgaagacgaactcgacaagtacagcgaagccctaaaggatgcgcaagagaagctggagcttgcggagaagaaggctactgacgcagaagctgacgtcgcctcacttaacaggcggattcagctggtggaggaggagctggatcgagcccaggagcgcttggcaaccgccttacagaaactagaagaggcagaaaaggctgcagatgaatcagagcggggtatgaaggtgatcgagtcccgggcacagaaagacgaggagaagatggaaatccaggagattcagctgaaagaagcaaagcacatcgcggaagatgcggaccgtaagtacgaggaagtcgcccgtaagcttgtgatcatcgagtcagatctggagcgtgccgaggagagggcagaactttcagaaggccaggttagacaattagaagagcagctgcggattatggaccagactttgaaagccctgatggccgcagaagacaagtattctcagaaagaggaccgctatgaggaagaaattaaagtcttatccgataagctgaaagaggctgagactcgggcagaattcgccgagcgaagtgtaaccaaactggagaaatcgattgatgacctcgaggatgagctctacgcccagaagcttaagtacaaagcaatctcagaagaactggatcacgctctgaatgacatgaccagtatgtag

SEQ ID NO: 7845 - DNA, 1295 bp, Artificial Sequence
  derived and/or modified sequence
gagaggaggaaggggggcaggagaaaaaagcttttccaaaaaagtattggctgtcttgaggaatgcggtcgcccccttgggaaagtacatatctgggagaagcaggcggctccgcgctcgcactcccgctcctccgcccgaccgcgcgctcgccccgccgctcctgctgcagccccagggcccctcgccgccgccaccatggacgccatcaagaagaagatgcagatgctgaagctcgacaaggagaacgccttggatcgagctgagcaggcggaggccgacaagaaggcggcggaagacaggagcaagcagctggaagatgagctggtgtcactgcaaaagaaactcaagggcaccgaagatgaactggacaaatactctgaggctctcaaagatgcccaggagaagctggagctggcagagaaaaaggccaccgatgctgaagccgacgtagcttctctgaacagacgcatccagctggttgaggaagagttggatcgtgcccaggagcgtctggcaacagctttgcagaagctggaggaagctgagaaggcagcagatgagagtgagagaggcatgaaagtcattgagagtcgagcccaaaaagatgaagaaaaaatggaaattcaggagatccaactgaaagaggccaagcacattgctgaagatgccgaccgcaaatatgaagaggtggcccgtaagctggtcatcattgagagcgacctggaacgtgcagaggagcgggctgagctctcagaaggccaagtccgacagctggaagaacaattaagaataatggatcagaccttgaaagcattaatggctgcagaggataagtactcgcagaaggaagacagatatgaggaagagatcaaggtcctttccgacaagctgaaggaggctgagactcgggctgagtttgcggagaggtcagtaactaaattggagaaaagcattgatgacttagaagacgagctgtacgctcagaaactgaagtacaaagccatcagcgaggagctggaccacgctctcaacgatatgacttccatgtaaacgttcatccactctgcctgcttacaccctgccctcatgctaatataagtttctttgcttcacttctcccaagactccctcgtcgagctggatgtcccacctctctgagctctgcatttgtctattctccagctgaccctggttctctctcttagcatcctgccttagagccaggcacacactgtgctttctattgtacagaagctcttcgtttcagtgtcaaataaacactgtgtaagcta

SEQ ID NO: 7846 - protein, 245 aa, Artificial Sequence
  derived and/or modified sequence
MDGTRTSLDIEEYSDTEVQKNQVLTLEEWQDKWVNGKTAFHQEQGHQLLKKHLDTFLKGKSGLRVFFPLCGKAVEMKWFADRGHSVVGVEISELGIQEFFTEQNLSYSEEPITEIPGTKVFKSSSGNISLYCCSIFDLPRTNIGKFDMIWDRGALVAINPGDRKCYADTMFSLLGKKFQYLLCVLSYDPTKHPGPPFYVPHAEIERLFGKICNIRCLEKVDAFEERHKSWGIDCLFEKLYLLTEK

SEQ ID NO: 7847 - DNA, 738 bp, Artificial Sequence
  derived and/or modified sequence
atggacggcaccagaaccagcctggacatcgaggagtacagcgacaccgaggtgcagaagaaccaggtgctgaccctggaggagtggcaggacaagtgggtgaacggcaagaccgccttccaccaggagcagggccaccagctgctgaagaagcacctggacaccttcctgaagggcaagagcggcctgagagtgttcttccccctgtgcggcaaggccgtggagatgaagtggttcgccgacagaggccacagcgtggtgggcgtggagatcagcgagctgggcatccaggagttcttcaccgagcagaacctgagctacagcgaggagcccatcaccgagatccccggcaccaaggtgttcaagagcagcagcggcaacatcagcctgtactgctgcagcatcttcgacctgcccagaaccaacatcggcaagttcgacatgatctgggacagaggcgccctggtggccatcaaccccggcgacagaaagtgctacgccgacaccatgttcagcctgctgggcaagaagttccagtacctgctgtgcgtgctgagctacgaccccaccaagcaccccggcccccccttctacgtgccccacgccgagatcgagagactgttcggcaagatctgcaacatcagatgcctggagaaggtggacgccttcgaggagagacacaagagctggggcatcgactgcctgttcgagaagctgtacctgctgaccgagaagtag

SEQ ID NO: 7848 - DNA, 738 bp, Artificial Sequence
  derived and/or modified sequence
atggacggtactcgcacctcacttgatattgaagagtattctgatacagaggtccagaaaaatcaagttctgacactggaggaatggcaggacaaatgggtcaacggaaaaaccgccttccaccaggaacagggccaccaactgttgaagaaacatctggacaccttcttgaagggtaagagcggactgagagtttttttccccctctgtggaaaagccgtcgaaatgaagtggtttgcagacaggggccatagcgtggtgggggtggaaatctctgaactcggcattcaggaattcttcactgagcagaacttatcctactcagaagagcccattacggagatccctgggacgaaggtttttaagtcaagctcaggaaatatatccctgtattgctgctccatcttcgacctgccgagaactaacatcggtaaattcgacatgatatgggatcggggcgctctggttgcaattaatcctggggaccggaagtgttatgccgataccatgttcagtctcctcgggaaaaaatttcagtatctgttatgcgtactatcttacgatcccaccaaacatccaggccccccattctatgtgccccacgctgagattgagaggctgttcggaaagatctgtaatattcgttgtctggagaaagtggacgcctttgaagagcggcacaagtcatggggcatcgactgcctatttgaaaaactatacttactgaccgaaaaatag

SEQ ID NO: 7849 - DNA, 738 bp, Artificial Sequence
  derived and/or modified sequence
atggatggcaccaggaccagcctggacatcgaggagtacagcgacacagaggtgcagaagaaccaggtgctgaccctggaggagtggcaggacaagtgggtgaatggcaagacagccttccaccaggagcagggccaccagctgctgaagaagcacctggacaccttcctgaagggcaagagcggcctgcgggtcttcttccccctgtgtgggaaggctgtggagatgaagtggtttgctgaccggggccacagcgtggtgggcgtggagatcagcgagctgggcatccaggagttcttcacagagcagaacctgagctacagcgaggagcccatcacagagatccctggcaccaaggtgttcaagagcagcagcggcaacatcagcctgtactgctgcagcatctttgacctgcccaggaccaacatcggcaagtttgacatgatctgggacagaggagccctggtggccatcaaccctggggacaggaagtgctatgctgacaccatgttcagcctgctgggcaagaagttccagtacctgctgtgtgtgctgtcctatgaccccaccaagcaccctggcccccccttctacgtgccccacgccgagattgaaagactctttgggaagatctgcaacatccgctgcctggagaaggtggatgcctttgaggagcggcacaagtcctggggcatcgactgcctgtttgagaagctgtacctgctgacagagaagtag

SEQ ID NO: 7850 - DNA, 738 bp, Artificial Sequence
  derived and/or modified sequence
atggacggcacccggaccagcctggacatcgaggagtacagcgacaccgaagtgcagaaaaatcaagtcctcaccttggaggagtggcaggataaatgggttaacggaaagactgcgtttcaccaagagcagggacaccaattgctgaagaagcatctggacacatttctcaaggggaagtcaggactgagagtttttttccctctttgcgggaaagccgtcgagatgaaatggttcgctgatagaggccactctgtggtaggagtggaaatctctgaactcggaattcaggagttcttcactgaacagaacctgtcttattctgaagagcccatcacggaaatccccggcacaaaggtgttcaaaagctccagcggaaacatctccctgtactgctgctcaatttttgacctgccccgtacaaatatcggcaagtttgacatgatttgggatcggggggctctcgttgcaatcaatccgggcgacagaaagtgttatgcagataccatgttctctctcttgggtaaaaagtttcagtatctgctgtgtgtcctttcctatgatcctactaaacaccctggacctcctttctatgtcccacatgccgaaatcgagcgcctcttcggaaaaatctgtaatattcggtgtctggagaaagtggatgcctttgaagagagacataagagctggggaattgactgtttgttcgagaagctctacctactgactgagaaatag

SEQ ID NO: 7851 - DNA, 738 bp, Artificial Sequence
  derived and/or modified sequence
atggatggtacccgaaccagcctggacattgaggaatatagtgatactgaggtacagaagaaccaggtgttgacactggaggagtggcaagacaagtgggttaacggcaaaacggcctttcaccaggaacaagggcaccaactactgaagaagcacctggatactttcttaaaggggaagagcggactgagagtgtttttcccactgtgcggtaaagcagtggaaatgaagtggttcgctgacagagggcacagtgttgtgggagtcgagatttcagagttgggcatccaggagttctttaccgagcagaatctgtcatacagcgaggaaccaataaccgaaatcccaggaactaaggtatttaagagcagctccgggaatattagcttgtattgctgcagtatcttcgatcttcctaggactaatattgggaaattcgatatgatttgggatcgtggggctctggtcgctattaatcccggagaccggaagtgctacgcggacacaatgttcagcctcctggggaaaaaattccagtacctgctgtgtgtccttagctacgacccgacaaaacatcctggaccccctttctatgtccctcacgcagaaattgagaggttattcggaaagatttgtaacattcgttgcttagagaaagtggacgcgttcgaagagagacacaagtcttggggcatcgactgcctcttcgaaaaactctatctgcttacagagaaatag

SEQ ID NO: 7852 - DNA, 3181 bp, Artificial Sequence
  derived and/or modified sequence
attggtggcggaggcaatggccggcaaccagctgtaagcgaggcacggaagacatatgcttgtgagacaaaggtgtctctgaaactatggatggtacaagaacttcacttgacattgaagagtactcggatactgaggtacagaaaaaccaagtactaactctggaagaatggcaagacaagtgggtgaacggcaagactgcttttcatcaggaacaaggacatcagctattaaagaagcatttagatactttccttaaaggcaagagtggactgagggtattttttcctctttgcggaaaagcggttgagatgaaatggtttgcagaccggggacacagtgtagttggtgtggaaatcagtgaacttgggatacaagaattttttacagagcagaatctttcttactcagaagaaccaatcaccgaaattcctggaaccaaagtatttaagagttcttcggggaacatttcattgtactgttgcagtatttttgatcttcccaggacaaatattggcaaatttgacatgatttgggatagaggagcattagttgccatcaatccaggtgatcgcaaatgctatgcagatacaatgttttccctcctgggaaagaagtttcagtatctcctgtgtgttctttcttatgatccaactaaacatccaggtccaccattttatgttccacatgctgaaattgaaaggttgtttggtaaaatatgcaatatacgttgtcttgagaaggttgatgcttttgaagaacgacataaaagttggggaattgactgtctttttgaaaagttatatctacttacagaaaagtaaatgagacatagataaaataaaatcacactgacatgtttttgaggaattgaaaattatgctaaagcctgaaaatgtaatggatgaatttttaaaattgtttataaatcatatgatagatctttactaaaaatggctttttagtaaagccatttactttttctaaaaaagttttagaagaaaaagatgtaactaaacttttaaagtagctcctttggagaggagattatgatgtgaaagattatgcctatgtgtcttgcagattgcaagatattttaccaatcagcatgtgttacctgtacaattaaaaaaatatttcaaaatgcaatgcatattaaatataatacacacagaaaaactggcatttattttgttttatttttttgagatggagtttcgttcttgttgcccaacctggagtgcaatggtgcaatctcagctcactgcaacctctgcctcccaggttcaggtgattctcctgcctcagcctcctgagtagctgggattacaggtgtgcgccaccacgcccagctaattttttgtatttttagtagagacagggtttcaccatgttggtcaggctgatctcgagctcctgacctcaggtgatctacccacctcggcctcccaaagtgctgggattacaggcgtgagccactgcacctggcctgacattctttatgaaatttagaattgttgaagaactataacatttcagtagggttcaaggtggtcccaaaagttatataaaagattagtttttactataaacccttgtcttttactcagatcctagcatcccttttcacatggtttctccatgtatataacagaatcaagaaacaaattttaattaaacaatctgtaacagaatcaagaaacaaatacattttaattaaacaatctatatggaacaaacattcccaaattctaagaataaatttttctttaagttttctctgagtttggcaattgttgttttttataatttaatctgtttaaatcatcaggtcttataaaatataatgtacttagagctggattcatggctgtttattatgaaaggttagatttctcagttcttctttaaccacattttgttatatcagacagtcctctataactctgtactacccaacaactaaatggtttagattgtttagctcatgttaataggatggttgtgtattataaaaaacgagttacgtgtgtgtgtgcacgcatgcacgcacatgtgctggcttaaaggttgttaatgcaaggtttggggtcccctttaacactggtgaaagctacggtactctccccagagatatgtcttgtcagcctctctagttccccttggcctgcatgtacaaacttctaccctagaagctctctgccatcgatgtattctaatagatttgtaaggctattaatttgaagcaactccttgctcacagtgattcttgcttctctgagacctgctcccagtcgatactgtgggcttcagaagccatgactccccaactctgcctgtatcaccggttgaatggacaactaacccgagctggaccaacacaattctctccagagacttttgattttacttttatgtagagacagggtctcactttgttgcccacgctgatgttgaacttgacgtgaggcctcaagcagtcctcctgtcttggccacccaaagtgctaggattacaggtatgagccattgcgctggccctcttcataggcttttggacttgggaatagaaaagcaaccccgtctctactaaaaatacaaaaaaattagccaggcgtggtggcacgtgcctgtaatcccagctacttgggaggctgaggcaggagaatcacttgaacctaggaggcggaggttgcagtgagctgagatcatgccactgcacgcaagcctgggcaacagagcaagactctgtctcaaaagaaagaaaaagaaaagaaaaaaaagaaaggcaagttgactgctgaaaggggaatctgtgtacgcctgggagctgtggggcagccacattccagcacatggatctgagaaacagaacgctgatctgcagaaagagatgagaaccaaagagaggccacctgcgtcctgggtccattttcatcctccctgaagcccagctgcccagggtggggagaaacaccctgtgtccatgggatagagtcctttccgcttgcagttgtgcccaaagaatcttaaatacaaatgagatatccttaggtagttgatcatttatgtaatatgtgtcttcactggggaatactgacttcctaaaatctcaagatggaagatataccacatgtaaattattttagagcaattaaattgttttcaggattttccaaaaa

SEQ ID NO: 7853 - protein, 278 aa, Artificial Sequence
  derived and/or modified sequence
MAEARSQPSAGPQLNALPDHSPLLQPGLAALRRRAREAGVPLAPLPLTDSFLLRFLRARDFDLDLAWRLLKNYYKWRAECPEISADLHPRSIIGLLKAGYHGVLRSRDPTGSKVLIYRIAHWDPKVFTAYDVFRVSLITSELIVQEVETQRNGIKAIFDLEGWQFSHAFQITPSVAKKIAAVLTDSFPLKVRGIHLINEPVIFHAVFSMIKPFLTEKIKERIHMHGNNYKQSLLQHFPDILPLEYGGEEFSMEDICQEWTNFIMKSEDYLSSISESIQ

SEQ ID NO: 7854 - DNA, 837 bp, Artificial Sequence
  derived and/or modified sequence
atggccgaggccagaagccagcccagcgccggcccccagctgaacgccctgcccgaccacagccccctgctgcagcccggcctggccgccctgagaagaagagccagagaggccggcgtgcccctggcccccctgcccctgaccgacagcttcctgctgagattcctgagagccagagacttcgacctggacctggcctggagactgctgaagaactactacaagtggagagccgagtgccccgagatcagcgccgacctgcaccccagaagcatcatcggcctgctgaaggccggctaccacggcgtgctgagaagcagagaccccaccggcagcaaggtgctgatctacagaatcgcccactgggaccccaaggtgttcaccgcctacgacgtgttcagagtgagcctgatcaccagcgagctgatcgtgcaggaggtggagacccagagaaacggcatcaaggccatcttcgacctggagggctggcagttcagccacgccttccagatcacccccagcgtggccaagaagatcgccgccgtgctgaccgacagcttccccctgaaggtgagaggcatccacctgatcaacgagcccgtgatcttccacgccgtgttcagcatgatcaagcccttcctgaccgagaagatcaaggagagaatccacatgcacggcaacaactacaagcagagcctgctgcagcacttccccgacatcctgcccctggagtacggcggcgaggagttcagcatggaggacatctgccaggagtggaccaacttcatcatgaagagcgaggactacctgagcagcatcagcgagagcatccagtag

SEQ ID NO: 7855 - DNA, 837 bp, Artificial Sequence
  derived and/or modified sequence
atggcagaagctaggagtcagccatcggccggcccacagctgaatgcactgcctgatcacagcccactgcttcagcccggcctggccgccctccgccgccgtgctcgtgaagccggagtgccacttgccccgctgccactcacagacagttttcttctgcggttcctgcgagcgagggattttgatttagatctggcctggagattactgaagaactattacaagtggcgggcagagtgtccagaaatctccgcagacttgcatccaagaagcataattgggctactaaaggcagggtaccacggggtgcttcggtcccgggatccaactgggtccaaggtcctgatttaccggatcgcacattgggaccctaaggtatttactgcatatgatgtgttccgggtttcgctcattactagcgagctgatcgttcaggaggtcgaaacccagcgtaatgggattaaagctatctttgatctggaaggatggcagtttagccatgctttccaaatcactccctcagtcgctaagaagattgcagcggtgctaactgacagtttccctctcaaagtacgcggcattcatctgattaatgaaccagtgatcttccacgcagtttttagcatgatcaagccctttctgactgagaagatcaaggagagaatccacatgcacggcaataattacaagcagtccttgttgcagcacttcccagacatcctcccactcgagtacgggggtgaggaattttcgatggaggacatatgccaggaatggactaatttcattatgaagagtgaagactatctgtcgagcataagtgagtcaatccagtag

SEQ ID NO: 7856 - DNA, 837 bp, Artificial Sequence
  derived and/or modified sequence
atggccgaggcccggagccagcccagcgctggcccccagctgaatgccctgcctgaccacagccccctgctgcagcccggcctggccgccctgcggcggcgggcccgggaggccggcgtgcccctggcccccctgcccctgacagacagcttcctgctgcgcttcctgcgggcccgggactttgacctggacctggcctggaggctgctgaagaactactacaagtggagggcagaatgtcctgagatctctgctgacctgcaccccaggagcatcatcggcctgctgaaggccggctaccatggagtgctgcggagccgggaccccaccggcagcaaggtgctgatctacagaattgcccactgggaccccaaggtgttcaccgcctatgatgtgttccgggtgtccctcatcaccagcgagctgattgtgcaggaggtggagacccagagaaatggcatcaaggccatctttgacctggagggctggcagttcagccacgccttccagatcacccccagcgtggccaagaagattgctgctgtgctgacagacagcttccccctgaaggtgcggggcatccacctgatcaatgagcccgtcatcttccacgctgtgttctccatgatcaagcccttcctgacagagaagatcaaggagcgcatccacatgcacggcaacaactacaagcagagcctgctgcagcacttcccagacatcctgcccctggagtatggaggagaggagttctccatggaggacatctgccaggagtggaccaacttcatcatgaagtctgaggactacctgagcagcatcagcgagagcatccagtag

SEQ ID NO: 7857 - DNA, 837 bp, Artificial Sequence
  derived and/or modified sequence
atggccgaggcccggagccagcccagcgccggcccccagctgaacgccctccctgatcatagcccactgctacagcctggcttagctgcgctgcgaaggagagccagagaagctggcgtaccactggcacccctccccctgaccgatagctttctgctgaggtttctgcgcgctagggactttgacctggatctggcctggaggttgctgaagaactactacaagtggagggctgagtgccctgagatttctgctgatttgcatcccagaagtataatcggcctgttgaaggcgggataccacggcgtcctacgatcaagggacccaactggctccaaggtccttatttacagaattgctcactgggaccctaaggtatttacagcttatgacgtctttcgcgtctcgctgatcacaagcgaattaatcgttcaggaagttgagactcagcgaaatggcatcaaggctatctttgacctggaaggttggcagttttcccatgccttccagatcaccccatcagtggccaaaaagattgcagcagtcctcacggacagcttcccactgaaggttagggggatccacctgatcaacgaacccgtcatcttccatgctgttttcagcatgatcaaaccctttctcactgaaaaaataaaagaaaggatacacatgcacggtaacaactataagcaaagtctgctccaacattttcccgatattctgcctctggagtatgggggagaggaattcagtatggaggatatttgccaggaatggactaattttattatgaaaagtgaggactatctttcttcaatttctgaatcaatacagtag

SEQ ID NO: 7858 - DNA, 837 bp, Artificial Sequence
  derived and/or modified sequence
atggccgaggcccgatctcagccttctgcgggaccccagctcaacgcactccctgatcacagcccgctgctgcagcctggccttgcagcccttcggagaagagcaagagaagcgggagtcccactggcccctctacctctgaccgattcatttctactgaggtttctcagagcgagggatttcgatcttgacttggcctggagactcctgaaaaactattacaagtggagagctgagtgcccagaaatctctgcagacttgcacccacggagcataataggactcctaaaagccggataccacggtgtgttaagaagcagagacccaactggttcaaaggtgctcatttaccggattgctcattgggacccaaaggtgttcacagcttacgacgtgttcagggtctccttgatcacaagcgagctgatcgtgcaggaagtggaaacacaacggaacgggatcaaggcaatttttgatttggaggggtggcagttctcccatgcattccaaataactccttccgtcgccaagaagatcgcggcagtactgaccgacagttttccgctgaaggtcagggggatccatcttatcaacgagccagtcatctttcatgccgtcttttctatgatcaaaccgtttttgactgagaagattaaggagcggatacacatgcacgggaataactacaaacagtccctgctgcagcattttcccgatatattacctctggagtacggaggggaagagttcagtatggaggacatttgtcaggagtggaccaatttcataatgaagagtgaagactacttgagttcaatatctgagagcatacagtag

SEQ ID NO: 7859 - DNA, 2338 bp, Artificial Sequence
  derived and/or modified sequence
gggtagctgcggccgcagcagcggcggcgggcatggcagaggcgcgatcccagccctcggcggggccgcagctcaacgcgctaccggaccactctccgttgctgcagccgggcctggcggcgctgcggcgccgggcccgggaagctggcgtcccgctcgcgccgctgccgctcaccgactccttcctgctgcggttcctgcgcgcccgggatttcgatctggacctggcctggcggttactaaaaaactattataagtggagagcagaatgtccagaaataagtgcagatctacaccctagaagtattattggcctcctaaaggctggctaccatggagtcctgagatccagggatcccactggcagcaaagttcttatttacagaatcgcacactgggaccccaaagtttttacagcttatgacgtatttcgagtaagtctaatcacatccgagcttattgtacaggaggtagaaactcagcggaatggaatcaaggctatctttgatctggaaggttggcagttttctcatgcttttcaaatcactccatccgtagccaagaagattgctgctgtacttacggattcatttccattgaaagttcgtggcatccatttgataaatgaaccagtaattttccatgctgtcttttccatgatcaaaccattcctgactgaaaaaattaaggaacggattcacatgcatgggaacaactacaaacaaagcttgcttcagcatttcccagacattcttcctctggaatatggtggtgaagaattctccatggaggacatttgtcaggaatggacaaattttataatgaagtctgaagattatctcagcagcatttctgagagcattcaatgagaagttatgtcatgtgaatggcttcctaactaaaaatacatgagtgatatccaacctggttaaatgaatgaaagaaaaggagcaaatcttttaaactaatgcttgcctgaactttaaaaatgtagaaatcttctgacatgagcaacacaggtgtttggaaagattttttactttttaaatgcttttttctctacttttgaagtaattaaatgtcagtacattttaagagcataaaaatcggcgattttgtacttgaagagaacatgaaagttattgctaaagtagctgctcatgtgcatctttgtatgtttctagaaagttatattttaaacaagttctctgattaaattggtttagaaaaaaatttagaaatattccgcttaaaaatactagcacaagtcagctaatgataaaaaaattaacacttgttttaagtggatgtcagattaaattataattcattataattaaaatctgaatagagttttatggttattcctgtggaccagcaagacatttcatctcagggaaattttattttagtatattaacacgatagaaactttttttttttttttcagacagagtcttgctctgtcgcccaggctagagtgcagtagtgagatctcagctcactgcaacctctgctaggattacatgtgcacaccaccactcctggctaagttttgtattttatatagagatggggttttgccacgttggccaagctggtctcaaactcctgaactcaagtaatttgcctgcttcggcctcccagagtcctgggattacagtcgtgagccatcgcgcctggccgtgatagaaactttcagctgaggagtctatatgccatactactctatgtggcatctttaggtctctgtgaaatcatgttgatgtaattgattaacaaaaataatttagaaaatacgtcaggcacagttgatggcttctcaatatctgctttgcatttttaaacaaatcaagaatgtaattttaacttttgcttatggtcattcttatgactacacggaaagggatggaatcatacttacttgtcttatacatggactgtttttagttaacaataacgtaactacacaaaggaaaggaaatgtttacattttaaaaaattactgtcaattacatctggtatttttcagattatgcataaaataatatgagtttgactattgtatcagaatattttaatcaaatcctgcaatttatattaacttaaaaaaacatctggtaaagactgggtgtggcagctcacacctgtaatcccagcactttgggaggccgaggctggatggatgattgcttgagcgcaggagttctagaccagcctgggcaatacagggagaccctgtctctatttcaaaaataaataaataggccccggtgtgtgatgttccccttcctgtgtccatgtgttctcaaaaaaaattaaaaaataaaaataaaaa

SEQ ID NO: 7860 - protein, 170 aa, Artificial Sequence
  derived and/or modified sequence
MVTVLDQMKAGTYKLTFDTEGYWRKRGQESFYPHVEVVLTITSKAQKFHVPLVLHHLPRELERRLAAGGCLPVPARWLHPPSPQQSGLCAHQGALAHHFLGKSRPPGESHWAAVTQVSMKLVPAPAKLSIRWDNSGAKTGSTARHCPNPQVSAGHSEKVPPTVVGGETRE

SEQ ID NO: 7861 - protein, 147 aa, Artificial Sequence
  derived and/or modified sequence
MASHRLLLLCLAGLVFVSEAGPTGTGESKCPLMVKVLDAVRGSPAINVAVHVFRKAADDTWEPFASGKTSESGELHGLTTEEEFVEGIYKVEIDTKSYWKALGISPFHEHAEVVFTANDSGPRRYTIAALLSPYSYSTTAVVTNPKE

SEQ ID NO: 7862 - protein, 184 aa, Artificial Sequence
  derived and/or modified sequence
MASHRLLLLCLAGLVFVSEAGPTGTGESKCPLMVKVLDAVRGSPAINVAVHVFRKAADDTWEPFASGKTSESGELHGLTTEEEFVEGIYKVEIDTKSYWKALGISPFHEHAEVSIQTFEAFQEILYKKKFTTLWHWTSGGQSFFRALVEVVFTANDSGPRRYTIAALLSPYSYSTTAVVTNPKE

SEQ ID NO: 7863 - protein, 139 aa, Artificial Sequence
  derived and/or modified sequence
MASHRLLLLCLAGLVFVSEAGPTGTGESKCPLMVKVLDAVRGSPAINVAVHVFRKAADDTWEPFASGKTSESGELHGLTTEEEFVEGIYKVEIDTKSYWKALGISPFHEHAEVVFTANDSGPRRYYSYSTTAVVTNPKE

SEQ ID NO: 7864 - DNA, 513 bp, Artificial Sequence
  derived and/or modified sequence
atggtgaccgtgctggaccagatgaaggccggcacctacaagctgaccttcgacaccgagggctactggagaaagagaggccaggagagcttctacccccacgtggaggtggtgctgaccatcaccagcaaggcccagaagttccacgtgcccctggtgctgcaccacctgcccagagagctggagagaagactggccgccggcggctgcctgcccgtgcccgccagatggctgcacccccccagcccccagcagagcggcctgtgcgcccaccagggcgccctggcccaccacttcctgggcaagagcagaccccccggcgagagccactgggccgccgtgacccaggtgagcatgaagctggtgcccgcccccgccaagctgagcatcagatgggacaacagcggcgccaagaccggcagcaccgccagacactgccccaacccccaggtgagcgccggccacagcgagaaggtgccccccaccgtggtgggcggcgagaccagagagtag

SEQ ID NO: 7865 - DNA, 513 bp, Artificial Sequence
  derived and/or modified sequence
atggtgacagtgctggatcagatgaaagctggcacatataagcttactttcgataccgaggggtattggagaaaaagaggccaggagtcattctaccctcatgtggaggtggtccttactatcacgtcaaaagcacagaagtttcatgtgcctctggtgttacaccatctccccagggagctggaaaggcgactggctgcgggagggtgcctgccagtgcccgcacgatggctgcacccccctagccctcagcagtcgggcttgtgtgctcaccagggagctttggcccatcactttttgggcaaatccaggccacctggcgagagtcattgggccgccgtgacacaggtcagcatgaaactggtgcccgcacccgctaagctatccatcaggtgggacaattcaggcgctaaaacgggatccaccgccagacattgtccaaatccacaggtgtccgctggacattccgagaaggtgcctcctacagtggtgggcggggaaacgagagagtag

SEQ ID NO: 7866 - DNA, 513 bp, Artificial Sequence
  derived and/or modified sequence
atggtgacagtgctggaccagatgaaggccggcacctacaagctgacctttgacacagagggctactggaggaagaggggccaggagagcttctacccccacgtggaggtggtgctgaccatcaccagcaaggcccagaagttccacgtgcccctggtgctgcaccacctgccccgggagctggagcggcggctggccgccggcggctgcctgcctgtgcctgcccgctggctgcacccccccagcccccagcagagcggcctgtgtgcccaccagggcgccctggcccaccacttcctgggcaagagcaggcctcctggagagagccactgggccgctgtgacccaggtgtccatgaagctggtgcctgccccagccaagctgagcatccgctgggacaacagcggggccaagacaggcagcacagcccggcactgccccaacccccaggtgtctgctggccacagcgagaaggtgccccccaccgtggtgggcggggagacccgggagtag

SEQ ID NO: 7867 - DNA, 513 bp, Artificial Sequence
  derived and/or modified sequence
atggtgaccgtgctggaccagatgaaggccggcacctacaagctgacttttgataccgaggggtactggcgaaagcggggccaggagtccttctacccccatgtggaagtagtgctgacaatcaccagcaaagcccaaaagttccacgtcccattggttctgcaccatttacccagggagctggagcgcagactggcagcgggtgggtgcctccctgtgcccgcacggtggctacacccgccgtccccccagcagtcgggtctgtgcgctcaccagggagccttagcccaccacttcctcggtaaatccaggccgccgggggagagtcattgggccgccgtgacgcaggtatccatgaagctggtgccggcgccagccaagttgagcatccggtgggacaactctggagctaagactggcagtaccgcacgccattgtcccaaccctcaagtgtctgctggacatagcgaaaaggtgccgccaactgtcgtcgggggagagacacgtgaatag

SEQ ID NO: 7868 - DNA, 513 bp, Artificial Sequence
  derived and/or modified sequence
atggtgacggtgctggaccagatgaaagccggtacgtacaagctcaccttcgataccgagggctactggcgcaagcggggtcaagaaagcttctacccgcatgtggaagtggtcctcacgatcacctccaaggctcaaaaatttcacgtacccttggttctgcaccacttgccacgcgagctagagcggaggctcgctgctggtgggtgtctccccgtacctgctcgttggctccatccacccagcccacagcagtccgggctatgtgcccaccaaggtgccttagcccatcatttcctcggcaagtctagacccccaggggagagccattgggccgctgtgacccaagtatcaatgaagctggtgccagcgccagcgaagttgtcgattaggtgggataactcaggcgctaaaacaggtagtactgctagacactgtcccaatcctcaggtttccgcaggacactccgagaaagtacccccaactgttgtgggcggtgagacacgcgagtag

SEQ ID NO: 7869 - DNA, 441 bp, Artificial Sequence
  derived and/or modified sequence
atggcctctcacaggctgttgctgttgtgcctggctggactggtgttcgtctcagaggccggacccactggcaccggcgaatcgaaatgtccgcttatggtcaaggtgctggacgctgtgcggggcagcccggcgatcaacgtcgcagtccatgtgttccgcaaggccgcagacgatacgtgggaaccatttgcctcgggcaaaacttccgagtcaggggagctgcacggactcactaccgaggaggaattcgtggagggaatctacaaagtggaaattgacaccaagtcctactggaaggccctgggaatttccccgttccatgagcacgccgaagtggtctttaccgccaacgactcgggcccacgccgctacactattgccgctttgctgtcgccatactcctacagcactatggccgtggtgactaacccgaaagag

SEQ ID NO: 7870 - DNA, 441 bp, Artificial Sequence
  derived and/or modified sequence
atggcctcgcatcgattattgctgctctgtctggccggactggttttcgttagtgaggctggaccaacaggcacaggcgagtcaaagtgccccttaatggttaaggtactggacgctgttcggggctcaccagcaatcaatgtggctgtccacgttttccggaaggccgcggacgacacttgggagcccttcgcatccggaaagacaagcgaatcaggtgagctgcacgggctcacaaccgaagaggaatttgtggaggggatttacaaggtggagatcgataccaagtcctactggaaagctctcggcatctcgcccttccacgagcacgcggaggttgtatttaccgctaacgactccggcccccgtcggtatactatagctgctctgctgtctccatactcatactctactatggcagtcgtgactaaccccaaggaa

SEQ ID NO: 7871 - DNA, 441 bp, Artificial Sequence
  derived and/or modified sequence
atggctagccacagactcctcctgctttgcctcgcaggactcgtctttgtctccgaggcgggcccaactggaactggagaatccaaatgccccctcatggtcaaggtgcttgatgcggtgagaggaagcccagcgatcaacgtggcggtgcacgtgtttaggaaggccgccgatgacacttgggagccgttcgcctccggaaaaacctcagaatcgggagagttgcacgggctgacgaccgaagaagagttcgtggagggaatctacaaagtggagatcgacactaagtcatattggaaggctctcggaatcagcccgttccatgaacatgccgaggtggtgttcaccgcgaacgattcaggtcctcgaaggtacaccatcgcagccctgctctcaccttactcctactcgactatggctgtggtcacgaatccgaaggaa

SEQ ID NO: 7872 - DNA, 441 bp, Artificial Sequence
  derived and/or modified sequence
atggcatcccaccggcttttgctgctgtgtcttgcaggactggtcttcgttagcgaggctggccccaccggcacaggggagtctaagtgtcccctaatggttaaggttctggatgctgttcgcgggtctcccgccatcaacgtggccgtccatgtcttccgaaaggccgcggacgatacctgggagccctttgccagcggaaagacaagcgaatcaggagagctgcacggcctgacaactgaagaagaattcgtggagggaatttataaagtagaaattgataccaaaagttactggaaagccctcggaatctctccctttcacgaacacgccgaagtagtttttactgccaatgatagcggacctcgtcggtatacaattgctgcgttattaagcccatattcctattcaacaatggccgtggtgaccaatcctaaggag

SEQ ID NO: 7873 - DNA, 441 bp, Artificial Sequence
  derived and/or modified sequence
atggcatcccaccggctcctcctcctgtgcctggctggactcgtgttcgtctcggaggcaggaccaacgggaactggagagagcaaatgtccactgatggttaaggtcctggatgcggtccgcggatcgcctgccatcaacgtcgccgtgcacgtgttcagaaaagcggcggacgacacttgggaaccgttcgcgtcaggcaagacctcggagtccggggagctgcatggcctgactacggaggaagagtttgtggagggtatttacaaggtcgaaattgatactaagtcgtactggaaggctctcggcatttccccgtttcatgaacatgcagaagtcgtgttcacggcgaatgactctgggcctcgccggtacacgatcgcggcactgctctcaccatattcatactctaccatggccgtggtgactaacccgaaggaa

SEQ ID NO: 7874 - DNA, 441 bp, Artificial Sequence
  derived and/or modified sequence
atggctagtcacaggctgcttctgctttgccttgcgggcctggtcttcgtgtcagaggctggacctacaggcaccggcgagagcaagtgccctctgatggttaaggtactggatgcagtcagggggagccctgcgataaatgtcgctgtgcacgtgtttagaaaggcagctgacgatacctgggaaccttttgccagcggaaagacgagcgaatcaggagagctgcatgggctcaccacagaggaggagtttgtcgaaggaatctacaaggttgagatcgacacaaaaagctattggaaagcgctgggcataagcccctttcacgagcatgccgaggtggtgttcacggccaacgatagcggtcctagacgctacacaatcgccgccctgctcagcccctacagttacagtaccatggctgtcgtgacaaaccccaaagag

SEQ ID NO: 7875 - DNA, 441 bp, Artificial Sequence
  derived and/or modified sequence
atggctagccataggctgctcctcttgtgcctcgcaggtctggttttcgtgtctgaggcaggccctactggaacaggtgagtctaagtgtccactcatggttaaggtcttggatgccgtgcgcggtagtcccgcaatcaacgttgccgtgcacgtctttaggaaagccgctgatgatacttgggaaccattcgcctcaggcaagacttctgagagcggagagctgcacggtctgacgactgaggaagaatttgtagaaggtatttataaggtggaaatagacacaaaatcatactggaaggctttgggaatatctccattccacgagcatgctgaagtcgtgttcaccgccaatgacagcggaccgcgccgctacactattgccgccctgctttcaccatattcttacagcactatggccgtggttaccaacccgaaggag

SEQ ID NO: 7876 - DNA, 441 bp, Artificial Sequence
  derived and/or modified sequence
atggcatctcaccgattgctgctgctgtgcctggcaggactggtcttcgtctccgaggcgggccctaccgggactggggagagcaaatgcccgcttatggtcaaagtacttgatgcagtgagggggagccctgccatcaatgtggccgtgcatgtgttcagaaaggccgcagatgatacctgggagccgttcgcttcaggtaagacatcagaatctggtgagctacacggcctcactactgaggaggagtttgtagaaggtatctacaaagttgagatcgacacaaagagttactggaaagcattggggatctctccctttcacgaacacgccgaggtggtgtttaccgcaaatgatagtggaccccggcggtacacaatcgctgcgctgttgagcccatattcctactcaacaatggccgtggtgaccaaccccaaggag

SEQ ID NO: 7877 - DNA, 441 bp, Artificial Sequence
  derived and/or modified sequence
atggcgtcccaccggctgttgctcctttgtttggccggcctggtgttcgtgagtgaggccgggcctactgggaccggcgagagcaagtgcccgctgatggtgaaagttcttgatgctgtgcgaggcagcccggctattaacgtggccgtgcacgtgttcagaaaggccgccgatgacacctgggaacctttcgctagtggaaaaacttctgagtccggagagcttcatgggctgacaaccgaggaggaattcgtggaaggcatctataaagtggagatagatacaaagtcctactggaaggcgctgggaatctcaccctttcatgaacacgctgaggtggtattcaccgccaacgatagcggtccgaggcggtacacaatcgcagcgctcttgagtccttacagttacagcaccatggccgtagtcactaatcctaaggaa

SEQ ID NO: 7878 - DNA, 441 bp, Artificial Sequence
  derived and/or modified sequence
atggcgagccatcggcttcttctgctctgcctcgctggccttgtgtttgttagcgaggctgggccaaccgggacaggggagtcgaaatgtcccctcatggtcaaggtgctggacgccgtaaggggatcgccggccattaacgtagccgtgcacgtatttcgaaaagctgccgatgacacctgggaaccattcgcatccggtaagacaagtgaatctggcgaattgcatggattgaccaccgaagaagagtttgttgaaggaatttataaagttgagatcgacacaaagtcctactggaaagctctaggaatctcaccttttcacgagcacgctgaggtcgtgttcaccgccaacgacagtggaccccggagatatactatcgcagcgctgttgtccccgtacagttattccaccatggcagttgtgactaaccctaaagaa

SEQ ID NO: 7879 - DNA, 441 bp, Artificial Sequence
  derived and/or modified sequence
atggccagtcatagactgttacttttatgtctggctgggctcgtgttcgtgagtgaggctgggcccacaggtactggagagagcaagtgtcccctgatggtaaaggtgctggatgcagtgaggggcagcccggccatcaacgtggcagtgcacgtgttccgcaaagccgcggatgacacctgggagccatttgcttctggcaagacctccgaatccggggaactgcacggcctgaccacagaggaggagtttgtggaaggaatttataaagtggagatcgacaccaaaagttactggaaggccctaggaatcagccccttccatgagcatgccgaggtagtttttaccgcgaatgatagtggcccacggaggtacaccattgccgctctgttgagcccttatagctacagcaccatggccgtggtgacgaaccccaaggaa

SEQ ID NO: 7880 - DNA, 441 bp, Artificial Sequence
  derived and/or modified sequence
atggcttcgcaccggctcctgctgctgtgcctcgctgggctggtctttgtgtcggaagccggaccaactggaactggggagtcgaagtgtcccctgatggtgaaggtcctggacgccgtgcggggtagcccggccatcaacgtcgccgtccacgtgttcaggaaggccgccgatgacacctgggagccattcgcctcaggaaagacgtctgagtccggggagttgcacggtcttaccaccgaagaggagtttgtggaaggaatctacaaagtggagatcgatactaagtcatattggaaggctctcggtatctccccgtttcacgagcacgcagaagtggtgttcaccgcaaacgacagcggacctcggaggtacaccattgcagcgcttttgtccccgtactcgtactcgaccatggccgttgtgactaacccaaaggag

SEQ ID NO: 7881 - DNA, 441 bp, Artificial Sequence
  derived and/or modified sequence
atggcatcgcatagacttctgttgctgtgcctggccggacttgtgttcgtgtcggaggccggtccaactggcaccggagagtcgaagtgcccgcttatggtcaaggtgctggacgcggtgagaggttcgcctgccatcaatgttgccgtgcatgtgttccgcaaggcggcggacgatacctgggaaccgttcgcaagcggaaaaacgtccgaatccggtgagttgcatgggcttaccacggaagaagaattcgtggaaggcatttacaaggtggaaattgatactaagtcctactggaaggctttggggatctcaccattccacgagcacgctgaggtcgtgtttaccgcgaacgatagcggaccgcggcggtataccatcgccgcattgctctccccttactcctactcgactatggcggtggtgactaacccaaaggaa

SEQ ID NO: 7882 - DNA, 441 bp, Artificial Sequence
  derived and/or modified sequence
atggcatcccaccgcctgctccttctctgtctggcgggtttggtgttcgtgtcggaggctggaccgactggtactggtgaatcgaagtgcccgctgatggtgaaggtgctcgatgcggtccggggctcccccgcgatcaacgtggcggttcatgtctttcggaaagctgcagatgacacgtgggaaccattcgcatcgggcaagacgtcagagtccggagagctgcacggcctgactactgaggaggaatttgtcgaaggaatttacaaggtggagattgataccaaaagctactggaaggcattggggatatcgcctttccatgaacatgcagaagtggtgtttaccgcaaacgattcggggccaagacgttacactattgcagccttgctttccccttacagctatagcacgatggcagtggtgaccaatcctaaggag

SEQ ID NO: 7883 - DNA, 441 bp, Artificial Sequence
  derived and/or modified sequence
atggcatcccaccggcttctcttactgtgccttgccggcttggtgtttgttagtgaggcagggcccactgggacaggggaatcgaagtgcccattaatggtcaaagtattggatgcggtgagagggagtccagctatcaacgtggcagtccacgttttccgcaaggcggccgatgatacgtgggagccgtttgccagcgggaagacgtccgagtctggggagctccatggcctgacaacggaggaagaattcgtcgaaggaatctacaaagtcgaaattgataccaaatcctattggaaagccctggggatctcacccttccacgagcacgctgaggtggtgttcacggccaacgatagcggaccccgtcgctacaccattgccgctctgttatccccctacagctattccactatggcagtggttaccaaccctaaggag

SEQ ID NO: 7884 - DNA, 441 bp, Artificial Sequence
  derived and/or modified sequence
atggcctcacaccggctgctccttctctgtttggcaggactggttttcgtctcagaggcggggcctaccggaacgggtgaaagcaaatgcccacttatggtgaaggtgctggatgcagtccgcggatcaccggctatcaatgtggcagtgcatgtgttcaggaaagcggctgacgacacttgggaaccatttgcgagcggcaagacgtcggagtctggagagctgcacggactgaccacggaagaagagtttgtggagggtatctacaaggtcgaaattgataccaaaagctactggaaggcactgggaatcagcccttttcatgaacacgcggaggtggtgttcaccgccaacgacagcggtccgagacgctacactatcgcggccctcctgtcgccgtactcctattcgactatggcagtggtgaccaacccaaaggag

SEQ ID NO: 7885 - DNA, 441 bp, Artificial Sequence
  derived and/or modified sequence
atggcgtcacatcggctccttctgctgtgtctggcaggactggtgttcgtgtccgaggctggcccaactgggaccggtgagtcgaagtgcccgttgatggttaaagtgctcgacgctgtgaggggatctcctgccatcaatgtggcggtccacgtctttagaaaggccgcagacgatacctgggaacctttcgccagcggcaagacttccgaatcgggagagctgcatggactcaccaccgaagaagaattcgtggagggaatctacaaggtcgagatcgacactaaatcctactggaaggcactcgggatctcgccgttccacgaacacgccgaggtggtctttaccgccaacgatagcggcccacgccgctacactattgccgctctgctgagcccctactcgtattcaactatggcggtggtgacgaacccgaaggaa

SEQ ID NO: 7886 - DNA, 441 bp, Artificial Sequence
  derived and/or modified sequence
atggctagccaccgtctgctgctgctgtgcctggctggtcttgtgttcgtgtcagaggctgggcccaccggaaccggcgagagcaagtgccccctaatggtcaaggtgctagatgctgtcagaggttcacccgcgattaatgtcgccgtgcatgttttccgcaaagccgctgatgacacatgggagccgttcgcaagtgggaagaccagcgagtctggggaactccatggcttgacgaccgaggaagaattcgtagagggaatatataaagtggagattgatacaaaaagctactggaaagcgctcgggattagtccatttcacgagcacgcggaggtcgtgttcacagccaacgactcagggcctcgacggtatactatcgccgccctcctgtctccttacagctatagtacgatggcagtcgtaacaaaccccaaagag

SEQ ID NO: 7887 - DNA, 441 bp, Artificial Sequence
  derived and/or modified sequence
atggcaagtcaccggctattgctcttgtgcctggctggtttggtatttgtatctgaagcgggcccaaccgggactggcgagagtaagtgccccttaatggtaaaagtcttggacgccgttagagggtctccagccattaacgtggcggttcacgtgttccgcaaggctgctgatgatacgtgggaacctttcgcgtccgggaagacctctgagagcggcgagctgcacggccttacaaccgaggaggagttcgtagagggaatttataaagtggagatagatactaaatcctactggaaggcattgggcatctctccctttcacgagcacgccgaggtggtatttacggcgaacgatagcggaccccggagatatactatcgccgccctactgtccccctactcttatagtactatggctgtggtgaccaaccccaaagag

SEQ ID NO: 7888 - DNA, 441 bp, Artificial Sequence
  derived and/or modified sequence
atggcatcacaccgtctgcttctgctctgcctggcgggcctggtgttcgtgagcgaagcgggaccaaccggtaccggagagtccaagtgtccactcatggtaaaagttcttgatgcagtgcggggctctccagccattaatgtggcggtgcacgtttttagaaaggcagcagacgacacttgggaaccttttgcgtcgggtaagacgtcggagagcggtgaactgcatggtctgacgactgaagaagaatttgtggagggaatatacaaggtggaaatcgataccaaatcatactggaaggccttgggaatctccccttttcatgaacatgcagaggtggtctttactgccaacgactcaggccctcgcagatataccatcgcagctctgttgtctccttactcctactcaaccatggccgtggtgaccaacccgaaagaa

SEQ ID NO: 7889 - DNA, 441 bp, Artificial Sequence
  derived and/or modified sequence
atggccagccaccgtctgttgttactgtgtctagccggacttgtctttgtgtcagaggccgggcccacaggtaccggggaatcgaagtgtcccctaatggtcaaagtgctagatgctgtccgaggatcacccgctattaatgttgctgttcatgtcttccgtaaagcagcagacgacacctgggagcccttcgcctcaggcaaaacaagcgagagtggagagctgcacggtctgacaacggaggaggagttcgtcgaaggcatttataaggtcgagatcgacaccaagtcctattggaaagcactgggaattagcccatttcacgagcacgctgaagtggtgtttaccgctaatgactcagggcccagacgctacaccatcgctgcacttttaagtccttactcgtactcgacaatggccgtggtgacgaatccgaaggag

SEQ ID NO: 7890 - DNA, 441 bp, Artificial Sequence
  derived and/or modified sequence
atggcgagccaccgactgttactcctgtgtctcgccggattggtgttcgtgtccgaagctggccctacgggaacaggtgagtccaagtgccctttgatggtaaaggtactggacgctgtgcggggatctccggctatcaacgtggctgtgcatgtatttcgcaaggcagcagatgacacatgggagcccttcgcctccggcaagacgtcagaaagcggtgagttgcacggcctgaccaccgaagaggaatttgtagaggggatctataaagtcgagatcgatacaaagagttactggaaggcacttgggatcagtccattccatgagcacgctgaggtagttttcaccgccaacgatagcgggccaagacgctataccatagcggcattactgtcaccgtacagctatagcactatggccgtggtgaccaatcctaaagag

SEQ ID NO: 7891 - DNA, 441 bp, Artificial Sequence
  derived and/or modified sequence
atggctagtcatagactgctcctcttgtgccttgcaggcctggtgttcgtgagcgaggcaggtccaactggaactggtgagtctaaatgtcctctgatggttaaagtcttggatgccgtgaggggcagtcccgcaataaatgtcgcagtccacgtatttagaaaagccgccgatgacacctgggagccattcgcttctggtaagacatcagagtctggcgagctgcacggacttactaccgaggaggaatttgtggagggcatttataaggtggaaattgataccaaatcctactggaaggctttgggaatctcacctttccatgaacacgccgaagtcgtgttcactgcaaacgattctggcccccgcaggtacaccatcgctgcccttctgtccccctatagctattctacaatggcagtagttactaatccaaaggag

SEQ ID NO: 7892 - DNA, 441 bp, Artificial Sequence
  derived and/or modified sequence
atggcctcacataggctgttgctgctctgtcttgccggcctggtgtttgtctccgaagccggaccaactggaaccggagagtcgaagtgcccgctgatggttaaagtgctcgatgcagtccgcggaagccccgccataaatgtcgcggtgcatgtgttccgcaaggcggccgatgacacctgggagccttttgcatcgggtaagaccagcgagtccggcgaactgcatggactgacgaccgaagaagagttcgtggagggaatctacaaggtcgagattgacactaagagctactggaaagcattgggcatctcacccttccatgaacatgccgaggtcgttttcactgccaacgacagcggtccgagacgctacactatcgcagccctcctttcgccatactcctattcgactatggccgtcgtgacgaacccaaaggag

SEQ ID NO: 7893 - DNA, 441 bp, Artificial Sequence
  derived and/or modified sequence
atggcttctcaccggctgttgttattgtgtctcgctgggctggtgttcgtgtctgaagctggacccactggcacaggcgagagcaagtgccccctgatggtgaaagtgttggatgctgtccgcggttcacctgccatcaacgtggctgtccacgtgtttcgcaaagccgcagacgacacctgggagccattcgcatcagggaaaaccagcgaaagcggcgagttacacgggctgaccaccgaagaggagttcgtcgaaggtatatacaaggtggagatagacaccaagtcttactggaaggccctggggatttctccatttcacgaacacgcagaagtggtttttaccgccaatgactctggtcccaggcggtatactattgctgctctactatccccttatagttattctacaatggccgtcgtcacaaacccaaaagaa

SEQ ID NO: 7894 - DNA, 441 bp, Artificial Sequence
  derived and/or modified sequence
atggcctcccatcggcttcttctgttgtgccttgcaggattggtctttgtctcagaagcgggtccgacgggcaccggggaatcgaagtgtcctctgatggttaaggtgctggacgcagtgcgcggttcgcccgccataaacgtggcagttcacgtgtttagaaaagcagcagatgatacttgggaaccatttgcatccggtaaaacctcggagtccggcgagctccacggattgaccactgaagaagagtttgtggaaggaatttacaaggtggagatcgacactaagtcatactggaaagcgctcggtatcagccccttccatgaacatgctgaggtagtattcaccgcaaatgattccggccctaggagatacacgattgctgctctccttagcccatacagttattcgaccatggctgtggtcactaaccctaaggag

SEQ ID NO: 7895 - DNA, 441 bp, Artificial Sequence
  derived and/or modified sequence
atggcttcacacagacttctactgttgtgtctcgcaggcctggtgttcgtgtcagaagcagggccaacaggcaccggcgagtccaagtgccctctgatggtgaaagtgctcgatgccgtgcggggatccccagctatcaacgtggccgtgcacgtatttcgtaaagctgctgatgatacctgggagcccttcgctagtgggaagacctcagagtccggtgaacttcacgggcttacgacggaggaggagttcgtcgagggaatctacaaggtcgaaattgatactaaatcctattggaaggcactcggcatttccccctttcatgagcacgcagaagtggttttcactgccaacgacagcgggcctaggaggtatactatcgcggcactcctgtctccatatagctactccaccatggcagtggtcactaaccctaaggaa

SEQ ID NO: 7896 - DNA, 441 bp, Artificial Sequence
  derived and/or modified sequence
atggcatcccacagattgttgttgctgtgtctggcaggtctggtgtttgtgagcgaagccggccccacgggcactggcgagtccaaatgcccacttatggttaaggtgctggatgcggttagggggagccctgctatcaatgtagcggtacatgttttccggaaggcagccgacgacacctgggaaccattcgcatcagggaaaacttccgaatcaggagagctgcatggactgaccactgaagaagaatttgtcgaaggaatttacaaggtggagattgatacaaagtcatattggaaagcattgggcattagtcctttccatgaacatgcggaagtggtgttcacagcaaatgattccggaccgcggcgatatactattgctgcacttttgagtccttatagttactcaaccatggccgttgttactaatccgaaggag

SEQ ID NO: 7897 - DNA, 441 bp, Artificial Sequence
  derived and/or modified sequence
atggcgtcccaccgccttctgcttctgtgtctggcaggcttggtgttcgtgtcagaagctggaccgaccggaactggagaatctaagtgcccgctcatggtcaaggtgctggatgccgtgcgggggtcgcctgcgattaacgttgccgtgcacgtttttcgcaaggctgcggatgacacttgggagccattcgcctcaggcaagacgtctgagtccggtgagctgcatggcctcaccactgaggaagagttcgtggaaggtatctacaaagtcgaaatcgacaccaagtcatactggaaagccctcgggatctcaccgttccacgagcacgcggaagtggtctttactgcgaatgactccggaccgcggcggtatactattgccgcactgctgtccccctactcctactcgactatggccgtcgtgaccaatccaaaggaa

SEQ ID NO: 7898 - DNA, 441 bp, Artificial Sequence
  derived and/or modified sequence
atggcatcacataggctgttgctcttatgcctcgcaggacttgtttttgttagcgaagcagggcctaccggaacgggagaaagtaaatgtccgcttatggtcaaagtgcttgacgcggtaagaggcagcccggcgattaatgtagccgttcatgtctttcgtaaggccgctgacgacacgtgggaaccgtttgcctcaggaaaaacatccgaaagcggtgagctgcatggattaaccacagaagaggaatttgtcgaaggtatttataaagttgaaatcgataccaagtcgtactggaaagctttgggtatttcaccgttccatgaacatgcggaagttgttttcaccgctaatgattcaggaccgagacgctatacaatcgcagctcttctgtcaccgtatagctattccacgatggctgttgtcaccaatcccaaagaa

SEQ ID NO: 7899 - DNA, 441 bp, Artificial Sequence
  derived and/or modified sequence
atggcgtcccaccgcctgctgctgctgtgtctggcgggtctagtctttgtttcagaggcggggccaaccgggaccggcgaaagtaagtgcccactgatggtcaaagtactggatgcggtgcgaggtagcccagcgatcaatgtggccgtgcatgtatttcgcaaggcagccgacgatacttgggagcctttcgcgtcaggaaaaacgagcgaatctggggaactgcacggcctaacgacggaagaggagttcgtcgaaggtatttataaagtggagatcgacaccaagagctattggaaggccctgggtattagcccatttcacgagcacgcggaggtggttttcaccgccaacgacagcggccccagacgctacacgatcgccgcgttactgagcccgtattcctacagcaccatggcagtcgttaccaacccaaaggag

SEQ ID NO: 7900 - DNA, 441 bp, Artificial Sequence
  derived and/or modified sequence
atggcatcccaccggcttttgctgctgtgcctggccgggctggtgttcgtgtcggaggctggtccaactggaaccggagaaagcaagtgcccgctgatggtgaaggtccttgatgcagtgcgcggtagccctgccatcaacgtggctgtgcatgtctttcgcaaggccgcagacgatacctgggaaccctttgcttcgggaaagaccagcgaatcaggggagctgcatggtctgacgactgaagaagagttcgtggagggcatttacaaggtggaaatcgatactaaatcatactggaaggcgctcggaatctccccgttccatgaacacgctgaagtggtctttactgccaacgactccggtccgcggcggtacactatcgccgccctcctctccccctattcctactccacgatggcggtggtcactaaccccaaggag

SEQ ID NO: 7901 - DNA, 441 bp, Artificial Sequence
  derived and/or modified sequence
atggcaagtcaccgcctcctcctgctttgtctggccggcctggtattcgtgagcgaagccggaccgactgggactggagaaagcaaatgcccgctcatggttaaagtgctggacgcggtgcgcggttccccagccatcaatgtcgccgtacacgtgttcagaaaggcagctgatgacacttgggagccttttgcttcaggaaaaacttccgagtcaggcgagctgcatggactgacgactgaagaagaatttgtggaaggaatctacaaggtcgaaatcgataccaagtcgtattggaaggcccttgggatttccccgttccatgagcacgccgaggtcgttttcaccgcgaacgactcgggtcctagacgttacaccatcgcggcgcttcttagcccatactcgtactcgaccatggctgtggtgaccaaccccaaagaa

SEQ ID NO: 7902 - DNA, 441 bp, Artificial Sequence
  derived and/or modified sequence
atggccagccatagacttctgttgctgtgtcttgctggactggtgtttgtctcagaagcaggtcctactggtacgggagaaagcaaatgccctcttatggtgaaggtgctcgacgcagttaggggtagccctgccattaatgtggccgtgcacgtgtttagaaaagccgcggacgatacctgggaaccttttgcgtcgggaaagacctcggagtccggtgaattgcatgggctgactaccgaagaagagttcgtggaaggaatttacaaggtcgagatagatacgaagtcctactggaaggcactgggtatctcgcctttccatgaacacgctgaggtggtctttaccgctaacgattcagggcccagacgctacaccatcgcagcactgctgagtccctattcgtactcgactatggctgtggttactaaccctaaagag

SEQ ID NO: 7903 - DNA, 441 bp, Artificial Sequence
  derived and/or modified sequence
atggcctcccaccggttgctgctgctgtgtctcgccggtttggtgtttgtgtccgaagccgggccgacgggaactggagaatctaagtgcccgctgatggtgaaggtcctcgacgcagtccggggaagccccgcaatcaacgtggcggtccatgtgttccgcaaggcagccgacgacacctgggaaccgttcgcgtcaggtaagacgtcagagtcgggagagctgcatggactgactaccgaagaggaattcgtggaggggatttacaaggtggaaatcgatactaaatcctactggaaagccctcggaatctcaccattccatgaacacgctgaggtcgtctttaccgccaacgactccggtccgaggcgctacactatcgctgccctgctgtccccctactcctactcaacgatggccgtggtgactaacccgaaagaa

SEQ ID NO: 7904 - DNA, 441 bp, Artificial Sequence
  derived and/or modified sequence
atggcaagccaccgtttgctgctgctgtgtctggccggcctggttttcgtgagcgaggctgggcccaccggaacaggcgagtcgaaatgtcccctcatggtgaaagttctggacgccgtgcggggtagcccagcaatcaacgttgccgttcacgtttttcgaaaagcagccgacgatacatgggagccgttcgcaagtgggaagaccagtgaatcaggagagctccatgggctaaccaccgaagaagagtttgtggaaggaatctacaaggtagaaatcgatactaaaagttattggaaggccctgggtatatctccgtttcatgaacatgccgaggtagtgtttaccgccaatgactctggcccaagacgatacacaattgccgcactgcttagcccttactcttactccactatggctgtggttactaaccctaaggaa

SEQ ID NO: 7905 - DNA, 441 bp, Artificial Sequence
  derived and/or modified sequence
atggcttcccacaggctgcttctcctctgtttggcgggcctagttttcgtttccgaagctgggcctacgggcacaggggagtcgaaatgccccctcatggtgaaggtgctagatgctgtccgaggcagtccggcaatcaacgtcgccgtccacgtgtttcgtaaagccgccgacgacacatgggaaccttttgcctctgggaaaacttccgaaagtggagagctgcatggcctgaccacagaagaggaattcgtggaggggatctataaagttgaaatagacacaaagagctattggaaagctcttgggatatcaccgttccacgagcacgcagaggtggttttcacagccaacgatagcggccctagacgctacactatagccgctcttctctctccatattcttattccaccatggctgtagttaccaacccaaaagag

SEQ ID NO: 7906 - DNA, 441 bp, Artificial Sequence
  derived and/or modified sequence
atggcctcccaccgtctgctcctgctgtgcctggccggtctggttttcgtgtcggaagcgggcccgacgggcacgggcgagtccaagtgcccactcatggtgaaagtgttggatgccgtgaggggatcgcctgcaattaatgtcgccgtgcacgtttttaggaaggcagctgacgatacctgggaaccattcgcttcaggaaagaccagtgagagcggtgagctgcacggcctcactacagaggaagagttcgttgagggaatctataaggtcgagatcgataccaagagttactggaaggcgcttggcatatctccattccatgagcacgccgaggtggtcttcacggctaatgatagcggcccacgtcgctataccatagccgcactactctccccgtacagttactcgaccatggcagtggtgacgaaccctaaagag

SEQ ID NO: 7907 - DNA, 441 bp, Artificial Sequence
  derived and/or modified sequence
atggcgtcacaccggctcctcctgctgtgtctggctggactcgtgttcgtgtccgaggccggcccgaccggaactggagaatccaagtgcccactgatggtgaaagtcctcgacgccgtgcgggggtcgccggccatcaatgtcgccgtgcatgtgttccgcaaggccgcagacgacacgtgggaaccattcgcctcaggtaagacctcggaatcaggagaactgcacggactcactactgaggaagagttcgttgagggaatctacaaggttgaaatcgacaccaaatcgtactggaaggctcttggtatcagcccgttccacgaacatgccgaggtggtgtttaccgcgaacgatagcggtccgcgcaggtacactatcgcagccctgctgtccccgtactcgtatagcaccatggctgtggtgaccaatccaaaggag

SEQ ID NO: 7908 - DNA, 441 bp, Artificial Sequence
  derived and/or modified sequence
atggcctctcacagactactgctgctttgtctggcgggtctggtttttgtgagtgaggcaggtcccactggtaccggggagagtaaatgccccctgatggtgaaagtgcttgacgccgtcagggggagccctgcgataaacgtagccgtacatgtgtttcgaaaggccgccgacgatacgtgggagccattcgcaagcgggaagacaagcgagtctggtgaactgcatggcctgaccactgaggaagaattcgtcgaagggatctacaaagtggagattgacactaagtcctactggaaggcactgggaatttcccccttccatgagcacgcagaggtggtttttacggctaacgactctggacccaggagatacacgatcgccgccctgctcagcccatacagctactccacgatggccgttgtcacaaaccccaaagag

SEQ ID NO: 7909 - DNA, 441 bp, Artificial Sequence
  derived and/or modified sequence
atggcatcgcatagactgcttctgttgtgcctggcagggctggtgtttgtgtcagaggcgggcccaactggcactggagaatccaagtgcccactgatggtcaaggtgcttgacgccgtgcgcgggtcccctgcgattaatgtggcggtgcatgtgtttcgaaaggcagccgatgatacttgggaaccttttgcttccggtaaaacttccgagagcggagaactccatggattgaccactgaggaagagttcgtggaaggtatctacaaagtggaaatagataccaagtcgtactggaaggcgctgggtatctccccgtttcacgagcatgcagaagtggtgttcaccgcgaatgactctggtccccggcgatacactatcgcagcccttctctcgccatattcgtatagcaccatggctgtggtgacgaaccctaaggag

SEQ ID NO: 7910 - DNA, 441 bp, Artificial Sequence
  derived and/or modified sequence
atggcctcacatcggcttctgcttctctgtctggcaggattggtgtttgtgtcagaagccgggcctactgggactggagagtcgaagtgcccactgatggtgaaggtgttggatgccgtcaggggatcccccgcaatcaatgtcgcagtccacgtctttagaaaagcggcagacgatacttgggaacctttcgcatcgggcaagacctcagaatccggagaactgcatggcctgaccaccgaggaagagttcgtcgagggtatatacaaggtggaaatcgacaccaagtcttactggaaggctctgggaatctcccctttccatgaacacgcggaggtggtgttcacggcgaacgattcgggtcccaggcgctacaccattgcagcccttttgtcgccatattcgtacagcacgatggcagtggtgactaacccaaaggag

SEQ ID NO: 7911 - DNA, 441 bp, Artificial Sequence
  derived and/or modified sequence
atggcttctcaccggctattgctcctgtgcctggccggcctcgttttcgtaagcgaggccggccctactggcacaggtgaatccaagtgtcccctaatggtgaaggttctcgatgctgtgcgaggcagccctgccatcaacgtggcagttcacgttttcagaaaagccgccgatgatacgtgggagccatttgcctccggcaaaactagtgagagcggggaactccacggcctaacgaccgaggaggaattcgtagagggaatatataaggttgaaattgatacgaaatcttattggaaagccctgggcataagtcccttccatgagcatgcggaggtcgtgtttactgcaaacgattctggtcccaggcgttacaccatagctgccctgttgtctccctattcctactctacaatggcagtggtcacaaacccaaaggag

SEQ ID NO: 7912 - DNA, 441 bp, Artificial Sequence
  derived and/or modified sequence
atggcaagccaccgccttctcctgctttgcctggcagggttggtgtttgtctccgaggcgggccctacgggtaccggagagtccaaatgtccattgatggtgaaagttcttgacgcagtacgagggagtccggccataaacgtggccgtgcatgtgttcaggaaggcagcggacgatacctgggaaccgtttgcgtccggaaagacttcggagtcaggtgaactccacggactgactacggaagaagagttcgtggaagggatctacaaggttgagattgataccaaatcgtactggaaggcccttggaatttcgccttttcatgaacatgcagaagttgtctttaccgcaaacgattcgggtccccggcgttataccatcgccgctcttctcagcccgtactcgtactctactatggccgtggtaactaatcccaaggaa

SEQ ID NO: 7913 - DNA, 441 bp, Artificial Sequence
  derived and/or modified sequence
atggcctcccatcggctgctcttgctgtgcctggcaggccttgtcttcgtttctgaagccggaccaactggaaccggggaatccaagtgtccattgatggtcaaggtgctcgacgccgtgaggggaagcccagcgatcaatgtggctgtgcatgtgttccgaaaagccgcagacgacacctgggaaccgttcgcgtccggaaagactagcgagtcgggcgagctgcacggactcaccactgaagaagaatttgtggaagggatctataaggtggaaatcgataccaaatcgtactggaaggcactcggaatctcgcccttccatgaacatgcagaggtcgtgttcaccgcaaatgactcgggccctaggagatacactattgcagccctgctgtcaccgtactcatactccaccatggcagtggtcactaaccccaaggaa

SEQ ID NO: 7914 - DNA, 441 bp, Artificial Sequence
  derived and/or modified sequence
atggcatcccataggttattgctgctctgtttggcgggacttgtattcgtaagcgaggctggtccgacaggtactggagagtctaaatgtccactcatggtgaaggtcctggacgcggtgcgcggatcccctgcaataaatgtggcagtgcacgtgttccgaaaggccgcagatgacacttgggaacccttcgcgagcggaaagactagcgagagcggggaactgcacgggctcactacagaggaagagtttgttgaaggaatctataaggtggagatcgacactaaatcttattggaaagcgctcggcatcagcccctttcatgagcatgctgaagtggtgttcactgccaatgactctggcccgcgcaggtacaccatcgctgcgctcctgtccccttattcgtattctaccatggccgttgtcacaaaccccaaggag

SEQ ID NO: 7915 - DNA, 441 bp, Artificial Sequence
  derived and/or modified sequence
atggcctcccatagactgctccttctttgccttgccgggctggtgtttgtgtcggaagcaggacccaccggcaccggggaatctaaatgtcctcttatggtgaaggttctggacgccgtgagaggcagcccagcaatcaatgtcgctgtgcatgtgttccggaaagcagccgatgatacttgggaacctttcgccagcggaaagacttcagaatccggagagctgcatggattgactaccgaagaagagtttgtcgaaggaatctataaagtcgaaattgatactaagtcatactggaaggcactcggcatctccccgttccacgagcacgccgaagtggtgtttactgcaaacgactcggggcctagaagatacaccatcgccgcacttctgtcaccttacagctactccactatggcagtcgtgaccaaccccaaggaa

SEQ ID NO: 7916 - DNA, 441 bp, Artificial Sequence
  derived and/or modified sequence
atggcttcacacaggttactgctgctgtgcctcgctggcctcgtctttgtaagtgaagccggtccaaccggtacaggtgagagcaagtgcccacttatggttaaagtactggacgccgttcgcgggagccctgcaatcaacgtggcggtccatgtcttccgcaaagccgctgatgatacctgggagccattcgctagcggcaagacaagtgaaagtggcgagctccacggactgacgaccgaggaagaattcgtggagggtatatacaaagtggagatcgataccaaaagctattggaaggcactgggaattagcccgtttcacgaacacgccgaagtggtttttactgcaaatgacagcggcccaagacgctatactattgctgcgctgctgagcccctactcttattcaacaatggccgtagtgaccaacccaaaggaa

SEQ ID NO: 7917 - DNA, 441 bp, Artificial Sequence
  derived and/or modified sequence
atggcatcacaccgactcttacttctttgtctggcaggactcgtgttcgtgtcagaagcaggaccaacaggaacaggagaatctaaatgccccctaatggttaaggttttggacgccgttaggggaagtccagcaataaacgtggccgtgcatgtcttccgcaaggcggccgatgacacatgggaaccattcgcttccgggaaaactagtgaatcaggggaactccacgggctcacaactgaagaagaattcgttgaaggaatctacaaagtggaaatagatacaaaatcttattggaaagcactagggatatcacctttccacgaacatgcagaagtcgtctttacagcgaacgattctgggccacggcgctatactatcgccgccctgctaagtccttattcctattctactatggctgtggtcactaaccctaaagaa

SEQ ID NO: 7918 - DNA, 441 bp, Artificial Sequence
  derived and/or modified sequence
atggcatctcacagattattattattatgtttagcagggttagtttttgtttctgaggcaggaccaacaggaactggtgaatcaaaatgtccattaatggttaaggttcttgacgcagttcgtggttctccagctattaatgttgctgtacatgttttcagaaaagcagctgatgatacatgggaaccattcgctagtggaaaaacttcagaatctggagaattacatggattaacaacagaagaagaatttgttgaaggaatttataaagttgaaattgatactaaatcatattggaaggctttaggtatttcaccttttcatgaacatgcagaggtagttttcactgctaatgatagtggtccaagaagatatactattgcagctttactttctccatactcttattctactatggctgttgttactaatccaaaagaa

SEQ ID NO: 7919 - DNA, 441 bp, Artificial Sequence
  derived and/or modified sequence
atggcctcacaccggttgctgttactctgtcttgctgggctggtattcgtgtctgaggccgggccaaccgggacaggggagagcaaatgtcctctgatggtgaaggttctggacgctgtcaggggatcaccggccatcaatgttgccgtgcacgtgtttagaaaggccgctgacgatacgtgggagcccttcgcttccggcaaaacgagcgagtcaggcgagctgcacggtttgaccaccgaagaggaatttgtggagggtatctacaaagtggaaattgacacaaaaagctactggaaggccttgggaatctccccgtttcacgaacacgcagaggtggtgttcaccgccaacgactccggaccccgccgttatactattgccgctctgctgagtccatattcctactccacaatggctgtcgtgactaaccctaaagag

SEQ ID NO: 7920 - DNA, 441 bp, Artificial Sequence
  derived and/or modified sequence
atggcttcccatcgtctgctgctgctgtgcctggccggcttagtctttgtctccgaggcaggccctaccggaaccggagagagcaagtgcccgctgatggtaaaggtcctcgacgctgttaggggaagcccagccattaacgtcgcagtgcacgtgtttcggaaagcagccgatgatacctgggagccgtttgcttcgggaaagacctcagagagtggggaacttcacggcctgaccaccgaggaggaattcgttgagggtatctacaaggtcgaaattgataccaagtcgtactggaaggcactggggatctccccttttcacgaacacgcggaagtggtgttcactgccaacgacagcggtcccagacgttacaccatcgccgccctgctgagtccgtatagctactcgaccatggctgtcgtcacaaacccaaaggag

SEQ ID NO: 7921 - DNA, 441 bp, Artificial Sequence
  derived and/or modified sequence
atggcctctcatcgtctccttcttctctgtctggctggactcgtgtttgtatctgaggctggaccaactggcaccggtgagagcaaatgtcctcttatggtcaaagtcttggatgccgtcagaggatctccagcaattaacgtagccgttcatgtgttcaggaaagctgcagatgacacatgggaaccattcgcgagtggcaaaacgtccgagagcggcgagttacatggtcttaccacagaggaagagtttgtcgaaggtatctacaaagttgaaattgatacaaaatcttactggaaagcgttaggaatctctccatttcacgaacatgcagaagtcgtatttacagccaatgactctggtccacgaagatacacaattgcagccttgttaagcccatatagctactctactatggcagttgtaaccaacccaaaagag

SEQ ID NO: 7922 - DNA, 441 bp, Artificial Sequence
  derived and/or modified sequence
atggcctctcatagactgttactgctgtgccttgcgggcttggtcttcgtcagcgaagccggaccaacaggcacaggggaatccaaatgcccgcttatggtgaaggtgctggacgcagtgagaggaagccccgccattaatgtggctgtgcatgtattccgcaaagccgccgacgacacttgggagccatttgcgtcaggtaagacaagcgagtcaggtgagctccacggcctaactactgaagaagaattcgtggagggtatttacaaagttgaaatcgatactaagtcttattggaaagcccttggtatcagcccttttcatgaacacgcggaggtcgtatttactgcaaacgattcaggacctcgccgctatactatagccgctctactctccccgtatagctacagtaccatggctgtggtaacgaatcctaaagag

SEQ ID NO: 7923 - DNA, 441 bp, Artificial Sequence
  derived and/or modified sequence
atggcttcacaccgtcttctgttattgtgcctcgccgggctggtgttcgtatccgaggccggccctaccgggacaggggagtcaaagtgccctctcatggtgaaagtcctggacgccgtgcgagggtccccggcgattaacgtcgcggttcacgtgttccgcaaagccgccgacgatacctgggagccctttgccagcggcaagaccagcgaatctggagaactgcacggtctgacaaccgaggaggaattcgtggagggaatctacaaggtggagatagataccaaatcttactggaaagcactgggcatctcccctttccacgagcacgcggaggtggtcttcaccgctaacgattccggccctcggagatacaccatcgctgctctcctgagcccttactcgtactccactatggccgtcgttacgaacccaaaggaa

SEQ ID NO: 7924 - DNA, 441 bp, Artificial Sequence
  derived and/or modified sequence
atggccagccatcggctgctgcttctgtgccttgctggactcgtctttgtgagcgaagccggaccgaccggaactggggaatccaagtgtccgctgatggtgaaggtgcttgatgccgtgcggggatcgccggcaatcaacgtcgcagtgcacgtgttcagaaaggccgctgacgatacctgggaaccgtttgcgtcgggaaaaacttccgaatccggagaactccatggtctgactactgaggaagagttcgtcgagggaatctataaggtggagatcgacactaaatcgtactggaaagccctcggcatttcacctttccatgagcacgcggaagtggtctttacggccaatgactctggtccccgccgctacacgatcgcggcgcttctgtcgccatacagctactcgactatggcggtcgtgaccaatccaaaagaa

SEQ ID NO: 7925 - DNA, 441 bp, Artificial Sequence
  derived and/or modified sequence
atggcgtcacatcgcctgcttctgctctgcttggctggcctggtctttgtctccgaagcaggaccaaccggaaccggcgaatcgaaatgtcctttgatggtgaaggtgttggatgcagtgagaggatcccctgcaatcaacgttgcagtgcatgtgtttcggaaggcggccgacgacacctgggagccattcgcgagcggtaagacctccgaatcgggagaacttcacggactcaccactgaagaggaatttgtggaaggtatctacaaggtcgaaatagatactaagtcctactggaaggcccttggtatttcaccatttcatgaacatgctgaggtggtgttcactgcaaatgatagcggaccacgcagatacactattgcagcactgctgtccccgtactcctactcaaccatggcagtggtcaccaaccctaaggaa

SEQ ID NO: 7926 - DNA, 441 bp, Artificial Sequence
  derived and/or modified sequence
atggcctcgcatagactcttgctgctgtgcctcgccgggttggtgttcgttagcgaggcgggtcctactggaactggcgaatcaaagtgcccgctgatggtgaaagtgcttgatgcagtccgcggatcaccggccatcaacgtcgccgtgcacgtgttccgcaaggccgcggacgacacgtgggaaccattcgcgtcaggcaagacctcagaaagcggggagctccatgggctgactactgaggaagagttcgtggagggcatctacaaggtggaaatcgataccaagtcgtactggaaggcgctcggaatctccccgttccacgagcacgccgaagtcgttttcactgctaacgattcgggaccacgccgctacactattgcggcgttgctctctccgtactcatactccactatggccgtggtgactaatcccaaggaa

SEQ ID NO: 7927 - DNA, 441 bp, Artificial Sequence
  derived and/or modified sequence
atggcatcccaccgcttgcttctgctttgtctggcaggactggtttttgtgtccgaagccggacctaccggcaccggggagtcgaagtgtcccctgatggtgaaggtgctggacgcagtcagaggttcgcctgcaatcaatgtggccgtgcatgtgtttaggaaagcagccgacgatacttgggaaccatttgcatcgggtaaaactagcgaatctggtgagctgcatgggctcactactgaggaagaatttgtcgagggaatctacaaggtggaaattgataccaagtcgtactggaaggcactgggtatctcccctttccatgagcacgcagaggtggttttcactgccaacgatagcggacccagaagatacactattgcagcacttctgtccccttacagctactctactatggccgtcgtgaccaacccaaaggaa

SEQ ID NO: 7928 - DNA, 441 bp, Artificial Sequence
  derived and/or modified sequence
atggcctcccaccgactgctgttgctgtgcctcgctgggctcgtctttgtgtccgaagctggccccaccgggacaggggagtcaaagtgccctttgatggtgaaggtgttggacgcggtgagaggttcacccgctattaatgtggctgttcatgtctttcgcaaagcagctgacgatacttgggagccatttgcttccggcaaaacatccgagtctggtgagttgcacgggctcaccaccgaggaggagttcgtggagggaatctataaagtcgaaattgacaccaagtcatattggaaggccctgggcataagtccttttcacgaacacgctgaggtagtgttcacggcgaacgacagtggccctcggcgatacaccattgcagccctgctgtctccttactcttattcaaccatggctgttgtcacaaaccccaaagaa

SEQ ID NO: 7929 - DNA, 441 bp, Artificial Sequence
  derived and/or modified sequence
atggctagtcaccgactgctgctgctgtgcctggcagggctggttttcgtctcagaagcaggcccaacaggcaccggcgaatcaaagtgccccttgatggtaaaggtgttggacgcggtgcgtgggtcccccgctatcaacgtggcagtgcatgttttccgcaaggcagccgatgacacctgggaacctttcgcgtccggtaagactagcgagagcggcgaactccacggcttgacgacagaggaggaattcgtggaggggatttataaagttgaaatcgacacgaagagttactggaaagccctaggaatcagccccttccacgaacacgccgaagtcgtttttactgcaaatgacagcggcccccggaggtataccattgctgccctgttgagtccttacagttacagcaccatggccgtggtgacgaatccaaaagag

SEQ ID NO: 7930 - DNA, 441 bp, Artificial Sequence
  derived and/or modified sequence
atggcatcccaccgacttttgctgctctgcttggcaggccttgtgttcgtgtccgaggccggaccaaccggaaccggcgaaagcaagtgtccccttatggtgaaggtccttgacgccgtccggggatcccctgcaattaacgtggccgtgcatgtgtttagaaaggcagccgatgatacctgggaaccatttgcttccggaaagaccagcgaatccggagaattgcatgggctgactactgaagaagagttcgtggaaggaatttacaaggtcgaaattgatacgaagtcatactggaaggcacttggaatatcaccttttcatgagcacgccgaggtcgtgtttacggctaatgacagcggtcctaggcggtacaccattgccgcacttctgtccccgtattcgtactcgaccatggcagttgtgactaaccccaaggag

SEQ ID NO: 7931 - DNA, 441 bp, Artificial Sequence
  derived and/or modified sequence
atggcttcacacaggcttctcctgctttgcctagctggcctggtgtttgtctccgaggccggaccgaccggcaccggtgagtccaagtgcccactgatggtgaaagtgctggatgcagtccgtggcagcccagcgattaacgtcgccgtgcatgtttttaggaaggctgcagacgacacttgggagcctttcgccagcggcaagacttctgagtcaggagagctgcatgggttaaccaccgaggaggagttcgttgagggtatttataaagtggagatagataccaagtcctactggaaggccctagggatatcacccttccatgagcatgccgaagtggtctttacagcaaacgattcggggccgagaaggtacaccatagccgccttgttgtctccatatagctacagcactatggccgtggtgaccaaccctaaagag

SEQ ID NO: 7932 - DNA, 441 bp, Artificial Sequence
  derived and/or modified sequence
atggcgtcccacaggttgctgctgctgtgccttgccggactggtctttgtctcggaagcggggccgactggtacgggagaatcgaagtgtcccctgatggtgaaagtgctcgatgccgttagaggctccccagccattaacgtcgcggtgcacgtgttccgcaaggctgcggatgacacctgggaaccgttcgccagcggcaagacctctgagagcggcgagttgcatggactgaccactgaggaagaatttgtggaaggtatctacaaagtcgagatcgacaccaagagctactggaaagcactgggaatctcgcctttccacgaacatgcagaggttgtattcacggctaacgactccggtccacgtcggtacactatcgccgccttgctcagtccctactcttattcgactatggcagtggtgaccaatccgaaggag

SEQ ID NO: 7933 - DNA, 441 bp, Artificial Sequence
  derived and/or modified sequence
atggcgtcgcatcgattactactactatgtttagcgggtttagtatttgtatcggaagcgggtccgacgggtacgggtgaatcgaaatgtccgttaatggtaaaagtattagatgcggttcgaggttcgccggcgataaatgtagcggtacatgtttttcgtaaagcggcggatgatacgtgggaaccgtttgcgtcgggtaaaacgtcggaatcgggtgaactacatggtctaacgacggaagaagaatttgttgaaggtatatataaagtagaaatagatacgaaatcgtattggaaagcgctaggtatatcgccgtttcatgaacatgcggaagtagtatttacggcgaatgattcgggtccgcgtcgttatacgatagcggcgctactatcgccgtattcgtattcgacgatggcggttgttacgaatccgaaagaa

SEQ ID NO: 7934 - DNA, 441 bp, Artificial Sequence
  derived and/or modified sequence
atggcaagtcatcgtttattgcttctatgcttggctgggctggtatttgtttcggaggcaggacctactggaaccggtgagtccaagtgtccacttatggttaaggtgttggatgctgttaggggttctcccgctataaacgtggcagtgcacgtgttccgtaaagctgctgatgacacgtgggaaccattcgctagcggaaagacttccgaatcaggggagttgcacggacttaccactgaagaagaatttgtagaaggtatttataaagtagaaattgataccaagtcttattggaaagcactcggaatatccccatttcacgagcatgctgaggtcgtcttcaccgccaatgattcaggcccgagaagatatacgattgccgcgttgctcagcccttattcatacagtacaatggcggtggtgacaaaccccaaggag

SEQ ID NO: 7935 - DNA, 441 bp, Artificial Sequence
  derived and/or modified sequence
atggcaagccacaggttactgctgctctgtctcgccggtttagtatttgtaagcgaagcaggaccaaccggtacgggcgaatctaagtgcccactaatggttaaagtccttgacgcggtccgcggctcgccggccattaatgtcgcggtgcacgtctttcgtaaggcagctgacgacacatgggagcccttcgccagtggcaaaactagtgagagcggcgagctgcatggacttaccaccgaggaggagttcgtcgaaggtatttacaaggtggagattgataccaagtcgtattggaaggctttgggaatttcccctttccacgaacacgctgaggttgtcttcacggcaaatgactcgggccctcgtcgctacactatcgcggcgctcttgtctccctactcctatagtactatggcggttgtcactaacccgaaagag

SEQ ID NO: 7936 - DNA, 441 bp, Artificial Sequence
  derived and/or modified sequence
atggcatcgcacagattgcttctgctgtgccttgccggactcgtgtttgtgtccgaagcaggaccaaccgggactggcgagtccaagtgtcctctcatggttaaagttctggatgcagtacgtggtagtcctgcaataaacgttgcggtgcatgtgttccgaaaggcagccgatgacacgtgggaaccatttgcgagcggtaagacctcggaatcgggagagctccatggacttactactgaggaggaatttgtagaaggaatttacaaggtggaaatcgacactaaatcttattggaaagcactgggtatttcaccgttccatgagcacgcagaagtcgtctttacggctaatgactcgggccccagaaggtacactattgcggccttgctgtcaccctactcctactcgacgatggcagtcgtgaccaacccaaaggaa

SEQ ID NO: 7937 - DNA, 441 bp, Artificial Sequence
  derived and/or modified sequence
atggcctcccaccgcctgctgctgctctgcctggctggccttgtgttcgtgagcgaggcaggacccacgggcaccggggagagcaagtgcccactcatggtgaaggtgcttgacgccgtcagagggtctcccgccatcaatgttgcagtgcacgtgtttagaaaggcggcggacgatacctgggaaccattcgccagcggtaagacgagtgaatcgggcgaactccatggcttgaccaccgaggaggagttcgttgagggtatttataaggttgagatcgatacaaaaagctactggaaggccttagggatatcaccctttcatgagcacgccgaggtggtgttcactgccaacgactctggacccagacgttacaccattgccgcactgctgtcgccttattcctatagcacgatggctgtcgtgacgaatcctaaggaa

SEQ ID NO: 7938 - DNA, 441 bp, Artificial Sequence
  derived and/or modified sequence
atggctagtcatagactccttctcctttgtcttgcagggctcgtgttcgtttccgaagccgggcctacaggaactggagagtctaaatgcccattgatggtgaaagtcctcgatgctgtccgcggatcccccgcgataaacgtagctgtacatgtttttaggaaagcagccgatgatacttgggaaccgttcgcatctggaaaaacttctgaatcaggagaattacatggactgacaactgaagaagaattcgtggaagggatctataaagtagagatcgatacaaaaagttactggaaagccctggggatatcgcctttccatgaacacgctgaagtggtttttacagctaacgattcaggaccacgaagatacacaatcgctgctctactctcaccttattcttactctactatggcggtagtcacaaatcccaaagag

SEQ ID NO: 7939 - DNA, 441 bp, Artificial Sequence
  derived and/or modified sequence
atggcaagccacaggctcctcctgctgtgcctggccggcctggtctttgtctccgaagccgggcccaccggaacgggcgaaagcaaatgtccactgatggtgaaggtgctggatgccgttagaggatctccggcaatcaacgtggcggtccatgtgtttcggaaggccgcagacgatacttgggaaccttttgcttcggggaaaacgtctgagtcaggagaactccacggactcaccactgaagaagagttcgtggaaggaatctacaaggttgaaattgacaccaagtcctactggaaggcactcgggatttctcctttccatgagcatgccgaggtggtgttcactgcaaacgattcaggaccgcgcagatacactatagcagcgttgctgtcgccttactcctactccactatggccgtggtgaccaatccaaaggaa

SEQ ID NO: 7940 - DNA, 441 bp, Artificial Sequence
  derived and/or modified sequence
atggctagccaccgtctgcttctcctctgcctcgccggcctggtgtttgtctccgaggccggacctactggaactggggaaagcaaatgtcctctcatggtcaaagtcctcgacgctgtgcgtggtagccctgcaatcaacgtggcggtgcatgtgtttcgaaaggcagcagatgatacctgggagcccttcgcatccggtaagacttccgagagcggagaactgcatggccttaccacggaggaggaatttgtggaaggaatttacaaggtggaaattgataccaaatcctactggaaagcactgggcatatcaccctttcatgagcacgcagaagtcgttttcaccgccaacgattcgggtccgaggagatacactattgctgccctgcttagcccttactcctattctaccatggcagttgtgaccaacccaaaagag

SEQ ID NO: 7941 - DNA, 441 bp, Artificial Sequence
  derived and/or modified sequence
atggcttcccaccgcctactgctgctgtgcctcgcaggcctcgtatttgtgtccgaggcaggccccaccggtaccggcgagagcaagtgtcctctgatggtgaaggtcttggacgcagtgaggggaagtccagcaattaatgtggcggtccacgtgtttcgcaaagccgccgatgacacttgggagcctttcgcctcaggcaaaacctcagaatccggcgagcttcacggtttgacaacagaggaggaattcgtggaaggtatctataaagttgagatcgatacgaagtcatattggaaggcgctcggcatatccccttttcatgaacacgctgaggtcgtgttcacggcaaacgattccgggcctcggcggtacaccatcgccgcacttctgagcccatatagttacagtacgatggcggtagtcactaatccaaaagag

SEQ ID NO: 7942 - DNA, 441 bp, Artificial Sequence
  derived and/or modified sequence
atggcctcacaccgtctactgctgctatgtctggccggactcgtgtttgtgtcagaggcgggacctacaggcactggagagtccaaatgcccgctcatggtcaaggtcttggacgctgtccggggatcgcccgcaattaacgtggccgtccacgtctttagaaaggccgctgacgacacctgggagcctttcgcaagtgggaagactagcgaatctggggaactgcacggcctcacgactgaagaagagtttgtggaaggaatctataaggtggaaattgataccaagagctattggaaggctttgggcatctctccttttcatgaacatgctgaggtggtctttaccgccaacgattccggcccacgccggtataccattgcagccctgcttagcccttactcctatagtactatggctgtcgtgaccaatccaaaagag

SEQ ID NO: 7943 - DNA, 441 bp, Artificial Sequence
  derived and/or modified sequence
atggcgagccacagattgctgctgctctgtctcgctggtctggtgtttgtctcagaggccgggccgactggcaccggcgagagcaagtgcccgctcatggtgaaagtactggacgcggtccgcggctcgcctgcgatcaatgtcgcagtgcacgtgtttcggaaggcggccgacgacacctgggaacctttcgcttccggaaagactagcgagtcaggagaactgcatggtcttaccactgaagaggaattcgttgagggtatctacaaagtggaaatcgatacgaagtcgtactggaaggctctgggcataagccccttccatgaacacgcagaagttgtattcactgcaaacgattcagggccaaggcgctacacgatcgccgcgctgctctccccatattcttactccaccatggccgtggttaccaaccccaaggaa

SEQ ID NO: 7944 - DNA, 441 bp, Artificial Sequence
  derived and/or modified sequence
atggcgagccatagactgctcctcctgtgtcttgcggggctcgtgtttgtgtctgaagcagggccaactggaactggagaatcaaagtgccctctgatggtcaaggtgctggatgcggtgcgaggttcacccgccatcaacgtggccgtgcatgtgtttcgcaaggccgcagatgacacttgggagccttttgcttccggaaagacctcggagagtggagaactgcatggtctgactactgaagaggaatttgtggaaggtatttacaaggtggagattgatacgaagtcctactggaaagcacttggtatatcgcccttccacgaacatgcagaagtggtgtttaccgcgaatgactccggaccccggaggtacactatagcggcacttctcagcccatactcctattcgaccatggcagttgtcacgaaccctaaggag

SEQ ID NO: 7945 - DNA, 441 bp, Artificial Sequence
  derived and/or modified sequence
atggcatcgcatagactgcttcttctctgcctcgcaggcttggtgttcgtgtccgaggcgggtccaaccggcactggtgaatcgaagtgtcctctgatggtgaaggtgctcgacgccgtccggggaagcccagcgatcaacgttgcggtgcacgtgtttcgcaaggccgctgatgacacctgggaacccttcgcatcgggtaagacctctgagtccggagagctccacggtctgaccaccgaagaagaattcgtcgaaggaatctacaaggtggagattgatactaaatcatactggaaagcattgggaatttctccttttcatgaacatgccgaggtcgtgtttaccgccaacgattcgggccctagacggtacactattgcagcgttgctgagcccatactcttattcaacgatggccgtcgttacgaatccgaaggag

SEQ ID NO: 7946 - DNA, 441 bp, Artificial Sequence
  derived and/or modified sequence
atggccagtcaccgcctcctcctgttgtgcttggcagggctggtgtttgtaagcgaggcgggcccgacaggtaccggtgagagcaagtgccctctcatggtgaaagtgctggatgcagtacgagggtccccagcaatcaacgtggctgtgcatgtgtttaggaaggccgccgatgacacctgggagcccttcgcttcaggtaaaacgtctgaaagcggcgagctccatgggctgaccactgaggaagaatttgtagaaggcatatataaagtagaaatcgacacaaagtcctattggaaagcactgggcatctcccccttccatgaacacgcagaagtcgtgtttactgcaaatgattcgggtcctcgacgatatacaatcgccgcgctgctgtcgccctacagctattcaacaatggccgttgtgacgaaccccaaggaa

SEQ ID NO: 7947 - DNA, 441 bp, Artificial Sequence
  derived and/or modified sequence
atggcaagtcatcggctcctgctcctgtgcctcgccggactggtatttgtcagcgaagccgggcccacaggaaccggggagtccaagtgtcctctcatggtaaaggtcctagatgcggtgaggggatccccagccatcaacgtggccgtgcacgtgtttagaaaggctgctgacgacacctgggagcccttcgcttccggcaaaactagcgagagcggggagctgcacggtttgacgacagaggaggaatttgtggaagggatctacaaggtcgaaattgacacaaagtcctactggaaagccctggggattagcccatttcacgagcatgccgaggtggtgttcacagcaaatgacagtggccccagacgctacacaatcgctgcccttctgtccccatactcctactcgactatggccgttgtgaccaaccccaaagag

SEQ ID NO: 7948 - DNA, 441 bp, Artificial Sequence
  derived and/or modified sequence
atggcgtctcaccgtttgctactcctgtgccttgccgggctcgtatttgtttcagaggccggaccaaccgggacaggtgaatccaagtgccctctcatggtgaaagtcctggacgcagtcagagggtcacctgctattaacgtggctgtccacgtatttcgaaaagccgcagatgatacttgggaaccttttgcctccgggaagaccagcgagagcggagagttgcacgggctgactacagaagaagaattcgtggaagggatctacaaagttgagatcgacaccaagtcatattggaaggccctgggaatcagtccattccacgaacacgccgaggtagtgtttactgcaaacgactccggcccaagaagatacaccattgcagcccttctgtccccctactcttattctacaatggccgtcgtaacgaatcctaaggaa

SEQ ID NO: 7949 - DNA, 441 bp, Artificial Sequence
  derived and/or modified sequence
atggctagccaccgattactccttttgtgcctggccgggctagtgtttgtgtcagaagctgggcccacagggactggtgagtccaaatgccctttaatggtaaaagtcctagacgctgtacgaggtagccctgccatcaatgtcgccgtccacgtgttccgcaaagccgctgatgacacttgggagccgttcgcttccggcaagacatcagagagtggcgagctccacgggttgaccactgaagaggagtttgtggagggcatatacaaggttgagatcgacaccaaaagctattggaaagccttggggatatccccttttcatgagcacgccgaagtcgtgttcacagccaatgactcgggccctcgtcggtacactattgccgccctgttgtctccatatagttattctactatggcggtggtgaccaatccaaaggag

SEQ ID NO: 7950 - DNA, 441 bp, Artificial Sequence
  derived and/or modified sequence
atggcctcccacaggttgcttctcctgtgtctggcaggactcgttttcgtgtcagaagcggggcccaccggaactggagaatcaaagtgcccccttatggttaaagtccttgatgcagtgcgcggatcgccggccattaatgtggcagtgcatgtgtttagaaaggccgccgacgatacttgggagccgttcgcttccgggaaaacctcggaatccggcgaacttcatggtctgaccaccgaagaagaatttgtggagggaatctacaaagtcgaaatcgacactaaaagctactggaaggctcttggtatctcgccattccatgaacacgcagaagtggtgttcactgctaatgattcgggccctcggagatacaccatcgcagcgttgctttccccttactcgtacagcaccatggcagtcgtcacgaatcctaaggaa

SEQ ID NO: 7951 - DNA, 441 bp, Artificial Sequence
  derived and/or modified sequence
atggcatcccaccggctgttgctgctgtgcctggcgggccttgtctttgtcagcgaggccgggccgacaggcaccggcgagtcaaaatgtccgttgatggttaaggttctcgacgctgtgcgcggttcccctgccatcaacgtggccgttcacgttttccgcaaagcagcggacgatacatgggagccttttgctagtggcaagacctccgaatcgggcgaactgcatggactgaccactgaggaagagttcgtggagggaatatataaagttgaaattgatacaaaatcctactggaaggctctaggtatctcgccattccatgaacatgccgaggttgtgtttacggccaatgattctggccctagaagatacactattgccgccctgctgtctccatactcctactctactatggcagtagtgacaaatcccaaggag

SEQ ID NO: 7952 - DNA, 441 bp, Artificial Sequence
  derived and/or modified sequence
atggctagtcaccgtctgcttctgttgtgtttggccggcctcgtgttcgtgagtgaagccggaccgaccgggacgggggagtctaaatgtcccctgatggtgaaagtgttggatgcggtgcggggatctcctgctataaacgtggcagttcacgtcttccgaaaagcagcagatgatacctgggaacctttcgcttcaggcaaaacgtccgagagcggcgaactgcacggactaaccacggaggaggaattcgtcgaagggatctataaggtggagatcgacaccaaaagctactggaaggccctgggaatctccccattccatgaacacgccgaggtcgtcttcacagcaaacgactccggacctagacgatacacgattgccgccctcctgtctccctactcatattccactatggcggttgtgacaaatcccaaggag

SEQ ID NO: 7953 - DNA, 441 bp, Artificial Sequence
  derived and/or modified sequence
atggcttcccacagactcctcctgctgtgtctggccggtcttgtgtttgtgtcagaagctggcccaaccggcaccggcgagagcaaatgcccccttatggtgaaggtcctcgacgctgttcgcgggtcacctgccattaacgtggcggtccacgtgtttaggaaggccgcggacgacacctgggaaccctttgcaagcggcaaaactagcgaatcaggggaacttcatggactcaccaccgaagaggaattcgtcgaagggatctacaaggtggagattgacacaaagtcatattggaaagccctggggatctccccctttcacgagcacgcggaggtagtctttactgctaacgactctggaccgagacgatataccattgcagcactcctgtctccatattcttacagcacaatggccgtagtgacgaaccctaaggag

SEQ ID NO: 7954 - DNA, 441 bp, Artificial Sequence
  derived and/or modified sequence
atggcttcgcatcgccttctgctgctgtgtctggccgggcttgtgttcgtctcagaggccggaccgacggggactggcgaatccaagtgcccgctcatggtgaaagtgctggacgcagtgaggggatctccagccatcaacgtcgccgtgcatgtgttcagaaaggcagccgatgacacctgggaacccttcgcttcagggaaaacctcagagagcggagagctgcacggtctgaccaccgaggaagaatttgtggaaggaatctacaaggtggagattgatactaagtcttactggaaggcacttggtatcagcccgttccacgagcacgccgaagtggtctttactgcaaacgacagtggaccacggcgctacacgatcgcagcactgctctcgccctactcgtactccaccatggccgtggtcacgaatccgaaagaa

SEQ ID NO: 7955 - DNA, 441 bp, Artificial Sequence
  derived and/or modified sequence
atggcatctcatcgcttactccttctgtgtttagccgggctcgtattcgtatcagaagccggccccacgggaacaggcgaaagcaaatgtcctcttatggtcaaggttcttgacgccgtaagaggaagccccgctattaatgttgctgtgcacgtttttaggaaagcagccgatgacacttgggagcccttcgcgtctggcaaaacctctgagtcaggcgaactgcatggcctgacgaccgaagaggaattcgtcgaaggaatttacaaagtggagattgatacaaagagctattggaaggccctcggtattagtcctttccacgagcacgccgaggtggtatttactgccaacgatagcggacctcgccggtacactatcgcagcactcttaagcccgtatagctactcaacaatggctgtggtgactaatcctaaggaa

SEQ ID NO: 7956 - DNA, 441 bp, Artificial Sequence
  derived and/or modified sequence
atggccagccatcggttactactactctgcctggcaggtctcgtgttcgtttccgaggcaggaccgaccggcactggggagtccaagtgccctctcatggttaaggtgctagacgccgtaaggggctctcccgcaattaatgttgccgtacatgtcttccgaaaagcggccgatgacacctgggagcctttcgcctctggaaaaactagcgaatccggcgagctgcatggtctcacaactgaggaggagttcgtcgaggggatatataaagtggaaattgacactaaatcgtactggaaagctctcggcataagtccgtttcacgagcatgcggaagtagtgttcacagctaatgactccggcccgagaagatatacgatcgctgcgctgctgagcccgtatagttatagcacgatggccgtggtaactaatccgaaggaa

SEQ ID NO: 7957 - DNA, 441 bp, Artificial Sequence
  derived and/or modified sequence
atggcctctcaccgcttgctcctactgtgtctcgctggactggtttttgttagcgaagccggaccaaccggcaccggagaatcgaagtgcccactcatggttaaggtgctcgatgctgtcagaggttctcctgctataaacgtggctgtgcatgtgttccgcaaggcagcagacgatacttgggaacccttcgcatccggcaaaaccagcgagagcggggagctccacggtcttaccacagaagaggaattcgtggaggggatctataaagtggagatagatactaagtcttactggaaggcgctgggaatatcacccttccatgagcacgctgaagtcgtcttcactgccaacgactctggtcccaggagatataccattgcagctttattgtccccatatagctacagtaccatggctgtggttaccaacccgaaggag

SEQ ID NO: 7958 - DNA, 441 bp, Artificial Sequence
  derived and/or modified sequence
atggcatctcacaggctactgctcctgtgtttggccggactggtgttcgtgtccgaggccggaccaacaggaacaggagagagtaaatgtcccttaatggtaaaagtcttagacgccgttagaggatctcccgcgataaacgtggccgtgcacgtgtttcgcaaagccgcagatgatacttgggaaccttttgcctctggaaaaacatcggaatctggggaactgcatggactgactacagaagaagaatttgtagaagggatatacaaagtggaaatcgatacaaaaagttattggaaagctctcggaatctccccttttcacgaacatgcggaggtggtatttactgccaatgattcaggaccccgaaggtatacaatagccgcattgttatcaccttattcatattccacaatggcggtagttacaaatccaaaagag

SEQ ID NO: 7959 - DNA, 441 bp, Artificial Sequence
  derived and/or modified sequence
atggcatcgcatcgcctgcttctgctctgccttgcggggcttgtgtttgtgtctgaggccggaccaaccggcaccggagagtctaaatgccctctgatggtgaaggtccttgacgccgtcagaggcagccccgcaatcaatgtggcggtccacgtcttccggaaagcagccgatgatacatgggagcctttcgcctctgggaaaacgagcgagtccggggagctccatggcctcaccactgaagaagagttcgtcgagggcatttataaggttgagatcgacactaagagttattggaaagctctgggcattagcccctttcacgagcacgctgaggtcgtattcaccgcgaatgactcaggacctagaagatataccattgcggcattgttatccccatactcctattcaacgatggctgttgttaccaaccctaaagaa

SEQ ID NO: 7960 - DNA, 441 bp, Artificial Sequence
  derived and/or modified sequence
atggcaagccaccgtctattattgctgtgcttggccggcctggtgttcgtgtcagaagccggtcccacgggcacaggagagagcaagtgcccgctgatggttaaagtgttagacgccgtaaggggatcgcctgctattaacgtcgccgtccacgtcttccgcaaggctgcggatgatacctgggagccattcgcctcgggcaaaacatctgagagtggtgaactgcacggtctgaccactgaagaggaattcgttgaaggaatctacaaggtcgagattgataccaagagctattggaaagccctggggatttccccattccatgagcatgcggaggtagtattcacagcgaacgattccggaccgcgccgctacacgattgcggccctgctgagcccatacagctacagtaccatggccgtggttactaaccctaaggaa

SEQ ID NO: 7961 - DNA, 441 bp, Artificial Sequence
  derived and/or modified sequence
atggcctctcatagactgctgttgctgtgcctggctggcctggtgtttgtgtcagaagccggaccaactggcaccggcgagtccaaatgtcctctgatggtcaaggtgctggatgcagttcgcggatccccggctatcaacgttgccgttcatgtgtttagaaaagcagccgacgatacctgggagccttttgccagtggaaagacgtccgaatcgggagaactccacggcctcaccaccgaagaagagttcgttgaagggatctacaaggtcgaaattgatacaaagagctactggaaagccttgggtataagtcccttccacgagcacgccgaggtggtgttcaccgccaacgattccggtcccaggagatacactatcgctgcattgctgtctccttactcctactctacaatggcagtggtgactaatcccaaagag

SEQ ID NO: 7962 - DNA, 441 bp, Artificial Sequence
  derived and/or modified sequence
atggcgtcgcatcgactactactattatgtctagcgggtctagtatttgtatcggaagcgggtccgacgggtacgggtgaatcgaaatgtccgctaatggttaaagtattagatgcggtacgtggttcgccggcgataaatgttgcggtacatgtatttcgtaaagcggcggatgatacgtgggaaccgtttgcgtcgggtaaaacgtcggaatcgggtgaactacatggtttaacgacggaagaagaatttgtagaaggtatatataaagttgaaatagatacgaaatcgtattggaaagcgctaggtatatcgccgtttcatgaacatgcggaagtagtttttacggcgaatgattcgggtccgcgtcgttatacgatagcggcgctattatcgccgtattcgtattcgacgatggcggtagtaacgaatccgaaagaa

SEQ ID NO: 7963 - DNA, 441 bp, Artificial Sequence
  derived and/or modified sequence
atggcctctcaccgcctgcttttgctgtgcctggccggtctggtcttcgtctctgaggcaggccctaccggtaccggggaatctaagtgtccattgatggtgaaagtactcgacgcggtgcggggctcacccgcaattaatgtagccgtccacgtgttcagaaaggcggctgatgatacttgggaaccattcgcctcagggaagacatcggagtctggtgaattgcacggactgactacagaggaagagttcgttgagggcatatacaaagtcgagattgatacaaaaagctactggaaagcactgggaatcagcccctttcatgaacacgctgaagtagttttcacagctaatgatagcgggcctcggaggtacaccatcgcagcactgctgagcccatactcttattctactatggccgtcgtaaccaatcccaaagag

SEQ ID NO: 7964 - DNA, 441 bp, Artificial Sequence
  derived and/or modified sequence
atggcctcacatcggctcctgttgctgtgcctcgctggtctggtgtttgtgtctgaagccggcccaactggtaccggggagagcaagtgtccactcatggtgaaggtactggacgccgtcagggggtcaccagcaatcaatgtggcggtgcatgtcttcagaaaagccgcagacgatacctgggagcccttcgcatccgggaaaactagcgaatctggagagcttcatgggcttacaacagaggaggagtttgttgaaggcatttataaagtcgagatcgacacaaaatcttattggaaagctcttggcatcagcccctttcatgaacacgcagaggtcgtattcactgccaacgatagcgggccacggaggtacaccatcgccgccctgttgtccccctacagttattccacaatggccgttgttacgaacccaaaggaa

SEQ ID NO: 7965 - DNA, 441 bp, Artificial Sequence
  derived and/or modified sequence
atggcaagtcatcgtcttctgctcctgtgtctggcaggtttggtgtttgtatccgaagcagggccaaccgggaccggtgaatcaaagtgtccactgatggtcaaggtgctggatgctgtgcgcggctctcccgctatcaatgtcgccgtgcacgtgttccggaaggcggctgacgacacctgggaaccctttgcaagtgggaaaaccagtgagtcgggagagctccatggcctcaccactgaagaggagttcgtggagggaatctataaggtggagatagataccaaatcctattggaaagctctggggatctccccttttcacgagcacgccgaggtcgtgttcacagcaaacgatagtggacctaggaggtatactatagctgctctattaagtccctattcatattcaaccatggctgtcgtgaccaaccccaaagaa

SEQ ID NO: 7966 - DNA, 441 bp, Artificial Sequence
  derived and/or modified sequence
atggccagtcacagactgttactcctgtgcttagccggactggtgtttgtgtccgaggcaggccctacaggcaccggcgagagtaagtgccccctaatggttaaagttctcgatgctgtgaggggctcgcctgccatcaacgtggcagtgcacgtgtttaggaaagctgcagatgacacctgggagccctttgctagtggaaaaacttctgagagtggtgaactgcatggactgaccacagaagaggagttcgttgaaggtatctacaaagtggagatcgacaccaagagttactggaaggccctggggataagcccgttccatgagcacgcggaggtagtctttacagctaatgacagtggccctagaaggtacaccattgccgctctgctgtcgccatattcgtactcaacgatggctgtggtgacaaatccaaaggag

SEQ ID NO: 7967 - DNA, 441 bp, Artificial Sequence
  derived and/or modified sequence
atggcctcacatcgcctcctcctgctgtgcctggctggcctggtgttcgtgagcgaggctggaccaaccggtaccggtgagtccaaatgcccactgatggtcaaagtcttggacgccgttagaggcagtccagcgattaacgtcgcagtgcacgtcttcagaaaagccgcggacgatacatgggaacccttcgctagtggtaaaacatctgagtcaggagagttgcacggactcactactgaggaagaattcgttgagggaatctataaagtggagattgacaccaagagttactggaaggcactgggcatctcacccttccacgagcatgccgaagtagtgtttacggcaaacgactctggcccacgcaggtatacaattgcagcactcctctctccttactcttacagtacaatggctgtggtaactaaccctaaggag

SEQ ID NO: 7968 - DNA, 441 bp, Artificial Sequence
  derived and/or modified sequence
atggccagtcacaggctactcttattatgtcttgcagggcttgtttttgttagtgaagctggaccaacagggactggagaatctaaatgtccacttatggtaaaagtgctggatgccgtccgggggtcccccgcaataaacgtcgcggtgcatgtatttcggaaagccgcagatgatacatgggaaccatttgcctcaggaaagacttctgaaagtggagagctccacgggctcactacagaagaagaattcgtagaagggatctacaaagttgagatagacacaaagagttattggaaagccctaggaatctctcccttccacgaacatgccgaagtggtattcacagcaaatgactctggaccccgaagatatactatcgcagcactcctatccccctacagttactcaactatggccgtcgtgacaaaccctaaggag

SEQ ID NO: 7969 - DNA, 441 bp, Artificial Sequence
  derived and/or modified sequence
atggcatcccaccgactacttcttttatgcttggccggactggtgtttgtttccgaagctggtcccaccggtaccggggagtcgaaatgtcccctgatggtaaaagtgctggacgccgttagagggtcccctgccataaacgtcgcagtccacgtcttccggaaggcggcggacgacacgtgggaaccattcgcctcaggaaagaccagtgagtcaggtgagctgcatggcctaacaaccgaagaagagtttgttgagggaatctataaggtcgagatagataccaagtcctactggaaggccttgggtatttccccctttcatgagcatgccgaggtggttttcactgcgaatgattcagggcctagaagatacacaattgcagcgctactaagtccgtactcatatagcacgatggccgtagtgaccaaccccaaagaa

SEQ ID NO: 7970 - DNA, 441 bp, Artificial Sequence
  derived and/or modified sequence
atggcatcccatcgcctcctccttttgtgtcttgcaggtttggtgtttgtgtctgaggctgggcccaccggcaccggtgaaagcaagtgccccttgatggttaaagtcttggatgcagttcgtggctcacctgcaattaatgtcgcagtgcacgtgttcagaaaggccgcggatgatacgtgggaaccctttgcctcaggaaaaacttcggaaagtggcgagctgcacggtctgaccactgaagaggagtttgtggaaggcatttataaagtggagatagatacaaaaagttactggaaggcactgggaatctcccccttccacgaacacgccgaggtggtcttcactgccaatgattctggaccaagaaggtatacaatcgccgctctgttatccccttacagctattccaccatggctgttgtgaccaaccccaaagag

SEQ ID NO: 7971 - DNA, 441 bp, Artificial Sequence
  derived and/or modified sequence
atggcctcccaccgcttgctcctgctctgcctggctgggttggtgtttgtgtctgaggcaggtcctaccggcacaggggaaagcaaatgcccacttatggttaaggtgcttgatgcagtccgggggtctcctgccatcaatgtagccgtgcacgtgtttcggaaggctgctgatgatacctgggagcctttcgcttccggcaaaacctccgagagcggggaactgcacggcttgaccaccgaggaagagtttgttgagggcatttataaggtagagatagatacaaaatcctactggaaagcgttaggcatctcccctttccacgaacacgcggaggtagtatttacagctaacgattccggtcctagacggtataccattgccgctctgttatccccttactcttattcaaccatggctgtcgtcactaacccgaaggag

SEQ ID NO: 7972 - DNA, 441 bp, Artificial Sequence
  derived and/or modified sequence
atggctagccaccggctgttgttgctgtgtttagcagggcttgtgttcgtgagtgaggcaggtcctacaggcacgggtgaatccaagtgcccattgatggtaaaagttttagacgccgtgagggggtcccctgccattaatgtcgcagtgcatgtctttcgaaaagctgcagacgacacttgggagccatttgcatccggaaagacgagcgaatctggcgagcttcacggcttgacaactgaagaagagtttgtagaggggatttacaaggtggagatcgacactaaatcttactggaaagccctcggtatcagcccattccacgagcacgcagaggttgtgtttaccgcaaacgacagtggccctcggagatacaccatcgccgcactcctgagcccttactcctatagcaccatggccgtcgtgaccaaccctaaagaa

SEQ ID NO: 7973 - DNA, 441 bp, Artificial Sequence
  derived and/or modified sequence
atggctagccaccgtctgctacttctgtgcctcgccggtctggtgttcgtatctgaggctggccccaccggcaccggggagagtaagtgcccactcatggtcaaagtacttgacgccgtgcgaggctctccggctattaacgtcgcagtccacgtgttcaggaaggccgctgatgacacctgggaaccttttgcatctggcaagacctctgaatcaggggagttgcatgggttgacaaccgaagaagaatttgtggagggcatttacaaggtagagattgatactaagtcatactggaaggccctcggaatcagcccttttcatgaacacgccgaggtcgtgttcaccgcaaacgattctgggcctagaaggtacaccatcgctgctctcctgtcgccttactcatatagcaccatggccgtcgtcacaaaccccaaagag

SEQ ID NO: 7974 - DNA, 441 bp, Artificial Sequence
  derived and/or modified sequence
atggcctcacatcggctacttttgctctgtctcgccgggcttgtattcgtgagtgaagctggacccaccggaaccggtgagtcaaagtgcccacttatggtgaaggtgctggacgccgtcagaggctcccccgcaattaatgtggcagtccatgtgtttcggaaggctgccgatgatacttgggaaccatttgccagcgggaaaacatccgaatcaggcgaactccacgggctgacaaccgaggaagagtttgtagagggcatttataaggtggagatcgacactaaatcctattggaaagctctgggcatttcacccttccacgagcacgccgaagtggtatttaccgccaatgactctggaccccgtaggtatacgatcgccgcgctcctgtcaccctactcttacagcaccatggccgtggtaacaaatcctaaagag

SEQ ID NO: 7975 - DNA, 441 bp, Artificial Sequence
  derived and/or modified sequence
atggctagccacagactgcttctgctgtgcctggcggggttagtctttgtgtccgaggctggacccaccggcacgggcgagtcgaagtgtcccttaatggtgaaggtgctggacgctgtccggggctctcccgccatcaatgtggcggtgcatgtattcaggaaggccgctgatgacacctgggagcccttcgcaagtggaaaaacctctgaatcaggcgaactgcacggcctgacaaccgaggaggaatttgttgaggggatctataaggtggaaatcgataccaagtcatactggaaagctcttggcatctccccctttcacgaacacgcagaggttgtgttcacggctaacgactcagggcccagaaggtacaccattgccgccctgctcagcccgtatagctactctaccatggcagtcgtgacgaatcccaaggag

SEQ ID NO: 7976 - DNA, 441 bp, Artificial Sequence
  derived and/or modified sequence
atggcctctcacaggctcctcctgctgtgcttggccggactggtcttcgtgtccgaagctggtcctactggtaccggcgagtctaagtgccccctgatggtcaaggtcctcgacgccgttagaggcagtccagccattaatgtggccgtccatgtgttcaggaaggccgcagacgatacttgggagcccttcgcctccggtaagacatccgagtcaggtgaattgcatggtctcacaaccgaagaggaatttgtggaaggcatttataaggttgaaatcgacacaaagtcctattggaaagccctgggaatttctccttttcacgaacacgccgaggtggtgttcactgccaacgacagtggaccccgccgttacactatcgccgcccttctgtctccctactcctactccacaatggcagtcgtgacaaatccaaaggag

SEQ ID NO: 7977 - DNA, 441 bp, Artificial Sequence
  derived and/or modified sequence
atggcttcccacaggctgctgttgctgtgcctcgccggcctcgtcttcgtttctgaagccggtccaacagggacaggagagagcaagtgccctttgatggtgaaagtgctcgacgctgttaggggttcacctgctattaacgtcgccgtgcacgtttttcgcaaggccgccgacgatacttgggagccattcgctagcggcaagacatctgagagcggggaactacacggcctaactacagaggaggaattcgtggaggggatctataaggtggagattgacaccaaatcctattggaaagccctgggaatttccccattccacgaacacgcagaggttgtgttcacggcgaacgattccgggcccaggcggtacaccattgccgccctgctgagtccgtattcttattccaccatggcagttgtgacaaatcccaaagaa

SEQ ID NO: 7978 - DNA, 441 bp, Artificial Sequence
  derived and/or modified sequence
atggcttcacaccgactattgcttttgtgccttgcaggtcttgtattcgtgagtgaggcaggaccgacgggaacaggagaatccaaatgcccgttaatggtgaaagtattggatgctgttcgaggtagccctgctatcaacgtcgctgtccatgttttcagaaaagccgctgatgatacttgggagccgtttgcgagtggcaagacgtcagagtccggagaattacatggtttgacaacggaagaagaattcgtggaaggaatatacaaagtcgagattgatacgaagtcgtattggaaggccctaggaatcagtccatttcacgaacacgcagaagtagtgttcactgctaatgattctggaccacgaagatacacaatcgctgctttattatcaccatactcttactctacaatggcggtcgttactaacccaaaagag

SEQ ID NO: 7979 - DNA, 441 bp, Artificial Sequence
  derived and/or modified sequence
atggcctcgcatagactactactattatgcctcgccggtctggtttttgtgagtgaggccggacccaccggtacaggcgagtccaagtgccctctaatggtcaaggtgctggacgccgttcgaggctcacctgctataaatgtggcggtacacgtcttccgcaaagctgcagacgatacttgggagccttttgcaagtggaaagaccagcgagagcggcgagctccacgggctgacaacagaggaagagttcgtggagggcatctataaggtggaaatcgataccaaatcttattggaaggccctcggaatcagccccttccacgaacatgcagaagttgtgttcactgccaacgattccggaccgcgcagatacacaatagccgctctgctctctccttatagttactccaccatggctgtggtgacaaatcctaaggaa

SEQ ID NO: 7980 - DNA, 441 bp, Artificial Sequence
  derived and/or modified sequence
atggcctcacaccgcttgcttcttttgtgcctcgctgggctcgtctttgtttcggaagccggcccaaccgggacaggagagtcgaagtgtcctttgatggtcaaggttctcgacgccgtccgtgggtcccctgccattaacgtggcggtacacgtgtttcgtaaagctgctgatgatacatgggagcccttcgcatcgggcaagacctcggagtcaggagaattacatggactcaccacggaggaagaattcgtggaggggatctacaaagtggagattgatacaaaatcgtactggaaggcgctcggaatcagccccttccacgagcatgctgaggtggtatttacagccaatgactccggccctcgtcggtatacgatagctgcgctcctatctccttacagctattcgaccatggccgtcgtcactaaccccaaagag

SEQ ID NO: 7981 - DNA, 441 bp, Artificial Sequence
  derived and/or modified sequence
atggcttctcataggcttctcctcttatgtttggccggactggtttttgtgagtgaagcaggtcccacagggacaggcgagagtaagtgtcctctgatggtgaaggtgctggatgctgtgcgtggatctcccgcaatcaatgtcgccgtccatgtgttcagaaaagctgcagatgatacctgggaacctttcgcgtctgggaagacgagtgaatcaggggagctgcacggattgacaaccgaagaagaatttgtagaaggtatatacaaggtagaaatcgataccaagagttactggaaagcattaggaatttcccctttccacgaacacgcagaagttgtcttcaccgccaacgactccgggccacggagatacacaattgccgcactcctgagcccttatagttactctactatggccgtggtgactaacccgaaggag

SEQ ID NO: 7982 - DNA, 441 bp, Artificial Sequence
  derived and/or modified sequence
atggcctctcataggctactgttgctctgcctggccggcctggtcttcgtatctgaggctggccccactgggaccggggagagcaaatgtcccctgatggtgaaagtgctcgacgcggtaagaggatctccagcaatcaacgtggctgtgcacgtgtttagaaaagccgccgatgacacctgggagccgtttgcatctggaaagaccagcgagagcggggaattacacggactgactacggaggaggagtttgtagagggcatttacaaggtcgagatcgacaccaaaagctattggaaggctctgggaatctctccgtttcacgagcacgcagaagttgtgtttaccgcgaatgattcgggccctaggaggtataccatcgccgcgcttctttcaccatatagctactcaaccatggctgtggtcacaaaccccaaagag

SEQ ID NO: 7983 - DNA, 441 bp, Artificial Sequence
  derived and/or modified sequence
atggcctcacaccggctgttgttgctgtgcctggccggtctggtcttcgtgtcggaggcgggcccgaccggcacaggcgaaagcaaatgcccattgatggtgaaagtgctggatgcagtgcggggctccccagctatcaacgtcgccgtgcatgtctttcgcaaggcagcggatgacacctgggaaccgtttgcttccggcaaaaccagcgagagcggtgagctgcacggcctgaccacggaggaggaatttgtcgaaggtatctacaaggtagaaatagacactaaaagctattggaaggctctcgggatcagcccgttccacgagcacgcggaggtggttttcacggctaatgatagcggccctcgtcgatacaccatcgcggcactccttagcccgtatagctactccaccatggcagtggtcacgaaccctaaagaa

SEQ ID NO: 7984 - DNA, 441 bp, Artificial Sequence
  derived and/or modified sequence
atggcgtcccataggctgcttctcctgtgccttgccggcctggtgttcgtcagcgaagccgggcctacgggcaccggcgagagcaagtgcccactgatggttaaggtactggatgccgtacggggctcacctgctatcaatgttgccgtgcatgtgttcaggaaagctgccgacgacacttgggagcctttcgcctctgggaaaacatccgagtcgggagagctccatggtctcaccacggaggaggagttcgtggagggcatatataaggttgaaatcgatacaaaaagctactggaaagccttgggtatcagccccttccacgaacacgcagaagtcgtcttcaccgccaatgattctggcccacgccgatacaccattgccgccttgctgagtccatactcgtattcgactatggctgtcgttacaaaccctaaggag

SEQ ID NO: 7985 - DNA, 441 bp, Artificial Sequence
  derived and/or modified sequence
atggcctctcatcgactgcttctcctgtgtctcgctggcctggtgtttgtttcagaggccggacccaccgggacaggcgagtccaaatgtcccctgatggtgaaggtgctcgatgctgtgagggggagccccgcaatcaatgtggccgtgcacgttttccggaaggccgccgacgatacctgggagcctttcgcatccgggaagaccagcgagagcggagaactgcacggcctcaccaccgaggaggagtttgtggaaggcatttacaaggtcgagatcgacacaaagagctattggaaagctctggggatttctcccttccatgaacacgcggaggtcgtgttcacagcaaatgactcaggaccccggcgatatacgatcgccgccctgctgagtccatattcctactcaactatggccgttgtcactaatcctaaggag

SEQ ID NO: 7986 - DNA, 441 bp, Artificial Sequence
  derived and/or modified sequence
atggcctcacataggcttctgctcctctgtctggcgggactcgtgttcgtgagtgaagcaggaccaacaggcaccggtgagtccaaatgtccacttatggttaaggtgctcgacgccgtgagagggtcccccgcaattaacgtggccgtgcatgtcttccgaaaggccgccgatgatacttgggagcccttcgcgagcgggaagacgtccgaaagcggggagctgcacggactgaccactgaagaggaattcgtggagggaatctataaggttgagatcgacacgaaaagttattggaaagcactgggtatctcaccattccacgaacatgccgaagttgtgttcacagctaacgactccgggccaaggcgctacaccatcgcagccctgctctctccttacagttatagcactatggctgtggttaccaatccgaaggag

SEQ ID NO: 7987 - DNA, 441 bp, Artificial Sequence
  derived and/or modified sequence
atggcttcacatcgattacttttactctgcttggcaggcctggtcttcgtgagtgaggcgggaccgacgggcactggtgaatcaaaatgtcctctgatggtcaaggttttagatgcagttcgtggttctcctgccattaacgtggcagtgcacgtttttcgtaaggcggcagatgatacatgggagccgtttgcatcgggaaaaacaagcgaatcaggggaattacacggtctgacaacggaggaggaatttgtggaaggtatctataaggtggaaattgatacaaaatcttattggaaagctcttggaatatcaccgtttcatgaacatgcagaagtggtttttacagcgaatgattctggcccgcgccgctacacgatcgcagcactgctctccccctattcgtactctacgatggccgttgtgacgaacccgaaggag

SEQ ID NO: 7988 - DNA, 441 bp, Artificial Sequence
  derived and/or modified sequence
atggcttctcaccgcctgcttctgctatgtctcgcaggtcttgtcttcgtgtccgaagccggtcccacgggtaccggcgagagcaagtgccctctgatggtgaaggtccttgacgccgtccgcggttcccccgccattaatgtggcagtgcatgtcttcagaaaggctgccgacgacacatgggagccctttgctagcggcaagacctctgagtccggcgagcttcatggtctgacgactgaagaagaattcgtcgagggtatttacaaggtggagatcgacactaagtcctactggaaggctttaggtatcagccctttccacgagcacgcggaggttgtcttcaccgctaacgacagcggcccccgtaggtataccatcgcggcgctcttgtcgccctactcctacagtacaatggctgtcgtcaccaatcctaaggaa

SEQ ID NO: 7989 - DNA, 441 bp, Artificial Sequence
  derived and/or modified sequence
atggcttctcatcgtctgttacttctttgtcttgcgggattggtttttgtttccgaggctggtcccaccggaacgggggagtccaagtgtcctttaatggttaaagtgttagatgcggtaaggggttctcctgcaattaatgtggcggttcacgtattcagaaaggctgctgatgatacctgggagccatttgctagtgggaaaacatctgagtctggtgaacttcatggtctcaccaccgaggaggagtttgtggaaggaatatataaggtcgaaatagatactaaaagttattggaaggcattgggaatctccccttttcatgaacatgcagaggtcgtgttcaccgctaacgattcaggcccacgcagatatacgattgctgccttgcttagcccatattcctatagcactatggcggtagttacaaaccctaaggaa

SEQ ID NO: 7990 - DNA, 441 bp, Artificial Sequence
  derived and/or modified sequence
atggcaagccatagactgcttctgctatgcttagccggcctcgtgtttgtttctgaggccgggccaacaggaacaggtgagtccaagtgtccactcatggtaaaggtgcttgacgctgtgcgcggttcccctgcaataaatgttgctgtgcacgtgttcaggaaggctgcagacgacacttgggagccgttcgcttctgggaagactagtgagagtggcgaactacacggtctgactacagaagaggagtttgtagagggaatctataaggtggagatcgatacaaagtcctattggaaggccctggggatatctccgtttcatgagcacgccgaggtagtcttcaccgcaaatgacagcgggccgagacgatataccattgctgccttactgtccccctattcttactccacaatggccgtggtgactaaccccaaagag

SEQ ID NO: 7991 - DNA, 441 bp, Artificial Sequence
  derived and/or modified sequence
atggcaagccacaggctgctcttgctttgcttagccgggctagtgttcgtctctgaggccggcccgactggcaccggggaatccaagtgtcctctcatggtgaaagtactcgatgccgtccggggatcgcccgctattaacgttgcagttcatgtctttaggaaggccgccgacgatacgtgggagccctttgcgagtggcaagactagcgagtcgggagaattgcacggattaacaaccgaggaggaattcgtggagggaatttataaggtagagattgacaccaagtcttattggaaagcccttggtatctcccccttccacgaacatgccgaggtagtgttcaccgccaacgattcaggacctaggcgctacacgattgccgcgctgctgagtccatacagctattccaccatggccgttgttaccaatcctaaagaa

SEQ ID NO: 7992 - DNA, 441 bp, Artificial Sequence
  derived and/or modified sequence
atggcctcccaccggctgttgcttctgtgcctcgcaggtctggtctttgtgtccgaagctggcccgaccggcacaggagaaagcaaatgccccctgatggtgaaagtgctggacgccgtcaggggctcacccgcaatcaacgtggccgtgcatgtgtttcgaaaagctgcagacgacacatgggagccattcgccagtggcaaaacctccgagtcaggagaactccacggcctaaccacagaggaggagtttgtggagggcatttataaggtggagattgacaccaagagctactggaaagccctgggtatcagcccatttcatgaacatgccgaggtagtgttcaccgcgaacgactcaggaccaaggaggtacacgatcgctgctctgctgagcccatacagttactccactatggccgttgtgaccaatcccaaagaa

SEQ ID NO: 7993 - DNA, 441 bp, Artificial Sequence
  derived and/or modified sequence
atggcatctcatagattacttcttctttgtttggctggattagtatttgtatcagaagctggtccaactggaactggagaaagtaagtgtccacttatggttaaagttcttgatgctgttagaggtagtcctgcaattaacgttgcagtacatgtttttcgtaaggctgctgatgatacttgggaaccattcgcatctggtaaaacttctgaatcaggagaacttcatggtttaactacagaagaagagtttgttgaagggatttataaagtagaaattgatacaaaatcatattggaaggcacttggaatatcaccattccatgaacatgcagaagttgtttttacagctaatgattcaggtccaaggcgatatacaattgcagctttattatctccatattcttattcaacaatggcagttgtaacaaatccaaaagaa

SEQ ID NO: 7994 - DNA, 441 bp, Artificial Sequence
  derived and/or modified sequence
atggcatcacatagattactgctgctatgtctggccgggctagtcttcgtaagtgaggctggtcctacaggcaccggtgagagtaagtgccctctgatggtcaaagtgctggatgctgtccgcggctccccagctattaatgtcgctgttcacgtttttaggaaagccgctgacgatacatgggaaccctttgcttctgggaagaccagcgaatctggcgagctgcacggcttgaccaccgaggaggagtttgtggagggcatctataaggtcgagatcgacacaaaaagctattggaaggcactgggcataagcccctttcacgaacatgctgaagtggtgttcacagcaaacgacagcggcccaagacgatacactattgccgctctgctgagcccttatagttacagcaccatggccgttgtgacaaaccccaaggaa

SEQ ID NO: 7995 - DNA, 441 bp, Artificial Sequence
  derived and/or modified sequence
atggcttcccacagactgctcctactgtgtctggcagggctggtcttcgtcagtgaagctggcccgactggtacaggcgaatctaagtgtcctctcatggtgaaggtgcttgacgccgtgagaggaagtccagccatcaacgtggccgtgcatgtgtttaggaaagccgccgatgacacttgggagccgtttgcctccggaaagacatctgaatctggcgagttgcacgggttgaccacggaagaagaatttgtggaaggaatctacaaagtggagatcgatactaagtcctactggaaggcccttgggatcagcccatttcatgagcatgctgaggtggtgttcacagcaaatgactccggtccaaggagatatactatcgccgcccttttgtctccctactcatattctaccatggcagtagtcaccaaccccaaagag

SEQ ID NO: 7996 - DNA, 441 bp, Artificial Sequence
  derived and/or modified sequence
atggcctcacatagactactattactgtgcctggccggactagttttcgtgagcgaggccggccctaccggaaccggagaatcaaaatgccccttgatggtcaaggtcttagacgccgtccgaggttctccagccattaacgtggctgtgcacgttttccgcaaggcggccgacgacacctgggagcccttcgccagtggaaagacctccgaaagtggagagctgcacgggctcacaactgaagaagagtttgtggaaggtatctacaaggtggagatcgatacaaaaagctattggaaagcactggggatctccccatttcatgagcacgctgaggtcgtgttcactgcaaatgattccgggcctcgacggtataccatcgctgccctgctgagtccctacagttattctaccatggccgtggtaaccaatcctaaggaa

SEQ ID NO: 7997 - DNA, 441 bp, Artificial Sequence
  derived and/or modified sequence
atggcaagtcatcgcttgctcctgctatgtctggccgggctggtcttcgtgtctgaagccgggcctacaggaacaggcgagtctaaatgccccctgatggtgaaggtactggatgctgtgaggggcagccccgctatcaatgtcgccgtccacgtattccggaaagcagccgatgacacttgggagccctttgcctccggcaaaacctccgagtccggcgagttgcatggtttaacgacagaggaggagttcgtggaaggcatttataaggtggagatcgatacgaagtcatactggaaggctttgggcatcagcccgttccatgagcatgccgaggtggttttcacagccaacgattccgggccaagacgatacaccatcgcagctctgctgtccccctacagttattccactatggccgtggtgacaaatcccaaggaa

SEQ ID NO: 7998 - DNA, 441 bp, Artificial Sequence
  derived and/or modified sequence
atggcgtcccacagactactccttctctgcctggccggcctggtgtttgtgagtgaggccggccccacaggtacaggggagagtaagtgccctcttatggtaaaagttctggatgcggtgcgtggcagccctgcgatcaatgtggccgtgcacgtatttcgcaaagccgcagatgatacctgggagccatttgctagcggcaagacatccgagagtggcgaattgcacgggcttaccaccgaggaagagttcgtggaggggatctataaggtcgaaatcgacactaagagctattggaaagcccttgggatcagccctttccacgaacacgcagaggtagtcttcacagctaatgatagcggcccgaggcgatacaccatcgccgcgctgctttctccgtattcttatagtacaatggcggtggtgacaaatcccaaggag

SEQ ID NO: 7999 - DNA, 441 bp, Artificial Sequence
  derived and/or modified sequence
atggcctcgcacagactcctgcttctctgcctcgcaggacttgtcttcgtgtctgaggccggccccactggaaccggagagtcaaagtgcccactgatggtgaaggtgttggatgcagtccgtggcagcccagctattaacgtggcagtccacgtgttcaggaaggccgcagacgacacttgggagcctttcgcatctggaaaaacgtctgagagcggagaactgcatggtctgaccaccgaagaggagtttgtcgaaggaatttataaggtagagatcgacacaaagagttattggaaggcactggggatctccccattccatgaacacgctgaggtggtgttcaccgctaacgactctggtcccaggcggtataccattgccgccctgctgagcccttattcctacagcaccatggccgtggtgacgaaccccaaggag

SEQ ID NO: 8000 - DNA, 441 bp, Artificial Sequence
  derived and/or modified sequence
atggcctcacacaggctacttcttttgtgtttggctggacttgtttttgtgagcgaggcgggcccaactggtaccggcgagtccaagtgcccgctcatggttaaggtgttagatgctgttagggggtctccagcaatcaatgttgccgtgcatgtcttcagaaaggcagccgatgacacttgggagccatttgcctctggaaaaactagtgagtctggggagctgcacgggctaaccactgaggaggagtttgtcgagggcatatataaggttgaaatcgacacgaagagctattggaaagcccttggaatcagtccctttcatgagcacgcagaggtcgtgtttacagctaatgatagtggccctcgcagatatactattgctgctcttctgtctccttactcctacagtacaatggcggtggttacgaacccgaaggag

SEQ ID NO: 8001 - DNA, 441 bp, Artificial Sequence
  derived and/or modified sequence
atggcctcacatagattgttgctgctatgtttagcagggctggtcttcgtatcagaggcagggccgaccggaacgggagaaagcaaatgtccactgatggttaaagtgctggatgccgtgcgcggttctccagccataaatgtcgccgtccatgtctttcggaaagcagccgatgacacctgggagccatttgcctccggtaaaactagcgagtccggagagctccacggtctgacaacagaagaggagttcgtagagggaatttacaaagtcgagatcgacacaaaaagctattggaaggctctcggcatctcccccttccacgaacacgcagaggtagtctttactgccaacgattccggtcctaggaggtataccatcgcagctctattgtctccttattcctatagtactatggctgtggtcactaaccccaaagaa

SEQ ID NO: 8002 - DNA, 441 bp, Artificial Sequence
  derived and/or modified sequence
atggcatcacaccgattactgttgctctgcctggccggactcgtgtttgtaagtgaagcaggccctaccggtactggcgaaagcaagtgtcctcttatggtgaaggtactggacgctgttagaggcagcccggctatcaacgtggcggtgcatgtgtttcgcaaggcggccgacgatacgtgggaaccatttgcttcaggcaagaccagcgagtctggagaactacatggcctgaccacggaggaggagtttgtggagggaatctacaaagtggaaattgacacaaagtcatattggaaggctctagggatttctcctttccacgagcatgcagaggtcgtgttcaccgcaaatgattccggtccaaggcgctacacgattgcggcacttctgtctccgtattcctactcgactatggcggtggtaacaaaccctaaagag

SEQ ID NO: 8003 - DNA, 441 bp, Artificial Sequence
  derived and/or modified sequence
atggcatcacacaggctgcttttgttatgtctagctgggctcgtcttcgtaagtgaagcaggcccaactgggacgggcgagtccaagtgccccttgatggtgaaggtcctcgacgcagtgcgaggaagtccagcgatcaacgtagcagtgcatgtgtttcgcaaagcagcggacgacacatgggaacccttcgctagtggaaaaacctccgagtcaggcgagctgcacgggctgacaaccgaggaggaatttgttgaggggatctataaggtcgaaatcgataccaaatcctattggaaggccttgggaattagcccattccatgaacacgccgaagtggtgtttaccgcaaacgactctggtcctcggcgctacacgatcgctgctcttctgtcaccgtattcatactcaactatggcagtggtaactaaccccaaggag

SEQ ID NO: 8004 - DNA, 441 bp, Artificial Sequence
  derived and/or modified sequence
atggcctcgcacaggctgctgctgctttgtctggcagggctcgtttttgtcagcgaagccggaccaactggcaccggagaatcgaagtgcccgctgatggtgaaagtcctggatgccgtgcggggctcgccggccattaacgtggcggtgcatgtgttcagaaaggcagcagacgacacctgggagccgttcgctagcggaaagactagcgaatcaggggagctccacggcttgacgaccgaggaggaattcgtcgaaggtatctacaaggtcgagatcgataccaagtcttactggaaggcgctgggaatctccccctttcacgagcatgctgaagtggtgttcactgcgaatgactccggacctcgccgctacaccatcgctgccctcctctcaccttattcctactcgactatggccgtggtgactaacccaaaagaa

SEQ ID NO: 8005 - DNA, 441 bp, Artificial Sequence
  derived and/or modified sequence
atggcttcccacagactactactgctttgtttggctggccttgttttcgtgtcagaagcaggccccacagggactggcgagtccaagtgtcctcttatggtgaaggtgcttgatgcggtaagggggagcccagcaataaacgttgccgtgcatgtgtttcgcaaggctgccgacgacacctgggaaccctttgcctccggcaaaacatctgaatcaggtgagttacacgggctcacaacagaagaggagttcgtcgagggaatctataaagtcgagattgatacgaaaagttattggaaagccttaggtataagtccgttccatgagcacgcagaggtggtcttcactgcaaatgactcaggcccccgccgatatacaattgccgcgcttttgtccccctacagttacagtactatggctgtcgtgactaatccgaaggag

SEQ ID NO: 8006 - DNA, 444 bp, Artificial Sequence
  derived and/or modified sequence
atggccagccacagactgctgctgctgtgcctggccggcctggtgttcgtgagcgaggccggccccaccggcaccggcgagagcaagtgccccctgatggtgaaggtgctggacgccgtgagaggcagccccgccatcaacgtggccgtgcacgtgttcagaaaggccgccgacgacacctgggagcccttcgccagcggcaagaccagcgagagcggcgagctgcacggcctgaccaccgaggaggagttcgtggagggcatctacaaggtggagatcgacaccaagagctactggaaggccctgggcatcagccccttccacgagcacgccgaggtggtgttcaccgccaacgacagcggccccagaagatacaccatcgccgccctgctgagcccctacagctacagcaccaccgccgtggtgaccaaccccaaggagtag

SEQ ID NO: 8007 - DNA, 555 bp, Artificial Sequence
  derived and/or modified sequence
atggccagccacagactgctgctgctgtgcctggccggcctggtgttcgtgagcgaggccggccccaccggcaccggcgagagcaagtgccccctgatggtgaaggtgctggacgccgtgagaggcagccccgccatcaacgtggccgtgcacgtgttcagaaaggccgccgacgacacctgggagcccttcgccagcggcaagaccagcgagagcggcgagctgcacggcctgaccaccgaggaggagttcgtggagggcatctacaaggtggagatcgacaccaagagctactggaaggccctgggcatcagccccttccacgagcacgccgaggtgagcatccagaccttcgaggccttccaggagatcctgtacaagaagaagttcaccaccctgtggcactggaccagcggcggccagagcttcttcagagccctggtggaggtggtgttcaccgccaacgacagcggccccagaagatacaccatcgccgccctgctgagcccctacagctacagcaccaccgccgtggtgaccaaccccaaggagtag

SEQ ID NO: 8008 - DNA, 420 bp, Artificial Sequence
  derived and/or modified sequence
atggccagccacagactgctgctgctgtgcctggccggcctggtgttcgtgagcgaggccggccccaccggcaccggcgagagcaagtgccccctgatggtgaaggtgctggacgccgtgagaggcagccccgccatcaacgtggccgtgcacgtgttcagaaaggccgccgacgacacctgggagcccttcgccagcggcaagaccagcgagagcggcgagctgcacggcctgaccaccgaggaggagttcgtggagggcatctacaaggtggagatcgacaccaagagctactggaaggccctgggcatcagccccttccacgagcacgccgaggtggtgttcaccgccaacgacagcggccccagaagatactacagctacagcaccaccgccgtggtgaccaaccccaaggagtag

SEQ ID NO: 8009 - DNA, 444 bp, Artificial Sequence
  derived and/or modified sequence
atggccagtcataggcttctgctgttgtgtctggccgggctggtgtttgtttctgaggctgggcctacaggaactggggagagtaagtgcccattgatggtgaaagtgttggatgctgtgcgcggctcccccgccatcaatgtggctgtccatgttttccgcaaggccgccgatgacacgtgggagccatttgcttccggcaaaacttcagagagtggcgagctgcacgggctcactactgaggaagaattcgtcgagggaatttataaagtggaaatcgacactaagtcgtattggaaagccttaggcatttccccattccacgagcatgcagaagtcgttttcaccgccaatgactccggccccaggcgctacacaatagcggcattattatccccgtactcgtacagcaccactgccgtggtgaccaaccctaaggagtag

SEQ ID NO: 8010 - DNA, 555 bp, Artificial Sequence
  derived and/or modified sequence
atggcgagccataggctactgctgctttgtctggcgggactggtcttcgtttcggaagccgggccaactggtaccggcgagtccaagtgtcctctgatggtaaaagtgctagatgcggtcaggggctctcccgctattaatgtggctgtgcatgttttccggaaagccgcagatgacacctgggagcccttcgccagcgggaagacctcggaatccggggagctccatggtctaacaaccgaagaggagttcgtggaggggatctataaagtggaaatcgatactaaatcttattggaaagctctaggaattagcccgttccacgaacacgcagaagtgtcaatccagacattcgaggcttttcaggaaatcctgtacaagaagaaatttaccacactgtggcattggaccagcggcggccagtcattcttcagggctcttgtggaagtggttttcacggcgaatgactccggtccccgtagatatacaattgcggcgcttcttagtccctatagctatagcaccactgctgtggttaccaatcctaaggagtag

SEQ ID NO: 8011 - DNA, 420 bp, Artificial Sequence
  derived and/or modified sequence
atggcttcccaccggttgcttctgttgtgcctcgctggactggtatttgtgagtgaggctggtcctactgggacaggcgaaagtaaatgtcctctgatggttaaggttctcgatgccgtgcgtggctcgcccgcaatcaatgtggctgtgcatgtatttaggaaggctgctgacgatacatgggagccgtttgccagcggcaagacttctgagtcaggggaactgcacgggttaactacagaagaggaattcgtagaaggaatctacaaagtcgagatcgacaccaaatcctattggaaggctttgggcatctctccgtttcacgagcatgcggaggtggtgttcaccgccaatgatagcggaccacgtcggtactacagttactccaccaccgcagtggtgacgaacccaaaggaatag

SEQ ID NO: 8012 - DNA, 444 bp, Artificial Sequence
  derived and/or modified sequence
atggccagccaccggctgctgctgctgtgcctggccggcctggtgtttgtgtctgaggccggccccactggaactggagagagcaaatgtcccctgatggtgaaggtgctggatgctgtgcggggcagccctgccatcaacgtggccgtgcacgtgttcaggaaggctgctgatgacacctgggagccctttgccagcggcaagaccagcgagagcggggagctgcacggcctgaccacagaggaggagtttgtggagggcatctacaaggtggagattgacaccaagagctactggaaggccctgggcatcagccccttccacgagcacgccgaggtggtgttcaccgccaatgacagcggcccccggcgctacaccatcgccgccctgctgagcccctacagctacagcaccacagctgtggtgaccaaccccaaggagtag

SEQ ID NO: 8013 - DNA, 555 bp, Artificial Sequence
  derived and/or modified sequence
atggccagccaccggctgctgctgctgtgcctggccggcctggtgtttgtgtctgaggccggccccactggaactggagagagcaaatgtcccctgatggtgaaggtgctggatgctgtgcggggcagccctgccatcaacgtggccgtgcacgtgttcaggaaggctgctgatgacacctgggagccctttgccagcggcaagaccagcgagagcggggagctgcacggcctgaccacagaggaggagtttgtggagggcatctacaaggtggagattgacaccaagagctactggaaggccctgggcatcagccccttccacgagcacgccgaggtgtccatccagacctttgaggccttccaggagatcctgtacaagaagaagttcaccaccctgtggcactggaccagcggcggccagagcttcttccgggccctggtggaggtggtgttcaccgccaatgattctggcccccggcgctacaccatcgccgccctgctgagcccctacagctacagcaccacagctgtggtgaccaaccccaaggagtag

SEQ ID NO: 8014 - DNA, 420 bp, Artificial Sequence
  derived and/or modified sequence
atggccagccaccggctgctgctgctgtgcctggccggcctggtgtttgtgtctgaggccggccccactggaactggagagagcaaatgtcccctgatggtgaaggtgctggatgctgtgcggggcagccctgccatcaacgtggccgtgcacgtgttcaggaaggctgctgatgacacctgggagccctttgccagcggcaagaccagcgagagcggggagctgcacggcctgaccacagaggaggagtttgtggagggcatctacaaggtggagattgacaccaagagctactggaaggccctgggcatcagccccttccacgagcacgccgaggtggtgttcaccgccaatgacagcggcccccggcgctactacagctacagcaccacagctgtggtgaccaaccccaaggagtag

SEQ ID NO: 8015 - DNA, 444 bp, Artificial Sequence
  derived and/or modified sequence
atggccagccaccggctgctgctgctgtgcctggccggcctggtgttcgtgtccgaggctggccctacaggaaccggtgaatctaagtgtccactgatggtcaaggtcctggacgctgtaaggggaagtccagcaataaacgtcgccgtccacgtatttcgcaaagccgccgacgacacttgggagcccttcgcgagtggtaaaacttctgaatctggcgaactacacgggctgactactgaagaggaatttgtggaaggcatctacaaagtggagatcgatacgaaaagctactggaaagccctagggatttcaccgttccatgagcatgctgaggtggttttcaccgctaacgattccgggcctcgacgttacactatcgccgctttgctctccccatactcttatagcactacagccgtggtgacaaaccccaaggagtag

SEQ ID NO: 8016 - DNA, 555 bp, Artificial Sequence
  derived and/or modified sequence
atggccagccaccggctgctgctgctgtgcctggccggcctggtgttcgtgtcagaggccggcccaacggggacaggggaatcaaagtgtccactgatggtcaaggttttggacgccgtgagagggagcccggccatcaatgtcgctgtccatgtattccgtaaagcagccgatgacacttgggagccgtttgccagtggaaaaacatccgagagtggggaactgcacgggctgaccaccgaggaggagttcgtagagggtatctataaggtggagatcgataccaaatcatactggaaagccctagggatctccccttttcacgaacacgccgaggtgagcatccagacattcgaagcattccaggaaattctgtacaaaaagaagtttactactctgtggcattggaccagtggcggacaatccttctttagagcactcgtggaggtcgtgttcacagccaacgactctggccctagaaggtatactatcgctgcactgctcagcccttactcatacagcaccacagccgtcgttaccaaccctaaggagtag

SEQ ID NO: 8017 - DNA, 420 bp, Artificial Sequence
  derived and/or modified sequence
atggccagccaccggctgctgctgctgtgcctggccggcctggtgttcgtctcagaggcgggcccaacaggcaccggagagtccaaatgcccacttatggtgaaagtcctggatgccgtgagagggagccctgcaattaatgtggctgtgcacgtgttcaggaaagctgccgacgatacttgggaacccttcgcatctggtaagacctccgagtcgggggaattgcatgggctgactactgaggaagaatttgtggagggcatctataaagtggaaatcgacactaaaagctactggaaggcactcggcatttcgccattccatgagcacgctgaagtcgtgtttacagctaatgactccggccctcgccgctattactcctacagcaccaccgcagtagtgacgaaccccaaggaatag

SEQ ID NO: 8018 - DNA, 444 bp, Artificial Sequence
  derived and/or modified sequence
atggcttctcaccgcttgttactcctctgcctggccggtctcgtgttcgttagtgaagcaggtccaactggtaccggagagtcaaagtgcccactaatggtcaaggtgctggacgcagtacggggatcacccgcaatcaatgtggccgtgcacgtttttcggaaggctgccgatgacacctgggagccttttgctagcggcaaaacatcagagagcggtgagctgcacggactaaccaccgaagaggagttcgtcgagggcatctacaaggtcgaaattgataccaagagttactggaaggccctgggaatttctccatttcatgaacacgctgaagtggtatttaccgctaatgactccggcccacggaggtataccatcgccgctctactgagcccctattcctatagcaccactgctgtcgtcactaatccgaaagagtag

SEQ ID NO: 8019 - DNA, 555 bp, Artificial Sequence
  derived and/or modified sequence
atggcgtcgcatcgactgcttctgttatgcctagccggtctggtcttcgtgtcggaggctggtcccaccggcaccggggaatccaagtgccctttgatggtgaaggtcttggacgccgtgcggggatcccctgcaatcaacgtggccgtgcatgtctttcgtaaggcagctgacgacacttgggagccatttgctagcgggaaaacatccgagagtggggagcttcacgggctgacgacggaggaagagtttgtagaggggatatacaaagtcgagatagacacgaaaagctattggaaagcactgggaatatcgccttttcacgagcacgccgaagttagcatccagacttttgaagcctttcaggagatcctgtataaaaaaaagttcaccactctttggcattggacctccggcggacagtccttttttcgggctctggtggaggtagtgtttaccgctaacgattcaggcccacggaggtacacaatcgccgctctcctctcgccctactcatacagcaccaccgccgtcgttactaacccaaaggagtag

SEQ ID NO: 8020 - DNA, 420 bp, Artificial Sequence
  derived and/or modified sequence
atggcaagccataggttactgctgctgtgcctggccggattagtgtttgtctccgaagccggacctaccggaacaggagagagcaagtgcccactgatggtgaaggtcctggacgccgtgagaggcagccccgctatcaacgtggcagtacacgtgttccggaaggccgcagacgacacgtgggagccatttgctagcgggaaaacaagtgaatccggggagctgcatggccttacaacagaggaagagttcgtggagggcatttataaggtggagatcgatacaaagtcctactggaaggccttgggcatctcacccttccacgagcatgcggaggtagtattcaccgcgaacgattccggccctagacggtactattcatattctaccaccgccgtcgtgaccaaccccaaggagtag

SEQ ID NO: 8021 - DNA, 957 bp, Artificial Sequence
  derived and/or modified sequence
agacaaggttcatatttgtatgggttacttattctctctttgttgactaagtcaataatcagaatcagcaggtttgcagtcagattggcagggataagcagcctagctcaggagaagtgagtataaaagccccaggctgggagcagccatcacagaagtccactcattcttggcaggatggcttctcatcgtctgctcctcctctgccttgctggactggtatttgtgtctgaggctggccctacgggcaccggtgaatccaagtgtcctctgatggtcaaagttctagatgctgtccgaggcagtcctgccatcaatgtggccgtgcatgtgttcagaaaggctgctgatgacacctgggagccatttgcctctgggaaaaccagtgagtctggagagctgcatgggctcacaactgaggaggaatttgtagaagggatatacaaagtggaaatagacaccaaatcttactggaaggcacttggcatctccccattccatgagcatgcagaggtggtattcacagccaacgactccggcccccgccgctacaccattgccgccctgctgagcccctactcctattccaccacggctgtcgtcaccaatcccaaggaatgagggacttctcctccagtggacctgaaggacgagggatgggatttcatgtaaccaagagtattccatttttactaaagcagtgttttcacctcatatgctatgttagaagtccaggcagagacaataaaacattcctgtgaaaggcacttttcattccactttaacttgattttttaaattcccttattgtcccttccaaaaaaaagagaatcaaaattttacaaagaatcaaaggaattctagaaagtatctgggcagaacgctaggagagatccaaatttccattgtcttgcaagcaaagcacgtattaaatatgatctgcagccattaaaaaga

SEQ ID NO: 8022 - DNA, 1037 bp, Artificial Sequence
  derived and/or modified sequence
gttgactaagtcaataatcagaatcagcaggtttgcagtcagattggcagggataagcagcctagctcaggagaagtgagtataaaagccccaggctgggagcagccatcacagaagtccactcattcttggcaggatggcttctcatcgtctgctcctcctctgccttgctggactggtatttgtgtctgaggctggccctacgggcaccggtgaatccaagtgtcctctgatggtcaaagttctagatgctgtccgaggcagtcctgccatcaatgtggccgtgcatgtgttcagaaaggctgctgatgacacctgggagccatttgcctctgggaaaaccagtgagtctggagagctgcatgggctcacaactgaggaggaatttgtagaagggatatacaaagtggaaatagacaccaaatcttactggaaggcacttggcatctccccattccatgagcatgcagaggtgagtatacagaccttcgaggcattccaggaaatattatacaagaaaaaattcacaacactttggcactggacttccggtggtcagtcattttttcgggctctggtggaagtggtattcacagccaacgactccggcccccgccgctacaccattgccgccctgctgagcccctactcctattccaccacggctgtcgtcaccaatcccaaggaatgagggacttctcctccagtggacctgaaggacgagggatgggatttcatgtaaccaagagtattccatttttactaaagcagtgttttcacctcatatgctatgttagaagtccaggcagagacaataaaacattcctgtgaaaggcacttttcattccactttaacttgattttttaaattcccttattgtcccttccaaaaaaaagagaatcaaaattttacaaagaatcaaaggaattctagaaagtatctgggcagaacgctaggagagatccaaatttccattgtcttgcaagcaaagcacgtattaaatatgatctgcagccattaaaaagacacattctgt

SEQ ID NO: 8023 - DNA, 556 bp, Artificial Sequence
  derived and/or modified sequence
gttgactaagtcaataatcagaatcagcaggtttgcagtcagattggcagggataagcagcctagctcaggagaagtgagtataaaagccccaggctgggagcagccatcacagaagtccactcattcttggcaggatggcttctcatcgtctgctcctcctctgccttgctggactggtatttgtgtctgaggctggccctacgggcaccggtgaatccaagtgtcctctgatggtcaaagttctagatgctgtccgaggcagtcctgccatcaatgtggccgtgcatgtgttcagaaaggctgctgatgacacctgggagccatttgcctctgggaaaaccagtgagtctggagagctgcatgggctcacaactgaggaggaatttgtagaagggatatacaaagtggaaatagacaccaaatcttactggaaggcacttggcatctccccattccatgagcatgcagaggtggtattcacagccaacgactccggcccccgccgctactactcctattccaccacggctgtcgtcaccaatcccaaggaatga

SEQ ID NO: 8024 - protein, 529 aa, Artificial Sequence [sequence omitted]

SEQ ID NO: 8025 - DNA, 1587 bp, Artificial Sequence
  derived and/or modified sequence
atgcttctcgccgtcttgtactgccttctttggtccttccaaacttcggcaggtcactttccacgggcatgtgtgtcgtccaagaatcttatggagaaggagtgctgccctccttggagcggtgatagatcaccctgcggtcaactttcggggcgcggatcctgtcaaaacattcttctctcaaatgcacctcttggacctcagttccctttcaccggagtcgatgatagggaatcatggccttccgtgttttacaatcggacttgtcagtgctcaggaaactttatggggtttaactgcggaaattgcaaatttggattttggggcccaaactgtaccgaaagaagattgctggtgaggagaaacatctttgatctgtccgcaccagaaaaggataagttcttcgcctacctgacgctcgcaaagcacacgatttcctcggattacgtgatacccatcggaacctatggacaaatgaagaacgggagcactcccatgtttaacgacataaacatctacgacctctttgtctggatgcattactacgtttcaatggacgcccttctgggcggttccgaaatctggcgcgatatcgatttcgcgcacgaagccccagcatttcttccatggcataggctttttctgctgaggtgggaacaagagattcaaaaactgactggagatgaaaactttactatcccttactgggactggagagacgcagagaaatgcgacatctgcaccgatgaatacatgggcggtcagcacccaaccaatccgaatctgctttcgccagcctcattcttttcgtcgtggcagattgtctgttcacgcctggaagaatacaactctcaccagtcactttgcaatggaacgccggagggtccactcagacggaacccaggtaaccatgataagtcgagaacccctcggctgccgagctccgcagatgtcgagttttgtctttcgttgacccagtacgagagtggctcgatggacaaagcagcgaacttttcattccgcaatactctcgagggattcgcttcgcctcttaccgggattgcagatgcgtcgcaatcctcaatgcataacgcacttcacatctacatgaatgggactatgagccaggtccaaggaagcgctaacgacccaatattcctccttcatcatgcctttgttgactctatctttgagcagtggctgcgtcggcatcgcccgcttcaggaagtctaccccgaggccaacgcgcccatcggtcataaccgtgaatcgtacatggttccatttatccctctctaccggaatggagactttttcatatcctccaaggatttggggtatgattactcctatctccaagactcggacccggattcctttcaggattacattaagagctacctcgagcaagcctctcgtatttggtcatggctcctgggtgcagcaatggtgggtgccgttcttactgctctcttggccggccttgtcagccttctttgtagacataaacggaagcaactgccagaggagaagcaaccgcttctgatggagaaagaagattaccactcgctgtaccagtcgcatctc

SEQ ID NO: 8026 - DNA, 1587 bp, Artificial Sequence
  derived and/or modified sequence
atgctcctggcagtgctgtactgcctcctgtggagttttcagacaagcgccggccattttcctagagcatgcgtctcaagtaaaaaccttatggaaaaagagtgctgccccccttggagtggagacaggagcccctgtggtcaactctctggacgcggatcttgtcagaacatcctgctgtcaaacgccccactcggcccccagtttcccttcaccggtgtcgatgatagggagagctggccaagtgtgttttacaatagaacttgccagtgctcagggaattttatgggcttcaactgtggtaactgtaaatttgggttctgggggcctaactgtaccgagagaaggctgcttgttagaaggaacatcttcgatctgagcgctcccgaaaaagacaagttctttgcctacttgacactggctaagcatactattagctcagactacgtgattcccatcggaacatacggccaaatgaagaacggttccacccctatgtttaacgatataaacatctacgatctctttgtgtggatgcactattatgtaagcatggatgcgctacttggcggctccgaaatctggagggatatcgattttgcccatgaggcaccagccttccttccttggcacagattgttcctgctgcgttgggagcaagaaatccaaaagctgaccggggacgaaaacttcaccataccctattgggactggagggacgccgagaagtgcgatatatgcacagacgaatacatgggtggacaacacccgactaaccccaacttgctctctccggccagctttttttcttcctggcagatcgtgtgttccagattggaagaatataactcacaccagagcctctgcaacggcactccagaaggacccttgcgccggaatccaggaaaccacgacaagagtagaacacccagacttccttccagtgcagatgtggaattttgcctgagtctcacacagtatgaatccggctctatggataaagctgccaactttagcttcaggaacaccctggagggtttcgcaagcccactgactgggattgccgatgcttctcaatcttctatgcacaacgcactccatatatacatgaacgggactatgagtcaagttcagggaagtgcgaacgacccgatctttctcttacaccatgcgttcgttgattctatctttgagcaatggcttcgccgccaccgcccactgcaggaagtgtatccagaagccaacgctcctatcggccacaatcgcgaatcttatatggttccattcatcccactgtatcgtaacggcgatttcttcatttccagcaaggacctgggatatgattactcttacctgcaggacagcgatccagattcatttcaggactatattaaatcttacttggagcaggcttcgcgtatatggagttggttgctgggagcagcaatggtgggggcagttttaacagccctgctggctggtctggtatcactgctttgcagacacaagcggaagcagcttcctgaagaaaagcagcctctgctgatggaaaaggaggactatcatagtctgtaccagtctcatctg

SEQ ID NO: 8027 - DNA, 1587 bp, Artificial Sequence
  derived and/or modified sequence
atgctgctcgctgtgctctactgtctgctttggtcgttccagacgtccgcgggacattttccgagagcatgtgtctcatcgaaaaatctgatggaaaaagagtgctgccctccgtggagcggagacagaagcccgtgcggccagctgtcggggcggggctcctgtcaaaacatcctgctttctaatgccccgctcggaccgcagttcccattcaccggagtggatgatcgggagtcgtggccctcagttttctacaatcgtacctgccaatgttcaggaaatttcatgggatttaactgcggcaattgcaagttcggattctggggccctaactgtaccgaaaggagactgctcgtgcggagaaatatctttgatttgagcgcccctgaaaaggataagttctttgcttatctgacgttggcgaaacacaccatctccagcgattacgtgattccgattggcacctacggccaaatgaaaaacggctcgaccccaatgtttaacgacatcaacatttacgacctctttgtgtggatgcactactacgtgtcgatggacgcactgctgggaggatcggaaatctggagagacatcgatttcgctcacgaagccccagccttcctcccgtggcaccggctctttcttctgagatgggagcaagaaatccagaagctgactggagacgaaaacttcaccatcccgtactgggattggcgcgacgccgagaagtgcgacatctgcactgatgaatacatgggcggacagcacccgaccaacccaaacctcctgtcgcctgcgagcttcttctcctcctggcagatcgtgtgcagtcgcctggaagaatacaattcacatcagtccctgtgcaacggtacccccgaaggaccgctgagacggaatccgggcaatcacgataagtcacgcaccccgcgcttgccgtcctccgccgacgtagaattctgcctgagcctgacccaatacgagtccggatcgatggataaggcagcgaatttctcattccgcaacactctggaaggcttcgcgtcccccctcactggcattgccgatgcatcccaaagcagcatgcacaatgcgctgcatatctacatgaatggaactatgtcgcaggtgcaggggtccgctaacgatccaatctttttgcttcaccacgctttcgtcgatagtatcttcgagcaatggctgcgccgccatcggccccttcaggaggtgtacccggaggcaaacgcccctatcggccacaatagggaatcatacatggtccccttcatcccgctgtaccggaatggtgacttctttatcagcagcaaagatctcggctacgactactcgtacttgcaagattcggatcctgattcgtttcaagactacatcaaatcgtatctcgagcaagccagccgcatctggagctggcttctgggagccgcgatggtgggagcggtccttactgctctgctggcagggttggtgtcgctgttgtgcaggcacaagcgcaagcagctgccagaagaaaagcaaccacttctgatggagaaagaagattaccacagcctctaccaatcacatctt

SEQ ID NO: 8028 - DNA, 1587 bp, Artificial Sequence
  derived and/or modified sequence
atgctcctcgcagttctgtattgcctcctgtggtcttttcagacttccgcgggacattttcccagggcatgtgtgtcgtcaaagaaccttatggaaaaagaatgctgtcctccgtggagcggggatagatcgccatgcggacagttgtccggtcgcgggtcctgtcaaaacattctgcttagcaacgcacctctgggtccccagttcccttttaccggtgtcgatgacagggaatcctggccttccgtcttttacaaccggacctgtcaatgttcaggtaacttcatggggtttaactgcggaaattgcaagtttggattctgggggcccaactgtaccgagagaaggctgcttgtgcgaaggaacatatttgatcttagcgcacctgaaaaggacaagttttttgcgtaccttacccttgcaaagcataccatcagctccgattacgtgattcctatcggaacttatggccagatgaagaacggatcgactccgatgtttaacgacattaacatctacgatctttttgtgtggatgcattactatgtgtcaatggatgcactccttggaggttctgaaatctggcgtgatattgattttgcccatgaggctcctgcatttcttccttggcatcgcctgttccttctgaggtgggaacaggaaattcagaagctgactggggacgagaatttcaccatcccttactgggattggcgcgatgctgagaaatgtgatatctgtacggatgaatacatgggtggacagcatccgaccaaccccaacctcttgagtccggcctcgttcttttcgtcatggcagattgtctgttcacgccttgaagaatacaattcccaccagtcgctctgtaacggaacccctgaagggcctctgcgaagaaaccctggtaatcacgataaaagcagaaccccacggcttccctcctcggcagatgtcgaattctgtctttcacttacccaatatgaatcaggaagcatggataaggcagccaactttagctttagaaacactttggagggttttgcttcgccacttaccggaattgcagatgcatcacaatcgagcatgcataacgcattgcacatctacatgaatggcactatgtcgcaggttcagggctcggctaacgatcctatctttctgttgcaccacgcctttgtggattcgatcttcgagcaatggcttcgccggcataggccactgcaagaagtgtaccccgaagcaaatgctccgattggacataacagagaaagctacatggtgccttttatcccactgtacagaaacggcgactttttcatctccagcaaggatttgggctacgattactcgtacctgcaggactcggatcctgactcctttcaagattacattaagtcatatctggaacaggcatcccgtatttggtcctggcttcttggtgccgcaatggtgggggccgtgcttaccgccctcctggcaggacttgtctccctgctgtgccgacataagagaaagcagcttcctgaagaaaagcaaccactccttatggagaaggaagattaccattcactctatcagtcgcacctg

SEQ ID NO: 8029 - DNA, 1587 bp, Artificial Sequence
  derived and/or modified sequence
atgctccttgcagttctttactgccttctttggtcattccaaacctcggccggccactttccgcgagcctgcgtcagctccaagaatctgatggaaaaagaatgttgccctccgtggtccggtgaccgcagcccttgtggacaactcagcggccggggaagctgtcagaacatcctcctgagcaacgcgccgttgggaccacagttcccgttcaccggcgtggacgaccgcgaatcctggccgtccgtgttttacaatcgcacctgccagtgcagcggaaacttcatgggattcaattgtggcaattgcaagtttggtttttggggtccgaactgcactgagcgccgccttttggtccggcgtaacattttcgatctgtcagcgccggagaaagacaagttcttcgcgtacctgacgctggccaagcacaccatctcttcggattacgtcatccctatcggcacttatggccagatgaagaatggaagcactccgatgttcaacgacatcaacatctacgacctgtttgtgtggatgcactactacgtgtcaatggacgcgctgctcggcggttcagaaatttggcgggatattgattttgcacacgaagctcctgcctttctgccgtggcatcgcctgttcctgctgcggtgggagcaagaaattcagaaactgaccggagacgaaaacttcacgatcccatattgggactggcgtgatgcagagaagtgtgatatctgcacggacgagtacatgggaggacagcacccgactaatccaaacctgctctcgcctgcctcctttttctcatcttggcaaatcgtgtgctccagactcgaggaatacaattctcatcagtcgctgtgcaatgggaccccagaaggaccgctccgtcggaacccgggcaaccatgataaatcaaggactccgcggctcccttcttctgcagacgtggagttctgcctctccttgacccagtacgagtcgggatcgatggataaggctgcaaacttctccttccggaacactctcgaggggttcgcctccccactgactggaattgcagacgcctcacagtcctctatgcataacgccctccacatctacatgaacggaaccatgtcgcaggtccagggtagcgctaacgacccaatctttctcttgcatcatgcattcgtggattccatcttcgaacagtggctgagacgccacagacctctgcaagaagtctacccagaagcaaatgctcccatcggacacaatcgcgaatcttacatggtgccgttcatccccctgtacagaaatggggactttttcatctcgtcaaaggacttggggtacgattactcatatctgcaagacagcgaccccgatagcttccaagactacatcaagtcgtaccttgaacaggcctcgaggatctggagctggctcttgggggccgcgatggtgggagccgtgttgaccgccctcttggcgggcctggtgtccctgctgtgcaggcacaaacgcaagcagctcccagaggagaagcaacccctgctgatggagaaggaagattaccattccctctatcagagccacctg

SEQ ID NO: 8030 - DNA, 1587 bp, Artificial Sequence
  derived and/or modified sequence
atgctgttggctgtactttattgtctgctctggtccttccagactagcgctggacactttccaagagcctgcgtctcatctaaaaacttgatggagaaggaatgttgtcccccctggagtggcgaccggagcccatgtggccaactctctgggagaggttcttgtcagaacatactgctgtccaacgcacctctgggcccacagttccctttcactggagtcgatgacagggagtcctggccttctgtgttctacaaccgaacatgccagtgctccggtaattttatggggttcaactgcgggaactgcaagttcgggttttggggtccaaactgtacagagaggcggctcctggtgcgacgcaatatttttgacttgtcagcccccgaaaaagacaagttttttgcctatctgacattggctaagcacacgatctcatccgattacgtgatccccatagggacctacggccaaatgaagaacggtagtaccccgatgttcaatgacatcaatatttatgaccttttcgtgtggatgcattattatgtatctatggacgctcttttgggtggttcagaaatctggcgggacatcgattttgcacacgaagcgcccgcctttcttccctggcatcgactgtttctcttgaggtgggagcaggaaatccagaagctcactggcgatgagaacttcaccattccatattgggactggagggacgctgaaaagtgtgatatctgcactgacgagtacatgggcgggcagcaccccaccaatcccaatttgctgtcccccgcatccttcttttcatcatggcagattgtctgctctagactggaggagtataactcacaccaaagtctgtgtaacggtacgcctgagggtcccctgcgacgaaaccccggaaaccacgataagtcacgaactccccggctgcccagcagtgcggacgttgaattctgccttagcctgacccaatacgaatctggctctatggataaggcagcaaactttagttttaggaatacactcgaaggctttgctagtccccttaccggtattgcagatgccagtcagtcttcaatgcataacgcgctgcatatttacatgaacgggactatgagccaggtgcagggtagcgctaacgatccaatctttcttctgcaccacgctttcgtcgacagcatctttgagcagtggctcagacgccaccggcccctccaggaggtctatccagaggccaacgcacccattggccacaaccgagaaagctatatggtgcccttcataccactgtacaggaacggtgacttcttcattagctctaaagacctgggatatgactattcttacttgcaggactcagatccagacagcttccaggactatattaaatcttatctggagcaggcaagtaggatttggagttggctgctgggggctgctatggtcggcgctgtccttacggccctgctggccgggctggtgagcctcctgtgtcgccacaaaagaaaacagctgccagaagagaagcagccattgctgatggagaaggaagactaccacagcctctatcagtctcacctc

SEQ ID NO: 8031 - DNA, 1587 bp, Artificial Sequence
  derived and/or modified sequence
atgctactagccgtcttgtattgtttgctgtggtcgtttcagaccagcgccgggcacttcccaagagcgtgtgtctcgagcaagaaccttatggagaaggaatgttgcccaccatggagcggcgataggagcccatgtgggcagttatcgggaagaggctcatgtcaaaacatcctcctgagcaatgcacccttgggtcctcaattcccattcaccggagtggacgacagagaatcttggcccagcgttttttacaataggacatgtcaatgttctgggaatttcatggggtttaattgtggtaactgcaaattcggcttttggggacccaactgtacagaacgacgcctgctcgtgagacgaaacatttttgatctatcagcacctgaaaaggacaagttcttcgcttacttgactctggcgaaacacactatatctagcgactatgtgattccaataggtacttatggccagatgaaaaatggctcaacccctatgtttaacgacataaacatatatgacctctttgtatggatgcattattacgtgagtatggacgctctgttgggaggatctgagatctggagggatattgatttcgctcatgaagcgccagccttcctgccatggcaccgcctgttcctgttgcggtgggagcaggagatccagaaactgactggcgacgaaaatttcaccatcccttactgggattggcgcgacgcagagaagtgtgatatctgcacggatgagtatatgggaggccagcacccaacaaacccaaatctgctttcccctgctagctttttctcgtcctggcagattgtatgttcccgcctggaagaatataattcccatcagtctttgtgcaacggcactcccgaaggccctttgcgaaggaaccccggcaaccatgacaagagtcgcacacctaggttgccctcctccgcagacgtcgaattttgcctgagccttacccagtatgagagcggttctatggacaaagccgctaacttctccttcagaaacacattggagggtttcgcctccccattgactggcatagctgatgcatcccagagttcgatgcataacgctctgcacatctatatgaacggcactatgtcccaggtacagggcagcgcaaatgaccccatctttttactgcatcacgcctttgtggatagcatatttgaacagtggttacggaggcaccgacccctccaagaggtttacccagaggccaacgcacccatcggtcacaaccgagagagctacatggtgcctttcatccctctctataggaacggcgacttttttataagcagtaaggatttgggatacgattactcttacctgcaggactctgaccccgattccttccaagactatataaaatcctacctggaacaggcttctcgcatctggtcatggctgctaggggccgccatggtgggggctgtactgaccgccttgctcgcaggattggtgtccctgttgtgcaggcacaagcggaagcagttaccggaagaaaagcagcctcttctgatggagaaggaagattatcatagcctctaccagtcacacctc

SEQ ID NO: 8032 - DNA, 1587 bp, Artificial Sequence
  derived and/or modified sequence
atgctcctggcggtcctctactgtctgctctggtctttccagacctccgccggtcattttcctcgggcctgcgtgtcgtccaagaacttgatggaaaaggaatgctgcccaccatggtccggggatcgctcaccgtgcggacaacttagcggacgcggttcatgtcaaaacattctcttgtccaacgcgccgttggggccgcagtttccattcaccggtgtggatgacagagagtcctggcccagcgttttctacaatagaacttgtcaatgctccggaaatttcatgggcttcaactgtggcaactgtaagttcggcttctggggaccgaactgcaccgagcggcgccttctcgtgcggcggaacatcttcgacctgtccgccccggagaaagacaagttctttgcatatctcactcttgccaaacatactatcagctcagactacgtgattcccattggaacttacggacaaatgaaaaacgggtcgactccaatgttcaacgacatcaacatatatgatcttttcgtctggatgcattactacgtgtcgatggacgcgctgctcggggggtccgagatatggcgcgacatcgacttcgctcatgaagctcctgcattcttgccgtggcatagactcttcctcttgagatgggaacaggagatccaaaagctcactggtgacgagaacttcactatcccgtactgggattggcgcgacgccgaaaagtgtgatatttgcacggatgagtatatgggaggacaacatcccaccaacccgaatttgctgtcgccagccagctttttcagctcctggcagatcgtgtgctcccggctggaggaatacaactcgcatcagtcgctctgtaatggaacgccggagggcccactgcggcgcaatcccggaaaccacgataagtctaggacccctagacttccgtccagcgcggatgtggaattttgcctgtcgctgacccagtacgaatcgggctcgatggacaaagccgccaacttctcctttcggaacaccttggaaggattcgcctcgcccctgaccggtatcgctgacgcgagccagagttccatgcataatgctctgcatatctacatgaacgggaccatgtcccaggtgcagggctccgcaaatgacccgatctttctcctgcaccacgcctttgtcgatagcatctttgagcagtggctgaggcggcaccgaccgctgcaggaagtgtacccggaagctaacgcccctatcggtcacaacagggaatcgtacatggttccgtttatccctctgtacagaaatggtgacttcttcatctcatcgaaggacctgggctacgattactcctacctgcaggacagcgaccctgactccttccaggattacatcaagtcatacctggaacaagccagccgcatctggtcgtggttgctgggggcggcaatggtgggagccgttcttactgcactgctcgccggtctggtatcgcttctgtgcagacataagcgcaaacagctgcctgaggagaagcaaccacttctgatggagaaggaggactaccactcgctgtaccagtcacatctg

SEQ ID NO: 8033 - DNA, 1587 bp, Artificial Sequence
  derived and/or modified sequence
atgcttctggcagtgctttactgtcttttgtggtcatttcagacgagcgcaggtcattttcctcgggcatgcgtgagttccaagaatcttatggaaaaagagtgctgccccccgtggtccggtgaccggtccccctgtggacagctttcaggtagagggtcgtgccagaacattcttctctcgaacgctccacttggccctcaatttccatttaccggtgtcgacgatagagaaagctggccatcggtgttctacaaccggacctgccagtgtagcggcaacttcatgggattcaactgcggaaactgtaagttcggtttttggggtcctaattgtaccgaaaggcgcctcctggttagacggaatatcttcgatctctccgcacctgaaaaggacaagtttttcgcataccttacgctggccaagcacactatctcatccgactacgtgatcccgatcggaacctacggccaaatgaaaaatggttcgacccctatgttcaacgatatcaacatatacgatctttttgtgtggatgcactactatgtgtcgatggatgcactccttggaggctccgaaatttggcgagatattgattttgcacacgaagccccagcgttcctgccgtggcaccgtctgttcctgctccgatgggaacaagaaatccagaaactgaccggagatgagaatttcactatcccatactgggactggcgcgacgccgagaagtgtgatatctgcaccgatgaatacatgggaggtcaacacccaactaaccctaacttgctgagcccggcgagctttttcagctcctggcagatcgtgtgttcgagattggaggagtacaattcccatcaaagtctgtgtaatggaacgccggaagggccccttagaagaaatcccggaaaccatgataaatcccgcaccccgagacttccctcatcggcggatgtggagttttgtctttcgctgacccagtacgaatccggatcgatggataaagcagccaacttttcgtttcgaaatactctggaaggatttgccagccccctcactggaatcgccgacgcatcccaaagttcaatgcataacgcacttcacatatacatgaacggcaccatgagccaggtgcagggaagcgcgaacgacccaatctttctgctccatcatgcatttgttgattccatctttgaacaatggctccggagacatagaccactgcaagaggtgtatcccgaagcgaacgctccaatcggtcataatcgcgaatcgtacatggtcccatttatccctctgtacaggaacggtgatttcttcatttcatccaaggatctggggtacgactactcctacctccaagattccgatcccgattcgtttcaggattacatcaaatcgtacctggagcaagcatcacggatctggtcatggctgctcggtgcagccatggtcggtgcagtgctgactgcactgttggctggactcgtctcccttctgtgtagacacaagcgtaagcaactgcctgaagagaaacaacctctccttatggaaaaggaagattatcactctctttatcaatcccatctg

SEQ ID NO: 8034 - DNA, 1587 bp, Artificial Sequence
  derived and/or modified sequence
atgcttttggcggtcctgtattgtcttctgtggagtttccagacctccgctggccatttcccgcgggcttgtgtgagtagtaagaatcttatggaaaaggagtgttgcccgccctggtccggcgacagatccccttgcggacaactctcagggaggggctcctgtcagaatatcttactgagtaatgcgcctctgggtccccagtttccgtttaccggagtagacgatagagaaagctggccttccgtcttctacaatcgcacctgccagtgcagcggtaatttcatggggttcaactgcggtaactgcaagttcggattctggggacccaactgtactgagcgaaggttgctcgtgaggagaaatatctttgatttgtccgcgcctgaaaaggacaagttctttgcgtatctgaccttggccaaacacaccatatcctcggactacgtgatacctattgggacttacggacagatgaaaaacggcagcacacccatgttcaacgacattaacatatacgatctgttcgtatggatgcactactacgtcagtatggatgccttacttggaggatcggagatctggcgcgacattgatttcgctcatgaagctccagccttcttaccctggcaccgattgttccttttgagatgggaacaggagatccagaaactgacgggcgatgagaatttcaccattccctactgggattggagggacgctgagaaatgcgacatttgtactgatgaatacatggggggacaacacccaaccaatccaaacctgttatctcccgccagctttttctcctcttggcagattgtctgttcacgcctcgaggaatataacagccatcagagcctgtgtaacggcacgcctgagggccccttacgcaggaaccctggcaaccatgacaaatctcgaacaccacgcttgccctcctcggccgatgtcgagttctgtttgagcctgacccagtatgaaagcggtagcatggataaagccgccaactttagctttcgcaatacactcgaaggctttgccagccctttgaccggcattgcagatgcttcccagagtagtatgcataacgctctgcacatatatatgaatggtactatgagccaggtgcagggttccgcgaacgatccaatattcctgctccatcacgccttcgtggacagcattttcgaacagtggctccgtcgtcatcggcctctccaggaagtctacccagaggctaacgcccctataggccacaaccgcgaatcttacatggtcccttttatcccgctgtacagaaacggtgattttttcatatcctccaaggatctgggatacgattattcatacctccaggactccgaccccgactccttccaggattacattaaatcatatctggaacaggccagcagaatttggtcctggctattgggagcagccatggtaggggccgtgctcacggccctcctggctggattggtgtcgttgctttgccgccacaagaggaaacagctgccagaagaaaagcaaccactgctaatggagaaagaagactaccattccctgtatcaatcccattta

SEQ ID NO: 8035 - DNA, 1587 bp, Artificial Sequence
  derived and/or modified sequence
atgctgttggccgtcctgtactgtctgttgtggagcttccaaacttccgcgggacactttcctcgtgcatgtgtctcctccaaaaatctcatggaaaaggaatgctgcccaccttggtcaggggacagaagcccgtgtggacaactgtccggacgcggctcatgtcaaaacatcttgctttcaaatgcaccacttggccctcagtttccttttaccggagtagacgacagagaaagctggccttcagtgttttacaaccggacttgtcagtgctcgggtaatttcatgggatttaactgtggcaactgtaagtttggattttggggacccaactgcactgagcgccgacttcttgtgcgtcggaacatttttgatctcagcgcccccgaaaaggacaagtttttcgcttaccttactcttgccaaacatactattagctcggattacgtgattcccattggaacttatggacagatgaaaaatggttccacccccatgttcaacgatatcaacatttatgatttgtttgtgtggatgcactactacgtgtcgatggacgcattgctcggtggttccgagatatggcgtgatattgattttgcccacgaagcacctgcctttctcccctggcatcgactgtttctgctccgctgggaacaagaaattcagaaacttactggcgatgaaaactttaccataccatactgggattggcgcgacgccgaaaaatgcgatatttgtactgatgagtacatggggggacagcatccaaccaatcccaatcttctctcccctgcaagttttttcagctcgtggcaaattgtgtgctcccgtctggaagaatacaatagccatcaaagcctttgcaacgggacccccgaaggaccccttcggcgcaaccctggaaaccatgataagtcgagaacccccaggctcccctcgtccgctgacgtcgaattctgcctttccttgacccaatacgaatccggtagcatggataaggccgcgaacttttcgttcaggaataccttggaaggatttgcatcgcccctgacggggatcgccgacgcgtcacaaagctcgatgcataacgcactccacatttacatgaacggaaccatgagtcaagtccagggatccgcaaacgacccgatttttcttcttcatcatgcgttcgtcgacagcatatttgaacagtggctgcgcagacatcgccctctgcaagaagtgtatccagaagcaaacgcccctatcggccacaacagagaatcatatatggtcccttttatccctctgtacagaaatggcgatttcttcatctcctcgaaggaccttgggtacgattactcatacctccaggattcggacccagattcgtttcaagattacattaagtcataccttgaacaggcaagccgcatttggtcttggctgcttggtgcagcgatggtcggagcagtcctgacggcactgcttgcagggcttgtgagcctcctttgccggcataagcgtaagcaactcccagaagagaagcagcctttgctgatggagaaggaagattaccactccctgtaccaatcccatctg

SEQ ID NO: 8036 - DNA, 1587 bp, Artificial Sequence
  derived and/or modified sequence
atgctccttgctgtgctttattgcctcctttggtccttccagacctccgctggccatttcccgcgagcttgtgtctcctcgaagaacctcatggaaaaggagtgttgtccgccctggtccggggatcgcagcccttgtggacagctgtccggccgtggtagctgccagaacattctcctcagcaacgcccctcttggcccacagttcccgttcacaggtgtggacgaccgcgagtcctggccctctgttttctacaaccggacctgccagtgctccgggaatttcatgggtttcaactgcggcaactgcaagttcggtttctggggacccaattgtaccgagcgccgtctactcgtgaggcgtaatatttttgacttgtccgctcctgagaaagacaagttcttcgcctatcttactctggccaagcatacaatctcgtctgattacgtcattcctattggtacgtatggccagatgaagaatggatctactcccatgttcaacgatatcaacatatacgacctcttcgtgtggatgcactattacgtcagcatggacgcgctgttgggaggatccgagatttggcgcgacattgatttcgctcatgaggctcctgccttcttgccgtggcaccgcctatttcttctgcgttgggagcaggagattcaaaagctgacgggggacgagaatttcaccattccgtactgggactggcgcgacgccgaaaagtgcgacatttgcactgatgaatatatgggtggccagcaccccacgaacccgaacctcctgtcacccgccagcttcttttcgtcgtggcaaatcgtgtgctcccgcttggaagagtacaactcccatcagtccctgtgtaatggtacccctgagggccccctgcggcgcaaccccggcaaccacgacaagtcgcgtacaccgcgcctgcctagctccgccgacgtcgagttctgcctcagtctcactcagtacgagtctggttccatggacaaggccgccaatttttcgtttcggaacacattggagggctttgcctctccactgacgggtatcgccgatgcttcccagtccagcatgcacaatgcactccacatctacatgaacggaactatgtcgcaagttcagggttccgctaacgatcccattttccttcttcaccacgcatttgtggacagcatattcgagcagtggctgcgtaggcaccgtccgcttcaggaggtctaccctgaggcgaatgcgcctatcggacacaaccgcgaatcctacatggtccccttcatcccgctttataggaacggagatttcttcatctcttcaaaggatctaggttacgactactcctacctgcaggacagcgatcccgatagcttccaggattacatcaagtcctatttggagcaggccagtaggatctggtcttggctactcggcgcggcaatggtcggcgcagtgctgaccgccctgttggcgggtctggtctcactgttgtgcagacataagcgcaagcaactaccggaggagaagcaaccgctgctgatggaaaaggaggactatcattccctataccagagccacctg

SEQ ID NO: 8037 - DNA, 1587 bp, Artificial Sequence
  derived and/or modified sequence
atgcttctagctgttctttactgtcttctttggtcgtttcagacatccgcggggcactttccgcgcgcatgcgtctcctcaaaaaatctgatggaaaaggaatgctgcccaccatggagtggtgatcgatccccatgtggccagctttcaggtcgtggatcttgtcaaaacattcttctatcaaatgctccattgggtccacaattcccctttacaggagttgacgatcgggaatcgtggccgtcagtcttctacaataggacgtgccagtgttctgggaactttatgggtttcaattgtggaaattgcaagtttggcttttggggacccaactgcactgaaaggcgtctgcttgttcgccgtaacatattcgacttgtcagctcccgaaaaggacaagttctttgcctatttgaccttggccaaacatactatctcgtctgattacgtcatcccaattggaacttacggtcagatgaaaaatggatctacaccaatgttcaatgatatcaacatctatgacctctttgtttggatgcactattacgtcagcatggacgcgttattgggaggctctgagatttggagagacatcgacttcgcccatgaggctccggctttcttgccatggcaccggttatttctacttagatgggaacaggagattcaaaagcttacaggtgatgaaaattttactatcccatactgggattggcgtgatgccgaaaagtgcgacatctgcaccgatgaatacatgggaggccaacacccaacaaaccctaatttgttgtccccagctagcttcttctcttcgtggcaaatagtgtgctctcgtcttgaagagtataatagccatcaatcgttatgcaacggcactccggaaggtccattgcgacgaaatcccggaaaccacgataaatcgaggacaccgaggctaccctctagcgcagacgtggaattctgtctgtcattgacacaatacgagtcaggctccatggataaagccgctaacttctcctttagaaataccttggaagggttcgccagtcctttgacaggcatcgcagacgcttcccaaagctcaatgcataatgctcttcatatctacatgaatggaactatgtcacaagtacagggatctgccaacgatcctattttccttttgcatcacgccttcgttgacagtatttttgaacaatggttgagaagacatcgaccgctgcaagaagtctatccagaagcgaatgctcctatcggacataatagagaatcttatatggtgccattcatcccactgtatcgtaatggagatttctttatttcctctaaggatctcggctacgactacagctatctacaagactcagacccggatagctttcaagactacattaaatcgtacttggaacaggcgagcagaatctggtcatggctgttgggagcggctatggttggagcagtcttgactgccttacttgcaggcttagtgtccctcctttgtcgtcataagagaaagcagttgcctgaagagaaacagccgctgcttatggaaaaagaagactaccactcgctgtatcaatctcatctg

SEQ ID NO: 8038 - DNA, 1587 bp, Artificial Sequence
  derived and/or modified sequence
atgctcctggccgttctctactgtctgctgtggagctttcagacttcagcagggcactttccccgtgcctgtgtaagctcgaagaacctcatggaaaaggagtgttgccccccgtggagcggcgatcggtcaccatgcgggcagctgagtggccgtggctcctgccaaaacatcctactcagcaacgctccactgggcccccagtttccattcaccggagttgacgaccgggagtcttggccatccgtgttctacaaccgcacgtgtcaatgttctggtaattttatgggctttaattgtggcaattgtaaatttggattctggggaccaaactgtactgagagaaggctgttggtaagaagaaacatttttgacttgtcagcccccgagaaggataagttcttcgcttatctaactttagccaagcacactatatcaagcgactatgtcatccccataggaacttacgggcaaatgaagaatggatccacccccatgttcaatgatatcaacatctacgacttgttcgtctggatgcactactatgtcagcatggatgcccttcttgggggcagtgaaatctggagagacatagacttcgcccacgaggcacccgccttcctcccttggcacaggttgttcctactgcggtgggagcaagaaatacagaaactgacaggcgatgagaactttacgattccatactgggactggcgagatgcggaaaaatgcgacatctgtacagacgaatatatgggcgggcagcacccgacaaaccccaatctgctgtcacccgcttccttttttagtagctggcagatcgtctgcagccgcctggaggagtataacagtcatcagtccctctgtaacggcacacccgaaggccctttaaggaggaacccggggaatcacgataagagtcgtacccccaggctcccctcgagcgccgatgtggagttttgtttgtctctgactcagtacgagagcggaagcatggataaggcagccaatttcagttttcgaaatactctggaggggtttgcctcacccctcacagggatcgccgatgccagccagtctagtatgcacaacgcactgcatatctatatgaatggaactatgtctcaggtacaggggagcgccaatgacccaattttcctgttgcaccacgcattcgtggactccatattcgagcagtggttacggaggcacaggcccttgcaggaggtttaccctgaggcaaatgcccccatagggcataatagagaatcctatatggtccccttcattcctctgtaccgcaacggcgacttcttcataagttccaaggatttaggatacgattattcatacttacaggacagtgaccccgattcattccaggactatatcaaaagttatctggagcaagccagccgtatctggtcttggctgcttggcgctgcaatggtcggcgcggtactgacagcacttctggcaggcctggtgtcactgttatgccgccataagcgaaaacagctacccgaagaaaagcaacccctactgatggagaaagaggactaccactccctctaccaaagccacctg

SEQ ID NO: 8039 - DNA, 1587 bp, Artificial Sequence
  derived and/or modified sequence
atgctgctcgccgtgctgtattgtttgctgtggtcattccagaccagcgcagggcactttccgagggcctgcgtctcatccaagaatcttatggagaaggaatgctgtcccccgtggtctggcgaccggtcaccctgcgggcagctgagtggaagggggtcctgtcagaacattctcctgtccaatgccccgctgggcccacagttcccctttacaggcgttgacgatagggaatcttggccgtccgtgttctataaccgcacatgtcaatgcagcggtaattttatgggctttaattgcgggaattgtaagttcggattctgggggcccaattgcaccgagcgtcggctgttagtccggagaaatatttttgacctcagtgcgcccgagaaggacaagtttttcgcgtatcttacactggctaaacataccatcagttccgactatgttatccccataggtacctatggtcagatgaagaatgggtcaacacctatgtttaatgacattaacatctacgacctattcgtgtggatgcactattacgtttctatggatgcacttttggggggctcagagatttggagggacatcgatttcgcacacgaggcccctgctttccttccttggcacagactgtttctgctgcgctgggagcaggagatccaaaaactgactggcgacgaaaacttcaccataccttactgggattggagggatgccgaaaagtgtgacatctgtacagatgagtacatgggaggtcagcatcctacaaatcctaacttgctttcaccggcctcctttttttctagctggcagattgtatgcagcaggctggaggagtacaattctcatcaatccctgtgtaacgggacaccggaaggtcccctgagacgcaatcctgggaaccacgacaaaagtagaaccccccggctccctagcagtgctgacgtggagttctgcctgtctctgacccagtatgaatcaggatcaatggacaaggcagccaatttcagcttccgcaataccttggagggcttcgctagccccctgacaggaatcgccgatgcgagtcagtcatctatgcacaatgccttgcacatttacatgaatggcactatgtcccaggtgcagggctctgccaacgaccccatattccttctgcatcacgccttcgttgacagcatttttgagcaatggctgcgacgacacagacctcttcaggaagtgtaccctgaggccaatgcccccataggacataaccgggagtcatacatggtcccatttatccccctctacaggaacggagatttttttatttctagcaaagatctgggttacgattattcttacctccaagattccgaccccgactccttccaggattacattaagtcttatctggaacaagcgagccggatctggtcttggttgctcggtgcggccatggtgggggctgtgctaaccgcccttctcgcgggcctcgtcagcctgctttgccggcataagcgcaagcagctccccgaggaaaagcaacctctgctgatggagaaagaggactaccattctctctatcagtcccatttg

SEQ ID NO: 8040 - DNA, 1587 bp, Artificial Sequence
  derived and/or modified sequence
atgctcctggccgtcctatactgcctgctctggtcttttcagactagtgctgggcattttccaagggcctgtgtgtcatccaagaacctgatggagaaggaatgctgtcccccatggagtggcgacaggtccccatgcggccagctctctggacgaggctcctgccaaaacattcttttgtccaacgccccacttgggccccagttccccttcacaggggtggacgaccgggagtcctggccttcagtgttctataacaggacttgccagtgttccggaaacttcatggggtttaactgcggcaattgcaaattcggtttctgggggccgaattgtactgaacgaaggcttcttgttcgacgaaacatttttgacctcagtgccccagagaaagacaagtttttcgcctatttgactttagcgaagcacacaatctctagcgattatgtaattcctatcggcacatatggccaaatgaaaaatggcagtacacctatgttcaacgatatcaacatatatgatctttttgtgtggatgcattactacgtctccatggatgcactgttgggtggctccgaaatatggcgggatattgacttcgcccacgaggcacctgcctttctgccatggcaccgcttgtttctgctgcgctgggagcaggagattcagaagctgacaggcgatgagaacttcaccattccttactgggattggcgcgacgcagaaaaatgtgatatatgcacggatgagtacatgggagggcagcaccctaccaatcccaaccttttatctcctgctagttttttttcctcctggcagatagtgtgttcacgactcgaagagtacaactcacaccagtcactctgcaacggaacacctgagggtccccttagacgaaaccccggaaatcatgacaagtcgagaacaccccggctgccgtcaagtgcagatgtggagttctgcctcagcctcacgcagtatgagagcggctccatggataaggccgccaactttagctttcgtaacactctcgagggcttcgccagtccactgacaggcattgccgacgctagtcaatctagcatgcataatgctttgcatatctacatgaatggcactatgagccaagtgcaggggtctgccaatgatcccatatttctgctccatcacgcctttgttgattccatattcgagcagtggttgcggcgccatcggcccttgcaagaggtgtatcctgaagcaaacgcaccaataggacacaaccgcgagtcatatatggtgccatttatacctttgtataggaatggagactttttcattagctcaaaggatctgggatacgactacagttatcttcaagactcggaccccgattcctttcaggactacatcaaatcctacctggaacaagcctcgcgaatctggtcttggctgctgggtgctgcaatggtgggtgctgtgttgacagccctgttagcgggactagtgtcattactatgccgtcataaacgtaaacagcttcctgaggaaaagcagcccctgctgatggaaaaggaagattatcattccttataccaaagccatctg

SEQ ID NO: 8041 - DNA, 1587 bp, Artificial Sequence
  derived and/or modified sequence
atgctcttggctgtgctttattgtctgttgtggtcttttcagacaagtgcgggacacttcccacgggcctgtgtaagttcgaagaacctgatggagaaggagtgttgcccaccttggtcaggagacagatccccctgcggacaacttagcgggagagggagctgtcagaatatcctgctcagtaatgcacctctaggcccccagtttccattcacaggtgtagacgatcgagagtcctggcccagtgtcttctacaacaggacctgtcaatgttcaggaaacttcatggggttcaattgcggcaactgcaagtttggcttttggggacctaattgcacggagcggagattattggtccggcggaatatttttgacttgtctgcgcctgaaaaggacaagttttttgcgtatctaacgcttgccaagcatactatctcttcagactacgtgataccaatcggaacttacggccagatgaaaaacggttccactcccatgttcaacgacatcaacatttacgacctttttgtttggatgcactactacgtatctatggatgctttgcttggcggctccgaaatttggagagatatagacttcgcacatgaggccccggcatttctgccttggcatcgtctcttccttcttcggtgggaacaggaaatccagaaattaaccggggacgaaaactttaccatcccctactgggattggcgagatgcagaaaaatgtgacatctgcactgacgaatatatggggggacaacaccccactaaccccaacttgttaagcccagccagctttttcagttcttggcaaatcgtctgttctaggctggaagaatataactcacatcagtcgctatgtaatggtacccctgaaggtcctcttcgccggaatccggggaatcacgataaatccaggactccccgtttgccgtcgtcagccgacgtggagttttgcctttccctcacgcagtatgagtcgggctctatggataaagcagctaacttctctttccgcaacaccctggagggtttcgcatcccccctcactggtatagctgacgcatctcagtcaagtatgcacaacgcgctgcatatttatatgaacggaacaatgagccaggtgcaaggatctgcaaacgatccaatttttttgctgcatcacgcattcgtggactccatcttcgagcagtggttacgccggcaccgtcctctgcaagaagtttatccagaggcaaacgcccccattggccacaacagggaatcctacatggtgccttttatcccgttgtatcgaaacggcgatttttttatttcctcaaaagacctgggctacgattacagctacctccaggatagcgacccagattcgtttcaagactacattaaatcctacctggagcaggcgtcacgtatctggtcttggctgttgggagcggccatggtgggtgcggttctcaccgccctactggccggtcttgtgagcctcctgtgtagacataagaggaaacaactccccgaggagaaacagccacttcttatggaaaaggaagactatcacagcctctaccagtcacacctg

SEQ ID NO: 8042 - DNA, 1587 bp, Artificial Sequence
  derived and/or modified sequence
atgctgctcgctgtattgtattgcttgctctggtcattccagacatctgcaggtcactttcctcgcgcctgtgtctcctctaagaatctgatggaaaaggagtgttgccctccctggtccggcgataggagcccctgcggccaactttccggtagaggctcctgccagaacattctgctctcaaacgctcccctgggaccacagttccctttcaccggcgtcgatgatagggaaagttggccatccgtcttctacaaccgcacttgtcagtgttctggaaatttcatgggattcaattgcggcaactgcaagttcggtttctggggtccgaactgcactgagcgccgccttttggttcgcaggaatatcttcgatcttagtgcccctgaaaaggacaaattcttcgcttacctgacattggcgaagcacactatttcttctgattacgttatccccattggcacttacggccagatgaaaaatggatcaacacctatgttcaacgacatcaacatatatgacttgtttgtttggatgcactactatgtctccatggacgccctgctgggtggatcagaaatctggagggatatcgacttcgcgcacgaagccccggccttcctcccatggcacaggctgtttctgcttcgctgggaacaggaaatccagaagcttacaggtgatgaaaatttcacaattccatactgggactggagggacgctgaaaaatgcgacatctgtacagacgagtatatgggaggccagcatccaaccaacccaaatcttctctcaccagcctcttttttctccagttggcagatcgtttgcagtaggcttgaagagtacaactctcatcagtctctgtgcaatggtacacccgaaggccccctgagacgcaaccctggaaaccacgacaaaagtaggaccccaagactgccctcttctgctgacgtcgagttctgtctgtctctcacccagtatgagagcggctctatggacaaggcggcaaacttcagtttccgcaatacgctggagggttttgccagtcctttgaccggtatagcggatgcttctcaaagtagcatgcataatgctctgcacatatacatgaacggcactatgagccaggtgcaaggcagtgctaacgatccgatctttctgctgcatcacgccttcgttgattcaatcttcgagcaatggttgcgcaggcaccgccccctccaggaggtgtaccctgaagcaaacgcgccaattggtcataacagagaatcatatatggttccattcatacctttgtacaggaacggcgacttcttcatttcaagcaaagatctgggctatgactactcttatctccaggacagtgacccagactctttccaggactacatcaaatcatacctggagcaggctagcagaatttggagctggttgctgggagccgccatggttggcgccgtgctgacagcactcctggccggcctcgtaagtctcctctgtagacacaagcgcaaacagttgccagaagagaaacagccactgctgatggagaaagaagactaccattccctctaccaaagccacctg

SEQ ID NO: 8043 - DNA, 1587 bp, Artificial Sequence
  derived and/or modified sequence
atgctcctggcggtgctctactgtctgctttggtcgttccagacttccgcgggacactttccgcgggcttgcgtttcgtctaagaatctgatggagaaggaatgctgtccgccgtggagcggtgaccgctccccgtgtggccagctgtcgggtagaggaagctgccagaacattctgttgagcaacgctccgcttggaccgcaattccctttcacgggtgtcgatgacagggaatcatggcctagcgtgttctataatcggacctgccagtgctcgggtaatttcatgggcttcaactgtggtaactgcaagttcggattttggggaccaaactgtactgaaagacggctccttgtccggcgcaatatcttcgatctctctgcccccgaaaaagacaagttcttcgcttaccttacccttgccaagcatactatatcttctgattacgtcattcctatcggaacgtacggacagatgaagaacgggagcaccccaatgtttaacgatatcaacatttatgatctgttcgtgtggatgcactactacgtgtcgatggacgcgctgctcggcggctcggaaatctggagagatattgacttcgcccacgaagcgccggcttttctcccatggcaccgcttgtttcttctgcgctgggaacaggaaatccaaaagctgaccggggatgagaacttcactatcccatactgggactggagagatgccgagaaatgcgatatctgcaccgacgagtacatgggcgggcagcatccaactaacccgaatcttctctccccggccagcttcttcagctcctggcagatcgtgtgcagccggcttgaggagtacaacagccaccagtccctctgcaacgggacccctgagggtccgctgaggaggaatcccggaaaccatgataagagtaggaccccccgcctgcccagttcggccgacgttgaattctgtctgtcgctgactcagtacgaatcaggaagcatggataaagcggccaacttttcattcaggaacaccctcgagggcttcgcgtcgccactcactggaatcgcagacgcctcccaatcttctatgcataacgcattgcacatttacatgaatggaaccatgagccaagtccaagggtcagccaatgacccaatcttcctgctgcatcacgccttcgtggactctatcttcgaacagtggcttagacggcatagaccactgcaggaggtctaccccgaagctaatgccccgatcgggcacaatcgcgagtcatacatggtcccttttatccctttgtaccgcaacggtgactttttcatcagctctaaggacctgggctacgactattcctacctgcaggactcggatccggattcgtttcaagactacatcaaaagctacttggaacaagcatcgcggatctggtcatggctgctgggagcagcaatggtgggagcggtgctgactgctctgttggccggactcgtgtcactcctctgtcgccacaaacggaagcaactgccagaggaaaagcagccattgctgatggaaaaagaggactaccactccctctaccagtcacatctg

SEQ ID NO: 8044 - DNA, 1587 bp, Artificial Sequence
  derived and/or modified sequence
atgctgctggcagtcctctactgtctgctgtggtctttccagacaagcgccggtcacttccctagagcttgcgtgtcttcgaagaacctcatggaaaaggaatgttgccccccatggagtggcgatcgcagcccgtgcgggcagctgtctggacggggtagttgtcagaatatcctcctgagcaatgcaccgctcgggccccagttcccttttaccggcgtggacgatagggagtcctggccatccgtgttctacaataggacctgccagtgcagcggaaactttatgggtttcaactgtgggaattgtaagtttggcttctgggggcccaactgcaccgaacgacgtttgttggtgcggcgcaatatattcgacctgagcgcgcccgagaaagacaagtttttcgcctacttgaccttagctaagcacaccatctccagcgattatgtaatcccaattggtacatacggacaaatgaagaatggctcaacgccgatgtttaacgatattaatatctatgacctctttgtatggatgcattattacgtatcaatggacgccctcttgggcggctccgagatctggagagatattgatttcgcccatgaggcccctgcctttctaccctggcataggctgtttctgcttcgctgggaacaggagattcagaaactcactggggatgaaaattttaccataccttactgggactggagggatgctgaaaagtgcgacatctgcacggatgaatacatgggcggccaacatcccacaaaccctaacttgctctctccagcatccttcttctctagttggcaaatcgtttgctctcggctcgaggaatacaattctcaccagtctttgtgcaatggaactcctgagggccctctgcgcagaaatcccggcaaccatgataagtccaggacgcccagacttccctcctctgccgacgtggagttttgtctgagcctgactcagtatgagagcggaagtatggacaaggccgcgaatttttcattcaggaacacccttgaaggattcgccagccccttgaccggaattgctgacgcctcccagtcaagtatgcacaacgctctgcacatttacatgaacggcaccatgtcgcaggtgcagggtagcgccaatgatcccattttccttctgcatcacgcctttgtggattccattttcgaacaatggctgcgccggcaccgccctctgcaggaagtgtatcctgaagcaaacgcccccatagggcacaatcgagaatcgtacatggtgccatttatcccactgtaccgtaatggagattttttcatttccagcaaagaccttggctatgattattcgtatctccaggactcagatcccgattccttccaggactatattaagagttatctggagcaggcttctaggatctggtcatggttactgggcgccgcaatggtgggcgctgtgttgaccgctctcctcgcaggccttgtctcactgctgtgtcggcacaagcgaaagcagctacccgaggagaagcagcccctgttaatggaaaaggaggactaccactcactttatcaatcccactta

SEQ ID NO: 8045 - DNA, 1587 bp, Artificial Sequence
  derived and/or modified sequence
atgttacttgctgtgctgtattgtctactgtggtctttccaaactagcgcaggccattttccgcgagcttgcgtttcgtccaaaaacctgatggaaaaggaatgttgtccgccgtggtctggcgataggtccccctgcggccagttatcgggcagaggttcctgccagaatattcttctctcaaacgccccccttggaccacaatttccgttcaccggcgtggacgacagagagtcatggccctctgtgttttacaaccgaacgtgtcagtgttcaggcaatttcatgggtttcaattgcggtaattgcaaatttggattttggggacctaactgcactgaacgcaggttgcttgtccgcagaaatatcttcgacttgtcagcacctgagaaggacaagttcttcgcctatttaaccctggccaaacataccatatcttccgattatgtcataccaattggaacgtacggacagatgaagaatgggagtacacccatgttcaatgacataaacatttatgacctttttgtgtggatgcactattatgttagcatggatgcattactggggggttctgagatctggcgtgatattgacttcgcccatgaagctcccgcctttctaccgtggcaccgactgtttctgctgaggtgggaacaggagattcagaaactgacaggcgatgagaatttcacaatcccttactgggattggagagatgcagagaagtgcgacatctgcaccgacgagtatatgggtggacagcatcctaccaacccaaatctgttgtccccagcctccttcttctcatcttggcagatcgtgtgctcgagactggaagaatataactctcatcagtccctgtgcaatggtacacctgaaggccccctccggcggaatccgggcaatcacgacaaatcgcgtactcccagactgccttcatcagccgatgtcgagttctgtttgagtctcacacagtacgagtccggatcaatggacaaagctgccaatttctcatttcgcaacacactggagggttttgccagccctctgaccgggatcgccgatgcctcacagtctagcatgcataatgcactgcacatatatatgaatggaaccatgtcgcaggtccagggcagtgcaaatgacccaatcttcttgctgcaccatgcctttgtagacagtatttttgagcagtggttgcggaggcatcggcccctgcaggaagtttaccctgaagccaacgcccctataggccacaacagagaaagctatatggttccgtttataccactctatcgaaacggtgatttctttatctcctctaaagatctggggtacgactatagttatctgcaggatagcgatccagacagtttccaggattacatcaagtcatatctcgagcaagctagtaggatttggtcttggctcctcggggcggctatggtgggcgccgtactgacagccctgctcgccggcctggtgtctctgttgtgcaggcacaaacgcaaacagttgcccgaagaaaaacaaccgcttcttatggaaaaagaggattatcattctctgtaccagagtcacctc

SEQ ID NO: 8046 - DNA, 1587 bp, Artificial Sequence
  derived and/or modified sequence
atgcttcttgctgttctctattgccttctttggagctttcaaaccagcgccggtcactttcccagagcatgtgtgagctcaaaaaaccttatggaaaaagaatgttgtcccccttggtcaggagatcggtccccgtgcggacagctgtctggacggggatcgtgtcagaacatcctcctttccaatgcaccacttggacctcagttcccttttactggggtggatgatcgagaatcctggccgagcgtgttttacaacagaacttgccagtgtagcggtaacttcatggggttcaattgtgggaactgtaagtttgggttttggggaccaaactgcaccgaaagaaggctcctcgtccgtagaaacattttcgatctttccgccccagagaaggataagtttttcgcataccttacccttgcgaagcatacgatctcatctgactacgtcattcctattggaacttacggacagatgaaaaacggatcaactccaatgtttaacgacatcaacatttatgatctctttgtgtggatgcattactacgtgagcatggatgcacttctcggcgggtccgagatctggagggatatcgactttgctcatgaggcacctgctttcctcccctggcatagactgttcttgctgaggtgggaacaggaaatccaaaaactgactggtgatgagaactttaccataccatactgggattggagggatgcggagaagtgcgatatctgcacggacgagtacatgggtggccaacatcctaccaaccctaacctgctttcaccagcatcttttttctcgtcatggcaaatcgtgtgcagcaggctcgaggaatacaactcccatcaaagcctctgtaatggaaccccagaaggtcccctgcgtaggaatcctggaaaccacgacaagtcacggactcctcggcttccttcatcggccgacgtggaattttgtctctcactcactcagtacgaatcaggttcgatggataaggccgcgaatttcagcttcaggaacactcttgagggattcgcaagtccacttaccggaatagcggatgcaagccagagctcaatgcacaatgcacttcatatctacatgaacggcacgatgtcacaagtccaggggtcagctaatgatccaatcttcctgttgcatcatgcctttgtggattcgatttttgaacagtggctccggcgacatcgccctctgcaggaagtgtaccccgaagcgaatgcacccattggtcataatcgggaatcctatatggtgccattcatacccctctacagaaacggtgacttcttcatttcctccaaagacctcggctacgattacagctaccttcaagactccgatcctgattcgtttcaggattacattaagtcgtacctcgaacaagccagcagaatctggtcctggcttcttggagccgcaatggtcggtgcagtcctgactgccctgctcgctggactggtgtcattgctctgcagacacaagagaaaacagcttcctgaagagaagcagccacttcttatggagaaggaggattaccattcgctgtaccaaagccatctg

SEQ ID NO: 8047 - DNA, 1587 bp, Artificial Sequence
  derived and/or modified sequence
atgcttctggctgtcctgtactgtttgctttggtcgttccaaaccagtgcagggcatttcccccgagcatgtgtttcgtcgaagaacctaatggagaaggaatgctgcccaccctggagcggggatcgatcgccgtgtggccagctatccggacgaggatcatgccagaacatactcctctccaacgctcccctcggaccgcagtttccgtttaccggcgtggacgaccgagaatcatggccgtccgtgttttataacaggacgtgccagtgttccggaaattttatggggtttaattgcggcaactgcaagtttggcttctggggaccaaactgcaccgaacggcgacttttggtccgcagaaacattttcgacctgtcagctccggaaaaagacaaattttttgcttatttaaccctcgctaagcatacaatttcatctgattacgtgattcctattggcacgtatggacaaatgaagaatggctctacacccatgtttaacgacatcaatatttacgatttgttcgtgtggatgcattactatgtttcaatggatgcactccttggtggatcggagatctggcgtgatatagatttcgcacacgaggctcctgcctttttaccgtggcatcgattgttcttacttcgctgggaacaagagatacagaagttaacgggggatgaaaattttacaataccctactgggattggagggacgccgagaaatgcgacatttgtactgatgagtacatgggtgggcagcatcccacgaatccaaacctcctttctccggccagtttcttctcctcttggcagatcgtgtgctctagactggaggagtataactcgcatcagagtctatgtaacggaacgccggagggcccacttaggcgaaacccaggaaatcatgacaagtctagaacgcctcggcttccgagctcagccgacgtcgaattctgcctgtcgctgacgcagtatgagtctggatccatggacaaggcggccaacttttctttccggaataccctcgaggggttcgcttcgccccttaccggcatcgcggacgcgagccaatcaagtatgcataatgctttgcatatttacatgaacggcaccatgagtcaagttcagggctccgccaatgatccgatattcttgttacatcatgcctttgtggattccattttcgagcagtggcttaggcgccacaggcctctacaggaagtttatcctgaggccaatgcgcctataggtcataatcgcgagtcctacatggtcccatttatacctctatacaggaatggcgattttttcatttcgagtaaggatttgggttacgactattcttacctgcaggattccgaccccgacagctttcaagattacattaaatcctatctggagcaggcgtcgcggatttggtcgtggctgctgggtgctgctatggtaggagctgtactgacagcattgctcgccggcctggtctctctgctctgccggcacaagcggaagcagctcccggaggaaaagcagccactgcttatggaaaaggaggactaccatagtctataccaaagtcacttg

SEQ ID NO: 8048 - DNA, 1587 bp, Artificial Sequence
  derived and/or modified sequence
atgctgcttgcagttctgtattgtctcctgtggtcctttcagacatcagctgggcatttcccccgtgcttgtgtcagctcaaagaatctgatggagaaagagtgttgcccaccctggtctggtgatcgctctccctgcggacagttgagcggacgggggagttgtcagaatatactgttgtctaatgctcctcttgggccccagttcccctttaccggggtggacgatcgtgagtcctggcccagtgtattctacaaccgcacctgccaatgttctggtaacttcatgggctttaactgcggaaattgtaagttcggcttctgggggcctaactgcacagagcgtcgcctcctggttaggagaaacattttcgatctttccgcccccgagaaggataaattcttcgcttacttgactttagccaagcacaccatcagcagtgattacgtaatcccgatcggaacatatggacagatgaaaaatggatctaccccaatgttcaacgacatcaatatttacgacctcttcgtatggatgcactactatgtgagcatggacgccctcctcgggggatctgaaatctggagagatatcgactttgctcacgaggcccctgcatttctcccctggcacaggctgttcctccttagatgggaacaggagatccagaagttaaccggcgacgagaactttaccataccatactgggattggagggacgccgaaaagtgcgacatttgcacagatgagtacatggggggacaacaccctactaatcctaacttgctgtctccagcttccttcttttcttcctggcagatagtgtgctcaaggctggaagaatataatagccaccagtcgttatgtaatggaacccccgaggggccacttaggaggaatccgggaaatcacgataagtcacgcaccccacgactcccatcatccgcggatgtcgaattttgtctgtcattgacacagtacgagtccggatccatggacaaggccgccaacttctcatttaggaacactctcgagggatttgccagtccgctgactggaatcgcagacgcaagtcagtcatctatgcacaatgctctgcacatatacatgaacggtacgatgtcacaggtgcagggatccgcaaatgatccaattttcctgctgcaccacgcatttgtggacagtatcttcgagcagtggctgcggcgccatagacccttacaagaagtctatcctgaagctaatgcccctatcggacacaatagagagtcatatatggttccattcatccccctgtatcgcaatggggatttcttcatttctagcaaagacttaggctatgactatagctacctgcaggatagtgatccagactcgttccaggactatatcaagtcctacttggagcaggcgtctcgaatctggtcatggctgcttggcgcggctatggttggagctgtgctgactgctctgctcgccggactcgtcagtctgctgtgccgtcataagcggaaacagctgcctgaggagaaacagcccctcctgatggaaaaggaagattatcatagcctctatcagtcgcatctg

SEQ ID NO: 8049 - DNA, 1587 bp, Artificial Sequence
  derived and/or modified sequence
atgcttctcgcagtgctgtactgcttactgtggtccttccaaaccagcgcaggccacttccctcgcgcgtgcgtctctagcaaaaacctgatggagaaagaatgctgtccgccttggtccggggatcggagcccgtgtggtcaactgagcggccgcgggagttgccaaaacattctgctgagcaacgcacccctgggtccccagtttcctttcacaggggtagatgatcgggagagttggccaagcgtgttctataatagaacctgtcagtgctccggcaacttcatggggttcaattgtggcaactgtaagttcggtttctggggccctaattgcactgagcgccgtctgctggtgcgtagaaacatcttcgatctgtcggcgccggagaaagacaaattctttgcctatctcaccctggcgaagcacactattagcagcgattacgttatccctatcgggacctacggccagatgaaaaatggaagcacgccaatgtttaatgatatcaacatctatgatctgttcgtatggatgcactattacgtgagcatggacgctctgctgggcggctcagaaatttggcgagacattgacttcgcgcacgaagctccagccttcctgccgtggcatcgtctgtttctactgcgctgggaacaggaaatccagaagctcactggtgatgagaatttcaccattccatactgggactggcgtgatgcggagaaatgcgacatctgcactgatgagtatatgggcgggcagcaccctactaatcctaatctgctgtcaccagcaagcttcttcagctcttggcagattgtctgcagccgcctggaggagtataattctcatcagagcctgtgcaatggaaccccagaaggaccactgcgccgtaacccgggtaaccacgataagtctcgcaccccaagactgccatcaagcgccgacgtggaattctgtctgtccctcactcaatatgagtctggtagcatggataaggctgcaaatttttctttccgtaatacccttgaaggctttgcaagccctctgactggtatcgcagatgccagccaatcatctatgcacaacgctttgcacatatacatgaatggtaccatgagccaggttcagggctcagcaaatgaccctatctttctgctgcaccatgcctttgtcgattcaatattcgagcaatggttgaggcgtcatcgcccactgcaggaagtttatccggaggctaatgcaccgataggccacaaccgcgagtcttacatggttccatttattcccctttatcggaatggggatttcttcattagtagcaaagacttgggttatgactattcgtacctgcaggattccgaccctgatagcttccaagattacattaagagctacctcgaacaggcttcccgcatttggtcgtggctgttgggtgccgcaatggtaggggccgtgctgaccgcactgctggctggcttggtttctctgctgtgtcgtcataaacgcaagcagctgccagaggagaagcagccactcctgatggaaaaagaggattaccatagcctctaccagagccacctt

SEQ ID NO: 8050 - DNA, 1587 bp, Artificial Sequence
  derived and/or modified sequence
atgctcctggccgttctctactgcctgctctggagctttcaaacttcagccggccatttccctcgagcatgtgtctcatccaagaatctcatggaaaaggaatgctgcccgccgtggtcgggtgacaggagcccatgtggccagctgtccggacgggggtcatgccaaaacatccttctgtccaacgccccactcgggcctcaattcccattcaccggagtggacgatagagaatcatggccgagcgtgttctacaaccgcacttgccagtgctcaggaaatttcatgggcttcaactgtggaaattgcaaatttggattctggggcccgaactgcactgaaaggcgactgctcgtccgccgcaatatctttgacttgtcggctccggaaaaagataagttcttcgcctacctcaccctggccaaacacactatctcttcagactacgtgatcccaattggaacctacggtcagatgaaaaacggatcaactccgatgttcaacgacatcaacatatatgatctgttcgtgtggatgcattactacgtgtcgatggacgccctccttggtggttcggaaatctggagggatatcgatttcgcacacgaggccccagctttcttgccgtggcaccgcctgttcctcctcagatgggagcaggaaatccaaaaacttaccggcgatgaaaacttcaccattccttactgggactggcgcgacgctgagaagtgcgatatttgcacggacgaatacatgggaggacagcatcctaccaatccgaacctgctgtcacctgccagcttcttctccagctggcagatcgtgtgtagccgcctcgaggagtacaactcacaccagtccctgtgcaatggaacgccggaagggccgctgaggcgcaacccaggaaatcacgataaatcccggacgccgcggctcccgagctcagcggatgtggagttttgcctgtcgttgactcagtacgaatctgggtcgatggataaagcggcaaacttttccttccgcaatactctggaaggattcgcctcccccttgacgggcatcgcggacgcctcgcagtcctcaatgcataatgctctgcacatctacatgaatggtactatgtcccaggttcaagggagcgccaatgacccgattttcctgctccaccacgccttcgtggatagcatttttgagcaatggctgcgccggcaccggcctcttcaggaagtctacccagaggccaatgcccccatcggccataacagggaatcgtatatggtcccatttatccctctgtaccggaacggagatttcttcatcagttccaaagatctgggatacgattacagctacctgcaggatagcgaccccgactcgttccaggactacatcaagtcctacctcgaacaggcaagcaggatctggtcgtggctgctgggagcagcgatggtgggcgcagtcctgactgcccttttggcaggcctggtcagcttgctgtgtcgacataaacggaagcagctgccagaggaaaagcagccgctgctgatggagaaagaggactaccatagcctgtatcagagccatttg

SEQ ID NO: 8051 - DNA, 1587 bp, Artificial Sequence
  derived and/or modified sequence
atgcttttagctgtgttgtactgtttattgtggtcattccagacgtccgccgggcacttcccccgagcttgcgtgtctagtaagaacctgatggaaaaggaatgctgtcccccatggagtggtgatagatccccgtgtggacagctctcgggcaggggctcatgccagaacattctcctgagcaacgctccgctcggaccacagtttccattcacgggcgtggatgatcgagagtcttggcctagcgtgttctacaatagaacttgtcagtgcagcggcaacttcatggggtttaactgtggtaattgtaaattcggcttctgggggcccaattgtactgaaagaagactgctcgttaggaggaatatcttcgacctgagcgctccagagaaggataaattctttgcctacttaacattggctaagcacacaattagtagcgattatgtgattcctattggcacctatggccagatgaagaacggctctacaccaatgttcaacgatatcaatatctatgatctgttcgtgtggatgcattactacgtgtcaatggacgccttattgggcgggagcgagatatggcgggacatcgactttgcacacgaggctcccgcgttcctgccatggcaccggctattcctcctgaggtgggaacaggaaatccaaaaactgacaggcgacgagaacttcaccataccatactgggactggcgcgatgctgaaaagtgcgatatttgtacagacgagtacatgggcggacaacacccaactaatccgaatctgttaagccccgcaagttttttcagcagttggcagatcgtgtgctccagactggaggagtataacagccatcaaagcctgtgcaacgggaccccggagggcccattgcgccgcaatccaggcaaccacgataagtcccgcacaccccggctcccttcctccgcagatgtggagttctgcctgagcctcacccagtatgagagcggtagcatggacaaggcggctaattttagcttcaggaacactcttgagggatttgcttcacctcttactggaattgcagatgcaagccagagctccatgcacaatgcgttacatatttacatgaacgggaccatgtcgcaggttcagggatccgctaacgatccgatcttcctgctgcaccacgccttcgtggattctatctttgagcagtggctacgcagacatcgcccacttcaggaagtgtatcccgaggccaacgccccaatcggtcacaaccgcgagagctatatggtgcccttcatccccttatatcgcaatggagactttttcataagttccaaggacttgggttacgattatagctatcttcaagacagtgacccagactctttccaggactacattaaatcctaccttgagcaggcgagtaggatctggtcgtggttgctgggcgccgcaatggtgggggcagtgttgaccgcgttactggctggcctggtttccttgctctgccgtcataaaaggaagcagctacccgaagagaagcagccactgttgatggaaaaagaggactatcactccttatatcaatctcatttg

SEQ ID NO: 8052 - DNA, 1587 bp, Artificial Sequence
  derived and/or modified sequence
atgttactggccgtcctttactgtttgctatggtccttccagactagcgctggacattttcctagagcttgtgtctcatcaaaaaacctgatggaaaaagagtgttgccccccttggtcaggggatcggagcccttgcggccagctgtctgggcgcggcagttgccagaatattttgctttccaatgctccactgggcccacaatttccattcacgggcgtggacgaccgcgagagctggcccagcgtcttctataatcgaacttgtcagtgctccggtaattttatggggttcaactgcgggaattgcaaattcggattctggggccctaactgcaccgagcgccgtcttctcgtccgtcgcaacattttcgatctcagcgcacccgagaaggacaagttctttgcatatctgacattggctaagcacactatctctagcgactacgttatccccatcggtacctacggacagatgaagaacggttcaacgcccatgtttaacgatattaacatctatgaccttttcgtgtggatgcattactacgtctccatggatgcgttactgggaggatctgaaatttggcgggacatagatttcgcacatgaagccccggcgtttctcccatggcacaggctgtttctattgaggtgggaacaagagatccaaaagttaacaggagatgagaattttacaattccctattgggattggagggatgccgagaagtgcgacatctgtactgacgaatatatgggtgggcaacaccccacaaaccctaacttactatcccccgcctctttctttagtagttggcagatcgtgtgctcgcggttagaggaatacaactctcatcagagtttatgcaacggcacacctgaggggcccctgaggcgaaatccagggaatcacgataagtctagaacaccgcgactaccgtccagcgcagacgttgagttttgtctgtcactgacacagtatgagagtggttccatggacaaggctgcaaattttagctttcgtaacacccttgaggggtttgcctcccctctcacaggtatcgctgatgccagccagtctagtatgcacaatgctctgcatatttacatgaacggcaccatgtctcaagtgcagggctccgccaatgacccaatattcctgctgcaccatgctttcgtggattccattttcgaacagtggttaagacgtcacaggcccctgcaggaagtttaccccgaagccaatgcgcctattggccacaatcgcgagtcctatatggttcccttcatcccactatatagaaacggtgactttttcatttcctctaaagatctcggctacgattattcttacctgcaagattctgaccccgattccttccaggactacattaagtcatatctcgaacaggccagccggatctggagctggctgttgggggctgcaatggtcggggcagtgctgacagctcttcttgccggccttgtgtcgctgctgtgtcggcacaagagaaagcagctcccggaagaaaaacagccactccttatggaaaaagaggattaccacagcctgtaccagtctcacttg

SEQ ID NO: 8053 - DNA, 1587 bp, Artificial Sequence
  derived and/or modified sequence
atgctgttggccgtgctgtattgtctgctatggtcatttcagacatcagcaggtcattttcctcgggcgtgcgtaagctctaagaatctgatggaaaaagagtgctgcccaccatggtccggggatcgaagcccatgtggccaactatctggaagagggagctgtcagaacatcctgttatctaatgcccccctgggacctcaattccccttcactggagtggatgaccgggagagctggccgtctgtgttctataaccgaacctgtcagtgtagcggcaatttcatgggctttaactgcggcaactgcaaatttgggttctggggtccaaactgtactgaaagaaggctgctggttaggagaaatatctttgatcttagcgcacctgagaaggataaattcttcgcatatttgacactcgccaagcatacaatctctagcgattacgttatccccatcggcacttatggacagatgaaaaatgggtcgacccccatgttcaacgatatcaatatttatgacctcttcgtgtggatgcattactacgtttccatggatgctttactggggggttcagagatctggagagatattgattttgctcatgaagccccagcctttctgccttggcacaggctctttctcctaagatgggaacaggagatccaaaaactgactggagatgaaaacttcacaattccatattgggactggagggatgcagagaaatgtgatatttgcacggatgaatacatgggcggccagcatcccactaaccccaatctgctgtcaccggctagctttttctcatcatggcagatcgtgtgctcccgcctggaagagtacaactctcatcagagtctgtgtaacgggacacctgagggcccccttagaaggaaccccggcaatcacgacaaatctcgaactccccggctccccagttctgccgacgtggaattttgccttagcctgacccagtacgaaagcgggtcaatggacaaagcggcaaacttttcatttcgaaacacactggagggatttgccagtcccctgaccgggatcgccgacgcaagccagagttcgatgcataatgctctgcatatttacatgaatggtactatgtcccaggttcaaggcagcgcgaacgaccctatttttctgctacatcatgctttcgtggactccatcttcgaacagtggcttcgcagacacaggccacttcaggaggtataccccgaagccaacgcccctatagggcataatagggaatcctatatggttccatttatcccgttgtacagaaatggcgattttttcatctcctccaaggatctgggctatgattactcctaccttcaggatagcgatcccgacagttttcaggattatattaagtcctacctagaacaggcttcgagaatctggtcctggctactcggtgctgccatggtcggtgcagtgcttactgcattgcttgcggggttggtctcactactttgtagacacaagaggaagcaactgccagaagaaaagcaacccctccttatggagaaggaggattaccacagcctttatcagtcccatctc

SEQ ID NO: 8054 - DNA, 1587 bp, Artificial Sequence
  derived and/or modified sequence
atgctcctagccgtactgtattgtctcctctggtcctttcagacttcagcgggacactttcctcgggcctgcgtatctagtaaaaacctcatggaaaaggaatgctgtcccccttggtccggggaccgctcaccctgcgggcagttgtctgggcggggaagttgccagaatatattactgtctaatgcaccccttgggccccaattcccgttcactggagtcgatgatcgggagtcctggccaagtgtgttctataaccgcacttgtcagtgtagtgggaactttatggggtttaattgtgggaattgcaaattcggattctggggacccaactgcacagagcggcggctgctcgtcagaagaaacatattcgatctctctgccccagagaaagataaattcttcgcttacctgacattagctaaacatactatctcatctgattatgtgatcccaatagggacatacgggcagatgaaaaacgggtctactccaatgtttaatgatataaatatttatgatttgtttgtgtggatgcactattatgtgtccatggatgcactattgggaggaagtgaaatctggagggatatagattttgcacatgaagcaccagccttcttaccttggcatagactatttttgttacgatgggaacaggaaatacagaaacttacaggggatgaaaatttcacaatcccttattgggattggagggatgccgaaaaatgtgacatatgcacagatgaatatatggggggacagcatcccacaaatcctaacctcctctcccccgcttctttcttctcttcctggcagatcgtgtgctccaggctcgaagagtacaattcccatcagtcactctgtaatgggactcccgaagggcctcttagacggaatccagggaatcacgataaatcacgaactcccagactaccttcgtctgcagatgtcgaattctgcctttcactaacacagtacgagagtgggtcaatggataaggctgctaatttctcttttcgaaatacattggaagggttcgcatccccattaacagggatcgccgatgcctcacagtcttccatgcacaacgccttacatatatatatgaacgggacaatgtcccaggtgcaggggtcagctaatgatcctatatttctgctacatcacgcttttgtggattccatcttcgaacaatggctccgtcggcatcggccactccaggaggtctatcccgaagccaacgcccctataggacacaatagggaaagttatatggttcccttcatccccctgtacagaaacggagatttttttatttcttcaaaagatctaggatacgattattcctatcttcaggattccgaccccgatagttttcaggattatataaaatcttatctcgaacaagcatcacgaatctggtcatggctactgggggctgcaatggttggagcagttctgactgctctgctggccgggctagtctctttgttatgccgacataaaaggaaacagctgcctgaagaaaaacagcccctcttgatggagaaagaagattatcactctctctatcaatcccatctc

SEQ ID NO: 8055 - DNA, 1587 bp, Artificial Sequence
  derived and/or modified sequence
atgctgcttgccgtcttgtactgtctgctgtggtcctttcaaacgtccgcaggccactttcctagagcatgtgtgtcgtcgaaaaacctgatggaaaaagagtgttgtccaccctggtccggggacaggagcccttgtgggcaactgtcgggtcgggggtcctgccaaaacattctgcttagcaacgcaccactggggcctcagtttccctttacgggcgtggatgaccgggaatcgtggccgagcgtcttttacaacaggacctgccagtgctccggcaacttcatgggattcaactgtggaaactgtaaattcggattctggggacccaattgtactgaacgcaggctcctggtaagacggaatatcttcgacctgtcggctcccgagaaggataagtttttcgcatacctcaccttggcaaagcatactatttctagcgactacgtgatcccgattggcacttacggacagatgaagaatggatcaactcccatgtttaacgatatcaacatctacgatctttttgtctggatgcactactacgtcagtatggatgcgttgctcggtggatcagaaatttggagggatatagattttgcacatgaagcgcccgcattccttccctggcatagactgtttctgttgaggtgggagcaggaaattcaaaaacttaccggtgatgaaaactttaccataccttactgggactggagagacgcagaaaagtgcgatatctgtacggatgagtacatgggcggccagcatcctactaatcctaaccttctgtcacctgctagctttttcagctcgtggcagatagtgtgttcaagactcgaagaatacaatagtcatcaatcgctttgtaatggaacccctgagggaccgctgcgaagaaatccaggaaatcatgataagagccgtaccccccgcctgccgtcctccgcggacgtcgagttctgtctgtcacttactcaatacgagtcaggttctatggacaaggccgccaacttttcatttagaaacactcttgaaggattcgcatctcccctgactggtattgcggacgcatcgcaatcgagcatgcataatgctctccacatttacatgaacggtaccatgagccaagtgcagggttccgctaacgaccccatctttctgctgcaccatgcgtttgtggattccatttttgagcagtggctgaggagacaccgccctttgcaggaggtgtaccctgaagccaacgcacccattggacataaccgtgaatcatatatggtgccgtttattcccctttaccgaaacggtgatttcttcatatcttcaaaagaccttggatatgactattcgtacctgcaagacagcgatccggatagcttccaggactacatcaaatcgtaccttgagcaagcctcacgcatttggtcgtggctcctcggagccgcgatggtgggtgcagtgcttaccgcactgcttgcagggttggtgtccttgctttgcagacataagcggaaacagctgcctgaagaaaaacagccactcttgatggagaaggaagattaccattccctctaccaatcccacttg

SEQ ID NO: 8056 - DNA, 1587 bp, Artificial Sequence
  derived and/or modified sequence
atgttgttagctgtcctctactgtctgctttggtcattccagaccagcgcaggtcacttcccgcgggcctgtgtctcaagtaagaatcttatggaaaaggaatgctgccctccgtggagtggagatcgctctccttgcggacagctgtccggccgaggatcgtgtcaaaacatcttacttagtaatgctcccctcggaccgcaatttccgtttacaggcgtcgacgatagagagtcttggccatcagttttctataaccggacctgccagtgttcggggaactttatgggatttaattgcggaaattgtaaattcgggttctggggtcccaactgcaccgaacgaaggcttcttgtaaggcgtaacattttcgatctgagcgcccctgagaaagacaagttcttcgcatatctgacccttgctaagcacactatatcatcagattatgtgatcccaattgggacctatggtcagatgaagaatggcagtacgcctatgtttaacgatattaatatttatgatttgtttgtatggatgcattattatgtgtccatggacgccttgcttggtggctctgaaatctggcgtgatattgactttgctcatgaagcaccagctttcctcccatggcatcgtctgtttctgcttagatgggaacaggaaattcagaaactcactggtgacgaaaattttactataccgtattgggactggcgagacgctgaaaagtgcgacatttgtacagatgaatacatgggtggtcaacatcctacgaaccccaacctgttgtcccctgcctcttttttttctagttggcaaatcgtatgcagtaggcttgaggagtacaactcccatcaatcactctgtaacggtacgcctgaaggtccactcagacgtaaccccggaaaccatgataagtctagaacccccagactaccttcaagtgctgatgtggaattttgtttgtcacttacgcaatatgagtctgggagtatggataaagcagctaatttttcttttaggaacacgttggaaggctttgctagtcccctcaccggtatagcagatgcttcacaatcctctatgcataatgctcttcacatatacatgaacggaaccatgtcccaagtacaagggtctgctaacgatccaatttttttgcttcaccatgcattcgtcgatagcattttcgaacaatggttgagacggcatagaccgcttcaagaggtctacccggaggcaaacgcaccaattggtcacaaccgggagagctatatggtcccatttatcccactctaccgaaacggtgatttttttataagttccaaggacctggggtatgattattcttatcttcaggatagtgatcctgactcgttccaagattatattaaaagctaccttgaacaggccagtcgtatatggtcttggctgttaggagctgctatggttggggcagtgcttacagcgttacttgcaggtctcgtgtccttgctgtgccgacacaagcgaaagcagctcccagaggagaaacagcctctgttgatggagaaagaagattatcattcactatatcagtctcatttg

SEQ ID NO: 8057 - DNA, 1587 bp, Artificial Sequence
  derived and/or modified sequence
atgctcttggccgttttgtactgcctcctgtggtccttccagacctcggcgggccacttcccacgggcgtgtgtctcctcgaagaacctgatggagaaagaatgctgtccgccgtggtcgggtgatcgctcgccttgcggccagctctcgggtcggggaagttgtcaaaacattctgctgtcaaatgccccgttgggaccgcagtttccgttcaccggagtggacgatcgggaatcgtggccatcggtgttctacaatcgaacttgccaatgttccgggaatttcatgggctttaactgtggaaattgcaagttcggattctggggcccaaactgtacggaacgccggctcctcgtcaggcgcaatatcttcgatctttcagcgccggaaaaggacaagttcttcgcttacctgacgctggcaaagcacactatctcctccgactacgtaatcccgattggcacttacgggcagatgaagaacggctcgacgccgatgtttaatgacatcaacatctacgatctcttcgtgtggatgcattactatgtgtcaatggacgctcttctggggggctccgaaatctggcgtgacatcgacttcgctcatgaggctccggcgttcctcccttggcaccggctctttttgctgcggtgggaacaggagatccaaaaactgaccggtgacgagaatttcaccatcccatactgggactggagggacgccgaaaagtgcgatatttgtaccgacgagtatatgggtggacagcacccgactaacccgaatctgttgagccccgcctcgttcttctcatcctggcagattgtctgctcgcggctggaagagtataactcccatcaaagcctctgcaatggcaccccggagggcccgctcagaagaaatccaggaaatcatgacaaatcacggaccccgcggctgccgtcatcggccgacgtcgagttctgtcttagcctgactcagtacgagagcggttcgatggacaaggctgcgaacttttccttcagaaacaccctggaaggattcgcgagccctctgactggaatcgcagacgcctcccaatcaagcatgcacaatgcgctgcacatttacatgaacggaactatgtcgcaggtgcagggatcagccaatgacccgattttcctgttgcaccatgcgtttgtggattccatctttgagcagtggctcagaaggcaccggccactccaagaggtgtaccccgaagcgaacgcgccgatcggacataaccgcgaatcgtacatggtgccgtttattccactctaccggaacggtgatttctttatctcgtcaaaagatcttggttacgattacagctacctgcaggactccgatccggactcctttcaggattacatcaagagctaccttgaacaagcatcgaggatctggtcgtggctgctcggcgctgccatggtgggagccgtgctgaccgccctgctcgcaggactcgtgtcactgctctgccgccacaagaggaagcagctcccagaagaaaaacagccgctgttgatggaaaaagaagattaccactccctctaccaatcgcacttg

SEQ ID NO: 8058 - DNA, 1587 bp, Artificial Sequence
  derived and/or modified sequence
atgcttttggcggttctgtactgtttgctttggtcattccagactagcgccggccactttccgagagcctgcgtgagctcaaagaacctgatggaaaaggaatgttgccccccgtggtcgggggacagaagcccatgtggacagctgtcgggtagaggcagctgccaaaacatcctgctgtcaaacgccccgctcgggccgcagttccccttcaccggcgttgatgacagagaaagctggcctagcgtcttttacaaccggacttgccagtgctccggcaactttatgggattcaactgcggaaactgcaagttcggtttctggggtccgaattgcactgaacggcggctgctcgttagacggaacatcttcgacctgagcgcgccggagaaggataagtttttcgcgtaccttactctggctaagcacaccatctcctctgattacgtgattcctatcggaacttacgggcaaatgaagaacggatcaaccccaatgttcaacgatatcaacatctacgatctcttcgtctggatgcactactatgtctcgatggatgcactgctcggaggctctgaaatctggagagatatcgactttgcacatgaggcccctgcgttcctcccatggcaccgattgttcctgctgcgatgggaacaagagatccaaaagctgaccggggacgagaacttcaccattccgtactgggattggcgcgacgcagagaaatgcgacatctgtaccgatgaatacatggggggtcagcaccctacgaacccgaacctcctctcaccggcatccttcttttcgtcgtggcaaattgtgtgctcaagactggaagaatacaattctcatcagtccctgtgcaacggtaccccggaaggccccctccggagaaaccctggaaaccatgataagtctcgtaccccccggctcccatcatccgctgacgtggaattttgcctgagcctgactcagtacgagtcagggtctatggacaaagccgccaacttttcctttcggaatactctggagggattcgcctcgccgctgaccggtattgcagacgcttcccagtcgagcatgcataatgccctgcacatctacatgaatggaactatgtcccaagtgcagggatccgctaacgatcccatctttctgctccatcacgccttcgtcgactcgatcttcgaacaatggctgaggcgccatagaccgctgcaagaagtctacccggaggcaaatgcgccgatcggtcacaatcgcgaaagctacatggtgcctttcatcccattgtaccggaacggcgatttcttcatctcttccaaggacctgggatacgattactcatacctgcaagacagcgaccctgacagcttccaggattacatcaagtcgtacctcgaacaggcgtcgcgcatctggagctggctgctgggagcggcaatggtcggggccgttctcaccgcattgttggctggactcgtctcgctcctgtgccgccacaaacgcaaacagctgccagaggaaaaacagccacttctgatggagaaggaggactatcactcactgtaccagtcacacctg

SEQ ID NO: 8059 - DNA, 1587 bp, Artificial Sequence
  derived and/or modified sequence
atgctcctggcagtcctttattgcctgctgtggtcctttcagacgtccgcgggtcacttcccccgcgcctgcgtttcttccaagaatctgatggagaaagagtgctgtcccccctggagcggggacagatctccctgcggacagctttccgggagagggtcgtgccaaaacatcctcctctccaacgctcctctaggcccccagttccctttcactggggtggatgacagagagtcttggcctagcgtgttttataacagaacttgtcagtgctccggtaacttcatgggattcaattgcggcaactgtaaattcggcttttggggtccaaactgcaccgagcgccgcctcttagtgcggcgaaatatctttgacctaagtgcccccgaaaaggacaaatttttcgcctacctgactttggccaagcatactatctcatctgactacgttattcctatcggaacctacggccagatgaaaaatgggagtaccccgatgtttaatgacattaacatttatgatttgtttgtttggatgcattattacgtgtccatggacgctctcctgggaggaagtgagatttggcgcgatattgatttcgcccatgaggcgcctgcattcctcccctggcataggctgtttcttctgcgctgggagcaggagatacaaaaattaaccggcgatgagaactttaccatcccttattgggactggcgcgacgcagaaaaatgcgacatttgtacagacgagtatatgggaggccagcatccaacaaatccgaacctcctcagccccgctagcttcttcagttcctggcaaatagtgtgctcgcgtctcgaagagtacaatagccaccaatcactgtgtaacggaacacccgaagggcccctgaggcggaaccccgggaaccacgacaagagccgaactccccggcttccatcttccgctgacgtggaattttgcctgtctctgactcaatacgaatcaggctcaatggacaaagccgccaacttcagcttccggaataccctggagggattcgcaagtccactgaccggcatcgctgatgcgtctcagtcaagtatgcataatgcactgcatatctacatgaacggaaccatgtcccaggtgcaagggagcgcaaatgatcctatatttctgctccatcacgctttcgttgatagcattttcgagcagtggctcagacgacacaggcccctccaagaagtgtaccctgaggctaatgcccccatcggccataaccgtgagagctatatggtgcctttcattccattgtatagaaatggggatttcttcatctctagcaaggatctaggatatgactactcttatctccaagactccgatcccgactcctttcaggactacatcaagagctaccttgaacaagcatcgaggatctggtcttggctgctgggggcagcaatggtgggcgccgtccttacagcattactggccggactagtgtccctgctttgtcggcataagcggaagcagcttcccgaggaaaaacagcccttacttatggagaaggaggattatcactctctctaccagtcccacttg

SEQ ID NO: 8060 - DNA, 1587 bp, Artificial Sequence
  derived and/or modified sequence
atgttactcgccgttctgtactgcctgctctggtcctttcaaacatcagctggacacttccctcgggcctgtgtgagttcaaagaatctcatggagaaggaatgctgccctccgtggtctggagatagatccccttgcgggcagctgtcagggcgggggtcctgccagaatatcctgctgtccaacgccccactgggaccacagttcccatttactggtgtcgacgatcgtgaatcctggccttctgtgttctataaccgcacctgtcagtgtagcggaaacttcatgggattcaactgcggcaattgcaaatttgggttttgggggccgaattgcactgagcggagactgcttgtccgccgaaacattttcgacctgagcgctcccgaaaaagacaagttcttcgcctacttgactttggccaagcacacaattagctccgattacgtaatacccatcggaacctacggccagatgaagaatgggtctacacctatgttcaacgatatcaacatatacgacttatttgtgtggatgcattactatgtatcgatggacgccctgctagggggcagcgaaatctggagggatatagactttgcacacgaagcgcccgcatttttaccatggcacaggttgttccttttgaggtgggagcaagaaatacagaaactgactggcgatgaaaacttcactatcccgtactgggattggcgggacgccgaaaagtgtgacatttgtaccgatgaatatatgggtggacagcaccccaccaatcctaacttgctatcgcccgcgtccttcttctcatcgtggcagatcgtctgctcccgcctcgaagaatataactctcaccagagtttatgtaatggcactcccgaagggccacttaggcgaaaccccggaaatcacgataaatcaaggaccccgcggctgccaagttctgcagatgtggagttctgccttagcctcacgcagtacgaatccggtagcatggacaaggccgctaatttttctttccgcaataccctagaggggttcgcttcaccactgacaggtatcgccgatgcctctcagtcgtctatgcataacgccttacatatctatatgaacggaaccatgtcccaggtgcagggttctgcaaatgatccaattttcctccttcaccatgccttcgtggattcaattttcgaacaatggctgcgacggcacagacccttgcaagaagtttaccccgaggcgaatgcgcccataggccacaaccgggagtcctacatggtcccattcataccgctatacaggaatggagatttttttatcagtagcaaggacctgggctacgattatagttatctgcaagactctgatccggattcgttccaggattatatcaagtcttacctggagcaggcgtcgcggatctggagctggctgctgggcgcggctatggtgggagcagttctgaccgcactactggcaggtctcgtgtccctgttatgtcgccataagaggaaacagctccctgaggaaaaacagcctttactgatggagaaagaggattaccactcgctatatcagagccacctc

SEQ ID NO: 8061 - DNA, 1587 bp, Artificial Sequence
  derived and/or modified sequence
atgctgctggccgtcctgtattgcttactctggtcctttcagacttctgcaggtcacttccccagggcgtgtgtgtcatctaaaaacttgatggaaaaggagtgttgcccgccatggagtggagatcgttctccttgcggccaacttagtggccgcggctcttgccagaacatacttttgagcaacgcgcccctaggaccacagttcccctttacaggagtggacgaccgagagagctggccctccgtgttttataaccgcacttgtcagtgttctggtaactttatgggattcaattgtggaaactgtaagttcgggttctggggtcctaactgcaccgagcggcgcctgctggtgagaagaaatattttcgatctgtcagccccagaaaaagataagtttttcgcatacctgactcttgcaaaacatacgatcagttcagactacgtgattcctatcggtacttacggccagatgaagaatggcagcacaccaatgtttaatgacataaacatttacgatctctttgtgtggatgcactattacgtaagcatggacgcactgctcgggggatctgaaatttggcgggacattgactttgctcatgaagcgccagccttcctcccctggcaccggctgttcctcttgcggtgggagcaggaaatccaaaagcttaccggcgacgaaaatttcacgataccctactgggactggcgcgacgctgagaagtgtgacatttgcaccgacgagtatatgggcgggcagcaccccacgaatccaaatcttctgtcccctgcctcgttttttagttcatggcaaattgtttgcagccggcttgaagagtataactctcaccagtcactgtgcaatggcacgcctgagggacccctgcggcgtaacccagggaatcacgataaatccagaactccccgcctgccgagcagcgcagacgtcgagttctgtctgtctttgacacaatacgagagcggctcaatggacaaggcggcgaattttagttttcgtaacacactggaagggttcgcctctcccctgactgggatcgccgatgccagccagtccagtatgcacaatgcgctccatatttacatgaacggtacgatgtcacaggtgcaggggtcggctaatgaccctattttcttgctgcaccacgcgtttgtggattctatttttgaacaatggctgcgcaggcaccggccattgcaggaagtgtatcccgaagccaatgccccaataggacacaatagggagtcctatatggtgcctttcattcctctatatcgaaacggggacttttttatttccagtaaggatttgggctatgattattcatacctgcaggatagcgacccagattctttccaggattacataaaatcctatctggagcaggcctcccgcatctggtcatggctcctcggcgcggccatggtgggagcagtactgactgcacttctggcagggctggtctccttgctgtgcaggcataagaggaaacagcttccagaagagaaacaacctctgctgatggaaaaagaggactaccatagtttatatcaatcacacctg

SEQ ID NO: 8062 - DNA, 1587 bp, Artificial Sequence
  derived and/or modified sequence
atgctactggccgttctgtactgcctgctttggtccttccagacatctgcgggccattttccgcgagcctgtgtgtcatcaaagaatctcatggagaaagagtgctgtccgccttggagtggcgataggagtccttgtggtcaactcagtggccggggatcctgtcaaaacatcctgctcagcaatgccccactgggaccccagtttccgttcacaggtgtggacgatcgtgagtcatggccttcagtcttttataacagaacctgtcagtgtagcggtaacttcatgggcttcaattgcggaaattgtaaatttgggttttggggacccaattgcacggaaaggaggctgctggtgagacggaatattttcgacttgtccgctcctgaaaaagacaagtttttcgcgtatctcacactggcgaagcacacaataagtagtgattatgtgattcccatcggcacatacggccagatgaaaaacgggtccactcctatgtttaatgacattaacatttacgatttgtttgtgtggatgcactactacgtcagtatggacgctctattggggggctccgagatctggcgagatatcgactttgctcacgaagcccccgccttcctaccctggcaccgattgttcctcctgagatgggagcaggaaattcagaaactgaccggggacgaaaacttcaccatcccttattgggactggagggacgcagagaagtgcgatatatgtacagatgagtacatgggcgggcagcatcccacgaaccccaacttacttagcccggcctcttttttttcttcctggcaaattgtctgctctcgtctcgaggagtataactctcatcaatccctgtgtaacggaactccagagggccctcttagaagaaatcccggcaatcacgacaagagccggactcccaggcttccgtcttctgccgacgtggagttttgcctctcgttgacccagtacgagagcggcagtatggacaaggcagcaaacttctcctttcggaatacgcttgagggctttgccagccctctgaccggcattgcagacgccagtcaatcaagtatgcacaatgcattgcacatttatatgaatgggacaatgtctcaggtgcaaggatccgccaatgatcccatcttcttgctgcaccatgcgtttgtcgacagcatcttcgaacaatggctgaggaggcaccggccgctacaagaggtgtacccagaggcgaatgctccaatcggtcacaatcgcgagtcctatatggtcccttttattcctctgtacaggaacggggactttttcattagttccaaagatctgggatacgactactcctacctgcaagactccgaccccgactcatttcaggattacataaagtcctatttggaacaggcctcacgtatctggtcgtggctgctcggtgccgccatggtgggggcagttctgacagcactcttggccggtttggtgagtctgctgtgtaggcacaaaaggaagcagctgcccgaagaaaagcagccactgcttatggagaaagaggactatcactccctttaccagagtcacctt

SEQ ID NO: 8063 - DNA, 1587 bp, Artificial Sequence
  derived and/or modified sequence
atgctgctcgcagttttatactgcctgctgtggagctttcaaacaagcgcagggcatttccctagggcctgcgtgagctccaagaacctaatggaaaaagaatgctgtcctccttggtccggtgataggtccccctgcggacagctctccggcaggggttcatgtcagaacattctcctgtctaacgcccccctcgggccacagtttcccttcacgggggttgacgatcgggagtcatggccttcggtgttttacaacagaacctgccaatgttctggaaactttatgggttttaactgtggaaactgcaaattcggtttctggggtccaaactgcacagagagacgtctccttgtgcgccgaaatattttcgacttgtctgcgccagaaaaagacaagttctttgcttacctgacactggcaaaacacaccattagctcagactacgtcataccaattggcacctacggtcagatgaagaatggttcaactcccatgttcaacgacattaatatctacgatttgtttgtctggatgcactattacgtctccatggatgcactgctgggcggatccgagatttggcgagacattgatttcgctcatgaggctcctgcctttctgccctggcaccgtctgtttctgctgcggtgggagcaggagattcagaaacttaccggtgacgaaaactttactattccttattgggattggcgggatgctgagaagtgtgacatatgcactgatgagtatatgggtgggcaacacccaactaaccctaatcttctgtcgcccgcctccttcttttcgtcatggcagatcgtgtgttcgcggctcgaagagtacaattcgcaccagtctctgtgtaacgggacaccggagggaccgctgcgccggaaccccgggaatcatgataagtctcggacgccccgcctgccatcctccgctgatgtcgaattctgtttatctctgacccagtacgaaagcggttcaatggataaagccgcaaatttttccttccgcaacaccctggaggggttcgccagccccttaacaggaattgcagacgcctctcaatcttctatgcataacgctttgcacatctatatgaacggaacaatgtcccaagtccaggggagcgccaacgatccgatctttctgctgcatcatgcctttgttgatagtatctttgagcagtggctgcggaggcacagaccccttcaggaagtctaccccgaagctaacgcgccgattggccacaaccgggagagctacatggttccttttatcccattatacaggaacggggattttttcatttcgagtaaagacctcgggtatgactactcatacttgcaggactcagacccggacagtttccaggattatattaaatcatatctggaacaggcttcgaggatttggtcttggttgttaggtgctgccatggtaggcgccgtgctcaccgctctgttggctggacttgtaagcctgttgtgtcgccacaagcggaaacaactgcccgaagagaagcagccattgctcatggagaaggaggattaccactctctgtatcagagccatctc

SEQ ID NO: 8064 - DNA, 1587 bp, Artificial Sequence
  derived and/or modified sequence
atgctgcttgccgttctctattgcctgttatggtcctttcaaacctctgctgggcacttcccaagggcctgcgtgtccagtaaaaatctcatggagaaagaatgttgtcccccttggtctggcgataggtctccgtgcgggcagctgagcggacggggatcctgccaaaacatcttactgagtaacgctcccctgggcccacagtttccattcacaggggttgatgaccgggagtcatggccaagtgttttttacaaccggacctgccagtgctcaggaaatttcatgggatttaactgtggcaattgcaaattcggattttggggtcctaactgcacagagcggcggctcctggtgcgcaggaacatcttcgatttgagtgcccctgaaaaggataagtttttcgcttacctcacattagcgaaacacaccatttcttccgactacgtgatacccataggtacgtacggtcagatgaagaacgggtcaacaccgatgttcaatgacatcaatatctacgatttgttcgtgtggatgcactattacgtctcaatggatgccctattaggtgggagcgagatctggagggatatcgacttcgcacacgaagcaccagcctttctcccgtggcacaggctttttctccttaggtgggagcaggagattcaaaagctcacgggcgacgaaaactttaccatcccatactgggattggagggatgccgaaaaatgtgatatctgcacagacgaatacatgggcgggcagcatcctaccaaccctaatctcctaagtcccgccagcttttttagttcctggcagatcgtctgctccagattagaggaatacaattcacaccagtccctttgcaacggaacccccgaagggccgttgagacggaatcctggtaatcacgacaagtctcgcacaccacgcttaccctctagtgcggatgtggaattttgtttatcccttactcagtacgagtccggctccatggacaaagctgccaatttcagcttcaggaacaccctcgaaggttttgcctctcctctgacaggaattgcagatgcttcccagagttctatgcataacgctctccatatatacatgaatggtacaatgtcccaggtccagggcagcgccaatgaccctattttcctgctgcaccacgcgtttgtagactcgatcttcgagcagtggttaagacgccatcggccccttcaggaagtctatccagaggctaatgcaccaatcggacacaatcgggaatcttatatggttccctttattcccttgtatcggaacggtgactttttcatttctagcaaggatctgggatacgactacagctatctgcaggactctgatcccgactcttttcaggactatatcaagtcttatcttgagcaagcatcgcggatctggtcatggctgctgggcgccgctatggtgggggccgttttaactgctttactcgctgggctcgtctcactgctctgcagacataaaaggaagcagctccctgaggaaaaacagccccttctgatggagaaggaagactatcactctctataccagtctcactta

SEQ ID NO: 8065 - DNA, 1587 bp, Artificial Sequence
  derived and/or modified sequence
atgctcctggcagtgctgtactgcctgctgtggtccttccaaaccagcgcgggccacttcccgagggcttgcgtcagctcgaagaatctgatggaaaaggaatgctgtcctccgtggtcgggcgaccgaagcccctgcggtcaactgtccgggaggggaagctgccagaatatcctcctgtcgaacgctccgctcggcccccagtttccgttcactggcgtggatgaccgcgagtcctggccctcagtattctataaccgtacctgccagtgttctggcaacttcatgggattcaattgtggaaattgcaaatttgggttctggggtcctaactgtaccgagcggcggctgctggtgcgcagaaacatcttcgacctgtcggcaccggaaaaagacaagttcttcgcctacctgaccctcgcaaagcacacgatcagctcggattacgtcattccaatcggcacttacggacagatgaaaaacggtagcacgccgatgtttaatgacatcaacatttacgacctctttgtctggatgcactactacgtgtcgatggacgccctgctgggtgggtccgaaatctggagagatattgactttgcacacgaggcgcctgccttccttccgtggcataggttgttcctcctgcgctgggagcaggagatccagaaactcaccggagatgaaaacttcaccattccgtactgggactggcgagacgcggaaaaatgcgacatctgcactgatgaatacatggggggtcagcatccaactaatccgaaccttctgtccccggcctcctttttctcgtcgtggcagatcgtctgcagccgcctggaggaatacaattctcatcaatcactgtgcaacggaactccggagggaccactgcggcgcaatcctggtaatcacgacaagtcgcggactccacggctgccgagcagcgctgacgtggaattctgtctgtcgctgacccagtacgaatcgggctcaatggataaggcagcaaatttctcattccggaacactctggaaggatttgcatcgcctctgaccgggatcgctgacgcctcccaatcgtcaatgcataacgcgttgcacatatacatgaacggaactatgtcccaggtgcagggtagcgcgaacgatccaatctttctgttgcatcacgctttcgtggattcaatctttgaacagtggctcaggcggcacagaccgctgcaagaggtgtaccccgaggcaaacgcccctatcggacacaatagggaaagctacatggtcccgtttatcccgctgtaccggaacggagatttcttcatctcaagcaaagatctcggatacgactattcgtacctccaagactcagatcctgactcgttccaggactacatcaaatcctacctggaacaagcctcccgaatctggtcctggcttctgggtgccgcaatggtgggggctgtgctgactgcgctcctggccggtctggtgtccctgctctgccgtcacaaaagaaagcagctgccggaagaaaagcagcctctgctcatggaaaaggaggattaccacagcttgtaccagtcccacctg

SEQ ID NO: 8066 - DNA, 1587 bp, Artificial Sequence
  derived and/or modified sequence
atgctcctcgctgtgctgtattgtcttctctggtcattccagacttccgccggtcattttccgagagcatgcgtctcatctaaaaatctgatggaaaaggaatgctgcccaccttggtccggggacagatcaccatgcggacagctatcggggcggggcagctgccagaatatcctgctgagcaatgctccactgggcccccagtttccttttaccggggtggacgatcgtgagtcgtggccaagcgtgttctataataggacatgccagtgtagcgggaatttcatgggcttcaactgcgggaactgtaagtttggattctggggcccaaattgcacggagcggaggttgctcgtgcgccggaacatttttgatctctccgcgccagaaaaagacaagttttttgcctatctgacactagcaaaacacaccatttcatcagattacgtcatcccaatcggtacttacggacagatgaagaatggttccaccccgatgtttaacgacattaatatatacgaccttttcgtttggatgcactattatgtgagtatggacgcgttgctgggaggctccgaaatctggcgcgacattgatttcgcccacgaggctccggcctttcttccctggcatcgcctcttcttgctgcggtgggagcaggaaattcagaaactgaccggcgacgagaacttcacaattccctattgggactggagggatgctgagaagtgtgatatctgtaccgacgaatatatgggcggccaacatccaaccaacccaaatctgttaagtcccgccagtttttttagcagttggcagattgtctgcagtagattggaggagtataattcacaccagtcgctgtgtaatggtacacctgaaggaccactgcgcagaaaccccgggaaccatgacaagtcgcgaacaccacgattgcccagttccgcagatgtggaattctgcctgtctcttacacagtacgagagtgggagcatggacaaggcagccaatttctcttttcgcaataccctggaggggttcgcctcccccctcacgggtatagccgatgccagccagtcaagcatgcacaacgcactccatatttatatgaacggtacaatgtctcaagtgcagggttctgcaaatgatccgattttcctcctgcatcacgcatttgttgattcaatctttgaacagtggctgcggaggcaccggccactccaagaagtctaccctgaggctaacgcccctattggccacaacagggaaagctacatggtgccgttcattcctctctaccggaatggtgacttcttcatttcatcaaaagatctcgggtacgactacagctacctccaagactccgaccctgatagctttcaggattacattaagtcctatctggagcaggccagccgaatatggagttggctgctcggcgctgcaatggtcggcgccgtgctgaccgcccttctcgccggcctcgtgagcttactctgtagacataaacgcaagcagctgcccgaggagaagcagcccttactcatggagaaagaggactatcattccctctatcagagtcacctg

SEQ ID NO: 8067 - DNA, 1587 bp, Artificial Sequence
  derived and/or modified sequence
atgttattggcagtgctctactgcctgttgtggtccttccaaacaagcgccggccactttcctagggcatgcgtatcctccaagaatcttatggaaaaggaatgttgcccaccttggtccggcgatagatctccttgtggacagctgtctgggcggggatcctgtcagaacatcctgcttagcaatgccccactgggacctcaatttcccttcaccggagttgatgaccgggaatcatggcctagcgtgttttacaaccggacttgtcagtgctctgggaatttcatgggctttaattgcggaaattgtaaatttgggttttggggaccaaactgcacagagcgccgactcttagtccggcgcaacattttcgatctgtctgcccctgaaaaagataaattctttgcctacctcactctggcaaagcataccatctcatcggactatgtgatccccatcggaacctatggacaaatgaaaaacggctccactccaatgtttaacgatattaacatatatgacctgtttgtgtggatgcactactatgtgtcaatggatgctctgctagggggctctgagatctggcgggacatcgacttcgcccatgaagcccctgccttcctcccctggcatcgcctgttcctcctgcggtgggagcaagagatccagaaactgaccggagatgaaaactttacgatcccctattgggactggagggacgcagagaaatgcgacatttgtactgatgagtatatgggtggacaacacccgacaaaccctaatttgctgtcaccagcttctttctttagttcttggcagatagtatgctcaagattggaagaatacaattcgcatcagagcctctgcaacggtactcccgaagggccccttcgacgaaaccccggcaatcatgataagagtcgcacgccaagacttccaagctccgccgacgtcgagttctgcctgagcctgactcagtacgaatccggctcaatggataaagctgcaaacttctcttttaggaacaccttagaagggtttgccagcccacttaccggaatcgctgatgcgagccagagctccatgcacaacgccctgcacatctacatgaatggcaccatgagccaagtacagggttctgccaatgacccaattttcttgttacatcacgcctttgtggactccatctttgaacagtggctccggcggcaccgaccactccaggaagtgtacccagaggccaatgcccctattggacataacagagaatcttatatggtgcctttcatacctttgtaccgcaacggggatttctttatttcttcaaaggatctcgggtatgactatagctatctgcaagattcagacccagactcttttcaggactatataaagtcttatctggaacaggcctcaagaatctggtcttggctgcttggcgctgctatggtcggtgccgtgttgaccgcgttgctagccggcctggtaagtctcctgtgccgccacaagaggaaacagcttcccgaagagaagcagccccttttgatggagaaggaagactaccactcgctctaccagtctcactta

SEQ ID NO: 8068 - DNA, 1587 bp, Artificial Sequence
  derived and/or modified sequence
atgctgcttgccgtactgtactgcttgctgtggagcttccagacttccgccggacacttcccacgcgcatgtgtgtcctcgaaaaacctgatggagaaggaatgctgccccccttggtccggcgaccgatccccatgtggtcaattgagcggacggggatcgtgtcaaaacatccttctgtcgaacgcaccgctgggcccgcagtttccgttcaccggcgtagacgaccgagagagctggccgtccgtgttctacaataggacctgccagtgctcgggcaatttcatgggatttaactgcggcaactgtaagttcgggttttggggaccgaactgcactgagcggcggctgttggtgcgccgcaacattttcgacctgagcgcaccggagaaggacaagtttttcgcctatctcacgctggcaaagcacactatatcctcggattacgtgatcccgattggtacttatggccagatgaagaacggctcaactccgatgttcaacgacatcaatatctacgacctgttcgtgtggatgcactactacgtgtcgatggacgcccttctgggaggttccgagatctggagagacatcgatttcgctcacgaagctccggctttccttccttggcacagactgttcctgttgagatgggaacaggaaatccaaaagctgaccggggatgagaactttaccatcccgtactgggattggcgggatgcagaaaagtgcgacatttgcaccgacgaatacatggggggccaacatccgaccaatccgaatctgctgagcccagcctccttcttttcttcctggcaaattgtttgctcccgcctggaggaatacaactcgcatcagagcctgtgcaacggaactccggagggaccactccggcgcaatcccggcaatcatgataaatcaagaactccacgcctgccatcatccgcggacgtcgaattctgtctctccttgacccagtatgaatcgggcagcatggataaagcggcaaacttttcgttccggaacactctggagggattcgcttccccgcttaccggtatcgcggacgccagtcagtcgtcgatgcataacgcgctccacatctacatgaatggaaccatgagccaagtgcagggcagcgccaacgatccaatcttcctcctgcaccacgctttcgtcgattcgatctttgaacaatggctccgccggcatcggccgctccaggaagtgtaccctgaggctaacgcaccaatcggccataaccgcgaatcatacatggtgcccttcatcccgttgtataggaacggagacttctttatctcatcaaaagatctgggatacgactactcctacctccaggactctgacccagattcctttcaggattacataaagtcgtacctcgaacaagcgtcgagaatctggtcgtggctgcttggtgccgccatggtgggggccgtgctcacggcccttctcgctggcctggtttcgctgttgtgcagacacaagcgtaaacagctgcctgaggagaaacagccactgctcatggaaaaggaggactaccattccctttaccagagccacctg

SEQ ID NO: 8069 - DNA, 1587 bp, Artificial Sequence
  derived and/or modified sequence
atgctgctggccgtgctgtattgcctgctttggtccttccagacttcggcaggacactttccccgcgcctgcgtcagctcgaaaaatctcatggaaaaggagtgctgtccaccatggtccggagatcgctcgccttgcggtcagctttcgggccgcgggagctgtcagaacatcctgttgtcaaatgcgccactcggacctcagtttccattcactggggtggatgatcgggagtcatggccaagcgtgttctacaatcggacctgtcaatgttcaggcaactttatgggttttaactgtggcaactgcaagtttggattttggggcccaaactgcactgagagacgtcttttggtccgaagaaatatctttgatctttcggcacctgaaaaggacaagttttttgcgtaccttaccctcgccaagcatactatctcatcggactacgtgatccccatcggaacctacggacagatgaagaacggttccactcctatgtttaatgacattaacatatacgatcttttcgtgtggatgcattactatgtctcgatggatgcgctcctgggaggatccgaaatttggagagatatcgattttgcacatgaggcaccagctttcttgccttggcacaggctttttcttcttagatgggaacaagagattcagaagctgacgggagacgaaaacttcaccattccgtactgggattggcgggatgcggaaaaatgtgacatctgcactgatgaatacatgggtggacaacatcctaccaacccaaatctgctttccccagctagcttcttttccagctggcaaatcgtctgctcgagactggaggagtacaatagtcaccagtcgctgtgcaatggtacccccgaagggcctttgcggcgtaatccaggaaaccatgacaagtctcgcaccccgaggttgccaagctccgcggacgtcgagttttgtcttagcttgactcaatacgaatcagggagcatggacaaggctgcaaacttttcgttcagaaacaccctcgagggatttgcaagccctctgactgggattgcagatgcgtcccaaagctcgatgcacaacgcactgcatatctacatgaatggtactatgtcacaggtgcaaggttcggcaaacgatccaatctttctgcttcaccatgcattcgtggacagcatctttgaacaatggctgcgccgccacagacctcttcaagaagtgtacccagaagccaacgctcctatcggacataaccgggagtcttacatggtgccattcattcccctctaccgcaatggtgactttttcatttcctccaaggatctgggatacgattactcgtacctgcaggattcggacccggattcgtttcaagattacattaagtcctacctggaacaggcatccaggatctggtcctggttgcttggtgctgctatggttggagcagtgcttaccgctcttctcgcaggattggtatcgcttctctgtcgacacaagcggaaacaactgcctgaggagaagcaacctcttcttatggagaaggaagattatcatagtctctaccaatcccacctc

SEQ ID NO: 8070 - DNA, 1587 bp, Artificial Sequence
  derived and/or modified sequence
atgctgctggcggtcctgtactgtctcctgtggtcatttcagacgagcgccgggcacttcccaagggcctgtgtgtccagtaaaaacctcatggagaaggaatgttgcccgccttggagcggagacaggtcaccatgtggtcagctgagtggaagaggctcgtgtcaaaatatcttgctgtcaaacgcccctttgggaccacaattcccatttactggagttgatgatagggagtcctggccttccgtattctacaacagaacctgccagtgcagtggcaatttcatgggctttaactgcgggaactgcaaatttggattttggggccctaattgcacagaacggcggctgctcgtgaggagaaacatttttgacctgtccgccccggagaaggataaatttttcgcctatcttaccctagctaaacacaccattagcagcgactatgtaattcctatcggcacatacggacagatgaaaaatggttccactcctatgttcaacgacatcaacatctacgacctgtttgtgtggatgcattattacgtcagtatggatgccctgctgggcggcagcgaaatctggagggatatcgatttcgctcacgaagctcccgcgttcctcccatggcaccgtctgtttctgttgagatgggagcaggagattcagaaactgacaggggatgaaaatttcacaatcccatactgggactggcgcgatgccgagaagtgtgacatttgcaccgacgaatatatgggcggccaacaccctacaaaccccaaccttctcagtccagccagcttcttttcgtcatggcagatcgtctgttcacggctcgaagaatacaattcgcatcagtccctgtgcaatggcactccagagggaccgttaagaaggaatcccggcaatcatgacaaatccagaacacctcgcctgccctccagtgccgacgtcgaattctgtttatctctgactcagtatgaatctggatcgatggacaaggccgctaattttagttttcgaaacacccttgaagggttcgcgagcccgctgactgggattgcagatgcctcacaaagctctatgcacaacgctctgcacatctatatgaatggcactatgtcccaggtgcaaggaagcgcgaacgatcccatattcctgctccaccacgccttcgttgacagtatatttgagcaatggctgaggcgccaccgcccgctgcaagaggtttatccggaggcaaacgcccccatcggtcataaccgcgaatcttacatggtaccattcatacccctgtacaggaacggcgatttttttatcagcagtaaggatctgggatacgactattcttatctgcaggattcagaccccgattcattccaggattatatcaaaagctatttggagcaggcgtcgcgtatatggtcgtggttgttaggcgccgctatggtgggggcggtcctgaccgccctactggcaggcctggtgagtttgctctgccggcacaaaaggaagcagcttcccgaggagaaacagcctctcctcatggaaaaagaagattatcacagcctgtatcagtcccacttg

SEQ ID NO: 8071 - DNA, 1587 bp, Artificial Sequence
  derived and/or modified sequence
atgcttcttgccgtgctctattgtctgctctggagctttcagacaagcgcgggacattttcctcgcgcgtgcgtgtcatcaaagaacttgatggaaaaagagtgctgccccccgtggtctggcgacaggtccccatgcgggcaactctctggccgggggagctgtcagaacatcctactatccaatgcccccttgggcccacagttcccattcactggagtggatgatcgcgaatcttggccaagcgttttttacaaccgtacatgccaatgctcgggaaacttcatgggctttaattgcggtaactgtaagtttggattttggggcccgaactgcaccgagaggcggcttttggttcgaaggaacatctttgacctctccgctccagaaaaagacaagttttttgcctacttgaccctagctaagcacaccatctcctcggactatgtgatcccaattgggacatacggccagatgaagaatggtagtactccaatgttcaatgatattaacatctacgacctgttcgtgtggatgcactattacgtctctatggacgcactcctcggcggaagcgagatttggagagatatagatttcgcccacgaagctcccgcctttctgccatggcatcgacttttcctcctccgatgggaacaagaaatccaaaagctcaccggcgacgaaaactttaccattccttattgggactggcgtgatgccgagaaatgcgacatctgtaccgatgagtacatgggaggacagcatccaacaaaccctaacctcctgagccccgcgtctttcttttcttcttggcagatcgtgtgctcccgcttggaggaatataactcacatcagtccctgtgcaacggtacacccgagggacccttgcgacggaatcccgggaaccatgataagtctcgcaccccacgcttaccaagctccgccgatgttgaattttgcttgtctttgacacaatatgaatccggttcaatggataaggccgcaaacttcagttttagaaacacgctggagggctttgccagcccactgacaggaatcgctgatgcgtcacaatcatcaatgcataacgcactgcacatctacatgaatgggacaatgtctcaagttcagggtagcgccaacgacccaatctttttactgcatcatgccttcgtcgactcaatctttgaacagtggctgcgacgtcatcggcctttgcaggaagtgtaccctgaggctaacgcccctattgggcacaaccgcgagagttacatggtgcccttcattccattgtatcgtaatggagatttctttatctcatctaaagatctgggctatgattactcctacctccaagacagcgaccccgactcatttcaggactatataaagtcttacttagagcaggcctccaggatatggtcatggctgttgggagctgccatggtaggggccgtgctgacagccctgctcgctgggctggtatctctgctctgccggcacaagagaaagcagctacctgaagaaaagcaacccctgctaatggagaaagaagattaccacagcctgtatcaaagccattta

SEQ ID NO: 8072 - DNA, 1587 bp, Artificial Sequence
  derived and/or modified sequence
atgctcctggcggtgctctactgtctgctgtggtcgttccaaacttccgcaggacacttcccgcgggcatgtgtgtcatccaaaaatctcatggagaaagaatgctgtccgccgtggagcggcgaccgctcgccatgtggccagctttcgggccggggctcatgccagaatatcctgctgtctaacgcgccactgggaccacaattccctttcacgggcgtggatgatcgcgagtcgtggccaagcgtgttttacaaccgaacctgccagtgcagcggaaatttcatgggatttaactgcggaaattgtaagtttgggttttggggacctaactgcaccgaaagaaggttgttggtgcggaggaatatcttcgatctctccgccccagaaaaggacaagttttttgcatatctgactctggccaagcacaccatctcctcagattacgtcatcccgattggaacctatggacagatgaagaacggctcgaccccaatgttcaatgatatcaacatctacgatctgtttgtgtggatgcactactatgtgagcatggatgccctgctgggcggaagcgaaatctggcgcgatattgacttcgcacatgaagcgcctgcattcctgccgtggcatcgcctcttcctcctcaggtgggagcaagaaatccagaaactcactggagacgaaaacttcactatcccatactgggattggcgcgacgccgaaaaatgcgacatctgcaccgacgagtacatgggtggacaacacccgactaacccgaacctgctgtcgccagcatcatttttcagctcgtggcagatcgtgtgctcgcggcttgaggaatacaattctcatcagtccctctgcaacggaactccggaaggaccgctcagacggaacccgggaaatcatgacaagagtcgcactccgcggctcccatcgtccgccgacgtggaattttgcctgagcctcacccaatacgagtcgggatcgatggacaaggcggccaactttagcttcagaaatactctggaaggatttgcgtccccactgaccggaattgccgatgcgtcgcagtcatccatgcacaacgctctgcatatctacatgaatggaaccatgtcccaggtgcagggatctgccaacgatccaatcttcttgctgcaccacgccttcgtggactcaatcttcgagcagtggctgcggcgccacagacctctgcaggaggtgtacccagaagctaacgcgccaattgggcacaaccgagaatcgtacatggtccctttcatcccgctgtaccggaacggggacttcttcatttcgtccaaggacctgggatacgactacagctacctgcaagactcggaccctgattccttccaagactacatcaaatcttacctggaacaagccagtagaatctggtcgtggctcctgggcgcggccatggtcggagcagtcctgactgccctgttggcagggctcgtctcactcctgtgcaggcacaagcgcaagcagctcccagaagagaaacagccgctgctcatggagaaggaggactaccatagcctctaccaatcgcatctg

SEQ ID NO: 8073 - DNA, 1587 bp, Artificial Sequence
  derived and/or modified sequence
atgctgcttgctgtgctgtactgtctgctgtggtctttccagaccagcgctggccacttcccacgcgcctgcgtgtcaagcaagaacctgatggaaaaagagtgttgtcctccctggtccggcgatagatccccatgtggccagctttccggtcgcggaagctgtcagaacatcctgctgtctaatgctccacttggcccccaatttcctttcacaggtgtggacgaccgcgagagctggccatccgtgttttataataggacttgtcagtgctctggaaatttcatgggtttcaactgcggcaactgtaagttcggcttctggggtcccaattgcacagagaggcgtcttctggtacgcagaaatatcttcgacctgtctgctcctgaaaaagataaatttttcgcatacctgaccttggccaagcacaccatctcctctgactacgttatcccaatcggtacatatggacagatgaagaacggtagcactcccatgttcaatgatataaatatttacgatctctttgtgtggatgcactactatgtgtccatggacgcccttctgggaggttccgaaatctggcgcgatatcgacttcgctcacgaggcaccagccttcctgccttggcaccgcttgtttctgttgcgctgggaacaagaaatacagaagttgactggagatgaaaattttaccataccttactgggactggagggacgccgagaagtgtgacatctgcacagatgagtacatgggcggtcagcatccaactaacccaaacctgctcagtccagcatctttcttctccagctggcagatcgtgtgttcccgcttggaagaatacaactcacaccagagtctctgtaacggtactcctgagggtcctttgcgcagaaaccccggtaatcatgataagtcccgtacaccaaggttgccctcatcagccgacgtagagttctgtctctccctgactcagtatgaaagcggttccatggataaagccgccaatttctccttccgcaacactctggagggcttcgcttcacctcttaccggaatcgctgacgctagtcagtcttctatgcataacgcactgcatatctacatgaacggcacaatgagtcaagtccagggctccgcaaacgatccaatcttcttgctgcaccatgcttttgtcgactcaatcttcgagcagtggcttcgccgccacaggcccttgcaggaggtataccctgaagcaaatgctcctatcggtcataatcgtgaatcctacatggtgccctttatcccactgtatcgtaatggcgacttctttatcagcagcaaggatcttggctacgattacagttatctccaggattccgaccccgattccttccaggactacattaaaagctatctggagcaggcaagtaggatctggagctggctgctgggcgcagcaatggtcggtgccgtgcttacagccctcctggcaggtcttgtgtctctcctctgtagacacaagcgtaagcaactgcccgaggaaaagcagccactgctgatggagaaggaagactaccactctctgtaccagtctcacctc

SEQ ID NO: 8074 - DNA, 1587 bp, Artificial Sequence
  derived and/or modified sequence
atgctgctggcagtcctctactgtctgctctggtcgttccagaccagcgctggacacttcccacgcgcctgcgtgtcgtcgaagaatctgatggagaaggaatgctgccccccgtggagcggagataggtcgccgtgcggacagctctccggtagaggaagctgccaaaacatcctgctgtcaaacgcgccgctgggaccacagttcccattcactggcgtcgacgatagagagtcgtggccctcagtgttctacaaccggacctgccagtgctcgggaaactttatgggatttaactgtgggaattgcaaatttggcttctggggcccgaactgcaccgagcggaggctcctggtccgccgcaacatcttcgacctgtctgcgccggaaaaagacaagttcttcgcataccttaccctggccaagcataccatctcatccgattacgtcatcccgattggtacttatggccagatgaagaatggttcaaccccgatgtttaacgacatcaatatctatgatctgttcgtgtggatgcactactacgtctctatggatgctttgctgggaggttcagagatctggcgtgacattgatttcgctcacgaggccccagcattcctgccctggcatcgactcttcttgctgcggtgggaacaggaaatccaaaagctgacgggggacgagaacttcaccatcccatactgggattggcgcgatgccgagaagtgcgacatctgcactgacgaatacatgggaggacagcacccgacgaatccaaacctgctgtcaccggccagcttcttttcatcctggcagatcgtgtgcagccgcttggaagaatacaactcgcatcaatcactgtgtaatggaaccccggagggaccactcagacggaatcccggaaaccatgacaaaagccggaccccacgcctcccgtcctcggctgacgtcgaattctgtttgtcccttactcagtacgaaagcggatcgatggataaggcggccaacttcagcttccgcaacactctggaaggcttcgcctcaccactgaccggaatcgccgatgcgtcccagtcgagcatgcataatgcgctccacatttacatgaacggaacgatgtcccaggtgcaaggttcggcgaacgacccgatctttctcctgcaccacgccttcgtcgattcgatctttgaacagtggctccggcggcatcgaccattgcaggaggtgtatccagaagctaatgccccgattgggcacaacagagagtcctacatggtgccgtttatcccgctttacagaaatggagacttctttatcagctccaaagatctcggatacgattactcctaccttcaagactctgaccccgactcatttcaagattacatcaagtcgtatctggaacaggctagcagaatttggtcatggcttctgggcgcagcgatggtgggcgcagtgcttactgcgctgctggctgggctggtgtccctgctgtgccgccacaagcgtaaacagttgccggaggaaaagcagccgctccttatggagaaagaggattaccactcgctgtaccagtcccatctg

SEQ ID NO: 8075 - DNA, 1587 bp, Artificial Sequence
  derived and/or modified sequence
atgcttctcgccgtcctctactgtctgctttggtccttccaaacttcggcgggtcacttccctcgtgcctgtgtgagctcaaagaatcttatggaaaaagaatgttgccctccatggtcgggagatagatccccatgtggccaactttcgggacgggggtcctgtcagaatatccttctgtccaacgcaccacttgggccccagtttccttttactggagtggacgaccgggagtcgtggccttcagtgttttacaaccggacgtgccaatgctccggcaacttcatggggttcaattgcggaaactgtaagtttggattttggggcccaaactgtactgaacgacggctcttggtgcggaggaacatttttgacctcagcgcccctgaaaaagacaagttttttgcatacctgaccctggcgaaacataccatctcatcggattatgtgatcccaattggtacttacggacagatgaagaacggttccactccaatgtttaacgacattaacatttacgacctgtttgtctggatgcactactacgtgtcgatggacgcacttcttgggggaagcgaaatatggagagatatcgattttgctcacgaagcaccagcttttctgccgtggcatcgcctgtttcttctgcggtgggaacaagaaatccagaagctcacgggggatgagaactttaccattccatactgggactggagagatgcagaaaagtgtgatatttgcaccgatgagtacatgggaggtcaacaccctacgaaccccaatctgctgtccccagcatcctttttctcctcctggcaaattgtgtgctctcggctggaagaatacaatagccatcagtccctctgtaatgggaccccagaaggaccgctcagaagaaaccccggaaaccatgataagagccggacgcctagacttccttcatcagccgacgtggaattttgcctgtcgctcactcaatacgaatcaggatcgatggacaaggcagcgaacttctcgttcaggaacacccttgaaggattcgcatccccattgactggtattgccgatgctagccaatcaagcatgcacaacgcactgcatatctatatgaacggaactatgtcccaagtccaaggatccgcgaacgatccaatctttcttcttcatcatgcgtttgtggatagcatctttgagcagtggcttcgcaggcatcggcccctccaggaagtgtacccagaagcaaatgccccaatcggacataatagagaatcgtacatggtcccttttatcccgctttaccgcaacggagacttctttatcagtagcaaagacctgggttacgattattcgtaccttcaagactccgatcccgattcctttcaggattacattaagagctaccttgagcaggcctcgcgaatttggagctggcttctgggggcagcaatggtcggcgccgtgctgactgcactccttgcagggctcgtgagcctgctgtgcaggcataagaggaagcaactcccagaagaaaagcaaccactgctcatggaaaaggaagattaccatagcctgtaccaatcgcatctg

SEQ ID NO: 8076 - DNA, 1587 bp, Artificial Sequence
  derived and/or modified sequence
atgcttctggcagtgttgtactgtctcctttggtcgttccagactagcgcaggtcatttcccccgcgcatgcgttagcagtaagaatctcatggagaaggaatgttgtccaccatggagcggtgatcgctccccttgtggacagctgagcggtcggggatcatgtcaaaacattcttttgtccaatgcaccacttggaccgcagtttccattcaccggcgtggacgatcgcgaaagttggccgtcggttttctacaatagaacctgccaatgctcaggtaacttcatgggatttaactgcggtaattgtaagtttggattctggggtccaaattgcactgagcggcgccttcttgtgagaagaaatatctttgacctgtcggcacccgagaaggacaagttctttgcataccttaccctggcaaaacataccatctcgtccgactacgtgattcccattggtacgtacgggcaaatgaaaaacggctcgaccccgatgtttaacgatatcaacatatacgatctttttgtgtggatgcactactatgtgtccatggacgccctgcttggggggtccgaaatttggcgagatattgactttgcacacgaggcacccgcatttcttccatggcacagactgtttctgctgcgctgggagcaagaaattcagaagctcaccggtgatgaaaacttcactattccatattgggactggagggatgcggagaagtgcgatatctgcacggacgagtatatgggaggtcaacatcctactaatcccaacctgctgtcgccagcatcgtttttctcatcctggcagatcgtgtgttcgagacttgaagagtacaactcacatcagtccctgtgtaacggaacccccgaaggccctctgcggaggaaccctggaaaccatgataaatcgaggactccaaggcttccctccagcgccgatgtggaattttgcctttccctcactcaatacgaatcgggttccatggataaggcagcaaatttctcattccggaacaccctcgagggattcgcatcgccactgaccgggattgcggatgcatcgcaaagcagcatgcataacgccctccacatctacatgaacggtacgatgtctcaggttcagggtagcgcaaacgatcctattttcctcctccaccacgcctttgtggatagcatctttgaacaatggcttcgtagacatcgacctttgcaggaggtctacccagaggccaatgcccctattggtcataacagggagtcgtacatggtgccattcattcctctttacagaaacggcgatttcttcatctcgtctaaagacctcggatacgattactcctatcttcaagacagcgacccagattcctttcaagattacatcaaatcgtacctggagcaggcaagccggatctggtcgtggcttctgggagcagcaatggtgggggcagtcctcactgcccttcttgcgggcctggtgtccctgctctgcaggcataagagaaagcaacttcccgaggaaaaacaacctctcctgatggaaaaggaagattaccatagcctctaccagtcccatctg

SEQ ID NO: 8077 - DNA, 1587 bp, Artificial Sequence
  derived and/or modified sequence
atgctgctagccgttctgtattgcctcttatggtcattccagacctcggccggacatttccctcgggcttgcgtatcttccaagaacctgatggaaaaagagtgctgcccaccatggtccggcgacagatccccatgcgggcagcttagtggtcgagggtcttgtcagaacatccttctctctaatgctccgttaggacctcagttcccatttaccggggttgatgacagagagtcctggcctagcgtgttttacaaccggacttgtcagtgctccgggaatttcatggggttcaactgtggtaattgcaagtttggcttttggggccctaattgcactgagagacgcctgctggtgcggagaaatatctttgacctttccgcccccgagaaagataagttctttgcttatctgaccctggccaagcatacaatatcttcagactatgtgattcccatcggcacttatggccagatgaaaaacggttccactcccatgtttaacgatatcaatatttacgacctctttgtttggatgcactattacgtctccatggatgctcttttgggcggatccgagatctggcgcgacatcgactttgcccatgaggctccggcatttctcccctggcacagactctttttgcttaggtgggagcaagagattcagaagttaacgggggatgagaattttacaataccctattgggactggcgagacgcagaaaagtgtgacatctgtactgacgaatacatgggggggcaacaccccactaacccaaatctgttgtccccagctagcttttttagctcgtggcaaatcgtttgctcacgactggaggaatataacagtcaccaatcactgtgcaacgggactcccgaagggccactgcggcgtaaccctgggaaccatgacaagtcccgcaccccaaggcttccttcgtcagccgatgtggagttttgcctttcgctgacgcagtacgagagtggctccatggacaaggcggcgaacttctccttcagaaacaccctagagggattcgctagccctctgaccggaatagcggacgcctctcagtcttcaatgcacaacgcactccatatctacatgaacggcaccatgtcacaggtacaggggtctgctaacgacccaatatttttactgcaccatgcatttgtcgactctatcttcgagcaatggcttcgcagacacagacctctgcaggaggtttacccagaggccaatgccccgattggtcataatcgcgaatcctatatggtgcctttcatcccattgtacaggaatggagactttttcatttcttcaaaagatttggggtatgactattcttatctccaggactccgatcccgattctttccaggactacattaaaagctatctcgagcaggcttctaggatctggagctggttactgggggccgcgatggttggcgctgtcctcacagctctgctggcgggattagtgagcctgctgtgccggcacaaacgcaagcaactgcccgaggagaagcaacctctgctcatggagaaagaagactatcactctctatatcagtcacatctg

SEQ ID NO: 8078 - DNA, 1587 bp, Artificial Sequence
  derived and/or modified sequence
atgctgctcgctgtcctctactgcctgctgtggtcatttcaaacatctgctggccattttccaagggcgtgtgtgtcctcaaaaaacctgatggagaaggagtgctgtcccccatggagcggagatcggtcaccttgcggacagctgtccggaagaggcagttgccagaacatcctcctgtctaatgctcctctggggccacagtttccattcacgggcgtggacgatcgggagtcttggccctcagtgttctacaaccgcacgtgccagtgctcaggaaacttcatggggtttaattgcgggaactgcaagtttggattttggggcccaaactgcacagaacggcggctgttggtaagacgaaacatttttgacttgtcagctcccgagaaggacaaattcttcgcctacctgaccttggccaagcacaccatatcctctgattacgtcatcccaatcggcacctacggccagatgaaaaatggttctaccccgatgttcaacgacataaatatctacgaccttttcgtgtggatgcactactacgtgtccatggatgcactgttgggggggagcgagatctggcgcgacattgatttcgcccatgaggcgcctgcgttcctgccgtggcatcgactcttcctcttgcgatgggagcaagaaatccaaaaattgaccggcgacgaaaactttacaataccctattgggattggagggatgcggaaaagtgcgatatctgtaccgatgagtatatgggagggcagcacccaaccaatccaaatctgctgtcccccgcttcattcttctcatcttggcagattgtttgcagccggcttgaagagtacaattcccaccagagcctgtgtaatgggacaccggagggcccactgagacgcaaccccggcaatcacgataaatctcgaactcctcggttgcccagctccgctgacgtggagttctgcctttcactgacacagtatgaatccggctccatggataaggccgccaacttctcattcaggaacaccttggaggggtttgcctctccactcacgggcattgccgatgccagccaatcctccatgcacaatgctcttcacatctatatgaatggcaccatgtcacaggtccagggatcagccaacgaccccatttttctgctgcaccatgctttcgtagacagtatcttcgagcagtggctccggagacaccggcctctgcaagaggtgtatcccgaggcaaatgcccccatcgggcataatcgggagagttacatggtgcccttcattcccctgtataggaatggagacttttttatctcctcaaaggacctggggtacgactacagctaccttcaggattctgatcccgatagtttccaggactacattaagtcatatttggagcaagcatctcggatctggtcctggctgttgggcgctgctatggtgggggcagtactgaccgcccttctggcgggtctcgtgtctctgctttgcagacacaaaaggaagcagcttccagaggaaaagcagcccctgctgatggaaaaagaggactatcacagcctgtatcagagccacctg

SEQ ID NO: 8079 - DNA, 1587 bp, Artificial Sequence
  derived and/or modified sequence
atgctgctcgccgtgctctattgtcttctgtggagttttcagacttctgcagggcatttcccccgggcttgtgtttcatcaaagaacctgatggaaaaggaatgctgtcccccttggtctggcgaccgatccccttgtggccagctctccggacgcggatcctgtcagaacatcttactatcaaatgcccccctgggacctcagttcccttttaccggagtagatgatcgagagtcctggccttccgtgttttacaacagaacttgccagtgctctggcaatttcatggggttcaactgcggaaactgtaaattcggtttttggggtccaaattgtactgagcggcgcctactcgtgagaaggaacattttcgatcttagcgccccggagaaggataaattctttgcttacctgaccctggcgaagcacaccataagttccgactatgttatcccaattggaacgtatggtcagatgaagaatgggagcacacccatgtttaatgacatcaatatttatgacctatttgtctggatgcactactacgtctctatggacgcattgctgggggggagtgagatttggcgcgacattgacttcgcccacgaagctcctgccttcctgccctggcatagactatttctgctacgttgggagcaggaaatacagaagctgactggcgatgagaacttcacaattccctactgggattggcgggacgcagaaaagtgcgatatatgtacagatgagtatatgggcggtcagcacccgaccaaccccaaccttctgtcccctgcatcatttttctcttcttggcaaatagtgtgcagccgtctcgaggaatataattcccaccagtcactctgcaatggtacaccagagggtcctctgagacgtaatcccggcaatcacgacaagtcacgaacaccccggctgccttccagtgccgacgttgaattctgtctttctctcacccaatatgaatctggtagcatggacaaagccgccaatttttctttcaggaataccttggaggggttcgcttcccccctgactgggatcgccgacgcgtcacagtcctcaatgcataatgcgttgcacatttacatgaatgggacgatgagtcaggtacagggatcagccaacgatcccatctttctcttacaccacgctttcgtggactctattttcgaacaatggctcagacggcaccggccactgcaggaggtatatcctgaagcaaatgcccccatcggccacaatagagagagttatatggtccccttcatcccactgtaccgcaatggggacttctttatttcatcaaaagacctcggttatgactattcttatctgcaagatagcgaccctgattcgtttcaagattatatcaaatcctacttggaacaagccagccgcatttggtcatggctattgggtgctgcgatggttggagccgttttaaccgccttgctggccgggctggtcagcctgctttgtagacacaagaggaagcaacttcccgaggaaaagcagcccctcttgatggaaaaggaagactaccattctctctatcaatctcacctt

SEQ ID NO: 8080 - DNA, 1587 bp, Artificial Sequence
  derived and/or modified sequence
atgctgctcgccgtgctgtactgtctgctgtggagctttcaaacttccgctggacacttcccgcgggcttgcgtctcatcgaaaaacctgatggagaaagagtgttgccctccttggtcgggggatcgctccccctgtggtcaattgagcggacgaggctcctgccagaacatcctgctctccaacgcgcctctgggtccgcagttccctttcaccggagtggacgaccgcgaatcgtggccctccgtcttttacaaccgcacgtgccagtgctctggaaactttatggggttcaactgcgggaactgcaaattcggattctggggacctaattgcacggaacgcagattgcttgtgcggagaaacattttcgacctttccgcccctgaaaaggataagttttttgcatatctgaccctggccaagcacactatcagttcggactacgtaatcccaattggcacctacggacagatgaagaatggaagcactccaatgtttaacgatatcaatatctacgatttgttcgtgtggatgcactactacgtcagcatggatgcgcttcttggcggctccgagatctggagagatatcgacttcgctcacgaggcaccggctttcctgccgtggcaccgcctgttcctgctccgctgggagcaggaaatccagaagctgaccggagacgagaacttcactatcccatactgggactggagggatgcagaaaaatgtgatatctgcaccgacgaatacatgggaggacagcacccgaccaatcctaacctgctcagcccagcgagctttttcagctcctggcaaatcgtgtgctctcggctggaagagtataactcacatcagtcgctctgcaatggaactcctgaaggaccactgaggagaaaccctggcaaccatgacaagtcacgcacccctcggcttccgtcgtccgccgacgtggaattctgtctgagcctcacccagtacgagtcaggatccatggacaaggccgctaacttttcattccggaacactctggaagggtttgcgagccctctcaccggaatcgccgatgcctcccagagcagcatgcacaacgccttgcacatatacatgaacggtaccatgtcgcaggtgcagggatcggcgaacgatcctatctttttgctgcatcatgcttttgtggactcaatctttgagcagtggctgcgccgccaccgcccgcttcaggaagtgtacccagaagccaatgctccaatcggccataaccgagaatcatacatggtgccattcattcccttgtaccgcaacggggactttttcatcagctcgaaagatcttggatacgactactcatacctccaggatagcgatcccgattctttccaggactacatcaagagctacctcgagcaggcttcgcgtatttggtcatggctcttgggagcagcgatggtgggagcagtgcttactgccctgctggcgggattggtttcgctcctgtgcagacacaagcgcaagcagctgccagaggaaaagcagccactcctgatggaaaaggaggactatcactcactgtaccaatcccatctg

SEQ ID NO: 8081 - DNA, 1587 bp, Artificial Sequence
  derived and/or modified sequence
atgctgctcgccgtcctctattgcttgctgtggagcttccagaccagcgctggccacttcccgcgcgcttgcgtgagttcgaaaaaccttatggagaaggaatgctgtccaccctggtcgggggacagatccccctgcggacagctgtcgggccgcgggtcatgtcagaatatcctgctttctaacgccccgctgggaccccaatttccgttcactggcgtcgacgatcgggagtcctggccttctgtgttctataacagaacctgtcagtgctccggcaacttcatgggctttaactgtggaaattgcaagttcggattttgggggcccaattgcacggagcggcgtctcctggtgcgccgtaacattttcgatctgagtgccccggagaaggacaagttcttcgcttacctgaccctggccaagcataccatcagctcagattacgtgatccctatcggaacttatgggcagatgaagaatgggtcaaccccgatgtttaacgatatcaacatctacgacctgttcgtttggatgcattactacgtgagcatggacgcacttctgggaggtagcgaaatttggagagacatcgacttcgcacacgaagctccggcttttctgccgtggcacagactgtttctcctgaggtgggagcaggagatccaaaagctgactggagatgagaatttcactatcccgtactgggattggcgcgacgccgaaaagtgtgatatatgcactgacgagtacatgggcggacagcatcccactaatccgaacctgctgtcgcccgcgtcattcttcagctcatggcagatcgtgtgctccaggctggaggaatacaactcccaccagtccttgtgcaacggaacgcctgagggtccgctgaggagaaatccgggtaaccatgacaaatcaagaactccgcggctgccatcatcagctgacgtcgaattctgcctgagcctgactcaatacgagagcggatcaatggataaggccgccaacttctccttccgcaacactctggaggggtttgcctcgccgctcaccggcatcgccgacgcctcgcaatccagcatgcataacgccctgcatatctacatgaatggaacgatgtcgcaggtgcaaggatcggctaacgacccgattttcttgctgcaccacgcgtttgtcgactccatattcgaacagtggcttcggagacacagaccgctccaggaggtgtacccagaagctaatgccccaatcggacacaatcgcgagtcgtacatggtgccatttatcccattgtaccgcaacggtgatttctttatcagctccaaggatcttggatacgactactcctatctccaagattccgacccggattcctttcaagactacatcaagtcgtaccttgagcaggcaagccggatttggtcatggctgctgggtgcggccatggtcggggccgtgctcaccgctctcctggcaggattggtttctctgctctgtcgccacaaaagaaaacagctccctgaagagaaacagcctctcttgatggagaaagaggactaccattcgctctaccagtcgcatctg

SEQ ID NO: 8082 - DNA, 1587 bp, Artificial Sequence
  derived and/or modified sequence
atgcttttggcggtcctctactgcctgttgtggtccttccaaacttcggccggacacttcccgagagcctgcgtgtccagcaagaacctgatggagaaagaatgttgtccaccgtggagcggtgaccggagcccatgcgggcagctgtccggccgtggatcatgccagaatatcttgttgtcaaacgcgccgctgggacctcagtttccatttaccggagtggacgaccgggaatcctggcctagcgtgttctacaaccgcacctgccagtgttcaggaaacttcatgggattcaactgcgggaactgcaagttcggtttttggggtccaaactgcactgaaaggcgcctgctcgtgcgccgaaacatttttgatctgtcagcgcccgaaaaggacaagttcttcgcttacctgactctggctaagcacaccatctcgtccgactacgtgatcccaataggaacttacggtcagatgaaaaatggttcaactcctatgtttaacgacatcaacatctatgacctcttcgtctggatgcattactacgtttcgatggatgcactcctcgggggctctgagatttggagggatatcgatttcgcccacgaggcgccagcctttttgccgtggcacagactgtttctgctgagatgggaacaagagatccagaagttgaccggagatgagaactttaccatcccgtactgggattggcgtgacgctgaaaaatgcgatatctgcacggacgaatacatgggtggacagcatccaaccaacccgaatctgctgtcgccggctagcttcttctcctcatggcagatcgtctgttcgagactcgaagaatacaattcacaccagagcctgtgcaacggaacgccggaaggaccactgcggaggaatccgggtaatcacgataagtcacggactcctcgcctgccgtcgtccgcagacgtggaattctgcctgtcgctgactcagtacgagagcggatcgatggacaaggcagcgaatttctcattcaggaataccctcgagggatttgcctcacctctgaccggtatcgcggatgccagccaatcatccatgcacaatgccctgcacatctacatgaatggcactatgtcccaagtccaaggaagtgccaacgacccgatcttccttctgcatcatgcgttcgttgacagcatttttgaacaatggctgcggcggcataggcctctgcaggaagtgtacccggaagcaaacgcgccaattggtcataatcgggagtcctacatggtccctttcatcccgctgtaccgaaacggagacttcttcatctccagtaaagacctgggatacgactactcgtaccttcaagactcagaccctgactcgttccaagactatatcaaatcctacctggaacaggcatcccggatctggagctggttgctgggcgccgcaatggtgggcgctgtgctgacggcactgctggccggactcgtctccctcctctgtcgccacaagcgcaaacagctgccagaggaaaagcagccgctgttgatggaaaaggaagattaccattcgttgtatcaatcccatctt

SEQ ID NO: 8083 - DNA, 1587 bp, Artificial Sequence
  derived and/or modified sequence
atgttgcttgctgtgctttactgtttgctgtggtcattccagacctcagccggtcactttcctcgcgcctgtgtcagtagtaagaacctgatggaaaaagagtgttgccctccctggagcggggatcgctctccttgcggccagctcagcggtcgcggtagctgtcaaaatatcctgctatcaaacgcccccctgggtccacagttcccctttacaggtgttgatgatcgtgagtcctggccctcagtgttttacaaccggacatgccaatgtagcggcaattttatgggattcaattgtggaaactgtaaatttggattctggggccccaactgtaccgaacgccggctactggtgaggcgcaatatcttcgatctaagcgctcccgagaaagataagttctttgcttacttgacgctggccaaacacaccatttcgtctgactatgtgatcccgatcggcacttatgggcagatgaagaatggatccactccaatgtttaacgacataaatatctacgacttgttcgtctggatgcactattatgtgtctatggatgcccttcttggtggaagcgagatatggagggatatagatttcgcccacgaggcgcccgcctttttaccttggcataggttattcctgctccgctgggagcaggagatccagaagttaaccggcgacgaaaacttcaccattccttactgggactggagggatgctgaaaagtgtgacatctgcactgatgagtacatgggtggacagcacccgacgaaccccaatctcttatcccccgcctccttcttctcatcctggcagattgtgtgctcccgcctggaggaatataattctcatcagtcactttgtaatggaactcccgagggaccactcaggcggaaccctgggaatcacgacaagagtagaaccccaagactgccctcatcagctgacgttgaattctgtctttctcttacacaatacgaaagcggctctatggataaagccgccaatttctccttccgtaataccctggaagggtttgccagccctttgacggggattgcagatgcatctcagtcttcaatgcacaacgctctccacatctatatgaatggtacaatgagccaagtacagggcagtgcaaacgatcccatctttctgctacatcatgcctttgtcgatagcatattcgaacaatggctgaggaggcatcgccccctccaagaggtgtatcctgaagccaacgctccgatcgggcataatcgcgagtcttacatggtccccttcatccccctgtatcggaacggggactttttcatctctagcaaggacctcggttatgactactcttatctgcaggactccgatcccgattctttccaggactatattaagtcctacctggagcaggcatcccggatttggtcatggttgttgggtgctgcaatggtgggagctgtcttgactgccctgctcgccggacttgtgtctttgttatgccgccacaagagaaaacagctgcccgaggaaaagcagcctctcctgatggagaaggaggattatcattcgctatatcagtcccacctt

SEQ ID NO: 8084 - DNA, 1587 bp, Artificial Sequence
  derived and/or modified sequence
atgctcctggccgtgctgtactgcctgctgtggagctttcaaacttcggcaggacactttccgcgcgcttgtgtcagctctaagaacctgatggagaaagagtgctgccctccctggtcaggggacaggtcgccatgcggccagctgagcggtcggggcagttgccagaacatcctgcttagcaacgcgccacttggaccacagtttcctttcacgggagtggacgatagagaaagctggccttccgtgttttacaatcgcacctgtcagtgttcgggaaatttcatgggattcaactgcggcaattgtaagtttggattctggggcccgaattgtactgaaagacggctccttgtccggagaaacatttttgacctctccgcaccagagaaagacaagttctttgcctacttgacgctcgcaaagcataccatatcctccgattacgtgattccaattgggacctacggtcagatgaaaaatgggagcactcccatgttcaatgatatcaacatatacgacctgtttgtgtggatgcattactacgtgagcatggacgccctccttggtggtagcgagatttggcgcgatattgatttcgcacacgaagcaccagcatttctcccgtggcatagactttttctcctgaggtgggaacaagaaattcaaaagctgaccggagacgagaactttacgatcccatactgggactggcgcgacgccgaaaagtgcgatatttgtactgatgagtacatgggaggacagcatcctaccaaccccaacctgctgtcaccggcttccttcttttcatcttggcagatcgtgtgttcccggcttgaagaatacaactcccaccaatcgctttgtaacgggactcctgaggggccacttcgtcgaaatccaggaaatcatgataagtccagaacgcctcgactgccctcgtccgcagatgtggaattctgtctttccctcactcagtacgaatctggatcgatggataaagcagctaacttttcgtttagaaacaccctggaggggtttgcatccccgcttactggaatagccgatgcatctcaaagctcgatgcataacgcactgcacatttacatgaatgggactatgagccaagtccagggctcggccaatgatccgatttttcttctgcatcacgcatttgtggattcgatcttcgaacaatggcttcgtagacatcggccgctgcaggaagtgtacccagaagcaaacgcgcctattggacataaccgtgaatcgtacatggtgcccttcattccgctttaccgaaatggtgatttcttcatctcgtcgaaggatctcggatatgattactcttatctccaagactcggaccctgatagttttcaagattacatcaagtcgtacctcgagcaagcaagcagaatttggtcatggttgcttggggcggccatggtgggcgctgtgctgactgccctgttggcgggactcgtgtcgctgctctgtagacataaacgaaagcaattgccagaggaaaagcagccgttgcttatggagaaggaagattaccactccctgtatcagtcgcatctt

SEQ ID NO: 8085 - DNA, 1587 bp, Artificial Sequence
  derived and/or modified sequence
atgctgctggccgtgctatactgcctgctgtggtcatttcaaaccagtgcagggcactttccccgagcctgcgtcagcagcaaaaacttaatggagaaagagtgttgccctccttggtcaggcgatcgtagcccctgcggacagctgtccgggcgtgggagctgtcagaatatcctattgtctaacgctcccctcggcccacagttccctttcaccggcgttgatgaccgcgaatcttggccctcagtgttttataatcggacatgtcaatgcagcggaaactttatggggttcaattgtgggaattgtaagtttggcttctggggtcccaattgtactgaacggcgcctactggtccgacgcaacatttttgatctgagcgcccccgaaaaagataagttttttgcctacctgacactagctaaacacacaatcagtagcgattatgttatccccattggtacttacgggcaaatgaagaatggtagtaccccaatgttcaatgacattaatatttacgacctgtttgtgtggatgcattactacgtgtctatggacgccctgctgggagggtccgaaatctggcgcgacattgacttcgcccacgaggccccagccttcctaccttggcaccgcctgtttctgctacgatgggagcaggagattcaaaagctgactggggatgagaacttcactatcccttactgggactggcgggacgcagaaaagtgcgacatctgcaccgacgagtatatgggaggtcaacatcccactaaccccaacctgctcagccccgctagcttcttcagcagctggcaaatcgtctgcagtaggctggaagaatacaacagccaccagtccctctgtaatgggaccccagagggccccctgcggaggaatcctggcaaccacgacaaatctcgaactcctcgccttccttcttctgctgatgtggaattctgcctgagtctgacacagtacgagtccggttctatggataaggctgccaatttctctttccggaataccctggagggttttgcttctccattaaccgggatcgcagacgcatcccaatcttccatgcacaatgccctgcacatctacatgaatggcacaatgagtcaggtgcagggcagcgctaacgacccaatatttctgctacaccacgcctttgtggacagtattttcgaacaatggcttcggagacatcggccgttacaggaggtgtaccctgaggccaacgctcctattggccacaaccgcgagtcttacatggtcccttttatcccattgtataggaacggcgacttcttcattagtagcaaggacctaggctacgattacagctatctgcaggacagtgacccagactcttttcaggactacattaaatcttatctggagcaggcctctcgcatttggagttggctgcttggcgctgctatggtcggggccgtgctgaccgccctgctagccgggctggtgtccctgctgtgccgacacaaaagaaaacagctgcctgaagagaagcagcctctgttaatggaaaaagaggattatcattctctgtaccagagtcacttg

SEQ ID NO: 8086 - DNA, 1587 bp, Artificial Sequence
  derived and/or modified sequence
atgttgctcgcggtgctttactgcctgctttggtcgtttcagacttccgccggacatttccccagagcctgtgtgtcgtcgaagaatctcatggagaaggaatgttgtccaccttggtcaggtgatcggtcgccttgtggccaactgtccggaagaggaagctgccagaacatacttctgtccaacgcgcctctcggccctcaatttccatttacgggcgtggatgacagagaaagctggccaagcgtcttttacaatcgtacctgtcaatgttcgggaaacttcatgggttttaactgcggtaactgcaagttcggtttttggggccctaattgtactgaacggaggctgttggtgagaagaaatatctttgatctgtccgctccggagaaggataagttctttgcctacctcactcttgccaaacacaccatttcttccgactacgtcattcccatcggcacctatggtcagatgaagaatggcagcactccgatgttcaacgacatcaacatttacgacttgttcgtgtggatgcattactacgtgtcaatggatgccctgttgggaggatccgagatctggcgggatattgatttcgcacatgaggcacctgcatttctcccttggcatcgactgtttctcttgcggtgggaacaggagatacaaaagctgactggagatgagaactttactattccgtactgggattggcgtgatgcggagaagtgtgatatatgcaccgacgaatacatggggggtcaacacccaactaatcctaaccttctgtctccggcttcgttcttctcctcgtggcagattgtctgttcacgccttgaagaatacaactcacatcagtcgctctgtaatggaactccagagggcccactcaggcgaaaccccgggaatcatgacaagtctaggaccccaagacttccttcctcagctgacgtggaattctgcctctcactgacccaatacgaatcagggtcaatggataaggcagcaaacttttcgtttcgtaacaccttggagggatttgcctctcctctgaccggtattgcagatgcctcgcaatcgtccatgcataacgcacttcacatatacatgaacggaacgatgagccaggtgcaaggaagcgcaaacgaccctattttcctcttgcatcacgcgttcgtcgattcgatttttgaacagtggcttcgccgacacaggccgttgcaggaggtgtaccccgaagcaaacgccccaatcgggcataaccgcgaatcctatatggtgccgtttatccccctctaccgcaatggtgactttttcatatcgtcgaaagatctgggttacgattactcatatctccaagactcggacccagactcgtttcaggactacatcaaatcataccttgaacaggcttcgcgtatttggtcctggttgcttggagcagcgatggtgggggcagtccttaccgcactgctggcaggtcttgtgtcattgctgtgtaggcataaacggaaacaactgccagaagaaaaacaaccgctccttatggaaaaggaggattaccatagcctttaccaatcgcatctg

SEQ ID NO: 8087 - DNA, 1587 bp, Artificial Sequence
  derived and/or modified sequence
atgctgcttgccgtgttatactgcctgttgtggagtttccagacctcagccggtcacttccccagagcctgtgttagttctaaaaacctgatggaaaaggagtgttgccccccgtggagcggcgacaggagcccttgcggacagctgtcgggtcgggggtcatgccagaacatcctcctgtcaaatgcaccactcggccctcagtttccgtttacaggagtcgacgatagagagtcctggccttccgtgttctataatagaacctgtcagtgcagtgggaatttcatgggattcaactgcggaaactgcaaattcggtttctggggtccgaattgcacggagcggaggctactcgtcaggaggaatatctttgatctgtccgctcctgagaaagacaaattctttgcttacttaacgctggccaagcacaccatatccagcgattacgtgatccctatcgggacctacggacagatgaagaacggtagcacgccgatgttcaatgacatcaatatctatgacctcttcgtgtggatgcactactacgtctccatggacgctctccttggcggctctgaaatctggcgggatattgattttgcacatgaggcccctgccttcctgccgtggcataggctcttcttactgagatgggaacaggaaattcagaagcttacgggcgacgaaaatttcaccataccttattgggattggagagacgcggagaagtgcgacatttgcacagatgaatacatgggcggccagcatcccaccaatcccaacttactttcaccagcctctttcttttctagttggcagatcgtttgcagtcgactggaagagtataactcacaccagtctttgtgtaacggcacacccgagggacccctccgaaggaacccaggcaatcacgacaaatccaggactcctaggctcccatcatccgccgatgtcgagttttgtctgtccttaacccaatacgaaagtgggagcatggacaaggcagccaacttttctttcagaaacactctcgaagggtttgcctcccctttgacaggaatagccgatgcatcacagagctccatgcacaatgcattgcacatttacatgaacggtactatgagtcaagtgcagggctcggccaatgacccgatcttcctgctgcatcatgcgtttgttgattctatcttcgaacagtggttgcggagacaccgaccgcttcaggaggtttaccccgaggccaatgcgcctattggtcataatcgcgaatcatacatggtcccatttatccccctgtataggaacggcgatttctttatttcctctaaagatcttgggtacgactactcatatctgcaggactcggatccagatagcttccaggactacattaagtcttacctggagcaggctagccgtatttggagttggttgcttggagctgcaatggtcggggcagttttaacagctctacttgccggcctggtttccctactttgtaggcataaacgtaaacaattgcccgaagagaaacaaccactgctgatggagaaggaagattaccacagcctctaccaaagccatctg

SEQ ID NO: 8088 - DNA, 1587 bp, Artificial Sequence
  derived and/or modified sequence
atgctgctggctgtcctttactgtcttctctggtcatttcagaccagcgcaggccacttccctcgagcctgcgtcagctcaaaaaacctgatggagaaggaatgttgtcccccatggagcggcgataggagcccttgcggccagttgagtggacgcggcagctgtcagaacatacttttgtcaaacgctccattggggccacaattcccctttactggagtcgacgacagggagtcatggccatctgtcttttacaaccgcacttgccaatgctcaggtaatttcatgggttttaactgtggtaattgcaagttcggtttctggggaccaaactgcactgaacggaggctgctggtccgccgcaatatcttcgatctgagtgcacctgaaaaagataaattcttcgcctacctgactctcgccaagcatacaatatcatccgattatgtgattccgatcggcacctacgggcagatgaagaatggctccacccccatgttcaacgacatcaacatttacgatctgtttgtgtggatgcactactatgtgtccatggatgccttgctcggagggtcagagatatggcgggacatcgactttgctcatgaggctccagcttttctgccttggcaccggttgttcctcctcaggtgggagcaggaaatccagaagctgactggagacgagaactttaccatcccctactgggattggcgggacgctgaaaaatgtgacatttgtacagatgagtacatgggaggtcagcacccaaccaacccaaacctgctgtcacccgcatccttcttttcaagttggcaaattgtctgttctaggctggaggagtataacagccaccaaagcctgtgtaatggaacccctgagggacccctgagaagaaaccccggcaatcatgataaatcacgcactcctcgccttccgagttctgctgacgtggagttttgcttgtcactgacccagtacgaaagcgggtctatggacaaggccgcaaacttctcttttcgcaacaccctggaaggctttgcatcacccttgaccggaatcgcagacgcaagtcagagctctatgcacaacgccctgcacatctacatgaacggaaccatgagccaggtgcagggaagcgctaacgatccaatcttcctgttgcaccacgcgttcgtagactcgatctttgagcaatggctcagaaggcacagaccactccaagaagtgtaccccgaggcaaacgctccaatcggccacaatagagagtcttacatggtacccttcatccctctctacaggaatggagatttcttcatcagtagtaaggaccttggttacgattactcatacctccaagactctgatcctgactcatttcaggactacattaagagctatctggagcaagctagtcgcatctggagttggctcttaggcgccgctatggtgggagctgtcctgactgccctgttggcaggcctggtgtctctcctgtgcaggcataaacgcaaacagctgcccgaagagaagcagccactgctgatggaaaaggaagattaccattctctctaccagagccatctg

SEQ ID NO: 8089 - DNA, 1587 bp, Artificial Sequence
  derived and/or modified sequence
atgcttctggcagtgctttactgtctcctgtggtcttttcaaacttcggccggacattttcccagggcatgtgtttcatctaaaaaccttatggagaaggagtgttgtcccccttggtcaggcgaccggtcaccctgtggccaactgtccggacgtggatcgtgtcagaacatactcctttcaaacgcacctctcggacctcagtttccattcactggagtggatgacagagaaagctggccatcggtgttctacaacaggacttgtcaatgtagcgggaatttcatgggattcaactgcggaaactgtaagtttggattttggggacctaattgtaccgagcgcagacttcttgtgcggcggaacatctttgatctgtcagcacccgaaaaggataagttctttgcataccttacccttgcaaagcataccatttcgagcgattatgtcattcccatcggcacctacggtcaaatgaagaatggaagcactcccatgttcaatgatatcaatatctacgatctttttgtctggatgcattactacgtgtcgatggatgcactgttgggtggatccgaaatttggagagacatcgattttgctcatgaggcacctgcatttcttccttggcatagactgtttcttcttagatgggaacaagaaatccaaaagctgaccggagatgagaactttactattccatactgggattggcgcgacgcggaaaagtgtgatatatgcacggatgagtacatgggaggacagcatccaactaaccctaatcttttgtcaccagctagcttcttttcctcgtggcagattgtgtgtagccgtttggaagagtacaactcccatcaatctctctgtaacggcaccccagaaggacccctcagacggaaccccggtaaccatgataagtcgcgaaccccccgcctgccttcatccgcagacgtcgaattctgtctgagcctcacccagtacgagtcgggatcgatggataaagcagcaaacttcagctttcgaaatacccttgaaggattcgcatcccccctcactggaattgccgacgcctcacagtcgtcgatgcataatgcgctgcacatttacatgaacggcaccatgagccaggtgcagggcagcgctaacgatccaatattcctgctgcatcacgccttcgtggattcgatttttgaacagtggcttagacgacaccgtccgctccaagaggtgtaccccgaggcgaatgcacctattggacacaacagagaatcgtacatggtcccttttatccctctttataggaacggtgatttcttcatatcctccaaggacctgggttatgattactcgtacctccaagattcggatcctgatagctttcaggattacatcaaatcgtacctcgaacaggcgtcccgcatttggtcgtggttgcttggagcagcgatggtgggtgcagtgcttactgcactgctcgcgggtttggtttcccttctttgccgccataaacggaagcagctcccggaggaaaaacagcctttgctgatggagaaagaagattatcactccctgtatcaatcgcatctc

SEQ ID NO: 8090 - DNA, 1587 bp, Artificial Sequence
  derived and/or modified sequence
atgctgcttgccgtgctttattgtctcctgtggtccttccaaacctcagccggacattttcctagagcctgcgtttcgtccaagaacctgatggaaaaagagtgttgcccaccctggtctggtgatcggtcgccttgcggccaacttagcgggagaggcagctgtcaaaacatcttgctgtcgaatgcacctctgggaccccaattcccctttaccggagtggatgatagagagagctggccatcggtcttttacaatcgaacctgtcaatgttcgggaaactttatggggttcaattgcgggaattgtaagtttggtttttggggtcctaattgtaccgaacgacggttgttggtgcgtcgaaacatttttgatctttcggcaccagaaaaggacaagtttttcgcatatcttaccctggcaaagcacaccatcagctcggattacgtgatccccattggtacttacggtcaaatgaaaaacgggtcgactcccatgtttaatgacattaacatttacgaccttttcgtgtggatgcactactatgtgtcgatggacgccctgctcggtggttccgaaatctggagagacattgactttgcacatgaagccccggccttcctcccatggcatcgcttgtttcttcttcgatgggaacaagaaattcagaagctcaccggcgacgagaactttactattccgtattgggattggagggatgcggaaaagtgcgacatttgcaccgatgagtacatgggaggacaacacccaacgaatcctaacctgttgtcacccgcctcctttttctcgtcgtggcaaatcgtgtgttcaagacttgaggaatacaactcccaccaatcgctttgcaacggcactcctgagggccctctcagacgtaatcccgggaaccacgataaaagcagaactcctaggttgccaagctccgcagacgttgaattttgtttgtcacttacccaatacgaatcgggcagcatggataaggctgccaacttttcctttcgaaacactctggagggttttgcaagcccgcttaccggaattgcagatgcaagccagtcgtcaatgcataatgcactgcacatctacatgaacggtactatgtcgcaagtgcaaggaagcgccaatgaccctatctttcttcttcaccatgcattcgtggactcgatctttgagcagtggctgcgccggcatagacctctgcaggaagtctatcctgaagcaaatgctcctataggacataatcgagaaagctacatggtcccatttatcccgctgtacagaaacggtgactttttcatatcgtccaaagacctgggctacgattactcgtatctccaggattccgatccagattcatttcaggactacattaagtcctaccttgaacaggcctcgcggatttggtcatggcttttgggagcagcaatggtgggcgcagtgctcaccgcactcctcgcgggtcttgtgtcgcttctgtgtagacacaaaaggaagcagcttcctgaagaaaagcaacccctgctgatggagaaggaagattaccattcgctgtaccagtcgcatctg

SEQ ID NO: 8091 - DNA, 1587 bp, Artificial Sequence
  derived and/or modified sequence
atgcttctagccgtgctctactgcctcctctggtcctttcagacatcagctggacacttccctagggcatgcgtgagttctaagaatttgatggagaaggaatgttgtcccccatggtccggagatcgctctccttgtgggcaattaagtggcaggggttcgtgccagaacatcctcctgagtaacgcacctctgggccctcagttccctttcaccggcgttgatgatcgagagtcatggccgagtgtgttctacaatcggacttgccagtgcagtgggaactttatggggtttaattgtggcaattgtaaattcgggttctggggccccaactgtactgagaggaggctactagtgaggaggaacatctttgacctgagcgctccagagaaagataaatttttcgcttacctcaccctcgctaagcacactatctcgagtgattatgtgattcctatcgggacatatggtcagatgaagaacggatccacacctatgtttaacgacataaacatttatgatctcttcgtgtggatgcactattacgtctcaatggacgccttactcggaggttctgagatctggcgcgacatcgactttgcacacgaagcacctgcatttttgccatggcacaggctgttcctgcttcgatgggaacaagagattcagaagctgacaggcgacgagaatttcaccattccatactgggactggcgagatgccgagaagtgcgacatctgtactgacgagtatatgggaggacagcaccccaccaacccaaatttgctgtccccggcttccttcttttcctcttggcagatcgtctgctctcgcctcgaagagtataactctcaccagagcctatgtaatggaactcctgaggggccattgcggagaaaccctggcaatcacgacaaatctagaacgcctaggctgcctagttctgcggatgttgaattttgcctgtcgttgacccagtatgagagtggcagcatggacaaagcagctaatttctcattcaggaacacactggaaggcttcgcctctccccttactggaatcgcagatgcctctcaaagttcaatgcacaatgcactgcatatttacatgaatggcaccatgtcgcaggtccagggatcggcgaatgatcctatctttttgttacaccacgcatttgtggatagcatctttgaacagtggctccggagacacagaccgctacaggaagtgtaccccgaggcaaatgcgccaattggacacaaccgtgagtcttacatggtgcccttcattcctctgtacaggaacggcgactttttcatttcctctaaagatttaggttatgattactcatatctccaggactcggacccggattcatttcaggattacattaaaagttacctcgagcaggcttcgagaatttggtcttggctcttgggcgccgctatggtgggcgcagtcctgactgcccttcttgccggtcttgtgagcctgctgtgtcgccataagcgtaagcaactccccgaagagaagcagcccctcctgatggagaaggaagactatcatagtctttatcagtcccattta

SEQ ID NO: 8092 - DNA, 1587 bp, Artificial Sequence
  derived and/or modified sequence
atgttgttagcagtcttatattgtttattgtggtcatttcagacatctgctggtcattttccacgcgcttgcgtgagttccaagaacttaatggagaaagagtgctgtccaccgtggtcaggggatcgctcaccttgtggccaactttctggcagaggctcatgtcaaaatattttgttgagcaacgctccgctcggcccacagtttccgttcactggcgttgatgacagagagtcctggccatccgttttttataaccggacgtgccagtgttctgggaacttcatggggttcaactgcggcaattgcaagtttggcttttgggggccgaactgcacagaacgacgacttttggtgcgaagaaatatttttgatttatcagcaccggaaaaggacaaatttttcgcttatttaacactcgcgaagcatacaattagtagtgactatgtcatcccaattggaacatatggacagatgaaaaatggcagtacgccgatgtttaacgatataaatatttatgacctgtttgtctggatgcattattatgtttcaatggacgcgttgttgggaggcagcgaaatctggagagacattgattttgcacatgaagcacctgcgttcttaccgtggcaccgattgtttcttcttcgttgggaacaggaaatccaaaaactcacaggtgacgagaatttcacaatcccgtactgggactggagggacgccgagaaatgcgatatttgtacggatgaatacatgggagggcagcacccaacaaatccaaacttattgtccccggcgtcgtttttttcatcgtggcaaattgtctgctcccgactagaagaatataactctcatcagagcctctgcaacggcacgccggaaggaccgctgcgccgtaatccgggaaaccatgacaaatcgagaacacctcgtttaccgagctcagcggatgtggaattctgtttgtcattgacccagtatgaatctggctcaatggataaagcggcaaacttctcatttaggaatacgttagaggggttcgcgtcgcctcttacaggcattgccgacgcatcacagtctagcatgcacaatgcgctgcatatttatatgaacggaacaatgtcacaagtgcagggcagcgccaatgatccgattttcctgttgcatcatgccttcgtcgactcaattttcgagcaatggttgcgaagacatagaccactgcaagaggtctacccggaagccaatgcaccgatcggtcataaccgtgaaagctatatggttcctttcattccgctctatcgaaatggcgactttttcatttcaagtaaggaccttggctatgactatagctatcttcaggattctgacccggacagtttccaagattacatcaaatcttatttagagcaagcgagccgcatttggagctggctcctcggcgctgcgatggttggagcagtgttaactgcactcctggctggcttagtcagcttgctgtgtagacacaaaaggaagcaacttccggaagagaagcagcctcttttgatggaaaaagaggactaccattctttatatcaatcacacctt

SEQ ID NO: 8093 - DNA, 1587 bp, Artificial Sequence
  derived and/or modified sequence
atgttactagccgttctgtattgtttgttatggtcgtttcagacttctgcaggccattttcccagggcctgtgtgtcatccaaaaatttgatggagaaggaatgttgtcccccttggagtggggatcgcagcccatgtggccaattatcgggccgggggtcttgtcagaatattctgctctccaacgctcccctcggcccgcagttccctttcaccggcgtcgacgatcgcgagtcctggccaagtgttttttataatcggacttgccagtgtagtggaaacttcatggggttcaactgcggaaactgcaagttcggcttttggggccctaattgcacagaacgtaggttactggtgcgccgaaacatctttgatctttctgctccggaaaaggataaatttttcgcctatctgacgctcgccaaacacactattagttccgactatgtgattcccatcgggacctacggacaaatgaagaacggctccacgcccatgtttaatgatatcaatatttacgatctgtttgtctggatgcactactacgtctccatggacgcactgctagggggctctgagatctggcgcgatatagactttgcgcatgaagcacccgcattcctgccctggcatcggctgttcctgctgaggtgggagcaggagattcaaaaactgacaggtgacgaaaattttacaatcccttactgggactggagggatgccgagaagtgcgacatctgcacggacgagtacatgggagggcaacatcccaccaatcctaacttgctgagtccggcttctttttttagctcctggcagatcgtctgctctcggctcgaggaatataactcccaccaatctctctgtaatggaacaccggagggcccattgcggcgcaacccaggtaaccacgataagagtcgcaccccacgtctgccctcatccgcagatgtggagttttgtctcagtttgacacaatatgagtccggtagcatggataaggcggccaacttctcttttagaaatactttggagggcttcgcgtccccgctaaccggcatcgcagacgcaagccagagtagcatgcataacgccctacacatatacatgaacggcaccatgtcgcaggtgcagggctcagccaacgacccgatatttttattgcaccacgcatttgttgacagcatcttcgaacaatggctgcggcggcaccggccactccaagaggtttacccagaggccaatgcccccatagggcacaatagagagagctatatggtgcccttcatcccactgtataggaatggcgacttcttcattagttccaaagatctgggctacgactattcatatctgcaggacagtgacccggattcattccaagattatataaagtcttacttagagcaggcttctcggatatggtcctggctgctgggcgctgcaatggtcggtgcagtgttgaccgctctgctggcgggactggtctccctgctttgtaggcataaacggaaacaattacccgaggaaaaacagcctctactgatggagaaggaggactaccattccctttatcagagtcacctt

SEQ ID NO: 8094 - DNA, 1587 bp, Artificial Sequence
  derived and/or modified sequence
atgctccttgcggtgctgtactgccttttgtggagctttcagacgagcgcaggccatttcccgagagcctgcgtctcctcaaaaaacctgatggaaaaggaatgctgccctccttggtcgggtgatcgctccccatgtggacaactgtcgggaagaggatcctgtcaaaatatcctcctctccaacgcgcctctgggacctcagttcccgtttaccggagtggatgacagggagagctggcctagcgtcttctacaaccggacctgccaatgctcaggtaatttcatgggcttcaactgcggaaattgtaagtttgggttctggggaccgaattgcacggagagaaggctgctcgtacgccgcaacattttcgacctgtcggcgccagagaaggataaattcttcgcgtacttgacgctcgccaagcacaccatcagcagtgactacgtgatcccgatcggaacctacggtcagatgaagaacggctccaccccaatgttcaacgacatcaacatctacgacctgtttgtgtggatgcattactacgtgagcatggatgcgctgctcggcgggtccgagatctggagagatatcgacttcgcccatgaggcgccagcatttctcccgtggcataggctgttcctgttgcgatgggagcaagagattcaaaagctcactggcgatgagaacttcaccatcccatactgggattggcgcgacgcggaaaaatgcgacatttgtaccgacgagtacatgggcggacagcatccgaccaaccccaacctgctgtcgccggcatctttcttctccagctggcaaatcgtgtgctctcggctggaagaatacaattcgcaccagtctctgtgtaacgggactccggaaggcccgctccggcgcaatccgggaaaccacgacaagtcacgcaccccgaggctgccttcatcagcggacgtcgagttctgcctgtcgctgactcaatacgagagcggatccatggataaggcagccaacttctcgtttagaaacactctggaaggattcgcttccccactgaccggcatcgccgacgcgtcccaatcgtcaatgcacaatgctctccatatctacatgaacggaaccatgtcacaagtgcagggatctgcaaacgaccccatcttcctgctgcaccacgcgttcgttgattccatcttcgaacagtggttgaggcgccaccgcccgctccaggaagtgtacccggaggccaatgcgcctatcggacataacagagagtcctacatggtcccgtttatccccctctaccgaaatggagacttctttatctcatcaaaggatcttggctacgattacagctacctgcaggatagcgatccggattcgttccaggactacatcaaatcctacctcgaacaggcatcgcgcatctggtcctggctgctgggagccgcaatggtgggagccgtgctgaccgcacttctggccggactcgtgtctctgctgtgccgccacaagcgcaagcagctgccagaggaaaaacagccgcttctgatggagaaagaggattaccactcgctgtaccagagccacctg

SEQ ID NO: 8095 - DNA, 1587 bp, Artificial Sequence
  derived and/or modified sequence
atgctgctcgccgttctttattgtctcttgtggtccttccagacatcggcgggacatttcccacgcgcctgtgtcagctccaagaatcttatggagaaggaatgttgccccccatggtccggcgaccggtcgccttgcggccagctgtcagggaggggctcatgtcagaatattctgcttagcaatgctcctttgggcccacagtttcccttcactggagtggacgatagggaaagttggccatcagtgttctacaacagaacctgtcagtgctccgggaattttatgggcttcaactgcggcaattgtaagtttgggttttggggccccaattgcaccgagaggagactccttgtccgtcggaacatctttgatctgtctgccccagaaaaagataaattctttgcctacctgactttggctaaacacacaatctcctccgactacgtcatcccgatcggcacatacggtcagatgaagaatggatcaacacctatgtttaatgacataaatatctatgacctgttcgtgtggatgcattattatgtgagtatggatgccttgctgggaggctccgagatctggcgagatatcgactttgcccatgaggctcctgctttcctgccctggcaccggctcttcctactgcggtgggagcaagagattcagaagctcaccggagacgagaactttactattccttattgggactggcgcgacgcagagaagtgtgacatttgtaccgacgaatacatgggcggacaacaccctaccaatcccaatctgctctcccccgctagcttcttttcatcgtggcagattgtatgtagccgcttagaggagtacaactctcaccagagcctgtgtaatggaaccccagaaggaccactgcgccggaatcccggaaaccacgacaaatctcggaccccccgcttgccctcctctgcagacgtggagttttgcctcagtctaactcaatacgagagcggctccatggataaagccgcaaatttttcgttccggaacacactcgagggatttgcctccccccttaccggcatcgccgatgcatcccagtcttcaatgcacaatgcacttcatatctatatgaacggtacaatgtctcaggtacagggttccgcaaacgacccgatcttcctgctgcaccacgcttttgtcgactctattttcgaacaatggctgcgccgtcaccgacccttgcaggaggtgtacccagaagctaacgccccgattggacataaccgcgagagctacatggtgcctttcatccccctttatagaaacggagatttcttcatcagctccaaggatctgggctatgattactcatacttgcaggacagcgatcctgattctttccaggactatatcaagagctacctggaacaggccagccgaatatggtcatggctgctgggggcggctatggtgggcgctgtgttaaccgcgctactggcaggtctggtgtccctcttgtgcaggcataaacggaaacaactgccagaggaaaaacagcccctcctgatggaaaaggaagattaccattctttgtatcaatcacacctc

SEQ ID NO: 8096 - DNA, 1587 bp, Artificial Sequence
  derived and/or modified sequence
atgctgctggccgtcctctactgcctactatggagcttccagaccagcgctggacacttccctcgcgcttgcgtctctagtaagaacctgatggagaaagaatgttgccctccatggtcgggtgacagaagcccgtgcggacaactgtccggtcgaggtagttgccaaaacattctgctttctaacgccccgctgggaccacagttcccctttactggcgtcgacgatcgcgagagctggccttccgttttttacaaccggacgtgccagtgttctgggaacttcatgggcttcaattgtggcaactgcaagttcggattttggggcccaaattgcactgaaaggagactgctcgtaagaagaaacatattcgatctcagcgctcccgagaaggacaaatttttcgcttacttgactctcgccaaacacaccatttctagcgactacgttatcccgataggtacttacggccagatgaagaatggatccacgcctatgtttaacgacattaatatctatgatctgttcgtgtggatgcactactacgtgtccatggacgctctgctgggaggaagtgagatttggagagatatagacttcgcacacgaggcaccggcatttctgccatggcaccgcctttttcttctgcgatgggagcaagagatccagaagctgaccggagatgaaaacttcacgatcccatactgggattggcgcgacgcagagaaatgcgacatttgcacggacgaatacatgggaggacagcatccaactaaccccaacttactctccccagccagtttcttctcgagctggcagattgtatgctctcgtcttgaggagtataatagtcatcagtcgctgtgtaatggtacacccgagggacctctccgcaggaacccaggtaatcatgacaaatcgaggacccccagattaccctcatccgcggatgttgagttttgtctgtccctaacgcagtacgaatcgggctctatggacaaggccgccaattttagttttcggaatactctggagggcttcgcctcgcccttgactggcatcgccgatgcctcgcagtcgagcatgcataacgccttgcatatttatatgaatggaaccatgagccaggtgcagggctcggctaatgacccaattttcctgctacatcacgcattcgtggatagcatatttgagcagtggcttcgccggcaccgcccgctacaggaggtttatccggaggccaatgcccccattggtcacaatcgcgaatcgtatatggttccgttcatccccctctacagaaatggagatttcttcatcagcagcaaggacttgggatacgattattcctacctacaagacagcgacccggattccttccaagattacattaagtcgtatcttgaacaggcaagtcggatttggagctggctcctgggcgcagccatggttggcgcagtgctgacagccttgctggcaggactggtgtctctgctgtgccgtcacaagcggaagcagttgccagaggaaaaacagcccttgctaatggagaaggaggactaccacagcctatatcaatcacacttg

SEQ ID NO: 8097 - DNA, 1587 bp, Artificial Sequence
  derived and/or modified sequence
atgcttttagctgtattatattgtttactttggtcttttcaaacttcagctgggcattttcctagagcttgtgtttcatcaaaaaatcttatggaaaaagaatgttgtccaccatggtctggtgatagatccccttgtggacaattatcaggaagaggatcatgtcaaaacattttactttcaaatgctccattaggaccacaattcccatttactggtgttgatgatagagaatcatggccttctgtgttttataatagaacttgtcaatgttctggaaattttatgggatttaattgtggaaactgtaaatttggattttggggtccaaattgtacagaacgtagattattagttagaagaaacatttttgatttatcagctcctgaaaaagataaattttttgcatatttaacattggctaaacatactatcagtagtgattacgtcattccaattggaacatatggacaaatgaaaaatggatcaacaccaatgttcaatgatattaatatttacgatctttttgtttggatgcattattatgtttcaatggatgcattacttggtggttcagaaatatggagagatattgattttgctcatgaagcacctgcatttttaccatggcatagactttttttattaagatgggaacaagaaattcagaaactaaccggtgatgagaattttacaattccttattgggactggagagatgcagaaaaatgtgatatttgtacagacgaatatatgggtggacaacacccaactaatcctaaccttctttcaccagcaagtttcttttcatcatggcaaattgtttgttcaagattagaagaatataactctcaccaatctttgtgtaatggaacccctgaaggaccattaagacgtaaccctggaaatcacgataaatctagaacaccaagacttccttcaagtgccgatgttgaattttgtctatctcttactcaatatgaaagtggttctatggacaaagcagctaatttttcatttcgaaatactttagaagggtttgcttcaccattaactggaattgcagatgcatcacaatcttcaatgcataacgcattacatatttatatgaatggaactatgtctcaagttcaaggatcagcaaatgatccaattttccttttgcatcatgcatttgtagactctattttcgaacaatggcttagaagacatcgtccattacaagaagtttatccagaagcaaatgcaccaattggacataatcgagaatcttatatggttccatttattccattatatagaaatggagatttttttatatcatcaaaagacttaggttatgattattcgtatcttcaagatagcgatccagatagtttccaggattatattaaaagttatttagagcaagcatcaagaatttggtcttggcttttaggtgctgctatggttggtgctgttttaacagctttgttagctggattagttagtcttttatgtagacacaaacgaaaacaattgccagaagaaaagcaacctttacttatggaaaaagaagattaccatagtttgtaccaaagtcattta

SEQ ID NO: 8098 - DNA, 1587 bp, Artificial Sequence
  derived and/or modified sequence
atgttgctcgccgttctgtactgcctcctgtggtcgttccaaacatcagcgggccactttccgcgggcctgcgtgtcaagcaaaaatctcatggaaaaggagtgctgtcctccctggtccggcgatcgatccccatgtggacagctctcgggtcgcggttcttgccagaacatcctgctaagcaatgcacctctggggccccagtttcccttcaccggtgtggatgatagagagagctggcccagtgtgttttacaaccgcacatgccagtgctccggaaacttcatggggtttaattgtgggaattgtaagttcggtttttggggacccaattgcacagagagaaggctgctggtgcgaaggaacatcttcgacctaagcgcgcccgagaaagataagttctttgcatacttgaccctagccaaacacacgatctcctcagattatgtaattccaattggaacttacgggcagatgaagaatgggtcaaccccaatgttcaacgatatcaatatatacgatctctttgtgtggatgcactattatgtcagcatggacgcgctccttggcgggtcagaaatatggcgagacatcgactttgcacatgaagccccagcgttcttgccctggcaccggctcttcctgctgagatgggaacaggagattcagaaactgactggcgatgaaaattttactatcccatattgggattggagggacgcagaaaaatgcgatatctgtaccgacgagtacatgggcggacagcacccaaccaacccgaatctcctgagtcccgcatcattttttagcagttggcaaatcgtttgcagtcgacttgaggagtacaattcccaccagtcactctgtaacgggactcccgaaggacccctgaggcggaacccaggtaatcacgacaagtctcggacacctaggctcccatctagtgctgatgtcgaattttgcctgtctctcacacagtacgaatccggctccatggacaaagcggcaaacttttcttttcgaaatacactcgaagggttcgcatcacctttgaccggcatagctgacgcctcccagtcctcaatgcataacgcgctccacatctacatgaatggaactatgagtcaggtgcaggggtctgcaaacgatcctattttcctgttacaccacgcttttgtggatagtattttcgaacagtggctgcgacgccaccgccctctgcaggaggtgtatccggaggcaaatgctccaatcggacataacagagaaagctatatggtgcccttcattccactgtaccggaatggggacttttttatcagtagtaaggacttggggtacgattatagttatctccaggactcggacccagattctttccaggactatattaagagttacctcgagcaagcctcgaggatctggagctggctgctgggagccgccatggtgggcgctgtccttaccgctctgttagctggcctcgttagcctgttgtgtcgccacaagaggaagcagcttcccgaagaaaagcagcccctgctgatggagaaagaagactatcattccctatatcagagccacctc

SEQ ID NO: 8099 - DNA, 1587 bp, Artificial Sequence
  derived and/or modified sequence
atgttgctcgccgtgctctactgtctgctctggtcgttccagacgagcgcggggcactttccgcgggcgtgcgtgtcctccaagaatttgatggaaaaagagtgttgcccgccgtggtcaggcgatcgctcgccctgcggacaactctccggacggggatcgtgccagaacatcctgctgtccaacgcacctctcggcccgcagttcccgttcaccggagtggacgatcgcgaaagctggcccagcgtgttctataatcggacctgccagtgctctggaaacttcatgggattcaactgtggtaattgcaaatttggattctggggaccgaattgtaccgagcgcagactcctggtgcgaaggaacatctttgacttgtccgccccagaaaaggacaaattcttcgcgtacctgacccttgccaaacataccatctcatcggactatgtgattccgattggaacttacggccagatgaagaatggatcgactccgatgttcaacgacatcaacatctacgatctgttcgtttggatgcactattatgtgtccatggacgcgctgttgggaggatcagagatctggcgcgacatcgatttcgcacatgaggcaccggcattcttgccgtggcaccgcctgttcctgctgcgctgggaacaagagatccagaaactgacgggtgacgaaaactttaccataccatactgggactggcgcgacgcggaaaagtgtgatatctgcactgacgagtacatgggaggtcagcatcctactaacccgaaccttctctcgcctgcctcctttttctcgtcgtggcagattgtctgctccagactggaggagtacaactcgcaccagtccctgtgcaacggtaccccggaaggacctcttcgccggaacccaggcaatcacgacaagtctcgtaccccacggctgccctcgtcagcggatgtggaattttgccttagcctcacccagtacgaaagcggatctatggacaaggctgctaatttctcattcagaaacacgctcgaaggattcgcctccccgttgaccggcatcgcggacgcaagccagagctccatgcataatgccctgcacatatacatgaacggaactatgagccaggtccaggggtcggcaaacgatcctatcttcctcctccaccacgcctttgtggactcgatctttgaacaatggctgcgacggcaccggccgctccaggaagtctacccagaagccaatgcgccaattggacacaatcgcgagtcgtacatggtgccgtttatcccactgtaccggaacggtgacttctttatctcatccaaggacttggggtatgactactcctacctgcaggattccgacccggacagcttccaggactatatcaagagctacctggagcaagccagtcggatctggtcatggctgctgggagccgcaatggtaggtgcagtgttgaccgcgttgttggctgggctcgtctctcttctgtgccgccacaaaagaaagcagctcccggaagaaaagcagcctctgctgatggaaaaggaggattaccactcgctgtaccagtcccatctg

SEQ ID NO: 8100 - DNA, 1587 bp, Artificial Sequence
  derived and/or modified sequence
atgcttctggcggtgctctattgcctcctctggtcgttccaaacttctgcagggcacttccctcgggcttgtgtgtcaagcaagaacctcatggaaaaggagtgttgcccgccctggagcggggaccggtcgccttgtggccagctttccgggcgcggatcatgccagaacatcctgctctccaacgccccactgggaccgcagttcccgttcactggagtggatgatcgcgagagctggccttcagtgttctacaaccgcacctgccagtgctccggtaatttcatgggattcaattgcggaaactgtaagttcggtttctggggacccaactgcaccgaaaggcgcctgcttgtgagacgcaacatctttgacttgtccgcaccagaaaaagataaatttttcgcatacctcactttggccaagcatactatctcgagcgattacgtgatcccgattggcacttacggacaaatgaagaatggttcaaccccaatgttcaatgacatcaacatctacgacttgtttgtgtggatgcactactacgtctcgatggacgcccttctgggtggctccgagatttggcgcgacatcgacttcgcgcacgaggcgccggccttcctgccttggcaccggctgttcctcctgaggtgggaacaggaaatccagaaactcactggcgacgagaactttaccatcccatactgggattggcgggatgccgaaaagtgcgacatctgcacggatgaatacatggggggccagcatccaactaacccgaatctgctgagtcccgctagctttttctcgtcgtggcaaattgtgtgctcacggctggaagagtacaactcgcatcagtcgctgtgcaatggaaccccggagggacctctccgcagaaatcccggcaatcacgataaatcgcgcactccgaggctgccatcaagcgccgatgttgagttttgcctgtccctgacgcagtacgagtcaggatcaatggataaggccgctaatttctctttcagaaacaccttggaagggtttgcatcgcctctgaccggaatcgccgacgcatcccaaagctccatgcacaacgcgctgcatatctatatgaacggaaccatgagccaggtgcagggaagcgcaaacgatccgatcttcctcctccatcatgcgttcgtcgactcaatctttgaacaatggctgcgacggcatcggccactccaggaagtgtacccggaggcgaacgccccaatcggccacaatcgcgaatcgtacatggtcccgttcataccgctttaccggaacggcgacttctttattagctcgaaggacctgggatacgactattcctacctgcaggattctgaccctgactccttccaagactacatcaagtcgtacttggaacaggccagccgaatctggtcctggttgctgggagctgctatggtcggagccgtcctcaccgccctgctggcgggcctggtgtcgctcctttgtagacacaaaagaaagcaactcccggaagaaaagcagccgctgctgatggagaaggaggactaccactccctctaccaatcacacctg

SEQ ID NO: 8101 - DNA, 1587 bp, Artificial Sequence
  derived and/or modified sequence
atgttgctggccgtgttatattgcctgctttggagcttccagacctccgcgggtcatttcccacgggcgtgtgtgtcatccaagaacctgatggaaaaagaatgctgccctccttggtctggcgaccgttctccatgtggacagttgagtgggcgtgggtcatgccaaaacatcctcctgagtaacgcaccgctcggtcctcagtttccttttactggggtggacgacagggaaagctggccatccgtgttctacaatagaacttgccagtgttccggcaactttatggggttcaattgtggaaactgtaagttcgggttctggggccccaattgtactgaaaggagactgctcgtccgccggaacatttttgacctgtcggcgcccgagaaagataagttctttgcctacttgaccctcgccaaacacacgatctctagcgactatgtcatcccaattggaacctacggccagatgaagaatggttccacgcctatgtttaatgacattaacatctacgatctgtttgtgtggatgcattactacgtgtctatggatgccctgttgggcggctctgaaatatggagagatatcgactttgctcatgaggcccctgctttcttgccttggcacaggctttttttgctccgatgggagcaggaaatccaaaaacttactggtgatgaaaattttacgatcccatactgggactggcgggacgccgagaagtgcgacatctgtaccgacgaatatatgggtgggcaacaccccacaaacccgaacctcctgagcccagcgtccttcttcagtagctggcagatcgtgtgctctaggctcgaggagtataatagccaccaatcactgtgcaacgggactcctgaggggcctcttagacggaatcctggaaaccatgacaagtctcgcactcctcgtctcccgtcaagcgctgatgttgaattttgcctgtcgcttacccagtatgaaagcggatccatggacaaagccgccaattttagcttccgcaacaccctagaaggattcgctagccctctgaccgggatcgctgacgccagccaaagctccatgcataacgccctccatatctacatgaatggtacaatgtcgcaggtgcaggggtccgccaacgatcccatattcctgttacaccacgccttcgtggattccatattcgaacaatggctccggagacaccgccctctgcaggaagtgtatcccgaggctaacgcccccattggccacaaccgagaatcttacatggtgcctttcatccccctgtaccggaacggggacttttttatctcttccaaggatctgggatatgactattcctacttgcaggatagcgaccctgactcgttccaagactatataaagtcctatctggagcaggcatctagaatttggtcttggctgctgggcgccgctatggtgggggctgtgctgacagctcttctggcaggccttgtctcacttttgtgccgccataagcgtaagcagctccctgaagaaaaacagccattattgatggaaaaagaggactaccacagtctgtaccagtcacacctc

SEQ ID NO: 8102 - DNA, 1587 bp, Artificial Sequence
  derived and/or modified sequence
atgcttcttgcagtgctttactgtcttttgtggtcgtttcagacttccgcaggccatttcccaagagcgtgcgtgtcctcgaagaacctcatggaaaaggaatgttgtccgccctggtccggtgaccgttcgccttgcggtcagctgtcgggccggggatcgtgtcagaatatccttctctcgaatgcaccactgggcccccagttcccatttaccggagtcgacgaccgggaatcctggccctccgtgttttacaacagaacgtgccagtgtagcggtaacttcatgggattcaattgcgggaattgtaagttcggtttctggggacctaattgcactgaacgtcgtttgctcgtgcgaagaaatatcttcgatctgtcggcccccgaaaaagataagttttttgcctatcttactcttgccaagcacactatctcatccgactatgtcattcccatcggcacttacggccaaatgaaaaacggctcgaccccaatgttcaacgatatcaacatctacgacctttttgtgtggatgcactactacgtctccatggacgcacttttgggaggatcagaaatttggagggatattgatttcgcccatgaagcacctgcgtttctgccatggcaccggctttttcttctgaggtgggagcaagagatccagaagctcaccggtgatgaaaacttcaccataccttactgggattggagggatgcagagaagtgtgacatctgcactgatgaatacatgggaggacaacacccgactaatcctaaccttctgtccccagcatcgtttttctcctcatggcaaatcgtgtgttcgcgcctggaagagtacaattcgcatcagtcgctttgtaatggaacccctgagggtccactgaggcgcaaccccgggaatcatgataagagccggacccctagacttcctagcagcgcggacgtggaattctgtctgtccctgacgcaatacgagtccggctccatggataaggcagcaaatttctcatttaggaatacgctggagggttttgcttcaccacttacgggtattgcagatgcaagccagtcatccatgcataacgcactgcatatctacatgaatggtactatgtctcaagtgcaaggatctgccaacgatccgatatttcttttgcatcatgcttttgtggactccatttttgaacaatggctccggagacacagacctcttcaggaagtgtaccccgaagctaacgcgccaattggtcataatagagagtcatacatggtgccgtttatccccctctaccgaaacggagacttcttcatttcgtcgaaggacctcgggtacgattactcctacctgcaggactcggacccggactcattccaagattacatcaaatcgtatctggaacaagcgtcacgaatttggtcgtggcttcttggagcagcgatggtgggagcagtgcttaccgcgcttctcgccggtctggtcagccttctttgtcgtcataagcgcaaacaactgcctgaagaaaagcaaccactgcttatggagaaagaagattaccattccctgtaccaatcgcacttg

SEQ ID NO: 8103 - DNA, 1587 bp, Artificial Sequence
  derived and/or modified sequence
atgctgctggcagtgctctactgccttctttggtcttttcagacttcggctggacacttcccgcgggcctgtgtctcgtcgaagaacctgatggaaaaagaatgttgcccaccgtggtcgggcgatagaagcccttgcggacaacttagcggaagaggatcttgccagaacatcctgctttccaacgcgccactgggaccgcaatttccatttactggggtcgatgaccgcgagtcgtggccatccgtgttctacaaccgcacttgccagtgctcgggaaatttcatggggtttaactgtggaaattgcaagtttggattctggggacccaactgcactgagaggcggttgctcgtccggcgcaacatcttcgacctctctgctcccgagaaggataagttttttgcttacctgactctcgccaagcatacgatcagctccgactacgtcatcccgatcggtacctacggacagatgaagaacggatccaccccgatgttcaatgatatcaacatctacgatctgttcgtgtggatgcattactacgtgtcgatggacgctcttctgggaggatccgaaatctggcgcgatatcgacttcgcacacgaagccccagccttcctgccgtggcacagactgttcctgctgcgctgggagcaggaaatccagaagttgacgggagacgaaaacttcaccattccgtactgggactggagagacgccgaaaaatgtgatatctgcactgacgaatacatgggaggtcagcacccgactaatccgaaccttctctcgcctgcgagcttcttttccagctggcaaatcgtctgctccaggctcgaagaatacaattcgcatcagtccttgtgcaatgggactcctgaaggaccgttgcggcgcaatccaggcaaccatgacaagtcccgcactccgagactgccctcatcggccgacgtcgagttttgcctgagccttacccagtacgaatcaggatcaatggacaaggccgccaacttttcgtttcgcaataccctggaggggtttgcgagcccgctcaccggaatcgcagacgccagccaatcatccatgcacaacgccctgcacatctacatgaacggcactatgtcacaggtgcagggatcagcaaacgacccgattttcctgctccaccacgcgttcgtggactcaattttcgagcagtggctgcgtaggcacagaccgctgcaggaagtgtatcccgaagctaatgccccgatcggacataaccgagaatcgtacatggtgcctttcatccctctctaccgcaatggtgacttcttcatctcgtctaaggacttgggttacgactacagctacctccaggactcggacccagactcttttcaagactacatcaagtcatacctggaacaggcatcgcggatctggtcatggctgctcggcgcggcaatggtgggagccgttttgaccgctctccttgccgggctggtgagcctcctctgccgccataaacgcaagcagctgccggaagaaaagcagcccctgctgatggagaaagaggactaccactcactttaccaatcccacctc

SEQ ID NO: 8104 - DNA, 1587 bp, Artificial Sequence
  derived and/or modified sequence
atgctccttgcagtgctttactgcctgctctggagcttccaaacctcagcaggtcattttccccgtgcttgtgtgtcatcgaagaacctgatggaaaaagaatgctgtccaccttggagcggcgatcgcagcccatgcggacaactgtcaggacgaggctcgtgccagaacatcctgctgtcgaatgcccctcttggtccacagttcccttttaccggagtcgatgatagggagtcctggccatcggttttctacaatcggacttgccagtgtagcggtaatttcatgggttttaactgtggcaactgtaagttcggattttgggggcctaactgtaccgaacggagacttctggtgagaaggaacatatttgatctgtcggcaccagagaaagataagttcttcgcataccttaccctggcaaagcatactattagctcagactacgtgatacctattggtacctacggacagatgaagaacggatccaccccaatgtttaacgacattaacatctacgatctttttgtgtggatgcattactatgtcagcatggatgctcttcttggtgggagcgaaatttggcgcgacatcgattttgcccatgaagctcccgcttttcttccctggcatcgcctttttctgcttagatgggaacaggagattcaaaagctgactggagacgaaaactttactatcccttactgggattggcgagacgcagaaaaatgtgatatatgtaccgatgagtacatggggggacagcatccaactaatcctaatctccttagcccagccagctttttctcgtcatggcaaatcgtgtgttcgaggctggaagaatacaactcgcatcaatcgctctgtaacgggacgccagaggggccactgagacgaaacccaggtaaccacgacaagagcaggaccccaagattgccctccagcgcagatgttgaattttgcctctcgttgacgcaatacgagtccggatcaatggataaagcggcgaacttttcctttcgcaacaccctcgaaggattcgcttcgcctcttacggggatcgcagatgcatctcagtcctcaatgcataacgcactgcacatttacatgaacgggaccatgtcgcaggtccagggatctgcgaacgatcctattttcctcctgcaccatgcattcgtggatagcatttttgaacaatggttgaggagacacagacctcttcaagaagtgtatcctgaagcaaatgcgcccatcggccataaccgggaaagctacatggtgccgttcatcccactttaccggaatggcgactttttcatcagctcaaaggatcttggatacgattattcctaccttcaagatagcgacccagactcctttcaagactacattaagtcgtatcttgagcaggcaagccgtatttggagctggcttctgggggctgcaatggttggagccgtgttgactgcactgctcgcgggtcttgtgtcgcttctttgtcggcataaaagaaagcagttgccagaggagaagcagcctctcctgatggagaaggaggattaccattccctgtaccaatcccacctg

SEQ ID NO: 8105 - DNA, 1587 bp, Artificial Sequence
  derived and/or modified sequence
atgttgcttgcagtgttgtattgccttctgtggtcatttcaaaccagcgctggacattttcctcgcgcttgtgtctctagcaagaaccttatggaaaaagaatgttgtccaccttggagcggcgacaggtcgccctgtggtcaactttccggacggggatcctgccaaaacattctgctttcgaatgcccccctggggccgcaatttccgtttactggagtggatgacagagagagctggccgtccgtgttttacaacaggacttgccagtgttccggtaacttcatgggtttcaattgcggtaattgtaagtttggcttttggggccctaattgtacggaaagacgactccttgtgagaagaaacatctttgatctttccgctccagagaaagataagttcttcgcctacttgacccttgctaagcacaccatttcttcagactacgtcatcccaatagggacctacggtcagatgaaaaacggcagcacgcctatgtttaatgacattaacatttacgacctcttcgtgtggatgcattactacgtctctatggatgcattgcttggagggtcagagatttggagagatattgattttgcacatgaagcacctgcatttctgccatggcacagactgttccttctgcggtgggagcaagaaattcagaagttgaccggtgatgaaaactttaccatcccttactgggactggcgggatgcggaaaagtgcgacatttgcaccgatgaatacatgggtgggcaacatcctaccaacccgaaccttctctcccccgcgtcgttcttcagctcctggcaaattgtgtgcagccgcctggaagaatacaactcccatcagtcgctttgcaacggtacccccgagggaccgctcagacggaacccaggaaaccatgataagagcagaactcctagactgccctcgtccgctgatgtcgagttttgtctttcgcttactcagtacgagtcgggctcgatggacaaggcggccaacttttcattccggaacactttggagggattcgcaagccctctcactggtattgctgatgcatctcagtctagcatgcataacgcccttcatatctatatgaacggtacgatgtcgcaggtgcagggttcagcaaatgatccgatatttctgctgcatcatgccttcgtggattccatctttgaacagtggcttaggcgtcacagaccactccaggaagtgtaccctgaagcaaacgcccctattggccacaacagagagtcgtacatggtccctttcatcccactttaccgcaacggagacttctttatctcatctaaagatcttgggtacgattatagctacctgcaagatagcgacccagattcgttccaagactacattaagtcctacctcgaacaggcatccaggatctggtcgtggctcctcggagcagccatggtcggggcagttctgactgcccttttggcgggcctcgtgtccctgctgtgtcgtcacaagagaaagcaacttccagaagaaaagcaacctcttctgatggagaaggaggattaccactccctttatcaatcgcatttg

SEQ ID NO: 8106 - DNA, 1587 bp, Artificial Sequence
  derived and/or modified sequence
atgctgctcgccgtgctgtactgtcttctgtggtctttccagactagtgcgggacactttcctagggcttgcgtttcttcgaaaaatctcatggaaaaagaatgttgtcctccttggtccggagataggtcaccctgtggacagctctctgggaggggaagttgtcagaatatacttctctccaacgcaccactgggaccacagttccctttcacaggagtcgatgacagggagtcttggccctcagttttttataaccggacatgtcagtgcagtggaaacttcatggggttcaattgtggaaactgtaagttcggattctgggggccaaactgcacagaacgaagactcctagtccgcaggaacatcttcgatctgtctgcgcccgaaaaagataagttctttgcatatctcacattagcgaaacacactatctcctctgattacgtgatccctatcggaacttatgggcaaatgaagaacgggtctacacccatgtttaatgatataaacatatatgatctttttgtctggatgcattactatgtctccatggatgctctcctaggaggatctgaaatttggagggatatcgattttgctcacgaagctccagcattcctcccatggcaccgactgttcctcttgaggtgggaacaagaaatacagaaacttacaggagatgaaaatttcacaattccatattgggattggcgggatgccgaaaaatgcgatatttgcacagatgaatatatggggggacagcatcccacaaacccaaatctcctttctcctgcatccttcttctcctcctggcagatagtttgtagtagactagaagaatataactcccaccagagtttatgtaatggaacaccggaggggccactgcggcggaaccccgggaatcacgacaagtctaggacacctcgccttcctagttccgccgatgtggaattttgtctcagtctcacacagtatgaatcaggatcaatggataaagccgctaacttttccttccgcaatacacttgaaggatttgccagtcctctaacaggaattgctgatgcatcacagagttctatgcataatgccttgcacatctatatgaacgggactatgtcacaggtccaagggtctgctaatgatccaatcttcctgctgcaccacgcttttgtggatagtatctttgagcagtggctacggagacatcgtcctctacaggaagtttaccctgaggcgaatgctcccatcggacacaatcgggaatcttacatggtaccttttatcccactctataggaacggggatttttttatctcatccaaagatctggggtacgattattcctacctacaggattctgaccctgattctttccaggattacatcaaatcttatctcgaacaggcttctcgcatctggagttggctactcggggcagctatggtgggggccgtcctgactgccttgctggcaggacttgtgagtctcctgtgcaggcacaaacgaaaacagctacctgaagaaaaacagcccctacttatggagaaagaagattaccattcactctaccaatcacatctt

SEQ ID NO: 8107 - DNA, 1587 bp, Artificial Sequence
  derived and/or modified sequence
atgctgctggccgtgctttactgtctgctgtggtcgtttcaaacttcagcaggccattttcctagggcctgtgtgtcctcgaaaaaccttatggagaaggagtgttgtcctccatggtcaggtgaccggtcgccatgcgggcaacttagcggacgaggtagctgtcaaaacatccttctgtcgaacgctccccttggtcctcagttcccattcacgggagtggacgatcgagaatcgtggcctagcgtgttttacaacaggacctgtcagtgcagcggaaacttcatgggtttcaattgcggcaattgcaagttcggtttttggggtccaaattgcactgaacgtaggctgctcgtcagacgtaacatctttgatctgagcgctccggaaaaggacaagtttttcgcatacctgactctggcaaagcacaccatctcatcggactacgttatacctatagggacctacggacagatgaagaacggatccaccccaatgtttaacgatatcaacatctacgatctgttcgtgtggatgcattactacgtgtccatggatgccctcttgggaggctcggaaatttggcgcgacattgactttgctcacgaagcacctgccttcctgccatggcaccggctgtttctcctgcgttgggaacaagagattcaaaagctgactggtgatgaaaactttaccattccatactgggattggagagacgcagaaaaatgcgatatctgcactgacgaatacatgggtggacagcatccaaccaacccaaatcttctctcacccgcctccttcttttcctcctggcaaatcgtctgtagccgactcgaagagtacaattcccaccagtccctctgtaacggcactccggagggccctcttaggagaaaccctggaaaccacgacaagtccagaactccgagactgccttcctcagccgatgtggaattttgcctgtctcttacccagtacgagtccggttcgatggataaggccgcaaatttctcgttccgcaatacccttgaaggttttgcaagccctcttactggtatagcagacgcttcgcagtcctctatgcataacgcccttcatatctacatgaatggaaccatgtcgcaagtgcagggctccgcaaacgatcctatctttcttcttcatcatgccttcgtggactccatctttgaacagtggctgcgacgacacagaccccttcaggaagtctacccagaagcaaacgcacctatcggtcacaacagagagagctacatggtgccctttattcctctttacagaaacggggacttctttatctcctctaaagatcttggatacgattactcgtaccttcaggatagcgatccggattcgtttcaggactacattaagtcgtacctggaacaggcttcccggatatggtcatggctgctgggagccgcgatggtcggggcagtcctgactgcactgctcgcgggtctggtgtccctcctttgtcgtcataaaagaaagcaacttccagaggaaaagcaacccctgctgatggaaaaggaagattatcattcgctttaccagtcccacctg

SEQ ID NO: 8108 - DNA, 1587 bp, Artificial Sequence
  derived and/or modified sequence
atgcttctcgccgtgctgtattgcttgctctggtcctttcaaaccagcgccgggcacttccctagagcttgtgtttcaagcaaaaatcttatggaaaaagaatgttgccccccatggtccggtgatcgcagcccctgcggacagctctcaggacgaggcagttgtcagaatatcctgctgtccaatgcacctctgggtcctcagttccctttcaccggcgtcgacgacagggagtcatggccatcagtgttctacaatcgaacttgccaatgttccgggaatttcatgggcttcaactgtggcaactgtaagttcgggttctggggcccaaactgcaccgaaaggagacttctggtgcggcggaatatttttgacctgtctgcgcccgagaaggataagttctttgcctatctcacactcgctaagcatacaatctcatcagattacgtcatccccattggtacttacgggcagatgaagaatgggtctacacctatgttcaatgacatcaatatctatgatctgttcgtgtggatgcactattacgtgagtatggatgcactgctcggaggatctgagatctggagggacatcgacttcgctcatgaagctcccgctttcttgccatggcataggctgttcctgttgagatgggaacaggaaattcagaaactcactggcgacgagaatttcactatcccatattgggattggcgcgatgcagaaaagtgcgacatatgtacggatgaatacatgggggggcagcatcctaccaatcccaatctgctgtctcctgcttccttcttttcaagctggcagatcgtgtgctcaaggctggaggagtataatagtcatcaatccctttgcaatggcactccagaggggcccctgagacggaatccaggcaatcatgataagagccgcaccccaaggctcccaagtagcgcagatgtcgagttttgcctctcactgacccagtacgaaagtgggtcaatggacaaagcagccaatttttcatttaggaatactttggaaggatttgcctcaccattgaccggtatcgctgacgccagccagtccagcatgcataatgctttgcatatttatatgaacggaaccatgagccaagtgcagggctcagccaatgaccccatttttctgctgcaccatgccttcgtcgactctattttcgagcagtggcttcggcgacacaggccactgcaggaggtgtatccagaggccaatgctcctattgggcacaatagagaaagttacatggtgccttttatccccctctataggaacggcgactttttcatttcttctaaagacttgggatatgattattcttatctccaggactctgacccggactccttccaagactacataaaatcctatctggagcaagcaagtcgcatctggtcctggctgctcggggccgccatggtgggagctgtcctgacagcactgcttgcaggcctcgtgtcactgttgtgccgccacaagcggaagcagctgccagaggagaagcaaccattgctgatggagaaagaggattaccactctttgtaccaaagtcatctg

SEQ ID NO: 8109 - DNA, 1587 bp, Artificial Sequence
  derived and/or modified sequence
atgttgctggcggtcttgtactgcctcttgtggtccttccaaaccagcgcgggtcatttcccaagagcgtgcgtgagtagcaagaacctgatggagaaggaatgttgcccaccgtggagcggagacagatcgccatgcggccagctgtcgggacgcggttcctgccaaaacattctcctctccaatgccccgctgggaccacaattcccgtttactggggtcgatgaccgtgagtcctggccttccgtgttttacaaccggacctgtcaatgtagcggaaacttcatgggatttaactgtgggaactgcaagttcggattctggggccccaattgcactgaacggagactcttggtgcgacggaacattttcgacctgagcgcgcctgagaaggataagttcttcgcctacctcactctcgcgaagcatactatctcttcagactacgttatccccatcggcacctatggacaaatgaagaatgggtcaactcctatgtttaacgatatcaacatctatgaccttttcgtgtggatgcattactacgtgagcatggatgcgctgctgggaggaagcgagatctggcgcgacattgactttgcgcatgaagcaccggccttcctgccgtggcaccgcctgttcctgctccggtgggagcaggagatccagaagctgacgggggacgagaacttcaccatcccgtactgggattggagagacgccgaaaagtgcgatatctgcactgatgagtatatgggtggacaacatccgaccaacccgaacctcctgtccccggcgagctttttctcatcctggcagattgtctgttcgcgcctggaagagtacaactcccaccaatccctctgtaacggcactccagagggaccgctgaggcggaatcctggaaatcacgataaatccaggaccccaagactgccatcctcggcggatgtggaattctgcctgagcctcacgcaatatgaatcaggatcgatggataaagcggctaacttctcatttcggaacactcttgaaggcttcgccagcccgctgactggaatcgcagatgcgtcgcagtcctcaatgcacaacgctcttcatatctacatgaatgggaccatgtcgcaagttcaaggttcggcaaatgaccctatctttttgctgcaccatgccttcgtggactccatcttcgagcagtggctgcggcggcacaggcccctgcaggaggtgtacccggaggcgaacgctccgattggacataaccgcgagtcatacatggtgccgttcatcccactgtaccgcaacggagatttcttcatcagctcgaaggatctggggtacgattactcgtacttgcaggacagcgacccagattcgttccaggattacatcaagtcgtaccttgagcaggcctctcgcatctggtcctggctgctgggtgctgcaatggtgggcgcagtgttgaccgccctcctcgcaggactcgtgtcacttctgtgtcggcataagagaaagcaactgccggaagagaagcagccgctgctcatggaaaaggaggactaccacagcctgtaccaatctcacctc

SEQ ID NO: 8110 - DNA, 1587 bp, Artificial Sequence
  derived and/or modified sequence
atgctattagcggttctatattgtttattatggtcgtttcaaacgtcggcgggtcattttccgcgtgcgtgtgtatcgtcgaaaaatctaatggaaaaagaatgttgtccgccgtggtcgggtgatcgttcgccgtgtggtcaactatcgggtcgaggttcgtgtcaaaatatattattatcgaatgcgccgctaggtccgcaatttccgtttacgggtgttgatgatcgagaatcgtggccgtcggttttttataatcgtacgtgtcaatgttcgggtaattttatgggttttaattgtggtaattgtaaatttggtttttggggtccgaattgtacggaacgtcgtctattagtacgacgtaatatatttgatctatcggcgccggaaaaagataaattttttgcgtatttaacgctagcgaaacatacgatatcgtcggattatgttataccgataggtacgtatggtcaaatgaaaaatggttcgacgccgatgtttaatgatataaatatatatgatttatttgtatggatgcattattatgtatcgatggatgcgctattaggtggttcggaaatatggcgagatatagattttgcgcatgaagcgccggcgtttttaccgtggcatcgattatttttactacgatgggaacaagaaatacaaaaactaacgggtgatgaaaattttacgataccgtattgggattggcgagatgcggaaaaatgtgatatatgtacggatgaatatatgggtggtcaacatccgacgaatccgaatctattatcgccggcgtcgtttttttcgtcgtggcaaatagtatgttcgcgactagaagaatataattcgcatcaatcgctatgtaatggtacgccggaaggtccgctacgacgtaatccgggtaatcatgataaatcgcgtacgccgcgtttaccgtcgtcggcggatgtagaattttgtttatcgttaacgcaatatgaatcgggttcgatggataaagcggcgaatttttcgtttcgaaatacgctagaaggttttgcgtcgccgttaacgggtatagcggatgcgtcgcaatcgtcgatgcataatgcgttacatatatatatgaatggtacgatgtcgcaagtacaaggttcggcgaatgatccgatatttttactacatcatgcgtttgttgattcgatatttgaacaatggctacgtcgacatcgaccgttacaagaagtatatccggaagcgaatgcgccgataggtcataatcgtgaatcgtatatggtaccgtttataccgctatatcgtaatggtgatttttttatatcgtcgaaagatttaggttatgattattcgtatttacaagattcggatccggattcgtttcaagattatataaaatcgtatctagaacaagcgtcgcgtatatggtcgtggctactaggtgcggcgatggttggtgcggtactaacggcgttattagcgggtttagtttcgctattatgtcgacataaacgtaaacaactaccggaagaaaaacaaccgttattaatggaaaaagaagattatcattcgctatatcaatcgcatcta

SEQ ID NO: 8111 - DNA, 1736 bp, Artificial Sequence
  derived and/or modified sequence
gggaaataagagagaaaagaagagtaagaagaaatataagagccaccatgcttctggccgtcctttactgtctcttgtggtccttccagacatcggcgggacattttccaagggcgtgcgtatcgtcaaagaatctgatggaaaaggaatgttgtccaccctggtcaggagataggtccccttgcggccagttgtcaggtagaggaagctgtcagaacattcttctttcgaacgctccgttgggaccgcagttcccctttacgggtgtcgatgatcgcgaatcatggcccagcgtgttttacaacagaacgtgccaatgcagcgggaatttcatgggattcaactgcgggaactgcaagtttggcttttggggacccaactgcacggagcggcgactcctcgtacggcgaaacatctttgatctgtcagcgcccgagaaagacaagttcttcgcgtatcttactctggcaaaacataccatctcgagcgattacgtgatcccaatcggtacgtacggacagatgaagaatggatcgactcctatgttcaacgatatcaacatctacgatcttttcgtgtggatgcattactatgtctccatggatgccctcttgggaggatcggagatttggagagacattgactttgcgcacgaggcgcctgcgtttctgccttggcaccgcctgtttcttttgcgctgggagcaggagatccagaagctgactggggacgagaatttcaccatcccgtactgggattggagggacgcggaaaaatgtgatatttgcaccgatgaatacatgggtggccaacaccccacaaatcccaatctcctttcacccgcatccttcttttcgtcctggcagattgtctgttccaggctggaagagtataactcacaccagtccttgtgcaatggtaccccggaggggcctctccgccgcaatcccggaaatcacgacaaaagcaggacaccgcggctcccgtcctcggcagacgtggaattctgtctcagcttgacgcagtatgagtcggggtcgatggacaaggcagccaacttttcgttccggaatacgctcgaagggttcgcaagccccttgacagggatcgcggacgcaagccagtcgtcgatgcataacgcgctgcatatctacatgaatgggacaatgagccaggtgcaggggtcggctaacgacccgattttcctgctccaccacgccttcgtagacagcatttttgaacaatggttgcgacggcaccggccgttgcaagaggtctatccggaggccaacgccccgatcggtcacaacagggaatcatatatggtaccgtttatccctctgtatagaaatggtgacttcttcatcagctcgaaagaccttggctatgattactcctatctccaagattcggatccggactcattccaagactacattaagtcatatctcgagcaagcgtcgcgaatctggtcgtggttgctgggagcggccatggtcggggcagtgctgacggcgctgctcgccggtcttgtgtcgctgttgtgtcggcacaagagaaaacagctccccgaggagaagcagcccttgctcatggaaaaagaggattatcattcactttaccagtcgcatctgtgataataggctgccttctgcggggcttgccttctggccatgcccttcttctctcccttgcacctgtacctcttggtctttgaataaagcctgagtaggaag

SEQ ID NO: 8112 - DNA, 1590 bp, Artificial Sequence
  derived and/or modified sequence
atgctgctggccgtgctgtactgcctgctgtggagcttccagaccagcgccggccacttccccagagcctgcgtgagcagcaagaacctgatggagaaggagtgctgccccccctggagcggcgacagaagcccctgcggccagctgagcggcagaggcagctgccagaacatcctgctgagcaacgcccccctgggcccccagttccccttcaccggcgtggacgacagagagagctggcccagcgtgttctacaacagaacctgccagtgcagcggcaacttcatgggcttcaactgcggcaactgcaagttcggcttctggggccccaactgcaccgagagaagactgctggtgagaagaaacatcttcgacctgagcgcccccgagaaggacaagttcttcgcctacctgaccctggccaagcacaccatcagcagcgactacgtgatccccatcggcacctacggccagatgaagaacggcagcacccccatgttcaacgacatcaacatctacgacctgttcgtgtggatgcactactacgtgagcatggacgccctgctgggcggcagcgagatctggagagacatcgacttcgcccacgaggcccccgccttcctgccctggcacagactgttcctgctgagatgggagcaggagatccagaagctgaccggcgacgagaacttcaccatcccctactgggactggagagacgccgagaagtgcgacatctgcaccgacgagtacatgggcggccagcaccccaccaaccccaacctgctgagccccgccagcttcttcagcagctggcagatcgtgtgcagcagactggaggagtacaacagccaccagagcctgtgcaacggcacccccgagggccccctgagaagaaaccccggcaaccacgacaagagcagaacccccagactgcccagcagcgccgacgtggagttctgcctgagcctgacccagtacgagagcggcagcatggacaaggccgccaacttcagcttcagaaacaccctggagggcttcgccagccccctgaccggcatcgccgacgccagccagagcagcatgcacaacgccctgcacatctacatgaacggcaccatgagccaggtgcagggcagcgccaacgaccccatcttcctgctgcaccacgccttcgtggacagcatcttcgagcagtggctgagaagacacagacccctgcaggaggtgtaccccgaggccaacgcccccatcggccacaacagagagagctacatggtgcccttcatccccctgtacagaaacggcgacttcttcatcagcagcaaggacctgggctacgactacagctacctgcaggacagcgaccccgacagcttccaggactacatcaagagctacctggagcaggccagcagaatctggagctggctgctgggcgccgccatggtgggcgccgtgctgaccgccctgctggccggcctggtgagcctgctgtgcagacacaagagaaagcagctgcccgaggagaagcagcccctgctgatggagaaggaggactaccacagcctgtaccagagccacctgtag

SEQ ID NO: 8113 - DNA, 1590 bp, Artificial Sequence
  derived and/or modified sequence
atgctactggcagtgctgtattgcttactctggagtttccaaacatcagctggccatttcccaagagcctgtgtctcttcgaaaaacttgatggaaaaggagtgctgccctccctggagcggagaccgctctccctgcggccagctgagcggccgcgggtcatgtcagaatatcttactgagtaacgcaccactcggtccccaattccccttcactggagtggacgatagagaatcttggccatctgtcttttacaatagaacctgtcagtgctctggaaattttatgggtttcaactgcggaaactgcaagttcgggttctggggccctaattgtaccgaacggaggctgctggttcggaggaatatctttgatctcagtgctcctgagaaggacaagttcttcgcctacctgacgctcgcaaaacatactatttctagcgactatgtcatcccaattggtacatacggccagatgaaaaatggctcaacccctatgtttaatgatataaatatttacgatttatttgtgtggatgcactactatgtcagcatggacgccctactggggggctcggaaatctggagggacattgattttgctcatgaggctccggcttttttaccttggcatcgcctcttccttctccgctgggaacaagaaatacagaaattgacaggggacgagaatttcaccataccctactgggactggcgggacgctgagaaatgtgacatctgcacggatgaatacatgggcggccagcaccccaccaatcccaatctcctgtcgcccgcatctttttttagttcttggcagatagtgtgtagtcggcttgaggagtacaacagccaccaatcactctgcaatggtacacctgagggccccctgcgcagaaacccaggcaatcacgacaaatccagaacaccacggttgccttcttctgccgatgtggaattttgtctgtccctcactcagtatgaatcgggaagcatggataaagcggccaacttttcttttagaaacaccttagagggcttcgctagcccactgacaggaatcgccgatgcatcccaatcatccatgcacaatgctttacatatttatatgaacggaacaatgtcgcaggtgcaggggtctgctaacgaccctattttcttgctacaccacgcgtttgtggattccatcttcgaacagtggttgagaagacacagaccactgcaggaggtctatcccgaagccaacgcgcctatagggcataacagggaatcatacatggtgccgttcattcctctttataggaacggggatttcttcataagtagtaaggatcttggttatgactacagctacctgcaggactctgatcctgattcgttccaggattacatcaaaagttacctggaacaagccagccgcatctggtcctggctgcttggcgccgcaatggttggggccgtccttactgccttgctggcaggacttgtcagcctgctctgtagacataagcgcaaacagctcccagaagagaagcagcccctcctgatggaaaaagaggattaccactcactctaccagagccacctgtag

SEQ ID NO: 8114 - DNA, 1590 bp, Artificial Sequence
  derived and/or modified sequence
atgctgctggccgtgctgtactgcctgctgtggagcttccagaccagcgctggccacttcccccgggcctgtgtgagcagcaagaacctgatggagaaggagtgctgccccccctggagcggggacaggagcccctgtggccagctgagcggccggggcagctgccagaacatcctgctgagcaatgcccccctgggcccccagttccccttcaccggggtggatgaccgggagagctggcccagcgtcttctacaacagaacctgccagtgcagcggcaacttcatgggcttcaactgtggcaactgcaagtttggcttctggggccccaactgcacagaaagaaggctgctggtgagaagaaacatctttgacctgagcgcccctgagaaggacaagttctttgcctacctgaccctggccaagcacaccatcagcagtgactatgtgatccccatcggcacctacggccagatgaagaatggcagcacccccatgtttaatgacatcaacatctatgacctgtttgtgtggatgcactactacgtgtccatggatgccctgctgggcggcagcgagatctggagggacatcgactttgcccacgaggccccagccttcctgccctggcacaggctcttcctgctgcgctgggagcaggagatccagaagctgactggagatgagaacttcaccatcccctactgggactggagagatgctgagaagtgtgacatctgcacagatgagtacatgggcggccagcaccccaccaaccccaacctgctgagccctgccagcttcttcagctcctggcagatcgtgtgcagccggctggaggagtacaacagccaccagagcctgtgcaatggcaccccagagggccccctgcggagaaatcctggcaaccacgacaagagcaggaccccccggctgcccagcagcgcagatgtggagttctgcctgagcctgacccagtatgaaagtggctccatggacaaggccgccaacttctccttcaggaacaccctggagggctttgccagccccctgaccggcattgctgatgccagccagagctccatgcacaatgccctgcacatctacatgaatggcaccatgagccaggtgcagggcagcgccaatgaccccatcttcctgctgcaccacgcctttgtggacagcatctttgagcagtggctgcggcggcaccggcccctgcaggaggtgtacccagaggccaatgcccccatcggccacaaccgggagagctacatggtgcccttcatccccctgtacagaaatggagacttcttcatcagcagcaaggacctgggctatgactacagctacctgcaggacagcgaccctgacagcttccaggactacatcaagagctacctggagcaggccagccgcatctggagctggctgctgggcgccgccatggtgggcgctgtgctgacagccctgctggccggcctggtgtccctgctgtgccgccacaagaggaagcagctgcctgaggagaagcagcccctgctgatggagaaggaggactaccacagcctgtaccagagccacctgtag

SEQ ID NO: 8115 - DNA, 1590 bp, Artificial Sequence
  derived and/or modified sequence
atgctgctggccgtgctgtactgcctgctgtggagcttccagaccagcgcgggtcacttccctcgggcctgtgtaagttctaaaaatctgatggagaaagaatgctgtccgccttggtctggggaccgaagtccctgcgggcagctctcgggccgcggttcatgccaaaacattcttctttctaatgcccccctgggaccccagttcccttttactggggttgatgaccgtgagtcctggccaagcgtcttctacaaccgcacttgtcaatgctctggcaatttcatgggtttcaactgtgggaattgcaagttcggattctgggggccaaattgcactgagcgtcggcttctggtgcgcagaaatatatttgaccttagtgcgccggagaaagataagttctttgcttatctcaccctggcaaaacatacaatcagctctgactacgtgatacctatcggcacttacgggcagatgaagaacgggtcaacccccatgtttaacgatatcaatatctacgatctattcgtgtggatgcattactacgtgtccatggatgccctgctgggggggtctgaaatttggagagacatcgatttcgcacatgaagcgccagcctttcttccctggcatcgactcttccttttgcggtgggaacaggaaatccagaagctgacaggagatgagaacttcaccattccctactgggactggcgggacgctgaaaagtgtgacatttgtactgacgagtatatgggtggtcagcaccctactaaccccaacttactcagccccgcttcttttttttcatcctggcagatcgtctgctccaggctggaagagtataatagtcatcagtcactctgcaacgggacccccgagggcccattaagacgcaaccctggcaaccacgataaatcacgcacaccacgcttgcccagctccgccgacgtggagttctgcctgtccctcactcagtatgaaagtggctcaatggataaggcagctaatttttcctttagaaatactttggaggggtttgcgtcccctcttaccggtatcgcggacgcctcccagtccagtatgcataacgcgcttcatatctacatgaatggcaccatgtctcaagtgcagggctccgcaaatgaccccatttttttattgcatcatgcctttgtggacagtatctttgagcagtggctgagacggcacaggccacttcaagaggtttacccagaagctaatgcccccattggccataatcgggaaagctacatggtgccctttattcctctgtaccgcaacggggacttcttcattagttcaaaagacttaggatatgattactcttacctccaggactccgatccagatagtttccaggattacatcaaaagctatctggaacaagcctcaagaatctggtcatggttactgggagctgccatggtgggggctgtgttaactgccttgctggctggcctcgtgagcctgctctgccgacataagcgtaaacaattgcctgaggaaaagcagcccctgctgatggaaaaagaagattaccatagcttatatcagtcccatttgtag

SEQ ID NO: 8116 - DNA, 1590 bp, Artificial Sequence
  derived and/or modified sequence
atgctgttagctgtcctgtattgtctcctttggagcttccagacgtcggccggtcacttcccccgagcctgcgtgtccagcaagaacctgatggaaaaggagtgttgccccccttggtcaggagatcggtcgccgtgcgggcagctatccgggcgaggatcatgccagaatattttgcttagcaatgcaccgctggggcctcaattccccttcacgggcgtggatgatcgtgagtcatggccctcggtgttttataaccgaacttgccaatgtagcggcaatttcatggggttcaattgtggcaattgcaaatttggattttggggcccaaattgtacggaacgacgcctgctggtgagaagaaacattttcgatttatccgcccctgagaaggacaagttcttcgcatacttgactcttgcgaaacacactatcagtagcgactacgtcatcccgattggcacttacggacagatgaagaatggatctaccccgatgtttaatgatatcaacatatacgacctgtttgtttggatgcactactacgtgtccatggacgccctgctcggagggtcagagatctggcgtgatatagactttgctcacgaagcacccgcttttctgccctggcaccggctgttcctgttgcggtgggaacaagaaattcagaagctcaccggcgatgaaaattttaccattccctactgggattggagagatgcagagaaatgcgatatctgcacagatgagtatatgggtggccagcaccccaccaatccaaacctcctctctccagcctcattcttctcatcctggcagatcgtgtgctcgcgactggaggagtacaattctcatcagtctctgtgcaatggcaccccagagggccctttgcggaggaaccctggaaatcacgataagtcacgcacccctcggctgccatcctccgctgacgtggaattctgcctgagcttgacacagtacgagtctggctcaatggataaagccgctaactttagctttaggaacacactagagggatttgccagtcctttgaccggaatcgccgatgctagccaatccagcatgcacaatgccctgcacatctacatgaacgggaccatgtcccaggtccagggatctgccaatgatcctatcttcttgttacatcacgccttcgtcgatagtatttttgaacaatggctcaggagacaccgtcctctccaagaggtctacccagaggccaacgctcctattgggcacaatcgtgagagttatatggtaccctttatccctttgtacagaaatggggattttttcattagcagtaaagacctgggctatgactacagttacttacaggactccgatcctgacagctttcaggattacattaaatcttacttggaacaggccagtcgcatctggagctggttgctcggagcggctatggtaggagccgtcctgaccgcattgctggccggtctcgtctctttgctctgtcgccacaaacgcaagcagcttcctgaggaaaagcagccgctcctgatggaaaaagaagactaccactcattgtatcaaagccacttgtag

SEQ ID NO: 8117 - DNA, 2466 bp, Artificial Sequence
  derived and/or modified sequence
tattgagttcttcaaacattgtagcctctttatggtctctgagaaataactaccttaaacccataatctttaatacttcctaaactttcttaataagagaagctctattcctgacactacctctcatttgcaaggtcaaatcatcattagttttgtagtctattaactgggtttgcttaggtcaggcattattattactaaccttattgttaatattctaaccataagaattaaactattaatggtgaatagagtttttcactttaacataggcctatcccactggtgggatacgagccaattcgaaagaaaagtcagtcatgtgcttttcagaggatgaaagcttaagataaagactaaaagtgtttgatgctggaggtgggagtggtattatataggtctcagccaagacatgtgataatcactgtagtagtagctggaaagagaaatctgtgactccaattagccagttcctgcagaccttgtgaggactagaggaagaatgctcctggctgttttgtactgcctgctgtggagtttccagacctccgctggccatttccctagagcctgtgtctcctctaagaacctgatggagaaggaatgctgtccaccgtggagcggggacaggagtccctgtggccagctttcaggcagaggttcctgtcagaatatccttctgtccaatgcaccacttgggcctcaatttcccttcacaggggtggatgaccgggagtcgtggccttccgtcttttataataggacctgccagtgctctggcaacttcatgggattcaactgtggaaactgcaagtttggcttttggggaccaaactgcacagagagacgactcttggtgagaagaaacatcttcgatttgagtgccccagagaaggacaaattttttgcctacctcactttagcaaagcataccatcagctcagactatgtcatccccatagggacctatggccaaatgaaaaatggatcaacacccatgtttaacgacatcaatatttatgacctctttgtctggatgcattattatgtgtcaatggatgcactgcttgggggatctgaaatctggagagacattgattttgcccatgaagcaccagcttttctgccttggcatagactcttcttgttgcggtgggaacaagaaatccagaagctgacaggagatgaaaacttcactattccatattgggactggcgggatgcagaaaagtgtgacatttgcacagatgagtacatgggaggtcagcaccccacaaatcctaacttactcagcccagcatcattcttctcctcttggcagattgtctgtagccgattggaggagtacaacagccatcagtctttatgcaatggaacgcccgagggacctttacggcgtaatcctggaaaccatgacaaatccagaaccccaaggctcccctcttcagctgatgtagaattttgcctgagtttgacccaatatgaatctggttccatggataaagctgccaatttcagctttagaaatacactggaaggatttgctagtccacttactgggatagcggatgcctctcaaagcagcatgcacaatgccttgcacatctatatgaatggaacaatgtcccaggtacagggatctgccaacgatcctatcttccttcttcaccatgcatttgttgacagtatttttgagcagtggctccgaaggcaccgtcctcttcaagaagtttatccagaagccaatgcacccattggacataaccgggaatcctacatggttccttttataccactgtacagaaatggtgatttctttatttcatccaaagatctgggctatgactatagctatctacaagattcagacccagactcttttcaagactacattaagtcctatttggaacaagcgagtcggatctggtcatggctccttggggcggcgatggtaggggccgtcctcactgccctgctggcagggcttgtgagcttgctgtgtcgtcacaagagaaagcagcttcctgaagaaaagcagccactcctcatggagaaagaggattaccacagcttgtatcagagccatttataaaaggcttaggcaatagagtagggccaaaaagcctgacctcactctaactcaaagtaatgtccaggttcccagagaatatctgctggtatttttctgtaaagaccatttgcaaaattgtaacctaatacaaagtgtagccttcttccaactcaggtagaacacacctgtctttgtcttgctgttttcactcagcccttttaacattttcccctaagcccatatgtctaaggaaaggatgctatttggtaatgaggaactgttatttgtatgtgaattaaagtgctcttattttaaaaaattgaaataattttgatttttgccttctgattatttaaagatctatatatgttttattggccccttctttattttaa

SEQ ID NO: 8118 - RNA, 1736 nt, Artificial Sequence
  derived and/or modified sequence
gggaaauaagagagaaaagaagaguaagaagaaauauaagagccaccaugcuucuggccguccuuuacugucucuugugguccuuccagacaucggcgggacauuuuccaagggcgugcguaucgucaaagaaucugauggaaaaggaauguuguccacccuggucaggagauagguccccuugcggccaguugucagguagaggaagcugucagaacauucuucuuucgaacgcuccguugggaccgcaguuccccuuuacgggugucgaugaucgcgaaucauggcccagcguguuuuacaacagaacgugccaaugcagcgggaauuucaugggauucaacugcgggaacugcaaguuuggcuuuuggggacccaacugcacggagcggcgacuccucguacggcgaaacaucuuugaucugucagcgcccgagaaagacaaguucuucgcguaucuuacucuggcaaaacauaccaucucgagcgauuacgugaucccaaucgguacguacggacagaugaagaauggaucgacuccuauguucaacgauaucaacaucuacgaucuuuucguguggaugcauuacuaugucuccauggaugcccucuugggaggaucggagauuuggagagacauugacuuugcgcacgaggcgccugcguuucugccuuggcaccgccuguuucuuuugcgcugggagcaggagauccagaagcugacuggggacgagaauuucaccaucccguacugggauuggagggacgcggaaaaaugugauauuugcaccgaugaauacauggguggccaacaccccacaaaucccaaucuccuuucacccgcauccuucuuuucguccuggcagauugucuguuccaggcuggaagaguauaacucacaccaguccuugugcaaugguaccccggaggggccucuccgccgcaaucccggaaaucacgacaaaagcaggacaccgcggcucccguccucggcagacguggaauucugucucagcuugacgcaguaugagucggggucgauggacaaggcagccaacuuuucguuccggaauacgcucgaaggguucgcaagccccuugacagggaucgcggacgcaagccagucgucgaugcauaacgcgcugcauaucuacaugaaugggacaaugagccaggugcaggggucggcuaacgacccgauuuuccugcuccaccacgccuucguagacagcauuuuugaacaaugguugcgacggcaccggccguugcaagaggucuauccggaggccaacgccccgaucggucacaacagggaaucauauaugguaccguuuaucccucuguauagaaauggugacuucuucaucagcucgaaagaccuuggcuaugauuacuccuaucuccaagauucggauccggacucauuccaagacuacauuaagucauaucucgagcaagcgucgcgaaucuggucgugguugcugggagcggccauggucggggcagugcugacggcgcugcucgccggucuugugucgcuguugugucggcacaagagaaaacagcuccccgaggagaagcagcccuugcucauggaaaaagaggauuaucauucacuuuaccagucgcaucugugauaauaggcugccuucugcggggcuugccuucuggccaugcccuucuucucucccuugcaccuguaccucuuggucuuugaauaaagccugaguaggaag

SEQ ID NO: 8119 - protein, 480 aa, Artificial Sequence
  derived and/or modified sequence
MAVARAALGPLVTGLYDVQAFKFGDFVLKSGLSSPIYIDLRGIVSRPRLLSQVADILFQTAQNAGISFDTVCGVPYTALPLATVICSTNQIPMLIRRKETKDYGTKRLVEGTINPGETCLIIEDVVTSGSSVLETVEVLQKEGLKVTDAIVLLDREQGGKDKLQAHGIRLHSVCTLSKMLEILEQQKKVDAETVGRVKRFIQENVFVAANHNGSPLSIKEAPKELSFGARAELPRIHPVASKLLRLMQKKETNLCLSADVSLARELLQLADALGPSICMLKTHVDILNDFTLDVMKELITLAKCHEFLIFEDRKFADIGNTVKKQYEGGIFKIASWADLVNAHVVPGSGVVKGLQEVGLPLHRGCLLIAEMSSTGSLATGDYTRAAVRMAEEHSEFVVGFISGSRVSMKPEFLHLTPGVQLEAGGDNLGQQYNSPQEVIGKRGSDIIIVGRGIISAADRLEAAEMYRKAAWEAYLSRLGV

SEQ ID NO: 8120 - protein, 205 aa, Artificial Sequence
  derived and/or modified sequence
MLEILEQQKKVDAETVGRVKRFIQENVFVAANHNGSPLSIKEAPKELSFGARAELPRIHPVASKLLRLMQKKETNLCLSADVSLARELLQLADALGPSICMLKTHVDILNDFTLDVMKELITLAKCHEFLIFEDRKFADIGNTVKKQYEGDNLGQQYNSPQEVIGKRGSDIIIVGRGIISAADRLEAAEMYRKAAWEAYLSRLGV

SEQ ID NO: 8121 - protein, 388 aa, Artificial Sequence
  derived and/or modified sequence
MLIRRKETKDYGTKRLVEGTINPGETCLIIEDVVTSGSSVLETVEVLQKEGLKVTDAIVLLDREQGGKDKLQAHGIRLHSVCTLSKMLEILEQQKKVDAETVGRVKRFIQENVFVAANHNGSPLSIKEAPKELSFGARAELPRIHPVASKLLRLMQKKETNLCLSADVSLARELLQLADALGPSICMLKTHVDILNDFTLDVMKELITLAKCHEFLIFEDRKFADIGNTVKKQYEGGIFKIASWADLVNAHVVPGSGVVKGLQEVGLPLHRGCLLIAEMSSTGSLATGDYTRAAVRMAEEHSEFVVGFISGSRVSMKPEFLHLTPGVQLEAGGDNLGQQYNSPQEVIGKRGSDIIIVGRGIISAADRLEAAEMYRKAAWEAYLSRLGV

SEQ ID NO: 8122 - protein, 302 aa, Artificial Sequence
  derived and/or modified sequence
MLEILEQQKKVDAETVGRVKRFIQENVFVAANHNGSPLSIKEAPKELSFGARAELPRIHPVASKLLRLMQKKETNLCLSADVSLARELLQLADALGPSICMLKTHVDILNDFTLDVMKELITLAKCHEFLIFEDRKFADIGNTVKKQYEGGIFKIASWADLVNAHVVPGSGVVKGLQEVGLPLHRGCLLIAEMSSTGSLATGDYTRAAVRMAEEHSEFVVGFISGSRVSMKPEFLHLTPGVQLEAGGDNLGQQYNSPQEVIGKRGSDIIIVGRGIISAADRLEAAEMYRKAAWEAYLSRLGV

SEQ ID NO: 8123 - DNA, 618 bp, Artificial Sequence
  derived and/or modified sequence
atgctggagatcctggagcagcagaagaaggtggacgccgagaccgtgggcagagtgaagagattcatccaggagaacgtgttcgtggccgccaaccacaacggcagccccctgagcatcaaggaggcccccaaggagctgagcttcggcgccagagccgagctgcccagaatccaccccgtggccagcaagctgctgagactgatgcagaagaaggagaccaacctgtgcctgagcgccgacgtgagcctggccagagagctgctgcagctggccgacgccctgggccccagcatctgcatgctgaagacccacgtggacatcctgaacgacttcaccctggacgtgatgaaggagctgatcaccctggccaagtgccacgagttcctgatcttcgaggacagaaagttcgccgacatcggcaacaccgtgaagaagcagtacgagggcgacaacctgggccagcagtacaacagcccccaggaggtgatcggcaagagaggcagcgacatcatcatcgtgggcagaggcatcatcagcgccgccgacagactggaggccgccgagatgtacagaaaggccgcctgggaggcctacctgagcagactgggcgtgtag

SEQ ID NO: 8124 - DNA, 1167 bp, Artificial Sequence
  derived and/or modified sequence
atgctgatcagaagaaaggagaccaaggactacggcaccaagagactggtggagggcaccatcaaccccggcgagacctgcctgatcatcgaggacgtggtgaccagcggcagcagcgtgctggagaccgtggaggtgctgcagaaggagggcctgaaggtgaccgacgccatcgtgctgctggacagagagcagggcggcaaggacaagctgcaggcccacggcatcagactgcacagcgtgtgcaccctgagcaagatgctggagatcctggagcagcagaagaaggtggacgccgagaccgtgggcagagtgaagagattcatccaggagaacgtgttcgtggccgccaaccacaacggcagccccctgagcatcaaggaggcccccaaggagctgagcttcggcgccagagccgagctgcccagaatccaccccgtggccagcaagctgctgagactgatgcagaagaaggagaccaacctgtgcctgagcgccgacgtgagcctggccagagagctgctgcagctggccgacgccctgggccccagcatctgcatgctgaagacccacgtggacatcctgaacgacttcaccctggacgtgatgaaggagctgatcaccctggccaagtgccacgagttcctgatcttcgaggacagaaagttcgccgacatcggcaacaccgtgaagaagcagtacgagggcggcatcttcaagatcgccagctgggccgacctggtgaacgcccacgtggtgcccggcagcggcgtggtgaagggcctgcaggaggtgggcctgcccctgcacagaggctgcctgctgatcgccgagatgagcagcaccggcagcctggccaccggcgactacaccagagccgccgtgagaatggccgaggagcacagcgagttcgtggtgggcttcatcagcggcagcagagtgagcatgaagcccgagttcctgcacctgacccccggcgtgcagctggaggccggcggcgacaacctgggccagcagtacaacagcccccaggaggtgatcggcaagagaggcagcgacatcatcatcgtgggcagaggcatcatcagcgccgccgacagactggaggccgccgagatgtacagaaaggccgcctgggaggcctacctgagcagactgggcgtgtag

SEQ ID NO: 8125 - DNA, 909 bp, Artificial Sequence
  derived and/or modified sequence
atgctggagatcctggagcagcagaagaaggtggacgccgagaccgtgggcagagtgaagagattcatccaggagaacgtgttcgtggccgccaaccacaacggcagccccctgagcatcaaggaggcccccaaggagctgagcttcggcgccagagccgagctgcccagaatccaccccgtggccagcaagctgctgagactgatgcagaagaaggagaccaacctgtgcctgagcgccgacgtgagcctggccagagagctgctgcagctggccgacgccctgggccccagcatctgcatgctgaagacccacgtggacatcctgaacgacttcaccctggacgtgatgaaggagctgatcaccctggccaagtgccacgagttcctgatcttcgaggacagaaagttcgccgacatcggcaacaccgtgaagaagcagtacgagggcggcatcttcaagatcgccagctgggccgacctggtgaacgcccacgtggtgcccggcagcggcgtggtgaagggcctgcaggaggtgggcctgcccctgcacagaggctgcctgctgatcgccgagatgagcagcaccggcagcctggccaccggcgactacaccagagccgccgtgagaatggccgaggagcacagcgagttcgtggtgggcttcatcagcggcagcagagtgagcatgaagcccgagttcctgcacctgacccccggcgtgcagctggaggccggcggcgacaacctgggccagcagtacaacagcccccaggaggtgatcggcaagagaggcagcgacatcatcatcgtgggcagaggcatcatcagcgccgccgacagactggaggccgccgagatgtacagaaaggccgcctgggaggcctacctgagcagactgggcgtgtag

SEQ ID NO: 8126 - DNA, 1443 bp, Artificial Sequence
  derived and/or modified sequence
atggccgtcgctagagctgcactcggcccgctggtcacgggcctgtacgacgtacaggcattcaaattcggggactttgttctaaagtccggtctatcatcccctatctacatagacctgcgggggatcgtgtctagacctaggcttctatcccaggtggctgacatcctttttcagaccgcgcagaatgcagggatttctttcgataccgtttgtggagtaccgtacacggccttgcccctcgccacagtgatttgcagcaccaaccagattcccatgctgataagacgcaaggagacaaaagattacgggacaaagagactcgtggaaggtacaattaaccccggagaaacctgtttgatcattgaagatgttgtgaccagcggctcttctgtgctggaaaccgtggaggttctgcagaaggaagggctgaaggttaccgatgccatcgtgctcctagaccgggaacaaggtgggaaagacaaattacaagctcatggcatccggcttcattctgtgtgcacactgagcaaaatgctggaaatccttgagcagcagaagaaagtcgatgccgaaactgtcggccgcgtgaagaggtttatccaggagaatgtgtttgtagcagccaaccataacgggtcccccctgtcaatcaaagaggctcccaaggaactgtccttcggagcgcgcgccgagctgcctcgaatccaccccgtagctagtaagttgctgcggcttatgcagaagaaagagaccaatctgtgtctcagcgctgacgtgtcactggctagggagcttctccagctcgccgacgccctgggcccaagcatatgcatgctgaagacccacgttgacattctaaacgatttcacactcgatgttatgaaggagctcattacgctggctaagtgccacgagtttttaatttttgaggacaggaaatttgcagacataggaaacacggtgaagaagcaatacgaggggggcattttcaagatagcctcttgggcagatttggtcaacgcacacgtggtgcccggttctggagttgtgaaaggattacaggaagttgggctgcctttacaccgcggctgcctgctgattgccgagatgagctccaccggtagtcttgccactggcgattataccagggcggcagtgcggatggccgaagagcatagcgagtttgtggtgggatttatttctggcagccgcgtgagtatgaagcctgaattcctccacttgacccctggagtacagctggaggccggcggggataatctcggacagcaatacaacagcccacaggaagtaatagggaaaagaggatccgatatcattatcgtggggcgtgggattatctccgcagcagaccgtctggaagctgcagagatgtatcggaaagccgcctgggaagcttacttgtcacggcttggagtctag

SEQ ID NO: 8127 - DNA, 618 bp, Artificial Sequence
  derived and/or modified sequence
atgctggagattcttgagcagcaaaagaaagtggacgctgagaccgtgggaagagttaaacggttcatacaggagaacgtctttgtcgccgctaatcacaacggtagtccactttcaattaaggaggcacccaaggaacttagttttggcgcccgcgccgagctgcctcggatccaccccgtggcttctaaactgctgaggctgatgcagaaaaaagagacaaacctgtgtctgagtgccgatgtgtccctggccagggaattgcttcagctggcggacgcattaggtccttccatctgcatgcttaaaacgcacgttgacatcctgaacgacttcactttggatgtaatgaaggagctgatcaccctggccaaatgtcatgagttcctgatttttgaggatcgcaagttcgctgacataggcaacacagtgaaaaagcagtacgagggcgataaccttggtcagcagtacaactcaccccaggaggtcataggtaagcgtggttcagatatcatcattgtcgggagaggaataatctctgccgcagaccgcctcgaggcagcggagatgtatcgcaaggccgcctgggaagcctacttgagccgacttggggtatag

SEQ ID NO: 8128 - DNA, 1167 bp, Artificial Sequence
  derived and/or modified sequence
atgctgattaggagaaaagaaaccaaagactatggtacaaagcggcttgtggaagggacaattaatcctggagaaacgtgtctgatcatcgaggacgtagttacttctggaagcagtgtgctcgaaaccgtggaggtgcttcagaaggaaggccttaaggtgaccgatgcaattgttctacttgatagagaacaggggggaaaggacaagctgcaagcacacggtatcaggttacattccgtgtgcaccttaagtaagatgctggaaatcctagagcagcagaaaaaggtggatgctgaaacagtcggccgggtaaaacgatttatccaggagaacgtttttgtagccgccaatcacaacggatctcccctcagcatcaaggaggcacctaaagaacttagcttcggagcccgggccgagctgccccggatacacccagtcgccagcaagctgctgcgcctcatgcagaagaaggagacaaacctttgcctgtccgctgatgtcagtttggcccgtgaactgctccaactagctgatgcccttgggccctctatatgtatgctaaaaacacacgtggatattctcaacgatttcaccctggatgtcatgaaagaacttatcaccctcgccaaatgccatgaattcctgatttttgaggatcggaagtttgccgatatcggaaataccgtgaaaaagcagtacgaggggggcatctttaagatagctagctgggccgatctggtgaacgctcacgtggtccctggatccggtgtcgtcaagggtttgcaagaggtgggtcttccattgcatagagggtgcctactgatcgccgagatgtcgagcactggctcactggccactggagattatacccgagccgccgtgcgaatggctgaggaacattctgaattcgttgtaggctttatatcaggatcaagggtcagcatgaaacctgagttcctgcacctgacccctggagtgcagctggaggccgggggcgataatctgggacagcaatacaattctcctcaagaagtgatcggtaagcgaggcagcgatataattattgttggtagggggattatctcagcagccgacagattagaggctgctgagatgtatcgcaaggccgcctgggaggcgtatctgagtcgactcggcgtctag

SEQ ID NO: 8129 - DNA, 909 bp, Artificial Sequence
  derived and/or modified sequence
atgctcgagatactggagcagcaaaaaaaagtagatgcggaaaccgtcggacgggtcaagcgtttcatacaggagaacgtatttgttgcagctaatcacaacggaagccctctaagcataaaggaagcccccaaggagctcagttttggggcacgggctgaactgcctaggattcatcctgtggcctctaaacttctgaggctgatgcagaagaaggagacaaacctgtgcctctccgcggatgtaagtctggcccgggagctactgcagctagccgacgccctcggcccctcgatttgtatgctgaagacacatgtcgatatcctcaacgacttcacattggacgtgatgaaggaactgatcaccctcgcgaaatgtcacgagtttcttatttttgaggaccgcaaattcgcggacatcggaaataccgtaaaaaagcagtacgagggaggaatcttcaaaatcgcaagctgggctgacctggtgaacgctcacgtcgtaccagggagcggggtggtcaagggtcttcaggaagttggactgcctctacaccgaggctgcctcctcatcgcagaaatgtcttctaccggatctttagcgaccggagattatacgcgggccgccgttaggatggccgaggagcattctgagttcgtggtgggctttatctctggatccagagtgtcaatgaaacccgagtttctacacctcacacctggcgtgcaacttgaggccggcggggataatctgggacagcaatataatagcccacaggaagtaatcgggaaaagaggcagtgatattatcattgtcgggcgcggtattatctcagctgctgatcgtctggaggccgcggaaatgtaccggaaagcggcctgggaagcatatctgagcaggctgggcgtgtag

SEQ ID NO: 8130 - DNA, 1443 bp, Artificial Sequence
  derived and/or modified sequence
atggctgtggcccgggccgccctgggccccctggtgacaggcctgtatgatgtgcaggccttcaagtttggagactttgtgctgaagagcggcctgagcagccccatctacatcgacctgcggggcatcgtgtcccggccccggctgctgagccaggtggccgacatcctcttccagacagcccagaatgccggcatcagctttgacacagtgtgtggggtgccctacacagccctgcccctggccaccgtcatctgcagcaccaaccagatccccatgctgatccggaggaaggagaccaaggactatggcaccaagaggctggtggagggcaccatcaaccctggagagacctgcctgatcattgaagatgtggtgaccagcggcagctctgtgctggagaccgtggaggtgctgcagaaggagggcctgaaggtgacagatgccatcgtgctgctggaccgggagcagggcggcaaggacaagctgcaggcccacggcatccggctgcacagcgtgtgcaccctgagcaagatgctggagatcctggagcagcagaagaaggtggatgctgagaccgtgggccgggtgaagcgcttcatccaggagaatgtgtttgtggccgccaaccacaacggcagccccctgagcatcaaggaggcccccaaggagctgagctttggagcccgggcagagctgccccgcatccaccctgtggccagcaagctgctgcggctgatgcagaagaaggagaccaacctgtgcctgtctgcagatgtgtccctggcccgggagctgctgcagctggctgatgccctgggccccagcatctgcatgctgaagacccacgtggacatcctgaatgacttcaccctggatgtgatgaaggagctgatcaccctggccaagtgccacgagttcctgatctttgaggacaggaagtttgctgacatcggcaacacagtgaagaagcagtatgagggcggcatcttcaagatcgcctcctgggccgacctggtgaatgcccacgtggtgcccggcagcggcgtggtgaagggcctgcaggaggtgggcctgcccctgcaccggggctgcctgctgattgctgagatgagcagcacaggcagcctggccactggagactacaccagggctgctgtgaggatggccgaggagcacagcgagtttgtggtgggcttcatcagcggcagccgggtgtccatgaagccagagttcctgcacctgaccccaggagtgcagctggaggccggcggggacaacctgggccagcagtacaacagcccccaggaggtgattggcaagaggggcagtgacatcatcatcgtgggccggggcatcatctctgctgctgaccggctggaggccgctgagatgtacaggaaggccgcctgggaggcctacctgagccggctgggcgtgtag

SEQ ID NO: 8131 - DNA, 618 bp, Artificial Sequence
  derived and/or modified sequence
atgctggagatcctggagcagcagaagaaggtggatgctgagaccgtgggccgggtgaagcgcttcatccaggagaatgtgtttgtggccgccaaccacaacggcagccccctgagcatcaaggaggcccccaaggagctgagctttggagcccgggcagagctgccccgcatccaccctgtggccagcaagctgctgcggctgatgcagaagaaggagaccaacctgtgcctgtctgcagatgtgtccctggcccgggagctgctgcagctggctgatgccctgggccccagcatctgcatgctgaagacccacgtggacatcctgaatgacttcaccctggatgtgatgaaggagctgatcaccctggccaagtgccacgagttcctgatctttgaggacaggaagtttgctgacatcggcaacacagtgaagaagcagtatgaaggagacaacctgggccagcagtacaacagcccccaggaggtgattggcaagaggggcagtgacatcatcatcgtgggccggggcatcatctctgctgctgaccggctggaggccgctgagatgtacaggaaggccgcctgggaggcctacctgagccggctgggcgtgtag

SEQ ID NO: 8132 - DNA, 1167 bp, Artificial Sequence
  derived and/or modified sequence
atgctgatccggaggaaggagaccaaggactatggcaccaagaggctggtggagggcaccatcaaccctggagagacctgcctgatcattgaagatgtggtgaccagcggcagctctgtgctggagaccgtggaggtgctgcagaaggagggcctgaaggtgacagatgccatcgtgctgctggaccgggagcagggcggcaaggacaagctgcaggcccacggcatccggctgcacagcgtgtgcaccctgagcaagatgctggagatcctggagcagcagaagaaggtggatgctgagaccgtgggccgggtgaagcgcttcatccaggagaatgtgtttgtggccgccaaccacaacggcagccccctgagcatcaaggaggcccccaaggagctgagctttggagcccgggcagagctgccccgcatccaccctgtggccagcaagctgctgcggctgatgcagaagaaggagaccaacctgtgcctgtctgcagatgtgtccctggcccgggagctgctgcagctggctgatgccctgggccccagcatctgcatgctgaagacccacgtggacatcctgaatgacttcaccctggatgtgatgaaggagctgatcaccctggccaagtgccacgagttcctgatctttgaggacaggaagtttgctgacatcggcaacacagtgaagaagcagtatgagggcggcatcttcaagatcgcctcctgggccgacctggtgaatgcccacgtggtgcccggcagcggcgtggtgaagggcctgcaggaggtgggcctgcccctgcaccggggctgcctgctgattgctgagatgagcagcacaggcagcctggccactggagactacaccagggctgctgtgaggatggccgaggagcacagcgagtttgtggtgggcttcatcagcggcagccgggtgtccatgaagccagagttcctgcacctgaccccaggagtgcagctggaggccggcggggacaacctgggccagcagtacaacagcccccaggaggtgattggcaagaggggcagtgacatcatcatcgtgggccggggcatcatctctgctgctgaccggctggaggccgctgagatgtacaggaaggccgcctgggaggcctacctgagccggctgggcgtgtag

SEQ ID NO: 8133 - DNA, 909 bp, Artificial Sequence
  derived and/or modified sequence
atgctggagatcctggagcagcagaagaaggtggatgctgagaccgtgggccgggtgaagcgcttcatccaggagaatgtgtttgtggccgccaaccacaacggcagccccctgagcatcaaggaggcccccaaggagctgagctttggagcccgggcagagctgccccgcatccaccctgtggccagcaagctgctgcggctgatgcagaagaaggagaccaacctgtgcctgtctgcagatgtgtccctggcccgggagctgctgcagctggctgatgccctgggccccagcatctgcatgctgaagacccacgtggacatcctgaatgacttcaccctggatgtgatgaaggagctgatcaccctggccaagtgccacgagttcctgatctttgaggacaggaagtttgctgacatcggcaacacagtgaagaagcagtatgagggcggcatcttcaagatcgcctcctgggccgacctggtgaatgcccacgtggtgcccggcagcggcgtggtgaagggcctgcaggaggtgggcctgcccctgcaccggggctgcctgctgattgctgagatgagcagcacaggcagcctggccactggagactacaccagggctgctgtgaggatggccgaggagcacagcgagtttgtggtgggcttcatcagcggcagccgggtgtccatgaagccagagttcctgcacctgaccccaggagtgcagctggaggccggcggggacaacctgggccagcagtacaacagcccccaggaggtgattggcaagaggggcagtgacatcatcatcgtgggccggggcatcatctctgctgctgaccggctggaggccgctgagatgtacaggaaggccgcctgggaggcctacctgagccggctgggcgtgtag

SEQ ID NO: 8134 - DNA, 1443 bp, Artificial Sequence
  derived and/or modified sequence
atggccgtggcccgggccgccctgggccccctggtgaccggcctgtacgacgtacaggcctttaagtttggagattttgtgctgaagtccggcttgtcttctcccatctacattgatctgcggggcatcgtctctaggcctcggttgctctcccaggtggctgatatactgtttcagactgcccaaaacgcaggcatcagttttgacacagtgtgcggcgtaccttacacggcactcccacttgcaactgtcatatgtagcacaaaccagatccccatgctcatccgcaggaaagaaactaaagactacggcaccaagagattggtggagggaacaattaacccaggggagacttgtctcattatcgaagacgttgtcacctctggtagttccgtgctcgaaacagtagaagtactacagaaggagggcttgaaggtgactgatgccattgttctgctagatcgcgaacagggaggaaaggataaactccaggctcacgggatcagactacattcagtgtgcaccctcagcaagatgcttgagatactggagcagcagaaaaaggtggatgctgagacagttggacgagtcaagcggttcattcaagagaacgtctttgtcgccgcgaatcataatgggagccccctgagcatcaaagaggcccctaaagagctttcatttggagccagagctgagcttcccaggatccatcctgtggcaagtaagctgttgcggttaatgcagaagaaggaaactaacctctgcctgtccgccgacgtgagccttgcgcgcgaactcttacagcttgccgatgccctgggcccctcaatctgcatgctcaagacacacgtggatattctcaatgattttacactggatgtcatgaaggaactcatcacacttgctaagtgccatgaatttctaatcttcgaggatcgaaagttcgccgatatagggaatacagtcaagaagcagtacgagggagggatatttaagattgcctcctgggctgatctcgtgaacgctcacgtggtgccaggctctggggtggtcaaaggactgcaagaggtaggtctcccgctgcaccggggttgtctgctaatcgcagagatgtcgtccacaggctccctggccacgggagactatacccgagccgcagtacgaatggcagaggagcactccgaatttgtggtaggctttatcagtggaagccgcgtttctatgaaacctgagttcctccacctgacccccggggtccaactggaagctggtggtgacaacctggggcaacagtataacagtccacaggaggttattggtaagagaggaagcgacattatcattgtggggcgggggataatatctgctgctgatcgtctggaagcagcggagatgtaccgtaaagccgcttgggaggcctacctctcaagactcggcgtttag

SEQ ID NO: 8135 - DNA, 618 bp, Artificial Sequence
  derived and/or modified sequence
atgctggagatcctggagcagcagaagaaggtggacgccgagaccgtgggaagggtcaagcggttcatacaggaaaatgtgttcgttgctgccaatcacaatggcagtccgttaagtattaaggaggcccctaaggagctgtcatttggcgctagagccgaactgccacgaatccatcccgtcgcatctaaactgttacggctgatgcagaaaaaagaaactaatctatgtttgtcggccgacgtgtccctcgcccgggagctcctccaactggccgacgcactcggaccatctatatgcatgttgaaaactcatgtggatatcctgaacgatttcaccctggacgttatgaaagagctaatcacgctggcaaaatgtcatgaattcctgattttcgaggatcgtaagtttgctgatattggaaataccgtgaagaagcagtatgagggtgataacctggggcaacagtataactctccacaggaagttatcggaaaaagagggtcagatattatcatcgtgggcaggggcataatctctgcagcagacagactagaagcagctgagatgtaccgcaaggctgcctgggaagcatacctgagtagattgggcgtgtag

SEQ ID NO: 8136 - DNA, 1167 bp, Artificial Sequence
  derived and/or modified sequence
atgctgatccggcggaaggagaccaaggactacggcaccaagcggttggtggaagggaccatcaatcccggagaaacatgtcttatcatcgaggacgtagtaacatcagggtccagcgtgttggaaactgtggaggtgctgcagaaggaagggctgaaggtgactgacgctattgtgcttctggacagggaacagggggggaaggataaactccaggcccacggtattaggctccactccgtgtgcaccctctctaagatgctcgagattctggaacaacagaagaaagtcgatgccgaaactgttggccgtgtgaagcggttcatacaggagaatgttttcgtcgcagcaaaccacaacgggagtccgttatccatcaaagaagcccccaaagaactgtcgttcggcgctcgggccgagttgcctcgcatccaccccgtggcaagcaaacttctcagattaatgcaaaagaaggagaccaacttgtgcctcagcgccgatgtgagcctggcccgggaactactgcagctcgctgatgccctggggccctctatttgcatgctgaagactcatgtggatatcctcaacgacttcactctagacgtgatgaaggaactaatcacacttgcaaagtgtcatgagtttctgatcttcgaagaccgaaaatttgccgatattggtaataccgtgaagaaacagtacgaaggcgggatctttaagatagccagttgggccgacctggttaacgcccatgtggtgccgggtagtggcgtcgtcaaagggcttcaggaagttggcttaccgctgcacagaggctgcctgttgattgctgagatgagttctactggatcactggctacgggtgattacacccgtgccgctgtccgaatggctgaggagcactcagaatttgtggtgggctttatctctgggtcacgcgtctctatgaaaccagagttcctgcacctgactcctggagtgcagttggaggcggggggggacaacctgggccagcaatacaattccccgcaggaggtaataggtaagcggggaagcgacataattatcgtgggccgaggcatcatttccgctgcggacagactcgaggctgctgagatgtaccggaaggcagcctgggaggcctacttatcgcgcctcggcgtgtag

SEQ ID NO: 8137 - DNA, 909 bp, Artificial Sequence
  derived and/or modified sequence
atgctggagatcctggagcagcagaagaaggtggacgccgagaccgtcggacgggtcaaaagattcatccaggaaaacgtgttcgtggccgctaatcacaacggaagtccgctgtcgatcaaggaggcacctaaggagttgagctttggcgctagggctgaactgccgcgcattcaccccgttgccagtaagctgcttcggctgatgcagaagaaggaaacaaacctgtgtctgtctgccgacgtttctctggcccgcgagctgttgcagcttgctgacgcattgggcccatcgatttgcatgctcaagacgcatgttgacatcctcaacgactttactctggacgtgatgaaagaacttataacactcgccaaatgtcacgaatttctcatattcgaagatcggaaatttgccgatatcggcaataccgttaaaaagcagtacgagggcgggatctttaaaatagcctcatgggcagatctggtgaacgcgcatgttgtgccaggctctggagtcgtaaaaggacttcaagaagtcggtcttcccctgcaccgcggctgcctgttaattgccgagatgtccagcaccggaagcctggccaccggcgactacaccagggcggcggtgcgaatggccgaagagcattcggagttcgttgtgggattcataagcggttcacgggtaagtatgaagcccgagtttttgcaccttacccccggtgtgcagctcgaagccggtggggataacctgggccagcagtataattccccacaagaagtcataggcaagcgcgggtccgacatcattattgtggggcgcggcattattagtgcggcagacagactggaggccgcggaaatgtacaggaaagccgcttgggaggcatatttatcccgcctcggcgtgtag

SEQ ID NO: 8138 - DNA, 1443 bp, Artificial Sequence
  derived and/or modified sequence
atggccgtcgcccgtgccgctctcgggcctctggtgacaggactgtacgatgtacaggccttcaagtttggcgacttcgtgttaaaatcaggcctctcctcgcctatttatatagacttacgcggtatcgtgtctcggccaaggcttctctcccaggtcgctgacatactgtttcagaccgcccagaacgccggaatctcttttgacacagtctgtggcgtgccctatacggctctccctttggctacagtgatatgctccaccaaccagataccgatgttaattcgaagaaaggaaaccaaggactatggaactaagagactggtggaaggtactattaacccaggtgagacatgcttgattatcgaggacgtggtgacgagtggatcaagcgttctggagaccgtggaggtgcttcaaaaggaaggattgaaagtgacggatgctatagttctgttggatagagaacaggggggaaaagataagctgcaggcccatggaatcaggctgcactctgtgtgtactctcagcaaaatgttagagattctagagcagcagaagaaggtcgacgcagaaaccgtgggaagagtgaagaggtttatccaggagaatgtgtttgtggccgcaaatcacaatggttctccactctcaatcaaagaggccccaaaggaactgtccttcggtgccagggcggagctcccaaggatccaccccgtggcctccaaattgttgaggcttatgcagaaaaaagagacgaacctctgccttagtgctgatgtgagtctggccagggaactgcttcagctcgcagatgctttgggaccttcaatttgcatgctgaagactcatgtcgatattttaaacgacttcacactggatgtgatgaaagaactcatcactctggctaaatgtcatgagtttctgatttttgaagatagaaagtttgcagacatcggcaacacggtgaaaaagcagtatgaggggggtatatttaaaatcgcctcctgggcagatctcgtgaacgctcatgtggtgcctggaagtggcgttgtgaaaggacttcaggaggtgggcctcccgctgcataggggctgtcttctcatagcagagatgtctagcaccggatccttggctacaggggattatactagagccgcagtgcggatggcggaggagcattcagagttcgttgtcgggttcatcagtggctcgcgcgtctccatgaagccggagttcctccatctgacacccggtgtgcaactggaggccggaggcgataacttgggtcaacagtacaactctcctcaagaggtaatcggaaagagaggatctgacatcatcattgtcgggcgtggaattatctcagccgctgatcgtctcgaagctgccgagatgtataggaaagctgcctgggaagcctatttgagtagattgggtgtgtag

SEQ ID NO: 8139 - DNA, 618 bp, Artificial Sequence
  derived and/or modified sequence
atgctcgagatactggaacagcaaaagaaggtggacgctgaaactgtgggtagggtgaaaagattcatccaggaaaacgttttcgtggctgctaatcacaacgggtcaccactgtccatcaaagaggcccctaaagaattaagcttcggagcaagggctgagttgccgcgtatccaccctgtggcctcaaaattgctgagattgatgcaaaagaaagaaaccaatctgtgcctctcagccgatgtaagcctggctcgggagcttctccagctagccgacgccttgggtcctagcatctgtatgcttaagactcatgtagacatactgaacgatttcacactggacgtgatgaaagaacttataaccctggcaaaatgtcatgagtttttgatatttgaagaccgtaaattcgccgacattggcaataccgtcaaaaagcagtacgagggcgacaatctgggacagcaatataactcgccccaggaggtcataggcaagcgcggtagtgacatcattatcgtgggcagggggattatctcagctgcagatcgtctggaagctgctgaaatgtatcgaaaggccgcttgggaggcttacctttctaggctcggtgtttag

SEQ ID NO: 8140 - DNA, 1167 bp, Artificial Sequence
  derived and/or modified sequence
atgctgattcgaagaaaggagacgaaggactatgggacaaaaagacttgtagagggcacgataaatcccggtgagacatgcctgattattgaagacgtcgtgacctcaggctcttcggttctggagacagtggaggtgctgcagaaagagggcctaaaagtgaccgacgcgattgtgctgttggacagggagcagggaggcaaggacaagttacaggcacatggaattcgattacactcagtctgtactctcagcaagatgctggaaatacttgaacagcaaaagaaagtggatgctgagaccgtggggagagtgaagagattcatccaggagaatgtctttgtagcggcaaaccacaacggcagccctttatctatcaaagaggcacctaaggaactgagtttcggcgctcgggctgagctgccacgtattcaccccgttgcaagtaagctgctccgcttgatgcagaagaaagaaactaacctatgcctgtcagcagacgtaagcctggccagggaattgttgcaactagccgatgctctggggccttcgatttgcatgctcaaaacacacgtggacattctgaacgatttcacactggacgtgatgaaagaacttataaccctcgctaagtgtcatgagttcctgatatttgaggatcggaagttcgctgatatagggaatactgtcaaaaaacagtacgaaggtggcatcttcaagatagcctcatgggccgacctggtaaacgctcatgtggtccccggaagcggcgtggtcaaagggctgcaggaagtcgggctccctctgcatagaggctgccttctcatcgcggagatgtcctcgactggctcacttgcaaccggagattacacccgcgcagccgtaagaatggccgaggaacattcggagttcgtggtgggttttattagcggttctagagtctctatgaaacccgagtttttgcacctgacaccgggtgtgcagctggaggctggcggtgacaacctgggccagcagtacaattcgccacaggaagtcataggaaaacgcggaagcgacatcatcatcgtgggcagaggaataatttccgcagcggaccgcttagaggctgccgagatgtaccgcaaggccgcttgggaggcctacctgtctcgactgggagtctag

SEQ ID NO: 8141 - DNA, 909 bp, Artificial Sequence
  derived and/or modified sequence
atgctcgaaattctcgagcagcagaaaaaggtggacgcagaaactgttggaagagtgaaacgctttatccaggagaatgtgtttgtggccgctaaccataatggcagccctctatccattaaggaagcccctaaggagctgagctttggagcacgggctgagctgcctcgaattcatcccgtggcttcaaagctgctgcgactgatgcaaaagaaggagacaaatctctgcctcagcgctgatgtttcacttgcacgggaactactgcagctcgccgatgccttagggccaagcatctgtatgctgaagacgcatgtcgatatcctgaatgatttcacccttgacgtgatgaaagaactgataacactagctaagtgccacgagttcctcatctttgaggacaggaaattcgccgatattggaaatacagttaaaaagcagtatgagggtggaattttcaaaattgcctcctgggctgatctggtgaacgcccacgttgtaccagggtccggcgtcgtgaaaggactgcaagaggttggattacccctgcataggggctgcctgttgatcgcagagatgtcttcaaccggcagcctggcaacaggcgattatactcgagcagccgtaagaatggccgaggaacacagcgagttcgtcgtcggattcatctcaggttcacgtgtgagcatgaagcccgagttccttcacctcactcctggagtgcagctggaagccggaggcgacaacctcgggcagcaatataactctccccaggaggtaatcggcaaacgaggttcggacattatcatagtgggccgagggatcatcagcgcagccgatagactcgaggcggcagagatgtaccggaaggcagcttgggaagcctacctgtcgcgcctgggagtgtag

SEQ ID NO: 8142 - DNA, 2658 bp, Artificial Sequence
  derived and/or modified sequence
ctgcagacgaggcaggcggaagaggcgggacttcgcgggtgacgtcatcggggcgccggaggcccggggcgcctgggaatttgaagcaaacaggcagcgcgcgacaatggcggtcgctcgtgcagctttggggccattggtgacgggtctgtacgacgtgcaggctttcaagtttggggacttcgtgctgaagagcgggctttcctcccccatctacatcgatctgcggggcatcgtgtctcgaccgcgtcttctgagtcaggttgcagatattttattccaaactgcccaaaatgcaggcatcagttttgacaccgtgtgtggagtgccttatacagctttgccattggctacagttatctgttcaaccaatcaaattccaatgcttattagaaggaaagaaacaaaggattatggaactaagcgtcttgtagaaggaactattaatccaggagaaacctgtttaatcattgaagatgttgtcaccagtggatctagtgttttggaaactgttgaggttcttcagaaggagggcttgaaggtcactgatgccatagtgctgttggacagagagcagggaggcaaggacaagttgcaggcgcacgggatccgcctccactcagtgtgtacattgtccaaaatgctggagattctcgagcagcagaaaaaagttgatgctgagacagttgggagagtgaagaggtttattcaggagaatgtctttgtggcagcgaatcataatggttctcccctttctataaaggaagcacccaaagaactcagcttcggtgcacgtgcagagctgcccaggatccacccagttgcatcgaagcttctcaggcttatgcaaaagaaggagaccaatctgtgtctatctgctgatgtttcactggccagagagctgttgcagctagcagatgctttaggacctagtatctgcatgctgaagactcatgtagatattttgaatgattttactctggatgtgatgaaggagttgataactctggcaaaatgccatgagttcttgatatttgaagaccggaagtttgcagatataggaaacacagtgaaaaagcagtatgaaggaggtatctttaaaatagcttcctgggcagatctagtaaatgctcacgtggtgccaggctcaggagttgtgaaaggcctgcaagaagtgggcctgcctttgcatcgggggtgcctccttattgcggaaatgagctccaccggctccctggccactggggactacactagagcagcggttagaatggctgaggagcactctgaatttgttgttggttttatttctggctcccgagtaagcatgaaaccagaatttcttcacttgactccaggagttcagttggaagcaggaggagataatcttggccaacagtacaatagcccacaagaagttattggcaaacgaggttccgatatcatcattgtaggtcgtggcataatctcagcagctgatcgtctggaagcagcagagatgtacagaaaagctgcttgggaagcgtatttgagtagacttggtgtttgagtgcttcagatacatttttcagatacaatgtgaagacattgaagatatgtggtcctcctgaaagtcactggctggaaataatccaattattcctgcttggattcttccacagggcctgtgtaagaatgggttctggagttctcatggtctttaggaaatattgagtaatttgtaatcaccgcattgatactataataagttcattcttaagcttgctttttttgagactggtgtttgttagacagccacagtcctgtctgggttagggtcttccacatttgaggatccttcctatctctccatgggactagactgctttgttattctatttattttttaatttttttcgagacaggatctcactctgttgcccaggatggagtgcagtggtgagatcacggctcattgcagcctcgacctcccaggtgatcctcccacctcagcttccagattagctggtgctataggcatgcaccaccacgtccatctaaatttctttattatttgtagagatgaggtcttgccatgttacccaggctggtctcaactcctgggctcaagcgatcctcctgcctcagtctctcaaagtgctgggattacaggtgtgagccactgtgcccagcctaattgcagtaagacaaaaattctagggcaccaagaggctaaagtcagcacagcttttcttgtgtcctgtattctctgtctaatgtgttgcccaaataatacctaattgttagccattcccctccatctctggcctaaaagtgatagtccaggtatccacatgggctggttcccagaactgccattgctcactctccaaagaggggaaggtggggaaggggaaggtgactatagctcagctcctgagctagtatctggctgttatttcaacaaccggagttggggtttgggctcattttttcccctagccagcaattatggaccagtagtaacacaagtgacagcttcctgtgactgacttcacaattaggaggtctaagattccatttgggtatttgcttaaggatcccacataattgtcccaacggtcattagtagaggggaggtaagccttcattaataataaagagaaagcccacattcaa

SEQ ID NO: 8143 - DNA, 1691 bp, Artificial Sequence
  derived and/or modified sequence
caaacaggcagcgcgcgacaatggcggtcgctcgtgcagctttggggccattggtgacgggtctgtacgacgtgcaggctttcaagtttggggacttcgtgctgaagagcgggctttcctcccccatctacatcgatctgcggggcatcgtgtctcgaccgcgtcttctgagtcaggaactaagcgtcttgtagaaggaactattaatccaggagaaacctgtttaatcattgaagatgttgtcaccagtggatctagtgttttggaaactgttgaggttcttcagaaggagggcttgaaggtcactgatgccatagtgctgttggacagagagcagggaggcaaggacaagttgcaggcgcacgggatccgcctccactcagtgtgtacattgtccaaaatgctggagattctcgagcagcagaaaaaagttgatgctgagacagttgggagagtgaagaggtttattcaggagaatgtctttgtggcagcgaatcataatggttctcccctttctataaaggaagcacccaaagaactcagcttcggtgcacgtgcagagctgcccaggatccacccagttgcatcgaagcttctcaggcttatgcaaaagaaggagaccaatctgtgtctatctgctgatgtttcactggccagagagctgttgcagctagcagatgctttaggacctagtatctgcatgctgaagactcatgtagatattttgaatgattttactctggatgtgatgaaggagttgataactctggcaaaatgccatgagttcttgatatttgaagaccggaagtttgcagatataggaaacacagtgaaaaagcagtatgaaggagataatcttggccaacagtacaatagcccacaagaagttattggcaaacgaggttccgatatcatcattgtaggtcgtggcataatctcagcagctgatcgtctggaagcagcagagatgtacagaaaagctgcttgggaagcgtatttgagtagacttggtgtttgagtgcttcagatacatttttcagatacaatgtgaagacattgaagatatgtggtcctcctgaaagtcactggctggaaataatccaattattcctgcttggattcttccacagggcctgtgtaagaatgggttctggagttctcatggtctttaggaaatattgagtaatttgtaatcaccgcattgatactataataagttcattcttaagcttgctttttttgagactggtgtttgttagacagccacagtcctgtctgggttagggtcttccacatttgaggatccttcctatctctccatgggactagactgctttgttattctatttattttttaatttttttcgagacaggatctcactctgttgcccaggatggagtgcagtggtgagatcacggctcattgcagcctcgacctcccaggtgatcctcccacctcagcttccagattagctggtgctataggcatgcaccaccacgtccatctaaatttctttattatttgtagagatgaggtcttgccatgttacccaggctggtctcaactcctgggctcaagcgatcctcctgcctcagtctctcaaagtgctgggattacaggtgtgagccactgtgcccagcctaattgcagtaagacaaaaattctagggcaccaagaggctaaagtcagc

SEQ ID NO: 8144 - DNA, 2235 bp, Artificial Sequence
  derived and/or modified sequence
caaacaggcagcgcgcgacaatggcggtcgctcgtgcagctttggggccattggtgacgggtctgtacgacgtgcaggctttcaagtttggggacttcgtgctgaagagcgggctttcctcccccatctacatcgatctgcggggcatcgtgtctcgaccgcgtcttctgagtcagatgggatctctcttacgtcacccaggctggagtgcagctctgtgatcatagctcactgcagcctggaactcctgggcttaagagatcttcttgcctcgggttgcagatattttattccaaactgcccaaaatgcaggcatcagttttgacaccgtgtgtggagtgccttatacagctttgccattggctacagttatctgttcaaccaatcaaattccaatgcttattagaaggaaagaaacaaaggattatggaactaagcgtcttgtagaaggaactattaatccaggagaaacctgtttaatcattgaagatgttgtcaccagtggatctagtgttttggaaactgttgaggttcttcagaaggagggcttgaaggtcactgatgccatagtgctgttggacagagagcagggaggcaaggacaagttgcaggcgcacgggatccgcctccactcagtgtgtacattgtccaaaatgctggagattctcgagcagcagaaaaaagttgatgctgagacagttgggagagtgaagaggtttattcaggagaatgtctttgtggcagcgaatcataatggttctcccctttctataaaggaagcacccaaagaactcagcttcggtgcacgtgcagagctgcccaggatccacccagttgcatcgaagcttctcaggcttatgcaaaagaaggagaccaatctgtgtctatctgctgatgtttcactggccagagagctgttgcagctagcagatgctttaggacctagtatctgcatgctgaagactcatgtagatattttgaatgattttactctggatgtgatgaaggagttgataactctggcaaaatgccatgagttcttgatatttgaagaccggaagtttgcagatataggaaacacagtgaaaaagcagtatgaaggaggtatctttaaaatagcttcctgggcagatctagtaaatgctcacgtggtgccaggctcaggagttgtgaaaggcctgcaagaagtgggcctgcctttgcatcgggggtgcctccttattgcggaaatgagctccaccggctccctggccactggggactacactagagcagcggttagaatggctgaggagcactctgaatttgttgttggttttatttctggctcccgagtaagcatgaaaccagaatttcttcacttgactccaggagttcagttggaagcaggaggagataatcttggccaacagtacaatagcccacaagaagttattggcaaacgaggttccgatatcatcattgtaggtcgtggcataatctcagcagctgatcgtctggaagcagcagagatgtacagaaaagctgcttgggaagcgtatttgagtagacttggtgtttgagtgcttcagatacatttttcagatacaatgtgaagacattgaagatatgtggtcctcctgaaagtcactggctggaaataatccaattattcctgcttggattcttccacagggcctgtgtaagaatgggttctggagttctcatggtctttaggaaatattgagtaatttgtaatcaccgcattgatactataataagttcattcttaagcttgctttttttgagactggtgtttgttagacagccacagtcctgtctgggttagggtcttccacatttgaggatccttcctatctctccatgggactagactgctttgttattctatttattttttaatttttttcgagacaggatctcactctgttgcccaggatggagtgcagtggtgagatcacggctcattgcagcctcgacctcccaggtgatcctcccacctcagcttccagattagctggtgctataggcatgcaccaccacgtccatctaaatttctttattatttgtagagatgaggtcttgccatgttacccaggctggtctcaactcctgggctcaagcgatcctcctgcctcagtctctcaaagtgctgggattacaggtgtgagccactgtgcccagcctaattgcagtaagacaaaaattctagggcaccaagaggctaaagtcagc

SEQ ID NO: 8145 - DNA, 1982 bp, Artificial Sequence
  derived and/or modified sequence
caaacaggcagcgcgcgacaatggcggtcgctcgtgcagctttggggccattggtgacgggtctgtacgacgtgcaggctttcaagtttggggacttcgtgctgaagagcgggctttcctcccccatctacatcgatctgcggggcatcgtgtctcgaccgcgtcttctgagtcaggaactaagcgtcttgtagaaggaactattaatccaggagaaacctgtttaatcattgaagatgttgtcaccagtggatctagtgttttggaaactgttgaggttcttcagaaggagggcttgaaggtcactgatgccatagtgctgttggacagagagcagggaggcaaggacaagttgcaggcgcacgggatccgcctccactcagtgtgtacattgtccaaaatgctggagattctcgagcagcagaaaaaagttgatgctgagacagttgggagagtgaagaggtttattcaggagaatgtctttgtggcagcgaatcataatggttctcccctttctataaaggaagcacccaaagaactcagcttcggtgcacgtgcagagctgcccaggatccacccagttgcatcgaagcttctcaggcttatgcaaaagaaggagaccaatctgtgtctatctgctgatgtttcactggccagagagctgttgcagctagcagatgctttaggacctagtatctgcatgctgaagactcatgtagatattttgaatgattttactctggatgtgatgaaggagttgataactctggcaaaatgccatgagttcttgatatttgaagaccggaagtttgcagatataggaaacacagtgaaaaagcagtatgaaggaggtatctttaaaatagcttcctgggcagatctagtaaatgctcacgtggtgccaggctcaggagttgtgaaaggcctgcaagaagtgggcctgcctttgcatcgggggtgcctccttattgcggaaatgagctccaccggctccctggccactggggactacactagagcagcggttagaatggctgaggagcactctgaatttgttgttggttttatttctggctcccgagtaagcatgaaaccagaatttcttcacttgactccaggagttcagttggaagcaggaggagataatcttggccaacagtacaatagcccacaagaagttattggcaaacgaggttccgatatcatcattgtaggtcgtggcataatctcagcagctgatcgtctggaagcagcagagatgtacagaaaagctgcttgggaagcgtatttgagtagacttggtgtttgagtgcttcagatacatttttcagatacaatgtgaagacattgaagatatgtggtcctcctgaaagtcactggctggaaataatccaattattcctgcttggattcttccacagggcctgtgtaagaatgggttctggagttctcatggtctttaggaaatattgagtaatttgtaatcaccgcattgatactataataagttcattcttaagcttgctttttttgagactggtgtttgttagacagccacagtcctgtctgggttagggtcttccacatttgaggatccttcctatctctccatgggactagactgctttgttattctatttattttttaatttttttcgagacaggatctcactctgttgcccaggatggagtgcagtggtgagatcacggctcattgcagcctcgacctcccaggtgatcctcccacctcagcttccagattagctggtgctataggcatgcaccaccacgtccatctaaatttctttattatttgtagagatgaggtcttgccatgttacccaggctggtctcaactcctgggctcaagcgatcctcctgcctcagtctctcaaagtgctgggattacaggtgtgagccactgtgcccagcctaattgcagtaagacaaaaattctagggcaccaagaggctaaagtcagc

SEQ ID NO: 8146 - DNA, 1443 bp, Artificial Sequence
  derived and/or modified sequence
atggccgtggccagagccgccctgggccccctggtgaccggcctgtacgacgtgcaggccttcaagttcggcgacttcgtgctgaagagcggcctgagcagccccatctacatcgacctgagaggcatcgtgagcagacccagactgctgagccaggtggccgacatcctgttccagaccgcccagaacgccggcatcagcttcgacaccgtgtgcggcgtgccctacaccgccctgcccctggccaccgtgatctgcagcaccaaccagatccccatgctgatcagaagaaaggagaccaaggactacggcaccaagagactggtggagggcaccatcaaccccggcgagacctgcctgatcatcgaggacgtggtgaccagcggcagcagcgtgctggagaccgtggaggtgctgcagaaggagggcctgaaggtgaccgacgccatcgtgctgctggacagagagcagggcggcaaggacaagctgcaggcccacggcatcagactgcacagcgtgtgcaccctgagcaagatgctggagatcctggagcagcagaagaaggtggacgccgagaccgtgggcagagtgaagagattcatccaggagaacgtgttcgtggccgccaaccacaacggcagccccctgagcatcaaggaggcccccaaggagctgagcttcggcgccagagccgagctgcccagaatccaccccgtggccagcaagctgctgagactgatgcagaagaaggagaccaacctgtgcctgagcgccgacgtgagcctggccagagagctgctgcagctggccgacgccctgggccccagcatctgcatgctgaagacccacgtggacatcctgaacgacttcaccctggacgtgatgaaggagctgatcaccctggccaagtgccacgagttcctgatcttcgaggacagaaagttcgccgacatcggcaacaccgtgaagaagcagtacgagggcggcatcttcaagatcgccagctgggccgacctggtgaacgcccacgtggtgcccggcagcggcgtggtgaagggcctgcaggaggtgggcctgcccctgcacagaggctgcctgctgatcgccgagatgagcagcaccggcagcctggccaccggcgactacaccagagccgccgtgagaatggccgaggagcacagcgagttcgtggtgggcttcatcagcggcagcagagtgagcatgaagcccgagttcctgcacctgacccccggcgtgcagctggaggccggcggcgacaacctgggccagcagtacaacagcccccaggaggtgatcggcaagagaggcagcgacatcatcatcgtgggcagaggcatcatcagcgccgccgacagactggaggccgccgagatgtacagaaaggccgcctgggaggcctacctgagcagactgggcgtgtag

SEQ ID NO: 8147 - protein, 265 aa, Artificial Sequence
  derived and/or modified sequence
MKVLLLKDAKEDDCGQDPYIRELGLYGLEATLIPVLSFEFLSLPSFSEKLSHPEDYGGLIFTSPRAVEAAELCLEQNNKTEVWERSLKEKWNAKSVYVVGNATASLVSKIGLDTEGETCGNAEKLAEYICSRESSALPLLFPCGNLKREILPKALKDKGIAMESITVYQTVAHPGIQGNLNSYYSQQGVPASITFFSPSGLTYSLKHIQELSGDNIDQIKFAAIGPTTARALAAQGLPVSCTAESPTPQALATGIRKALQPHGCC

SEQ ID NO: 8148 - protein, 185 aa, Artificial Sequence
  derived and/or modified sequence
MKVLLLKDAKEDDCGQDPYIRLSHPEDYGGLIFTSPRAVEAAELCLEQNNKTEVWERSLKEKWNAKSVYVVGNATASLVSKIGLDTEGETCGNAEKLAEYICSRESSALPLLFPCGNLKREILPKALKDKGIAMESITVYQTVAHPGIQGNLNSYYSQQGVPASITFFSPSGLTYSLKHIQELSG

SEQ ID NO: 8149 - DNA, 798 bp, Artificial Sequence
  derived and/or modified sequence
atgaaggtgctgctgctgaaggacgccaaggaggacgactgcggccaggacccctacatcagagagctgggcctgtacggcctggaggccaccctgatccccgtgctgagcttcgagttcctgagcctgcccagcttcagcgagaagctgagccaccccgaggactacggcggcctgatcttcaccagccccagagccgtggaggccgccgagctgtgcctggagcagaacaacaagaccgaggtgtgggagagaagcctgaaggagaagtggaacgccaagagcgtgtacgtggtgggcaacgccaccgccagcctggtgagcaagatcggcctggacaccgagggcgagacctgcggcaacgccgagaagctggccgagtacatctgcagcagagagagcagcgccctgcccctgctgttcccctgcggcaacctgaagagagagatcctgcccaaggccctgaaggacaagggcatcgccatggagagcatcaccgtgtaccagaccgtggcccaccccggcatccagggcaacctgaacagctactacagccagcagggcgtgcccgccagcatcaccttcttcagccccagcggcctgacctacagcctgaagcacatccaggagctgagcggcgacaacatcgaccagatcaagttcgccgccatcggccccaccaccgccagagccctggccgcccagggcctgcccgtgagctgcaccgccgagagccccaccccccaggccctggccaccggcatcagaaaggccctgcagccccacggctgctgctag

SEQ ID NO: 8150 - DNA, 798 bp, Artificial Sequence
  derived and/or modified sequence
atgaaggtgctgctgctgaaggacgctaaggaagacgattgcggccaggacccttatattagagagcttgggctgtatgggctagaggccactctgatacccgtgctgagctttgaattcctctccctgccaagcttctctgagaagctgagccacccagaggactatggcgggctgattttcacctccccacgtgctgtggaagccgctgaactgtgtctggaacagaacaacaagaccgaggtctgggaaaggtccctgaaggagaaatggaacgcaaagtctgtgtacgtagtagggaatgccaccgccagtcttgttagcaagatcggattagacacagaaggcgagacgtgcggcaatgccgaaaagttggccgagtacatttgttcacgtgagagcagtgccctgcctctattattcccgtgcggcaacctgaagagagagatcctgcctaaggcgctcaaggacaaggggatcgcaatggagagcatcactgtgtatcaaactgttgcacatcctggtattcagggcaatcttaacagttactactctcaacaaggtgttcccgcttcgataacattctttagtccttccgggctgacttattcactaaagcacatccaggagcttagcggtgacaacatcgaccagattaaattcgctgccatcggccctaccacagcccgtgctctagcagcccagggactgccagttagctgtactgcggagtcaccgaccccacaggccctggctacagggattaggaaggccctgcagccgcacgggtgttgctag

SEQ ID NO: 8151 - DNA, 798 bp, Artificial Sequence
  derived and/or modified sequence
atgaaagtgttgctgctcaaagacgctaaagaagatgattgcggccaggatccgtatatccgcgaactgggactgtatggcctggaggcaacgctcataccagttctgagctttgagttcctgtctctgccgtcattttccgaaaaactttcccacccggaggattacggtgggctgatcttcacctcacccagggccgtcgaggccgctgaattgtgcctggaacaaaacaacaagaccgaggtttgggagaggagcctaaaggaaaaatggaatgctaaaagtgtttatgtggttggaaatgccactgccagcctcgtctctaaaatcggacttgatacagaaggggagacatgtggtaacgcggagaaattagctgagtatatctgttcaagggagtcgagcgctttgccactgctattcccatgtgggaatcttaagcgcgagatcttacctaaagcactgaaggataagggaatagcaatggagtccatcaccgtgtaccaaactgttgctcacccgggtatccaaggcaacctaaactcctactattcacaacagggcgtgcccgccagcatcacgtttttttccccctcagggctcacctactccttgaagcatattcaagaattaagtggcgacaacatcgatcagataaaattcgctgctatcggccccacaacagcaagagcactggccgcacagggactgcccgtgtcctgtaccgctgagagtccgacccctcaggctctggctacaggaatccgcaaggcccttcagccccatggctgttgttag

SEQ ID NO: 8152 - DNA, 798 bp, Artificial Sequence
  derived and/or modified sequence
atgaaggtgctgctgctgaaggatgccaaggaggatgactgtggccaggacccctacatccgggagctgggcctgtatggcctggaggccaccctcatccctgtgctgagctttgagttcctgagcctgcccagcttcagcgagaagctgagccaccctgaggactatggaggcctcatcttcaccagccccagggctgtggaggccgctgagctgtgcctggagcagaacaacaagacagaggtgtgggagaggagcctgaaggagaagtggaatgccaagtctgtgtatgtggtgggcaatgccacagccagcctggtgtccaagattggcctggacacagaaggagagacctgtggaaatgctgagaagctggccgagtacatctgcagccgggagagcagcgccctgcccctgctcttcccctgtggcaacctgaagcgggagatcctgcccaaggccctgaaggacaagggcatcgccatggagagcatcaccgtgtaccagacagtggcccaccctggcatccagggcaacctgaacagctactacagccagcagggcgtgcctgccagcatcaccttcttcagccccagcggcctgacctacagcctgaagcacatccaggagctgagcggggacaacatcgaccagatcaagtttgctgccatcggccccaccacagcccgggccctggccgcccagggcctgcctgtgtcctgcacagctgagagccccaccccccaggccctggccaccggcatcaggaaggccctgcagccccacggctgctgctag

SEQ ID NO: 8153 - DNA, 798 bp, Artificial Sequence
  derived and/or modified sequence
atgaaggtgctgctgctgaaggacgccaaggaggacgactgcggccaagacccctatattcgggagttaggcttgtatggcctcgaggctactttgattcctgtattgagctttgaatttttatctttgccaagttttagcgaaaagctgtcgcatcccgaggattacggaggtcttattttcacctcgcctagggccgtcgaagcagccgagctgtgtctagagcaaaataacaagacagaggtttgggaacgctcattgaaagagaaatggaatgcaaaaagcgtatacgtggtgggcaacgccacagccagcctcgtctccaagatcggactggatactgaaggtgagacctgcggaaatgctgagaagttagccgaatacatatgcagtcgcgagtcgtccgctttgcccttattattcccgtgtgggaacctcaaacgagagattctgcccaaggcactcaaagataaaggcatcgctatggagtctatcacggtgtaccagaccgtggcccacccaggtatccagggaaatctgaattcctactattcccagcagggagtgccagctagtatcaccttcttttccccgtccggcctaacctattctctcaaacacattcaggagcttagcggggataatattgaccagataaagtttgcagcaattggtcccacaactgctcgggctctggctgcccagggccttccggtcagttgtaccgcggagtcgcctaccccacaagctttggccaccggcattcggaaggccttacaacctcacggctgctgctag

SEQ ID NO: 8154 - DNA, 798 bp, Artificial Sequence
  derived and/or modified sequence
atgaaggtgctgctgctgaaggacgccaaggaggacgactgcggccaggacccttatattcgagagctgggcctgtatggactcgaggcaacactgatcccagttctgtcatttgagttcctgtcactgccttccttttccgagaaactttctcaccctgaggattacgggggtctgatttttacatccccccgggcagtggaggcagccgagctgtgtctggagcaaaacaacaagacggaggtgtgggagaggtcccttaaggagaaatggaacgcgaagagcgtgtacgttgtgggtaacgctactgcaagtttagtatctaaaatcggtctggacaccgaaggagaaacctgcggcaatgctgagaagcttgcggagtacatctgcagtcgggagagtagtgcactgccactcctattcccctgtggcaacctgaaaagagagatcctgcccaaagccttgaaggataaaggaatcgctatggagagcataacagtgtaccagaccgtggcgcacccgggaatccaggggaacctgaactcctactactcccagcaaggagtgccagccagcattaccttcttctctccttccggtttaacatactcactgaagcatatacaggagcttagtggcgacaatatcgaccagatcaagtttgccgcgataggaccaaccacagctcgggccctggccgctcaaggcttgcccgtgagttgtacagcggagtccccaacaccgcaggcgcttgctaccgggattcggaaagccctccagccacacgggtgttgttag

SEQ ID NO: 8155 - DNA, 798 bp, Artificial Sequence
  derived and/or modified sequence
atgaaggtgctcctcctcaaggatgctaaagaagatgactgtggccaggacccctacatacgggagcttggactctacggcttggaggccactctcatacctgtgcttagtttcgaattcctttcactccctagcttcagtgagaaattatcgcacccagaagattatggcggactgattttcacttccccgcgagccgtggaggcagctgagttgtgtctggagcagaataacaagaccgaggtctgggagcgatcccttaaagagaagtggaacgctaagagcgtttatgtggtcggtaacgctaccgcttcattggtatccaaaataggccttgatacggaaggggagacatgcgggaatgcggagaagctggctgagtacatttgcagccgggagagttcagcactcccactgctttttccatgcggaaatttgaagcgagagatcctgccgaaagccttgaaggataagggcatcgctatggaatccatcaccgtgtatcagacagtggcccatcccggtattcaagggaacctcaactcatactatagtcaacagggcgtcccagctagcattacatttttctcgccctcgggactgacctacagcctgaagcatattcaagagctgtccggggacaatatcgaccagattaaattcgccgctatcggacccacaaccgcacgggcactggctgcccaggggttacctgtgtcttgcaccgctgagtcgccaaccccgcaagctttagctactggcattcgaaaggcgcttcagccgcatggttgttgttag

SEQ ID NO: 8156 - DNA, 798 bp, Artificial Sequence
  derived and/or modified sequence
atgaaggtcctcctgctgaaggatgctaaggaggatgactgcggccaggacccatacatccgtgagctgggcctttacgggttagaggcaaccctgatccctgtactgagctttgagtttctgtcattgccgtcattctcagagaaactgagccacccggaggactacggagggctcatttttactagccccagagcagtggaagcggcagagctctgcctagaacagaacaataaaaccgaagtgtgggaacgttccctgaaggagaaatggaacgctaagagcgtctatgtggtggggaatgccactgccagcttggtatccaagatcgggctggatactgaaggtgaaacctgcggtaatgctgagaagctcgcagaatacatttgttcacgggaatcttcagccctacccctcctgttcccttgtgggaacctcaagagagagatccttccaaaggctctgaaagataagggtattgctatggagagcattactgtgtatcagaccgttgctcatccaggaatacagggtaacctgaacagctattattctcaacagggggtgccagcaagcattacctttttctctccatccggactcacctactcactgaagcacatacaggagctaagcggagacaacatagatcagatcaaattcgcggcaataggacccaccaccgccagggcactcgcagctcaaggtctgcccgtttcttgtaccgctgagagccctacacctcaggcactggccaccgggatccgtaaagccctgcagccacacgggtgttgttag

SEQ ID NO: 8157 - DNA, 1216 bp, Artificial Sequence
  derived and/or modified sequence
ttccacaagcatttgattgccttcttcttgtgtaccgtccccatcggaaattgcttaggaagagtctttgagatctaattaagatctgtttccttgctctgtcgcagtgccctataaggactgccaggcaataatgaaggttcttttactgaaggatgcgaaggaagatgactgtggccaggatccgtatatcagggaattaggattatatggacttgaagccactttgatccctgttttatcgtttgagtttttgtctcttcccagtttctctgagaagctttctcatcctgaagattacgggggactcatttttaccagccccagagcagtggaagcagcagagttatgtttggagcaaaacaataaaactgaagtctgggaaaggtctctgaaagaaaaatggaatgccaagtcagtgtatgtggttggaaatgctactgcttctctagtgagtaaaattggcctggatacagaaggagaaacctgtggaaatgcagaaaagcttgcagaatatatttgttccagggagtcctcagcactgcctcttctatttccctgtggaaacctcaaaagagaaatcctgccaaaagcgctcaaggacaaagggattgccatggaaagcataactgtgtatcagacagttgcacacccaggaatccaagggaacctgaacagctactattcccagcagggggttccagccagcatcacattttttagtccctctggcctcacatacagtctcaagcacattcaggagttatctggtgacaatatcgatcaaattaagtttgcagccatcggccccactacggctcgcgcgctggccgcccagggccttcctgtaagctgcactgcagagagccccacgccacaagccctggccactggcatcaggaaggctctccagccccatggctgctgctgagtcagccacctagcgctggccccatgcagcctccctgggctgggctggctctggatggagccaggcatcggcaagggctctcgggagctgctgccgtcagactcctgcctcaagcctgagtggaagcacctgaggaccggggatcgggacctgacctggggctggcctcaggcccacgtgcacgtgactgccctctgtggaagccagcttaaaccctagccctgtgagagcttcctgtgcccagcaggaaggaagtcaaataaaccacactgactacctgtgctt

SEQ ID NO: 8158 - DNA, 1313 bp, Artificial Sequence
  derived and/or modified sequence
cccacgcgaccccagtctgaggtgcggggtcctggggcccggcgcgggtggccgccgcggcccctcgggctgcgtggggagggggcttccgcccctgttgtcattgctcctgcagccttttcgctgggactgcgcgacaccgccccccgaccgggtgcccgctgtgtgccaggccgggtgctgggcacggtcccgcgagtgccctataaggactgccaggcaataatgaaggttcttttactgaaggatgcgaaggaagatgactgtggccaggatccgtatatcagggaattaggattatatggacttgaagccactttgatccctgttttatcgtttgagtttttgtctcttcccagtttctctgagaagctttctcatcctgaagattacgggggactcatttttaccagccccagagcagtggaagcagcagagttatgtttggagcaaaacaataaaactgaagtctgggaaaggtctctgaaagaaaaatggaatgccaagtcagtgtatgtggttggaaatgctactgcttctctagtgagtaaaattggcctggatacagaaggagaaacctgtggaaatgcagaaaagcttgcagaatatatttgttccagggagtcctcagcactgcctcttctatttccctgtggaaacctcaaaagagaaatcctgccaaaagcgctcaaggacaaagggattgccatggaaagcataactgtgtatcagacagttgcacacccaggaatccaagggaacctgaacagctactattcccagcagggggttccagccagcatcacattttttagtccctctggcctcacatacagtctcaagcacattcaggagttatctggtgacaatatcgatcaaattaagtttgcagccatcggccccactacggctcgcgcgctggccgcccagggccttcctgtaagctgcactgcagagagccccacgccacaagccctggccactggcatcaggaaggctctccagccccatggctgctgctgagtcagccacctagcgctggccccatgcagcctccctgggctgggctggctctggatggagccaggcatcggcaagggctctcgggagctgctgccgtcagactcctgcctcaagcctgagtggaagcacctgaggaccggggatcgggacctgacctggggctggcctcaggcccacgtgcacgtgactgccctctgtggaagccagcttaaaccctagccctgtgagagcttcctgtgcccagcaggaaggaagtcaaataaaccacactgactacctgtgcttactga

SEQ ID NO: 8159 - protein, 395 aa, Artificial Sequence
  derived and/or modified sequence
MSMEHAALTATGAGGSWRSMKRKALFTCPFNGDCRITKDNRRHCQACRLKRCVDIGMMKEFILTDEEVQRKREMILKRKEEEALKDSLRPKLSEEQQRIIAILLDAHHKTYDPTYSDFCQFRPPVRVNDGGGSHPSRPNSRHTPSFSGDSSSSCSDHCITSSDMMDSSSFSNLDLSEEDSDDPSVTLELSQLSMLPHLADLVSYSIQKVIGFAKMIPGFRDLTSEDQIVLLKSSAIEVIMLRSNESFTMDDMSWTCGNQDYKYRVSDVTKAGHSLELIEPLIKFQVGLKKLNLHEEEHVLLMAICIVSPDRPGVQDAALIEAIQDRLSNTLQTYIRCRHPPPGSHLLYAKMIQKLADLRSLNEEHSKQYRCLSFQPECSMKLTPLVLEVFGNEIS

SEQ ID NO: 8160 - DNA, 1188 bp, Artificial Sequence
  derived and/or modified sequence
atgagcatggagcacgccgccctgaccgccaccggcgccggcggcagctggagaagcatgaagagaaaggccctgttcacctgccccttcaacggcgactgcagaatcaccaaggacaacagaagacactgccaggcctgcagactgaagagatgcgtggacatcggcatgatgaaggagttcatcctgaccgacgaggaggtgcagagaaagagagagatgatcctgaagagaaaggaggaggaggccctgaaggacagcctgagacccaagctgagcgaggagcagcagagaatcatcgccatcctgctggacgcccaccacaagacctacgaccccacctacagcgacttctgccagttcagaccccccgtgagagtgaacgacggcggcggcagccaccccagcagacccaacagcagacacacccccagcttcagcggcgacagcagcagcagctgcagcgaccactgcatcaccagcagcgacatgatggacagcagcagcttcagcaacctggacctgagcgaggaggacagcgacgaccccagcgtgaccctggagctgagccagctgagcatgctgccccacctggccgacctggtgagctacagcatccagaaggtgatcggcttcgccaagatgatccccggcttcagagacctgaccagcgaggaccagatcgtgctgctgaagagcagcgccatcgaggtgatcatgctgagaagcaacgagagcttcaccatggacgacatgagctggacctgcggcaaccaggactacaagtacagagtgagcgacgtgaccaaggccggccacagcctggagctgatcgagcccctgatcaagttccaggtgggcctgaagaagctgaacctgcacgaggaggagcacgtgctgctgatggccatctgcatcgtgagccccgacagacccggcgtgcaggacgccgccctgatcgaggccatccaggacagactgagcaacaccctgcagacctacatcagatgcagacaccccccccccggcagccacctgctgtacgccaagatgatccagaagctggccgacctgagaagcctgaacgaggagcacagcaagcagtacagatgcctgagcttccagcccgagtgcagcatgaagctgacccccctggtgctggaggtgttcggcaacgagatcagctag

SEQ ID NO: 8161 - DNA, 753 bp, Artificial Sequence
  derived and/or modified sequence
atggaggccatggccgccagcaccagcctgcccgaccccggcgacttcgacagaaacgtgcccagaatctgcggcgtgtgcggcgacagagccaccggcttccacttcaacgccatgacctgcgagggctgcaagggcttcttcagaagaagcatgaagagaaaggccctgttcacctgccccttcaacggcgactgcagaatcaccaaggacaacagaagacactgccaggcctgcagactgaagagatgcgtggacatcggcatgatgaaggagttcatcctgaccgacgaggaggtgcagagaaagagagagatgatcctgaagagaaaggaggaggaggccctgaaggacagcctgagacccaagctgagcgaggagcagcagagaatcatcgccatcctgctggacgcccaccacaagacctacgaccccacctacagcgacttctgccagttcagaccccccgtgagagtgaacgacggcggcggcagccaccccagcagacccaacagcagacacacccccagcttcagcggcgacagcagcagcagctgcagcgaccactgcatcaccagcagcgacatgatggacagcagcagcttcagcaacctggacctgagcgaggaggacagcgacgaccccagcgtgaccctggagctgagccagctgagcatgctgccccacctggccgacctggtgagctacagcatccagaaggtgatcggcttcgccaagatgatccccggctag

SEQ ID NO: 8162 - DNA, 306 bp, Artificial Sequence
  derived and/or modified sequence
atggaggccatggccgccagcaccagcctgcccgaccccggcgacttcgacagaaacgtgcccagaatctgcggcgtgtgcggcgacagagccaccggcttccacttcaacgccatgacctgcgagggctgcaagggcttcttcagaagaagcatgaagagaaaggccctgttcacctgccccttcaacggcgactgcagaatcaccaaggacaacagaagacactgccaggcctgcagactgaagagatgcgtggacatcggcatgatgaaggagttcatcctgaccgacgaggaggtgcagtag

SEQ ID NO: 8163 - DNA, 321 bp, Artificial Sequence
  derived and/or modified sequence
atggaggccatggccgccagcaccagcctgcccgaccccggcgacttcgacagaaacgtgcccagaatctgcggcgtgtgcggcgacagagccaccggcttccacttcaacgccatgacctgcgagggctgcaagggcttcttcagaagaagcatgaagagaaaggccctgttcacctgccccttcaacggcgactgcagaatcaccaaggacaacagaagacactgccaggcctgcagactgaagagatgcgtggacatcggcatgatgaaggagttcatcctgaccgacgaggaggtgcagagaaagagagagatgtag

SEQ ID NO: 8164 - DNA, 1284 bp, Artificial Sequence
  derived and/or modified sequence
atggaggcgatggctgcctctacatctttacccgatcctggtgatttcgataggaatgtcccacggatctgcggagtgtgcggagacagagccacaggattccactttaatgctatgacatgcgagggctgtaagggatttttccgccggtctatgaagcgcaaggctctgttcacatgcccttttaacggagactgcaggataacgaaagataatcgcagacattgtcaggcttgcagactgaagagatgtgtcgacattggcatgatgaaggaatttatcctgaccgatgaagaagtgcagcgcaagagagagatgatcttaaaacgaaaagaggaggaagccctcaaggatagccttagacctaagctgagcgaagaacaacagcgcatcatagctattcttctggacgcccatcataaaacttacgaccccacatattccgacttctgccagtttagacctccagtacgggttaacgacggcggcggtagtcatccctcccgccccaatagccgccacaccccgagcttctcaggagactccagctcctcatgttcagaccattgcatcacctcaagcgatatgatggattcgagctcattctctaacctagacctaagcgaggaggattccgacgatccctccgtaacgttggaactctctcagctctccatgctcccgcatctcgccgaccttgtttcctactcgatccagaaagttatcggtttcgcaaaaatgatccctgggttcagagaccttacctcagaggaccagattgttctgctcaagtccagtgcgattgaggttatcatgctccgatccaacgagagtttcacgatggatgacatgagttggacgtgcggaaaccaggactacaagtaccgggtgtcggacgtgactaaggcggggcattcacttgagttaatcgagccattaatcaagttccaggtgggcctgaaaaagttgaacctgcacgaggaagagcacgtcttgctgatggccatttgcatcgtgtccccggataggcctggggtccaggacgccgctttgatcgaggcaatacaagatcgactgtccaacacgttgcagacatacattcgatgtaggcatcctcccccaggctcacatcttctatatgccaaaatgattcaaaaactcgcggatttgagatctctgaacgaggaacattccaagcaatataggtgtctctcattccagcccgagtgtagtatgaagctcactccgctcgtgcttgaggtcttcggaaatgagatttcctag

SEQ ID NO: 8165 - DNA, 1284 bp, Artificial Sequence
  derived and/or modified sequence
atggaggccatggccgcctcaacctccctccccgaccccggggactttgatagaaacgtgccacggatctgtggggtatgtggagatagggcaaccggctttcactttaacgccatgacttgtgaagggtgtaaaggtttcttccgaagaagtatgaaacgaaaggcactgtttacctgtccctttaatggcgactgcagaattactaaggacaaccgccgccactgtcaggcttgtcggttaaaacgctgtgttgatattggtatgatgaaggaattcatactgacagacgaagaagtacagcgtaaacgtgagatgattctgaaacgcaaggaagaggaagcattgaaagactctctgagaccgaaactcagcgaggaacagcagagaattatagccatcctcctcgatgcccatcacaaaacctacgatcccacttactccgatttctgtcaattcagacctccggtcagagtgaatgatggaggcggctcccaccctagcagacccaactcaagacacacaccctcctttagcggagactctagcagcagctgctctgaccactgcattaccagctctgatatgatggactcttccagcttctctaacctggatctttcagaagaagattctgatgatcctagtgttaccttagagttgtcgcagcttagcatgctcccacacctggcagaccttgtgagctacagcatccagaaggttatcggctttgcgaagatgatccctggattcagggatctgacctcagaagaccagatagtgttactgaagtcatccgcaattgaagtaatcatgctgcgcagtaacgaatcattcacgatggacgatatgagctggacctgcgggaaccaggactacaagtatcgcgtcagtgatgttacaaaggcagggcacagcctcgagctcatcgagcctttgattaagtttcaagtggggttaaagaaattgaatctccacgaggaagagcatgtcctgctcatggctatctgtatcgtatcgcctgacaggcctggagtgcaggacgcggcactaattgaagcaatccaggatcggctgagcaacacattgcagacatacatccggtgtaggcaccccccccccggaagccacctactatatgctaagatgatacagaagctggccgacttgcgaagcctcaatgaagagcatagcaagcaatataggtgcttgagcttccagcccgagtgtagcatgaagctgactccgttggtcttggaagtatttggcaacgagataagttag

SEQ ID NO: 8166 - DNA, 1188 bp, Artificial Sequence
  derived and/or modified sequence
atgtcaatggagcatgctgctctaaccgctacgggagcaggcggttcttggcgtagcatgaagaggaaggccttatttacctgcccattcaacggggactgccgcatcactaaagataatcggcggcactgccaggcctgccgcctaaaaagatgcgttgatataggcatgatgaaggaattcattctcactgatgaggaggtgcagaggaagagagagatgatcctgaaaagaaaggaggaggaagccttgaaggactccctgcggccaaagctctccgaagagcagcagcgcattatcgcgattctgttagacgctcatcacaagacttatgatccaacatactcagatttctgtcagtttcggccacctgtcagagtcaatgatggaggcggaagtcaccctagtaggccaaacagtcgccacactccaagtttctccggtgattccagtagcagttgctcggaccactgcataactagcagtgacatgatggactcttcaagcttttcaaacctcgatctgtccgaggaggattccgatgatccctcagtcactctggaattgtcgcagctcagtatgctgccgcatctggccgaccttgtttcctactccatccagaaggtgatcgggtttgccaagatgatcccgggctttagagatctgacctcagaagatcaaatagtgctcctgaagagcagcgctatcgaggtgattatgttacgcagtaacgagtcttttaccatggacgacatgtcgtggacttgtggaaaccaggactataagtatagggtgtcagatgttacaaaagcaggccattctctagagctgatcgaacccttgatcaagttccaggtgggacttaaaaagcttaacctccacgaggaggagcatgttcttcttatggcgatttgcatcgtgagtcccgatagacccggcgtccaggatgctgccctgattgaagccatccaggatcggctatctaacacactgcaaacctatatcagatgtcgccatcccccgcctggttcccatttactctacgcgaagatgatacaaaaactggcagaccttcgtagtctgaatgaagaacactccaaacagtaccgatgcttgtcatttcaacctgagtgcagtatgaaactgactccactggttcttgaagtcttcggcaacgagatctcatag

SEQ ID NO: 8167 - DNA, 753 bp, Artificial Sequence
  derived and/or modified sequence
atggaagcaatggcggcttccaccagtctgccagaccccggagacttcgataggaacgttccgaggatctgtggggtctgtggcgacagagctacggggttccacttcaatgctatgacatgtgaagggtgcaaaggattcttccggcgcagcatgaaacggaaagctttgtttacctgccccttcaatggggactgtcggattacaaaggataaccgtcgccattgccaggcatgccgtctgaagcgatgtgtcgatatagggatgatgaaagagtttatactcactgacgaagaggttcagcgcaaaagggagatgatactaaagaggaaagaggaagaagcattgaaagactcccttcgcccaaaactgagcgaggagcaacaacggataatcgccattttgctggatgctcaccataaaacctatgatccgacttattcagacttttgccagtttagaccaccagtcagggtgaacgatggcggcggatcgcacccttcgcgtcctaattcccggcacactccaagtttctccggtgactccagtagcagctgctcagatcactgcatcacatcctcagatatgatggacagttcaagtttttcaaatctagatctgtccgaagaagattcagacgacccctctgtgactttggagctcagccaactctcaatgcttccacacctagccgatctggtttcctacagcatccaaaaggtaataggattcgccaagatgatccctgggtag

SEQ ID NO: 8168 - DNA, 306 bp, Artificial Sequence
  derived and/or modified sequence
atggaagccatggccgcaagcacctccctccctgaccccggagactttgaccggaatgtccctaggatctgcggagtttgcggcgatcgggctaccggcttccatttcaacgcaatgacgtgtgaaggctgtaagggctttttcagaaggtccatgaagagaaaggcgttattcacatgtccattcaatggcgactgcaggatcaccaaggacaatcgccgacactgtcaagcctgtagattgaagaggtgtgtggatattggcatgatgaaagaatttatcttaactgacgaggaggtacaatag

SEQ ID NO: 8169 - DNA, 1284 bp, Artificial Sequence
  derived and/or modified sequence
atggaggccatggccgcctccaccagcctgccagaccccggcgacttcgaccgtaacgtcccgaggatttgcggtgtttgcggcgaccgggcaacgggatttcacttcaatgccatgacctgcgagggatgtaaaggctttttccgaaggagcatgaaaagaaaagccctgttcacttgcccgtttaacggggattgtaggatcacaaaagataatcgtaggcattgtcaggcatgccgccttaaacggtgcgtcgacatagggatgatgaaggaatttatactgaccgatgaagaggtgcagagaaagagggagatgatcctgaagcgcaaagaggaggaggccttaaaagactccctgaggcctaagctgagtgaagaacagcagagaattatcgccatccttctggatgcccaccacaagacctatgacccaacttattccgatttttgccagttccgcccgcctgttagggtgaatgatggaggcgggagtcacccatcacgacccaatagccgacatactcctagcttttctggggattcctccagctcttgctcagaccattgtattacgtcctcagatatgatggattcctcctctttcagcaatctggatttgtctgaggaagattccgacgatccatcagtaacccttgagctctcccagctcagcatgctgcctcacctcgccgacctcgtgagttattcaatccagaaagtgatcggctttgccaaaatgatccccggttttagggatctgacgtctgaggatcagattgttctgcttaagtcttctgctattgaagtcatcatgttgcgcagtaatgaatctttcaccatggatgatatgagctggacatgcggtaaccaggattacaaataccgagtgtccgatgttaccaaagctggacacagccttgagctcatcgagccgctgattaagtttcaggttggactcaagaaactcaatttacacgaggaagagcacgtgctgctgatggcgatatgcatcgtgtctcctgataggcctggcgtgcaggacgccgctctcattgaagccatacaggacagactgtctaacacactacagacatacattcgctgccgacatccacctcctggatctcatctgctgtacgcgaagatgatccagaaactggcagacctgaggtcgctgaatgaggagcatagcaagcaatatcggtgtctgtcattccagcctgaatgctccatgaaacttactcctttggttcttgaggtgtttggtaatgagatcagttag

SEQ ID NO: 8170 - DNA, 321 bp, Artificial Sequence
  derived and/or modified sequence
atggaagcaatggccgcatccactagtctccctgaccccggcgactttgatcggaatgttcctagaatctgtggtgtgtgtggagacagagccacaggtttccatttcaatgcaatgacgtgcgaaggatgcaaggggttctttcgacgctctatgaaaagaaaggcgctgttcacttgcccttttaatggcgactgcagaattaccaaggataatcgtcgccattgtcaggcttgccggctgaagcgttgcgttgacatcgggatgatgaaggagttcattctgacagatgaagaggttcaacgtaagcgtgagatgtag

SEQ ID NO: 8171 - DNA, 1284 bp, Artificial Sequence
  derived and/or modified sequence
atggaggccatggccgccagcaccagcctgcctgaccccggggactttgacagaaatgtgccccgcatctgtggggtgtgtggggaccgggccaccggcttccacttcaatgccatgacctgtgagggctgcaagggcttcttcagaagatccatgaagaggaaggccctcttcacctgccccttcaatggagactgccgcatcaccaaggacaacagaagacactgccaggcctgccgcctgaagagatgtgtggacatcggcatgatgaaggagttcatcctgacagatgaggaggtgcagaggaagcgggagatgatcctgaagaggaaggaggaggaggccctgaaggacagcctgcggcccaagctgtctgaggagcagcagaggatcatcgccatcctgctggatgcccaccacaagacctatgaccccacctacagcgacttctgccagttccggccccctgtgcgggtgaatgatggcggcggcagccaccccagccggcccaacagccgccacacccccagcttcagcggggacagcagcagcagctgcagcgaccactgcatcaccagcagtgacatgatggacagcagcagcttcagcaacctggacctgtctgaggaggacagtgatgaccccagcgtgaccctggagctgagccagctgtccatgctgccccacctggccgacctggtgtcctacagcatccagaaggtgattggatttgccaagatgatccctggcttccgggacctgaccagcgaggaccagatcgtgctgctgaagagcagcgccatcgaggtgatcatgctgcggagcaatgaaagcttcaccatggatgacatgtcctggacctgtggcaaccaggactacaagtacagagtgtctgatgtgaccaaggccggccacagcctggagctgattgagcccctcatcaagttccaggtgggcctgaagaagctgaacctgcacgaggaggagcacgtgctgctgatggccatctgcatcgtgtccccagacaggcctggggtgcaggatgctgccctgattgaggccatccaggaccggctgagcaacaccctgcagacctacatccgctgccgccaccccccacctggcagccacctgctgtatgccaagatgatccagaagctggccgacctgcggagcctgaatgaggagcacagcaagcagtaccgctgcctgtccttccagccagaatgttccatgaagctgacccccctggtgctggaggtgtttggaaatgagatctcctag

SEQ ID NO: 8172 - DNA, 1188 bp, Artificial Sequence
  derived and/or modified sequence
atgtccatggagcacgccgccctgacagccactggagctgggggctcctggaggtccatgaagaggaaggccctcttcacctgccccttcaatggagactgccgcatcaccaaggacaacagaagacactgccaggcctgccgcctgaagagatgtgtggacatcggcatgatgaaggagttcatcctgacagatgaggaggtgcagaggaagcgggagatgatcctgaagaggaaggaggaggaggccctgaaggacagcctgcggcccaagctgtctgaggagcagcagaggatcatcgccatcctgctggatgcccaccacaagacctatgaccccacctacagcgacttctgccagttccggccccctgtgcgggtgaatgatggcggcggcagccaccccagccggcccaacagccgccacacccccagcttcagcggggacagcagcagcagctgcagcgaccactgcatcaccagcagtgacatgatggacagcagcagcttcagcaacctggacctgtctgaggaggacagtgatgaccccagcgtgaccctggagctgagccagctgtccatgctgccccacctggccgacctggtgtcctacagcatccagaaggtgattggatttgccaagatgatccctggcttccgggacctgaccagcgaggaccagatcgtgctgctgaagagcagcgccatcgaggtgatcatgctgcggagcaatgaaagcttcaccatggatgacatgtcctggacctgtggcaaccaggactacaagtacagagtgtctgatgtgaccaaggccggccacagcctggagctgattgagcccctcatcaagttccaggtgggcctgaagaagctgaacctgcacgaggaggagcacgtgctgctgatggccatctgcatcgtgtccccagacaggcctggggtgcaggatgctgccctgattgaggccatccaggaccggctgagcaacaccctgcagacctacatccgctgccgccaccccccacctggcagccacctgctgtatgccaagatgatccagaagctggccgacctgcggagcctgaatgaggagcacagcaagcagtaccgctgcctgtccttccagccagaatgttccatgaagctgacccccctggtgctggaggtgtttggaaatgagatctcctag

SEQ ID NO: 8173 - DNA, 753 bp, Artificial Sequence
  derived and/or modified sequence
atggaggccatggccgccagcaccagcctgcctgaccccggggactttgacagaaatgtgccccgcatctgtggggtgtgtggggaccgggccaccggcttccacttcaatgccatgacctgtgagggctgcaagggcttcttcagaagatccatgaagaggaaggccctcttcacctgccccttcaatggagactgccgcatcaccaaggacaacagaagacactgccaggcctgccgcctgaagagatgtgtggacatcggcatgatgaaggagttcatcctgacagatgaggaggtgcagaggaagcgggagatgatcctgaagaggaaggaggaggaggccctgaaggacagcctgcggcccaagctgtctgaggagcagcagaggatcatcgccatcctgctggatgcccaccacaagacctatgaccccacctacagcgacttctgccagttccggccccctgtgcgggtgaatgatggcggcggcagccaccccagccggcccaacagccgccacacccccagcttcagcggggacagcagcagcagctgcagcgaccactgcatcaccagcagtgacatgatggacagcagcagcttcagcaacctggacctgtctgaggaggacagtgatgaccccagcgtgaccctggagctgagccagctgtccatgctgccccacctggccgacctggtgtcctacagcatccagaaggtgattggatttgccaagatgatccctggatag

SEQ ID NO: 8174 - DNA, 306 bp, Artificial Sequence
  derived and/or modified sequence
atggaggccatggccgccagcaccagcctgcctgaccccggggactttgacagaaatgtgccccgcatctgtggggtgtgtggggaccgggccaccggcttccacttcaatgccatgacctgtgagggctgcaagggcttcttcagaagatccatgaagaggaaggccctcttcacctgccccttcaatggagactgccgcatcaccaaggacaacagaagacactgccaggcctgccgcctgaagagatgtgtggacatcggcatgatgaaggagttcatcctgacagatgaggaggtgcagtag

SEQ ID NO: 8175 - DNA, 321 bp, Artificial Sequence
  derived and/or modified sequence
atggaggccatggccgccagcaccagcctgcctgaccccggggactttgacagaaatgtgccccgcatctgtggggtgtgtggggaccgggccaccggcttccacttcaatgccatgacctgtgagggctgcaagggcttcttcagaagatccatgaagaggaaggccctcttcacctgccccttcaatggagactgccgcatcaccaaggacaacagaagacactgccaggcctgccgcctgaagagatgtgtggacatcggcatgatgaaggagttcatcctgacagatgaggaggtgcagaggaagcgggagatgtag

SEQ ID NO: 8176 - DNA, 1284 bp, Artificial Sequence
  derived and/or modified sequence
atggaggccatggccgccagcaccagcctgcccgaccccggcgactttgataggaacgtgccgaggatctgcggggtatgtggagatcgcgctactggattccatttcaacgccatgacctgcgaagggtgtaaaggcttctttaggaggtctatgaaaaggaaagccttattcacatgcccttttaacggggactgtaggatcaccaaggataatcggagacattgccaggcctgcaggctgaaaaggtgcgtagacatcggcatgatgaaggagttcatactcacggacgaagaagtccagcgaaaaagagagatgatcttgaagcggaaggaggaggaagcactgaaggattctctgcgacccaagctgtccgaagagcagcaaagaatcatcgccattctgctagatgcacaccataagacttatgaccctacctatagtgatttctgtcaatttaggccacctgtgagagtgaatgatggcgggggatcgcacccttcccgccccaatagtcgccatactccatccttttctggcgactcctcatcctcatgtagcgatcactgcattacctcttcagacatgatggattcaagcagtttcagcaaccttgacctgtccgaggaagattcagatgacccctccgtgacactggaactcagtcagctgagtatgcttccccacctggcagatttagtgtcatattctattcagaaggtgatcgggttcgccaaaatgatccctgggtttagggaccttacatctgaggaccagattgtgcttctcaagagtagcgcgattgaggtcatcatgctacgtagcaatgagagtttcacaatggatgacatgagttggacatgcggtaaccaggactataaataccgggtgtccgatgttaccaaggccggccactcattagaattaattgagcctctgattaaatttcaagtgggtctgaagaagctcaatctgcatgaggaggaacatgttttgctgatggctatttgtatcgtgagcccagatcggccgggtgttcaggatgctgcactgatagaggctatccaggatcgtctgagtaatactctccagacgtatattcggtgccggcatcccccccccggcagtcacttactgtacgccaagatgattcagaagctcgcagatttgaggtcactcaacgaggagcattcaaagcaatatagatgtctgagcttccagccagagtgctctatgaaattgacccccttggtgctggaggtgttcggaaatgaaatcagttag

SEQ ID NO: 8177 - DNA, 1284 bp, Artificial Sequence
  derived and/or modified sequence
atggaggccatggccgccagcaccagcctgcccgaccccggcgactttgaccgcaatgtcccaaggatatgcggcgtgtgtggggacagggcaaccgggtttcatttcaatgccatgacgtgtgaaggctgcaaaggattcttccgccgctctatgaaaagaaaggctctgttcacatgcccatttaatggggactgtagaattacaaaagacaacagacgtcactgtcaagcttgccgcttgaagagatgcgtcgacatcggcatgatgaaggagtttattctcaccgatgaagaggtccagagaaagcgggagatgatcctcaagaggaaggaagaagaggctctaaaggacagcctgagacctaagctcagtgaggaacagcagcggatcattgcaatccttctcgacgcccatcacaagacctacgaccccacatactccgatttctgccaattccggcccccagtaagagtgaatgacgggggcggcagtcacccttccagaccaaactctcggcacactccgtcgttttcaggggacagtagttccagctgttcagaccactgtataacctcatccgatatgatggactccagttctttcagtaatctcgacctgtcggaggaagacagcgacgacccctcagtgaccctggagctttcacagttgtcgatgctgccgcacctcgcggatctggtcagttactctatacagaaggtgattggctttgcaaaaatgatccctgggttcagagatctgacctcagaggatcagatcgtcctgctcaagtccagtgctatagaggtcataatgcttagatccaatgaatctttcaccatggacgacatgtcttggacatgtggcaatcaggattataagtaccgcgttagcgacgttaccaaggcgggccatagcttggagctaattgagcctctgattaaatttcaggtgggcctcaagaaactgaatttgcacgaggaagaacacgtcctcctgatggccatctgcatagtcagccccgacagaccaggagtgcaggacgccgccctaatcgaggcaatccaggatcgcctcagtaacactctacagacatacattagatgtcggcatcccccgcccggctcacacctattatatgccaagatgatccaaaaactggctgatctgcggtctcttaatgaggaacatagtaagcaatatcgttgcttaagcttccagccagagtgtagcatgaaactaacaccgctcgtgctagaggtgtttggaaacgagataagctag

SEQ ID NO: 8178 - DNA, 1188 bp, Artificial Sequence
  derived and/or modified sequence
atgagcatggagcacgccgccctgaccgccaccggcgccggcggctcttggcgcagtatgaagcgcaaggctcttttcacatgcccgtttaatggagattgtcgcataacgaaggacaacaggagacattgccaagcctgccgacttaaacggtgtgtggatattgggatgatgaaggaatttatcctgactgacgaggaggtgcagagaaaacgtgaaatgattctgaagcgaaaggaagaagaggctctaaaggattccctgaggcccaaactgagcgaggagcagcagagaattattgcaattttactggacgctcatcacaagacctacgacccgacctatagcgatttctgtcagttccggccgccagtgcgcgtgaacgacgggggtggcagccatccatcgaggcctaacagtagacataccccgtcatttagcggcgattcctctagctcctgcagtgaccactgcattacatccagcgatatgatggattcaagtagtttcagtaatctggacctttcagaagaggacagcgacgacccgagtgtgaccctcgagctgtcgcaactgtcgatgttgccgcatctcgcggatctggtttcctactcgattcaaaaagtcatcggcttcgcaaagatgatccccggatttagagacctgaccagcgaggatcagattgtgttactgaaaagctctgccattgaggtgatcatgcttagatctaacgagtcgttcacaatggatgatatgagctggacctgcggtaatcaagactacaagtatcgcgtgagcgacgttaccaaagcgggacactccttggaactgattgaacccctgattaaatttcaggtcgggttaaagaaattgaatcttcacgaggaagagcacgtgctgctgatggctatctgtatcgtcagtcccgatcgcccgggagttcaggacgccgccctcatcgaagcgattcaggatcgactctctaacacgttgcagacctacatcaggtgccgccaccctcctcctggcagccacctcttgtatgccaaaatgatccagaagcttgctgatctcagaagtctgaatgaagagcattcaaagcagtaccgttgtctgtcattccaaccagaatgtagtatgaagctgactcctttggtgcttgaggtctttggaaatgagattagttag

SEQ ID NO: 8179 - DNA, 753 bp, Artificial Sequence
  derived and/or modified sequence
atggaggccatggccgccagcaccagcctgcccgaccccggcgactttgatcggaacgtgcctcggatatgcggagtgtgtggcgatagagccacaggatttcactttaacgccatgacgtgtgagggatgcaagggcttctttcggcgaagtatgaagcggaaagccttgtttacttgtccatttaacggtgactgccggatcactaaagacaataggagacactgccaagcatgtaggttaaagcgctgtgtagacattggaatgatgaaagagtttatcctgactgacgaggaggtgcagcggaagcgagaaatgatcctcaagaggaaagaagaggaggccttgaaagactccctccggcccaagctgtcggaggagcaacagagaattatagcaatcttactggatgctcaccataaaacatacgatcccacctattctgatttctgtcaatttaggcccccagttagggtgaatgatggcgggggaagtcatccatcaagacccaactctaggcacactccctccttcagcggcgatagttcttctagctgttccgaccattgtatcaccagctctgatatgatggattcctcgtcattctccaacctggatctgtccgaggaggattccgatgaccctagcgtcaccctggaactgagccagttgtcaatgctgccccacctcgcagacctcgtgtcatatagcatccagaaagttatcggctttgcaaagatgatcccaggctag

SEQ ID NO: 8180 - DNA, 306 bp, Artificial Sequence
  derived and/or modified sequence
atggaggccatggccgccagcaccagcctgcccgaccccggcgacttcgatcggaatgttcctcgcatttgtggcgtctgtggggatcgcgcaacgggattccacttcaacgctatgacatgtgaaggttgtaagggcttttttagacgcagtatgaagcgcaaagccctgtttacctgcccctttaacggggactgtcgaattactaaggataacagacgtcattgtcaagcctgcaggctgaagagatgtgtggatatcgggatgatgaaggagtttattcttacagacgaggaagtgcaatag

SEQ ID NO: 8181 - DNA, 1284 bp, Artificial Sequence
  derived and/or modified sequence
atggaggccatggccgccagcaccagcctgcccgaccccggcgacttcgatcgaaatgtcccccggatttgtggtgtgtgcggcgatcgcgccaccgggtttcacttcaacgctatgacatgtgagggttgtaaaggcttcttccgtcggagcatgaagagaaaagcgctcttcacgtgtccattcaatggcgactgcagaatcacaaaggataacaggagacactgtcaagcctgcagattgaaacggtgtgtggatatcggaatgatgaaagagttcattctgacagatgaagaggtccagaggaagcgcgagatgatccttaaacgcaaggaggaagaggccctgaaggattcactacggccaaaactctctgaagagcagcagcgaattatagctattttgttagacgcacaccataaaacctatgaccccacttattctgacttctgtcagttccgccccccagtacgtgtgaacgacggcggtggcagccacccctcaaggccgaatagtcgacatacaccctcttttagtggagatagttcctctagttgctccgaccactgtataacaagcagcgacatgatggacagttctagcttctctaatttggacctgtcagaggaggatagtgacgacccttctgtgactttggaactctcgcaactttctatgctgccccacttggccgatctagtatcctattccatccagaaagtcatcggcttcgctaagatgatacctggcttccgggatctgaccagtgaagaccagatcgtccttcttaagagttctgctatcgaggtgatcatgctccgcagtaatgagagctttaccatggacgacatgagctggacctgcggcaatcaggattacaaatatcgtgtgtccgatgttaccaaggccggtcacagtctggaactcattgagccgttaatcaagtttcaggtggggctgaaaaagctgaacctacatgaggaggagcatgtgctcctgatggctatatgcattgtttcccctgacaggcccggagtgcaggatgccgcactaattgaggcaatccaggacaggctgtccaatacacttcagacctacatccgatgtagacatccccctcccgggtctcatctgctgtacgccaaaatgatccagaaactggccgacctcagatctctgaatgaggagcacagcaaacaatacagatgtctgagctttcagccggaatgctccatgaaactcaccccactggtgctggaggtcttcgggaacgagattagttag

SEQ ID NO: 8182 - DNA, 321 bp, Artificial Sequence
  derived and/or modified sequence
atggaggccatggccgccagcaccagcctgcccgaccccggcgacttcgatagaaacgtgccacggatctgcggagtgtgcggagatagagccaccggattccacttcaacgctatgacttgtgagggatgcaagggattttttaggcgcagtatgaaacgtaaggccttatttacctgccccttcaatggtgactgccgcatcacaaaggataataggaggcattgtcaggcttgcagactgaagcgatgcgtcgatatcggcatgatgaaagagttcattttgactgacgaagaagtgcaacgaaaacgtgagatgtag

SEQ ID NO: 8183 - DNA, 1284 bp, Artificial Sequence
  derived and/or modified sequence
atggaagcaatggctgcaagcactagcctgcccgatcctggggacttcgacaggaacgtgccacgaatttgtggcgtctgtggcgatcgcgcaactggcttccacttcaacgctatgacctgcgaaggatgcaagggatttttcagaagatcgatgaagaggaaggcgctctttacatgccctttcaatggcgactgcagaatcacaaaggataatcgacgtcactgtcaggcttgtcgactgaagcgatgtgttgatattggcatgatgaaggaattcattcttaccgacgaggaagtacagcgtaagcgcgagatgatcctgaaacggaaagaagaggaggcattgaaggattccttgagaccaaagttgtctgaagaacagcagagaattatcgccattttgttggacgcgcatcataaaacctacgatcctacatactctgatttttgccaatttcggcctcccgtgcgagtaaacgatggcggaggatctcacccttctcgccctaattcgcgacataccccatctttttccggtgactcctcttcctcctgtagtgaccactgtatcacaagtagcgacatgatggattcctctagcttttcaaacctcgacctgagcgaagaagattcggacgacccctccgtcaccctggagctgtctcagcttagtatgttgcctcatctcgccgatctagtgtcctattcgatccagaaggtgattggcttcgccaagatgattcctgggtttagagacctcaccagcgaagaccagattgttctgctaaagtcaagcgctattgaggtgattatgctcaggagcaatgaatcatttaccatggacgatatgtcatggacatgcgggaaccaggattataagtacagagtctccgatgtgaccaaagctggacactccttagagctcattgaacctctgatcaaatttcaggttggattgaagaaactgaatctgcacgaagaagagcatgttctgttaatggctatttgcatagtgagccctgaccgtcccggtgtgcaggatgccgcacttatcgaggcaatccaagatagattgtcgaacaccttacagacatacatcagatgcagacaccctccacctggctctcacctactttacgcgaagatgatccaaaaacttgctgatctgcgctcactgaacgaagaacattcaaagcagtaccgatgcctttccttccagcccgagtgctcgatgaagcttactcctctagttcttgaggtgttcggaaacgagatatcttag

SEQ ID NO: 8184 - DNA, 1284 bp, Artificial Sequence
  derived and/or modified sequence
atggaggctatggcggcaagcacttcgcttcctgatccaggagacttcgaccgtaatgtaccgagaatctgcggagtctgtggagatcgggctacaggatttcattttaacgcaatgacctgcgaaggctgtaagggcttctttagacgcagcatgaaacggaaggcattgtttacttgtccctttaacggtgattgtaggattactaaggataacaggcgccactgccaggcatgcagacttaaaagatgtgtggatattgggatgatgaaagagtttattctgacagacgaggaggtccagcgaaagagagagatgattcttaagaggaaggaggaagaagctctgaaggatagtctaaggccaaaactgtctgaggagcagcaacgtattatagctatcctcctagatgcccaccataagacctacgatcccacctactcagacttttgccaatttagaccacccgtccgcgtcaatgatggcggtggctcacatccgtcacgccctaactcgagacacacccccagcttctcaggcgatagctcatccagctgctccgaccactgtatcaccagtagtgatatgatggacagctccagcttcagcaatctcgacctcagtgaggaagacagtgatgatcccagtgtgactcttgaactctcccagctgagcatgcttccacatttagcagacttagtatcatattctatacaaaaagtcatcggctttgccaagatgatccctggtttccgggacctgacgtctgaagatcagatcgtactgctaaaatcttctgcgattgaggtgataatgctgagatcgaatgagagtttcaccatggacgacatgtcgtggacctgcggaaaccaggactataaatatcgggtgagtgacgttaccaaggctggacattcactggagctgattgagcctctgatcaagttccaggtgggcttgaaaaagctgaacctacatgaagaggaacacgtcctgcttatggccatctgtatcgtgagtcctgataggcctggtgtccaggacgcagcgctgattgaagctattcaggaccgcttgtccaataccctgcaaacatatatccggtgtcgccacccaccccctggaagccatttactgtatgccaagatgattcagaaactcgcagatcttagatcattaaatgaagagcactccaagcagtacaggtgtctctcatttcaaccggagtgttccatgaagctcacccctcttgtattagaagtctttggtaacgaaattagctag

SEQ ID NO: 8185 - DNA, 1188 bp, Artificial Sequence
  derived and/or modified sequence
atgtcaatggaacacgcagccctgacagctactggagcgggtgggagctggaggtcaatgaaaaggaaagccctttttacatgtccattcaacggggattgtagaatcaccaaagataaccggaggcactgtcaggcgtgcaggctcaagaggtgcgtggacatcggcatgatgaaagagttcattctgacggatgaagaggttcagcggaaacgagagatgatactcaaacggaaggaggaggaagcattaaaagacagtttaaggccaaaactgagtgaggagcagcagaggatcattgccattttgttggacgcccatcacaagacatacgatcccacatactctgacttctgccaattccgcccacctgtgcgtgtaaatgacggagggggaagccacccctcaagacccaattccagacacacacccagcttcagtggggattcctcctcaagctgtagcgaccactgtatcacaagctccgacatgatggactcctcatctttttccaatttagacttgtctgaggaggatagcgatgatccctcggtgaccctggaactgagtcagttaagcatgctgccccatctggcagacctggtttcctatagcatccagaaggtgattggcttcgccaaaatgatcccaggttttcgtgatttgacctccgaagaccagatcgtcctgctaaagtctagcgccatcgaggtgattatgctgcgtagcaatgaatcattcacaatggatgatatgtcttggacttgcggcaatcaggattacaaataccgcgtgtcagatgtgacaaaagctggacattctctggaacttattgagcctctgatcaaattccaggtcggcctgaagaaactaaatcttcatgaagaagagcacgtgctgttgatggccatttgcatcgtttcgcccgacagacccggtgtgcaggacgctgccctgatcgaagccatccaggatcgcctgtcaaacacattacagacctacattcgatgtcgacatcccccaccaggaagtcacctgctgtacgccaagatgattcagaagctggctgacctaagatccctgaacgaggaacatagcaagcaatacagatgtttgtcctttcagcctgagtgttcaatgaaactcacaccgttagtactagaggtatttggtaacgagatttcatag

SEQ ID NO: 8186 - DNA, 753 bp, Artificial Sequence
  derived and/or modified sequence
atggaagcaatggcagcttctacctctctacccgatccaggcgattttgatagaaatgtcccaaggatttgcggggtatgtggagatagggctaccgggttccatttcaacgcaatgacttgcgagggatgcaagggtttcttccggagaagcatgaaaagaaaagcacttttcacttgcccatttaatggagattgccgaattacgaaggacaaccggaggcattgtcaggcttgccggctcaaaaggtgtgtcgatattggcatgatgaaggagtttattctgaccgacgaggaagtccagagaaaacgcgagatgatccttaaaaggaaggaggaagaggcacttaaagattccctcagacccaagctttcagaggaacaacagagaatcattgccattctgttagatgcccaccataagacttatgatcctacctactcagacttttgtcagtttaggcctcctgtgcgggtgaatgatgggggtgggagccacccttcaagacctaattctaggcatacaccatcattttccggggatagctcctcatcctgttcggaccactgtatcacttcaagtgacatgatggacagctcctcattcagtaatctagacctcagcgaagaagacagcgacgacccctccgtcacactcgaactgtcacaactctcaatgctgccccatctggcggaccttgtgtcctatagcattcagaaggtaatcggtttcgccaagatgataccaggatag

SEQ ID NO: 8187 - DNA, 306 bp, Artificial Sequence
  derived and/or modified sequence
atggaggcaatggccgctagtacatcactgccagatccaggtgactttgacagaaacgtgcccagaatatgtggcgtgtgcggagatcgcgctacaggcttccacttcaatgctatgacttgcgaagggtgcaaaggcttcttccggagaagcatgaagaggaaagccctgtttacttgcccctttaacggagactgtcggatcactaaagataatcggcgtcactgtcaggcttgtcgactgaaaaggtgcgtcgatattggcatgatgaaagagtttatactgaccgacgaagaagtacaatag

SEQ ID NO: 8188 - DNA, 1284 bp, Artificial Sequence
  derived and/or modified sequence
atggaggccatggccgcttcaacctctctgccagacccaggagacttcgaccgaaacgttccccgtatctgcggagtatgtggagacagagccaccggcttccattttaacgccatgacttgtgagggttgcaagggcttttttcgcagaagcatgaagcgtaaagcacttttcacatgtccatttaatggcgactgtcgtatcactaaagacaacaggaggcattgccaagcttgccggctgaagcggtgcgtggatatcggcatgatgaaggagttcatactcaccgacgaggaggtgcagaggaagagggagatgattctgaagcgcaaggaggaagaggcattaaaagactcacttcgccctaagctcagcgaggaacagcaaagaataatcgctatcctcttagacgctcaccataagacctacgacccaacatactctgacttttgccagtttaggccgccagtgcgggtgaatgacggagggggatcgcatccttctcggccaaactctcgccataccccctccttcagcggcgactcgtcatcctcatgctctgaccactgtatcacctcatccgatatgatggattcctcttcattcagtaatttagacctcagtgaggaggattccgatgatccaagcgtcacacttgaattgagccagctttccatgctgcctcatttggccgatttggtgagctacagtatccaaaaagtgattggcttcgcgaagatgatcccagggtttagggatttgacttcagaggatcagatcgtgctcctaaagtcttccgctattgaggttattatgctacgatctaatgagtcattcacaatggacgacatgagctggacctgcggcaatcaggactacaagtatagggtttcagatgttaccaaggccggacactctctcgaactcatcgagcctctcataaagtttcaagtgggcttgaagaagctgaacctacatgaggaagaacacgtgctcctcatggcaatttgtatcgtgtcccccgacagacccggagtccaggatgcagctctgattgaggccatccaggacaggttgagcaatacactgcagacgtacattaggtgtaggcatcctcctcccggaagtcacctgctgtacgccaaaatgattcagaagcttgcggatctccgaagcctgaacgaggagcactctaaacagtatcgctgtttatcatttcaaccagagtgcagtatgaagttaacccccttggtgctggaggtgttcggcaacgagatctcatag

SEQ ID NO: 8189 - DNA, 321 bp, Artificial Sequence
  derived and/or modified sequence
atggaggcgatggcagcctcaactagtctgcccgaccctggcgattttgatcggaacgttccacggatttgtggtgtttgcggcgatagagcgaccggatttcactttaacgccatgacctgtgaaggatgcaaaggattcttccggaggtctatgaagaggaaggctctattcacttgtccttttaacggtgactgtcggatcaccaaagataaccgtaggcattgccaggcgtgtcgtctgaaacgatgcgttgatatcggtatgatgaaagaattcattctcactgatgaagaggtccaaaggaagcgtgaaatgtag

SEQ ID NO: 8190 - DNA, 1782 bp, Artificial Sequence
  derived and/or modified sequence
aaaaggcggcagcggagccgtgtgcgccgggagcgcggaacagcttgtccacccgccggccggaccagggatggaggcaatggcggccagcacttccctgcctgaccctggagactttgaccggaacgtgccccggatctgtggggtgtgtggagaccgagccactggctttcacttcaatgctatgacctgtgaaggctgcaaaggcttcttcaggtgagccctcctcccaggctctccccagtggaaagggagggagaagaagcaaggtgtttccatgaagggagcccttgcatttttcacatctccttccttacaatgtccatggaacatgcggcgctcacagccacaggagcaggagggtcttggcgaagcatgaagcggaaggcactattcacctgccccttcaacggggactgccgcatcaccaaggacaaccgacgccactgccaggcctgccggctcaaacgctgtgtggacatcggcatgatgaaggagttcattctgacagatgaggaagtgcagaggaagcgggagatgatcctgaagcggaaggaggaggaggccttgaaggacagtctgcggcccaagctgtctgaggagcagcagcgcatcattgccatactgctggacgcccaccataagacctacgaccccacctactccgacttctgccagttccggcctccagttcgtgtgaatgatggtggagggagccatccttccaggcccaactccagacacactcccagcttctctggggactcctcctcctcctgctcagatcactgtatcacctcttcagacatgatggactcgtccagcttctccaatctggatctgagtgaagaagattcagatgacccttctgtgaccctagagctgtcccagctctccatgctgccccacctggctgacctggtcagttacagcatccaaaaggtcattggctttgctaagatgataccaggattcagagacctcacctctgaggaccagatcgtactgctgaagtcaagtgccattgaggtcatcatgttgcgctccaatgagtccttcaccatggacgacatgtcctggacctgtggcaaccaagactacaagtaccgcgtcagtgacgtgaccaaagccggacacagcctggagctgattgagcccctcatcaagttccaggtgggactgaagaagctgaacttgcatgaggaggagcatgtcctgctcatggccatctgcatcgtctccccagatcgtcctggggtgcaggacgccgcgctgattgaggccatccaggaccgcctgtccaacacactgcagacgtacatccgctgccgccacccgcccccgggcagccacctgctctatgccaagatgatccagaagctagccgacctgcgcagcctcaatgaggagcactccaagcagtaccgctgcctctccttccagcctgagtgcagcatgaagctaacgccccttgtgctcgaagtgtttggcaatgagatctcctgactaggacagcctgtggcggtgcctgggtggggctgctcctccagggccacgtgccaggcccggggctggcggctactcagcagccctcctcaccccgtctggggttcagcccctcctctgccacctcccctatccacccagcccattctctctcctgtccaacctaacccctttcctgcgggcttttccccggtcccttgagacctcagccatgaggagttgctgtttgtttgacaaagaaacccaagtgggggcagagggcagaggctggaggca

SEQ ID NO: 8191 - DNA, 1284 bp, Artificial Sequence
  derived and/or modified sequence
atggaggccatggccgccagcaccagcctgcccgaccccggcgacttcgacagaaacgtgcccagaatctgcggcgtgtgcggcgacagagccaccggcttccacttcaacgccatgacctgcgagggctgcaagggcttcttcagaagaagcatgaagagaaaggccctgttcacctgccccttcaacggcgactgcagaatcaccaaggacaacagaagacactgccaggcctgcagactgaagagatgcgtggacatcggcatgatgaaggagttcatcctgaccgacgaggaggtgcagagaaagagagagatgatcctgaagagaaaggaggaggaggccctgaaggacagcctgagacccaagctgagcgaggagcagcagagaatcatcgccatcctgctggacgcccaccacaagacctacgaccccacctacagcgacttctgccagttcagaccccccgtgagagtgaacgacggcggcggcagccaccccagcagacccaacagcagacacacccccagcttcagcggcgacagcagcagcagctgcagcgaccactgcatcaccagcagcgacatgatggacagcagcagcttcagcaacctggacctgagcgaggaggacagcgacgaccccagcgtgaccctggagctgagccagctgagcatgctgccccacctggccgacctggtgagctacagcatccagaaggtgatcggcttcgccaagatgatccccggcttcagagacctgaccagcgaggaccagatcgtgctgctgaagagcagcgccatcgaggtgatcatgctgagaagcaacgagagcttcaccatggacgacatgagctggacctgcggcaaccaggactacaagtacagagtgagcgacgtgaccaaggccggccacagcctggagctgatcgagcccctgatcaagttccaggtgggcctgaagaagctgaacctgcacgaggaggagcacgtgctgctgatggccatctgcatcgtgagccccgacagacccggcgtgcaggacgccgccctgatcgaggccatccaggacagactgagcaacaccctgcagacctacatcagatgcagacaccccccccccggcagccacctgctgtacgccaagatgatccagaagctggccgacctgagaagcctgaacgaggagcacagcaagcagtacagatgcctgagcttccagcccgagtgcagcatgaagctgacccccctggtgctggaggtgttcggcaacgagatcagctag

SEQ ID NO: 8192 - protein, 502 aa, Artificial Sequence
  derived and/or modified sequence
MSGGPMGGRPGGRGAPAVQQNIPSTLLQDHENQRLFEMLGRKCLTLATAVVQLYLALPPGAEHWTKEHCGAVCFVKDNPQKSYFIRLYGLQAGRLLWEQELYSQLVYSTPTPFFHTFAGDDCQAGLNFADEDEAQAFRALVQEKIQKRNQRQSGDRRQLPPPPTPANEERRGGLPPLPLHPGGDQGGPPVGPLSLGLATVDIQNPDITSSRYRGLPAPGPSPADKKRSGKKKISKADIGAPSGFKHVSHVGWDPQNGFDVNNLDPDLRSLFSRAGISEAQLTDAETSKLIYDFIEDQGGLEAVRQEMRRQEPLPPPPPPSRGGNQLPRPPIVGGNKGRSGPLPPVPLGIAPPPPTPRGPPPPGRGGPPPPPPPATGRSGPLPPPPPGAGGPPMPPPPPPPPPPPSSGNGPAPPPLPPALVPAGGLAPGGGRGALLDQIRQGIQLNKTPGAPESSALQPPPQSSEGLVGALMHVMQKRSRAIHSSDEGEDQAGDEDEDDEWDD

SEQ ID NO: 8193 - DNA, 1509 bp, Artificial Sequence
  derived and/or modified sequence
atgagcggcggccccatgggcggcagacccggcggcagaggcgcccccgccgtgcagcagaacatccccagcaccctgctgcaggaccacgagaaccagagactgttcgagatgctgggcagaaagtgcctgaccctggccaccgccgtggtgcagctgtacctggccctgccccccggcgccgagcactggaccaaggagcactgcggcgccgtgtgcttcgtgaaggacaacccccagaagagctacttcatcagactgtacggcctgcaggccggcagactgctgtgggagcaggagctgtacagccagctggtgtacagcacccccacccccttcttccacaccttcgccggcgacgactgccaggccggcctgaacttcgccgacgaggacgaggcccaggccttcagagccctggtgcaggagaagatccagaagagaaaccagagacagagcggcgacagaagacagctgccccccccccccacccccgccaacgaggagagaagaggcggcctgccccccctgcccctgcaccccggcggcgaccagggcggcccccccgtgggccccctgagcctgggcctggccaccgtggacatccagaaccccgacatcaccagcagcagatacagaggcctgcccgcccccggccccagccccgccgacaagaagagaagcggcaagaagaagatcagcaaggccgacatcggcgcccccagcggcttcaagcacgtgagccacgtgggctgggacccccagaacggcttcgacgtgaacaacctggaccccgacctgagaagcctgttcagcagagccggcatcagcgaggcccagctgaccgacgccgagaccagcaagctgatctacgacttcatcgaggaccagggcggcctggaggccgtgagacaggagatgagaagacaggagcccctgccccccccccccccccccagcagaggcggcaaccagctgcccagaccccccatcgtgggcggcaacaagggcagaagcggccccctgccccccgtgcccctgggcatcgccccccccccccccacccccagaggcccccccccccccggcagaggcggccccccccccccccccccccccgccaccggcagaagcggccccctgcccccccccccccccggcgccggcggcccccccatgcccccccccccccccccccccccccccccccccagcagcggcaacggccccgcccccccccccctgccccccgccctggtgcccgccggcggcctggcccccggcggcggcagaggcgccctgctggaccagatcagacagggcatccagctgaacaagacccccggcgcccccgagagcagcgccctgcagccccccccccagagcagcgagggcctggtgggcgccctgatgcacgtgatgcagaagagaagcagagccatccacagcagcgacgagggcgaggaccaggccggcgacgaggacgaggacgacgagtgggacgactag

SEQ ID NO: 8194 - DNA, 1509 bp, Artificial Sequence
  derived and/or modified sequence
atgtctggaggccctatgggtggaaggcctgggggtcggggggcaccagctgtgcagcagaacattccctcaactctgctacaagatcacgagaaccagcggctatttgaaatgctcgggcggaagtgcctgactttggcaactgcagtggtgcagctgtatttagcgctcccgcctggcgcagagcactggaccaaggagcactgtggggccgtatgcttcgtcaaagacaacccccaaaagagttatttcatccgcctgtacgggcttcaggccggaagactgttgtgggagcaggagctgtacagtcaattggtgtactctacgcccaccccatttttccacacgttcgctggcgatgactgtcaggctggcctgaatttcgccgacgaggacgaggctcaggcttttagagcgctggtgcaggaaaaaatccagaagagaaaccaaaggcagtccggtgaccggagacagctgccacctcccccaacacctgcgaatgaggagcggagaggggggttgcctcccctgccactgcatcccggcggagaccagggcggccctccggtgggtccgctctctctcgggctcgccaccgtcgatatccagaacccggacattacctcaagcaggtaccgaggactcccggctcccggcccatcccccgcggataaaaagcgtagtgggaagaaaaagattagtaaggccgacataggagcacctagcgggttcaaacacgtgtctcatgtcggttgggatccccaaaacggctttgacgtgaacaatctcgatcctgatctcagaagccttttctccagggccgggatctccgaagcgcagctcaccgatgccgaaaccagtaaactgatttacgattttattgaggatcagggcggattagaggcggtcaggcaggagatgcggcggcaagaaccccttccacccccccctccgccaagccggggagggaaccagctcccgcgccccccaatcgtcggcgggaataagggacgctccggccccttaccgcccgtccctcttggcattgcaccacccccaccaacacctcgtggtccccctccacctgggaggggggggccaccacccccccccccacccgccaccggcagatccggtcctctgcctccgccacctcccggcgcgggaggtccaccaatgcctccaccaccacccccaccccctccccctccttccagtggtaatggaccggcgcccccacccctccctccagcactggtcccagcaggaggcttagcccctggaggaggccgcggagccctactagatcagattaggcaggggatccagctaaacaagactcccggcgccccagaaagttcagccctgcagcctccgccacaatcctcagaggggttggtgggggccctcatgcacgtaatgcagaagagatcgcgcgcaattcacagttctgatgaaggcgaggatcaagctggcgacgaagatgaggatgacgaatgggacgactag

SEQ ID NO: 8195 - DNA, 1509 bp, Artificial Sequence
  derived and/or modified sequence
atgtctgggggccccatgggcggccggcctgggggccgcggggccccagctgtgcagcagaacatccccagcaccctgctgcaggaccacgagaaccagaggctgtttgagatgctgggcaggaagtgcctgaccctggccacagctgtggtgcagctgtacctggccctgcccccaggagctgagcactggaccaaggagcactgtggggctgtgtgctttgtgaaggacaacccccagaagagctacttcatccggctgtatggcctgcaggccggccgcctgctgtgggagcaggagctgtacagccagctggtgtacagcacccccacccccttcttccacacctttgctggagatgactgccaggccggcctgaactttgctgatgaagatgaggcccaggccttccgggccctggtgcaggagaagatccagaagaggaaccagaggcagagcggggaccggcggcagctgcccccaccacccaccccagccaatgaggagcggcggggcggcctgccccccctgcccctgcaccctggaggagaccagggcggcccccctgtgggccccctgagcctgggcctggccaccgtggacatccagaacccagacatcaccagcagccgctaccggggcctgcctgcccctggccccagccctgctgacaagaagaggtctgggaagaagaagatcagcaaggctgacatcggggcccccagcggcttcaagcacgtgagccacgtgggctgggacccccagaatggatttgatgtgaacaacctggaccctgacctgcggagcctcttcagccgggccggcatcagcgaggcccagctgacagatgctgagaccagcaagctgatctatgacttcatcgaggaccagggcggcctggaggccgtgcggcaggagatgaggcggcaggagcccctgcccccacctcctccacccagccggggcggcaaccagctgcccaggcctcccatcgtgggcggcaacaagggccgcagcggccccctgccccctgtgcccctgggcatcgcccctcctccacccaccccccggggccccccacctcctggccggggcggccccccacctcctcctcctccagccaccggccgcagcggccccctgcccccacctcctcctggggccggcggcccccccatgcctcctcctcctcctcctcctcctcctccacccagcagtggaaatggacctgcccccccacccctgcccccagccctggtgcctgctgggggcctggcccctgggggcggccgcggggccctgctggaccagatccggcagggcatccagctgaacaagacccctggggcccctgagagcagcgccctgcagcccccaccccagagcagcgagggcctggtgggcgccctgatgcacgtgatgcagaagaggagccgggccatccacagcagtgatgaaggagaggaccaggccggagatgaagatgaagatgatgagtgggatgactag

SEQ ID NO: 8196 - DNA, 1509 bp, Artificial Sequence
  derived and/or modified sequence
atgagcggcggccccatgggcggccggcccggcggccggggcgcccccgctgtgcagcagaacattcctagtactctcctgcaggaccacgagaaccaacgcttgtttgagatgctgggccggaaatgccttacattagccacagctgtggttcagctctatctggcgctgcctcccggagccgagcattggaccaaagagcactgtggcgcagtgtgctttgtgaaagacaacccacagaaaagctactttatcagactgtacggcctgcaggccgggaggctgctttgggaacaggagttatactctcagctggtgtactccacccccaccccattcttccatacatttgccggagatgactgtcaagccggtctgaacttcgctgatgaggacgaagcccaggctttcagagccttagtgcaagagaagatccagaaaagaaatcagaggcagtcgggtgaccgccgacaactgcctcctccaccaacaccagccaatgaggagcgaagaggcggcctccctccgctgccattgcatcctggtggcgatcagggcggccctcccgtaggccctctgtccttgggactggcaacggtggatatacagaatccagatattacaagttctcggtatcggggactgccggcacctggcccttccccagccgacaaaaaaagatcagggaagaaaaagatctctaaagctgatatcggagccccttctggcttcaaacacgtcagccacgtgggatgggatcctcagaatggctttgatgtgaataaccttgacccagacctgagatcattattttcaagagctggaatatctgaggcccagctgactgacgccgaaacctccaagctgatctacgactttatcgaagaccaggggggattagaagcggtgaggcaggagatgcggcgccaagaacctttgcccccgcctccacccccctcccgaggggggaaccagcttcctaggccaccaatcgtgggcgggaacaaggggcgaagcggaccattgccgcccgtgccactcggcatcgctcctccccccccaacccctcggggccctcctccgccagggcggggtggtccccctccaccccctccccccgccactggccggtctggtccactgccgccaccaccaccgggggccgggggccccccgatgccacccccccctcctccacctccccctcccccgagttccggcaatggtccagctccccccccactcccgcccgctctagtccctgcggggggcttggcacccggaggcggacgaggagcgctgctggatcaaatccggcaaggaatccaactgaacaagacacctggagctccagagtcatctgcactgcaaccaccaccacagtcgagtgagggtctagtgggcgccctgatgcatgtcatgcaaaaaaggagccgcgcgattcattcctctgacgaaggggaggaccaggctggtgacgaggacgaagacgatgagtgggacgactag

SEQ ID NO: 8197 - DNA, 1509 bp, Artificial Sequence
  derived and/or modified sequence
atgtcgggaggccctatgggtgggcgaccaggaggtagaggcgctccagcagtgcagcagaacatacccagcacactcttacaggaccatgagaatcagaggctctttgagatgctaggcaggaagtgcttaaccctcgccaccgccgtggttcagctttatctggcacttcctcctggcgcagaacactggactaaggagcattgcggggcagtgtgcttcgtaaaggacaatccacagaaatcttactttattcgcctgtacgggctgcaggccggacgcctgctctgggagcaggagctgtattcccaactagtctattcgactcccacccctttcttccacacttttgcaggggacgactgtcaggctggtctgaactttgccgatgaagatgaagctcaagcatttcgcgcactggtgcaagaaaagatccagaaacgaaatcagcgtcaatcaggggaccggagacagcttccgcctccacctactccggctaatgaggagcgcagaggaggcttaccgcctctgcctctgcatccagggggtgatcaaggaggaccaccggttggacctttgagcctgggacttgcaactgtagacatccagaaccccgacataacttcttcacgctatcggggactgcctgctccagggccaagtccagctgataagaaacgatccggaaagaagaaaatatctaaagcggatattggggcaccctcaggctttaagcatgtctcccacgttggatgggaccctcagaacggatttgatgtgaataatctggaccctgatctgagatcactttttagccgggctgggatcagtgaggcccaactcactgacgcagagacaagcaagctgatttacgactttatcgaggatcagggcggtctcgaggccgtgcgacaagagatgagaaggcaagaaccactaccacctcctccacctccttcgcgcggtggcaatcagcttcccagacccccaatcgtcggcggaaacaaagggagatcagggcctcttcccccagtgccgctgggaatagctcctcctcctccgacaccacgaggaccccctccaccgggaagaggcggtcctccacctccccctccacccgctaccggcagaagtggccctcttccccctccccctcctggtgctggtggccctcccatgcccccaccaccaccccctccaccaccgcctccctctagcggaaatggcccagcacctccgccactccccccagctctcgtgccagcgggaggattggctcctggagggggtcgtggcgcactgctggaccagattagacagggaattcagctgaataaaacccccggagcacctgagtcttcagctctgcagcctccaccccagtctagcgagggcctagttggggctctcatgcatgtgatgcagaagagaagccgtgcaattcattccagcgatgagggagaggaccaggcaggcgacgaagatgaggacgacgaatgggatgactag

SEQ ID NO: 8198 - DNA, 1849 bp, Artificial Sequence
  derived and/or modified sequence
gctgctcattgcggaagttcctcttcttaccctgcacccagagcctcgccagagaagacaagggcagaaagcaccatgagtgggggcccaatgggaggaaggcccgggggccgaggagcaccagcggttcagcagaacataccctccaccctcctccaggaccacgagaaccagcgactctttgagatgcttggacgaaaatgcttgacgctggccactgcagttgttcagctgtacctggcgctgccccctggagctgagcactggaccaaggagcattgtggggctgtgtgcttcgtgaaggataacccccagaagtcctacttcatccgcctttacggccttcaggctggtcggctgctctgggaacaggagctgtactcacagcttgtctactccacccccacccccttcttccacaccttcgctggagatgactgccaagcggggctgaactttgcagacgaggacgaggcccaggccttccgggccctcgtgcaggagaagatacaaaaaaggaatcagaggcaaagtggagacagacgccagctacccccaccaccaacaccagccaatgaagagagaagaggagggctcccacccctgcccctgcatccaggtggagaccaaggaggccctccagtgggtccgctctccctggggctggcgacagtggacatccagaaccctgacatcacgagttcacgataccgtgggctcccagcacctggacctagcccagctgataagaaacgctcagggaagaagaagatcagcaaagctgatattggtgcacccagtggattcaagcatgtcagccacgtggggtgggacccccagaatggatttgacgtgaacaacctcgacccagatctgcggagtctgttctccagggcaggaatcagcgaggcccagctcaccgacgccgagacctctaaacttatctacgacttcattgaggaccagggtgggctggaggctgtgcggcaggagatgaggcgccaggagccacttccgccgcccccaccgccatctcgaggagggaaccagctcccccggccccctattgtggggggtaacaagggtcgttctggtccactgccccctgtacctttggggattgccccacccccaccaacaccccggggacccccacccccaggccgagggggccctccaccaccaccccctccagctactggacgttctggaccactgccccctccaccccctggagctggtgggccacccatgccaccaccaccgccaccaccgccaccgccgcccagctccgggaatggaccagcccctcccccactccctcctgctctggtgcctgccgggggcctggcccctggtgggggtcggggagcgcttttggatcaaatccggcagggaattcagctgaacaagacccctggggccccagagagctcagcgctgcagccaccacctcagagctcagagggactggtgggggccctgatgcacgtgatgcagaagagaagcagagccatccactcctccgacgaaggggaggaccaggctggcgatgaagatgaagatgatgaatgggatgactgagtggctgagttacttgctgccctgtgctcctccccgcaggacatggctccccctccacctgctctgtgcccaccctccactctcctcttccaggcccccaaccccccatttcttccccaccaacccctccaatgctgttatccctgcctggtcctcacactcacccaacaatcccaaggccctttttatacaaaaattctcagttctcttcactcaaggatttttaaagaaaaataaaagaattgtctttctgtctctctataaa

SEQ ID NO: 8199 - protein, 497 aa, Artificial Sequence
  derived and/or modified sequence
LQDPASTCVPEPASQHTLRSGPGCLQQPEQQGVRDPGGIWAKLGAAEASAERLQGRRSRGASGSEPQQMGSDVRDLNALLPAVPSLGGGGGCALPVSGAAQWAPVLDFAPPGASAYGSLGGPAPPPAPPPPPPPPPHSFIKQEPSWGGAEPHEEQCLSAFTVHFSGQFTGTAGACRYGPFGPPPPSQASSGQARMFPNAPYLPSCLESQPAIRNQGYSTVTFDGTPSYGHTPSHHAAQFPNHSFKHEDPMGQQGSLGEQQYSVPPPVYGCHTPTDSCTGSQALLLRTPYSSDNLYQMTSQLECMTWNQMNLGATLKGHSTGYESDNHTTPILCGAQYRIHTHGVFRGIQDVRRVPGVAPTLVRSASETSEKRPFMCAYPGCNKRYFKLSHLQMHSRKHTGEKPYQCDFKDCERRFSRSDQLKRHQRRHTGVKPFQCKTCQRKFSRSDHLKTHTRTHTGEKPFSCRWPSCQKKFARSDELVRHHNMHQRNMTKLQLAL

SEQ ID NO: 8200 - DNA, 954 bp, Artificial Sequence
  derived and/or modified sequence
ctgcaggaccccgccagcacctgcgtgcccgagcccgccagccagcacaccctgagaagcggccccggctgcctgcagcagcccgagcagcagggcgtgagagaccccggcggcatctgggccaagctgggcgccgccgaggccagcgccgagagactgcagggcagaagaagcagaggcgccagcggcagcgagccccagcagatgggcagcgacgtgagagacctgaacgccctgctgcccgccgtgcccagcctgggcggcggcggcggctgcgccctgcccgtgagcggcgccgcccagtgggcccccgtgctggacttcgccccccccggcgccagcgcctacggcagcctgggcggccccgcccccccccccgccccccccccccccccccccccccccccccacagcttcatcaagcaggagcccagctggggcggcgccgagccccacgaggagcagtgcctgagcgccttcaccgtgcacttcagcggccagttcaccggcaccgccggcgcctgcagatacggccccttcggcccccccccccccagccaggccagcagcggccaggccagaatgttccccaacgccccctacctgcccagctgcctggagagccagcccgccatcagaaaccagggctacagcaccgtgaccttcgacggcacccccagctacggccacacccccagccaccacgccgcccagttccccaaccacagcttcaagcacgaggaccccatgggccagcagggcagcctgggcgagcagcagtacagcgtgcccccccccgtgtacggctgccacacccccaccgacagctgcaccggcagccaggccctgctgctgagaaccccctacagcagcgacaacctgtaccagatgaccagccagctggagtgcatgacctggaaccagatgaacctgggcgccaccctgaagggctag

SEQ ID NO: 8201 - DNA, 1494 bp, Artificial Sequence
  derived and/or modified sequence
ctgcaggaccccgccagcacctgcgtgcccgagcccgccagccagcacaccctgagaagcggccccggctgcctgcagcagcccgagcagcagggcgtgagagaccccggcggcatctgggccaagctgggcgccgccgaggccagcgccgagagactgcagggcagaagaagcagaggcgccagcggcagcgagccccagcagatgggcagcgacgtgagagacctgaacgccctgctgcccgccgtgcccagcctgggcggcggcggcggctgcgccctgcccgtgagcggcgccgcccagtgggcccccgtgctggacttcgccccccccggcgccagcgcctacggcagcctgggcggccccgcccccccccccgccccccccccccccccccccccccccccccacagcttcatcaagcaggagcccagctggggcggcgccgagccccacgaggagcagtgcctgagcgccttcaccgtgcacttcagcggccagttcaccggcaccgccggcgcctgcagatacggccccttcggcccccccccccccagccaggccagcagcggccaggccagaatgttccccaacgccccctacctgcccagctgcctggagagccagcccgccatcagaaaccagggctacagcaccgtgaccttcgacggcacccccagctacggccacacccccagccaccacgccgcccagttccccaaccacagcttcaagcacgaggaccccatgggccagcagggcagcctgggcgagcagcagtacagcgtgcccccccccgtgtacggctgccacacccccaccgacagctgcaccggcagccaggccctgctgctgagaaccccctacagcagcgacaacctgtaccagatgaccagccagctggagtgcatgacctggaaccagatgaacctgggcgccaccctgaagggccacagcaccggctacgagagcgacaaccacaccacccccatcctgtgcggcgcccagtacagaatccacacccacggcgtgttcagaggcatccaggacgtgagaagagtgcccggcgtggcccccaccctggtgagaagcgccagcgagaccagcgagaagagacccttcatgtgcgcctaccccggctgcaacaagagatacttcaagctgagccacctgcagatgcacagcagaaagcacaccggcgagaagccctaccagtgcgacttcaaggactgcgagagaagattcagcagaagcgaccagctgaagagacaccagagaagacacaccggcgtgaagcccttccagtgcaagacctgccagagaaagttcagcagaagcgaccacctgaagacccacaccagaacccacaccggcgagaagcccttcagctgcagatggcccagctgccagaagaagttcgccagaagcgacgagctggtgagacaccacaacatgcaccagagaaacatgaccaagctgcagctggccctgtag

SEQ ID NO: 8202 - DNA, 954 bp, Artificial Sequence
  derived and/or modified sequence
ctacaggaccctgcgagcacatgcgtaccagagccagcatctcaacacacacttagatccggcccgggatgccttcagcagcccgaacagcagggtgtccgggatccaggcggcatatgggctaagctgggggccgcggaggcctcggctgaacgcctccagggcagacgctctcggggcgcatccggtagtgaacctcagcagatggggagcgatgtgagagatcttaatgcattactgcctgcggtcccgtctctgggtgggggggggggctgtgcacttcccgtgtctggtgcagcacagtgggctcccgtgttagacttcgcgccacccggggccagtgcatacggatcccttggggggccagctccgccacccgccccacctcccccgcctcctccacctcctcacagcttcatcaagcaggaaccatcctggggcggtgctgagccgcatgaggagcagtgcctctcagcatttactgttcacttctctgggcagttcaccggcaccgccggggcctgcaggtacggcccctttggccctccccccccttctcaggcctcctccggccaggcaagaatgttcccaaacgcaccctacctgccttcctgcctggagagccagcccgccattaggaatcaggggtactcgacagtgacctttgacggaaccccttcatatggccataccccatcccatcacgcagcccaatttcccaatcatagtttcaagcatgaggatcccatgggccagcagggttcactaggagagcagcagtattcagtcccccccccagtatatggatgtcacacgcccacggattcatgtaccggaagccaggctctgctgctacgcaccccatacagttccgacaacctgtaccagatgacaagtcagctcgaatgcatgacatggaatcagatgaacttgggagccaccttgaagggatag

SEQ ID NO: 8203 - DNA, 1494 bp, Artificial Sequence
  derived and/or modified sequence
cttcaagatccagcatccacgtgtgttcctgaacccgcctcccaacacacactaaggagcggacccggctgtctccagcagccagaacaacaaggcgtacgagacccaggaggcatctgggcaaagctaggggccgccgaggcatcagccgaacgcctgcagggaagacgatcccgcggggcctctggtagcgagccacaacagatgggttcagatgtccgggatctgaacgctctgttgcctgcagtgccctcactaggtgggggtggtggttgcgccctccctgtttctggggcggcccagtgggcccctgtgctggattttgctccccccggcgcctctgcttacggctccttgggggggcccgcacctcctccagcaccaccccccccgccacctccacccccacactccttcataaagcaagaaccaagttgggggggagctgagcctcacgaagaacaatgtctctctgcttttaccgtgcatttctccggccaattcaccggcaccgctggtgcttgccgatatggcccctttggacctccgccgccgagccaggcttcttccgggcaagctagaatgtttccaaacgctccttatctcccatcatgccttgagagccagcccgccataaggaaccaaggatattctactgtcacatttgatggaacaccatcatacggtcacactccctctcaccacgccgcacaattccctaatcattccttcaaacatgaggatcctatgggccagcagggtagccttggagaacaacaatacagtgttcctccccccgtctatgggtgccacacacctaccgatagctgtacaggatcccaggctttgctgttgcggaccccctacagctcagacaacttgtaccaaatgacatctcaactggaatgcatgacctggaaccagatgaacttgggtgctaccttgaagggacactctaccggctacgaaagcgataatcatactacccccattctgtgtggcgctcaatataggattcatactcacggggtttttagaggcatccaagacgtgaggagagttcctggtgtggccccgacgctggtgcgttctgcgagcgaaaccagcgagaagcggccatttatgtgcgcctatcccggatgcaacaagcgatactttaagctgtctcaccttcaaatgcacagccgcaaacatactggagagaagccctaccagtgcgacttcaaggattgcgagagaaggtttagtagaagcgaccaactaaaacgacaccagagaagacacaccggcgttaagcccttccagtgtaagacttgccagcgaaaattcagtagatctgatcatctcaagacgcacactcggactcacaccggggaaaaacccttctcctgcagatggcccagctgccagaaaaaatttgccagaagcgatgagttagtgcggcaccacaacatgcatcaaaggaacatgacaaaactgcagttggctttatag

SEQ ID NO: 8204 - DNA, 954 bp, Artificial Sequence
  derived and/or modified sequence
ctgcaggaccctgccagcacctgtgtgcctgagcccgccagccagcacaccctgcggagcggccctggctgcctgcagcagcctgagcagcagggcgtgcgggaccccggcggcatctgggccaagctgggcgctgctgaggccagcgctgagcggctgcagggccgccgcagcagaggagccagcggcagcgagccccagcagatgggcagtgatgtgcgggacctgaatgccctgctgcctgctgtgcccagcctgggcggcggcggcggctgtgccctgcctgtgtctggagctgcccagtgggcccctgtgctggactttgcccctcctggggccagcgcctacggcagcctgggcggccctgcccctcctccagcccctcctcctcctcctcctcctccaccccacagcttcatcaagcaggagcccagctggggcggcgctgagccccatgaggagcagtgcctgagcgccttcaccgtgcacttcagcggccagttcaccggcacagctggggcctgccgctatggccccttcggccccccaccacccagccaggccagcagcggccaggccaggatgttccccaatgccccctacctgcccagctgcctggagagccagcctgccatccggaaccagggctacagcacagtgacctttgatggcacccccagctatggccacacccccagccaccacgccgcccagttccccaaccacagcttcaagcatgaggaccccatgggccagcagggcagcctgggggagcagcagtacagcgtgcccccacctgtgtatggctgccacacccccacagacagctgcaccggcagccaggccctgctgctgcggaccccctacagcagtgacaacctgtaccagatgaccagccagctggagtgcatgacctggaaccagatgaacctgggcgccaccctgaagggctag

SEQ ID NO: 8205 - DNA, 1494 bp, Artificial Sequence
  derived and/or modified sequence
ctgcaggaccctgccagcacctgtgtgcctgagcccgccagccagcacaccctgcggagcggccctggctgcctgcagcagcctgagcagcagggcgtgcgggaccccggcggcatctgggccaagctgggcgctgctgaggccagcgctgagcggctgcagggccgccgcagcagaggagccagcggcagcgagccccagcagatgggcagtgatgtgcgggacctgaatgccctgctgcctgctgtgcccagcctgggcggcggcggcggctgtgccctgcctgtgtctggagctgcccagtgggcccctgtgctggactttgcccctcctggggccagcgcctacggcagcctgggcggccctgcccctcctccagcccctcctcctcctcctcctcctccaccccacagcttcatcaagcaggagcccagctggggcggcgctgagccccatgaggagcagtgcctgagcgccttcaccgtgcacttcagcggccagttcaccggcacagctggggcctgccgctatggccccttcggccccccaccacccagccaggccagcagcggccaggccaggatgttccccaatgccccctacctgcccagctgcctggagagccagcctgccatccggaaccagggctacagcacagtgacctttgatggcacccccagctatggccacacccccagccaccacgccgcccagttccccaaccacagcttcaagcatgaggaccccatgggccagcagggcagcctgggggagcagcagtacagcgtgcccccacctgtgtatggctgccacacccccacagacagctgcaccggcagccaggccctgctgctgcggaccccctacagcagtgacaacctgtaccagatgaccagccagctggagtgcatgacctggaaccagatgaacctgggcgccaccctgaagggccacagcacaggctatgaaagtgacaaccacaccacccccatcctgtgtggggcccagtaccgcatccacacccacggcgtcttccggggcatccaggatgtgcggcgggtgcctggggtggcccccaccctggtgcgcagcgccagcgagaccagcgagaagaggcccttcatgtgtgcctacccaggctgcaacaagcgctacttcaagctgagccacctgcagatgcacagcaggaagcacactggagagaagccctaccagtgtgacttcaaggactgtgaaagacgcttcagcagaagtgaccagctgaagaggcaccagaggaggcacactggagtgaagcccttccagtgcaagacctgccagaggaagttcagcagaagtgaccacctgaagacccacaccaggacccacactggagagaagcccttcagctgccgctggcccagctgccagaagaagtttgcccggagtgatgagctggtgcgccaccacaacatgcaccagaggaacatgaccaagctgcagctggccctgtag

SEQ ID NO: 8206 - DNA, 954 bp, Artificial Sequence
  derived and/or modified sequence
ctgcaggaccccgccagcacctgcgtgcccgagcccgccagccagcacacattaaggtcaggtcccggttgcctgcaacagcccgagcagcaaggcgtgagggaccccggcggcatctgggccaaactgggagcagccgaggccagtgcagagagattacagggccgaagatctcgcggagcttctggatccgagccacagcagatggggagtgacgtgcgggatttgaatgcactcctccccgccgtgccctcattgggggggggaggaggctgcgcactgcctgtcagcggagccgcccagtgggccccagtgttagatttcgccccgccaggagcgtcggcatacggttccttgggtggtccagcccctcccccagccccgcccccacccccacctccacctccacactctttcataaagcaagagccctcgtggggtggcgcagaaccccacgaagaacaatgtcttagtgcatttactgtccactttagcgggcagtttaccggtactgctggagcctgtcggtatggaccatttgggccacctccaccaagccaggcatcctccggacaggcccgtatgtttcctaatgcaccttatttgcccagctgcctggagagccagcctgccatcagaaatcaggggtatagcaccgtgacctttgacggcactccaagttatggccatacgccctcccaccatgccgctcagttccccaaccattccttcaagcacgaggacccaatgggccagcagggttctctgggggagcagcagtactccgttcctccacctgtctacgggtgccatacgccgacggactcatgtaccgggtctcaggcattgctgctccggactccttatagctccgacaatctgtaccagatgacaagccagttggaatgcatgacgtggaaccagatgaatcttggggccaccctgaagggctag

SEQ ID NO: 8207 - DNA, 1494 bp, Artificial Sequence
  derived and/or modified sequence
ctgcaggaccccgccagcacctgcgtgcccgagcccgccagccagcatacgctccggagcgggccaggctgtcttcagcaaccggaacagcagggggtgcgcgatccggggggtatctgggctaagctcggggctgctgaggcctccgcagagaggttacagggcaggcgatcccgtggggcgtctggctctgaaccccagcagatggggagcgacgtgcgcgacctgaatgcactcttacccgctgtgccttcccttggaggcggcggtggttgcgcgttacccgtttcgggcgccgctcagtgggcgccagtattagactttgcccctcccggagcctcggcgtatggctccttaggagggcctgccccccctccagccccccccccgccacctccacctcccccacactcctttatcaagcaggaaccctcctggggtggtgcagagccacatgaagagcagtgtctctctgcctttacagtgcatttcagcggccagttcacaggaacagcaggggcttgccgctacgggccctttggaccaccacccccatcccaagcaagttcaggtcaggcccgcatgtttccaaacgccccctacctgccaagttgtctggaatcccagcccgcgatcagaaaccaaggatattctactgtgactttcgatggcaccccatcctacggtcatactccgagccaccacgccgcccagtttcctaaccactcctttaaacacgaagacccaatgggtcagcagggctcgctaggcgagcagcagtactcagttcctcccccggtttacggctgtcatacgccaactgattcctgtaccggttcccaggctctcctgttgcgcaccccttactctagcgataatttgtatcaaatgacatcgcaactcgagtgcatgacctggaaccagatgaacctgggcgctacactgaaaggacattctactggttacgagtcagataaccataccacgccaatcctgtgtggcgcgcagtatagaattcatacccatggcgtgttcagagggatccaagacgtacgccgcgttcctggtgtggccccaactttagtcagatcagctagtgagactagcgagaaacggccctttatgtgcgcctaccctgggtgtaataagcgctacttcaagttgagccacctgcagatgcattcaagaaaacacacaggcgagaagccttaccagtgtgattttaaagattgtgaacgccgctttagcaggagcgatcagctgaaacgccatcagcggagacatacaggggtcaagccatttcagtgtaagacatgccagcggaaattctcacgaagtgatcacctgaagacacacacgaggacccacacaggcgagaagcctttttcgtgtaggtggccgtcctgtcagaaaaagtttgctagatcagacgagcttgtgcgtcaccacaatatgcaccagcggaacatgaccaaattgcagctggccctgtag

SEQ ID NO: 8208 - DNA, 954 bp, Artificial Sequence
  derived and/or modified sequence
ctgcaggatcctgctagtacctgcgtccctgagccggcttctcagcacaccctgagaagcggacctggttgtctccagcagcctgaacaacagggcgttcgggatccagggggaatttgggccaaactcggggcagccgaagcatctgctgagagactgcaaggcagacggagtaggggcgcttccgggtctgagccgcagcagatgggttctgatgtgcgcgacctgaacgccctgttgcccgcagtcccttctctgggaggtgggggaggatgtgccctgccagtgtctggagcagcccagtgggctcccgttttggacttcgctcccccaggcgcatcagcctacgggtcccttggaggacccgctcccccaccggctcccccaccgccaccaccacctccccctcattccttcatcaagcaggagccctcttggggaggggcagagcctcatgaggagcagtgtttgtcagctttcactgtacatttctcagggcagttcacaggtacagctggtgcttgtagatacggccctttcggcccacctcctcccagccaggctagtagcggtcaagccagaatgttcccaaacgctccttacctgccctcatgcctcgaaagccagccagccatccgcaaccaggggtactctactgttacattcgacggaacccccagttacggacataccccctcccatcatgccgcacagttccccaatcactcttttaagcatgaagaccctatggggcagcagggtagtctgggggagcagcagtacagtgtgccgccacccgtgtacggatgtcatactcccaccgacagctgtaccggatcccaagcactgctgctcagaactccttattcctctgataatctgtaccagatgacctcccagctggagtgcatgacttggaaccagatgaacctgggagccaccctgaaagggtag

SEQ ID NO: 8209 - DNA, 1494 bp, Artificial Sequence
  derived and/or modified sequence
ctgcaggacccggcatctacttgtgttcctgaacctgcttcgcagcatacacttaggtcaggaccaggttgcctgcagcagccagagcagcaaggagtgagagaccctggaggaatctgggcaaagctgggtgcggctgaggcctcagctgagcgcctgcagggacgcagatcaaggggagccagcggatcagagccccaacaaatgggcagcgacgtgagagatctgaacgcgttgttaccagctgtgccttcactaggaggagggggaggatgcgccctgccagtgtccggagccgctcagtgggccccagtcctggatttcgcccctcccggtgctagcgcctatgggagcctgggagggccagccccaccccctgcacctccccctcccccacccccaccgcctcattctttcataaagcaggagccgtcctggggtggggcagagcctcatgaagagcagtgcctctccgcctttaccgtgcactttagtggtcaattcacgggcacagctggtgcctgtcgttatggtccttttggaccccctcctcctagccaagcgtcctctggtcaggcaagaatgtttcccaacgctccatacctgcctagctgtctcgagtcccagcccgcaatcagaaaccagggctattctactgtgaccttcgatggtactccctcttacggccatacaccgtctcaccatgcagcccagttccccaaccatagctttaagcatgaagatcccatgggccagcagggcagtttaggagaacagcagtacagtgtgccgcctccagtatacggatgccacacaccaaccgatagctgcaccggttcccaggcattattgctacggaccccttattccagcgataacttatatcagatgacctcccagttggagtgtatgacctggaaccaaatgaatcttggcgcaacgttaaaggggcactctaccggatatgagtcagataatcacactaccccgattctgtgtggagcccaatacagaatccacacacacggagtgttccgtggcatacaggacgtacggcgtgttccaggggtggctccaacactcgtccggagcgcctcagagacctccgagaaacggccttttatgtgcgcctatcccggatgtaataaaagatactttaagttgtcccatctgcagatgcactccagaaaacataccggcgaaaaaccctaccagtgcgacttcaaggactgcgagaggcggtttagtcgctctgatcaattaaaaagacatcagagaaggcatactggcgtgaagccctttcaatgtaaaacttgccagcgcaaattcagcaggtccgatcatctgaaaacccacaccagaacccacacaggggagaaaccgtttagctgccgatggccctcctgccaaaagaagttcgcccgtagtgacgagctggtgagacatcacaacatgcaccagaggaatatgactaagctacagctggccctctag

SEQ ID NO: 8210 - DNA, 2768 bp, Artificial Sequence
  derived and/or modified sequence
ctgcaggacccggcttccacgtgtgtcccggagccggcgtctcagcacacgctccgctccgggcctgggtgcctacagcagccagagcagcagggagtccgggacccgggcggcatctgggccaagttaggcgccgccgaggccagcgctgaacgtctccagggccggaggagccgcggggcgtccgggtctgagccgcagcaaatgggctccgacgtgcgggacctgaacgcgctgctgcccgccgtcccctccctgggtggcggcggcggctgtgccctgcctgtgagcggcgcggcgcagtgggcgccggtgctggactttgcgcccccgggcgcttcggcttacgggtcgttgggcggccccgcgccgccaccggctccgccgccacccccgccgccgccgcctcactccttcatcaaacaggagccgagctggggcggcgcggagccgcacgaggagcagtgcctgagcgccttcactgtccacttttccggccagttcactggcacagccggagcctgtcgctacgggcccttcggtcctcctccgcccagccaggcgtcatccggccaggccaggatgtttcctaacgcgccctacctgcccagctgcctcgagagccagcccgctattcgcaatcagggttacagcacggtcaccttcgacgggacgcccagctacggtcacacgccctcgcaccatgcggcgcagttccccaaccactcattcaagcatgaggatcccatgggccagcagggctcgctgggtgagcagcagtactcggtgccgcccccggtctatggctgccacacccccaccgacagctgcaccggcagccaggctttgctgctgaggacgccctacagcagtgacaatttataccaaatgacatcccagcttgaatgcatgacctggaatcagatgaacttaggagccaccttaaagggccacagcacagggtacgagagcgataaccacacaacgcccatcctctgcggagcccaatacagaatacacacgcacggtgtcttcagaggcattcaggatgtgcgacgtgtgcctggagtagccccgactcttgtacggtcggcatctgagaccagtgagaaacgccccttcatgtgtgcttacccaggctgcaataagagatattttaagctgtcccacttacagatgcacagcaggaagcacactggtgagaaaccataccagtgtgacttcaaggactgtgaacgaaggttttctcgttcagaccagctcaaaagacaccaaaggagacatacaggtgtgaaaccattccagtgtaaaacttgtcagcgaaagttctcccggtccgaccacctgaagacccacaccaggactcatacaggtgaaaagcccttcagctgtcggtggccaagttgtcagaaaaagtttgcccggtcagatgaattagtccgccatcacaacatgcatcagagaaacatgaccaaactccagctggcgctttgaggggtctccctcggggaccgttcagtgtcccaggcagcacagtgtgtgaactgctttcaagtctgactctccactcctcctcactaaaaaggaaacttcagttgatcttcttcatccaacttccaagacaagataccggtgcttctggaaactaccaggtgtgcctggaagagttggtctctgccctgcctacttttagttgactcacaggccctggagaagcagctaacaatgtctggttagttaaaagcccattgccatttggtgtggattttctactgtaagaagagccatagctgatcatgtccccctgacccttcccttctttttttatgctcgttttcgctggggatggaattattgtaccattttctatcatggaatatttataggccagggcatgtgtatgtgtctgctaatgtaaactttgtcatggtttccatttactaacagcaacagcaagaaataaatcagagagcaaggcatcgggggtgaatcttgtctaacattcccgaggtcagccaggctgctaacctggaaagcaggatgtagttctgccaggcaacttttaaagctcatgcatttcaagcagctgaagaaaaaatcagaactaaccagtacctctgtatagaaatctaaaagaattttaccattcagttaattcaatgtgaacactggcacactgctcttaagaaactatgaagatctgagatttttttgtgtatgtttttgactcttttgagtggtaatcatatgtgtctttatagatgtacatacctccttgcacaaatggaggggaattcattttcatcactgggagtgtccttagtgtataaaaaccatgctggtatatggcttcaagttgtaaaaatgaaagtgactttaaaagaaaataggggatggtccaggatctccactgataagactgtttttaagtaacttaaggacctttgggtctacaagtatatgtgaaaaaaatgagacttactgggtgaggaaatccattgtttaaagatggtcgtgtgtgtgtgtgtgtgtgtgtgtgtgtgtgtgttgtgttgtgttttgttttttaagggagggaatttattatttaccgttgcttgaaattactgtgtaaatatatgtctgataatgatttgctctttgacaactaaaattaggactgtataagtactagatgcatcactgggtgttgatcttacaagatattgatgataacacttaaaattgtaacctgcatttttcactttgctctcaattaaagtctattc

SEQ ID NO: 8211 - protein, 1333 aa, Artificial Sequence
  derived and/or modified sequence
MTADKLVFFVNGRKVVEKNADPETTLLAYLRRKLGLSGTKLGCGEGGCGACTVMLSKYDRLQNKIVHFSANACLAPICSLHHVAVTTVEGIGSTKTRLHPVQERIAKSHGSQCGFCTPGIVMSMYTLLRNQPEPTMEEIENAFQGNLCRCTGYRPILQGFRTFARDGGCCGGDGNNPNCCMNQKKDHSVSLSPSLFKPEEFTPLDPTQEPIFPPELLRLKDTPRKQLRFEGERVTWIQASTLKELLDLKAQHPDAKLVVGNTEIGIEMKFKNMLFPMIVCPAWIPELNSVEHGPDGISFGAACPLSIVEKTLVDAVAKLPAQKTEVFRGVLEQLRWFAGKQVKSVASVGGNIITASPISDLNPVFMASGAKLTLVSRGTRRTVQMDHTFFPGYRKTLLSPEEILLSIEIPYSREGEYFSAFKQASRREDDIAKVTSGMRVLFKPGTTEVQELALCYGGMANRTISALKTTQRQLSKLWKEELLQDVCAGLAEELHLPPDAPGGMVDFRCTLTLSFFFKFYLTVLQKLGQENLEDKCGKLDPTFASATLLFQKDPPADVQLFQEVPKGQSEEDMVGRPLPHLAADMQASGEAVYCDDIPRYENELSLRLVTSTRAHAKIKSIDTSEAKKVPGFVCFISADDVPGSNITGICNDETVFAKDKVTCVGHIIGAVVADTPEHTQRAAQGVKITYEELPAIITIEDAIKNNSFYGPELKIEKGDLKKGFSEADNVVSGEIYIGGQEHFYLETHCTIAVPKGEAGEMELFVSTQNTMKTQSFVAKMLGVPANRIVVRVKRMGGGFGGKETRSTVVSTAVALAAYKTGRPVRCMLDRDEDMLITGGRHPFLARYKVGFMKTGTVVALEVDHFSNVGNTQDLSQSIMERALFHMDNCYKIPNIRGTGRLCKTNLPSNTAFRGFGGPQGMLIAECWMSEVAVTCGMPAEEVRRKNLYKEGDLTHFNQKLEGFTLPRCWEECLASSQYHARKSEVDKFNKENCWKKRGLCIIPTKFGISFTVPFLNQAGALLHVYTDGSVLLTHGGTEMGQGLHTKMVQVASRALKIPTSKIYISETSTNTVPNTSPTAASVSADLNGQAVYAACQTILKRLEPYKKKNPSGSWEDWVTAAYMDTVSLSATGFYRTPNLGYSFETNSGNPFHYFSYGVACSEVEIDCLTGDHKNLRTDIVMDVGSSLNPAIDIGQVEGAFVQGLGLFTLEELHYSPEGSLHTRGPSTYKIPAFGSIPIEFRVSLLRDCPNKKAIYASKAVGEPPLFLAASIFFAIKDAIRAARAQHTGNNVKELFRLDSPATPEKIRNACVDKFTTLCVTGVPENCKPWSVRV

SEQ ID NO: 8212 - DNA, 4002 bp, Artificial Sequence
  derived and/or modified sequence
atgaccgccgacaagctggtgttcttcgtgaacggcagaaaggtggtggagaagaacgccgaccccgagaccaccctgctggcctacctgagaagaaagctgggcctgagcggcaccaagctgggctgcggcgagggcggctgcggcgcctgcaccgtgatgctgagcaagtacgacagactgcagaacaagatcgtgcacttcagcgccaacgcctgcctggcccccatctgcagcctgcaccacgtggccgtgaccaccgtggagggcatcggcagcaccaagaccagactgcaccccgtgcaggagagaatcgccaagagccacggcagccagtgcggcttctgcacccccggcatcgtgatgagcatgtacaccctgctgagaaaccagcccgagcccaccatggaggagatcgagaacgccttccagggcaacctgtgcagatgcaccggctacagacccatcctgcagggcttcagaaccttcgccagagacggcggctgctgcggcggcgacggcaacaaccccaactgctgcatgaaccagaagaaggaccacagcgtgagcctgagccccagcctgttcaagcccgaggagttcacccccctggaccccacccaggagcccatcttcccccccgagctgctgagactgaaggacacccccagaaagcagctgagattcgagggcgagagagtgacctggatccaggccagcaccctgaaggagctgctggacctgaaggcccagcaccccgacgccaagctggtggtgggcaacaccgagatcggcatcgagatgaagttcaagaacatgctgttccccatgatcgtgtgccccgcctggatccccgagctgaacagcgtggagcacggccccgacggcatcagcttcggcgccgcctgccccctgagcatcgtggagaagaccctggtggacgccgtggccaagctgcccgcccagaagaccgaggtgttcagaggcgtgctggagcagctgagatggttcgccggcaagcaggtgaagagcgtggccagcgtgggcggcaacatcatcaccgccagccccatcagcgacctgaaccccgtgttcatggccagcggcgccaagctgaccctggtgagcagaggcaccagaagaaccgtgcagatggaccacaccttcttccccggctacagaaagaccctgctgagccccgaggagatcctgctgagcatcgagatcccctacagcagagagggcgagtacttcagcgccttcaagcaggccagcagaagagaggacgacatcgccaaggtgaccagcggcatgagagtgctgttcaagcccggcaccaccgaggtgcaggagctggccctgtgctacggcggcatggccaacagaaccatcagcgccctgaagaccacccagagacagctgagcaagctgtggaaggaggagctgctgcaggacgtgtgcgccggcctggccgaggagctgcacctgccccccgacgcccccggcggcatggtggacttcagatgcaccctgaccctgagcttcttcttcaagttctacctgaccgtgctgcagaagctgggccaggagaacctggaggacaagtgcggcaagctggaccccaccttcgccagcgccaccctgctgttccagaaggacccccccgccgacgtgcagctgttccaggaggtgcccaagggccagagcgaggaggacatggtgggcagacccctgccccacctggccgccgacatgcaggccagcggcgaggccgtgtactgcgacgacatccccagatacgagaacgagctgagcctgagactggtgaccagcaccagagcccacgccaagatcaagagcatcgacaccagcgaggccaagaaggtgcccggcttcgtgtgcttcatcagcgccgacgacgtgcccggcagcaacatcaccggcatctgcaacgacgagaccgtgttcgccaaggacaaggtgacctgcgtgggccacatcatcggcgccgtggtggccgacacccccgagcacacccagagagccgcccagggcgtgaagatcacctacgaggagctgcccgccatcatcaccatcgaggacgccatcaagaacaacagcttctacggccccgagctgaagatcgagaagggcgacctgaagaagggcttcagcgaggccgacaacgtggtgagcggcgagatctacatcggcggccaggagcacttctacctggagacccactgcaccatcgccgtgcccaagggcgaggccggcgagatggagctgttcgtgagcacccagaacaccatgaagacccagagcttcgtggccaagatgctgggcgtgcccgccaacagaatcgtggtgagagtgaagagaatgggcggcggcttcggcggcaaggagaccagaagcaccgtggtgagcaccgccgtggccctggccgcctacaagaccggcagacccgtgagatgcatgctggacagagacgaggacatgctgatcaccggcggcagacaccccttcctggccagatacaaggtgggcttcatgaagaccggcaccgtggtggccctggaggtggaccacttcagcaacgtgggcaacacccaggacctgagccagagcatcatggagagagccctgttccacatggacaactgctacaagatccccaacatcagaggcaccggcagactgtgcaagaccaacctgcccagcaacaccgccttcagaggcttcggcggcccccagggcatgctgatcgccgagtgctggatgagcgaggtggccgtgacctgcggcatgcccgccgaggaggtgagaagaaagaacctgtacaaggagggcgacctgacccacttcaaccagaagctggagggcttcaccctgcccagatgctgggaggagtgcctggccagcagccagtaccacgccagaaagagcgaggtggacaagttcaacaaggagaactgctggaagaagagaggcctgtgcatcatccccaccaagttcggcatcagcttcaccgtgcccttcctgaaccaggccggcgccctgctgcacgtgtacaccgacggcagcgtgctgctgacccacggcggcaccgagatgggccagggcctgcacaccaagatggtgcaggtggccagcagagccctgaagatccccaccagcaagatctacatcagcgagaccagcaccaacaccgtgcccaacaccagccccaccgccgccagcgtgagcgccgacctgaacggccaggccgtgtacgccgcctgccagaccatcctgaagagactggagccctacaagaagaagaaccccagcggcagctgggaggactgggtgaccgccgcctacatggacaccgtgagcctgagcgccaccggcttctacagaacccccaacctgggctacagcttcgagaccaacagcggcaaccccttccactacttcagctacggcgtggcctgcagcgaggtggagatcgactgcctgaccggcgaccacaagaacctgagaaccgacatcgtgatggacgtgggcagcagcctgaaccccgccatcgacatcggccaggtggagggcgccttcgtgcagggcctgggcctgttcaccctggaggagctgcactacagccccgagggcagcctgcacaccagaggccccagcacctacaagatccccgccttcggcagcatccccatcgagttcagagtgagcctgctgagagactgccccaacaagaaggccatctacgccagcaaggccgtgggcgagccccccctgttcctggccgccagcatcttcttcgccatcaaggacgccatcagagccgccagagcccagcacaccggcaacaacgtgaaggagctgttcagactggacagccccgccacccccgagaagatcagaaacgcctgcgtggacaagttcaccaccctgtgcgtgaccggcgtgcccgagaactgcaagccctggagcgtgagagtgtag

SEQ ID NO: 8213 - DNA, 4002 bp, Artificial Sequence
  derived and/or modified sequence
atgacagccgataaactagtgtttttcgtgaacggacgcaaagtggtggagaagaatgccgatccagagactacgctactcgcctacttaagaaggaaactgggcctgtcaggcacgaagctcggctgcggggagggcggctgtggggcgtgcacggtcatgttgtctaagtacgaccgtctgcagaacaaaatcgtacatttttctgcaaacgcctgcctggcacccatttgtagtctgcaccacgttgctgtcacgaccgttgaggggattggctcgaccaagacccggttgcaccccgtccaagagaggatcgccaagagccacggatcccagtgcggcttttgtacacccgggatcgtgatgtcaatgtatacacttcttcgaaaccagcctgaacccaccatggaagagatagaaaacgcctttcagggcaatttatgtagatgtaccggctatcggcccattctgcaggggttccgcacatttgcgcgggacggaggctgctgcgggggagacggcaacaaccctaattgttgcatgaaccagaaaaaagaccactctgtgtctctaagccccagcctgtttaaaccagaggaattcactccattggaccccacgcaggaaccgatcttccctccagagcttctgcgtttgaaggacacaccccgcaagcagctgagattcgaaggggagagggtcacctggatccaggcatctacactgaaggaactgttagacctaaaagctcagcaccctgacgctaaactggtcgtcggaaacaccgagatcgggatcgagatgaaatttaagaatatgctgtttcctatgatcgtgtgccctgcgtggataccagagttaaatagcgttgagcacgggcccgatggcatctcttttggagcggcgtgcccactcagcatcgtcgaaaagacgctggttgatgcagtggccaagctacccgcccagaagaccgaggttttcagaggagtcctggagcagcttagatggttcgccgggaaacaagtgaagagtgtggcctctgtgggggggaatatcattaccgctagtccaatctccgacctgaatcctgtatttatggcctcgggagcaaagctcacccttgtgagtcgcggcacaagaagaaccgtacagatggaccatactttcttccccggctacaggaagacactactgagtcccgaggagatactgctgtccattgagatcccatactcgcgagagggcgagtattttagcgcttttaagcaggctagcagaagggaggatgacatcgcaaaggtgacttcagggatgcgcgtcctgttcaaacccggtactacagaggtccaggaactggctctctgttatggtggcatggccaatcggactatcagcgcgctaaagactacacagcggcagctaagtaagctgtggaaagaggagctcctccaggacgtgtgtgccgggctggccgaagagctgcacctgcctcctgatgccccaggcggcatggttgatttcaggtgcactcttactctgagtttcttttttaagttttatctgacggtgttacaaaagctggggcaggaaaacctggaagataagtgtggcaagctggaccccactttcgcctccgcgacgctgttattccagaaggatccccccgccgatgtccagctattccaagaggttccaaagggccagagtgaagaggacatggtcggaaggcccttaccccacctggccgcagacatgcaagccagtggagaggcagtgtattgtgatgacatccccaggtacgagaacgaactgtctctgagactcgtgactagcacgagagcccacgcgaagatcaaatcaatcgacacttcagaagccaaaaaggtgcccggttttgtctgcttcatatccgccgatgacgttccagggtcgaatattaccggaatctgcaacgatgaaaccgtcttcgcaaaggacaaggtcacttgtgtgggacatatcatcggagccgtagttgcagacacgccagagcacacacagagggctgcccaaggcgtaaagataacctacgaagagctcccggcaattataacgatcgaggatgcaatcaagaataatagcttttatggcccggagctcaaaattgagaaaggcgatctgaaaaagggcttcagcgaggccgataatgtggtctcaggcgaaatttacataggcggtcaggaacacttctatttggagacccattgtaccattgcagtacctaagggcgaagcaggcgagatggaactattcgtgtctactcagaacacaatgaaaacccagtcctttgtagctaagatgctcggtgtgcccgctaaccggattgtagtacgcgtgaagcgcatgggaggtggatttgggggaaaggagacccggagcacggttgtgtccacagccgtcgccctggcagcctacaaaacgggccgccctgtgagatgcatgctcgacagggacgaagacatgctcatcacgggaggtcgccacccattcttggcccgatacaaagtgggctttatgaagaccggcactgtagtggcgctcgaagtggatcacttctctaacgtgggcaacacccaggatctcagccagtctattatggaaagggcgctctttcatatggacaactgttataagatcccaaatatccgtggaacaggacgactttgtaagactaaccttcccagtaatacagctttcagaggattcggaggcccccaggggatgcttatcgcagaatgctggatgtctgaagtcgcagtgacatgtggtatgcccgcggaggaggtgcggcggaagaatctatacaaggagggggacctgactcactttaatcagaagttggagggcttcacactgcctcgctgttgggaagaatgcctcgccagcagccagtatcacgcaaggaaatctgaagttgataagttcaataaagaaaactgctggaagaagcgcggtctgtgtattattccaactaagttcggcatctcgttcacagtgcccttcctgaaccaggccggcgcactgctgcacgtttataccgatgggagcgtgctgctcacacatggagggacagaaatgggacaggggctgcacactaagatggtgcaggtagcaagcagggctctcaaaattccaacatcaaagatctacatttcggagactagcaccaatacagtgcctaacacatcgcctaccgctgcgtcagtgtcggccgatctcaatgggcaggccgtgtatgcagcctgccagaccattttaaagaggctggagccctacaagaagaagaacccctccggctcatgggaggactgggtgactgcagcctacatggacacagtgagccttagcgctactggattttaccggacccccaatctcggatacagtttcgagactaattctggcaatccattccactattttagctatggcgttgcctgctctgaggtggagattgattgcctgacaggcgaccacaagaacctaaggaccgacatcgtgatggatgttggcagtagcctcaaccccgccatagatatagggcaggtagagggagccttcgtccagggcttagggttatttaccctggaagagcttcactattcgccggaagggtccttacatacacgaggaccatcaacctataagatccccgcctttgggtccatccccatcgagtttagagtgtctctgttgagggactgccccaacaagaaagccatctatgcaagcaaggctgtgggtgaacctccactgttcttggcagcaagtatctttttcgcaatcaaagacgctattcgagccgctcgtgctcagcatactggtaacaacgtcaaagagctgtttcgtctcgactcccccgcgacccctgagaagatacggaatgcatgcgtggacaagttcaccaccctgtgtgtgacgggagttcctgagaattgtaagccctggtccgtccgtgtttag

SEQ ID NO: 8214 - DNA, 4002 bp, Artificial Sequence
  derived and/or modified sequence
atgacagctgacaagctggtgttctttgtgaatggaaggaaggtggtggagaagaatgctgaccctgagaccaccctgctggcctacctgcggaggaagctgggcctgagcggcaccaagctgggctgtggggagggcggctgtggggcctgcaccgtgatgctgagcaaatatgaccggctgcagaacaagatcgtgcacttcagcgccaatgcctgcctggcccccatctgcagcctgcaccacgtggccgtgaccaccgtggagggcatcggcagcaccaagacccggctgcaccctgtgcaggagagaattgccaagagccacggcagccagtgtggcttctgcaccccaggcatcgtgatgtccatgtacaccctgctgaggaaccagcctgagcccaccatggaggagattgaaaatgccttccagggcaacctgtgccgctgcaccggctaccggcccatcctgcagggcttccgcacctttgccagagatggcggctgctgcggaggagatggcaacaaccccaactgctgcatgaaccagaagaaggaccacagcgtgtccctgagccccagcctcttcaagccagaggagttcacccccctggaccccacccaggagcccatcttccccccagagctgctgcggctgaaggacacccccaggaagcagctgcgctttgaaggagagcgggtgacctggatccaggccagcaccctgaaggagctgctggacctgaaggcccagcacccagatgccaagctggtggtgggcaacacagagatcggcatcgagatgaagttcaagaacatgctgttccccatgattgtgtgcccagcctggatccctgagctgaacagcgtggagcacggcccagatggcatcagctttggagctgcctgccccctgagcatcgtggagaagaccctggtggatgctgtggccaagctgcctgcccagaagacagaggtgttccggggcgtgctggagcagctgcgctggtttgctgggaagcaggtgaagtctgtggcctctgtgggcggcaacatcatcacagccagccccatcagtgacctgaaccctgtgttcatggccagcggggccaagctgaccctggtgtcccggggcaccaggagaacagtgcagatggaccacaccttcttccctggctacaggaagaccctgctgagccctgaggagatcctgctgagcattgagatcccctacagccgggagggggagtacttcagcgccttcaagcaggccagccggcgggaggatgacatcgccaaggtgaccagcggcatgagggtgctcttcaagccaggcaccacagaggtgcaggagctggccctgtgctacggcggcatggccaacagaaccatcagcgccctgaagaccacccagaggcagctgagcaagctgtggaaggaggagctgctgcaggatgtgtgtgccggcctggccgaggagctgcacctgcccccagatgcccctgggggcatggtggacttccgctgcaccctgaccctgtccttcttcttcaagttctacctgactgtgctgcagaagctgggccaggagaacctggaggacaagtgtgggaagctggaccccacctttgccagcgccaccctgctcttccagaaggaccccccagcagatgtgcagctgttccaggaggtgcccaagggccagagcgaggaggacatggtgggccggcccctgccccacctggccgctgacatgcaggccagcggggaggccgtgtactgtgatgacatccccaggtatgaaaatgagctgagcctgcggctggtgaccagcacccgggcccacgccaagatcaagagcattgacaccagcgaggccaagaaggtgcccggctttgtgtgcttcatctctgcagatgatgtgcccggcagcaacatcaccggcatctgcaatgatgagaccgtgtttgccaaggacaaggtgacctgtgtgggccacatcatcggggctgtggtggccgacaccccagagcacacccagagagctgcccagggcgtgaagatcacctatgaggagctgcctgccatcatcaccattgaagatgccatcaagaacaacagcttctacggccctgagctgaagattgaaaaaggagacctgaagaagggcttcagcgaggccgacaacgtggtgtctggagagatctacatcggcggccaggagcacttctacctggagacccactgcaccatcgctgtgcccaagggggaggccggggagatggagctgtttgtgtccacccagaacaccatgaagacccagagctttgtggccaagatgctgggcgtgcctgccaaccgcatcgtggtgcgggtgaagaggatgggcggcggctttggaggcaaggagaccaggagcacagtggtgtccacagctgtggccctggccgcctacaagacaggccggcctgtgcgctgcatgctggacagagatgaggacatgctgatcactggaggccgccaccccttcctggcccgctacaaggtgggcttcatgaagacaggcaccgtggtggccctggaggtggaccacttcagcaatgtgggcaacacccaggacctgagccagagcatcatggagcgggccctcttccacatggacaactgctacaagatccccaacatccggggcaccggccgcctgtgcaagaccaacctgcccagcaacacagccttccggggctttggaggcccccagggcatgctgattgctgagtgctggatgtctgaggtggccgtgacctgtggcatgcctgctgaggaggtgcggaggaagaacctgtacaaggagggggacctgacccacttcaaccagaagctggagggcttcaccctgccccgctgctgggaggagtgcctggccagcagccagtaccacgccaggaagtctgaggtggacaagttcaacaaggagaactgctggaagaagaggggcctgtgcatcatccccaccaagtttggcatctccttcaccgtgcccttcctgaaccaggccggggccctgctgcacgtgtacacagatggctctgtgctgctgacccacggcggcacagagatgggccagggcctgcacaccaagatggtgcaggtggccagccgggccctgaagatccccaccagcaagatctacatcagcgagaccagcaccaacacagtgcccaacaccagccccacagctgcctctgtgtctgctgacctgaatggccaggccgtgtatgctgcctgccagaccatcctgaagaggctggagccctacaagaagaagaaccccagcggctcctgggaggactgggtgacagctgcctacatggacacagtgtccctgagcgccaccggcttctaccgcacccccaacctgggctacagctttgagaccaacagcggcaaccccttccactacttctcctatggagtggcctgcagcgaggtggagattgactgcctgactggagaccacaagaacctgaggacagacatcgtgatggatgtgggcagcagcctgaacccagccattgatattggccaggtggagggcgcctttgtgcagggcctgggcctcttcaccctggaggagctgcactacagccctgagggcagcctgcacacccggggccccagcacctacaagatcccagccttcggcagcatccccatcgagttccgggtgtccctgctgcgggactgccccaacaagaaggccatctatgccagcaaggctgtgggggagcccccactcttcctggccgccagcatcttctttgccatcaaggatgccatccgggccgcccgggcccagcacactggaaacaacgtgaaggagctgttccggctggacagccctgccaccccagagaagatcagaaatgcctgtgtggacaagttcaccaccctgtgtgtgactggagtgcctgagaactgcaagccctggagcgtgcgggtgtag

SEQ ID NO: 8215 - DNA, 4002 bp, Artificial Sequence
  derived and/or modified sequence
atgaccgccgacaagctggtgttcttcgtgaacggccggaaggtggtcgaaaaaaacgcagacccggagacaacactcttggcgtacctgcgaaggaaactcggactctctgggaccaagctcggatgtggagagggggggtgtggggcctgcacagtgatgctaagcaagtacgatagactacagaacaagattgttcacttcagcgctaatgcatgcttggccccaatctgctctctgcaccacgtagccgttacgacagtcgagggcattggtagcacaaaaactagactgcatcctgtgcaggagcggatagccaaatctcacggctcccagtgcggtttctgcaccccgggaatcgtgatgagcatgtacaccctcctgcggaatcagcccgagccgactatggaggagattgagaacgcttttcaggggaatttgtgtcgatgcacgggctatcgtcctatcttgcagggcttccggacattcgcccgtgatggcggatgctgtggcggcgatggcaataacccgaattgctgtatgaatcaaaaaaaggaccacagcgtcagtctgtccccatccctgttcaagcccgaggagttcacccctttagatcctacccaggagcccatcttcccacccgaattgttacgcttgaaggacacccctcgcaagcagctgcgctttgaaggagaacgggtgacctggatacaagcaagtacactgaaagaactcttggacttaaaagcccagcaccccgatgccaaacttgttgttgggaataccgagattggtatcgagatgaaatttaaaaatatgctgtttcctatgattgtatgcccggcgtggattccagaattgaacagtgttgagcatggccccgatggcataagcttcggcgcagcatgccctttatcaatcgtcgagaaaacactggtcgatgccgtggccaagctgcccgcccagaagacagaggtcttcagaggggtcctggagcagcttaggtggtttgccggaaaacaggtgaagtccgtggcaagtgtaggtggcaatataatcacggccagtccgatcagtgacttaaatcctgttttcatggcgtcaggagccaagttaacacttgtcagtcggggcactaggcggaccgtccaaatggaccacaccttcttcccgggttatcggaaaaccctactatccccagaagagatcctcctgagcatagaaataccatactctcgggagggggaatatttttctgcctttaaacaggcatctcggcgcgaggacgacatcgcaaaagtaacatctggtatgcgtgtgctattcaagcctggaacgacagaggtccaagaactagccctttgctatggaggcatggctaaccggaccatcagtgctctgaagacgacacagcggcagctcagcaagctttggaaggaggaactgctccaggatgtatgtgccggattggccgaagaactgcatcttcccccggacgccccgggcggtatggttgatttccggtgcacacttacactctcttttttttttaaattttatctcaccgttttacagaaattagggcaggagaatctcgaggataaatgcggaaagcttgacccaacattcgctagcgcgacgctgctgtttcaaaaagatccgcccgccgacgttcaactgttccaggaggtgcctaaaggacagtcagaggaggacatggtggggcgcccgctgcctcatctggctgcagacatgcaggcatcaggcgaggccgtttactgtgatgacatacctcgatacgaaaatgaactgagtctgagactggtcacttcaacccgggcccacgcaaagattaagtcaatcgacactagtgaggcaaagaaggttccgggcttcgtttgcttcatttctgctgacgacgtgcccggctcgaacattacgggaatatgcaatgatgagacagtgttcgcaaaggataaagttacctgcgtgggacacattattggggctgtggtggccgatacaccagaacatacccaaagagccgcccaaggggtgaaaattacttatgaggagttgcccgctatcatcaccatcgaagacgcaattaagaacaacagtttctacggcccagaactcaagatagaaaagggcgacctcaagaaaggtttctccgaggccgacaacgtcgtgagcggcgagatttacataggcggccaggagcacttctacttggaaacccactgtacaattgctgtccctaaaggcgaggccggagaaatggagctgtttgtcagcacacagaataccatgaaaacgcagtccttcgtagcgaaaatgcttggagtgcccgctaaccgtattgtagtgagagtgaagaggatggggggcggtttcggtgggaaggagactcgcagcacagttgtttccacagcggtggcactggctgcgtacaagactggacgtccggtacgctgcatgttagatagggacgaggatatgttgattacaggtgggcgacatccctttctcgcacgctacaaagtgggattcatgaaaaccggaaccgtggtggctctggaagtcgatcatttttccaacgtaggcaacactcaggacctgtcgcagtctatcatggagagggcccttttccacatggacaattgctataagattcctaacattagagggacagggagactgtgcaaaaccaatctcccgagcaacacagctttccgtgggtttggggggcctcagggaatgctcatagctgaatgttggatgtccgaggtcgcagtaacttgcggcatgcctgctgaggaagtgagaaggaaaaacctctacaaggagggcgatctgacgcatttcaatcaaaagctcgaggggtttacgctgcccaggtgttgggaggagtgtctggcaagtagccaataccacgcaaggaaaagcgaagtggataagttcaataaggagaattgttggaagaaaagaggtttgtgcattattccaactaagttcgggatctcctttaccgttccgttcctcaaccaagccggcgctctgttgcacgtgtataccgacgggtccgtgctgctgacccatgggggtaccgagatgggccaaggacttcatacgaagatggttcaggtggcctcgcgggcactcaagatccctacaagcaagatctatatttccgaaacttcaaccaatacagtgcctaacactagcccaactgccgccagcgtgagtgccgatctcaacggacaggcagtctacgcagcttgtcaaaccatattgaaaagactggaaccctacaaaaaaaagaacccctccggttcttgggaagattgggttacggccgcctacatggatactgtaagcctgtccgctacaggattttatcggacgccgaacctgggatatagtttcgaaacaaactcaggcaatccttttcactacttttcttatggggtagcgtgtagtgaagttgaaattgactgccttacgggtgatcataagaatttacgtaccgatatcgtaatggacgtgggttccagtttgaaccccgctatcgacatcggccaggttgaaggagccttcgttcaggggttgggcttatttaccctagaggagttgcactactcccccgaaggcagtctgcacacacgaggcccgtcgacatacaaaattcccgcattcggttcaattccgatagaattcagagtgagcctactgcgagattgtcctaacaaaaaggccatatatgccagcaaagcagttggagaaccccctctcttcctcgctgcatcgatattttttgcaatcaaggacgccattagggcagcgagggctcagcacacagggaacaatgtgaaggagctgtttagactggattccccggcgaccccagaaaagattagaaacgcttgtgtggacaagttcacaacactgtgtgtgactggggtgcccgaaaattgtaaaccatggagcgtcagggtgtag

SEQ ID NO: 8216 - DNA, 4002 bp, Artificial Sequence
  derived and/or modified sequence
atgactgcagataaactagtgttcttcgtgaatggcagaaaggtggtggaaaagaatgccgaccccgagacaacactgttggcctaccttcgcagaaagctcggcttgtccgggaccaaactggggtgcggggaggggggttgtggcgcatgcactgtgatgcttagtaagtacgatcggttgcagaacaagatcgtacacttctccgcgaacgcctgtctcgccccaatctgctctctgcaccatgtggccgtgaccacggtggaaggaataggcagcacaaagaccaggcttcaccctgtccaggaaaggattgcgaagtcccacggcagccagtgcgggttttgcaccccaggtatagttatgtccatgtacacactgctgcggaatcaacccgagccaaccatggaagaaattgagaatgcttttcaaggcaacctgtgtagatgcaccggatatagaccgattctacaaggctttagaacattcgcccgagatggtgggtgctgcggcggtgacgggaataaccctaactgctgcatgaatcagaagaaggatcactccgtctccttaagtccgtccctgttcaagcccgaggagttcacgccccttgatcccacccaggagccaatcttcccgccagagcttcttcgactgaaggacacgcccagaaagcagctgcgcttcgagggggagagggttacctggattcaggcctccactctcaaggagttactagacctcaaggcccaacacccggacgcaaagctcgttgttggaaatactgagatcggcattgaaatgaaatttaagaacatgttgtttccgatgatcgtttgccctgcttggattcccgagctcaattctgtggagcatggccctgacggtatctcattcggtgccgcttgtccgctttctattgttgagaagactttagtggacgcggtcgccaaactgcctgcccagaagacagaagtttttcgcggagtgctcgaacagttgcgctggtttgcaggtaaacaggtcaagagtgtggcatcagtcggcggtaatatcatcaccgcaagcccaattagtgatcttaaccccgtgttcatggcatccggcgcaaaacttacgctggttagtcggggaactagacgtaccgtgcagatggaccataccttcttccctggttaccggaagacgctgctgagcccagaggagatattgctcagtatcgagattccctactctagagagggcgaatatttttcagcctttaagcaggctagtagaagagaggatgatatcgccaaggtgaccagcggaatgagagtgctgttcaaaccaggaaccaccgaggttcaagaactggcactttgttacgggggtatggccaatagaacaatctccgctctgaaaacgactcagcgacaactctcaaagttgtggaaagaagaactgcttcaggacgtatgtgcaggtcttgccgaggaactccacttgccaccagacgcaccgggtggcatggtggatttcaggtgtacacttacccttagcttctttttcaagttctacctcacagtgctacagaaactggggcaggaaaacctggaggacaagtgcgggaagctagatcctacctttgcgtctgcaaccctgttattccagaaggacccccctgcggacgtgcagcttttccaggaagtcccaaaaggacagtcagaagaggatatggtgggtcgtccactgccacacctcgcagcagacatgcaggcatccggcgaggctgtgtactgcgatgatatacccaggtacgagaacgaactttccctaagactggttaccagcacacgagcacacgccaaaatcaaaagcatagatacaagcgaagccaagaaggtgccaggttttgtttgtttcatcagtgccgatgatgtgccgggttccaatatcacaggcatctgcaatgacgaaacggtcttcgctaaagacaaggtgacatgtgtcggccacatcatcggcgctgttgtggcagacacccctgaacatacccaacgagcggcacagggggtaaagattacttacgaggagcttcctgccataattacaattgaggacgccattaagaacaattcattctacggacccgagctgaaaatagagaagggggatctcaagaaaggattctccgaggctgacaatgttgtgagcggggagatctacatcgggggacaggaacacttctatctagagacccactgtactatcgccgtgcctaagggggaggcaggggagatggaattgtttgtctcaactcagaacacaatgaaaacacaatcttttgtcgccaagatgttaggcgtcccagctaatagaattgtagtccgcgtaaaaaggatgggtggcggtttcgggggtaaggagacgcgttcaaccgtggtgtcaaccgccgttgcattagctgcatacaaaacgggaagacctgtcagatgtatgctggaccgagatgaagatatgcttattactggcggaagacatcctttcctggctagatacaaggtaggttttatgaagactggtacagtggtcgctctagaagttgatcatttctctaatgtgggcaacacacaggacctgtcacagtccattatggaaagagctttgtttcatatggacaattgttataagattccgaacatcagggggaccggacgcctctgcaagacgaacttgccttcaaacactgctttcagaggcttcggcggacctcaggggatgctgattgccgaatgctggatgagcgaggtcgccgtcacctgcgggatgccagcagaggaagtgcggcgaaaaaatttgtacaaggagggagacttgactcattttaatcagaagctggagggatttaccctccccagatgctgggaggaatgtttggcttcgtcccagtatcatgcccgtaaatctgaagttgacaaattcaataaagagaactgctggaagaagcgcggtctttgcatcatccctacgaagtttgggatatcatttaccgtgccatttctgaaccaagcaggagccttgctgcatgtgtatacagatgggtctgtcctcctgactcacggtggtaccgagatgggccaaggtctgcacacaaagatggtgcaggtggcctctagggcccttaaaattcctacaagcaagatatacattagtgagacctctacaaatacggtccctaatacatctcctacagcagcttcagtgagcgctgacttgaacgggcaggctgtctacgccgcttgtcaaacaatcctgaagcgccttgaaccgtataaaaaaaaaaacccatccggatcctgggaggattgggtgacagcagcctacatggacaccgtatccctaagtgccaccggcttttacaggacaccaaacctgggttattctttcgaaacgaacagcggcaacccgttccattacttttcctacggggtggcctgtagcgaggtagaaatcgattgtctaaccggtgatcacaagaatttgcggaccgacattgttatggacgtgggctcctccctgaatccagccattgatattggtcaggtggagggagcttttgtgcagggcctcgggcttttcactcttgaggagttgcactactcaccagagggctcacttcacacacggggaccatccacgtataagatccctgcattcggcagtattcccatagagttccgcgtctccctccttcgggactgtccaaataaaaaagcaatctacgcctccaaggccgtgggcgagcctcccctatttcttgctgcatccatttttttcgccatcaaggatgctatccgtgcggcacgcgctcaacacactggcaataatgtaaaggaattgtttcggctggactcaccggctactccagagaagatacggaacgcttgcgtggacaagttcactactctgtgcgttaccggcgtgcccgagaactgcaaaccatggtcagtgagagtgtag

SEQ ID NO: 8217 - DNA, 5688 bp, Artificial Sequence
  derived and/or modified sequence
gtctcttaggagtgaggtacctggagttcggggaccccaacctgtgacaatgacagcagacaaattggttttctttgtgaatggcagaaaggtggtggagaaaaatgcagatccagagacaacccttttggcctacctgagaagaaagttggggctgagtggaaccaagctcggctgtggagaggggggctgcggggcttgcacagtgatgctctccaagtatgatcgtctgcagaacaagatcgtccacttttctgccaatgcctgcctggcccccatctgctccttgcaccatgttgcagtgacaactgtggaaggaataggaagcaccaagacgaggctgcatcctgtgcaggagagaattgccaaaagccacggctcccagtgcgggttctgcacccctggcatcgtcatgagtatgtacacactgctccggaatcagcccgagcccaccatggaggagattgagaatgccttccaaggaaatctgtgccgctgcacaggctacagacccatcctccagggcttccggacctttgccagggatggtggatgctgtggaggagatgggaataatccaaattgctgcatgaaccagaagaaagaccactcagtcagcctctcgccatctttattcaaaccagaggagttcacgcccctggatccaacccaggagcccatttttcccccagagttgctgaggctgaaagacactcctcggaagcagctgcgatttgaaggggagcgtgtgacgtggatacaggcctcaaccctcaaggagctgctggacctcaaggctcagcaccctgacgccaagctggtcgtggggaacacggagattggcattgagatgaagttcaagaatatgctgtttcctatgattgtctgcccagcctggatccctgagctgaattcggtagaacatggacccgacggtatctcctttggagctgcttgccccctgagcattgtggaaaaaaccctggtggatgctgttgctaagcttcctgcccaaaagacagaggtgttcagaggggtcctggagcagctgcgctggtttgctgggaagcaagtcaagtctgtggcgtccgttggagggaacatcatcactgccagccccatctccgacctcaaccccgtgttcatggccagtggggccaagctgacacttgtgtccagaggcaccaggagaactgtccagatggaccacaccttcttccctggctacagaaagaccctgctgagcccggaggagatactgctctccatagagatcccctacagcagggagggggagtatttctcagcattcaagcaggcctcccggagagaagatgacattgccaaggtaaccagtggcatgagagttttattcaagccaggaaccacagaggtacaggagctggccctttgctatggtggaatggccaacagaaccatctcagccctcaagaccactcagaggcagctttccaagctctggaaggaggagctgctgcaggacgtgtgtgcaggactggcagaggagctgcatctgcctcccgatgcccctggtggcatggtggacttccggtgcaccctcaccctcagcttcttcttcaagttctacctgacagtccttcagaagctgggccaagagaacctggaagacaagtgtggtaaactggaccccactttcgccagtgcaactttactgtttcagaaagaccccccagccgatgtccagctcttccaagaggtgcccaagggtcagtctgaggaggacatggtgggccggcccctgccccacctggcagcggacatgcaggcctctggtgaggccgtgtactgtgacgacattcctcgctacgagaatgagctgtctctccggctggtcaccagcacccgggcccacgccaagatcaagtccatagatacatcagaagctaagaaggttccagggtttgtttgtttcatttccgctgatgatgttcctgggagtaacataactggaatttgtaatgatgagacagtctttgcgaaggataaggttacttgtgttgggcatatcattggtgctgtggttgctgacaccccggaacacacacagagagctgcccaaggggtgaaaatcacctatgaagaactaccagccattatcacaattgaggatgctataaagaacaactccttttatggacctgagctgaagatcgagaaaggggacctaaagaaggggttttccgaagcagataatgttgtgtcaggggagatatacatcggtggccaagagcacttctacctggagactcactgcaccattgctgttccaaaaggcgaggcaggggagatggagctctttgtgtctacacagaacaccatgaagacccagagctttgttgcaaaaatgttgggggttccagcaaaccggattgtggttcgagtgaagagaatgggaggaggctttggaggcaaggagacccggagcactgtggtgtccacggcagtggccctggctgcatataagaccggccgccctgtgcgatgcatgctggaccgtgatgaggacatgctgataactggtggcagacatcccttcctggccagatacaaggttggcttcatgaagactgggacagttgtggctcttgaggtggaccacttcagcaatgtggggaacacccaggatctctctcagagtattatggaacgagctttattccacatggacaactgctataaaatccccaacatccggggcactgggcggctgtgcaaaaccaaccttccctccaacacggccttccggggctttggggggccccaggggatgctcattgccgagtgctggatgagtgaagttgcagtgacctgtgggatgcctgcagaggaggtgcggagaaaaaacctgtacaaagaaggggacctgacacacttcaaccagaagcttgagggtttcaccttgcccagatgctgggaagaatgcctagcaagctctcagtatcatgctcggaagagtgaggttgacaagttcaacaaggagaattgttggaaaaagagaggattgtgcataattcccaccaagtttggaataagctttacagttccttttctgaatcaggcaggagccctacttcatgtgtacacagatggctctgtgctgctgacccacggggggactgagatgggccaaggccttcataccaaaatggtccaggtggccagtagagctctgaaaatccccacctctaagatttatatcagcgagacaagcactaacactgtgcccaacacctctcccacggctgcctctgtcagcgctgacctcaatggacaggccgtctatgcggcttgtcagaccatcttgaaaaggctggaaccctacaagaagaagaatcccagtggctcctgggaagactgggtcacagctgcctacatggacacagtgagcttgtctgccactgggttttatagaacacccaatctgggctacagctttgagactaactcagggaaccccttccactacttcagctatggggtggcttgctctgaagtagaaatcgactgcctaacaggagatcataagaacctccgcacagatattgtcatggatgttggctccagtctaaaccctgccattgatattggacaggtggaaggggcatttgtccagggccttggcctcttcaccctagaggagctacactattcccccgaggggagcctgcacacccgtggccctagcacctacaagatcccggcatttggcagcatccccattgagttcagggtgtccctgctccgcgactgccccaacaagaaggccatctatgcatcgaaggctgttggagagccgcccctcttcctggctgcttctatcttctttgccatcaaagatgccatccgtgcagctcgagctcagcacacaggtaataacgtgaaggaactcttccggctagacagccctgccaccccggagaagatccgcaatgcctgcgtggacaagttcaccaccctgtgtgtcactggtgtcccagaaaactgcaaaccctggtctgtgagggtctaaagagagagtcctcagcagagtcttcttgtgctgcctttgggcttccatggagcaggaggaacataccacagaacatggatctattaaagtcacagaatgacagacctgtgatttgtcaagatgggatttggaagacaagtgaatgcaatggaagattttgatcaaaaatgtaatttgtaaacacaatgataagcaaattcaaaactgttatgcctaaatggtgaatatgcaattaggatcattttctgtctgttttaatcatgtatctggaatagggtcgggaagggtttgtgctattccccacttactggacagcctgtataacctcaagttctgatggtgtctgtcctttgaagaggattcccacaaacctctagaagcttaaaccgaagttactttaaatcgtgtgccttcctgtgaaagcctggccttcaaaccaatgaacagcaaagcataaccttgaatctatactcaaattttgcaatgaggcagtggggtaaggttaaatcctctaaccatctttgaatcattggaaagaataaagaatgaaacaaattcaaggttaattggatctgattttgtgaagctgcataaagcaagattactctataatacaaaaatccaaccaactcaattattgagcacgtacaatgttctagatttctttcccttcctctttgaagagaatatttgtattccaaatactctttgagtatttacaaaaaagattatgtttaatctttacatttgaagccaaagtaatttccacctagaaatgatgctatcagtcctggcatggtggctcacccctataatcccagcactttgggaggctaaggcaggagaattgcttgagcccagcagtttgagaccagcctgggcaacatagagagctcctgtctttaaaaaaaatttttttaattagttggtcttgatagtgcatgcctgtagtcccaactacttgaaaggctgaggtggagagatcatttgagctcaggaggttgaggctgcagtgagctatgattgcgccactgcactcctgcctgagcgactgagcaagatcttgtctctgaagaaaaaaaaagaaataaaaatgctgctatcaaaatcaagcccaaccagaggtagaagagccaagaagcctgggttctcatcctagctctgtctcttctgtctctatctttgtgatcttggactgtcaattccccttcctgtgatccattttactgcaaacataagggttgcagtaaagggttgtctcacgtcttctgctttaaaagcctataaatatatgacctgaaaactccagttacataaaggatctgcagctatctaaggcttggttttcttactgtcatatgatacctgggtctaatgaactctgctgagatcacctcaagtttctgcggttggtaaagagaacaagggaagaacaaacatcccttttattgctccaaatggtgatttaatccctacatggtgctgggtggacaatgtgtcactgtcacatgccttcactgtataaatccaaccttctgccagagagaatctgtggttctggccatggagggaggatagtggaaatgatatagttggactggtgcttgatgtcactaataaatgaaactgtcagctgg

SEQ ID NO: 8218 - protein, 273 aa, Artificial Sequence
  derived and/or modified sequence
MAAADGALPEAAALEQPAELPASVRASIERKRQRALMLRQARLAARPYSATAAAATGGMANVKAAPKIIDTGGGFILEEEEEEEQKIGKVVHQPGPVMEFDYVICEECGKEFMDSYLMNHFDLPTCDNCRDADDKHKLITKTEAKQEYLLKDCDLEKREPPLKFIVKKNPHHSQWGDMKLYLKLQIVKRSLEVWGSQEALEEAKEVRQENREKMKQKKFDKKVKELRRAVRSSVWKRETIVHQHEYGPEENLEDDMYRKTCTMCGHELTYEKM

SEQ ID NO: 8219 - DNA, 822 bp, Artificial Sequence
  derived and/or modified sequence
atggccgccgccgacggcgccctgcccgaggccgccgccctggagcagcccgccgagctgcccgccagcgtgagagccagcatcgagagaaagagacagagagccctgatgctgagacaggccagactggccgccagaccctacagcgccaccgccgccgccgccaccggcggcatggccaacgtgaaggccgcccccaagatcatcgacaccggcggcggcttcatcctggaggaggaggaggaggaggagcagaagatcggcaaggtggtgcaccagcccggccccgtgatggagttcgactacgtgatctgcgaggagtgcggcaaggagttcatggacagctacctgatgaaccacttcgacctgcccacctgcgacaactgcagagacgccgacgacaagcacaagctgatcaccaagaccgaggccaagcaggagtacctgctgaaggactgcgacctggagaagagagagccccccctgaagttcatcgtgaagaagaacccccaccacagccagtggggcgacatgaagctgtacctgaagctgcagatcgtgaagagaagcctggaggtgtggggcagccaggaggccctggaggaggccaaggaggtgagacaggagaacagagagaagatgaagcagaagaagttcgacaagaaggtgaaggagctgagaagagccgtgagaagcagcgtgtggaagagagagaccatcgtgcaccagcacgagtacggccccgaggagaacctggaggacgacatgtacagaaagacctgcaccatgtgcggccacgagctgacctacgagaagatgtag

SEQ ID NO: 8220 - DNA, 822 bp, Artificial Sequence
  derived and/or modified sequence
atggctgcagccgatggtgcactgcctgaagctgctgccttagagcagcctgcggaactgcccgcaagcgtgcgtgcctcaatcgagcgtaaaagacagagggctctaatgcttcgacaagctagactggccgctagaccctactccgcgacagctgctgcagctaccggaggcatggccaatgtaaaggccgccccaaagattattgacaccggaggaggcttcatcctggaggaagaggaggaggaggaacagaaaatcggaaaggtcgtgcaccagcctggccccgtgatggagtttgattacgtgatttgcgaggagtgcggcaaagagtttatggacagctatttgatgaaccacttcgaccttcccacctgtgataactgtcgggatgctgacgataaacacaaattgatcacaaagaccgaggccaagcaggagtacttattgaaagactgcgatctggaaaagcgcgagcctcccctgaagtttattgtgaaaaagaacccacaccactctcagtggggtgatatgaagctttacctgaagctgcagatcgttaaacggtccttggaagtgtggggctcccaggaggctctggaggaagctaaagaggttagacaagagaaccgcgagaaaatgaagcagaagaaattcgataaaaaggtgaaagagctgagaagggcagtgagatcctccgtgtggaaacgggaaaccatcgtgcatcagcatgaatacgggcccgaagaaaacttggaggatgatatgtataggaaaacctgcactatgtgcgggcatgaactgacctatgagaagatgtag

SEQ ID NO: 8221 - DNA, 822 bp, Artificial Sequence
  derived and/or modified sequence
atggctgctgctgatggagccctgcctgaggccgccgccctggagcagcctgctgagctgcctgcctctgtgcgggccagcattgaaaggaagaggcagagggccctgatgctgcggcaggcccggctggccgcccggccctacagcgccacagctgctgctgccaccggcggcatggccaacgtgaaggccgcccccaagatcatcgacacaggaggcggcttcatcctggaggaggaggaggaggaggagcagaagattggcaaggtggtgcaccagcccggccctgtgatggagtttgattatgtgatctgtgaagaatgtgggaaggagttcatggacagctacctgatgaaccactttgacctgcccacctgtgacaactgcagagatgctgatgacaagcacaagctgatcaccaagacagaggccaagcaggagtacctgctgaaggactgtgacctggagaagcgggagccccccctgaagttcatcgtgaagaagaacccccaccacagccagtggggagacatgaagctgtacctgaagctgcagatcgtgaagaggagcctggaggtgtggggcagccaggaggccctggaggaggccaaggaggtgcggcaggagaaccgggagaagatgaagcagaagaagtttgacaagaaggtgaaggagctgcggcgggctgtgcgcagctctgtgtggaagcgggagaccatcgtgcaccagcacgagtatggccctgaggagaacctggaggatgacatgtacaggaagacctgcaccatgtgtggccacgagctgacctatgagaagatgtag

SEQ ID NO: 8222 - DNA, 822 bp, Artificial Sequence
  derived and/or modified sequence
atggccgccgccgacggcgccctgcccgaggccgccgccctggagcagccagccgagctcccagctagcgttagggcctccatcgagcgcaagcgccagagagctttgatgctgaggcaggcacggctcgcagcccgcccctacagtgctacggctgcagcggcaaccggcggaatggctaatgtgaaggctgcgccaaaaattattgacaccggtgggggttttatcctggaggaagaagaagaggaagagcagaagatcgggaaagtggtgcatcagccgggccctgtcatggaatttgattatgtgatctgcgaagagtgtggtaaggagttcatggactcatatcttatgaaccacttcgacctacccacttgcgataattgtcgtgatgctgacgataaacacaaacttatcacaaaaactgaggccaaacaggagtatctcttaaaggattgcgatttagaaaagcgcgagcctcctcttaaattcatcgtaaagaaaaatcctcaccattcccaatggggcgatatgaagctttacctgaagctccagatcgtgaagcgctccctggaggtctggggcagccaggaggcgctcgaggaagccaaggaagtccgtcaggaaaatcgagagaaaatgaagcaaaaaaaattcgataagaaagttaaagagctcaggcgggccgtcaggtcctctgtatggaaaagagaaaccatcgtgcaccagcacgaatatgggcctgaggaaaacctggaggatgacatgtaccggaagacgtgcaccatgtgtggccatgagctcacctatgaaaaaatgtag

SEQ ID NO: 8223 - DNA, 822 bp, Artificial Sequence
  derived and/or modified sequence
atggctgcagccgacggcgctttgcctgaagccgcagctctggagcagccggctgagcttcctgcctccgtccgggcatcaatcgaacgtaagaggcagcgtgctctcatgttgcgtcaggcacgcttggctgctcggccttatagcgcgaccgctgcggctgctaccggcggaatggccaacgtcaaagccgctccaaaaattatcgatactggtgggggattcattctcgaagaagaggaggaggaggaacaaaagattgggaaggtagtgcaccagcccggtcccgtgatggagtttgattacgtcatctgcgaagagtgtggtaaagaatttatggactcctatctcatgaaccatttcgacttgccaacttgtgacaattgcagggatgcggatgataagcataaactgataaccaagacggaggccaagcaggaatacctcctcaaggattgtgatctcgagaagcgggaaccacctcttaaattcattgtcaagaaaaatccacatcattctcagtggggggatatgaagctgtacctgaagctgcagatcgttaagcgatcgctggaggtttggggaagccaagaggcactcgaggaagcaaaagaggtgcgccaagagaacagagaaaagatgaagcagaaaaagttcgataaaaaagttaaggaactgcgaagagccgtccgtagtagtgtgtggaagcgggagacgatcgtgcaccagcatgaatacggtcctgaagagaacctggaagatgacatgtacagaaaaacatgcactatgtgcggccacgagctgacctatgagaagatgtag

SEQ ID NO: 8224 - DNA, 1417 bp, Artificial Sequence
  derived and/or modified sequence
ggctcgcctcggcgtgcagtgcgcgtgcgtggagctgggagctaggtcctcggagtgggccagagatggcggcggccgacggggctttgccggaggcggcggctttagagcaacccgcggagctgcctgcctcggtgcgggcgagtatcgagcggaagcggcagcgggcactgatgctgcgccaggcccggctggctgcccggccctactcggcgacggcggctgcggctactggaggcatggctaatgtaaaagcagccccaaagataattgacacaggaggaggcttcattttagaagaggaagaagaagaagaacagaaaattggaaaagttgttcatcaaccaggacctgttatggaatttgattatgtaatatgcgaagaatgtgggaaagaatttatggattcttatcttatgaaccactttgatttgccaacttgtgataactgcagagatgctgatgataaacacaagcttataaccaaaacagaggcaaaacaagaatatcttctgaaagactgtgatttagaaaaaagagagccacctcttaaatttattgtgaagaagaatccacatcattcacaatggggtgatatgaaactctacttaaagttacagattgtgaagaggtctcttgaagtttggggtagtcaagaagcattagaagaagcaaaggaagtccgacaggaaaaccgagaaaaaatgaaacagaagaaatttgataaaaaagtaaaagaattgcggcgagcagtaagaagcagcgtgtggaaaagggagacgattgttcatcaacatgagtatggaccagaagaaaacctagaagatgacatgtaccgtaagacttgtactatgtgtggccatgaactgacatatgaaaaaatgtgattttttagttcagtgacctgttttatagaattttatatttaaataaaggaaatttagattggtccttttcaaaattcaaaaaaaaaagcaacatcttcatagatgaatgaaacccttgtataagtaatacttcagtaataattatgtatgttatggcttaaaagcaagtttcagtgaaggtcacctggcctggttgtgtgcacaatgtcatgtctgtgattgccttcttacaacagagatgggagctgagtgctagagtaggtgcagaagtggtaggtcagctacaaatttgaggacaagataccaaggcaaaccctagattggggtagagggaaaagggttcaacaaaggctgaactggattcttaaccaagaaacaaataatagcaatggtggtgcaccactgtaccccaggttctagtcatgtgttttttaggacgatttctgtctccacgatggtggaaacagtggggaactactgctggaaaaagccctaatagcagaaataaacattgagttgtacgagtctga

SEQ ID NO: 8225 - protein, 485 aa, Artificial Sequence
  derived and/or modified sequence
MELEVRRVRQAFLSGRSRPLRFRLQQLEALRRMVQEREKDILTAIAADLCKSEFNVYSQEVITVLGEIDFMLENLPEWVTAKPVKKNVLTMLDEAYIQPQPLGVVLIIGAWNYPFVLTIQPLIGAIAAGNAVIIKPSELSENTAKILAKLLPQYLDQDLYIVINGGVEETTELLKQRFDHIFYTGNTAVGKIVMEAAAKHLTPVTLELGGKSPCYIDKDCDLDIVCRRITWGKYMNCGQTCIAPDYILCEASLQNQIVWKIKETVKEFYGENIKESPDYERIINLRHFKRILSLLEGQKIAFGGETDEATRYIAPTVLTDVDPKTKVMQEEIFGPILPIVPVKNVDEAINFINEREKPLALYVFSHNHKLIKRMIDETSSGGVTGNDVIMHFTLNSFPFGGVGSSGMGAYHGKHSFDTFSHQRPCLLKSLKREGANKLRYPPNSQSKVDWGKFFLLKRFNKEKLGLLLLTFLGIVAAVLVKAEYY

SEQ ID NO: 8226 - DNA, 1458 bp, Artificial Sequence
  derived and/or modified sequence
atggaactggaggtgagaagagtccgacaggcgttcctttccggccgcagcagacccctgcgctttcgacttcagcagctggaagccctccgaaggatggtgcaggagagggagaaggacatcctcaccgctatagctgcagatctttgcaaatctgaatttaatgtgtattcacaagaagtgatcacagttttgggggagatcgacttcatgctcgaaaacttgcccgagtgggtgacagcgaaaccagtgaaaaagaacgtgctcaccatgttagatgaggcatacatccagccccagccactgggggtggttctgatcattggagcctggaactatcctttcgtgcttactattcaaccgcttatcggtgccattgccgccggaaatgctgttataattaagccctctgagctttcggagaatacagccaagatcctggccaagttgttaccacagtaccttgaccaggatctttatatcgtgatcaacggaggggtggaggagaccactgagcttctaaaacagcggtttgaccacatcttctataccgggaacactgctgtgggcaagatcgttatggaagccgccgctaagcaccttacccccgttactctggagctcggaggaaaatcaccttgttatattgataaagactgtgaccttgacattgtctgcaggcgtatcacttgggggaaatatatgaattgtggccagacgtgcatcgcccctgactacatcctgtgtgaggccagcctccagaatcagattgtgtggaagatcaaggaaacagtgaaggagttttatggtgaaaatatcaaagagtcccccgactatgagaggatcatcaacctgaggcattttaaacggatcctgtctttactggaaggacaaaaaatagcatttggcggcgagacggacgaagcgacccgatatatcgctccaacagtgctgacagatgttgatcccaagacaaaggttatgcaagaggagatcttcggccctatcctgcccattgtacccgtgaagaatgtagatgaagcgatcaattttataaacgagcgggaaaaaccccttgccctctatgtgttcagccataatcacaaactgataaagcggatgattgacgagacgtccagcggcggcgttactggcaacgatgtaattatgcactttaccctgaactcctttccttttggcggcgttggttcctcaggaatgggtgcctatcacggcaaacactctttcgacacctttagccaccaacgcccttgtctactgaaaagcctaaagagagaaggggctaacaaactcaggtacccacctaatagccagtcaaaagtggactggggcaagttcttcctactgaaaagatttaacaaagaaaagttgggcctgctgttactgacattcctaggcatcgtcgcagcagtgctcgtgaaggcagaatactactag

SEQ ID NO: 8227 - DNA, 1458 bp, Artificial Sequence
  derived and/or modified sequence
atggagttggaagtccggagagtccgccaggcattcctgtcaggtcgatcaaggccgttacgcttcaggctgcagcagttggaagcacttcgaaggatggtccaggagcgggagaaggatatcctgacagctatagcggccgacctctgtaagtccgagttcaacgtgtattcccaagaagtgattaccgtgctgggggaaatcgattttatgctcgaaaacctgcccgagtgggtgaccgccaaaccggtcaagaaaaatgtcttaaccatgctggacgaagcctatattcagccccagcccctcggcgtggtgctcattattggcgcttggaattacccattcgtcctgacaatccaacccctgatcggagcgatagccgcggggaacgcagttataatcaaaccgtccgagctgtcggaaaatacggccaagattctcgctaaactgcttcctcagtacctggaccaagacctctacattgtcattaacgggggggtggaggagaccactgagctgcttaaacagcggttcgatcacattttttatactggaaatactgccgtgggtaaaatagtcatggaagcagctgccaagcacctgacacccgttacactagaactgggtgggaaaagcccatgttacatcgataaggattgtgatctggacatcgtttgcaggagaatcacatggggtaaatatatgaattgcggacagacatgcatcgccccggattacatcctgtgcgaggcgtctctacagaatcaaatcgtgtggaagattaaagagacagtgaaggaattttatggggaaaacatcaaagaatcccctgattacgaacggatcattaaccttagacatttcaagcgcatcctatctcttctggagggtcaaaaaattgcgttcgggggagaaacagacgaagccacacgctacatcgcacccactgttttgaccgatgtagaccctaagacaaaggtgatgcaagaggaaatctttgggccaatcctgccaatcgtgccggtcaaaaacgtcgacgaagctattaactttattaacgagcgggagaaacccctggccctgtatgtttttagtcacaatcataaactcattaagcggatgattgatgaaacctccagcggaggtgtgaccgggaatgatgtgatcatgcattttaccctgaactcctttccctttgggggagttggatcatcgggcatgggagcttatcacgggaagcattctttcgacacattcagccaccagagaccgtgcttactaaaatcacttaagcgtgaaggagcgaacaaactgaggtacccccccaatagtcagtctaaggttgattggggtaagtttttcctcctgaagcgattcaacaaggaaaagctgggcctgctgctactaacttttttaggcatcgtcgccgccgtcctggtcaaggccgagtattattag

SEQ ID NO: 8228 - DNA, 501 bp, Artificial Sequence
  derived and/or modified sequence
atggagctagaggtaaggcgggtccggcaggcctttctcagtggaaggagcagacctctgcgcttcaggctgcagcaattggaagccctgcgaagaatggttcaggagcgagaaaaagacatccttacagctattgccgccgacctctgcaagtccgagtttaacgtgtactcccaagaggtgattactgtgctcggcgagattgacttcatgttggagaatttgccagaatgggtgaccgccaagccagtcaagaaaaacgtcctcaccatgctggatgaagcctacatccaaccccagccgctaggggttgtgttgattataggggcttggaactacccatttgtgctaacaattcaaccgctaatcggcgccattgctgcagggaacgccgtgatcattaagccgtctgaactttccgagaatacggctaagatcctggcaaagctactaccacagtacctggaccaagacctatacatagttatcaacggagggtag

SEQ ID NO: 8229 - DNA, 1458 bp, Artificial Sequence
  derived and/or modified sequence
atggagctggaggtgcggcgggtgcggcaggccttcctgagcggccgcagccggcccctgcgcttccggctgcagcagctggaggccctgcggaggatggtgcaggagcgggagaaggacatcctgacagccatcgctgctgacctgtgcaagtctgagttcaacgtgtacagccaggaggtgatcaccgtgctgggggagattgacttcatgctggagaacctgcctgagtgggtgacagccaagcctgtgaagaagaatgtgctgaccatgctggatgaggcctacatccagccccagcccctgggcgtggtgctgatcatcggggcctggaactacccctttgtgctgaccatccagcccctgattggagccatcgctgctggaaatgctgtgatcatcaagcccagcgagctgtctgaaaatacagccaagatcctggccaagctgctgccccagtacctggaccaggacctgtacatcgtcatcaatggaggagtggaggagaccacagagctgctgaagcagagatttgaccacatcttctacacaggcaacacagctgtgggcaagatcgtgatggaggccgccgccaagcacctgacccctgtgaccctggagctgggcggcaagagcccctgctacatcgacaaggactgtgacctggacatcgtgtgccgccgcatcacctggggcaagtacatgaactgtggccagacctgcatcgccccagactacatcctgtgtgaggccagcctgcagaaccagatcgtgtggaagatcaaggagaccgtgaaggagttctatggagagaacatcaaggagagcccagactatgagcgcatcatcaacctgcggcacttcaagaggatcctgagcctgctggagggccagaagatcgccttcggcggggagacagatgaggccacccgctacatcgcccccaccgtgctgacagatgtggaccccaagaccaaggtgatgcaggaggagatcttcggccccatcctgcccatcgtgcctgtgaagaatgtggatgaggccatcaacttcatcaatgaaagagagaagcccctggccctgtatgtgttcagccacaaccacaagctgatcaagaggatgattgatgagaccagcagcggcggcgtgactggaaatgatgtgatcatgcacttcaccctgaacagcttcccctttggaggagtgggcagcagcggcatgggcgcctaccacggcaagcacagctttgacaccttcagccaccagaggccctgcctgctgaagagcctgaagcgggagggcgccaacaagctgcgctacccacccaacagccagagcaaggtggactggggcaagttcttcctgctgaagcgcttcaacaaggagaagctgggcctgctgctgctgaccttcctgggcatcgtggccgctgtgctggtgaaggccgagtactactag

SEQ ID NO: 8230 - DNA, 501 bp, Artificial Sequence
  derived and/or modified sequence
atggagctggaggtgcggcgggtgcggcaggccttcctgagcggccgcagccggcccctgcgcttccggctgcagcagctggaggccctgcggaggatggtgcaggagcgggagaaggacatcctgacagccatcgctgctgacctgtgcaagtctgagttcaacgtgtacagccaggaggtgatcaccgtgctgggggagattgacttcatgctggagaacctgcctgagtgggtgacagccaagcctgtgaagaagaatgtgctgaccatgctggatgaggcctacatccagccccagcccctgggcgtggtgctgatcatcggggcctggaactacccctttgtgctgaccatccagcccctgattggagccatcgctgctggaaatgctgtgatcatcaagcccagcgagctgtctgaaaatacagccaagatcctggccaagctgctgccccagtacctggaccaggacctgtacatcgtcatcaatggaggatag

SEQ ID NO: 8231 - DNA, 3928 bp, Artificial Sequence
  derived and/or modified sequence
ccggggcgctctcagcaggatggccaacaccttccctccatccctacaccccgccgccccctggcccgtggccgcgctcggctcccgcactgctcactccaccccctacatcccagcccgctgccagagccggggagagggcgggggccgcgtgggcgaggccgtgaacagcggctgtcacgtgggccgcccaggccaataggggtgaggctttgggtcgagctcagtcctcccccggcgcctccgactggcagtgggactcagcgggcgtggaggtcgcggctgagcgagcgagccctgggcgagtgaattgtggctgtgggttgacggtggagacaccccccggagggaggcggagggaagggaggcgaggcctgcacctgcatgcttcccgcctcccactccccagcgcccccggaccgtgcagttctctgcaggaccaggccatggagctcgaagtccggcgggtccgacaggcgttcctgtccggccggtcgcgacctctgcggtttcggctgcagcagctggaggccctgcggaggatggtgcaggagcgcgagaaggatatcctgacggccatcgccgccgacctgtgcaagagtgaattcaatgtgtacagtcaggaagtcattactgtccttggggaaattgattttatgcttgagaatcttcctgaatgggttactgctaaaccagttaagaagaacgtgctcaccatgctggatgaggcctatattcagccacagcctctgggagtggtgctgataatcggagcttggaattaccccttcgttctcaccattcagccactgataggagccatcgctgcaggaaatgctgtgattataaagccttctgaactgagtgaaaatacagccaagatcttggcaaagcttctccctcagtatttagaccaggatctctatattgttattaatggtggtgttgaggaaaccacggagctcctgaagcagcgatttgaccacattttctatacgggaaacactgcggttggcaaaattgtcatggaagctgctgccaagcatctgacccctgtgactcttgaactgggagggaaaagtccatgttatattgataaagattgtgacctggacattgtttgcagacgcataacctggggaaaatacatgaattgtggccaaacctgcattgcacccgactatattctctgtgaagcatccctccaaaatcaaattgtatggaagattaaggaaacagtgaaggaattttatggagaaaatataaaagagtctcctgattatgaaaggatcatcaatcttcgtcattttaagaggatactaagtttgcttgaaggacaaaagatagcttttggtggggagactgatgaggccacacgctacatagccccaacagtacttaccgatgttgatcctaaaaccaaggtgatgcaagaagaaatttttggaccaattcttccaatagtgcctgtgaaaaatgtagatgaggccataaatttcataaatgaacgtgaaaagcctctggctctttatgtattttcgcataaccataagctcatcaaacggatgattgatgagacatccagtggaggtgtcacaggcaatgacgtcattatgcacttcacgctcaactctttcccatttggaggagtgggttccagtgggatgggagcttatcacggaaaacatagttttgatactttttctcatcagcgtccctgtttattaaaaagtttaaagagagaaggtgctaacaaactcagatatcctcccaacagccagtcaaaggtggattggggaaaattttttctcttgaaacggttcaacaaagaaaaactcggtctcctgttgctcactttcctgggtattgtagccgctgtgcttgtcaaggcagaatattactgaagaatgatcctgttcaacctcctagtgcctctactgaattattcctcttttaaatggttaatgaaccaataatttttaaatcataccaaaaatagtaagaaaatatgcaaacactctgtgatcaaacttaaaagtcattgccattcatcattaataaaagttgccatttcaactacgtcccaacattccctaatagggtattcagggaacctgtcttaaattgtgcttatctaaatcttggaactttgagctaggggaggagaatgtattagactaaatacaaactgcggggttgtaagggagtctcagaacctcactgaatccttcactccagttaatggcactgctcacttcctgcctctgctgccaccatcactgtgtgaagctttcaagagcttggtacttcccagggctaccggcagtcctctgtagtccagagaggtgagattagatcttcttggttccctgtgaggtttcaggcactaaaactctatgtggggaagggaggggttactcctcctccaatgggactcaaggacttgacctccaggagtaggcccctggtcagaagtgccatctcaccagtggtcttcattcttcctcattcattctttatcatcctgtgttctgtttagttgcaacaatctcttgtgactaatgtcactcaaagcatcttgtaaatcctagggcttcctggaagttagttgccaaagtcatgcaagcatcacctgtcattcttgtgttggagttatagaattctacatcttataaaacctaactggcatttaaaaaatactgtggccgggcgtggtggctcatgcctgtaatcccagcactttgggaggccgaggtgggaggattgcttgagtccaggaatttgagaccagcctggacaacacagtgagacctcatctctatcaaaaaataaaaattagctagatgtggtggcatgagcctgtgttcccagctgcttaggaggctgaagcaggaggattgattgagcctgcgaggccaaggctgcagcaggctgtgattgcaccactgcacttcagcttgggcaacagagcaagaccctgtctccgaaacaaataaaaaatactgtaataaaagtacttataaacatactaatcctctttcaggaccctaaagttgcaggttagtaggtcttcaaggacaaatctgtaagtttcttatttctgtagtgcaagtaaaatttcactttttgaaactatagagagatccctttctgattagcctacagaacttaaagtgagggaaccatttcctctcacagacaaagaggcctgggatattaggactttggggtttgagagcatcatggggcagacagatggtggatggtctggacaagaagcgagtaagccactgcggttggtcatactgaagggaattgatggcaagaggatcccctgagcaagtcagaagttactctcatcagtcgttcatggtcacaacctgaggtactctgctgagtgggcaaggctgaagaagaggcctgtggaatgcagcattacctgctggacagagcagggcaggcagttctatgccttggagctcctgactgcagggactctgtccccacactcaaaaagactcagctcactcaatgagagaatgtgatttactttatagaacgtataatcaactttgttgaataatttgttctattaaggctgtctaaagtatgtgatgtcttcatcatagtatgaagtgttgaaaattaataacgagcctagtttaggaaaaagctgcttaaaactgtggctctaagagagtaatcataaaataccttagataaaattgcactatggaattttcattgagtatgtttaaattattggcttgtctactaatacacatctgcttcaaaatgaacatatttcataaaattggcatcaattttaatgacgctcctggtatggaacctcagatataccctattggagacaatcctttgatcataaattctccccaactataaatcattttatgtctttatcata

SEQ ID NO: 8232 - DNA, 3627 bp, Artificial Sequence
  derived and/or modified sequence
ctttgggtcgagctcagtcctcccccggcgcctccgactggcagtgggactcagcgggcgtggaggtcgcggctgagcgagcgagccctgggcgagtgaattgtggctcgcccccggaccgtgcagttctctgcaggaccaggccatggagctcgaagtccggcgggtccgacaggcgttcctgtccggccggtcgcgacctctgcggtttcggctgcagcagctggaggccctgcggaggatggtgcaggagcgcgagaaggatatcctgacggccatcgccgccgacctgtgcaagagtgaattcaatgtgtacagtcaggaagtcattactgtccttggggaaattgattttatgcttgagaatcttcctgaatgggttactgctaaaccagttaagaagaacgtgctcaccatgctggatgaggcctatattcagccacagcctctgggagtggtgctgataatcggagcttggaattaccccttcgttctcaccattcagccactgataggagccatcgctgcaggaaatgctgtgattataaagccttctgaactgagtgaaaatacagccaagatcttggcaaagcttctccctcagtatttagaccaggatctctatattgttattaatggtggtgttgaggaaaccacggagctcctgaagcagcgatttgaccacattttctatacgggaaacactgcggttggcaaaattgtcatggaagctgctgccaagcatctgacccctgtgactcttgaactgggagggaaaagtccatgttatattgataaagattgtgacctggacattgtttgcagacgcataacctggggaaaatacatgaattgtggccaaacctgcattgcacccgactatattctctgtgaagcatccctccaaaatcaaattgtatggaagattaaggaaacagtgaaggaattttatggagaaaatataaaagagtctcctgattatgaaaggatcatcaatcttcgtcattttaagaggatactaagtttgcttgaaggacaaaagatagcttttggtggggagactgatgaggccacacgctacatagccccaacagtacttaccgatgttgatcctaaaaccaaggtgatgcaagaagaaatttttggaccaattcttccaatagtgcctgtgaaaaatgtagatgaggccataaatttcataaatgaacgtgaaaagcctctggctctttatgtattttcgcataaccataagctcatcaaacggatgattgatgagacatccagtggaggtgtcacaggcaatgacgtcattatgcacttcacgctcaactctttcccatttggaggagtgggttccagtgggatgggagcttatcacggaaaacatagttttgatactttttctcatcagcgtccctgtttattaaaaagtttaaagagagaaggtgctaacaaactcagatatcctcccaacagccagtcaaaggtggattggggaaaattttttctcttgaaacggttcaacaaagaaaaactcggtctcctgttgctcactttcctgggtattgtagccgctgtgcttgtcaaggcagaatattactgaagaatgatcctgttcaacctcctagtgcctctactgaattattcctcttttaaatggttaatgaaccaataatttttaaatcataccaaaaatagtaagaaaatatgcaaacactctgtgatcaaacttaaaagtcattgccattcatcattaataaaagttgccatttcaactacgtcccaacattccctaatagggtattcagggaacctgtcttaaattgtgcttatctaaatcttggaactttgagctaggggaggagaatgtattagactaaatacaaactgcggggttgtaagggagtctcagaacctcactgaatccttcactccagttaatggcactgctcacttcctgcctctgctgccaccatcactgtgtgaagctttcaagagcttggtacttcccagggctaccggcagtcctctgtagtccagagaggtgagattagatcttcttggttccctgtgaggtttcaggcactaaaactctatgtggggaagggaggggttactcctcctccaatgggactcaaggacttgacctccaggagtaggcccctggtcagaagtgccatctcaccagtggtcttcattcttcctcattcattctttatcatcctgtgttctgtttagttgcaacaatctcttgtgactaatgtcactcaaagcatcttgtaaatcctagggcttcctggaagttagttgccaaagtcatgcaagcatcacctgtcattcttgtgttggagttatagaattctacatcttataaaacctaactggcatttaaaaaatactgtggccgggcgtggtggctcatgcctgtaatcccagcactttgggaggccgaggtgggaggattgcttgagtccaggaatttgagaccagcctggacaacacagtgagacctcatctctatcaaaaaataaaaattagctagatgtggtggcatgagcctgtgttcccagctgcttaggaggctgaagcaggaggattgattgagcctgcgaggccaaggctgcagcaggctgtgattgcaccactgcacttcagcttgggcaacagagcaagaccctgtctccgaaacaaataaaaaatactgtaataaaagtacttataaacatactaatcctctttcaggaccctaaagttgcaggttagtaggtcttcaaggacaaatctgtaagtttcttatttctgtagtgcaagtaaaatttcactttttgaaactatagagagatccctttctgattagcctacagaacttaaagtgagggaaccatttcctctcacagacaaagaggcctgggatattaggactttggggtttgagagcatcatggggcagacagatggtggatggtctggacaagaagcgagtaagccactgcggttggtcatactgaagggaattgatggcaagaggatcccctgagcaagtcagaagttactctcatcagtcgttcatggtcacaacctgaggtactctgctgagtgggcaaggctgaagaagaggcctgtggaatgcagcattacctgctggacagagcagggcaggcagttctatgccttggagctcctgactgcagggactctgtccccacactcaaaaagactcagctcactcaatgagagaatgtgatttactttatagaacgtataatcaactttgttgaataatttgttctattaaggctgtctaaagtatgtgatgtcttcatcatagtatgaagtgttgaaaattaataacgagcctagtttaggaaaaagctgcttaaaactgtggctctaagagagtaatcataaaataccttagataaaattgcactatggaattttcattgagtatgtttaaattattggcttgtctactaatacacatctgcttcaaaatgaacatatttcataaaattggcatcaattttaatgacgctcctggtatggaacctcagatataccctattggagacaatcctttgatcataaattctccccaactataaatcattttatgtctttatcata

SEQ ID NO: 8233 - DNA, 655 bp, Artificial Sequence
  derived and/or modified sequence
gagtaacggacgtgcgaggatgatgcttgtgcaagaaggaaatgaccgctgtcccggctccgcgggagacgaaccccggcttcccgccctcagggactagctctccagggaactgggacgcgcccccggaccgtgcagttctctgcaggaccaggccatggagctcgaagtccggcgggtccgacaggcgttcctgtccggccggtcgcgacctctgcggtttcggctgcagcagctggaggccctgcggaggatggtgcaggagcgcgagaaggatatcctgacggccatcgccgccgacctgtgcaagagtgaattcaatgtgtacagtcaggaagtcattactgtccttggggaaattgattttatgcttgagaatcttcctgaatgggttactgctaaaccagttaagaagaacgtgctcaccatgctggatgaggcctatattcagccacagcctctgggagtggtgctgataatcggagcttggaattaccccttcgttctcaccattcagccactgataggagccatcgctgcaggaaatgctgtgattataaagccttctgaactgagtgaaaatacagccaagatcttggcaaagcttctccctcagtatttagaccaggatctctatattgttattaatggtggt

SEQ ID NO: 8234 - DNA, 1458 bp, Artificial Sequence
  derived and/or modified sequence
atggagctggaggtgcggcgggtgcggcaggccttcctgagcggcagaagcagaccattacgattcagactgcaacagcttgaggctctgcgccggatggtgcaggagcgcgaaaaggatattttgacggccatcgcagctgacctgtgtaaatccgagttcaacgtatattctcaggaggtgataaccgttttaggcgagatcgacttcatgctggagaacctgcccgagtgggttaccgcaaagcctgtgaaaaagaatgtgcttactatgcttgacgaagcatacattcaacctcagccccttggtgttgtccttataattggcgcttggaactatccatttgtactcacaattcagcctctaataggcgcaatcgcggctggcaacgcagtcattatcaaaccaagtgaactgtccgagaatacagctaaaattctggctaaactgttgccccaatacctcgatcaagatttgtacattgttattaacgggggcgtggaagagaccacagagctgctgaagcagcgatttgaccacattttttatacaggtaacacagcggttggcaagatcgtcatggaagctgcagctaagcacctcactcccgtcactttggagctgggcgggaaatccccttgctacattgataaagactgcgatctggacatcgtgtgccgccgaattacttggggcaagtacatgaactgcggacagacatgcatcgcccctgactacatcctgtgcgaggcgtcacttcagaatcaaatcgtgtggaagatcaaagagacggtgaaagaattctacggtgagaatatcaaggagagccccgattatgaacgcattataaatctgagacatttcaagcggattctgagtctcctggaagggcagaaaattgcctttgggggcgaaacagacgaggccacacgctatatagcccccactgtgctgacagacgtggatcccaagaccaaagtcatgcaggaggagatttttggacctattctgccaatagtgccagtgaaaaatgttgacgaggctattaatttcatcaatgagcgcgaaaagccactggccttatacgtgttcagccataaccacaaactgattaaacggatgatagatgagacctccagtgggggagtcacaggcaacgatgtgattatgcattttactctcaattcttttcctttcggcggagttgggagttcagggatgggagcttatcatggtaaacatagctttgacacattctcacaccagcgcccctgcctactgaaatccctcaaaagggagggtgccaataaactgagatacccaccgaattctcagtcaaaggttgactgggggaagttttttctgttaaagcggttcaataaagagaaactgggtttgctactgctaacttttctgggaattgtggcagcggtacttgtgaaagcggagtactattag

SEQ ID NO: 8235 - DNA, 1458 bp, Artificial Sequence
  derived and/or modified sequence
atggagctggaggtgcggcgggtgcggcaggccttcctgagcggccgctccaggccattgcgttttagattacagcagcttgaagcgctcagacggatggtgcaggagcgcgagaaggacattctcacagctatcgccgccgacctctgtaaaagtgagtttaacgtttactcacaggaagtaatcacggttttaggagaaattgatttcatgctggagaacctaccagagtgggtcacagcaaagccagtgaagaaaaatgtcctgaccatgctagatgaagcttacatacaaccacagccccttggtgtcgtactcatcatcggtgcatggaattatccatttgtcctgacaatccagcctcttatcggcgccatagccgccggtaatgccgtcattatcaaaccttccgaattaagcgagaacacagcaaagattttggcaaagctcttgccccagtatttggatcaagacctgtacattgtgatcaacggaggagtcgaagagacgactgaattgcttaagcagcgttttgaccatattttctatacgggaaacactgccgtgggcaaaatcgtgatggaggcagctgctaaacacctgaccccggtgacattagagctcggaggtaaaagcccctgctatatcgacaaagattgcgacttggacattgtctgtcggcgtattacgtggggtaaatacatgaactgcgggcaaacatgcatagcaccagactacattttatgtgaagccagcctgcagaatcagatcgtctggaaaatcaaggaaaccgtaaaagagttctatggcgagaacatcaaggagagccccgactatgagcgcattatcaaccttcggcattttaaacgcatcttatccctactggagggccagaagatcgcctttggcggcgagacggatgaggccacacggtatatagcaccaactgtcctgacggatgtggatcccaagaccaaggtgatgcaggaagaaattttcggcccaatcctcccaatcgtgccagtcaagaacgtcgatgaagccattaacttcatcaacgagcgggagaagccccttgcactttatgttttcagccataaccataaactgataaagaggatgatcgatgagacctcctcaggaggtgtaaccggcaacgacgtgataatgcacttcactctcaatagttttccgttcggcggggtgggctcctctgggatgggggcgtaccacgggaagcattctttcgacaccttttcgcaccagaggccttgcctcctcaaatctttaaaacgtgagggagccaacaaactgcgttatccccccaacagccaatcaaaggttgactggggcaagttcttcctcttgaagcgcttcaacaaggagaaactgggcctgctgttattaacctttctgggaatagtggcagccgtactagtcaaagccgagtactactag

SEQ ID NO: 8236 - DNA, 501 bp, Artificial Sequence
  derived and/or modified sequence
atggagctggaggtgcggcgggtgcggcaggccttcctgagcggcagatcacgtcccctcaggtttaggttgcagcagttggaagccttacgtcggatggtgcaggagcgggagaaggatattctgaccgcaatcgccgccgatctgtgcaaatcggagttcaatgtctactctcaggaggtgattacagtgctgggagaaatcgacttcatgctcgagaacctgccagagtgggtgacagctaaacccgtgaagaagaatgtcctcacaatgctcgatgaggcctacattcagcctcagcccctcggggtagtcctcataatcggtgcttggaattacccatttgtacttacaatccaacctctgattggggccattgctgctgggaacgctgtgataatcaaacccagcgagttgtctgaaaatacagcaaaaattttggccaaattgctgccacagtaccttgatcaggacttgtatatcgtcataaatggaggctag

SEQ ID NO: 8237 - DNA, 1458 bp, Artificial Sequence
  derived and/or modified sequence
atggaactcgaggttcgccgtgtgcggcaggcattcctgagcggtcgctctcgacctttgaggtttcgtctgcaacagttggaagcactgcgacgcatggtgcaggagcgcgaaaaggacatactgacagctattgctgctgatttgtgcaaatcggagtttaacgtttattcacaggaggttattactgttttgggcgagatcgacttcatgctggagaacctaccagaatgggtgacagccaagcccgtgaaaaagaacgtcctgaccatgctggatgaggcttacattcagccacagccccttggcgtggttctaatcatcggggcatggaactatccgttcgtactcacaattcagccactaatcggagctatagccgcaggaaatgcggtcataattaaaccatccgagttatctgaaaacacagccaagatcctcgccaaactgcttcctcagtatctggaccaggatttatatatagttattaatggcggagtggaagagacaactgaactcttgaaacagaggttcgatcatatcttctacaccgggaacactgctgtgggcaagattgtgatggaagccgctgccaaacacctaactcctgtcacattggaactaggcggtaagagcccgtgttacatagacaaagattgtgatttagacatagtttgccggaggattacatggggcaaatacatgaattgtggccagacctgcattgccccagattatatcctgtgtgaagcaagcctccagaaccagattgtgtggaagataaaagagaccgtgaaggagttctatggagaaaacatcaaggagtcccccgattacgagagaatcatcaatctccgccatttcaagaggatccttagtctgctggaaggacagaagatcgccttcgggggtgagactgatgaagccacgcggtacattgcgccaaccgtgttgactgacgtcgaccctaagaccaaggtgatgcaggaagaaatcttcggacctattttgccgatagtcccagtgaagaatgttgacgaggccatcaatttcattaatgagcgagagaagcccctggccctttacgtcttttcccacaaccacaaactgataaagcgtatgattgacgaaacttcgtcgggcggagttaccggcaacgacgttattatgcattttaccctgaacagcttccccttcgggggagtcgggagtagtggtatgggcgcatatcacgggaaacactcattcgacactttctcacaccagagaccatgtctcctgaagagtttgaagcgggagggggcaaacaaactgcgctaccctcccaactcccaatccaaagtcgattgggggaagttctttttactgaagaggttcaacaaggaaaaactggggctgctcctcctgactttcctcgggattgttgccgctgtgctcgtgaaagcagaatattactag

SEQ ID NO: 8238 - DNA, 1458 bp, Artificial Sequence
  derived and/or modified sequence
atggaacttgaagtccgaagagtgcgacaggccttccttagcggcagatctcgaccgctgagatttcgcttgcagcagctcgaggctctccgcagaatggtccaggagagagagaaagatatactcactgctatcgcagcagatctgtgtaagtcggaattcaacgtgtacagccaggaagttataacggtgctcggcgagatagactttatgctcgagaatttgcccgagtgggtcactgcaaagccagtgaagaagaatgtcctgaccatgctggacgaagcctacattcaaccccaacctttgggcgtggtgctcatcattggagcttggaactatcccttcgtgctcacaatccaaccattgattggcgctatagccgctggaaacgcagtgataatcaagccaagcgagctgtccgagaacaccgcaaagatcctcgctaagctgctgcctcagtatttggaccaggacctgtatattgtgatcaatggaggagtggaagagacaaccgagctgcttaagcagcggttcgaccatattttctataccggaaatactgcagtgggtaagattgtgatggaagcagctgccaagcatctgacacctgtcacgctggagctgggcggaaaatccccgtgttacatcgacaaggattgcgatttggacatcgtgtgcaggaggatcacatggggtaagtacatgaactgtgggcagacctgcatcgctcccgactacattctttgtgaagcctcactccagaaccaaattgtctggaagataaaagagactgtgaaggaattttacggggagaacataaaagagagtccagactacgagaggatcatcaacctaagacactttaaaagaatcctatccttattggaaggccaaaaaattgcatttgggggagaaacagacgaagccacccgctacattgcaccaaccgttctgacagatgttgatccgaagaccaaagtcatgcaggaagaaatttttgggcctattctcccaatcgttcctgttaaaaatgtggacgaggcaattaatttcattaacgaacgggagaagccactggctctgtacgtgttttctcataatcataagcttatcaaaaggatgattgacgagacttcttccggaggcgttaccggtaatgatgttattatgcatttcaccctgaacagtttcccctttggcggagtggggtcaagcggtatgggtgcctaccacggaaaacacagcttcgacactttttcccatcagcgaccttgtttattgaaatctctgaaacgagagggagccaacaaactcagatatccccctaacagtcagagtaaggtcgattggggtaaattcttccttctcaagcgctttaacaaagaaaagctggggcttcttctcctcacatttttgggcatcgtggccgcagtgcttgtcaaggccgagtactattag

SEQ ID NO: 8239 - DNA, 501 bp, Artificial Sequence
  derived and/or modified sequence
atggaattagaagtcagacgtgtcagacaggcattcctgagcgggagaagccggccactccgattccggctgcaacagctagaggcgctgcggaggatggtccaggagagagaaaaggacatcctgacagcaattgctgccgacctgtgtaaatctgagttcaacgtgtacagtcaggaagtcatcacagtgcttggtgaaatagacttcatgctcgagaatctgccagagtgggtaaccgccaagcctgtcaagaagaatgttctgaccatgctggatgaggcatacatccaaccacagcctctgggagttgttttaatcatcggagcctggaattatcccttcgtgctaaccatccaaccactgatcggcgctatagccgctgggaacgcggtgataataaaaccgtcagaattaagtgagaacactgccaaaatcctggcgaagctcctgcctcaatacttggatcaggacttgtacattgtgataaacggcggatag

SEQ ID NO: 8240 - DNA, 1458 bp, Artificial Sequence
  derived and/or modified sequence
atggagctggaggtgagaagagtgagacaggccttcctgagcggcagaagcagacccctgagattcagactgcagcagctggaggccctgagaagaatggtgcaggagagagagaaggacatcctgaccgccatcgccgccgacctgtgcaagagcgagttcaacgtgtacagccaggaggtgatcaccgtgctgggcgagatcgacttcatgctggagaacctgcccgagtgggtgaccgccaagcccgtgaagaagaacgtgctgaccatgctggacgaggcctacatccagccccagcccctgggcgtggtgctgatcatcggcgcctggaactaccccttcgtgctgaccatccagcccctgatcggcgccatcgccgccggcaacgccgtgatcatcaagcccagcgagctgagcgagaacaccgccaagatcctggccaagctgctgccccagtacctggaccaggacctgtacatcgtgatcaacggcggcgtggaggagaccaccgagctgctgaagcagagattcgaccacatcttctacaccggcaacaccgccgtgggcaagatcgtgatggaggccgccgccaagcacctgacccccgtgaccctggagctgggcggcaagagcccctgctacatcgacaaggactgcgacctggacatcgtgtgcagaagaatcacctggggcaagtacatgaactgcggccagacctgcatcgcccccgactacatcctgtgcgaggccagcctgcagaaccagatcgtgtggaagatcaaggagaccgtgaaggagttctacggcgagaacatcaaggagagccccgactacgagagaatcatcaacctgagacacttcaagagaatcctgagcctgctggagggccagaagatcgccttcggcggcgagaccgacgaggccaccagatacatcgcccccaccgtgctgaccgacgtggaccccaagaccaaggtgatgcaggaggagatcttcggccccatcctgcccatcgtgcccgtgaagaacgtggacgaggccatcaacttcatcaacgagagagagaagcccctggccctgtacgtgttcagccacaaccacaagctgatcaagagaatgatcgacgagaccagcagcggcggcgtgaccggcaacgacgtgatcatgcacttcaccctgaacagcttccccttcggcggcgtgggcagcagcggcatgggcgcctaccacggcaagcacagcttcgacaccttcagccaccagagaccctgcctgctgaagagcctgaagagagagggcgccaacaagctgagatacccccccaacagccagagcaaggtggactggggcaagttcttcctgctgaagagattcaacaaggagaagctgggcctgctgctgctgaccttcctgggcatcgtggccgccgtgctggtgaaggccgagtactactag

SEQ ID NO: 8241 - DNA, 501 bp, Artificial Sequence
  derived and/or modified sequence
atggagctggaggtgagaagagtgagacaggccttcctgagcggcagaagcagacccctgagattcagactgcagcagctggaggccctgagaagaatggtgcaggagagagagaaggacatcctgaccgccatcgccgccgacctgtgcaagagcgagttcaacgtgtacagccaggaggtgatcaccgtgctgggcgagatcgacttcatgctggagaacctgcccgagtgggtgaccgccaagcccgtgaagaagaacgtgctgaccatgctggacgaggcctacatccagccccagcccctgggcgtggtgctgatcatcggcgcctggaactaccccttcgtgctgaccatccagcccctgatcggcgccatcgccgccggcaacgccgtgatcatcaagcccagcgagctgagcgagaacaccgccaagatcctggccaagctgctgccccagtacctggaccaggacctgtacatcgtgatcaacggcggctag

SEQ ID NO: 8242 - protein, 545 aa, Artificial Sequence
  derived and/or modified sequence
MATDAALRRLLRLHRTEIAVAVDSAFPLLHALADHDVVPEDKFQETLHLKEKEGCPQAFHALLSWLLTQDSTAILDFWRVLFKDYNLERYGRLQPILDSFPKDVDLSQPRKGRKPPAVPKALVPPPRLPTKRKASEEARAAAPAALTPRGTASPGSQLKAKPPKKPESSAEQQRLPLGNGIQTMSASVQRAVAMSSGDVPGARGAVEGILIQQVFESGGSKKCIQVGGEFYTPSKFEDSGSGKNKARSSSGPKPLVRAKGAQGAAPGGGEARLGQQGSVPAPLALPSDPQLHQKNEDECAVCRDGGELICCDGCPRAFHLACLSPPLREIPSGTWRCSSCLQATVQEVQPRAEEPRPQEPPVETPLPPGLRSAGEEVRGPPGEPLAGMDTTLVYKHLPAPPSAAPLPGLDSSALHPLLCVGPEGQQNLAPGARCGVCGDGTDVLRCTHCAAAFHWRCHFPAGTSRPGTGLRCRSCSGDVTPAPVEGVLAPSPARLAPGPAKDDTASHEPALHRDDLESLLSEHTFDGILQWAIQSMARPAAPFPS

SEQ ID NO: 8243 - protein, 244 aa, Artificial Sequence
  derived and/or modified sequence
MWLVYSSGAPGTQQPARNRVFFPIGMAPGGVCWRPDGWGTGGQGRISGPGSMGAGQRLGSSGTQRCCWGSCFGKEVALRRVLHPSPKNEDECAVCRDGGELICCDGCPRAFHLACLSPPLREIPSGTWRCSSCLQATVQEVQPRAEEPRPQEPPVETPLPPGLRSAGEEPRCQGWTPRPCTPYCVWVLRVSRTWLLVRVAGCAEMVRTCCGVLTAPLPSTGAATSQPAPPGPGRACAADPAQET

SEQ ID NO: 8244 - protein, 348 aa, Artificial Sequence
  derived and/or modified sequence
MWLVYSSGAPGTQQPARNRVFFPIGMAPGGVCWRPDGWGTGGQGRISGPGSMGAGQRLGSSGTQRCCWGSCFGKEVALRRVLHPSPVCMGVSCLCQKNEDECAVCRDGGELICCDGCPRAFHLACLSPPLREIPSGTWRCSSCLQATVQEVQPRAEEPRPQEPPVETPLPPGLRSAGEEVRGPPGEPLAGMDTTLVYKHLPAPPSAAPLPGLDSSALHPLLCVGPEGQQNLAPGARCGVCGDGTDVLRCTHCAAAFHWRCHFPAGTSRPGTGLRCRSCSGDVTPAPVEGVLAPSPARLAPGPAKDDTASHEPALHRDDLESLLSEHTFDGILQWAIQSMARPAAPFPS

SEQ ID NO: 8245 - protein, 338 aa, Artificial Sequence
  derived and/or modified sequence
MWLVYSSGAPGTQQPARNRVFFPIGMAPGGVCWRPDGWGTGGQGRISGPGSMGAGQRLGSSGTQRCCWGSCFGKEVALRRVLHPSPKNEDECAVCRDGGELICCDGCPRAFHLACLSPPLREIPSGTWRCSSCLQATVQEVQPRAEEPRPQEPPVETPLPPGLRSAGEEVRGPPGEPLAGMDTTLVYKHLPAPPSAAPLPGLDSSALHPLLCVGPEGQQNLAPGARCGVCGDGTDVLRCTHCAAAFHWRCHFPAGTSRPGTGLRCRSCSGDVTPAPVEGVLAPSPARLAPGPAKDDTASHEPALHRDDLESLLSEHTFDGILQWAIQSMARPAAPFPS

SEQ ID NO: 8246 - DNA, 2257 bp, Artificial Sequence
  derived and/or modified sequence
agacgggcgggcgcacagccggcgcggaggccccacagccccgccgggacccgaggccaagcgaggggctgccagtgtcccgggacccaccgcgtccgccccagccccgggtccccgcgcccaccccatggcgacggacgcggcgctacgccggcttctgaggctgcaccgcacggagatcgcggtggccgtggacagcgccttcccactgctgcacgcgctggctgaccacgacgtggtccccgaggacaagtttcaggagacgcttcatctgaaggaaaaggagggctgcccccaggccttccacgccctcctgtcctggctgctgacccaggactccacagccatcctggacttctggagggtgctgttcaaggactacaacctggagcgctatggccggctgcagcccatcctggacagcttccccaaagatgtggacctcagccagccccggaaggggaggaagcccccggccgtccccaaggctttggtaccgccacccagactccccaccaagaggaaggcctcagaagaggctcgagctgccgcgccagcagccctgactccaaggggcaccgccagcccaggctctcaactgaaggccaagccccccaagaagccggagagcagcgcagagcagcagcgccttccactcgggaacgggattcagaccatgtcagcttcagtccagagagctgtggccatgtcctccggggacgtcccgggagcccgaggggccgtggaggggatcctcatccagcaggtgtttgagtcaggcggctccaagaagtgcatccaggttggcggggagttctacactcccagcaagttcgaagactccggcagtgggaagaacaaggcccgcagcagcagtggcccgaagcctctggttcgagccaagggagcccagggcgctgcccccggtggaggtgaggctaggctgggccagcagggcagcgttcccgcccctctggccctccccagtgacccccagctccaccagaagaatgaggacgagtgtgccgtgtgtcgggacggcggggagctcatctgctgtgacggctgccctcgggccttccacctggcctgcctgtcccctccgctccgggagatccccagtgggacctggaggtgctccagctgcctgcaggcaacagtccaggaggtgcagccccgggcagaggagccccggccccaggagccacccgtggagaccccgctccccccggggcttaggtcggcgggagaggaggtaagaggtccacctggggaacccctagccggcatggacacgactcttgtctacaagcacctgccggctccgccttctgcagccccgctgccagggctggactcctcggccctgcaccccctactgtgtgtgggtcctgagggtcagcagaacctggctcctggtgcgcgttgcggggtgtgcggagatggtacggacgtgctgcggtgtactcactgcgccgctgccttccactggcgctgccacttcccagccggcacctcccggcccgggacgggcctgcgctgcagatcctgctcaggagacgtgaccccagcccctgtggagggggtgctggcccccagccccgcccgcctggcccctgggcctgccaaggatgacactgccagtcacgagcccgctctgcacagggatgacctggagtcccttctgagcgagcacaccttcgatggcatcctgcagtgggccatccagagcatggcccgtccggcggcccccttcccctcctgaccccagatggccgggacatgcagctctgatgagagagtgctgagaaggacacctccttcctcagtcctggaagccggccggctgggatcaagaaggggacagcgccacctcttgtcagtgctcggctgtaaacagctctgtgtttctggggacaccagccatcatgtgcctggaaattaaaccctgccccacttctctactctggaagtccccgggagcctctccttgcctggtgacctactaaaaatataaaaattagctgggtgtggtggtgggtgcctgtaatcccagctacatgggagcctgaggcatgagaatcacttgaactcgggaggtggaggttgcagtgagctgagattgcgccactgcactccagtctggtcggcaagagtgagactccgtctcaaaaacaaaacaaaacaaaaaaaccacataacataaatttatcatctcgaccacttttcagttcagtggcattcacatctcatgtaa

SEQ ID NO: 8247 - DNA, 1638 bp, Artificial Sequence
  derived and/or modified sequence
atggccactgatgcagctctgaggcgcttactacggctgcaccggaccgagatcgctgtggctgtggatagtgcatttcctctgttgcacgccttggccgaccacgacgtagtccccgaggacaagtttcaagagacgctgcatctgaaagagaaggaggggtgtccccaagcttttcatgccctgttgtcatggctgctgacccaggactcaaccgcaatcttggacttttggcgggtcttatttaaagactacaacttggagcgctacggaaggttgcagccaatcctggacagtttccctaaggatgtggatctgtcacagccgcgaaaaggacgcaagccacccgcagtgcccaaagcactcgtgccaccaccccgcttacccaccaagcggaaggcatcagaggaggctcgcgcagctgcccccgccgccttaaccccacgggggaccgcctcgcccggcagccaactgaaggcgaagccgccaaagaaacccgagtcatccgcagaacagcagagactgccactcggcaacggcatccagacaatgtctgcgagcgtgcagcgtgcggtggccatgagttcaggggatgtccccggcgcccgaggcgctgtagagggaattcttatccaacaagtgtttgaatctggtgggtctaagaaatgtatccaagtgggaggcgaattttatactcccagcaagtttgaagactccggatctggcaagaataaggcgagatctagctccggacctaaaccactggtaagggctaaaggtgcccagggagccgctcctggtgggggtgaggcacggctagggcagcaggggagtgtcccagcccccctagcactacccagcgatccacagctgcatcaaaagaacgaggacgaatgcgcagtgtgtagagatggcggagagctcatctgttgtgacggttgtccccgcgcatttcatctcgcctgcctttcacccccactgcgtgaaatcccttctggcacatggcgatgcagtagctgtttacaggcaacagttcaggaggtgcagcccagagcagaggaaccccggccccaggaacctccagttgaaacaccactcccacctggtctgcgatccgctggagaggaggttcgcgggccccccggagaaccattggctggcatggacactaccttggtatataagcatcttcctgcaccaccgtctgccgcccccctccccggattagatagctctgccctgcaccccttgctatgtgtcggcccagaaggccagcagaatcttgcccccggggcgagatgcggtgtgtgtggagacggcaccgacgttctgcggtgtacccactgtgctgcagcgtttcattggaggtgtcacttccccgccggtacatcacgaccaggaacgggactgaggtgtaggagttgcagtggggacgtaacacccgctcctgtggagggagtcttggctccaagcccagctcggctggctccagggcctgccaaagatgatacagccagccacgagcctgctctccatagggatgatctggagagtcttctctccgagcacaccttcgatggaatactccagtgggccatccagagcatggctcgcccagccgccccgttcccaagttag

SEQ ID NO: 8248 - DNA, 735 bp, Artificial Sequence
  derived and/or modified sequence
atgtggcttgtatattcctcgggcgccccaggcacccagcagcctgctcgtaacagggtgttcttcccgataggaatggcacctggaggcgtctgttggcgacccgatggctggggaactggtggccagggcagaatttccggaccaggaagtatgggtgcaggtcagcgtctgggcagttcaggaacccaaaggtgctgttggggatcgtgttttggcaaggaggtggcgctgcgacgggtccttcacccttctcctaagaacgaggacgaatgcgctgtgtgcagagacggaggcgagttaatctgctgtgatggatgtccacgtgcctttcatttggcttgcttgtctcctccactacgagaaatcccttccggaacctggcgctgtagctcatgtctgcaagccacagtgcaagaagttcagcctcgagcagaagagcctaggcctcaggagcccccagtggagactccactgcctccggggctgagatcagccggagaggaacctcggtgtcaaggctggacacctcgaccatgtacaccctattgtgtctgggtccttcgcgtctctcgaacgtggctcctggtgagagtcgccggctgcgctgagatggttaggacttgctgcggagttttgaccgctcccctccctagcaccggtgctgcaacgtctcagccagcaccacccggccccggaagagcctgtgcagcagatccagcacaagaaacatag

SEQ ID NO: 8249 - DNA, 1047 bp, Artificial Sequence
  derived and/or modified sequence
atgtggctcgtgtattcttctggggcacccggcacccagcaacctgcaaggaaccgggtgttcttccccatcggaatggccccaggaggggtctgttggagacctgacggctggggcacaggaggccagggccgcattagcgggccaggaagcatgggcgcaggccaacgcctcgggtcaagtggaacacaacgctgctgttgggggtcatgcttcggaaaggaagtggccctgaggagagttttgcacccgtctccagtttgtatgggagttagttgtctttgtcagaagaacgaggacgaatgcgccgtgtgcagagatggcggtgaactcatttgttgcgacggctgcccccgtgcattccacctcgcttgcctatctccgcccttaagggagatcccgtctggcacatggcgctgctcaagctgcttacaggccaccgtccaagaagtccagccccgggcggaagagccacgtccacaggagcccccagtggaaaccccacttccccctgggcttcgttctgctggagaggaagtaaggggcccaccaggagagccactcgccggaatggataccacactggtgtacaagcacctgccggccccgccgtcagcagcccctctcccgggattagattcctcggctttgcatcccctcctatgtgtaggaccagaagggcagcagaatcttgcgccgggagctagatgtggcgtgtgcggggatgggacagacgtgctgaggtgtacgcattgcgcagccgctttccactggaggtgtcacttccctgcaggcactagccgtccgggtactggactgagatgtcgatcctgtagcggcgatgtgacccccgctccggtggaaggcgtactggccccatctcctgctaggcttgcaccagggcctgctaaagatgacaccgccagccatgagcctgccctccaccgagacgacctggagagcttgctttctgagcacaccttcgacggcatactccagtgggcaatccagagcatggccaggccagccgctccctttccaagctag

SEQ ID NO: 8250 - DNA, 1017 bp, Artificial Sequence
  derived and/or modified sequence
atgtggttggtgtacagcagcggcgcacctggcacacaacagcctgccaggaaccgcgtgttctttcccataggcatggcccccggaggggtctgctggaggcccgatggctggggcacgggcggacagggacggatcagtgggccggggtcgatgggtgccggacaacgtctgggtagctctggcacccagagatgctgttggggatcatgtttcggcaaggaggtggcccttaggagggtgctccacccttcacccaagaatgaggacgaatgcgccgtttgcagagatggcggcgagctgatatgctgtgatggctgcccgagggctttccacttggcctgtttatcacccccgctaagagaaattcctagcggcacctggcgttgctcaagctgcttacaggcaacagtgcaagaagttcagccgagggccgaggaaccacgaccacaggagcctcctgtcgagacacccctgccccccggattgcgttctgcaggcgaggaagtgcgcggtcctccaggtgagcctttggcggggatggacacaactctcgtgtacaagcacctgcctgccccgccctctgcagctcctctccctgggctggatagtagcgcattgcaccccttgctctgcgtcggaccagagggccaacagaatttggctcccggggctaggtgtggggtgtgcggcgatggtactgacgttctcaggtgcacccattgtgcagccgccttccactggagatgccactttcccgcaggaacgtctcggcctggtacaggtctgcgctgccgttcctgcagcggcgacgttaccccagccccagtagaaggtgttctggcacccagtccagccaggctggcacctggccccgcaaaagatgatacagcgtcccacgagcccgctctccaccgcgatgacctggagtctcttttgtcagagcacaccttcgacggtattctccagtgggcgattcagagcatggctaggcccgccgcgccgttcccatcttag

SEQ ID NO: 8251 - DNA, 1047 bp, Artificial Sequence
  derived and/or modified sequence
atgtggctggtttattctagtggcgcacctgggactcagcagcctgccaggaacagagtgttctttccaatcgggatggcccctgggggcgtgtgctggcgtcctgacggctggggcactggaggacagggtcgaatctctggcccggggagtatgggcgccggtcaaaggctcggtagctctgggactcagaggtgctgttgggggtcttgctttggaaaggaggtggccctgcggcgcgtgctgcatccttcgccagtttgtatgggagtctcatgcctttgccaaaaaaacgaggatgagtgtgccgtttgtagggacgggggggagctgatttgctgtgatggctgccctcgggcttttcatcttgcgtgtttgtcccctccattgcgggagattccttcgggaacctggagatgtagctcatgccttcaggccacggtgcaggaagttcagccaagagcagaagaaccaaggccccaggagcctcccgtggagacacccctcccacctggacttcgaagcgcgggtgaggaggtccgaggcccccctggcgagcccctagctggaatggacactactttggtctacaagcatcttcccgctccaccttctgccgctccgttgccgggattggactccagcgcgctgcatcccctgttgtgcgtgggaccagaagggcaacagaacctggcgcctggggcaaggtgcggtgtgtgcggggacggtaccgacgtgttaagatgtacacattgtgccgcagcctttcattggcggtgtcacttccctgcaggcacttcaagacccgggacgggtctccgatgtagaagctgcagcggcgacgttacgcctgcccccgtggagggggttcttgcccccagtccagccagattagcaccaggccccgccaaggacgataccgcgagtcacgagccagcactgcatcgcgatgacctggagtctctcctcagcgagcatacgttcgatggaatcctgcagtgggccattcagagcatggcgagacccgccgctccctttcctagctag

SEQ ID NO: 8252 - DNA, 1638 bp, Artificial Sequence
  derived and/or modified sequence
atggccacagatgctgccctgcggcggctgctgcggctgcacaggacagaaattgctgtggccgtggacagcgccttccccctgctgcacgccctggccgaccatgatgtggtgcctgaggacaagttccaggagaccctgcacctgaaggagaaggagggctgcccccaggccttccacgccctgctgtcctggctgctgacccaggacagcacagccatcctggacttctggagggtgctcttcaaggactacaacctggagagatatggccgcctgcagcccatcctggacagcttccccaaggatgtggacctgagccagcccaggaaaggaaggaagcccccagctgtgcccaaggccctggtgcccccaccccggctgcccaccaagaggaaggccagcgaggaggcccgggctgctgccccagctgccctgaccccccggggcacagccagccctggcagccagctgaaggccaagccacccaagaagccagagagcagcgctgagcagcagaggctgcccctgggcaatggcatccagaccatgtctgcctctgtgcagagagctgtggccatgagcagtggagatgtgcctggggcccggggagctgtggagggcatcctgatccagcaggtgtttgaaagtggcggcagcaagaagtgcatccaggtgggcggggagttctacacccccagcaagtttgaagattctggcagcggcaagaacaaggcccggagcagcagcggccccaagcccctggtgcgggccaagggggcccagggcgccgcccctgggggcggggaggcccggctgggccagcagggctctgtgcctgcccccctggccctgcccagcgacccccagctgcaccagaagaatgaagatgaatgtgctgtgtgcagagatggaggagagctgatctgctgtgatggctgcccccgggccttccacctggcctgcctgagcccccccctgcgggagatccccagcggcacctggcgctgcagcagctgcctgcaggccaccgtgcaggaggtgcagcccagggctgaggagccccggccccaggagccccctgtggagacccccctgcccccaggcctgcggtctgctggggaggaggtgcggggccccccaggagagcccctggccggcatggacaccaccctggtgtacaagcacctgcctgccccacccagcgctgcccccctgcccggcctggacagcagcgccctgcaccccctgctgtgtgtgggccctgagggccagcagaacctggcccctggggcccgctgtggggtgtgtggagatggaacagatgtgctgcgctgcacccactgtgccgccgccttccactggcgctgccacttccctgctggcaccagccggcccggcaccggcctgcgctgccgcagctgcagcggagatgtgaccccagcccctgtggagggcgtgctggcccccagccctgcccggctggcccctggccctgccaaggatgacacagccagccatgagcccgccctgcacagagatgacctggagagcctgctgtctgagcacacctttgatggcatcctgcagtgggccatccagagcatggcccggcctgctgcccccttccccagctag

SEQ ID NO: 8253 - DNA, 735 bp, Artificial Sequence
  derived and/or modified sequence
atgtggctggtgtacagcagcggggcccctggcacccagcagcctgccaggaacagagtcttcttccccatcggcatggcccctgggggcgtgtgctggaggccagatggctggggcaccggcggccagggccgcatcagcggccctggctccatgggcgccggccagaggctgggcagcagcggcacccagcgctgctgctggggcagctgcttcggcaaggaggtggccctgcggcgggtgctgcaccccagccccaagaatgaagatgaatgtgctgtgtgcagagatggaggagagctgatctgctgtgatggctgcccccgggccttccacctggcctgcctgagcccccccctgcgggagatccccagcggcacctggcgctgcagcagctgcctgcaggccaccgtgcaggaggtgcagcccagggctgaggagccccggccccaggagccccctgtggagacccccctgcccccaggcctgcggtctgctggggaggagccccgctgccagggctggaccccccggccctgcaccccctactgtgtgtgggtgctgcgggtgtccaggacctggctgctggtgcgggtggccggctgtgccgagatggtgaggacctgctgcggcgtgctgacagcccccctgcccagcactggagctgccaccagccagcctgcccctcctggccctggccgggcctgtgccgctgaccctgcccaggagacctag

SEQ ID NO: 8254 - DNA, 1047 bp, Artificial Sequence
  derived and/or modified sequence
atgtggctggtgtacagcagcggggcccctggcacccagcagcctgccaggaacagagtcttcttccccatcggcatggcccctgggggcgtgtgctggaggccagatggctggggcaccggcggccagggccgcatcagcggccctggctccatgggcgccggccagaggctgggcagcagcggcacccagcgctgctgctggggcagctgcttcggcaaggaggtggccctgcggcgggtgctgcaccccagccctgtgtgcatgggcgtgtcctgcctgtgccagaagaatgaagatgaatgtgctgtgtgcagagatggaggagagctgatctgctgtgatggctgcccccgggccttccacctggcctgcctgagcccccccctgcgggagatccccagcggcacctggcgctgcagcagctgcctgcaggccaccgtgcaggaggtgcagcccagggctgaggagccccggccccaggagccccctgtggagacccccctgcccccaggcctgcggtctgctggggaggaggtgcggggccccccaggagagcccctggccggcatggacaccaccctggtgtacaagcacctgcctgcccctccttctgctgcccccctgcccggcctggacagcagcgccctgcaccccctgctgtgtgtgggccctgagggccagcagaacctggcccctggggcccgctgtggggtgtgtggagatggaacagatgtgctgcgctgcacccactgtgccgccgccttccactggcgctgccacttccctgctggcaccagcaggcctggcaccggcctgcgctgccgcagctgcagcggagatgtgaccccagcccctgtggagggcgtgctggcccccagccctgcccggctggcccctggccctgccaaggatgacacagccagccatgagcccgccctgcacagagatgacctggagagcctgctgtctgagcacacctttgatggcatcctgcagtgggccatccagagcatggcccggcctgctgcccccttccccagctag

SEQ ID NO: 8255 - DNA, 1017 bp, Artificial Sequence
  derived and/or modified sequence
atgtggctggtgtacagcagcggggcccctggcacccagcagcctgccaggaacagagtcttcttccccatcggcatggcccctgggggcgtgtgctggaggccagatggctggggcaccggcggccagggccgcatcagcggccctggctccatgggcgccggccagaggctgggcagcagcggcacccagcgctgctgctggggcagctgcttcggcaaggaggtggccctgcggcgggtgctgcaccccagccccaagaatgaagatgaatgtgctgtgtgcagagatggaggagagctgatctgctgtgatggctgcccccgggccttccacctggcctgcctgagcccccccctgcgggagatccccagcggcacctggcgctgcagcagctgcctgcaggccaccgtgcaggaggtgcagcccagggctgaggagccccggccccaggagccccctgtggagacccccctgcccccaggcctgcggtctgctggggaggaggtgcggggccccccaggagagcccctggccggcatggacaccaccctggtgtacaagcacctgcctgcccctccttctgctgcccccctgcccggcctggacagcagcgccctgcaccccctgctgtgtgtgggccctgagggccagcagaacctggcccctggggcccgctgtggggtgtgtggagatggaacagatgtgctgcgctgcacccactgtgccgccgccttccactggcgctgccacttccctgctggcaccagcaggcctggcaccggcctgcgctgccgcagctgcagcggagatgtgaccccagcccctgtggagggcgtgctggcccccagccctgcccggctggcccctggccctgccaaggatgacacagccagccatgagcccgccctgcacagagatgacctggagagcctgctgtctgagcacacctttgatggcatcctgcagtgggccatccagagcatggcccggcctgctgcccccttccccagctag

SEQ ID NO: 8256 - DNA, 1638 bp, Artificial Sequence
  derived and/or modified sequence
atggccaccgacgccgccctgcggcggctgctgcggctgcaccggacagaaattgccgtggctgtcgactccgctttcccgctgctgcatgccttggctgatcacgatgtcgtgcccgaagacaaattccaagagaccctgcacctcaaggaaaaggaagggtgtccacaggccttccatgcgctgctatcatggctcctcacacaggacagtaccgctatcctggacttctggcgagtgctctttaaagactataacctcgaaaggtatggtagactgcaacccatcctggacagcttcccaaaagacgttgacctgagccagcctaggaaaggacgcaagcctcccgcagtgcctaaggctctggtgcccccaccccggttgcccaccaaaaggaaggcgagcgaagaagcacgagctgccgcacccgcagctcttaccccacgtgggaccgcctctcccggtagccagctcaaggctaaaccacctaaaaaacccgagagttccgcggagcagcaacgcctgcctctcggcaatggaattcagacaatgtccgcgtctgtccagagggcggtcgctatgagctcgggggacgtgccaggggcaaggggtgctgtggaggggattctgatccagcaggtctttgagagtggaggaagtaaaaagtgcattcaagtggggggggagttctacactcccagcaaattcgaagacagcggctctgggaaaaataaagccagaagtagctctggacctaaacccctcgtacgtgccaaaggggcacagggcgctgcccccggcggaggtgaggcacggttagggcaacaggggagcgttccagctccgttggcattgccaagcgaccctcagctgcatcagaaaaatgaagatgagtgcgcagtgtgccgggatggcggagagcttatctgttgcgacggctgtccaagagccttccatctcgcttgcctgtctccacctctgcgcgaaataccatcgggtacttggaggtgttcttcatgcctccaggccaccgtccaggaggtgcagccgagagccgaggagcccaggccccaggagccccctgtggagacgccactgccccccggcctgcggtctgctggcgaagaggtacggggtccccctggcgagccgctggctggcatggacactacactggtctataaacacctgcccgcgccacccagcgcggctccgttgcctggcctggactcatcggccctgcatcctttgttatgtgtcggtccagaagggcagcaaaacctcgctcccggcgctcgctgtggcgtgtgcggggatgggactgacgttctccggtgcacccattgtgcagcagcattccactggagatgtcactttccagccggaacatcaagacccggcacaggcctccggtgccgctcctgttccggggatgtaacccccgcccctgtggagggggtgctggcacccagccctgcacggttggcccctggccctgctaaagacgatacagcatcacacgagccggccttgcacagggacgacctggaatcccttctgtcagagcatacattcgacggaatcctgcagtgggcgatacagtccatggctcgaccggcggcaccattccctagctag

SEQ ID NO: 8257 - DNA, 735 bp, Artificial Sequence
  derived and/or modified sequence
atgtggctggtgtacagcagcggcgcccccggcacccagcagcccgctagaaacagggtttttttcccgataggcatggctccggggggagtgtgttggagacccgatggctggggcacagggggccaaggacgcattagtgggcccggcagcatgggcgcaggacaaaggctcggctcgtccggaacccagcggtgttgctggggaagctgtttcggaaaagaagtggccttgcgaagagtcctccaccccagccccaagaatgaggatgaatgtgccgtctgtcgggatggcggcgagctaatatgttgcgacggctgtcctagagcatttcatctagcttgcctcagcccaccgctgcgggaaatcccctctggaacctggaggtgtagcagttgcttgcaggctactgtgcaggaggtgcagcccagggccgaggagccacggccccaagagccaccagtcgaaactcccctaccgcctggtcttcggagcgctggagaagagcctaggtgtcaggggtggacccccagaccttgcacaccttactgcgtctgggtgcttcgcgtgtcgcgaacctggctcttggtgcgcgtcgcgggctgcgcagagatggtgcggacttgctgtggggttttgactgcccccctcccgtcaactggtgcggccacgtcccaacctgctcctcccggacccggccgcgcatgtgccgccgatccagcacaggagacatag

SEQ ID NO: 8258 - DNA, 1047 bp, Artificial Sequence
  derived and/or modified sequence
atgtggctggtgtacagcagcggcgcccccggcacccagcagcccgcgcgaaaccgagtgttcttcccaatcggaatggcccccggcggtgtgtgttggcgacccgacggatggggaacaggaggacagggacgaatcagtggacccggatcaatgggcgccggccaaaggctgggctcctccggcactcaacgctgctgttggggctcatgtttcggtaaagaggtggctctgcggagggtgttacaccccagccctgtgtgtatgggcgtgagttgtctgtgccagaaaaacgaggatgaatgcgccgtttgtagggatggaggggagttaatatgttgcgatggatgtccacgtgctttccacctggcttgcctcagccctcccttacgggagatacccagcggcacctggcgttgttcaagctgcctgcaggcaactgtccaagaggtgcagccgagggctgaagagcctagacctcaggagcctcctgttgaaacaccactgccccctgggctgagatctgcgggggaggaggttagagggccgcctggggagcccctggccggtatggataccaccttggtgtacaaacatctcccagcccccccgagcgccgctccgttgccaggcttggatagctccgccctccatccgctactgtgtgtgggccccgagggccaacagaacctggccccaggagcacggtgtggggtatgcggggatggaacggacgtgctacgctgcacacattgtgcggcagcatttcattggcggtgtcactttccagctggcacatccagaccaggtacaggactgaggtgccgctcatgtagcggagatgttacccccgcacctgtagagggagtgctggccccgagtccagctcgcctggcgcctgggccagctaaggacgatacagcgtcacacgaacccgctcttcaccgtgacgacctggagtcactgctcagcgagcacacattcgacgggatcctccaatgggctattcagagtatggcccggccagcagcacctttccctagttag

SEQ ID NO: 8259 - DNA, 1017 bp, Artificial Sequence
  derived and/or modified sequence
atgtggctggtgtacagcagcggcgcccccggcacccagcagcccgctagaaacagagtctttttcccaatcgggatggccccaggcggagtgtgttggaggcccgatggctgggggacgggcggacaaggccgcatttctggacccggctccatgggtgcaggccagaggctcggctctagtgggacacagagatgctgctggggctcatgtttcggcaaggaagtcgctctgcgtcgtgtactgcacccttctcccaaaaatgaggacgaatgtgcggtctgtagagacggcggtgagctgatttgctgcgacggttgtcccagagccttccacctggcatgtctttctcctccactgcgcgagatcccctctggcacatggagatgcagcagttgtctgcaagccactgtgcaggaagtgcaacctcgggcggaggagccgagacctcaggagccacctgtagaaacacctctacctccaggattgagatctgctggggaagaagtcaggggacccccgggcgagccactcgctggcatggacacaacactagtttacaagcatctgcccgcgccacccagcgcagcgcctctcccaggcctcgatagcagcgctctgcaccctcttttgtgcgttggccccgaagggcaacaaaacctagcccctggcgcccggtgtggcgtctgcggggacggaaccgatgtgttaagatgtacgcactgtgctgcagctttccattggagatgtcatttccctgctggtacatcgcgcccaggcactggcctgcgttgtcgatcttgttccggggacgtgacccctgcccccgtggagggagttctggcccccagcccagcgaggttagctccgggccctgcaaaggatgataccgcttcacacgaaccagcccttcatagggacgatcttgaaagccttctttccgagcacacattcgacggaattctccaatgggctatccagagcatggcaagacccgctgcaccctttccttcctag

SEQ ID NO: 8260 - DNA, 1047 bp, Artificial Sequence
  derived and/or modified sequence
atgtggctggtgtacagcagcggcgcccccggcacccagcagcccgccagaaatcgcgtgttttttcctatcgggatggcaccagggggcgtgtgctggagacctgacggctggggcactggcggacaggggcggatctccggcccaggcagcatgggcgcgggccagagactcgggtcctccggaactcagcgatgctgttgggggtcttgcttcggtaaagaggttgcgctcaggcgcgtgctgcacccgtcaccagtgtgtatgggagtctcatgtctgtgtcaaaagaacgaagacgagtgcgcagtgtgtcgggatggcggcgaacttatctgctgcgatgggtgtccacgcgccttccatctcgcttgcttaagcccaccgctgagagaaattccaagcggcacttggcgctgtagtagttgtctgcaggccaccgtacaagaggtccagccccgggctgaagagcctagacctcaggaacctcctgttgagacccccttgcccccaggcctgcgcagcgcgggagaagaagttagaggtcctccaggggagccactggccggaatggatacaaccctggtgtacaagcaccttcccgctcccccgagcgccgcccctctgccaggcctggacagcagcgcgctgcatccactcctttgcgttggtcccgagggccaacagaatctggcccctggagccaggtgcggcgtatgtggcgacgggactgatgttctccgttgtacccactgtgccgccgcctttcattggagatgtcatttccctgcaggtacaagccggcccggaactgggcttaggtgccgatcgtgcagtggcgacgtgacaccggcaccagtagagggggtgcttgcaccttcccctgcccgactggcccctggtcccgccaaagacgacaccgcctctcacgaacccgccttacatcgggatgacctcgaaagccttctcagcgaacacactttcgacgggatcttgcagtgggccattcagtcgatggcgagaccggctgcccctttccctagttag

SEQ ID NO: 8261 - DNA, 1638 bp, Artificial Sequence
  derived and/or modified sequence
atggcaaccgatgccgcattgagacggctcttgcggctgcacaggacagagattgccgtggccgtagactccgcgtttcctctgctccacgctcttgcagaccatgacgtggtacctgaagacaagttccaggagactctccatctaaaggagaaggagggctgccctcaagccttccacgctttactgagttggcttctcactcaagattccaccgctattctggatttctggcgagtcctattcaaggattataacctcgagcgctatggcagactgcaacccatcttagactcctttccaaaggatgtcgacctgagccaaccaaggaagggccgtaaaccgcctgccgtgcccaaggcactggtccccccacctcgtttgccaaccaagagaaaggcaagcgaggaagccagagccgctgccccagcagctctgaccccccgtggcaccgcgagtccaggatctcagctgaaagctaaacctccaaagaagcctgagtctagcgctgagcagcagcgactgccccttgggaacggtatacagacaatgagcgccagtgtgcagcgagcggtagctatgtctagtggtgacgtgccaggggcacgaggcgctgtggaaggtatcctgattcagcaggtcttcgagtcagggggtagcaaaaagtgcatccaagtggggggtgagttctatacacccagcaagttcgaggactccggttccggcaagaacaaagcacgatcttcttcgggaccaaagcccctggtgcgagccaaaggagctcaaggcgctgcaccaggcggtggggaagcaaggctggggcagcagggctccgtcccagcccctctggcactgccatcggaccctcagctccaccagaagaacgaagacgagtgcgcagtgtgccgcgatggaggagagctgatctgttgcgatggctgtccacgggcatttcatctggcctgcctgagccccccattgcgtgaaattcccagcgggacttggcggtgttcctcttgtctgcaggctacggtacaagaggtccagccaagggctgaagagccacggccacaggagccacctgtggaaacccccctcccccctgggctaaggtctgctggtgaagaggttcgcggtcctccgggtgagcccttggctggtatggacaccaccttagtgtataaacacctccctgctcccccaagcgccgcacctcttcctgggctggatagctctgcgctgcacccattgctgtgcgttggccctgaggggcaacagaacctcgctcccggagccagatgtggagtgtgcggggacggtactgacgtgctccggtgcacccactgtgccgcagcctttcattggcgctgccacttcccagctggcacgagcagaccgggaaccggccttaggtgtaggtcttgctctggggatgtcacccctgcccctgtagaaggcgtcctggccccatcccccgctaggctggcacctgggcctgccaaagacgatactgctagtcacgagccagctctgcaccgggacgacttagagagtctgctgtctgaacacacttttgatggcatcctgcagtgggctatccaatccatggccagacccgcagctccattcccatcctag

SEQ ID NO: 8262 - DNA, 735 bp, Artificial Sequence
  derived and/or modified sequence
atgtggttggtatattcttccggtgcccctggcacacagcagcctgctcggaaccgcgtcttttttcctatcggtatggctcccggtggtgtgtgttggcggcctgatggctggggtactggcggtcaaggcagaattagcggtcctgggagcatgggagctggccagcgcctggggtcctctggcacacagcgatgctgctggggcagttgctttggcaaagaggtggccctgagacgggttctgcatccctcacccaagaatgaagacgagtgtgccgtctgcagagatggcggagaattgatctgctgcgacggctgccccagggctttccacttagcttgtctgtctccacccttgcgcgagattccatcaggcacttggcgatgcagttcttgcctgcaagcaaccgtccaggaggtgcagccaagggctgaggaacctcgaccccaggagccacctgtagaaactcccttaccccctggcctaagatctgccggagaggaacccagatgccagggttggactccccgtccatgtactccatactgcgtgtgggtgctgcgcgtatcacggacctggttgctggtaagggttgccggttgtgccgagatggtgcggacttgctgcggagtgttaaccgctcccttgccaagcacgggagcagcgacctcccagccggctccacccggtcctggaagagcttgcgccgctgatcccgctcaggaaacctag

SEQ ID NO: 8263 - DNA, 1047 bp, Artificial Sequence
  derived and/or modified sequence
atgtggctggtatattcttcgggggcaccgggtactcagcagccagccaggaaccgggtgtttttccccatcggtatggccccaggcggagtctgttggagacctgacggctggggcactgggggacagggccgtatctcagggcctggctccatgggagccggacaaaggctcggaagcagcggcacccagcggtgctgttgggggagctgctttgggaaagaggtggccctgcgcagggtactccatcctagcccagtgtgcatgggggtatcttgcctatgtcagaagaatgaagatgagtgtgctgtgtgccgcgacggcggtgagctgatctgctgcgatgggtgcccaagagcatttcatctggcctgtctttctcccccactacgggaaatcccctcaggcacctggcggtgctcctcctgccttcaggcaaccgtgcaggaggtacagccccgagcggaggagccacggccacaggaaccccctgtcgagaccccactccctcctggattacgcagtgcgggagaagaagttaggggacctcccggtgagccgctggcgggaatggatacaactctcgtctacaagcatcttcctgcccctccatctgccgcaccgttgcctggcctggacagttccgccctgcaccctttgctctgcgtgggacccgaggggcagcagaacttagccccaggcgctcgttgtggagtgtgcggggacggtacagatgtgttgaggtgcacacactgtgctgcggcattccattggaggtgccattttcccgctggaacttctcgcccaggcaccgggctgaggtgcaggagctgtagtggcgatgtgactcctgcccctgttgagggtgtgctggccccttcacctgccaggcttgcgccaggcccagcaaaagacgataccgccagccacgaacctgccctccaccgagacgacttagaatcccttctatctgagcacaccttcgacggaattcttcaatgggccatccaaagcatggcacggccagcagccccttttccttcctag

SEQ ID NO: 8264 - DNA, 1017 bp, Artificial Sequence
  derived and/or modified sequence
atgtggctggtttatagcagtggcgctcctggcactcagcagccagcccgtaatcgagtgtttttccctattgggatggcccctggaggggtgtgctggagaccagatggatgggggacaggtgggcagggaaggataagcggaccgggttctatgggcgctggacagcgcctcgggtcttcaggtactcagcggtgctgttgggggagttgcttcggcaaagaggtcgcacttcggagggtactccacccttctccaaagaatgaagacgagtgtgccgtctgccgtgacggcggagaacttatctgctgtgatgggtgtcccagagcttttcatctcgcctgcctgtctcctcctttacgcgaaattccaagcggcacatggcgatgtagcagctgtctgcaggctactgtacaggaggtgcagccaagggccgaagaacctcgaccacaggaacccccagtagaaactccgctcccacctgggttacggtcagctggagaggaagttcgtggccctcctggagagccactggccggaatggataccactttggtttacaaacatctgcccgctcctccaagcgccgctcctctacccggactggatagttccgccctgcaccctctattgtgcgtcggacctgaaggccaacagaaccttgcacccggagccaggtgtggcgtatgcggcgacggaaccgatgttctccgctgcacacattgtgcagccgcttttcactggagatgccacttccctgcaggtacttctcggccaggaacaggactaaggtgccggtcctgttctggagatgtcactcccgctcccgttgaaggcgtgctggcccctagccctgccagacttgcacctggacccgcaaaggacgatacagcatcacacgaacccgcactccacagggacgatcttgaaagtctgctaagcgaacataccttcgatggaattctgcagtgggcaatacaatcaatggcacgacctgcagctcctttcccctcctag

SEQ ID NO: 8265 - DNA, 1047 bp, Artificial Sequence
  derived and/or modified sequence
atgtggctcgtttactcctccggcgcaccgggtacgcagcagccagcaaggaaccgggttttcttccctattggtatggcccctggtggagtgtgctggagacccgatggctggggcacagggggtcaagggcgaatcagcggacctggctccatgggcgctgggcagcgcctgggatcttcggggacacaaagatgttgctgggggtcctgtttcgggaaggaagtggcactcagacgcgtgcttcaccctagtccagtttgtatgggagtttcttgtctgtgtcagaagaacgaggacgagtgtgctgtctgtagagacggaggcgaactgatatgttgtgacggatgccctcgggcatttcatctcgcttgcttaagcccgccacttcgggagatcccctccggcacatggcgctgtagctcctgcctccaggctaccgtgcaagaggtccagcccagagccgaggagccccgtccacaagaaccacccgtggagactccactgccccctgggctgcggtctgccggtgaggaagtgcggggacctccaggagaacctcttgcgggtatggacactaccctggtgtataagcatctgcctgcaccccctagtgctgctccactcccgggtttggactctagcgccctacaccctctcctgtgcgtcgggcctgaggggcagcagaacctcgcaccaggagccaggtgcggtgtttgtggagatggtacagacgtgctgagatgtacacactgcgccgctgcatttcattggagatgccacttcccagccggtacctcccggccaggcacaggcttacggtgtcggtcctgctcgggcgatgtgaccccagctcctgtcgagggcgtgctagcgccatctccagccaggctggcacccggacccgcaaaggacgacaccgcctcacacgagccagccctccatagagacgatctcgagtctctgctcagcgaacatacctttgatggtatccttcagtgggctatccaaagtatggcgaggcccgctgcgccttttccatcctag

SEQ ID NO: 8266 - DNA, 1427 bp, Artificial Sequence
  derived and/or modified sequence
atgtggttggtgtacagttccggggcccctggaacgcagcagcctgcaagaaaccgggttttcttcccaatagggatggccccggggggtgtctgttggagaccagatggatggggaacaggtggtcagggcagaatttcaggccctggcagcatgggagcagggcagagactggggagttcaggtacccagagatgctgctgggggagctgttttgggaaggaggtggctctcaggagggtgctgcaccccagcccaaagaatgaggacgagtgtgccgtgtgtcgggacggcggggagctcatctgctgtgacggctgccctcgggccttccacctggcctgcctgtcccctccgctccgggagatccccagtgggacctggaggtgctccagctgcctgcaggcaacagtccaggaggtgcagccccgggcagaggagccccggccccaggagccacccgtggagaccccgctccccccggggcttaggtcggcgggagaggagccccgctgccagggctggactcctcggccctgcaccccctactgtgtgtgggtcctgagggtcagcagaacctggctcctggtgcgcgttgcggggtgtgcggagatggtacggacgtgctgcggtgtactcactgcgccgctgccttccactggcgctgccacttcccagccggcacctcccggcccgggacgggcctgcgctgcagatcctgctcaggagacgtgaccccagcccctgtggagggggtgctggcccccagccccgcccgcctggcccctgggcctgccaaggatgacactgccagtcacgagcccgctctgcacagggatgacctggagtcccttctgagcgagcacaccttcgatggcatcctgcagtgggccatccagagcatggcccgtccggcggcccccttcccctcctgaccccagatggccgggacatgcagctctgatgagagagtgctgagaaggacacctccttcctcagtcctggaagccggccggctgggatcaagaaggggacagcgccacctcttgtcagtgctcggctgtaaacagctctgtgtttctggggacaccagccatcatgtgcctggaaattaaaccctgccccacttctctactctggaagtccccgggagcctctccttgcctggtgacctactaaaaatataaaaattagctgggtgtggtggtgggtgcctgtaatcccagctacatgggagcctgaggcatgagaatcacttgaactcgggaggtggaggttgcagtgagctgagattgcgccactgcactccagtctggtcggcaagagtgagactccgtctcaaaaacaaaacaaaacaaaaaaaccacataacataaatttatcatctcgaccacttttcagttcagtggcattcacatctcatgtaa

SEQ ID NO: 8267 - DNA, 1542 bp, Artificial Sequence
  derived and/or modified sequence
agaaagtgaggtcttctcaggctcttaagagcatggcgtttggtccaggctgtacccgctgctctcagctgggcccgtgggtgggccgggcgcccctgctatagccaggaggtcaaggatccactgggaatgccatgctcatctttcgtccccagcatggtttcttaatggggtagaagcagtcgggagagacctccctgggcctggccccactgccctgtgaggaagggttcatgtggttggtgtacagttccggggcccctggaacgcagcagcctgcaagaaaccgggttttcttcccaatagggatggccccggggggtgtctgttggagaccagatggatggggaacaggtggtcagggcagaatttcaggccctggcagcatgggagcagggcagagactggggagttcaggtacccagagatgctgctgggggagctgttttgggaaggaggtggctctcaggagggtgctgcaccccagcccagtctgcatgggcgtctcttgcctgtgccagaagaatgaggacgagtgtgccgtgtgtcgggacggcggggagctcatctgctgtgacggctgccctcgggccttccacctggcctgcctgtcccctccgctccgggagatccccagtgggacctggaggtgctccagctgcctgcaggcaacagtccaggaggtgcagccccgggcagaggagccccggccccaggagccacccgtggagaccccgctccccccggggcttaggtcggcgggagaggaggtaagaggtccacctggggaacccctagccggcatggacacgactcttgtctacaagcacctgccggctccgccttctgcagccccgctgccagggctggactcctcggccctgcaccccctactgtgtgtgggtcctgagggtcagcagaacctggctcctggtgcgcgttgcggggtgtgcggagatggtacggacgtgctgcggtgtactcactgcgccgctgccttccactggcgctgccacttcccagccggcacctcccggcccgggacgggcctgcgctgcagatcctgctcaggagacgtgaccccagcccctgtggagggggtgctggcccccagccccgcccgcctggcccctgggcctgccaaggatgacactgccagtcacgagcccgctctgcacagggatgacctggagtcccttctgagcgagcacaccttcgatggcatcctgcagtgggccatccagagcatggcccgtccggcggcccccttcccctcctgaccccagatggccgggacatgcagctctgatgagagagtgctgagaaggacacctccttcctcagtcctggaagccggccggctgggatcaagaaggggacagcgccacctcttgtcagtgctcggctgtaaacagctctgtgtttctggggacaccagccatcatgtgcctggaaattaaaccctgccccacttctctactctggaagtccccgggagcctctccttgcctggtgacctactaaaaatataaaaattagctg

SEQ ID NO: 8268 - DNA, 1509 bp, Artificial Sequence
  derived and/or modified sequence
atgtggttggtgtacagttccggggcccctggaacgcagcagcctgcaagaaaccgggttttcttcccaatagggatggccccggggggtgtctgttggagaccagatggatggggaacaggtggtcagggcagaatttcaggccctggcagcatgggagcagggcagagactggggagttcaggtacccagagatgctgctgggggagctgttttgggaaggaggtggctctcaggagggtgctgcaccccagcccaaagaatgaggacgagtgtgccgtgtgtcgggacggcggggagctcatctgctgtgacggctgccctcgggccttccacctggcctgcctgtcccctccgctccgggagatccccagtgggacctggaggtgctccagctgcctgcaggcaacagtccaggaggtgcagccccgggcagaggagccccggccccaggagccacccgtggagaccccgctccccccggggcttaggtcggcgggagaggaggtaagaggtccacctggggaacccctagccggcatggacacgactcttgtctacaagcacctgccggctccgccttctgcagccccgctgccagggctggactcctcggccctgcaccccctactgtgtgtgggtcctgagggtcagcagaacctggctcctggtgcgcgttgcggggtgtgcggagatggtacggacgtgctgcggtgtactcactgcgccgctgccttccactggcgctgccacttcccagccggcacctcccggcccgggacgggcctgcgctgcagatcctgctcaggagacgtgaccccagcccctgtggagggggtgctggcccccagccccgcccgcctggcccctgggcctgccaaggatgacactgccagtcacgagcccgctctgcacagggatgacctggagtcccttctgagcgagcacaccttcgatggcatcctgcagtgggccatccagagcatggcccgtccggcggcccccttcccctcctgaccccagatggccgggacatgcagctctgatgagagagtgctgagaaggacacctccttcctcagtcctggaagccggccggctgggatcaagaaggggacagcgccacctcttgtcagtgctcggctgtaaacagctctgtgtttctggggacaccagccatcatgtgcctggaaattaaaccctgccccacttctctactctggaagtccccgggagcctctccttgcctggtgacctactaaaaatataaaaattagctgggtgtggtggtgggtgcctgtaatcccagctacatgggagcctgaggcatgagaatcacttgaactcgggaggtggaggttgcagtgagctgagattgcgccactgcactccagtctggtcggcaagagtgagactccgtctcaaaaacaaaacaaaacaaaaaaaccacataacataaatttatcatctcgaccacttttcagttcagtggcattcacatctcatgtaa

SEQ ID NO: 8269 - DNA, 1963 bp, Artificial Sequence
  derived and/or modified sequence
tgggaatgccatgctcatctttcgtccccagcatggtttcttaatggggtagaagcagtgtggggggtgcctgccgtggtgggttacagatcttgaccacttggcaccaggggctctgtggggccctggcacttagcagtgacaggagccagtcctgccctgcaggagcacccgggctggtgggcgtctgggggattgttagaatgagtgaggtcattgccgtgcaggaccagcctagcctggctgtctggggggattctggaggaagtggtacctgggagacccctgaaggcacagcaggcaccatccaggcagggcacaaggacggtgggggctgcaggtggaggattcagcaggcgctgaggtcgggagagacctccctgggcctggccccactgccctgtgaggaagggttcatgtggttggtgtacagttccggggcccctggaacgcagcagcctgcaagaaaccgggttttcttcccaatagggatggccccggggggtgtctgttggagaccagatggatggggaacaggtggtcagggcagaatttcaggccctggcagcatgggagcagggcagagactggggagttcaggtacccagagatgctgctgggggagctgttttgggaaggaggtggctctcaggagggtgctgcaccccagcccagtctgcatgggcgtctcttgcctgtgccagaagaatgaggacgagtgtgccgtgtgtcgggacggcggggagctcatctgctgtgacggctgccctcgggccttccacctggcctgcctgtcccctccgctccgggagatccccagtgggacctggaggtgctccagctgcctgcaggcaacagtccaggaggtgcagccccgggcagaggagccccggccccaggagccacccgtggagaccccgctccccccggggcttaggtcggcgggagaggaggtaagaggtccacctggggaacccctagccggcatggacacgactcttgtctacaagcacctgccggctccgccttctgcagccccgctgccagggctggactcctcggccctgcaccccctactgtgtgtgggtcctgagggtcagcagaacctggctcctggtgcgcgttgcggggtgtgcggagatggtacggacgtgctgcggtgtactcactgcgccgctgccttccactggcgctgccacttcccagccggcacctcccggcccgggacgggcctgcgctgcagatcctgctcaggagacgtgaccccagcccctgtggagggggtgctggcccccagccccgcccgcctggcccctgggcctgccaaggatgacactgccagtcacgagcccgctctgcacagggatgacctggagtcccttctgagcgagcacaccttcgatggcatcctgcagtgggccatccagagcatggcccgtccggcggcccccttcccctcctgaccccagatggccgggacatgcagctctgatgagagagtgctgagaaggacacctccttcctcagtcctggaagccggccggctgggatcaagaaggggacagcgccacctcttgtcagtgctcggctgtaaacagctctgtgtttctggggacaccagccatcatgtgcctggaaattaaaccctgccccacttctctactctggaagtccccgggagcctctccttgcctggtgacctactaaaaatataaaaattagctgggtgtggtggtgggtgcctgtaatcccagctacatgggagcctgaggcatgagaatcacttgaactcgggaggtggaggttgcagtgagctgagattgcgccactgcactccagtctggtcggcaagagtgagactccgtctcaaaaacaaaacaaaacaaaaaaaccacataacataaatttatcatctcgaccacttttcagttcagtggcattcacatctcatgtaaccattgcc

SEQ ID NO: 8270 - DNA, 1638 bp, Artificial Sequence
  derived and/or modified sequence
atggccaccgacgccgccctgagaagactgctgagactgcacagaaccgagatcgccgtggccgtggacagcgccttccccctgctgcacgccctggccgaccacgacgtggtgcccgaggacaagttccaggagaccctgcacctgaaggagaaggagggctgcccccaggccttccacgccctgctgagctggctgctgacccaggacagcaccgccatcctggacttctggagagtgctgttcaaggactacaacctggagagatacggcagactgcagcccatcctggacagcttccccaaggacgtggacctgagccagcccagaaagggcagaaagccccccgccgtgcccaaggccctggtgcccccccccagactgcccaccaagagaaaggccagcgaggaggccagagccgccgcccccgccgccctgacccccagaggcaccgccagccccggcagccagctgaaggccaagccccccaagaagcccgagagcagcgccgagcagcagagactgcccctgggcaacggcatccagaccatgagcgccagcgtgcagagagccgtggccatgagcagcggcgacgtgcccggcgccagaggcgccgtggagggcatcctgatccagcaggtgttcgagagcggcggcagcaagaagtgcatccaggtgggcggcgagttctacacccccagcaagttcgaggacagcggcagcggcaagaacaaggccagaagcagcagcggccccaagcccctggtgagagccaagggcgcccagggcgccgcccccggcggcggcgaggccagactgggccagcagggcagcgtgcccgcccccctggccctgcccagcgacccccagctgcaccagaagaacgaggacgagtgcgccgtgtgcagagacggcggcgagctgatctgctgcgacggctgccccagagccttccacctggcctgcctgagcccccccctgagagagatccccagcggcacctggagatgcagcagctgcctgcaggccaccgtgcaggaggtgcagcccagagccgaggagcccagaccccaggagccccccgtggagacccccctgccccccggcctgagaagcgccggcgaggaggtgagaggcccccccggcgagcccctggccggcatggacaccaccctggtgtacaagcacctgcccgccccccccagcgccgcccccctgcccggcctggacagcagcgccctgcaccccctgctgtgcgtgggccccgagggccagcagaacctggcccccggcgccagatgcggcgtgtgcggcgacggcaccgacgtgctgagatgcacccactgcgccgccgccttccactggagatgccacttccccgccggcaccagcagacccggcaccggcctgagatgcagaagctgcagcggcgacgtgacccccgcccccgtggagggcgtgctggcccccagccccgccagactggcccccggccccgccaaggacgacaccgccagccacgagcccgccctgcacagagacgacctggagagcctgctgagcgagcacaccttcgacggcatcctgcagtgggccatccagagcatggccagacccgccgcccccttccccagctag

SEQ ID NO: 8271 - DNA, 735 bp, Artificial Sequence
  derived and/or modified sequence
atgtggctggtgtacagcagcggcgcccccggcacccagcagcccgccagaaacagagtgttcttccccatcggcatggcccccggcggcgtgtgctggagacccgacggctggggcaccggcggccagggcagaatcagcggccccggcagcatgggcgccggccagagactgggcagcagcggcacccagagatgctgctggggcagctgcttcggcaaggaggtggccctgagaagagtgctgcaccccagccccaagaacgaggacgagtgcgccgtgtgcagagacggcggcgagctgatctgctgcgacggctgccccagagccttccacctggcctgcctgagcccccccctgagagagatccccagcggcacctggagatgcagcagctgcctgcaggccaccgtgcaggaggtgcagcccagagccgaggagcccagaccccaggagccccccgtggagacccccctgccccccggcctgagaagcgccggcgaggagcccagatgccagggctggacccccagaccctgcaccccctactgcgtgtgggtgctgagagtgagcagaacctggctgctggtgagagtggccggctgcgccgagatggtgagaacctgctgcggcgtgctgaccgcccccctgcccagcaccggcgccgccaccagccagcccgccccccccggccccggcagagcctgcgccgccgaccccgcccaggagacctag

SEQ ID NO: 8272 - DNA, 1047 bp, Artificial Sequence
  derived and/or modified sequence
atgtggctggtgtacagcagcggcgcccccggcacccagcagcccgccagaaacagagtgttcttccccatcggcatggcccccggcggcgtgtgctggagacccgacggctggggcaccggcggccagggcagaatcagcggccccggcagcatgggcgccggccagagactgggcagcagcggcacccagagatgctgctggggcagctgcttcggcaaggaggtggccctgagaagagtgctgcaccccagccccgtgtgcatgggcgtgagctgcctgtgccagaagaacgaggacgagtgcgccgtgtgcagagacggcggcgagctgatctgctgcgacggctgccccagagccttccacctggcctgcctgagcccccccctgagagagatccccagcggcacctggagatgcagcagctgcctgcaggccaccgtgcaggaggtgcagcccagagccgaggagcccagaccccaggagccccccgtggagacccccctgccccccggcctgagaagcgccggcgaggaggtgagaggcccccccggcgagcccctggccggcatggacaccaccctggtgtacaagcacctgcccgccccccccagcgccgcccccctgcccggcctggacagcagcgccctgcaccccctgctgtgcgtgggccccgagggccagcagaacctggcccccggcgccagatgcggcgtgtgcggcgacggcaccgacgtgctgagatgcacccactgcgccgccgccttccactggagatgccacttccccgccggcaccagcagacccggcaccggcctgagatgcagaagctgcagcggcgacgtgacccccgcccccgtggagggcgtgctggcccccagccccgccagactggcccccggccccgccaaggacgacaccgccagccacgagcccgccctgcacagagacgacctggagagcctgctgagcgagcacaccttcgacggcatcctgcagtgggccatccagagcatggccagacccgccgcccccttccccagctag

SEQ ID NO: 8273 - DNA, 1017 bp, Artificial Sequence
  derived and/or modified sequence
atgtggctggtgtacagcagcggcgcccccggcacccagcagcccgccagaaacagagtgttcttccccatcggcatggcccccggcggcgtgtgctggagacccgacggctggggcaccggcggccagggcagaatcagcggccccggcagcatgggcgccggccagagactgggcagcagcggcacccagagatgctgctggggcagctgcttcggcaaggaggtggccctgagaagagtgctgcaccccagccccaagaacgaggacgagtgcgccgtgtgcagagacggcggcgagctgatctgctgcgacggctgccccagagccttccacctggcctgcctgagcccccccctgagagagatccccagcggcacctggagatgcagcagctgcctgcaggccaccgtgcaggaggtgcagcccagagccgaggagcccagaccccaggagccccccgtggagacccccctgccccccggcctgagaagcgccggcgaggaggtgagaggcccccccggcgagcccctggccggcatggacaccaccctggtgtacaagcacctgcccgccccccccagcgccgcccccctgcccggcctggacagcagcgccctgcaccccctgctgtgcgtgggccccgagggccagcagaacctggcccccggcgccagatgcggcgtgtgcggcgacggcaccgacgtgctgagatgcacccactgcgccgccgccttccactggagatgccacttccccgccggcaccagcagacccggcaccggcctgagatgcagaagctgcagcggcgacgtgacccccgcccccgtggagggcgtgctggcccccagccccgccagactggcccccggccccgccaaggacgacaccgccagccacgagcccgccctgcacagagacgacctggagagcctgctgagcgagcacaccttcgacggcatcctgcagtgggccatccagagcatggccagacccgccgcccccttccccagctag

SEQ ID NO: 8274 - protein, 4563 aa, Artificial Sequence
  derived and/or modified sequence
MDPPRPALLALLALPALLLLLLAGARAEEEMLENVSLVCPKDATRFKHLRKYTYNYEAESSSGVPGTADSRSATRINCKVELEVPQLCSFILKTSQCTLKEVYGFNPEGKALLKKTKNSEEFAAAMSRYELKLAIPEGKQVFLYPEKDEPTYILNIKRGIISALLVPPETEEAKQVLFLDTVYGNCSTHFTVKTRKGNVATEISTERDLGQCDRFKPIRTGISPLALIKGMTRPLSTLISSSQSCQYTLDAKRKHVAEAICKEQHLFLPFSYKNKYGMVAQVTQTLKLEDTPKINSRFFGEGTKKMGLAFESTKSTSPPKQAEAVLKTLQELKKLTISEQNIQRANLFNKLVTELRGLSDEAVTSLLPQLIEVSSPITLQALVQCGQPQCSTHILQWLKRVHANPLLIDVVTYLVALIPEPSAQQLREIFNMARDQRSRATLYALSHAVNNYHKTNPTGTQELLDIANYLMEQIQDDCTGDEDYTYLILRVIGNMGQTMEQLTPELKSSILKCVQSTKPSLMIQKAAIQALRKMEPKDKDQEVLLQTFLDDASPGDKRLAAYLMLMRSPSQADINKIVQILPWEQNEQVKNFVASHIANILNSEELDIQDLKKLVKEALKESQLPTVMDFRKFSRNYQLYKSVSLPSLDPASAKIEGNLIFDPNNYLPKESMLKTTLTAFGFASADLIEIGLEGKGFEPTLEALFGKQGFFPDSVNKALYWVNGQVPDGVSKVLVDHFGYTKDDKHEQDMVNGIMLSVEKLIKDLKSKEVPEARAYLRILGEELGFASLHDLQLLGKLLLMGARTLQGIPQMIGEVIRKGSKNDFFLHYIFMENAFELPTGAGLQLQISSSGVIAPGAKAGVKLEVANMQAELVAKPSVSVEFVTNMGIIIPDFARSGVQMNTNFFHESGLEAHVALKAGKLKFIIPSPKRPVKLLSGGNTLHLVSTTKTEVIPPLIENRQSWSVCKQVFPGLNYCTSGAYSNASSTDSASYYPLTGDTRLELELRPTGEIEQYSVSATYELQREDRALVDTLKFVTQAEGAKQTEATMTFKYNRQSMTLSSEVQIPDFDVDLGTILRVNDESTEGKTSYRLTLDIQNKKITEVALMGHLSCDTKEERKIKGVISIPRLQAEARSEILAHWSPAKLLLQMDSSATAYGSTVSKRVAWHYDEEKIEFEWNTGTNVDTKKMTSNFPVDLSDYPKSLHMYANRLLDHRVPQTDMTFRHVGSKLIVAMSSWLQKASGSLPYTQTLQDHLNSLKEFNLQNMGLPDFHIPENLFLKSDGRVKYTLNKNSLKIEIPLPFGGKSSRDLKMLETVRTPALHFKSVGFHLPSREFQVPTFTIPKLYQLQVPLLGVLDLSTNVYSNLYNWSASYSGGNTSTDHFSLRARYHMKADSVVDLLSYNVQGSGETTYDHKNTFTLSYDGSLRHKFLDSNIKFSHVEKLGNNPVSKGLLIFDASSSWGPQMSASVHLDSKKKQHLFVKEVKIDGQFRVSSFYAKGTYGLSCQRDPNTGRLNGESNLRFNSSYLQGTNQITGRYEDGTLSLTSTSDLQSGIIKNTASLKYENYELTLKSDTNGKYKNFATSNKMDMTFSKQNALLRSEYQADYESLRFFSLLSGSLNSHGLELNADILGTDKINSGAHKATLRIGQDGISTSATTNLKCSLLVLENELNAELGLSGASMKLTTNGRFREHNAKFSLDGKAALTELSLGSAYQAMILGVDSKNIFNFKVSQEGLKLSNDMMGSYAEMKFDHTNSLNIAGLSLDFSSKLDNIYSSDKFYKQTVNLQLQPYSLVTTLNSDLKYNALDLTNNGKLRLEPLKLHVAGNLKGAYQNNEIKHIYAISSAALSASYKADTVAKVQGVEFSHRLNTDIAGLASAIDMSTNYNSDSLHFSNVFRSVMAPFTMTIDAHTNGNGKLALWGEHTGQLYSKFLLKAEPLAFTFSHDYKGSTSHHLVSRKSISAALEHKVSALLTPAEQTGTWKLKTQFNNNEYSQDLDAYNTKDKIGVELTGRTLADLTLLDSPIKVPLLLSEPINIIDALEMRDAVEKPQEFTIVAFVKYDKNQDVHSINLPFFETLQEYFERNRQTIIVVLENVQRNLKHINIDQFVRKYRAALGKLPQQANDYLNSFNWERQVSHAKEKLTALTKKYRITENDIQIALDDAKINFNEKLSQLQTYMIQFDQYIKDSYDLHDLKIAIANIIDEIIEKLKSLDEHYHIRVNLVKTIHDLHLFIENIDFNKSGSSTASWIQNVDTKYQIRIQIQEKLQQLKRHIQNIDIQHLAGKLKQHIEAIDVRVLLDQLGTTISFERINDILEHVKHFVINLIGDFEVAEKINAFRAKVHELIERYEVDQQIQVLMDKLVELAHQYKLKETIQKLSNVLQQVKIKDYFEKLVGFIDDAVKKLNELSFKTFIEDVNKFLDMLIKKLKSFDYHQFVDETNDKIREVTQRLNGEIQALELPQKAEALKLFLEETKATVAVYLESLQDTKITLIINWLQEALSSASLAHMKAKFRETLEDTRDRMYQMDIQQELQRYLSLVGQVYSTLVTYISDWWTLAAKNLTDFAEQYSIQDWAKRMKALVEQGFTVPEIKTILGTMPAFEVSLQALQKATFQTPDFIVPLTDLRIPSVQINFKDLKNIKIPSRFSTPEFTILNTFHIPSFTIDFVEMKVKIIRTIDQMLNSELQWPVPDIYLRDLKVEDIPLARITLPDFRLPEIAIPEFIIPTLNLNDFQVPDLHIPEFQLPHISHTIEVPTFGKLYSILKIQSPLFTLDANADIGNGTTSANEAGIAASITAKGESKLEVLNFDFQANAQLSNPKINPLALKESVKFSSKYLRTEHGSEMLFFGNAIEGKSNTVASLHTEKNTLELSNGVIVKINNQLTLDSNTKYFHKLNIPKLDFSSQADLRNEIKTLLKAGHIAWTSSGKGSWKWACPRFSDEGTHESQISFTIEGPLTSFGLSNKINSKHLRVNQNLVYESGSLNFSKLEIQSQVDSQHVGHSVLTAKGMALFGEGKAEFTGRHDAHLNGKVIGTLKNSLFFSAQPFEITASTNNEGNLKVRFPLRLTGKIDFLNNYALFLSPSAQQASWQVSARFNQYKYNQNFSAGNNENIMEAHVGINGEANLDFLNIPLTIPEMRLPYTIITTPPLKDFSLWEKTGLKEFLKTTKQSFDLSVKAQYKKNKHRHSITNPLAVLCEFISQSIKSFDRHFEKNRNNALDFVTKSYNETKIKFDKYKAEKSHDELPRTFQIPGYTVPVVNVEVSPFTIEMSAFGYVFPKAVSMPSFSILGSDVRVPSYTLILPSLELPVLHVPRNLKLSLPDFKELCTISHIFIPAMGNITYDFSFKSSVITLNTNAELFNQSDIVAHLLSSSSSVIDALQYKLEGTTRLTRKRGLKLATALSLSNKFVEGSHNSTVSLTTKNMEVSVATTTKAQIPILRMNFKQELNGNTKSKPTVSSSMEFKYDFNSSMLYSTAKGAVDHKLSLESLTSYFSIESSTKGDVKGSVLSREYSGTIASEANTYLNSKSTRSSVKLQGTSKIDDIWNLEVKENFAGEATLQRIYSLWEHSTKNHLQLEGLFFTNGEHTSKATLELSPWQMSALVQVHASQPSSFHDFPDLGQEVALNANTKNQKIRWKNEVRIHSGSFQSQVELSNDQEKAHLDIAGSLEGHLRFLKNIILPVYDKSLWDFLKLDVTTSIGRRQHLRVSTAFVYTKNPNGYSFSIPVKVLADKFIIPGLKLNDLNSVLVMPTFHVPFTDLQVPSCKLDFREIQIYKKLRTSSFALNLPTLPEVKFPEVDVLTKYSQPEDSLIPFFEITVPESQLTVSQFTLPKSVSDGIAALDLNAVANKIADFELPTIIVPEQTIEIPSIKFSVPAGIVIPSFQALTARFEVDSPVYNATWSASLKNKADYVETVLDSTCSSTVQFLEYELNVLGTHKIEDGTLASKTKGTFAHRDFSAEYEEDGKYEGLQEWEGKAHLNIKSPAFTDLHLRYQKDKKGISTSAASPAVGTVGMDMDEDDDFSKWNFYYSPQSSPDKKLTIFKTELRVRESDEETQIKVNWEEEAASGLLTSLKDNVPKATGVLYDYVNKYHWEHTGLTLREVSSKLRRNLQNNAEWVYQGAIRQIDDIDVRFQKAASGTTGTYQEWKDKAQNLYQELLTQEGQASFQGLKDNVFDGLVRVTQEFHMKVKHLIDSLIDFLNFPRFQFPGKPGIYTREELCTMFIREVGTVLSQVYSKVHNGSEILFSYFQDLVITLPFELRKHKLIDVISMYRELLKDLSKEAQEVFKAIQSLKTTEVLRNLQDLLQFIFQLIEDNIKQLKEMKFTYLINYIQDEINTIFSDYIPYVFKLLKENLCLNLHKFNEFIQNELQEASQELQQIHQYIMALREEYFDPSIVGWTVKYYELEEKIVSLIKNLLVALKDFHSEYIVSASNFTSQLSSQVEQFLHRNIQEYLSILTDPDGKGKEKIAELSATAQEIIKSQAIATKKIISDYHQQFRYKLQDFSDQLSDYYEKFIAESKRLIDLSIQNYHTFLIYITELLKKLQSTTVMNPYMKLAPGELTIIL

SEQ ID NO: 8275 - protein, 4344 aa, Artificial Sequence
  derived and/or modified sequence
MDPPRPALLALLALPALLLLLLAGARAEEEMLENVSLVCPKDATRFKHLRKYTYNYEAESSSGVPGTADSRSATRINCKVELEVPQLCSFILKTSQCTLKEVYGFNPEGKALLKKTKNSEEFAAAMSRYELKLAIPEGKQVFLYPEKDEPTYILNIKRGIISALLVPPETEEAKQVLFLDTVYGNCSTHFTVKTRKGNVATEISTERDLGQCDRFKPIRTGISPLALIKGMTRPLSTLISSSQSCQYTLDAKRKHVAEAICKEQHLFLPFSYKNKYGMVAQVTQTLKLEDTPKINSRFFGEGTKKMGLAFESTKSTSPPKQAEAVLKTLQELKKLTISEQNIQRANLFNKLVTELRGLSDEAVTSLLPQLIEVSSPITLQALVQCGQPQCSTHILQWLKRVHANPLLIDVVTYLVALIPEPSAQQLREIFNMARDQRSRATLYALSHAVNNYHKTNPTGTQELLDIANYLMEQIQDDCTGDEDYTYLILRVIGNMGQTMEQLTPELKSSILKCVQSTKPSLMIQKAAIQALRKMEPKDKDQEVLLQTFLDDASPGDKRLAAYLMLMRSPSQADINKIVQILPWEQNEQVKNFVASHIANILNSEELDIQDLKKLVKEALKESQLPTVMDFRKFSRNYQLYKSVSLPSLDPASAKIEGNLIFDPNNYLPKESMLKTTLTAFGFASADLIEIGLEGKGFEPTLEALFGKQGFFPDSVNKALYWVNGQVPDGVSKVLVDHFGYTKDDKHEQDMVNGIMLSVEKLIKDLKSKEVPEARAYLRILGEELGFASLHDLQLLGKLLLMGARTLQGIPQMIGEVIRKGSKNDFFLHYIFMENAFELPTGAGLQLQISSSGVIAPGAKAGVKLEVANMQAELVAKPSVSVEFVTNMGIIIPDFARSGVQMNTNFFHESGLEAHVALKAGKLKFIIPSPKRPVKLLSGGNTLHLVSTTKTEVIPPLIENRQSWSVCKQVFPGLNYCTSGAYSNASSTDSASYYPLTGDTRLELELRPTGEIEQYSVSATYELQREDRALVDTLKFVTQAEGAKQTEATMTFKYNRQSMTLSSEVQIPDFDVDLGTILRVNDESTEGKTSYRLTLDIQNKKITEVALMGHLSCDTKEERKIKGVISIPRLQAEARSEILAHWSPAKLLLQMDSSATAYGSTVSKRVAWHYDEEKIEFEWNTGTNVDTKKMTSNFPVDLSDYPKSLHMYANRLLDHRVPQTDMTFRHVGSKLIVAMSSWLQKASGSLPYTQTLQDHLNSLKEFNLQNMGLPDFHIPENLFLKSDGRVKYTLNKNSLKIEIPLPFGGKSSRDLKMLETVRTPALHFKSVGFHLPSREFQVPTFTIPKLYQLQVPLLGVLDLSTNVYSNLYNWSASYSGGNTSTDHFSLRARYHMKADSVVDLLSYNVQGSGETTYDHKNTFTLSYDGSLRHKFLDSNIKFSHVEKLGNNPVSKGLLIFDASSSWGPQMSASVHLDSKKKQHLFVKEVKIDGQFRVSSFYAKGTYGLSCQRDPNTGRLNGESNLRFNSSYLQGTNQITGRYEDGTLSLTSTSDLQSGIIKNTASLKYENYELTLKSDTNGKYKNFATSNKMDMTFSKQNALLRSEYQADYESLRFFSLLSGSLNSHGLELNADILGTDKINSGAHKATLRIGQDGISTSATTNLKCSLLVLENELNAELGLSGASMKLTTNGRFREHNAKFSLDGKAALTELSLGSAYQAMILGVDSKNIFNFKVSQEGLKLSNDMMGSYAEMKFDHTNSLNIAGLSLDFSSKLDNIYSSDKFYKQTVNLQLQPYSLVTTLNSDLKYNALDLTNNGKLRLEPLKLHVAGNLKGAYQNNEIKHIYAISSAALSASYKADTVAKVQGVEFSHRLNTDIAGLASAIDMSTNYNSDSLHFSNVFRSVMAPFTMTIDAHTNGNGKLALWGEHTGQLYSKFLLKAEPLAFTFSHDYKGSTSHHLVSRKSISAALEHKVSALLTPAEQTGTWKLKTQFNNNEYSQDLDAYNTKDKIGVELTGRTLADLTLLDSPIKVPLLLSEPINIIDALEMRDAVEKPQEFTIVAFVKYDKNQDVHSINLPFFETLQEYFERNRQTIIVVLENVQRNLKHINIDQFVRKYRAALGKLPQQANDYLNSFNWERQVSHAKEKLTALTKKYRITENDIQIALDDAKINFNEKLSQLQTYMIQFDQYIKDSYDLHDLKIAIANIIDEIIEKLKSLDEHYHIRVNLVKTIHDLHLFIENIDFNKSGSSTASWIQNVDTKYQIRIQIQEKLQQLKRHIQNIDIQHLAGKLKQHIEAIDVRVLLDQLGTTISFERINDILEHVKHFVINLIGDFEVAEKINAFRAKVHELIERYEVDQQIQVLMDKLVELAHQYKLKETIQKLSNVLQQVKIKDYFEKLVGFIDDAVKKLNELSFKTFIEDVNKFLDMLIKKLKSFDYHQFVDETNDKIREVTQRLNGEIQALELPQKAEALKLFLEETKATVAVYLESLQDTKITLIINWLQEALSSASLAHMKAKFRETLEDTRDRMYQMDIQQELQRYLSLVGQVYSTLVTYISDWWTLAAKNLTDFAEQYSIQDWAKRMKALVEQGFTVPEIKTILGTMPAFEVSLQALQKATFQTPDFIVPLTDLRIPSVQINFKDLKNIKIPSRFSTPEFTILNTFHIPSFTIDFVEMKVKIIRTIDQMLNSELQWPVPDIYLRDLKVEDIPLARITLPDFRLPEIAIPEFIIPTLNLNDFQVPDLHIPEFQLPHISHTIEVPTFGKLYSILKIQSPLFTLDANADIGNGTTSANEAGIAASITAKGESKLEVLNFDFQANAQLSNPKINPLALKESVKFSSKYLRTEHGSEMLFFGNAIEGKSNTVASLHTEKNTLELSNGVIVKINNQLTLDSNTKYFHKLNIPKLDFSSQADLRNEIKTLLKAGHIAWTSSGKGSWKWACPRFSDEGTHESQISFTIEGPLTSFGLSNKINSKHLRVNQNLVYESGSLNFSKLEIQSQVDSQHVGHSVLTAKGMALFGEGKAEFTGRHDAHLNGKVIGTLKNSLFFSAQPFEITASTNNEGNLKVRFPLRLTGKIDFLNNYALFLSPSAQQASWQVSARFNQYKYNQNFSAGNNENIMEAHVGINGEANLDFLNIPLTIPEMRLPYTIITTPPLKDFSLWEKTGLKEFLKTTKQSFDLSVKAQYKKNKHRHSITNPLAVLCEFISQSIKSFDRHFEKNRNNALDFVTKSYNETKIKFDKYKAEKSHDELPRTFQIPGYTVPVVNVEVSPFTIEMSAFGYVFPKAVSMPSFSILGSDVRVPSYTLILPSLELPVLHVPRNLKLSLPDFKELCTISHIFIPAMGNITYDFSFKSSVITLNTNAELFNQSDIVAHLLSSSSSVIDALQYKLEGTTRLTRKRGLKLATALSLSNKFVEGSHNSTVSLTTKNMEVSVATTTKAQIPILRMNFKQELNGNTKSKPTVSSSMEFKYDFNSSMLYSTAKGAVDHKLSLESLTSYFSIESSTKGDVKGSVLSREYSGTIASEANTYLNSKSTRSSVKLQGTSKIDDIWNLEVKENFAGEATLQRIYSLWEHSTKNHLQLEGLFFTNGEHTSKATLELSPWQMSALVQVHASQPSSFHDFPDLGQEVALNANTKNQKIRWKNEVRIHSGSFQSQVELSNDQEKAHLDIAGSLEGHLRFLKNIILPVYDKSLWDFLKLDVTTSIGRRQHLRVSTAFVYTKNPNGYSFSIPVKVLADKFIIPGLKLNDLNSVLVMPTFHVPFTDLQVPSCKLDFREIQIYKKLRTSSFALNLPTLPEVKFPEVDVLTKYSQPEDSLIPFFEITVPESQLTVSQFTLPKSVSDGIAALDLNAVANKIADFELPTIIVPEQTIEIPSIKFSVPAGIVIPSFQALTARFEVDSPVYNATWSASLKNKADYVETVLDSTCSSTVQFLEYELNVLGTHKIEDGTLASKTKGTFAHRDFSAEYEEDGKYEGLQEWEGKAHLNIKSPAFTDLHLRYQKDKKGISTSAASPAVGTVGMDMDEDDDFSKWNFYYSPQSSPDKKLTIFKTELRVRESDEETQIKVNWEEEAASGLLTSLKDNVPKATGVLYDYVNKYHWEHTGLTLREVSSKLRRNLQNNAEWVYQGAIRQIDDIDVRFQKAASGTTGTYQEWKDKAQNLYQELLTQEGQASFQGLKDNVFDGLVRVTQEFHMKVKHLIDSLIDFLNFPRFQFPGKPGIYTREELCTMFIREVGTVLSQVYSKVHNGSEILFSYFQDLVITLPFELRKHKLIDVISMYRELLKDLSKEAQEVFKAIQSLKTTEVLRNLQDLLQFIFQLIEDNIKQLKEMKFTYLINYIQDEINTIFSDYIPCF

SEQ ID NO: 8276 - DNA, 13035 bp, Artificial Sequence
  derived and/or modified sequence
atggacccccccagacccgccctgctggccctgctggccctgcccgccctgctgctgctgctgctggccggcgccagagccgaggaggagatgctggagaacgtgagcctggtgtgccccaaggacgccaccagattcaagcacctgagaaagtacacctacaactacgaggccgagagcagcagcggcgtgcccggcaccgccgacagcagaagcgccaccagaatcaactgcaaggtggagctggaggtgccccagctgtgcagcttcatcctgaagaccagccagtgcaccctgaaggaggtgtacggcttcaaccccgagggcaaggccctgctgaagaagaccaagaacagcgaggagttcgccgccgccatgagcagatacgagctgaagctggccatccccgagggcaagcaggtgttcctgtaccccgagaaggacgagcccacctacatcctgaacatcaagagaggcatcatcagcgccctgctggtgccccccgagaccgaggaggccaagcaggtgctgttcctggacaccgtgtacggcaactgcagcacccacttcaccgtgaagaccagaaagggcaacgtggccaccgagatcagcaccgagagagacctgggccagtgcgacagattcaagcccatcagaaccggcatcagccccctggccctgatcaagggcatgaccagacccctgagcaccctgatcagcagcagccagagctgccagtacaccctggacgccaagagaaagcacgtggccgaggccatctgcaaggagcagcacctgttcctgcccttcagctacaagaacaagtacggcatggtggcccaggtgacccagaccctgaagctggaggacacccccaagatcaacagcagattcttcggcgagggcaccaagaagatgggcctggccttcgagagcaccaagagcaccagcccccccaagcaggccgaggccgtgctgaagaccctgcaggagctgaagaagctgaccatcagcgagcagaacatccagagagccaacctgttcaacaagctggtgaccgagctgagaggcctgagcgacgaggccgtgaccagcctgctgccccagctgatcgaggtgagcagccccatcaccctgcaggccctggtgcagtgcggccagccccagtgcagcacccacatcctgcagtggctgaagagagtgcacgccaaccccctgctgatcgacgtggtgacctacctggtggccctgatccccgagcccagcgcccagcagctgagagagatcttcaacatggccagagaccagagaagcagagccaccctgtacgccctgagccacgccgtgaacaactaccacaagaccaaccccaccggcacccaggagctgctggacatcgccaactacctgatggagcagatccaggacgactgcaccggcgacgaggactacacctacctgatcctgagagtgatcggcaacatgggccagaccatggagcagctgacccccgagctgaagagcagcatcctgaagtgcgtgcagagcaccaagcccagcctgatgatccagaaggccgccatccaggccctgagaaagatggagcccaaggacaaggaccaggaggtgctgctgcagaccttcctggacgacgccagccccggcgacaagagactggccgcctacctgatgctgatgagaagccccagccaggccgacatcaacaagatcgtgcagatcctgccctgggagcagaacgagcaggtgaagaacttcgtggccagccacatcgccaacatcctgaacagcgaggagctggacatccaggacctgaagaagctggtgaaggaggccctgaaggagagccagctgcccaccgtgatggacttcagaaagttcagcagaaactaccagctgtacaagagcgtgagcctgcccagcctggaccccgccagcgccaagatcgagggcaacctgatcttcgaccccaacaactacctgcccaaggagagcatgctgaagaccaccctgaccgccttcggcttcgccagcgccgacctgatcgagatcggcctggagggcaagggcttcgagcccaccctggaggccctgttcggcaagcagggcttcttccccgacagcgtgaacaaggccctgtactgggtgaacggccaggtgcccgacggcgtgagcaaggtgctggtggaccacttcggctacaccaaggacgacaagcacgagcaggacatggtgaacggcatcatgctgagcgtggagaagctgatcaaggacctgaagagcaaggaggtgcccgaggccagagcctacctgagaatcctgggcgaggagctgggcttcgccagcctgcacgacctgcagctgctgggcaagctgctgctgatgggcgccagaaccctgcagggcatcccccagatgatcggcgaggtgatcagaaagggcagcaagaacgacttcttcctgcactacatcttcatggagaacgccttcgagctgcccaccggcgccggcctgcagctgcagatcagcagcagcggcgtgatcgcccccggcgccaaggccggcgtgaagctggaggtggccaacatgcaggccgagctggtggccaagcccagcgtgagcgtggagttcgtgaccaacatgggcatcatcatccccgacttcgccagaagcggcgtgcagatgaacaccaacttcttccacgagagcggcctggaggcccacgtggccctgaaggccggcaagctgaagttcatcatccccagccccaagagacccgtgaagctgctgagcggcggcaacaccctgcacctggtgagcaccaccaagaccgaggtgatcccccccctgatcgagaacagacagagctggagcgtgtgcaagcaggtgttccccggcctgaactactgcaccagcggcgcctacagcaacgccagcagcaccgacagcgccagctactaccccctgaccggcgacaccagactggagctggagctgagacccaccggcgagatcgagcagtacagcgtgagcgccacctacgagctgcagagagaggacagagccctggtggacaccctgaagttcgtgacccaggccgagggcgccaagcagaccgaggccaccatgaccttcaagtacaacagacagagcatgaccctgagcagcgaggtgcagatccccgacttcgacgtggacctgggcaccatcctgagagtgaacgacgagagcaccgagggcaagaccagctacagactgaccctggacatccagaacaagaagatcaccgaggtggccctgatgggccacctgagctgcgacaccaaggaggagagaaagatcaagggcgtgatcagcatccccagactgcaggccgaggccagaagcgagatcctggcccactggagccccgccaagctgctgctgcagatggacagcagcgccaccgcctacggcagcaccgtgagcaagagagtggcctggcactacgacgaggagaagatcgagttcgagtggaacaccggcaccaacgtggacaccaagaagatgaccagcaacttccccgtggacctgagcgactaccccaagagcctgcacatgtacgccaacagactgctggaccacagagtgccccagaccgacatgaccttcagacacgtgggcagcaagctgatcgtggccatgagcagctggctgcagaaggccagcggcagcctgccctacacccagaccctgcaggaccacctgaacagcctgaaggagttcaacctgcagaacatgggcctgcccgacttccacatccccgagaacctgttcctgaagagcgacggcagagtgaagtacaccctgaacaagaacagcctgaagatcgagatccccctgcccttcggcggcaagagcagcagagacctgaagatgctggagaccgtgagaacccccgccctgcacttcaagagcgtgggcttccacctgcccagcagagagttccaggtgcccaccttcaccatccccaagctgtaccagctgcaggtgcccctgctgggcgtgctggacctgagcaccaacgtgtacagcaacctgtacaactggagcgccagctacagcggcggcaacaccagcaccgaccacttcagcctgagagccagataccacatgaaggccgacagcgtggtggacctgctgagctacaacgtgcagggcagcggcgagaccacctacgaccacaagaacaccttcaccctgagctacgacggcagcctgagacacaagttcctggacagcaacatcaagttcagccacgtggagaagctgggcaacaaccccgtgagcaagggcctgctgatcttcgacgccagcagcagctggggcccccagatgagcgccagcgtgcacctggacagcaagaagaagcagcacctgttcgtgaaggaggtgaagatcgacggccagttcagagtgagcagcttctacgccaagggcacctacggcctgagctgccagagagaccccaacaccggcagactgaacggcgagagcaacctgagattcaacagcagctacctgcagggcaccaaccagatcaccggcagatacgaggacggcaccctgagcctgaccagcaccagcgacctgcagagcggcatcatcaagaacaccgccagcctgaagtacgagaactacgagctgaccctgaagagcgacaccaacggcaagtacaagaacttcgccaccagcaacaagatggacatgaccttcagcaagcagaacgccctgctgagaagcgagtaccaggccgactacgagagcctgagattcttcagcctgctgagcggcagcctgaacagccacggcctggagctgaacgccgacatcctgggcaccgacaagatcaacagcggcgcccacaaggccaccctgagaatcggccaggacggcatcagcaccagcgccaccaccaacctgaagtgcagcctgctggtgctggagaacgagctgaacgccgagctgggcctgagcggcgccagcatgaagctgaccaccaacggcagattcagagagcacaacgccaagttcagcctggacggcaaggccgccctgaccgagctgagcctgggcagcgcctaccaggccatgatcctgggcgtggacagcaagaacatcttcaacttcaaggtgagccaggagggcctgaagctgagcaacgacatgatgggcagctacgccgagatgaagttcgaccacaccaacagcctgaacatcgccggcctgagcctggacttcagcagcaagctggacaacatctacagcagcgacaagttctacaagcagaccgtgaacctgcagctgcagccctacagcctggtgaccaccctgaacagcgacctgaagtacaacgccctggacctgaccaacaacggcaagctgagactggagcccctgaagctgcacgtggccggcaacctgaagggcgcctaccagaacaacgagatcaagcacatctacgccatcagcagcgccgccctgagcgccagctacaaggccgacaccgtggccaaggtgcagggcgtggagttcagccacagactgaacaccgacatcgccggcctggccagcgccatcgacatgagcaccaactacaacagcgacagcctgcacttcagcaacgtgttcagaagcgtgatggcccccttcaccatgaccatcgacgcccacaccaacggcaacggcaagctggccctgtggggcgagcacaccggccagctgtacagcaagttcctgctgaaggccgagcccctggccttcaccttcagccacgactacaagggcagcaccagccaccacctggtgagcagaaagagcatcagcgccgccctggagcacaaggtgagcgccctgctgacccccgccgagcagaccggcacctggaagctgaagacccagttcaacaacaacgagtacagccaggacctggacgcctacaacaccaaggacaagatcggcgtggagctgaccggcagaaccctggccgacctgaccctgctggacagccccatcaaggtgcccctgctgctgagcgagcccatcaacatcatcgacgccctggagatgagagacgccgtggagaagccccaggagttcaccatcgtggccttcgtgaagtacgacaagaaccaggacgtgcacagcatcaacctgcccttcttcgagaccctgcaggagtacttcgagagaaacagacagaccatcatcgtggtgctggagaacgtgcagagaaacctgaagcacatcaacatcgaccagttcgtgagaaagtacagagccgccctgggcaagctgccccagcaggccaacgactacctgaacagcttcaactgggagagacaggtgagccacgccaaggagaagctgaccgccctgaccaagaagtacagaatcaccgagaacgacatccagatcgccctggacgacgccaagatcaacttcaacgagaagctgagccagctgcagacctacatgatccagttcgaccagtacatcaaggacagctacgacctgcacgacctgaagatcgccatcgccaacatcatcgacgagatcatcgagaagctgaagagcctggacgagcactaccacatcagagtgaacctggtgaagaccatccacgacctgcacctgttcatcgagaacatcgacttcaacaagagcggcagcagcaccgccagctggatccagaacgtggacaccaagtaccagatcagaatccagatccaggagaagctgcagcagctgaagagacacatccagaacatcgacatccagcacctggccggcaagctgaagcagcacatcgaggccatcgacgtgagagtgctgctggaccagctgggcaccaccatcagcttcgagagaatcaacgacatcctggagcacgtgaagcacttcgtgatcaacctgatcggcgacttcgaggtggccgagaagatcaacgccttcagagccaaggtgcacgagctgatcgagagatacgaggtggaccagcagatccaggtgctgatggacaagctggtggagctggcccaccagtacaagctgaaggagaccatccagaagctgagcaacgtgctgcagcaggtgaagatcaaggactacttcgagaagctggtgggcttcatcgacgacgccgtgaagaagctgaacgagctgagcttcaagaccttcatcgaggacgtgaacaagttcctggacatgctgatcaagaagctgaagagcttcgactaccaccagttcgtggacgagaccaacgacaagatcagagaggtgacccagagactgaacggcgagatccaggccctggagctgccccagaaggccgaggccctgaagctgttcctggaggagaccaaggccaccgtggccgtgtacctggagagcctgcaggacaccaagatcaccctgatcatcaactggctgcaggaggccctgagcagcgccagcctggcccacatgaaggccaagttcagagagaccctggaggacaccagagacagaatgtaccagatggacatccagcaggagctgcagagatacctgagcctggtgggccaggtgtacagcaccctggtgacctacatcagcgactggtggaccctggccgccaagaacctgaccgacttcgccgagcagtacagcatccaggactgggccaagagaatgaaggccctggtggagcagggcttcaccgtgcccgagatcaagaccatcctgggcaccatgcccgccttcgaggtgagcctgcaggccctgcagaaggccaccttccagacccccgacttcatcgtgcccctgaccgacctgagaatccccagcgtgcagatcaacttcaaggacctgaagaacatcaagatccccagcagattcagcacccccgagttcaccatcctgaacaccttccacatccccagcttcaccatcgacttcgtggagatgaaggtgaagatcatcagaaccatcgaccagatgctgaacagcgagctgcagtggcccgtgcccgacatctacctgagagacctgaaggtggaggacatccccctggccagaatcaccctgcccgacttcagactgcccgagatcgccatccccgagttcatcatccccaccctgaacctgaacgacttccaggtgcccgacctgcacatccccgagttccagctgccccacatcagccacaccatcgaggtgcccaccttcggcaagctgtacagcatcctgaagatccagagccccctgttcaccctggacgccaacgccgacatcggcaacggcaccaccagcgccaacgaggccggcatcgccgccagcatcaccgccaagggcgagagcaagctggaggtgctgaacttcgacttccaggccaacgcccagctgagcaaccccaagatcaaccccctggccctgaaggagagcgtgaagttcagcagcaagtacctgagaaccgagcacggcagcgagatgctgttcttcggcaacgccatcgagggcaagagcaacaccgtggccagcctgcacaccgagaagaacaccctggagctgagcaacggcgtgatcgtgaagatcaacaaccagctgaccctggacagcaacaccaagtacttccacaagctgaacatccccaagctggacttcagcagccaggccgacctgagaaacgagatcaagaccctgctgaaggccggccacatcgcctggaccagcagcggcaagggcagctggaagtgggcctgccccagattcagcgacgagggcacccacgagagccagatcagcttcaccatcgagggccccctgaccagcttcggcctgagcaacaagatcaacagcaagcacctgagagtgaaccagaacctggtgtacgagagcggcagcctgaacttcagcaagctggagatccagagccaggtggacagccagcacgtgggccacagcgtgctgaccgccaagggcatggccctgttcggcgagggcaaggccgagttcaccggcagacacgacgcccacctgaacggcaaggtgatcggcaccctgaagaacagcctgttcttcagcgcccagcccttcgagatcaccgccagcaccaacaacgagggcaacctgaaggtgagattccccctgagactgaccggcaagatcgacttcctgaacaactacgccctgttcctgagccccagcgcccagcaggccagctggcaggtgagcgccagattcaaccagtacaagtacaaccagaacttcagcgccggcaacaacgagaacatcatggaggcccacgtgggcatcaacggcgaggccaacctggacttcctgaacatccccctgaccatccccgagatgagactgccctacaccatcatcaccaccccccccctgaaggacttcagcctgtgggagaagaccggcctgaaggagttcctgaagaccaccaagcagagcttcgacctgagcgtgaaggcccagtacaagaagaacaagcacagacacagcatcaccaaccccctggccgtgctgtgcgagttcatcagccagagcatcaagagcttcgacagacacttcgagaagaacagaaacaacgccctggacttcgtgaccaagagctacaacgagaccaagatcaagttcgacaagtacaaggccgagaagagccacgacgagctgcccagaaccttccagatccccggctacaccgtgcccgtggtgaacgtggaggtgagccccttcaccatcgagatgagcgccttcggctacgtgttccccaaggccgtgagcatgcccagcttcagcatcctgggcagcgacgtgagagtgcccagctacaccctgatcctgcccagcctggagctgcccgtgctgcacgtgcccagaaacctgaagctgagcctgcccgacttcaaggagctgtgcaccatcagccacatcttcatccccgccatgggcaacatcacctacgacttcagcttcaagagcagcgtgatcaccctgaacaccaacgccgagctgttcaaccagagcgacatcgtggcccacctgctgagcagcagcagcagcgtgatcgacgccctgcagtacaagctggagggcaccaccagactgaccagaaagagaggcctgaagctggccaccgccctgagcctgagcaacaagttcgtggagggcagccacaacagcaccgtgagcctgaccaccaagaacatggaggtgagcgtggccaccaccaccaaggcccagatccccatcctgagaatgaacttcaagcaggagctgaacggcaacaccaagagcaagcccaccgtgagcagcagcatggagttcaagtacgacttcaacagcagcatgctgtacagcaccgccaagggcgccgtggaccacaagctgagcctggagagcctgaccagctacttcagcatcgagagcagcaccaagggcgacgtgaagggcagcgtgctgagcagagagtacagcggcaccatcgccagcgaggccaacacctacctgaacagcaagagcaccagaagcagcgtgaagctgcagggcaccagcaagatcgacgacatctggaacctggaggtgaaggagaacttcgccggcgaggccaccctgcagagaatctacagcctgtgggagcacagcaccaagaaccacctgcagctggagggcctgttcttcaccaacggcgagcacaccagcaaggccaccctggagctgagcccctggcagatgagcgccctggtgcaggtgcacgccagccagcccagcagcttccacgacttccccgacctgggccaggaggtggccctgaacgccaacaccaagaaccagaagatcagatggaagaacgaggtgagaatccacagcggcagcttccagagccaggtggagctgagcaacgaccaggagaaggcccacctggacatcgccggcagcctggagggccacctgagattcctgaagaacatcatcctgcccgtgtacgacaagagcctgtgggacttcctgaagctggacgtgaccaccagcatcggcagaagacagcacctgagagtgagcaccgccttcgtgtacaccaagaaccccaacggctacagcttcagcatccccgtgaaggtgctggccgacaagttcatcatccccggcctgaagctgaacgacctgaacagcgtgctggtgatgcccaccttccacgtgcccttcaccgacctgcaggtgcccagctgcaagctggacttcagagagatccagatctacaagaagctgagaaccagcagcttcgccctgaacctgcccaccctgcccgaggtgaagttccccgaggtggacgtgctgaccaagtacagccagcccgaggacagcctgatccccttcttcgagatcaccgtgcccgagagccagctgaccgtgagccagttcaccctgcccaagagcgtgagcgacggcatcgccgccctggacctgaacgccgtggccaacaagatcgccgacttcgagctgcccaccatcatcgtgcccgagcagaccatcgagatccccagcatcaagttcagcgtgcccgccggcatcgtgatccccagcttccaggccctgaccgccagattcgaggtggacagccccgtgtacaacgccacctggagcgccagcctgaagaacaaggccgactacgtggagaccgtgctggacagcacctgcagcagcaccgtgcagttcctggagtacgagctgaacgtgctgggcacccacaagatcgaggacggcaccctggccagcaagaccaagggcaccttcgcccacagagacttcagcgccgagtacgaggaggacggcaagtacgagggcctgcaggagtgggagggcaaggcccacctgaacatcaagagccccgccttcaccgacctgcacctgagataccagaaggacaagaagggcatcagcaccagcgccgccagccccgccgtgggcaccgtgggcatggacatggacgaggacgacgacttcagcaagtggaacttctactacagcccccagagcagccccgacaagaagctgaccatcttcaagaccgagctgagagtgagagagagcgacgaggagacccagatcaaggtgaactgggaggaggaggccgccagcggcctgctgaccagcctgaaggacaacgtgcccaaggccaccggcgtgctgtacgactacgtgaacaagtaccactgggagcacaccggcctgaccctgagagaggtgagcagcaagctgagaagaaacctgcagaacaacgccgagtgggtgtaccagggcgccatcagacagatcgacgacatcgacgtgagattccagaaggccgccagcggcaccaccggcacctaccaggagtggaaggacaaggcccagaacctgtaccaggagctgctgacccaggagggccaggccagcttccagggcctgaaggacaacgtgttcgacggcctggtgagagtgacccaggagttccacatgaaggtgaagcacctgatcgacagcctgatcgacttcctgaacttccccagattccagttccccggcaagcccggcatctacaccagagaggagctgtgcaccatgttcatcagagaggtgggcaccgtgctgagccaggtgtacagcaaggtgcacaacggcagcgagatcctgttcagctacttccaggacctggtgatcaccctgcccttcgagctgagaaagcacaagctgatcgacgtgatcagcatgtacagagagctgctgaaggacctgagcaaggaggcccaggaggtgttcaaggccatccagagcctgaagaccaccgaggtgctgagaaacctgcaggacctgctgcagttcatcttccagctgatcgaggacaacatcaagcagctgaaggagatgaagttcacctacctgatcaactacatccaggacgagatcaacaccatcttcagcgactacatcccctgcttctag

SEQ ID NO: 8277 - DNA, 14121 bp, Artificial Sequence
  derived and/or modified sequence
attcccaccgggacctgcggggctgagtgcccttctcggttgctgccgctgaggagcccgcccagccagccagggccgcgaggccgaggccaggccgcagcccaggagccgccccaccgcagctggcgatggacccgccgaggcccgcgctgctggcgctgctggcgctgcctgcgctgctgctgctgctgctggcgggcgccagggccgaagaggaaatgctggaaaatgtcagcctggtctgtccaaaagatgcgacccgattcaagcacctccggaagtacacatacaactatgaggctgagagttccagtggagtccctgggactgctgattcaagaagtgccaccaggatcaactgcaaggttgagctggaggttccccagctctgcagcttcatcctgaagaccagccagtgcaccctgaaagaggtgtatggcttcaaccctgagggcaaagccttgctgaagaaaaccaagaactctgaggagtttgctgcagccatgtccaggtatgagctcaagctggccattccagaagggaagcaggttttcctttacccggagaaagatgaacctacttacatcctgaacatcaagaggggcatcatttctgccctcctggttcccccagagacagaagaagccaagcaagtgttgtttctggataccgtgtatggaaactgctccactcactttaccgtcaagacgaggaagggcaatgtggcaacagaaatatccactgaaagagacctggggcagtgtgatcgcttcaagcccatccgcacaggcatcagcccacttgctctcatcaaaggcatgacccgccccttgtcaactctgatcagcagcagccagtcctgtcagtacacactggacgctaagaggaagcatgtggcagaagccatctgcaaggagcaacacctcttcctgcctttctcctacaagaataagtatgggatggtagcacaagtgacacagactttgaaacttgaagacacaccaaagatcaacagccgcttctttggtgaaggtactaagaagatgggcctcgcatttgagagcaccaaatccacatcacctccaaagcaggccgaagctgttttgaagactctccaggaactgaaaaaactaaccatctctgagcaaaatatccagagagctaatctcttcaataagctggttactgagctgagaggcctcagtgatgaagcagtcacatctctcttgccacagctgattgaggtgtccagccccatcactttacaagccttggttcagtgtggacagcctcagtgctccactcacatcctccagtggctgaaacgtgtgcatgccaacccccttctgatagatgtggtcacctacctggtggccctgatccccgagccctcagcacagcagctgcgagagatcttcaacatggcgagggatcagcgcagccgagccaccttgtatgcgctgagccacgcggtcaacaactatcataagacaaaccctacagggacccaggagctgctggacattgctaattacctgatggaacagattcaagatgactgcactggggatgaagattacacctatttgattctgcgggtcattggaaatatgggccaaaccatggagcagttaactccagaactcaagtcttcaatcctgaaatgtgtccaaagtacaaagccatcactgatgatccagaaagctgccatccaggctctgcggaaaatggagcctaaagacaaggaccaggaggttcttcttcagactttccttgatgatgcttctccgggagataagcgactggctgcctatcttatgttgatgaggagtccttcacaggcagatattaacaaaattgtccaaattctaccatgggaacagaatgagcaagtgaagaactttgtggcttcccatattgccaatatcttgaactcagaagaattggatatccaagatctgaaaaagttagtgaaagaagctctgaaagaatctcaacttccaactgtcatggacttcagaaaattctctcggaactatcaactctacaaatctgtttctcttccatcacttgacccagcctcagccaaaatagaagggaatcttatatttgatccaaataactaccttcctaaagaaagcatgctgaaaactaccctcactgcctttggatttgcttcagctgacctcatcgagattggcttggaaggaaaaggctttgagccaacattggaagctctttttgggaagcaaggatttttcccagacagtgtcaacaaagctttgtactgggttaatggtcaagttcctgatggtgtctctaaggtcttagtggaccactttggctataccaaagatgataaacatgagcaggatatggtaaatggaataatgctcagtgttgagaagctgattaaagatttgaaatccaaagaagtcccggaagccagagcctacctccgcatcttgggagaggagcttggttttgccagtctccatgacctccagctcctgggaaagctgcttctgatgggtgcccgcactctgcaggggatcccccagatgattggagaggtcatcaggaagggctcaaagaatgacttttttcttcactacatcttcatggagaatgcctttgaactccccactggagctggattacagttgcaaatatcttcatctggagtcattgctcccggagccaaggctggagtaaaactggaagtagccaacatgcaggctgaactggtggcaaaaccctccgtgtctgtggagtttgtgacaaatatgggcatcatcattccggacttcgctaggagtggggtccagatgaacaccaacttcttccacgagtcgggtctggaggctcatgttgccctaaaagctgggaagctgaagtttatcattccttccccaaagagaccagtcaagctgctcagtggaggcaacacattacatttggtctctaccaccaaaacggaggtgatcccacctctcattgagaacaggcagtcctggtcagtttgcaagcaagtctttcctggcctgaattactgcacctcaggcgcttactccaacgccagctccacagactccgcctcctactatccgctgaccggggacaccagattagagctggaactgaggcctacaggagagattgagcagtattctgtcagcgcaacctatgagctccagagagaggacagagccttggtggataccctgaagtttgtaactcaagcagaaggtgcgaagcagactgaggctaccatgacattcaaatataatcggcagagtatgaccttgtccagtgaagtccaaattccggattttgatgttgacctcggaacaatcctcagagttaatgatgaatctactgagggcaaaacgtcttacagactcaccctggacattcagaacaagaaaattactgaggtcgccctcatgggccacctaagttgtgacacaaaggaagaaagaaaaatcaagggtgttatttccataccccgtttgcaagcagaagccagaagtgagatcctcgcccactggtcgcctgccaaactgcttctccaaatggactcatctgctacagcttatggctccacagtttccaagagggtggcatggcattatgatgaagagaagattgaatttgaatggaacacaggcaccaatgtagataccaaaaaaatgacttccaatttccctgtggatctctccgattatcctaagagcttgcatatgtatgctaatagactcctggatcacagagtccctcaaacagacatgactttccggcacgtgggttccaaattaatagttgcaatgagctcatggcttcagaaggcatctgggagtcttccttatacccagactttgcaagaccacctcaatagcctgaaggagttcaacctccagaacatgggattgccagacttccacatcccagaaaacctcttcttaaaaagcgatggccgggtcaaatataccttgaacaagaacagtttgaaaattgagattcctttgccttttggtggcaaatcctccagagatctaaagatgttagagactgttaggacaccagccctccacttcaagtctgtgggattccatctgccatctcgagagttccaagtccctacttttaccattcccaagttgtatcaactgcaagtgcctctcctgggtgttctagacctctccacgaatgtctacagcaacttgtacaactggtccgcctcctacagtggtggcaacaccagcacagaccatttcagccttcgggctcgttaccacatgaaggctgactctgtggttgacctgctttcctacaatgtgcaaggatctggagaaacaacatatgaccacaagaatacgttcacactatcatatgatgggtctctacgccacaaatttctagattcgaatatcaaattcagtcatgtagaaaaacttggaaacaacccagtctcaaaaggtttactaatattcgatgcatctagttcctggggaccacagatgtctgcttcagttcatttggactccaaaaagaaacagcatttgtttgtcaaagaagtcaagattgatgggcagttcagagtctcttcgttctatgctaaaggcacatatggcctgtcttgtcagagggatcctaacactggccggctcaatggagagtccaacctgaggtttaactcctcctacctccaaggcaccaaccagataacaggaagatatgaagatggaaccctctccctcacctccacctctgatctgcaaagtggcatcattaaaaatactgcttccctaaagtatgagaactacgagctgactttaaaatctgacaccaatgggaagtataagaactttgccacttctaacaagatggatatgaccttctctaagcaaaatgcactgctgcgttctgaatatcaggctgattacgagtcattgaggttcttcagcctgctttctggatcactaaattcccatggtcttgagttaaatgctgacatcttaggcactgacaaaattaatagtggtgctcacaaggcgacactaaggattggccaagatggaatatctaccagtgcaacgaccaacttgaagtgtagtctcctggtgctggagaatgagctgaatgcagagcttggcctctctggggcatctatgaaattaacaacaaatggccgcttcagggaacacaatgcaaaattcagtctggatgggaaagccgccctcacagagctatcactgggaagtgcttatcaggccatgattctgggtgtcgacagcaaaaacattttcaacttcaaggtcagtcaagaaggacttaagctctcaaatgacatgatgggctcatatgctgaaatgaaatttgaccacacaaacagtctgaacattgcaggcttatcactggacttctcttcaaaacttgacaacatttacagctctgacaagttttataagcaaactgttaatttacagctacagccctattctctggtaactactttaaacagtgacctgaaatacaatgctctggatctcaccaacaatgggaaactacggctagaacccctgaagctgcatgtggctggtaacctaaaaggagcctaccaaaataatgaaataaaacacatctatgccatctcttctgctgccttatcagcaagctataaagcagacactgttgctaaggttcagggtgtggagtttagccatcggctcaacacagacatcgctgggctggcttcagccattgacatgagcacaaactataattcagactcactgcatttcagcaatgtcttccgttctgtaatggccccgtttaccatgaccatcgatgcacatacaaatggcaatgggaaactcgctctctggggagaacatactgggcagctgtatagcaaattcctgttgaaagcagaacctctggcatttactttctctcatgattacaaaggctccacaagtcatcatctcgtgtctaggaaaagcatcagtgcagctcttgaacacaaagtcagtgccctgcttactccagctgagcagacaggcacctggaaactcaagacccaatttaacaacaatgaatacagccaggacttggatgcttacaacactaaagataaaattggcgtggagcttactggacgaactctggctgacctaactctactagactccccaattaaagtgccacttttactcagtgagcccatcaatatcattgatgctttagagatgagagatgccgttgagaagccccaagaatttacaattgttgcttttgtaaagtatgataaaaaccaagatgttcactccattaacctcccattttttgagaccttgcaagaatattttgagaggaatcgacaaaccattatagttgtactggaaaacgtacagagaaacctgaagcacatcaatattgatcaatttgtaagaaaatacagagcagccctgggaaaactcccacagcaagctaatgattatctgaattcattcaattgggagagacaagtttcacatgccaaggagaaactgactgctctcacaaaaaagtatagaattacagaaaatgatatacaaattgcattagatgatgccaaaatcaactttaatgaaaaactatctcaactgcagacatatatgatacaatttgatcagtatattaaagatagttatgatttacatgatttgaaaatagctattgctaatattattgatgaaatcattgaaaaattaaaaagtcttgatgagcactatcatatccgtgtaaatttagtaaaaacaatccatgatctacatttgtttattgaaaatattgattttaacaaaagtggaagtagtactgcatcctggattcaaaatgtggatactaagtaccaaatcagaatccagatacaagaaaaactgcagcagcttaagagacacatacagaatatagacatccagcacctagctggaaagttaaaacaacacattgaggctattgatgttagagtgcttttagatcaattgggaactacaatttcatttgaaagaataaatgacattcttgagcatgtcaaacactttgttataaatcttattggggattttgaagtagctgagaaaatcaatgccttcagagccaaagtccatgagttaatcgagaggtatgaagtagaccaacaaatccaggttttaatggataaattagtagagttggcccaccaatacaagttgaaggagactattcagaagctaagcaatgtcctacaacaagttaagataaaagattactttgagaaattggttggatttattgatgatgctgtcaagaagcttaatgaattatcttttaaaacattcattgaagatgttaacaaattccttgacatgttgataaagaaattaaagtcatttgattaccaccagtttgtagatgaaaccaatgacaaaatccgtgaggtgactcagagactcaatggtgaaattcaggctctggaactaccacaaaaagctgaagcattaaaactgtttttagaggaaaccaaggccacagttgcagtgtatctggaaagcctacaggacaccaaaataaccttaatcatcaattggttacaggaggctttaagttcagcatctttggctcacatgaaggccaaattccgagagaccctagaagatacacgagaccgaatgtatcaaatggacattcagcaggaacttcaacgatacctgtctctggtaggccaggtttatagcacacttgtcacctacatttctgattggtggactcttgctgctaagaaccttactgactttgcagagcaatattctatccaagattgggctaaacgtatgaaagcattggtagagcaagggttcactgttcctgaaatcaagaccatccttgggaccatgcctgcctttgaagtcagtcttcaggctcttcagaaagctaccttccagacacctgattttatagtccccctaacagatttgaggattccatcagttcagataaacttcaaagacttaaaaaatataaaaatcccatccaggttttccacaccagaatttaccatccttaacaccttccacattccttcctttacaattgactttgtagaaatgaaagtaaagatcatcagaaccattgaccagatgctgaacagtgagctgcagtggcccgttccagatatatatctcagggatctgaaggtggaggacattcctctagcgagaatcaccctgccagacttccgtttaccagaaatcgcaattccagaattcataatcccaactctcaaccttaatgattttcaagttcctgaccttcacataccagaattccagcttccccacatctcacacacaattgaagtacctacttttggcaagctatacagtattctgaaaatccaatctcctcttttcacattagatgcaaatgctgacatagggaatggaaccacctcagcaaacgaagcaggtatcgcagcttccatcactgccaaaggagagtccaaattagaagttctcaattttgattttcaagcaaatgcacaactctcaaaccctaagattaatccgctggctctgaaggagtcagtgaagttctccagcaagtacctgagaacggagcatgggagtgaaatgctgttttttggaaatgctattgagggaaaatcaaacacagtggcaagtttacacacagaaaaaaatacactggagcttagtaatggagtgattgtcaagataaacaatcagcttaccctggatagcaacactaaatacttccacaaattgaacatccccaaactggacttctctagtcaggctgacctgcgcaacgagatcaagacactgttgaaagctggccacatagcatggacttcttctggaaaagggtcatggaaatgggcctgccccagattctcagatgagggaacacatgaatcacaaattagtttcaccatagaaggacccctcacttcctttggactgtccaataagatcaatagcaaacacctaagagtaaaccaaaacttggtttatgaatctggctccctcaacttttctaaacttgaaattcaatcacaagtcgattcccagcatgtgggccacagtgttctaactgctaaaggcatggcactgtttggagaagggaaggcagagtttactgggaggcatgatgctcatttaaatggaaaggttattggaactttgaaaaattctcttttcttttcagcccagccatttgagatcacggcatccacaaacaatgaagggaatttgaaagttcgttttccattaaggttaacagggaagatagacttcctgaataactatgcactgtttctgagtcccagtgcccagcaagcaagttggcaagtaagtgctaggttcaatcagtataagtacaaccaaaatttctctgctggaaacaacgagaacattatggaggcccatgtaggaataaatggagaagcaaatctggatttcttaaacattcctttaacaattcctgaaatgcgtctaccttacacaataatcacaactcctccactgaaagatttctctctatgggaaaaaacaggcttgaaggaattcttgaaaacgacaaagcaatcatttgatttaagtgtaaaagctcagtataagaaaaacaaacacaggcattccatcacaaatcctttggctgtgctttgtgagtttatcagtcagagcatcaaatcctttgacaggcattttgaaaaaaacagaaacaatgcattagattttgtcaccaaatcctataatgaaacaaaaattaagtttgataagtacaaagctgaaaaatctcacgacgagctccccaggacctttcaaattcctggatacactgttccagttgtcaatgttgaagtgtctccattcaccatagagatgtcggcattcggctatgtgttcccaaaagcagtcagcatgcctagtttctccatcctaggttctgacgtccgtgtgccttcatacacattaatcctgccatcattagagctgccagtccttcatgtccctagaaatctcaagctttctcttccagatttcaaggaattgtgtaccataagccatatttttattcctgccatgggcaatattacctatgatttctcctttaaatcaagtgtcatcacactgaataccaatgctgaactttttaaccagtcagatattgttgctcatctcctttcttcatcttcatctgtcattgatgcactgcagtacaaattagagggcaccacaagattgacaagaaaaaggggattgaagttagccacagctctgtctctgagcaacaaatttgtggagggtagtcataacagtactgtgagcttaaccacgaaaaatatggaagtgtcagtggcaacaaccacaaaagcccaaattccaattttgagaatgaatttcaagcaagaacttaatggaaataccaagtcaaaacctactgtctcttcctccatggaatttaagtatgatttcaattcttcaatgctgtactctaccgctaaaggagcagttgaccacaagcttagcttggaaagcctcacctcttacttttccattgagtcatctaccaaaggagatgtcaagggttcggttctttctcgggaatattcaggaactattgctagtgaggccaacacttacttgaattccaagagcacacggtcttcagtgaagctgcagggcacttccaaaattgatgatatctggaaccttgaagtaaaagaaaattttgctggagaagccacactccaacgcatatattccctctgggagcacagtacgaaaaaccacttacagctagagggcctctttttcaccaacggagaacatacaagcaaagccaccctggaactctctccatggcaaatgtcagctcttgttcaggtccatgcaagtcagcccagttccttccatgatttccctgaccttggccaggaagtggccctgaatgctaacactaagaaccagaagatcagatggaaaaatgaagtccggattcattctgggtctttccagagccaggtcgagctttccaatgaccaagaaaaggcacaccttgacattgcaggatccttagaaggacacctaaggttcctcaaaaatatcatcctaccagtctatgacaagagcttatgggatttcctaaagctggatgtaaccaccagcattggtaggagacagcatcttcgtgtttcaactgcctttgtgtacaccaaaaaccccaatggctattcattctccatccctgtaaaagttttggctgataaattcattattcctgggctgaaactaaatgatctaaattcagttcttgtcatgcctacgttccatgtcccatttacagatcttcaggttccatcgtgcaaacttgacttcagagaaatacaaatctataagaagctgagaacttcatcatttgccctcaacctaccaacactccccgaggtaaaattccctgaagttgatgtgttaacaaaatattctcaaccagaagactccttgattcccttttttgagataaccgtgcctgaatctcagttaactgtgtcccagttcacgcttccaaaaagtgtttcagatggcattgctgctttggatctaaatgcagtagccaacaagatcgcagactttgagttgcccaccatcatcgtgcctgagcagaccattgagattccctccattaagttctctgtacctgctggaattgtcattccttcctttcaagcactgactgcacgctttgaggtagactctcccgtgtataatgccacttggagtgccagtttgaaaaacaaagcagattatgttgaaacagtcctggattccacatgcagctcaaccgtacagttcctagaatatgaactaaatgttttgggaacacacaaaatcgaagatggtacgttagcctctaagactaaaggaacatttgcacaccgtgacttcagtgcagaatatgaagaagatggcaaatatgaaggacttcaggaatgggaaggaaaagcgcacctcaatatcaaaagcccagcgttcaccgatctccatctgcgctaccagaaagacaagaaaggcatctccacctcagcagcctccccagccgtaggcaccgtgggcatggatatggatgaagatgacgacttttctaaatggaacttctactacagccctcagtcctctccagataaaaaactcaccatattcaaaactgagttgagggtccgggaatctgatgaggaaactcagatcaaagttaattgggaagaagaggcagcttctggcttgctaacctctctgaaagacaacgtgcccaaggccacaggggtcctttatgattatgtcaacaagtaccactgggaacacacagggctcaccctgagagaagtgtcttcaaagctgagaagaaatctgcagaacaatgctgagtgggtttatcaaggggccattaggcaaattgatgatatcgacgtgaggttccagaaagcagccagtggcaccactgggacctaccaagagtggaaggacaaggcccagaatctgtaccaggaactgttgactcaggaaggccaagccagtttccagggactcaaggataacgtgtttgatggcttggtacgagttactcaagaattccatatgaaagtcaagcatctgattgactcactcattgattttctgaacttccccagattccagtttccggggaaacctgggatatacactagggaggaactttgcactatgttcataagggaggtagggacggtactgtcccaggtatattcgaaagtccataatggttcagaaatactgttttcctatttccaagacctagtgattacacttcctttcgagttaaggaaacataaactaatagatgtaatctcgatgtatagggaactgttgaaagatttatcaaaagaagcccaagaggtatttaaagccattcagtctctcaagaccacagaggtgctacgtaatcttcaggaccttttacaattcattttccaactaatagaagataacattaaacagctgaaagagatgaaatttacttatcttattaattatatccaagatgagatcaacacaatcttcagtgattatatcccatatgtttttaaattgttgaaagaaaacctatgccttaatcttcataagttcaatgaatttattcaaaacgagcttcaggaagcttctcaagagttacagcagatccatcaatacattatggcccttcgtgaagaatattttgatccaagtatagttggctggacagtgaaatattatgaacttgaagaaaagatagtcagtctgatcaagaacctgttagttgctcttaaggacttccattctgaatatattgtcagtgcctctaactttacttcccaactctcaagtcaagttgagcaatttctgcacagaaatattcaggaatatcttagcatccttaccgatccagatggaaaagggaaagagaagattgcagagctttctgccactgctcaggaaataattaaaagccaggccattgcgacgaagaaaataatttctgattaccaccagcagtttagatataaactgcaagatttttcagaccaactctctgattactatgaaaaatttattgctgaatccaaaagattgattgacctgtccattcaaaactaccacacatttctgatatacatcacggagttactgaaaaagctgcaatcaaccacagtcatgaacccctacatgaagcttgctccaggagaacttactatcatcctctaattttttaaaagaaatcttcatttattcttcttttccaattgaactttcacatagcacagaaaaaattcaaactgcctatattgataaaaccatacagtgagccagccttgcagtaggcagtagactataagcagaagcacatatgaactggacctgcaccaaagctggcaccagggctcggaaggtctctgaactcagaaggatggcattttttgcaagttaaagaaaatcaggatctgagttattttgctaaacttgggggaggaggaacaaataaatggagtctttattgtgtatcata

SEQ ID NO: 8278 - DNA, 13991 bp, Artificial Sequence
  derived and/or modified sequence
atggacccgccgaggcccgcgctgctggcgctgctggcgctgcctgcgctgctgctgctgctgctggcgggcgccagggccgaagaggaaatgctggaaaatgtcagcctggtctgtccaaaagatgcgacccgattcaagcacctccggaagtacacatacaactatgaggctgagagttccagtggagtccctgggactgctgattcaagaagtgccaccaggatcaactgcaaggttgagctggaggttccccagctctgcagcttcatcctgaagaccagccagtgcaccctgaaagaggtgtatggcttcaaccctgagggcaaagccttgctgaagaaaaccaagaactctgaggagtttgctgcagccatgtccaggtatgagctcaagctggccattccagaagggaagcaggttttcctttacccggagaaagatgaacctacttacatcctgaacatcaagaggggcatcatttctgccctcctggttcccccagagacagaagaagccaagcaagtgttgtttctggataccgtgtatggaaactgctccactcactttaccgtcaagacgaggaagggcaatgtggcaacagaaatatccactgaaagagacctggggcagtgtgatcgcttcaagcccatccgcacaggcatcagcccacttgctctcatcaaaggcatgacccgccccttgtcaactctgatcagcagcagccagtcctgtcagtacacactggacgctaagaggaagcatgtggcagaagccatctgcaaggagcaacacctcttcctgcctttctcctacaagaataagtatgggatggtagcacaagtgacacagactttgaaacttgaagacacaccaaagatcaacagccgcttctttggtgaaggtactaagaagatgggcctcgcatttgagagcaccaaatccacatcacctccaaagcaggccgaagctgttttgaagactctccaggaactgaaaaaactaaccatctctgagcaaaatatccagagagctaatctcttcaataagctggttactgagctgagaggcctcagtgatgaagcagtcacatctctcttgccacagctgattgaggtgtccagccccatcactttacaagccttggttcagtgtggacagcctcagtgctccactcacatcctccagtggctgaaacgtgtgcatgccaacccccttctgatagatgtggtcacctacctggtggccctgatccccgagccctcagcacagcagctgcgagagatcttcaacatggcgagggatcagcgcagccgagccaccttgtatgcgctgagccacgcggtcaacaactatcataagacaaaccctacagggacccaggagctgctggacattgctaattacctgatggaacagattcaagatgactgcactggggatgaagattacacctatttgattctgcgggtcattggaaatatgggccaaaccatggagcagttaactccagaactcaagtcttcaatcctgaaatgtgtccaaagtacaaagccatcactgatgatccagaaagctgccatccaggctctgcggaaaatggagcctaaagacaaggaccaggaggttcttcttcagactttccttgatgatgcttctccgggagataagcgactggctgcctatcttatgttgatgaggagtccttcacaggcagatattaacaaaattgtccaaattctaccatgggaacagaatgagcaagtgaagaactttgtggcttcccatattgccaatatcttgaactcagaagaattggatatccaagatctgaaaaagttagtgaaagaagctctgaaagaatctcaacttccaactgtcatggacttcagaaaattctctcggaactatcaactctacaaatctgtttctcttccatcacttgacccagcctcagccaaaatagaagggaatcttatatttgatccaaataactaccttcctaaagaaagcatgctgaaaactaccctcactgcctttggatttgcttcagctgacctcatcgagattggcttggaaggaaaaggctttgagccaacattggaagctctttttgggaagcaaggatttttcccagacagtgtcaacaaagctttgtactgggttaatggtcaagttcctgatggtgtctctaaggtcttagtggaccactttggctataccaaagatgataaacatgagcaggatatggtaaatggaataatgctcagtgttgagaagctgattaaagatttgaaatccaaagaagtcccggaagccagagcctacctccgcatcttgggagaggagcttggttttgccagtctccatgacctccagctcctgggaaagctgcttctgatgggtgcccgcactctgcaggggatcccccagatgattggagaggtcatcaggaagggctcaaagaatgacttttttcttcactacatcttcatggagaatgcctttgaactccccactggagctggattacagttgcaaatatcttcatctggagtcattgctcccggagccaaggctggagtaaaactggaagtagccaacatgcaggctgaactggtggcaaaaccctccgtgtctgtggagtttgtgacaaatatgggcatcatcattccggacttcgctaggagtggggtccagatgaacaccaacttcttccacgagtcgggtctggaggctcatgttgccctaaaagctgggaagctgaagtttatcattccttccccaaagagaccagtcaagctgctcagtggaggcaacacattacatttggtctctaccaccaaaacggaggtgatcccacctctcattgagaacaggcagtcctggtcagtttgcaagcaagtctttcctggcctgaattactgcacctcaggcgcttactccaacgccagctccacagactccgcctcctactatccgctgaccggggacaccagattagagctggaactgaggcctacaggagagattgagcagtattctgtcagcgcaacctatgagctccagagagaggacagagccttggtggataccctgaagtttgtaactcaagcagaaggtgcgaagcagactgaggctaccatgacattcaaatataatcggcagagtatgaccttgtccagtgaagtccaaattccggattttgatgttgacctcggaacaatcctcagagttaatgatgaatctactgagggcaaaacgtcttacagactcaccctggacattcagaacaagaaaattactgaggtcgccctcatgggccacctaagttgtgacacaaaggaagaaagaaaaatcaagggtgttatttccataccccgtttgcaagcagaagccagaagtgagatcctcgcccactggtcgcctgccaaactgcttctccaaatggactcatctgctacagcttatggctccacagtttccaagagggtggcatggcattatgatgaagagaagattgaatttgaatggaacacaggcaccaatgtagataccaaaaaaatgacttccaatttccctgtggatctctccgattatcctaagagcttgcatatgtatgctaatagactcctggatcacagagtccctcaaacagacatgactttccggcacgtgggttccaaattaatagttgcaatgagctcatggcttcagaaggcatctgggagtcttccttatacccagactttgcaagaccacctcaatagcctgaaggagttcaacctccagaacatgggattgccagacttccacatcccagaaaacctcttcttaaaaagcgatggccgggtcaaatataccttgaacaagaacagtttgaaaattgagattcctttgccttttggtggcaaatcctccagagatctaaagatgttagagactgttaggacaccagccctccacttcaagtctgtgggattccatctgccatctcgagagttccaagtccctacttttaccattcccaagttgtatcaactgcaagtgcctctcctgggtgttctagacctctccacgaatgtctacagcaacttgtacaactggtccgcctcctacagtggtggcaacaccagcacagaccatttcagccttcgggctcgttaccacatgaaggctgactctgtggttgacctgctttcctacaatgtgcaaggatctggagaaacaacatatgaccacaagaatacgttcacactatcatatgatgggtctctacgccacaaatttctagattcgaatatcaaattcagtcatgtagaaaaacttggaaacaacccagtctcaaaaggtttactaatattcgatgcatctagttcctggggaccacagatgtctgcttcagttcatttggactccaaaaagaaacagcatttgtttgtcaaagaagtcaagattgatgggcagttcagagtctcttcgttctatgctaaaggcacatatggcctgtcttgtcagagggatcctaacactggccggctcaatggagagtccaacctgaggtttaactcctcctacctccaaggcaccaaccagataacaggaagatatgaagatggaaccctctccctcacctccacctctgatctgcaaagtggcatcattaaaaatactgcttccctaaagtatgagaactacgagctgactttaaaatctgacaccaatgggaagtataagaactttgccacttctaacaagatggatatgaccttctctaagcaaaatgcactgctgcgttctgaatatcaggctgattacgagtcattgaggttcttcagcctgctttctggatcactaaattcccatggtcttgagttaaatgctgacatcttaggcactgacaaaattaatagtggtgctcacaaggcgacactaaggattggccaagatggaatatctaccagtgcaacgaccaacttgaagtgtagtctcctggtgctggagaatgagctgaatgcagagcttggcctctctggggcatctatgaaattaacaacaaatggccgcttcagggaacacaatgcaaaattcagtctggatgggaaagccgccctcacagagctatcactgggaagtgcttatcaggccatgattctgggtgtcgacagcaaaaacattttcaacttcaaggtcagtcaagaaggacttaagctctcaaatgacatgatgggctcatatgctgaaatgaaatttgaccacacaaacagtctgaacattgcaggcttatcactggacttctcttcaaaacttgacaacatttacagctctgacaagttttataagcaaactgttaatttacagctacagccctattctctggtaactactttaaacagtgacctgaaatacaatgctctggatctcaccaacaatgggaaactacggctagaacccctgaagctgcatgtggctggtaacctaaaaggagcctaccaaaataatgaaataaaacacatctatgccatctcttctgctgccttatcagcaagctataaagcagacactgttgctaaggttcagggtgtggagtttagccatcggctcaacacagacatcgctgggctggcttcagccattgacatgagcacaaactataattcagactcactgcatttcagcaatgtcttccgttctgtaatggccccgtttaccatgaccatcgatgcacatacaaatggcaatgggaaactcgctctctggggagaacatactgggcagctgtatagcaaattcctgttgaaagcagaacctctggcatttactttctctcatgattacaaaggctccacaagtcatcatctcgtgtctaggaaaagcatcagtgcagctcttgaacacaaagtcagtgccctgcttactccagctgagcagacaggcacctggaaactcaagacccaatttaacaacaatgaatacagccaggacttggatgcttacaacactaaagataaaattggcgtggagcttactggacgaactctggctgacctaactctactagactccccaattaaagtgccacttttactcagtgagcccatcaatatcattgatgctttagagatgagagatgccgttgagaagccccaagaatttacaattgttgcttttgtaaagtatgataaaaaccaagatgttcactccattaacctcccattttttgagaccttgcaagaatattttgagaggaatcgacaaaccattatagttgtactggaaaacgtacagagaaacctgaagcacatcaatattgatcaatttgtaagaaaatacagagcagccctgggaaaactcccacagcaagctaatgattatctgaattcattcaattgggagagacaagtttcacatgccaaggagaaactgactgctctcacaaaaaagtatagaattacagaaaatgatatacaaattgcattagatgatgccaaaatcaactttaatgaaaaactatctcaactgcagacatatatgatacaatttgatcagtatattaaagatagttatgatttacatgatttgaaaatagctattgctaatattattgatgaaatcattgaaaaattaaaaagtcttgatgagcactatcatatccgtgtaaatttagtaaaaacaatccatgatctacatttgtttattgaaaatattgattttaacaaaagtggaagtagtactgcatcctggattcaaaatgtggatactaagtaccaaatcagaatccagatacaagaaaaactgcagcagcttaagagacacatacagaatatagacatccagcacctagctggaaagttaaaacaacacattgaggctattgatgttagagtgcttttagatcaattgggaactacaatttcatttgaaagaataaatgacattcttgagcatgtcaaacactttgttataaatcttattggggattttgaagtagctgagaaaatcaatgccttcagagccaaagtccatgagttaatcgagaggtatgaagtagaccaacaaatccaggttttaatggataaattagtagagttggcccaccaatacaagttgaaggagactattcagaagctaagcaatgtcctacaacaagttaagataaaagattactttgagaaattggttggatttattgatgatgctgtcaagaagcttaatgaattatcttttaaaacattcattgaagatgttaacaaattccttgacatgttgataaagaaattaaagtcatttgattaccaccagtttgtagatgaaaccaatgacaaaatccgtgaggtgactcagagactcaatggtgaaattcaggctctggaactaccacaaaaagctgaagcattaaaactgtttttagaggaaaccaaggccacagttgcagtgtatctggaaagcctacaggacaccaaaataaccttaatcatcaattggttacaggaggctttaagttcagcatctttggctcacatgaaggccaaattccgagagaccctagaagatacacgagaccgaatgtatcaaatggacattcagcaggaacttcaacgatacctgtctctggtaggccaggtttatagcacacttgtcacctacatttctgattggtggactcttgctgctaagaaccttactgactttgcagagcaatattctatccaagattgggctaaacgtatgaaagcattggtagagcaagggttcactgttcctgaaatcaagaccatccttgggaccatgcctgcctttgaagtcagtcttcaggctcttcagaaagctaccttccagacacctgattttatagtccccctaacagatttgaggattccatcagttcagataaacttcaaagacttaaaaaatataaaaatcccatccaggttttccacaccagaatttaccatccttaacaccttccacattccttcctttacaattgactttgtagaaatgaaagtaaagatcatcagaaccattgaccagatgctgaacagtgagctgcagtggcccgttccagatatatatctcagggatctgaaggtggaggacattcctctagcgagaatcaccctgccagacttccgtttaccagaaatcgcaattccagaattcataatcccaactctcaaccttaatgattttcaagttcctgaccttcacataccagaattccagcttccccacatctcacacacaattgaagtacctacttttggcaagctatacagtattctgaaaatccaatctcctcttttcacattagatgcaaatgctgacatagggaatggaaccacctcagcaaacgaagcaggtatcgcagcttccatcactgccaaaggagagtccaaattagaagttctcaattttgattttcaagcaaatgcacaactctcaaaccctaagattaatccgctggctctgaaggagtcagtgaagttctccagcaagtacctgagaacggagcatgggagtgaaatgctgttttttggaaatgctattgagggaaaatcaaacacagtggcaagtttacacacagaaaaaaatacactggagcttagtaatggagtgattgtcaagataaacaatcagcttaccctggatagcaacactaaatacttccacaaattgaacatccccaaactggacttctctagtcaggctgacctgcgcaacgagatcaagacactgttgaaagctggccacatagcatggacttcttctggaaaagggtcatggaaatgggcctgccccagattctcagatgagggaacacatgaatcacaaattagtttcaccatagaaggacccctcacttcctttggactgtccaataagatcaatagcaaacacctaagagtaaaccaaaacttggtttatgaatctggctccctcaacttttctaaacttgaaattcaatcacaagtcgattcccagcatgtgggccacagtgttctaactgctaaaggcatggcactgtttggagaagggaaggcagagtttactgggaggcatgatgctcatttaaatggaaaggttattggaactttgaaaaattctcttttcttttcagcccagccatttgagatcacggcatccacaaacaatgaagggaatttgaaagttcgttttccattaaggttaacagggaagatagacttcctgaataactatgcactgtttctgagtcccagtgcccagcaagcaagttggcaagtaagtgctaggttcaatcagtataagtacaaccaaaatttctctgctggaaacaacgagaacattatggaggcccatgtaggaataaatggagaagcaaatctggatttcttaaacattcctttaacaattcctgaaatgcgtctaccttacacaataatcacaactcctccactgaaagatttctctctatgggaaaaaacaggcttgaaggaattcttgaaaacgacaaagcaatcatttgatttaagtgtaaaagctcagtataagaaaaacaaacacaggcattccatcacaaatcctttggctgtgctttgtgagtttatcagtcagagcatcaaatcctttgacaggcattttgaaaaaaacagaaacaatgcattagattttgtcaccaaatcctataatgaaacaaaaattaagtttgataagtacaaagctgaaaaatctcacgacgagctccccaggacctttcaaattcctggatacactgttccagttgtcaatgttgaagtgtctccattcaccatagagatgtcggcattcggctatgtgttcccaaaagcagtcagcatgcctagtttctccatcctaggttctgacgtccgtgtgccttcatacacattaatcctgccatcattagagctgccagtccttcatgtccctagaaatctcaagctttctcttccagatttcaaggaattgtgtaccataagccatatttttattcctgccatgggcaatattacctatgatttctcctttaaatcaagtgtcatcacactgaataccaatgctgaactttttaaccagtcagatattgttgctcatctcctttcttcatcttcatctgtcattgatgcactgcagtacaaattagagggcaccacaagattgacaagaaaaaggggattgaagttagccacagctctgtctctgagcaacaaatttgtggagggtagtcataacagtactgtgagcttaaccacgaaaaatatggaagtgtcagtggcaacaaccacaaaagcccaaattccaattttgagaatgaatttcaagcaagaacttaatggaaataccaagtcaaaacctactgtctcttcctccatggaatttaagtatgatttcaattcttcaatgctgtactctaccgctaaaggagcagttgaccacaagcttagcttggaaagcctcacctcttacttttccattgagtcatctaccaaaggagatgtcaagggttcggttctttctcgggaatattcaggaactattgctagtgaggccaacacttacttgaattccaagagcacacggtcttcagtgaagctgcagggcacttccaaaattgatgatatctggaaccttgaagtaaaagaaaattttgctggagaagccacactccaacgcatatattccctctgggagcacagtacgaaaaaccacttacagctagagggcctctttttcaccaacggagaacatacaagcaaagccaccctggaactctctccatggcaaatgtcagctcttgttcaggtccatgcaagtcagcccagttccttccatgatttccctgaccttggccaggaagtggccctgaatgctaacactaagaaccagaagatcagatggaaaaatgaagtccggattcattctgggtctttccagagccaggtcgagctttccaatgaccaagaaaaggcacaccttgacattgcaggatccttagaaggacacctaaggttcctcaaaaatatcatcctaccagtctatgacaagagcttatgggatttcctaaagctggatgtaaccaccagcattggtaggagacagcatcttcgtgtttcaactgcctttgtgtacaccaaaaaccccaatggctattcattctccatccctgtaaaagttttggctgataaattcattattcctgggctgaaactaaatgatctaaattcagttcttgtcatgcctacgttccatgtcccatttacagatcttcaggttccatcgtgcaaacttgacttcagagaaatacaaatctataagaagctgagaacttcatcatttgccctcaacctaccaacactccccgaggtaaaattccctgaagttgatgtgttaacaaaatattctcaaccagaagactccttgattcccttttttgagataaccgtgcctgaatctcagttaactgtgtcccagttcacgcttccaaaaagtgtttcagatggcattgctgctttggatctaaatgcagtagccaacaagatcgcagactttgagttgcccaccatcatcgtgcctgagcagaccattgagattccctccattaagttctctgtacctgctggaattgtcattccttcctttcaagcactgactgcacgctttgaggtagactctcccgtgtataatgccacttggagtgccagtttgaaaaacaaagcagattatgttgaaacagtcctggattccacatgcagctcaaccgtacagttcctagaatatgaactaaatgttttgggaacacacaaaatcgaagatggtacgttagcctctaagactaaaggaacatttgcacaccgtgacttcagtgcagaatatgaagaagatggcaaatatgaaggacttcaggaatgggaaggaaaagcgcacctcaatatcaaaagcccagcgttcaccgatctccatctgcgctaccagaaagacaagaaaggcatctccacctcagcagcctccccagccgtaggcaccgtgggcatggatatggatgaagatgacgacttttctaaatggaacttctactacagccctcagtcctctccagataaaaaactcaccatattcaaaactgagttgagggtccgggaatctgatgaggaaactcagatcaaagttaattgggaagaagaggcagcttctggcttgctaacctctctgaaagacaacgtgcccaaggccacaggggtcctttatgattatgtcaacaagtaccactgggaacacacagggctcaccctgagagaagtgtcttcaaagctgagaagaaatctgcagaacaatgctgagtgggtttatcaaggggccattaggcaaattgatgatatcgacgtgaggttccagaaagcagccagtggcaccactgggacctaccaagagtggaaggacaaggcccagaatctgtaccaggaactgttgactcaggaaggccaagccagtttccagggactcaaggataacgtgtttgatggcttggtacgagttactcaagaattccatatgaaagtcaagcatctgattgactcactcattgattttctgaacttccccagattccagtttccggggaaacctgggatatacactagggaggaactttgcactatgttcataagggaggtagggacggtactgtcccaggtatattcgaaagtccataatggttcagaaatactgttttcctatttccaagacctagtgattacacttcctttcgagttaaggaaacataaactaatagatgtaatctcgatgtatagggaactgttgaaagatttatcaaaagaagcccaagaggtatttaaagccattcagtctctcaagaccacagaggtgctacgtaatcttcaggaccttttacaattcattttccaactaatagaagataacattaaacagctgaaagagatgaaatttacttatcttattaattatatccaagatgagatcaacacaatcttcagtgattatatcccatgtttttaaattgttgaaagaaaacctatgccttaatcttcataagttcaatgaatttattcaaaacgagcttcaggaagcttctcaagagttacagcagatccatcaatacattatggcccttcgtgaagaatattttgatccaagtatagttggctggacagtgaaatattatgaacttgaagaaaagatagtcagtctgatcaagaacctgttagttgctcttaaggacttccattctgaatatattgtcagtgcctctaactttacttcccaactctcaagtcaagttgagcaatttctgcacagaaatattcaggaatatcttagcatccttaccgatccagatggaaaagggaaagagaagattgcagagctttctgccactgctcaggaaataattaaaagccaggccattgcgacgaagaaaataatttctgattaccaccagcagtttagatataaactgcaagatttttcagaccaactctctgattactatgaaaaatttattgctgaatccaaaagattgattgacctgtccattcaaaactaccacacatttctgatatacatcacggagttactgaaaaagctgcaatcaaccacagtcatgaacccctacatgaagcttgctccaggagaacttactatcatcctctaattttttaaaagaaatcttcatttattcttcttttccaattgaactttcacatagcacagaaaaaattcaaactgcctatattgataaaaccatacagtgagccagccttgcagtaggcagtagactataagcagaagcacatatgaactggacctgcaccaaagctggcaccagggctcggaaggtctctgaactcagaaggatggcattttttgcaagttaaagaaaatcaggatctgagttattttgctaaacttgggggaggaggaacaaataaatggagtctttattgtgtatcata

SEQ ID NO: 8279 - DNA, 13035 bp, Artificial Sequence
  derived and/or modified sequence
atggacccaccccgcccagcccttctcgctttgctcgctctacccgccttgctgttgctgctcttagcgggggctagggccgaagaggagatgctcgaaaacgtgtccctggtgtgtcctaaagatgcaaccagatttaaacacttaagaaagtatacttacaactatgaggcagaatccagctccggcgtaccaggcaccgctgattctcgatccgccactagaatcaattgcaaggtcgagctcgaggtcccgcagctatgttcattcatcttgaaaacttcacagtgtacattgaaggaagtctacggatttaatcctgaaggtaaagctctcctgaagaagactaagaactcagaagagtttgctgccgctatgagccgctatgaacttaaattagctatcccagagggaaagcaggttttcctgtaccctgagaaggatgaaccgacctacattctcaatattaaaagagggattatcagcgctctgctggtgcctcctgagactgaagaggcgaagcaggttctgtttctggatacagtgtacggtaattgctcgacccatttcaccgtgaagacacgaaaaggtaatgtggcaactgaaatctctacagagcgcgatttggggcaatgcgacagattcaaaccgatccgcaccggcataagcccactcgcacttattaaaggcatgactcggcccctgtctaccctcatcagttcttcgcagtcctgtcaatataccctggatgcgaaacgcaaacatgtggcggaggctatttgcaaggagcaacacctttttctccccttttcctacaaaaacaagtatggtatggtcgcccaggtcacgcaaacgctcaagctggaggataccccaaaaataaactctaggttcttcggagaggggacgaagaagatggggctcgcttttgagagtacaaaaagtacctctccccctaaacaggctgaagccgtgttgaaaacacttcaggagcttaaaaaactgactatctccgagcagaacatccaacgagctaacttgtttaacaagctggtgacagaacttaggggtctctccgacgaggccgtgacatccctgctgcctcagcttatagaagtctcatccccgatcactctccaggcgcttgtccaatgtggccagccccagtgttcaactcatattctacagtggctgaagcgagtgcacgcaaatcccctgctgattgacgtggttacgtatcttgtggctctcatccctgagccctcagcgcagcagctgcgtgaaattttcaacatggctcgggaccagcgaagcagggccaccctgtatgctctgagccacgccgtcaataactaccacaagaccaatccaactggcacccaggagctgctcgacattgcaaattatctgatggagcagattcaggacgactgcactggcgacgaggattacacctatctgattttgcgggtcataggcaacatgggacagacaatggagcagctgacccctgagctgaaaagtagcatcctcaagtgtgttcagagtaccaaacctagcctgatgatccagaaggctgcaatacaggccttgagaaagatggagccgaaggacaaggatcaggaggttctactgcagacattcctggatgatgcatctccaggtgacaaacgcttggccgcttacttgatgttgatgagatccccaagccaggctgacataaacaagattgtccagatactcccatgggagcaaaacgagcaggttaagaattttgtggcatcacatatcgcaaatattcttaacagcgaagagctggacattcaagatctaaagaaactcgtcaaagaggcattgaaggaatctcagctgccgaccgtgatggactttaggaagtttagtcggaattatcagctgtacaagagcgtgagtcttccttcccttgatcccgcatctgcaaagattgaaggaaacctgatcttcgacccaaacaattacctgcctaaggagtctatgctgaaaacaacgttaaccgccttcggtttcgcatctgcagacctgattgaaatcgggttagagggcaagggatttgagcctaccctcgaggcactgtttggtaaacagggcttcttccccgattctgtcaacaaggcactgtactgggtgaacggacaagtcccggatggagtgagcaaagttctggtcgaccatttcggttataccaaggacgacaagcatgagcaggatatggtgaacggcattatgctgtctgttgagaaactgattaaagaccttaagagtaaggaggtgcccgaggcccgcgcctacctcagaattctgggagaagagctggggttcgcctcacttcatgaccttcaactgctcggcaagctgctcctgatgggagctagaactcttcagggaataccccagatgattggggaggtcatccgaaagggctcgaagaacgacttttttctccattacatctttatggagaacgcattcgaactgcctacaggggccgggttgcagctccagatatcctcctctggcgtaatagctccaggggcaaaagcaggagtaaagttggaggttgccaatatgcaggccgagttggttgctaaacctagcgtgagcgtagaattcgtgaccaacatgggaatcattattccagatttcgcccggtccggtgtccagatgaataccaacttttttcatgagtctggtctcgaggcccacgtggcgctcaaggctgggaagctgaagttcatcatcccttcccccaaacgcccagtcaagctactctccgggggtaacactctgcatctggtttcaaccaccaagacggaggtgatacccccattgattgagaatcgtcaaagctggtctgtgtgtaagcaagtgtttcctggactgaactactgcacctctggtgcctactccaacgcttcaagcaccgactcggccagctattaccccctcaccggtgacactagactagaactggaactgcgccctacaggcgaaattgagcagtatagcgtcagtgcaacctacgagttgcagcgcgaggatagggctctggtcgataccttaaagttcgtgacccaggcggagggcgcgaaacagacagaagccactatgacattcaagtacaatagacagtctatgaccctttctagcgaagttcagatcccagatttcgatgttgacctgggaactatattgagagttaacgatgagtcgacagaggggaagaccagctatcggctcacactggatatccagaacaagaagatcactgaagtagcgctaatgggccacctgagctgtgacacgaaagaggagcggaagatcaaaggagtgatctccatcccgcgtctccaagccgaagccaggtcagagattctggctcactggagtcccgccaagctacttctgcaaatggactcttctgcgacggcctacggcagcacagttagcaagcgcgtggcctggcactatgacgaggagaaaatcgagttcgagtggaacactggaacaaatgtggataccaaaaaaatgaccagtaactttcccgtggacctgagtgactatcccaagtctcttcatatgtatgctaacagactgttagatcatagggtgccgcagactgacatgacctttcgtcatgtggggtccaagttgattgtagccatgtcctcatggctccagaaggcaagtggcagcttgccgtatacacaaactttacaggaccacctgaatagcttgaaggagttcaatctccagaacatgggtttgccagacttccacatccccgagaatctatttcttaagtcagatgggagagtaaaatatacgctgaataaaaatagccttaagatagaaatacccttgccttttggcggaaaaagttctagagatcttaaaatgctcgagacagtgcgcactcccgcactacatttcaaatctgtcggatttcaccttccctcccgagagttccaagtgccaacctttacaattcctaagctctaccagttgcaagtccctctgctcggcgtccttgatttatcgacgaacgtgtattccaatctctataactggagtgcatcatatagcggtggcaatacgtccacagaccacttcagtttgcgcgcaaggtatcacatgaaggcagatagcgtagtcgacctgttgtcatacaacgtgcaagggagtggcgagacaacttatgaccacaagaatacattcacgctgtcctacgacggcagcctgagacacaagttcctcgattccaacattaagttcagccatgtggagaagctcggcaataaccccgttagcaaagggctgcttattttcgatgcttcctcttcctggggcccacaaatgtccgcgtctgtccacctggactccaaaaaaaagcagcacctgtttgttaaggaagtaaagatcgacggacagttcagggtttcctccttctatgccaaaggaacttacggcctgagttgccagagagatcccaacactggccggcttaatggagagtcaaatctccgtttcaactcatcttatctccagggtaccaatcagattaccgggaggtatgaggatgggactctctctttgacatcaacctccgatcttcaatcaggaatcatcaaaaacaccgcatcactgaagtatgagaactacgagctaactcttaagagcgataccaatggtaagtacaagaacttcgctacatccaacaaaatggacatgacattttccaagcagaatgcactgctcagatcagaataccaggcagattacgagagcctgagatttttctctctactgagcgggagcttgaactctcacggactcgagctgaacgcagatattcttgggacggacaaaatcaatagcggcgcccacaaagcgaccctccgcatcgggcaggacgggatctctacaagcgcaaccaccaatttgaagtgctcactgctagttctggagaacgagctgaatgctgagctgggactgagcggtgcttcaatgaaactgacaactaatggccggtttcgcgaacataacgcaaagttctctttggatggtaaggctgccctgaccgagctttcattggggtctgcctaccaggccatgattctgggggttgattccaaaaatatattcaattttaaagtttctcaggagggtctaaaactctccaatgatatgatggggtcctacgctgagatgaagtttgaccacaccaactcactgaatatagccggcctaagtctggatttcagctctaagttggataatatctatagttctgacaagttctacaagcagacagtgaacctgcagttacagccatacagtctggtgacgactctcaacagcgacctgaaatacaacgcacttgatctcacaaataacggaaaattgcgactagagccccttaaactgcatgtggcgggcaatctgaaaggggcctatcagaataatgaaatcaaacatatctacgcaataagctccgctgctctatctgcttcatacaaggctgatacagttgctaaagtgcagggtgtggaatttagtcatagattaaacaccgacattgctggtctggcgagtgctatcgatatgtccactaactacaatagcgactcattgcacttctccaacgtgtttcgtagcgttatggctccgtttacgatgacaatcgatgcgcatacaaacggtaatggaaagctggcactatggggagaacataccggccagttgtatagtaaattcctcctcaaagccgagcctttggcttttaccttttcccacgattataaaggctcgacatcacatcatttggtcagccgtaagtctattagcgctgccctcgagcataaggtgtcagcacttctgaccccggccgagcagaccggcacttggaagctcaaaacgcagttcaataacaacgagtacagtcaagacctagatgcgtacaacacaaaagataagataggtgttgagttgacaggcagaaccttggcagatctgaccttgttggacagcccaatcaaagttcccctgttactctcggaaccaatcaatatcattgacgcactggagatgcgggatgctgtggagaagccccaggaattcactatagtggcctttgttaaatacgacaaaaaccaggatgtccattccatcaatctgccttttttcgagaccctccaggaatacttcgagaggaaccggcaaactattatcgtggttctggaaaacgttcaacgaaatctgaaacacataaacatcgatcagtttgtgcgcaagtatcgagctgctttggggaagttgccacagcaagccaatgactatctcaactcgtttaattgggagcgccaggtcagccacgccaaggagaagctcactgcactgacaaagaagtaccggatcacagagaacgacattcagattgcgttggatgacgccaagatcaacttcaatgagaaacttagtcaactgcagacatatatgatccagtttgatcaatacataaaagacagctacgacctgcatgacctaaagatcgctatcgcgaacattatcgacgaaattattgagaagttgaaaagtctagacgagcactaccacattcgagtgaacctggtcaaaaccattcacgaccttcacctgtttattgagaacatcgattttaataagtcaggcagcagtactgcttcatggatacagaacgtggacacaaaataccagattcggatccagattcaggaaaagctacagcagctcaaacggcatatccagaacattgacatacagcatctggctggcaagctaaaacagcatattgaggctatcgacgtgcgtgtgcttctggatcagctcggaaccacaatctctttcgaaagaattaatgatattctggagcacgtcaaacactttgtgattaatcttatcggtgatttcgaagtcgccgagaagataaatgcatttcgggccaaagtccatgaactgattgagcgctacgaggtggaccaacagattcaggtgctgatggataagctggttgagctggcccatcagtacaaactcaaggagactatacagaagctgagcaacgtcttacaacaggtgaaaatcaaagactattttgaaaaacttgtcggttttattgatgatgccgtcaagaagttgaatgaactgtccttcaaaaccttcatcgaagacgtcaacaagtttctagatatgctgatcaaaaaacttaaaagtttcgattaccaccaattcgtggatgagaccaacgacaagattcgtgaggtgactcagcgcctgaacggtgagatccaggcactggagctccctcaaaaagcagaggcactgaagctgttcctggaagaaaccaaagctacagttgccgtgtatttggaaagcctccaggatactaaaattacgctgatcatcaattggctgcaggaggctctatcttctgctagcctggctcacatgaaagctaaattccgggaaaccctggaagatactcgcgatcggatgtatcagatggatattcagcaggagctgcagaggtacctcagcttggtcggccaggtgtacagtaccttggtaacatacatctctgattggtggactttggctgctaagaacctgaccgacttcgctgagcagtacagcattcaagattgggcgaaacgcatgaaggcccttgttgagcaggggttcaccgtgcccgaaatcaagaccattctgggcactatgccagcgtttgaagtttctttgcaggccctccaaaaggcaacatttcaaaccccagacttcatcgtcccgctcaccgatttgcgcataccctccgtccagatcaactttaaggatttgaaaaacatcaaaatcccttctcgttttagcaccccagagttcactattctcaacacttttcacatcccaagttttaccatcgatttcgttgagatgaaggtcaagatcattaggacgatcgatcagatgctgaatagcgagttgcaatggcccgtgcctgatatttatttacgtgacctgaaggtcgaagacatacctctggctcggatcacacttccggacttccgcttgcctgagattgcaattccagaattcattatcccgactctgaacctgaatgactttcaagtccctgatctgcacatccctgagttccaactgccccatattagccatacgattgaggtgccaaccttcggcaagttatattccattctgaagattcagagccccctatttacactcgacgctaacgccgatattggtaacggcacaacatccgccaatgaggctggcattgcggcaagtatcacagcaaaaggtgaatctaagctggaggtcctgaattttgactttcaggccaatgcccagctgagtaaccctaaaataaaccccttggcccttaaagagtccgtaaaattctccagcaagtatctccgaacagaacacgggagtgagatgttgttttttggaaacgcgatcgaaggcaagtccaacacagtggcaagcctgcataccgagaaaaacaccctggaattatcaaatggagtcatagttaagattaacaatcagctcaccctggactccaatacaaagtacttccataaactgaacataccaaaactggactttagttctcaggcagatttacggaacgagatcaagacacttctgaaagcggggcacatagcctggaccagcagtggtaaaggttcatggaaatgggcatgtcctagatttagtgatgaaggtacacatgagagtcagatcagttttaccattgaggggcctctgactagttttggtctatccaacaaaattaattccaagcacttgcgggtgaaccagaatctcgtgtatgagtcaggctcattaaatttctccaagttggaaatccagagtcaggtggattctcagcatgttgggcactctgtgctgacagctaagggaatggccctgtttggtgagggaaaggccgagttcacaggccgccatgatgcacacttgaacggaaaagtcattgggactctcaagaattccctttttttttcagcgcagcccttcgaaattacagctagcaccaataatgaaggcaacctgaaggttagattccccctcagactgaccggtaagatcgactttttaaacaactacgccctcttcttatcgccaagtgctcagcaggcttcttggcaggtgagtgctcgttttaaccagtataaatataaccagaatttctctgccggaaacaatgaaaatatcatggaggctcatgtcggcataaacggtgaagctaatctagacttcctgaacatcccgctaaccatccccgaaatgagactcccctacactatcatcacaacaccaccattgaaggacttcagcctgtgggagaagacaggacttaaggaatttctgaagactacgaaacaatcctttgatctcagcgtgaaagcgcagtacaagaagaacaagcaccggcacagcatcacaaacccacttgccgttttatgtgaattcatatcccaatccattaaaagcttcgataggcatttcgagaagaacagaaataatgctctggactttgtgacaaagagctacaacgagacaaaaatcaagttcgataagtataaggcagagaagtcacacgacgagctgccaagaacattccagatcccagggtacacagtccccgttgtcaacgttgaagttagcccctttaccattgagatgagtgcttttggatacgtgttccctaaagccgttagtatgccgtccttttctatactcggctcagatgtgagagtccctagttacacgttaattctgccgtctctcgagttgccagtgttgcacgtgccaagaaatctgaaattatctctgcccgatttcaaggaactttgtacgatctctcatattttcattcctgctatgggcaacatcacctatgatttctccttcaagtccagcgtgattaccctcaacacaaatgcagagctgttcaatcagagtgatatcgtggctcatcttctgagtagctctagtagcgtcattgatgccttgcagtacaagctcgaaggtactacaagactgactcggaaaagaggacttaagctcgcaactgccctatccctgtctaataaattcgtggaagggtcgcataactccaccgtgagcctgacaaccaagaacatggaggtctccgttgccactactaccaaagcgcagatcccgattctacgaatgaatttcaagcaagaactgaatgggaacacaaaaagcaagcctacagttagttccagtatggaatttaaatacgacttcaactcaagcatgctatacagcaccgctaaaggtgcagtagatcataagctctcgctggagtccctgaccagttatttttccatcgaaagttcaactaaaggagatgtcaagggaagtgtcttatcgcgtgaatatagtgggactatcgccagtgaagccaacacctacctgaatagtaagagtacccgatcctctgtgaagctgcagggaacttctaagatcgatgacatctggaacctggaggttaaggagaatttcgccggcgaggctacgctgcaaaggatctactctctctgggagcattcgaccaagaatcatctgcagctggaaggcctgttcttcactaacggagagcacacatcaaaggccaccctcgaactatcaccatggcagatgtcagccttagtgcaggttcacgccagtcagccatctagcttccacgatttccccgacctaggccaggaggtggcactcaacgctaacacaaagaatcagaagattagatggaagaacgaggtccgtatacattctggctcatttcagtcacaggtggagctctctaacgaccaggagaaggcccacttagacattgctggcagcttggagggtcacctccgtttcctgaagaatatcattcttcctgtgtatgataagtctctgtgggactttctcaagctcgacgtcactacaagcattgggagaaggcagcatctcagggttagtaccgccttcgtctatacaaagaatccgaacggttattccttttccattcccgtgaaggttctggctgacaaattcatcatccctggcctgaaactgaacgatctcaactccgtccttgtgatgccaacttttcacgtgccttttaccgaccttcaggtgccatcgtgcaaattggattttcgggagattcagatctataagaagctaagaactagcagtttcgccctgaatcttccaacgctgcctgaggtaaaattccctgaggttgacgttctcactaagtatagtcagcctgaagacagcctgattcctttcttcgagattacagtacctgagagccagctgactgtgtctcagtttactctccctaagagcgtatcagatggcatagccgccctggaccttaacgctgttgcgaataagatcgctgattttgagctgccgacaattattgtccccgagcaaactatcgagatccccagcatcaaattttccgtaccagcaggaatcgttattccctctttccaggctcttactgctagattcgaggttgacagccccgtgtataatgcaacctggagtgctagtctcaagaataaagccgactatgtagagactgtgcttgattccacctgctccagcactgtccagtttttggagtacgagttaaatgttcttggcacacacaagatcgaagatgggaccctcgccagcaagaccaaagggaccttcgcccaccgtgatttcagcgctgagtacgaagaggatggaaagtacgaaggcctccaagagtgggaaggtaaagcgcacctaaacattaagtcgccagcgttcacagatttgcatttgcgataccagaaggacaaaaaggggatctcaactagcgccgcttcccctgccgttgggacggtcggaatggacatggacgaagatgatgattttagcaaatggaatttctattactccccccaatctagccctgataaaaaactgacaatatttaagaccgaattgcgcgtcagagaatctgatgaagagacacagatcaaggttaactgggaggaagaggccgcttccgggctgcttaccagcctgaaagacaatgttccaaaggccaccggcgtactgtacgattacgtcaataaataccactgggagcatacagggttgaccctgcgcgaggtatcatcgaagcttcgtaggaatctgcagaacaacgcggagtgggtctatcaaggcgcgatccgccagattgacgacatcgacgtgagatttcagaaggccgccagcgggacaacaggaacgtaccaggagtggaaagataaggcccagaatttgtaccaggagctgctgactcaggagggacaggcgtctttccagggactgaaagataatgtttttgacggcctagtgcgcgtgactcaggaattccacatgaaagtcaaacatctcatagatagtctcatcgacttcttaaactttccaaggttccaattccctggcaaaccaggaatttatacccgagaggagctgtgcactatgtttattcgagaggtagggaccgttctgtctcaggtttactctaaggtgcataatggctccgagatcctgttttcatactttcaggaccttgtgatcaccctccctttcgagctgagaaagcacaaactgattgatgtcatctcaatgtatagagaactgctcaaggatttgtcgaaggaggcccaggaggtcttcaaggccatacagtccctaaaaactacagaagtactgcgcaatcttcaggatctgctgcagttcatcttccagctgattgaggataatatcaaacaactcaaagagatgaaattcacttacctgatcaactatatacaggacgagatcaacacaatcttcagcgactacattccgtgtttctag

SEQ ID NO: 8280 - DNA, 13035 bp, Artificial Sequence
  derived and/or modified sequence
atggacccccccaggcctgccctgctggccctgctggccctgcctgccctgctgctgctgctgctggccggggcccgggcagaggaggagatgctggagaatgtgtccctggtgtgccccaaggatgccacccgcttcaagcacctgaggaagtacacctacaactatgaggccgagagcagcagcggcgtgcctggaacagctgacagccgcagcgccacccgcatcaactgcaaggtggagctggaggtgccccagctgtgcagcttcatcctgaagaccagccagtgcaccctgaaggaggtgtatggcttcaaccctgagggcaaggccctgctgaagaagaccaagaacagcgaggagtttgctgctgccatgagccgctatgagctgaagctggccatccctgagggcaagcaggtgttcctgtacccagagaaggatgagcccacctacatcctgaacatcaagaggggcatcatcagcgccctgctggtgcccccagagacagaggaggccaagcaggtgctcttcctggacacagtgtatggcaactgcagcacccacttcaccgtgaagaccaggaaaggaaatgtggccacagagatcagcacagagcgggacctgggccagtgtgaccgcttcaagcccatcagaacaggcatcagccccctggccctgatcaagggcatgacccggcccctgagcaccctcatcagcagcagccagagctgccagtacaccctggatgccaagaggaagcacgtggccgaggccatctgcaaggagcagcacctgttcctgcccttctcctacaagaacaagtatggcatggtggcccaggtgacccagaccctgaagctggaggacacccccaagatcaacagccgcttctttggagagggcaccaagaagatgggcctggcctttgagagcaccaagagcaccagcccccccaagcaggccgaggccgtgctgaagaccctgcaggagctgaagaagctgaccatcagcgagcagaacatccagagggccaacctcttcaacaagctggtgacagagctgcggggcctgagtgatgaggccgtgaccagcctgctgccccagctgattgaggtgagcagccccatcaccctgcaggccctggtgcagtgtggccagccccagtgcagcacccacatcctgcagtggctgaagagggtgcacgccaaccccctgctgattgatgtggtgacctacctggtggccctgatccctgagcccagcgcccagcagctgcgggagatcttcaacatggcccgggaccagaggagccgggccaccctgtatgccctgagccatgctgtgaacaactaccacaagaccaaccccaccggcacccaggagctgctggacatcgccaactacctgatggagcagatccaggatgactgcacaggagatgaggactacacctacctgatcctgcgggtcatcggcaacatgggccagaccatggagcagctgaccccagagctgaagagcagcatcctgaagtgtgtgcagagcaccaagcccagcctgatgatccagaaggccgccatccaggccctgaggaagatggagcccaaggacaaggaccaggaggtgctgctgcagaccttcctggatgatgccagccctggggacaagaggctggccgcctacctgatgctgatgaggagccccagccaggccgacatcaacaagatcgtgcagatcctgccctgggagcagaatgagcaggtgaagaactttgtggccagccacatcgccaacatcctgaacagcgaggagctggacatccaggacctgaagaagctggtgaaggaggccctgaaggagagccagctgcccaccgtgatggacttcaggaagttcagcaggaactaccagctgtacaagtctgtgtccctgcccagcctggaccctgccagcgccaagattgagggcaacctgatctttgaccccaacaactacctgcccaaggagagcatgctgaagaccaccctgacagccttcggctttgccagcgctgacctgattgagatcggcctggagggcaaaggatttgagcccaccctggaggccctgtttgggaagcagggcttcttcccagacagcgtgaacaaggccctgtactgggtgaatggccaggtgcctgatggagtgtccaaggtgctggtggaccacttcggctacaccaaggatgacaagcatgagcaggacatggtgaatggcatcatgctgtctgtggagaagctgatcaaggacctgaagagcaaggaggtgcctgaggcccgggcctacctgcgcatcctgggggaggagctgggctttgccagcctgcatgacctgcagctgctgggcaagctgctgctgatgggcgcccggaccctgcagggcatcccccagatgattggagaggtgatcaggaagggcagcaagaatgacttcttcctgcactacatcttcatggagaatgcctttgagctgcccaccggggccggcctgcagctgcagatcagcagcagtggagtcatcgcccctggggccaaggccggcgtgaagctggaggtggccaacatgcaggccgagctggtggccaagcccagcgtgtctgtggagtttgtgaccaacatgggcatcatcatcccagactttgcccggtctggagtgcagatgaacaccaacttcttccatgaaagtggcctggaggcccacgtggccctgaaggccggcaagctgaagttcatcatccccagccccaagaggcctgtgaagctgctgagcggcggcaacaccctgcacctggtgtccaccaccaagacagaggtgatcccccccctgattgagaaccggcagagctggagcgtgtgcaagcaggtgtttcctggcctgaactactgcaccagcggggcctacagcaatgccagcagcacagattctgccagctactaccccctgaccggggacacccggctggagctggagctgcggcccaccggggagattgagcagtacagcgtgtctgccacctatgagctgcagagagaagatcgggccctggtggacaccctgaagtttgtgacccaggccgagggcgccaagcagacagaggccaccatgaccttcaagtacaaccggcagagcatgaccctgagcagcgaggtgcagatcccagactttgatgtggacctgggcaccatcctgcgggtgaatgatgagagcacagagggcaagaccagctaccgcctgaccctggacatccagaacaagaagatcacagaggtggccctgatgggccacctgagctgtgacaccaaggaggagaggaagatcaagggcgtcatcagcatcccccggctgcaggccgaggcccggtctgagatcctggcccactggagccctgccaagctgctgctgcagatggacagcagcgccacagcctacggcagcacagtgtccaagagggtggcctggcactatgatgaggagaagattgaatttgagtggaacacaggcaccaacgtggacaccaagaagatgaccagcaacttccctgtggacctgagtgactaccccaagagcctgcacatgtatgccaaccggctgctggaccaccgggtgccccagacagacatgaccttcagacatgtgggcagcaagctgattgtggccatgagctcctggctgcagaaggccagcggcagcctgccctacacccagaccctgcaggaccacctgaacagcctgaaggagttcaacctgcagaacatgggcctgcctgacttccacatcccagaaaatctcttcctgaagagtgatggccgggtgaagtacaccctgaacaagaacagcctgaagattgagatccccctgccctttggaggcaagagcagccgggacctgaagatgctggagaccgtgaggaccccagccctgcacttcaagtctgtgggcttccacctgcccagccgggagttccaggtgcccaccttcaccatccccaagctgtaccagctgcaggtgcccctgctgggcgtgctggacctgagcaccaacgtgtacagcaacctgtacaactggagcgccagctacagcggcggcaacaccagcacagaccacttcagcctgcgggcccgctaccacatgaaggctgacagcgtggtggacctgctgagctacaacgtgcagggcagcggggagaccacctatgaccacaagaacaccttcaccctgtcctatgatggcagcctgcggcacaagttcctggacagcaacatcaagttcagccacgtggagaagctgggcaacaaccctgtgtccaagggcctgctgatctttgatgccagcagctcctggggcccccagatgtctgcctctgtgcacctggacagcaagaagaagcagcacctgtttgtgaaggaggtgaagattgatggccagttccgggtgagcagcttctacgccaagggcacctacggcctgagctgccagagggaccccaacacaggccgcctgaatggagagagcaacctgcgcttcaacagcagctacctgcagggcaccaaccagatcaccggccgctatgaagatggcaccctgagcctgaccagcaccagtgacctgcagagcggcatcatcaagaacacagccagcctgaagtatgagaactatgagctgaccctgaagagtgacaccaacgggaagtacaagaactttgccaccagcaacaagatggacatgaccttcagcaagcagaatgccctgctgcggtctgagtaccaggccgactatgagagcctgcgcttcttcagcctgctgagcggcagcctgaacagccacggcctggagctgaatgctgacatcctgggcacagacaagatcaacagcggggcccacaaggccaccctgagaattggccaggacggcatcagcaccagcgccaccaccaacctgaagtgcagcctgctggtgctggagaatgagctgaatgctgagctgggcctgagcggggcctccatgaagctgaccaccaacggccgcttccgggagcacaatgccaagttcagcctggatggcaaggccgccctgacagagctgagcctgggcagcgcctaccaggccatgatcctgggcgtggacagcaagaacatcttcaacttcaaggtgtcccaggagggcctgaagctgagcaatgacatgatgggcagctatgcagagatgaagtttgaccacaccaacagcctgaacattgctggcctgagcctggacttcagcagcaagctggacaacatctacagcagtgacaagttctacaagcagacagtgaacctgcagctgcagccctacagcctggtgaccaccctgaacagcgacctgaagtacaatgccctggacctgaccaacaacgggaagctgcggctggagcccctgaagctgcacgtggccggcaacctgaagggggcctaccagaacaatgagatcaagcacatctatgccatcagcagcgctgccctgagcgccagctacaaggctgacacagtggccaaggtgcagggcgtggagttcagccaccggctgaacacagacattgctggcctggccagcgccatcgacatgagcaccaactacaacagcgacagcctgcacttcagcaatgtgttccgctctgtgatggcccccttcaccatgaccattgatgcccacaccaatggaaatggcaagctggccctgtggggcgagcacacaggccagctgtacagcaagttcctgctgaaggccgagcccctggccttcaccttcagccatgactacaagggcagcaccagccaccacctggtgtccaggaagagcatctctgctgccctggagcacaaggtgtctgccctgctgaccccagctgagcagacaggcacctggaagctgaagacccagttcaacaacaatgagtacagccaggacctggatgcctacaacaccaaggacaagattggagtggagctgaccggccgcaccctggccgacctgaccctgctggacagccccatcaaggtgcccctgctgctgtctgagcccatcaacatcattgatgccctggagatgagagatgctgtggagaagccccaggagttcaccatcgtggcctttgtgaagtatgacaagaaccaggatgtgcacagcatcaacctgcccttctttgagaccctgcaggagtactttgaaagaaaccggcagaccatcatcgtggtgctggagaatgtgcagaggaacctgaagcacatcaacatcgaccagtttgtgaggaagtacagagctgccctgggcaagctgccccagcaggccaatgactacctgaacagcttcaactgggagcggcaggtgtcccatgccaaggagaagctgacagccctgaccaagaagtaccgcatcacagaaaatgacatccagatcgccctggatgatgccaagatcaacttcaatgagaagctgagccagctgcagacctacatgatccagtttgaccagtacatcaaggacagctatgacctgcatgacctgaagatcgccatcgccaacatcattgatgagatcatcgagaagctgaagagcctggatgagcactaccacatccgggtgaacctggtgaagaccatccatgacctgcacctgttcatcgagaacatcgacttcaacaagagcggcagcagcacagcctcctggatccagaatgtggacaccaagtaccagatccgcatccagatccaggagaagctgcagcagctgaagaggcacatccagaacatcgacatccagcacctggccggcaagctgaagcagcacatcgaggccattgatgtgcgggtgctgctggaccagctgggcaccaccatcagctttgagcgcatcaatgacatcctggagcacgtgaagcacttcgtcatcaacctgattggagactttgaggtggccgagaagatcaatgccttccgggccaaggtgcatgagctgattgaaagatatgaggtggaccagcagatccaggtgctgatggacaagctggtggagctggcccaccagtacaagctgaaggagaccatccagaagctgagcaatgtgctgcagcaggtgaagatcaaggactactttgagaagctggtgggcttcattgatgatgctgtgaagaagctgaatgagctgtccttcaagaccttcattgaagatgtgaacaagttcctggacatgctgatcaagaagctgaagagctttgactaccaccagtttgtggatgagaccaatgacaagatccgggaggtgacccagaggctgaatggagagatccaggccctggagctgccccagaaggccgaggccctgaagctgttcctggaggagaccaaggccaccgtggccgtgtacctggagagcctgcaggacaccaagatcaccctcatcatcaactggctgcaggaggccctgagcagcgccagcctggcccacatgaaggccaagttccgggagaccctggaggacacccgggacaggatgtaccagatggacatccagcaggagctgcagcgctacctgagcctggtgggccaggtgtacagcaccctggtgacctacatcagtgactggtggaccctggccgccaagaacctgacagactttgctgagcagtacagcatccaggactgggccaagaggatgaaggccctggtggagcagggcttcaccgtgcctgagatcaagaccatcctgggcaccatgcctgcctttgaggtgtccctgcaggccctgcagaaggccaccttccagaccccagacttcatcgtgcccctgacagacctgcgcatccccagcgtgcagatcaacttcaaggacctgaagaacatcaagatccccagccgcttcagcaccccagagttcaccatcctgaacaccttccacatccccagcttcaccatcgactttgtggagatgaaggtgaagatcatccgcaccatcgaccagatgctgaacagcgagctgcagtggcctgtgcctgacatctacctgcgggacctgaaggtggaggacatccccctggcccgcatcaccctgcctgacttccggctgcctgagatcgccatccctgagttcatcatccccaccctgaacctgaatgacttccaggtgcctgacctgcacatccctgagttccagctgccccacatcagccacaccatcgaggtgcccaccttcggcaagctgtacagcatcctgaagatccagagccccctcttcaccctggatgccaatgctgacattggaaatggcaccaccagcgccaatgaagctggcattgctgccagcatcacagccaagggggagagcaagctggaggtgctgaactttgacttccaggccaatgcccagctgagcaaccccaagatcaaccccctggccctgaaggagagcgtgaagttcagcagcaagtacctgaggacagaacatggcagcgagatgctgttctttggaaatgccatcgagggcaagagcaacacagtggccagcctgcacacagagaagaacaccctggagctgagcaatggagtcatcgtgaagatcaacaaccagctgaccctggacagcaacaccaagtacttccacaagctgaacatccccaagctggacttcagcagccaggccgacctgagaaatgagatcaagaccctgctgaaggccggccacatcgcctggaccagcagcggcaagggctcctggaagtgggcctgcccccgcttcagtgatgagggcacccatgagagccagatctccttcaccatcgagggccccctgaccagctttggcctgagcaacaagatcaacagcaagcacctgcgggtgaaccagaacctggtgtatgagagcggcagcctgaacttcagcaagctggagatccagagccaggtggacagccagcacgtgggccacagcgtgctgacagccaagggcatggccctgtttggagagggcaaggccgagttcaccggcagacatgatgcccacctgaatggcaaggtgattggcaccctgaagaacagcctcttcttcagcgcccagccctttgagatcacagccagcaccaacaatgaaggcaacctgaaggtgcgcttccccctgcggctgaccgggaagattgacttcctgaacaactatgccctcttcctgagccccagcgcccagcaggcctcctggcaggtgtctgcccgcttcaaccagtacaagtacaaccagaacttctctgctggcaacaatgaaaacatcatggaggcccacgtgggcatcaacggggaggccaacctggacttcctgaacatccccctgaccatccctgagatgaggctgccctacaccatcatcaccaccccacccctgaaggacttcagcctgtgggagaagacaggcctgaaggagttcctgaagaccaccaagcagagctttgacctgtctgtgaaggcccagtacaagaagaacaagcaccgccacagcatcaccaaccccctggccgtgctgtgtgagttcatcagccagagcatcaagagctttgacagacactttgagaagaacagaaataatgccctggactttgtgaccaagagctacaatgagaccaagatcaagtttgacaagtacaaggccgagaagagccatgatgagctgcccaggaccttccagatccctggctacacagtgcctgtggtgaatgtggaggtgagccccttcaccatcgagatgtctgccttcggctacgtgttccccaaggctgtgtccatgcccagcttcagcatcctgggcagtgatgtgcgggtgcccagctacaccctcatcctgcccagcctggagctgcctgtgctgcacgtgcccaggaacctgaagctgagcctgcctgacttcaaggagctgtgcaccatcagccacatcttcatcccagccatgggcaacatcacctatgacttctccttcaagagcagcgtcatcaccctgaacaccaatgctgagctgttcaaccagagcgacatcgtggcccacctgctgagcagcagcagctctgtgattgatgccctgcagtacaagctggagggcaccacccggctgaccaggaagaggggcctgaagctggccacagccctgagcctgagcaacaagtttgtggagggcagccacaacagcacagtgtccctgaccaccaagaacatggaggtgtctgtggccaccaccaccaaggcccagatccccatcctgaggatgaacttcaagcaggagctgaatggaaacaccaagagcaagcccaccgtgagcagctccatggagttcaagtatgacttcaacagctccatgctgtacagcacagccaagggagctgtggaccacaagctgagcctggagagcctgaccagctacttcagcattgagagcagcaccaagggagatgtgaagggctctgtgctgagccgggagtacagcggcaccatcgccagcgaggccaacacctacctgaacagcaagagcaccaggagctctgtgaagctgcagggcaccagcaagattgatgacatctggaacctggaggtgaaggagaactttgctggggaggccaccctgcagaggatctacagcctgtgggagcacagcaccaagaaccacctgcagctggagggcctcttcttcaccaacggggagcacaccagcaaggccaccctggagctgagcccctggcagatgtctgccctggtgcaggtgcacgccagccagcccagcagcttccatgacttcccagacctgggccaggaggtggccctgaatgccaacaccaagaaccagaagatccgctggaagaatgaggtgcgcatccacagcggcagcttccagagccaggtggagctgagcaatgaccaggagaaggcccacctggacattgctggcagcctggagggccacctgcgcttcctgaagaacatcatcctgcctgtgtatgacaagagcctgtgggacttcctgaagctggatgtgaccaccagcatcggccggcggcagcacctgcgggtgtccacagcctttgtgtacaccaagaaccccaacggctacagcttcagcatccctgtgaaggtgctggccgacaagttcatcatccctggcctgaagctgaatgacctgaacagcgtgctggtgatgcccaccttccacgtgcccttcacagacctgcaggtgcccagctgcaagctggacttccgggagatccagatctacaagaagctgcggaccagcagctttgccctgaacctgcccaccctgcctgaggtgaagtttcctgaggtggatgtgctgaccaagtacagccagcctgaggacagcctcatccccttctttgagatcaccgtgcctgagagccagctgactgtgtcccagttcaccctgcccaagtctgtgtctgatggcattgctgccctggacctgaatgctgtggccaacaagattgctgactttgagctgcccaccatcatcgtgcctgagcagaccatcgagatccccagcatcaagttctctgtgcctgctggcatcgtcatccccagcttccaggccctgacagccaggtttgaggtggacagccctgtgtacaatgccacctggagcgccagcctgaagaacaaggctgactatgtggagaccgtgctggacagcacctgcagcagcacagtgcagttcctggagtatgagctgaatgtgctgggcacccacaagattgaagatggcaccctggccagcaagaccaagggcacctttgcccaccgggacttcagcgcagaatatgaggaggatggcaagtatgagggcctgcaggagtgggagggcaaggcccacctgaacatcaagagccctgccttcacagacctgcacctgcgctaccagaaggacaagaagggcatcagcaccagcgctgccagccctgctgtgggcaccgtgggcatggacatggatgaagatgatgacttcagcaagtggaacttctactacagcccccagagcagcccagacaagaagctgaccatcttcaagacagagctgcgggtgcgggagagtgatgaggagacccagatcaaggtgaactgggaggaggaggccgccagcggcctgctgaccagcctgaaggacaacgtgcccaaggccaccggggtgctgtatgactatgtgaacaagtaccactgggagcacacaggcctgaccctgcgggaggtgagcagcaagctgcggaggaacctgcagaacaatgctgagtgggtgtaccagggcgccatccggcagattgatgacattgatgtgcgcttccagaaggccgccagcggcaccaccggcacctaccaggagtggaaggacaaggcccagaacctgtaccaggagctgctgacccaggagggccaggccagcttccagggcctgaaggacaacgtgtttgatggcctggtgcgggtgacccaggagttccacatgaaggtgaagcacctgattgacagcctgattgacttcctgaacttcccccgcttccagtttcctgggaagccaggcatctacacccgggaggagctgtgcaccatgttcatccgggaggtgggcaccgtgctgagccaggtgtacagcaaggtgcacaatggaagtgagatcctcttctcctacttccaggacctggtgatcaccctgccctttgagctgaggaagcacaagctgattgatgtgatctccatgtaccgggagctgctgaaggacctgagcaaggaggcccaggaggtgttcaaggccatccagagcctgaagaccacagaggtgctgaggaacctgcaggacctgctgcagttcatcttccagctgattgaggacaacatcaagcagctgaaggagatgaagttcacctacctgatcaactacatccaggatgagatcaacaccatcttcagtgactacatcccctgcttctag

SEQ ID NO: 8281 - DNA, 13035 bp, Artificial Sequence
  derived and/or modified sequence
atggaccccccccggcccgccctgctggccctgctggccctgcccgcactgctcctcctcctgctggccggtgccagggccgaagaggagatgctcgagaacgtctccctggtgtgtccgaaggatgccacaagatttaaacacctgagaaagtacacctacaactatgaggctgagtcctctagcggtgtccctggcacggcagactcccgatccgccacaagaatcaactgcaaggttgagctagaagtgccgcaactgtgtagctttattctgaagacgtctcaatgtactctcaaagaagtatacgggtttaatccagaaggaaaagcccttcttaagaagacgaaaaacagcgaagagtttgccgcggctatgtcccgttacgaactaaaactcgctatccccgagggaaagcaagtgtttctgtaccctgaaaaggacgagcccacttatatactgaacatcaaaaggggtattatcagcgccctccttgtcccacctgaaaccgaggaagccaagcaggtgctttttttagacactgtgtacgggaattgtagcactcacttcacagtgaaaaccaggaaaggaaatgtagcgaccgagatatctacagagagggacttaggacagtgtgacaggtttaaaccaatccgcaccgggatttctcccctggccctaattaaaggcatgacccggccgctctccaccctcatctcttctagtcagtcgtgccagtacactttggatgccaaacggaagcatgtggctgaagcgatatgtaaggagcagcacctttttctgcccttctcctataagaataaatacgggatggtggctcaagtgacccagactctgaaacttgaggatacgccgaagatcaattctagattcttcggcgaggggactaagaagatgggcctggccttcgaatctaccaagtcaacttcacctcctaagcaggcggaagcggtgctgaaaactttgcaagaactcaagaagctgaccatctccgaacagaatatccagagggcgaacctgttcaataaattggtaactgagctgagaggcctgagcgatgaagccgttacttcattgctgccccagctgatcgaggtctcatcgcctatcacattgcaggctctagttcagtgcggtcagccccagtgttcaacccacattttacagtggctcaagcgagtacatgcaaatcccctgctcattgacgtggtgacttacctggtagccttgatccccgagccaagcgcacagcagttaagagagatttttaatatggccagagatcagcggagcagggccaccctgtatgctctgtctcacgccgtgaacaactatcataaaacaaatcctactggaacgcaagagctcctggatatcgccaactacctgatggaacaaatacaagacgactgcaccggggacgaggattacacgtatctgatcttgagagtgatcggcaatatgggtcagacgatggagcaacttacacctgagttgaaaagcagcattcttaagtgtgtccaatctacaaaacccagtcttatgattcaaaaagcagctatccaggccctgaggaaaatggagccaaaagacaaggaccaggaagtactgctgcagacattcctagatgacgcctccccaggagacaagcgcctggccgcctacctgatgcttatgcgtagccccagccaagctgatattaacaagatcgtgcagatcctgccctgggagcagaacgaacaggtaaagaacttcgtcgcctcccacatcgcgaacatcttgaatagcgaggagctggacatacaggacctcaagaagttggttaaggaggccctgaaagaaagccagctgccaactgttatggacttccggaagttctcccggaattaccaactgtataagagtgtttccttgccctctctcgaccctgcctcggccaaaatagaggggaatttgatttttgatccaaataattaccttcctaaggagtctatgttgaaaacaaccctgactgcattcggcttcgcctctgccgatttgatagaaattggacttgaagggaaaggattcgagcccactttagaagcactgtttgggaagcaggggtttttccctgattccgtaaacaaggccttatattgggtgaacggtcaggtgccggatggtgtgtctaaagttctggtcgatcacttcggttatacaaaggatgataagcacgaacaggatatggttaacggaatcatgttgagcgtggaaaagctcattaaggatctgaagagtaaggaagtacctgaagcaagagcatacctccgtatacttggagaggagctgggctttgcatccctccatgaccttcaactgttggggaaactgctgctgatgggcgcaaggaccttacaggggattccccaaatgatcggagaagtgataaggaaaggatccaaaaatgattttttcctgcactacatctttatggagaacgccttcgaattgcctacaggcgctggcctccaattacagatctcttccagtggggtgatagcgcccggcgccaaggccggggttaagctggaagtggcaaatatgcaagctgagcttgtggccaaaccttctgtctccgtcgagttcgttacaaatatggggattatcataccagacttcgccaggtccggagtgcagatgaataccaattttttccatgagagcggtctggaagctcatgtagccctgaaagctggcaagctgaagttcataattccttctcccaagcggcccgtcaaactccttagtgggggcaacacgctacatctggtgtccacaacaaaaacagaagttatcccccctctgatagagaacaggcagtcatggtctgtctgcaagcaagtgttcccaggactgaattattgcacgagcggcgcatactcaaacgccagtagtactgactcagcttcttactaccccctcacgggcgacactcggctggagctagaacttaggccaaccggagaaatagaacaatactccgtgtcagccacatatgagctccaaagagaggacagggccttggttgataccctcaagtttgtgacacaagctgagggagctaaacagactgaagccactatgacgttcaaatataaccgccaatctatgacactcagctccgaggtgcagatcccggatttcgacgtcgacctaggcaccatcttgagggtgaatgacgaatctacagagggcaagacatcctaccgacttaccctcgacattcagaacaagaagatcaccgaggtcgcactgatgggccacttatcctgcgatacaaaagaagagcggaaaatcaagggagtcatttctatcccccggctccaggccgaggcaagatctgagatcctggcccactggagtccagctaagctcctactgcagatggattctagtgcgactgcctatgggtccaccgtgtcgaaacgcgtggcctggcactacgacgaagaaaagattgaattcgagtggaacaccggtactaatgtcgacacaaagaagatgacttcaaatttccccgttgacctgtccgactaccccaaatcgcttcacatgtatgccaaccggctgctcgaccaccgggtgcctcagacagacatgacttttcgacacgtgggcagcaaactgatcgtggccatgagttcctggctccagaaggctagtggcagcctcccttacacacagacgctgcaggaccacctgaattctctgaaagagttcaatcttcagaacatgggcctcccggactttcatattccagagaatctgtttcttaagtcagacgggcgggtcaaatacaccttaaacaaaaacagcctcaaaattgagattccattaccattcggcggtaagagcagcagagatctgaaaatgctcgagaccgtgaggacccccgctctgcatttcaagagcgttggctttcaccttccctcccgggagtttcaggtaccaaccttcactattcccaaactgtaccagttgcaggtccccttgctcggtgtgctcgatctgtcaactaatgtatacagcaatttgtataactggagcgcatcctactctggggggaacactagcactgaccacttcagcttgagagctaggtaccacatgaaggccgattctgtcgttgatctactgtcctacaatgtgcagggttctggagagaccacgtatgaccacaagaatacatttacactgtcatatgacggctccctgagacacaaatttcttgatagtaacatcaagttttcccacgtcgaaaaactgggaaataatccagtcagcaagggcctcctgatcttcgatgcaagcagcagctggggcccccagatgagcgcctctgtccacctggactccaagaagaagcaacacctgtttgttaaagaggtgaaaatagatggacagtttagggtcagttccttttacgctaagggcacgtatggactcagttgccagcgtgaccctaataccggcaggttaaatggggaatccaacctgagatttaatagctcctatctgcagggcacaaaccaaatcacgggcaggtatgaagacgggacacttagtctgacatccacttccgatttgcagagcggcattatcaaaaataccgcctccctgaagtacgagaactatgaacttactctcaagtctgacaccaacggcaagtacaagaatttcgccacgtccaataagatggacatgacattctctaagcagaacgctctgctgcgctccgaataccaagccgactacgagagcctgagattcttcagccttttaagtggttctctcaacagccacgggcttgaactgaatgctgatattctgggaacggataagattaactcaggagctcacaaggccacacttagaattgggcaggacggtatctcaacatcagctaccactaacttgaaatgctccctgctggtcctcgagaatgagttaaacgcagaactcgggttatccggcgcctcaatgaagctcaccaccaatgggagatttcgcgagcacaacgccaagttttctctggatggtaaggcggcactcacagaattgagcttgggcagcgcctatcaagctatgattctgggcgtggattcaaaaaacatctttaatttcaaagtctcccaggaaggactgaaattgtcaaatgacatgatggggtcgtatgccgagatgaagttcgatcacaccaatagcctaaacatcgctgggcttagccttgacttcagttcaaagttggacaatatttactcctcagacaagttctacaagcagacagtgaatcttcagctgcaaccatattcactggtcacaacactaaacagcgatcttaagtacaatgcccttgacctgaccaataacgggaagctgagacttgaaccccttaaactgcacgtggctgggaatctgaagggagcctaccagaataatgagattaaacacatctacgcaatttcaagcgcagcgttgagtgcatcgtacaaagccgacacagtggccaaggtgcaaggcgtggaattctcacaccgcctcaacaccgatatcgcagggctggcaagcgcaattgacatgagtacgaactataactctgactcgttacattttagcaatgtctttcggtccgtgatggctccatttacaatgaccatcgacgcgcacaccaacgggaatgggaaactggccctctggggcgagcacacagggcagctttatagcaagttccttttgaaggcagaaccgctggccttcactttctcacacgactacaagggcagcacaagtcaccaccttgtgtcccggaagtctatatctgccgccctggaacacaaagtgtcagccctgctgacgccggcggaacaaactggtacctggaagctgaagacacaattcaataacaacgagtattcccaagacttagacgcctataataccaaagacaagataggagtcgagctcacggggcgaaccttggctgacctgacgcttctggatagccctattaaggtgcctctcctcctatccgagccaatcaacatcattgatgcgttggaaatgagagatgccgttgagaagccacaagaatttaccatcgtcgcatttgttaagtacgataaaaatcaggatgttcactcaataaacctgccgttctttgaaaccttgcaggagtacttcgaaaggaaccgccagaccataatcgtggtgttggagaatgtccagaggaatttgaagcacatcaacatcgaccagtttgttaggaaatatagagccgccctgggaaaattacctcagcaggctaacgactatttaaactcctttaattgggagcgacaggtcagtcacgctaaagagaagctgacggcgctgacaaagaagtatagaatcaccgaaaatgatatacagatcgcactggacgacgccaagatcaacttcaacgagaaattgtcgcagctccagacttatatgatacagttcgatcagtatattaaggactcttacgatcttcatgacctgaagatcgccattgccaacatcattgatgaaatcattgaaaaactcaagtctttggacgaacattaccacatacgggtgaacttggtgaagacaatccacgacctgcatttgttcatagagaacatcgactttaataaatctggctctagcacggcgagctggatccagaacgtggacactaagtatcaaatcaggatccagatccaagaaaaacttcagcagctcaagcggcacatccagaacatcgatattcaacacctggcggggaagctgaaacagcacatcgaagccattgacgtgagggttttgctggatcagctcggcacgaccatctcctttgaacggatcaacgatatactggagcacgtcaagcattttgtaatcaacttaattggcgatttcgaggttgcagaaaaaataaatgccttcagggctaaagtccatgaactaatcgaacgctacgaggtggatcagcagatccaggttctcatggataagctggttgagcttgcccaccaatacaaattaaaagaaacgatccagaagctgtccaacgtgctgcagcaagtaaaaatcaaagactactttgaaaagttggtcggattcattgatgatgccgtgaaaaagttaaacgaactgtcatttaagacctttattgaagatgtgaataagtttttagacatgcttataaaaaagctgaaatctttcgactaccatcaatttgttgatgaaactaacgataaaatccgcgaagtcacacagaggctaaacggagaaatccaggctcttgaactgccacaaaaggccgaagctttaaaattgtttctggaagagaccaaggctacggtcgccgtgtatctagaatcccttcaggataccaaaatcaccttgataattaactggttgcaggaagctctttcctcagcctccctcgcgcacatgaaagccaaatttcgagagacccttgaagatactcgggatcgcatgtatcaaatggatattcagcaagagctccaacgctacctctccctggtgggccaggtctacagcaccctggtgacctatataagtgactggtggactctggcagccaagaacctcacggattttgccgagcagtatagcatacaggattgggctaagcgtatgaaagcgctggtcgagcagggtttcacggttccggaaatcaagacgatattgggtaccatgccggcttttgaggtctctctccaggccctgcagaaggctacctttcaaactcctgacttcatagtgccactcacagatctgcggataccctctgtgcagattaacttcaaggatctcaagaatatcaaaatccccagcaggttttccacacccgaattcactatcctgaacacctttcatattccttcattcacaatcgacttcgtcgaaatgaaagttaagatcatcagaactatcgatcagatgctcaatagcgaattacaatggccagtacctgacatatatctgagagatttaaaggtggaggatatccccctcgctagaataaccctgccggacttccgcttacctgagatcgccatcccagagtttatcatccccaccctgaaccttaatgatttccaggtgcctgacctacatatccccgaatttcagctgccgcacatctcccatacaattgaggtgcccacctttggcaagctgtattcaatcctgaagatccagagccccctctttaccctcgatgcgaacgccgatatagggaatgggactacctcagccaatgaggcagggatcgcagcctctattactgctaaaggggaatctaaactggaagtcctgaattttgatttccaagcaaatgcccagctcagtaatccaaagatcaaccccttggccctgaaggagtccgtgaagtttagtagcaaatatctcaggaccgaacatggatctgagatgctgttttttggcaacgctatcgagggaaagtcaaatacggtggcgtctctccacaccgagaagaacacactggaactcagtaacggtgtaattgttaaaattaataaccaactgacactggatagcaacactaagtatttccacaagctcaacatccctaagctagacttctccagccaggctgacttaagaaatgagattaaaaccctcctgaaggctggacacatcgcttggacatcatctggcaagggctcttggaaatgggcttgtcctcggttctccgatgaaggtacccacgagtcacaaattagcttcactattgagggacctctcacctcctttgggctgtcaaacaaaattaactctaaacacctaagggtaaatcagaatctagtgtacgagtctggctctttaaatttttccaagctggaaattcagagtcaggtggactctcagcatgtcggacactcggtgttgaccgccaaagggatggccctgttcggcgaaggtaaagccgagttcactggccgtcacgacgcccaccttaacggcaaggttattggcacactgaagaacagcctgttcttcagcgctcagccctttgagataaccgccagcacgaacaacgaaggcaacttgaaagtgagattccctctgcgtcttaccgggaaaattgactttctcaacaactatgcactttttctgagcccaagcgcccagcaagcatcatggcaggtgtcagcgcgtttcaaccagtacaaatataaccagaatttctctgcaggaaataatgagaatattatggaagcccatgtgggtatcaacggggaagcgaacctagactttcttaacataccgctaacaatcccggaaatgcgtctcccatacactatcattacaacacctcccctgaaggacttttccctctgggaaaaaacagggttgaaggagttcttaaaaaccactaagcaaagctttgacctcagcgttaaggcccagtacaagaagaataagcatcgccacagcataacaaatcctttagcagtcctgtgtgagtttatctcgcagagcattaagagttttgacagacacttcgagaagaatagaaacaacgccctggacttcgtcacaaaatcctacaacgagactaaaataaaattcgataaatacaaagccgaaaagtcgcatgatgaactgccccggaccttccagatcccaggctatacagtacccgtggtaaatgttgaggtgtcccccttcactatagagatgagtgcttttggatatgtgtttcctaaggccgtcagcatgccaagcttcagcatcctaggctcagacgtacgtgtgccttcttatacactgattttgccatcacttgagctccccgtgcttcacgtgcccaggaaccttaagctgagcttgccagatttcaaggaactttgtactattagccatatcttcatcccagcgatgggtaacatcacatatgatttctcctttaagagttcagtaataacactgaacaccaatgcggagctctttaaccagagtgatattgtggcccacctgctcagttcttctagttctgtcattgacgcgctgcagtataagctggagggaaccacaagattgacccgtaagaggggactgaagttggctactgcactctctttgtctaacaagttcgtggagggaagtcacaacagcaccgtcagcctgactactaaaaatatggaggtgagcgtggccactacaactaaggcccagatacctatcctccggatgaatttcaaacaagaactgaacggaaacacgaagtcgaaaccgactgtgtctagtagtatggaatttaaatatgactttaacagtagtatgttatattctacggccaagggggccgtcgaccataagcttagtctggagagcttgacatcctactttagcatcgagagctcgacgaagggggatgtaaaagggtcagtacttagccgggagtatagtgggacaattgcttccgaagccaacacttatctcaactctaaatccactcgcagctcggtgaaactgcagggaaccagtaaaattgacgatatctggaatctggaggttaaagaaaattttgctggagaggccaccctccagagaatttactccctgtgggaacacagcaccaagaaccacctgcaactggaggggctgtttttcaccaacggggaacacacctccaaggcaaccctcgagctgtccccttggcagatgtctgcccttgtgcaagtgcacgcctctcagcctagctccttccatgattttccagatctggggcaggaggtagctttaaatgctaatacgaaaaaccagaagattcgatggaaaaatgaggtgcggattcactccgggtcatttcagtcccaggttgaattatccaatgatcaggagaaggcccatcttgacatcgctgggagtttagagggacatctgagattccttaagaatatcattctccccgtgtacgacaaatccctgtgggatttcctgaagttagacgtgaccacttctatcggccgtaggcagcaccttagagtaagcaccgccttcgtgtatacaaagaatcctaacggttattccttctcaatccctgtgaaagtgcttgccgacaagttcatcattcctggactgaagctgaacgacctgaattccgtgctggtcatgccaacgttccacgtcccatttaccgatttacaggtgccctcgtgtaagctagacttcagggagatccagatttacaagaaactgcgaacatcgtcattcgccctcaatctgccaaccttgcctgaagtgaagttccctgaagtggacgtgctgactaaatactctcagccagaagattcgctaatcccctttttcgagatcaccgtccccgagagccaactgaccgtgagtcagtttaccctcccaaagtccgtatcagatgggatcgccgcgctagatctgaatgctgtggccaataaaatcgccgacttcgaacttcctactattatcgtgcccgagcagaccatcgaaattccctcaatcaaattctcggtgcccgctgggattgtgatcccgtccttccaggcgttaaccgcccggtttgaggttgattcccctgtctacaacgccacatggtctgctagcttgaagaataaagcagattatgttgaaaccgtattggacagtacgtgttcaagcaccgttcagttcctcgagtacgagttgaacgtgttagggacacataaaattgaggatgggaccctggcttcaaagacaaagggcaccttcgcccatagggattttagcgcagagtatgaggaggatggcaagtacgagggcctgcaggaatgggaagggaaggctcacctgaacataaaatcgcctgcatttacagatctgcacctccgatatcaaaaggataagaaggggatctcaaccagcgctgcatctccagccgtagggacggtgggtatggacatggatgaagacgatgacttcagcaaatggaacttttactactctccgcagtctagtccggacaagaagctaaccatctttaagaccgagcttcgtgttcgcgagagcgatgaagagacacagattaaggtcaattgggaagaggaggctgctagcggcctgctgactagcctcaaggacaacgtgccaaaggcgactggcgtgctgtacgactatgtgaataaatatcattgggaacatacgggcctcacactgcgcgaggtgagctccaagttgagacggaatctgcaaaacaacgctgagtgggtgtaccaaggcgccatccgtcagatcgacgacattgacgtcaggtttcagaaggctgcgtcagggaccacaggcacgtaccaggaatggaaagacaaggcccagaacttatatcaggaactattaactcaggaagggcaggcctccttccagggcctcaaagacaacgtgttcgacggcctagtcagagtaactcaggagtttcacatgaaggtcaagcatctcatagactccctgatcgactttctgaatttccctcgatttcagttccccgggaagccagggatttatacaagagaggagctgtgtacgatgtttatcagagaagtcggtactgtgctcagccaggtttactcgaaggtgcacaatgggtccgaaatcttattctcctacttccaggatctggttattacgctgccctttgagcttagaaaacacaagttgattgatgtgatttccatgtacagagagcttctgaaggatctgtccaaggaagcgcaggaagtctttaaggccattcagtcactgaagacaaccgaagtcctgcggaatcttcaggacctgctccagttcatcttccagcttatcgaggataacatcaaacagctcaaagagatgaaatttacctacctcatcaactatattcaagacgagatcaacacaatcttttcagattatataccctgcttttag

SEQ ID NO: 8282 - DNA, 13035 bp, Artificial Sequence
  derived and/or modified sequence
atggacccccctagaccagccctgctcgccctgttggcactcccagctctgctgttactgctcttggccggtgctcgggctgaggaagagatgctcgagaatgtttcccttgtgtgcccaaaagatgccaccaggtttaaacacctccgcaagtacacctacaattacgaagcggagagcagctccggagtcccgggaaccgccgactctagatcggcaactagaatcaactgcaaagtggaactggaggttcctcaactttgctcattcattctgaagacatctcagtgcacactgaaagaagtgtacggatttaacccggaaggtaaggccctgttaaaaaagactaaaaactccgaggagtttgcggcagcgatgagcagatatgaactcaaattagccattcctgaaggaaagcaagtgttcctgtaccccgagaaagatgaaccgacctacatcctgaatattaaaagaggaattatttccgccctgttggtgccaccggagaccgaggaggctaagcaggtgctttttcttgatacagtctacggcaattgctctactcatttcaccgtcaaaaccaggaaaggaaacgtggctaccgagatctcgactgaaagggatctgggccagtgtgataggttcaagcccatcaggacagggattagccccctggcattgatcaaggggatgaccaggcctcttagcacccttatctcttctagccaatcctgtcagtatacactggacgcaaaaaggaagcacgtggccgaagccatctgcaaggagcagcatctttttctgcccttcagttataagaacaagtacggtatggtggctcaggtcactcaaacgcttaagctggaggacacaccgaaaatcaactcacggttcttcggcgaggggacaaagaagatgggccttgcctttgagagcactaagtctacatcacccccaaaacaagccgaagcagtgcttaaaactctgcaagaacttaagaagttgacaatctctgagcagaacattcagagagccaatttgttcaacaagctggtaactgagctgaggggtctatcagacgaggcagtgaccagtctgttacctcaactgatcgaggtgagttcacctattacgctccaggctcttgtacagtgcggacaaccacaatgcagcacccacatcctccagtggcttaaaagagttcacgccaacccactcctgatcgatgtggtgacgtaccttgttgccctaatacccgagccttctgctcagcagttgcgggaaatattcaacatggcccgagaccagcgaagccgggcaactctttacgcgctctctcatgccgtcaataactatcataagactaaccctacagggacacaggagctgttggatatcgccaattatctgatggaacagatccaggacgactgtaccggtgacgaggattacacctatctgatcctgagggtaataggtaacatggggcagaccatggagcagctgacgcccgaattgaagagctctatactgaagtgtgtacaatctactaagccaagccttatgatccagaaggccgcaatccaggctctccgtaaaatggagccgaaagataaggaccaagaggtcctgctgcagacttttcttgatgatgcctcgccaggcgataagcgcctggctgcttacctcatgcttatgcgctccccttcccaggctgatatcaacaagattgttcaaatcctgccatgggagcagaatgagcaagtcaaaaactttgtcgccagtcacatcgccaacattctgaatagcgaggagctggatattcaggacctgaaaaagctcgttaaggaagcattgaaagagtcgcagctgccgactgtgatggactttcggaagtttagtaggaactaccagctgtataaatccgtgtcgctcccctccctcgaccctgcatcagccaagatcgaaggtaacctcatttttgaccctaataattaccttccaaaggaaagcatgctgaaaactactctgaccgccttcgggtttgctagcgccgatctcattgaaatcggtttggaaggcaagggcttcgaacctacgctagaggcgctcttcgggaaacaagggttctttcccgactctgtgaacaaggccctgtactgggtgaacggtcaggtgcctgacggcgtgagcaaggttctcgtggatcacttcgggtacaccaaggacgataagcacgaacaggatatggtgaacggtatcatgctgagcgtggaaaagctgatcaaggacctcaagtctaaggaagtccccgaagctcgcgcttacttaagaatcctgggcgaagagctgggatttgcctctctacatgacctccagctgttaggaaagctgttgttgatgggcgctagaacactacaaggaattcctcagatgattggcgaagtcattcggaaagggagtaagaacgatttttttttacattatatatttatggagaatgcctttgaactgcctacaggagctggtctccagctgcagatctcatcatcaggagtgattgcgcctggcgctaaggccggagtgaagttggaggtcgccaacatgcaggctgaattggtggcgaagccttccgtgagcgtggaatttgtgactaatatgggcattattattcccgacttcgccaggagcggcgttcagatgaacacaaactttttccacgagtccggtctggaagcacacgttgccctgaaggctggtaaactgaaatttatcatcccaagcccaaaaagaccagtgaaactgctgtccgggggaaatacgctgcacctggtttccaccacgaagactgaggttatcccacctctcattgaaaacagacagagttggtccgtgtgcaagcaggtgtttcccggattgaactactgtacatcaggcgcttactccaatgcgtcaagtaccgatagcgcttcctactaccctctgaccggggataccaggctagaattggagttgagaccaaccggtgaaatcgagcagtatagcgtctcagcaacatatgagcttcagcgggaagatcgcgcactggtggacacactcaaattcgtcacccaggccgaaggtgcaaaacaaaccgaggcaactatgacatttaagtacaatagacagtcaatgacattgagttctgaggtgcagattccagacttcgatgtcgacctcggcacaattttgcgggtgaatgatgaaagcactgagggaaaaaccagctataggctaactcttgacatacaaaataaaaagatcactgaagtcgcccttatgggacacttgtcctgtgacaccaaggaagaacggaaaatcaaaggggtcatttccattcccagactccaggcggaggctcggtcggaaatcctcgcgcattggtcccctgcaaaactgctgctccagatggatagctctgctacagcttatggcagcactgtgtccaaaagagtggcgtggcactacgacgaggagaaaatcgaattcgaatggaatacagggactaatgtggataccaagaagatgacaagcaacttcccagtcgacctcagcgactacccaaagtctctccatatgtacgccaatcgtctattggatcacagggtcccgcagacggacatgacctttagacatgtaggatctaaacttatcgtagcaatgtccagctggttacagaaggcttccgggagcctcccttacacacagacattacaagatcacctcaacagtcttaaagaattcaacctccagaatatgggcctcccagatttccatattccggagaacttgtttctgaagagcgatggacgcgtgaagtacacgctgaataagaactcgctgaagattgagattccactgcccttcggcggaaaaagtagtcgggatcttaaaatgctagagacagtaagaactcccgctctccatttcaaatctgtggggtttcaccttccttctcgggaattccaagtgcccacatttactatccccaagctgtatcaacttcaggtgccactcttgggcgtgctggacctttcaacaaatgtgtactcaaatttgtacaactggagcgcaagctacagcggagggaacacctcaaccgatcacttcagcttgagggcccgttatcatatgaaagcagatagcgtggtcgacttgttatcgtacaatgtccagggctcaggggagaccacatacgaccataaaaacacgtttaccctgtcgtacgatggctctctgaggcataagtttctcgattccaatatcaaattcagccacgttgagaagttgggcaacaatcccgtgtccaagggtttgctgatcttcgatgcctccagttcctgggggccacagatgtcggcttcagtacacctcgatagcaagaagaaacagcatctattcgtcaaagaggttaaaatcgacggccagtttagagttagctccttctatgccaaaggaacatatggcctatcatgccagcgggatccaaataccggcaggctgaacggggagagtaacctgcgattcaactcttcatacttgcagggaacaaatcagataactggaagatacgaggatggcacgctcagtctgacgtccaccagtgacctgcagtcaggcattattaagaatacggcatcgctcaaatatgagaactacgagttaaccctcaaatctgacactaacggtaagtataagaacttcgcaacctcaaacaaaatggatatgaccttctctaaacagaacgctctgttgagatccgaatatcaggcagactacgaatcactaaggtttttcagtctgttgtccggctctctgaacagccatggtctggaactcaacgctgatatcttgggtacagacaagatcaactccggggctcacaaggccactctgcgtattggccaagatggaatcagtacctctgctaccacgaacctcaaatgttctctgctagtactggagaacgagctcaacgctgagcttggcctttctggggctagcatgaaactgactactaatggccgtttcagagaacacaatgccaagtttagtctggatggcaaggcagccctcacagaattgtcgctcggcagcgcctaccaggcgatgatcctaggagtggactcaaagaacattttcaacttcaaagtgtctcaggagggcctgaaactgtcaaacgacatgatggggagctacgccgagatgaaattcgaccacacaaacagcctcaatattgccggactctctctggacttttcttcaaagctcgacaacatatattcaagcgacaagttttacaagcagacagtgaacttacagctacagccctactcactggtaaccaccctgaattctgatttgaaatacaacgcactggacctgaccaacaatgggaaactccggctggagccgctgaaactgcacgtcgccggaaatctcaaaggcgcatatcagaacaacgagatcaaacacatctacgccatatcatctgctgccctgtctgcttcttacaaagccgacaccgtggccaaagtacaaggcgtggagtttagtcaccgactgaatactgacatcgcagggcttgctagtgcaattgatatgagcacgaactacaattccgattcattgcacttttcaaatgtattccggtctgttatggctccattcactatgaccatagatgcccacaccaatggcaatggtaagctggccctgtggggcgagcacactggccagctgtactcgaagttcttattaaaagcagaacccctcgctttcaccttttcccacgattacaaagggagtactagtcaccacctcgtctctagaaaaagcatctctgcagcattagagcacaaagtctccgctctgcttacccccgctgagcagacaggtacgtggaagttgaagacacagttcaataacaacgagtattctcaggatctggatgcctacaataccaaggacaaaataggcgtggagctgaccggcaggacactggcagacctgacactcctggattctcctattaaggtgcctctgctgctgtctgaaccaattaatatcatagatgctcttgagatgagagacgccgtggagaaaccacaggaatttacaatcgtggcctttgtgaagtatgataaaaaccaggacgtccactctatcaatctgccattcttcgaaaccttacaagagtacttcgagagaaaccgccagacgataattgttgtgcttgaaaatgtacagaggaacctaaagcacattaacatcgatcagtttgtaagaaaatacagggccgcattggggaagctcccccagcaggccaatgactacctgaacagcttcaactgggagcgccaagtttcacacgccaaggagaaacttacagcactcactaaaaagtacaggataactgagaatgatattcagatagcgctcgatgatgctaagatcaacttcaatgaaaaacttagccaacttcagacatatatgatccagttcgatcagtacatcaaggatagctatgacctgcatgatctcaaaatagcaattgccaatattattgacgagattatcgagaagcttaagtcactcgatgagcactaccatatccgcgtgaacttggtcaaaacgatccacgatttgcacctttttatcgaaaacattgacttcaataagtctggctccagtaccgctagttggattcagaacgtggacacaaagtaccagataaggatccagatccaggagaagttacaacagttgaaaaggcacattcagaacatagatatccagcatctggccggtaagctgaagcaacacatcgaggccatcgatgtacgggtattgctagatcaactgggaactaccatcagcttcgagcgcatcaatgatatcctggaacacgtgaagcactttgtgatcaatctgattggggattttgaggttgcggaaaaaattaatgcttttcgtgctaaggtgcacgagttaatcgagcgctatgaggtggatcaacagatccaggtactcatggataagcttgttgaactggcacaccagtataagcttaaggagacaattcaaaagctttccaatgtcttgcaacaagttaagattaaggattattttgagaagctagtgggcttcatagacgatgcggtcaagaagcttaatgagctgagctttaagacgtttattgaggatgtgaataaatttttagacatgctgataaagaaactaaagagttttgactaccatcagttcgttgatgaaacaaatgacaagattagagaggtgacccaaagactgaacggcgagatacaggccttggagctcccgcagaaagcagaggcccttaaactgtttctcgaggagactaaagccaccgtcgccgtgtacctggagagtctgcaggacacaaagattacactgattattaattggctgcaagaggctctctcgagcgctagtctggcgcatatgaaagccaagttccgagagacattggaagatacgcgcgaccgaatgtaccagatggacatccagcaggaattgcaaaggtatctgagtctggttggacaggtgtactccacgcttgttacgtacatttccgattggtggacactcgccgcaaagaatttgaccgacttcgctgagcagtactcgatccaggattgggctaaacgaatgaaggctctggtggagcagggatttacggtgccggaaattaaaaccatccttgggacaatgccagcatttgaggtgtctcttcaagccctgcaaaaagccactttccagactccggacttcattgtgcccctgacagaccttcggatcccttccgtacagataaacttcaaggatctcaaaaatataaaaatccccagccgcttctcaactcccgagtttaccatactgaatacgtttcacatcccaagcttcaccattgatttcgtcgagatgaaggtcaaaatcatccggactatcgatcagatgctgaactcagaactccagtggcctgtgcccgacatctacttaagagacctgaaggtggaggacatccctctggcacggattaccctacccgactttagattacctgaaatcgccattcctgaattcataatcccaacactgaacctgaatgattttcaggtgccggacctccacattcccgagtttcaactgccccatatatcgcacaccattgaggtccctacattcggcaagctctacagtatcctcaaaattcagtcacccctgttcacgctggatgccaatgcagatatcggaaacgggaccaccagtgcaaacgaagccggaatagccgcatcaattacagccaagggtgagagcaagctcgaagtgctcaatttcgactttcaagcaaatgctcaactatcaaatccaaaaattaacccgctggccctcaaagaatctgtcaaattttcgagtaagtacctgcgcactgagcatggctccgagatgttattttttgggaacgccattgaagggaaatctaacacagtggctagtctacacactgagaagaatacactagagctctccaatggagtgatagtaaagatcaataaccagctaacgctggactcgaacaccaagtattttcataagctcaacataccgaagctggattttagctctcaagctgacctacgtaacgagatcaaaaccttgctcaaggctgggcacatcgcctggacgagctccgggaagggtagttggaaatgggcctgccccaggttctccgacgagggtacccacgaatcacagatcagtttcaccatcgagggcccactgacaagttttggcctatctaataaaatcaactcaaagcacctgcgcgttaatcagaatttggtgtacgagtctggcagtttgaacttcagtaaattggagatccagtcacaggtggacagtcaacacgtggggcattcggtgttgacagcgaaagggatggcgttgtttggggaaggcaaggctgaatttaccgggaggcacgacgcgcaccttaacggtaaggtgataggaactctgaagaacagcctttttttcagtgctcagcccttcgaaattacggcatccacaaataacgaggggaacctgaaagtgcgttttccccttcgtctgacgggcaaaatagacttcctgaacaattatgccctatttttgagccccagcgctcaacaggccagctggcaagtgtcagctaggttcaatcaatataaatataatcagaactttagcgccggaaataatgagaacatcatggaggcccatgtcggaatcaacggagaagccaacctggactttctcaatattccccttacaattccagagatgcgcctgccctataccatcatcactactccacctctgaaagacttttccctctgggaaaagaccggtcttaaggagttcctgaagacgacaaaacaaagtttcgatctgtccgtgaaggcccagtataaaaagaataagcaccggcatagtataacgaacccactggctgttctgtgtgaatttatatcccagagcatcaagagcttcgatcggcactttgaaaagaatcgaaacaatgcgttggactttgtgaccaagtcctacaacgagaccaaaattaaattcgataagtataaggcagaaaaatctcacgatgaactccccaggacgtttcaaattcccggatacactgtcccagtcgtgaatgtggaggttagcccctttaccattgaaatgtcagcatttggttacgtgttcccaaaggctgtgtctatgcctagctttagcatcttgggaagcgacgtcagggtgccttcgtacaccctgattctgccgagtctcgaactgcccgtactgcatgtgccaagaaatttgaagctaagtctaccagacttcaaggagctatgtaccatatcacacattttcattcctgctatgggtaatatcacatatgatttttctttcaaatcatccgtaataaccttaaatacaaacgctgaactgtttaatcaaagcgacatagtcgcccatctgctgagcagttccagtagtgtgatagacgctttgcaatacaagctggaggggaccactaggcttactcgcaagagaggtcttaagttggctactgctctgagtctttccaataaatttgttgagggatctcataactctaccgtttcactgacgaccaaaaacatggaggtatctgtcgccaccaccaccaaggcgcaaattcctatcctgcggatgaactttaagcaggaactcaatgggaacaccaagtctaagcctacagtgtccagctccatggagtttaaatacgactttaattctagtatgctctatagtacagccaaaggggcagtggaccacaagttgtccctcgagagtctgactagttacttttcaatcgagtcatcaacaaagggggacgtgaaagggtccgtgttgtcccgcgaatacagtggtactatagcctctgaggccaacacctacttgaactcaaaatcaacaaggtctagcgtgaagctgcagggaacctctaaaattgacgatatatggaacctggaagtgaaggaaaactttgccggagaggctactctccagcgcatctactctctctgggagcattcaacaaaaaatcacctccaactggaaggactattcttcactaatggagagcataccagtaaagcgactttggaattatccccctggcagatgagtgcacttgtgcaagtccatgcatcgcagccttccagtttccacgattttccggacctgggacaagaagtcgctcttaatgctaatacaaagaaccaaaaaatcaggtggaaaaatgaggtacgtatacattccggttcatttcagagccaagtcgaattgtcaaacgatcaagaaaaggcgcacctagacatcgccggatctctggaaggacatctgaggtttctgaaaaatataattctgccagtgtacgacaagtctctgtgggattttcttaagttggacgtaaccacttctattggccgtaggcagcatcttagagtgtccaccgctttcgtgtatactaagaacccaaatggatattctttttctattccagtcaaagtccttgcggataagttcatcattccgggactgaagctcaacgacttgaactccgttctggtaatgcctaccttccatgtccctttcaccgatcttcaggttcctagttgcaagctggattttcgggaaattcagatctacaagaagttacggacttcatcgttcgcccttaaccttcctacactgcctgaggtgaaatttccggaagtggacgttcttactaaatattcccaacctgaagactctctgatcccattttttgagatcaccgtacccgagtcacaactgactgtttcacagttcaccttgccaaagagtgtcagcgatggtatcgcagcccttgatctgaatgccgtagccaataaaattgccgatttcgaactgcccactatcattgtgcctgaacaaaccatcgagattcccagcattaagttcagcgtgcccgctgggattgtgatcccctccttccaagccttgacagctcggtttgaggttgacagcccagtttataatgcaacatggtcagcctcattgaaaaacaaagcagactatgtagaaacggtgctggatagtacttgttctagtacggtgcagttccttgagtatgaattgaatgtgctaggcacccataaaattgaggatgggactcttgcttcaaaaacaaagggtacctttgcacaccgggacttcagcgccgagtacgaagaggatggcaagtatgaaggactccaggaatgggaaggcaaagcccacttaaatattaagtcacccgcattcacagatctgcatctccggtatcagaaagacaagaagggaatctcaacatcagccgcatctcctgccgtgggtaccgtggggatggatatggacgaggatgatgacttcagcaaatggaacttctactacagcccgcaaagttcgccagacaagaagcttacaatatttaaaaccgaactgcgggtacgggagtctgatgaagagactcagatcaaggtgaattgggaggaggaagctgcctcaggcctgcttacaagccttaaggacaacgtgcccaaagccaccggagtgttgtacgactacgtaaacaagtaccactgggagcacacagggttgactctgagggaggtatcttcaaaacttcgaaggaacttacagaataacgcagagtgggtataccagggagctatcagacagatagatgacatcgatgtgagatttcagaaagcagcaagcggcactacaggaacgtaccaggaatggaaagacaaagctcagaacttgtatcaggaactgttgacccaagagggacaagccagctttcagggcctcaaggacaatgtgttcgacggtctggtgcgcgtaactcaggaattccatatgaaggtcaagcatcttatcgattctctgattgactttctgaattttccgaggttccagttcccaggaaaacctgggatctatacacgggaggaactatgtaccatgttcatcagagaggtggggaccgtcttatcccaggtttactccaaggtccataacggcagcgagatcctgttctcctacttccaagacctcgtcattacattacccttcgaactgcggaagcataagctgatagatgtaatcagcatgtatagagaattgcttaaagacttatctaaagaggcccaggaggtgtttaaagctatacaatcgctaaaaaccacagaagtactgcgaaacctccaggatcttttgcagtttatctttcaactgatcgaagacaatatcaagcagttgaaggaaatgaaattcacctacctgataaattatatccaagatgagatcaacaccattttctctgattatatcccatgcttctac

SEQ ID NO: 8283 - DNA, 13692 bp, Artificial Sequence
  derived and/or modified sequence
atggatcctcctaggccagccttgttggctttacttgctctccctgccctgctgctgctgctgttagcaggtgcgcgcgcggaagaagaaatgctcgagaacgttagccttgtgtgtccgaaggatgccacacggtttaagcacctgaggaaatacacatataactacgaggccgagagttcatcaggagtgccagggactgcagattctagaagcgctacccgtattaattgtaaagtggagttggaggtgccacaactctgctcatttattcttaagacttcacagtgcacactgaaagaagtctatggattcaatcctgagggaaaggcactgttaaaaaagacgaagaactccgaggagttcgccgcggccatgagtagatacgagctgaagctggcaatcccagaaggcaaacaggttttcctgtatcctgagaaggatgagcctacctatatcctcaatattaagcgcgggattattagcgcactgttagttcccccggagactgaagaagccaagcaagtgctctttctggacaccgtctatggcaattgcagcacacactttaccgttaagacccgcaagggtaacgtagctactgaaattagtaccgagagagaccttgggcagtgtgacaggtttaaacccattcgaaccggcatcagcccattggccctcattaagggtatgaccagacccttatccacgctcatttcttcttcccagtcttgccaatatacactcgacgcaaaacgaaagcacgttgccgaagcgatctgcaaagagcagcacctgttccttcccttttcatacaagaacaagtacggcatggtggcccaggtcacccaaaccctcaaactggaggatactccaaagatcaacagcagattctttggagaggggactaagaaaatgggactggccttcgagtcaaccaagtccacatcacccccaaaacaggcggaagctgtgctgaagactttgcaggagcttaagaagctcacgatatctgagcagaacattcaacgcgctaacttattcaacaaactggtcacagagctaaggggcctgtctgatgaggcagtgacctctctgctgccgcaacttatcgaggttagcagcccaattaccctccaagctcttgttcaatgcggacagcctcagtgtagcacgcacatactacagtggctaaaaagagtgcacgccaacccgctcttgatcgatgtcgtgacataccttgtggctttaatccctgagccctctgcacagcagctccgtgaaattttcaatatggcccgagaccaacgctcccgtgccaccctgtacgcactgtctcatgccgtcaataactatcacaaaacaaacccaacgggcacccaggagctgctggacatcgccaactaccttatggaacagatccaggatgactgcacgggcgacgaagattacacctatcttatcctgagagtaattggtaatatgggccagacaatggagcagctcactcccgaacttaaatcaagtatcctaaaatgcgtgcaaagtaccaaacccagcctgatgatccaaaaggccgcgatccaggctctaagaaaaatggaaccgaaagataaagaccaggaggtattactgcagacatttctcgatgacgcaagcccgggggataaaaggctcgccgcatatctgatgttaatgcggtcaccttctcaagcagacattaacaagattgtgcagattctcccatgggaacaaaacgagcaggtgaagaacttcgtggcgtctcacattgccaacattcttaactccgaggagttggatattcaagatctaaaaaaactagtgaaggaggccctgaaggagtctcagcttccaactgtcatggatttccggaaatttagccgaaattaccaattgtacaaatccgtttctctcccgtcattggatccggcaagtgccaagatcgaaggtaacctgatcttcgatcccaataactacctcccgaaggagtctatgctgaaaaccacgctcacagccttcggattcgcgtcagcggaccttatagagattggcttggagggcaaaggctttgagccaacccttgaagccctcttcggcaagcaggggttttttccggactcagtaaataaagccctctactgggtaaacggacaagtgccggatggcgtctcaaaagttctggtcgaccatttcgggtatacaaaggacgacaagcacgaacaggacatggtaaacggtataatgctgtccgtggagaaactcattaaagacctcaagtcaaaggaagtcccagaggcgagggcatacctgcgcatactgggtgaggagctgggctttgcctctctccatgatctgcagctccttggcaaactcttgctgatgggagctagaaccctgcaaggcattccgcagatgatcggggaggtgattaggaagggttctaaaaatgatttctttctgcactacattttcatggagaacgctttcgagcttccaacaggggctggccttcagttgcagatctcctcgtccggtgtgatagcccccggcgcgaaggcaggcgtgaagctggaagtcgccaatatgcaagctgagctggtcgccaaaccttcagtgtctgtagaatttgtaactaacatgggaattattattcccgactttgccaggagcggtgtccagatgaataccaatttctttcatgagtctggactcgaagcacacgtggccctcaaagcagggaagctcaagttcattatcccatcacccaaaaggcctgttaagttgctatcaggaggaaatacactccacctggtgtcgactacaaagaccgaggtcatcccaccccttattgaaaatcgtcagtcttggtctgtgtgcaagcaggtgttccctgggctgaactactgcacatcgggagcatactctaacgccagctcaactgatagcgcttcctactaccctttaaccggggatacacggcttgaactggagctgcgcccaactggggaaattgagcagtactccgtgagtgctacctacgaactgcaacgagaggaccgagctttggtcgacacactgaagtttgtgactcaagctgagggggctaaacaaactgaggccacaatgacattcaagtacaatcgccagagcatgaccctgagctcggaagtgcagatcccggatttcgacgtggatttgggcactattttgcgcgtaaacgacgaatcaactgagggtaagacctcatatcgcctcactctcgatatccagaataagaagatcaccgaggtagcgctaatgggccacctctcctgtgataccaaagaagagagaaagatcaaaggggtgatttccatacctcgccttcaggctgaggcacgcagcgaaatcttggcccactggtccccagccaagttgctactgcaaatggacagttccgccaccgcctacggtagtaccgtgtcgaaacgtgtggcttggcactacgatgaggagaagatcgagtttgaatggaacacaggaaccaacgtggatactaagaagatgacttcaaacttccccgtcgacctgagcgactacccaaagtccttgcatatgtacgccaaccgcctcctcgatcatcgagtcccccagacagacatgacctttcgacacgtgggctccaagctgattgtcgccatgtccagttggttacaaaaggctagtgggagcctgccttacactcagaccctccaagatcacctcaattccctcaaagagttcaatctgcagaatatggggttgccggactttcacatccccgaaaaccttttcctgaagtccgacgggcgtgtaaaatacacactgaataaaaattctcttaaaatcgagatccccctgccatttggaggcaagtcctctagggacctgaaaatgctggagactgtcaggactcctgcgctccattttaagagtgttgggttccatcttccttccagagaattccaagtccccacattcactatccccaagctctaccagctccaggtaccactcctcggcgtgctggatctgtctactaacgtctattcaaacctatacaattggtctgccagctatagcgggggcaatacctccaccgaccatttctccctccgcgccagataccatatgaaggcggactctgtcgtggacctcctttcctataatgtccagggttctggagaaacaacgtatgaccacaagaataccttcacattgagctatgatggctctctgcgccacaaatttctggactcaaatatcaaattctcacacgtcgaaaagctcgggaacaatccagtgtcaaaagggcttctgatctttgacgcttcttcttcatggggcccccagatgtctgcttccgttcatctcgactctaagaagaagcagcacctgttcgtgaaggaggtgaagattgacggtcagttcagggtgtcttcattctatgccaagggaacctatggactttcttgccaacgagatccaaacacagggcgcctgaacggcgagtcaaatttgcgcttcaactcgagctacctgcagggcacgaatcagattaccgggcggtacgaggacggcacactcagcctgacaagcaccagcgacctccaatcaggtattatcaagaacaccgcctcactgaaatacgagaactatgagcttaccctgaaaagcgataccaacggcaagtacaagaacttcgccacaagtaacaagatggatatgaccttttccaagcaaaacgcacttttacggtccgagtatcaggccgactacgagagtctccggttcttctctttgctctctgggtccctgaacagtcatgggctggagttgaacgccgatatcttgggcaccgataaaattaactccggagcccacaaggcaaccctcaggatcggccaagatggaatctctacgtctgctactacaaatctgaagtgtagcctgttggtgttagagaatgagcttaatgcagagctcggcctctctggagcttctatgaaattaacaactaacgggcggtttagagagcacaatgcaaaattttcccttgacggcaaggcagcactgacagaactcagcctgggcagtgcctaccaggccatgattctgggtgttgattcgaagaacatcttcaactttaaggtgagccaggaaggtcttaagctgagtaacgacatgatggggagctacgccgagatgaagtttgaccacacgaactcactcaacattgctggactgagcctggacttctcgagcaaacttgacaacatttatagtagcgacaagttttataaacaaactgtgaacttacagttacagccttactctttagtcacaaccctgaactccgacttaaagtacaacgctctggatctcacaaataacggcaaacttcgcttagagcccttgaagctacatgtagctggcaatctgaagggcgcatatcagaataacgaaatcaaacatatctatgccatttcctctgccgccctgagtgcatcctataaagcggacacagtggcgaaagtgcagggggtcgaatttagtcatcggttaaacactgatattgccggactggcctcagctatagacatgagtaccaactacaacagtgattcgttgcatttctcgaacgtgtttagaagcgtgatggcgcccttcactatgaccattgatgctcatactaatggtaatgggaagttggccttgtggggcgagcacacgggccaactgtactcaaagtttctgcttaaagccgagcccctggcattcaccttcagtcacgactataaaggctcaacgtcgcaccacttagtgagtagaaagtcgatcagcgccgctcttgaacacaaggtttctgccttactcactcctgctgagcaaactggcacatggaaactgaaaactcagtttaataacaacgagtattcacaggacttggacgcttacaatacaaaagataagatcggcgtggagctgacggggcggactttggccgacctaacactgctggattcgcctataaaggttcctctgcttttgagtgagcccatcaacataatcgacgctctcgagatgcgcgatgctgtcgaaaagccccaggaatttaccatcgtcgcatttgtgaagtatgacaaaaaccaggacgtacattccattaatcttcccttttttgaaactctacaggaatattttgaacgtaatcggcagactatcatcgtcgtgctggaaaacgtgcagcgaaacctgaaacatataaacatcgatcagtttgtgcggaaatacagagctgccttgggtaagctgcctcagcaggctaacgattacttaaacagctttaattgggagcgtcaggtatcccatgccaaggagaagctgactgctctgacgaagaaatatcggattaccgagaacgacatccagatcgcccttgatgatgccaaaattaattttaatgaaaaacttagtcaactccaaacctatatgattcagttcgatcagtatattaaggactcatatgaccttcatgatctgaaaattgctatagcaaacatcattgacgaaataatcgaaaaactgaaatctctggatgagcattatcatatcagggtgaatctggtcaaaactattcatgacttgcatctctttattgagaatattgattttaataagagcggcagcagtaccgcttcctggatccagaatgttgacaccaaatatcagatacgaatacagattcaggaaaagctccagcagctgaaaagacacatccagaatatcgatatacagcacctcgccggaaagctgaagcagcatattgaggccatcgacgttagggtgctgctggatcaactgggaactaccatcagtttcgaaagaatcaatgatatcctcgagcacgtgaaacactttgtgattaacctgataggggactttgaagtcgccgagaagataaatgcctttagagccaaagtccacgagctcatagaacggtacgaggtcgaccaacagattcaagtgctgatggataaattagtggaactcgctcaccagtacaaacttaaagagactatccagaaactctccaacgtgctgcagcaagtgaagatcaaggactactttgagaagctggtggggtttatcgacgacgccgtcaaaaaacttaacgagctcagtttcaagacttttatcgaagacgtgaacaagttcttggacatgctgatcaagaaattgaagtccttcgactatcaccagttcgtggatgaaaccaacgataaaatccgagaagtgacacaacggctgaacggagaaattcaggccctagaactaccccagaaagccgaggcgctgaaactcttcctcgaggagaccaaagctacggtggccgtgtatctggagagccttcaagatactaaaattaccctgattatcaactggttacaggaggctctgtcctccgctagccttgcacatatgaaagcgaagttccgggagacgctggaggatacaagagataggatgtatcaaatggacattcagcaggaacttcagcggtacctgtctctagtaggccaggtatatagcactctggttacgtatattagcgactggtggactctcgccgcaaaaaaccttaccgatttcgcagaacaatattcgattcaggattgggctaaacgtatgaaggcccttgtcgagcaggggtttacggtgcctgaaatcaaaaccatacttgggacaatgccagctttcgaggtgtccctccaggcactccagaaggccactttccaaacacccgacttcattgtgcccctgacggacctccgcattccctcagtccagattaatttcaaggatcttaaaaatatcaaaatccccagtcgcttctctacaccggagttcactatccttaacacttttcacatacccagtttcaccatagacttcgtggaaatgaaggtcaagataatccgtaccatagatcaaatgcttaactccgaacttcaatggccagtccctgacatataccttcgcgacctgaaggtggaggacataccattggccaggattaccctccctgacttccggctgcccgagattgctatccctgagttcatcattccgactttgaacttgaatgatttccaggtgccagatctgcatatccctgagttccagctgcctcatatcagccatactatagaggtgccaacatttggtaagctgtattcaatcctgaaaatccagtcccctctcttcaccctcgatgcaaatgccgacattgggaacgggactacctctgccaatgaggctggtattgccgcctctattacagcaaaaggagagagcaagctcgaggtccttaatttcgactttcaggcaaatgcccagctgtccaatcccaagattaacccgctggccctcaaggagagcgttaaattctccagcaaatacttgcggaccgaacacggaagcgaaatgctttttttcggcaacgcaatagagggaaaaagcaacactgtggcctcactgcacacagaaaaaaataccctcgagctgtctaacggggtcatcgtgaagataaataatcaactgacactcgactcaaataccaaatactttcacaagctcaacataccaaaacttgatttcagtagccaagcagatctgcgcaacgaaattaaaacattactgaaggccggtcatatcgcgtggacctcctcagggaagggctcgtggaaatgggcctgccctagattttcagatgaagggacgcacgagtcacagatatcatttactattgaagggcccttaacttcattcggattaagtaacaaaatcaactcaaagcatcttagggtgaatcagaatttggtctacgagtcaggtagtctgaatttctcaaaactcgaaatacaatcacaggtagattcacagcacgtgggccattcggtgttgacagccaagggcatggctctgttcggcgagggcaaggccgagtttactgggcgccatgatgctcacctgaacggcaaggttatcggaacgctgaagaacagcctcttttttagtgctcagccattcgagattacagctagtacaaacaacgagggcaatctgaaggtccgctttccgctccgacttacgggcaaaatcgatttcctgaacaattacgcattattcctgtcccctagtgctcaacaggcaagttggcaagtatctgctcgattcaatcaatacaagtacaatcagaacttctcggctggcaataacgaaaacataatggaggcacacgtgggtattaacggggaggccaatttagactttctcaatatacctttgactatccccgagatgcggctaccctacaccatcatcacgacccctcccctgaaggatttctccctctgggagaagactggtctaaaagaatttctcaaaaccactaaacagtccttcgatctgtccgtgaaggcacagtataagaagaacaaacatcgtcatagcattacaaatcccctcgctgtgctctgtgaattcatcagtcagagtatcaagtccttcgataggcatttcgagaaaaatcggaataacgctctagatttcgtgaccaagtcctacaacgaaaccaagatcaagtttgataagtacaaggctgaaaagtcacacgatgagcttcccaggacctttcagattcccgggtacactgtgccagtggtgaacgtcgaggtatccccttttaccattgagatgagtgcctttgggtatgtattccctaaggcagtgtccatgccctcattctctatcctcgggagtgacgtgcgggtgccgtcctacacccttatcctgcctagcctcgaacttcctgttctccatgtgccaaggaatcttaagctgagtctgcccgatttcaaagaactgtgcacgatctctcacattttcattcccgcaatgggcaacattacctatgatttttccttcaagagttcagtcattactctcaacactaatgctgaactctttaaccagtccgacattgtggcacatttattatcttcgagttccagtgtgatagacgcgctgcagtacaagcttgaggggaccaccagattgactcggaagaggggcctcaagctagcaactgcactgagtctctctaacaagttcgtggagggttctcataactccacagtttcgttgactactaaaaacatggaggtcagtgtggctaccaccaccaaagcccagatccctatcctgaggatgaacttcaaacaggaattgaacggtaatactaagtccaagcccacagtcagctcatccatggagttcaaatatgattttaatagcagcatgctgtatagtaccgctaaaggagccgtcgaccacaagctgtccttggagtctctcacctcctactttagcattgagtccagtactaagggcgatgtgaagggaagcgtgcttagtagagagtattcgggcactattgcctccgaagccaatacatacctgaatagcaaaagtacccgtagttcggtgaagctgcaggggacctctaagatagatgatatatggaatctcgaggtgaaagaaaactttgctggcgaagccactctccaaaggatttatagcctctgggagcactctactaagaatcatcttcagctcgaggggcttttttttaccaacggtgagcatacgagcaaggccactctggagctctccccgtggcaaatgtctgccttggtccaggtccatgcctcgcagccatctagcttccacgacttcccggatctgggacaggaagtagccctaaacgccaatactaaaaaccaaaagattcgttggaagaatgaggttcgcattcactccggttccttccagtcccaggttgaactgtccaacgaccaggaaaaagcgcacctggacatcgctggttcgctggagggacacctgaggtttctcaagaacatcattctgccagtgtacgataaaagcttgtgggacttcctcaagctggacgtgactacctccatcggacgacgacagcaccttcgtgtgtccacggcctttgtctacacaaaaaatccaaatggatattccttttccatccccgtaaaggtgctggctgacaaatttatcatcccgggtcttaaattaaatgacctaaattctgttctcgtgatgcctaccttccatgtcccctttaccgatctgcaggtaccttcttgcaaactggatttccgagagattcagatctacaagaaactcagaacatctagctttgccctaaaccttcctaccctcccggaggtgaagtttcccgaggtggatgtgctcaccaaatacagccagcctgaagattcactgatcccttttttcgaaattaccgtacccgaaagtcagttgactgttagccagttcacactccctaagtccgtgtccgatggaatcgcagcactggatctgaatgcggtcgcaaacaaaattgccgacttcgagctgcccactatcattgtcccagagcagacaatagagatccccagcataaagttttctgttcccgcaggcatagttattccctcctttcaagctctgacagccaggttcgaggtcgactctcctgtgtataatgctacatggtcggcatcattaaagaacaaggctgactacgtggaaacggtcctggactccacctgctcctccacggtacaattcctggaatatgaactgaatgtccttgggacacacaaaattgaggatggcacacttgcctcaaagactaagggtacattcgctcacagggacttcagcgcggaatacgaggaagacgggaaatatgagggtctccaggaatgggagggcaaggctcacctgaatatcaagagccccgccttcaccgaccttcatctccgataccaaaaggataagaaaggcatcagcacctccgcggcttcaccagctgtgggtacggtcgggatggatatggacgaggacgatgacttcagcaagtggaatttttattacagcccacagtcttcaccagataagaagctgactattttcaaaactgaactgcgtgttagggaatccgatgaagagactcaaatcaaggtcaattgggaagaagaggctgccagtggcctgctgaccagcctaaaggataacgttccaaaggcgacaggtgtgttgtacgattacgtcaacaagtaccactgggaacacactgggctgacgcttcgggaagttagctccaagcttcgccgcaacctgcagaataatgccgagtgggtttaccaaggggccataaggcagatagacgatattgacgttaggtttcagaaagccgcttcggggacaaccggcacctatcaagaatggaaggacaaagcgcagaatttataccaggagctactgacacaagagggccaagcctcctttcaaggcctgaaggacaacgtgttcgacggcctcgtgagggtcacccaggagttccacatgaaagtcaagcatctgattgactccctcatcgactttctgaattttccacgcttccagttccccggcaaacctggcatctatacacgcgaggagttgtgcacaatgttcattcgtgaggtaggtacagtgctgtctcaggtctatagcaaggtgcataatgggtcagagattctgttttcctacttccaggacctggtcattacgctacccttcgaattacgaaaacacaagctgattgatgtgatcagcatgtatcgcgagctgctgaaggacttatccaaagaggcccaggaagtattcaaagccattcagagtctcaagacaaccgaggtcttgaggaacctgcaggatctcctgcagtttatttttcaactgatcgaggacaacattaaacagctgaaagaaatgaagtttacctatctaataaattacattcaggatgagattaacaccatcttcagcgactatatcccgtacgtctttaagctgctgaaagagaacctttgtttaaatctgcacaagtttaatgaatttatccagaatgaattacaagaggctagtcaagagttgcagcaaatccaccagtatatcatggccctccgagaggaatatttcgacccttctattgtggggtggacggtgaaatattacgagctagaggaaaagattgtctctttgattaagaatcttctggtggcgttgaaggatttccactccgaatatatcgtctccgcatccaactttaccagccagctgagctcgcaagtggaacagttcttgcatcgtaacattcaggagtacctgagtatcctcacagaccctgacggcaaaggaaaggagaagatagcagaacttagtgctacagcccaggagatcattaagagccaggccattgccacaaagaagatcattagtgattaccatcagcaattccggtacaagctgcaggatttctctgatcagctgtcggattattacgagaaatttatcgctgaatcaaaaaggttaatcgatctgtcgatccagaattatcatacgttcctgatctatatcacagagctactgaagaaactgcagagtacgacagttatgaatccttatatgaagctggcccctggtgagctgaccattatcctttag

SEQ ID NO: 8284 - DNA, 13692 bp, Artificial Sequence
  derived and/or modified sequence
atggacccccccaggcctgccctgctggccctgctggccctgcctgccctgctgctgctgctgctggccggggcccgggcagaggaggagatgctggagaatgtgtccctggtgtgccccaaggatgccacccgcttcaagcacctgaggaagtacacctacaactatgaggccgagagcagcagcggcgtgcctggaacagctgacagccgcagcgccacccgcatcaactgcaaggtggagctggaggtgccccagctgtgcagcttcatcctgaagaccagccagtgcaccctgaaggaggtgtatggcttcaaccctgagggcaaggccctgctgaagaagaccaagaacagcgaggagtttgctgctgccatgagccgctatgagctgaagctggccatccctgagggcaagcaggtgttcctgtacccagagaaggatgagcccacctacatcctgaacatcaagaggggcatcatcagcgccctgctggtgcccccagagacagaggaggccaagcaggtgctcttcctggacacagtgtatggcaactgcagcacccacttcaccgtgaagaccaggaaaggaaatgtggccacagagatcagcacagagcgggacctgggccagtgtgaccgcttcaagcccatcagaacaggcatcagccccctggccctgatcaagggcatgacccggcccctgagcaccctcatcagcagcagccagagctgccagtacaccctggatgccaagaggaagcacgtggccgaggccatctgcaaggagcagcacctgttcctgcccttctcctacaagaacaagtatggcatggtggcccaggtgacccagaccctgaagctggaggacacccccaagatcaacagccgcttctttggagagggcaccaagaagatgggcctggcctttgagagcaccaagagcaccagcccccccaagcaggccgaggccgtgctgaagaccctgcaggagctgaagaagctgaccatcagcgagcagaacatccagagggccaacctcttcaacaagctggtgacagagctgcggggcctgagtgatgaggccgtgaccagcctgctgccccagctgattgaggtgagcagccccatcaccctgcaggccctggtgcagtgtggccagccccagtgcagcacccacatcctgcagtggctgaagagggtgcacgccaaccccctgctgattgatgtggtgacctacctggtggccctgatccctgagcccagcgcccagcagctgcgggagatcttcaacatggcccgggaccagaggagccgggccaccctgtatgccctgagccatgctgtgaacaactaccacaagaccaaccccaccggcacccaggagctgctggacatcgccaactacctgatggagcagatccaggatgactgcacaggagatgaggactacacctacctgatcctgcgggtcatcggcaacatgggccagaccatggagcagctgaccccagagctgaagagcagcatcctgaagtgtgtgcagagcaccaagcccagcctgatgatccagaaggccgccatccaggccctgaggaagatggagcccaaggacaaggaccaggaggtgctgctgcagaccttcctggatgatgccagccctggggacaagaggctggccgcctacctgatgctgatgaggagccccagccaggccgacatcaacaagatcgtgcagatcctgccctgggagcagaatgagcaggtgaagaactttgtggccagccacatcgccaacatcctgaacagcgaggagctggacatccaggacctgaagaagctggtgaaggaggccctgaaggagagccagctgcccaccgtgatggacttcaggaagttcagcaggaactaccagctgtacaagtctgtgtccctgcccagcctggaccctgccagcgccaagattgagggcaacctgatctttgaccccaacaactacctgcccaaggagagcatgctgaagaccaccctgacagccttcggctttgccagcgctgacctgattgagatcggcctggagggcaaaggatttgagcccaccctggaggccctgtttgggaagcagggcttcttcccagacagcgtgaacaaggccctgtactgggtgaatggccaggtgcctgatggagtgtccaaggtgctggtggaccacttcggctacaccaaggatgacaagcatgagcaggacatggtgaatggcatcatgctgtctgtggagaagctgatcaaggacctgaagagcaaggaggtgcctgaggcccgggcctacctgcgcatcctgggggaggagctgggctttgccagcctgcatgacctgcagctgctgggcaagctgctgctgatgggcgcccggaccctgcagggcatcccccagatgattggagaggtgatcaggaagggcagcaagaatgacttcttcctgcactacatcttcatggagaatgcctttgagctgcccaccggggccggcctgcagctgcagatcagcagcagtggagtcatcgcccctggggccaaggccggcgtgaagctggaggtggccaacatgcaggccgagctggtggccaagcccagcgtgtctgtggagtttgtgaccaacatgggcatcatcatcccagactttgcccggtctggagtgcagatgaacaccaacttcttccatgaaagtggcctggaggcccacgtggccctgaaggccggcaagctgaagttcatcatccccagccccaagaggcctgtgaagctgctgagcggcggcaacaccctgcacctggtgtccaccaccaagacagaggtgatcccccccctgattgagaaccggcagagctggagcgtgtgcaagcaggtgtttcctggcctgaactactgcaccagcggggcctacagcaatgccagcagcacagattctgccagctactaccccctgaccggggacacccggctggagctggagctgcggcccaccggggagattgagcagtacagcgtgtctgccacctatgagctgcagagagaagatcgggccctggtggacaccctgaagtttgtgacccaggccgagggcgccaagcagacagaggccaccatgaccttcaagtacaaccggcagagcatgaccctgagcagcgaggtgcagatcccagactttgatgtggacctgggcaccatcctgcgggtgaatgatgagagcacagagggcaagaccagctaccgcctgaccctggacatccagaacaagaagatcacagaggtggccctgatgggccacctgagctgtgacaccaaggaggagaggaagatcaagggcgtcatcagcatcccccggctgcaggccgaggcccggtctgagatcctggcccactggagccctgccaagctgctgctgcagatggacagcagcgccacagcctacggcagcacagtgtccaagagggtggcctggcactatgatgaggagaagattgaatttgagtggaacacaggcaccaacgtggacaccaagaagatgaccagcaacttccctgtggacctgagtgactaccccaagagcctgcacatgtatgccaaccggctgctggaccaccgggtgccccagacagacatgaccttcagacatgtgggcagcaagctgattgtggccatgagctcctggctgcagaaggccagcggcagcctgccctacacccagaccctgcaggaccacctgaacagcctgaaggagttcaacctgcagaacatgggcctgcctgacttccacatcccagaaaatctcttcctgaagagtgatggccgggtgaagtacaccctgaacaagaacagcctgaagattgagatccccctgccctttggaggcaagagcagccgggacctgaagatgctggagaccgtgaggaccccagccctgcacttcaagtctgtgggcttccacctgcccagccgggagttccaggtgcccaccttcaccatccccaagctgtaccagctgcaggtgcccctgctgggcgtgctggacctgagcaccaacgtgtacagcaacctgtacaactggagcgccagctacagcggcggcaacaccagcacagaccacttcagcctgcgggcccgctaccacatgaaggctgacagcgtggtggacctgctgagctacaacgtgcagggcagcggggagaccacctatgaccacaagaacaccttcaccctgtcctatgatggcagcctgcggcacaagttcctggacagcaacatcaagttcagccacgtggagaagctgggcaacaaccctgtgtccaagggcctgctgatctttgatgccagcagctcctggggcccccagatgtctgcctctgtgcacctggacagcaagaagaagcagcacctgtttgtgaaggaggtgaagattgatggccagttccgggtgagcagcttctacgccaagggcacctacggcctgagctgccagagggaccccaacacaggccgcctgaatggagagagcaacctgcgcttcaacagcagctacctgcagggcaccaaccagatcaccggccgctatgaagatggcaccctgagcctgaccagcaccagtgacctgcagagcggcatcatcaagaacacagccagcctgaagtatgagaactatgagctgaccctgaagagtgacaccaacgggaagtacaagaactttgccaccagcaacaagatggacatgaccttcagcaagcagaatgccctgctgcggtctgagtaccaggccgactatgagagcctgcgcttcttcagcctgctgagcggcagcctgaacagccacggcctggagctgaatgctgacatcctgggcacagacaagatcaacagcggggcccacaaggccaccctgagaattggccaggacggcatcagcaccagcgccaccaccaacctgaagtgcagcctgctggtgctggagaatgagctgaatgctgagctgggcctgagcggggcctccatgaagctgaccaccaacggccgcttccgggagcacaatgccaagttcagcctggatggcaaggccgccctgacagagctgagcctgggcagcgcctaccaggccatgatcctgggcgtggacagcaagaacatcttcaacttcaaggtgtcccaggagggcctgaagctgagcaatgacatgatgggcagctatgcagagatgaagtttgaccacaccaacagcctgaacattgctggcctgagcctggacttcagcagcaagctggacaacatctacagcagtgacaagttctacaagcagacagtgaacctgcagctgcagccctacagcctggtgaccaccctgaacagcgacctgaagtacaatgccctggacctgaccaacaacgggaagctgcggctggagcccctgaagctgcacgtggccggcaacctgaagggggcctaccagaacaatgagatcaagcacatctatgccatcagcagcgctgccctgagcgccagctacaaggctgacacagtggccaaggtgcagggcgtggagttcagccaccggctgaacacagacattgctggcctggccagcgccatcgacatgagcaccaactacaacagcgacagcctgcacttcagcaatgtgttccgctctgtgatggcccccttcaccatgaccattgatgcccacaccaatggaaatggcaagctggccctgtggggcgagcacacaggccagctgtacagcaagttcctgctgaaggccgagcccctggccttcaccttcagccatgactacaagggcagcaccagccaccacctggtgtccaggaagagcatctctgctgccctggagcacaaggtgtctgccctgctgaccccagctgagcagacaggcacctggaagctgaagacccagttcaacaacaatgagtacagccaggacctggatgcctacaacaccaaggacaagattggagtggagctgaccggccgcaccctggccgacctgaccctgctggacagccccatcaaggtgcccctgctgctgtctgagcccatcaacatcattgatgccctggagatgagagatgctgtggagaagccccaggagttcaccatcgtggcctttgtgaagtatgacaagaaccaggatgtgcacagcatcaacctgcccttctttgagaccctgcaggagtactttgaaagaaaccggcagaccatcatcgtggtgctggagaatgtgcagaggaacctgaagcacatcaacatcgaccagtttgtgaggaagtacagagctgccctgggcaagctgccccagcaggccaatgactacctgaacagcttcaactgggagcggcaggtgtcccatgccaaggagaagctgacagccctgaccaagaagtaccgcatcacagaaaatgacatccagatcgccctggatgatgccaagatcaacttcaatgagaagctgagccagctgcagacctacatgatccagtttgaccagtacatcaaggacagctatgacctgcatgacctgaagatcgccatcgccaacatcattgatgagatcatcgagaagctgaagagcctggatgagcactaccacatccgggtgaacctggtgaagaccatccatgacctgcacctgttcatcgagaacatcgacttcaacaagagcggcagcagcacagcctcctggatccagaatgtggacaccaagtaccagatccgcatccagatccaggagaagctgcagcagctgaagaggcacatccagaacatcgacatccagcacctggccggcaagctgaagcagcacatcgaggccattgatgtgcgggtgctgctggaccagctgggcaccaccatcagctttgagcgcatcaatgacatcctggagcacgtgaagcacttcgtcatcaacctgattggagactttgaggtggccgagaagatcaatgccttccgggccaaggtgcatgagctgattgaaagatatgaggtggaccagcagatccaggtgctgatggacaagctggtggagctggcccaccagtacaagctgaaggagaccatccagaagctgagcaatgtgctgcagcaggtgaagatcaaggactactttgagaagctggtgggcttcattgatgatgctgtgaagaagctgaatgagctgtccttcaagaccttcattgaagatgtgaacaagttcctggacatgctgatcaagaagctgaagagctttgactaccaccagtttgtggatgagaccaatgacaagatccgggaggtgacccagaggctgaatggagagatccaggccctggagctgccccagaaggccgaggccctgaagctgttcctggaggagaccaaggccaccgtggccgtgtacctggagagcctgcaggacaccaagatcaccctcatcatcaactggctgcaggaggccctgagcagcgccagcctggcccacatgaaggccaagttccgggagaccctggaggacacccgggacaggatgtaccagatggacatccagcaggagctgcagcgctacctgagcctggtgggccaggtgtacagcaccctggtgacctacatcagtgactggtggaccctggccgccaagaacctgacagactttgctgagcagtacagcatccaggactgggccaagaggatgaaggccctggtggagcagggcttcaccgtgcctgagatcaagaccatcctgggcaccatgcctgcctttgaggtgtccctgcaggccctgcagaaggccaccttccagaccccagacttcatcgtgcccctgacagacctgcgcatccccagcgtgcagatcaacttcaaggacctgaagaacatcaagatccccagccgcttcagcaccccagagttcaccatcctgaacaccttccacatccccagcttcaccatcgactttgtggagatgaaggtgaagatcatccgcaccatcgaccagatgctgaacagcgagctgcagtggcctgtgcctgacatctacctgcgggacctgaaggtggaggacatccccctggcccgcatcaccctgcctgacttccggctgcctgagatcgccatccctgagttcatcatccccaccctgaacctgaatgacttccaggtgcctgacctgcacatccctgagttccagctgccccacatcagccacaccatcgaggtgcccaccttcggcaagctgtacagcatcctgaagatccagagccccctcttcaccctggatgccaatgctgacattggaaatggcaccaccagcgccaatgaagctggcattgctgccagcatcacagccaagggggagagcaagctggaggtgctgaactttgacttccaggccaatgcccagctgagcaaccccaagatcaaccccctggccctgaaggagagcgtgaagttcagcagcaagtacctgaggacagaacatggcagcgagatgctgttctttggaaatgccatcgagggcaagagcaacacagtggccagcctgcacacagagaagaacaccctggagctgagcaatggagtcatcgtgaagatcaacaaccagctgaccctggacagcaacaccaagtacttccacaagctgaacatccccaagctggacttcagcagccaggccgacctgagaaatgagatcaagaccctgctgaaggccggccacatcgcctggaccagcagcggcaagggctcctggaagtgggcctgcccccgcttcagtgatgagggcacccatgagagccagatctccttcaccatcgagggccccctgaccagctttggcctgagcaacaagatcaacagcaagcacctgcgggtgaaccagaacctggtgtatgagagcggcagcctgaacttcagcaagctggagatccagagccaggtggacagccagcacgtgggccacagcgtgctgacagccaagggcatggccctgtttggagagggcaaggccgagttcaccggcagacatgatgcccacctgaatggcaaggtgattggcaccctgaagaacagcctcttcttcagcgcccagccctttgagatcacagccagcaccaacaatgaaggcaacctgaaggtgcgcttccccctgcggctgaccgggaagattgacttcctgaacaactatgccctcttcctgagccccagcgcccagcaggcctcctggcaggtgtctgcccgcttcaaccagtacaagtacaaccagaacttctctgctggcaacaatgaaaacatcatggaggcccacgtgggcatcaacggggaggccaacctggacttcctgaacatccccctgaccatccctgagatgaggctgccctacaccatcatcaccaccccacccctgaaggacttcagcctgtgggagaagacaggcctgaaggagttcctgaagaccaccaagcagagctttgacctgtctgtgaaggcccagtacaagaagaacaagcaccgccacagcatcaccaaccccctggccgtgctgtgtgagttcatcagccagagcatcaagagctttgacagacactttgagaagaacagaaataatgccctggactttgtgaccaagagctacaatgagaccaagatcaagtttgacaagtacaaggccgagaagagccatgatgagctgcccaggaccttccagatccctggctacacagtgcctgtggtgaatgtggaggtgagccccttcaccatcgagatgtctgccttcggctacgtgttccccaaggctgtgtccatgcccagcttcagcatcctgggcagtgatgtgcgggtgcccagctacaccctcatcctgcccagcctggagctgcctgtgctgcacgtgcccaggaacctgaagctgagcctgcctgacttcaaggagctgtgcaccatcagccacatcttcatcccagccatgggcaacatcacctatgacttctccttcaagagcagcgtcatcaccctgaacaccaatgctgagctgttcaaccagagcgacatcgtggcccacctgctgagcagcagcagctctgtgattgatgccctgcagtacaagctggagggcaccacccggctgaccaggaagaggggcctgaagctggccacagccctgagcctgagcaacaagtttgtggagggcagccacaacagcacagtgtccctgaccaccaagaacatggaggtgtctgtggccaccaccaccaaggcccagatccccatcctgaggatgaacttcaagcaggagctgaatggaaacaccaagagcaagcccaccgtgagcagctccatggagttcaagtatgacttcaacagctccatgctgtacagcacagccaagggagctgtggaccacaagctgagcctggagagcctgaccagctacttcagcattgagagcagcaccaagggagatgtgaagggctctgtgctgagccgggagtacagcggcaccatcgccagcgaggccaacacctacctgaacagcaagagcaccaggagctctgtgaagctgcagggcaccagcaagattgatgacatctggaacctggaggtgaaggagaactttgctggggaggccaccctgcagaggatctacagcctgtgggagcacagcaccaagaaccacctgcagctggagggcctcttcttcaccaacggggagcacaccagcaaggccaccctggagctgagcccctggcagatgtctgccctggtgcaggtgcacgccagccagcccagcagcttccatgacttcccagacctgggccaggaggtggccctgaatgccaacaccaagaaccagaagatccgctggaagaatgaggtgcgcatccacagcggcagcttccagagccaggtggagctgagcaatgaccaggagaaggcccacctggacattgctggcagcctggagggccacctgcgcttcctgaagaacatcatcctgcctgtgtatgacaagagcctgtgggacttcctgaagctggatgtgaccaccagcatcggccggcggcagcacctgcgggtgtccacagcctttgtgtacaccaagaaccccaacggctacagcttcagcatccctgtgaaggtgctggccgacaagttcatcatccctggcctgaagctgaatgacctgaacagcgtgctggtgatgcccaccttccacgtgcccttcacagacctgcaggtgcccagctgcaagctggacttccgggagatccagatctacaagaagctgcggaccagcagctttgccctgaacctgcccaccctgcctgaggtgaagtttcctgaggtggatgtgctgaccaagtacagccagcctgaggacagcctcatccccttctttgagatcaccgtgcctgagagccagctgactgtgtcccagttcaccctgcccaagtctgtgtctgatggcattgctgccctggacctgaatgctgtggccaacaagattgctgactttgagctgcccaccatcatcgtgcctgagcagaccatcgagatccccagcatcaagttctctgtgcctgctggcatcgtcatccccagcttccaggccctgacagccaggtttgaggtggacagccctgtgtacaatgccacctggagcgccagcctgaagaacaaggctgactatgtggagaccgtgctggacagcacctgcagcagcacagtgcagttcctggagtatgagctgaatgtgctgggcacccacaagattgaagatggcaccctggccagcaagaccaagggcacctttgcccaccgggacttcagcgcagaatatgaggaggatggcaagtatgagggcctgcaggagtgggagggcaaggcccacctgaacatcaagagccctgccttcacagacctgcacctgcgctaccagaaggacaagaagggcatcagcaccagcgctgccagccctgctgtgggcaccgtgggcatggacatggatgaagatgatgacttcagcaagtggaacttctactacagcccccagagcagcccagacaagaagctgaccatcttcaagacagagctgcgggtgcgggagagtgatgaggagacccagatcaaggtgaactgggaggaggaggccgccagcggcctgctgaccagcctgaaggacaacgtgcccaaggccaccggggtgctgtatgactatgtgaacaagtaccactgggagcacacaggcctgaccctgcgggaggtgagcagcaagctgcggaggaacctgcagaacaatgctgagtgggtgtaccagggcgccatccggcagattgatgacattgatgtgcgcttccagaaggccgccagcggcaccaccggcacctaccaggagtggaaggacaaggcccagaacctgtaccaggagctgctgacccaggagggccaggccagcttccagggcctgaaggacaacgtgtttgatggcctggtgcgggtgacccaggagttccacatgaaggtgaagcacctgattgacagcctgattgacttcctgaacttcccccgcttccagtttcctgggaagccaggcatctacacccgggaggagctgtgcaccatgttcatccgggaggtgggcaccgtgctgagccaggtgtacagcaaggtgcacaatggaagtgagatcctcttctcctacttccaggacctggtgatcaccctgccctttgagctgaggaagcacaagctgattgatgtgatctccatgtaccgggagctgctgaaggacctgagcaaggaggcccaggaggtgttcaaggccatccagagcctgaagaccacagaggtgctgaggaacctgcaggacctgctgcagttcatcttccagctgattgaggacaacatcaagcagctgaaggagatgaagttcacctacctgatcaactacatccaggatgagatcaacaccatcttcagtgactacatcccctacgtgttcaagctgctgaaggagaacctgtgcctgaacctgcacaagttcaatgagttcatccagaatgagctgcaggaggccagccaggagctgcagcagatccaccagtacatcatggccctgcgggaggagtactttgaccccagcatcgtgggctggacagtgaagtactatgagctggaggagaagatcgtgtccctcatcaagaacctgctggtggccctgaaggacttccacagcgagtacatcgtgtctgccagcaacttcaccagccagctgagcagccaggtggagcagttcctgcacaggaacatccaggagtacctgagcatcctgacagatcctgatggcaagggcaaggagaagattgctgagctgagcgccacagcccaggagatcatcaagagccaggccatcgccaccaagaagatcatcagtgactaccaccagcagttccgctacaagctgcaggacttcagtgaccagctgagtgactactatgagaagttcatcgccgagagcaagaggctgattgacctgagcatccagaactaccacaccttcctgatctacatcacagagctgctgaagaagctgcagagcaccaccgtgatgaacccctacatgaagctggcccctggagagctgaccatcatcctgtag

SEQ ID NO: 8285 - DNA, 13692 bp, Artificial Sequence
  derived and/or modified sequence
atggaccccccccggcccgccctgctggccctgctggccctgcccgcactcctgcttctgttgctggctggtgctcgggcggaggaggagatgcttgagaatgtttcattagtgtgtccgaaggacgctacccggtttaagcaccttcggaaatacacctataattatgaagcagagtccagcagcggtgtgccaggcacggctgacagcagatccgcaactcggatcaactgcaaggtcgaactcgaagttccacagttgtgttcttttatcctgaagacctcacagtgcacactcaaagaggtgtacggcttcaacccagaaggcaaagccttgctaaagaaaacaaagaactcagaggaatttgccgctgcgatgagccggtacgagttaaagctcgcgattccagaggggaagcaggtgtttctttatcctgagaaggacgagcccacctatatcctgaatatcaaacggggcataatatctgcactcctcgtgcccccagagaccgaggaggccaagcaggtactctttctggacaccgtttacggaaactgctctacccacttcacagttaaaacaaggaaaggcaacgtggctaccgaaatcagtaccgaaagggacctcggccagtgtgatcgcttcaaaccaatcaggacaggtatctcacccttggctttgattaaaggcatgactcgcccgctctcaacactgatttcttcgagccagtcatgccagtacaccttagatgccaagcggaaacatgttgccgaggcaatatgcaaagagcaacacctttttctgcctttctcttataaaaacaaatacggaatggtagcacaagtgactcagaccctcaagctcgaagacacccccaagattaatagccgctttttcggagaaggcacgaaaaaaatgggacttgcgttcgagtcgaccaagtccacctctcctcctaaacaggcagaggccgtgctcaaaacactccaggaactcaagaaactgacaatctctgagcagaacatccagagggctaacctgttcaacaaattagtgaccgagctgagggggttgtcggatgaggccgtgacaagcctcttgccgcagttgatcgaagtctcctcacctatcactttacaggcattggtccagtgtggtcagccccaatgctcaacgcatattctgcagtggctgaaacgggttcatgcaaatcccctgcttatagatgtggtgacgtatctggttgccttgattccggaaccttcggcacagcagttgcgcgaaatcttcaacatggcgagggatcagcggagtcgagctaccctgtacgccctcagccacgcagttaataactaccacaagactaatcctactggcacgcaggagctgcttgatatcgcgaattacttgatggagcagatccaggacgattgcacgggggatgaggattacacctatctgatactcagagttattggcaacatggggcagactatggaacaacttactcctgaacttaagtcaagtattctgaaatgcgtgcaatccaccaaaccaagtttaatgatccagaaggccgccattcaagcacttagaaaaatggaaccaaaggacaaagaccaggaagttctcctccagacattcctggatgacgcatctccaggcgacaaaagactagctgcctacctaatgctgatgaggtccccatcacaggcagacattaacaagatcgtccaaatcctgccatgggagcagaatgaacaggtaaagaattttgtggcatcgcacattgctaacattcttaatagtgaggagctggacatccaggacctcaagaagttggtgaaagaagccttgaaagaaagtcagctgcctacagtcatggattttcgaaagttctccagaaactatcagctttataagagcgtttctctgccgagcttagaccccgcatctgccaagatcgaaggcaatttaatttttgaccctaataattatttacctaaggaaagtatgctcaagactaccctcaccgcatttgggttcgcatccgcagatttaattgagattggccttgagggcaagggcttcgaacccaccctagaggcgctattcggaaaacaggggttcttcccggattccgtcaataaggccctgtactgggtaaatgggcaagtacctgacggtgtgagtaaagtgttggtcgatcatttcgggtacaccaaggatgacaagcacgagcaagacatggtcaacggtatcatgctgtcagttgaaaaactaattaaggacttgaagagcaaagaggtcccagaagcaagagcctaccttcggatcctcggagaagaactgggatttgcctccttacacgaccttcagctgcttggcaagctgctacttatgggcgcccgcacattgcagggaataccacagatgatcggtgaagtaatcaggaaaggaagcaaaaatgacttcttcctccattacatctttatggagaacgccttcgagctacccactggagccggcctgcagttgcagattagtagctcgggggtcatcgctcctggagccaaggccggagtaaagctcgaagttgctaacatgcaagccgaattggtggccaagccatctgttagcgtagaattcgtcactaatatgggaatcatcatccccgacttcgcgcgatctggagttcaaatgaatacaaacttttttcacgaatccggtctcgaagctcatgtggctttaaaggccggtaagcttaaatttattatcccctcaccaaaaagacctgtcaagctgctgtccggggggaacaccctgcatttggtaagcaccacaaaaacggaggtcatccctccgttgatcgaaaaccggcagtcgtggagtgtatgcaaacaggtgttccccggcctgaactactgtacctctggagcatatagcaacgcctcctcaacagacagcgcctcgtactatccactcacaggcgataccaggctggaattggagctgcggcccactggagaaatcgagcagtactcagtctccgctacctacgaactgcagcgtgaagatcgagccttagtagataccttaaagtttgtgacccaggccgaaggcgctaagcaaactgaggcgacgatgacattcaaatacaataggcaaagcatgactctgtcaagtgaggtccagatccccgacttcgatgtcgacctgggtacgatccttcgagtaaatgacgagtctactgagggaaaaacatcttacaggctcacactggacatacagaataaaaaaattaccgaggttgcattaatggggcacctctcttgcgacactaaggaggagcgaaaaattaagggtgtcatctccataccccgcctccaggctgaggcccggtccgaaatcctggcccattggtcccccgccaaactgctgttacagatggattcatctgctacagcctacggcagtactgtttccaagagagtggcttggcattacgatgaagaaaagatcgaattcgagtggaatactggtaccaacgtggatactaagaagatgacatccaatttcccagtcgacctaagcgactaccccaagagtctgcacatgtatgctaaccggctgctggatcaccgtgtccctcaaacagatatgaccttccgccacgttgggagtaagcttatcgtcgccatgtcaagctggctgcagaaggcctctggcagcctgccctacacccagaccctacaggatcacctgaacagcttgaaagagttcaatctgcagaacatgggattacccgactttcacatcccagagaacctgtttttaaaaagtgatggacgggtgaagtacaccctgaacaaaaactctttaaagatcgaaatcccactgccttttggcggcaagagcagccgcgatctaaagatgttggaaaccgtgcggactcccgcattgcacttcaagtctgtcgggttccacttaccttcaagggaattccaagttcccacattcacaatccccaagctgtaccaacttcaggtgccattactaggggtgctggacctgagcaccaacgtgtacagcaatctttacaactggagcgcatcatactctgggggtaacacttctactgaccacttcagcttaagggccagataccacatgaaagccgattctgtcgtcgatttgctgtcctacaatgtacagggctctggtgagaccacttatgatcacaagaatactttcactctgtcatacgacggttcacttagacataagttcctagattccaacatcaagttcagccatgtcgagaagctcgggaataacccagtttccaagggactgcttattttcgacgcctcatctagctggggccctcagatgtcggcctccgttcacctggatagcaagaagaagcagcacttattcgtaaaggaggtcaaaattgatggccagttcagagtcagctcgttttacgcaaagggaacctatgggctgtcatgccagcgcgatcccaacaccggccggctcaacggggagagtaatttaagatttaattcttcttacctccagggtaccaatcagatcacaggaagatacgaggacggaactctaagtttgactagcacctccgacctgcaaagcgggatcataaagaatacagcaagtctgaagtacgaaaactacgaactcacgttgaagtcagacaccaacgggaagtataagaacttcgccaccagcaataaaatggacatgaccttcagcaaacagaacgcattgttacgatccgagtatcaggccgactatgagtcattgagatttttttccctgttgagcggctcactgaattctcatggccttgaattaaacgccgacatcctgggcaccgataagatcaactctggtgcacacaaagcaacactccggatagggcaggacgggataagcacttctgctaccactaatttgaaatgtagtctcctggtattggaaaatgagttgaatgccgaactcgggctctcaggtgccagcatgaagctgaccaccaacggcaggttccgagagcacaatgctaaattttccctcgatggcaaggcagctctgacagagttgagcctgggcagtgcatatcaagctatgatcctcggggtcgactctaaaaacatcttcaattttaaggtaagccaggaagggctgaagctgtccaacgacatgatgggaagctacgccgaaatgaaatttgaccatacaaattctctgaacatcgccggactgtccctcgatttctcctctaaactggataatatctacagcagtgacaaattttacaagcagacagtgaatctacagcttcaaccttacagcctcgttactacgttgaatagcgatttaaagtacaatgcccttgatctgactaataatggaaaactgcggttggaacccctgaaattgcacgtcgcagggaacctgaagggcgcgtaccagaataacgagatcaaacatatatacgccatctcctcagccgccttgagcgccagctacaaggccgacaccgtggccaaggtgcagggagtggagttctctcatagactgaacaccgatattgctggcctggcctctgctattgacatgtcaactaactataattcagatagtctgcacttcagcaacgtgtttcgctccgtgatggctcctttcacgatgaccattgacgctcacacgaacggcaacggtaagctagcactgtggggggagcatacaggccagctatatagcaagttcctgcttaaagctgagcctctcgccttcacgttttctcacgactacaagggttccacatcacaccacttggtctcacgcaaatcaatctccgctgctctggaacacaaggtgtctgccttgttgaccccggcagagcaaaccggcacttggaaactgaagacccagtttaacaacaatgaatactcccaggatttagatgcgtataacaccaaggacaagatcggtgtagagctgaccggtcgtacactcgcagatctgactctcctggattcccccattaaagttcctctcctgttaagcgaaccaattaatattattgacgctctggagatgcgggatgccgttgaaaagccgcaggaatttacaatagtagcttttgtcaaatacgacaagaatcaggacgtgcactctatcaacctgcccttcttcgaaacacttcaagagtatttcgaacggaatagacaaacgattatcgtagtcttagagaacgtgcaacgtaacttgaagcacataaacattgatcagtttgttaggaagtatagggccgcgctgggaaaactcccgcaacaggccaacgattatctgaactcctttaattgggagcgccaagtctctcatgcgaaagaaaagctcaccgcactcaccaaaaagtaccgcatcaccgagaacgacatccagatcgccttagacgatgcaaagatcaacttcaacgagaagctttcccagctccagacatatatgatccagtttgaccagtacattaaggatagttacgatttacacgacctcaagatcgccattgccaatatcatcgacgaaatcatcgaaaaactgaagtctctggatgaacattatcacattagagtcaatctggttaagaccatccacgacctacacctgtttatagaaaatatagacttcaataaaagcggctctagcaccgccagctggatacagaatgtagataccaagtaccaaatccggattcagatccaagagaagctgcagcaactcaagagacacatccagaacattgatatacagcatttggcgggcaaattgaaacagcatatcgaagccatcgacgttcgggtactgctggaccaactgggcacaacaatctctttcgagaggatcaatgatatactggagcatgtcaaacattttgtgattaatctgatcggcgattttgaggtcgctgagaagattaacgctttcagggctaaggtgcacgaattgattgaacggtatgaggtggaccagcagatccaggtgctaatggacaaactcgtggagttggcacaccagtacaagctgaaggaaaccattcaaaagttaagcaatgtgcttcagcaagtgaaaattaaagactatttcgaaaaactggtgggttttatcgatgacgctgtgaagaaacttaacgagctgtccttcaaaacttttatcgaagatgtcaacaagtttctagatatgttgataaagaagctcaagtccttcgattatcatcagttcgttgatgagactaacgataaaatccgtgaggtaacacaaagactcaatggggagatccaggctctggaacttccacaaaaggccgaagcattgaaactgtttctggaagaaactaaggctaccgtggcagtatatttagagagtttgcaggacactaaaattaccctaataataaattggctgcaagaggcactgtcaagcgcttctcttgcgcacatgaaagccaaatttcgggagacactagaagacacccgggatcgtatgtaccagatggacattcagcaggaattgcagcggtacctcagtctggtaggacaggtctatagcactctggtgacgtacatttcagattggtggactctggccgcaaagaacttaactgattttgcggagcagtactcgatacaggactgggcaaagagaatgaaggctctggtcgagcagggctttacagttccagagataaaaactattctgggaacgatgccagcgttcgaagtttccttgcaggcccttcagaaagcaactttccagacacccgatttcattgttcctctgaccgaccttcgcatcccttccgtccagattaactttaaggacctaaagaatatcaagattcctagccggttcagcactcccgagtttaccatcttgaatacattccatatcccttcattcactatcgattttgttgagatgaaggtcaaaatcattcgcaccatcgaccagatgttgaactcagaattacagtggccagtgcctgacatctacctgcgtgacctcaaggtagaggatatccccctcgctcgtatcacactgcccgattttaggctgccagagatcgccattccagaattcatcattcccactctcaacctaaacgactttcaagtccccgacctgcacatcccggaatttcagcttccccacatctcacataccattgaggtaccaaccttcggtaagctgtactccatactgaagatacaatcccccctgttcactcttgacgccaatgccgatattggcaacgggacaacttcagcgaatgaggcgggaatcgcagcctccataacggcaaaaggagaaagcaagctggaagtgcttaacttcgactttcaggcaaacgcccagctctctaacccaaaaatcaacccattagccctgaaagaaagcgtcaaattttcatcaaaatatctgcggaccgaacatggcagtgagatgctgtttttcggtaacgctatagaaggcaagtcgaacactgtcgcctcactccacacagaaaagaacactctagagttgtccaacggagtgatcgtaaagatcaataatcagctgacccttgactctaacacaaagtattttcacaagctaaacatccctaaactcgacttctcctctcaggcagatctgaggaacgagatcaagactttgcttaaagccggacacatcgcctggacttctagcgggaaaggctcatggaaatgggcctgcccccgcttctccgacgaagggacccacgagtctcagatctcattcactatcgaaggaccactgaccagcttcggtctctccaacaagattaattctaaacacctccgtgtcaaccaaaaccttgtgtatgagtcagggtctctcaacttcagtaagctggagattcagtctcaggttgatagccagcatgtgggacactccgtgttgacggccaagggtatggctctgttcggcgaggggaaggccgagtttacaggtagacacgatgcccacctgaatgggaaggtgataggtaccctgaagaactctttgttcttctccgcccagccattcgaaattacggcatccaccaataacgaaggcaatctcaaggtacggtttcctttaaggctgactggaaagatcgattttcttaataattacgcactctttctgagccctagcgcccaacaggcgtcctggcaggtgagcgctcggttcaaccaatacaagtacaaccagaacttcagcgcagggaacaatgaaaatatcatggaagcccacgtaggtattaatggggaagcaaacctagattttcttaatatccctctgaccattccagagatgagacttccctacaccatcattactacgccacccctgaaagactttagcctgtgggagaagactgggttgaaggagttcctgaagacaaccaagcagtccttcgatctcagtgtcaaagcacaatataagaagaataagcaccgccactccatcaccaatccgctggccgtgctttgtgagttcatttcacagagcattaagagcttcgaccggcatttcgagaaaaacaggaataatgctctggacttcgtaactaaaagttataacgaaaccaaaattaagtttgacaagtataaggctgagaaaagccatgatgagctccccagaaccttccagattcccggatatactgtcccagtcgtcaacgtcgaggtgtccccttttaccatcgaaatgtccgcatttggctacgtgtttcctaaggcagtgtccatgccatccttttccatcttaggatcggacgtcagagtgccaagttataccctcatcctgccttccttggagctgcccgtgctccacgtcccacggaacctgaagctcagcctgcccgacttcaaggagctgtgtacaatctctcatattttcatcccggccatggggaatataacctatgatttttccttcaagtcatccgtgatcactctcaatactaacgccgaactgtttaatcagagtgatatcgtagcccaccttcttagcagttccagctcagttatagacgctctgcagtataagttagaggggacaactcggctgacgcgaaagcgcgggttaaaacttgcgacagccctcagtctgagcaataagtttgtggaggggtctcacaacagcaccgtttctctcaccaccaaaaacatggaggtgagcgttgctaccactacaaaggcacaaatccccatactgaggatgaactttaagcaggagctgaatggcaatacaaaaagtaaacctacggtgagttcatcaatggagttcaagtacgacttcaacagctccatgttatactcaactgcgaagggtgccgttgatcacaagttgtcactagaaagccttacttcctacttctcaatcgaatcttccactaagggagacgttaaaggctcagtcctgtcaagggaatatagcggcaccatagcctccgaagcaaatacatacctgaattccaagtctaccagatcttctgtcaagttacagggaacatccaaaatagatgacatttggaacctagaggttaaggagaatttcgccggtgaagcaaccctgcaaagaatttattctctctgggagcatagtactaagaatcatcttcaattggagggactgttcttcaccaacggggagcatacgtcgaaagcaacactggagctctccccatggcagatgtccgctttagtgcaggtgcatgcatcgcagccatcgtccttccatgacttccctgacctggggcaagaagtggccttgaatgccaacacaaagaatcagaaaattcggtggaagaacgaggtcagaatccattccggctcattccagtctcaagtggagttgtcaaacgatcaggaaaaagctcacctcgatatcgccgggagtttagagggacacctccgcttcctgaaaaatatcatcctaccagtatatgacaagagcctgtgggactttcttaagctagacgtgacgacctctatagggaggcggcagcatcttagagtgtcaacggctttcgtatacaccaaaaatccaaatggctattcgttctctatcccggtcaaggttctagcggataaattcatcatacccggcctgaagctgaatgatctgaattctgtcctggtaatgcccaccttccatgttccctttaccgatctgcaggtcccctcctgtaaactcgacttcagagagatccagatctataaaaaactaaggacatcctcttttgctctgaaccttccgactctgccggaagtgaaattccccgaggttgacgtgctgacaaaatattctcaacctgaggacagcctgattcccttttttgagatcactgtgcccgaatctcagcttacagtctcccagtttacccttcctaagagtgtgagtgatgggatagcagccctagacctcaacgctgtcgctaacaaaattgctgattttgaactccccaccatcattgtaccagagcaaactattgagatcccctccattaagtttagcgtgccagccggcattgtcattccatctttccaagcgttaacggctcgttttgaagtggacagtccagtctacaacgccacgtggagcgcaagcctcaaaaacaaggctgattatgtggagacggttctagattctacatgttcctccacagtccagttcttagaatacgaactgaatgtgctcggcacacacaagatagaagacggtacacttgcctcaaagactaaaggaaccttcgcccaccgggacttctctgccgaatacgaagaagacggcaaatacgagggtttgcaggagtgggaaggcaaggctcacctgaatattaagtccccggcattcacagacctgcacttgcgctaccaaaaagataaaaagggcatctccacatctgcagcgagtcctgctgtgggcaccgtcggtatggatatggacgaagacgatgatttctcaaagtggaacttttactattccccacagagtagcccagacaagaaactgacaatctttaagactgaactgagggtgagagagtcagacgaagagacacagatcaaggtcaattgggaggaggaagctgcaagcgggctgcttacaagcctaaaggacaatgtacccaaggctacaggcgtactatatgattatgtcaataagtatcactgggagcacaccggattgaccctgcgagaggtttcttccaaactcagacgaaatctgcagaacaatgcggagtgggtgtaccagggcgccatcaggcagatcgacgatatagacgttaggtttcagaaagccgctagcggcacaacgggcacttaccaggagtggaaggacaaagctcaaaacctgtatcaagagctactgacccaggagggccaagcttcgtttcagggcctgaaggataatgtctttgacggattagtgagggtgacgcaggagttccacatgaaggtgaagcacctaatcgattccctgatagattttttaaatttccctcgttttcagttccctgggaagcctggcatttatacaagagaggagctctgtacaatgttcatccgcgaggtcggaactgtcctcagccaggtgtacagtaaagttcacaacgggagtgagattctttttagttactttcaagaccttgtgatcacactcccgttcgaactgaggaagcacaaactcatagacgtaattagtatgtaccgcgagctccttaaggatctgtctaaggaggcgcaggaggtgttcaaagccatacagagcctgaagactacagaggtcctccggaacctgcaggacctccttcagttcatctttcagctgatcgaagataacattaagcagttaaaggagatgaagttcacctacctgattaactatatacaggatgaaatcaacacaatcttcagtgactacatcccttatgtgttcaagttacttaaagaaaacttgtgcctgaacctgcacaagttcaatgaatttattcagaatgaactgcaggaagcctctcaggagttacagcagatccaccagtacattatggccctcagagaagagtattttgacccgtctattgttggctggaccgttaagtactacgaacttgaggagaagatcgtgtcgctgattaagaacctactagtggcgctgaaagattttcactctgaatacattgtgtctgcttccaatttcacctcacagctcagctcgcaggtcgagcaatttctgcatcgaaatatccaagagtacttgtcgatcttaactgatcctgacggtaaaggtaaggagaagatcgccgagctgtctgccactgcacaggagatcataaaatcccaagccatcgcaaccaagaagattatttcagattatcatcagcaattcaggtacaagctgcaggatttttctgaccaattgtcagactactatgaaaaatttatcgccgagtccaagagattgatcgacctgagtattcagaattaccataccttcctgatttacataaccgaattgctaaaaaagctccaatccactacggtcatgaacccctacatgaagctcgctccaggagagctgaccattattctttag

SEQ ID NO: 8286 - DNA, 13692 bp, Artificial Sequence
  derived and/or modified sequence
atggatcctccacgtcccgcacttctcgctctgctcgctctgcctgccttactcctcctcctcctggctggcgcacgcgcagaggaggagatgttagagaacgtatctttggtttgccctaaggacgcaacacgctttaagcatttgaggaaatatacatataactatgaggccgaatcgagctctggtgtgccgggaacagccgactcaagatctgctactcggatcaactgcaaggtggagctggaagtgccccagttgtgttcatttattttgaaaacatcgcagtgcacgctaaaggaggtttatggtttcaacccagagggcaaggcactcctgaagaagacgaaaaacagcgaggagttcgcggctgccatgtctcggtacgaactgaaacttgcaatacctgagggaaaacaggtgttcctttacccggagaaggatgagccaacatatatcctgaatatcaaaagagggatcatttccgctttactagtcccgccagaaactgaagaagccaaacaagtcctgtttttggacactgtgtacggaaactgctcaacacacttcactgtgaagaccaggaagggaaacgtagccactgaaatatccaccgaaagggacttgggccagtgcgacaggttcaaacctattagaacaggaatatcacccctggccctcatcaagggcatgaccagaccactgagcacgctgatctcgtctagccagtcctgccagtacactcttgatgctaaaaggaagcacgtcgctgaagctatctgcaaagaacagcacctgttcctgccttttagctacaaaaacaagtacggtatggtggcacaggtgacccaaaccctcaaactggaggatacccctaagatcaattcaaggttcttcggtgagggcacgaagaagatgggtctcgcttttgagagtacgaagagcacctccccgccaaaacaagccgaggcagtactgaaaactctccaggagctgaagaagctgaccatctctgagcaaaacattcagagggccaatttattcaacaaactggtgactgagctccgcggtttatcagacgaggcggtgacatctctgctgcctcaactcatcgaagtgagtagccctatcaccctccaggcattagtgcagtgcggccaaccccaatgcagcacccatatcctccaatggcttaagagagtgcacgcaaatcccttactgattgatgtggtaacctatttagttgccttgatccccgaacccagtgctcagcagctccgagagatctttaatatggccagagatcagaggtctcgggcaacactgtatgctctgtcacatgcggtgaacaactaccacaagacgaacccaaccggcacgcaagagcttctcgacattgccaactatttaatggagcagattcaggatgattgtacgggcgatgaggactacacatatctaattctgagagtaattgggaatatgggccagacgatggaacaacttactcctgaactcaaatcatccattcttaagtgcgtacagtccaccaagccatcactaatgatccagaaggccgctattcaagcattgcgcaaaatggagcctaaggacaaggaccaggaggtcttgttgcaaaccttcttagatgacgcttcgcccggtgacaaaagactggccgcatacctgatgctcatgcgcagcccctcacaggcagacataaacaaaatcgttcaaattttgccatgggagcagaacgaacaggtgaagaactttgttgcaagccatatcgctaacattctgaacagcgaggagctggatatccaagacttaaaaaagctggtgaaggaagccctgaaggaatcgcaactgcctacagtgatggactttcgcaaattttctagaaactaccagctgtacaaatccgtgtcccttccctctttagaccctgcttccgccaagattgaggggaacctgatcttcgatcccaacaattacctgccaaaggaatccatgctgaagaccacgctcaccgcctttgggttcgccagcgctgatctgatcgagatcgggctggagggcaagggtttcgagccaaccctggaagctctctttgggaagcaggggttttttccagattctgtgaacaaggctctgtactgggtcaatgggcaagtgcctgacggagtgtccaaagttttggtagaccacttcggctatactaaggatgacaaacatgagcaggatatggtcaatggcatcatgctttcagtggaaaagctcatcaaggatttgaagtccaaagaggtacccgaagcacgggcttatctcagaatcctcggcgaagagctcggctttgcttccctccacgacctgcagctgttggggaagttattacttatgggggctcgcacgctgcagggaatcccacagatgatcggggaggtcattaggaagggctctaagaacgatttctttctgcactacatcttcatggagaacgcttttgagcttccaactggcgcagggttgcagctgcagatatcttcatccggagtgatagccccaggggcaaaggcgggtgtaaagttggaagtagctaatatgcaagctgaactggtggccaagcccagtgtgagtgtcgagttcgtaacaaacatgggcatcattattccagattttgccagaagcggtgtccagatgaacactaacttctttcacgagtctggccttgaggctcacgtggctcttaaggcaggaaagttaaagttcattattccatcaccaaaacgcccagtaaaactgctgtcagggggaaatacactgcacctggtctccactaccaagactgaggtgatccccccactgatcgagaaccggcagtcatggtcggtgtgtaagcaggtgtttcctggtcttaactattgcacatcaggggcttactcaaatgcctcttccaccgatagtgccagttattatccactgaccggagatactaggctggagctggagttgcgacccacaggtgagatcgaacaatattccgtgtccgctacatacgaactgcagagagaggacagggccctggtggatacacttaagtttgtgacacaggccgagggagcaaagcagacagaggctacaatgacatttaaatacaataggcagagtatgactctcagctctgaagtacagattccagatttcgatgtcgacctcggaacaatcctccgggtcaatgatgagtccaccgagggcaaaacctcctaccggctgacgttggatatccagaacaaaaaaattacagaggtggcactgatgggacacctcagctgtgacacaaaagaggagagaaagatcaaaggagttatatcaatccctcggctacaggcagaagcccgttctgagattctggctcactggtcgccggcaaaactgcttctgcagatggacagctctgctacagcttacggcagcaccgtgagtaagcgggtcgcttggcattacgacgaggagaaaatcgaatttgaatggaacacgggtaccaatgtcgatacgaagaagatgacctcaaatttccctgtggatctgtcagactaccccaagtcactgcacatgtatgccaatcggttactcgatcacagagtgcctcagactgatatgacttttagacacgttgggagcaagctcattgtggcaatgtcgagctggcttcagaaagcttcaggcagcctgccttatacacagacactgcaggaccacctcaattctctcaaagagtttaacctgcagaacatgggcctcccagattttcatatccccgagaatctcttcctgaaaagcgacggtcgggtaaaatatacattaaacaaaaactccctgaaaatcgagataccactgcctttcggcggaaaaagctctcgcgacctcaagatgctggagacagtgcgcacaccagccctgcactttaagagcgtaggttttcacctcccatctcgcgagttccaggtgccgacattcaccattccgaagctgtaccagttacaggtgcccctcctgggagtgctggatctctcaaccaacgtgtatagcaatttgtacaactggagcgcttcttatagcggagggaacacatccacagaccacttctctctccgcgctcgataccacatgaaagccgattcggtggtggatctgctgtcttacaacgtgcagggatcaggcgagaccacctatgaccacaagaatacgtttaccctaagttatgatggatcactccgccacaagtttctggattctaacatcaaatttagccatgtagagaagttgggcaataatcccgtgtcaaagggactacttatttttgacgcctccagttcctggggtccccagatgagcgcaagtgttcacctggattcaaagaagaaacagcacctcttcgtgaaagaggtcaaaattgacggccagtttcgtgtgagtagtttctacgcgaaaggaacctacgggttaagctgtcagcgggatccgaacacgggaagattaaatggagagagcaatctgcgattcaactcctcatacctgcagggcacaaaccagattaccgggagatatgaggacggcaccctctccctgacatctacctcggacctgcagagtggcataattaaaaacactgcctcactgaaatacgaaaactatgaacttacgttgaaaagcgacacaaatgggaaatataaaaactttgctaccagcaacaaaatggacatgacgttttctaagcagaacgccctactgcgctccgaataccaggccgattatgagtccctacgattcttctccctgctttcgggaagtctgaatagtcacggacttgagctcaatgctgacatcctgggtacggacaagatcaattccggtgcccacaaagctaccctgcgcatcgggcaagacggtatttccacaagcgccactacaaatctgaaatgcagcttgcttgtactggaaaatgagttgaacgcggaactgggcttatccggggcttcgatgaaactaactactaacggcagattcagggaacacaatgccaagttctctctcgatggaaaggccgcactgactgaactgtcgctgggatccgcttaccaggctatgatcctcggggtagactctaagaatatcttcaattttaaggtgtctcaggaaggattgaagctgtcaaacgacatgatgggctcctacgcagaaatgaagttcgatcacacaaattccctgaatatcgcaggcctgtctttggacttctcatctaaactggataacatctacagttccgataagttctataaacaaaccgtgaatttacagctccagccttatagtctggtgaccacattaaactcagatctcaagtacaacgcgctagatctcacaaataacgggaagctgcgcttggagcccctgaaactgcacgtggccggaaacctgaaaggtgcgtaccagaataacgagataaagcatatctatgccatcagctccgcagctctctccgcctcatataaggccgacacggtggccaaggtgcaaggcgttgagttttctcacaggctcaacaccgacattgcaggactggccagtgctatcgatatgtcgacaaattacaattcagatagtttacacttttctaatgtgtttcgcagcgttatggctcctttcactatgacaatcgacgcacacacaaacgggaatggaaaactggctctctggggagaacacacaggccagctgtacagtaagttcctcctgaaggccgagccactggcttttaccttcagccacgattacaagggatccacctcccatcacctcgttagtagaaagtccataagcgcggctcttgagcataaggtctccgcactgctgactcctgctgaacagacagggacatggaaactcaagacccagttcaataataatgagtatagtcaggacctggatgcctacaataccaaggataagatcggagtggagctcaccggccgtaccctggccgaccttaccctgttagacagccctatcaaagtcccactacttctgagcgaacctatcaacatcattgatgccctggaaatgagagatgcagttgaaaaaccacaggagtttaccatagtcgctttcgtgaaatatgataaaaaccaggatgttcacagtatcaatctcccattttttgaaacgctgcaggaatacttcgaacgaaaccgtcaaacgattattgttgtcctggagaacgtccaaaggaatctcaagcacatcaacatcgaccagtttgtccggaaatacagagccgctttaggaaaactgcctcagcaggccaatgactacctgaactcctttaactgggagcggcaggttagtcacgccaaggagaaactgacggctctgacaaaaaagtaccggattacagaaaacgacatccagatcgctcttgacgacgcaaaaatcaattttaatgagaaactctctcagctgcagacttacatgatccaattcgatcagtatatcaaagattcttacgatctccatgatctcaagatcgcgatcgccaatattatcgacgaaattatagaaaagctgaagtcactagatgagcattatcacattcgagtgaacctggtcaaaaccatccacgatcttcatctgtttatagaaaacatagatttcaataaatctggatctagcaccgcgagttggatccagaacgtcgacactaagtatcagatccggatccaaattcaggagaagttgcagcagctcaagaggcacatccagaatatcgatatacagcacctggccggaaaattgaaacagcacattgaggccattgacgtgagagtgctcctagaccagctcggtaccactatctctttcgagcgtattaatgatatcctggagcatgttaagcatttcgtgatcaacctgataggcgacttcgaggttgctgaaaagattaatgcttttcgcgctaaggttcacgagctcatcgaaaggtatgaggtcgatcaacagatccaggtgctgatggataagttggtggagcttgcccaccagtataaactgaaggagaccatacagaagctatctaatgtgcttcagcaggtgaaaatcaaagactactttgaaaagctggtaggtttcatagatgatgctgttaaaaagctgaacgagttaagcttcaaaacatttatcgaggacgttaacaaattcttagatatgctcatcaaaaaactgaaatccttcgattatcaccagttcgtcgacgaaactaacgacaagattagggaggtcacacagagattgaatggcgagatccaggccctcgaattgccccagaaagccgaggcactgaaactgttcctcgaagagactaaagcaactgtggctgtgtacctcgaatcgcttcaggacaccaagatcacactgattatcaattggttgcaagaagccttgagttctgccagtctggcccatatgaaagccaaatttagagaaacacttgaagatacccgtgacagaatgtatcagatggatatccagcaagaactccagagatatctgagccttgtgggccaggtttactctacactcgtcacttacatctcagattggtggaccctagcggctaaaaatcttacggacttcgctgaacagtatagcattcaagattgggccaaacgtatgaaagcactcgttgaacaagggttcacagtgcccgagatcaagacgatcctgggcacgatgccagccttcgaggtttctcttcaagctctacagaaggcaacctttcagacacctgactttatcgtcccactaacagatctgcgtattccatcagtgcaaatcaactttaaagaccttaagaatatcaagattccctccagattctccaccccagaatttacaattcttaatacgttccacatcccctctttcacaattgactttgtggaaatgaaagtcaagatcatccggaccattgatcagatgctgaactctgaactccagtggccggtcccagatatatacctccgtgacctaaaagtggaggacattccactagcacgcataacacttccggatttcaggctccccgagatcgctatcccagaatttatcatccctacgcttaacctgaatgacttccaggtgccggatctgcacattccggagtttcagcttcctcatattagccataccatcgaggtacctactttcggcaagctatacagcatcctgaagattcaaagccctctgtttaccctggacgccaatgccgatatcggaaacggcactacttccgcaaatgaggccggtatagcagctagcattactgcgaaaggagagtccaaattagaagtcctaaacttcgacttccaggccaatgctcagctatctaatccgaagataaaccccctcgcgcttaaagaaagcgtcaagtttagttctaaatacctgcgcacagagcacggaagtgagatgctgttttttgggaacgccattgaggggaagtcgaacacggtggctagcctccacactgagaagaataccctggaactttccaacggcgtgatagtcaaaataaataaccagctgactcttgacagtaacacaaaatatttccataaactcaacatccccaagctggacttctcatctcaagcagatctgcgtaacgaaatcaaaactctgctgaaggcaggccacatcgcttggacatcctcaggcaaaggtagctggaagtgggcatgcccccgttttagtgacgaaggcacccacgaaagtcagatatcctttaccattgagggaccattaacctcttttggcctgagcaacaagattaactcaaagcatcttagggtgaaccagaatttggtgtacgaaagtgggagccttaatttttctaagctagagatacagtcacaggtcgattctcaacatgtcggccattccgtgctgacagccaaaggaatggcactttttggagagggaaaagctgagttcaccggcagacatgatgctcatctaaacggaaaggtgatcggcactttgaaaaacagcctcttcttctctgcacagcccttcgagatcacagcaagtaccaataacgaggggaatctgaaggtgcggttcccacttcgactgacaggtaaaatcgattttttgaataactacgccctgtttcttagccccagcgcccagcaagcctcttggcaggtgtctgcccgattcaatcagtacaagtacaaccaaaatttctccgccggaaacaacgagaacatcatggaggctcatgtaggtatcaatggcgaggcaaacttggatttcctcaatattccactaaccatccccgagatgcgactgccatacacaattatcacaaccccacctctgaaagattttagcttgtgggagaagacaggtttgaaggagtttctaaaaaccacgaaacaaagcttcgatctctcggtgaaagcacaatataaaaagaacaaacaccgacattccattacaaaccccctggctgtcctttgtgaattcatttctcagtccatcaaaagtttcgaccgacacttcgaaaagaatcgcaacaacgctctcgattttgttactaaatcgtataacgagacgaaaattaaattcgataagtacaaggcagagaagtctcacgatgagcttcctcggactttccagatcccaggctataccgtgcctgttgttaatgtcgaagtgtctccttttactatagaaatgtccgctttcggctatgtcttccccaaggcagtttccatgccttcgtttagcatattaggatccgatgtgcgcgtgcccagctatacactgatcctgcccagcttggagttgcccgtgctgcatgttccacgcaacctgaagctcagcctgccggacttcaaggaattgtgtactatttcgcatatcttcattcctgcaatgggcaatataacctacgacttcagtttcaaaagcagtgttatcactctgaacaccaatgccgagctgttcaaccagtcagatattgttgctcacctgttaagttcctcgtcatccgtgattgacgccctacagtataaactcgaaggtacgactcgattgactcgaaagcgcggattgaagcttgccacggccctgtctctgtcaaacaagttcgtggagggctcacacaattcaacagtgagtctgacaaccaagaacatggaggtgtcagtggctaccacaacaaaggcccagattccaatcttgagaatgaacttcaagcaggaacttaacggaaatacaaagagtaaacccacggtaagctctagtatggaattcaagtatgactttaatagcagcatgctttactcaacagccaaaggagccgtggaccataaattgtctttagaaagccttacctcttacttcagtatcgagtcctctacaaagggagacgttaaggggtcagttctgtcgcgggagtacagcggcacaatcgccagcgaggctaacacctatcttaacagtaaatcaactcgcagctctgtgaaactgcagggcacctctaaaatcgacgatatctggaacctggaggttaaagagaatttcgctggcgaagccacactccagaggatatactcattgtgggaacactctacaaaaaaccatctgcagcttgaagggttgttctttacaaacggcgagcatacatccaaggccactcttgaactatcaccctggcaaatgtccgctttggtacaggtgcatgctagccagccatcttcgtttcacgactttccagatttaggccaagaggttgccctcaacgccaataccaagaatcagaagatccggtggaagaatgaagtgaggatacactccggatcttttcaatcacaggttgagctgtccaatgaccaagaaaaggcacacctggacattgctggcagtctggaggggcatctaaggttcttgaaaaacataattctaccagtctatgacaaatccctgtgggacttcctaaagttggatgtcactacttctataggcaggcggcaacatctgagggtcagcaccgcgttcgtgtacaccaagaacccaaacggctacagcttcagtatccctgtcaaggtacttgccgacaaatttatcatccccggactgaagctgaatgacctgaattcagtcctcgtcatgccgacctttcacgtgcccttcacagatctgcaggtgcccagttgcaaactggattttagggagattcagatttataaaaagctgaggacgtcctcttttgcccttaatttgcctacgctgcctgaagtcaaatttcctgaggtggacgtactcaccaagtactcccagccagaagattctctgatcccatttttcgagattaccgtcccggagtctcaattgaccgtgtctcagtttactcttccaaaatccgtgagtgatgggatagccgcactggatctcaatgcagtcgccaacaagattgccgacttcgagctaccgactatcatcgtccccgaacagacaatcgaaatcccatcgatcaagtttagcgtacctgcgggtatcgtgattccctcctttcaagctctaacagctcggtttgaggtagattctcccgtgtataacgctacctggagtgcctccttaaagaataaagctgactacgtggagaccgtcttggactccacctgctcatcgaccgtccagttcctcgagtatgaactgaacgtattgggtacccacaaaatcgaagatggcactctcgcatctaaaactaaagggaccttcgctcatcgcgatttttcagcagaatatgaagaagatggcaaatacgaagggctgcaggagtgggaaggcaaggcgcacctgaatattaaaagccccgcattcactgatctgcatctacgctaccagaaggacaaaaagggcatcagcacctcagctgctagtccagccgtcggcactgtcgggatggatatggacgaagatgacgacttctccaaatggaatttttattactccccacagagctccccggataagaagctcaccatattcaaaaccgagcttagagtgcgggagtcggatgaagaaacccagatcaaagtgaattgggaagaagaagccgcttcgggcctcctgacatccctgaaggataacgtcccaaaggccacaggggtactgtacgattatgtgaataagtaccattgggagcatacgggcctgacgctcagggaagtttccagtaaactcagaaggaatctgcagaacaacgcggagtgggtttatcagggtgcaattaggcaaatcgacgatatcgacgttagatttcagaaggcagcctccggcactactggaacataccaggagtggaaagataaagcccaaaatctgtaccaggaattactgacacaggagggccaggcatcttttcagggtttaaaagataatgtgttcgatgggcttgtgcgtgtgacccaggaatttcacatgaaggtgaagcacttaattgactcattaattgactttctgaacttcccgaggtttcaatttccgggtaagccaggaatttacaccagagaagaactgtgcactatgttcatcagagaggtgggaacggtgctctctcaggtctatagtaaggtgcacaacggttctgaaatactcttcagttactttcaggaccttgtgataaccctgccgttcgagttacgcaagcataagttaattgatgtgatctctatgtacagggagctcctgaaggacttatcaaaggaggcacaggaggttttcaaggccatccagagcctcaagacaaccgaggtgttgcggaacttgcaggacctgctccaatttatattccaacttatcgaagataacatcaagcagttaaaggaaatgaaattcacgtaccttattaattatatccaagatgagatcaacactatctttagcgactacataccttacgtcttcaaactacttaaggagaatctttgtttgaacttgcacaagtttaacgaatttatacagaatgaactccaagaggccagccaagagctccaacaaatccaccagtacattatggccctgcgggaagaatattttgatccttcaattgttggatggaccgtgaagtactacgaactagaagaaaagatcgtgagcttaattaaaaatctgctggtcgccctgaaggactttcactctgagtatattgtgtcggcgtctaacttcacttcacagctgtccagtcaggtggaacaattcctccatcggaatatccaggaatacctgagcattctgacagatcctgatggaaaaggaaaggaaaaaatcgccgagttaagcgcaaccgcccaggaaatcattaaatctcaggccattgccacaaaaaaaatcatttctgattaccatcagcaattccgctataaactgcaggatttctccgaccagctctctgactattatgagaagttcatcgcggaatccaaaagattaatcgatctgagcatccagaactaccatactttcctgatctacatcacagaattgcttaaaaaactgcagagcacaaccgtaatgaacccttacatgaaactggctccaggggagctcaccattatactttag

SEQ ID NO: 8287 - DNA, 13692 bp, Artificial Sequence
  derived and/or modified sequence
atggacccccccagacccgccctgctggccctgctggccctgcccgccctgctgctgctgctgctggccggcgccagagccgaggaggagatgctggagaacgtgagcctggtgtgccccaaggacgccaccagattcaagcacctgagaaagtacacctacaactacgaggccgagagcagcagcggcgtgcccggcaccgccgacagcagaagcgccaccagaatcaactgcaaggtggagctggaggtgccccagctgtgcagcttcatcctgaagaccagccagtgcaccctgaaggaggtgtacggcttcaaccccgagggcaaggccctgctgaagaagaccaagaacagcgaggagttcgccgccgccatgagcagatacgagctgaagctggccatccccgagggcaagcaggtgttcctgtaccccgagaaggacgagcccacctacatcctgaacatcaagagaggcatcatcagcgccctgctggtgccccccgagaccgaggaggccaagcaggtgctgttcctggacaccgtgtacggcaactgcagcacccacttcaccgtgaagaccagaaagggcaacgtggccaccgagatcagcaccgagagagacctgggccagtgcgacagattcaagcccatcagaaccggcatcagccccctggccctgatcaagggcatgaccagacccctgagcaccctgatcagcagcagccagagctgccagtacaccctggacgccaagagaaagcacgtggccgaggccatctgcaaggagcagcacctgttcctgcccttcagctacaagaacaagtacggcatggtggcccaggtgacccagaccctgaagctggaggacacccccaagatcaacagcagattcttcggcgagggcaccaagaagatgggcctggccttcgagagcaccaagagcaccagcccccccaagcaggccgaggccgtgctgaagaccctgcaggagctgaagaagctgaccatcagcgagcagaacatccagagagccaacctgttcaacaagctggtgaccgagctgagaggcctgagcgacgaggccgtgaccagcctgctgccccagctgatcgaggtgagcagccccatcaccctgcaggccctggtgcagtgcggccagccccagtgcagcacccacatcctgcagtggctgaagagagtgcacgccaaccccctgctgatcgacgtggtgacctacctggtggccctgatccccgagcccagcgcccagcagctgagagagatcttcaacatggccagagaccagagaagcagagccaccctgtacgccctgagccacgccgtgaacaactaccacaagaccaaccccaccggcacccaggagctgctggacatcgccaactacctgatggagcagatccaggacgactgcaccggcgacgaggactacacctacctgatcctgagagtgatcggcaacatgggccagaccatggagcagctgacccccgagctgaagagcagcatcctgaagtgcgtgcagagcaccaagcccagcctgatgatccagaaggccgccatccaggccctgagaaagatggagcccaaggacaaggaccaggaggtgctgctgcagaccttcctggacgacgccagccccggcgacaagagactggccgcctacctgatgctgatgagaagccccagccaggccgacatcaacaagatcgtgcagatcctgccctgggagcagaacgagcaggtgaagaacttcgtggccagccacatcgccaacatcctgaacagcgaggagctggacatccaggacctgaagaagctggtgaaggaggccctgaaggagagccagctgcccaccgtgatggacttcagaaagttcagcagaaactaccagctgtacaagagcgtgagcctgcccagcctggaccccgccagcgccaagatcgagggcaacctgatcttcgaccccaacaactacctgcccaaggagagcatgctgaagaccaccctgaccgccttcggcttcgccagcgccgacctgatcgagatcggcctggagggcaagggcttcgagcccaccctggaggccctgttcggcaagcagggcttcttccccgacagcgtgaacaaggccctgtactgggtgaacggccaggtgcccgacggcgtgagcaaggtgctggtggaccacttcggctacaccaaggacgacaagcacgagcaggacatggtgaacggcatcatgctgagcgtggagaagctgatcaaggacctgaagagcaaggaggtgcccgaggccagagcctacctgagaatcctgggcgaggagctgggcttcgccagcctgcacgacctgcagctgctgggcaagctgctgctgatgggcgccagaaccctgcagggcatcccccagatgatcggcgaggtgatcagaaagggcagcaagaacgacttcttcctgcactacatcttcatggagaacgccttcgagctgcccaccggcgccggcctgcagctgcagatcagcagcagcggcgtgatcgcccccggcgccaaggccggcgtgaagctggaggtggccaacatgcaggccgagctggtggccaagcccagcgtgagcgtggagttcgtgaccaacatgggcatcatcatccccgacttcgccagaagcggcgtgcagatgaacaccaacttcttccacgagagcggcctggaggcccacgtggccctgaaggccggcaagctgaagttcatcatccccagccccaagagacccgtgaagctgctgagcggcggcaacaccctgcacctggtgagcaccaccaagaccgaggtgatcccccccctgatcgagaacagacagagctggagcgtgtgcaagcaggtgttccccggcctgaactactgcaccagcggcgcctacagcaacgccagcagcaccgacagcgccagctactaccccctgaccggcgacaccagactggagctggagctgagacccaccggcgagatcgagcagtacagcgtgagcgccacctacgagctgcagagagaggacagagccctggtggacaccctgaagttcgtgacccaggccgagggcgccaagcagaccgaggccaccatgaccttcaagtacaacagacagagcatgaccctgagcagcgaggtgcagatccccgacttcgacgtggacctgggcaccatcctgagagtgaacgacgagagcaccgagggcaagaccagctacagactgaccctggacatccagaacaagaagatcaccgaggtggccctgatgggccacctgagctgcgacaccaaggaggagagaaagatcaagggcgtgatcagcatccccagactgcaggccgaggccagaagcgagatcctggcccactggagccccgccaagctgctgctgcagatggacagcagcgccaccgcctacggcagcaccgtgagcaagagagtggcctggcactacgacgaggagaagatcgagttcgagtggaacaccggcaccaacgtggacaccaagaagatgaccagcaacttccccgtggacctgagcgactaccccaagagcctgcacatgtacgccaacagactgctggaccacagagtgccccagaccgacatgaccttcagacacgtgggcagcaagctgatcgtggccatgagcagctggctgcagaaggccagcggcagcctgccctacacccagaccctgcaggaccacctgaacagcctgaaggagttcaacctgcagaacatgggcctgcccgacttccacatccccgagaacctgttcctgaagagcgacggcagagtgaagtacaccctgaacaagaacagcctgaagatcgagatccccctgcccttcggcggcaagagcagcagagacctgaagatgctggagaccgtgagaacccccgccctgcacttcaagagcgtgggcttccacctgcccagcagagagttccaggtgcccaccttcaccatccccaagctgtaccagctgcaggtgcccctgctgggcgtgctggacctgagcaccaacgtgtacagcaacctgtacaactggagcgccagctacagcggcggcaacaccagcaccgaccacttcagcctgagagccagataccacatgaaggccgacagcgtggtggacctgctgagctacaacgtgcagggcagcggcgagaccacctacgaccacaagaacaccttcaccctgagctacgacggcagcctgagacacaagttcctggacagcaacatcaagttcagccacgtggagaagctgggcaacaaccccgtgagcaagggcctgctgatcttcgacgccagcagcagctggggcccccagatgagcgccagcgtgcacctggacagcaagaagaagcagcacctgttcgtgaaggaggtgaagatcgacggccagttcagagtgagcagcttctacgccaagggcacctacggcctgagctgccagagagaccccaacaccggcagactgaacggcgagagcaacctgagattcaacagcagctacctgcagggcaccaaccagatcaccggcagatacgaggacggcaccctgagcctgaccagcaccagcgacctgcagagcggcatcatcaagaacaccgccagcctgaagtacgagaactacgagctgaccctgaagagcgacaccaacggcaagtacaagaacttcgccaccagcaacaagatggacatgaccttcagcaagcagaacgccctgctgagaagcgagtaccaggccgactacgagagcctgagattcttcagcctgctgagcggcagcctgaacagccacggcctggagctgaacgccgacatcctgggcaccgacaagatcaacagcggcgcccacaaggccaccctgagaatcggccaggacggcatcagcaccagcgccaccaccaacctgaagtgcagcctgctggtgctggagaacgagctgaacgccgagctgggcctgagcggcgccagcatgaagctgaccaccaacggcagattcagagagcacaacgccaagttcagcctggacggcaaggccgccctgaccgagctgagcctgggcagcgcctaccaggccatgatcctgggcgtggacagcaagaacatcttcaacttcaaggtgagccaggagggcctgaagctgagcaacgacatgatgggcagctacgccgagatgaagttcgaccacaccaacagcctgaacatcgccggcctgagcctggacttcagcagcaagctggacaacatctacagcagcgacaagttctacaagcagaccgtgaacctgcagctgcagccctacagcctggtgaccaccctgaacagcgacctgaagtacaacgccctggacctgaccaacaacggcaagctgagactggagcccctgaagctgcacgtggccggcaacctgaagggcgcctaccagaacaacgagatcaagcacatctacgccatcagcagcgccgccctgagcgccagctacaaggccgacaccgtggccaaggtgcagggcgtggagttcagccacagactgaacaccgacatcgccggcctggccagcgccatcgacatgagcaccaactacaacagcgacagcctgcacttcagcaacgtgttcagaagcgtgatggcccccttcaccatgaccatcgacgcccacaccaacggcaacggcaagctggccctgtggggcgagcacaccggccagctgtacagcaagttcctgctgaaggccgagcccctggccttcaccttcagccacgactacaagggcagcaccagccaccacctggtgagcagaaagagcatcagcgccgccctggagcacaaggtgagcgccctgctgacccccgccgagcagaccggcacctggaagctgaagacccagttcaacaacaacgagtacagccaggacctggacgcctacaacaccaaggacaagatcggcgtggagctgaccggcagaaccctggccgacctgaccctgctggacagccccatcaaggtgcccctgctgctgagcgagcccatcaacatcatcgacgccctggagatgagagacgccgtggagaagccccaggagttcaccatcgtggccttcgtgaagtacgacaagaaccaggacgtgcacagcatcaacctgcccttcttcgagaccctgcaggagtacttcgagagaaacagacagaccatcatcgtggtgctggagaacgtgcagagaaacctgaagcacatcaacatcgaccagttcgtgagaaagtacagagccgccctgggcaagctgccccagcaggccaacgactacctgaacagcttcaactgggagagacaggtgagccacgccaaggagaagctgaccgccctgaccaagaagtacagaatcaccgagaacgacatccagatcgccctggacgacgccaagatcaacttcaacgagaagctgagccagctgcagacctacatgatccagttcgaccagtacatcaaggacagctacgacctgcacgacctgaagatcgccatcgccaacatcatcgacgagatcatcgagaagctgaagagcctggacgagcactaccacatcagagtgaacctggtgaagaccatccacgacctgcacctgttcatcgagaacatcgacttcaacaagagcggcagcagcaccgccagctggatccagaacgtggacaccaagtaccagatcagaatccagatccaggagaagctgcagcagctgaagagacacatccagaacatcgacatccagcacctggccggcaagctgaagcagcacatcgaggccatcgacgtgagagtgctgctggaccagctgggcaccaccatcagcttcgagagaatcaacgacatcctggagcacgtgaagcacttcgtgatcaacctgatcggcgacttcgaggtggccgagaagatcaacgccttcagagccaaggtgcacgagctgatcgagagatacgaggtggaccagcagatccaggtgctgatggacaagctggtggagctggcccaccagtacaagctgaaggagaccatccagaagctgagcaacgtgctgcagcaggtgaagatcaaggactacttcgagaagctggtgggcttcatcgacgacgccgtgaagaagctgaacgagctgagcttcaagaccttcatcgaggacgtgaacaagttcctggacatgctgatcaagaagctgaagagcttcgactaccaccagttcgtggacgagaccaacgacaagatcagagaggtgacccagagactgaacggcgagatccaggccctggagctgccccagaaggccgaggccctgaagctgttcctggaggagaccaaggccaccgtggccgtgtacctggagagcctgcaggacaccaagatcaccctgatcatcaactggctgcaggaggccctgagcagcgccagcctggcccacatgaaggccaagttcagagagaccctggaggacaccagagacagaatgtaccagatggacatccagcaggagctgcagagatacctgagcctggtgggccaggtgtacagcaccctggtgacctacatcagcgactggtggaccctggccgccaagaacctgaccgacttcgccgagcagtacagcatccaggactgggccaagagaatgaaggccctggtggagcagggcttcaccgtgcccgagatcaagaccatcctgggcaccatgcccgccttcgaggtgagcctgcaggccctgcagaaggccaccttccagacccccgacttcatcgtgcccctgaccgacctgagaatccccagcgtgcagatcaacttcaaggacctgaagaacatcaagatccccagcagattcagcacccccgagttcaccatcctgaacaccttccacatccccagcttcaccatcgacttcgtggagatgaaggtgaagatcatcagaaccatcgaccagatgctgaacagcgagctgcagtggcccgtgcccgacatctacctgagagacctgaaggtggaggacatccccctggccagaatcaccctgcccgacttcagactgcccgagatcgccatccccgagttcatcatccccaccctgaacctgaacgacttccaggtgcccgacctgcacatccccgagttccagctgccccacatcagccacaccatcgaggtgcccaccttcggcaagctgtacagcatcctgaagatccagagccccctgttcaccctggacgccaacgccgacatcggcaacggcaccaccagcgccaacgaggccggcatcgccgccagcatcaccgccaagggcgagagcaagctggaggtgctgaacttcgacttccaggccaacgcccagctgagcaaccccaagatcaaccccctggccctgaaggagagcgtgaagttcagcagcaagtacctgagaaccgagcacggcagcgagatgctgttcttcggcaacgccatcgagggcaagagcaacaccgtggccagcctgcacaccgagaagaacaccctggagctgagcaacggcgtgatcgtgaagatcaacaaccagctgaccctggacagcaacaccaagtacttccacaagctgaacatccccaagctggacttcagcagccaggccgacctgagaaacgagatcaagaccctgctgaaggccggccacatcgcctggaccagcagcggcaagggcagctggaagtgggcctgccccagattcagcgacgagggcacccacgagagccagatcagcttcaccatcgagggccccctgaccagcttcggcctgagcaacaagatcaacagcaagcacctgagagtgaaccagaacctggtgtacgagagcggcagcctgaacttcagcaagctggagatccagagccaggtggacagccagcacgtgggccacagcgtgctgaccgccaagggcatggccctgttcggcgagggcaaggccgagttcaccggcagacacgacgcccacctgaacggcaaggtgatcggcaccctgaagaacagcctgttcttcagcgcccagcccttcgagatcaccgccagcaccaacaacgagggcaacctgaaggtgagattccccctgagactgaccggcaagatcgacttcctgaacaactacgccctgttcctgagccccagcgcccagcaggccagctggcaggtgagcgccagattcaaccagtacaagtacaaccagaacttcagcgccggcaacaacgagaacatcatggaggcccacgtgggcatcaacggcgaggccaacctggacttcctgaacatccccctgaccatccccgagatgagactgccctacaccatcatcaccaccccccccctgaaggacttcagcctgtgggagaagaccggcctgaaggagttcctgaagaccaccaagcagagcttcgacctgagcgtgaaggcccagtacaagaagaacaagcacagacacagcatcaccaaccccctggccgtgctgtgcgagttcatcagccagagcatcaagagcttcgacagacacttcgagaagaacagaaacaacgccctggacttcgtgaccaagagctacaacgagaccaagatcaagttcgacaagtacaaggccgagaagagccacgacgagctgcccagaaccttccagatccccggctacaccgtgcccgtggtgaacgtggaggtgagccccttcaccatcgagatgagcgccttcggctacgtgttccccaaggccgtgagcatgcccagcttcagcatcctgggcagcgacgtgagagtgcccagctacaccctgatcctgcccagcctggagctgcccgtgctgcacgtgcccagaaacctgaagctgagcctgcccgacttcaaggagctgtgcaccatcagccacatcttcatccccgccatgggcaacatcacctacgacttcagcttcaagagcagcgtgatcaccctgaacaccaacgccgagctgttcaaccagagcgacatcgtggcccacctgctgagcagcagcagcagcgtgatcgacgccctgcagtacaagctggagggcaccaccagactgaccagaaagagaggcctgaagctggccaccgccctgagcctgagcaacaagttcgtggagggcagccacaacagcaccgtgagcctgaccaccaagaacatggaggtgagcgtggccaccaccaccaaggcccagatccccatcctgagaatgaacttcaagcaggagctgaacggcaacaccaagagcaagcccaccgtgagcagcagcatggagttcaagtacgacttcaacagcagcatgctgtacagcaccgccaagggcgccgtggaccacaagctgagcctggagagcctgaccagctacttcagcatcgagagcagcaccaagggcgacgtgaagggcagcgtgctgagcagagagtacagcggcaccatcgccagcgaggccaacacctacctgaacagcaagagcaccagaagcagcgtgaagctgcagggcaccagcaagatcgacgacatctggaacctggaggtgaaggagaacttcgccggcgaggccaccctgcagagaatctacagcctgtgggagcacagcaccaagaaccacctgcagctggagggcctgttcttcaccaacggcgagcacaccagcaaggccaccctggagctgagcccctggcagatgagcgccctggtgcaggtgcacgccagccagcccagcagcttccacgacttccccgacctgggccaggaggtggccctgaacgccaacaccaagaaccagaagatcagatggaagaacgaggtgagaatccacagcggcagcttccagagccaggtggagctgagcaacgaccaggagaaggcccacctggacatcgccggcagcctggagggccacctgagattcctgaagaacatcatcctgcccgtgtacgacaagagcctgtgggacttcctgaagctggacgtgaccaccagcatcggcagaagacagcacctgagagtgagcaccgccttcgtgtacaccaagaaccccaacggctacagcttcagcatccccgtgaaggtgctggccgacaagttcatcatccccggcctgaagctgaacgacctgaacagcgtgctggtgatgcccaccttccacgtgcccttcaccgacctgcaggtgcccagctgcaagctggacttcagagagatccagatctacaagaagctgagaaccagcagcttcgccctgaacctgcccaccctgcccgaggtgaagttccccgaggtggacgtgctgaccaagtacagccagcccgaggacagcctgatccccttcttcgagatcaccgtgcccgagagccagctgaccgtgagccagttcaccctgcccaagagcgtgagcgacggcatcgccgccctggacctgaacgccgtggccaacaagatcgccgacttcgagctgcccaccatcatcgtgcccgagcagaccatcgagatccccagcatcaagttcagcgtgcccgccggcatcgtgatccccagcttccaggccctgaccgccagattcgaggtggacagccccgtgtacaacgccacctggagcgccagcctgaagaacaaggccgactacgtggagaccgtgctggacagcacctgcagcagcaccgtgcagttcctggagtacgagctgaacgtgctgggcacccacaagatcgaggacggcaccctggccagcaagaccaagggcaccttcgcccacagagacttcagcgccgagtacgaggaggacggcaagtacgagggcctgcaggagtgggagggcaaggcccacctgaacatcaagagccccgccttcaccgacctgcacctgagataccagaaggacaagaagggcatcagcaccagcgccgccagccccgccgtgggcaccgtgggcatggacatggacgaggacgacgacttcagcaagtggaacttctactacagcccccagagcagccccgacaagaagctgaccatcttcaagaccgagctgagagtgagagagagcgacgaggagacccagatcaaggtgaactgggaggaggaggccgccagcggcctgctgaccagcctgaaggacaacgtgcccaaggccaccggcgtgctgtacgactacgtgaacaagtaccactgggagcacaccggcctgaccctgagagaggtgagcagcaagctgagaagaaacctgcagaacaacgccgagtgggtgtaccagggcgccatcagacagatcgacgacatcgacgtgagattccagaaggccgccagcggcaccaccggcacctaccaggagtggaaggacaaggcccagaacctgtaccaggagctgctgacccaggagggccaggccagcttccagggcctgaaggacaacgtgttcgacggcctggtgagagtgacccaggagttccacatgaaggtgaagcacctgatcgacagcctgatcgacttcctgaacttccccagattccagttccccggcaagcccggcatctacaccagagaggagctgtgcaccatgttcatcagagaggtgggcaccgtgctgagccaggtgtacagcaaggtgcacaacggcagcgagatcctgttcagctacttccaggacctggtgatcaccctgcccttcgagctgagaaagcacaagctgatcgacgtgatcagcatgtacagagagctgctgaaggacctgagcaaggaggcccaggaggtgttcaaggccatccagagcctgaagaccaccgaggtgctgagaaacctgcaggacctgctgcagttcatcttccagctgatcgaggacaacatcaagcagctgaaggagatgaagttcacctacctgatcaactacatccaggacgagatcaacaccatcttcagcgactacatcccctacgtgttcaagctgctgaaggagaacctgtgcctgaacctgcacaagttcaacgagttcatccagaacgagctgcaggaggccagccaggagctgcagcagatccaccagtacatcatggccctgagagaggagtacttcgaccccagcatcgtgggctggaccgtgaagtactacgagctggaggagaagatcgtgagcctgatcaagaacctgctggtggccctgaaggacttccacagcgagtacatcgtgagcgccagcaacttcaccagccagctgagcagccaggtggagcagttcctgcacagaaacatccaggagtacctgagcatcctgaccgaccccgacggcaagggcaaggagaagatcgccgagctgagcgccaccgcccaggagatcatcaagagccaggccatcgccaccaagaagatcatcagcgactaccaccagcagttcagatacaagctgcaggacttcagcgaccagctgagcgactactacgagaagttcatcgccgagagcaagagactgatcgacctgagcatccagaactaccacaccttcctgatctacatcaccgagctgctgaagaagctgcagagcaccaccgtgatgaacccctacatgaagctggcccccggcgagctgaccatcatcctgtag

SEQ ID NO: 8288 - protein, 455 aa, Artificial Sequence
  derived and/or modified sequence
MSSSGLNSEKVAALIQKLNSDPQFVLAQNVGTTHDLLDICLKRATVQRAQHVFQHAVPQEGKPITNQKSSGRCWIFSCLNVMRLPFMKKLNIEEFEFSQSYLFFWDKVERCYFFLSAFVDTAQRKEPEDGRLVQFLLMNPANDGGQWDMLVNIVEKYGVIPKKCFPESYTTEATRRMNDILNHKMREFCIRLRNLVHSGATKGEISATQDVMMEEIFRVVCICLGNPPETFTWEYRDKDKNYQKIGPITPLEFYREHVKPLFNMEDKICLVNDPRPQHKYNKLYTVEYLSNMVGGRKTLYNNQPIDFLKKMVAASIKDGEAVWFGCDVGKHFNSKLGLSDMNLYDHELVFGVSLKNMNKAERLTFGESLMTHAMTFTAVSEKDDQDGAFTKWRVENSWGEDHGHKGYLCMTDEWFSEYVYEVVVDRKHVPEEVLAVLEQEPIILPAWDPMGALAE

SEQ ID NO: 8289 - protein, 368 aa, Artificial Sequence
  derived and/or modified sequence
MCSSTPCPRRASQSPTRRAQVERCYFFLSAFVDTAQRKEPEDGRLVQFLLMNPANDGGQWDMLVNIVEKYGVIPKKCFPESYTTEATRRMNDILNHKMREFCIRLRNLVHSGATKGEISATQDVMMEEIFRVVCICLGNPPETFTWEYRDKDKNYQKIGPITPLEFYREHVKPLFNMEDKICLVNDPRPQHKYNKLYTVEYLSNMVGGRKTLYNNQPIDFLKKMVAASIKDGEAVWFGCDVGKHFNSKLGLSDMNLYDHELVFGVSLKNMNKAERLTFGESLMTHAMTFTAVSEKDDQDGAFTKWRVENSWGEDHGHKGYLCMTDEWFSEYVYEVVVDRKHVPEEVLAVLEQEPIILPAWDPMGALAE

SEQ ID NO: 8290 - DNA, 1368 bp, Artificial Sequence
  derived and/or modified sequence
atgtcaagctccggcttaaacagcgaaaaggtggccgcacttatacagaagctgaacagcgaccctcagttcgttttagcccagaatgttgggacgacccatgacttgcttgacatttgtttgaagagggctaccgtgcagcgtgcacaacacgtgtttcagcacgcggtccctcaagaggggaaacctatcaccaatcagaagtcatctgggcggtgctggattttcagttgtctgaatgtcatgcggctcccatttatgaaaaagttaaatattgaggagtttgagttttctcagagctacttgttcttctgggataaggtcgaacgctgctatttcttcctaagtgctttcgtggatactgcacagcgcaaggaacccgaggacggaagacttgttcagttcttactcatgaatcctgctaacgacggtggtcagtgggatatgctggttaatattgtggaaaagtacggggttatccctaagaagtgtttccccgaatcctataccactgaggctacgaggcggatgaacgatattttaaatcataagatgcgggaattctgcatccggcttaggaacctcgttcactctggcgcaaccaagggcgagattagtgccacccaagatgtgatgatggaggaaattttccgcgtggtttgcatatgcctgggcaaccccccagagacttttacgtgggaatacagagataaagacaaaaactaccaaaagatcgggccgataactcctttagaattctaccgcgaacacgtgaagccacttttcaatatggaggacaagatttgcctagtgaacgatcctcgtccccagcataagtacaataagctctatacagtcgagtatctgagtaacatggtcggaggaagaaaaacactctacaacaaccagccaatcgattttctcaagaagatggtggccgcctctatcaaggacggcgaggcagtatggtttggatgtgatgttggaaagcacttcaacagtaaactcggtctttccgacatgaatctctacgaccacgagttggtcttcggagtgtcactgaaaaacatgaataaagctgagcggctcactttcggggagagccttatgactcacgcgatgaccttcacggctgtttctgaaaaggatgatcaggacggagccttcaccaagtggagagtcgaaaattcctggggtgaagaccacggccataaagggtacctctgtatgaccgatgagtggtttagcgaatacgtgtacgaggtggtagttgacaggaagcacgtgccagaagaggtgttagccgtgttggagcaggaacccataatattacctgcttgggatcctatgggtgccctggctgaatag

SEQ ID NO: 8291 - DNA, 1107 bp, Artificial Sequence
  derived and/or modified sequence
atgtgcagctctacaccatgccctagacgggcttcccagagccccacccgacgtgcacaagtcgaacggtgttatttttttctctcagcctttgtagacactgcccagcgaaaggagcctgaggacgggaggctggtgcagttcctattaatgaatcccgcaaatgacggcggccagtgggatatgttggtgaatatcgtcgaaaaatatggcgtaatcccaaaaaaatgcttccctgagagttacacaacggaggccacacgccggatgaacgatattctcaaccacaagatgcgggaattttgcattcggctcagaaacctcgtccactccggggccaccaagggagagataagcgcaactcaagatgttatgatggaagaaattttccgggtcgtctgtatttgcctcggaaaccctcctgaaaccttcacttgggaatatagggacaaggacaagaactaccaaaaaatcggacctatcacccccctggaattctatcgcgagcacgtgaaacctttgttcaacatggaagataagatttgtttagtgaacgaccccagaccccaacacaaatataataagctgtacaccgtggagtacctctctaatatggtaggtggtcggaaaaccctttataacaatcaacccattgactttctgaaaaaaatggtcgcagcgagcatcaaagacggggaagcagtctggttcggttgcgatgtgggcaaacacttcaattctaagctcggcctctccgatatgaatctctatgaccacgagctagtttttggcgtgtccctgaaaaatatgaacaaggccgaacggcttacattcggtgagagcctaatgacgcacgccatgacatttaccgccgttagcgagaaagatgatcaagatggagccttcaccaagtggagggtggaaaacagttggggagaggatcacggccacaagggttacttgtgtatgaccgacgagtggttttccgagtacgtgtacgaagtggtcgtagaccggaagcacgttccggaggaagtacttgcagtcttagagcaagagccaattattttgccagcatgggacccgatgggtgctctcgccgagtag

SEQ ID NO: 8292 - DNA, 1368 bp, Artificial Sequence
  derived and/or modified sequence
atgagcagcagcggcctgaacagcgagaaggtggccgccctgatccagaagctgaacagcgacccccagtttgtgctggcccagaatgtgggcaccacccatgacctgctggacatctgcctgaagagggccaccgtgcagagggcccagcacgtgttccagcacgctgtgccccaggagggcaagcccatcaccaaccagaagagcagcggccgctgctggatcttcagctgcctgaatgtgatgaggctgcccttcatgaagaagctgaacatcgaggagtttgagttcagccagagctacctgttcttctgggacaaggtggagcgctgctacttcttcctgagcgcctttgtggacacagcccagaggaaggagccagaagatggccgcctggtgcagttcctgctgatgaacccagccaatgatggcggccagtgggacatgctggtgaacatcgtggagaagtatggagtcatccccaagaagtgcttccctgagagctacaccacagaggccaccaggaggatgaatgacatcctgaaccacaagatgagggagttctgcatccggctgaggaacctggtgcacagcggggccaccaagggggagatcagcgccacccaggatgtgatgatggaggagatcttccgggtggtgtgcatctgcctgggcaaccccccagagaccttcacctgggagtacagagacaaggacaagaactaccagaagattggccccatcacccccctggagttctaccgggagcacgtgaagcccctcttcaacatggaggacaagatctgcctggtgaatgacccccggccccagcacaagtacaacaagctgtacacagtggagtacctgagcaacatggtgggcggcaggaagaccctgtacaacaaccagcccatcgacttcctgaagaagatggtggccgccagcatcaaggatggagaggccgtgtggtttggctgtgatgtgggcaagcacttcaacagcaagctgggcctgagtgacatgaacctgtatgaccacgagctggtgtttggagtgtccctgaagaacatgaacaaggccgagcggctgacctttggagagagcctgatgacccacgccatgaccttcaccgctgtgtctgagaaggatgaccaggatggagccttcaccaagtggagggtggagaacagctggggcgaggaccacggccacaagggctacctgtgcatgacagatgagtggttctctgaatatgtgtatgaggtggtggtggacaggaagcacgtgcctgaggaggtgctggccgtgctggagcaggagcccatcatcctgcctgcctgggaccccatgggcgccctggccgagtag

SEQ ID NO: 8293 - DNA, 1107 bp, Artificial Sequence
  derived and/or modified sequence
atgtgcagcagcaccccctgcccccggcgggccagccagagccccacccggcgggcccaggtggagcgctgctacttcttcctgagcgcctttgtggacacagcccagaggaaggagccagaagatggccgcctggtgcagttcctgctgatgaacccagccaatgatggcggccagtgggacatgctggtgaacatcgtggagaagtatggagtcatccccaagaagtgcttccctgagagctacaccacagaggccaccaggaggatgaatgacatcctgaaccacaagatgagggagttctgcatccggctgaggaacctggtgcacagcggggccaccaagggggagatcagcgccacccaggatgtgatgatggaggagatcttccgggtggtgtgcatctgcctgggcaaccccccagagaccttcacctgggagtacagagacaaggacaagaactaccagaagattggccccatcacccccctggagttctaccgggagcacgtgaagcccctcttcaacatggaggacaagatctgcctggtgaatgacccccggccccagcacaagtacaacaagctgtacacagtggagtacctgagcaacatggtgggcggcaggaagaccctgtacaacaaccagcccatcgacttcctgaagaagatggtggccgccagcatcaaggatggagaggccgtgtggtttggctgtgatgtgggcaagcacttcaacagcaagctgggcctgagtgacatgaacctgtatgaccacgagctggtgtttggagtgtccctgaagaacatgaacaaggccgagcggctgaccttcggggagagcctgatgacccacgccatgaccttcaccgctgtgtctgagaaggatgaccaggatggagccttcaccaagtggagggtggagaacagctggggagaagatcatggccacaagggctacctgtgcatgacagatgagtggttctctgaatatgtgtatgaggtggtggtggacaggaagcacgtgcctgaggaggtgctggccgtgctggagcaggagcccatcatcctgcctgcctgggaccccatgggcgccctggccgagtag

SEQ ID NO: 8294 - DNA, 1368 bp, Artificial Sequence
  derived and/or modified sequence
atgagcagcagcggcctgaacagcgagaaggtggccgccctgatccaaaaactcaactccgatccacagttcgtgctcgcccaaaatgtgggcactacacacgacttacttgacatttgtctcaaacgtgcgacagtccagagggcccaacacgtttttcagcacgccgtgcctcaagagggcaagcctattaccaaccagaaatcttcaggccgatgctggattttctcctgtctgaacgtgatgagactcccattcatgaagaaactaaatattgaagagttcgaattttctcaaagctacctattcttctgggacaaagttgagcgatgttatttttttctgagcgctttcgttgacaccgcccagcgcaaagagcccgaggacggccgcctggtgcaatttctgttgatgaaccctgcaaatgacggcgggcaatgggacatgctagtgaacatcgtggaaaagtacggcgtcatcccaaagaagtgttttcccgagagttatactactgaagccactcggcggatgaacgacattttaaatcacaaaatgagggagttttgcattagactcaggaacctcgtgcactctggggccactaaaggtgaaatctcagcaacccaggatgtcatgatggaggagatcttccgtgtagtgtgtatctgtctggggaatcctcccgagacttttacctgggagtacagagacaaagataaaaactaccagaagataggacctattacacctttggagttctatcgcgagcatgtgaagccattatttaacatggaagacaagatttgcctggtgaatgacccaaggccccagcataagtataataagctttacacggtggagtacctgtctaacatggtcgggggacggaagaccctgtacaataatcagccaatagattttcttaagaagatggtcgccgcctcaataaaagacggcgaggccgtctggttcgggtgcgatgtgggtaagcatttcaacagtaagctgggcttgtccgatatgaatctatatgaccatgagctggtatttggggtctccctaaagaacatgaataaagccgaaagactaacattcggagaatcccttatgacccatgccatgacattcacagccgtaagcgaaaaagatgatcaggacggcgctttcacaaaatggcgagttgaaaatagttggggtgaggaccatgggcacaaggggtacctgtgcatgactgacgagtggtttagcgagtatgtctatgaagtggtggtggatcggaaacacgtacccgaagaagtgctggcagtcttagagcaggaacccattattctgccagcctgggaccccatgggggcgctggcagaatag

SEQ ID NO: 8295 - DNA, 1107 bp, Artificial Sequence
  derived and/or modified sequence
atgtgcagcagcaccccctgcccccggcgggccagccagagccccacccgaagggcccaggttgagagatgctatttttttttatcagccttcgttgataccgcgcaaagaaaagagccagaggacggaagactggtccaattcttgctgatgaaccccgctaatgacgggggccaatgggatatgttggtaaatatagtcgaaaagtatggcgttattcccaaaaaatgttttccagagtcatacaccactgaggccacacggcggatgaacgacattctgaatcacaaaatgcgcgaattctgcataagactgagaaacctggtgcactccggcgccaccaagggggagattagtgctacacaggacgtgatgatggaggagatttttcgcgtcgtatgtatttgccttgggaatcctcctgaaactttcacatgggagtaccgagacaaagacaagaattatcagaaaataggccctatcactcccctggagttctatcgggagcacgtgaagcctcttttcaatatggaagacaagatctgcctggtgaatgatcccaggccacaacacaaatataacaagctttatacggttgaatatctctccaatatggtgggcgggcggaagactctgtacaacaaccagcctatcgacttcctaaagaagatggttgccgcttctatcaaggacggtgaagccgtctggttcggctgtgatgtaggtaaacattttaacagcaaattgggacttagcgatatgaatctgtatgatcacgagttggtgtttggcgtgagcctcaagaacatgaataaagcagaaagattgacattcggcgagtcccttatgactcatgcgatgaccttcactgctgtgtcggaaaaggatgatcaagatggtgccttcaccaagtggcgggtggaaaactcttggggtgaggatcacggccacaaaggatatctgtgcatgactgatgaatggtttagtgagtatgtgtacgaggttgtggtagataggaaacatgtgcccgaagaggttctggccgtgctcgaacaagagcctatcatccttccagcatgggaccccatgggagcactggccgaatag

SEQ ID NO: 8296 - DNA, 1368 bp, Artificial Sequence
  derived and/or modified sequence
atgagttctagcggcctcaatagcgaaaaagtggcggctttaatccagaagctcaactctgacccccagttcgtgctggcccagaacgtgggcaccactcatgatctgttagacatctgccttaagagagccaccgtccagcgggcacagcacgtgttccagcatgccgtgccacaagagggaaagcccataacaaaccaaaaaagcagtggtcggtgttggatattctcttgtttgaacgttatgagacttccgtttatgaaaaagttgaatattgaagaattcgagttcagtcagtcatacctcttcttctgggataaagtggaacgatgttatttttttttaagcgcgttcgttgataccgctcagagaaaagaacctgaagatgggaggcttgtgcagttcctgctgatgaacccggctaatgacggcggtcaatgggacatgttggtgaacatcgtggaaaaatacggggttattccgaaaaagtgttttccggagtcttatacgaccgaggccacgcgacgaatgaatgatatcctgaaccataagatgagagagttctgcatccggctgcggaatctcgtgcatagtggggctaccaagggggagatctctgccacacaggacgtaatgatggaagagatctttagggttgtctgcatctgcctgggcaacccacccgagacctttacgtgggagtatcgggacaaggacaagaattaccagaaaatagggccaattacgcctttggaattctacagagaacacgttaagcctctgtttaatatggaagataagatctgtctcgttaatgatccccgaccacagcataaatataataaactctacactgttgaatacctgtccaatatggtgggtggcagaaaaacactgtataataaccagccgatcgactttcttaaaaaaatggtggcagcttccatcaaggatggcgaggccgtgtggttcggatgtgacgtgggcaagcacttcaactctaagttgggcctttccgacatgaatttgtacgaccacgagctggtgtttggagtttcactgaagaacatgaataaggcagaaagacttacttttggagaatctctgatgacccacgcaatgacctttaccgctgtaagcgagaaagatgatcaggatggggctttcacaaagtggagagtagaaaattcctggggtgaggatcatggccacaaaggttatctctgcatgactgacgagtggttctctgagtacgtgtacgaagtcgtcgttgatcgcaagcacgtgcccgaggaggtgcttgctgtacttgagcaggagcctatcattttgcccgcttgggatcccatgggcgctctggcagagtag

SEQ ID NO: 8297 - DNA, 1107 bp, Artificial Sequence
  derived and/or modified sequence
atgtgtagctcaactccctgcccacgccgtgcttcccaaagtcccacccggagggcgcaggtagagcgctgttacttttttttatctgcgttcgttgacacagcacagaggaaggaaccggaagatgggagactggtacagttcctcctgatgaatcccgcaaatgacggtggacaatgggatatgctggtcaatatcgttgaaaaatacggggttattcctaagaagtgtttcccagagagttacacaactgaggcaactcgcaggatgaacgatattctgaaccacaaaatgagagagttttgtataaggttacgaaatctcgtacattcaggcgctaccaagggagagattagtgctactcaggatgtgatgatggaagagatcttccgagtcgtgtgcatctgcctcggcaacccccctgaaacttttacatgggagtatcgggacaaagacaaaaactaccagaaaataggacctatcacccccctggagttctaccgcgaacacgtgaagcctttgtttaacatggaggacaaaatttgtctggtgaacgaccccagaccgcagcataaatacaacaagttatataccgtggagtacctctcaaatatggtaggagggcgaaagacactgtacaataaccagcctattgactttttgaagaagatggttgccgcttctattaaggatggagaggccgtgtggtttggctgtgacgttgggaaacattttaacagcaaactgggtctgagtgatatgaacctatacgatcacgagcttgtgttcggcgtgtccttgaagaatatgaacaaagccgagcgcttaactttcggggaatccctcatgacccatgcaatgacttttacggctgtttcagagaaggacgaccaggatggggcttttaccaagtggcgagttgagaatagctggggagaagaccacgggcacaaaggctatctgtgcatgactgacgaatggttttccgagtacgtgtacgaagtagtcgtggaccggaagcacgtgcctgaggaggtacttgccgtgcttgagcaggagccgattatcctgcctgcatgggaccccatgggggcactcgcagaatag

SEQ ID NO: 8298 - DNA, 2417 bp, Artificial Sequence
  derived and/or modified sequence
gacggcgctgactcagcaacgcgaggggggagttttgtccctccgcggaccccgtttctcccagcctcagcctccccgccgccgccgccgccgccgccgccgagccggtttcctttttccggcgctccgggtgcgagagacaggtcgggccccctaggcagcgagccgcagcgcaatcccggcgctcgcccaaggaccctggaagctaccgttaccccgccgggcagcgtgggcgccatgagcagctcgggactgaattcggagaaggtagctgctctgatacagaaactgaattccgacccccagttcgtacttgcccagaatgtcgggaccacccacgacctgctggacatctgtctgaagcgggccacggtgcagcgcgcgcagcatgtgttccagcacgccgtgccccaggagggcaagccaatcaccaaccagaagagctcagggcgatgctggatcttttcttgtctgaatgttatgaggcttccattcatgaaaaagttaaatattgaagaatttgagtttagccaatcttacctgtttttttgggacaaggttgaacgctgttatttcttcttgagtgcttttgtggacacagcccagagaaaggagcctgaggatgggaggctggtgcagtttttgcttatgaaccctgcaaatgatggtggccaatgggatatgcttgttaatattgttgaaaaatatggtgttatccctaagaaatgcttccctgaatcttatacaacagaggcaaccagaaggatgaatgatattctgaatcacaagatgagagaattctgtatacgactgcggaacctggtacacagtggagcaaccaaaggagaaatctcggccacacaggacgtcatgatggaggagatattccgagtggtgtgcatctgtttgggtaatccaccagagacattcacctgggaatatcgagacaaagataaaaattatcagaaaattggccccataacacccttggagttttacagggaacatgtcaagccactcttcaatatggaagataagatttgtttagtgaatgaccctaggccccagcacaagtacaacaaactttacacagtggaatacttaagcaatatggttggagggagaaaaactctatacaacaaccagcccattgacttcctgaaaaagatggttgctgcctccatcaaagatggagaggctgtgtggtttggctgtgatgttggaaaacacttcaatagcaagctgggcctcagtgacatgaatctctatgaccatgagttagtgtttggtgtctccttgaagaacatgaataaagcggagaggctgacttttggtgagtcacttatgacccacgccatgaccttcactgctgtctcagagaaggatgatcaggatggtgctttcacaaaatggagagtggagaattcatggggtgaagaccatggccacaaaggttacctgtgcatgacagatgagtggttctctgagtatgtctacgaagtggtggtggacaggaagcatgtccctgaagaggtgctagctgtgttagagcaggaacccattatcctgccagcatgggaccccatgggagctttggctgagtgatactgccctccagctctttcctccttccatggaacctgacgtagctgcaaaggacagatccagggactgaagccaaagttatgcaagggactgtgtgttgccacaggacacagtcagatttccagtctccaccaggaacctcttcagaaagtgtgctttatgctgaaacagaatactgttaaaggaaaaaaaagaggggggaagatcaggtcatactatctactctcctcatctctaacagctcaggatctcttagcattttaattagatgtaattgtttgtctttaactgtcaaaaagtttggttctgtgtctgtgttttaataagacgagaggacgagcgattgaggtgtatggagagaaaacagacctaatgctccttgttcctagagtagagtggagggagggtggcctaagagttgagctctcggaactgcatgctgctggacagtatcactgtctttcctagatggcagtcactgaattccattttttcaaggtaatttcttgtgcctctaatagcccaagaatgggaggttgatcagatctgacatgattccttcctgttctgaactgtggggtgtgcacatctctgcttgagtcaggtttgagtagaggcttagagacagttgggtgagaacaaccaaaatcttatcatggtctcagtcataatcattagggggaactctagccaaatggtttaacttctgcctgtggaactggggattgggtgggcaggaaaaggtgatatccattctttctgataactagatggtgctgagaagcttttgaataaaaactttgctaaatgag

SEQ ID NO: 8299 - DNA, 1473 bp, Artificial Sequence
  derived and/or modified sequence
accgttaccccgccgggcagcgtgggcgccatgagcagctcgggactgaattcggagaaggtagctgctctgatacagaaactgaattccgacccccagttcgtacttgcccagaatgtcgggaccacccacgacctgctggacatctgtctgaagcgggccacggtgcagcgcgcgcagcatgtgttccagcacgccgtgccccaggagggcaagccaatcaccaaccagaagagctcaggttgaacgctgttatttcttcttgagtgcttttgtggacacagcccagagaaaggagcctgaggatgggaggctggtgcagtttttgcttatgaaccctgcaaatgatggtggccaatgggatatgcttgttaatattgttgaaaaatatggtgttatccctaagaaatgcttccctgaatcttatacaacagaggcaaccagaaggatgaatgatattctgaatcacaagatgagagaattctgtatacgactgcggaacctggtacacagtggagcaaccaaaggagaaatctcggccacacaggacgtcatgatggaggagatattccgagtggtgtgcatctgtttgggtaatccaccagagacattcacctgggaatatcgagacaaagataaaaattatcagaaaattggccccataacacccttggagttttacagggaacatgtcaagccactcttcaatatggaagataagatttgtttagtgaatgaccctaggccccagcacaagtacaacaaactttacacagtggaatacttaagcaatatggttggagggagaaaaactctatacaacaaccagcccattgacttcctgaaaaagatggttgctgcctccatcaaagatggagaggctgtgtggtttggctgtgatgttggaaaacacttcaatagcaagctgggcctcagtgacatgaatctctatgaccatgagttagtgtttggtgtctccttgaagaacatgaataaagcggagaggctgacttttggtgagtcacttatgacccacgccatgaccttcactgctgtctcagagaaggatgatcaggatggtgctttcacaaaatggagagtggagaattcatggggtgaagaccatggccacaaaggttacctgtgcatgacagatgagtggttctctgagtatgtctacgaagtggtggtggacaggaagcatgtccctgaagaggtgctagctgtgttagagcaggaacccattatcctgccagcatgggaccccatgggagctttggctgagtgatactgccctccagctctttcctccttccatggaacctgacgtagctgcaaaggacagatccagggactgaagccaaagttatgcaagggactgtgtgttgccacaggacacagtcagatttccagtctccaccaggaacctcttcagaaagtgtgctttatgctgaaacagaatactgttaaagg

SEQ ID NO: 8300 - DNA, 1368 bp, Artificial Sequence
  derived and/or modified sequence
atgagcagcagcggcctgaacagcgagaaggtggccgccctgatccagaagctgaacagcgacccccagttcgtgctggcccagaacgtgggcaccacccacgacctgctggacatctgcctgaagagagccaccgtgcagagagcccagcacgtgttccagcacgccgtgccccaggagggcaagcccatcaccaaccagaagagcagcggcagatgctggatcttcagctgcctgaacgtgatgagactgcccttcatgaagaagctgaacatcgaggagttcgagttcagccagagctacctgttcttctgggacaaggtggagagatgctacttcttcctgagcgccttcgtggacaccgcccagagaaaggagcccgaggacggcagactggtgcagttcctgctgatgaaccccgccaacgacggcggccagtgggacatgctggtgaacatcgtggagaagtacggcgtgatccccaagaagtgcttccccgagagctacaccaccgaggccaccagaagaatgaacgacatcctgaaccacaagatgagagagttctgcatcagactgagaaacctggtgcacagcggcgccaccaagggcgagatcagcgccacccaggacgtgatgatggaggagatcttcagagtggtgtgcatctgcctgggcaacccccccgagaccttcacctgggagtacagagacaaggacaagaactaccagaagatcggccccatcacccccctggagttctacagagagcacgtgaagcccctgttcaacatggaggacaagatctgcctggtgaacgaccccagaccccagcacaagtacaacaagctgtacaccgtggagtacctgagcaacatggtgggcggcagaaagaccctgtacaacaaccagcccatcgacttcctgaagaagatggtggccgccagcatcaaggacggcgaggccgtgtggttcggctgcgacgtgggcaagcacttcaacagcaagctgggcctgagcgacatgaacctgtacgaccacgagctggtgttcggcgtgagcctgaagaacatgaacaaggccgagagactgaccttcggcgagagcctgatgacccacgccatgaccttcaccgccgtgagcgagaaggacgaccaggacggcgccttcaccaagtggagagtggagaacagctggggcgaggaccacggccacaagggctacctgtgcatgaccgacgagtggttcagcgagtacgtgtacgaggtggtggtggacagaaagcacgtgcccgaggaggtgctggccgtgctggagcaggagcccatcatcctgcccgcctgggaccccatgggcgccctggccgagtag

SEQ ID NO: 8301 - DNA, 1107 bp, Artificial Sequence
  derived and/or modified sequence
atgtgcagcagcaccccctgccccagaagagccagccagagccccaccagaagagcccaggtggagagatgctacttcttcctgagcgccttcgtggacaccgcccagagaaaggagcccgaggacggcagactggtgcagttcctgctgatgaaccccgccaacgacggcggccagtgggacatgctggtgaacatcgtggagaagtacggcgtgatccccaagaagtgcttccccgagagctacaccaccgaggccaccagaagaatgaacgacatcctgaaccacaagatgagagagttctgcatcagactgagaaacctggtgcacagcggcgccaccaagggcgagatcagcgccacccaggacgtgatgatggaggagatcttcagagtggtgtgcatctgcctgggcaacccccccgagaccttcacctgggagtacagagacaaggacaagaactaccagaagatcggccccatcacccccctggagttctacagagagcacgtgaagcccctgttcaacatggaggacaagatctgcctggtgaacgaccccagaccccagcacaagtacaacaagctgtacaccgtggagtacctgagcaacatggtgggcggcagaaagaccctgtacaacaaccagcccatcgacttcctgaagaagatggtggccgccagcatcaaggacggcgaggccgtgtggttcggctgcgacgtgggcaagcacttcaacagcaagctgggcctgagcgacatgaacctgtacgaccacgagctggtgttcggcgtgagcctgaagaacatgaacaaggccgagagactgaccttcggcgagagcctgatgacccacgccatgaccttcaccgccgtgagcgagaaggacgaccaggacggcgccttcaccaagtggagagtggagaacagctggggcgaggaccacggccacaagggctacctgtgcatgaccgacgagtggttcagcgagtacgtgtacgaggtggtggtggacagaaagcacgtgcccgaggaggtgctggccgtgctggagcaggagcccatcatcctgcccgcctgggaccccatgggcgccctggccgagtag

SEQ ID NO: 8302 - protein, 301 aa, Artificial Sequence
  derived and/or modified sequence
MADQPKPISPLKNLLAGGFGGVCLVFVGHPLDTVKVRLQTQPPSLPGQPPMYSGTFDCFRKTLFREGITGLYRGMAAPIIGVTPMFAVCFFGFGLGKKLQQKHPEDVLSYPQLFAAGMLSGVFTTGIMTPGERIKCLLQIQASSGESKYTGTLDCAKKLYQEFGIRGIYKGTVLTLMRDVPASGMYFMTYEWLKNIFTPEGKRVSELSAPRILVAGGIAGIFNWAVAIPPDVLKSRFQTAPPGKYPNGFRDVLRELIRDEGVTSLYKGFNAVMIRAFPANAACFLGFEVAMKFLNWATPNL

SEQ ID NO: 8303 - protein, 251 aa, Artificial Sequence
  derived and/or modified sequence
MYSGTFDCFRKTLFREGITGLYRGMAAPIIGVTPMFAVCFFGFGLGKKLQQKHPEDVLSYPQLFAAGMLSGVFTTGIMTPGERIKCLLQIQASSGESKYTGTLDCAKKLYQEFGIRGIYKGTVLTLMRDVPASGMYFMTYEWLKNIFTPEGKRVSELSAPRILVAGGIAGIFNWAVAIPPDVLKSRFQTAPPGKYPNGFRDVLRELIRDEGVTSLYKGFNAVMIRAFPANAACFLGFEVAMKFLNWATPNL

SEQ ID NO: 8304 - DNA, 906 bp, Artificial Sequence
  derived and/or modified sequence
atggcggatcaacccaaacctatttcgcccctaaaaaacctgctcgccggagggtttggtggtgtgtgtctagtgttcgtgggtcacccattggacacagtgaaagtgcgcctgcagactcaacctccatctctgcccgggcagccgcccatgtactccggtacctttgattgcttccgaaagaccctttttcgggaggggatcacaggattatacaggggcatggccgcccctatcatcggggtgaccccaatgttcgcggtgtgcttttttgggttcgggcttggcaagaaattacagcagaagcacccagaagatgtgctctcatatccccagctgttcgccgccggcatgctttctggcgtattcactacagggattatgacgcctggggagaggataaagtgcttacttcagatccaggcaagcagcggcgaaagcaaatacacggggactctagactgtgctaagaagttgtaccaggagttcggaatcagaggaatctacaaaggtaccgtccttacactgatgcgcgatgttcctgcaagcggcatgtacttcatgacctatgagtggctgaaaaacatatttaccccagaaggcaaaagagtctcggagctgtctgctcctcggatcctggtcgccggggggatcgctggcatttttaattgggccgtagctatcccaccagatgtgctgaagagtcggttccagacagcccccccaggaaaataccccaacggcttcagagatgtgcttcgggaactgatcagagacgagggcgtgacttcactgtataaggggtttaacgcagtaatgatacgggctttccccgcaaacgccgcctgcttcttgggatttgaggtggccatgaagttcttaaattgggcaacaccaaacctgtag

SEQ ID NO: 8305 - DNA, 756 bp, Artificial Sequence
  derived and/or modified sequence
atgtacagtggtacgtttgattgcttccgtaagacactctttcgcgagggtattaccgggctgtaccggggaatggccgctcctataataggggtaactcccatgttcgctgtgtgttttttcggctttggcttgggaaagaagctccagcaaaagcatcccgaagatgtgctgtcctatccccagctgttcgcagccggcatgctgagcggagtgttcacaactggcattatgacgcctggcgaaagaattaagtgtttgctgcagattcaggcttctagcggtgagtccaaatacacgggaaccttagactgtgcaaaaaagctgtatcaggagtttggcataagggggatttacaagggtaccgtcctaacactcatgcgcgatgtgccggctagtggaatgtacttcatgacctatgaatggttgaagaacatcttcacacccgaaggaaagagggtgtccgagttatctgccccccgtatcctggtcgcgggaggtattgctgggatattcaactgggcagtcgccatcccccctgacgttctgaaaagccggttccagactgctcctcccggtaaataccctaatgggtttagggacgtgttaagggagctgattcgggacgaaggcgtgacgtcattgtacaagggatttaatgccgtgatgattcgtgctttccccgccaatgccgcctgttttctgggctttgaagttgcaatgaaatttctcaactgggctacaccgaacctatag

SEQ ID NO: 8306 - DNA, 906 bp, Artificial Sequence
  derived and/or modified sequence
atggctgaccagcccaagcccatcagccccctgaagaacctgctggccggcggctttggaggagtgtgcctggtgtttgtgggccaccccctggacacagtgaaggtgcggctgcagacccagccccccagcctgcccggccagccccccatgtacagcggcacctttgactgcttcaggaagaccctcttccgggagggcatcaccggcctgtaccggggcatggccgcccccatcatcggcgtgacccccatgtttgctgtgtgcttctttggatttggcctgggcaagaagctgcagcagaagcacccagaagatgtgctgagctacccccagctgtttgctgctggcatgctgagcggggtcttcaccaccggcatcatgaccccaggagagcgcatcaagtgcctgctgcagatccaggccagcagcggggagagcaagtacacaggcaccctggactgtgccaagaagctgtaccaggagtttggcatccggggcatctacaagggcaccgtgctgaccctgatgagagatgtgcctgccagcggcatgtacttcatgacctatgagtggctgaagaacatcttcaccccagagggcaagagggtgtctgagctgagcgccccccgcatcctggtggccggcggcattgctggcatcttcaactgggccgtggccatccccccagatgtgctgaagagccgcttccagacagcccctcctgggaagtacccaaatggcttcagagatgtgctgcgggagctgatcagagatgaaggagtgaccagcctgtacaagggcttcaatgctgtgatgatccgggccttccctgccaatgctgcctgcttcctgggctttgaggtggccatgaagttcctgaactgggccacccccaacctgtag

SEQ ID NO: 8307 - DNA, 756 bp, Artificial Sequence
  derived and/or modified sequence
atgtacagcggcacctttgactgcttcaggaagaccctcttccgggagggcatcaccggcctgtaccggggcatggccgcccccatcatcggcgtgacccccatgtttgctgtgtgcttctttggatttggcctgggcaagaagctgcagcagaagcacccagaagatgtgctgagctacccccagctgtttgctgctggcatgctgagcggggtcttcaccaccggcatcatgaccccaggagagcgcatcaagtgcctgctgcagatccaggccagcagcggggagagcaagtacacaggcaccctggactgtgccaagaagctgtaccaggagtttggcatccggggcatctacaagggcaccgtgctgaccctgatgagagatgtgcctgccagcggcatgtacttcatgacctatgagtggctgaagaacatcttcaccccagagggcaagagggtgtctgagctgagcgccccccgcatcctggtggccggcggcattgctggcatcttcaactgggccgtggccatccccccagatgtgctgaagagccgcttccagacagcccctcctgggaagtacccaaatggcttcagagatgtgctgcgggagctgatcagagatgaaggagtgaccagcctgtacaagggcttcaatgctgtgatgatccgggccttccctgccaatgctgcctgcttcctgggctttgaggtggccatgaagttcctgaactgggccacccccaacctgtag

SEQ ID NO: 8308 - DNA, 906 bp, Artificial Sequence
  derived and/or modified sequence
atggccgaccagcccaagcccatcagccccctgaagaacctgctggcgggaggctttgggggtgtgtgccttgtgttcgttggccaccccctggacacagtcaaagtccggctacagacccagccaccctccttacctggacagccgcccatgtacagcggcaccttcgactgtttccgaaagacacttttcagggagggcattaccgggctctaccgaggtatggctgccccaatcatcggtgtgaccccaatgtttgccgtctgcttcttcggctttggactaggcaaaaagctgcagcaaaagcaccccgaggatgtgctttcttatccacaattgttcgcagctgggatgttgagtggagtgtttaccaccggaatcatgacgccgggcgagcggattaagtgtttactccagatccaggcaagttctggtgagtccaagtataccgggacactcgattgcgccaagaaactgtaccaggaatttggaatccgcgggatctacaaaggcactgtgctcaccctaatgcgggacgtaccggcctctggcatgtattttatgacgtacgagtggctcaagaatattttcacccccgaaggcaagcgcgtttcagagctgagtgccccaagaatccttgtggcagggggtatagccggcatatttaactgggcagtggctatacccccagatgttttaaagtctagattccagacagctccaccaggcaagtatccaaacggttttcgggatgtgctgcgggagctgattcgtgatgaaggagtgacatctctctataaaggcttcaatgcagtgatgatacgcgccttccctgcgaacgcggcatgttttcttggattcgaggtggctatgaagttcctgaattgggccacacccaatctgtag

SEQ ID NO: 8309 - DNA, 756 bp, Artificial Sequence
  derived and/or modified sequence
atgtacagcggcaccttcgactgcttccggaagaccctgttccgggagggaataaccggactgtacagagggatggccgcccctatcatcggcgtgactcctatgttcgccgtgtgctttttcggctttggactaggaaaaaagttgcaacagaaacaccccgaggacgtactgtcttaccctcagctctttgcagccggcatgttgtcgggagtgttcacaacagggataatgactcccggggaacgcattaaatgtctgctgcagattcaggcttcctccggcgagagtaaatacacaggcactttggattgcgccaagaagctgtatcaggaattcggcatcagaggcatctacaagggaacagtgttaacactcatgagagatgttccagcgtccggcatgtactttatgacctatgagtggttgaagaacatctttacccctgagggtaaacgggtaagcgagctgtccgctccgcggatacttgtggcaggcggaattgcaggtatctttaactgggcagtagccatccctcctgacgtcctgaagtctcgctttcagaccgctcctcctggcaaataccccaatggatttcgcgacgttcttcgggagctgattagggacgagggagtgacctccctctataagggctttaacgctgtcatgattagagcctttcctgccaatgctgcatgcttcctggggtttgaggtcgccatgaaatttcttaattgggcgacacccaatttgtag

SEQ ID NO: 8310 - DNA, 906 bp, Artificial Sequence
  derived and/or modified sequence
atggcagaccagcccaaaccaatatccccactaaagaatctgctggcaggtggatttggaggtgtctgcttggtgttcgtcggccaccctctcgacacagtgaaagtacgactgcagacgcaacccccatctctgccgggacagccgccaatgtactccgggactttcgactgctttcggaagaccctgttccgagagggtatcacaggtctttacagaggaatggctgccccaattattggagtgacacccatgttcgctgtctgcttcttcggctttggattgggcaaaaagttgcagcagaaacatcctgaagacgttcttagctaccctcagctgttcgccgcaggcatgctgtccggcgtatttactaccggcatcatgacccctggggaaaggattaaatgtttgcttcagattcaggccagcagcggagaatctaaatacacagggaccctcgactgcgcgaaaaaactctatcaggagtttggaatcagggggatttacaagggtactgtgttgaccctgatgagagatgtcccggctagcggcatgtactttatgacatatgaatggctcaagaacattttcacaccagagggcaagcgagtgtctgaactgtccgccccaagaatcctggtcgcagggggaatagccggaatttttaactgggccgtggctatccctcctgacgtgctaaagtcaagatttcagactgctcccccaggaaagtaccccaacgggtttagggacgtcttgagggaacttattcgcgacgagggcgtcaccagcctttacaagggatttaacgctgtgatgatcagggctttcccagctaacgctgcgtgttttctgggctttgaagtcgccatgaaattcctgaactgggccacacccaacctatag

SEQ ID NO: 8311 - DNA, 756 bp, Artificial Sequence
  derived and/or modified sequence
atgtatagcgggacttttgactgctttcgtaaaaccctgtttagggaaggcattacggggctttataggggcatggcagctccgattattggcgtcaccccaatgttcgccgtgtgctttttcggatttggtctgggaaagaaacttcagcagaagcaccccgaggacgtgctctcctacccccagctgtttgcagcaggaatgctgagtggggttttcacgactggtataatgactcctggagagcgtattaaatgcctcctgcaaatccaggcttcctccggcgagagcaaatacacaggcactctggattgcgctaagaaactttaccaagagttcggaatccgtgggatttataaggggactgttttaacactcatgcgagacgtaccagcctccggcatgtacttcatgacctatgagtggctaaaaaacatctttacgcctgagggaaagcgcgtgagtgagctcagcgcacctcgcattctggtggccggaggcatcgccggtatcttcaattgggcagtggctatacctcccgacgtcctcaaatcccgtttccaaacggctcctccaggcaagtatcctaatggatttagggatgtcctacgggagttgattagagacgagggagttacctccctgtacaaagggtttaatgcagtcatgatcagggctttccctgccaacgcggcatgtttcctgggattcgaagtcgctatgaaatttctgaactgggcaactccgaacctctag

SEQ ID NO: 8312 - DNA, 1879 bp, Artificial Sequence
  derived and/or modified sequence
atcgaagcggggccgaggccggaagcagccccgggcggaagccctaccgtgccaactgggccctcctcccgacctgccccgggctcgtgccccgcccacccaaaagtgggtgaaaggtcggcggcgccggcactgcagctggggctgagaagccaggacggcccgagaactgacagacggagtgacagacggactgaccatggccgaccagccaaaacccatcagcccgctcaagaacctgctggccggcggctttggcggcgtgtgcctggtgttcgtcggtcaccctctggacacggtcaaggtccgactgcagacacagccaccgagtttgcctggacaacctcccatgtactctgggacctttgactgtttccggaagactctttttagagagggcatcacggggctatatcggggaatggctgcccctatcatcggggtcactcccatgtttgccgtgtgcttctttgggtttggtttggggaagaaactacaacagaaacacccagaagatgtgctcagctatccccagctttttgcagctgggatgttatctggcgtattcaccacaggaatcatgactcctggagaacggatcaagtgcttattacagattcaggcttcttcaggagaaagcaagtacactggtaccttggactgtgcaaagaagctgtaccaggagtttgggatccgaggcatctacaaagggactgtgcttacccttatgcgagatgtcccagctagtggaatgtatttcatgacatatgaatggctgaaaaatatcttcactccggagggaaagagggtcagtgagctcagtgcccctcggatcttggtggctgggggcattgcagggatcttcaactgggctgtggcaatccccccagatgtgctcaagtctcgattccagactgcacctcctgggaaatatcctaatggtttcagagatgtgctgagggagctgatccgggatgaaggagtcacatccttgtacaaagggttcaatgcagtgatgatccgagccttcccagccaatgcggcctgtttccttggctttgaagttgccatgaagttccttaattgggccacccccaacttgtgaggctgaaggctgctcaagttcacttctggatgctggaagctgtcgttgaggagaaggagtagtaagcagaactaagcagtcttggagggcaaggggaggggaatggtgagatccgagccctgtgcatggacttggtgagactgttgccttaatgacatcctgcaccgtgtataacttagtgtgtcattttgaaacttgaattcattcttatcaatttaagggatcttaaaaggatttggaaatggaacaagtagcttccagaccagatactacctgtggcaagaatgctgcctaccagttaactgctggtcctaccacagtcaaagtattcctcattaaagagagaatctcaggttctcactggaggcactgtgcatattttcaaccagatcaccaggagctgagatcttcttcagtccctagccaggaatacccatttgatttccagggtgccatctaatcctgggctgtacatgtggatatggacttgaggcccacctctgtgtccaagtggattgagcatatatgcctaggaggagatagactgttaatcgttggattttgattttttttttttatgcctgcaaataatcaaaagtaaaactggagtagcctaattttctgggagcaggtggagaactttccctcctacacagtgaggacagtcccagtctgctgggataagtgagaaagcccagggtgtaggaaggccctttttacatactcttttctcatgagagctcactattttaacaataaacaataaacgttgtt

SEQ ID NO: 8313 - DNA, 1383 bp, Artificial Sequence
  derived and/or modified sequence
aaaagtgggtgaaaggtcggcggcgccggcactgcagctggggctgagaagccaggacggcccgagaactgacagacggagtgacagacggactgaccatggccgaccagccaaaacccatcagcccgctcaagaacctgctggccggcggctttggcggcgtgtgcctggtgttcgtcggtcaccctctggacacggtcaaggggaggttatgcctgactatgggagatctgaaggacaatatgagggattttggatgtaaaggtccgactgcagacacagccaccgagtttgcctggacaacctcccatgtactctgggacctttgactgtttccggaagactctttttagagagggcatcacggggctatatcggggaatggctgcccctatcatcggggtcactcccatgtttgccgtgtgcttctttgggtttggtttggggaagaaactacaacagaaacacccagaagatgtgctcagctatccccagctttttgcagctgggatgttatctggcgtattcaccacaggaatcatgactcctggagaacggatcaagtgcttattacagattcaggcttcttcaggagaaagcaagtacactggtaccttggactgtgcaaagaagctgtaccaggagtttgggatccgaggcatctacaaagggactgtgcttacccttatgcgagatgtcccagctagtggaatgtatttcatgacatatgaatggctgaaaaatatcttcactccggagggaaagagggtcagtgagctcagtgcccctcggatcttggtggctgggggcattgcagggatcttcaactgggctgtggcaatccccccagatgtgctcaagtctcgattccagactgcacctcctgggaaatatcctaatggtttcagagatgtgctgagggagctgatccgggatgaaggagtcacatccttgtacaaagggttcaatgcagtgatgatccgagccttcccagccaatgcggcctgtttccttggctttgaagttgccatgaagttccttaattgggccacccccaacttgtgaggctgaaggctgctcaagttcacttctggatgctggaagctgtcgttgaggagaaggagtagtaagcagaactaagcagtcttggagggcaaggggaggggaatggtgagatccgagccctgtgcatggacttggtgagactgttgccttaatgacatcctgcaccgtgtataacttagtgtgtcattttgaaacttgaattcattcttatcaatttaagggatcttaaaaggatttggaaatggaacaagtagcttccagaccagatactacctgtggcaagaatgctgcctaccagttaactgctggtcctaccac

SEQ ID NO: 8314 - DNA, 906 bp, Artificial Sequence
  derived and/or modified sequence
atggccgaccagcccaagcccatcagccccctgaagaacctgctggccggcggcttcggcggcgtgtgcctggtgttcgtgggccaccccctggacaccgtgaaggtgagactgcagacccagccccccagcctgcccggccagccccccatgtacagcggcaccttcgactgcttcagaaagaccctgttcagagagggcatcaccggcctgtacagaggcatggccgcccccatcatcggcgtgacccccatgttcgccgtgtgcttcttcggcttcggcctgggcaagaagctgcagcagaagcaccccgaggacgtgctgagctacccccagctgttcgccgccggcatgctgagcggcgtgttcaccaccggcatcatgacccccggcgagagaatcaagtgcctgctgcagatccaggccagcagcggcgagagcaagtacaccggcaccctggactgcgccaagaagctgtaccaggagttcggcatcagaggcatctacaagggcaccgtgctgaccctgatgagagacgtgcccgccagcggcatgtacttcatgacctacgagtggctgaagaacatcttcacccccgagggcaagagagtgagcgagctgagcgcccccagaatcctggtggccggcggcatcgccggcatcttcaactgggccgtggccatcccccccgacgtgctgaagagcagattccagaccgccccccccggcaagtaccccaacggcttcagagacgtgctgagagagctgatcagagacgagggcgtgaccagcctgtacaagggcttcaacgccgtgatgatcagagccttccccgccaacgccgcctgcttcctgggcttcgaggtggccatgaagttcctgaactgggccacccccaacctgtag

SEQ ID NO: 8315 - DNA, 756 bp, Artificial Sequence
  derived and/or modified sequence
atgtacagcggcaccttcgactgcttcagaaagaccctgttcagagagggcatcaccggcctgtacagaggcatggccgcccccatcatcggcgtgacccccatgttcgccgtgtgcttcttcggcttcggcctgggcaagaagctgcagcagaagcaccccgaggacgtgctgagctacccccagctgttcgccgccggcatgctgagcggcgtgttcaccaccggcatcatgacccccggcgagagaatcaagtgcctgctgcagatccaggccagcagcggcgagagcaagtacaccggcaccctggactgcgccaagaagctgtaccaggagttcggcatcagaggcatctacaagggcaccgtgctgaccctgatgagagacgtgcccgccagcggcatgtacttcatgacctacgagtggctgaagaacatcttcacccccgagggcaagagagtgagcgagctgagcgcccccagaatcctggtggccggcggcatcgccggcatcttcaactgggccgtggccatcccccccgacgtgctgaagagcagattccagaccgccccccccggcaagtaccccaacggcttcagagacgtgctgagagagctgatcagagacgagggcgtgaccagcctgtacaagggcttcaacgccgtgatgatcagagccttccccgccaacgccgcctgcttcctgggcttcgaggtggccatgaagttcctgaactgggccacccccaacctgtag

SEQ ID NO: 8316 - protein, 164 aa, Artificial Sequence
  derived and/or modified sequence
MSEPAGDVRQNPCGSKACRRLFGPVDSEQLSRDCDALMAGCIQEARERWNFDFVTETPLEGDFAWERVRGLGLPKLYLPTGPRRGRDELGGGRRPGTSPALLQGTAEEDHVDLSLSCTLVPRSGEQAEGSPGGPGDSQGRKRRQTSMTDFYHSKRRLIFSKRKP

SEQ ID NO: 8317 - DNA, 495 bp, Artificial Sequence
  derived and/or modified sequence
atgagcgagcccgccggcgacgtgagacagaacccctgcggcagcaaggcctgcagaagactgttcggccccgtggacagcgagcagctgagcagagactgcgacgccctgatggccggctgcatccaggaggccagagagagatggaacttcgacttcgtgaccgagacccccctggagggcgacttcgcctgggagagagtgagaggcctgggcctgcccaagctgtacctgcccaccggccccagaagaggcagagacgagctgggcggcggcagaagacccggcaccagccccgccctgctgcagggcaccgccgaggaggaccacgtggacctgagcctgagctgcaccctggtgcccagaagcggcgagcaggccgagggcagccccggcggccccggcgacagccagggcagaaagagaagacagaccagcatgaccgacttctaccacagcaagagaagactgatcttcagcaagagaaagccctag

SEQ ID NO: 8318 - DNA, 495 bp, Artificial Sequence
  derived and/or modified sequence
atgtctgagcccgccggcgatgtccgtcagaatccatgcgggtctaaggcctgcagacgcctgtttggtcctgtggatagcgagcaactgtctcgcgattgtgacgctctgatggctggctgcattcaagaagcccgtgagagatggaattttgattttgtgaccgagacgccactggagggggactttgcatgggagcgtgtgcgcggtctcggcctgccaaagctctatctgcccacggggccccggcggggaagagacgaattggggggaggtcgacgaccaggaactagccccgccttactgcaggggaccgcagaggaggaccatgtggatctgtccctgagttgtaccctggtcccccgttctggggagcaagcggaggggtccccagggggccccggcgacagtcagggaagaaaacgaaggcagacatccatgactgatttctaccactctaagcgaaggctgatcttctctaaacggaaaccttag

SEQ ID NO: 8319 - DNA, 495 bp, Artificial Sequence
  derived and/or modified sequence
atgtccgaaccagctggagatgtccggcaaaacccgtgtggcagtaaagcttgtcggagactgtttgggcccgtggactccgagcagctgagcagagactgcgatgcattgatggctgggtgtatccaggaagcccgtgagcgctggaactttgatttcgtcactgaaacgcccctggagggcgacttcgcctgggaacgagtcagaggtttagggctgcctaagctgtatttgcctacgggaccaaggaggggtcgagacgagctgggggggggtagacgaccaggaacgagcccagcactattgcagggaacagccgaggaggatcacgtggatctgagcctgagttgcacccttgtacccagaagtggggaacaggcggagggctccccaggaggtcctggcgattctcaagggcgaaaacgaagacagacctccatgactgacttctatcattctaaacgacggctcatcttttccaagcgcaagccatag

SEQ ID NO: 8320 - DNA, 495 bp, Artificial Sequence
  derived and/or modified sequence
atgtcagaacctgcaggagacgtgcgccaaaacccatgcggtagcaaagcctgtcgtcgactgttcggacccgtggacagtgagcagctcagtagggactgtgacgcgctgatggcagggtgtatccaggaagctagagaacgttggaacttcgactttgtgacagaaactcctttggaaggcgactttgcctgggaaagagtgaggggtctgggcctccccaaactctacttaccgacaggtcctcggcggggtagagacgagcttgggggtggccgtcgacctggaacatctcccgccttattacagggcactgcagaggaggaccatgtggacctttccctgtcatgcactttggttccacggtctggtgaacaggccgagggctcgcccggcggccctggggattcccaggggcgaaaaagaagacagacttccatgactgatttttatcatagcaaaagacgcttgattttttctaagagaaagccctag

SEQ ID NO: 8321 - DNA, 495 bp, Artificial Sequence
  derived and/or modified sequence
atgtctgagcctgctggagatgtgcggcagaacccctgtggcagcaaggcctgcagaagactctttggacctgtggacagcgagcagctgagccgggactgtgatgccctgatggccggctgcatccaggaggcccgggagcgctggaactttgattttgtgacagagacccccctggagggggactttgcctgggagcgggtgcggggcctgggcctgcccaagctgtacctgcccaccggcccccggcggggcagagatgagctgggcggcggcagaagacctggcaccagccctgccctgctgcagggcacagctgaggaggaccacgtggacctgagcctgagctgcaccctggtgcccaggtctggagagcaggccgagggcagccctgggggccctggggacagccagggcaggaagaggcggcagacctccatgacagacttctaccacagcaagagaagactcatcttcagcaagaggaagccctag

SEQ ID NO: 8322 - DNA, 495 bp, Artificial Sequence
  derived and/or modified sequence
atgagcgagcccgccggcgacgtgcggcagaacccctgcggcagcaaagcttgtcgtcgtctgtttggccctgtggatagcgaacagctgagtagggattgtgacgcactgatggccggttgcattcaagaagcgcgagagcggtggaactttgactttgtcactgaaactccactggagggtgacttcgcgtgggagcgcgtcagagggctcggactgccaaagctctacctaccgacaggaccaaggagagggcgggatgaattgggtggcggccgcaggccgggaacttctccagccctattgcagggcaccgcagaagaagaccatgtggatcttagcctgagttgtacacttgtgcctcgatcaggcgagcaggctgaagggtccccaggcggacccggcgactcccagggtcgtaagcgtcgtcagacctcgatgactgacttctaccattctaaaagacggcttatcttctctaagcgcaagccatag

SEQ ID NO: 8323 - DNA, 495 bp, Artificial Sequence
  derived and/or modified sequence
atgagcgagcccgccggcgacgtgcggcagaacccctgcggcagcaaagcctgccgccgcctgtttggtcctgtcgatagcgagcagttatcacgcgactgcgatgccttgatggctggctgcattcaggaggcaagggagcgctggaattttgatttcgttaccgaaacgccattggaaggcgatttcgcttgggaacgcgtgcgcggccttggactgccaaagctgtatctccccaccgggccacggcgcggcagagacgagctgggagggggaagaaggccggggactagccctgctctgctgcaagggaccgctgaggaggaccacgtcgatctcagtctgagctgcacccttgtgccccgatcgggcgagcaagcagaagggagcccaggcgggcccggggacagccagggtcgcaagcgtagacaaactagcatgacagatttctaccacagtaagcgtcgactcatcttctctaaacgaaaaccttag

SEQ ID NO: 8324 - DNA, 495 bp, Artificial Sequence
  derived and/or modified sequence
atgagcgagcccgccggcgacgtgcggcagaacccctgcggcagcaaagcatgcagacgcctgtttgggccagtcgacagcgagcagctgtcaagagactgcgatgcactgatggcagggtgtatacaggaggctcgtgagcgatggaattttgattttgttaccgagacacctctcgagggggacttcgcctgggagcgggtgcggggccttgggcttccgaagttgtacctcccaactggtcctcgacgagggcgagacgaactaggaggagggcgaagaccaggtacatcacctgcactacttcagggcacagcagaagaggaccacgttgacctgagcctgtcatgtacactggtgcccagatctggcgagcaagccgaaggctctccgggcggaccaggagactcacagggacgcaagcgacgacagacatccatgacggatttctatcactctaagaggcggctgatctttagcaagcggaagccctag

SEQ ID NO: 8325 - DNA, 495 bp, Artificial Sequence
  derived and/or modified sequence
atgagcgaacccgcaggcgacgtgagacagaacccctgcggatccaaggcatgtaggagactgtttggcccagtagactccgagcaattaagcagggattgcgatgccctcatggccggttgtattcaagaggccagagaaaggtggaattttgatttcgtgaccgaaacacccctggaaggcgatttcgcctgggaacgcgtccgcggtctgggtctaccgaagctgtacctgccgacaggcccaaggagagggcgtgatgagctaggaggagggcgacgtcctggcactagcccagccctattacagggtaccgccgaagaggatcacgtcgacttaagcctgtcatgtaccctggtgccccgttctggggagcaggccgagggttcaccagggggtcctggtgactctcaagggagaaagcgcagacagacttcaatgacagacttctaccacagcaagaggcggctgattttctccaagcggaagccatag

SEQ ID NO: 8326 - DNA, 495 bp, Artificial Sequence
  derived and/or modified sequence
atgagcgagccggctggcgacgttcgccagaacccttgcggatcgaaggcctgccggaggttgtttggtcctgtcgactccgagcagctttctagggattgcgatgctcttatggccggttgtatccaagaagctcgggagcgctggaacttcgactttgtgactgagacacccctggagggcgattttgcctgggagagggtgcgcggactcggactgcctaagctgtatctccctacaggccctagacgtggccgagacgaattgggcggaggccgaaggcctggcacctcacccgctctgctgcaggggactgccgaagaagatcacgtcgatctatctctgagttgcacgctagtgccacgcagcggcgaacaagccgaagggagcccagggggtcctggcgatagccaaggtcgtaaacgtaggcagacaagcatgaccgacttttatcactcaaaaagacgtttaatattcagcaagaggaagccttag

SEQ ID NO: 8327 - DNA, 495 bp, Artificial Sequence
  derived and/or modified sequence
atgagcgagccagctggagatgtgagacaaaatccctgcggctcaaaagcctgccggaggcttttcgggcctgttgacagtgagcagctgagcagagattgcgatgctctcatggccggatgcattcaagaagctagagaaaggtggaattttgattttgtcacagagacccctctcgaaggggactttgcttgggagcgtgtgaggggtctcggcctccccaaattgtacctccccactggaccccgacgaggacgcgacgagctcggcggaggcagacgccctggtacatcaccagccctgctccaggggacggccgaggaggaccacgtggatcttagtctgtcttgtaccctggtgccacggtccggtgaacaagccgagggctctcctggcggtccaggtgacagtcaaggtcgtaaacggcgtcagactagcatgacagacttctaccactcaaaacgaaggttgattttctccaagcgcaaaccatag

SEQ ID NO: 8328 - protein, 653 aa, Artificial Sequence
  derived and/or modified sequence
MADTLPSEFDVIVIGTGLPESIIAAACSRSGRRVLHVDSRSYYGGNWASFSFSGLLSWLKEYQENSDIVSDSPVWQDQILENEEAIALSRKDKTIQHVEVFCYASQDLHEDVEEAGALQKNHALVTSANSTEAADSAFLPTEDESLSTMSCEMLTEQTPSSDPENALEVNGAEVTGEKENHCDDKTCVPSTSAEDMSENVPIAEDTTEQPKKNRITYSQIIKEGRRFNIDLVSKLLYSRGLLIDLLIKSNVSRYAEFKNITRILAFREGRVEQVPCSRADVFNSKQLTMVEKRMLMKFLTFCMEYEKYPDEYKGYEEITFYEYLKTQKLTPNLQYIVMHSIAMTSETASSTIDGLKATKNFLHCLGRYGNTPFLFPLYGQGELPQCFCRMCAVFGGIYCLRHSVQCLVVDKESRKCKAIIDQFGQRIISEHFLVEDSYFPENMCSRVQYRQISRAVLITDRSVLKTDSDQQISILTVPAEEPGTFAVRVIELCSSTMTCMKGTYLVHLTCTSSKTAREDLESVVQKLFVPYTEMEIENEQVEKPRILWALYFNMRDSSDISRSCYNDLPSNVYVCSGPDCGLGNDNAVKQAETLFQEICPNEDFCPPPPNPEDIILDGDSLQPEASESSAIPEANSETFKESTNLGNLEESSE

SEQ ID NO: 8329 - protein, 505 aa, Artificial Sequence
  derived and/or modified sequence
MSCEMLTEQTPSSDPENALEVNGAEVTGEKENHCDDKTCVPSTSAEDMSENVPIAEDTTEQPKKNRITYSQIIKEGRRFNIDLVSKLLYSRGLLIDLLIKSNVSRYAEFKNITRILAFREGRVEQVPCSRADVFNSKQLTMVEKRMLMKFLTFCMEYEKYPDEYKGYEEITFYEYLKTQKLTPNLQYIVMHSIAMTSETASSTIDGLKATKNFLHCLGRYGNTPFLFPLYGQGELPQCFCRMCAVFGGIYCLRHSVQCLVVDKESRKCKAIIDQFGQRIISEHFLVEDSYFPENMCSRVQYRQISRAVLITDRSVLKTDSDQQISILTVPAEEPGTFAVRVIELCSSTMTCMKGTYLVHLTCTSSKTAREDLESVVQKLFVPYTEMEIENEQVEKPRILWALYFNMRDSSDISRSCYNDLPSNVYVCSGPDCGLGNDNAVKQAETLFQEICPNEDFCPPPPNPEDIILDGDSLQPEASESSAIPEANSETFKESTNLGNLEESSE

SEQ ID NO: 8330 - DNA, 1962 bp, Artificial Sequence
  derived and/or modified sequence
atggcggacactctccccagcgagttcgatgtgatcgttattggcaccggactccctgagtctattattgccgcggcatgtagtcggtcaggccggcgcgtgcttcatgtggattcaagaagctactacgggggcaactgggcgtcgttctcattctccggtttgctttcttggctcaaagaatatcaggagaattctgacattgtgtcagacagccccgtgtggcaagaccagattctcgaaaacgaagaggccatcgcactgtccagaaaagataagacaattcagcacgtagaagtcttttgttacgcttcacaggaccttcacgaagacgtggaagaagctggtgcccttcagaagaaccatgccttagtgacaagtgccaactcaacagaagcagcagacagtgcattcctgccaaccgaggatgaaagcctgtcgaccatgagttgcgagatgctgactgaacagactccgtcaagcgatccagaaaatgccctcgaagtgaatggagcggaggtgaccggcgaaaaggagaaccattgtgatgataagacatgtgtcccatccacaagcgctgaagacatgtcagaaaacgtccccatcgctgaggataccactgagcagcccaagaagaataggattacctacagtcagatcataaaggaaggaaggcgctttaatattgaccttgtctcaaaactgctgtattcacgagggttgctgattgatctcctgatcaaaagcaatgtgtctagatatgccgagttcaaaaacattacccgaattctggcctttagggaaggcagggtagagcaagtgccatgttcacgagcagatgtgtttaattccaagcaactgactatggtggaaaagcggatgcttatgaagttcttgaccttctgcatggagtatgaaaagtacccagatgagtacaaaggctatgaggaaatcactttctatgaatacctaaaaacacaaaagctaacccctaaccttcaatacatcgtgatgcatagtattgcgatgacgagcgagaccgcctcaagcactattgatgggctgaaagccactaagaacttcctccattgtcttggcaggtatggcaatactccgttcttatttcctctgtacggccagggagagctccctcagtgcttctgtcgaatgtgcgccgtcttcggaggcatctactgcctaaggcattccgttcagtgcctcgtagtggacaaagagagtcgaaaatgtaaagctatcatcgaccaattcggacagcgtatcatctccgaacactttttggtggaggactcttattttccagagaatatgtgctcgcgagtccagtacagacaaatttcccgtgcagtccttattactgatcggagcgtcctaaaaaccgactctgaccagcagatatctattctgaccgtgccggcagaagagcccggaacatttgccgtgcgcgttatcgaactatgctcctccactatgacatgcatgaaaggaacctatctcgtgcacctcacctgcacttcttccaagaccgcccgcgaagatttggaatcagtcgtgcaaaagcttttcgtgccatacacagagatggaaattgagaacgagcaggtcgagaaacctcgaattctgtgggccctgtacttcaatatgcgggactcctcagatatctcaagaagttgttacaacgatctgccaagtaatgtttacgtgtgttctggaccagactgcgggctgggaaacgataacgcagtgaaacaagctgaaacactctttcaggaaatatgccctaacgaagatttctgccctcccccacccaacccggaggatatcattctggatggggattccctccaaccagaagcctcagaatcatctgctatccccgaagccaattcagaaacgtttaaagaatccaccaatcttggaaatctggaagagtccagcgaatag

SEQ ID NO: 8331 - DNA, 1962 bp, Artificial Sequence
  derived and/or modified sequence
atggctgacaccctgcccagcgagtttgatgtgattgtcatcggcaccggcctgcctgagagcatcatcgctgctgcctgcagccgcagcggccggcgggtgctgcacgtggacagccgcagctactatggaggcaactgggccagcttctccttcagcggcctgctgtcctggctgaaggagtaccaggagaacagcgacatcgtgtctgacagccctgtgtggcaggaccagatcctggagaatgaggaggccatcgccctgagcaggaaggacaagaccatccagcacgtggaggtgttctgctacgccagccaggacctgcatgaagatgtggaggaggccggggccctgcagaagaaccacgccctggtgaccagcgccaacagcacagaagctgctgacagcgccttcctgcccacagaagatgagagcctgagcaccatgagctgtgagatgctgacagagcagacccccagcagtgaccctgaaaatgccctggaggtgaatggagctgaggtgactggagagaaggagaaccactgtgatgacaagacctgtgtgcccagcaccagcgctgaggacatgtctgaaaatgtgcccatcgccgaggacaccacagagcagcccaagaagaaccgcatcacctacagccagatcatcaaggagggccgccgcttcaacatcgacctggtgtccaagctgctgtacagccggggcctgctgattgacctgctgatcaagagcaatgtgagccgctatgcagagttcaagaacatcacccgcatcctggccttccgggagggccgggtggagcaggtgccctgcagcagagcagatgtgttcaacagcaagcagctgaccatggtggagaagaggatgctgatgaagttcctgaccttctgcatggagtatgagaagtacccagatgagtacaagggctatgaggagatcaccttctatgagtacctgaagacccagaagctgacccccaacctgcagtacatcgtgatgcacagcatcgccatgaccagcgagacagccagcagcaccattgatggcctgaaggccaccaagaacttcctgcactgcctgggccgctatggcaacacccccttcctgttccccctgtatggccagggcgagctgccccagtgcttctgcaggatgtgtgctgtgtttggaggcatctactgcctgcggcacagcgtgcagtgcctggtggtggacaaggagagcaggaagtgcaaggccatcatcgaccagtttggccagaggatcatcagcgagcacttcctggtggaggacagctacttccctgagaacatgtgcagccgggtgcagtaccggcagatcagcagagctgtgctgatcacagacagatctgtgctgaagacagacagcgaccagcagatcagcatcctgactgtgcctgctgaggagcccggcacctttgctgtgcgggtcatcgagctgtgcagcagcaccatgacctgcatgaagggcacctacctggtgcacctgacctgcaccagcagcaagacagcccgggaggacctggagagcgtggtgcagaagctgtttgtgccctacacagagatggagattgaaaatgagcaggtggagaagccccgcatcctgtgggccctgtacttcaacatgagggacagcagtgacatcagccgcagctgctacaatgacctgcccagcaatgtgtatgtgtgcagcggccctgactgtggcctgggcaatgacaatgctgtgaagcaggccgagaccctcttccaggagatctgccccaatgaagacttctgccccccaccacccaaccctgaggacatcatcctggatggagacagcctgcagcctgaggccagcgagagcagcgccatccctgaggccaacagcgagaccttcaaggagagcaccaacctgggcaacctggaggagagcagcgagtag

SEQ ID NO: 8332 - DNA, 1962 bp, Artificial Sequence
  derived and/or modified sequence
atggccgacaccctgcccagcgagttcgacgtgatcgtgatcggcacagggctccctgaaagcattatagccgcagcctgttccagatcagggaggagagtgttgcacgtagatagccgctcctattatggaggcaactgggcctccttctctttttcggggctcttgtcctggttgaaggaataccaggagaattccgatattgtgtctgactcccccgtgtggcaggaccagatcttggagaatgaggaagctattgccctcagcaggaaggataaaaccattcaacatgtggaagtattctgctacgcgtctcaagacctacatgaggacgtggaggaggccggagcactgcagaagaaccatgctctcgtcactagtgccaattccacagaggccgccgactcagcgttcttgccaaccgaggacgagagtctgagcacaatgagctgcgagatgctgaccgaacaaacaccatcttccgatccggaaaatgcgctggaagtcaatggcgcagaggtcaccggcgaaaaagagaaccactgtgatgacaagacttgtgtgccctcaacatccgctgaggatatgtccgaaaatgtgcccatagcggaggatacaaccgaacagcccaagaaaaatagaattacttactcccagattatcaaggagggccgcagattcaacatcgacctcgtctcaaaactgttatattctcgcgggctcctgattgatctccttataaaatccaatgtcagccgctatgcggaattcaagaacatcacgaggattctcgcctttcgagagggcagggtagaacaggtcccatgtagtcgggccgatgtcttcaatagtaaacagctaactatggttgaaaaaaggatgctcatgaaatttctgacattctgcatggaatatgaaaagtaccctgacgagtataagggatatgaagagatcacattctacgaatacctaaagacccagaaattgactccgaatcttcagtatatcgtaatgcacagtatcgctatgactagtgaaaccgcaagttccaccattgacggcctcaaagctacgaaaaatttcttacattgcctggggcgttacgggaacacaccttttttattccctctttacgggcagggcgaactgcctcagtgcttttgtaggatgtgcgccgtgttcggcgggatttactgccttcgtcactctgtgcagtgtctagtcgtcgacaaagaaagtcggaagtgtaaagcaataattgaccaattcgggcagcgcataatcagcgagcactttctcgtagaggattcttactttccagaaaatatgtgttctcgggtgcagtatcgccaaatttcacgcgccgtcctcatcaccgatcggtccgtccttaaaaccgactcagaccagcagatttccatcctaacggtgcccgctgaagaacccggcacctttgctgtgcgcgtgattgagctctgctctagcacaatgacctgcatgaagggcacctacttggtccacttaacatgcactagtagcaaaaccgctcgagaagacctggagtcagtggttcaaaaactctttgtgccttacaccgaaatggaaatcgaaaacgagcaggtcgagaagcctagaatcctttgggcgctctacttcaatatgcgtgattcatctgacatctctcggtcgtgctacaatgacctccccagtaacgtttacgtctgtagtggaccagattgtgggcttggtaacgataatgccgtgaaacaggccgaaactttgtttcaggaaatctgtcctaacgaagacttctgtccaccaccaccaaacccagaagacatcatcctggatggagacagtctgcagcccgaagccagcgagtcctcagctattccagaggccaacagcgaaacgtttaaagaatccacgaacttgggtaacttagaggagagctctgaatag

SEQ ID NO: 8333 - DNA, 1962 bp, Artificial Sequence
  derived and/or modified sequence
atggctgacactctgccctctgagtttgatgttatcgtgattggaacaggactccccgagagtatcatcgccgcagcttgtagtcgatccgggagacgtgtattgcatgtggattctagaagttattacgggggaaattgggcttcctttagcttctcaggattgttatcctggctcaaggaatatcaggaaaacagcgacatagtgtccgatagccctgtctggcaggaccagatcctggaaaatgaggaggccatcgccttgtctcgaaaagataaaactattcagcacgtggaagtattttgctatgcatcccaggacctgcacgaggacgtggaagaagctggggctctgcagaaaaaccatgcgctggtgacctcggccaactctaccgaggccgcagatagtgcctttctcccaacagaggatgagtccctcagcactatgtcatgtgaaatgctgaccgagcagacacccagcagcgaccctgagaatgcactggaggttaacggggcagaagtaacaggtgagaaggaaaaccattgcgacgacaaaacttgtgttccatcaacgtccgctgaggacatgtctgagaatgtgccaatcgcagaggacactactgaacagcccaaaaagaatcggattacctactctcaaatcatcaaggagggccgtcgattcaacattgaccttgtgtcaaagctgttgtactcaagagggttgttgattgatctactgattaaatcgaacgtttctagatacgcagagtttaaaaatataacccgtatcctcgctttccgggaggggagggtggaacaagtaccgtgttcgagggctgacgtgtttaactcaaaacaattgaccatggttgagaaacgtatgcttatgaagtttctgactttctgtatggaatacgagaaatatccagatgagtataaagggtacgaggaaatcactttttatgaatatctgaagactcaaaaacttaccccgaacttgcagtacatagtgatgcatagcatcgcgatgacgtcggaaaccgcgagctcaaccattgacggactgaaggcaactaagaacttcctgcactgtctaggcaggtatggaaatacaccatttctatttcctttgtatggccagggagagctgccacagtgtttttgtaggatgtgcgctgtgttcggaggcatctactgcttacgccattccgttcagtgtctcgtagtcgacaaggagtcgcgaaaatgtaaagcaattatcgatcagtttggacaacgcatcatctccgagcacttcctcgtggaagattcatacttccctgagaacatgtgctcaagagtgcagtaccgccaaattagccgggcagtgctgatcacagatcgatctgtgcttaaaacagatagtgaccaacagattagtatcctgactgtgcccgcagaggagcccggtacgttcgcagtgagggtgattgagctgtgtagctctactatgacttgcatgaagggtacctacctcgttcatctgacgtgcacctcctctaaaacagctcgagaggatctcgagtctgttgttcagaagttgttcgtcccttacaccgaaatggaaatagaaaatgaacaggtggagaagccccgaatcctatgggcactatacttcaacatgcgcgatagtagcgacatatcacgatcctgttacaacgacttgccatctaatgtatatgtgtgctccggtcccgactgtggcctgggtaatgataatgctgttaaacaggctgagaccttgttccaggagatttgcccgaatgaggatttttgccccccaccacccaatccagaggatatcatactggatggtgacagccttcaacctgaggcatccgagtccagtgcgatacctgaagccaattcggagaccttcaaggaatcaactaacctgggcaacctggaagagagtagtgagtag

SEQ ID NO: 8334 - DNA, 5442 bp, Artificial Sequence
  derived and/or modified sequence
taatagtcacatgacacgtttcccgtcaagatggcggatactctcccttcggagtttgatgtgatcgtaatagggacgggtttgcctgaatccatcattgcagctgcatgttcaagaagtggccggagagttctgcatgttgattcaagaagctactatggaggaaactgggccagttttagcttttcaggactattgtcctggctaaaggaataccaggaaaacagtgacattgtaagtgacagtccagtgtggcaagaccagatccttgaaaatgaagaagccattgctcttagcaggaaggacaaaactattcaacatgtggaagtattttgttatgccagtcaggatttgcatgaagatgtcgaagaagctggtgcactgcagaaaaatcatgctcttgtgacatctgcaaactccacagaagctgcagattctgccttcctgcctacggaggatgagtcattaagcactatgagctgtgaaatgctcacagaacaaactccaagcagcgatccagagaatgcgctagaagtaaatggtgctgaagtgacaggggaaaaagaaaaccattgtgatgataaaacttgtgtgccatcaacttcagcagaagacatgagtgaaaatgtgcctatagcagaagataccacagagcaaccaaagaaaaacagaattacttactcacaaattattaaagaaggcaggagatttaatattgatttagtatcaaagctgctgtattctcgaggattactaattgatcttctaatcaaatctaatgttagtcgatatgcagagtttaaaaatattaccaggattcttgcatttcgagaaggacgagtggaacaggttccgtgttccagagcagatgtctttaatagcaaacaacttactatggtagaaaagcgaatgctaatgaaatttcttacattttgtatggaatatgagaaatatcctgatgaatataaaggatatgaagagatcacattttatgaatatttaaagactcaaaaattaacccccaacctccaatatattgtcatgcattcaattgcaatgacatcagagacagccagcagcaccatagatggtctcaaagctaccaaaaactttcttcactgtcttgggcggtatggcaacactccatttttgtttcctttatatggccaaggagaactcccccagtgtttctgcaggatgtgtgctgtgtttggtggaatttattgtcttcgccattcagtacagtgccttgtagtggacaaagaatccagaaaatgtaaagcaattatagatcagtttggtcagagaataatctctgagcatttcctcgtggaggacagttactttcctgagaacatgtgctcacgtgtgcaatacaggcagatctccagggcagtgctgattacagatagatctgtcctaaaaacagattcagatcaacagatttccattttgacagtgccagcagaggaaccaggaacttttgctgttcgggtcattgagttatgttcttcaacgatgacatgcatgaaaggcacctatttggttcatttgacttgcacatcttctaaaacagcaagagaagatttagaatcagttgtgcagaaattgtttgttccatatactgaaatggagatagaaaatgaacaagtagaaaagccaagaattctgtgggctctttacttcaatatgagagattcgtcagacatcagcaggagctgttataatgatttaccatccaacgtttatgtctgctctggcccagattgtggtttaggaaatgataatgcagtcaaacaggctgaaacacttttccaggaaatctgccccaatgaagatttctgtccccctccaccaaatcctgaagacattatccttgatggagacagtttacagccagaggcttcagaatccagtgccataccagaggctaactcggagactttcaaggaaagcacaaaccttggaaacctagaggagtcctctgaataatggatatacaccaaactggatacccaactttggaaattctgactggtctcagagtctacttgatagaaggactgtttgagaaatgttagaaagcagcagcaattataaggcaaaataggtaatagaaatccaaaaggggattttccttatagaggacattccaagaacacacaacacttataaagcacattgacttgctcattttaaataccaaacttgtgtgactagcagatgaaaattataaatcaattgattctcaggaatgtaactgtggatatgaaagtgatcctatgcattgttaataattccatggtcttaggacaattttgcttaccactttggatctttgtttgaaagccacattttcagaaccagctcatgtattttctttggttatttgaattttattttctttatggacaagagcatcataacataatgataaaaacatatagaaaaactaaagtatcatgatctagatagaagcctgtatttggaatacaggtttgttttgctttctatgttgagaagcattgaaaatgctaatataaaggtgtttagacatttttacgaataagtcagtagtgttttttagtatcagtagtgatatttgtttgtaaattatttacatattgggaaaggtcaataatgaagaaatgaaagaatggaaggaaaggtgtggataggctcattggtatttgaatattctgtctgtcaagtaactagagtattaggctaattgtctacagacctaatttaatcctggctgtcctactgatgatatttggtaaattgtttaacttctgagcctacgtttctccatatataaagtggaaatagtattactatgcctactatatgagaatggttatgaagacaatgcaatgccatgtttagaatcggtttgccagaagaaaattgttttagaattttcccattgacttgatgaatctcaaaagtctcacgcaggaaataattgcttgctgtcagtcaacttccaaacaaaatagatcacagtgtttttattgcattaagctttttaaatgaaaatttcttttttaaagtagtattttatagtcttacagaccagtaaaaatagtaacaagtagaattgtggttttgaaatattactaaggaaaacactctataaattgttttattccttttctggtaggtaaacctgcaaccaccaaggactccaaattgtgtatgacagttggtaagccctaatatacactacataaaaacgttagggctgcctgtaatcccagcactttgggaagctgaggtgggtagatcacttgaggtcaggagttcgagaccagcctggccaacatggcgaaaccctgtctctactaaaaatacaaaattttagctgggtgttatggtgggcacctgtaatcccagctactttgaagatgaggtagcagactcacttgaaccagggaggcggaggttgcagtgagccaagattttgccactgcactccagcctgggtgacagagcaagactctgtctcacaaaaaaaaaaaaagggggctgtacataggcagcaaactaagctgcagtgatgttgcctatatttaaattttctcaaatggccaagctctgatggtctactttatttgagcaatagttgagacttataattgcctataaataaacaaacaaatgaactatttgtttttttttctcacaacatctggcctatattgtctgtcaggaagccatggctccaatgtaaagtacatagttcttacatacttcaactgcagctggtccctgacctcaccaggtttcagagatgttcttaaaggaagccagctgtggcaggtcacagattcatgggaaatggaaagaaccaaggaatatagctcttgcctcacctttctacccactgcagatatagttcaagccagagtaatggaagaacttaacttactagcctctcaggctgctcctatccctacctcccagtgtacagcccctccccatctctttagtcccctttccctcacttccccttttataatgtcacacaaatcagggacagtaggatcacattataacctactttgtcatagggattcgatttttcttatatcaaatcatgtttcctgaaacccagctggggcatatgcactcaatgtctaatacatacttattaatgtaccggatattggccttgcccctggatatcagcaatatattataaaaggttccagtagatgagacgattgagtctgaatacaattgcagtaaattgtgccaataaagatattgtactgttacggtcttagagttaaagccgcttgaatgcagcatgcacattcatgtaaacagacaatcagggtaggcctagaataaccacaaaaattctattggccttactgcagccacctatatgtagaacaatggaggagatagtttgtggtccattattgtaccctgtttcatccattagcatcagaatctctctttcaggtcatttattaaatatgattgaaatgtttaaaagttcctgaacatgattcatgatgattaaaatatcatacaactgataaaagactttaagaactttatatatttcctgttgcctcaaaatgtaacagaaattattcttagagctttgattttagctatcctaattactgcaaataaatatttgttcttatagttttaaatcaaaaagaaaagtcttgttataaaaccttaagcttgaaatcatattaataaaatatattgtacatagtggaaaattttcagtagctaatttaaaatttcagaaaatgctattaaagaattttgattcaagtatttaaactgtttagttatgcatgcttcttattaaccgaaaatgataataccatttagtttagtgatcagtatgagaagcaatacctaatcctatgttgctattgtattttttcctagttggtgtgcctgctcagaaaaacatatactgtatgtgtatacatacctgtgtatatataaaaggtcaatttatatatttttctataggaaaatggagtaacaagttccctatctcccatatttatttgtccatagtaaaatggccacattgatgataatttctagaactagtttctgagattgtcagccctttgtctaaaataatggcagtattaatgattgacttctgtcactgccatagttacctggattgtcagccttggtagcctttgtctaaagtcctaaagagttccaaaaaaaatgtgttgaaatttaattgctaaatagtggttggtgattctttacagtaggaattgtaataattttcttgcaaataagttatttactgctattgatattgaataatttgtcttttattcagatatatttcaaaaagcatgaatatatgattattcataaattgtatactttaccagtaagttttcagaggaaataaagacttttaaatccttttca

SEQ ID NO: 8335 - DNA, 1962 bp, Artificial Sequence
  derived and/or modified sequence
atggccgacaccctgcccagcgagttcgacgtgatcgtgatcggcaccggcctgcccgagagcatcatcgccgccgcctgcagcagaagcggcagaagagtgctgcacgtggacagcagaagctactacggcggcaactgggccagcttcagcttcagcggcctgctgagctggctgaaggagtaccaggagaacagcgacatcgtgagcgacagccccgtgtggcaggaccagatcctggagaacgaggaggccatcgccctgagcagaaaggacaagaccatccagcacgtggaggtgttctgctacgccagccaggacctgcacgaggacgtggaggaggccggcgccctgcagaagaaccacgccctggtgaccagcgccaacagcaccgaggccgccgacagcgccttcctgcccaccgaggacgagagcctgagcaccatgagctgcgagatgctgaccgagcagacccccagcagcgaccccgagaacgccctggaggtgaacggcgccgaggtgaccggcgagaaggagaaccactgcgacgacaagacctgcgtgcccagcaccagcgccgaggacatgagcgagaacgtgcccatcgccgaggacaccaccgagcagcccaagaagaacagaatcacctacagccagatcatcaaggagggcagaagattcaacatcgacctggtgagcaagctgctgtacagcagaggcctgctgatcgacctgctgatcaagagcaacgtgagcagatacgccgagttcaagaacatcaccagaatcctggccttcagagagggcagagtggagcaggtgccctgcagcagagccgacgtgttcaacagcaagcagctgaccatggtggagaagagaatgctgatgaagttcctgaccttctgcatggagtacgagaagtaccccgacgagtacaagggctacgaggagatcaccttctacgagtacctgaagacccagaagctgacccccaacctgcagtacatcgtgatgcacagcatcgccatgaccagcgagaccgccagcagcaccatcgacggcctgaaggccaccaagaacttcctgcactgcctgggcagatacggcaacacccccttcctgttccccctgtacggccagggcgagctgccccagtgcttctgcagaatgtgcgccgtgttcggcggcatctactgcctgagacacagcgtgcagtgcctggtggtggacaaggagagcagaaagtgcaaggccatcatcgaccagttcggccagagaatcatcagcgagcacttcctggtggaggacagctacttccccgagaacatgtgcagcagagtgcagtacagacagatcagcagagccgtgctgatcaccgacagaagcgtgctgaagaccgacagcgaccagcagatcagcatcctgaccgtgcccgccgaggagcccggcaccttcgccgtgagagtgatcgagctgtgcagcagcaccatgacctgcatgaagggcacctacctggtgcacctgacctgcaccagcagcaagaccgccagagaggacctggagagcgtggtgcagaagctgttcgtgccctacaccgagatggagatcgagaacgagcaggtggagaagcccagaatcctgtgggccctgtacttcaacatgagagacagcagcgacatcagcagaagctgctacaacgacctgcccagcaacgtgtacgtgtgcagcggccccgactgcggcctgggcaacgacaacgccgtgaagcaggccgagaccctgttccaggagatctgccccaacgaggacttctgcccccccccccccaaccccgaggacatcatcctggacggcgacagcctgcagcccgaggccagcgagagcagcgccatccccgaggccaacagcgagaccttcaaggagagcaccaacctgggcaacctggaggagagcagcgagtag

SEQ ID NO: 8336 - protein, 563 aa, Artificial Sequence
  derived and/or modified sequence
MGLQACLLGLFALILSGKCSYSPEPDQRRTLPPGWVSLGRADPEEELSLTFALRQQNVERLSELVQAVSDPSSPQYGKYLTLENVADLVRPSPLTLHTVQKWLLAAGAQKCHSVITQDFLTCWLSIRQAELLLPGAEFHHYVGGPTETHVVRSPHPYQLPQALAPHVDFVGGLHRFPPTSSLRQRPEPQVTGTVGLHLGVTPSVIRKRYNLTSQDVGSGTSNNSQACAQFLEQYFHDSDLAQFMRLFGGNFAHQASVARVVGQQGRGRAGIEASLDVQYLMSAGANISTWVYSSPGRHEGQEPFLQWLMLLSNESALPHVHTVSYGDDEDSLSSAYIQRVNTELMKAAARGLTLLFASGDSGAGCWSVSGRHQFRPTFPASSPYVTTVGGTSFQEPFLITNEIVDYISGGGFSNVFPRPSYQEEAVTKFLSSSPHLPPSSYFNASGRAYPDVAALSDGYWVVSNRVPIPWVSGTSASTPVFGGILSLINEHRILSGRPPLGFLNPRLYQQHGAGLFDVTRGCHESCLDEEVEGQGFCSGPGWDPVTGWGTPNFPALLKTLLNP

SEQ ID NO: 8337 - protein, 346 aa, Artificial Sequence
  derived and/or modified sequence
MGLQACLLGLFALILSGKCSYSPEPDQRRTLPPGWVSLGRADPEEELSLTFALRQQNVERLSELVQAVSDPSSPQYGKYLTLENVADLVRPSPLTLHTVQKWLLAAGAQKCHSVITQDFLTCWLSIRQAELLLPGAEFHHYVGGPTETHVVRSPHPYQLPHILEVPYVTTVGGTSFQEPFLITNEIVDYISGGGFSNVFPRPSYQEEAVTKFLSSSPHLPPSSYFNASGRAYPDVAALSDGYWVVSNRVPIPWVSGTSASTPVFGGILSLINEHRILSGRPPLGFLNPRLYQQHGAGLFDVTRGCHESCLDEEVEGQGFCSGPGWDPVTGWGTPNFPALLKTLLNP

SEQ ID NO: 8338 - DNA, 1692 bp, Artificial Sequence
  derived and/or modified sequence
atgggcctgcaggcctgcctgctgggcctgttcgccctgatcctgagcggcaagtgcagctacagccccgagcccgaccagagaagaaccctgccccccggctgggtgagcctgggcagagccgaccccgaggaggagctgagcctgaccttcgccctgagacagcagaacgtggagagactgagcgagctggtgcaggccgtgagcgaccccagcagcccccagtacggcaagtacctgaccctggagaacgtggccgacctggtgagacccagccccctgaccctgcacaccgtgcagaagtggctgctggccgccggcgcccagaagtgccacagcgtgatcacccaggacttcctgacctgctggctgagcatcagacaggccgagctgctgctgcccggcgccgagttccaccactacgtgggcggccccaccgagacccacgtggtgagaagcccccacccctaccagctgccccaggccctggccccccacgtggacttcgtgggcggcctgcacagattcccccccaccagcagcctgagacagagacccgagccccaggtgaccggcaccgtgggcctgcacctgggcgtgacccccagcgtgatcagaaagagatacaacctgaccagccaggacgtgggcagcggcaccagcaacaacagccaggcctgcgcccagttcctggagcagtacttccacgacagcgacctggcccagttcatgagactgttcggcggcaacttcgcccaccaggccagcgtggccagagtggtgggccagcagggcagaggcagagccggcatcgaggccagcctggacgtgcagtacctgatgagcgccggcgccaacatcagcacctgggtgtacagcagccccggcagacacgagggccaggagcccttcctgcagtggctgatgctgctgagcaacgagagcgccctgccccacgtgcacaccgtgagctacggcgacgacgaggacagcctgagcagcgcctacatccagagagtgaacaccgagctgatgaaggccgccgccagaggcctgaccctgctgttcgccagcggcgacagcggcgccggctgctggagcgtgagcggcagacaccagttcagacccaccttccccgccagcagcccctacgtgaccaccgtgggcggcaccagcttccaggagcccttcctgatcaccaacgagatcgtggactacatcagcggcggcggcttcagcaacgtgttccccagacccagctaccaggaggaggccgtgaccaagttcctgagcagcagcccccacctgccccccagcagctacttcaacgccagcggcagagcctaccccgacgtggccgccctgagcgacggctactgggtggtgagcaacagagtgcccatcccctgggtgagcggcaccagcgccagcacccccgtgttcggcggcatcctgagcctgatcaacgagcacagaatcctgagcggcagaccccccctgggcttcctgaaccccagactgtaccagcagcacggcgccggcctgttcgacgtgaccagaggctgccacgagagctgcctggacgaggaggtggagggccagggcttctgcagcggccccggctgggaccccgtgaccggctggggcacccccaacttccccgccctgctgaagaccctgctgaacccctag

SEQ ID NO: 8339 - DNA, 1041 bp, Artificial Sequence
  derived and/or modified sequence
atgggcctgcaggcctgcctgctgggcctgttcgccctgatcctgagcggcaagtgcagctacagccccgagcccgaccagagaagaaccctgccccccggctgggtgagcctgggcagagccgaccccgaggaggagctgagcctgaccttcgccctgagacagcagaacgtggagagactgagcgagctggtgcaggccgtgagcgaccccagcagcccccagtacggcaagtacctgaccctggagaacgtggccgacctggtgagacccagccccctgaccctgcacaccgtgcagaagtggctgctggccgccggcgcccagaagtgccacagcgtgatcacccaggacttcctgacctgctggctgagcatcagacaggccgagctgctgctgcccggcgccgagttccaccactacgtgggcggccccaccgagacccacgtggtgagaagcccccacccctaccagctgccccacatcctggaggtgccctacgtgaccaccgtgggcggcaccagcttccaggagcccttcctgatcaccaacgagatcgtggactacatcagcggcggcggcttcagcaacgtgttccccagacccagctaccaggaggaggccgtgaccaagttcctgagcagcagcccccacctgccccccagcagctacttcaacgccagcggcagagcctaccccgacgtggccgccctgagcgacggctactgggtggtgagcaacagagtgcccatcccctgggtgagcggcaccagcgccagcacccccgtgttcggcggcatcctgagcctgatcaacgagcacagaatcctgagcggcagaccccccctgggcttcctgaaccccagactgtaccagcagcacggcgccggcctgttcgacgtgaccagaggctgccacgagagctgcctggacgaggaggtggagggccagggcttctgcagcggccccggctgggaccccgtgaccggctggggcacccccaacttccccgccctgctgaagaccctgctgaacccctag

SEQ ID NO: 8340 - DNA, 1692 bp, Artificial Sequence
  derived and/or modified sequence
atgggcctccaggcatgcctgctgggactcttcgcgctgattctgagtggcaagtgttcctattcaccggaacccgatcagcggcggacattaccgccaggctgggtgtcactcggaagagctgatccagaagaagaactctcactgacgtttgcgcttcgacaacagaacgttgagaggctttccgaactcgtccaagcagtttccgacccaagcagtcctcagtatgggaaatacctgaccctagaaaacgtggccgacctggtgcggccaagcccactgacactgcataccgtgcagaagtggctcctagccgctggtgcgcagaaatgtcattcagtgataacccaggattttctgacatgctggctgtccatccgccaggctgagcttctgctgccgggtgccgaattccatcactatgtcggcgggcccacggagactcatgtggttagatctcctcatccttaccaactgccccaggctctggcccctcacgtcgattttgtagggggcctgcacaggtttccccctaccagctccctcaggcagagacccgagcctcaagtcaccgggactgtgggactgcacctgggggtcactccttctgtaatcaggaaacgttacaacttaacctcacaagacgtggggtcaggaacaagcaacaatagtcaggcttgcgcccaatttctcgagcaatacttccacgatagcgacctagcccagtttatgagattgttcggcgggaactttgcgcatcaagcttcggtggcacgggttgttggtcagcagggtcgtggtagggccggcattgaggcctccctggacgtgcaatacctcatgagcgcaggcgcaaatatcagcacgtgggtatattcaagccccggacgacatgaaggacaggagccatttctccaatggctaatgctattgagcaacgagtccgccctgccccacgtccacaccgtcagttatggggacgatgaggactcactgagttccgcatatatacagagagtaaatactgagctcatgaaagcagcggccaggggccttactctgctctttgcgagcggagattcgggcgccggttgttggtccgttagcggacggcatcagttccgtccaactttcccagctagcagcccttatgtcacaacagtcggtgggacctctttccaggagccctttcttatcaccaacgaaattgtggattacatttctggcggaggcttttcaaatgtctttccacgcccatcttaccaggaagaagctgtgactaaatttctgagcagctcccctcacctcccaccttcaagttactttaatgcaagtggaagagcttaccctgatgtggccgccctctccgacggttattgggtggttagtaaccgggtgcctattccatgggtcagcgggacatccgccagcacccctgttttcgggggaattctgtccttgatcaatgagcaccggatactttcagggcgtcctccgctcggcttcctcaaccctaggctgtaccagcagcatggggctggtctcttcgacgtgacgagaggctgtcatgagtcctgtctcgatgaggaggttgagggtcaaggcttctgttcaggaccaggatgggatccagtcactggttgggggactcccaacttccctgcccttttgaaaacactgctcaacccttag

SEQ ID NO: 8341 - DNA, 1041 bp, Artificial Sequence
  derived and/or modified sequence
atgggcctacaggcttgtttgctgggactgtttgccttgatcctgtctggcaagtgcagctacagtccagagcctgatcagaggcgaacactccctcctggatgggtgtcgttggggagggcagacccagaggaggaactgtcattgacgttcgctctgaggcaacaaaacgttgaacgcctgtccgaacttgttcaggctgtgtccgatccttcatcccctcaatatggaaaatatctcaccctcgaaaatgttgctgatctggtaaggccaagcccactgaccctgcacacagtccagaagtggttactagccgccggcgctcaaaagtgccactctgtaattacccaggactttctgacatgctggctgagtattcggcaagctgaacttctgctgcccggagccgagtttcaccattatgtaggtgggcccaccgaaactcacgtcgtcaggagcccccacccctaccagctgccccacatcttagaggttccctacgtcaccacggtggggggtaccagctttcaggaaccctttctgattaccaatgagatagtcgactacatcagcggggggggcttttctaatgtgtttcctcgacccagttaccaagaagaggccgtgaccaaattcttatctagctccccacacctgccccctagtagctactttaacgcttcagggagagcgtaccccgatgtcgccgctttgagcgacggatactgggtggtgagtaatcgggttcctattccttgggtatctggtacatcggcctcaacaccggtgttcggtggtatcctgtcgctgatcaatgaacataggatcctttcaggccgccccccactagggttcctaaacccaagattataccaacagcatggtgccgggttgtttgacgttacccgtggctgtcacgagtcttgtctcgatgaggaggttgaaggacaaggtttttgttccggtcccggatgggaccctgtgaccggctggggtacccctaatttccctgccttgctcaagacactgctgaatccatag

SEQ ID NO: 8342 - DNA, 1692 bp, Artificial Sequence
  derived and/or modified sequence
atgggcctgcaggcctgcctgctgggcctgtttgccctgatcctgagcggcaagtgcagctacagccctgagccagaccagaggaggaccctgcccccaggctgggtgtccctgggccgggctgaccctgaggaggagctgagcctgacctttgccctgcggcagcagaatgtggagcggctgtctgagctggtgcaggccgtgtctgaccccagcagcccccagtatggcaagtacctgaccctggagaatgtggccgacctggtgcggcccagccccctgaccctgcacacagtgcagaagtggctgctggccgccggggcccagaagtgccacagcgtcatcacccaggacttcctgacctgctggctgagcatccggcaggccgagctgctgctgcccggggctgagttccaccactacgtgggcggccccacagagacccacgtggtgcgcagcccccacccctaccagctgccccaggccctggccccccacgtggactttgtgggcggcctgcaccgcttcccccccaccagcagcctgcggcagaggcctgagccccaggtgactggaacagtgggcctgcacctgggcgtgaccccatctgtcatcaggaagcgctacaacctgaccagccaggatgtgggcagcggcaccagcaacaacagccaggcctgtgcccagttcctggagcagtacttccatgacagcgacctggcccagttcatgaggctgtttggaggcaactttgcccaccaggcctctgtggcccgggtggtgggccagcagggccggggccgggccggcatcgaggccagcctggatgtgcagtacctgatgtctgctggggccaacatcagcacctgggtgtacagcagccctggaagacatgagggccaggagcccttcctgcagtggctgatgctgctgagcaatgaaagtgccctgccccacgtgcacacagtgtcctatggagatgatgaggacagcctgagcagcgcctacatccagagggtgaacacagagctgatgaaggccgccgcccggggcctgaccctgctgtttgccagcggggacagcggggccggctgctggagcgtgtctggccgccaccagttccggcccaccttccctgccagcagcccctacgtgaccaccgtgggcggcaccagcttccaggagcccttcctgatcaccaatgaaattgtggactacatcagcggcggcggcttcagcaatgtgttcccccggcccagctaccaggaggaggccgtgaccaagttcctgagcagcagcccccacctgccccccagcagctacttcaatgccagcggccgggcctacccagatgtggccgccctgagtgatggctactgggtggtgagcaacagagtgcccatcccctgggtgtctggcaccagcgccagcacccctgtgtttggaggcatcctgagcctcatcaatgagcaccgcatcctgagcggccggccccccctgggcttcctgaacccccggctgtaccagcagcacggggccggcctgtttgatgtgacccggggctgccacgagagctgcctggatgaggaggtggagggccagggcttctgcagcggccctggctgggaccctgtgacaggctggggcacccccaacttccctgccctgctgaagaccctgctgaacccctag

SEQ ID NO: 8343 - DNA, 1041 bp, Artificial Sequence
  derived and/or modified sequence
atgggcctgcaggcctgcctgctgggcctgtttgccctgatcctgagcggcaagtgcagctacagccctgagccagaccagaggaggaccctgcccccaggctgggtgtccctgggccgggctgaccctgaggaggagctgagcctgacctttgccctgcggcagcagaatgtggagcggctgtctgagctggtgcaggccgtgtctgaccccagcagcccccagtatggcaagtacctgaccctggagaatgtggccgacctggtgcggcccagccccctgaccctgcacacagtgcagaagtggctgctggccgccggggcccagaagtgccacagcgtcatcacccaggacttcctgacctgctggctgagcatccggcaggccgagctgctgctgcccggggctgagttccaccactacgtgggcggccccacagagacccacgtggtgcgcagcccccacccctaccagctgccccacatcctggaggtgccctacgtgaccaccgtgggcggcaccagcttccaggagcccttcctgatcaccaatgagatcgtggactacatcagcggcggcggcttcagcaatgtgttcccccggcccagctaccaggaggaggccgtgaccaagttcctgagcagcagcccccacctgccccccagcagctacttcaatgccagcggccgggcctacccagatgtggccgccctgagtgatggctactgggtggtgagcaacagagtgcccatcccctgggtgtctggcaccagcgccagcacccctgtgtttggaggcatcctgagcctcatcaatgagcaccgcatcctgagcggccggccccccctgggcttcctgaacccccggctgtaccagcagcacggggccggcctgtttgatgtgacccggggctgccacgagagctgcctggatgaggaggtggagggccagggcttctgcagcggccctggctgggaccctgtgacaggctggggcacccccaacttccctgccctgctgaagaccctgctgaacccctag

SEQ ID NO: 8344 - DNA, 1692 bp, Artificial Sequence
  derived and/or modified sequence
atgggcctgcaggcctgcctgctgggcctgttcgccctgatcctgagcggcaaatgttcctattccccagagcccgaccagcgtcgcaccctcccccccggctgggtgtccctgggaagggctgatcccgaagaggagctcagcctgacattcgccttaagacagcagaacgtggaacggctctctgaattggttcaggcagtcagcgacccatcctcaccccagtacggcaaatacctgacccttgaaaacgttgctgatctcgtgagaccctctcctctgacccttcacacagttcagaaatggctgctagcagcgggcgcccagaaatgccatagtgtgatcactcaagacttcctgacctgctggctgtcaatccgtcaggccgaactactgcttcccggtgcagagtttcaccactacgtgggcggccccacagaaactcacgtagtgcgctccccccacccataccaactgccccaggcactcgctccacacgttgactttgtcggaggcctacaccgtttccctcccacctcgagtttgcgccagaggcctgagccccaggtgacggggaccgtaggcttgcacttaggggtgactccaagtgtgatcagaaaacgttacaatcttacgagccaggacgtgggttccggcacctccaataactcacaggcctgcgctcagttcctggagcagtattttcatgatagtgatctggcccaatttatgaggctatttgggggcaactttgcccatcaggcttctgtggcaagagtggtcggccaacagggacgcggtcgggcgggaatagaggcctctcttgatgtgcagtatctcatgtcagctggtgccaacatctcaacttgggtttacagcagccccggacgtcatgaaggccaggagccttttcttcagtggctcatgctgttaagcaacgagtccgcactcccccacgtgcacacagttagctatggcgacgacgaagatagcttatcctccgcgtatattcagcgcgtcaatacagagctgatgaaggccgccgcgagggggctgaccctgctcttcgcttccggagacagcggggccgggtgctggtccgtgtccggcagacaccaattcaggcctacattcccagccagtagtccctatgtaacaactgtgggcgggacatcctttcaggaacccttcttgattactaatgaaatcgtggattacattagcggcggaggcttttcgaacgttttccctagacctagctaccaggaggaggccgttacaaaattcctgtcttctagcccccatctgcccccgagctcatattttaatgctagtggccgggcttatcctgacgtggcagccctgtcagacggatattgggttgtctcaaatcgagtgcccattccatgggtttccggtaccagtgcatctacccctgtgttcggagggattttgtcactgataaatgaacaccgcatcctgtctggccgaccacccctggggttcttaaaccctaggctgtatcaacagcatggagcgggcctgtttgacgtcaccagggggtgccacgaaagctgtctggacgaggaagtggagggacaggggttttgtagcggacccggctgggatccagtgacgggatgggggacccccaacttccctgccctgttgaagactctgctgaacccttag

SEQ ID NO: 8345 - DNA, 1041 bp, Artificial Sequence
  derived and/or modified sequence
atgggcctgcaggcctgcctgctgggcctgttcgccctgatcctgagtggcaagtgttcttacagccctgagccagatcaaaggaggaccttgcctcccgggtgggtctccctgggacgagcagatcctgaggaggaactgagtttgacattcgcactgcggcagcagaatgtggagcgtctgagcgaactggttcaggccgtgagtgatcccagtagcccacagtacgggaagtatcttactctggagaatgtggctgatcttgttaggccctcacctcttaccttacacaccgtgcagaagtggctactggccgctggagcccagaaatgccattcagtgatcacccaggactttcttacctgctggctgtctattagacaggccgagctcctgttacccggcgctgagtttcaccattatgttggcggaccgaccgagacacatgtagtgagatctcctcatccctaccagctaccgcatattttagaagtgccatacgtgacaaccgtcggtggtaccagctttcaggagccgtttctgatcaccaatgaaatcgttgactacattagtggcgggggcttcagcaacgtcttccctcgcccctcctatcaggaagaagcagtgacaaagtttctctcctcaagcccccacctgccaccatcctcctactttaacgctagcggtagagcctatcccgatgttgctgctctgagtgatggctactgggtggtgtccaaccgggtgcccatcccatgggtctctggtacttccgcctccacccccgtgtttggcggcatcctgtcactgatcaacgagcatcgcatcttaagtggcaggcctccactcggatttcttaacccccggctatatcagcagcacggcgccgggctcttcgatgttacgcgcggctgtcatgaatcttgtctggacgaggaggtagaagggcaagggttctgttctggaccagggtgggacccagtcacagggtggggcacccctaatttcccagcactgttgaagaccctgctgaatccttag

SEQ ID NO: 8346 - DNA, 1692 bp, Artificial Sequence
  derived and/or modified sequence
atgggacttcaggcttgtttgctcggactttttgcactaattctgtccggaaagtgctcttactctcccgaaccagaccaacggcgtaccctgccacctggctgggtgtcactcggccgagccgaccctgaggaagagctgtctctgacattcgccctacgccaacagaatgttgagaggctcagtgaattggtccaggccgtaagcgacccaagctccccgcagtacggcaagtatcttactctggaaaatgtggccgacctggtgcgaccctccccgctgactctccacactgttcaaaagtggctgctcgccgcaggggcacagaaatgccactccgtcattacccaggattttctgacttgttggcttagcattcggcaggcggaactgttgttacccggtgctgaattccaccattacgtcggcggacctactgaaactcacgtggtccggagtcctcatccctatcagctcccccaggcactcgcaccacacgtcgactttgtggggggactacacaggtttccccctaccagctctctgcgccaaaggcccgagcctcaggtgacaggtactgtcggcctccatttgggcgtaactccatctgtcatccggaagcgatacaaccttactagccaggatgttggcagcggcacttctaacaactcccaggcctgcgcccagttcctggagcagtacttccacgacagcgatctggctcagtttatgcgcctgttcggcggaaactttgcgcaccaagcctctgtagcacgcgtggtcggccaacagggaagaggcagggcaggaatcgaggccagtctggatgtccaatatcttatgagcgccggtgccaacatctcaacatgggtctactccagccctgggaggcacgagggccaggaaccgttcctgcagtggctgatgctgctgtccaatgagagcgccctgccgcacgtgcacacagtgtcttacggggacgacgaagattcactctcttccgcatatatacagagggtcaacactgagctgatgaaagcagccgcacgcggactcactctgctttttgctagcggtgattccggcgctggctgttggagcgttagtggacgccatcagttccgtcccaccttccctgcttcttcgccctatgtgaccaccgtcggaggcacatcatttcaagagccatttctgatcacaaatgaaatcgtggattatatatcaggcggtggattttccaacgtttttccgagaccttcctatcaagaggaggccgtgaccaaattcttatcctcctctccacatcttcctccctcatcttacttcaacgcaagtggacgcgcttaccctgacgtagctgccctgtccgacggctattgggttgtgtcaaatcgggtccctatcccgtgggttagtgggactagtgcctcaacgccagtgttcgggggaatcttatccttaataaacgagcacaggatcctgagtggtcggcctcctctggggtttttgaatccacgtctatatcaacagcacggggctggcctcttcgacgttactcggggttgccacgaatcatgcctcgacgaggaggtagagggccagggattctgttccggcccaggatgggatcctgtcactgggtggggaacccccaatttcccagccctacttaagactctgctgaatccctag

SEQ ID NO: 8347 - DNA, 1041 bp, Artificial Sequence
  derived and/or modified sequence
atgggcctccaggcatgcctgctgggccttttcgcactcattctgagcggcaaatgttcatacagccctgaaccagatcagcgcaggaccctgcctccaggatgggtgagcctgggcagggcagatccagaggaggaactgagtttgactttcgctctgcgccagcagaatgtggagcgactgtccgagttggtccaggcagtgtccgatccctcctccccacaatatgggaagtatctcaccctagagaacgttgctgacttagttagaccctctcccctgacactgcacaccgtccaaaaatggctcctggcagcaggcgcacagaagtgtcatagcgtaattacccaggattttctgacctgctggctttcaatccgacaggccgagttactgctgcccggtgctgagttccaccactatgttggtggccctaccgaaacacacgtcgttagaagccctcacccttaccagctcccccatatcctcgaagttccttatgtgaccacggttgggggtacttcattccaagaaccattcctgataaccaatgagatagtggattacatttccggcggaggcttctctaacgtgttcccaagacctagttaccaagaagaggcggtaacaaagttccttagctcttccccgcatcttcctccatcttcttattttaacgcctcaggacgcgcttaccccgatgttgcggcactgagtgacggctattgggtggtgtctaaccgagtgcctattccctgggtttccggcacttctgcctcaacgcctgtgttcgggggtatattaagtttgataaatgagcaccgtatcctgagtggcaggcctcctctggggtttctcaacccgaggctctaccagcagcatggggctgggttattcgatgtgactcgtggatgtcatgagagctgcctcgacgaggaagtggaagggcaaggtttctgtagtgggcctggttgggaccccgtaaccggctggggaacaccaaacttccctgctcttcttaaaacccttctcaatccttag

SEQ ID NO: 8348 - DNA, 3530 bp, Artificial Sequence
  derived and/or modified sequence
ggtggtggaatatagagctcatgtgatccgtcacatgacagcagatccgcggaagggcagaatgggactccaagcctgcctcctagggctctttgccctcatcctctctggcaaatgcagttacagcccggagcccgaccagcggaggacgctgcccccaggctgggtgtccctgggccgtgcggaccctgaggaagagctgagtctcacctttgccctgagacagcagaatgtggaaagactctcggagctggtgcaggctgtgtcggatcccagctctcctcaatacggaaaatacctgaccctagagaatgtggctgatctggtgaggccatccccactgaccctccacacggtgcaaaaatggctcttggcagccggagcccagaagtgccattctgtgatcacacaggactttctgacttgctggctgagcatccgacaagcagagctgctgctccctggggctgagtttcatcactatgtgggaggacctacggaaacccatgttgtaaggtccccacatccctaccagcttccacaggccttggccccccatgtggactttgtggggggactgcaccgttttcccccaacatcatccctgaggcaacgtcctgagccgcaggtgacagggactgtaggcctgcatctgggggtaaccccctctgtgatccgtaagcgatacaacttgacctcacaagacgtgggctctggcaccagcaataacagccaagcctgtgcccagttcctggagcagtatttccatgactcagacctggctcagttcatgcgcctcttcggtggcaactttgcacatcaggcatcagtagcccgtgtggttggacaacagggccggggccgggccgggattgaggccagtctagatgtgcagtacctgatgagtgctggtgccaacatctccacctgggtctacagtagccctggccggcatgagggacaggagcccttcctgcagtggctcatgctgctcagtaatgagtcagccctgccacatgtgcatactgtgagctatggagatgatgaggactccctcagcagcgcctacatccagcgggtcaacactgagctcatgaaggctgccgctcggggtctcaccctgctcttcgcctcaggtgacagtggggccgggtgttggtctgtctctggaagacaccagttccgccctaccttccctgcctccagcccctatgtcaccacagtgggaggcacatccttccaggaacctttcctcatcacaaatgaaattgttgactatatcagtggtggtggcttcagcaatgtgttcccacggccttcataccaggaggaagctgtaacgaagttcctgagctctagcccccacctgccaccatccagttacttcaatgccagtggccgtgcctacccagatgtggctgcactttctgatggctactgggtggtcagcaacagagtgcccattccatgggtgtccggaacctcggcctctactccagtgtttggggggatcctatccttgatcaatgagcacaggatccttagtggccgcccccctcttggctttctcaacccaaggctctaccagcagcatggggcaggactctttgatgtaacccgtggctgccatgagtcctgtctggatgaagaggtagagggccagggtttctgctctggtcctggctgggatcctgtaacaggctggggaacacccaacttcccagctttgctgaagactctactcaacccctgaccctttcctatcaggagagatggcttgtcccctgccctgaagctggcagttcagtcccttattctgccctgttggaagccctgctgaaccctcaactattgactgctgcagacagcttatctccctaaccctgaaatgctgtgagcttgacttgactcccaaccctaccatgctccatcatactcaggtctccctactcctgccttagattcctcaataagatgctgtaactagcattttttgaatgcctctccctccgcatctcatctttctcttttcaatcaggcttttccaaagggttgtatacagactctgtgcactatttcacttgatattcattccccaattcactgcaaggagacctctactgtcaccgtttactctttcctaccctgacatccagaaacaatggcctccagtgcatacttctcaatctttgctttatggcctttccatcatagttgcccactccctctccttacttagcttccaggtcttaacttctctgactactcttgtcttcctctctcatcaatttctgcttcttcatggaatgctgaccttcattgctccatttgtagatttttgctcttctcagtttactcattgtcccctggaacaaatcactgacatctacaaccattaccatctcactaaataagactttctatccaataatgattgatacctcaaatgtaagatgcgtgatactcaacatttcatcgtccaccttcccaaccccaaacaattccatctcgtttcttcttggtaaatgatgctatgctttttccaaccaagccagaaacctgtgtcatcttttcaccccaccttcaatcaacaagtcctcaatcaacaagtcctactgactgcacatcttaaatatatctttatcagtccacaagtccttccaattatatttcccaagtatatctagaacttatccacttatatccccactgctactaccttagtttagggctatattctcttgaaaaaaagtgtccttacttcctgccaatccccaagtcatcttccagagtaaaatgcaaatcccatcaggccacttggatgaaaacccttcaaggattactggatagaattcaggctttcccctccagcccccaatcatagctcacaaaccttccttgctatttgttcttaagtaaaaaatcatttttcctcctccctccccaaaccccaaggaactctcactcttgctcaagctgttccgtccccttaccacccctgatacaactgccaggttaatttccagaattcttgcaagactcagttcagaagtcaccttctttcgtgaatgttttgattccctgaggctactttattttggtatggctgaaaaatcctagattttctaaacaaaacctgtttgaatcttggttctgatatggactaggagagagactgggtcaagtaagcttatctccctgaggctgtttcctcgtctgttaagtgtgaatatcaatacctgcctttcataatcaccagggaataaagtggaataatgttgataacagtgcttggcacctggaagtaggtggcagatgttaacgcccttcctcccttgcactgcgccccctgtgcctacctctagcattgtaacgaccacgtagtattgaaatggccagtttacttgtctgccttcctttccaagaccgttggtgcctagaggactagaatcgtgtcctatttaactttgtgttcccaggtcctagctcaggagttggcaaataagaattaaatgtctgctacaccgaaa

SEQ ID NO: 8349 - DNA, 1527 bp, Artificial Sequence
  derived and/or modified sequence
agcagatccgcggaagggcagaatgggactccaagcctgcctcctagggctctttgccctcatcctctctggcaaatgcagttacagcccggagcccgaccagcggaggacgctgcccccaggctgggtgtccctgggccgtgcggaccctgaggaagagctgagtctcacctttgccctgagacagcagaatgtggaaagactctcggagctggtgcaggctgtgtcggatcccagctctcctcaatacggaaaatacctgaccctagagaatgtggctgatctggtgaggccatccccactgaccctccacacggtgcaaaaatggctcttggcagccggagcccagaagtgccattctgtgatcacacaggactttctgacttgctggctgagcatccgacaagcagagctgctgctccctggggctgagtttcatcactatgtgggaggacctacggaaacccatgttgtaaggtccccacatccctaccagcttccacatatcttggaggtcccctatgtcaccacagtgggaggcacatccttccaggaacctttcctcatcacaaatgaaattgttgactatatcagtggtggtggcttcagcaatgtgttcccacggccttcataccaggaggaagctgtaacgaagttcctgagctctagcccccacctgccaccatccagttacttcaatgccagtggccgtgcctacccagatgtggctgcactttctgatggctactgggtggtcagcaacagagtgcccattccatgggtgtccggaacctcggcctctactccagtgtttggggggatcctatccttgatcaatgagcacaggatccttagtggccgcccccctcttggctttctcaacccaaggctctaccagcagcatggggcaggactctttgatgtaacccgtggctgccatgagtcctgtctggatgaagaggtagagggccagggtttctgctctggtcctggctgggatcctgtaacaggctggggaacacccaacttcccagctttgctgaagactctactcaacccctgaccctttcctatcaggagagatggcttgtcccctgccctgaagctggcagttcagtcccttattctgccctgttggaagccctgctgaaccctcaactattgactgctgcagacagcttatctccctaaccctgaaatgctgtgagcttgacttgactcccaaccctaccatgctccatcatactcaggtctccctactcctgccttagattcctcaataagatgctgtaactagcattttttgaatgcctctccctccgcatctcatctttctcttttcaatcaggcttttccaaagggttgtatacagactctgtgcactatttcacttgatattcattccccaattcactgcaaggagacctctactgtcaccgtttactctttcctaccctgacatccagaaacaatggcctccagtgcatacttctcaatctttgctttatggcctttccatcatagttg

SEQ ID NO: 8350 - protein, 1545 aa, Artificial Sequence
  derived and/or modified sequence
MLEKFCNSTFWNSSFLDSPEADLPLCFEQTVLVWIPLGYLWLLAPWQLLHVYKSRTKRSSTTKLYLAKQVFVGFLLILAAIELALVLTEDSGQATVPAVRYTNPSLYLGTWLLVLLIQYSRQWCVQKNSWFLSLFWILSILCGTFQFQTLIRTLLQGDNSNLAYSCLFFISYGFQILILIFSAFSENNESSNNPSSIASFLSSITYSWYDSIILKGYKRPLTLEDVWEVDEEMKTKTLVSKFETHMKRELQKARRALQRRQEKSSQQNSGARLPGLNKNQSQSQDALVLEDVEKKKKKSGTKKDVPKSWLMKALFKTFYMVLLKSFLLKLVNDIFTFVSPQLLKLLISFASDRDTYLWIGYLCAILLFTAALIQSFCLQCYFQLCFKLGVKVRTAIMASVYKKALTLSNLARKEYTVGETVNLMSVDAQKLMDVTNFMHMLWSSVLQIVLSIFFLWRELGPSVLAGVGVMVLVIPINAILSTKSKTIQVKNMKNKDKRLKIMNEILSGIKILKYFAWEPSFRDQVQNLRKKELKNLLAFSQLQCVVIFVFQLTPVLVSVVTFSVYVLVDSNNILDAQKAFTSITLFNILRFPLSMLPMMISSMLQASVSTERLEKYLGGDDLDTSAIRHDCNFDKAMQFSEASFTWEHDSEATVRDVNLDIMAGQLVAVIGPVGSGKSSLISAMLGEMENVHGHITIKGTTAYVPQQSWIQNGTIKDNILFGTEFNEKRYQQVLEACALLPDLEMLPGGDLAEIGEKGINLSGGQKQRISLARATYQNLDIYLLDDPLSAVDAHVGKHIFNKVLGPNGLLKGKTRLLVTHSMHFLPQVDEIVVLGNGTIVEKGSYSALLAKKGEFAKNLKTFLRHTGPEEEATVHDGSEEEDDDYGLISSVEEIPEDAASITMRRENSFRRTLSRSSRSNGRHLKSLRNSLKTRNVNSLKEDEELVKGQKLIKKEFIETGKVKFSIYLEYLQAIGLFSIFFIILAFVMNSVAFIGSNLWLSAWTSDSKIFNSTDYPASQRDMRVGVYGALGLAQGIFVFIAHFWSAFGFVHASNILHKQLLNNILRAPMRFFDTTPTGRIVNRFAGDISTVDDTLPQSLRSWITCFLGIISTLVMICMATPVFTIIVIPLGIIYVSVQMFYVSTSRQLRRLDSVTRSPIYSHFSETVSGLPVIRAFEHQQRFLKHNEVRIDTNQKCVFSWITSNRWLAIRLELVGNLTVFFSALMMVIYRDTLSGDTVGFVLSNALNITQTLNWLVRMTSEIETNIVAVERITEYTKVENEAPWVTDKRPPPDWPSKGKIQFNNYQVRYRPELDLVLRGITCDIGSMEKIGVVGRTGAGKSSLTNCLFRILEAAGGQIIIDGVDIASIGLHDLREKLTIIPQDPILFSGSLRMNLDPFNNYSDEEIWKALELAHLKSFVASLQLGLSHEVTEAGGNLSIGQRQLLCLGRALLRKSKILVLDEATAAVDLETDNLIQTTIQNEFAHCTVITIAHRLHTIMDSDKVMVLDNGKIIECGSPEELLQIPGPFYFMAKEAGIENVNSTKF

SEQ ID NO: 8351 - DNA, 4638 bp, Artificial Sequence
  derived and/or modified sequence
atgctagagaagttctgtaatagtacattctggaactctagtttcctggattcgccagaggctgatctgcccctctgtttcgagcaaactgttctggtgtggattcccctcggctacctctggctcctcgccccatggcagttgctccacgtgtataagtcccggacgaaaaggagcagtacaacgaaactatatcttgctaaacaggtgtttgtagggttcctgctgatcctcgccgccatagaactggcactcgtcctgacggaggatagtggccaggccacggttcccgccgtcagatatactaatccctccctctacctcggcacttggttactcgtcctcctgatccagtacagtagacagtggtgtgttcagaaaaattcttggttcttaagcctgttttggattctgtctatcctctgcggcacttttcaatttcaaactctgatccggacactcctgcaaggcgacaacagcaatttggcttatagttgtctgttcttcattagctacggatttcagatcctaatcctgatttttagcgcgttctctgaaaacaacgagagcagtaataatccctcctctatcgcatcatttctctccagcatcacttatagctggtacgactctatcatcctgaagggctacaaaagacctctgacattagaggatgtctgggaggtggacgaagagatgaagaccaaaaccttggtaagtaagtttgagacccacatgaagcgagaacttcaaaaagcccgaagagcgctgcaaagacgtcaagagaagagctcgcagcagaacagtggagcccgactgcccggcctgaacaagaaccaaagccagagccaggatgccttggtcttggaagacgtggagaaaaagaagaagaagagcggaactaaaaaggacgtgcccaaaagctggttgatgaaggcactgttcaaaacattttatatggtgctcctcaagtcttttctgttgaagctggtgaatgacatttttacctttgtctcgcctcagctgttgaagttactgatctctttcgcttctgatcgagatacatatttatggattggatacttgtgcgccatactcctgttcaccgctgcactgatccagtcgttttgcttacagtgttactttcagctctgctttaaattgggggtgaaggtgcgaacggctattatggccagtgtatacaaaaaggccctcactctttcaaatctggcacggaaggagtacactgtgggcgagactgtgaacctgatgtcagtcgacgcgcaaaagctgatggatgttactaacttcatgcatatgttatggtcctctgtattacagatagtcttgagcattttttttttgtggagggagctggggcctagtgtgctggctggggttggagtcatggtccttgtgataccaatcaatgcgatcctttccaccaaatcaaagactatccaggtgaaaaacatgaagaacaaagataagcggctaaagataatgaatgagatcttgagcggtatcaaaatcctaaaatattttgcatgggaacctagctttcgtgaccaggtgcaaaacctgaggaagaaagagctgaagaacctgctggccttcagccagcttcagtgtgttgtaatcttcgtgttccagctgacccctgtcctcgtgtctgtggtgaccttctccgtttacgtcctggttgactcaaacaacatactggatgctcagaaggccttcacctcaatcaccctctttaatatcctccgtttcccactctccatgctccctatgatgatttcaagtatgctccaagcaagcgtttccaccgaaagactggaaaagtaccttggcggcgacgacttggatacctcagccatccgccatgactgcaatttcgacaaggcaatgcagttcagtgaggcttcctttacttgggaacacgacagtgaggccacagtgagagacgtgaatcttgacattatggccggtcagcttgtggcagtcattggtcccgtgggttctggcaaatccagcctgatctccgccatgctcggcgaaatggaaaacgtgcatggtcatatcacaattaagggcaccactgcatacgttccccagcagagctggatccaaaacgggacaattaaagacaacatcttatttggtaccgagttcaacgagaaaaggtaccagcaggtgctggaggcctgcgcattactgcctgacctggagatgttacctgggggcgacctagcagagattggtgagaaaggcattaacctctcggggggacagaagcaacgcataagcctcgcccgcgctacttatcagaacttagacatatacctgcttgatgatcccctctccgctgtggacgcacacgtcggcaagcacatcttcaacaaagtgctcggccctaacggcttgttgaaaggtaaaacgagactcctggttactcattcaatgcatttcctacctcaggtcgatgagattgttgtactcggaaacggtactatagtggaaaagggtagctacagtgcactgctagcaaaaaagggagagtttgcaaagaaccttaaaaccttcctacgtcacaccggtcccgaggaggaggcaactgtgcacgatggctcagaggaagaggacgatgactacggccttataagttcggtggaagaaattccagaagatgctgcttccatcaccatgcgcagggagaactcatttcgacgcacgctctctaggtcttctcgatctaacggaaggcacctcaagtcactccggaactctctaaaaacccggaacgtgaacagtctgaaagaagacgaggagttagtcaaaggtcagaagctgattaagaaggaatttattgagacgggcaaggtgaagttttccatctatctggaatatttacaagctatcgggcttttctccatcttcttcatcattctcgcctttgtgatgaattctgtcgcattcatcggtagcaatctgtggctctccgcctggaccagtgattcaaaaattttcaacagcactgactatcctgccagtcagcgtgacatgagagtcggtgtctacggcgcgctcggcctggctcaaggaattttcgtctttatagctcatttctggtctgcctttggcttcgtccacgcttccaatattcttcacaaacagttgctgaacaatatcttaagagcacctatgcgcttcttcgacaccaccccaacagggcgtatagtgaaccggttcgccggtgacatcagcaccgtcgatgacacccttccccagtctctgcggagctggattacctgtttcttgggcattatctctaccctggtgatgatttgcatggcgacccccgttttcacgattatcgtcatccccctgggcatcatctacgtatcagtgcaaatgttctatgtctcaacaagcaggcagcttaggcgtctcgacagtgttacaagatcccccatttattcgcactttagcgagaccgtgtccggcctccctgtgatccgggctttcgagcaccagcaaaggttcctgaagcataatgaagtgcgtatagacaccaaccaaaagtgcgtattctcctggattacctcaaatcgttggttggccatccgcctggagctagtgggaaatctcacggtattcttcagtgcgttgatgatggttatttaccgagacacactgagcggcgatacagttggtttcgtgctctcaaatgctcttaatattacccaaacactgaactggcttgtgaggatgactagcgagatagagaccaacattgtggctgtggagaggattactgaatatacaaaagtagagaacgaagccccgtgggtcactgacaaacgcccccccccagattggccgtctaagggcaagatccagtttaataattaccaggtaaggtatcggccagagctagatctggtgctacgcggtattacctgcgacatcggcagtatggaaaagatcggggtcgtgggaagaacaggtgcaggcaaatcaagcttgacaaattgtctcttccggatcctggaagctgcgggcgggcagataattattgatggagtcgatattgccagcatcggcctccatgaccttcgagagaagctgacaattatcccccaggatccaatccttttctctgggtcgctgcgcatgaacttagatccattcaacaactactccgacgaagaaatttggaaggccctcgagttggctcacctgaaatccttcgtggcctccttgcaactgggcctctctcacgaggtaaccgaggctggaggaaacctgtcaattggccagcggcagctgctgtgtctgggacgcgcactactgcgaaaaagcaagatattggtcctcgacgaggcaacagccgcagtcgatctggaaaccgacaacctgattcaaacaaccattcaaaacgaatttgcccactgcaccgtcattaccattgcgcacaggttgcacactatcatggacagtgataaagtcatggtcttggataatggcaagattatcgagtgtgggtccccagaagaacttttacaaataccagggcctttctattttatggcgaaggaagcaggcattgagaatgtgaacagtacgaagttctag

SEQ ID NO: 8352 - DNA, 4638 bp, Artificial Sequence
  derived and/or modified sequence
atgctggagaagttctgcaacagcaccttctggaacagcagcttcctggacagccctgaggccgacctgcccctgtgctttgagcagacagtgctggtgtggatccccctgggctacctgtggctgctggccccctggcagctgctgcacgtgtacaagagcaggaccaagaggagcagcaccaccaagctgtacctggccaagcaggtgtttgtgggcttcctgctgatcctggccgccatcgagctggccctggtgctgacagaagattctggccaggccaccgtgcctgctgtgcgctacaccaaccccagcctgtacctgggcacctggctgctggtgctgctgatccagtacagccggcagtggtgtgtgcagaagaacagctggttcctgagcctcttctggatcctgagcatcctgtgtggcaccttccagttccagaccctcatccgcaccctgctgcagggcgacaacagcaacctggcctacagctgcctcttcttcatctcctatggcttccagatcctgatcctgatcttcagcgccttcagcgagaacaatgaaagcagcaacaaccccagcagcatcgccagcttcctgagcagcatcacctacagctggtatgacagcatcatcctgaagggctacaagaggcccctgaccctggaggatgtgtgggaggtggatgaggagatgaagaccaagaccctggtgtccaagtttgagacccacatgaagcgggagctgcagaaggcccggcgggccctgcagaggcggcaggagaagagcagccagcagaacagcggggcccggctgcccggcctgaacaagaaccagagccagagccaggatgccctggtgctggaggatgtggagaagaagaagaagaagagcggcaccaagaaggatgtgcccaagtcctggctgatgaaggccctcttcaagaccttctacatggtgctgctgaagagcttcctgctgaagctggtgaatgacatcttcacctttgtgagcccccagctgctgaagctgctgatcagctttgccagtgaccgggacacctacctgtggattggctacctgtgtgccatcctgctcttcaccgctgccctgatccagagcttctgcctgcagtgctacttccagctgtgcttcaagctgggcgtgaaggtgaggacagccatcatggcctctgtgtacaagaaggccctgaccctgagcaacctggccaggaaggagtacacagtgggggagaccgtgaacctgatgtctgtggatgcccagaagctgatggatgtgaccaacttcatgcacatgctgtggagctctgtgctgcagatcgtgctgagcatcttcttcctgtggagggagctgggccccagcgtgctggccggcgtgggcgtgatggtgctggtgatccccatcaatgccatcctgagcaccaagagcaagaccatccaggtgaagaacatgaagaacaaggacaagaggctgaagatcatgaatgagatcctgagcggcatcaagatcctgaagtactttgcctgggagcccagcttccgggaccaggtgcagaacctgaggaagaaggagctgaagaacctgctggccttcagccagctgcagtgtgtggtgatctttgtgttccagctgacccctgtgctggtgtctgtggtgaccttctctgtgtatgtgctggtggacagcaacaacatcctggatgcccagaaggccttcaccagcatcaccctcttcaacatcctgcgcttccccctgtccatgctgcccatgatgatcagctccatgctgcaggcctctgtgtccacagagcggctggagaagtacctgggcggagatgacctggacaccagcgccatcagacatgactgcaactttgacaaggccatgcagttcagcgaggccagcttcacctgggagcatgacagcgaggccaccgtgagagatgtgaacctggacatcatggccggccagctggtggccgtcatcggccctgtgggcagcggcaagagcagcctcatcagcgccatgctgggggagatggagaatgtgcacggccacatcaccatcaagggcaccacagcctacgtgccccagcagagctggatccagaatggcaccatcaaggacaacatcctgtttggaacagagttcaatgagaagcgctaccagcaggtgctggaggcctgtgccctgctgcctgacctggagatgctgcctggaggagacctggccgagatcggggagaagggcatcaacctgagcggcggccagaagcagaggatcagcctggcccgggccacctaccagaacctggacatctacctgctggatgaccccctgtctgctgtggatgcccacgtgggcaagcacatcttcaacaaggtgctgggccccaacggcctgctgaagggcaagacccggctgctggtgacccacagcatgcacttcctgccccaggtggatgaaattgtggtgctgggcaatggcaccatcgtggagaagggcagctacagcgccctgctggccaagaagggggagtttgccaagaacctgaagaccttcctgcggcacacaggccctgaggaggaggccaccgtgcatgatggcagcgaggaggaggatgatgattatggcctcatcagctctgtggaggagatcccagaagatgctgccagcatcaccatgaggcgggagaacagcttccggaggaccctgagccgcagcagccgcagcaatggccgccacctgaagagcctgaggaacagcctgaagaccagaaatgtgaacagcctgaaggaggatgaggagctggtgaagggccagaagctgatcaagaaggagttcattgaaacaggcaaggtgaagttcagcatctacctggagtacctgcaggccatcggcctcttcagcatcttcttcatcatcctggcctttgtgatgaacagcgtggccttcatcggcagcaacctgtggctgagcgcctggaccagtgacagcaagatcttcaacagcacagactacccagccagccagagggacatgagggtgggcgtgtatggagccctgggcctggcccagggcatctttgtgttcatcgcccacttctggagcgcctttggatttgtgcacgccagcaacatcctgcacaagcagctgctgaacaacatcctgcgggcccccatgaggttctttgacaccacccccaccggccgcatcgtgaacagatttgctggggacatcagcacagtggatgacaccctgccccagagcctgcgctcctggatcacctgcttcctgggcatcatcagcaccctggtgatgatctgcatggccacccctgtgttcaccatcatcgtcatccccctgggcatcatctacgtgtctgtgcagatgttttatgtgtccaccagccggcagctgcggcggctggacagcgtgaccaggagccccatctacagccacttcagcgagaccgtgtctggcctgcctgtgatccgggcctttgagcaccagcagcgcttcctgaagcacaatgaggtgagaattgacaccaaccagaagtgtgtgttctcctggatcaccagcaaccgctggctggccatccggctggagctggtgggcaacctgaccgtcttcttcagcgccctgatgatggtgatctacagagacaccctgagcggggacacagtgggctttgtgctgagcaatgccctgaacatcacccagaccctgaactggctggtgaggatgaccagcgagattgagaccaacatcgtggccgtggagcgcatcacagagtacaccaaggtggagaatgaggccccctgggtgacagacaagaggcctcctccagactggcccagcaagggcaagatccagttcaacaactaccaggtgcgctacagacctgagctggacctggtgctgcggggcatcacctgtgacatcggctccatggagaagattggagtggtgggccgcactggagctgggaagagcagcctgaccaactgcctcttccgcatcctggaggccgccggcggccagatcatcattgatggagtggacatcgccagcatcggcctgcatgacctgcgggagaagctgaccatcatcccccaggaccccatcctcttcagcggcagcctgaggatgaacctggaccccttcaacaactacagtgatgaggagatctggaaggccctggagctggcccacctgaagagctttgtggccagcctgcagctgggcctgagccatgaggtgacagaagctgggggcaacctgagcatcggccagaggcagctgctgtgcctgggccgggccctgctgaggaagagcaagatcctggtgctggatgaggccacagctgctgtggacctggagacagacaacctgatccagaccaccatccagaatgaatttgcccactgcaccgtcatcaccatcgcccaccggctgcacaccatcatggacagcgacaaggtgatggtgctggacaatggcaagatcattgaatgtggcagccctgaggagctgctgcagatccctggccccttctacttcatggccaaggaggccggcattgaaaatgtgaacagcaccaagttctag

SEQ ID NO: 8353 - DNA, 4638 bp, Artificial Sequence
  derived and/or modified sequence
atgctggagaagttctgcaacagcaccttctggaacagcagcttcctggactctcccgaagccgatctacccctgtgctttgaacaaactgtactcgtctggatccccttgggttacctgtggctactggcgccatggcagttactgcacgtatacaaatcaagaaccaaacgcagtagtacaactaagctttatctcgctaagcaggtgtttgtaggatttctgctgatattggctgctatcgagctggctctggtactgacagaagacagcgggcaggctacggtccccgccgtcaggtatactaacccatccctgtacctgggtacctggctgctggtgctgctgatccaatactccaggcagtggtgtgtccagaagaacagttggttcctatctttgttctggatcctgtcaatcctgtgtggtacttttcagttccaaactctcatcaggaccctgcttcagggtgataattctaacttggcgtactcctgtctgttcttcatttcatacggctttcagatcctgatcctgattttctccgctttcagcgagaacaacgagtcttcaaataacccctcctctattgcaagttttctgagttctattacctactcgtggtacgacagcatcatcctgaagggatacaaacggcctctgacactggaggatgtgtgggaagtagatgaggaaatgaaaaccaaaactctggtgtccaaatttgaaacccatatgaagcgcgagctgcagaaggcccgtagagcccttcaaagaaggcaagagaagagctctcagcaaaatagtggtgcacgcttgccgggccttaacaagaaccagtctcaaagtcaggatgcactcgtgctggaagacgtggaaaaaaagaaaaaaaagtcaggaacaaagaaggacgtgccgaaaagctggctgatgaaagccctgttcaaaaccttttatatggtcctgctaaagtcattcctgctcaaactggtgaatgacatcttcacatttgtaagcccacaactgcttaagttgctaatctcatttgcttccgatagggacacttacctgtggatcggctacctgtgcgcgattctcctatttaccgccgccctcatccagtcgttctgtcttcagtgttattttcagctgtgcttcaaactgggggtgaaagttaggacagctatcatggcctccgtctataagaaggctctgactctgagcaacctcgcacggaaggaatacactgtcggagagaccgtgaatctgatgtctgtggacgctcagaagttgatggacgtgaccaattttatgcacatgctgtggagctccgtgctgcaaatcgtcctgagcattttctttctctggcgtgagctgggacccagtgttctcgccggcgtgggggtgatggtgctagtaattcccatcaacgccatactcagcaccaaaagcaagaccatccaggtgaaaaacatgaaaaacaaggataaaagacttaaaataatgaacgagatcctcagcggcatcaagattctaaaatactttgcttgggagccaagcttcagggaccaagttcagaaccttcgaaaaaaggagttgaagaatctgctcgccttcagccagctgcaatgtgtggtcatctttgtatttcagcttaccccagtcttggtgagcgtcgttactttctctgtgtatgtattggtggactcaaacaatattcttgacgctcagaaggcctttacatccatcaccctgtttaacatccttcgatttcctctaagcatgctgcccatgatgatctccagcatgttgcaggccagtgtatctactgagaggctggagaaatacttgggaggggatgacctggatacatccgctataagacatgattgcaattttgacaaggccatgcagttctcggaagcttcgtttacatgggagcacgactcagaggcgacggtgagggacgtgaatttggacatcatggccgggcagctcgtggctgttattggccccgttggctccggaaagagctctctgattagtgctatgcttggcgagatggagaatgtacatggccacatcacgataaagggcacaaccgcttatgtgccgcaacagtcctggattcagaacgggacgataaaagacaatatactgttcggaacagagttcaacgagaaacgatatcaacaggtcctggaggcatgtgccctgctgcccgacttggaaatgctcccaggcggcgacctggccgagattggggagaagggaataaacttaagtggaggccaaaaacagcgcatatctttggccagagctacttatcaaaacttagatatttatctgctggacgatcctctgagtgccgtagatgcacacgtcgggaagcacatcttcaacaaagtactcggccccaatgggctcctcaagggtaagacgaggctactcgtgacacattcaatgcactttctgccccaggtggatgagattgtcgtcttgggtaacggtaccatcgtcgagaagggctcttattctgctttattagctaagaagggagagtttgctaagaatcttaaaacgttcctaagacacactggacccgaagaagaagctaccgtgcatgacggcagtgaggaagaggatgacgactatggacttatatcaagcgtggaagagatccctgaggacgctgccagcattacaatgcgcagggaaaactcctttaggcgtaccctttcacggagctcccggagcaatggacggcacctgaagagtttaagaaatagcttaaagacaagaaacgtcaattccctgaaagaagacgaggagttggtgaaaggccagaaattgattaaaaaagaatttatagaaacaggtaaggtgaagttttctatctacctagagtaccttcaggcaatcggactgttttccattttttttatcatcctggcttttgtgatgaatagtgtagctttcatcggatctaatttgtggctaagtgcttggaccagcgattccaagatcttcaattccaccgactatcccgcctcccagagagatatgagagttggagtctatggcgctttagggctagcccagggaatattcgtgtttattgctcacttttggtccgctttcggctttgttcacgctagtaatatcttgcataaacaacttttaaataatatccttcgagctcctatgcggtttttcgacaccacacctaccggacgtatcgtaaaccgatttgcaggagatatctctacagtggatgacacgttgccacaatcgctccgcagctggattacgtgtttcctggggatcattagtaccctcgtgatgatctgtatggccactcccgtttttacgattattgtgatccccctcggaattatttatgtctcagtgcagatgttctacgtgtctacctcccggcagctcaggcgccttgatagtgttacacgatcacccatatattctcatttcagcgaaacagtgtctggcctaccagtgatacgggcttttgaacaccagcagcggttcctgaagcacaacgaagtgcgcatcgacacaaaccagaagtgcgttttttcttggattaccagcaataggtggctggccatccgactggaactggtgggcaaccttaccgtcttttttagcgccctgatgatggtgatctaccgggacacgctctcgggcgacaccgtggggtttgtcctgagcaacgctctcaacataactcagacactcaactggctggtacggatgactagcgagatcgagacaaatatcgtggccgttgaacgaatcaccgagtacaccaaagttgaaaatgaagccccgtgggtgaccgacaaacggccacctcccgactggccatcaaaaggtaagatacagttcaacaactaccaggtccggtatcgcccagagttggacctcgtgcttcgaggcatcacttgtgacattggctcgatggagaaaatcggagttgtggggaggacaggagctggaaagagctcactgaccaactgcctatttcgaatcctcgaggctgcaggcggacagataatcatcgacggagtggatatagccagtatcggattgcacgacttgcgcgaaaagttaactatcattccacaggaccccatattattctccggctccctgcgcatgaacctggatcctttcaataattactcagacgaggaaatatggaaagccctcgaactggctcatctcaagtcctttgtagctagcctccagttggggctgagtcatgaggtcaccgaggcgggtggcaacctgtccataggacaacgacaactgctgtgtctcggacgcgccctgctacgcaagagtaagattctcgtgttggacgaggccaccgctgcagtagatctggagacagacaatctgatacaaacgacgatacagaatgaatttgcccattgcaccgtgataactattgcacatcgcctgcataccattatggactctgacaaggtgatggtgttggacaacggcaagattattgagtgtgggtccccagaagagctcctgcagattcccggccctttctacttcatggctaaggaagctggtatcgagaatgtgaactctactaaattttag

SEQ ID NO: 8354 - DNA, 4638 bp, Artificial Sequence
  derived and/or modified sequence
atgttggagaaattttgcaactcaactttttggaattcctctttccttgacagtccagaagctgacttaccactctgctttgagcagaccgtcctggtctggattcctctcggttacctctggctgctcgcaccatggcagctcctccatgtgtataaatcacgcactaagcgctccagtactaccaagctatacttagcaaaacaggtctttgtggggtttctgctgatcctggcagcaattgagctggctctggtgcttactgaggactccggtcaagcaaccgtgcccgcagttcgttacaccaatccctcattgtatctcgggacatggctccttgtgctgctcattcagtacagccgccagtggtgcgtccaaaagaacagctggttcctcagtctgttttggatcctgtccatcctgtgtggtacatttcagttccagaccctgatccgcacactgctacagggtgataactctaacctggcatactcttgcctcttttttatttcctacggattccagatcttaattttgatcttctccgccttctctgaaaacaacgagtcctcgaacaacccctcttccattgctagttttctgagttctattacctacagctggtatgactccatcatccttaagggatacaaacgacctcttactttggaagatgtgtgggaggtggacgaagagatgaagacaaaaacattagtctccaagttcgagactcacatgaagagagagctccagaaggccaggcgcgcactccagcgaaggcaggaaaagagctctcagcagaattcaggagccagactgccaggccttaacaagaatcaaagccagagccaggacgccctggtcctggaagatgtggaaaagaagaaaaagaaaagtggcaccaaaaaagacgttcctaaatcttggctgatgaaggcattgttcaaaacattttatatggtacttctgaaatcatttttgcttaaattagtaaacgacatattcactttcgtgtcccctcagttgctgaaactcctgattagtttcgcgtccgaccgggacacatacctttggatcggctacctatgcgcaatcctgttattcaccgctgctctcatacagtccttttgtttgcaatgttatttccaactttgtttcaagctcggcgttaaggtgagaacagccattatggcctccgtatacaaaaaagcattgaccctttccaacctggccagaaaggaatacacagtaggggaaactgtgaatctgatgagtgttgatgcccagaagctaatggatgttaccaacttcatgcatatgttatggtctagcgttttacagatagtactgagtattttttttctctggagggagctcggtccctcagtgttagcaggtgtcggtgtgatggttttggttatccctattaacgcaatactgagcaccaagtcgaagaccattcaggtgaagaatatgaaaaacaaggataagaggctgaagatcatgaatgaaatactgagtgggattaagatcttgaagtatttcgcatgggaaccatcatttcgagatcaagtccagaacctacgcaagaaagaactaaaaaacctcctggctttctcacaactacagtgtgtggtaatatttgtgttccaactaactcccgtgcttgttagcgtagttacattctctgtctatgtcttggtggactccaacaacatccttgatgcccagaaagcattcacctctattacattgttcaatatcctcagattcccgttgtccatgttacctatgatgatttcttcaatgctgcaggccagcgtttctaccgaaaggctggaaaagtatctggggggagatgatcttgatactagtgccattagacatgattgcaactttgacaaggctatgcaattctccgaggcgagcttcacctgggaacatgactctgaagccacagtcagagatgttaacttggacattatggccggtcagctggttgctgttatcggcccagttggatccgggaagtcatcactgatcagcgctatgctgggcgaaatggagaacgttcacgggcacatcacaattaaggggacaaccgcctacgttccccagcagtcatggatccagaacggtaccattaaggataacattttatttggtacggagttcaatgaaaagcgatatcagcaggtgctggaagcgtgtgctctgctgccggacctagagatgcttccaggcggagatctggctgagatcggtgagaaaggcatcaacctgagtggcggtcaaaagcagaggattagcctcgctcgcgctacataccaaaacctagacatttatctactggacgacccgctgtctgccgttgacgcccatgtcggaaagcacatcttcaataaggtcctcggccctaacgggctgcttaagggcaaaactaggctgctggttactcactctatgcactttttgccacaggtggatgaaatcgtggtgcttggcaacggcacaatcgtcgaaaaagggtcttattccgcacttcttgcaaagaagggagaatttgcgaaaaatctgaaaacgttcctgcgacacactggccctgaggaagaagctactgtccatgacggatcagaagaggaggatgatgattacgggctgatcagctcagtggaagaaatcccagaagatgcggctagtattacaatgcggagagaaaattctttcagacggacattgtctcgctcctcccgcagcaatggcagacacctcaaatccttacggaatagccttaagacgcgcaacgtgaatagtctaaaggaagatgaggaactcgtaaaggggcaaaagctaataaagaaagaatttatcgagacagggaaagtgaaattttctatctacctggagtaccttcaggccataggactgttctcaattttcttcatcattttagccttcgtgatgaattctgtggcgtttattggctctaatctgtggttaagcgcctggacttctgacagtaaaatattcaatagcaccgactaccccgcatcacaaagagatatgagagttggagtttatggagccctaggcctcgctcagggaatattcgtcttcatcgcccacttctggtcagccttcgggtttgtccacgcctccaatattctccacaagcagctgctgaataatatcctgagagcgcctatgcgattttttgataccacaccaacaggacggattgtcaacaggtttgcaggagacatatcaacggtagatgacacgctgccacagtcgcttagatcttggattacatgcttccttggcattataagcacactggtgatgatatgcatggccacccctgtgtttacaattattgttattccgttgggcatcatctacgtgtcagtacagatgttctacgtctcaaccagccgtcagttgagacgacttgattctgtcaccagatcacctatatacagccacttctctgagacagtgtcaggcctgccagtgattagagccttcgagcatcagcaacggttcctaaaacataatgaggtccggatagacactaatcagaaatgtgtgttttcatggattacctcaaacagatggctggccatccggctggaactggttggcaatctgaccgtgttctttagcgcactgatgatggtgatttaccgggacacccttagtggggacacagtgggtttcgttttatctaacgcgctgaatataacacaaacactcaattggctggttagaatgacatcggaaatcgagaccaatattgtggctgtggagagaattacagaatacacaaaagttgagaacgaggctccttgggtaacagacaaaaggccccctcccgattggcccagtaagggcaaaatccagtttaataactatcaggtgaggtataggcccgaactagacttggttctgaggggcatcacatgcgatattgggtccatggagaagatcggcgtcgttggcaggaccggtgccggtaaatctagccttaccaactgcctatttcgcatacttgaagcggctgggggtcagattatcatcgacggagtcgacatcgccagtattgggctacacgacctgcgagaaaagctgaccatcatcccacaggacccaattttgttcagcgggtccctgcgcatgaatttggacccgtttaacaactactcagacgaagagatctggaaggcgctagagctcgctcacttaaagagctttgtcgcctcacttcaattgggactctcccatgaggtaacggaggcgggtggaaacttgtctatcggacagaggcagttgctgtgcctagggagggcacttctgaggaagtctaagattctcgtgcttgacgaggctacagccgctgtggacctggagaccgataacctcatccagaccactatccagaatgagttcgcccattgcacagtgataactatcgctcataggttgcacaccatcatggattccgacaaggtgatggtgctggacaacggaaagattatagagtgcggtagtccagaagaactgctgcagatccctggccctttctactttatggccaaagaggcgggtattgagaatgtgaactccacaaagttctag

SEQ ID NO: 8355 - DNA, 5312 bp, Artificial Sequence
  derived and/or modified sequence
acatcagaatggtagataattcctgttccactttctttgatgaaacaagtaaagaagaaacaacacaatcatattaatagaagagtcttcgttccagacgcagtccaggaatcatgctggagaagttctgcaactctactttttggaattcctcattcctggacagtccggaggcagacctgccactttgttttgagcaaactgttctggtgtggattcccttgggctacctatggctcctggccccctggcagcttctccacgtgtataaatccaggaccaagagatcctctaccaccaaactctatcttgctaagcaggtattcgttggttttcttcttattctagcagccatagagctggcccttgtactcacagaagactctggacaagccacagtccctgctgttcgatataccaatccaagcctctacctaggcacatggctcctggttttgctgatccaatacagcagacaatggtgtgtacagaaaaactcctggttcctgtccctattctggattctctcgatactctgtggcactttccaatttcagactctgatccggacactcttacagggtgacaattctaatctagcctactcctgcctgttcttcatctcctacggattccagatcctgatcctgatcttttcagcattttcagaaaataatgagtcatcaaataatccatcatccatagcttcattcctgagtagcattacctacagctggtatgacagcatcattctgaaaggctacaagcgtcctctgacactcgaggatgtctgggaagttgatgaagagatgaaaaccaagacattagtgagcaagtttgaaacgcacatgaagagagagctgcagaaagccaggcgggcactccagagacggcaggagaagagctcccagcagaactctggagccaggctgcctggcttgaacaagaatcagagtcaaagccaagatgcccttgtcctggaagatgttgaaaagaaaaaaaagaagtctgggaccaaaaaagatgttccaaaatcctggttgatgaaggctctgttcaaaactttctacatggtgctcctgaaatcattcctactgaagctagtgaatgacatcttcacgtttgtgagtcctcagctgctgaaattgctgatctcctttgcaagtgaccgtgacacatatttgtggattggatatctctgtgcaatcctcttattcactgcggctctcattcagtctttctgccttcagtgttatttccaactgtgcttcaagctgggtgtaaaagtacggacagctatcatggcttctgtatataagaaggcattgaccctatccaacttggccaggaaggagtacaccgttggagaaacagtgaacctgatgtctgtggatgcccagaagctcatggatgtgaccaacttcatgcacatgctgtggtcaagtgttctacagattgtcttatctatcttcttcctatggagagagttgggaccctcagtcttagcaggtgttggggtgatggtgcttgtaatcccaattaatgcgatactgtccaccaagagtaagaccattcaggtcaaaaatatgaagaataaagacaaacgtttaaagatcatgaatgagattcttagtggaatcaagatcctgaaatattttgcctgggaaccttcattcagagaccaagtacaaaacctccggaagaaagagctcaagaacctgctggcctttagtcaactacagtgtgtagtaatattcgtcttccagttaactccagtcctggtatctgtggtcacattttctgtttatgtcctggtggatagcaacaatattttggatgcacaaaaggccttcacctccattaccctcttcaatatcctgcgctttcccctgagcatgcttcccatgatgatctcctccatgctccaggccagtgtttccacagagcggctagagaagtacttgggaggggatgacttggacacatctgccattcgacatgactgcaattttgacaaagccatgcagttttctgaggcctcctttacctgggaacatgattcggaagccacagtccgagatgtgaacctggacattatggcaggccaacttgtggctgtgataggccctgtcggctctgggaaatcctccttgatatcagccatgctgggagaaatggaaaatgtccacgggcacatcaccatcaagggcaccactgcctatgtcccacagcagtcctggattcagaatggcaccataaaggacaacatcctttttggaacagagtttaatgaaaagaggtaccagcaagtactggaggcctgtgctctcctcccagacttggaaatgctgcctggaggagatttggctgagattggagagaagggtataaatcttagtgggggtcagaagcagcggatcagcctggccagagctacctaccaaaatttagacatctatcttctagatgaccccctgtctgcagtggatgctcatgtaggaaaacatatttttaataaggtcttgggccccaatggcctgttgaaaggcaagactcgactcttggttacacatagcatgcactttcttcctcaagtggatgagattgtagttctggggaatggaacaattgtagagaaaggatcctacagtgctctcctggccaaaaaaggagagtttgctaagaatctgaagacatttctaagacatacaggccctgaagaggaagccacagtccatgatggcagtgaagaagaagacgatgactatgggctgatatccagtgtggaagagatccccgaagatgcagcctccataaccatgagaagagagaacagctttcgtcgaacacttagccgcagttctaggtccaatggcaggcatctgaagtccctgagaaactccttgaaaactcggaatgtgaatagcctgaaggaagacgaagaactagtgaaaggacaaaaactaattaagaaggaattcatagaaactggaaaggtgaagttctccatctacctggagtacctacaagcaataggattgttttcgatattcttcatcatccttgcgtttgtgatgaattctgtggcttttattggatccaacctctggctcagtgcttggaccagtgactctaaaatcttcaatagcaccgactatccagcatctcagagggacatgagagttggagtctacggagctctgggattagcccaaggtatatttgtgttcatagcacatttctggagtgcctttggtttcgtccatgcatcaaatatcttgcacaagcaactgctgaacaatatccttcgagcacctatgagattttttgacacaacacccacaggccggattgtgaacaggtttgccggcgatatttccacagtggatgacaccctgcctcagtccttgcgcagctggattacatgcttcctggggataatcagcacccttgtcatgatctgcatggccactcctgtcttcaccatcatcgtcattcctcttggcattatttatgtatctgttcagatgttttatgtgtctacctcccgccagctgaggcgtctggactctgtcaccaggtccccaatctactctcacttcagcgagaccgtatcaggtttgccagttatccgtgcctttgagcaccagcagcgatttctgaaacacaatgaggtgaggattgacaccaaccagaaatgtgtcttttcctggatcacctccaacaggtggcttgcaattcgcctggagctggttgggaacctgactgtcttcttttcagccttgatgatggttatttatagagataccctaagtggggacactgttggctttgttctgtccaatgcactcaatatcacacaaaccctgaactggctggtgaggatgacatcagaaatagagaccaacattgtggctgttgagcgaataactgagtacacaaaagtggaaaatgaggcaccctgggtgactgataagaggcctccgccagattggcccagcaaaggcaagatccagtttaacaactaccaagtgcggtaccgacctgagctggatctggtcctcagagggatcacttgtgacatcggtagcatggagaagattggtgtggtgggcaggacaggagctggaaagtcatccctcacaaactgcctcttcagaatcttagaggctgccggtggtcagattatcattgatggagtagatattgcttccattgggctccacgacctccgagagaagctgaccatcatcccccaggaccccatcctgttctctggaagcctgaggatgaatctcgaccctttcaacaactactcagatgaggagatttggaaggccttggagctggctcacctcaagtcttttgtggccagcctgcaacttgggttatcccacgaagtgacagaggctggtggcaacctgagcataggccagaggcagctgctgtgcctgggcagggctctgcttcggaaatccaagatcctggtcctggatgaggccactgctgcggtggatctagagacagacaacctcattcagacgaccatccaaaacgagttcgcccactgcacagtgatcaccatcgcccacaggctgcacaccatcatggacagtgacaaggtaatggtcctagacaacgggaagattatagagtgcggcagccctgaagaactgctacaaatccctggacccttttactttatggctaaggaagctggcattgagaatgtgaacagcacaaaattctagcagaaggccccatgggttagaaaaggactataagaataatttcttatttaattttattttttataaaatacagaatacatacaaaagtgtgtataaaatgtacgttttaaaaaaggataagtgaacacccatgaacctactacccaggttaagaaaataaatgtcaccaggtacttgagaaacccctcgattgtctacctcgatcgtacttccttgctacccacccctcccagggacaaccactgtcctgaatttcacgataattattcctttgcctttcatttctgttttatcacctttgtatgtatctttaaacaacatatacccttttttacttatgtaaatggactgactcatactgcatacatcttctatgacttgattcttttgttcaatattatatctgagattcatccatggtgatgcaaataggtgcattattttttttcactgctctgtagtctggcattgtatgaatacagcacaatgtatcagttttaatattggggatcattagcattattctcaggtttttaaaaattataagcagtactactatgg

SEQ ID NO: 8356 - DNA, 4638 bp, Artificial Sequence
  derived and/or modified sequence
atgctggagaagttctgcaacagcaccttctggaacagcagcttcctggacagccccgaggccgacctgcccctgtgcttcgagcagaccgtgctggtgtggatccccctgggctacctgtggctgctggccccctggcagctgctgcacgtgtacaagagcagaaccaagagaagcagcaccaccaagctgtacctggccaagcaggtgttcgtgggcttcctgctgatcctggccgccatcgagctggccctggtgctgaccgaggacagcggccaggccaccgtgcccgccgtgagatacaccaaccccagcctgtacctgggcacctggctgctggtgctgctgatccagtacagcagacagtggtgcgtgcagaagaacagctggttcctgagcctgttctggatcctgagcatcctgtgcggcaccttccagttccagaccctgatcagaaccctgctgcagggcgacaacagcaacctggcctacagctgcctgttcttcatcagctacggcttccagatcctgatcctgatcttcagcgccttcagcgagaacaacgagagcagcaacaaccccagcagcatcgccagcttcctgagcagcatcacctacagctggtacgacagcatcatcctgaagggctacaagagacccctgaccctggaggacgtgtgggaggtggacgaggagatgaagaccaagaccctggtgagcaagttcgagacccacatgaagagagagctgcagaaggccagaagagccctgcagagaagacaggagaagagcagccagcagaacagcggcgccagactgcccggcctgaacaagaaccagagccagagccaggacgccctggtgctggaggacgtggagaagaagaagaagaagagcggcaccaagaaggacgtgcccaagagctggctgatgaaggccctgttcaagaccttctacatggtgctgctgaagagcttcctgctgaagctggtgaacgacatcttcaccttcgtgagcccccagctgctgaagctgctgatcagcttcgccagcgacagagacacctacctgtggatcggctacctgtgcgccatcctgctgttcaccgccgccctgatccagagcttctgcctgcagtgctacttccagctgtgcttcaagctgggcgtgaaggtgagaaccgccatcatggccagcgtgtacaagaaggccctgaccctgagcaacctggccagaaaggagtacaccgtgggcgagaccgtgaacctgatgagcgtggacgcccagaagctgatggacgtgaccaacttcatgcacatgctgtggagcagcgtgctgcagatcgtgctgagcatcttcttcctgtggagagagctgggccccagcgtgctggccggcgtgggcgtgatggtgctggtgatccccatcaacgccatcctgagcaccaagagcaagaccatccaggtgaagaacatgaagaacaaggacaagagactgaagatcatgaacgagatcctgagcggcatcaagatcctgaagtacttcgcctgggagcccagcttcagagaccaggtgcagaacctgagaaagaaggagctgaagaacctgctggccttcagccagctgcagtgcgtggtgatcttcgtgttccagctgacccccgtgctggtgagcgtggtgaccttcagcgtgtacgtgctggtggacagcaacaacatcctggacgcccagaaggccttcaccagcatcaccctgttcaacatcctgagattccccctgagcatgctgcccatgatgatcagcagcatgctgcaggccagcgtgagcaccgagagactggagaagtacctgggcggcgacgacctggacaccagcgccatcagacacgactgcaacttcgacaaggccatgcagttcagcgaggccagcttcacctgggagcacgacagcgaggccaccgtgagagacgtgaacctggacatcatggccggccagctggtggccgtgatcggccccgtgggcagcggcaagagcagcctgatcagcgccatgctgggcgagatggagaacgtgcacggccacatcaccatcaagggcaccaccgcctacgtgccccagcagagctggatccagaacggcaccatcaaggacaacatcctgttcggcaccgagttcaacgagaagagataccagcaggtgctggaggcctgcgccctgctgcccgacctggagatgctgcccggcggcgacctggccgagatcggcgagaagggcatcaacctgagcggcggccagaagcagagaatcagcctggccagagccacctaccagaacctggacatctacctgctggacgaccccctgagcgccgtggacgcccacgtgggcaagcacatcttcaacaaggtgctgggccccaacggcctgctgaagggcaagaccagactgctggtgacccacagcatgcacttcctgccccaggtggacgagatcgtggtgctgggcaacggcaccatcgtggagaagggcagctacagcgccctgctggccaagaagggcgagttcgccaagaacctgaagaccttcctgagacacaccggccccgaggaggaggccaccgtgcacgacggcagcgaggaggaggacgacgactacggcctgatcagcagcgtggaggagatccccgaggacgccgccagcatcaccatgagaagagagaacagcttcagaagaaccctgagcagaagcagcagaagcaacggcagacacctgaagagcctgagaaacagcctgaagaccagaaacgtgaacagcctgaaggaggacgaggagctggtgaagggccagaagctgatcaagaaggagttcatcgagaccggcaaggtgaagttcagcatctacctggagtacctgcaggccatcggcctgttcagcatcttcttcatcatcctggccttcgtgatgaacagcgtggccttcatcggcagcaacctgtggctgagcgcctggaccagcgacagcaagatcttcaacagcaccgactaccccgccagccagagagacatgagagtgggcgtgtacggcgccctgggcctggcccagggcatcttcgtgttcatcgcccacttctggagcgccttcggcttcgtgcacgccagcaacatcctgcacaagcagctgctgaacaacatcctgagagcccccatgagattcttcgacaccacccccaccggcagaatcgtgaacagattcgccggcgacatcagcaccgtggacgacaccctgccccagagcctgagaagctggatcacctgcttcctgggcatcatcagcaccctggtgatgatctgcatggccacccccgtgttcaccatcatcgtgatccccctgggcatcatctacgtgagcgtgcagatgttctacgtgagcaccagcagacagctgagaagactggacagcgtgaccagaagccccatctacagccacttcagcgagaccgtgagcggcctgcccgtgatcagagccttcgagcaccagcagagattcctgaagcacaacgaggtgagaatcgacaccaaccagaagtgcgtgttcagctggatcaccagcaacagatggctggccatcagactggagctggtgggcaacctgaccgtgttcttcagcgccctgatgatggtgatctacagagacaccctgagcggcgacaccgtgggcttcgtgctgagcaacgccctgaacatcacccagaccctgaactggctggtgagaatgaccagcgagatcgagaccaacatcgtggccgtggagagaatcaccgagtacaccaaggtggagaacgaggccccctgggtgaccgacaagagacccccccccgactggcccagcaagggcaagatccagttcaacaactaccaggtgagatacagacccgagctggacctggtgctgagaggcatcacctgcgacatcggcagcatggagaagatcggcgtggtgggcagaaccggcgccggcaagagcagcctgaccaactgcctgttcagaatcctggaggccgccggcggccagatcatcatcgacggcgtggacatcgccagcatcggcctgcacgacctgagagagaagctgaccatcatcccccaggaccccatcctgttcagcggcagcctgagaatgaacctggaccccttcaacaactacagcgacgaggagatctggaaggccctggagctggcccacctgaagagcttcgtggccagcctgcagctgggcctgagccacgaggtgaccgaggccggcggcaacctgagcatcggccagagacagctgctgtgcctgggcagagccctgctgagaaagagcaagatcctggtgctggacgaggccaccgccgccgtggacctggagaccgacaacctgatccagaccaccatccagaacgagttcgcccactgcaccgtgatcaccatcgcccacagactgcacaccatcatggacagcgacaaggtgatggtgctggacaacggcaagatcatcgagtgcggcagccccgaggagctgctgcagatccccggccccttctacttcatggccaaggaggccggcatcgagaacgtgaacagcaccaagttctag

SEQ ID NO: 8357 - protein, 1499 aa, Artificial Sequence
  derived and/or modified sequence
MMANWAEARPLLILIVLLGQFVSIKAQEEDEDEGYGEEIACTQNGQMYLNRDIWKPAPCQICVCDNGAILCDKIECQDVLDCADPVTPPGECCPVCSQTPGGGNTNFGRGRKGQKGEPGLVPVVTGIRGRPGPAGPPGSQGPRGERGPKGRPGPRGPQGIDGEPGVPGQPGAPGPPGHPSHPGPDGLSRPFSAQMAGLDEKSGLGSQVGLMPGSVGPVGPRGPQGLQGQQGGAGPTGPPGEPGDPGPMGPIGSRGPEGPPGKPGEDGEPGRNGNPGEVGFAGSPGARGFPGAPGLPGLKGHRGHKGLEGPKGEVGAPGSKGEAGPTGPMGAMGPLGPRGMPGERGRLGPQGAPGQRGAHGMPGKPGPMGPLGIPGSSGFPGNPGMKGEAGPTGARGPEGPQGQRGETGPPGPVGSPGLPGAIGTDGTPGAKGPTGSPGTSGPPGSAGPPGSPGPQGSTGPQGIRGQPGDPGVPGFKGEAGPKGEPGPHGIQGPIGPPGEEGKRGPRGDPGTVGPPGPVGERGAPGNRGFPGSDGLPGPKGAQGERGPVGSSGPKGSQGDPGRPGEPGLPGARGLTGNPGVQGPEGKLGPLGAPGEDGRPGPPGSIGIRGQPGSMGLPGPKGSSGDPGKPGEAGNAGVPGQRGAPGKDGEVGPSGPVGPPGLAGERGEQGPPGPTGFQGLPGPPGPPGEGGKPGDQGVPGDPGAVGPLGPRGERGNPGERGEPGITGLPGEKGMAGGHGPDGPKGSPGPSGTPGDTGPPGLQGMPGERGIAGTPGPKGDRGGIGEKGAEGTAGNDGARGLPGPLGPPGPAGPTGEKGEPGPRGLVGPPGSRGNPGSRGENGPTGAVGFAGPQGPDGQPGVKGEPGEPGQKGDAGSPGPQGLAGSPGPHGPNGVPGLKGGRGTQGPPGATGFPGSAGRVGPPGPAGAPGPAGPLGEPGKEGPPGLRGDPGSHGRVGDRGPAGPPGGPGDKGDPGEDGQPGPDGPPGPAGTTGQRGIVGMPGQRGERGMPGLPGPAGTPGKVGPTGATGDKGPPGPVGPPGSNGPVGEPGPEGPAGNDGTPGRDGAVGERGDRGDPGPAGLPGSQGAPGTPGPVGAPGDAGQRGDPGSRGPIGPPGRAGKRGLPGPQGPRGDKGDHGDRGDRGQKGHRGFTGLQGLPGPPGPNGEQGSAGIPGPFGPRGPPGPVGPSGKEGNPGPLGPIGPPGVRGSVGEAGPEGPPGEPGPPGPPGPPGHLTAALGDIMGHYDESMPDPLPEFTEDQAAPDDKNKTDPGVHATLKSLSSQIETMRSPDGSKKHPARTCDDLKLCHSAKQSGEYWIDPNQGSVEDAIKVYCNMETGETCISANPSSVPRKTWWASKSPDNKPVWYGLDMNRGSQFAYGDHQSPNTAITQMTFLRLLSKEASQNITYICKNSVGYMDDQAKNLKKAVVLKGANDLDIKAEGNIRFRYIVLQDTCSKRNGNVGKTVFEYRTQNVARLPIIDLAPVDVGGTDQEFGVEIGPVCFV

SEQ ID NO: 8358 - protein, 1139 aa, Artificial Sequence
  derived and/or modified sequence
LPGRRHRLGPPGSQGPRGERGPKGRPGPRGPQGIDGEPGVPGQPGAPGGAGPTGPPGEPGDPGPMGPIGSRGPEGPPGKPGEDGEPGRNGNPGEVGFAGSPGARGFPGAPGLPGLKGHRGHKGLEGPKGEVGAPGSKGEAGPTGPRGDPGTVGPPGPVGERGAPGNRGFPGSDGLPGPKGAQGERGPVGSSGPKGSQGDPGRPGEPGLPGARGLTGNPGVQGPEGKLGPLGAPGEDGRPGPPGSIGIRGQPGSMGLPGPKGSSGDPGKPGEAGNAGVPGQRGAPGKDGEVGPSGPVGPPGLAGERGEQGPPGPTGFQGLPGPPGPPGEGGKPGDQGVPGDPGAVGPLGPRGERGNPGERGEPGITGLPGEKGMAGGHGPDGPKGSPGPSGTPGDTGPPGLQGMPGERGIAGTPGPKGDRGGIGEKGAEGTAGNDGARGLPGPLGPPGPAGPTGEKGEPGPRGLVGPPGSRGNPGSRGENGPTGAVGFAGPQGPDGQPGVKGEPGEPGQKGDAGSPGPQGLAGSPGPHGPNGVPGLKGGRGTQGPPGATGFPGSAGRVGPPGPAGAPGPAGPLGEPGKEGPPGLRGDPGSHGRVGDRGPAGPPGGPGDKGDPGEDGQPGPDGPPGPAGTTGQRGIVGMPGQRGERGMPGLPGPAGTPGKVGPTGATGDKGPPGPVGPPGSNGPVGEPGPEGPAGNDGTPGRDGAVGERGDRGDPGPAGLPGSQGAPGTPGPVGAPGDAGQRGDPGSRGPIGPPGRAGKRGLPGPQGPRGDKGDHGDRGDRGQKGHRGFTGLQGLPGPPGPNGEQGSAGIPGPFGPRGPPGPVGPSGKEGNPGPLGPIGPPGVRGSVGEAGPEGPPGEPGPPGPPGPPGHLTAALGDIMGHYDESMPDPLPEFTEDQAAPDDKNKTDPGVHATLKSLSSQIETMRSPDGSKKHPARTCDDLKLCHSAKQSGEYWIDPNQGSVEDAIKVYCNMETGETCISANPSSVPRKTWWASKSPDNKPVWYGLDMNRGSQFAYGDHQSPNTAITQMTFLRLLSKEASQNITYICKNSVGYMDDQAKNLKKAVVLKGANDLDIKAEGNIRFRYIVLQDTCSKRNGNVGKTVFEYRTQNVARLPIIDLAPVDVGGTDQEFGVEIGPVCFV

SEQ ID NO: 8359 - DNA, 4500 bp, Artificial Sequence
  derived and/or modified sequence
atgatggccaactgggccgaggccagacccctgctgatcctgatcgtgctgctgggccagttcgtgagcatcaaggcccaggaggaggacgaggacgagggctacggcgaggagatcgcctgcacccagaacggccagatgtacctgaacagagacatctggaagcccgccccctgccagatctgcgtgtgcgacaacggcgccatcctgtgcgacaagatcgagtgccaggacgtgctggactgcgccgaccccgtgaccccccccggcgagtgctgccccgtgtgcagccagacccccggcggcggcaacaccaacttcggcagaggcagaaagggccagaagggcgagcccggcctggtgcccgtggtgaccggcatcagaggcagacccggccccgccggcccccccggcagccagggccccagaggcgagagaggccccaagggcagacccggccccagaggcccccagggcatcgacggcgagcccggcgtgcccggccagcccggcgcccccggcccccccggccaccccagccaccccggccccgacggcctgagcagacccttcagcgcccagatggccggcctggacgagaagagcggcctgggcagccaggtgggcctgatgcccggcagcgtgggccccgtgggccccagaggcccccagggcctgcagggccagcagggcggcgccggccccaccggcccccccggcgagcccggcgaccccggccccatgggccccatcggcagcagaggccccgagggcccccccggcaagcccggcgaggacggcgagcccggcagaaacggcaaccccggcgaggtgggcttcgccggcagccccggcgccagaggcttccccggcgcccccggcctgcccggcctgaagggccacagaggccacaagggcctggagggccccaagggcgaggtgggcgcccccggcagcaagggcgaggccggccccaccggccccatgggcgccatgggccccctgggccccagaggcatgcccggcgagagaggcagactgggcccccagggcgcccccggccagagaggcgcccacggcatgcccggcaagcccggccccatgggccccctgggcatccccggcagcagcggcttccccggcaaccccggcatgaagggcgaggccggccccaccggcgccagaggccccgagggcccccagggccagagaggcgagaccggcccccccggccccgtgggcagccccggcctgcccggcgccatcggcaccgacggcacccccggcgccaagggccccaccggcagccccggcaccagcggcccccccggcagcgccggcccccccggcagccccggcccccagggcagcaccggcccccagggcatcagaggccagcccggcgaccccggcgtgcccggcttcaagggcgaggccggccccaagggcgagcccggcccccacggcatccagggccccatcggcccccccggcgaggagggcaagagaggccccagaggcgaccccggcaccgtgggcccccccggccccgtgggcgagagaggcgcccccggcaacagaggcttccccggcagcgacggcctgcccggccccaagggcgcccagggcgagagaggccccgtgggcagcagcggccccaagggcagccagggcgaccccggcagacccggcgagcccggcctgcccggcgccagaggcctgaccggcaaccccggcgtgcagggccccgagggcaagctgggccccctgggcgcccccggcgaggacggcagacccggcccccccggcagcatcggcatcagaggccagcccggcagcatgggcctgcccggccccaagggcagcagcggcgaccccggcaagcccggcgaggccggcaacgccggcgtgcccggccagagaggcgcccccggcaaggacggcgaggtgggccccagcggccccgtgggcccccccggcctggccggcgagagaggcgagcagggcccccccggccccaccggcttccagggcctgcccggcccccccggcccccccggcgagggcggcaagcccggcgaccagggcgtgcccggcgaccccggcgccgtgggccccctgggccccagaggcgagagaggcaaccccggcgagagaggcgagcccggcatcaccggcctgcccggcgagaagggcatggccggcggccacggccccgacggccccaagggcagccccggccccagcggcacccccggcgacaccggcccccccggcctgcagggcatgcccggcgagagaggcatcgccggcacccccggccccaagggcgacagaggcggcatcggcgagaagggcgccgagggcaccgccggcaacgacggcgccagaggcctgcccggccccctgggcccccccggccccgccggccccaccggcgagaagggcgagcccggccccagaggcctggtgggcccccccggcagcagaggcaaccccggcagcagaggcgagaacggccccaccggcgccgtgggcttcgccggcccccagggccccgacggccagcccggcgtgaagggcgagcccggcgagcccggccagaagggcgacgccggcagccccggcccccagggcctggccggcagccccggcccccacggccccaacggcgtgcccggcctgaagggcggcagaggcacccagggcccccccggcgccaccggcttccccggcagcgccggcagagtgggcccccccggccccgccggcgcccccggccccgccggccccctgggcgagcccggcaaggagggcccccccggcctgagaggcgaccccggcagccacggcagagtgggcgacagaggccccgccggcccccccggcggccccggcgacaagggcgaccccggcgaggacggccagcccggccccgacggcccccccggccccgccggcaccaccggccagagaggcatcgtgggcatgcccggccagagaggcgagagaggcatgcccggcctgcccggccccgccggcacccccggcaaggtgggccccaccggcgccaccggcgacaagggcccccccggccccgtgggcccccccggcagcaacggccccgtgggcgagcccggccccgagggccccgccggcaacgacggcacccccggcagagacggcgccgtgggcgagagaggcgacagaggcgaccccggccccgccggcctgcccggcagccagggcgcccccggcacccccggccccgtgggcgcccccggcgacgccggccagagaggcgaccccggcagcagaggccccatcggcccccccggcagagccggcaagagaggcctgcccggcccccagggccccagaggcgacaagggcgaccacggcgacagaggcgacagaggccagaagggccacagaggcttcaccggcctgcagggcctgcccggcccccccggccccaacggcgagcagggcagcgccggcatccccggccccttcggccccagaggcccccccggccccgtgggccccagcggcaaggagggcaaccccggccccctgggccccatcggcccccccggcgtgagaggcagcgtgggcgaggccggccccgagggcccccccggcgagcccggcccccccggcccccccggcccccccggccacctgaccgccgccctgggcgacatcatgggccactacgacgagagcatgcccgaccccctgcccgagttcaccgaggaccaggccgcccccgacgacaagaacaagaccgaccccggcgtgcacgccaccctgaagagcctgagcagccagatcgagaccatgagaagccccgacggcagcaagaagcaccccgccagaacctgcgacgacctgaagctgtgccacagcgccaagcagagcggcgagtactggatcgaccccaaccagggcagcgtggaggacgccatcaaggtgtactgcaacatggagaccggcgagacctgcatcagcgccaaccccagcagcgtgcccagaaagacctggtgggccagcaagagccccgacaacaagcccgtgtggtacggcctggacatgaacagaggcagccagttcgcctacggcgaccaccagagccccaacaccgccatcacccagatgaccttcctgagactgctgagcaaggaggccagccagaacatcacctacatctgcaagaacagcgtgggctacatggacgaccaggccaagaacctgaagaaggccgtggtgctgaagggcgccaacgacctggacatcaaggccgagggcaacatcagattcagatacatcgtgctgcaggacacctgcagcaagagaaacggcaacgtgggcaagaccgtgttcgagtacagaacccagaacgtggccagactgcccatcatcgacctggcccccgtggacgtgggcggcaccgaccaggagttcggcgtggagatcggccccgtgtgcttcgtgtag

SEQ ID NO: 8360 - DNA, 3420 bp, Artificial Sequence
  derived and/or modified sequence
ctgcccggcagaagacacagactgggcccccccggcagccagggccccagaggcgagagaggccccaagggcagacccggccccagaggcccccagggcatcgacggcgagcccggcgtgcccggccagcccggcgcccccggcggcgccggccccaccggcccccccggcgagcccggcgaccccggccccatgggccccatcggcagcagaggccccgagggcccccccggcaagcccggcgaggacggcgagcccggcagaaacggcaaccccggcgaggtgggcttcgccggcagccccggcgccagaggcttccccggcgcccccggcctgcccggcctgaagggccacagaggccacaagggcctggagggccccaagggcgaggtgggcgcccccggcagcaagggcgaggccggccccaccggccccagaggcgaccccggcaccgtgggcccccccggccccgtgggcgagagaggcgcccccggcaacagaggcttccccggcagcgacggcctgcccggccccaagggcgcccagggcgagagaggccccgtgggcagcagcggccccaagggcagccagggcgaccccggcagacccggcgagcccggcctgcccggcgccagaggcctgaccggcaaccccggcgtgcagggccccgagggcaagctgggccccctgggcgcccccggcgaggacggcagacccggcccccccggcagcatcggcatcagaggccagcccggcagcatgggcctgcccggccccaagggcagcagcggcgaccccggcaagcccggcgaggccggcaacgccggcgtgcccggccagagaggcgcccccggcaaggacggcgaggtgggccccagcggccccgtgggcccccccggcctggccggcgagagaggcgagcagggcccccccggccccaccggcttccagggcctgcccggcccccccggcccccccggcgagggcggcaagcccggcgaccagggcgtgcccggcgaccccggcgccgtgggccccctgggccccagaggcgagagaggcaaccccggcgagagaggcgagcccggcatcaccggcctgcccggcgagaagggcatggccggcggccacggccccgacggccccaagggcagccccggccccagcggcacccccggcgacaccggcccccccggcctgcagggcatgcccggcgagagaggcatcgccggcacccccggccccaagggcgacagaggcggcatcggcgagaagggcgccgagggcaccgccggcaacgacggcgccagaggcctgcccggccccctgggcccccccggccccgccggccccaccggcgagaagggcgagcccggccccagaggcctggtgggcccccccggcagcagaggcaaccccggcagcagaggcgagaacggccccaccggcgccgtgggcttcgccggcccccagggccccgacggccagcccggcgtgaagggcgagcccggcgagcccggccagaagggcgacgccggcagccccggcccccagggcctggccggcagccccggcccccacggccccaacggcgtgcccggcctgaagggcggcagaggcacccagggcccccccggcgccaccggcttccccggcagcgccggcagagtgggcccccccggccccgccggcgcccccggccccgccggccccctgggcgagcccggcaaggagggcccccccggcctgagaggcgaccccggcagccacggcagagtgggcgacagaggccccgccggcccccccggcggccccggcgacaagggcgaccccggcgaggacggccagcccggccccgacggcccccccggccccgccggcaccaccggccagagaggcatcgtgggcatgcccggccagagaggcgagagaggcatgcccggcctgcccggccccgccggcacccccggcaaggtgggccccaccggcgccaccggcgacaagggcccccccggccccgtgggcccccccggcagcaacggccccgtgggcgagcccggccccgagggccccgccggcaacgacggcacccccggcagagacggcgccgtgggcgagagaggcgacagaggcgaccccggccccgccggcctgcccggcagccagggcgcccccggcacccccggccccgtgggcgcccccggcgacgccggccagagaggcgaccccggcagcagaggccccatcggcccccccggcagagccggcaagagaggcctgcccggcccccagggccccagaggcgacaagggcgaccacggcgacagaggcgacagaggccagaagggccacagaggcttcaccggcctgcagggcctgcccggcccccccggccccaacggcgagcagggcagcgccggcatccccggccccttcggccccagaggcccccccggccccgtgggccccagcggcaaggagggcaaccccggccccctgggccccatcggcccccccggcgtgagaggcagcgtgggcgaggccggccccgagggcccccccggcgagcccggcccccccggcccccccggcccccccggccacctgaccgccgccctgggcgacatcatgggccactacgacgagagcatgcccgaccccctgcccgagttcaccgaggaccaggccgcccccgacgacaagaacaagaccgaccccggcgtgcacgccaccctgaagagcctgagcagccagatcgagaccatgagaagccccgacggcagcaagaagcaccccgccagaacctgcgacgacctgaagctgtgccacagcgccaagcagagcggcgagtactggatcgaccccaaccagggcagcgtggaggacgccatcaaggtgtactgcaacatggagaccggcgagacctgcatcagcgccaaccccagcagcgtgcccagaaagacctggtgggccagcaagagccccgacaacaagcccgtgtggtacggcctggacatgaacagaggcagccagttcgcctacggcgaccaccagagccccaacaccgccatcacccagatgaccttcctgagactgctgagcaaggaggccagccagaacatcacctacatctgcaagaacagcgtgggctacatggacgaccaggccaagaacctgaagaaggccgtggtgctgaagggcgccaacgacctggacatcaaggccgagggcaacatcagattcagatacatcgtgctgcaggacacctgcagcaagagaaacggcaacgtgggcaagaccgtgttcgagtacagaacccagaacgtggccagactgcccatcatcgacctggcccccgtggacgtgggcggcaccgaccaggagttcggcgtggagatcggccccgtgtgcttcgtgtag

SEQ ID NO: 8361 - DNA, 6949 bp, Artificial Sequence
  derived and/or modified sequence
gaccgttgcttggcagacactggatggttatgagcctgaacaagctgaaaaggggcaggaaaagaagtggaggcagcattcttcctatttaaagctgcatcgcttgaaaaaagttttcgcagactgtgctggagctggtgctgaaaaagggggtttgcagaggctgccctggggctggtgctgaaagaagagcccacagctgacttcatggtgctacaataacctcagaatctacttttcactctcaggagaacccacatgtctaatatttagacatgatggcaaactgggcggaagcaagacctctcctcattcttattgttttattagggcaatttgtctcaataaaagcccaggaagaagacgaggatgaaggatatggtgaagaaatagcctgcactcagaatggccagatgtacttaaacagggacatttggaaacctgccccttgtcagatctgtgtctgtgacaatggagccattctctgtgacaagatagaatgccaggatgtgctggactgtgccgaccctgtaacgccccctggggaatgctgtcctgtctgttcacaaacacctggaggtggcaataccaattttggtagaggaagaaagggacaaaagggagaaccaggattagtgcctgttgtaacaggcatacgtggtcgtccaggaccggcaggacctccaggatcacagggaccaagaggagagcgagggccaaaaggaagacctggccctcgtggacctcagggaattgatggagaaccaggtgttcctggtcaacctggtgctccaggacctcctggacatccgtcccacccaggacccgatggcttgagcaggccgttttcagctcaaatggctgggttggatgaaaaatctggacttgggagtcaagtaggactaatgcctggctctgtgggtcctgttggcccaaggggaccacagggtttacaaggacagcaaggtggtgcaggacctacaggacctcctggtgaacctggtgatcctggaccaatgggtccgattggttcacgtggaccagagggccctcctggtaaacctggggaagatggtgaacctggcagaaatggaaatcctggtgaagtgggatttgcaggatctccgggagctcgtggatttcctggggctcctggtcttccaggtctgaagggtcaccgaggacacaaaggtcttgaaggccctaaaggtgaagttggagcacctggttccaagggtgaagctggccccactggtccaatgggtgccatgggtcctctgggtccgaggggaatgccaggagagagagggagacttgggccacagggtgctcctggacaacgaggtgcacatggtatgcctggaaaacctggaccaatgggtcctcttgggataccaggctcttctggttttccaggaaatcctggaatgaagggagaagcaggtcctacaggggcgcgaggccctgaaggtcctcaggggcagagaggtgaaactgggcccccaggtccagttggctctccaggtcttcctggtgcaataggaactgatggtactcctggtgccaaaggcccaacgggctctccaggtacctctggtcctcctggctcagcagggcctcctggatctccaggacctcagggtagcactggtcctcagggaattcgaggccaaccgggtgatccaggagttccaggtttcaaaggagaagctggcccaaaaggggaaccagggccacatggtattcagggtccgataggcccacccggtgaagaaggcaaaagaggtcccagaggtgacccaggaacagttggtcctccagggccagtgggagaaaggggtgctcctggcaatcgtggttttccaggctctgatggtttacctgggccaaagggtgctcaaggagaacggggtcctgtaggttcttcaggacccaaaggaagccagggggatccaggacgtccaggggaacctgggcttccaggtgctcggggtttgacaggaaatcctggtgttcaaggtcctgaaggaaaacttggacctttgggtgcgccaggggaagatggccgtccaggtcctccaggctccataggaatcagagggcagcccgggagcatgggccttccaggccccaaaggtagcagtggtgaccctgggaaacctggagaagcaggaaatgctggagttcctgggcagaggggagctcctggaaaagatggtgaagttggtccttctggtcctgtgggcccgccgggtctagctggtgaaagaggagaacaaggacctccaggccccacaggttttcaggggcttcctggtcctccagggcctcctggagaaggtggaaaaccaggtgatcaaggtgttcctggagatcccggagcagttggcccgttaggacctagaggagaacgaggaaatcctggggaaagaggagaacctgggataactggactccctggtgagaagggaatggctggaggacatggtcctgatggcccaaaaggcagtccaggtccatctgggacccctggagatacaggcccaccaggtcttcaaggtatgccgggagaaagaggaattgcaggaactcctggccccaagggtgacagaggtggcataggagaaaaaggtgctgaaggcacagctggaaatgatggtgcaagaggtcttccaggtcctttgggccctccaggtccggcaggtcctactggagaaaagggtgaacctggtcctcgaggtttagttggccctcctggctcccggggcaatcctggttctcgaggtgaaaatgggccaactggagctgttggttttgccggaccccagggtcctgacggacagcctggagtaaaaggtgaacctggagagccaggacagaagggagatgctggttctcctggaccacaaggtttagcaggatcccctggccctcatggtcctaatggtgttcctggactaaaaggtggtcgaggaacccaaggtccgcctggtgctacaggatttcctggttctgcgggcagagttggacctccaggccctgctggagctccaggacctgcgggacccctaggggaacccgggaaggagggacctccaggtcttcgtggggaccctggctctcatgggcgtgtgggagatcgaggaccagctggcccccctggtggcccaggagacaaaggggacccaggagaagatgggcaacctggtccagatggcccccctggtccagctggaacgaccgggcagagaggaattgttggcatgcctgggcaacgtggagagagaggcatgcccggcctaccaggcccagcgggaacaccaggaaaagtaggaccaactggtgcaacaggagataaaggtccacctggacctgtggggcccccaggctccaatggtcctgtaggggaacctggaccagaaggtccagctggcaatgatggtaccccaggacgggatggtgctgttggagaacgtggtgatcgtggagaccctgggcctgcaggtctgccaggctctcagggtgcccctggaactcctggccctgtgggtgctccaggagatgcaggacaaagaggagatccgggttctcggggtcctataggaccacctggtcgagctgggaaacgtggattacctggaccccaaggacctcgtggtgacaaaggtgatcatggagaccgaggtgacagaggtcagaagggccacagaggctttactggtcttcagggtcttcctggccctcctggtccaaatggtgaacaaggaagtgctggaatccctggaccatttggcccaagaggtcctccaggcccagttggtccttcaggtaaagaaggaaaccctgggccacttgggccaattggacctccaggtgtacgaggcagtgtaggagaagcaggacctgagggccctcctggtgagcctggcccacctggccctccgggtccccctggccaccttacagctgctcttggggatatcatggggcactatgatgaaagcatgccagatccacttcctgagtttactgaagatcaggcggctcctgatgacaaaaacaaaacggacccaggggttcatgctaccctgaagtcactcagtagtcagattgaaaccatgcgcagccccgatggctcgaaaaagcacccagcccgcacgtgtgatgacctaaagctttgccattccgcaaagcagagtggtgaatactggattgatcctaaccaaggatctgttgaagatgcaatcaaagtttactgcaacatggaaacaggagaaacatgtatttcagcaaacccatccagtgtaccacgtaaaacctggtgggccagtaaatctcctgacaataaacctgtttggtatggtcttgatatgaacagagggtctcagttcgcttatggagaccaccaatcacctaatacagccattactcagatgacttttttgcgccttttatcaaaagaagcctcccagaacatcacttacatctgtaaaaacagtgtaggatacatggacgatcaagctaagaacctcaaaaaagctgtggttctcaaaggggcaaatgacttagatatcaaagcagagggaaatattagattccggtatatcgttcttcaagacacttgctctaagcggaatggaaatgtgggcaagactgtctttgaatatagaacacagaatgtggcacgcttgcccatcatagatcttgctcctgtggatgttggcggcacagaccaggaattcggcgttgaaattgggccagtttgttttgtgtaaagtaagccaagacacatcgacaatgagcaccaccatcaatgaccaccgccattcacaagaactttgactgtttgaagttgatcctgagactcttgaagtaatggctgatcctgcatcagcattgtatatatggtcttaagtgcctggcctccttatccttcagaatatttattttacttacaatcctcaagttttaattgattttaaatatttttcaatacaacagtttaggtttaagatgaccaatgacaatgaccacctttgcagaaagtaaactgattgaataaataaatctccgttttcttcaatttatttcagtgtaatgaaaaagttgcttagtatttatgaggaaattcttcttcctggcaggtagcttaaagagtggggtatatagagccacaacacatgtttattttgcttggctgcagttgaaaaatagaaattagtgcccttttgtgacctctcattccaagattgtcaattaaaaatgagtttaaaatgtttaacttgtgatcgagacctacatgcatgtcttgatattgtgtaactataatagagactctttaaggagaatcttaaaaaaaaaaaaacgtttctcactgtcttaaatagaatttttaaatagtatatattcagtggcattttggagaacaaagtgaatttacttcgacttcttaaatttttgtaaaagactataagtttagacatctttctcattcaaatttaaagatatctttctcctcttgatcaatctatcaatattgatagaagtcacactagtatataccatttaatacatttacactttcttatttaagaagatattgaatgcaaaataattgacatatagaactttacaaacatatgtccaaggactctaaattgagactcttccacatgtacaatctcatcatcctgaagcctataatgaagaaaaagatctagaaactgagttgtggagctgactctaatcaaatgtgatgattggaattagaccatttggcctttgaactttcataggaaaaatgacccaacatttcttagcatgagctacctcatctctagaagctgggatggacttactattcttgtttatattttagatactgaaaggtgctatgcttctgttattattccaagactggagataggcagggctaaaaaggtattattatttttcctttaatgatggtgctaaaattcttcctataaaattccttaaaaataaagatggtttaatcactaccattgtgaaaacataactgttagacttcccgtttctgaaagaaagagcatcgttccaatgcttgttcactgttcctctgtcatactgtatctggaatgctttgtaatacttgcatgcttcttagaccagaacatgtaggtccccttgtgtctcaatactttttttttcttaattgcatttgttggctctattttaatttttttcttttaaaataaacagctgggaccatcccaaaagacaagccatgcatacaactttggtcatgtatctctgcaaagcatcaaattaaatgcacgcttttgtcatgtcagtggtttttgttttgtgaaattcctttgaccatattagatctatttcatttccaatagtgaaaaggagatgtggtggtatactttgtttgccatttgtttaaaagatacaacggataccttctatcatgtatgtactggcttataaatgaaaatctatctacaacattacccacaaaggcaacatgacaccaattatcactgcctctgcccttaaaaatgtcagagtagtattattgataaaaagggcaagcaatagatttttcatgactgaataaactgtaataataaaacatatgtctcaaagtgtatcacatatgaatttagcctaattgttttcagtttcattctcaatatttagtttacaacatcattttcccctaaactggttatattttgacctgtatatcttaaatttgagtatttatatgcctaaatacatgtgtgagttttgtttgacttccaagtccaaactataagattatataagttcatatagatgaatcagaaatatgtggtaatactattaagtcacaaacactaacaatttccaactatagaaataacagttcttatttggattttgggaatgctaccaataaaagcctgcccagaccatt

SEQ ID NO: 8362 - DNA, 5575 bp, Artificial Sequence
  derived and/or modified sequence
ttacctgggagaagacatagacttggacctccaggatcacagggaccaagaggagagcgagggccaaaaggaagacctggccctcgtggacctcagggaattgatggagaaccaggtgttcctggtcaacctggtgctccaggtggtgcaggacctacaggacctcctggtgaacctggtgatcctggaccaatgggtccgattggttcacgtggaccagagggccctcctggtaaacctggggaagatggtgaacctggcagaaatggaaatcctggtgaagtgggatttgcaggatctccgggagctcgtggatttcctggggctcctggtcttccaggtctgaagggtcaccgaggacacaaaggtcttgaaggccctaaaggtgaagttggagcacctggttccaagggagaagcaggtcctacagggcccagaggtgacccaggaacagttggtcctccagggccagtgggagaaaggggtgctcctggcaatcgtggttttccaggctctgatggtttacctgggccaaagggtgctcaaggagaacggggtcctgtaggttcttcaggacccaaaggaagccagggggatccaggacgtccaggggaacctgggcttccaggtgctcggggtttgacaggaaatcctggtgttcaaggtcctgaaggaaaacttggacctttgggtgcgccaggggaagatggccgtccaggtcctccaggctccataggaatcagagggcagcccgggagcatgggccttccaggccccaaaggtagcagtggtgaccctgggaaacctggagaagcaggaaatgctggagttcctgggcagaggggagctcctggaaaagatggtgaagttggtccttctggtcctgtgggcccgccgggtctagctggtgaaagaggagaacaaggacctccaggccccacaggttttcaggggcttcctggtcctccagggcctcctggagaaggtggaaaaccaggtgatcaaggtgttcctggagatcccggagcagttggcccgttaggacctagaggagaacgaggaaatcctggggaaagaggagaacctgggataactggactccctggtgagaagggaatggctggaggacatggtcctgatggcccaaaaggcagtccaggtccatctgggacccctggagatacaggcccaccaggtcttcaaggtatgccgggagaaagaggaattgcaggaactcctggccccaagggtgacagaggtggcataggagaaaaaggtgctgaaggcacagctggaaatgatggtgcaagaggtcttccaggtcctttgggccctccaggtccggcaggtcctactggagaaaagggtgaacctggtcctcgaggtttagttggccctcctggctcccggggcaatcctggttctcgaggtgaaaatgggccaactggagctgttggttttgccggaccccagggtcctgacggacagcctggagtaaaaggtgaacctggagagccaggacagaagggagatgctggttctcctggaccacaaggtttagcaggatcccctggccctcatggtcctaatggtgttcctggactaaaaggtggtcgaggaacccaaggtccgcctggtgctacaggatttcctggttctgcgggcagagttggacctccaggccctgctggagctccaggacctgcgggacccctaggggaacccgggaaggagggacctccaggtcttcgtggggaccctggctctcatgggcgtgtgggagatcgaggaccagctggcccccctggtggcccaggagacaaaggggacccaggagaagatgggcaacctggtccagatggcccccctggtccagctggaacgaccgggcagagaggaattgttggcatgcctgggcaacgtggagagagaggcatgcccggcctaccaggcccagcgggaacaccaggaaaagtaggaccaactggtgcaacaggagataaaggtccacctggacctgtggggcccccaggctccaatggtcctgtaggggaacctggaccagaaggtccagctggcaatgatggtaccccaggacgggatggtgctgttggagaacgtggtgatcgtggagaccctgggcctgcaggtctgccaggctctcagggtgcccctggaactcctggccctgtgggtgctccaggagatgcaggacaaagaggagatccgggttctcggggtcctataggaccacctggtcgagctgggaaacgtggattacctggaccccaaggacctcgtggtgacaaaggtgatcatggagaccgaggtgacagaggtcagaagggccacagaggctttactggtcttcagggtcttcctggccctcctggtccaaatggtgaacaaggaagtgctggaatccctggaccatttggcccaagaggtcctccaggcccagttggtccttcaggtaaagaaggaaaccctgggccacttgggccaattggacctccaggtgtacgaggcagtgtaggagaagcaggacctgagggccctcctggtgagcctggcccacctggccctccgggtccccctggccaccttacagctgctcttggggatatcatggggcactatgatgaaagcatgccagatccacttcctgagtttactgaagatcaggcggctcctgatgacaaaaacaaaacggacccaggggttcatgctaccctgaagtcactcagtagtcagattgaaaccatgcgcagccccgatggctcgaaaaagcacccagcccgcacgtgtgatgacctaaagctttgccattccgcaaagcagagtggtgaatactggattgatcctaaccaaggatctgttgaagatgcaatcaaagtttactgcaacatggaaacaggagaaacatgtatttcagcaaacccatccagtgtaccacgtaaaacctggtgggccagtaaatctcctgacaataaacctgtttggtatggtcttgatatgaacagagggtctcagttcgcttatggagaccaccaatcacctaatacagccattactcagatgacttttttgcgccttttatcaaaagaagcctcccagaacatcacttacatctgtaaaaacagtgtaggatacatggacgatcaagctaagaacctcaaaaaagctgtggttctcaaaggggcaaatgacttagatatcaaagcagagggaaatattagattccggtatatcgttcttcaagacacttgctctaagcggaatggaaatgtgggcaagactgtctttgaatatagaacacagaatgtggcacgcttgcccatcatagatcttgctcctgtggatgttggcggcacagaccaggaattcggcgttgaaattgggccagtttgttttgtgtaaagtaagccaagacacatcgacaatgagcaccaccatcaatgaccaccgccattcacaagaactttgactgtttgaagttgatcctgagactcttgaagtaatggctgatcctgcatcagcattgtatatatggtcttaagtgcctggcctccttatccttcagaatatttattttacttacaatcctcaagttttaattgattttaaatatttttcaatacaacagtttaggtttaagatgaccaatgacaatgaccacctttgcagaaagtaaactgattgaataaataaatctccgttttcttcaatttatttcagtgtaatgaaaaagttgcttagtatttatgaggaaattcttcttcctggcaggtagcttaaagagtggggtatatagagccacaacacatgtttattttgcttggctgcagttgaaaaatagaaattagtgcccttttgtgacctctcattccaagattgtcaattaaaaatgagtttaaaatgtttaacttgtgatcgagacctacatgcatgtcttgatattgtgtaactataatagagactctttaaggagaatcttaaaaaaaaaaaaacgtttctcactgtcttaaatagaatttttaaatagtatatattcagtggcattttggagaacaaagtgaatttacttcgacttcttaaatttttgtaaaagactataagtttagacatctttctcattcaaatttaaagatatctttctcctcttgatcaatctatcaatattgatagaagtcacactagtatataccatttaatacatttacactttcttatttaagaagatattgaatgcaaaataattgacatatagaactttacaaacatatgtccaaggactctaaattgagactcttccacatgtacaatctcatcatcctgaagcctataatgaagaaaaagatctagaaactgagttgtggagctgactctaatcaaatgtgatgattggaattagaccatttggcctttgaactttcataggaaaaatgacccaacatttcttagcatgagctacctcatctctagaagctgggatggacttactattcttgtttatattttagatactgaaaggtgctatgcttctgttattattccaagactggagataggcagggctaaaaaggtattattatttttcctttaatgatggtgctaaaattcttcctataaaattccttaaaaataaagatggtttaatcactaccattgtgaaaacataactgttagacttcccgtttctgaaagaaagagcatcgttccaatgcttgttcactgttcctctgtcatactgtatctggaatgctttgtaatacttgcatgcttcttagaccagaacatgtaggtccccttgtgtctcaatactttttttttcttaattgcatttgttggctctattttaatttttttcttttaaaataaacagctgggaccatcccaaaagacaagccatgcatacaactttggtcatgtatctctgcaaagcatcaaattaaatgcacgcttttgtcatgtcagtggtttttgttttgtgaaattcctttgaccatattagatctatttcatttccaatagtgaaaaggagatgtggtggtatactttgtttgccatttgtttaaaagatacaacggataccttctatcatgtatgtactggcttataaatgaaaatctatctacaacattacccacaaaggcaacatgacaccaattatcactgcctctgcccttaaaaatgtcagagtagtattattgataaaaagggcaagcaatagatttttcatgactgaataaactgtaataataaaacatatgtctcaaagtgtatcacatatgaatttagcctaattgttttcagtttcattctcaatatttagtttacaacatcattttcccctaaactggttatattttgacctgtatatcttaaatttgagtatttatatgcctaaatacatgtgtgagttttgtttgacttccaagtccaaactataagattatataagttcatatagatgaatcagaaatatgtggtaatactattaagtcacaaacactaacaatttccaactatagaaataacagttcttatttggattttgggaatgctaccaata

SEQ ID NO: 8363 - DNA, 4500 bp, Artificial Sequence
  derived and/or modified sequence
atgatggctaattgggcggaagctcgccctcttctcatccttatcgtgctcctgggccagttcgtgagcatcaaagcacaggaggaggatgaagatgagggctacggagaggagatcgcatgcactcagaacggacaaatgtacctgaaccgggatatctggaaacccgcgccatgccagatttgcgtttgtgataatggcgccattctctgcgataaaattgagtgccaggacgttctggattgtgccgacccggtgacaccacctggagagtgttgccctgtttgttctcagacaccaggcggcggaaataccaattttggcaggggcaggaaaggccagaagggggagcctggccttgttcccgtggtcacgggcattagaggaagacctgggccagctggtcccccgggatcgcaagggccccggggtgaaagaggccccaagggacgccctggaccgagagggccccagggcattgacggagagcctggggtgccagggcagccaggtgctccgggtccccctggtcatccctcccatcccgggccagacggtttgtcccgcccctttagcgcccaaatggccgggctcgacgaaaagtctgggctcggctcacaggtaggactgatgcccggatcagtcggaccagttgggccaagagggcctcaggggctgcagggtcagcagggtggagccggtccaacagggccaccgggagaaccaggtgaccctggcccgatgggccctattggatccaggggcccggaaggaccgccagggaaaccaggggaggatggggagcctgggcggaacggaaatccaggcgaggtggggttcgcaggctcgccaggagcccggggcttcccaggtgcccctgggcttcccggactaaaggggcatagaggccacaaggggctggagggaccaaaaggggaagttggtgccccggggagcaaaggcgaggccggccctaccggcccaatgggggcaatgggacctctggggccaagagggatgcccggtgagagaggaaggctgggtccacagggcgccccaggacagaggggagctcatggcatgcctggcaaacccggtcctatgggcccccttggtattcccggaagtagcgggtttcccggcaaccctggaatgaaaggcgaagccggccctaccggggctagggggccagaaggtcctcagggccagcgaggagagactggcccccccggacccgtggggtctccaggcctgcctggagccattggcactgatggaacccccggcgcaaaagggcctactggatccccaggcacttccggcccccccgggtctgctggccctcctgggagcccagggccgcaaggttctacgggcccccagggaatcagaggtcagcctggggacccaggggttcctggattcaagggagaggcagggcctaagggagaacctggcccccatggtatccagggccctataggacctccgggcgaggagggaaagagagggccccgcggagatcctggaacggttgggccccctggccctgtgggcgaacgcggggcccccggcaataggggcttcccaggatctgacggcctccctgggcctaaaggcgcgcagggggaacgcggcccagtcggctcttccggtcccaagggttcacagggtgatccgggaagaccaggtgagccaggcctaccaggagctcgaggtctcactgggaacccaggggtccaagggcccgagggcaagctgggcccgctgggggcgcctggcgaggacggccgcccaggaccccccggctcaattggaatccgggggcaacccgggtctatgggcttgcctggcccaaaaggctcaagcggagacccaggcaagccaggagaggctggtaacgcaggtgttccgggacagaggggcgcgccaggaaaagacggtgaggttggaccaagcggtcctgtcggacctccaggtttagcgggcgaacgaggtgaacagggaccacctggcccgaccggatttcaggggctccctggccccccgggcccacctggggagggagggaagcctggggatcagggggttccgggggaccccggggcagtcggtccattgggccccagaggggagcgcgggaacccaggggaaagaggcgagccaggcatcaccggtctacctggagaaaagggcatggccgggggacacggacctgacggccccaagggtagtcctggcccctctgggacccccggggacactggaccacccggtctgcagggcatgcctggcgagagaggaattgcaggcacccctggcccaaagggcgaccgggggggaataggcgagaaaggagctgagggtacagcagggaatgacggagcccgaggactacccggccctctgggaccaccggggccggctgggcctacaggagagaagggcgaaccgggcccccgggggctggtgggaccaccagggagtagaggaaatcccggcagtcggggtgagaacggccccaccggggcagtaggcttcgcaggaccccaaggacctgacggccaaccaggagttaagggtgagcctggggagcctggccagaagggggacgctggtagccctggcccccagggcctcgcgggttctcccggccctcacggtcccaatggggtacctggcctcaaaggcggacgcgggacccaggggccacccggcgctactggttttccagggagcgcggggcgggttggaccccctgggcctgctggagcccccgggcccgctggtcctttgggggagccggggaaggagggacctccaggactgagaggcgaccccggaagtcacggtcgggtgggcgacaggggcccagcaggcccccccggtggcccaggggacaaaggcgatcccggggaagacggacagcctggtcctgacggcccgcccggccccgccggaactaccggacagagaggcatcgtgggcatgcccggacagcggggtgaaaggggtatgccaggtcttccaggccctgcaggtaccccaggtaaagtcggtcctaccggggctactggcgacaaggggccgccaggccccgtcggcccaccagggtccaacggacccgtgggggaacctgggcctgaggggcccgcagggaacgacggtacccctggacgagatggggcggtgggtgaaaggggcgatcggggcgatcctggacccgcgggcctccctggaagtcaaggagctcccgggactcccggtcccgtaggcgcacccggcgatgctggacagaggggggaccctggatcacggggcccaattgggcctcctgggagagctggaaaacgggggcttcctgggcctcaagggccccgcggggacaaaggggaccacggggaccgcggagatcgggggcagaaggggcatcgcggctttacaggcttgcagggccttcctgggcctcccggtcctaatggtgaacagggaagcgccgggattccaggcccttttggtcctcgtggccccccggggcccgtgggcccctctggcaaagaaggaaatcctggaccactcggacccattgggcctccaggggtgcggggatccgttggagaggcagggcccgagggcccgcccggtgagccaggtccgccaggaccgccaggacctcccgggcacttgaccgccgcccttggcgatattatgggacattacgatgagtccatgccagatcctctccccgagttcacagaagatcaggccgcaccggatgacaaaaataagaccgaccctggcgtccatgccaccttgaaatctctgagtagtcagatcgaaacgatgcggagcccagatggctccaagaaacaccctgcacgaacttgtgacgacctgaagctttgtcattctgccaagcaatctggggaatactggattgatccaaaccaaggcagcgtggaggatgctataaaggtgtattgcaacatggagactggggaaacctgtatttcagctaaccctagcagcgtcccgcggaaaacatggtgggcaagcaagagtcccgataacaaaccagtgtggtatgggcttgacatgaacagagggtcgcaatttgcctacggtgatcatcaatcccccaatactgcaatcacacagatgacctttctcaggctgctgtccaaagaggcttcacagaacattacatatatatgtaaaaatagtgttggttatatggatgaccaagccaagaatcttaagaaggctgtcgtgctcaaaggtgctaacgatttggatatcaaggcagaggggaatatccgattcagatatattgtgctacaggatacgtgttccaaacgcaacgggaacgtggggaagactgtgttcgagtacagaactcaaaacgtagctcgtttaccaattatcgacttagcacctgttgatgtgggcggcaccgatcaagaatttggagtggagattggacccgtgtgctttgtatag

SEQ ID NO: 8364 - DNA, 3420 bp, Artificial Sequence
  derived and/or modified sequence
ctgcccggccgtcgccaccggctgggtcctcctggctctcaaggtccacggggtgagagggggcccaaaggaagacccggaccgcgcggcccccagggtatagacggcgaaccaggggtgccagggcaacctggcgctcctggaggcgcaggcccaacagggcctcccggcgaaccaggtgaccctggaccgatgggacctatcggatctaggggccctgaaggccctccgggcaaaccaggtgaggacggcgagcccggtaggaatggaaatcccggcgaagttggttttgcaggatcccccggcgcgcggggcttccccggagcgccgggcttgcctggccttaagggccaccggggccataagggactcgagggccccaagggagaggtgggagcccccggaagcaagggcgaagcaggaccaactggccctagaggcgacccagggacagtggggcctcccggtcctgttggagagaggggcgctcctggaaatcgcggcttcccaggctctgacgggcttccaggtcctaaaggggcccagggtgaacgcggtccagtcggttcgtccggacccaagggaagccagggcgatcctgggagaccaggtgagcctggactgcccggagctaggggactaacaggtaatcccggcgtgcagggcccagaaggcaagctggggcccctgggggcgcctggggaggatggcagacccggaccaccgggaagcattgggattcggggccagcccggctccatgggtttgccaggccctaaagggagttccggggaccccggtaagccaggtgaggcagggaatgcaggggtgccggggcagcgcggagcccccggtaaggatggggaggtcggcccaagcggacccgtaggcccacctggcctggccggagaaaggggagaacaaggtcccccaggaccgacaggattccagggactcccgggaccccccggcccgcccggcgaaggtggcaagcccggggatcagggcgttccaggagaccctggcgcagtgggcccgttggggcctaggggcgaacggggtaatccaggcgaaagaggcgagccgggtatcacgggcctcccaggggagaaggggatggccggcggacacgggccagatggtccaaaaggcagccctggaccatcaggaacacctggcgacaccggtcctcccggtttgcagggcatgccgggggagcgcggcatcgccggcactcctggcccaaaaggggatcgagggggaatcggcgagaagggcgccgaaggaacagcaggcaatgacggcgcacgtggacttccgggccctttagggcctcccggccctgccggccccacaggcgagaagggtgaaccaggtccaagaggcttagttgggccacctggatcgaggggaaatcccgggtctcgcggagagaatggccctaccggggctgtagggttcgccgggcctcaggggccagacggacagcctggagtcaagggagagcccggcgagcccgggcagaaaggcgacgccggcagccctggaccccaggggttggctgggagccccggtcctcacggaccaaatggggtgccagggctgaagggaggacggggcactcagggaccaccgggtgccacaggttttccagggtcagctgggagggtgggacctcccggccccgctggcgcccccggacctgcgggtccactgggcgaacccggcaaggaaggaccacccggcctgcgaggggatccaggttctcatggcagagtaggagatcgcggaccagccgggcccccaggtgggccaggggacaagggggacccaggcgaggatggacagcccggcccagacggaccgcccggccctgcagggacgaccggccagagaggaattgtgggaatgcctggccagcggggcgagaggggcatgccagggcttccagggccggccggtacaccaggtaaggtcggacctacgggtgccactggtgataaaggcccacccggccccgttgggcctccagggtctaatggtcccgtgggagaaccgggccctgagggaccagctggtaacgacggaacaccgggtcgcgacggagccgtgggtgagagaggcgataggggagaccctggtcctgctggactcccaggcagtcaaggcgcgccaggtacccctgggcctgtaggagcacctggggatgctggccagcggggtgatcccggctctcgcggacctatcgggcccccaggccgggccggaaagcgaggcttgccgggcccccaagggccacgaggagacaaaggtgaccacggagaccggggagacagaggacaaaaaggccacagaggctttacaggcttgcaggggctcccagggccccccggtcctaacggagaacaggggtctgctggaatccccgggccctttggccccagggggcctcccgggcctgttggcccgtctggaaaagagggtaacccagggcctctgggcccgatcgggccaccaggcgtccgcgggtcggtcggagaagcaggaccagagggcccacctggagagccgggccctccaggacctccggggccccctgggcacctaaccgctgcactcggcgatattatgggacattacgacgagagcatgccagaccccctgccagaatttaccgaagaccaggccgcccctgatgacaagaacaaaacagatccaggagtccacgccaccttgaagagtctatccagccagattgaaaccatgcggagcccagatggctctaagaagcacccggcacgcacatgcgacgatttgaagctttgccactccgcaaagcagagtggagaatattggatcgacccaaatcaggggagtgtggaagatgctattaaagtttactgcaacatggagactggcgaaacctgcatcagtgccaatccctcatccgtgccccggaagacttggtgggcctccaagtcccctgataacaagcccgtttggtatggactggatatgaatcggggatcccagtttgcgtacggggaccatcaatctcctaatacggccataacgcagatgacatttttacggcttctatccaaggaggccagccagaatatcacctacatatgcaaaaatagcgttggttacatggacgaccaagcgaagaacctcaagaaggccgtcgtgttgaagggggcaaacgacttggatatcaaggccgagggaaatatcagatttcgctacatcgtactgcaagacacctgtagtaaacgaaacggtaacgtcggaaagaccgtgttcgagtatcgtacacaaaacgtggctcggttgccaatcattgatctagcaccagttgacgtgggcggcactgaccaagagtttggtgttgagatcggcccagtatgcttcgtgtag

SEQ ID NO: 8365 - DNA, 4500 bp, Artificial Sequence
  derived and/or modified sequence
atgatggccaactgggccgaggcccggcccctgctgatcctgattgtgctgctgggccagtttgtgtccatcaaggcccaggaggaggatgaagatgagggctatggagaggagatcgcctgcacccagaatggccagatgtacctgaacagagacatctggaagccagccccctgccagatctgtgtgtgtgacaacggggccatcctgtgtgacaagattgagtgccaggatgtgctggactgtgccgaccctgtgaccccacctggagagtgctgccctgtgtgcagccagacccctgggggcggcaacaccaactttggccggggcaggaagggccagaagggggagcccggcctggtgcctgtggtgacaggcatccggggccggcccggccctgctggccccccaggcagccagggccccagaggagagcggggccccaagggccggcccggcccccggggcccccagggcattgatggagagcccggggtgcccggccagcccggggcccctggccccccaggccaccccagccaccctggcccagatggcctgagccggcccttcagcgcccagatggccggcctggatgagaagagcggcctgggcagccaggtgggcctgatgcctggctctgtgggccctgtgggcccccggggcccccagggcctgcagggccagcagggcggggccggccccaccggccccccaggagagcccggggaccccggccccatgggccccatcggcagccggggccctgagggccccccaggcaagccaggagaagatggagagcctggaagaaatggaaatcctggagaggtgggctttgctggcagccctggggcccggggcttccctggggcccctggcctgcccggcctgaagggccaccggggccacaagggcctggagggccccaagggggaggtgggcgcccctggcagcaagggggaggccggccccaccggccccatgggcgccatgggccccctgggcccccggggcatgcctggagagcggggccgcctgggcccccagggcgcccctggccagagaggagcccacggcatgcctgggaagccaggccccatgggccccctgggcatccctggcagcagcggcttccctggcaaccctggcatgaagggggaggccggccccaccggggcccggggccctgagggcccccagggccagagaggagaaacaggccccccaggccctgtgggcagccctggcctgcccggggccatcggcacagatggcacccctggggccaagggccccaccggcagccctggcaccagcggccccccaggcagcgctggccccccaggcagccctggcccccagggcagcacaggcccccagggcatccggggccagcccggggaccccggggtgcccggcttcaagggggaggccggccccaagggggagcccggcccccacggcatccagggccccatcggccccccaggagaggagggcaagaggggccccaggggggaccccggcaccgtgggccccccaggccctgtgggggagcggggggcccctggcaacagaggcttccctggcagtgatggcctgcccggccccaagggggcccagggcgagcggggccctgtgggcagcagcggccccaagggcagccagggcgaccccggccggcctggagagcccggcctgcccggggcccggggcctgactggaaatcctggggtgcagggccctgagggcaagctgggccccctgggcgcccctggagaagatggccggcccggccccccaggcagcatcggcatccggggccagcccggctccatgggcctgcccggccccaagggcagcagcggggaccccgggaagccaggagaggccggaaatgccggcgtgcccggccagagaggagcccctgggaaggatggagaggtgggccccagcggccctgtgggccccccaggcctggccggggagcggggggagcagggccccccaggccccaccggcttccagggcctgcccggccccccaggccccccaggagagggcggcaagccaggggaccagggcgtgcctggggaccctggagctgtgggccccctgggccccagaggagagcggggcaaccctggagagcggggggagcccggcatcaccggcctgcccggggagaagggcatggccggcggccacggcccagatggccccaagggcagccctggccccagcggcacccctggggacaccggccccccaggcctgcagggcatgcctggagagcggggcattgctggcaccccaggccccaagggggaccggggcggcatcggggagaagggagctgagggcacagctggaaatgatggagcccggggcctgcccggccccctgggccccccaggccctgctggccccaccggggagaagggggagcccggcccccggggcctggtgggccccccaggcagccggggcaaccctggcagcagaggagaaaatggccccaccggggctgtgggctttgctggcccccagggcccagatggccagcccggggtgaagggggagcctggagagcccggccagaagggagatgctggcagccctggcccccagggcctggccggcagccctggcccccacggccccaacggggtgcccggcctgaagggcggccggggcacccagggccccccaggggccaccggcttccctggcagcgctggccgggtgggccccccaggccctgctggggcccctggccctgctggccccctgggggagcccgggaaggagggccccccaggcctgcggggggaccccggcagccacggccgggtgggggaccggggccctgctggccccccaggcggccctggggacaagggggaccctggagaagatggccagcccggcccagatggccccccaggccctgctggcaccaccggccagaggggcatcgtgggcatgcctggccagagaggagagcggggcatgcctggcctgcccggccctgctggcacccctgggaaggtgggccccaccggggccactggagacaagggccccccaggccctgtgggccccccaggcagcaatggacctgtgggggagcccggccctgagggccctgctggaaatgatggcaccccaggaagagatggagctgtgggggagcggggggacagaggagaccccggccctgctggcctgcccggcagccagggcgcccctggcaccccaggccctgtgggcgcccctggagatgctggccagagaggagaccccggcagccggggccccatcggccccccaggccgggccggcaagaggggcctgcccggcccccagggccccaggggggacaagggggaccatggagacagaggagaccggggccagaagggccaccggggcttcaccggcctgcagggcctgcccggccccccaggccccaacggggagcagggcagcgctggcatccctggccccttcggcccccggggccccccaggccctgtgggccccagcggcaaggagggcaaccctggccccctgggccccatcggccccccaggagtgcggggctctgtgggggaggccggccctgagggccccccaggagagcccggccccccaggccccccaggccccccaggccacctgacagctgccctgggggacatcatgggccactatgatgagagcatgccagaccccctgcctgagttcacagaggaccaggccgccccagatgacaagaacaagacagaccccggggtgcacgccaccctgaagagcctgagcagccagatcgagaccatgaggagcccagatggcagcaagaagcacccagcccggacctgtgatgacctgaagctgtgccacagcgccaagcagagcggggagtactggattgaccccaaccagggctctgtggaggatgccatcaaggtgtactgcaacatggagaccggggagacctgcatcagcgccaaccccagctctgtgcccaggaagacctggtgggccagcaagagcccagacaacaagcctgtgtggtacggcctggacatgaacagaggcagccagtttgcctacggggaccaccagagccccaacacagccatcacccagatgaccttcctgcggctgctgagcaaggaggccagccagaacatcacctacatctgcaagaacagcgtgggctacatggatgaccaggccaagaacctgaagaaggctgtggtgctgaagggggccaatgacctggacatcaaggccgagggcaacatccgcttccgctacatcgtgctgcaggacacctgcagcaagagaaatggaaatgtgggcaagacagtgtttgagtaccgcacccagaatgtggcccggctgcccatcatcgacctggcccctgtggatgtgggcggcacagaccaggagtttggagtggagatcggccctgtgtgctttgtgtag

SEQ ID NO: 8366 - DNA, 3420 bp, Artificial Sequence
  derived and/or modified sequence
ctgcccggccgccgccaccggctgggccccccaggcagccagggccccagaggagagcggggccccaagggccggcccggcccccggggcccccagggcattgatggagagcccggggtgcccggccagcccggggcccctggaggagctggccccactggacctcctggagagcccggggaccccggccccatgggccccatcggcagccggggccctgagggccccccaggcaagccaggagaagatggagagcccggcagaaatggaaatcctggagaggtgggctttgctggcagccctggggcccggggcttccctggggcccctggcctgcccggcctgaagggccaccggggccacaagggcctggagggccccaagggggaggtgggcgcccctggcagcaaaggagaggccggccccaccggccccaggggggaccccggcaccgtgggccccccaggccctgtgggggagcggggggcccctggcaacagaggcttccctggcagtgatggcctgcccggccccaagggggcccagggcgagcggggccctgtgggcagcagcggccccaagggcagccagggcgaccccggccggcctggagagcccggcctgcccggggcccggggcctgactggaaatcctggggtgcagggccctgagggcaagctgggccccctgggcgcccctggagaagatggccggcccggccccccaggcagcatcggcatccggggccagcccggctccatgggcctgcccggccccaagggcagcagcggggaccccgggaagccaggagaggccggaaatgccggcgtgcccggccagagaggagcccctgggaaggatggagaggtgggccccagcggccctgtgggccccccaggcctggccggggagcggggggagcagggccccccaggccccaccggcttccagggcctgcccggccccccaggccccccaggagagggcggcaagccaggggaccagggcgtgcctggggaccctggagctgtgggccccctgggccccagaggagagcggggcaaccctggagagcggggggagcccggcatcaccggcctgcccggggagaagggcatggccggcggccacggcccagatggccccaagggcagccctggccccagcggcacccctggggacaccggccccccaggcctgcagggcatgcctggagagcggggcattgctggcaccccaggccccaagggggaccggggcggcatcggggagaagggagctgagggcacagctggaaatgatggagcccggggcctgcccggccccctgggccccccaggccctgctggccccaccggggagaagggggagcccggcccccggggcctggtgggccccccaggcagccggggcaaccctggcagcagaggagaaaatggccccaccggggctgtgggctttgctggcccccagggcccagatggccagcccggggtgaagggggagcctggagagcccggccagaagggagatgctggcagccctggcccccagggcctggccggcagccctggcccccacggccccaacggggtgcccggcctgaagggcggccggggcacccagggccccccaggggccaccggcttccctggcagcgctggccgggtgggccccccaggccctgctggggcccctggccctgctggccccctgggggagcccgggaaggagggccccccaggcctgcggggggaccccggcagccacggccgggtgggggaccggggccctgctggccccccaggcggccctggggacaagggggaccctggagaagatggccagcccggcccagatggccccccaggccctgctggcaccaccggccagaggggcatcgtgggcatgcctggccagagaggagagcggggcatgcctggcctgcccggccctgctggcacccctgggaaggtgggccccaccggggccactggagacaagggccccccaggccctgtgggccccccaggcagcaatggacctgtgggggagcccggccctgagggccctgctggaaatgatggcaccccaggaagagatggagctgtgggggagcggggggacagaggagaccccggccctgctggcctgcccggcagccagggcgcccctggcaccccaggccctgtgggcgcccctggagatgctggccagagaggagaccccggcagccggggccccatcggccccccaggccgggccggcaagaggggcctgcccggcccccagggccccaggggggacaagggggaccatggagacagaggagaccggggccagaagggccaccggggcttcaccggcctgcagggcctgcccggccccccaggccccaacggggagcagggcagcgctggcatccctggccccttcggcccccggggccccccaggccctgtgggccccagcggcaaggagggcaaccctggccccctgggccccatcggccccccaggagtgcggggctctgtgggggaggccggccctgagggccccccaggagagcccggccccccaggccccccaggccccccaggccacctgacagctgccctgggggacatcatgggccactatgatgagagcatgccagaccccctgcctgagttcacagaggaccaggccgccccagatgacaagaacaagacagaccccggggtgcacgccaccctgaagagcctgagcagccagatcgagaccatgaggagcccagatggcagcaagaagcacccagcccggacctgtgatgacctgaagctgtgccacagcgccaagcagagcggggagtactggattgaccccaaccagggctctgtggaggatgccatcaaggtgtactgcaacatggagaccggggagacctgcatcagcgccaaccccagctctgtgcccaggaagacctggtgggccagcaagagcccagacaacaagcctgtgtggtacggcctggacatgaacagaggcagccagtttgcctacggggaccaccagagccccaacacagccatcacccagatgaccttcctgcggctgctgagcaaggaggccagccagaacatcacctacatctgcaagaacagcgtgggctacatggatgaccaggccaagaacctgaagaaggctgtggtgctgaagggggccaatgacctggacatcaaggccgagggcaacatccgcttccgctacatcgtgctgcaggacacctgcagcaagagaaatggaaatgtgggcaagacagtgtttgagtaccgcacccagaatgtggcccggctgcccatcatcgacctggcccctgtggatgtgggcggcacagaccaggagtttggagtggagatcggccctgtgtgctttgtgtag

SEQ ID NO: 8367 - DNA, 4500 bp, Artificial Sequence
  derived and/or modified sequence
atgatggccaactgggccgaggcccggcccctgctgatcctgatcgttcttctgggtcagtttgtgagtatcaaagcgcaggaagaagacgaggacgaagggtacggagaggaaattgcttgtacacagaatggtcagatgtatctgaatcgtgatatatggaagcctgccccttgccaaatttgtgtctgcgacaacggggctatcttatgcgataagatcgagtgccaggatgtgttagattgcgctgaccctgtaaccccaccaggtgaatgttgtcctgtatgttctcagactccaggcggcgggaatacaaacttcgggaggggacgaaaagggcagaaaggtgaacccggcctggtccccgtcgtcacagggattcgaggaagaccgggccctgcgggaccacctggttcgcagggcccacgaggcgaacggggccccaaaggaaggcctggacctaggggcccacagggaattgatggcgagccaggcgtgcctggccagcccggagcccccgggccacctgggcacccttcccatccaggcccagatggcctgtcaagaccattcagcgcgcaaatggccggcctggatgagaaatcaggcttgggaagccaagtggggctgatgcccggcagcgtgggtcctgtgggacctcgaggaccacagggcctgcaaggccagcagggcggcgctgggcctactggaccgcccggtgaacctggggatcccgggcccatggggcctatcggctcccgcggccccgaaggcccccccggaaagcctggtgaggatggtgagccagggcgtaatggaaacccaggggaagtcggattcgccggcagtcccggagctcgcggctttcctggcgctccaggcctgccgggacttaaaggccatcggggacacaaggggctggaggggcctaagggagaagtgggggcacctggtagcaagggcgaggcaggacctacaggacccatgggtgccatgggtcccctcggccccaggggtatgcccggagaaagaggacgcctgggaccccaaggagctcctgggcaacggggtgcacatgggatgccaggaaaacctggccccatgggtccactgggcatacccggcagttcaggctttccgggcaatccaggcatgaagggcgaagccggtccgactggtgcccgcgggccggaaggcccgcaaggacagagaggcgagaccggaccacctggaccggttggctctcccggtctcccgggtgctataggcactgacggaaccccgggtgctaagggccctaccggaagccccggaacatctggacctcctggcagtgccggacctccgggatctccaggtccacaggggagtactggcccgcagggaatcagaggccagcctggcgatcccggcgttcccggctttaagggagaagcgggcccaaagggggagcccggcccacacggcatccagggcccaattggaccacccggagaggagggcaagcgggggccacggggtgaccctggtaccgtaggcccacccggtcccgtgggtgagaggggcgctcctgggaaccgcggcttcccagggagcgacgggcttcccggccccaagggcgctcagggggagagaggccccgtgggatccagcggccctaaaggaagtcagggggatcccgggagacctggcgagcccggactgcccggggcaagaggcctaaccgggaatccgggagtgcagggccctgagggcaagctaggccccttaggtgctccaggtgaggatggccgaccaggccctccgggatctataggtattagaggacagcctggttcaatgggcctgccagggcctaagggttccagtggagatcccggcaagcctggcgaggccgggaacgctggggttccagggcaacggggtgctcccgggaaggacggagaggttggaccttccggacctgttggaccccccggtctggcaggagagcgtggagagcagggccccccggggccaaccgggtttcaaggactcccggggccccccgggccgcctggagaaggcggcaagccaggcgaccagggcgttcctggcgatcccggggcggtcgggccactgggcccccggggcgaacgggggaacccaggcgaaagaggcgaacccggtattacagggttgcccggtgaaaagggcatggccggcggacacggccccgatgggccaaaaggatcgcctgggccttccggaacacctggagataccggcccaccagggttgcagggcatgccaggagagagaggcatcgccggaacgccagggcccaagggcgaccgcggtggaattggagagaaaggcgcagagggcaccgcagggaacgacggggcccgggggctgccaggccccttgggtccacccggccccgcaggtcccacaggcgagaagggagagcccggcccacggggactggtgggacccccagggtcacggggaaacccgggttcacggggagagaacgggccaacaggggctgtgggtttcgcagggcctcaagggccagacgggcagcctggggttaagggagaaccgggggagcccggacaaaagggagatgccggtagccccgggcctcaaggcttggccggctccccagggccccatgggcctaacggcgtgccaggactcaaaggtggaagaggaacccagggcccccctggggctactgggtttcccggaagtgccgggcgcgtgggtccaccaggtcccgcaggagcaccaggtcccgcgggtccattaggagaacccggtaaagaaggaccccccggccttcgcggtgatcctggtagccatggcagagtgggcgacagggggcctgcaggacctcctggcggccccggtgacaagggcgatcctggagaggacggccaaccagggccagatggaccccccggacctgccggcactactgggcagaggggcattgtgggaatgcccgggcagaggggtgaacgcggaatgcctggtctgcccggtcctgcggggactccgggcaaggttgggccaaccggggccaccggcgacaaaggtccgccgggtcctgtgggccccccagggagtaacggtcctgtgggtgaacccgggcccgagggccccgcaggaaacgatggaacaccaggaagggacggtgcagtaggagaaaggggtgatagaggtgatcctgggcctgcaggcctgcctggtagtcagggggcacctggcacccccggcccagtaggcgcacctggagatgccgggcagagaggggaccctggcagtcgggggccgattggtcctcccggcagagctgggaagcgggggctacctggccctcagggacctcgtggagacaaaggagaccacggcgacagaggtgatcgtggtcagaagggccatcgtggctttaccggcctgcaggggcttccgggtcctcctggtcccaacggcgaacaggggagtgctggaattcctgggccatttggcccacgggggccacccggccctgttggcccctcggggaaagagggtaaccctggaccactgggccccattggcccacctggagttcggggtagcgttggcgaggctggcccggagggcccacccggcgaaccgggccctcctggtccaccgggtccacccggacacctgaccgcagcccttggcgatatcatggggcactacgacgagagcatgcctgaccccctgccagaattcacagaagatcaagcagcaccagacgataaaaataagaccgaccctggagtgcacgccaccctcaagtctttgtcgtctcagattgaaacaatgaggtctccagatggttcaaaaaagcatcctgcccggacatgtgacgatcttaagttgtgtcactcagccaagcagagcggtgagtattggattgatcccaaccaaggaagcgttgaggacgctattaaggtatattgtaatatggaaacgggagagacttgcatttccgcgaaccccagttccgtccccaggaagacatggtgggcatccaagagcccagacaacaagcccgtttggtacggcctggatatgaaccgcggaagccaatttgcctatggagatcaccagagccccaacacagcgatcactcagatgaccttcctccggctgcttagtaaggaagcatcccagaacattacctatatctgcaagaacagtgttgggtacatggacgaccaggctaagaatttaaaaaaagccgtggtgcttaaaggagccaatgacctcgacattaaggccgaaggcaacataaggttccggtacattgtgctgcaggatacatgcagcaagaggaatgggaatgtgggcaaaactgtgttcgaatatcgtacgcagaatgtcgcgcgcctgcccatcatagatttagctcctgtagatgtgggtggtacagatcaagagtttggcgttgaaatcgggcccgtctgcttcgtctag

SEQ ID NO: 8368 - DNA, 3420 bp, Artificial Sequence
  derived and/or modified sequence
ctgcccggccggcggcaccggctgggcccccccggcagccagggcccccggggcgaacggggcccaaagggccgacccggacccagaggcccgcaaggaatcgacggggaacccggagtgcctgggcaaccaggagccccagggggcgccgggcctactggacctcctggcgaacctggggaccctggacccatgggccccatcggctcacgggggcctgaaggccccccaggcaagcccggtgaggacggcgaaccaggccgcaacgggaaccctggggaggtggggtttgctggcagccctggggcaaggggattcccaggcgctcctggactgcccgggttgaagggccacagaggacataaaggtcttgaaggccctaagggcgaggtgggcgccccaggctccaaaggcgaggcgggtcctactggccccagaggggatcccggcaccgtggggccacccggacccgtgggcgaacgaggggctccgggcaaccgagggttcccgggaagcgatggactgccaggtcccaaaggcgctcagggggaaagaggccctgtcgggagcagcgggcccaagggttcacaaggcgatcccggcaggcccggagagccaggcctccccggagcccgcggcctgacaggaaacccaggggtgcagggcccagaagggaagctgggacctctcggcgcccccggcgaggatggaaggcctggcccacctggcagtatcgggatcagagggcaacctggatcaatggggctaccggggcctaaaggatcttctggcgaccctggcaagcctggcgaggcagggaatgccggggtcccgggccagaggggagcgccagggaaggacggagaagtaggcccatctggccctgtcggccctcctggactggctggtgaacggggagaacaagggccgcccgggcctacaggcttccagggtctgcccgggccacccggtcccccgggcgagggagggaagcccggcgaccagggggtgcccggtgaccctggagccgtgggaccccttgggccacggggcgagcgagggaaccccggggagagaggggagcccggaataactggccttcccggggagaaaggaatggccggggggcatggaccggacggacccaagggaagtccaggcccttccggcactcccggtgacactggtccccccggcctgcaaggaatgccaggggagcggggcatagcgggaaccccagggcccaaaggtgaccgtggtggcatcggtgagaagggagccgaaggaactgctggcaacgatggggcacgtggcctgcctggcccgctcggtccgcccggcccagccggtcccacaggggagaaaggcgagcctggtccacggggcctggtgggaccacctggtagtcgcggtaatcctggctctcggggggaaaacggacccaccggtgccgtgggatttgctggccctcaaggacccgatgggcagccaggggtgaaaggcgaaccaggcgagcccggccagaagggagatgcggggtcccctggcccacagggtctggccggctcaccaggaccccacggaccgaacggagtgcccgggttgaaaggcgggcgcgggacgcaggggcctccaggagcaactgggtttccagggagcgcagggcgcgtcggaccacccggccccgcgggggccccaggccccgccggccctctcggcgaaccaggcaaggagggccctcctgggctccgtggagacccaggctctcacgggcgggtgggggaccgcggacccgcaggaccgccaggcggtcctggcgataagggagaccccggagaggacggccagccgggccccgatggccctcccggtccggctgggacaacggggcaacgaggcattgtaggcatgccaggtcagcggggcgagcggggcatgccgggccttccgggaccagccggaacgcccggtaaggtgggaccgactggggccacaggggataagggaccacctggtccagtgggccccccaggctccaacggaccagtcggggagccaggacctgaaggtcccgccggaaacgatggtacccccggcagggatggcgccgtcggcgagcgcggagatcgcggggatccaggacctgccgggctgcctggttcgcagggtgctcctggtacccctggccccgtgggtgcccccggggacgcggggcagaggggcgatcctgggtcccgaggacccataggaccccctgggcgagcaggaaaacgggggctcccagggccgcagggaccacgaggagacaagggagaccatggggatcgcggcgatcgcggtcaaaaaggtcacagaggcttcacagggctccagggtctgcctgggcctccgggaccaaatggcgagcagggcagtgccgggatccctggccccttcggacccagaggcccaccagggccggtgggtccatcaggaaaggaaggcaatcctggcccactcgggcctattggcccccctggggtccgcggctccgtgggtgaggcgggtccagaggggccgcctggagagccgggcccccccggtcctcctggcccccccggacacctgacggccgccctgggggacatcatgggacactacgacgagagtatgccggaccccctgcccgagttcactgaggaccaggccgcgcctgatgacaaaaataagaccgatcccggtgttcacgcaaccctgaagtcactgtcttcccagatcgagaccatgcgcagtccagacgggtccaagaagcatccagcacgtacctgtgacgatttaaaactgtgccacagcgccaagcagagcggggagtattggatcgaccccaatcaaggtagtgtggaggatgctatcaaggtttattgcaatatggaaacaggtgagacctgcataagcgccaacccctcctctgttcccaggaaaacctggtgggccagcaagagtccagataacaaacctgtgtggtatggattggatatgaatcggggttctcaatttgcctacggcgaccatcagagccccaatacagccataacacagatgacgtttctccgattgttatcaaaggaagcctcccagaacatcacctatatctgtaagaactcagttggatatatggatgatcaggctaagaacttaaagaaggcagtcgtgttaaagggggctaatgatcttgacattaaggcagaagggaacattaggttccggtatatagtccttcaggacacctgcagcaaaaggaatggcaatgtgggaaagacggtgttcgagtacaggacacagaacgtcgctagattacctatcatcgatctagcccctgtggacgtaggtggcaccgatcaggaatttggggttgagattggccctgtctgcttcgtgtag

SEQ ID NO: 8369 - DNA, 4500 bp, Artificial Sequence
  derived and/or modified sequence
atgatggcaaactgggccgaggcccgaccactgttgattctaatagtgttacttgggcaatttgtctctattaaggcccaggaggaagatgaagatgagggctacggagaggagatcgcatgcacccagaacggccagatgtatctgaatagggatatttggaaacctgctccctgccaaatttgcgtctgtgataacggcgcaatactatgtgataaaatcgagtgtcaagacgtgctcgactgtgccgaccccgtgacgcctcccggagagtgctgccctgtctgttctcagactcctgggggtgggaacaccaatttcggaagaggcaggaaaggtcagaaaggggaaccaggcttggtgccggtggtgaccgggatccgcggaagacccggacccgctggcccacctggctcacaagggccaaggggggagaggggaccaaagggtcgcccaggtcctagaggtccccagggtattgacggtgagcccggagtcccagggcagcctggagcacccggacccccagggcatccctcgcacccgggtcctgatggtctgtctcggcctttttcggcccagatggctggcttagacgaaaagtctggattgggatcacaggtgggattgatgcccggaagcgtgggacctgtcggaccaaggggacctcagggcttgcaggggcagcagggcggagcgggtcccacagggccaccaggagagccaggggatccgggtcccatgggccctatcggcagccgtggacccgaggggccaccgggaaagcctggagaagatggggagccagggagaaacggcaatcctggcgaggttggattcgcaggcagtccgggtgcgagaggattccctggcgctcctggactgcctggattaaaaggccacagaggtcacaaggggctggagggccctaaaggcgaagtgggcgcaccaggatctaaaggtgaggcagggccaactggccctatgggcgcaatgggcccattggggccaagaggtatgcctggcgagaggggcagactcggtccacagggggcaccgggtcaacgcggtgcccacgggatgcctggaaagccaggccctatgggccctctggggatccctgggtccagtggctttcctggaaaccccggaatgaaaggcgaggctggccctacaggggcacggggacctgagggacctcaggggcagagaggtgaaacaggaccaccaggtccagtcggatccccaggtctgcccggtgccattggcactgacggaacgccgggagctaaaggccctactgggtctcccggaacctcaggccctccaggcagcgcaggacctcctggctcgccgggaccacagggctctacaggaccgcaggggatcagaggtcagcctggtgatcccggtgtacccggattcaagggggaggctggcccaaagggagagccaggtcctcacggtatacaggggccaattggccctcctggggaggagggaaagcgcggacccagaggcgatcccggtaccgtgggcccaccaggccctgtcggggagcgtggcgcacctggcaaccgaggattccccggaagcgacgggctccccggtcccaaaggagctcaaggggaaagggggcctgttggctcctccgggcctaaggggtctcagggcgatcctgggcgacccggtgagcccggtcttccaggtgcccgtggcttaacggggaacccaggggtccaagggcctgaaggaaagctagggccactaggcgcaccaggcgaggacggacggcctggacccccaggctctatcggaatccggggacagcctgggtctatgggattacctggtcctaaaggtagttctggcgatcccggtaagcccggagaggcaggaaatgccggtgttccaggacagaggggcgcacctgggaaagacggggaggtcgggccaagtgggccagtaggcccacccggactcgctggcgagcgcggtgaacagggccctcctgggcctactggctttcagggcctgcctggaccgcctggcccaccaggcgaggggggtaagcctggcgatcagggagtgcccggtgatcccggtgcggtcggcccattaggacccagaggcgaaagagggaacccaggtgagcgaggagagcccggtattacggggctgcctggtgagaaaggaatggctgggggacacgggccagacggtccaaaaggttcacccggaccctctgggacccccggtgatactggcccaccgggtcttcagggcatgccgggagaacggggaattgccggaactcccggacccaagggtgatcggggtggtattggagagaaaggcgcagaggggaccgctggcaatgatggggcaagagggctgcccggtcccctcggaccgccagggcctgcaggccctacaggggagaagggcgagcccggtcctaggggcctggtaggaccccctggctccagagggaaccctgggtctcgaggtgagaacggacccaccggcgcagtcgggttcgctggtcctcagggtccagacggacaaccaggagtgaagggtgaacctggcgaaccaggacagaagggcgacgcgggatctccaggcccacagggattggcagggagtcctggcccacacggaccaaatggtgtgcctggtcttaagggagggagaggcacacagggacctccaggggctactggattccctgggtccgccggtcgtgtggggcctcctggcccagccggtgcacctggccctgctgggcctcttggcgagcccggaaaggaggggccacccggtctcagaggcgaccccggatcgcacgggcgtgtgggcgaccggggacctgccggtcccccaggaggccctggcgacaagggggaccccggagaggacggccagcctggacccgatgggccaccagggccagctgggactactggacaaaggggaatcgtcggtatgcctggacagagaggcgagaggggcatgcccggtctaccaggacccgctgggacgcctggaaaggtgggccctaccggagccaccggcgataaaggtcctccaggacctgtcgggcctcccggaagcaacggtcccgtaggagaaccgggaccagagggcccagccggaaatgacggcacccccggtcgggacggcgcagtcggcgagaggggggaccgtggggatcctggtccagccggacttcctggctcacagggtgcccctggaacacccggtccagtcggcgctcctggggatgcgggacagcgaggagaccccggtagtcggggtcctattggtcccccagggcgagccggtaagagaggcttacccggaccgcaaggcccacggggagacaaaggcgatcacggggaccgcggagacagggggcaaaaggggcacaggggctttacagggctgcagggactccctggccctcccggtcccaacggggagcaaggatctgcgggtatccctgggccttttggcccacgcggaccacctggcccagtcggcccaagcgggaaggaaggtaatcccggtccgctcgggcctatcggccctccaggcgtgcgtggctctgtaggtgaagccggacccgagggcccacccggagagcccggaccacccggtcccccaggacccccaggccacctgactgcagcccttggggacatcatggggcattatgacgagtccatgcctgatcctttgcctgaatttactgaggatcaggcggctccagacgataagaataagactgacccaggagtgcacgcaactctgaaatctctctcatcccagatagaaaccatgagaagccccgatggcagcaaaaaacaccccgctagaacgtgtgatgacctcaagttatgccatagcgccaagcagagtggtgaatactggattgatcctaatcaaggttccgtcgaggatgcaattaaggtctattgcaatatggaaactggagagacctgcattagcgcgaatccttcctccgtgccaaggaagacctggtgggcttcaaagagcccagacaataagccggtctggtatggcctcgacatgaatcgagggagtcaatttgcatacggtgaccaccaatcgccaaatactgccataacacagatgacatttctgcggctgctttcgaaggaagccagccagaatattacttatatctgtaagaattccgttggatatatggatgaccaggcaaagaatctaaagaaggccgtcgtcctgaagggggcaaacgaccttgacattaaggctgaagggaatattcgatttcggtacatcgttcttcaggatacttgtagcaagaggaacggaaacgtcgggaagacagtctttgaataccgtacacagaacgtcgcacggctcccgattatagatctggcaccagtagacgtcggcggaactgaccaagaatttggcgtggaaattggtcccgtatgcttcgtgtag

SEQ ID NO: 8370 - DNA, 3420 bp, Artificial Sequence
  derived and/or modified sequence
ctgcctggccgtaggcaccgactgggaccacctggatctcagggccctagaggggagcggggacccaaggggaggcctggtcccagagggccacaaggcatcgacggcgaaccgggtgtgcccggacagcccggagctcctgggggtgctggtccgacaggtccacccggagaacctggcgaccccggaccaatggggccaatcggctcacggggaccagaaggaccgccaggcaaacccggagaggacggtgagcccggaagaaatggtaaccccggtgaagtgggctttgcagggagtcccggtgcaaggggattcccaggggctcctggcctgcccggtttgaaagggcacagaggacacaaaggactggaaggacctaagggtgaagtgggggcaccaggttccaagggggaggccggtccgactggcccacgcggtgacccgggtacagttggcccacccggtccggtgggagaaagaggagcaccaggtaaccgcggatttcctgggtctgacgggcttcccggacccaagggtgctcagggcgagagggggccagttggctcctccggccctaaaggcagtcaaggggatcctgggagaccaggcgagcccggtctcccaggagccagaggtttgacaggtaacccaggcgtgcagggtcctgaaggcaagctgggacctttgggagcccctggagaggacggcagacccggtccacccggaagtatcgggattcggggacagccagggtctatgggactgccaggccctaagggctcttccggggaccccggaaagcccggtgaggccggtaacgccggagtgcctgggcagcgcggagcgccaggtaaagacggagaggtgggcccatctggtcccgtgggccctccaggccttgcgggagagagaggcgagcaagggccacctgggccaaccggctttcaaggtctgccaggcccacctggaccgccaggagagggaggcaagcccggtgaccaaggagtgcctggcgatccaggagccgtgggcccactcggcccacgcggtgaaagaggaaaccccggagaacggggagaacccggtataaccggtctccccggagaaaaggggatggcaggcggtcacggtccggacggtccgaaaggatctcctgggccatctggtacccctggtgacaccggccctccaggtctacaaggaatgcccggagaaagaggcatcgcaggtacaccaggccctaaaggcgaccgcggtggcattggggagaaaggcgctgaaggcactgcgggtaacgatggcgcacggggactgccgggaccattggggcctcccggtcctgcgggtcctaccggcgaaaaaggggaacccggacctcgtggcctcgtcggacctcccggttctcgaggcaatccaggaagtcgaggagagaacggcccaacaggggctgtcggatttgctgggccacaaggccctgatggacagcctggggttaagggagaacccggagagccaggtcagaagggtgacgctggctcccctggccctcagggtcttgctggcagtccagggcctcatggccctaatggtgtcccgggactgaagggcggtaggggtacccaaggccctcccggtgcaactggatttcccggtagcgctgggagggtggggccaccaggccctgctggggctccaggccctgctgggcctctgggcgaacctggaaaggagggaccaccaggactgagaggggacccgggaagtcacgggagagtcggcgacaggggcccagcgggaccacctggcggacctggggacaaaggcgatcctggggaggacggccagccagggcctgacggacctcctggacccgcaggaaccactgggcaacgcggtattgtgggcatgcctggtcagagaggggagaggggtatgcccggacttcctgggcctgcgggaaccccaggaaaagtagggccaaccggtgcaaccggagacaagggacctccaggtcctgtgggaccaccagggagcaatggccctgtgggggagccagggcctgaggggcctgccggtaatgatggtactcctgggcgtgacggcgctgtaggcgaacgaggagatagaggtgaccccggacctgccggtcttccgggatcccagggcgctcccggaacccctggacctgttggggcaccgggagacgcaggccaacgaggggatcctgggagtagaggacctatcggacccccagggagggccggtaagaggggcctcccaggaccgcagggacccaggggggacaaaggggaccatggggatcggggagataggggacagaagggacacagaggcttcactgggcttcaggggcttcctgggcctccgggtccgaatggtgagcagggttctgccggtatcccaggccctttcggaccccgagggccacctgggccagtgggaccttcaggaaaggaaggcaatcccggtccccttggaccaatcggccctccgggagtgagaggatctgtgggtgaggcaggccctgaagggcctcccggtgagcctggaccgcctggccctccaggacccccagggcatctaacggctgccctgggggacatcatggggcattacgatgagtctatgcctgacccactgccagaattcaccgaggaccaggctgcccctgacgataagaataaaaccgaccctggcgtgcacgctactctgaagtccctgagctcacagattgagacaatgaggtcacctgatggctcaaagaagcaccccgctcgcacttgtgatgacctgaagctgtgtcacagtgctaagcaatccggagaatattggattgatccaaatcagggcagtgtggaagacgccataaaggtgtactgcaacatggaaacaggggaaacctgcatctccgctaacccatcgtccgtaccaaggaagacctggtgggcttccaagtcacctgacaataaacccgtctggtatgggctggacatgaatcggggtagccagttcgcatatggagaccaccaatcacccaatacagccattacccagatgacattcttgagactgctcagtaaggaagcatcacagaatatcacctatatatgtaaaaatagcgtgggttatatggatgaccaagccaagaacctgaagaaagccgttgtactcaagggcgctaacgatctggacattaaggccgagggcaacatcaggtttaggtacatcgttttgcaggatacatgttccaaacggaacggcaatgtcggcaagaccgtctttgagtaccgtacccaaaacgtcgctcggcttccgatcattgatctggccccagtagatgttggaggtactgaccaggaattcggggtggaaatcggccctgtctgcttcgtttag

SEQ ID NO: 8371 - protein, 897 aa, Artificial Sequence
  derived and/or modified sequence
MVLAQGLLSMALLALCWERSLAGAEETIPLQTLRCYNDYTSHITCRWADTQDAQRLVNVTLIRRVNEDLLEPVSCDLSDDMPWSACPHPRCVPRRCVIPCQSFVVTDVDYFSFQPDRPLGTRLTVTLTQHVQPPEPRDLQISTDQDHFLLTWSVALGSPQSHWLSPGDLEFEVVYKRLQDSWEDAAILLSNTSQATLGPEHLMPSSTYVARVRTRLAPGSRLSGRPSKWSPEVCWDSQPGDEAQPQNLECFFDGAAVLSCSWEVRKEVASSVSFGLFYKPSPDAGEEECSPVLREGLGSLHTRHHCQIPVPDPATHGQYIVSVQPRRAEKHIKSSVNIQMAPPSLNVTKDGDSYSLRWETMKMRYEHIDHTFEIQYRKDTATWKDSKTETLQNAHSMALPALEPSTRYWARVRVRTSRTGYNGIWSEWSEARSWDTESVLPMWVLALIVIFLTIAVLLALRFCGIYGYRLRRKWEEKIPNPSKSHLFQNGSAELWPPGSMSAFTSGSPPHQGPWGSRFPELEGVFPVGFGDSEVSPLTIEDPKHVCDPPSGPDTTPAASDLPTEQPPSPQPGPPAASHTPEKQASSFDFNGPYLGPPHSRSLPDILGQPEPPQEGGSQKSPPPGSLEYLCLPAGGQVQLVPLAQAMGPGQAVEVERRPSQGAAGSPSLESGGGPAPPALGPRVGGQDQKDSPVAIPMSSGDTEDPGVASGYVSSADLVFTPNSGASSVSLVPSLGLPSDQTPSLCPGLASGPPGAPGPVKSGFEGYVELPPIEGRSPRSPRNNPVPPEAKSPVLNPGERPADVSPTSPQPEGLLVLQQVGDYCFLPGLGPGPLSLRSKPSSPGPGPEIKNLDQAFQVKKPPGQAVPQVPVIQLFKALKQQDYLSLPPWEVNKPGEVC

SEQ ID NO: 8372 - protein, 889 aa, Artificial Sequence
  derived and/or modified sequence
MVLAQGLLSMALLALCWERSLAGAEETIPLQTLRCYNDYTSHITCRWADTQDAQRLVNVTLIRRVNEDLLEPVSCDLSDDMPWSACPHPRCVPRRCVIPCQSFVVTDVDYFSFQPDRPLGTRLTVTLTQHVQPPEPRDLQISTDQDHFLLTWSVALGSPQSHWLSPGDLEFEVVYKRLQDSWEDAAILLSNTSQATLGPEHLMPSSTYVARVRTRLAPGSRLSGRPSKWSPEVCWDSQPGDEAQPQNLECFFDGAAVLSCSWEVRKEVASSVSFGLFYKPSPDAGEEECSPVLREGLGSLHTRHHCQIPVPDPATHGQYIVSVQPRRAEKHIKSSVNIQMAPPSLNVTKDGDSYSLRWETMKMRYEHIDHTFEIQYRKDTATWKDSKTETLQNAHSMALPALEPSTRYWARVRVRTSRTGYNGIWSEWSEARSWDTESVLPMWVLALIVIFLTIAVLLALRFCGIYGYRLRRKWEEKIPNPSKSHLFQNGSAELWPPGSMSAFTSGSPPHQGPWGSRFPELEGVFPVGFGDSEVSPLTIEDPKHVCDPPSGPDTTPAASDLPTEQPPSPQPGPPAASHTPEKQASSFDFNGPYLGPPHSRSLPDILGQPEPPQEGGSQKSPPPGSLEYLCLPAGGQVQLVPLAQAMGPGQAVEVERRPSQGAAGSPSLESGGGPAPPALGPRVGGQDQKDSPVAIPMSSGDTEDPGVASGYVSSADLVFTPNSGASSVSLVPSLGLPSDQTPSLCPGLASGPPGAPGPVKSGFEGYVELPPIEGRSPRSPRNNPVPPEAKSPVLNPGERPADVSPTSPQPEGLLVLQQVGDYCFLPGLGPGPLSLRSKPSSPGPGPEIKNLDQAFQVKKPPGQAVPQVPVIQLFKALVVSVMSVGPPVP

SEQ ID NO: 8373 - DNA, 2694 bp, Artificial Sequence
  derived and/or modified sequence
atggtcctggctcagggactcctttccatggccctgctggccctgtgttgggagcgatccctggcgggcgcagaggagactatccctctgcaaacactccggtgctataacgactatacaagtcacatcacgtgcaggtgggctgatacacaggatgcccagagactcgtgaacgtgaccttgatcagacgcgttaacgaggatttgttggaacccgtaagctgcgacttgtccgatgatatgccctggtctgcctgccctcacccacggtgcgtacccagaaggtgtgtgatcccctgtcaatcatttgtggtcacagatgtcgactacttttctttccagcccgatagacccttaggcactcgtcttaccgtcaccctgacacagcacgttcaacctcctgagccgcgagatcttcagatcagtacggatcaagaccactttctgttgacatggtcagtggcattgggctcccctcagagccactggctctctcctggggaccttgaattcgaagtggtgtacaagcgcctccaggattcctgggaagacgctgctattctgctgtcaaatacatctcaagcaacactcggccccgagcatctcatgccctctagcacttacgtggcccgcgtcaggacgcggctggcccccggatcccggttaagcggtcgcccatctaagtggagtccagaggtgtgctgggattctcaacccggggatgaagctcagcctcagaacttggaatgcttcttcgatggggctgccgtccttagctgcagttgggaggtgcggaaggaagtcgcttcatccgtatcttttggcttgttctacaagccctccccggacgccggggaggaagagtgcagccctgtgctgcgggaagggctcggctccctgcacactcgccaccactgccagataccagttcctgaccctgccacgcatggtcagtatattgtgagtgtccagccccggagggcagaaaagcacattaagtcgtctgtgaatattcaaatggcccctccgtcgctgaacgtgacgaaagatggggactcttattccctgcggtgggagacaatgaagatgcgatacgagcatatcgaccacacctttgagatacagtatcggaaggacacagccacatggaaggactcgaagactgagactttacagaatgcgcatagtatggccttgcccgctctggaaccaagcaccaggtattgggcacgcgtccgggtgcggacctcgcgcaccggctataatggcatttggtccgagtggtccgaggccagatcttgggacacggagtccgtcctccctatgtgggtactggcactgattgtgattttcctcacaattgctgttctgcttgcactgcgcttctgtggcatttatgggtatcgactgcgcaggaaatgggaggagaaaattccaaaccccagcaagtcacacttgtttcagaatggctccgccgaactttggccaccggggagcatgagcgcattcacaagcgggtcccctccccaccaaggcccttggggcagcagatttcccgagcttgagggggtatttccagtgggcttcggcgatagcgaagtctcaccgctgaccattgaagatccaaagcacgtctgcgatcccccctcagggcccgataccacgcccgctgcatctgaccttccaacagaacagccccccagcccacagccgggccccccagctgccagccacacaccagagaagcaggcctccagcttcgactttaatggaccatacctcggaccccctcattctagaagtctgcccgatatcctcggccagcccgaacctccgcaagagggcggaagccagaagtctcctccacccggctcactggagtacttgtgcctgccggccggcggccaggtccaactcgtgcctttggcccaggccatggggcccggacaggccgttgaggtagaacgccggccttcccagggagccgcgggcagtccgtcactggaatctggcggcgggccggctccccccgccctcggcccaagagtgggaggacaggaccagaaagacagtccagtggcaattccaatgtccagtggcgatacagaagatcccggcgtcgcctcagggtatgtgtcctctgccgacctcgttttcacccccaattcaggagctagtagcgtgagtttggttccatctctcggactgccatccgatcagactcccagcctttgcccgggccttgcatcagggcccccaggtgctcccggcccggtgaagtccggttttgaaggatatgtcgagctacccccaattgaaggccgctctcctagaagcccaagaaacaaccccgttccccctgaagccaaaagccccgtgctaaatccgggggagcgccccgcggacgtgtctcccacttcccctcaacctgaagggctgctggtgctgcagcaagtaggtgactattgctttttgccagggctaggcccgggtccattatctctcagaagtaaaccatccagtcccggacccggacccgagataaaaaatctggatcaggcctttcaggtgaagaagcccccaggccaggccgtgccccaggtaccagtaattcagctttttaaggccctgaagcagcaggactacctgtccctgccgccttgggaagttaacaagccgggcgaagtgtgttag

SEQ ID NO: 8374 - DNA, 2670 bp, Artificial Sequence
  derived and/or modified sequence
atggtgctcgcacaaggtctcctgagcatggccctgctggctctgtgctgggagcgtagcctggctggggctgaagagacaattcccttacaaacgcttagatgctacaacgactacaccagccatataacatgcagatgggcagatactcaggatgcccaacgtttagtaaatgttacactgatacggcgggtgaacgaggacttactggaacctgtgtcttgcgacctctcagacgatatgccctggtctgcctgccctcacccaagatgtgtccctcgccgctgcgtgatcccctgccaatccttcgttgtcactgacgtcgactacttcagcttccagcctgacaggccattggggacgcggctcacagtgacgctgactcagcacgtccagcccccggaacccagagacttgcaaatctcaaccgaccaagaccactttctgctcacctggtccgtggccctgggatcacctcagtcgcattggctgagtcccggagatctggagttcgaggttgtgtacaaaaggctgcaagatagctgggaggatgccgccatcttattgagcaacactagtcaggcaactttggggccggagcatctcatgccgtctagcacctacgtggcaagggtgaggactcgtctcgctccagggtctcggctatctggtaggcccagcaagtggtccccagaggtttgctgggattcccagcccggcgacgaagcacaacctcagaacctggagtgtttcttcgacggcgccgcggtgctctcgtgcagctgggaagtgcggaaggaggttgcctcatcggtctcatttggcttgttctacaaaccctcaccagacgctggcgaagaggagtgctccccagtcctccgtgagggcctgggttccctgcacactaggcatcattgtcaaatccccgtacctgatccagctacccacggtcagtacatcgtgagcgttcagccgcggcgtgcggagaagcacataaagtctagcgtgaacattcaaatggctccccccagtctgaacgttactaaggatggggactcttatagcctgcggtgggagacaatgaaaatgcgttacgagcacatcgaccatacgttcgagatccaataccgcaaagacacagctacctggaaggactctaaaactgagacccttcagaacgctcacagtatggcgctcccagccttggagccgtccactaggtattgggcaagggtgcgcgttaggacctctagaaccgggtataacgggatctggtcagagtggtccgaggccaggtcctgggacaccgagagcgttctgcccatgtgggtccttgctctgatcgtaattttcctgaccatagccgtgctgctcgcccttcgattctgcgggatctacggctacaggctgcggaggaagtgggaggaaaagatcccgaatcctagcaaatcgcacttgttccaaaacgggagcgccgagttatggccacccggcagcatgagtgccttcacttccggtagtccccctcaccaggggccatggggttctcgtttccctgagctggaaggggttttcccagtcggtttcggtgactctgaggtctctccgctgaccatagaggacccaaagcacgtgtgtgatccgccgtccggacctgatactaccccagcagcttctgacctgcccacagagcaaccaccaagccctcaaccaggcccgccagcagcatcacatactcccgagaagcaggcaagtagcttcgatttcaacgggccctacttaggcccccctcattccagatccctgcctgacattctcggccaaccggagcctccacaagagggtggtagtcagaagtctcccccgccaggaagccttgaatacttatgcctgcccgccggcggccaggttcaactagtgcctcttgcccaggccatgggcccaggccaggcggtggaggttgagcggcgaccctcccagggcgccgctggctctccctccctcgagtcaggaggggggcccgctccgcccgctttggggcccagagtagggggccaagaccagaaggatagcccagtggcgatacccatgagctcaggggacacagaagatcctggggttgcgtcaggttatgtaagcagcgcagatctggtgttcacccctaatagtggggctagctccgtgtcattggtgccatctctaggtttgcctagcgaccagaccccctcgttgtgcccaggtcttgcgtccgggcccccaggtgcccctggtcccgtcaaaagcggattcgagggctacgttgagctgcctcctatcgaaggccggtcgcctcgtagccctcgtaataacccagtcccaccagaagccaagtcacccgttcttaacccgggggagcggccagcagatgtgtcgcccacaagcccccaaccagaagggctcttggtgctccagcaggtgggggattactgcttccttccagggctgggacccggccctctcagcctgagatcaaagccatctagtcctggccccggccctgaaataaaaaacctcgaccaggcattccaggtcaagaaaccacctggtcaggctgtgccacaggtgcccgttattcagctgtttaaagccttggtagtttcggtgatgtctgtcggcccaccagtgccttag

SEQ ID NO: 8375 - DNA, 2694 bp, Artificial Sequence
  derived and/or modified sequence
atggtgctggcccagggcctgctgtccatggccctgctggccctgtgctgggagaggagcctggccggggctgaggagaccatccccctgcagaccctgcgctgctacaatgactacaccagccacatcacctgccgctgggccgacacccaggatgcccagaggctggtgaatgtgaccctcatcagaagagtgaatgaagacctgctggagcctgtgtcctgtgacctgagtgatgacatgccctggagcgcctgcccccacccccgctgtgtgccccggcgctgcgtcatcccctgccagagctttgtggtgacagatgtggactacttctccttccagcctgaccggcccctgggcacccggctgactgtgaccctgacccagcacgtgcagcccccagagccccgggacctgcagatcagcacagaccaggaccacttcctgctgacctggagcgtggccctgggcagcccccagagccactggctgagccctggggacctggagtttgaggtggtgtacaagaggctgcaggacagctgggaggatgctgccatcctgctgagcaacaccagccaggccaccctgggccctgagcacctgatgcccagcagcacctacgtggcccgggtgaggacccggctggcccctggcagccggctgagcggccggcccagcaagtggagccctgaggtgtgctgggacagccagcctggagatgaggcccagccccagaacctggagtgcttctttgatggagctgctgtgctgagctgctcctgggaggtgaggaaggaggtggccagctctgtgtcctttggcctcttctacaagcccagcccagatgctggggaggaggagtgcagccctgtgctgcgggagggcctgggcagcctgcacaccaggcaccactgccagatccctgtgcctgaccctgccacccacggccagtacatcgtgtctgtgcagccccggcgggcagagaagcacatcaagagctctgtgaacatccagatggccccacccagcctgaatgtgaccaaggatggagacagctacagcctgcgctgggagaccatgaagatgagatatgagcacatcgaccacacctttgagatccagtacaggaaggacacagccacctggaaggacagcaagacagagaccctgcagaatgcccacagcatggccctgcctgccctggagcccagcacccgctactgggcccgggtgcgggtgaggaccagcaggacaggctacaacggcatctggagcgagtggagcgaggcccgctcctgggacacagagagcgtgctgcccatgtgggtgctggccctgattgtcatcttcctgaccatcgctgtgctgctggccctgcgcttctgtggcatctacggctaccgcctgcggaggaagtgggaggagaagatccccaaccccagcaagagccacctgttccagaatggatctgctgagctgtggcccccaggctccatgtctgccttcaccagcggcagccccccccaccagggcccctggggcagccgcttccctgagctggagggcgtcttccctgtgggctttggagacagcgaggtgagccccctgaccatcgaggaccccaagcacgtgtgtgacccccccagcggccctgacaccaccccagctgccagtgacctgcccacagagcagccccccagcccccagcccggccccccagctgccagccacaccccagagaagcaggccagcagctttgacttcaacggcccctacctgggccccccccacagccgcagcctgcctgacatcctgggccagcctgagcccccccaggagggcggcagccagaagagccccccacctggcagcctggagtacctgtgcctgcctgctgggggccaggtgcagctggtgcccctggcccaggccatgggccctggccaggccgtggaggtggagcggcggcccagccagggcgctgctggcagccccagcctggagagcggcggcggccctgcccccccagccctgggcccccgggtgggcggccaggaccagaaggacagccctgtggccatccccatgagcagcggggacacagaagatcctggggtggccagcggctacgtgagcagcgctgacctggtgttcacccccaacagcggggccagctctgtgtccctggtgcccagcctgggcctgcccagcgaccagacccccagcctgtgccccggcctggccagcggccccccaggggcccctggccctgtgaagagcggctttgagggctacgtggagctgccccccatcgagggccgcagccccaggagccccaggaacaaccctgtgcccccagaggccaagagccctgtgctgaaccctggagagaggcctgcagatgtgagccccaccagcccccagcctgagggcctgctggtgctgcagcaggtgggggactactgcttcctgcccggcctgggccctggccccctgagcctgcggagcaagcccagcagccctggccctggccctgagatcaagaacctggaccaggccttccaggtgaagaagcccccaggccaggccgtgccccaggtgcctgtgatccagctgttcaaggccctgaagcagcaggactacctgagcctgcccccctgggaggtgaacaagccaggagaggtgtgctag

SEQ ID NO: 8376 - DNA, 2670 bp, Artificial Sequence
  derived and/or modified sequence
atggtgctggcccagggcctgctgtccatggccctgctggccctgtgctgggagaggagcctggccggggctgaggagaccatccccctgcagaccctgcgctgctacaatgactacaccagccacatcacctgccgctgggccgacacccaggatgcccagaggctggtgaatgtgaccctcatcagaagagtgaatgaagacctgctggagcctgtgtcctgtgacctgagtgatgacatgccctggagcgcctgcccccacccccgctgtgtgccccggcgctgcgtcatcccctgccagagctttgtggtgacagatgtggactacttctccttccagcctgaccggcccctgggcacccggctgactgtgaccctgacccagcacgtgcagcccccagagccccgggacctgcagatcagcacagaccaggaccacttcctgctgacctggagcgtggccctgggcagcccccagagccactggctgagccctggggacctggagtttgaggtggtgtacaagaggctgcaggacagctgggaggatgctgccatcctgctgagcaacaccagccaggccaccctgggccctgagcacctgatgcccagcagcacctacgtggcccgggtgaggacccggctggcccctggcagccggctgagcggccggcccagcaagtggagccctgaggtgtgctgggacagccagcctggagatgaggcccagccccagaacctggagtgcttctttgatggagctgctgtgctgagctgctcctgggaggtgaggaaggaggtggccagctctgtgtcctttggcctcttctacaagcccagcccagatgctggggaggaggagtgcagccctgtgctgcgggagggcctgggcagcctgcacaccaggcaccactgccagatccctgtgcctgaccctgccacccacggccagtacatcgtgtctgtgcagccccggcgggcagagaagcacatcaagagctctgtgaacatccagatggccccacccagcctgaatgtgaccaaggatggagacagctacagcctgcgctgggagaccatgaagatgagatatgagcacatcgaccacacctttgagatccagtacaggaaggacacagccacctggaaggacagcaagacagagaccctgcagaatgcccacagcatggccctgcctgccctggagcccagcacccgctactgggcccgggtgcgggtgaggaccagcaggacaggctacaacggcatctggagcgagtggagcgaggcccgctcctgggacacagagagcgtgctgcccatgtgggtgctggccctgattgtcatcttcctgaccatcgctgtgctgctggccctgcgcttctgtggcatctacggctaccgcctgcggaggaagtgggaggagaagatccccaaccccagcaagagccacctgttccagaatggatctgctgagctgtggcccccaggctccatgtctgccttcaccagcggcagccccccccaccagggcccctggggcagccgcttccctgagctggagggcgtcttccctgtgggctttggagacagcgaggtgagccccctgaccatcgaggaccccaagcacgtgtgtgacccccccagcggccctgacaccaccccagctgccagtgacctgcccacagagcagccccccagcccccagcccggccccccagctgccagccacaccccagagaagcaggccagcagctttgacttcaacggcccctacctgggccccccccacagccgcagcctgcctgacatcctgggccagcctgagcccccccaggagggcggcagccagaagagccccccacctggcagcctggagtacctgtgcctgcctgctgggggccaggtgcagctggtgcccctggcccaggccatgggccctggccaggccgtggaggtggagcggcggcccagccagggcgctgctggcagccccagcctggagagcggcggcggccctgcccccccagccctgggcccccgggtgggcggccaggaccagaaggacagccctgtggccatccccatgagcagcggggacacagaagatcctggggtggccagcggctacgtgagcagcgctgacctggtgttcacccccaacagcggggccagctctgtgtccctggtgcccagcctgggcctgcccagcgaccagacccccagcctgtgccccggcctggccagcggccccccaggggcccctggccctgtgaagagcggctttgagggctacgtggagctgccccccatcgagggccgcagccccaggagccccaggaacaaccctgtgcccccagaggccaagagccctgtgctgaaccctggagagaggcctgcagatgtgagccccaccagcccccagcctgagggcctgctggtgctgcagcaggtgggggactactgcttcctgcccggcctgggccctggccccctgagcctgcggagcaagcccagcagccctggccctggccctgagatcaagaacctggaccaggccttccaggtgaagaagcccccaggccaggccgtgccccaggtgcctgtgatccagctgttcaaggccctggtggtgtctgtgatgtctgtgggcccccctgtgccctag

SEQ ID NO: 8377 - DNA, 2694 bp, Artificial Sequence
  derived and/or modified sequence
atggtgctggcccagggcctgctgagcatggccctgctggccctgtgttgggagcgatccctggccggcgctgaggagacaatacctctgcagacgctgcggtgttacaacgattacacctcacatattacttgtcgctgggccgatacccaggatgcccagagactggtgaacgtgactcttattagacgcgtaaatgaggatctccttgagccagtctcctgcgacctgagtgatgacatgccgtggtcagcctgtccgcatccgagatgtgtgcctcggcggtgcgtgattccgtgccagagcttcgtggtgaccgatgtagactactttagcttccagccggaccgaccactcggtaccagactgacggtgacactcacacagcacgttcaacctcctgagcccagagatctgcagataagcacagaccaggatcactttctgctgacgtggtccgtcgcactggggtcaccacagtctcattggctctccccaggagacctggaattcgaggtggtatataagcgtcttcaggattcctgggaggacgccgccatcttgctgagcaatacgtcacaggccacgcttggacctgagcatcttatgccctcctcgacctacgtggctagagtaagaactaggctggcaccagggagccgcctctccgggcggccttcaaaatggtcccccgaagtatgttgggattcacagccgggcgacgaggctcagccgcaaaaccttgagtgctttttcgacggcgcggcggtgctctcatgtagttgggaagtcagaaaagaggttgcttccagtgtgtcgttcggactgttctataagccaagccccgacgctggagaggaagaatgcagcccagtcttacgcgaaggattagggtccctgcacacacgtcaccactgtcaaatcccagtgccggacccggctacacatggtcaatatatcgtgtccgtccagccacgacgcgccgagaagcacattaagtctagtgttaatattcagatggcacctccttctcttaatgtcacaaaggacggggattcttacagccttcgatgggagactatgaaaatgcggtacgaacatatcgatcacactttcgagattcagtacagaaaggacacagccacttggaaagactccaagaccgagaccttacaaaatgcccacagcatggcactgcctgctctggagccttccaccaggtactgggctagggttagagttagaacatcaagaacaggctacaatggtatttggagcgagtggagtgaagccagatcttgggacaccgaaagtgtactccctatgtgggttttagcactgatagtcattttcctgaccatcgccgtcctgctagccctgcgcttctgcgggatatatggttatagactgcgccgtaagtgggaggagaagattcccaacccatccaaaagtcatctgttccagaatgggagcgcagagctgtggcctccaggatctatgtccgcctttacctctgggagtcctccgcaccagggtccctggggctctcggttcccggaattagagggagtattccctgtgggcttcggagattctgaggtgagcccactgaccattgaggaccccaagcacgtctgcgaccccccctccggtccggataccactcctgccgcctctgacctccccactgagcagccaccatccccacagcccgggccccctgcagcttcccacacacctgagaagcaagcctcctcttttgattttaatggcccctacctgggacctcctcactctagatcactgcccgacatcctgggccagccagaacctccacaggaaggtggctcccagaaatccccgccgcctggatcactcgagtatctctgcctcccggccgggggccaggtccaactggtacccctggcacaggccatgggacccggacaggcagtggaggtggaaaggaggccttcccaaggggccgctggctctcccagcttagaaagcggcgggggacccgctcctcctgcacttggtccccgtgtgggcggccaagaccagaaagacagcccagtagctatacctatgtccagcggagacactgaggatcctggcgtcgccagtggctacgtgtctagtgccgacctggtgtttacacctaattcaggcgccagttcagtgtctctggtcccttccctcggccttcccagtgaccagactcctagtctgtgtcccggcttagctagcggcccacctggggccccaggtccggtgaaatccggcttcgaaggatatgtcgagctccctcccatcgaggggaggtccccccgaagtccacgaaataatcctgtgccccctgaggcgaagagtcccgtcctgaaccctggcgagagaccagcagatgtgtcccccactagcccacagccagagggcctccttgtgctccagcaggtgggagattattgctttctccctgggttgggccccgggcccctatccctgcgaagcaagccaagttcccctggccctggccccgaaattaagaatcttgatcaggcgtttcaagtgaaaaagccccctgggcaagctgtgcctcaagtgcccgtcatccagctcttcaaggccttaaagcagcaagattacttatcactgccgccctgggaagtgaataaacctggggaggtgtgttag

SEQ ID NO: 8378 - DNA, 2670 bp, Artificial Sequence
  derived and/or modified sequence
atggtgctggcccagggcctgctgagcatggccctgctggccctgtgttgggaacgctctctggccggcgctgaggagaccatcccactccagacgctgagatgttacaatgactacacttcacacattacatgtaggtgggctgatacacaagatgcccagcggcttgtgaacgtcactttgatccggagagtgaacgaagacctgctggagcccgtgtcctgtgatctaagtgatgacatgccctggagcgcttgcccccatccgcggtgtgtacccaggaggtgtgtgattccatgccagtcattcgtggtgactgatgtggactatttttcgtttcaacccgataggccactagggacgcgcctgaccgtcacactgacacagcatgtccagcctccggaaccccgcgacttgcagatctcaaccgatcaggaccattttctacttacctggagtgttgccttaggaagcccccagagccactggctcagtccaggcgacttagaattcgaggtcgtctacaagaggctgcaagattcatgggaggatgctgctatcctgctcagcaacacctcacaggctacactcgggcccgaacatctgatgccgtcatcgacgtacgtagccagagttcggactcgactggccccgggctctagactcagtggaaggccttccaagtggagtccagaggtgtgctgggacagccagcctggggatgaggcccagccacaaaatctcgagtgcttcttcgacggggccgccgtgttgtcttgcagctgggaggtgagaaaggaagtcgcttcttccgtttctttcggcctattctataagcctagccctgatgccggggaagaagaatgctcgcctgttctccgggaaggacttggatccttgcacacccgacaccattgccagatccctgttcccgaccctgcaacacacggccagtacattgtcagtgtccagccacgacgcgcagaaaaacatattaagagctcagtaaatatccaaatggcacctccttcactaaacgtgaccaaagacggtgattcatacagtctcagatgggaaacaatgaaaatgcggtacgagcacatcgatcacaccttcgagatccagtaccgaaaagatacagccacgtggaaggattctaagacagagactctgcagaacgctcactccatggccctccctgccctggaaccttccacgcgctattgggctagagtccgcgtgcgcactagcagaactggctataacggcatttggagtgaatggagtgaggcacgctcttgggacaccgaaagcgtgctcccaatgtgggtgttggcactgatcgtgatctttcttacaatcgcagttctcctggccctaaggttctgcggcatttatggctacaggctccggcggaagtgggaagagaaaattcccaatccgtccaagtctcacttattccagaacggcagtgccgagctgtggccccctggaagtatgagcgccttcacctccggaagccctccccaccaggggccgtggggctcccgatttcccgagctggaaggggtgttccccgtgggctttggggacagtgaagtgagtccactgacgatcgaagaccccaagcatgtatgcgacccaccctcgggacccgatactacgcccgccgcaagtgacttgcccacagaacagcctccctccccacagccagggcctcctgccgcctcccacacaccagagaagcaggccagcagtttcgatttcaatggtccttacctggggccaccacactccagatctttgcctgacatcctgggacagccggagcccccgcaggaagggggatctcagaaatcgcctccccctggaagcctcgagtacctgtgcctccccgccggcgggcaggtgcagctcgtgcctctggcccaggcaatgggcccaggccaagcggtcgaagtcgaacggagaccatctcaaggcgctgccgggtcccccagcctggagtctggaggagggcctgcgccacctgcattgggccctcgagtgggcggccaggaccagaaagactcccccgtggcaatccctatgagcagcggtgataccgaagaccctggggtggctagcggttacgttagctctgctgatttagtgtttacacccaacagtggggcttcaagcgtgagtctggtaccttcgttaggtctcccatccgatcagactccgtctctttgtccgggccttgccagcggtcccccgggggcgccgggccccgttaagtcaggattcgagggatatgtcgaactgccgccaatagagggcagaagtccccggagcccacgtaacaatccagtcccaccggaagccaagtctccagtgctgaatcctggagaaagacccgctgatgtgagcccaacctcacctcaacccgagggactgttggtcctgcagcaggtaggtgactattgcttcttgccggggctgggcccaggtccactatccctgaggtctaaaccttctagccccgggcctggtcctgagatcaagaacctggaccaggcattccaggtgaaaaagccccccggtcaagccgtaccccaggtgcctgtgatccaactgtttaaagccttggtggtaagcgtgatgagtgtaggcccaccggtgccatag

SEQ ID NO: 8379 - DNA, 2694 bp, Artificial Sequence
  derived and/or modified sequence
atggtgctggcccaggggctgttaagcatggctttgctcgcactctgttgggagagatcattggcgggagcagaagagaccatccctctgcagacgctgcgttgctataatgattacaccagccatatcacatgtagatgggccgacacccaggacgctcagagactggtgaatgtgacattgatacggagggtaaatgaggatcttctcgaaccggtgtcatgtgacctgtccgatgacatgccctggtctgcgtgccctcatcctcggtgtgttccacgcagatgtgttatcccttgccagtcctttgttgtaacagacgtggattacttttctttccagcccgatcgtcctcttggcactaggctgactgtcaccctgactcagcatgtgcagcctcctgaacctagagatctccaaataagtaccgatcaggaccattttcttttgacttggtccgtcgctctgggatccccacaatcacactggctctctcctggtgatcttgagttcgaggtggtgtataagaggctgcaggatagctgggaagatgcagccatccttttgagcaacacatcccaggcgacactggggcctgaacaccttatgcctagctctacttacgttgcccgagtgcgtacccgccttgcacccggttccagattatcgggcagacccagtaaatggtcgccagaggtatgttgggacagccaaccaggtgatgaagctcagccgcaaaatctggagtgtttttttgatggagcagccgtattgtcatgctcttgggaggtccgtaaggaggtcgcatccagcgtgtcttttggcctgttctacaagccatctcctgatgccggtgaggaagaatgctcgccggtgctacgcgagggattagggtcactccacaccagacaccactgccagatccctgtgccagatcctgctacccacgggcaatacattgtgagcgttcagccacgacgagccgagaagcacatcaagtcttccgtcaacatccaaatggcgccaccttcattgaacgttacgaaggatggggacagctatagcctgaggtgggaaactatgaagatgcggtacgaacatattgaccatacattcgaaatccaatatcgaaaggacaccgctacttggaaagattctaagactgaaaccctgcagaatgcacactcaatggccctacccgcactcgagccttccacccgctattgggctagggtacgagtgcgcaccagtaggaccggttataatggaatctggagcgaatggagcgaggccaggtcctgggacaccgagtctgttttgcctatgtgggtcttagcactcatagtgattttcctcaccatagcagtcctgctcgcgttgaggttttgtggaatttatggatatcgcctgaggcgcaaatgggaggagaaaatccctaacccttctaagtctcacctgttccagaatggcagcgccgagctctggcctccaggctccatgtcggcatttacatcaggttctcctcctcatcaaggcccttggggcagcagattccctgaactggagggtgtgttcccagtaggattcggagactccgaggtgtctcccctgactatcgaagacccaaaacatgtgtgtgatcctccttctggcccagatactacacccgcagcgtctgatctacctaccgaacaacctcccagcccacaacccggacctcccgctgccagccatacacctgagaaacaggcatcctctttcgacttcaatgggccttacctgggaccccctcactctcgatcgttgcccgacattctggggcagcccgagcctcctcaggaaggcggatcccagaagtctccgcctcccggatccttagagtacctctgcttgcctgctgggggtcaagtgcagctggtgccactggcgcaggccatgggaccaggtcaggcggtcgaggtggagaggcgtccttcccagggcgctgcaggctcaccctctctggaaagtggcggtggccctgcaccacccgctctgggaccacgagttggcggacaggaccagaaggactccccagttgcaattccaatgtctagtggtgataccgaagacccaggagtcgcgagcggttatgtctcatccgcagacttggtatttaccccgaactccggggcttcttcggtgagtcttgtgccctccctggggctaccctctgatcagacccctagcctttgcccagggctggcaagcgggcctccaggtgctcctggacccgttaaaagcggcttcgagggatacgtagaactccctccaatcgagggacggtctccgcgttctccacgcaataacccagtccccccagaggcaaaatctcccgtattgaacccgggtgaaaggccagcggacgtgtccccgacctcccctcagcctgaggggctgcttgtgcttcagcaggtgggggactactgcttcctgcccggacttggacctgggccattgtctttaaggtcaaaaccatccagtcccggtccagggccagagatcaaaaatctagaccaggccttccaggtgaaaaagcctccagggcaggcagtcccccaggtcccggtgattcagctcttcaaagctctcaagcaacaggactacttaagtctgcctccctgggaagtcaacaaaccaggcgaggtctgctag

SEQ ID NO: 8380 - DNA, 2670 bp, Artificial Sequence
  derived and/or modified sequence
atggtactggctcaggggctactgtccatggccttactggccctgtgctgggagaggtcattggcaggagccgaggagacaattcctctgcagactcttcgctgctacaatgattacacctctcacatcacatgtagatgggctgacacccaggatgcacagagactggtgaatgtgaccctcatacgaagagttaatgaggacttgctggaaccagtatcttgtgatctctcagacgacatgccatggagtgcttgcccccatccccgttgtgtgccaagaaggtgtgtcattccctgccaatctttcgtagtgactgatgtcgattattttagcttccaacctgacagaccactgggtacgagactcaccgtgaccctgacccagcatgtccagccccctgagcccagagacctgcaaatttcaacagatcaagaccacttcctgttgacctggagcgtggcccttggttccccacagtcacattggctatccccaggtgatctggagttcgaggtggtgtacaagcggcttcaggattcatgggaagatgcggcaatactgctaagtaatacgagtcaggccacgctcgggcctgagcaccttatgcctagcagcacttacgtggcaagggtccgaactaggctggctcctggttctcgcctctccggcagaccctctaaatggtcgcctgaagtgtgctgggattcacagccaggagatgaagctcagccccagaatttagaatgttttttcgatggggcagcggtcctcagctgttcttgggaagttcgcaaggaggtcgcatcttctgttagttttggtctgttttataaacctagtcccgatgcgggtgaggaggagtgctcacccgtactgcgcgaaggtctgggcagccttcacacacgccaccactgtcagatccccgtccctgaccccgcaacccatggacagtatatcgtcagcgtccagcctagacgggctgaaaaacacatcaagagctctgtgaacatacagatggcacccccttcccttaacgtgacaaaggacggcgattcctatagccttcggtgggagactatgaaaatgcgatatgaacatatcgaccatacatttgaaatccaatatcgcaaggacacagcaacctggaaagactctaagaccgagacgttacagaacgcccattctatggccctgccagcattggagcccagtactcgttactgggccagagtgagagttcgcacttctcgcactggatacaatggcatttggagtgaatggtccgaagctcggtcctgggacaccgaaagcgtgcttccaatgtgggttcttgcactgatcgtgatcttcctcacgatcgccgtgctccttgccctgcgcttctgtggcatctatgggtacaggctccgtcgtaaatgggaagagaagatccccaacccgtctaagtcacacctatttcaaaatggatctgctgagttatggcccccaggatcaatgtcggcgtttacgtcgggcagcccaccgcatcagggtccctggggatctagattccccgagcttgaaggcgtattccctgttggcttcggagacagcgaggtgtctcctctcacaatagaggatcccaagcacgtctgcgatcccccaagcggcccagacactactcctgcagccagcgatctgcccaccgagcagccgccttctccgcagcccggtccacccgcagcctcgcatacacctgagaagcaagcctcctcctttgatttcaatgggccatacctgggccctccacactcccgttccctcccagatatcttaggccagccagagccacctcaggagggcggttctcagaagtcccctcccccaggaagtctggaatacttatgcttacccgctggcggacaggtgcagctggtacctcttgcacaggccatgggcccagggcaagctgttgaagtggagcgcaggccatcacagggggctgcagggtcaccttccctagagtctggagggggacccgctcccccagctctaggccctcgtgtgggcggtcaggaccagaaagatagcccggtggccatccccatgtcctccggcgatactgaggatcccggtgtcgcgagcgggtacgtgtcctcagcagacctggtctttactccaaattctggggcaagttccgtgtcacttgtcccctccctgggcctgcccagtgatcagactccctcactgtgcccaggccttgcttctggacccccaggagctcctgggcctgtcaaaagtggttttgagggctacgtcgaactgccacccatcgagggcaggagccctagatcgccccgaaataaccccgtgcccccagaagccaaaagccctgtgttgaatccaggagaacggccagccgacgttagtcccacctctccccagccagagggcctgttggtgctacagcaggtcggagattactgcttcctccccggactggggccaggtcctctttcgctccggtctaaaccatcatcccctggaccgggacccgaaattaagaacctagatcaggcctttcaggttaagaaaccaccgggacaggccgtccctcaagttcctgtgatacagctgtttaaagctttagtggttagtgtaatgtcagtcggaccacctgtgccctag

SEQ ID NO: 8381 - DNA, 4863 bp, Artificial Sequence
  derived and/or modified sequence
actctgcctagaggctccagaagaagactggtctctcccaccacacagaggcctggaggaggcagaggccaggagggagaggtcccaagagcctgtgaaatgggtctggcctggctcccagctgggcaggaacacaggacttcaggacactaaggaccctgtcatgcccatggccagcacccaccagtgctggtgcctgcctgtccagagctgaccagggagatggtgctggcccaggggctgctctccatggccctgctggccctgtgctgggagcgcagcctggcaggggcagaagaaaccatcccgctgcagaccctgcgctgctacaacgactacaccagccacatcacctgcaggtgggcagacacccaggatgcccagcggctcgtcaacgtgaccctcattcgccgggtgaatgaggacctcctggagccagtgtcctgtgacctcagtgatgacatgccctggtcagcctgcccccatccccgctgcgtgcccaggagatgtgtcattccctgccagagttttgtcgtcactgacgttgactacttctcattccaaccagacaggcctctgggcacccggctcaccgtcactctgacccagcatgtccagcctcctgagcccagggacctgcagatcagcaccgaccaggaccacttcctgctgacctggagtgtggcccttgggagtccccagagccactggttgtccccaggggatctggagtttgaggtggtctacaagcggcttcaggactcttgggaggacgcagccatcctcctctccaacacctcccaggccaccctggggccagagcacctcatgcccagcagcacctacgtggcccgagtacggacccgcctggccccaggttctcggctctcaggacgtcccagcaagtggagcccagaggtttgctgggactcccagccaggggatgaggcccagccccagaacctggagtgcttctttgacggggccgccgtgctcagctgctcctgggaggtgaggaaggaggtggccagctcggtctcctttggcctattctacaagcccagcccagatgcaggggaggaagagtgctccccagtgctgagggaggggctcggcagcctccacaccaggcaccactgccagattcccgtgcccgaccccgcgacccacggccaatacatcgtctctgttcagccaaggagggcagagaaacacataaagagctcagtgaacatccagatggcccctccatccctcaacgtgaccaaggatggagacagctacagcctgcgctgggaaacaatgaaaatgcgatacgaacacatagaccacacatttgagatccagtacaggaaagacacggccacgtggaaggacagcaagaccgagaccctccagaacgcccacagcatggccctgccagccctggagccctccaccaggtactgggccagggtgagggtcaggacctcccgcaccggctacaacgggatctggagcgagtggagtgaggcgcgctcctgggacaccgagtcggtgctgcctatgtgggtgctggccctcatcgtgatcttcctcaccatcgctgtgctcctggccctccgcttctgtggcatctacgggtacaggctgcgcagaaagtgggaggagaagatccccaaccccagcaagagccacctgttccagaacgggagcgcagagctttggcccccaggcagcatgtcggccttcactagcgggagtcccccacaccaggggccgtggggcagccgcttccctgagctggagggggtgttccctgtaggattcggggacagcgaggtgtcacctctcaccatagaggaccccaagcatgtctgtgatccaccatctgggcctgacacgactccagctgcctcagatctacccacagagcagccccccagcccccagccaggcccgcctgccgcctcccacacacctgagaaacaggcttccagctttgacttcaatgggccctacctggggccgccccacagccgctccctacctgacatcctgggccagccggagcccccacaggagggtgggagccagaagtccccacctccagggtccctggagtacctgtgtctgcctgctggggggcaggtgcaactggtccctctggcccaggcgatgggaccaggacaggccgtggaagtggagagaaggccgagccagggggctgcagggagtccctccctggagtccgggggaggccctgcccctcctgctcttgggccaagggtgggaggacaggaccaaaaggacagccctgtggctatacccatgagctctggggacactgaggaccctggagtggcctctggttatgtctcctctgcagacctggtattcaccccaaactcaggggcctcgtctgtctccctagttccctctctgggcctcccctcagaccagacccccagcttatgtcctgggctggccagtggaccccctggagccccaggccctgtgaagtcagggtttgagggctatgtggagctccctccaattgagggccggtcccccaggtcaccaaggaacaatcctgtcccccctgaggccaaaagccctgtcctgaacccaggggaacgcccggcagatgtgtccccaacatccccacagcccgagggcctccttgtcctgcagcaagtgggcgactattgcttcctccccggcctggggcccggccctctctcgctccggagtaaaccttcttccccgggacccggtcctgagatcaagaacctagaccaggcttttcaagtcaagaagcccccaggccaggctgtgccccaggtgcccgtcattcagctcttcaaagccctgaagcagcaggactacctgtctctgcccccttgggaggtcaacaagcctggggaggtgtgttgagacccccaggcctagacaggcaaggggatggagagggcttgccttccctcccgcctgaccttcctcagtcatttctgcaaagccaaggggcagcctcctgtcaaggtagctagaggcctgggaaaggagatagccttgctccggcccccttgaccttcagcaaatcacttctctccctgcgctcacacagacacacacacacacacgtacatgcacacatttttcctgtcaggttaacttatttgtaggttctgcattattagaactttctagatatactcattccatctccccctcatttttttaatcaggtttccttgcttttgccatttttcttccttcttttttcactgatttattatgagagtggggctgaggtctgagctgagccttatcagactgagatgcggctggttgtgttgaggacttgtgtgggctgcctgtccccggcagtcgctgatgcacatgacatgattctcatctgggtgcagaggtgggaggcaccaggtgggcacccgtgggggttagggcttggaagagtggcacaggactgggcacgctcagtgaggctcagggaattcagactagcctcgattgtcactccgagaaatgggcatggtattgggggtcgggggggcggtgcaagggacgcacatgagagactgtttgggagcttctggggagccctgctagttgtctcagtgatgtctgtgggacctccagtcccttgagaccccacgtcatgtagagaagttaacggcccaagtggtgggcaggctggcgggacctggggaacatcaggagaggagtccagagcccacgtctactgcggaaaagtcaggggaaactgccaaacaaaggaaaatgccccaaaggcatatatgctttagggcctttggtccaaatggcccgggtggccactcttccagatagaccaggcaactctccctcccaccggccacagatgaggggctgctgatctatgcctgggcctgcaccagggattatggttcttttaaatctttgcctttcagatacaggaaaaataatggcattaaattgctttaatttgcattattttagttatccagtttgcacatatttttataggtatcttaggcatcgattggtattttttaactgggccaagcccattaaggtctttcttctgttgggtgctatcattttctgattaagtctttttgactattgacatacagtctttcacagatggtggagtgtttttcccccaaatctgttgtttgtcttataatgttgtatatgaggttttatggtgtatgaatatgaatgcttctgtaatgtcaaacagatccctagtaaactccttcttcacttttactgtcagatttacaaaggtcctcccattgcaaagcagtgtttgtcctaatttatatattgtttttctagttcattttgtgtttccaacttttcatgtaaaattttaattatttttgaatgtgtggatgtgagactgaggtgccttttggtactgaaattctttttccatgtacctgaagtgttacttttgtgatataggaaatccttgtatatatactttattggtccctaggcttcctattttgttaccttgctttctctatggcatccaccattttgattgttctacttttatgatatgttttcataagtggttaagcaagtattctcgttacttttgctcttaaatccctattcattacagcaatgttggtggtcaaagaaaatgataaacaacttgaatgttcaatggtcctgaaatacataacaacattttagtacattgtaaagtagaatcctctgttcataatgaacaagatgaaccaatgtggattagaaagaagtccgagatattaattccaaaatatccagacattgttaaagggaaaaaattgcaataaaatatttgtaacataaaacaaagtgaaa

SEQ ID NO: 8382 - DNA, 4087 bp, Artificial Sequence
  derived and/or modified sequence
gcctagaggctccagaagaagactggtctctcccaccacacagaggcctggaggaggcagaggccaggagggagaggtcccaagagcctgtgaaatgggtctggcctggctcccagctgggcaggaacacaggacttcaggacactaaggaccctgtcatgcccatggccagcacccaccagtgctggtgcctgcctgtccagagctgaccagggagatggtgctggcccaggggctgctctccatggccctgctggccctgtgctgggagcgcagcctggcaggggcagaagaaaccatcccgctgcagaccctgcgctgctacaacgactacaccagccacatcacctgcaggtgggcagacacccaggatgcccagcggctcgtcaacgtgaccctcattcgccgggtgaatgaggacctcctggagccagtgtcctgtgacctcagtgatgacatgccctggtcagcctgcccccatccccgctgcgtgcccaggagatgtgtcattccctgccagagttttgtcgtcactgacgttgactacttctcattccaaccagacaggcctctgggcacccggctcaccgtcactctgacccagcatgtccagcctcctgagcccagggacctgcagatcagcaccgaccaggaccacttcctgctgacctggagtgtggcccttgggagtccccagagccactggttgtccccaggggatctggagtttgaggtggtctacaagcggcttcaggactcttgggaggacgcagccatcctcctctccaacacctcccaggccaccctggggccagagcacctcatgcccagcagcacctacgtggcccgagtacggacccgcctggccccaggttctcggctctcaggacgtcccagcaagtggagcccagaggtttgctgggactcccagccaggggatgaggcccagccccagaacctggagtgcttctttgacggggccgccgtgctcagctgctcctgggaggtgaggaaggaggtggccagctcggtctcctttggcctattctacaagcccagcccagatgcaggggaggaagagtgctccccagtgctgagggaggggctcggcagcctccacaccaggcaccactgccagattcccgtgcccgaccccgcgacccacggccaatacatcgtctctgttcagccaaggagggcagagaaacacataaagagctcagtgaacatccagatggcccctccatccctcaacgtgaccaaggatggagacagctacagcctgcgctgggaaacaatgaaaatgcgatacgaacacatagaccacacatttgagatccagtacaggaaagacacggccacgtggaaggacagcaagaccgagaccctccagaacgcccacagcatggccctgccagccctggagccctccaccaggtactgggccagggtgagggtcaggacctcccgcaccggctacaacgggatctggagcgagtggagtgaggcgcgctcctgggacaccgagtcggtgctgcctatgtgggtgctggccctcatcgtgatcttcctcaccatcgctgtgctcctggccctccgcttctgtggcatctacgggtacaggctgcgcagaaagtgggaggagaagatccccaaccccagcaagagccacctgttccagaacgggagcgcagagctttggcccccaggcagcatgtcggccttcactagcgggagtcccccacaccaggggccgtggggcagccgcttccctgagctggagggggtgttccctgtaggattcggggacagcgaggtgtcacctctcaccatagaggaccccaagcatgtctgtgatccaccatctgggcctgacacgactccagctgcctcagatctacccacagagcagccccccagcccccagccaggcccgcctgccgcctcccacacacctgagaaacaggcttccagctttgacttcaatgggccctacctggggccgccccacagccgctccctacctgacatcctgggccagccggagcccccacaggagggtgggagccagaagtccccacctccagggtccctggagtacctgtgtctgcctgctggggggcaggtgcaactggtccctctggcccaggcgatgggaccaggacaggccgtggaagtggagagaaggccgagccagggggctgcagggagtccctccctggagtccgggggaggccctgcccctcctgctcttgggccaagggtgggaggacaggaccaaaaggacagccctgtggctatacccatgagctctggggacactgaggaccctggagtggcctctggttatgtctcctctgcagacctggtattcaccccaaactcaggggcctcgtctgtctccctagttccctctctgggcctcccctcagaccagacccccagcttatgtcctgggctggccagtggaccccctggagccccaggccctgtgaagtcagggtttgagggctatgtggagctccctccaattgagggccggtcccccaggtcaccaaggaacaatcctgtcccccctgaggccaaaagccctgtcctgaacccaggggaacgcccggcagatgtgtccccaacatccccacagcccgagggcctccttgtcctgcagcaagtgggcgactattgcttcctccccggcctggggcccggccctctctcgctccggagtaaaccttcttccccgggacccggtcctgagatcaagaacctagaccaggcttttcaagtcaagaagcccccaggccaggctgtgccccaggtgcccgtcattcagctcttcaaagccctagttgtctcagtgatgtctgtgggacctccagtcccttgagaccccacgtcatgtagagaagttaacggcccaagtggtgggcaggctggcgggacctggggaacatcaggagaggagtccagagcccacgtctactgcggaaaagtcaggggaaactgccaaacaaaggaaaatgccccaaaggcatatatgctttagggcctttggtccaaatggcccgggtggccactcttccagatagaccaggcaactctccctcccaccggccacagatgaggggctgctgatctatgcctgggcctgcaccagggattatggttcttttaaatctttgcctttcagatacaggaaaaataatggcattaaattgctttaatttgcattattttagttatccagtttgcacatatttttataggtatcttaggcatcgattggtattttttaactgggccaagcccattaaggtctttcttctgttgggtgctatcattttctgattaagtctttttgactattgacatacagtctttcacagatggtggagtgtttttcccccaaatctgttgtttgtcttataatgttgtatatgaggttttatggtgtatgaatatgaatgcttctgtaatgtcaaacagatccctagtaaactccttcttcacttttactgtcagatttacaaaggtcctcccattgcaaagcagtgtttgtcctaatttatatattgtttttctagttcattttgtgtttccaacttttcatgtaaaattttaattatttttgaatgtgtggatgtgagactgaggtgccttttggtactgaaattctttttccatgtacctgaagtgttacttttgtgatataggaaatccttgtatatatactttattggtccctaggcttcctattttgttaccttgctttctctatggcatccaccattttgattgttctacttttatgatatgttttcataagtggttaagcaagtattctcgttacttttgctcttaaatccctattcattacagcaatgttggtggtcaaagaaaatgataaacaacttgaatgttcaatggtcctgaaatacataacaacattttagtacattgtaaagtagaatcctctgttcataatgaacaagatgaaccaatgtggattagaaagaagtccgagatattaattccaaaatatccagacattgttaaagggaaaaaattgcaataaaatatttgtaac

SEQ ID NO: 8383 - DNA, 2694 bp, Artificial Sequence
  derived and/or modified sequence
atggtgctggcccagggcctgctgagcatggccctgctggccctgtgctgggagagaagcctggccggcgccgaggagaccatccccctgcagaccctgagatgctacaacgactacaccagccacatcacctgcagatgggccgacacccaggacgcccagagactggtgaacgtgaccctgatcagaagagtgaacgaggacctgctggagcccgtgagctgcgacctgagcgacgacatgccctggagcgcctgcccccaccccagatgcgtgcccagaagatgcgtgatcccctgccagagcttcgtggtgaccgacgtggactacttcagcttccagcccgacagacccctgggcaccagactgaccgtgaccctgacccagcacgtgcagccccccgagcccagagacctgcagatcagcaccgaccaggaccacttcctgctgacctggagcgtggccctgggcagcccccagagccactggctgagccccggcgacctggagttcgaggtggtgtacaagagactgcaggacagctgggaggacgccgccatcctgctgagcaacaccagccaggccaccctgggccccgagcacctgatgcccagcagcacctacgtggccagagtgagaaccagactggcccccggcagcagactgagcggcagacccagcaagtggagccccgaggtgtgctgggacagccagcccggcgacgaggcccagccccagaacctggagtgcttcttcgacggcgccgccgtgctgagctgcagctgggaggtgagaaaggaggtggccagcagcgtgagcttcggcctgttctacaagcccagccccgacgccggcgaggaggagtgcagccccgtgctgagagagggcctgggcagcctgcacaccagacaccactgccagatccccgtgcccgaccccgccacccacggccagtacatcgtgagcgtgcagcccagaagagccgagaagcacatcaagagcagcgtgaacatccagatggccccccccagcctgaacgtgaccaaggacggcgacagctacagcctgagatgggagaccatgaagatgagatacgagcacatcgaccacaccttcgagatccagtacagaaaggacaccgccacctggaaggacagcaagaccgagaccctgcagaacgcccacagcatggccctgcccgccctggagcccagcaccagatactgggccagagtgagagtgagaaccagcagaaccggctacaacggcatctggagcgagtggagcgaggccagaagctgggacaccgagagcgtgctgcccatgtgggtgctggccctgatcgtgatcttcctgaccatcgccgtgctgctggccctgagattctgcggcatctacggctacagactgagaagaaagtgggaggagaagatccccaaccccagcaagagccacctgttccagaacggcagcgccgagctgtggccccccggcagcatgagcgccttcaccagcggcagccccccccaccagggcccctggggcagcagattccccgagctggagggcgtgttccccgtgggcttcggcgacagcgaggtgagccccctgaccatcgaggaccccaagcacgtgtgcgacccccccagcggccccgacaccacccccgccgccagcgacctgcccaccgagcagccccccagcccccagcccggcccccccgccgccagccacacccccgagaagcaggccagcagcttcgacttcaacggcccctacctgggccccccccacagcagaagcctgcccgacatcctgggccagcccgagcccccccaggagggcggcagccagaagagccccccccccggcagcctggagtacctgtgcctgcccgccggcggccaggtgcagctggtgcccctggcccaggccatgggccccggccaggccgtggaggtggagagaagacccagccagggcgccgccggcagccccagcctggagagcggcggcggccccgccccccccgccctgggccccagagtgggcggccaggaccagaaggacagccccgtggccatccccatgagcagcggcgacaccgaggaccccggcgtggccagcggctacgtgagcagcgccgacctggtgttcacccccaacagcggcgccagcagcgtgagcctggtgcccagcctgggcctgcccagcgaccagacccccagcctgtgccccggcctggccagcggcccccccggcgcccccggccccgtgaagagcggcttcgagggctacgtggagctgccccccatcgagggcagaagccccagaagccccagaaacaaccccgtgccccccgaggccaagagccccgtgctgaaccccggcgagagacccgccgacgtgagccccaccagcccccagcccgagggcctgctggtgctgcagcaggtgggcgactactgcttcctgcccggcctgggccccggccccctgagcctgagaagcaagcccagcagccccggccccggccccgagatcaagaacctggaccaggccttccaggtgaagaagccccccggccaggccgtgccccaggtgcccgtgatccagctgttcaaggccctgaagcagcaggactacctgagcctgcccccctgggaggtgaacaagcccggcgaggtgtgctag

SEQ ID NO: 8384 - DNA, 2670 bp, Artificial Sequence
  derived and/or modified sequence
atggtgctggcccagggcctgctgagcatggccctgctggccctgtgctgggagagaagcctggccggcgccgaggagaccatccccctgcagaccctgagatgctacaacgactacaccagccacatcacctgcagatgggccgacacccaggacgcccagagactggtgaacgtgaccctgatcagaagagtgaacgaggacctgctggagcccgtgagctgcgacctgagcgacgacatgccctggagcgcctgcccccaccccagatgcgtgcccagaagatgcgtgatcccctgccagagcttcgtggtgaccgacgtggactacttcagcttccagcccgacagacccctgggcaccagactgaccgtgaccctgacccagcacgtgcagccccccgagcccagagacctgcagatcagcaccgaccaggaccacttcctgctgacctggagcgtggccctgggcagcccccagagccactggctgagccccggcgacctggagttcgaggtggtgtacaagagactgcaggacagctgggaggacgccgccatcctgctgagcaacaccagccaggccaccctgggccccgagcacctgatgcccagcagcacctacgtggccagagtgagaaccagactggcccccggcagcagactgagcggcagacccagcaagtggagccccgaggtgtgctgggacagccagcccggcgacgaggcccagccccagaacctggagtgcttcttcgacggcgccgccgtgctgagctgcagctgggaggtgagaaaggaggtggccagcagcgtgagcttcggcctgttctacaagcccagccccgacgccggcgaggaggagtgcagccccgtgctgagagagggcctgggcagcctgcacaccagacaccactgccagatccccgtgcccgaccccgccacccacggccagtacatcgtgagcgtgcagcccagaagagccgagaagcacatcaagagcagcgtgaacatccagatggccccccccagcctgaacgtgaccaaggacggcgacagctacagcctgagatgggagaccatgaagatgagatacgagcacatcgaccacaccttcgagatccagtacagaaaggacaccgccacctggaaggacagcaagaccgagaccctgcagaacgcccacagcatggccctgcccgccctggagcccagcaccagatactgggccagagtgagagtgagaaccagcagaaccggctacaacggcatctggagcgagtggagcgaggccagaagctgggacaccgagagcgtgctgcccatgtgggtgctggccctgatcgtgatcttcctgaccatcgccgtgctgctggccctgagattctgcggcatctacggctacagactgagaagaaagtgggaggagaagatccccaaccccagcaagagccacctgttccagaacggcagcgccgagctgtggccccccggcagcatgagcgccttcaccagcggcagccccccccaccagggcccctggggcagcagattccccgagctggagggcgtgttccccgtgggcttcggcgacagcgaggtgagccccctgaccatcgaggaccccaagcacgtgtgcgacccccccagcggccccgacaccacccccgccgccagcgacctgcccaccgagcagccccccagcccccagcccggcccccccgccgccagccacacccccgagaagcaggccagcagcttcgacttcaacggcccctacctgggccccccccacagcagaagcctgcccgacatcctgggccagcccgagcccccccaggagggcggcagccagaagagccccccccccggcagcctggagtacctgtgcctgcccgccggcggccaggtgcagctggtgcccctggcccaggccatgggccccggccaggccgtggaggtggagagaagacccagccagggcgccgccggcagccccagcctggagagcggcggcggccccgccccccccgccctgggccccagagtgggcggccaggaccagaaggacagccccgtggccatccccatgagcagcggcgacaccgaggaccccggcgtggccagcggctacgtgagcagcgccgacctggtgttcacccccaacagcggcgccagcagcgtgagcctggtgcccagcctgggcctgcccagcgaccagacccccagcctgtgccccggcctggccagcggcccccccggcgcccccggccccgtgaagagcggcttcgagggctacgtggagctgccccccatcgagggcagaagccccagaagccccagaaacaaccccgtgccccccgaggccaagagccccgtgctgaaccccggcgagagacccgccgacgtgagccccaccagcccccagcccgagggcctgctggtgctgcagcaggtgggcgactactgcttcctgcccggcctgggccccggccccctgagcctgagaagcaagcccagcagccccggccccggccccgagatcaagaacctggaccaggccttccaggtgaagaagccccccggccaggccgtgccccaggtgcccgtgatccagctgttcaaggccctggtggtgagcgtgatgagcgtgggcccccccgtgccctag

SEQ ID NO: 8385 - protein, 570 aa, Artificial Sequence
  derived and/or modified sequence
MGNWAVNEGLSIFVILVWLGLNVFLFVWYYRVYDIPPKFFYTRKLLGSALALARAPAACLNFNCMLILLPVCRNLLSFLRGSSACCSTRVRRQLDRNLTFHKMVAWMIALHSAIHTIAHLFNVEWCVNARVNNSDPYSVALSELGDRQNESYLNFARKRIKNPEGGLYLAVTLLAGITGVVITLCLILIITSSTKTIRRSYFEVFWYTHHLFVIFFIGLAIHGAERIVRGQTAESLAVHNITVCEQKISEWGKIKECPIPQFAGNPPMTWKWIVGPMFLYLCERLVRFWRSQQKVVITKVVTHPFKTIELQMKKKGFKMEVGQYIFVKCPKVSKLEWHPFTLTSAPEEDFFSIHIRIVGDWTEGLFNACGCDKQEFQDAWKLPKIAVDGPFGTASEDVFSYEVVMLVGAGIGVTPFASILKSVWYKYCNNATNLKLKKIYFYWLCRDTHAFEWFADLLQLLESQMQERNNAGFLSYNIYLTGWDESQANHFAVHHDEEKDVITGLKQKTLYGRPNWDNEFKTIASQHPNTRIGVFLCGPEALAETLSKQSISNSESGPRGVHFIFNKENF

SEQ ID NO: 8386 - protein, 303 aa, Artificial Sequence [sequence omitted]

SEQ ID NO: 8387 - protein, 538 aa, Artificial Sequence
  derived and/or modified sequence
MGNWAVNEGLSIFVISALALARAPAACLNFNCMLILLPVCRNLLSFLRGSSACCSTRVRRQLDRNLTFHKMVAWMIALHSAIHTIAHLFNVEWCVNARVNNSDPYSVALSELGDRQNESYLNFARKRIKNPEGGLYLAVTLLAGITGVVITLCLILIITSSTKTIRRSYFEVFWYTHHLFVIFFIGLAIHGAERIVRGQTAESLAVHNITVCEQKISEWGKIKECPIPQFAGNPPMTWKWIVGPMFLYLCERLVRFWRSQQKVVITKVVTHPFKTIELQMKKKGFKMEVGQYIFVKCPKVSKLEWHPFTLTSAPEEDFFSIHIRIVGDWTEGLFNACGCDKQEFQDAWKLPKIAVDGPFGTASEDVFSYEVVMLVGAGIGVTPFASILKSVWYKYCNNATNLKLKKIYFYWLCRDTHAFEWFADLLQLLESQMQERNNAGFLSYNIYLTGWDESQANHFAVHHDEEKDVITGLKQKTLYGRPNWDNEFKTIASQHPNTRIGVFLCGPEALAETLSKQSISNSESGPRGVHFIFNKENF

SEQ ID NO: 8388 - DNA, 1713 bp, Artificial Sequence
  derived and/or modified sequence
atgggcaactgggcggtaaatgaggggctgtctatttttgtaattctcgtatggctgggtctcaacgtgtttcttttcgtgtggtattaccgcgtttatgatatcccccctaaattcttctatacaaggaaactactcggaagtgccctcgccttagccagagcccctgccgcctgcctgaactttaactgcatgctcattttattgcctgtttgcagaaacctgttaagtttcctgcggggcagctcggcctgctgcagcacaagggtgcgtcggcaattggaccgcaatcttactttccataagatggtcgcctggatgattgccctccactctgctattcacacaatcgcccacctcttcaatgttgagtggtgtgtgaacgccagagtcaacaacagtgacccttattccgtggctctgtccgaattgggagacagacagaacgagtcatacttgaattttgcacgaaaacgaatcaagaatcctgaaggaggcctgtacctcgcggtgactctccttgcaggaattacaggggtggtgatcaccttatgtctgatcctcattatcacgtcttctaccaagaccattaggagatcttatttcgaagtgttctggtatactcatcatctttttgttatcttcttcatcggcctggcaatacacggtgcagaacgcatagtgcgggggcagaccgccgagtctttggccgttcacaatatcacagtgtgtgagcagaaaatctctgagtggggcaaaatcaaggaatgtccaattccacagttcgccggtaacccacccatgacctggaagtggatcgtcggacccatgtttctgtacctgtgtgaaaggcttgtgcgtttctggcggtcccagcagaaggtggtcataactaaagtggtgacccaccctttcaagacaatcgagctgcagatgaagaagaaaggcttcaagatggaggtcgggcagtatatctttgtgaaatgcccaaaggtgtctaaacttgagtggcatccgtttaccctgacctctgccccagaggaagatttctttagcatccacattaggatcgttggagattggacagaagggctgttcaatgcgtgcggatgtgacaagcaggaattccaggacgcatggaagctgccgaaaatcgccgttgacgggccgtttggtactgcgagtgaggacgtgttttcctatgaagtggtgatgcttgtaggggcaggcattggtgttacccctttcgcgagcatacttaaatcagtttggtataagtactgcaacaacgcgacaaacctgaaactcaaaaaaatttacttctattggttatgccgcgacacgcacgcttttgagtggtttgccgacctacttcagctgcttgagagccaaatgcaagaacggaataacgctgggttcctgagttataatatttatctcaccgggtgggatgaatctcaggcgaaccacttcgctgtgcaccatgatgaggaaaaggatgtcataactggacttaagcagaaaactctttacggccggcccaactgggataatgagtttaagaccattgcatcccagcaccccaacactcgcatcggtgttttcctctgcggtcccgaggctcttgcagagaccctcagcaaacagagcatcagcaactcggagtctgggcccagaggtgtccactttatttttaacaaagagaacttctag

SEQ ID NO: 8389 - DNA, 1617 bp, Artificial Sequence
  derived and/or modified sequence
atgggcaattgggcggtgaacgagggtctttccattttcgtcataagtgccttggctttggcgcgggcacccgctgcatgtctgaattttaactgtatgttgattctgttgcccgtgtgcaggaacctgctgagttttcttcgtggctcctccgcatgttgtagcacccgggtacggcgccaactggaccggaatcttacttttcataaaatggtggcctggatgatagccttgcatagcgccatccacaccatcgcccacctctttaacgtcgagtggtgcgtgaacgctcgtgtgaacaacagtgatccctactccgtcgctctttctgagttgggagacaggcagaatgaatcatatctgaacttcgcacgtaagcggatcaagaatcctgagggaggtctgtatctggctgtcaccctactcgctgggattacaggcgtggtaatcactctatgcctgatcctgatcatcactagctctaccaaaaccatccggcgctcatacttcgaagtattctggtatacccatcacctgttcgtcattttttttattggactcgcaattcacggcgccgaacgcatagttcggggccaaaccgcggaaagcctcgccgtccacaatataaccgtctgcgagcaaaagatttcagaatggggaaaaattaaggaatgtccaataccacagttcgccggaaacccccctatgacttggaagtggattgtcggacccatgttcttgtacctgtgcgagagactggtgcgattttggagatcacagcagaaggtcgtgatcactaaggtcgtgacccatccattcaaaactatcgagttgcaaatgaagaagaaaggtttcaagatggaggtgggacaatatatattcgtcaagtgccctaaggtgtctaaactcgaatggcacccttttaccttaacttccgctcccgaggaggacttcttctctatccacatcagaatagtaggagactggacagagggcctgtttaacgcatgtggctgtgacaagcaggagtttcaggatgcatggaagcttccaaagatagctgtcgacggtcctttcggtacagcctctgaagacgtttttagctatgaggtggtgatgctcgtgggggctggaatcggtgttacaccatttgcttcaatcctcaagtctgtgtggtacaagtactgcaataacgccacaaatctaaagctaaagaaaatttatttctattggctctgccgcgacacccacgccttcgaatggtttgccgacctgctccagcttctggaaagtcagatgcaggaacgaaataacgccgggtttctgtcatataacatttacctgactggatgggacgaaagtcaagctaatcatttcgccgtgcaccacgacgaggagaaagacgttataacaggcctcaagcagaagacgttatacgggaggccaaactgggacaacgaatttaagacgatcgccagccagcatcccaacacccgaatcggagtgtttctgtgcgggcccgaagccctggccgaaactttgtccaaacagagcatctctaattccgagtccggtccccggggggttcatttcatctttaacaaggagaacttttag

SEQ ID NO: 8390 - DNA, 1713 bp, Artificial Sequence
  derived and/or modified sequence
atgggcaactgggccgtgaatgaaggcctgagcatctttgtgatcctggtgtggctgggcctgaatgtgttcctgtttgtgtggtactacagagtgtatgacatcccccccaagttcttctacaccaggaagctgctgggcagcgccctggccctggcccgggccccagctgcctgcctgaacttcaactgcatgctgatcctgctgcctgtgtgcaggaacctgctgtccttcctgcggggcagcagcgcctgctgcagcaccagggtgcggcggcagctggacaggaacctgaccttccacaagatggtggcctggatgattgccctgcacagcgccatccacaccatcgcccacctgttcaacgtggagtggtgtgtgaatgcccgggtgaacaacagcgacccctacagcgtggccctgtctgagctgggggaccggcagaatgaaagctacctgaactttgccaggaagaggatcaagaaccctgagggcggcctgtacctggccgtgaccctgctggccggcatcaccggggtggtgatcaccctgtgcctgatcctgatcatcaccagcagcaccaagaccatccgccgcagctactttgaggtgttctggtacacccaccacctgtttgtgatcttcttcatcggcctggccatccacggggctgagagaattgtgcggggccagacagctgagagcctggccgtgcacaacatcaccgtgtgtgagcagaagatcagcgagtggggcaagatcaaggagtgccccatcccccagtttgctggcaacccccccatgacctggaagtggatcgtgggccccatgttcctgtacctgtgtgagcggctggtgcgcttctggaggagccagcagaaggtggtgatcaccaaggtggtgacccaccccttcaagaccatcgagctgcagatgaagaagaagggcttcaagatggaggtgggccagtacatctttgtgaagtgccccaaggtgtccaagctggagtggcaccccttcaccctgaccagcgcccctgaggaggacttcttcagcatccacatcagaattgtgggggactggacagagggcctcttcaatgcctgtggctgtgacaagcaggagttccaggatgcctggaagctgcccaagattgctgtggatggcccctttggaacagcctctgaagatgtgttctcctatgaggtggtgatgctggtgggcgccggcattggagtgaccccatttgccagcatcctgaagtctgtgtggtacaagtactgcaacaatgccaccaacctgaagctgaagaagatctacttctactggctgtgccgggacacccacgcctttgagtggtttgctgacctgctgcagctgctggagagccagatgcaggagaggaacaatgccggcttcctgagctacaacatctacctgaccggctgggatgagagccaggccaaccactttgctgtgcaccatgatgaggagaaggatgtgatcaccggcctgaagcagaagaccctgtatggccggcccaactgggacaatgagttcaagaccatcgccagccagcaccccaacacccgcatcggggtcttcctgtgtggccctgaggccctggccgagaccctgagcaagcagagcatcagcaacagcgagagcggcccccggggcgtgcacttcatcttcaacaaggagaacttctag

SEQ ID NO: 8391 - DNA, 1617 bp, Artificial Sequence
  derived and/or modified sequence
atgggcaactgggccgtgaatgaaggcctgagcatctttgtgatcagcgccctggccctggcccgggccccagctgcctgcctgaacttcaactgcatgctgatcctgctgcctgtgtgcaggaacctgctgtccttcctgcggggcagcagcgcctgctgcagcaccagggtgcggcggcagctggacaggaacctgaccttccacaagatggtggcctggatgattgccctgcacagcgccatccacaccatcgcccacctgttcaacgtggagtggtgtgtgaatgcccgggtgaacaacagcgacccctacagcgtggccctgtctgagctgggggaccggcagaatgaaagctacctgaactttgccaggaagaggatcaagaaccctgagggcggcctgtacctggccgtgaccctgctggccggcatcaccggggtggtgatcaccctgtgcctgatcctgatcatcaccagcagcaccaagaccatccgccgcagctactttgaggtgttctggtacacccaccacctgtttgtgatcttcttcatcggcctggccatccacggggctgagagaattgtgcggggccagacagctgagagcctggccgtgcacaacatcaccgtgtgtgagcagaagatcagcgagtggggcaagatcaaggagtgccccatcccccagtttgctggcaacccccccatgacctggaagtggatcgtgggccccatgttcctgtacctgtgtgagcggctggtgcgcttctggaggagccagcagaaggtggtgatcaccaaggtggtgacccaccccttcaagaccatcgagctgcagatgaagaagaagggcttcaagatggaggtgggccagtacatctttgtgaagtgccccaaggtgtccaagctggagtggcaccccttcaccctgaccagcgcccctgaggaggacttcttcagcatccacatcagaattgtgggggactggacagagggcctcttcaatgcctgtggctgtgacaagcaggagttccaggatgcctggaagctgcccaagattgctgtggatggcccctttggaacagcctctgaagatgtgttctcctatgaggtggtgatgctggtgggcgccggcattggagtgaccccatttgccagcatcctgaagtctgtgtggtacaagtactgcaacaatgccaccaacctgaagctgaagaagatctacttctactggctgtgccgggacacccacgcctttgagtggtttgctgacctgctgcagctgctggagagccagatgcaggagaggaacaatgccggcttcctgagctacaacatctacctgaccggctgggatgagagccaggccaaccactttgctgtgcaccatgatgaggagaaggatgtgatcaccggcctgaagcagaagaccctgtatggccggcccaactgggacaatgagttcaagaccatcgccagccagcaccccaacacccgcatcggggtcttcctgtgtggccctgaggccctggccgagaccctgagcaagcagagcatcagcaacagcgagagcggcccccggggcgtgcacttcatcttcaacaaggagaacttctag

SEQ ID NO: 8392 - DNA, 1713 bp, Artificial Sequence
  derived and/or modified sequence
atgggcaactgggccgtgaacgagggcctgagcatcttcgtgatcctcgtttggctgggcctcaacgttttcctgttcgtgtggtattatcgagtctacgatattccaccaaagttcttttacacacggaagctgttaggtagcgcactcgctttggctcgagcccccgctgcttgcctgaactttaactgcatgctgattctccttccagtgtgtcgtaatctactgtcatttcttagaggaagttccgcatgttgttctacccgtgtgaggcgacagctggacagaaacctgacattccacaagatggtcgcttggatgatcgctctgcactctgctattcacactattgctcacttgtttaatgttgaatggtgtgtgaatgcccgcgtgaacaacagtgacccttattccgtcgcgttgagcgaactgggagacaggcagaacgagtcctacctgaattttgcaaggaaacgcattaagaatccggagggcggtttgtacctggcagtaacactcctcgccggaatcaccggggtggtaattacactttgtctgatactcattatcacttccagcactaagactatacgtcgctcttactttgaggtgttctggtacacgcaccatctcttcgtcattttcttcatcggcctggcaatccacggcgctgagcggatcgttagaggacagacggctgagtccctcgccgtgcacaatattacagtgtgtgaacagaagatctccgagtggggaaagattaaggaatgtcccatccctcagttcgcaggtaacccccctatgacctggaagtggatagtaggcccgatgtttctctacctatgtgaaagactggtgcgcttttggagatcccagcagaaagtggttattaccaaggttgttacacacccctttaagaccatcgagctgcagatgaagaagaaggggtttaagatggaggtcggccagtacatcttcgtcaagtgccctaaagtgtccaagttggaatggcatccgttcacgctaacttcagctcctgaggaggacttcttctccatacacatcagaatagtgggcgattggaccgaaggtctgtttaacgcgtgcggatgcgataagcaggagtttcaggacgcctggaaactgcctaaaattgctgtggatgggccctttggcactgcctccgaagatgtgttctcctacgaggtagtgatgctcgtcggtgcagggatcggagtgaccccgtttgcttccatcctgaagagcgtgtggtacaagtattgtaacaacgccactaatctcaaacttaagaagatctacttttactggctgtgccgagatactcacgctttcgagtggtttgccgacttgctacaactgctggaaagtcagatgcaggagcggaataatgcagggttccttagttacaacatttaccttactgggtgggacgagtcccaggctaatcactttgccgtgcaccacgatgaagagaaggatgttattaccggactcaagcagaaaactctctacggcaggcctaactgggataatgaatttaagaccatcgcttcccagcatccaaacacgaggattggggtgttcctgtgtgggcccgaagccctggcggagacgctgtcaaagcagtccatttcaaattcagagtctggacccaggggcgtacacttcatctttaataaagagaacttctag

SEQ ID NO: 8393 - DNA, 1617 bp, Artificial Sequence
  derived and/or modified sequence
atgggcaactgggccgtgaacgagggcctgagcatcttcgtgatctcggccttggccctggctcgagctcccgctgcctgcctgaacttcaactgcatgctgattttgttgcccgtgtgccgcaacctgctgagctttctgcggggcagcagcgcgtgttgctccacccgggtccgtagacagttagaccggaacctcacatttcataagatggttgcctggatgattgccctccacagtgctatccatacgatcgctcatctgtttaatgtcgagtggtgcgtgaatgcccgcgtgaataattcagatccttattctgtggctctgtctgagctgggcgaccgacaaaacgaaagctatcttaatttcgcgcgcaagagaatcaagaatcccgaaggggggctgtatttggctgtgactctactcgcagggatcaccggagtcgtgattaccctctgtttgatcttgattatcacatcaagcaccaagacaatacgtcgctcatattttgaggttttttggtatactcaccatctgttcgtcatcttctttatagggctcgccatccatggcgctgaaaggattgttcggggtcagacagccgagtctcttgctgtccacaacataacagtttgtgaacagaaaataagcgaatggggcaagattaaggagtgccctattccccagtttgctggcaatccgccaatgacctggaagtggattgtgggaccaatgttcctctatctttgcgagagattggtgcggttttggagaagccagcagaaagtcgtaatcaccaaagtggtgactcacccatttaagactattgaactgcagatgaaaaaaaagggcttcaaaatggaagtgggccagtacatttttgtgaaatgtccaaaggtcagcaagctcgaatggcacccttttacactgacctctgctcctgaagaggacttcttttcaatacacattagaatcgtgggagattggacggaggggctgtttaacgcgtgcggttgcgataaacaagagtttcaggatgcttggaagttgccaaagatcgccgtggatgggcctttcggaacagcgtcagaggacgttttttcatatgaggtcgttatgctggttggtgccggcatcggagtgacacctttcgctagcatccttaaatccgtgtggtataaatactgtaacaacgccaccaacctgaagcttaagaagatttacttttactggttgtgccgcgatacacatgcattcgagtggttcgctgacttgctgcagcttctggagagtcagatgcaggagagaaacaacgccggatttctaagctacaacatctatctcaccggatgggatgaatctcaggccaaccacttcgctgtgcaccatgatgaggaaaaagacgttattaccgggctaaagcaaaaaacgttatacggaagaccgaactgggataatgaatttaagacaatcgccagccagcatccgaatacccgcataggcgtgttcctgtgtggtcccgaggcccttgctgagacactatccaagcaatctattagtaatagcgagagtggtcctagaggagtgcatttcatttttaacaaagagaacttctag

SEQ ID NO: 8394 - DNA, 1713 bp, Artificial Sequence
  derived and/or modified sequence
atgggcaactgggctgttaacgaggggctctccatattcgtgattttggtgtggcttggacttaacgtgttcctgttcgtatggtactaccgagtatatgacattcccccaaagttcttttacactaggaaactcctgggaagcgctttggcgttggccagagcccctgccgcttgcctgaacttcaactgtatgctcatactgctcccggtctgccggaacctactctcctttctacggggaagcagcgcctgctgctccacgcgggtgcgcaggcagctggatcggaatctgacattccacaaaatggtcgcctggatgattgcactgcattctgctatccacaccatcgcgcacctctttaacgtcgagtggtgtgtaaacgcaagagtgaataatagtgacccctattcagtagcgctcagcgagttaggtgatcggcaaaacgagtcttaccttaattttgctaggaagcgaatcaagaaccctgaaggtggcctgtatcttgcagttacgttgctggccggtattacaggagtggtaattactttatgcctgattttgattattacgagcagcactaagacgattagacgttcttactttgaagtgttctggtacacgcaccacctgttcgttattttttttatcggtctggctatccatggcgctgagcgcatcgtgaggggacagaccgccgagtccctggcagttcacaatatcacagtgtgtgaacagaagatctccgagtgggggaagataaaggagtgccccattccccaatttgcaggcaatcctccaatgacgtggaagtggattgtaggacctatgttcctgtacctctgtgagagattagtgaggttttggagatcccagcaaaaagtggtgattacaaaagttgtaacgcatccatttaagactatcgaactccagatgaaaaagaaggggtttaagatggaggtggggcagtatatttttgtcaaatgcccaaaggtgtctaagctggagtggcacccctttacgcttaccagtgcacccgaggaagatttttttagtatccatattagaatcgtgggggattggaccgaaggccttttcaacgcatgcggctgtgacaagcaagagttccaggatgcatggaagcttcccaagatcgcggtggacgggcctttcggtacggccagcgaagatgtgttcagctacgaagtggtcatgcttgtaggcgctggtatcggagtgacaccctttgccagcatactgaagagcgtatggtataaatactgcaacaacgccaccaacctgaaactgaagaaaatctatttttactggctgtgtagggatacccatgcgttcgaatggtttgccgatctgctgcagctccttgaatctcagatgcaagaacgcaacaacgccggttttctttcgtacaatatctatcttaccggctgggatgaaagccaggctaatcacttcgcagtgcatcacgatgaagagaaagacgtgatcacgggtctgaagcagaagactctatatgggaggcccaactgggacaacgagttcaagacgattgcctctcaacaccctaatacccgaatcggcgtctttctctgtggtccagaagcgctggccgaaaccctgtccaaacagtctatctccaacagtgaatcaggaccgcgtggcgtacacttcatctttaacaaggaaaacttctag

SEQ ID NO: 8395 - DNA, 1617 bp, Artificial Sequence
  derived and/or modified sequence
atgggtaactgggctgtgaacgagggactgagcatcttcgttataagcgctttggcgctggccagggctcccgcagcctgtttgaatttcaattgtatgttgattctcttacctgtctgccggaacctcctcagcttcctgcgtggtagctctgcttgctgcagcactcgggtcaggagacaactggatcgaaatctcaccttccataaaatggtggcttggatgattgccttgcactccgctatacacaccattgcgcaccttttcaatgtggaatggtgcgtgaacgcgcgtgttaacaacagtgacccctattccgttgccctgtcagaactcggtgatcggcagaatgaaagttatctgaactttgccaggaagcgcataaaaaaccctgagggcggactataccttgccgtgaccctgttagccggaatcacaggggttgtcataactctctgcctgatcctcattattacctcttctacaaagactatcagacgaagttactttgaggtcttttggtatacgcaccacctgtttgtaattttctttataggcctcgcaatccatggggcagaacggatcgtccgaggccagacggccgagtccctcgccgtgcataatataactgtctgtgagcagaaaatctctgaatggggcaaaattaaagagtgcccaataccccagtttgcgggtaaccctccgatgacctggaagtggatagtgggacccatgttcttgtacttgtgtgagcggctggtccggttttggaggagccagcagaaagtggtaattacaaaggtagtcacacacccattcaagacaattgagctccagatgaaaaagaaagggttcaagatggaagtgggtcagtatattttcgtcaagtgccctaaagtgtcaaagcttgagtggcacccctttacactaacctctgcacctgaagaggacttcttttcgattcacatccgcatcgtgggcgattggacagagggcctcttcaacgcctgtggctgtgataaacaagaattccaggacgcctggaagctgcccaagatcgccgttgacggcccattcggcactgcgtccgaggacgttttctcttatgaagttgtgatgttggtaggtgccggaatcggtgtgacgccctttgcgagcatcttgaagtccgtttggtataagtactgtaacaacgcgactaaccttaaactgaagaagatatacttctactggctctgcagagacacacatgcgtttgagtggttcgccgatcttctccagctcctcgaatcacagatgcaggaacgcaataatgccggtttcctttcatataacatctacctcactggatgggatgaaagccaggccaaccactttgcagtgcaccacgatgaagagaaagatgtcatcacaggattgaaacagaaaacactgtatggaagacccaactgggataatgaattcaaaaccattgccagccagcatccgaacacccggatcggagtgttcctatgtggacctgaagccctcgctgaaaccctcagcaaacaatcaatctcaaactccgagtctggccctaggggggtccatttcatctttaataaagagaatttctag

SEQ ID NO: 8396 - DNA, 4324 bp, Artificial Sequence
  derived and/or modified sequence
ttcctcattggaagaagaagcatagtatagaagaaaggcaaacacaacacattcaacctctgccaccatggggaactgggctgtgaatgaggggctctccatttttgtcattctggtttggctggggttgaacgtcttcctctttgtctggtattaccgggtttatgatattccacctaagttcttttacacaagaaaacttcttgggtcagcactggcactggccagggcccctgcagcctgcctgaatttcaactgcatgctgattctcttgccagtctgtcgaaatctgctgtccttcctcaggggttccagtgcgtgctgctcaacaagagttcgaagacaactggacaggaatctcacctttcataaaatggtggcatggatgattgcacttcactctgcgattcacaccattgcacatctatttaatgtggaatggtgtgtgaatgcccgagtcaataattctgatccttattcagtagcactctctgaacttggagacaggcaaaatgaaagttatctcaattttgctcgaaagagaataaagaaccctgaaggaggcctgtacctggctgtgaccctgttggcaggcatcactggagttgtcatcacgctgtgcctcatattaattatcacttcctccaccaaaaccatccggaggtcttactttgaagtcttttggtacacacatcatctctttgtgatcttcttcattggccttgccatccatggagctgaacgaattgtacgtgggcagaccgcagagagtttggctgtgcataatataacagtttgtgaacaaaaaatctcagaatggggaaaaataaaggaatgcccaatccctcagtttgctggaaaccctcctatgacttggaaatggatagtgggtcccatgtttctgtatctctgtgagaggttggtgcggttttggcgatctcaacagaaggtggtcatcaccaaggtggtcactcaccctttcaaaaccatcgagctacagatgaagaagaaggggttcaaaatggaagtgggacaatacatttttgtcaagtgcccaaaggtgtccaagctggagtggcacccttttacactgacatccgcccctgaggaagacttctttagtatccatatccgcatcgttggggactggacagaggggctgttcaatgcttgtggctgtgataagcaggagtttcaagatgcgtggaaactacctaagatagcggttgatgggccctttggcactgccagtgaagatgtgttcagctatgaggtggtgatgttagtgggagcagggattggggtcacacccttcgcatccattctcaagtcagtctggtacaaatattgcaataacgccaccaatctgaagctcaaaaagatctacttctactggctgtgccgggacacacatgcctttgagtggtttgcagatctgctgcaactgctggagagccagatgcaggaaaggaacaatgccggcttcctcagctacaacatctacctcactggctgggatgagtctcaggccaatcactttgctgtgcaccatgatgaggagaaagatgtgatcacaggcctgaaacaaaagactttgtatggacggcccaactgggataatgaattcaagacaattgcaagtcaacaccctaataccagaataggagttttcctctgtggacctgaagccttggctgaaaccctgagtaaacaaagcatctccaactctgagtctggccctcggggagtgcatttcattttcaacaaggaaaacttctaacttgtctcttccatgaggaaataaatgtgggttgtgctgccaaatgctcaaataatgctaattgataatataaataccccctgcttaaaaatggacaaaaagaaactataatgtaatggttttcccttaaaggaatgtcaaagattgtttgatagtgataagttacatttatgtggagctctatggttttgagagcacttttacaaacattatttcatttttttcctctcagtaatgtcagtggaagttagggaaaagattcttggactcaattttagaatcaaaagggaaaggatcaaaaggttcagtaacttccctaagattatgaaactgtgaccagatctagcccatcttactccaggtttgatactctttccacaatactgagctgcctcagaatcctcaaaatcagtttttatattccccaaaagaagaaggaaaccaaggagtagctatatatttctactttgtgtcatttttgccatcattattatcatactgaaggaaattttccagatcattaggacataatacatgttgagagtgtctcaacacttattagtgacagtattgacatctgagcatactccagtttactaatacagcagggtaactgggccagatgttctttctacagaagaatattggattgattggagttaatgtaatactcatcatttaccactgtgcttggcagagagcggatactcaagtaagttttgttaaatgaatgaatgaatttagaaccacacaatgccaagatagaattaatttaaagccttaaacaaaatttatctaaagaaataacttctattactgtcatagaccaaaggaatctgattctccctagggtcaagaacaggctaaggatactaaccaataggattgcctgaagggttctgcacattcttatttgaagcatgaaaaaagagggttggaggtggagaattaacctcctgccatgactctggctcatctagtcctgctccttgtgctataaaataaatgcagactaatttcctgcccaaagtggtcttctccagctagcccttatgaatattgaacttaggaattgtgacaaatatgtatctgatatggtcatttgttttaaataacacccaccccttattttccgtaaatacacacacaaaatggatcgcatctgtgtgactaatggtttatttgtattatatcatcatcatcatcctaaaattaacaacccagaaacaaaaatctctatacagagatcaaattcacactcaatagtatgttctgaatatatgttcaagagagagtctctaaatcactgttagtgtggccaagagcagggttttctttttgttcttagaactgctcccatttctgggaactaaaaccagttttatttgccccaccccttggagccacaaatgtttagaactcttcaacttcggtaatgaggaagaaggagaaagagctgggggaagggcagaagactggtttaggaggaaaaggaaataaggagaaaagagaatgggagagtgagagaaaataaaaaaggcaaaagggagagagaggggaagggggtctcatattggtcattccctgccccagatttcttaaagtttgatatgtatagaatataattgaaggaggtatacacatattgatgttgttttgattatctatggtattgaatcttttaaaatctggtcacaaattttgatgctgagggggattattcaagggactaggatgaactaaataagaactcagttgttctttgtcatactactattcctttcgtctcccagaatcctcagggcactgagggtaggtctgacaaataaggcctgctgtgcgaatatagcctttctgaaatgtaccaggatggtttctgcttagagacacttaggtccagcctgttcacactgcacctcaggtatcaattcatctattcaacagatatttattgtgttattactatgagtcaggctctgtttattgtttcaattctttacaccaaagtatgaactggagagggtacctcagttataaggagtctgagaatattggccctttctaacctatgtgcataattaaaaccagcttcatttgttgctccgagagtgtttctccaaggttttctatcttcaaaaccaactaagttatgaaagtagagagatctgccctgtgttatccagttatgagataaaaaatgaatataagagtgcttgtcattataaaagtttccttttttattctctcaagccaccagctgccagccaccagcagccagctgccagcctagctttttttttttttttttttttttagcacttagtatttagcatttattaacaggtactctaagaatgatgaagcattgtttttaatcttaagactatgaaggtttttcttagttcttctgcttttgcaattgtgtttgtgaaatttgaatacttgcaggctttgtatgtgaataattctagcgggggacctgggagataattcctacggggaattcttaaaactgtgctcaactattaaaatgaatgagctttc

SEQ ID NO: 8397 - DNA, 1822 bp, Artificial Sequence
  derived and/or modified sequence
acattcaacctctgccaccatggggaactgggctgtgaatgaggggctctccatttttgtcatttcagcactggcactggccagggcccctgcagcctgcctgaatttcaactgcatgctgattctcttgccagtctgtcgaaatctgctgtccttcctcaggggttccagtgcgtgctgctcaacaagagttcgaagacaactggacaggaatctcacctttcataaaatggtggcatggatgattgcacttcactctgcgattcacaccattgcacatctatttaatgtggaatggtgtgtgaatgcccgagtcaataattctgatccttattcagtagcactctctgaacttggagacaggcaaaatgaaagttatctcaattttgctcgaaagagaataaagaaccctgaaggaggcctgtacctggctgtgaccctgttggcaggcatcactggagttgtcatcacgctgtgcctcatattaattatcacttcctccaccaaaaccatccggaggtcttactttgaagtcttttggtacacacatcatctctttgtgatcttcttcattggccttgccatccatggagctgaacgaattgtacgtgggcagaccgcagagagtttggctgtgcataatataacagtttgtgaacaaaaaatctcagaatggggaaaaataaaggaatgcccaatccctcagtttgctggaaaccctcctatgacttggaaatggatagtgggtcccatgtttctgtatctctgtgagaggttggtgcggttttggcgatctcaacagaaggtggtcatcaccaaggtggtcactcaccctttcaaaaccatcgagctacagatgaagaagaaggggttcaaaatggaagtgggacaatacatttttgtcaagtgcccaaaggtgtccaagctggagtggcacccttttacactgacatccgcccctgaggaagacttctttagtatccatatccgcatcgttggggactggacagaggggctgttcaatgcttgtggctgtgataagcaggagtttcaagatgcgtggaaactacctaagatagcggttgatgggccctttggcactgccagtgaagatgtgttcagctatgaggtggtgatgttagtgggagcagggattggggtcacacccttcgcatccattctcaagtcagtctggtacaaatattgcaataacgccaccaatctgaagctcaaaaagatctacttctactggctgtgccgggacacacatgcctttgagtggtttgcagatctgctgcaactgctggagagccagatgcaggaaaggaacaatgccggcttcctcagctacaacatctacctcactggctgggatgagtctcaggccaatcactttgctgtgcaccatgatgaggagaaagatgtgatcacaggcctgaaacaaaagactttgtatggacggcccaactgggataatgaattcaagacaattgcaagtcaacaccctaataccagaataggagttttcctctgtggacctgaagccttggctgaaaccctgagtaaacaaagcatctccaactctgagtctggccctcggggagtgcatttcattttcaacaaggaaaacttctaacttgtctcttccatgaggaaataaatgtgggttgtgctgccaaatgctcaaataatgctaattgataatataaataccccctgcttaaaaatggacaaaaagaaactataatgtaatggttttcccttaaaggaatgtcaaagattgtttgatagtgataagttacatttatgtggagctctatgg

SEQ ID NO: 8398 - DNA, 1713 bp, Artificial Sequence
  derived and/or modified sequence
atgggcaactgggccgtgaacgagggcctgagcatcttcgtgatcctggtgtggctgggcctgaacgtgttcctgttcgtgtggtactacagagtgtacgacatcccccccaagttcttctacaccagaaagctgctgggcagcgccctggccctggccagagcccccgccgcctgcctgaacttcaactgcatgctgatcctgctgcccgtgtgcagaaacctgctgagcttcctgagaggcagcagcgcctgctgcagcaccagagtgagaagacagctggacagaaacctgaccttccacaagatggtggcctggatgatcgccctgcacagcgccatccacaccatcgcccacctgttcaacgtggagtggtgcgtgaacgccagagtgaacaacagcgacccctacagcgtggccctgagcgagctgggcgacagacagaacgagagctacctgaacttcgccagaaagagaatcaagaaccccgagggcggcctgtacctggccgtgaccctgctggccggcatcaccggcgtggtgatcaccctgtgcctgatcctgatcatcaccagcagcaccaagaccatcagaagaagctacttcgaggtgttctggtacacccaccacctgttcgtgatcttcttcatcggcctggccatccacggcgccgagagaatcgtgagaggccagaccgccgagagcctggccgtgcacaacatcaccgtgtgcgagcagaagatcagcgagtggggcaagatcaaggagtgccccatcccccagttcgccggcaacccccccatgacctggaagtggatcgtgggccccatgttcctgtacctgtgcgagagactggtgagattctggagaagccagcagaaggtggtgatcaccaaggtggtgacccaccccttcaagaccatcgagctgcagatgaagaagaagggcttcaagatggaggtgggccagtacatcttcgtgaagtgccccaaggtgagcaagctggagtggcaccccttcaccctgaccagcgcccccgaggaggacttcttcagcatccacatcagaatcgtgggcgactggaccgagggcctgttcaacgcctgcggctgcgacaagcaggagttccaggacgcctggaagctgcccaagatcgccgtggacggccccttcggcaccgccagcgaggacgtgttcagctacgaggtggtgatgctggtgggcgccggcatcggcgtgacccccttcgccagcatcctgaagagcgtgtggtacaagtactgcaacaacgccaccaacctgaagctgaagaagatctacttctactggctgtgcagagacacccacgccttcgagtggttcgccgacctgctgcagctgctggagagccagatgcaggagagaaacaacgccggcttcctgagctacaacatctacctgaccggctgggacgagagccaggccaaccacttcgccgtgcaccacgacgaggagaaggacgtgatcaccggcctgaagcagaagaccctgtacggcagacccaactgggacaacgagttcaagaccatcgccagccagcaccccaacaccagaatcggcgtgttcctgtgcggccccgaggccctggccgagaccctgagcaagcagagcatcagcaacagcgagagcggccccagaggcgtgcacttcatcttcaacaaggagaacttctag

SEQ ID NO: 8399 - DNA, 1617 bp, Artificial Sequence
  derived and/or modified sequence
atgggcaactgggccgtgaacgagggcctgagcatcttcgtgatcagcgccctggccctggccagagcccccgccgcctgcctgaacttcaactgcatgctgatcctgctgcccgtgtgcagaaacctgctgagcttcctgagaggcagcagcgcctgctgcagcaccagagtgagaagacagctggacagaaacctgaccttccacaagatggtggcctggatgatcgccctgcacagcgccatccacaccatcgcccacctgttcaacgtggagtggtgcgtgaacgccagagtgaacaacagcgacccctacagcgtggccctgagcgagctgggcgacagacagaacgagagctacctgaacttcgccagaaagagaatcaagaaccccgagggcggcctgtacctggccgtgaccctgctggccggcatcaccggcgtggtgatcaccctgtgcctgatcctgatcatcaccagcagcaccaagaccatcagaagaagctacttcgaggtgttctggtacacccaccacctgttcgtgatcttcttcatcggcctggccatccacggcgccgagagaatcgtgagaggccagaccgccgagagcctggccgtgcacaacatcaccgtgtgcgagcagaagatcagcgagtggggcaagatcaaggagtgccccatcccccagttcgccggcaacccccccatgacctggaagtggatcgtgggccccatgttcctgtacctgtgcgagagactggtgagattctggagaagccagcagaaggtggtgatcaccaaggtggtgacccaccccttcaagaccatcgagctgcagatgaagaagaagggcttcaagatggaggtgggccagtacatcttcgtgaagtgccccaaggtgagcaagctggagtggcaccccttcaccctgaccagcgcccccgaggaggacttcttcagcatccacatcagaatcgtgggcgactggaccgagggcctgttcaacgcctgcggctgcgacaagcaggagttccaggacgcctggaagctgcccaagatcgccgtggacggccccttcggcaccgccagcgaggacgtgttcagctacgaggtggtgatgctggtgggcgccggcatcggcgtgacccccttcgccagcatcctgaagagcgtgtggtacaagtactgcaacaacgccaccaacctgaagctgaagaagatctacttctactggctgtgcagagacacccacgccttcgagtggttcgccgacctgctgcagctgctggagagccagatgcaggagagaaacaacgccggcttcctgagctacaacatctacctgaccggctgggacgagagccaggccaaccacttcgccgtgcaccacgacgaggagaaggacgtgatcaccggcctgaagcagaagaccctgtacggcagacccaactgggacaacgagttcaagaccatcgccagccagcaccccaacaccagaatcggcgtgttcctgtgcggccccgaggccctggccgagaccctgagcaagcagagcatcagcaacagcgagagcggccccagaggcgtgcacttcatcttcaacaaggagaacttctag

SEQ ID NO: 8400 - protein, 301 aa, Artificial Sequence
  derived and/or modified sequence
MGAQLSTLGHMVLFPVWFLYSLLMKLFQRSTPAITLESPDIKYPLRLIDREIISHDTRRFRFALPSPQHILGLPVGQHIYLSARIDGNLVVRPYTPISSDDDKGFVDLVIKVYFKDTHPKFPAGGKMSQYLESMQIGDTIEFRGPSGLLVYQGKGKFAIRPDKKSNPIIRTVKSVGMIAGGTGITPMLQVIRAIMKDPDDHTVCHLLFANQTEKDILLRPELEELRNKHSARFKLWYTLDRAPEAWDYGQGFVNEEMIRDHLPPPEEEPLVLMCGPPPMIQYACLPNLDHVGHPTERCFVF

SEQ ID NO: 8401 - DNA, 906 bp, Artificial Sequence
  derived and/or modified sequence
atgggggcccagttaagcactcttggacacatggtcctgttccctgtatggtttctctattctcttctaatgaagctttttcagagaagcactcccgccatcacactggagagtcctgatattaagtatcccctgaggctaattgatcgagagatcatctctcacgacacccggcggttcaggttcgccctcccctccccccagcatatactgggtttaccagtgggacagcacatatacctgtcagcacggatcgatggcaatcttgtggtgagaccctatacgccaattagtagcgatgacgataagggattcgtggacttggtcattaaagtctattttaaggacacacacccaaagttcccagctggaggcaagatgagccagtatctggaaagcatgcagattggtgatacaatcgagttccgcggtccatcagggcttctggtatatcaaggcaaaggaaagtttgccataaggccagataagaaaagtaatcctataatccgtaccgtgaagtccgtcggcatgatcgcaggggggactggcattacaccgatgcttcaggtaattcgagccatcatgaaggaccctgatgatcatactgtttgccacttactgtttgcgaatcaaaccgagaaggatattctgctccggccggaacttgaagagctgcgcaataagcattccgccagattcaagctttggtatacattggatcgggcacccgaggcctgggattacggtcagggattcgtgaatgaggagatgatcagagatcacctgcctcctcctgaggaagagcctttggtgttgatgtgcggccctccgcccatgatacagtacgcatgccttcctaacctggaccatgtaggtcaccctaccgaaagatgcttcgtgttttag

SEQ ID NO: 8402 - DNA, 906 bp, Artificial Sequence
  derived and/or modified sequence
atgggcgcccagctgagcaccctgggccacatggtgctcttccctgtgtggttcctgtacagcctgctgatgaagctgttccagaggagcaccccagccatcaccctggagagcccagacatcaagtaccccctgcggctgattgaccgggagatcatcagccatgacacccggcgcttccgctttgccctgcccagcccccagcacatcctgggcctgcctgtgggccagcacatctacctgagcgccagaattgatggcaacctggtggtgcggccctacacccccatcagcagtgatgatgacaagggctttgtggacctggtgatcaaggtgtacttcaaggacacccaccccaagtttcctgctgggggcaagatgagccagtacctggagagcatgcagatcggggacaccatcgagttccggggccccagcggcctgctggtgtaccagggcaagggcaagtttgccatccggccagacaagaagagcaaccccatcatcagaacagtgaagtctgtgggcatgattgctgggggcaccggcatcacccccatgctgcaggtgatccgggccatcatgaaggaccctgatgaccacacagtgtgccacctgctgtttgccaaccagacagagaaggacatcctgctgcggcctgagctggaggagctgaggaacaagcacagcgcccgcttcaagctgtggtacaccctggaccgggcccctgaggcctgggactatggccagggctttgtgaatgaggagatgatccgggaccacctgcccccacctgaggaggagcccctggtgctgatgtgtggccccccacccatgatccagtatgcctgcctgcccaacctggaccacgtgggccaccccacagagcgctgctttgtgttctag

SEQ ID NO: 8403 - DNA, 906 bp, Artificial Sequence
  derived and/or modified sequence
atgggcgcccagctgagcaccctgggccacatggtgctgttccccgtctggttcctctatagcctgcttatgaagctgtttcagcggagcacccccgcgatcactcttgagtctccagatattaaataccctctccggctgatagatagagaaattatcagtcatgacacaaggcgctttcgctttgctttgcctagtccacagcacattctaggtctccctgttggccaacacatctacctttcggcacgaattgacggcaacttagtggtcagaccctacacgccaatttctagtgacgatgataagggattcgttgatttagtgattaaagtctactttaaggacactcaccctaagtttcccgctggtggcaagatgtcacaataccttgaaagcatgcagattggcgatacaatcgagttcagggggccatctggcctgctcgtctaccagggcaagggtaaattcgctattaggcccgacaagaagagtaaccctatcatccgtaccgtgaaatcagtagggatgatagccggagggactggtattacacctatgttgcaggtgattagagcaattatgaaggatcccgacgatcacactgtatgtcatctgctctttgcgaaccagacagagaaagatatcctgctgaggcccgaattagaggagttgagaaacaagcattctgccagattcaagttatggtatacactcgacagggccccagaggcctgggattacggacagggcttcgtaaacgaggagatgattcgcgatcaccttccgccaccagaagaagaaccacttgtgctgatgtgcgggccgccccccatgattcagtatgcttgtctgccgaatctggatcacgtgggacatcctaccgaaaggtgttttgtgttttag

SEQ ID NO: 8404 - DNA, 906 bp, Artificial Sequence
  derived and/or modified sequence
atgggcgcacagctgtcaaccctgggccacatggtcctcttccccgtctggttcctctattctcttctcatgaagctctttcagcggagcacccccgcaatcacactggaatcccctgacatcaaataccctctgaggctgattgaccgagagataatcagccatgacaccaggagattccggtttgccctaccgagcccccagcatatcctgggactgccagtgggacagcacatctatctgagcgccaggattgatgggaatctcgtcgtgaggccttatactcccataagttccgatgatgacaaagggtttgtggacctggtgattaaggtatacttcaaggacacacaccccaaattccccgctgggggaaaaatgtctcagtaccttgagagtatgcagattggcgacacaatagagttcaggggaccaagcggattgctcgtgtaccagggaaagggaaagtttgcgataagacctgacaaaaagagcaatcccatcattaggaccgtgaaatccgtaggaatgatcgccggtgggacaggcataacgcctatgctacaggtcatcagagctataatgaaagatcccgatgatcacactgtgtgtcacttgctgtttgcgaatcaaacggagaaggatattctcttacgccctgagctggaggagttgagaaacaagcatagtgcccgatttaagctgtggtacacactggatagagcaccagaggcctgggattatgggcagggatttgtaaacgaggaaatgatcagggatcacctgccaccccctgaggaggagccactcgtgctgatgtgcgggccacccccaatgattcagtacgcctgcctgcccaacctcgatcacgttggccacccaactgaacgatgcttcgttttctag

SEQ ID NO: 8405 - DNA, 2124 bp, Artificial Sequence
  derived and/or modified sequence
gaggccaccgtcccgcgcggggcagcacagcggcgggagagctcggagcgcagagggccgcatccccagttcccagtctccatccccggcagaagcaggcggagcgacccggtccccgcccccgcgcccgccccgccccgcgcgcccgcctggcccctcggccccgcccctgctccggagtgacgcgggcccgggcgcgacggtctcggcggcggcggcggcggcgacagagcgagcgcggcgcggggccaccatgggggcccagctcagcacgttgggccatatggtgctcttcccagtctggttcctgtacagtctgctcatgaagctgttccagcgctccacgccagccatcaccctcgagagcccggacatcaagtacccgctgcggctcatcgaccgggagatcatcagccatgacacccggcgcttccgctttgccctgccgtcaccccagcacatcctgggcctccctgtcggccagcacatctacctctcggctcgaattgatggaaacctggtcgtccggccctatacacccatctccagcgatgatgacaagggcttcgtggacctggtcatcaaggtttacttcaaggacacccatcccaagtttcccgctggagggaagatgtctcagtacctggagagcatgcagattggagacaccattgagttccggggccccagtgggctgctggtctaccagggcaaagggaagttcgccatccgacctgacaaaaagtccaaccctatcatcaggacagtgaagtctgtgggcatgatcgcgggagggacaggcatcaccccgatgctgcaggtgatccgcgccatcatgaaggaccctgatgaccacactgtgtgccacctgctctttgccaaccagaccgagaaggacatcctgctgcgacctgagctggaggaactcaggaacaaacattctgcacgcttcaagctctggtacacgctggacagagcccctgaagcctgggactacggccagggcttcgtgaatgaggagatgatccgggaccaccttccacccccagaggaggagccgctggtgctgatgtgtggccccccacccatgatccagtacgcctgccttcccaacctggaccacgtgggccaccccacggagcgctgcttcgtcttctgagggccgggcacggtcacacggccacccgccccgcgcaccccacgccctgttcacgctcacccagtcacctccccacatcgcacactggggccccgggttcagcctggcctgcccgtgccctggtgaatcacctggctgagcagttcccctggagccccttcgggagcagggctgtgtcccagatgggccacggctgagccttcagagtacgtcctgcctggcacttactggtccttaccagagacgcccagccccatccctgtcctcatgacccctcgtccaccccccacacacactataaggctgagggctgccagcagccccgtctgcccaccattcccggccgtggaccatagtcgggatgtcagcagacacacatgggcagcccaaagctgcaggtgccagggcccaccccagcctcgcctgtcacccccactcccgcctcagggccaggcccaggcctcaccacctgacgctgcatgagacattgacaccagaaagccctcttgggggcactgctccctaccccagggccctggccagccgggagcttggctctcctctggctagagtgggaagagggggctggccatggggccctcccagaacctcagcatttccttccagcccatccaaacactgaggcagccttggggaaccccgagctggggggttggcagcccactgcaccgcctcagggttttggggtcctgggctggggccaccatccctgatggcagaactcccacaaccacatgtatttattcctctgtcctaaaccgtcccctccttccctcacccccagcacagggggattctgagcagtgcctcttgtctgagggacatatcagtgacctcgacgttgcctttagactacagttgtgttagcctcttgcgtattggctttttcagagtcatttatgagcagaaaaaaaaaaagtaaaactttgctaatattaaccctt

SEQ ID NO: 8406 - DNA, 2922 bp, Artificial Sequence
  derived and/or modified sequence
agccacactgggaaaacattggagcttggtctgccatcctgaactgtggttcccctgcctcccagcccggctgtgagtgctcagcgaccctgacaggctgacagttgggccatatggtgctcttcccagtctggttcctgtacagtctgctcatgaagctgttccagcgctccacgccagccatcaccctcgagagcccggacatcaagtacccgctgcggctcatcgaccgggagatcatcagccatgacacccggcgcttccgctttgccctgccgtcaccccagcacatcctgggcctccctgtcggccagcacatctacctctcggctcgaattgatggaaacctggtcgtccggccctatacacccatctccagcgatgatgacaagggcttcgtggacctggtcatcaaggtttacttcaaggacacccatcccaagtttcccgctggagggaagatgtctcagtacctggagagcatgcagattggagacaccattgagttccggggccccagtgggctgctggtctaccagggcaaagggaagttcgccatccgacctgacaaaaagtccaaccctatcatcaggacagtgaagtctgtgggcatgatcgcgggagggacaggcatcaccccgatgctgcaggtgatccgcgccatcatgaaggaccctgatgaccacactgtgtgccacctgctctttgccaaccagaccgagaaggacatcctgctgcgacctgagctggaggaactcaggaacaaacattctgcacgcttcaagctctggtacacgctggacagagcccctgaagcctgggactacggccagggcttcgtgaatgaggagatgatccgggaccaccttccacccccagaggaggagccgctggtgctgatgtgtggccccccacccatgatccagtacgcctgccttcccaacctggaccacgtgggccaccccacggagcgctgcttcgtcttctgagggccgggcacggtcacacggccacccgccccgcgcaccccacgccctgttcacgctcacccagtcacctccccacatcgcacactggggccccgggttcagcctggcctgcccgtgccctggtgaatcacctggctgagcagttcccctggagccccttcgggagcagggctgtgtcccagatgggccacggctgagccttcagagtacgtcctgcctggcacttactggtccttaccagagacgcccagccccatccctgtcctcatgacccctcgtccaccccccacacacactataaggctgagggctgccagcagccccgtctgcccaccattcccggccgtggaccatagtcgggatgtcagcagacacacatgggcagcccaaagctgcaggtgccagggcccaccccagcctcgcctgtcacccccactcccgcctcagggccaggcccaggcctcaccacctgacgctgcatgagacattgacaccagaaagccctcttgggggcactgctccctaccccagggccctggccagccgggagcttggctctcctctggctagagtgggaagagggggctggccatggggccctcccagaacctcagcatttccttccagcccatccaaacactgaggcagccttggggaaccccgagctggggggttggcagcccactgcaccgcctcagggttttggggtcctgggctggggccaccatccctgatggcagaactcccacaaccacatgtatttattcctctgtcctaaaccgtcccctccttccctcacccccagcacagggggattctgagcagtgcctcttgtctgagggacatatcagtgacctcgacgttgcctttagactacagttgtgttagcctcttgcgtattggctttttcagagtcatttatgagcagaaaaaaaaaaagtaaaactttgctaatattaacccttctctagctcctcgagggtctgtgacctgcaacacaaggggtggggtcaggaaagggctggggaagacctagcattttttttttcttttttttttttttttgagacggagtctccctttgtcacccaggctggagtggcatgatctcagctcactacaacctccacctctcgggttcaagcgattctcctgcctcagcctcccgagtagctgggactaaaagtgcccaccaccacacccagctagtttttgtatttttttttttttttttttgagacggagtctcgctctgtcgcccaggctggagtgcagtggcgggatctcggctcactgcaagctccgcctcccgggttcacgccattctcctgcctcagcctcccaagtagctgggactacaggcgcccgccactacgcccggctaattttttgtatttttagtagagacggggtttcaccgttttagccgggatggtctcgatctcctgacctcgtgatccgcccgcctcggcctcccaaagtgctgggattacaggcgtgagccactgcgcccggctccagcatttatttctgatgtatctttgtggtagaaaatttggaaagtgcagagaagtatacacaggaagaaaaattcccaacccccagaggcaaaccagctgaaaccacgcaaccccagtcaccccaatgcaccgcgaggctgctgcctcctgtcagggtcagatgagcctcgaggctcaggaaagtcagaggatgccatctgcatggtggtaaattacagaggtgatgaggcaaggtgggtgtggggctgttcttaaaacggggcagcaggaaggccccaaggagatggatttgggctgggacgggaagagagagctggccatgctggggtgggtgggtgttcaaatggtggaaacagcagacgcaaaggccctgccgttggaaccagcttgtggaataaactttcagaaacaga

SEQ ID NO: 8407 - DNA, 675 bp, Artificial Sequence
  derived and/or modified sequence
atctaagacatgcaggccccatgggaggcctctcccaacactttgtgggatccaggccaggggttggccctggagtctgccagccacactgggaaaacattggagcttggtctgccatcctgaactgtggttcccctgcctcccagcccggctgtgagtgctcagcgaccctgacaggctgacagttgggccatatggtgctcttcccagtctggttcctgtacagtctgctcatgaagctgttccagcgctccacgccagccatcaccctcgagagcccggacatcaagtacccgctgcggctcatcgaccgggagatcatcagccatgacacccggcgcttccgctttgccctgccgtcaccccagcacatcctgggcctccctgtcggccagcacatctacctctcggctcgaattgatggaaacctggtcgtccggccctatacacccatctccagcgatgatgacaagggcttcgtggacctggtcatcaaggtttacttcaaggacacccatcccaagtttcccgctggagggaagatgtctcagtacctggagagcatgcagattggagacaccattgagttccggggccccagtgggctgctggtctaccagggcaaagggaagttcgccatccgacctgacaaaaagtccaaccctatcatcagga

SEQ ID NO: 8408 - DNA, 906 bp, Artificial Sequence
  derived and/or modified sequence
atgggcgcccagctgagcaccctgggccacatggtgctgttccccgtgtggttcctgtacagcctgctgatgaagctgttccagagaagcacccccgccatcaccctggagagccccgacatcaagtaccccctgagactgatcgacagagagatcatcagccacgacaccagaagattcagattcgccctgcccagcccccagcacatcctgggcctgcccgtgggccagcacatctacctgagcgccagaatcgacggcaacctggtggtgagaccctacacccccatcagcagcgacgacgacaagggcttcgtggacctggtgatcaaggtgtacttcaaggacacccaccccaagttccccgccggcggcaagatgagccagtacctggagagcatgcagatcggcgacaccatcgagttcagaggccccagcggcctgctggtgtaccagggcaagggcaagttcgccatcagacccgacaagaagagcaaccccatcatcagaaccgtgaagagcgtgggcatgatcgccggcggcaccggcatcacccccatgctgcaggtgatcagagccatcatgaaggaccccgacgaccacaccgtgtgccacctgctgttcgccaaccagaccgagaaggacatcctgctgagacccgagctggaggagctgagaaacaagcacagcgccagattcaagctgtggtacaccctggacagagcccccgaggcctgggactacggccagggcttcgtgaacgaggagatgatcagagaccacctgcccccccccgaggaggagcccctggtgctgatgtgcggccccccccccatgatccagtacgcctgcctgcccaacctggaccacgtgggccaccccaccgagagatgcttcgtgttctag

SEQ ID NO: 8409 - protein, 127 aa, Artificial Sequence
  derived and/or modified sequence
MKLNVDGLLVYFPYDYIYPEQFSYMRELKRTLDAKGHGVLEMPSGTGKTVSLLALIMAYQRAYPLEVTKLIYCSRTVPEIEKVIEELRKLLNFYEKQEGEKLPFLGLALSSRKNLCIHPETTSASTP

SEQ ID NO: 8410 - protein, 736 aa, Artificial Sequence
  derived and/or modified sequence
MRELKRTLDAKGHGVLEMPSGTGKTVSLLALIMAYQRAYPLEVTKLIYCSRTVPEIEKVIEELRKLLNFYEKQEGEKLPFLGLALSSRKNLCIHPEVTPLRFGKDVDGKCHSLTASYVRAQYQHDTSLPHCRFYEEFDAHGREVPLPAGIYNLDDLKALGRRQGWCPYFLARYSILHANVVVYSYHYLLDPKIADLVSKELARKAVVVFDEAHNIDNVCIDSMSVNLTRRTLDRCQGNLETLQKTVLRIKETDEQRLRDEYRRLVEGLREASAARETDAHLANPVLPDEVLQEAVPGSIRTAEHFLGFLRRLLEYVKWRLRVQHVVQESPPAFLSGLAQRVCIQRKPLRFCAERLRSLLHTLEITDLADFSPLTLLANFATLVSTYAKGFTIIIEPFDDRTPTIANPILHFSCMDASLAIKPVFERFQSVIITSGTLSPLDIYPKILDFHPVTMATFTMTLARVCLCPMIIGRGNDQVAISSKFETREDIAVIRNYGNLLLEMSAVVPDGIVAFFTSYQYMESTVASWYEQGILENIQRNKLLFIETQDGAETSVALEKYQEACENGRGAILLSVARGKVSEGIDFVHHYGRAVIMFGVPYVYTQSRILKARLEYLRDQFQIRENDFLTFDAMRHAAQCVGRAIRGKTDYGLMVFADKRFARGDKRGKLPRWIQEHLTDANLNLTVDEGVQVAKYFLRQMAQPFHREDQLGLSLLSLEQLESEETLKRIEQIAQQL

SEQ ID NO: 8411 - protein, 760 aa, Artificial Sequence
  derived and/or modified sequence
MKLNVDGLLVYFPYDYIYPEQFSYMRELKRTLDAKGHGVLEMPSGTGKTVSLLALIMAYQRAYPLEVTKLIYCSRTVPEIEKVIEELRKLLNFYEKQEGEKLPFLGLALSSRKNLCIHPEVTPLRFGKDVDGKCHSLTASYVRAQYQHDTSLPHCRFYEEFDAHGREVPLPAGIYNLDDLKALGRRQGWCPYFLARYSILHANVVVYSYHYLLDPKIADLVSKELARKAVVVFDEAHNIDNVCIDSMSVNLTRRTLDRCQGNLETLQKTVLRIKETDEQRLRDEYRRLVEGLREASAARETDAHLANPVLPDEVLQEAVPGSIRTAEHFLGFLRRLLEYVKWRLRVQHVVQESPPAFLSGLAQRVCIQRKPLRFCAERLRSLLHTLEITDLADFSPLTLLANFATLVSTYAKGFTIIIEPFDDRTPTIANPILHFSCMDASLAIKPVFERFQSVIITSGTLSPLDIYPKILDFHPVTMATFTMTLARVCLCPMIIGRGNDQVAISSKFETREDIAVIRNYGNLLLEMSAVVPDGIVAFFTSYQYMESTVASWYEQGILENIQRNKLLFIETQDGAETSVALEKYQEACENGRGAILLSVARGKVSEGIDFVHHYGRAVIMFGVPYVYTQSRILKARLEYLRDQFQIRENDFLTFDAMRHAAQCVGRAIRGKTDYGLMVFADKRFARGDKRGKLPRWIQEHLTDANLNLTVDEGVQVAKYFLRQMAQPFHREDQLGLSLLSLEQLESEETLKRIEQIAQQL

SEQ ID NO: 8412 - DNA, 2211 bp, Artificial Sequence
  derived and/or modified sequence
atgagagagctgaagagaaccctggacgccaagggccacggcgtgctggagatgcccagcggcaccggcaagaccgtgagcctgctggccctgatcatggcctaccagagagcctaccccctggaggtgaccaagctgatctactgcagcagaaccgtgcccgagatcgagaaggtgatcgaggagctgagaaagctgctgaacttctacgagaagcaggagggcgagaagctgcccttcctgggcctggccctgagcagcagaaagaacctgtgcatccaccccgaggtgacccccctgagattcggcaaggacgtggacggcaagtgccacagcctgaccgccagctacgtgagagcccagtaccagcacgacaccagcctgccccactgcagattctacgaggagttcgacgcccacggcagagaggtgcccctgcccgccggcatctacaacctggacgacctgaaggccctgggcagaagacagggctggtgcccctacttcctggccagatacagcatcctgcacgccaacgtggtggtgtacagctaccactacctgctggaccccaagatcgccgacctggtgagcaaggagctggccagaaaggccgtggtggtgttcgacgaggcccacaacatcgacaacgtgtgcatcgacagcatgagcgtgaacctgaccagaagaaccctggacagatgccagggcaacctggagaccctgcagaagaccgtgctgagaatcaaggagaccgacgagcagagactgagagacgagtacagaagactggtggagggcctgagagaggccagcgccgccagagagaccgacgcccacctggccaaccccgtgctgcccgacgaggtgctgcaggaggccgtgcccggcagcatcagaaccgccgagcacttcctgggcttcctgagaagactgctggagtacgtgaagtggagactgagagtgcagcacgtggtgcaggagagcccccccgccttcctgagcggcctggcccagagagtgtgcatccagagaaagcccctgagattctgcgccgagagactgagaagcctgctgcacaccctggagatcaccgacctggccgacttcagccccctgaccctgctggccaacttcgccaccctggtgagcacctacgccaagggcttcaccatcatcatcgagcccttcgacgacagaacccccaccatcgccaaccccatcctgcacttcagctgcatggacgccagcctggccatcaagcccgtgttcgagagattccagagcgtgatcatcaccagcggcaccctgagccccctggacatctaccccaagatcctggacttccaccccgtgaccatggccaccttcaccatgaccctggccagagtgtgcctgtgccccatgatcatcggcagaggcaacgaccaggtggccatcagcagcaagttcgagaccagagaggacatcgccgtgatcagaaactacggcaacctgctgctggagatgagcgccgtggtgcccgacggcatcgtggccttcttcaccagctaccagtacatggagagcaccgtggccagctggtacgagcagggcatcctggagaacatccagagaaacaagctgctgttcatcgagacccaggacggcgccgagaccagcgtggccctggagaagtaccaggaggcctgcgagaacggcagaggcgccatcctgctgagcgtggccagaggcaaggtgagcgagggcatcgacttcgtgcaccactacggcagagccgtgatcatgttcggcgtgccctacgtgtacacccagagcagaatcctgaaggccagactggagtacctgagagaccagttccagatcagagagaacgacttcctgaccttcgacgccatgagacacgccgcccagtgcgtgggcagagccatcagaggcaagaccgactacggcctgatggtgttcgccgacaagagattcgccagaggcgacaagagaggcaagctgcccagatggatccaggagcacctgaccgacgccaacctgaacctgaccgtggacgagggcgtgcaggtggccaagtacttcctgagacagatggcccagcccttccacagagaggaccagctgggcctgagcctgctgagcctggagcagctggagagcgaggagaccctgaagagaatcgagcagatcgcccagcagctgtag

SEQ ID NO: 8413 - DNA, 2283 bp, Artificial Sequence
  derived and/or modified sequence
atgaagctgaacgtggacggcctgctggtgtacttcccctacgactacatctaccccgagcagttcagctacatgagagagctgaagagaaccctggacgccaagggccacggcgtgctggagatgcccagcggcaccggcaagaccgtgagcctgctggccctgatcatggcctaccagagagcctaccccctggaggtgaccaagctgatctactgcagcagaaccgtgcccgagatcgagaaggtgatcgaggagctgagaaagctgctgaacttctacgagaagcaggagggcgagaagctgcccttcctgggcctggccctgagcagcagaaagaacctgtgcatccaccccgaggtgacccccctgagattcggcaaggacgtggacggcaagtgccacagcctgaccgccagctacgtgagagcccagtaccagcacgacaccagcctgccccactgcagattctacgaggagttcgacgcccacggcagagaggtgcccctgcccgccggcatctacaacctggacgacctgaaggccctgggcagaagacagggctggtgcccctacttcctggccagatacagcatcctgcacgccaacgtggtggtgtacagctaccactacctgctggaccccaagatcgccgacctggtgagcaaggagctggccagaaaggccgtggtggtgttcgacgaggcccacaacatcgacaacgtgtgcatcgacagcatgagcgtgaacctgaccagaagaaccctggacagatgccagggcaacctggagaccctgcagaagaccgtgctgagaatcaaggagaccgacgagcagagactgagagacgagtacagaagactggtggagggcctgagagaggccagcgccgccagagagaccgacgcccacctggccaaccccgtgctgcccgacgaggtgctgcaggaggccgtgcccggcagcatcagaaccgccgagcacttcctgggcttcctgagaagactgctggagtacgtgaagtggagactgagagtgcagcacgtggtgcaggagagcccccccgccttcctgagcggcctggcccagagagtgtgcatccagagaaagcccctgagattctgcgccgagagactgagaagcctgctgcacaccctggagatcaccgacctggccgacttcagccccctgaccctgctggccaacttcgccaccctggtgagcacctacgccaagggcttcaccatcatcatcgagcccttcgacgacagaacccccaccatcgccaaccccatcctgcacttcagctgcatggacgccagcctggccatcaagcccgtgttcgagagattccagagcgtgatcatcaccagcggcaccctgagccccctggacatctaccccaagatcctggacttccaccccgtgaccatggccaccttcaccatgaccctggccagagtgtgcctgtgccccatgatcatcggcagaggcaacgaccaggtggccatcagcagcaagttcgagaccagagaggacatcgccgtgatcagaaactacggcaacctgctgctggagatgagcgccgtggtgcccgacggcatcgtggccttcttcaccagctaccagtacatggagagcaccgtggccagctggtacgagcagggcatcctggagaacatccagagaaacaagctgctgttcatcgagacccaggacggcgccgagaccagcgtggccctggagaagtaccaggaggcctgcgagaacggcagaggcgccatcctgctgagcgtggccagaggcaaggtgagcgagggcatcgacttcgtgcaccactacggcagagccgtgatcatgttcggcgtgccctacgtgtacacccagagcagaatcctgaaggccagactggagtacctgagagaccagttccagatcagagagaacgacttcctgaccttcgacgccatgagacacgccgcccagtgcgtgggcagagccatcagaggcaagaccgactacggcctgatggtgttcgccgacaagagattcgccagaggcgacaagagaggcaagctgcccagatggatccaggagcacctgaccgacgccaacctgaacctgaccgtggacgagggcgtgcaggtggccaagtacttcctgagacagatggcccagcccttccacagagaggaccagctgggcctgagcctgctgagcctggagcagctggagagcgaggagaccctgaagagaatcgagcagatcgcccagcagctgtag

SEQ ID NO: 8414 - DNA, 2211 bp, Artificial Sequence
  derived and/or modified sequence
atgcgagagctgaagagaaccttggacgctaagggccacggcgtgctagagatgccttccggcacaggaaaaacagtgtccctgctggcgctgattatggcctatcagagggcatatccgctggaagtgactaagctgatctattgctcacggacagtgcctgagatcgagaaggttatcgaagagctccgcaaactactgaatttttacgagaagcaggagggggagaaactaccattcctcggcttggcactgagtagccgcaagaatctctgcattcacccggaagtgactccactacgctttgggaaggacgtggatgggaaatgccacagcctcactgcctcgtatgtcagagcacagtaccagcacgacacatctctgccccactgccgcttttatgaagaattcgacgcgcacggtagagaagtcccccttccagctggaatctataacttagacgacctcaaggccctggggcgccggcagggatggtgcccatacttcctggctcggtacagtattctgcacgccaatgtggtggtctactcataccactacttgctggatccaaagatcgccgatctggtgagcaaagagctcgcccgcaaggctgtagtggtttttgacgaggcgcataatattgacaatgtgtgtatagattccatgagtgtgaatctcactcgcaggacccttgaccgatgtcagggtaatctggaaactctacagaagaccgtcttgcgaataaaggagaccgacgagcagcgcctcagagatgagtataggagattggttgagggcctccgggaggcatctgccgctcgcgagaccgacgcccatttggcaaatcccgtgctgccagatgaggtgctccaggaagctgtccccggatccatacgcacagccgaacattttctggggttcttgagaaggctactggagtacgtgaaatggaggctccgcgtgcagcatgttgtgcaggagtcgcctcctgctttcttgtccggactggcccagcgggtctgtatccaacggaaacctcttaggttctgtgccgagagactgcggtctctccttcataccttggaaatcactgacctggccgatttctcgccactgactctgctagcaaacttcgccacacttgtgagtacctacgcaaaagggttcactatcatcatagagccatttgacgatcggacgcctacaatagccaatcccatcctccatttctcctgtatggacgcctcacttgcgatcaagccagtgtttgagcgatttcagagcgtaatcatcacatctggaacactgtcacccctggatatctatcctaaaatccttgactttcatccagtcaccatggctacatttacaatgaccttagctcgggtctgcctatgccctatgattatcgggaggggaaatgaccaggtggccatctcaagtaagttcgagacccgggaggacatcgcagttattcggaactacggaaaccttctactcgagatgtctgcagtcgtacctgatgggattgtggcctttttcacatcataccagtatatggagtcaactgtggcttcatggtacgagcaaggcattctggagaacatacagcgcaataaacttctcttcattgaaacacaggacggcgccgaaacttcagtggccctggaaaaataccaggaagcgtgtgaaaacggacggggtgcaattttactcagcgttgcccggggtaaagttagtgagggaattgatttcgtccaccattacggacgagcagtgatcatgtttggggtgccatacgtttacacacaaagtaggattctcaaggcaaggcttgagtacctcagagatcagtttcagatacgggagaacgactttctcacatttgatgctatgagacacgctgcacagtgtgtcggaagggcgatcagaggaaagaccgactacggattaatggtttttgctgacaaacggttcgccaggggggacaaaagagggaagctgccccggtggatccaggagcatcttactgacgccaacctcaatttgaccgtggacgaaggagtgcaagtcgccaaatactttcttcgacagatggctcagccttttcatcgagaggatcagcttggactttctctgctttccctcgagcagctcgaatccgaagaaaccttgaaaaggatcgaacagatcgcccagcagctatag

SEQ ID NO: 8415 - DNA, 2283 bp, Artificial Sequence
  derived and/or modified sequence
atgaaactgaacgtcgacggattgctcgtgtattttccatatgactatatctaccccgaacagttctcatacatgcgagagcttaagcgcacactggatgccaaaggacatggggttctggaaatgcccagtggcacgggcaaaacagtctccctcctggcactcatcatggcctatcaaagggcctatcccctggaggttacgaaactaatttactgctctagaaccgtcccagaaattgagaaggtgatcgaagagctccgcaagctgctaaacttctatgaaaagcaggagggcgagaagctgccttttcttggactggcactttcaagccgaaagaatctgtgcatccacccagaagtgactccattacgatttggcaaggatgtggacggcaaatgtcacagtttgacagcttcgtacgtgcgtgctcagtaccagcatgatacttccctgccgcactgcaggttctatgaagaatttgatgcacacgggcgggaagtgcctctgccggccgggatttataatctggacgacttgaaagcccttgggcggcgccagggatggtgtccttacttcctggcaagatactccatccttcatgcaaacgtagtcgtctacagctatcactatctcctcgatcctaagatcgctgaccttgtctctaaagagttagcacggaaagccgtggtcgtcttcgacgaggcccacaatatcgacaatgtgtgcattgactctatgtccgtgaatctgacccgcaggaccctggacaggtgccagggcaatttggaaactctgcagaaaactgtactcagaatcaaggaaacagatgagcagcgcctgagagatgagtatcgtcgcttggtggagggtctacgtgaggccagcgccgctagggagactgatgcccatttagctaatcccgtcctgcccgacgaagtactgcaagaagccgttccgggatctatcagaaccgctgaacattttttaggtttcctaagacggttactagaatatgtgaagtggagattaagggtgcagcatgtcgtgcaagaatctcctcccgcattcctcagtggcctggcccaaagagtatgcatccagcggaagcctcttcgcttctgcgccgaaaggctaaggagcctgttacacacccttgaaatcactgacctggcagattttagccctctgacactcctggccaactttgccactctggtgagtacctacgctaaagggttcactataatcattgagcctttcgatgacagaacccctacaatcgctaatcctatcctgcactttagctgcatggacgcctcgctagcaatcaaacctgtgtttgagcgatttcaatctgttatcatcacaagtggaacactgtcccctctggacatatatccaaagatcctcgacttccatcctgtcacaatggccactttcacaatgactctcgcacgagtgtgtctgtgccccatgatcataggcagaggtaacgaccaagttgccatatcctcaaaattcgagacacgtgaagacatcgctgtaatccggaattatgggaatctcctccttgaaatgagcgctgtggtgccagacggaattgtggcatttttcacaagctatcagtatatggagagcacagtggcttcatggtacgaacaggggatacttgagaacattcagagaaacaaactcctgttcatagagacccaggacggcgcagagacatctgttgccttagagaagtaccaagaggcctgtgaaaatggcagaggggccattctgttgtcagtggcaagagggaaggtctctgagggcatagacttcgtgcatcattatggaagggctgtcatcatgttcggagtcccatacgtgtatacccagtcgaggatcctcaaggctcggctggagtaccttagagatcaattccagattagagaaaatgacttcctgactttcgacgctatgaggcatgctgcccaatgcgttggtcgcgccattcgaggtaagactgactatggcctgatggtgttcgctgacaaaaggtttgcaaggggcgacaaacgtgggaaactccctcggtggattcaggagcatctgaccgacgccaatcttaacctgactgtcgacgagggagtacaggttgccaaatattttttgaggcagatggcccagcccttccaccgggaggatcagctcggcctgagcctcttatccttggaacagctggagagcgaggaaaccctgaagaggatcgaacaaattgctcaacagctttag

SEQ ID NO: 8416 - DNA, 1300 bp, Artificial Sequence
  derived and/or modified sequence
ggccggcgccatgaagctcaacgtggacgggctcctggtctacttcccgtacgactacatctaccccgagcagttctcctacatgcgggagctcaaacgcacgctggacgccaagggtcatggagtcctggagatgccctcaggcaccgggaagacagtatccctgttggccctgatcatggcataccagagagcatatccgctggaggtgaccaaactcatctactgctcaagaactgtgccagagattgagaaggtgattgaagagcttcgaaagttgctcaacttctatgagaagcaggagggcgagaagctgccgtttctgggactggctctgagctcccgcaaaaacttgtgtattcaccctgaggtgacacccctgcgctttgggaaggacgtcgatgggaaatgccacagcctcacagcctcctatgtgcgggcgcagtaccagcatgacaccagcctgccccactgccgattctatgaggaatttgatgcccatgggcgtgaggtgcccctccccgctggcatctacaacctggatgacctgaaggccctggggcggcgccagggctggtgcccatacttccttgctcgatactcaatcctgcatgccaatgtggtggtttatagctaccactacctcctggaccccaagattgcagacctggtgtccaaggaactggcccgcaaggccgtcgtggtcttcgacgaggcccacaacattgacaacgtctgcatcgactccatgagcgtcaacctcacccgccggacccttgaccggtgccagggcaacctggagaccctgcagaagacggtgctcaggatcaaagagacagacgagcagcgcctgcgggacgagtaccggcgtctggtggaggggctgcgggaggccagcgccgcccgggagacggacgcccacctggccaaccccgtgctgcccgacgaagtgctgcaggaggcagtgcctggctccatccgcacggccgagcatttcctgggcttcctgaggcggctgctggagtacgtgaagtggcggctgcgtgtgcagcatgtggtgcaggagagcccgcccgccttcctgagcggcctggcccagcgcgtgtgcatccagcgcaagcccctcagattctgtgctgaacgcctccggtccctgctgcatactctggagatcaccgaccttgctgacttctccccgctcaccctccttgctaactttgccacccttgtcagcacctacgccaaaggccaggctcagcactgtggaagcagcaggaaccaaaaaagatctcatccctaa

SEQ ID NO: 8417 - DNA, 2982 bp, Artificial Sequence
  derived and/or modified sequence
gagaagggggctgggggtcgcgctcgctagcgggcgcggggggtcttgaagatggggtcatcggctcaacgtggacgggctcctggtctacttcccgtacgactacatctaccccgagcagttctcctacatgcgggagctcaaacgcacgctggacgccaagggtcatggagtcctggagatgccctcaggcaccgggaagacagtatccctgttggccctgatcatggcataccagagagcatatccgctggaggtgaccaaactcatctactgctcaagaactgtgccagagattgagaaggtgattgaagagcttcgaaagttgctcaacttctatgagaagcaggagggcgagaagctgccgtttctgggactggctctgagctcccgcaaaaacttgtgtattcaccctgaggtgacacccctgcgctttgggaaggacgtcgatgggaaatgccacagcctcacagcctcctatgtgcgggcgcagtaccagcatgacaccagcctgccccactgccgattctatgaggaatttgatgcccatgggcgtgaggtgcccctccccgctggcatctacaacctggatgacctgaaggccctggggcggcgccagggctggtgcccatacttccttgctcgatactcaatcctgcatgccaatgtggtggtttatagctaccactacctcctggaccccaagattgcagacctggtgtccaaggaactggcccgcaaggccgtcgtggtcttcgacgaggcccacaacattgacaacgtctgcatcgactccatgagcgtcaacctcacccgccggacccttgaccggtgccagggcaacctggagaccctgcagaagacggtgctcaggatcaaagagacagacgagcagcgcctgcgggacgagtaccggcgtctggtggaggggctgcgggaggccagcgccgcccgggagacggacgcccacctggccaaccccgtgctgcccgacgaagtgctgcaggaggcagtgcctggctccatccgcacggccgagcatttcctgggcttcctgaggcggctgctggagtacgtgaagtggcggctgcgtgtgcagcatgtggtgcaggagagcccgcccgccttcctgagcggcctggcccagcgcgtgtgcatccagcgcaagcccctcagattctgtgctgaacgcctccggtccctgctgcatactctggagatcaccgaccttgctgacttctccccgctcaccctccttgctaactttgccacccttgtcagcacctacgccaaaggcttcaccatcatcatcgagccctttgacgacagaaccccgaccattgccaaccccatcctgcacttcagctgcatggacgcctcgctggccatcaaacccgtatttgagcgtttccagtctgtcatcatcacatctgggacactgtccccgctggacatctaccccaagatcctggacttccaccccgtcaccatggcaaccttcaccatgacgctggcacgggtctgcctctgccctatgatcatcggccgtggcaatgaccaggtggccatcagctccaaatttgagacccgggaggatattgctgtgatccggaactatgggaacctcctgctggagatgtccgctgtggtccctgatggcatcgtggccttcttcaccagctaccagtacatggagagcaccgtggcctcctggtatgagcaggggatccttgagaacatccagaggaacaagctgctctttattgagacccaggatggtgccgaaaccagtgtcgccctggagaagtaccaggaggcctgcgagaatggccgcggggccatcctgctgtcagtggcccggggcaaagtgtccgagggaatcgactttgtgcaccactacgggcgggccgtcatcatgtttggcgtcccctacgtctacacacagagccgcattctcaaggcgcggctggaatacctgcgggaccagttccagattcgtgagaatgactttcttaccttcgatgccatgcgccacgcggcccagtgtgtgggtcgggccatcaggggcaagacggactacggcctcatggtctttgccgacaagcggtttgcccgtggggacaagcgggggaagctgccccgctggatccaggagcacctcacagatgccaacctcaacctgaccgtggacgagggtgtccaggtggccaagtacttcctgcggcagatggcacagcccttccaccgggaggatcagctgggcctgtccctgctcagcctggagcagctagaatcagaggagacgctgaagaggatagagcagattgctcagcagctctgagtggggcgggtggggccataaacggttcctggtgactcctgagtcttgcctggccctggttcccagcggcggtggtgctagaaggtcttatgaagtcaggtgacatttctcactgtcacgtccacagcctttaatcgcaggagaaggcagctatccaccaggtacccagaggcaagggggggccaggagatgatagaccccctctcaccccaccagcccatccctcctgcactgttcccaagaagctgcggccagcgcagttcactggacgttagtgggggctcaggtcctgggtgctggcgctgagggtccgaggggccttgtccaggtgccagctgggaaactggagacaggcacaggggatggttggaggggaggtgaggggcaagtgttacatccaccctccagctccaggtccagcctggcagccaactatccaaccccctcgcctctaccccaagtaaaacccatctttgctcctgtcctgggtctcttctgacaccaacccaccacctgctgactccaccactggcccgaccgccctgcctttgcctcatctctgcacctacccacatggcctcctctatttttgacccagatgtccccctcacctgagtcccaggagcccttggagcatccac

SEQ ID NO: 8418 - DNA, 3002 bp, Artificial Sequence
  derived and/or modified sequence
ggatgtccacgacccggcctctcgctgaatattcatgagggaggcgggtcgaccccgctgcacagtccggccggcgccatgaagctcaacgtggacgggctcctggtctacttcccgtacgactacatctaccccgagcagttctcctacatgcgggagctcaaacgcacgctggacgccaagggtcatggagtcctggagatgccctcaggcaccgggaagacagtatccctgttggccctgatcatggcataccagagagcatatccgctggaggtgaccaaactcatctactgctcaagaactgtgccagagattgagaaggtgattgaagagcttcgaaagttgctcaacttctatgagaagcaggagggcgagaagctgccgtttctgggactggctctgagctcccgcaaaaacttgtgtattcaccctgaggtgacacccctgcgctttgggaaggacgtcgatgggaaatgccacagcctcacagcctcctatgtgcgggcgcagtaccagcatgacaccagcctgccccactgccgattctatgaggaatttgatgcccatgggcgtgaggtgcccctccccgctggcatctacaacctggatgacctgaaggccctggggcggcgccagggctggtgcccatacttccttgctcgatactcaatcctgcatgccaatgtggtggtttatagctaccactacctcctggaccccaagattgcagacctggtgtccaaggaactggcccgcaaggccgtcgtggtcttcgacgaggcccacaacattgacaacgtctgcatcgactccatgagcgtcaacctcacccgccggacccttgaccggtgccagggcaacctggagaccctgcagaagacggtgctcaggatcaaagagacagacgagcagcgcctgcgggacgagtaccggcgtctggtggaggggctgcgggaggccagcgccgcccgggagacggacgcccacctggccaaccccgtgctgcccgacgaagtgctgcaggaggcagtgcctggctccatccgcacggccgagcatttcctgggcttcctgaggcggctgctggagtacgtgaagtggcggctgcgtgtgcagcatgtggtgcaggagagcccgcccgccttcctgagcggcctggcccagcgcgtgtgcatccagcgcaagcccctcagattctgtgctgaacgcctccggtccctgctgcatactctggagatcaccgaccttgctgacttctccccgctcaccctccttgctaactttgccacccttgtcagcacctacgccaaaggcttcaccatcatcatcgagccctttgacgacagaaccccgaccattgccaaccccatcctgcacttcagctgcatggacgcctcgctggccatcaaacccgtatttgagcgtttccagtctgtcatcatcacatctgggacactgtccccgctggacatctaccccaagatcctggacttccaccccgtcaccatggcaaccttcaccatgacgctggcacgggtctgcctctgccctatgatcatcggccgtggcaatgaccaggtggccatcagctccaaatttgagacccgggaggatattgctgtgatccggaactatgggaacctcctgctggagatgtccgctgtggtccctgatggcatcgtggccttcttcaccagctaccagtacatggagagcaccgtggcctcctggtatgagcaggggatccttgagaacatccagaggaacaagctgctctttattgagacccaggatggtgccgaaaccagtgtcgccctggagaagtaccaggaggcctgcgagaatggccgcggggccatcctgctgtcagtggcccggggcaaagtgtccgagggaatcgactttgtgcaccactacgggcgggccgtcatcatgtttggcgtcccctacgtctacacacagagccgcattctcaaggcgcggctggaatacctgcgggaccagttccagattcgtgagaatgactttcttaccttcgatgccatgcgccacgcggcccagtgtgtgggtcgggccatcaggggcaagacggactacggcctcatggtctttgccgacaagcggtttgcccgtggggacaagcgggggaagctgccccgctggatccaggagcacctcacagatgccaacctcaacctgaccgtggacgagggtgtccaggtggccaagtacttcctgcggcagatggcacagcccttccaccgggaggatcagctgggcctgtccctgctcagcctggagcagctagaatcagaggagacgctgaagaggatagagcagattgctcagcagctctgagtggggcgggtggggccataaacggttcctggtgactcctgagtcttgcctggccctggttcccagcggcggtggtgctagaaggtcttatgaagtcaggtgacatttctcactgtcacgtccacagcctttaatcgcaggagaaggcagctatccaccaggtacccagaggcaagggggggccaggagatgatagaccccctctcaccccaccagcccatccctcctgcactgttcccaagaagctgcggccagcgcagttcactggacgttagtgggggctcaggtcctgggtgctggcgctgagggtccgaggggccttgtccaggtgccagctgggaaactggagacaggcacaggggatggttggaggggaggtgaggggcaagtgttacatccaccctccagctccaggtccagcctggcagccaactatccaaccccctcgcctctaccccaagtaaaacccatctttgctcctgtcctgggtctcttctgacaccaacccaccacctgctgactccaccactggcccgaccgccctgcctttgcctcatctctgcacctacccacatggcctcctctatttttgacccagatgtccccctcacctgagtcccaggagcccttggagcatccac

SEQ ID NO: 8419 - DNA, 2211 bp, Artificial Sequence
  derived and/or modified sequence
atgagggagctgaagaggaccctggatgccaagggccatggagtgctggagatgcccagcggcaccgggaagacagtgtccctgctggccctgatcatggcctaccagagggcctaccccctggaggtgaccaagctgatctactgcagcaggacagtgcctgagattgagaaggtgattgaggagctgaggaagctgctgaacttctatgagaagcaggagggggagaagctgcccttcctgggcctggccctgagcagcaggaagaacctgtgcatccaccctgaggtgacccccctgcgctttgggaaggatgtggatggcaagtgccacagcctgacagccagctatgtgcgggcccagtaccagcacgacaccagcctgccccactgccgcttctatgaggagtttgatgcccacggccgggaggtgcccctgcctgctggcatctacaacctggatgacctgaaggccctgggccggcggcagggctggtgcccctacttcctggcccgctacagcatcctgcacgccaacgtggtggtgtacagctaccactacctgctggaccccaagattgctgacctggtgtccaaggagctggccaggaaggctgtggtggtgtttgatgaggcccacaacatcgacaacgtgtgcatcgacagcatgtctgtgaacctgaccaggaggaccctggaccgctgccagggcaacctggagaccctgcagaagacagtgctgcgcatcaaggagacagatgagcagaggctgagagatgagtaccgccgcctggtggagggcctgcgggaggccagcgctgcccgggagacagatgcccacctggccaaccctgtgctgcctgatgaggtgctgcaggaggccgtgcccggcagcatcagaacagctgagcacttcctgggcttcctgcggcggctgctggagtatgtgaagtggaggctgcgggtgcagcacgtggtgcaggagagccccccagccttcctgagcggcctggcccagagggtgtgcatccagaggaagcccctgcgcttctgtgccgagcggctgcggagcctgctgcacaccctggagatcacagacctggccgacttcagccccctgaccctgctggccaactttgccaccctggtgtccacctacgccaagggcttcaccatcatcatcgagccctttgatgacaggacccccaccatcgccaaccccatcctgcacttcagctgcatggatgccagcctggccatcaagcctgtgtttgagcgcttccagagcgtcatcatcaccagcggcaccctgagccccctggacatctaccccaagatcctggacttccaccctgtgaccatggccaccttcaccatgaccctggcccgggtgtgcctgtgccccatgatcatcggcagaggaaatgaccaggtggccatcagcagcaagtttgagacccgggaggacattgctgtgatccggaactacggcaacctgctgctggagatgtctgctgtggtgcctgatggcatcgtggccttcttcaccagctaccagtacatggagagcacagtggcctcctggtatgagcagggcatcctggagaacatccagaggaacaagctgctcttcatcgagacccaggatggagctgagacctctgtggccctggagaagtaccaggaggcctgtgaaaatggccgcggggccatcctgctgtctgtggcccggggcaaggtgtctgagggcatcgactttgtgcaccactacggccgggctgtgatcatgtttggagtgccctacgtgtacacccagagccgcatcctgaaggcccggctggagtacctgcgggaccagttccagatccgggagaatgacttcctgacctttgatgccatgagacatgctgcccagtgtgtgggccgggccatccggggcaagacagattatggcctgatggtgtttgctgacaagagatttgcccggggggacaagaggggcaagctgccccgctggatccaggagcacctgacagatgccaacctgaacctgactgtggatgaaggagtgcaggtggccaagtacttcctgcggcagatggcccagcccttccaccgggaggaccagctgggcctgagcctgctgagcctggagcagctggagagcgaggagaccctgaagagaattgagcagatcgcccagcagctgtag

SEQ ID NO: 8420 - DNA, 2283 bp, Artificial Sequence
  derived and/or modified sequence
atgaagctgaatgtggatggcctgctggtgtacttcccctatgactacatctacccagagcagttctcctacatgagggagctgaagaggaccctggatgccaagggccatggagtgctggagatgcccagcggcaccgggaagacagtgtccctgctggccctgatcatggcctaccagagggcctaccccctggaggtgaccaagctgatctactgcagcaggacagtgcctgagattgagaaggtgattgaggagctgaggaagctgctgaacttctatgagaagcaggagggggagaagctgcccttcctgggcctggccctgagcagcaggaagaacctgtgcatccaccctgaggtgacccccctgcgctttgggaaggatgtggatggcaagtgccacagcctgacagccagctatgtgcgggcccagtaccagcacgacaccagcctgccccactgccgcttctatgaggagtttgatgcccacggccgggaggtgcccctgcctgctggcatctacaacctggatgacctgaaggccctgggccggcggcagggctggtgcccctacttcctggcccgctacagcatcctgcacgccaacgtggtggtgtacagctaccactacctgctggaccccaagattgctgacctggtgtccaaggagctggccaggaaggctgtggtggtgtttgatgaggcccacaacatcgacaacgtgtgcatcgacagcatgtctgtgaacctgaccaggaggaccctggaccgctgccagggcaacctggagaccctgcagaagacagtgctgcgcatcaaggagacagatgagcagaggctgagagatgagtaccgccgcctggtggagggcctgcgggaggccagcgctgcccgggagacagatgcccacctggccaaccctgtgctgcctgatgaggtgctgcaggaggccgtgcccggcagcatcagaacagctgagcacttcctgggcttcctgcggcggctgctggagtatgtgaagtggaggctgcgggtgcagcacgtggtgcaggagagccccccagccttcctgagcggcctggcccagagggtgtgcatccagaggaagcccctgcgcttctgtgccgagcggctgcggagcctgctgcacaccctggagatcacagacctggccgacttcagccccctgaccctgctggccaactttgccaccctggtgtccacctacgccaagggcttcaccatcatcatcgagccctttgatgacaggacccccaccatcgccaaccccatcctgcacttcagctgcatggatgccagcctggccatcaagcctgtgtttgagcgcttccagagcgtcatcatcaccagcggcaccctgagccccctggacatctaccccaagatcctggacttccaccctgtgaccatggccaccttcaccatgaccctggcccgggtgtgcctgtgccccatgatcatcggcagaggaaatgaccaggtggccatcagcagcaagtttgagacccgggaggacattgctgtgatccggaactacggcaacctgctgctggagatgtctgctgtggtgcctgatggcatcgtggccttcttcaccagctaccagtacatggagagcacagtggcctcctggtatgagcagggcatcctggagaacatccagaggaacaagctgctcttcatcgagacccaggatggagctgagacctctgtggccctggagaagtaccaggaggcctgtgaaaatggccgcggggccatcctgctgtctgtggcccggggcaaggtgtctgagggcatcgactttgtgcaccactacggccgggctgtgatcatgtttggagtgccctacgtgtacacccagagccgcatcctgaaggcccggctggagtacctgcgggaccagttccagatccgggagaatgacttcctgacctttgatgccatgagacatgctgcccagtgtgtgggccgggccatccggggcaagacagattatggcctgatggtgtttgctgacaagagatttgcccggggggacaagaggggcaagctgccccgctggatccaggagcacctgacagatgccaacctgaacctgactgtggatgaaggagtgcaggtggccaagtacttcctgcggcagatggcccagcccttccaccgggaggaccagctgggcctgagcctgctgagcctggagcagctggagagcgaggagaccctgaagagaattgagcagatcgcccagcagctgtag

SEQ ID NO: 8421 - DNA, 2211 bp, Artificial Sequence
  derived and/or modified sequence
atgcgggagctgaagcggaccctggacgccaagggccacggcgtgttggagatgccgtcaggcaccgggaaaaccgtcagtttattggcacttataatggcctaccaacgggcctaccctcttgaggtgaccaagttgatctactgctctcggacagtgccagagatcgaaaaagtgatagaggagctcagaaagctgttaaatttttacgagaaacaggaaggggagaagctgccttttctgggcctagctctgagcagtaggaagaacttgtgtatacaccccgaggtcacgcccttaaggttcggcaaggatgtggacgggaagtgtcactcactcacagccagctatgtgagagctcaataccaacatgatacttctctcccacactgtagattctatgaggagtttgacgcccacggacgtgaagtaccactgcccgccgggatatataacttggatgacctcaaggcactcggtagaaggcagggatggtgtccatattttctagccaggtactccatcctgcacgccaatgtggtggtgtattcttaccattacctgctggaccccaagatcgcagatctggtaagcaaagaattagctagaaaggctgttgtcgtgtttgacgaggcacacaacatcgacaatgtttgtatcgacagtatgtctgtgaacctgacacggcgcaccctggatcggtgtcaggggaacctggagaccctgcagaaaacggttctgagaataaaagaaactgacgaacagcggctgcgcgatgaatatcgtagactcgtagaaggtctgagggaggcctctgccgccagggaaacagacgctcacttggctaaccccgtgctccccgacgaggttttacaggaagcagtgcccggatccatcaggacagctgaacactttctaggttttttgagaagactgctggaatacgttaagtggcggctaagagttcagcacgtagtacaagaaagccccccagcgttcctgtctggcctcgcacaacgagtttgcattcagagaaaaccattgcggttctgcgctgagcgcctcagatctctgcttcacacactggaaatcaccgacctggccgatttcagccccctcaccctcttggctaactttgccaccttagtatcaacctacgccaaaggctttaccattattatcgagccattcgacgatagaacccctacaattgctaacccgattctgcattttagttgcatggacgcatcactcgccatcaagcccgtctttgaacgatttcagtctgtaattattacaagtggaacgctgtcaccgctggatatctatcctaaaattctcgacttccatccagtgaccatggccacattcacaatgaccctggctagagtttgtctgtgcccaatgatcatcggaaggggaaatgatcaggtcgccatctctagtaaattcgagacaagggaagatatcgctgtgatccggaattacggaaatctcctgctggaaatgtctgcagttgtgccagatggtatagttgcctttttcacttcctaccagtacatggagagtactgtggcttcgtggtatgagcaaggaatcctggagaatatccagcgcaacaaactgctcttcatagagacacaggatggagccgaaacctctgtcgcactggaaaagtaccaggaagcatgtgagaacgggcgcggagccatcctgctctcagttgccagggggaaggtgtctgaaggcatcgacttcgtgcaccattatggtcgggcagtgataatgttcggcgtgccatatgtctatactcagagcaggatcctgaaagccaggttggaatatctgagggatcagtttcagatccgggaaaacgatttcctgaccttcgacgcaatgcggcacgcggctcaatgtgttgggagagctatccgtggaaagactgactacggcctgatggtgttcgctgacaaacgctttgcacggggggataagcggggaaagctgccgcgctggatccaggagcatttaacagatgctaatctgaatcttaccgtcgatgagggcgtgcaggttgcaaagtatttcctgaggcagatggcgcagcccttccatcgcgaggatcaattggggttgagcctcctgtccctggaacaactcgagagcgaggaaacactgaaacgtattgagcagatcgcacagcagctctag

SEQ ID NO: 8422 - DNA, 2283 bp, Artificial Sequence
  derived and/or modified sequence
atgaagctgaacgtggacggcctgctggtgtacttcccctacgactacatttaccctgagcagtttagctacatgcgagagctgaaacgaacgctggacgccaagggccatggagttctggagatgccttccgggaccggaaagacagtttcactgctcgcactgataatggcttatcagcgggcatatccgttagaggtcactaaactcatatactgctcccggacggtgcctgagatagaaaaagtgatcgaggaactccgaaaactgctaaacttttatgagaaacaggaaggcgagaagttgccgttcctgggacttgctctgtccagccgcaaaaacctgtgtatccatcctgaggtgacccctctgcgttttggcaaagacgtcgacggcaaatgccactctctcacagcatcctacgttcgagctcagtaccaacacgatacatcgctcccacattgccgattttatgaagagttcgatgcccacgggcgggaagtgcccctgccagcaggaatatataacctggatgacctgaaggctttgggccgccgtcagggttggtgtccatattttctggcccgttacagcatcctgcacgctaacgtagtggtctatagctaccactacctgttggatcctaagattgccgatctggtgagcaaggaacttgcccgcaaagcggtcgtggtgttcgatgaggcccacaacattgataatgtatgcattgatagtatgagcgtgaatctcacaaggaggaccctggaccggtgtcaggggaaccttgaaaccctgcaaaaaactgtgctcagaatcaaagaaactgatgagcagcggctccgggacgagtatcgccggctggtggagggcttgagggaagctagtgctgcaagggaaacagacgcccacctggccaaccccgtgctacctgatgaagtcctgcaggaggctgtgccagggagtatcaggacggcagagcactttctcgggtttcttcgccgcctgctggaatacgtgaaatggcggttgcgggtgcagcacgtcgttcaggagagccccccagcgttcctgagtggccttgcccagcgagtatgtatccagaggaaaccactgagattctgcgcggaaaggcttagaagtctgctccacactctggagataaccgacttagcagacttctcaccgctgacgttgctggccaattttgctacattagtgtcaacttatgctaaggggtttactataattatcgagccattcgatgaccgaacacctactatcgcaaatcctattctgcattttagctgtatggacgcctccctagctatcaaaccagtattcgagcgattccagtcagttattatcactagtgggaccctgtccccactggatatatatcctaaaatcttagacttccaccctgttacgatggccacctttactatgaccctagccagagtgtgcctttgccctatgattatcggtagggggaatgaccaggtggcaatttccagcaaattcgagaccagagaggatatcgctgtaataagaaactacggcaatctcctccttgagatgagcgccgtggtccctgatggcatcgtggccttctttacctcatatcagtacatggagagcaccgttgccagctggtacgaacagggaatactggaaaatatccagcgcaacaaactcctgttcatcgagacccaggacggggcggaaacatctgtggccctggagaagtaccaagaggcctgtgagaacggccgaggggccatcttgctgtctgtggctcgggggaaggtgtctgaaggcattgacttcgtgcatcactatggaagagccgtgatcatgttcggggtgccatacgtctatactcagtcgagaatcctcaaggcccgcctggagtacctgcgtgaccaatttcagattagagaaaatgattttctgaccttcgacgccatgaggcacgctgctcaatgcgtgggacgggctattagagggaaaaccgactacggcctgatggtttttgctgacaagcgcttcgcccgcggagacaagcgagggaaactcccaaggtggatccaggagcatctcaccgacgccaatctgaacctaacggtcgatgagggtgttcaggttgcaaagtatttcctgcgccagatggcccagccattccaccgggaagaccagctcggtttgtccctcctgtcattggagcaattagaaagcgaggagacactgaaacggattgaacagatcgctcagcagctgtag

SEQ ID NO: 8423 - DNA, 2211 bp, Artificial Sequence
  derived and/or modified sequence
atgcgcgagcttaagcgcacactcgatgcgaagggccatggagtgctagagatgccctccggaaccggcaaaaccgtctccctgttagccctcatcatggcctatcagcgggcatatcccctggaggtaacaaaactgatttattgttctcggacggtgcccgaaattgaaaaggttattgaggagttgcggaagctcctgaatttttatgaaaagcaggaaggggagaaactgcccttcctgggactcgcattgagctcacgaaagaacctgtgcatccaccctgaagtcacaccgctgaggtttggtaaggatgttgatggcaaatgtcattccctcacagcctcctacgttcgggctcagtaccagcatgacacatctctcccacactgccgcttctatgaagaattcgacgcccatgggcgtgaggtccctcttcccgctggaatctacaacctcgatgatctgaaggcactcggcaggagacaggggtggtgcccctacttcttggccagatattctatactgcacgcgaatgtggtggtgtattcctatcactacctgttggacccaaagatagccgaccttgttagcaaggagctggccaggaaagctgtcgtggtttttgacgaggcccataacattgacaatgtgtgcatcgatagcatgagtgtcaacctcacaaggcggacgctagatcgttgtcagggtaatcttgagactctccaaaaaactgtgctccgcattaaggagactgacgaacagcggctgcgggacgagtaccggagacttgtcgaaggtttgcgcgaggctagcgctgcacgagaaaccgatgcccatttggcaaatcccgtgttacctgatgaagtgctgcaggaagcagtgcccggttccatccgcacggctgagcacttcctgggattcctcagaagacttttggaatatgtgaagtggcgcctgcgggtgcagcacgtcgtgcaagagtctcctccggcattcctgtctgggttggctcagagggtgtgcatccagagaaagccactcagattttgcgcagagcggctgcgaagtctcctgcacaccctggagatcacagatctggctgattttagcccgctgacattgttagccaacttcgccacgctggtgagtacctatgcaaaaggctttactattattatcgagcctttcgacgaccgcactcccacgattgcaaatccaattctccacttttcctgcatggatgcctctctggcaatcaagccagttttcgagcgctttcagtcagttatcataacatccgggactctctcaccgctggacatctaccccaaaatactggactttcatccagtgactatggccacgttcaccatgaccctcgctagagtgtgtctgtgcccaatgatcattgggaggggcaatgatcaggtggctataagttccaagttcgaaaccagggaagatattgcagtgatccgcaactatggaaacttgctgcttgaaatgagcgctgttgtacctgacggtatagttgccttctttacctcttatcaatatatggagtctaccgtagcttcctggtatgaacagggaattctcgaaaacattcagagaaacaagctactgttcatcgagactcaggatggcgctgaaactagtgtcgcccttgagaagtaccaggaggcatgcgaaaacggcagaggcgcaatcctgttgtccgtggcccgtggcaaggtgtctgagggtatcgactttgtccaccactatggcagggccgtcatcatgttcggggtcccatacgtgtacacccaatccagaatcctgaaggccaggttggaataccttagggatcaattccagatccgcgagaacgactttttgaccttcgatgccatgagacatgccgctcaatgcgttggacgggctattcgcggaaaaacggactatggcctgatggtgtttgctgacaagcggtttgctcgtggcgacaagcgaggaaaacttcccaggtggatacaagagcatttaactgacgccaatctcaatttgactgtggacgagggagtccaggtagccaagtatttcctccgacagatggcccagcccttccatagggaagaccagctcggcctctcgctactatctctcgaacaattagagtccgaggagacgctaaagaggatcgagcagatcgctcaacagctctag

SEQ ID NO: 8424 - DNA, 2283 bp, Artificial Sequence
  derived and/or modified sequence
atgaagctgaatgttgacggcttgctggtctatttcccttacgattatatctatcccgaacagttcagctacatgcgggagttgaagaggactcttgatgctaagggccacggcgtgctagagatgccttctggcacagggaaaaccgttagcttgctggcacttatcatggcctaccagagagcctaccctctggaggtgactaaactcatctattgctctcgaaccgttccagagatagaaaaggtgatcgaggaactgcggaaactgttgaatttctacgagaaacaggaaggagagaagcttcccttcttggggctcgctctgtctagtcgtaagaatctgtgtatacatccggaagtgactcctctgcggttcgggaaggacgtggacggtaaatgccactctctgacagcaagttacgtgagagcacaatatcagcatgacacgagcctcccccactgcagattctacgaagaattcgacgcccatggcagagaggtgccgctgcccgctggcatctataacctggatgatctgaaggctctggggcgacgacagggatggtgcccatattttctcgctcgctactcaatcctgcatgcaaacgtcgtagtctattcataccattacctccttgaccctaagatcgcagatctcgtctctaaggagttagccagaaaagccgtcgttgtttttgatgaggcccataacatcgacaatgtttgcatagactcaatgagcgtcaatctcactaggagaactttggatcggtgtcaaggaaacttggagactcttcagaagactgtactgcgtattaaggaaaccgatgaacagagactgagggacgaatatcggagactagttgaagggctgcgggaagctagcgcagcgcgagagaccgacgcccatctggctaatcccgtgctgccagacgaggttctccaggaggcagttccaggctctattcggactgcagagcattttctcggcttcctgcgtcggttactggagtacgtcaagtggcgtctgcgcgtccaacacgtagtgcaagaatccccacccgcttttctgtctggactggctcaaagagtctgcattcagcggaaaccactcaggttttgtgcagaaagacttcggtctctcttgcatactctggaaattacggatttggccgacttctcccctctgacactgctggccaatttcgcgaccctggtgtctacgtatgccaagggttttaccataatcatcgagcctttcgatgatcgtacaccaacgatcgcgaaccccatactccatttcagctgtatggatgcatccctcgctatcaagcctgtctttgaacggtttcaatctgtaattatcactagcggcacactcagtcccctcgatatatacccaaagatcctggactttcatccagtcaccatggctaccttcacaatgacactggcacgagtctgcctctgcccaatgattataggtcgcggaaacgatcaggtggcgattagcagcaaatttgaaactcgggaggacattgctgtgatcagaaactacgggaacctcctgctggagatgtcggcagtagtacccgatgggatcgtagcatttttcacgtcatatcagtacatggaaagcaccgttgcttcctggtatgagcagggaatcctcgagaacatacaacggaataagctgctattcatagaaactcaggatggcgcagaaacatcggttgccctcgaaaaatatcaggaagcatgcgaaaacgggaggggggctatcctgctctccgtggcgagaggcaaagtctctgagggcatagatttcgtccaccactacgggagagccgtgattatgttcggagtcccctacgtgtacacacagtctaggattctgaaagccagactcgagtacctaagagaccaatttcagattcgggaaaatgactttctcacctttgatgcaatgagacacgctgcacaatgtgtggggagagccatacgcggaaaaactgattatggtctgatggtttttgccgataagcgatttgctcgcggtgacaaaagaggcaagttgcctaggtggatacaggagcacctgaccgacgccaacttgaatcttactgttgacgagggcgtacaggtggctaaatattttctgcgccagatggctcagcccttccatagggaagaccagcttggcttgagtctcctgtctctagaacagttagagagcgaggagacccttaaacggattgagcagatagcgcaacaactttag

SEQ ID NO: 8425 - DNA, 384 bp, Artificial Sequence
  derived and/or modified sequence
atgaagctgaacgtggatggcctgttggtctacttcccatacgactatatttatccggagcagttcagctacatgagagaactgaaaaggacactcgatgcaaaagggcatggcgtgctggaaatgccctctggcaccggcaaaactgtctctcttctggccctcattatggcgtatcagagggcctaccccctggaggtaacaaagctgatatactgctcaagaaccgtgccagagatcgaaaaggtcatcgaagaacttagaaagctgctgaatttttatgagaaacaggagggagaaaagctgccatttctagggctcgctctctcttcaagaaaaaatctgtgtattcaccccgaaactacctctgcctctacaccgtag

SEQ ID NO: 8426 - DNA, 384 bp, Artificial Sequence
  derived and/or modified sequence
atgaagctgaatgtggatggcctgctggtgtacttcccctatgactacatctacccagagcagttctcctacatgagggagctgaagaggaccctggatgccaagggccatggagtgctggagatgcccagcggcaccgggaagacagtgtccctgctggccctgatcatggcctaccagagggcctaccccctggaggtgaccaagctgatctactgcagcaggacagtgcctgagattgagaaggtgattgaggagctgaggaagctgctgaacttctatgagaagcaggagggggagaagctgcccttcctgggcctggccctgagcagcaggaagaacctgtgcatccaccctgagaccaccagcgccagcaccccctag

SEQ ID NO: 8427 - DNA, 384 bp, Artificial Sequence
  derived and/or modified sequence
atgaagctgaacgtggacggcctgctggtgtacttcccctacgactacatctacccagagcaattcagctatatgagagaactgaaacgaaccctggatgcaaagggacacggggtcttggaaatgccttcagggaccgggaagaccgtgtcactcctggctctcatcatggcttaccaacgagcttatccactggaggtgacaaagctgatctattgttcaaggacagttcctgaaatagagaaggtaattgaggagctgcggaaactgttaaacttttatgaaaaacaggagggcgagaaactcccctttctcgggctcgcgcttagctcgagaaaaaacctgtgtatacatcccgaaacaacttcagcttccacaccctag

SEQ ID NO: 8428 - DNA, 384 bp, Artificial Sequence
  derived and/or modified sequence
atgaagcttaatgtggatgggcttctagtgtactttccttacgattacatttatcctgagcagttcagctacatgcgcgagttgaagcgaactctggatgctaaaggccatggggtgcttgaaatgcctagcgggacaggaaaaaccgtctcacttttagccctgataatggcctatcagcgcgcataccctctcgaagtgacgaaactcatttattgttccagaactgtgcctgagattgagaaagtgatagaggaactacgcaagctactgaacttctatgaaaagcaggaaggtgagaagctgcccttcctgggcctggcgctcagctctcgaaagaatctctgcatccatcctgaaacaaccagcgcaagcacaccatag

SEQ ID NO: 8429 - DNA, 384 bp, Artificial Sequence
  derived and/or modified sequence
atgaagctgaacgtggacggcctgctggtgtacttcccctacgactacatctaccccgagcagttcagctacatgagagagctgaagagaaccctggacgccaagggccacggcgtgctggagatgcccagcggcaccggcaagaccgtgagcctgctggccctgatcatggcctaccagagagcctaccccctggaggtgaccaagctgatctactgcagcagaaccgtgcccgagatcgagaaggtgatcgaggagctgagaaagctgctgaacttctacgagaagcaggagggcgagaagctgcccttcctgggcctggccctgagcagcagaaagaacctgtgcatccaccccgagaccaccagcgccagcaccccctag

SEQ ID NO: 8430 - protein, 751 aa, Artificial Sequence
  derived and/or modified sequence
MSCASGSGGGLRHPLRCQKPWDEECEEEAVCVIMCASVKYNIRGPALIPRMKTKHRIYYITLFSIVLLGLIATGMFQFWPHSIESSNDWNVEKRSIRDVPVVRLPADSPIPERGDLSCRMHTCFDVYRCGFNPKNKIKVYIYALKKYVDDFGVSVSNTISREYNELLMAISDSDYYTDDINRACLFVPSIDVLNQNTLRIKETAQAMAQLSRWDRGTNHLLFNMLPGGPPDYNTALDVPRDRALLAGGGFSTWTYRQGYDVSIPVYSPLSAEVDLPEKGPGPRQYFLLSSQVGLHPEYREDLEALQVKHGESVLVLDKCTNLSEGVLSVRKRCHKHQVFDYPQVLQEATFCVVLRGARLGQAVLSDVLQAGCVPVVIADSYILPFSEVLDWKRASVVVPEEKMSDVYSILQSIPQRQIEEMQRQARWFWEAYFQSIKAIALATLQIINDRIYPYAAISYEEWNDPPAVKWGSVSNPLFLPLIPPQSQGFTAIVLTYDRVESLFRVITEVSKVPSLSKLLVVWNNQNKNPPEDSLWPKIRVPLKVVRTAENKLSNRFFPYDEIETEAVLAIDDDIIMLTSDELQFGYEVWREFPDRLVGYPGRLHLWDHEMNKWKYESEWTNEVSMVLTGAAFYHKYFNYLYTYKMPGDIKNWVDAHMNCEDIAMNFLVANVTGKAVIKVTPRKKFKCPECTAIDGLSLDQTHMVERSECINKFASVFGTMPLKVVEHRADPVLYKDDFPEKLKSFPNIGSL

SEQ ID NO: 8431 - protein, 49 aa, Artificial Sequence
  derived and/or modified sequence
MCASVKYNIRGPALIPRMKTKHRIYYITLFSIVLLGLIATGMFQFWPHS

SEQ ID NO: 8432 - DNA, 2157 bp, Artificial Sequence
  derived and/or modified sequence
atgtgcgccagcgtgaagtacaacatcagaggccccgccctgatccccagaatgaagaccaagcacagaatctactacatcaccctgttcagcatcgtgctgctgggcctgatcgccaccggcatgttccagttctggccccacagcatcgagagcagcaacgactggaacgtggagaagagaagcatcagagacgtgcccgtggtgagactgcccgccgacagccccatccccgagagaggcgacctgagctgcagaatgcacacctgcttcgacgtgtacagatgcggcttcaaccccaagaacaagatcaaggtgtacatctacgccctgaagaagtacgtggacgacttcggcgtgagcgtgagcaacaccatcagcagagagtacaacgagctgctgatggccatcagcgacagcgactactacaccgacgacatcaacagagcctgcctgttcgtgcccagcatcgacgtgctgaaccagaacaccctgagaatcaaggagaccgcccaggccatggcccagctgagcagatgggacagaggcaccaaccacctgctgttcaacatgctgcccggcggcccccccgactacaacaccgccctggacgtgcccagagacagagccctgctggccggcggcggcttcagcacctggacctacagacagggctacgacgtgagcatccccgtgtacagccccctgagcgccgaggtggacctgcccgagaagggccccggccccagacagtacttcctgctgagcagccaggtgggcctgcaccccgagtacagagaggacctggaggccctgcaggtgaagcacggcgagagcgtgctggtgctggacaagtgcaccaacctgagcgagggcgtgctgagcgtgagaaagagatgccacaagcaccaggtgttcgactacccccaggtgctgcaggaggccaccttctgcgtggtgctgagaggcgccagactgggccaggccgtgctgagcgacgtgctgcaggccggctgcgtgcccgtggtgatcgccgacagctacatcctgcccttcagcgaggtgctggactggaagagagccagcgtggtggtgcccgaggagaagatgagcgacgtgtacagcatcctgcagagcatcccccagagacagatcgaggagatgcagagacaggccagatggttctgggaggcctacttccagagcatcaaggccatcgccctggccaccctgcagatcatcaacgacagaatctacccctacgccgccatcagctacgaggagtggaacgacccccccgccgtgaagtggggcagcgtgagcaaccccctgttcctgcccctgatccccccccagagccagggcttcaccgccatcgtgctgacctacgacagagtggagagcctgttcagagtgatcaccgaggtgagcaaggtgcccagcctgagcaagctgctggtggtgtggaacaaccagaacaagaacccccccgaggacagcctgtggcccaagatcagagtgcccctgaaggtggtgagaaccgccgagaacaagctgagcaacagattcttcccctacgacgagatcgagaccgaggccgtgctggccatcgacgacgacatcatcatgctgaccagcgacgagctgcagttcggctacgaggtgtggagagagttccccgacagactggtgggctaccccggcagactgcacctgtgggaccacgagatgaacaagtggaagtacgagagcgagtggaccaacgaggtgagcatggtgctgaccggcgccgccttctaccacaagtacttcaactacctgtacacctacaagatgcccggcgacatcaagaactgggtggacgcccacatgaactgcgaggacatcgccatgaacttcctggtggccaacgtgaccggcaaggccgtgatcaaggtgacccccagaaagaagttcaagtgccccgagtgcaccgccatcgacggcctgagcctggaccagacccacatggtggagagaagcgagtgcatcaacaagttcgccagcgtgttcggcaccatgcccctgaaggtggtggagcacagagccgaccccgtgctgtacaaggacgacttccccgagaagctgaagagcttccccaacatcggcagcctgtag

SEQ ID NO: 8433 - DNA, 2256 bp, Artificial Sequence
  derived and/or modified sequence
atgagctgcgccagcggcagcggcggcggcctgagacaccccctgagatgccagaagccctgggacgaggagtgcgaggaggaggccgtgtgcgtgatcatgtgcgccagcgtgaagtacaacatcagaggccccgccctgatccccagaatgaagaccaagcacagaatctactacatcaccctgttcagcatcgtgctgctgggcctgatcgccaccggcatgttccagttctggccccacagcatcgagagcagcaacgactggaacgtggagaagagaagcatcagagacgtgcccgtggtgagactgcccgccgacagccccatccccgagagaggcgacctgagctgcagaatgcacacctgcttcgacgtgtacagatgcggcttcaaccccaagaacaagatcaaggtgtacatctacgccctgaagaagtacgtggacgacttcggcgtgagcgtgagcaacaccatcagcagagagtacaacgagctgctgatggccatcagcgacagcgactactacaccgacgacatcaacagagcctgcctgttcgtgcccagcatcgacgtgctgaaccagaacaccctgagaatcaaggagaccgcccaggccatggcccagctgagcagatgggacagaggcaccaaccacctgctgttcaacatgctgcccggcggcccccccgactacaacaccgccctggacgtgcccagagacagagccctgctggccggcggcggcttcagcacctggacctacagacagggctacgacgtgagcatccccgtgtacagccccctgagcgccgaggtggacctgcccgagaagggccccggccccagacagtacttcctgctgagcagccaggtgggcctgcaccccgagtacagagaggacctggaggccctgcaggtgaagcacggcgagagcgtgctggtgctggacaagtgcaccaacctgagcgagggcgtgctgagcgtgagaaagagatgccacaagcaccaggtgttcgactacccccaggtgctgcaggaggccaccttctgcgtggtgctgagaggcgccagactgggccaggccgtgctgagcgacgtgctgcaggccggctgcgtgcccgtggtgatcgccgacagctacatcctgcccttcagcgaggtgctggactggaagagagccagcgtggtggtgcccgaggagaagatgagcgacgtgtacagcatcctgcagagcatcccccagagacagatcgaggagatgcagagacaggccagatggttctgggaggcctacttccagagcatcaaggccatcgccctggccaccctgcagatcatcaacgacagaatctacccctacgccgccatcagctacgaggagtggaacgacccccccgccgtgaagtggggcagcgtgagcaaccccctgttcctgcccctgatccccccccagagccagggcttcaccgccatcgtgctgacctacgacagagtggagagcctgttcagagtgatcaccgaggtgagcaaggtgcccagcctgagcaagctgctggtggtgtggaacaaccagaacaagaacccccccgaggacagcctgtggcccaagatcagagtgcccctgaaggtggtgagaaccgccgagaacaagctgagcaacagattcttcccctacgacgagatcgagaccgaggccgtgctggccatcgacgacgacatcatcatgctgaccagcgacgagctgcagttcggctacgaggtgtggagagagttccccgacagactggtgggctaccccggcagactgcacctgtgggaccacgagatgaacaagtggaagtacgagagcgagtggaccaacgaggtgagcatggtgctgaccggcgccgccttctaccacaagtacttcaactacctgtacacctacaagatgcccggcgacatcaagaactgggtggacgcccacatgaactgcgaggacatcgccatgaacttcctggtggccaacgtgaccggcaaggccgtgatcaaggtgacccccagaaagaagttcaagtgccccgagtgcaccgccatcgacggcctgagcctggaccagacccacatggtggagagaagcgagtgcatcaacaagttcgccagcgtgttcggcaccatgcccctgaaggtggtggagcacagagccgaccccgtgctgtacaaggacgacttccccgagaagctgaagagcttccccaacatcggcagcctgtag

SEQ ID NO: 8434 - DNA, 2157 bp, Artificial Sequence
  derived and/or modified sequence
atgtgcgcgtctgtcaaatataatattagaggccctgcgctaattccgcgcatgaaaaccaaacatagaatctactacattaccctcttttccatcgtgctcttgggcctcattgctacgggtatgttccagttctggccacactccatcgaatcttctaacgactggaacgtggaaaagagaagcatcagggacgttcctgtagtcagactgccggccgatagcccaattcccgagagaggcgatctgtcttgcagaatgcatacttgctttgacgtgtacaggtgcggatttaaccccaagaataagataaaggtttatatttacgctctcaaaaaatacgtggatgatttcggggtgtccgtgtcaaataccatctccagagaatataacgaacttctgatggccatctctgactctgattattacacagacgatatcaaccgagcctgcctttttgtcccatcaattgacgtattgaatcaaaacactcttaggatcaaagaaaccgcccaggcaatggcccagctgagcagatgggataggggaacgaaccacctcctgtttaatatgctgccggggggaccccccgattataatactgctttagacgtgccaagggatcgagccttattggctggcggaggattttcaacgtggacttacaggcaagggtacgacgtatctatcccagtgtacagtccattgtccgcagaggtggatcttccagaaaaaggccctggaccccggcagtatttcctgctgtcctctcaggtggggctgcatcccgagtatcgtgaggacttggaggccctacaagtgaagcacggcgagtccgtgctggtgctcgacaaatgcactaatttatccgagggggtgctgtctgtgagaaagagatgccacaagcatcaggttttcgattaccctcaagtgctgcaggaggccacattttgtgtggtgcttagaggggctcgtttaggacaagccgtattgtccgacgtcttacaggcaggttgcgttccagtggtcatcgcagactcatatatcctccccttctctgaggtcctcgactggaagcgtgcctctgtcgtggttcccgaggagaagatgagtgatgtgtacagcatcctccagtcaattccgcagagacagattgaggagatgcagagacaggctaggtggttttgggaagcttatttccaatctatcaaggccatagcacttgcgacccttcagatcataaacgacaggatctacccctacgcagccatttcttacgaagaatggaatgatccccctgcagtgaagtgggggtcggtctctaatcccttgttcctgcccttgattcccccccagtcgcagggcttcaccgccatagtgcttacatacgaccgagtcgagtccctgttccgagtaatcaccgaggttagtaaggtgccatccctttctaaactcctcgtcgtgtggaataaccagaataaaaatccacccgaggactctctctggcccaagatcagggttcccctgaaagtggtgcgcacggcagagaataaactgtctaacaggttttttccgtatgacgaaatcgaaaccgaggcagttctcgccattgacgacgacataataatgctgacatctgatgagcttcagtttgggtatgaggtatggagagagttccctgaccgcttggtcgggtacccaggtcgccttcacctttgggaccatgaaatgaataagtggaagtatgagtccgaatggactaatgaggtatcaatggtgctgaccggtgctgccttttatcataaatacttcaactatttgtatacctacaagatgcctggcgatatcaaaaactgggtcgatgctcacatgaactgtgaagatatagctatgaatttcctggtggccaacgtgacaggcaaggctgtgatcaaagtcactcctcgaaagaagtttaagtgtcctgaatgtaccgcaatcgatgggctctctcttgaccaaactcatatggttgaacggtctgagtgcattaataaatttgcttcggttttcgggacgatgcccctgaaggtggttgagcaccgggccgacccagttctttataaagacgacttcccagagaagttaaagtctttcccaaacatcggaagtctgtag

SEQ ID NO: 8435 - DNA, 2256 bp, Artificial Sequence
  derived and/or modified sequence
atgtcctgtgcaagtggcagcggaggaggactccggcacccactccggtgccagaagccatgggatgaagaatgcgaagaggaagccgtgtgcgtgataatgtgcgcatccgtgaaatacaatattagaggcccagctttgatccccagaatgaaaaccaaacatagaatctactacattacgctattcagcattgtgcttctcgggttaattgcaacagggatgttccaattctggcctcacagcatcgaatcctccaacgactggaacgttgaaaagaggtcgattagggatgtgccggtggttcggctcccagccgacagccccattcctgagcggggagatctgagctgccggatgcacacctgttttgacgtgtatcgctgtggttttaacccaaagaataaaatcaaggtatacatctatgccttgaagaagtatgtggacgatttcggtgtctctgtgagcaataccatctcgagagaatacaatgaactcctgatggccatttcagacagcgactactacacagatgatataaaccgcgcatgcttgttcgtaccttctattgacgtgctcaaccaaaacaccttaaggataaaagagacggcacaagccatggctcagctaagccgttgggatcgcggcaccaaccatttgctctttaacatgctccccggcggaccaccggattacaataccgccttggatgtccctcgcgaccgggccctccttgctggggggggcttttctacatggacttataggcaggggtacgatgtttccatacccgtctattcacctctctctgccgaggtagacctgccagagaagggaccaggaccgcgtcagtatttcctgctgtccagtcaggttggtttgcacccagagtatcgcgaagatttggaagcactgcaagtaaaacacggcgagtccgttctcgtactggacaaatgcacaaatctcagcgaaggcgtgctgtcggtgaggaagcggtgtcataagcatcaggttttcgattatccccaggtactgcaggaggccaccttctgtgttgtgcttaggggggctagactaggccaggccgtacttagcgatgtgttgcaggccggatgcgtgcctgtggttattgctgactcctacatcctgccattttcggaagtgctggactggaaacgagcttccgtggtggtcccagaagaaaagatgtccgatgtttacagtattctccagtcgatcccccagcgtcagattgaggagatgcagagacaggcccgttggttctgggaggcttacttccaaagcataaaagcaatcgctctcgccaccctgcagataattaatgatcgcatctacccctacgctgctataagctacgaagagtggaacgacccccctgcggttaagtggggatcggtgtctaatccgttgttcctccctcttatccccccccagtcgcagggattcacggctattgttctcacgtatgatagagtggagagtctatttcgggtcatcacggaggtgtccaaagtcccgagtctgagcaaactgctcgtagtctggaacaaccagaacaaaaacccacccgaggacagcctctggccaaaaatcagagtacccttgaaggttgtgaggacagccgaaaacaagctcagtaaccgatttttcccgtatgacgagatcgagacagaagctgttcttgctattgacgacgacattattatgctgacctcagatgagctgcaatttggttatgaagtatggcgggagttccccgatcgccttgttgggtaccccggccgcctgcacctttgggatcacgaaatgaacaagtggaagtacgagtcagaatggacaaacgaagtgagcatggtgctgaccggagcagctttttatcacaaatacttcaattacctgtatacctataagatgccaggcgacatcaagaactgggtcgacgctcatatgaattgtgaggacattgccatgaacttcttggtggcgaacgtaaccggaaaggcagtgatcaaggtgactcctaggaaaaagtttaaatgccctgagtgcacagctattgatggactgtcactggaccagactcacatggtggagcgctcagagtgcattaacaagtttgcctcggttttcggcactatgcccctcaaggtagtggaacaccgggcagatccggtgctgtacaaggatgacttccccgagaaactcaagagttttccgaatatcgggtccctgtag

SEQ ID NO: 8436 - DNA, 2157 bp, Artificial Sequence
  derived and/or modified sequence
atgtgtgccagcgtcaaatacaacatccgagggccagcactcatccctcgtatgaagaccaagcataggatttactatatcacactcttctcaattgtgctgctgggtctgattgctacggggatgttccaattctggccccactctatcgagtcttctaacgattggaacgtcgagaaaagatccatcagggacgtgcccgtggtgcgcttgcccgcagatagccctatacccgagcggggtgatctgtcctgccggatgcacacatgcttcgacgtatatcggtgtgggtttaatccaaaaaacaagattaaggtgtacatctatgcacttaagaagtacgtcgacgattttggcgtgtctgtgagcaatacaatcagtcgagaatacaacgagctattgatggcaatttctgattcggactactatacagacgacatcaaccgggcttgcctgttcgtgccgagcatcgacgtgcttaaccaaaatacgctccgcatcaaagaaacggcacaggccatggctcagctgtcgcggtgggaccgcggaacaaatcatctgcttttcaatatgttacccgggggtccccccgattataacaccgccctcgacgtcccacgtgaccgagccctgctggcggggggcggcttctcaacctggacctaccgccagggctacgacgtgtctatccctgtgtattcaccactgagcgccgaggtggacctgcctgaaaaaggtccagggccacggcaatatttcttgctttcaagccaggtcggactgcatccggagtatcgcgaagatctcgaggccttacaagtgaaacatggagagagcgtgcttgtgctggacaagtgcaccaatctctctgagggggtgttaagtgtccgcaagagatgccacaagcatcaggtatttgactacccgcaggtactgcaggaggctacattttgtgtagtgctccgaggcgcccggttaggccaggccgtcctgagcgacgttcttcaggctggctgtgtgcctgtggtcattgctgattcttatatattgccattttccgaggtgctggattggaagcgcgcgtccgttgtcgtgccggaggaaaagatgtccgacgtgtacagcatacttcagtcaatcccccagcgccagatcgaagagatgcaacggcaggcacgctggttttgggaagcatacttccagtctatcaaagccattgctctggcgactttacagattataaatgatcggatctacccatacgccgcaattagttatgaagagtggaacgatccccctgcagtcaagtgggggagcgtgagtaacccgttgtttttacccttgatcccgcctcaaagtcagggatttactgcaatagttctgacatacgatagggtggaaagccttttccgggtgatcactgaggtctccaaagtgccctccctgtccaagctccttgtcgtttggaacaatcaaaacaagaatccccccgaagactctctgtggcccaagattagggtgcccctgaaagttgttcgaacagcggaaaataaactgagcaaccgattcttcccctacgatgaaatcgaaaccgaagcagttctggctatagatgatgatatcataatgctgacctctgatgagttacagtttggctatgaagtctggcgcgaatttcctgaccggttggtgggttatccgggccgcctgcacttgtgggaccatgagatgaacaaatggaaatacgagtcagagtggaccaacgaggttagtatggtcctgaccggggccgcattttaccataagtactttaactacctatacacctataaaatgcctggcgatataaaaaactgggtggatgcacacatgaactgcgaagacattgcaatgaacttcctcgtggcgaacgtaacaggaaaagccgtgatcaaggtgactccaagaaagaagttcaagtgccctgaatgtaccgcaatagatggcttgtccttggatcagacgcacatggtagagcggtctgagtgcataaataagttcgcatctgtgttcgggaccatgccactaaaggtggtagaacatcgagccgatccggttctgtacaaggatgatttcccagagaaactgaagagcttcccaaacattggctcactttag

SEQ ID NO: 8437 - DNA, 3424 bp, Artificial Sequence
  derived and/or modified sequence
agccacagggatctgattcctcccagggggatgtcctgcgcctcagggtccggtggtggcctgcggcatcccttgcggtgccagaagccgtgggacgaggagtgtgaggaagaggctgtctgtgtcattatgtgtgcgtcggtcaagtataatatccggggtcctgccctcatcccaagaatgaagaccaagcaccgaatctactatatcaccctcttctccattgtcctcctgggcctcattgccactggcatgtttcagttttggccccattctatcgagtcctcaaatgactggaatgtagagaagcgcagcatccgtgatgtgccggttgttaggctgccagccgacagtcccatcccagagcggggggatctcagttgcagaatgcacacgtgttttgatgtctatcgctgtggcttcaacccaaagaacaaaatcaaggtgtatatctatgctctgaaaaagtacgtggatgactttggcgtctctgtcagcaacaccatctcccgggagtataatgaactgctcatggccatctcagacagtgactactacactgatgacatcaaccgggcctgtctgtttgttccctccatcgatgtgcttaaccagaacacactgcgcatcaaggagacagcacaagcgatggcccagctctctaggtgggatcgaggtacgaatcacctgttgttcaacatgttgcctggaggtcccccagattataacacagccctggatgtccccagagacagggccctgttggctggtggcggcttttctacgtggacttaccggcaaggctacgatgtcagcattcctgtctatagtccactgtcagctgaggtggatcttccagagaaaggaccaggtccacggcaatacttcctcctgtcatctcaggtgggtctccatcctgagtacagagaggacctagaagccctccaggtcaaacatggagagtcagtgttagtactcgataaatgcaccaacctctcagagggtgtcctttctgtccgtaagcgctgccacaagcaccaggtcttcgattacccacaggtgctacaggaggctactttctgtgtggttcttcgtggagctcggctgggccaggcagtattgagcgatgtgttacaagctggctgtgtcccggttgtcattgcagactcctatattttgcctttctctgaagttcttgactggaagagagcatctgtggttgtaccagaagaaaagatgtcagatgtgtacagtattttgcagagcatcccccaaagacagattgaagaaatgcagagacaggcccggtggttctgggaagcgtacttccagtcaattaaagccattgccctggccaccctgcagattatcaatgaccggatctatccatatgctgccatctcctatgaagaatggaatgaccctcctgctgtgaagtggggcagcgtgagcaatccactcttcctcccgctgatcccaccacagtctcaagggttcaccgccatagtcctcacctacgaccgagtagagagcctcttccgggtcatcactgaagtgtccaaggtgcccagtctatccaaactacttgtcgtctggaataatcagaataaaaaccctccagaagattctctctggcccaaaatccgggttccattaaaagttgtgaggactgctgaaaacaagttaagtaaccgtttcttcccttatgatgaaatcgagacagaagctgttctggccattgatgatgatatcattatgctgacctctgacgagctgcaatttggttatgaggtctggcgggaatttcctgaccggttggtgggttacccgggtcgtctgcatctctgggaccatgagatgaataagtggaagtatgagtctgagtggacgaatgaagtgtccatggtgctcactggggcagctttttatcacaagtattttaattacctgtatacctacaaaatgcctggggatatcaagaactgggtagatgctcatatgaactgtgaagatattgccatgaacttcctggtggccaacgtcacgggaaaagcagttatcaaggtaaccccacgaaagaaattcaagtgtcctgagtgcacagccatagatgggctttcactagaccaaacacacatggtggagaggtcagagtgcatcaacaagtttgcttcagtcttcgggaccatgcctctcaaggtggtggaacaccgagctgaccctgtcctgtacaaagatgactttcctgagaagctgaagagcttccccaacattggcagcttatgaaacgtgtcattggtggaggtctgaatgtgaggctgggacagagggagagaacaaggcctcccagcactctgatgtcagagtagtaggttaagggtggaaggttgacctacttggatcttggcatgcacccacctaacccactttctcaagaacaagaacctagaatgaatatccaagcacctcgagctatgcaacctctgttcttgtatttcttatgatctctgatgggttcttctcgaaaatgccaagtggaagactttgtggcatgctccagatttaaatccagctgaggctccctttgttttcagttccatgtaacaatctggaaggaaacttcacggacaggaagactgctggagaagagaagcgtgttagcccatttgaggtctggggaatcatgtaaagggtacccagacctcacttttagttatttacatcaatgagttctttcagggaaccaaacccagaattcggtgcaaaagccaaacatcttggtgggatttgataaatgccttgggacctggagtgctgggcttgtgcacaggaagagcaccagccgctgagtcaggatcctgtcagttccatgagctattcctctttggtttggctttttgatatgattaaaattattttttattcctttttctactgtgtcttaaacaccaattcctgatagtccaaggaaccacctttctcccttgatatatttaactccgtctttggcctgacaacagtcttctgcccatgtctgggaacacacgccaggaggaatgtctgataccctctgcatcaagcgtaagaaggtcccaaatcataaccattttaagaacagatgactcagaaacctccagaggaatctgtttgcttcctgattagatccagtcaatgttttaaaggtattgtcagagaaaaacagagggtctgtactagccatgcaaggagtcgctctagctggtacccgtaaaagttgtgggaattgtgacccccatcccaaggggatgccaaaatttctctcattcttttggtataaacttaacattagccagggaggttctggctaacgttaaatgctgctatacaactgctttgcaacagttgctggtatatttaaatcattaaatttcagcatttactaata

SEQ ID NO: 8438 - DNA, 3454 bp, Artificial Sequence
  derived and/or modified sequence
tcccttcctgctgccaccttcccgccagccacagggatctgattcctcccagggggatgtcctgcgcctcagggtccggtggtggcctgcggcatcccttgcggtgccagaagccgtgggacgaggagtgtgaggaagaggctgtctgtgtcattatgtgtgcgtcggtcaagtataatatccggggtcctgccctcatcccaagaatgaagaccaagcaccgaatctactatatcaccctcttctccattgtcctcctgggcctcattgccactggcatgtttcagttttggccccattctatcgagtcctcaaatgactggaatgtagagaagcgcagcatccgtgatgtgccggttgttaggctgccagccgacagtcccatcccagagcggggggatctcagttgcagaatgcacacgtgttttgatgtctatcgctgtggcttcaacccaaagaacaaaatcaaggtgtatatctatgctctgaaaaagtacgtggatgactttggcgtctctgtcagcaacaccatctcccgggagtataatgaactgctcatggccatctcagacagtgactactacactgatgacatcaaccgggcctgtctgtttgttccctccatcgatgtgcttaaccagaacacactgcgcatcaaggagacagcacaagcgatggcccagctctctaggtgggatcgaggtacgaatcacctgttgttcaacatgttgcctggaggtcccccagattataacacagccctggatgtccccagagacagggccctgttggctggtggcggcttttctacgtggacttaccggcaaggctacgatgtcagcattcctgtctatagtccactgtcagctgaggtggatcttccagagaaaggaccaggtccacggcaatacttcctcctgtcatctcaggtgggtctccatcctgagtacagagaggacctagaagccctccaggtcaaacatggagagtcagtgttagtactcgataaatgcaccaacctctcagagggtgtcctttctgtccgtaagcgctgccacaagcaccaggtcttcgattacccacaggtgctacaggaggctactttctgtgtggttcttcgtggagctcggctgggccaggcagtattgagcgatgtgttacaagctggctgtgtcccggttgtcattgcagactcctatattttgcctttctctgaagttcttgactggaagagagcatctgtggttgtaccagaagaaaagatgtcagatgtgtacagtattttgcagagcatcccccaaagacagattgaagaaatgcagagacaggcccggtggttctgggaagcgtacttccagtcaattaaagccattgccctggccaccctgcagattatcaatgaccggatctatccatatgctgccatctcctatgaagaatggaatgaccctcctgctgtgaagtggggcagcgtgagcaatccactcttcctcccgctgatcccaccacagtctcaagggttcaccgccatagtcctcacctacgaccgagtagagagcctcttccgggtcatcactgaagtgtccaaggtgcccagtctatccaaactacttgtcgtctggaataatcagaataaaaaccctccagaagattctctctggcccaaaatccgggttccattaaaagttgtgaggactgctgaaaacaagttaagtaaccgtttcttcccttatgatgaaatcgagacagaagctgttctggccattgatgatgatatcattatgctgacctctgacgagctgcaatttggttatgaggtctggcgggaatttcctgaccggttggtgggttacccgggtcgtctgcatctctgggaccatgagatgaataagtggaagtatgagtctgagtggacgaatgaagtgtccatggtgctcactggggcagctttttatcacaagtattttaattacctgtatacctacaaaatgcctggggatatcaagaactgggtagatgctcatatgaactgtgaagatattgccatgaacttcctggtggccaacgtcacgggaaaagcagttatcaaggtaaccccacgaaagaaattcaagtgtcctgagtgcacagccatagatgggctttcactagaccaaacacacatggtggagaggtcagagtgcatcaacaagtttgcttcagtcttcgggaccatgcctctcaaggtggtggaacaccgagctgaccctgtcctgtacaaagatgactttcctgagaagctgaagagcttccccaacattggcagcttatgaaacgtgtcattggtggaggtctgaatgtgaggctgggacagagggagagaacaaggcctcccagcactctgatgtcagagtagtaggttaagggtggaaggttgacctacttggatcttggcatgcacccacctaacccactttctcaagaacaagaacctagaatgaatatccaagcacctcgagctatgcaacctctgttcttgtatttcttatgatctctgatgggttcttctcgaaaatgccaagtggaagactttgtggcatgctccagatttaaatccagctgaggctccctttgttttcagttccatgtaacaatctggaaggaaacttcacggacaggaagactgctggagaagagaagcgtgttagcccatttgaggtctggggaatcatgtaaagggtacccagacctcacttttagttatttacatcaatgagttctttcagggaaccaaacccagaattcggtgcaaaagccaaacatcttggtgggatttgataaatgccttgggacctggagtgctgggcttgtgcacaggaagagcaccagccgctgagtcaggatcctgtcagttccatgagctattcctctttggtttggctttttgatatgattaaaattattttttattcctttttctactgtgtcttaaacaccaattcctgatagtccaaggaaccacctttctcccttgatatatttaactccgtctttggcctgacaacagtcttctgcccatgtctgggaacacacgccaggaggaatgtctgataccctctgcatcaagcgtaagaaggtcccaaatcataaccattttaagaacagatgactcagaaacctccagaggaatctgtttgcttcctgattagatccagtcaatgttttaaaggtattgtcagagaaaaacagagggtctgtactagccatgcaaggagtcgctctagctggtacccgtaaaagttgtgggaattgtgacccccatcccaaggggatgccaaaatttctctcattcttttggtataaacttaacattagccagggaggttctggctaacgttaaatgctgctatacaactgctttgcaacagttgctggtatatttaaatcattaaatttcagcatttactaatactgc

SEQ ID NO: 8439 - DNA, 580 bp, Artificial Sequence
  derived and/or modified sequence
gtgtcagacggcccggatcccggttaccggcccctcgctcgctgctcgccagcccagactcggccctggcagtggcggctggcgattcggaccgatccgacctgggcggaggtggcccgcgccccgcggcatgagccggtgaccaagctcggggccgagcgggaggcagccgtggccgagtgtctttaatgttatagagctactcagagttgctgtttctccttgagatgcttttggtgttggggaaccactgattcaagtatacacatagaccttgagagcttcttgggaagttctaacatgggccagcggagggcagctccttgcctgcatttgtcccaaaacttcctgtcttcaaactccaggagggatatgcagaatggcaaggaagccataccatagggagtgtgaggaagaggctgtctgtgtcattatgtgtgcgtcggtcaagtataatatccggggtcctgccctcatcccaagaatgaagaccaagcaccgaatctactatatcaccctcttctccattgtcctcctgggcctcattgccactggcatgtttcagttttggccccattct

SEQ ID NO: 8440 - DNA, 3136 bp, Artificial Sequence
  derived and/or modified sequence
ctgtctgagcatttcactgcggagcctgagcgcgcctgcctgggaaaacactgcagcggtgctcggactcctcctgtccagcaggaggcgcggcccggcagctcccgcatgcgcagtgcgctcggtgtcagacggcccggatcccggttaccggcccctcgctcgctgctcgccagcccagactcggccctggcagtggcggctggcgattcggaccgatccgacctgggcggaggtggcccgcgccccgcggcatgagccggtgaccaagctcggggccgagcgggaggcagccgtggccgaggagtgtgaggaagaggctgtctgtgtcattatgtgtgcgtcggtcaagtataatatccggggtcctgccctcatcccaagaatgaagaccaagcaccgaatctactatatcaccctcttctccattgtcctcctgggcctcattgccactggcatgtttcagttttggccccattctatcgagtcctcaaatgactggaatgtagagaagcgcagcatccgtgatgtgccggttgttaggctgccagccgacagtcccatcccagagcggggggatctcagttgcagaatgcacacgtgttttgatgtctatcgctgtggcttcaacccaaagaacaaaatcaaggtgtatatctatgctctgaaaaagtacgtggatgactttggcgtctctgtcagcaacaccatctcccgggagtataatgaactgctcatggccatctcagacagtgactactacactgatgacatcaaccgggcctgtctgtttgttccctccatcgatgtgcttaaccagaacacactgcgcatcaaggagacagcacaagcgatggcccagctctctaggtgggatcgaggtacgaatcacctgttgttcaacatgttgcctggaggtcccccagattataacacagccctggatgtccccagagacagggccctgttggctggtggcggcttttctacgtggacttaccggcaaggctacgatgtcagcattcctgtctatagtccactgtcagctgaggtggatcttccagagaaaggaccaggtccacggcaatacttcctcctgtcatctcaggtgggtctccatcctgagtacagagaggacctagaagccctccaggtcaaacatggagagtcagtgttagtactcgataaatgcaccaacctctcagagggtgtcctttctgtccgtaagcgctgccacaagcaccaggtcttcgattacccacaggtgctacaggaggctactttctgtgtggttcttcgtggagctcggctgggccaggcagtattgagcgatgtgttacaagctggctgtgtcccggttgtcattgcagactcctatattttgcctttctctgaagttcttgactggaagagagcatctgtggttgtaccagaagaaaagatgtcagatgtgtacagtattttgcagagcatcccccaaagacagattgaagaaatgcagagacaggcccggtggttctgggaagcgtacttccagtcaattaaagccattgccctggccaccctgcagattatcaatgaccggatctatccatatgctgccatctcctatgaagaatggaatgaccctcctgctgtgaagtggggcagcgtgagcaatccactcttcctcccgctgatcccaccacagtctcaagggttcaccgccatagtcctcacctacgaccgagtagagagcctcttccgggtcatcactgaagtgtccaaggtgcccagtctatccaaactacttgtcgtctggaataatcagaataaaaaccctccagaagattctctctggcccaaaatccgggttccattaaaagttgtgaggactgctgaaaacaagttaagtaaccgtttcttcccttatgatgaaatcgagacagaagctgttctggccattgatgatgatatcattatgctgacctctgacgagctgcaatttggttatgaggtctggcgggaatttcctgaccggttggtgggttacccgggtcgtctgcatctctgggaccatgagatgaataagtggaagtatgagtctgagtggacgaatgaagtgtccatggtgctcactggggcagctttttatcacaagtattttaattacctgtatacctacaaaatgcctggggatatcaagaactgggtagatgctcatatgaactgtgaagatattgccatgaacttcctggtggccaacgtcacgggaaaagcagttatcaaggtaaccccacgaaagaaattcaagtgtcctgagtgcacagccatagatgggctttcactagaccaaacacacatggtggagaggtcagagtgcatcaacaagtttgcttcagtcttcgggaccatgcctctcaaggtggtggaacaccgagctgaccctgtcctgtacaaagatgactttcctgagaagctgaagagcttccccaacattggcagcttatgaaacgtgtcattggtggaggtctgaatgtgaggctgggacagagggagagaacaaggcctcccagcactctgatgtcagagtagtaggttaagggtggaaggttgacctacttggatcttggcatgcacccacctaacccactttctcaagaacaagaacctagaatgaatatccaagcacctcgagctatgcaacctctgttcttgtatttcttatgatctctgatgggttcttctcgaaaatgccaagtggaagactttgtggcatgctccagatttaaatccagctgaggctccctttgttttcagttccatgtaacaatctggaaggaaacttcacggacaggaagactgctggagaagagaagcgtgttagcccatttgaggtctggggaatcatgtaaagggtacccagacctcacttttagttatttacatcaatgagttctttcagggaaccaaacccagaattcggtgcaaaagccaaacatcttggtgggatttgataaatgccttgggacctggagtgctgggcttgtgcacaggaagagcaccagccgctgagtcaggatcctgtcagttccatgagctattcctctttggtttggctttttgatatgattaaaattattttttattccttttt

SEQ ID NO: 8441 - DNA, 2157 bp, Artificial Sequence
  derived and/or modified sequence
atgtgtgcctctgtgaagtacaacatccggggccctgccctgatccccaggatgaagaccaagcaccgcatctactacatcaccctcttcagcatcgtgctgctgggcctcatcgccaccggcatgttccagttctggccccacagcattgagagcagcaatgactggaatgtggagaagaggagcatcagagatgtgcctgtggtgcggctgcctgctgacagccccatccctgagcggggggacctgagctgcaggatgcacacctgctttgatgtgtaccgctgtggcttcaaccccaagaacaagatcaaggtgtacatctatgccctgaagaagtatgtggatgactttggagtgtctgtgagcaacaccatcagccgggagtacaatgagctgctgatggccatcagtgacagcgactactacacagatgacatcaacagagcctgcctgtttgtgcccagcattgatgtgctgaaccagaacaccctgcgcatcaaggagacagcccaggccatggcccagctgagccgctgggaccggggcaccaaccacctgctcttcaacatgctgcccggcggccccccagactacaacacagccctggatgtgccccgggaccgggccctgctggccggcggcggcttcagcacctggacctaccggcagggctatgatgtgtccatccctgtgtacagccccctgtctgctgaggtggacctgcctgagaagggccctggcccccggcagtacttcctgctgagcagccaggtgggcctgcaccctgagtaccgggaggacctggaggccctgcaggtgaagcacggggagagcgtgctggtgctggacaagtgcaccaacctgtctgagggcgtgctgtctgtgaggaagcgctgccacaagcaccaggtgtttgactacccccaggtgctgcaggaggccaccttctgtgtggtgctgcggggggcccggctgggccaggccgtgctgagtgatgtgctgcaggccggctgtgtgcctgtggtgattgctgacagctacatcctgcccttcagcgaggtgctggactggaagagggcctctgtggtggtgcctgaggagaagatgtctgatgtgtacagcatcctgcagagcatcccccagaggcagatcgaggagatgcagaggcaggcccgctggttctgggaggcctacttccagagcatcaaggccatcgccctggccaccctgcagatcatcaatgaccgcatctacccctatgctgccatctcctatgaggagtggaatgaccccccagctgtgaagtggggctctgtgagcaaccccctcttcctgcccctcatccccccccagagccagggcttcaccgccatcgtgctgacctatgacagagtggagagcctcttccgggtcatcacagaggtgtccaaggtgcccagcctgagcaagctgctggtggtgtggaacaaccagaacaagaaccccccagaggacagcctgtggcccaagatccgggtgcccctgaaggtggtgaggacagctgagaacaagctgagcaaccgcttcttcccctatgatgaaattgaaacagaagctgtgctggccattgatgatgacatcatcatgctgaccagtgatgagctgcagtttggctatgaggtgtggagggagttcccagaccggctggtgggctacccaggccgcctgcacctgtgggaccacgagatgaacaagtggaagtatgagagcgagtggaccaatgaggtgtccatggtgctgactggagctgccttctaccacaagtacttcaactacctgtacacctacaagatgcctggggacatcaagaactgggtggatgcccacatgaactgtgaagatattgccatgaacttcctggtggccaacgtgacaggcaaggccgtcatcaaggtgacccccaggaagaagttcaagtgcccagagtgcacagccattgatggcctgagcctggaccagacccacatggtggagaggtctgagtgcatcaacaagtttgcctctgtgtttggcaccatgcccctgaaggtggtggagcacagagctgaccctgtgctgtacaaggatgacttccctgagaagctgaagagcttccccaacatcggcagcctgtag

SEQ ID NO: 8442 - DNA, 2256 bp, Artificial Sequence
  derived and/or modified sequence
atgagctgtgccagcggcagcggcggcggcctgcggcaccccctgcgctgccagaagccctgggatgaggagtgtgaggaggaggccgtgtgtgtgatcatgtgtgcctctgtgaagtacaacatccggggccctgccctgatccccaggatgaagaccaagcaccgcatctactacatcaccctcttcagcatcgtgctgctgggcctgattgccaccggcatgttccagttctggccccacagcattgagagcagcaatgactggaatgtggagaagaggagcatcagagatgtgcctgtggtgcggctgcctgctgacagccccatccctgagcggggggacctgagctgcaggatgcacacctgctttgatgtgtaccgctgtggcttcaaccccaagaacaagatcaaggtgtacatctatgccctgaagaagtatgtggatgactttggagtgtctgtgagcaacaccatcagccgggagtacaatgagctgctgatggccatcagtgacagcgactactacacagatgacatcaacagagcctgcctgtttgtgcccagcattgatgtgctgaaccagaacaccctgcgcatcaaggagacagcccaggccatggcccagctgagccgctgggaccggggcaccaaccacctgctcttcaacatgctgcccggcggccccccagactacaacacagccctggatgtgccccgggaccgggccctgctggccggcggcggcttcagcacctggacctaccggcagggctatgatgtgtccatccctgtgtacagccccctgtctgctgaggtggacctgcctgagaagggccctggcccccggcagtacttcctgctgagcagccaggtgggcctgcaccctgagtaccgggaggacctggaggccctgcaggtgaagcatggagagagcgtgctggtgctggacaagtgcaccaacctgtctgaaggagtgctgtctgtgaggaagcgctgccacaagcaccaggtgtttgactacccccaggtgctgcaggaggccaccttctgtgtggtgctgcggggggcccggctgggccaggccgtgctgagtgatgtgctgcaggccggctgtgtgcctgtggtgattgctgacagctacatcctgcccttcagcgaggtgctggactggaagagggcctctgtggtggtgcctgaggagaagatgtctgatgtgtacagcatcctgcagagcatcccccagaggcagatcgaggagatgcagaggcaggcccgctggttctgggaggcctacttccagagcatcaaggccatcgccctggccaccctgcagatcatcaatgaccgcatctacccctatgctgccatctcctatgaggagtggaatgaccccccagctgtgaagtggggctctgtgagcaaccccctcttcctgcccctcatccccccccagagccagggcttcaccgccatcgtgctgacctatgacagagtggagagcctcttccgggtcatcacagaggtgtccaaggtgcccagcctgagcaagctgctggtggtgtggaacaaccagaacaagaaccccccagaggacagcctgtggcccaagatccgggtgcccctgaaggtggtgaggacagctgagaacaagctgagcaaccgcttcttcccctatgatgaaattgaaacagaggccgtgctggccattgatgatgacatcatcatgctgaccagtgatgagctgcagtttggctatgaggtgtggagggagttcccagaccggctggtgggctacccaggccgcctgcacctgtgggaccacgagatgaacaagtggaagtatgaaagtgagtggaccaatgaggtgtccatggtgctgaccggggccgccttctaccacaagtacttcaactacctgtacacctacaagatgcctggggacatcaagaactgggtggatgcccacatgaactgtgaggacatcgccatgaacttcctggtggccaacgtgacaggcaaggctgtgatcaaggtgacccccaggaagaagttcaagtgcccagaatgtacagccattgatggcctgagcctggaccagacccacatggtggagaggtctgagtgcatcaacaagtttgcctctgtgtttggcaccatgcccctgaaggtggtggagcacagagctgaccctgtgctgtacaaggatgacttccctgagaagctgaagagcttccccaacatcggcagcctgtag

SEQ ID NO: 8443 - DNA, 2157 bp, Artificial Sequence
  derived and/or modified sequence
atgtgcgccagcgtgaagtacaacatccggggccccgccctgatcccacggatgaaaaccaaacatcgaatctattatattaccctgttcagcattgttctcctcgggctgatcgcgactggcatgtttcaattttggccccactctatcgaatcttctaacgattggaacgttgagaaacgttcgatccgggacgtgccagtagttcggctccctgctgactcaccaattcctgaaagaggggatctaagttgccgcatgcacacctgtttcgatgtttacaggtgtggtttcaatccgaagaacaagattaaggtctacatttacgccctgaagaagtatgtcgatgacttcggagtaagcgtgtctaataccatcagtcgggaatacaacgagctcctcatggcaattagtgactctgactattacactgatgatataaatagagcttgtttgttcgtgcccagtatcgacgttctaaaccagaacactctgagaatcaaagagaccgcacaagccatggcccagctcagcaggtgggataggggtactaatcatctcctgttcaacatgctccccggaggacctcccgattataacacggcattagatgttccgcgggaccgcgcgttactggctggaggtggattcagtacctggacctacaggcaggggtatgacgtgagtatccctgtgtattcccctctttccgccgaagtggacctgcccgaaaaaggaccagggccccggcagtatttcctcctctcgagccaggtggggttgcatcctgagtacagggaggacctggaagccttgcaggtgaagcacggagagagtgtgcttgtcttggataagtgcacaaacctttccgaaggcgtgctgagtgttcgcaaacgatgccacaagcaccaggtatttgactatccgcaagtgctgcaggaagccacattttgtgtggttttgcggggagcccgattgggccaggccgtcctgagcgatgtgctccaagcaggctgcgttcctgtagtgattgcagactcatacatcctgccattttccgaagtgcttgactggaagagagctagcgtcgtagtgccggaggaaaagatgtccgacgtgtactctatcctgcagtcaatccctcagcgacagatcgaggaaatgcagcggcaagcccggtggttttgggaggcctactttcagagcatcaaggccatcgctctcgccaccctgcagatcattaatgatcggatttatccttatgctgctatttcctacgaagaatggaacgatccacctgctgtcaagtggggttccgtgtccaacccactgttcctgcccctgatccctccacaatcccagggattcaccgccatcgtgttgacgtatgatcgagtggagagcctcttccgcgtgattaccgaggtaagcaaggtgcctagcctgtcaaagctgctagtggtctggaacaatcagaataaaaacccacctgaggacagtctctggcccaagatacgggttcccctgaaggtggtgagaaccgccgagaacaaactttccaaccggttctttccctacgatgagatagagaccgaggccgtgctggcaatcgacgacgatatcatcatgctgacatcagacgagctgcagtttggttatgaagtctggagagagtttccagacaggcttgtgggctatcccggtaggctccacctgtgggatcacgaaatgaacaaatggaaatatgaaagtgaatggaccaatgaggtgtccatggtgctcacgggggccgccttttaccataagtatttcaattatctgtacacatacaagatgccaggcgacatcaaaaattgggttgacgcgcacatgaactgcgaggatatcgccatgaactttctggtagctaatgtgaccggaaaagctgtgatcaaggtcacgccaaggaagaagttcaagtgccccgaatgcacagcaattgacggactatctctcgaccagactcatatggtggaacgcagcgagtgcatcaataaattcgcgtccgtcttcggcacaatgccactaaaggtggtggaacatcgggcggacccagtgctgtacaaagatgacttccccgagaagctgaaatcctttcccaacattggcagcctgtag

SEQ ID NO: 8444 - DNA, 2256 bp, Artificial Sequence
  derived and/or modified sequence
atgagctgcgccagcggcagcggcggcggcctgcggcaccccctgagatgtcagaaaccatgggatgaagaatgtgaagaagaggctgtttgcgtcatcatgtgcgcgtcggttaagtataatatccgtggtccggctctgatcccacggatgaagacaaagcaccgcatctattatattacactgtttagcattgtgcttctgggattgattgccacaggaatgttccagttttggcctcactctattgagtctagcaacgactggaacgtcgagaagcggtccatccgggatgtgccagtggttcgcctgccagccgactccccgatacctgagcgtggggacctgtcctgccggatgcatacatgcttcgacgtttatcgctgtggcttcaatcctaaaaacaaaattaaggtgtatatttatgctctcaagaagtacgttgacgactttggtgttagcgtgtcaaacacgattagtagagaatacaatgaactgctcatggcgatctccgatagcgactactacaccgacgacatcaaccgcgcatgtctatttgtgcctagcatcgatgtcttaaatcaaaacacgctgaggatcaaagagaccgcacaggctatggcccagctgtctagatgggatagaggcacgaaccatctgctcttcaacatgctccccggaggcccccctgattacaacactgcactggatgttccccgcgatcgggctctcttggcaggcggaggcttttccacctggacatatcgccagggctatgacgtctctattccagtgtattctcccctctctgccgaagttgacttacctgagaaggggcccggacccagacagtacttcctgcttagtagccaggtggggctccatcctgaataccgggaagacctggaagccctacaggttaagcacggggagtcggttttagtcctggacaaatgtactaatctttcggagggggtgctcagcgtccggaagcggtgtcataagcaccaggtttttgactatcctcaagtgttacaggaggccactttctgcgtggtcctccgaggggctaggctggggcaagctgtgctgtctgacgtgctacaggctgggtgcgttcccgttgtgatcgcagactcttatatcttaccgtttagtgaagtgctggattggaaacgtgcctcggtcgtagtgccagaggagaagatgagcgatgtttactccatcctgcaatcaatcccccaacggcagatagaagaaatgcaaagacaggctaggtggttctgggaggcctacttccagagcatcaaggccatagcgctggccaccctccagatcattaacgatcggatctacccctacgctgccattagctatgaggagtggaacgacccaccagccgtgaaatggggttctgtcagtaatcctctttttcttccactcatcccacctcaatctcagggctttacagctatcgtcctgacatacgatagggtcgagtctctgttcagggtcataacagaagtatcaaaagtgccctcactttctaagcttctggtagtttggaataaccagaacaaaaacccccccgaggatagtctgtggccgaaaattcgggtgcctcttaaagtagtacgaaccgcagagaataagctttctaaccgcttcttcccatacgatgagattgagaccgaggccgttttagctattgacgatgatattatcatgcttacctccgacgagttgcagttcgggtacgaagtgtggcgcgagttccccgataggctggtgggatacccgggccggttgcacctgtgggaccacgaaatgaataagtggaaatacgagtctgagtggacaaacgaagttagtatggtacttaccggagcagcgttttatcacaagtatttcaattatctgtacacctacaaaatgccaggagatattaagaattgggtcgatgcgcatatgaattgtgaggacatagccatgaactttctagtcgctaacgttaccggaaaagctgtgattaaagtgacaccacgcaaaaagttcaaatgtcctgaatgtacagccatagatggtctgtcattggaccagacacacatggtggagcgatcagagtgtatcaacaaatttgcatccgtgtttggcaccatgccactcaaagtggtggaacatcgcgctgacccggtcctgtacaaggatgactttcccgagaaactcaaaagcttccctaacatcgggagcctttag

SEQ ID NO: 8445 - DNA, 2157 bp, Artificial Sequence
  derived and/or modified sequence
atgtgcgccagcgtgaagtacaacatccggggccccgccctgatcccgaggatgaaaactaaacataggatctattacattacgttattctcgattgtgctgctgggcctgatcgcgactggtatgttccaattttggcctcactccattgagtctagtaatgattggaacgtcgagaaacgatccattcgggatgtgcccgtggtacgactgcccgcggatagccccatcccagaaagaggggacctctcttgtagaatgcatacctgctttgatgtataccggtgtggcttcaaccctaagaacaagattaaagtctacatctatgcactgaagaaatatgtcgatgattttggggttagcgtatcaaacactattagccgagaatataatgagctgctgatggctatctcagattcagattactataccgacgacattaatagggcctgccttttcgtcccctctatcgatgtgcttaatcaaaacactctgagaatcaaagaaacggctcaggcaatggcccagttaagtcggtgggatagaggaactaaccacttgctgtttaacatgcttccagggggaccaccggattacaacaccgcactggacgtaccaagggaccgtgccctgctggcggggggtggctttagtacttggacttacaggcagggctacgacgtgtccatacccgtttactctccattgtccgccgaagttgatctgccagaaaaggggccaggtccacgacagtatttcctgttgagcagccaggtgggcctccatcccgagtatcgtgaggatcttgaagctctgcaagttaaacacggtgaatccgtcctggtcctggacaagtgtacaaatctgtccgaaggagtgttgagcgtcagaaagaggtgtcataagcaccaggtgttcgactacccccaagtcctgcaagaggccacattctgcgtcgtcctcaggggggcccggctcgggcaggcagtgctgagcgacgtgctccaggcggggtgtgtgccagtagtgatcgcagacagctacattctcccgttctccgaggtgctggattggaaacgagcctcagtcgtggtccccgaggaaaaaatgagcgacgtgtattctatactgcagtccatcccgcaaaggcagattgaggagatgcaacgccaagccagatggttttgggaggcctacttccagtccatcaaggccatcgcactagcaaccctccagatcatcaatgaccgcatctatccgtacgccgctatctcctacgaggaatggaatgatcctccggctgtgaagtggggttcggtgagtaatccattgttcctgcccctcattccaccacagtcccagggatttactgccatagttctgacttacgacagggtggaatctctctttcgggtgataacagaagtgtccaaagtcccaagtctgagcaagctgctcgtcgtgtggaataatcagaacaaaaatccccctgaggatagcctctggcccaaaattagggtgcccctaaaggtagtacgcactgcagaaaataagctgtctaacaggttctttccctatgatgaaatagagacagaggcagtgctggctatcgacgacgacattatcatgctgacaagcgatgaactgcagttcggctacgaagtgtggcgggaattccctgaccgcctggtgggatatcctggcagactccacctgtgggatcacgagatgaacaagtggaaatacgagtccgagtggaccaacgaagttagtatggtgctaaccggcgctgctttctaccacaaatacttcaactacctctacacttataagatgccaggtgatatcaaaaactgggttgacgcgcatatgaactgcgaggacattgccatgaattttttggtagcgaatgtcacaggtaaggctgtgatcaaggttaccccccgcaaaaagtttaagtgtcccgagtgcacggccatcgacgggctatccttggaccaaactcatatggtagagaggtctgaatgcatcaataaatttgcatcagtgttcggaaccatgcccctgaaagtggtggaacatcgcgccgacccagttctttataaagatgacttccctgagaagctgaaaagtttccccaacatcgggtctttgtag

SEQ ID NO: 8446 - DNA, 2157 bp, Artificial Sequence
  derived and/or modified sequence
atgtgcgcatctgtgaaatataacattcgcggtcccgcactcatcccacgtatgaagacaaagcatcgaatttactacattactctgttttcgatcgtgctgctggggctgattgcaaccggaatgttccagttctggcctcattccatcgagagttctaatgactggaatgtcgagaagagatcaatacgagacgtgcccgtggtgcggttgccagccgattcacctattccagagagaggggatttgtcatgccgtatgcacacctgctttgacgtgtataggtgcggattcaacccaaagaataagatcaaggtatacatttacgcactgaaaaaatatgttgacgacttcggtgtcagtgtgtctaacaccatttcaagggaatataacgagctacttatggccatctcagatagcgactattacacagatgatataaatagggcttgtctcttcgtgccatctatcgatgtgctgaaccaaaacaccctccgcatcaaggagaccgcacaggccatggcccagttaagccggtgggatcggggaaccaatcatctcctctttaatatgcttcctggcggacccccagattataacacagcgctggacgtgccacgagaccgggctctgttagcaggtggcggtttttccacatggacctatagacaggggtatgacgtgtcaataccagtctattctcccctcagcgcagaggtagacctgcctgaaaagggtccgggtccaagacaatatttcctcctgagctctcaggtggggcttcatcctgaataccgtgaggaccttgaagccttacaggtgaagcatggcgagtctgtcctcgtcctggataaatgcaccaacctgagtgagggcgttttgagcgtgcgcaaaagatgtcacaaacatcaggtgtttgactaccctcaggtacttcaagaggccactttttgtgtagttctgcgcggtgcaaggctcggccaagccgtcctctcagacgtgctgcaagccggatgcgttcctgttgtgatcgccgatagctatattttacctttttccgaggtcctggattggaagagggcgagcgtcgtggtcccagaggaaaagatgagcgacgtctactctatcctgcaatctatcccacaaagacagatcgaagaaatgcagagacaagcaaggtggttttgggaggcctacttccagtcaattaaagcaatcgccctggccaccctgcagattatcaatgatcgaatctacccatacgccgcaatcagctatgaagagtggaacgacccacccgcagtaaaatggggatcagtcagcaatcccttgttcctccctttgatcccgccacaatcccagggattcaccgcaatagtgctaacgtacgatagagtggaaagtttgtttcgcgtgattaccgaagtatctaaggtgccgtccctgtcgaagttgttagtggtttggaataaccaaaataaaaacccaccggaggattcactctggcctaaaattagggtcccgctgaaggtggtgaggactgctgagaacaagttgtcgaataggtttttcccatatgacgagattgaaacagaagcagtgcttgccatcgatgacgacattataatgctgacgtcggatgagttgcagtttgggtatgaggtctggcgggagttccccgaccgtctggtcgggtatccgggaaggttacacctgtgggaccatgagatgaataaatggaaatacgagtcagaatggacaaatgaggtaagtatggtactgactggcgctgccttctatcacaagtattttaattacctgtacacttacaaaatgcccggtgatattaaaaattgggtcgacgcccatatgaactgcgaagatatagccatgaacttcttagtagcgaatgtgaccggaaaggcagtcatcaaggtgactcctcgtaagaagttcaagtgtcccgaatgcacagcgattgacggcctgtcccttgaccaaacccatatggtcgagcgttcagagtgcatcaataagtttgccagcgtgtttggaactatgcctctaaaagtggtcgaacaccgcgctgaccctgttctctataaagacgactttcccgagaagctaaagtccttcccgaacatcgggtcgctgtag

SEQ ID NO: 8447 - DNA, 2256 bp, Artificial Sequence
  derived and/or modified sequence
atgagttgcgctagcggaagcggtgggggattaaggcacccactgaggtgccaaaaaccttgggacgaagagtgcgaagaggaggctgtgtgcgtgatcatgtgcgcgtccgtgaaatataacatccggggacccgctctgattcccagaatgaaaactaagcaccgcatttattacataacactgtttagcatcgtgttactggggttgatcgccacaggaatgtttcagttctggccccactccatcgaatcctccaatgactggaacgttgagaagaggtcaatacgagacgtgcccgtagttagactccctgctgattcacctattcccgagaggggggacttatcctgccgaatgcacacttgctttgacgtgtacaggtgcgggtttaaccctaagaacaaaatcaaggtgtatatatacgcactcaaaaaatacgtggatgacttcggcgtgtctgtgtccaataccatctcaagggagtataatgagcttcttatggccattagtgacagcgattattatacggacgacattaatcgggcatgcctgtttgtacccagtattgatgtgctgaaccaaaacacactcagaatcaaggaaacagctcaagcaatggcgcagttgtctaggtgggaccgcggaacaaaccacttgctgtttaatatgctacctggagggccacctgattataacactgctcttgacgtcccaagggatagggcgctgcttgcaggagggggattttccacttggacatacaggcagggttatgacgttagtatccctgtgtactctcctctcagcgccgaagtggatctccccgagaaggggccaggtccgcgacaatacttcctgctttcctcgcaggttggcctacatccagaatatagggaggacctggaggccctgcaggtcaaacatggggagtcggtactggtgctagacaaatgtactaacctcagcgaaggagtgctctctgtgaggaagcgctgtcataagcatcaggtgttcgattacccccaagtactacaggaggctacattttgcgtggtgctgagaggcgcacggctcggccaggccgtgttgtccgacgtgctgcaggccggttgcgtgcctgtggtgatcgcagacagttacatactgccctttagtgaggtcttagattggaagagagccagcgtggtggtgcccgaggaaaaaatgtcagatgtctatagtatcctccagtcaattccccagcgacaaatcgaagagatgcagcggcaggctcgctggttctgggaggcctatttccaatctatcaaagctatcgccctggcaacactgcagattattaatgaccggatctacccctacgctgcaataagctacgaggagtggaacgacccacctgctgtgaagtggggctcggtctctaatccattgtttctgccactcattcccccacagagccagggctttaccgcgattgtgctgacctatgatcgggttgaatcgctctttagggttattacagaggtgagcaaggttccttccctcagcaagcttctcgtcgtgtggaacaatcaaaacaagaacccaccagaggactcactgtggccaaagattcgggtaccacttaaggtggttcgtaccgctgaaaacaagctatccaataggttctttccttatgacgagatagagactgaggcggtcctggctattgatgatgacattataatgttaacgagcgacgagctgcagttcggatacgaggtgtggcgagaatttcctgaccgactcgtgggttatcccggaaggctgcacctatgggatcacgaaatgaacaaatggaagtacgagtctgaatggaccaacgaggtgtcaatggttctgactggcgctgccttctaccataaatattttaattacctctacacctataaaatgcctggggacatcaaaaattgggtggacgctcatatgaactgcgaagatatagccatgaattttctggtggctaacgttaccggcaaggcggtgattaaggtgacgccaagaaagaaattcaagtgcccagaatgtactgccatagacggactcagccttgatcagacacacatggtggaacggagtgagtgtattaataaatttgccagcgtgtttggcaccatgcccctcaaggtcgtggagcatcgcgcagatcccgtcctgtataaggacgactttcctgaaaaactcaaatcatttcctaacatcggctctctgtag

SEQ ID NO: 8448 - DNA, 2157 bp, Artificial Sequence
  derived and/or modified sequence
atgtgcgcatctgttaaatacaacatccgtggccctgctctcattcctcgcatgaagactaaacatcgaatttactatattaccttattttctattgttctgcttggcttgattgccacgggtatgttccagttttggccgcattccatcgaaagctcgaacgattggaacgtggaaaagagaagtattcgagatgtccctgtggttaggctgccagccgattcccccatccccgagcggggtgatctgtcctgtaggatgcatacttgttttgatgtgtataggtgcggttttaaccccaagaacaagattaaagtttatatctatgcccttaaaaagtacgtggatgactttggggtctcagtctccaatacgatctcgcgtgagtacaacgaattgctcatggccatttcagactctgactattacaccgatgatattaacagagcttgtttgttcgttcccagcattgacgtgttgaaccagaacacactgaggatcaaagaaaccgcacaggcaatggcccagctttcaagatgggaccgcggaactaatcatctgctatttaatatgctgccaggcggacccccagattacaacacggctttagatgtgccccgagacagggccctgttagctggtgggggattttccacatggacgtatagacagggctatgacgtcagtatccccgtttactcccccttgtccgccgaggtagatctgccagagaaaggacccggaccaaggcagtatttccttttgagctcccaagtggggctccacccagaataccgggaggatcttgaggctctccaagtgaaacatggcgagtctgttttggtgctggacaaatgtacaaacctgtccgagggggtgctgagcgtgcgcaaacggtgtcacaagcaccaagtcttcgattatcctcaagtgctccaggaagctacgttctgcgtggtcctgaggggcgctaggctggggcaagccgtgctgagtgatgtgctacaggcaggatgtgttccagtggtcattgcagactcctacatccttcccttctccgaagtgctggactggaaaagggcctctgtggtcgtgcctgaggagaagatgtctgatgtttactctatcctgcagagcattccccaacggcagatcgaagaaatgcaacgccaagcgaggtggttttgggaggcctacttccagtctataaaagccatcgctcttgccaccttgcagattatcaatgatcgcatttatccgtatgccgcaatcagttacgaagagtggaatgacccgcctgctgtcaagtggggaagcgtctcaaacccgctgtttctgcctttgatcccccctcagagccagggctttactgccatcgtcctgacctatgacagggtagagtccctttttagggtgatcactgaagtctccaaagtgcctagcttgtccaaactcctggtggtatggaacaaccagaataagaatcctcctgaggattccctgtggcccaagatccgggttcccctgaaggtggtacgcaccgctgagaacaaactaagtaaccgtttcttcccttacgacgagattgagactgaggcagttctcgctatcgatgacgatatcatcatgctaacatccgatgaactccaatttgggtacgaagtgtggcgggaattccctgaccgcctggtgggttaccctggtcggctgcacctgtgggaccacgagatgaacaagtggaagtacgagagtgaatggacaaacgaagtgtctatggtactgacaggagctgccttctatcataaatacttcaattatttgtacacctacaaaatgcccggagatatcaagaactgggtcgacgcccacatgaactgcgaggacattgcaatgaatttccttgtcgccaacgtgaccggtaaagccgtcatcaaggtcactcccagaaaaaaattcaagtgccccgaatgtaccgccatagacggtctatccctggatcagacgcatatggtcgagcgaagtgagtgcatcaacaagtttgcttccgtgtttggaaccatgccactgaaggttgtagagcaccgcgcagacccagtgctgtataaagatgatttcccagagaagctgaagagctttcccaatatcggcagtctttag

SEQ ID NO: 8449 - protein, 545 aa, Artificial Sequence
  derived and/or modified sequence
MGRRGSAPGNGRTLRGCERGGRRRRSADSVMAEQVALSRTQVCGILREELFQGDAFHQSDTHIFIIMGASGDLAKKKIYPTIWWLFRDGLLPENTFIVGYARSRLTVADIRKQSEPFFKATPEEKLKLEDFFARNSYVAGQYDDAASYQRLNSHMNALHLGSQANRLFYLALPPTVYEAVTKNIHESCMSQIGWNRIIVEKPFGRDLQSSDRLSNHISSLFREDQIYRIDHYLGKEMVQNLMVLRFANRIFGPIWNRDNIACVILTFKEPFGTEGRGGYFDEFGIIRDVMQNHLLQMLCLVAMEKPASTNSDDVRDEKVKVLKCISEVQANNVVLGQYVGNPDGEGEATKGYLDDPTVPRGSTTATFAAVVLYVENERWDGVPFILRCGKALNERKAEVRLQFHDVAGDIFHQQCKRNELVIRVQPNEAVYTKMMTKKPGMFFNPEESELDLTYGNRYKNVKLPDAYERLILDVFCGSQMHFVRSDELREAWRIFTPLLHQIELEKPKPIPYIYGSRGPTEADELMKRVGFQYEGTYKWVNPHKL

SEQ ID NO: 8450 - DNA, 1638 bp, Artificial Sequence
  derived and/or modified sequence
atgggcagaagaggcagcgcccccggcaacggcagaaccctgagaggctgcgagagaggcggcagaagaagaagaagcgccgacagcgtgatggccgagcaggtggccctgagcagaacccaggtgtgcggcatcctgagagaggagctgttccagggcgacgccttccaccagagcgacacccacatcttcatcatcatgggcgccagcggcgacctggccaagaagaagatctaccccaccatctggtggctgttcagagacggcctgctgcccgagaacaccttcatcgtgggctacgccagaagcagactgaccgtggccgacatcagaaagcagagcgagcccttcttcaaggccacccccgaggagaagctgaagctggaggacttcttcgccagaaacagctacgtggccggccagtacgacgacgccgccagctaccagagactgaacagccacatgaacgccctgcacctgggcagccaggccaacagactgttctacctggccctgccccccaccgtgtacgaggccgtgaccaagaacatccacgagagctgcatgagccagatcggctggaacagaatcatcgtggagaagcccttcggcagagacctgcagagcagcgacagactgagcaaccacatcagcagcctgttcagagaggaccagatctacagaatcgaccactacctgggcaaggagatggtgcagaacctgatggtgctgagattcgccaacagaatcttcggccccatctggaacagagacaacatcgcctgcgtgatcctgaccttcaaggagcccttcggcaccgagggcagaggcggctacttcgacgagttcggcatcatcagagacgtgatgcagaaccacctgctgcagatgctgtgcctggtggccatggagaagcccgccagcaccaacagcgacgacgtgagagacgagaaggtgaaggtgctgaagtgcatcagcgaggtgcaggccaacaacgtggtgctgggccagtacgtgggcaaccccgacggcgagggcgaggccaccaagggctacctggacgaccccaccgtgcccagaggcagcaccaccgccaccttcgccgccgtggtgctgtacgtggagaacgagagatgggacggcgtgcccttcatcctgagatgcggcaaggccctgaacgagagaaaggccgaggtgagactgcagttccacgacgtggccggcgacatcttccaccagcagtgcaagagaaacgagctggtgatcagagtgcagcccaacgaggccgtgtacaccaagatgatgaccaagaagcccggcatgttcttcaaccccgaggagagcgagctggacctgacctacggcaacagatacaagaacgtgaagctgcccgacgcctacgagagactgatcctggacgtgttctgcggcagccagatgcacttcgtgagaagcgacgagctgagagaggcctggagaatcttcacccccctgctgcaccagatcgagctggagaagcccaagcccatcccctacatctacggcagcagaggccccaccgaggccgacgagctgatgaagagagtgggcttccagtacgagggcacctacaagtgggtgaacccccacaagctgtag

SEQ ID NO: 8451 - DNA, 1638 bp, Artificial Sequence
  derived and/or modified sequence
atggggcgcaggggcagcgcccctggaaatggtagaaccctacggggctgtgaacggggaggccgacggcgaaggtccgcagattccgtgatggccgagcaggttgccctgtcacgcacccaggtgtgcggcattctacgagaggagttgtttcaaggagatgcctttcatcagtctgatacccacatctttattattatgggggcttctggcgacctcgcaaaaaagaaaatctacccaactatatggtggctgtttagagatgggctgctgcccgagaatacttttatagttggctacgcgagaagcaggctgaccgttgctgacattagaaagcagagcgagcccttcttcaaggcgacccccgaggaaaaactaaagttggaggacttttttgcccgcaattcttacgtggcaggacaatatgacgatgccgctagttatcagaggctgaattcccatatgaacgctctgcacctggggtctcaggccaatcgcttgttttacctggcactcccgccaaccgtctatgaggcagtgactaagaatatccacgaaagttgcatgagccagattggctggaatcggatcatagtcgaaaagcccttcggtcgggacctccagtcgtcagacaggctgtctaaccatatttcttctctattcagagaagaccagatctatcgcattgaccactacttaggaaaagagatggtccaaaatctgatggtgctgcgctttgctaataggatctttggtcctatatggaaccgggataacatagcctgtgtgattctgacgttcaaggaacccttcgggactgaggggcgtggcggctactttgacgagttcgggattattagggatgtcatgcagaaccacctgcttcagatgctgtgtctggtggcgatggagaaacccgccagtactaactcagacgacgtgagagatgaaaaagtaaaagtgctcaagtgtataagcgaagtgcaagcgaacaatgttgtgcttggtcaatatgtggggaatcccgatggggagggagaggctactaagggatacttggacgacccgacggtgcccagaggatcaaccactgcaactttcgctgctgtggttttgtacgttgaaaacgagcggtgggatggtgtcccgttcatcctcaggtgtggcaaggccctcaacgagaggaaagctgaggtgaggctacagttccatgacgtagcaggagatatcttccatcagcagtgcaaaaggaacgagttggtcatccgcgtgcagccaaatgaggcggtgtataccaagatgatgaccaaaaaaccaggcatgttctttaatcctgaggagtcagagctcgatcttacttatgggaatcggtacaagaatgtgaagctccctgacgcatatgagcggttgatattggatgttttctgtggcagccagatgcacttcgtccgaagtgatgagctgcgggaggcatggcggatttttactccactgcttcaccaaatcgagttggaaaagcccaagcccatcccctacatttacggcagcaggggccccacagaagccgatgagttgatgaagagggttggattccagtacgagggcacatataagtgggttaaccctcacaaactgtag

SEQ ID NO: 8452 - DNA, 1966 bp, Artificial Sequence
  derived and/or modified sequence
aaacggtcgtacacttcggggctgcgagcgcggagggcgacgacgacgaagcgcagacagcgtcatggcagagcaggtggccctgagccggacccaggtgtgcgggatcctgcgggaagagcttttccagggcgatgccttccatcagtcggatacacacatattcatcatcatgggtgcatcgggtgacctggccaagaagaagatctaccccaccatctggtggctgttccgggatggccttctgcccgaaaacaccttcatcgtgggctatgcccgttcccgcctcacagtggctgacatccgcaaacagagtgagcccttcttcaaggccaccccagaggagaagctcaagctggaggacttctttgcccgcaactcctatgtggctggccagtacgatgatgcagcctcctaccagcgcctcaacagccacatgaatgccctccacctggggtcacaggccaaccgcctcttctacctggccttgcccccgaccgtctacgaggccgtcaccaagaacattcacgagtcctgcatgagccagataggctggaaccgcatcatcgtggagaagcccttcgggagggacctgcagagctctgaccggctgtccaaccacatctcctccctgttccgtgaggaccagatctaccgcatcgaccactacctgggcaaggagatggtgcagaacctcatggtgctgagatttgccaacaggatcttcggccccatctggaaccgggacaacatcgcctgcgttatcctcaccttcaaggagccctttggcactgagggtcgcgggggctatttcgatgaatttgggatcatccgggacgtgatgcagaaccacctactgcagatgctgtgtctggtggccatggagaagcccgcctccaccaactcagatgacgtccgtgatgagaaggtcaaggtgttgaaatgcatctcagaggtgcaggccaacaatgtggtcctgggccagtacgtggggaaccccgatggagagggcgaggccaccaaagggtacctggacgaccccacggtgccccgcgggtccaccaccgccacttttgcagccgtcgtcctctatgtggagaatgagaggtgggatggggtgcccttcatcctgcgctgcggcaaggccctgaacgagcgcaaggccgaggtgaggctgcagttccatgatgtggccggcgacatcttccaccagcagtgcaagcgcaacgagctggtgatccgcgtgcagcccaacgaggccgtgtacaccaagatgatgaccaagaagccgggcatgttcttcaaccccgaggagtcggagctggacctgacctacggcaacagatacaagaacgtgaagctccctgacgcctacgagcgcctcatcctggacgtcttctgcgggagccagatgcacttcgtgcgcagcgacgagctccgtgaggcctggcgtattttcaccccactgctgcaccagattgagctggagaagcccaagcccatcccctatatttatggcagccgaggccccacggaggcagacgagctgatgaagagagtgggtttccagtatgagggcacctacaagtgggtgaacccccacaagctctgagccctgggcacccacctccacccccgccacggccaccctccttcccgccgcccgaccccgagtcgggaggactccgggaccattgacctcagctgctactacccgagcccagctacattcctcagctgccaagcactcgagaccatcctggcccctccagaccctgcctgagcccaggagctgagtcacctcctccactcactccagcccaacagaaggaaggaggagggcgcccattcgtctgtcccagagcttattggccactgggtctcactcctgagtggggccagggtgggagggagggacaagggggaggaaaggggcgagcacccacgtgagagaatctgcctgtgg

SEQ ID NO: 8453 - DNA, 1799 bp, Artificial Sequence
  derived and/or modified sequence
cgagaactcgggaagccggcgagaagtgtgaggccgcggtagggccgcatcccgctccggagagaagtctgagtccgccaggctctgcaggcccgcggaagctcgacagcgtcatggcagagcaggtggccctgagccggacccaggtgtgcgggatcctgcgggaagagcttttccagggcgatgccttccatcagtcggatacacacatattcatcatcatgggtgcatcgggtgacctggccaagaagaagatctaccccaccatctggtggctgttccgggatggccttctgcccgaaaacaccttcatcgtgggctatgcccgttcccgcctcacagtggctgacatccgcaaacagagtgagcccttcttcaaggccaccccagaggagaagctcaagctggaggacttctttgcccgcaactcctatgtggctggccagtacgatgatgcagcctcctaccagcgcctcaacagccacatgaatgccctccacctggggtcacaggccaaccgcctcttctacctggccttgcccccgaccgtctacgaggccgtcaccaagaacattcacgagtcctgcatgagccagataggctggaaccgcatcatcgtggagaagcccttcgggagggacctgcagagctctgaccggctgtccaaccacatctcctccctgttccgtgaggaccagatctaccgcatcgaccactacctgggcaaggagatggtgcagaacctcatggtgctgagatttgccaacaggatcttcggccccatctggaaccgggacaacatcgcctgcgttatcctcaccttcaaggagccctttggcactgagggtcgcgggggctatttcgatgaatttgggatcatccggggacctggaagacaagggggatcaggaagtgagtcttgcagcttgtcactaggaagccttgtttggggtccccatgcccttgaaccaggtgaacagggcggggagctaaggcgagctctggcctcttccgtccccagggacgtgatgcagaaccacctactgcagatgctgtgtctggtggccatggagaagcccgcctccaccaactcagatgacgtccgtgatgagaaggtcaaggtgttgaaatgcatctcagaggtgcaggccaacaatgtggtcctgggccagtacgtggggaaccccgatggagagggcgaggccaccaaagggtacctggacgaccccacggtgccccgcgggtccaccaccgccacttttgcagccgtcgtcctctatgtggagaatgagaggtgggatggggtgcccttcatcctgcgctgcggcaaggccctgaacgagcgcaaggccgaggtgaggctgcagttccatgatgtggccggcgacatcttccaccagcagtgcaagcgcaacgagctggtgatccgcgtgcagcccaacgaggccgtgtacaccaagatgatgaccaagaagccgggcatgttcttcaaccccgaggagtcggagctggacctgacctacggcaacagatacaagaacgtgaagctccctgacgcctacgagcgcctcatcctggacgtcttctgcgggagccagatgcacttcgtgcgcagcgacgagctccgtgaggcctggcgtattttcaccccactgctgcaccagattgagctggagaagcccaagcccatcccctatatttatggcagccgaggccccacggaggcagacgagctgatgaagagagtgggtttccagtatgagggcacctacaagtgggtgaacccccacaagctctga

SEQ ID NO: 8454 - DNA, 2631 bp, Artificial Sequence
  derived and/or modified sequence
agggacagcccagaggaggcgtggccacgctgccggcggaagtggagccctccgcgagcgcgcgaggccgccggggcaggcggggaaaccggacagtaggggcggggcctggccggcgatggggattcgggagcactacgcggagctgcacccgtgcccgccggaattggggatgcagagcagcggcagcgggtatggcaggcagccggcgggccggcctccagcgcaggtgcccgagaggcaggggctggcctgggatgcgcgcgcacctgccctcgccccgccccgcccgcacgaggggtggtggccgaggccccgccccgcacgcctcgcctgaggcgggtccgctcagcccaggcgcccgcccccgcccccgccgattaaatgggccggcggggctcagcccccggaaacggtcgtacacttcggggctgcgagcgcggagggcgacgacgacgaagcgcagacagcgtcatggcagagcaggtggccctgagccggacccaggtgtgcgggatcctgcgggaagagcttttccagggcgatgccttccatcagtcggatacacacatattcatcatcatgggtgcatcgggtgacctggccaagaagaagatctaccccaccatctggtggctgttccgggatggccttctgcccgaaaacaccttcatcgtgggctatgcccgttcccgcctcacagtggctgacatccgcaaacagagtgagcccttcttcaaggccaccccagaggagaagctcaagctggaggacttctttgcccgcaactcctatgtggctggccagtacgatgatgcagcctcctaccagcgcctcaacagccacatgaatgccctccacctggggtcacaggccaaccgcctcttctacctggccttgcccccgaccgtctacgaggccgtcaccaagaacattcacgagtcctgcatgagccagataggctggaaccgcatcatcgtggagaagcccttcgggagggacctgcagagctctgaccggctgtccaaccacatctcctccctgttccgtgaggaccagatctaccgcatcgaccactacctgggcaaggagatggtgcagaacctcatggtgctgagatttgccaacaggatcttcggccccatctggaaccgggacaacatcgcctgcgttatcctcaccttcaaggagccctttggcactgagggtcgcgggggctatttcgatgaatttgggatcatccgggacgtgatgcagaaccacctactgcagatgctgtgtctggtggccatggagaagcccgcctccaccaactcagatgacgtccgtgatgagaaggtcaaggtgttgaaatgcatctcagaggtgcaggccaacaatgtggtcctgggccagtacgtggggaaccccgatggagagggcgaggccaccaaagggtacctggacgaccccacggtgccccgcgggtccaccaccgccacttttgcagccgtcgtcctctatgtggagaatgagaggtgggatggggtgcccttcatcctgcgctgcggcaaggccctgaacgagcgcaaggccgaggtgaggctgcagttccatgatgtggccggcgacatcttccaccagcagtgcaagcgcaacgagctggtgatccgcgtgcagcccaacgaggccgtgtacaccaagatgatgaccaagaagccgggcatgttcttcaaccccgaggagtcggagctggacctgacctacggcaacagatacaagaacgtgaagctccctgacgcctacgagcgcctcatcctggacgtcttctgcgggagccagatgcacttcgtgcgcagcgacgagctccgtgaggcctggcgtattttcaccccactgctgcaccagattgagctggagaagcccaagcccatcccctatatttatggcagccgaggccccacggaggcagacgagctgatgaagagagtgggtttccagtatgagggcacctacaagtgggtgaacccccacaagctctgagccctgggcacccacctccacccccgccacggccaccctccttcccgccgcccgaccccgagtcgggaggactccgggaccattgacctcagctgcacattcctggccccgggctctggccaccctggcccgcccctcgctgctgctactacccgagcccagctacattcctcagctgccaagcactcgagaccatcctggcccctccagaccctgcctgagcccaggagctgagtcacctcctccactcactccagcccaacagaaggaaggaggagggcgcccattcgtctgtcccagagcttattggccactgggtctcactcctgagtggggccagggtgggagggagggacaagggggaggaaaggggcgagcacccacgtgagagaatctgcctgtggccttgcccgccagcctcagtgccacttgacattccttgtcaccagcaacatctcgagccccctggatgtcccctgtcccaccaactctgcactccatggccaccccgtgccacccgtaggcagcctctctgctataagaaaagcagacgcagcagctgggacccctcccaacctcaatgccctgccattaaatccgcaaacagcc

SEQ ID NO: 8455 - DNA, 1661 bp, Artificial Sequence
  derived and/or modified sequence
cgagaactcgggaagccggcgagaagtgtgaggccgcggtagggccgcatcccgctccggagagaagtctgagtccgccaggctctgcaggcccgcggaagctcgacagcgtcatggcagagcaggtggccctgagccggacccaggtgtgcgggatcctgcgggaagagcttttccagggcgatgccttccatcagtcggatacacacatattcatcatcatgggtgcatcgggtgacctggccaagaagaagatctaccccaccatctggtggctgttccgggatggccttctgcccgaaaacaccttcatcgtgggctatgcccgttcccgcctcacagtggctgacatccgcaaacagagtgagcccttcttcaaggccaccccagaggagaagctcaagctggaggacttctttgcccgcaactcctatgtggctggccagtacgatgatgcagcctcctaccagcgcctcaacagccacatgaatgccctccacctggggtcacaggccaaccgcctcttctacctggccttgcccccgaccgtctacgaggccgtcaccaagaacattcacgagtcctgcatgagccagataggctggaaccgcatcatcgtggagaagcccttcgggagggacctgcagagctctgaccggctgtccaaccacatctcctccctgttccgtgaggaccagatctaccgcatcgaccactacctgggcaaggagatggtgcagaacctcatggtgctgagatttgccaacaggatcttcggccccatctggaaccgggacaacatcgcctgcgttatcctcaccttcaaggagccctttggcactgagggtcgcgggggctatttcgatgaatttgggatcatccgggacgtgatgcagaaccacctactgcagatgctgtgtctggtggccatggagaagcccgcctccaccaactcagatgacgtccgtgatgagaaggtcaaggtgttgaaatgcatctcagaggtgcaggccaacaatgtggtcctgggccagtacgtggggaaccccgatggagagggcgaggccaccaaagggtacctggacgaccccacggtgccccgcgggtccaccaccgccacttttgcagccgtcgtcctctatgtggagaatgagaggtgggatggggtgcccttcatcctgcgctgcggcaaggccctgaacgagcgcaaggccgaggtgaggctgcagttccatgatgtggccggcgacatcttccaccagcagtgcaagcgcaacgagctggtgatccgcgtgcagcccaacgaggccgtgtacaccaagatgatgaccaagaagccgggcatgttcttcaaccccgaggagtcggagctggacctgacctacggcaacagatacaagaacgtgaagctccctgacgcctacgagcgcctcatcctggacgtcttctgcgggagccagatgcacttcgtgcgcagcgacgagctccgtgaggcctggcgtattttcaccccactgctgcaccagattgagctggagaagcccaagcccatcccctatatttatggcagccgaggccccacggaggcagacgagctgatgaagagagtgggtttccagtatgagggcacctacaagtgggtgaacccccacaagctctga

SEQ ID NO: 8456 - DNA, 1638 bp, Artificial Sequence
  derived and/or modified sequence
atgggcagaagaggcagcgcccctggaaatggccgcaccctgcggggctgtgagcggggcggcagaagaagaagatctgctgacagcgtgatggccgagcaggtggccctgagcaggacccaggtgtgtggcatcctgcgggaggagctgttccagggagatgccttccaccagagcgacacccacatcttcatcatcatgggcgccagcggggacctggccaagaagaagatctaccccaccatctggtggctgttcagagatggcctgctgcctgagaacaccttcatcgtgggctacgcccggagccggctgactgtggccgacatcaggaagcagagcgagcccttcttcaaggccaccccagaggagaagctgaagctggaggacttctttgccaggaacagctatgtggccggccagtatgatgatgctgccagctaccagaggctgaacagccacatgaatgccctgcacctgggcagccaggccaacagactcttctacctggccctgcccccaacagtgtatgaagctgtgaccaagaacatccacgagagctgcatgagccagatcggctggaaccgcatcatcgtggagaagcccttcggccgggacctgcagagcagtgaccggctgagcaaccacatcagcagcctcttccgggaggaccagatctacagaattgaccactacctgggcaaggagatggtgcagaacctgatggtgctgcgctttgccaaccgcatcttcggccccatctggaacagagacaacatcgcctgcgtcatcctgaccttcaaggagccctttggaacagagggccggggcggctactttgatgaatttggcatcatcagagatgtgatgcagaaccacctgctgcagatgctgtgcctggtggccatggagaagccagccagcaccaacagtgatgatgtgagagatgagaaggtgaaggtgctgaagtgcatcagcgaggtgcaggccaacaacgtggtgctgggccagtatgtgggcaacccagatggagagggggaggccaccaagggctacctggatgaccccaccgtgccccggggcagcaccacagccacctttgctgctgtggtgctgtatgtggagaatgaacgctgggatggagtgcccttcatcctgcgctgtgggaaggccctgaatgaaaggaaggccgaggtgcggctgcagttccatgatgtggccggggacatcttccaccagcagtgcaagagaaatgagctggtgatccgggtgcagcccaatgaagctgtgtacaccaagatgatgaccaagaagccaggcatgttcttcaaccctgaggagagcgagctggacctgacctacggcaaccgctacaagaatgtgaagctgcctgatgcctatgagcggctcatcctggatgtgttctgtggcagccagatgcactttgtgcggagtgatgagctgcgggaggcctggaggatcttcacccccctgctgcaccagatcgagctggagaagcccaagcccatcccctacatctacggcagccggggccccacagaagcagatgagctgatgaagagggtgggcttccagtatgagggcacctacaagtgggtgaacccccacaagctgtag

SEQ ID NO: 8457 - DNA, 1638 bp, Artificial Sequence
  derived and/or modified sequence
atgggccggcggggcagcgcccccggcaacggccggaccctgcgggggtgcgaacgtgggggcagaagaagaaggagtgcggacagcgtaatggcagaacaggtcgcactttcccgaactcaggtatgtgggattctgagggaggaactgttccaaggggatgcttttcaccagagcgacacacacattttcattataatgggagcgtctggggacctggcaaagaagaaaatttacccgacaatatggtggctctttagggacggccttctgccagagaatacctttattgtaggctatgctcgcagtcggctcaccgtcgccgacatacgcaagcagtcagaaccgttcttcaaagcaacccccgaggagaagctgaagctcgaggatttcttcgcccggaactcgtatgtagctgggcagtatgatgacgcggcgtcttaccaacggctgaattcgcatatgaacgctctccacctggggtcccaagctaatcggctgttttatctggctttacctcccaccgtctatgaagctgtaaccaagaatatccatgagagctgtatgagccagattggctggaaccggatcatagttgagaaacctttcggtagggatctccagagctccgataggctgtctaaccatatcagctctctgtttagagaagatcagatttatagaatcgatcattacttgggtaaggagatggtccagaacttgatggttctccggtttgcaaatcgcatatttggcccgatttggaaccgcgacaatattgcgtgtgtcatccttaccttcaaggaaccttttggaaccgaaggccgcggcggatatttcgatgagttcggaataatcagggacgtaatgcagaatcacctgttacaaatgttatgcctcgttgccatggagaaaccagcctctaccaatagcgacgacgtccgggacgagaaggtgaaagttctgaaatgtatctcggaagtgcaagccaataacgttgtgttaggacaatacgtgggcaatccagatggtgaaggcgaagcaaccaaggggtatctcgatgatcctaccgtgcccagaggatccaccaccgctacctttgcagccgtcgtgctgtacgttgaaaacgaacggtgggacggggtcccattcattctgagatgcggtaaagccttaaatgagaggaaagccgaggtaagactgcagttccacgatgtcgccggcgatatcttccaccagcaatgcaaaagaaacgaactggttatccgtgtacaaccaaacgaggcagtttataccaaaatgatgacaaagaaacccggcatgttctttaaccccgaggagagtgagttggacttaacatacggcaatcggtacaaaaatgtcaaactccccgacgcctacgaaagactgatactcgatgtgttttgtgggtcccaaatgcacttcgtgcgcagtgacgagctgcgggaggcttggcggatttttactcccctgttacatcagattgaactggaaaagcccaagcctatcccttatatttatggcagcagggggcctacggaggccgacgagcttatgaagcgcgtgggattccagtacgaaggtacttataagtgggttaatccccacaaactctag

SEQ ID NO: 8458 - DNA, 1638 bp, Artificial Sequence
  derived and/or modified sequence
atgggcagaagggggagtgctcctggcaacggcagaacgctgcgaggatgtgaacgcggaggccgacggcgacggagcgcagactctgttatggccgagcaggtggccctgagccgaacccaggtctgcgggattctgcgcgaagagctgttccaaggcgatgcgttccaccagtccgacactcatattttcataatcatgggagccagcggtgacctagccaagaagaagatttatccgactatctggtggctcttcagagacggtcttctgccggaaaacacatttatcgtcggatacgcaagatcacgcctgactgtggccgatatcaggaaacaatcagagccgttctttaaggccacccccgaggagaagcttaagctggaagatttctttgcacggaactcctacgtggctgggcaatacgatgatgcggcatcatatcagaggctgaattcgcacatgaatgctctacaccttggcagccaggctaacaggcttttctacctggcgctccccccaactgtgtacgaggccgtaaccaaaaatattcacgaaagttgtatgtcccaaataggctggaacaggattatagtcgagaaaccttttggtagagacctccagtcttccgatcgcctgtcaaaccacatttcctccctgttccgagaagaccaaatctataggatcgaccactatttgggtaaagagatggtgcaaaatctgatggtgctgagattcgcaaatcgtatctttggcccaatctggaaccgcgacaatatagcttgtgtaatcttgactttcaaagagccctttggaaccgagggccgaggaggctactttgacgagtttggaataatccgtgacgtgatgcaaaatcatctcctgcagatgctgtgtttagtagccatggaaaaaccagcctctactaatagcgatgacgtgagggacgaaaaggttaaagtcctaaagtgcattagtgaggtgcaggccaataatgtcgtgctgggtcaatatgtgggaaaccctgacggcgaaggggaagccacaaaaggttacctcgacgatcccaccgtgccaagaggctcaaccaccgccactttcgccgcagtcgttttgtacgtggaaaacgagcgctgggacggagtcccctttattctgaggtgcggcaaagctctaaatgaacgcaaagctgaagtgcgactgcagtttcacgacgtcgcgggagacattttccatcagcagtgcaagagaaacgaactggtaattcgcgtacagccaaacgaagctgtctacactaaaatgatgacaaaaaagcccggaatgttcttcaatccagaagaaagcgaattggatcttacttacgggaacaggtacaaaaatgttaaattacccgatgcctatgagcgcctgatcttggacgtgttttgtggttctcagatgcacttcgtaagatcagatgagttgagagaagcctggagaattttcactccattgctgcaccagatcgaactggagaagcctaaacccataccttatatctacggcagccggggtcccactgaggctgacgagttaatgaagagggtgggcttccagtacgaggggacatacaaatgggtgaacccgcacaagctgtag

SEQ ID NO: 8459 - protein, 647 aa, Artificial Sequence
  derived and/or modified sequence
MFEIDYSRDSFLKDGQPFRYISGSIHYSRVPRFYWKDRLLKMKMAGLNAIQTYVPWNFHEPWPGQYQFSEDHDVEYFLRLAHELGLLVILRPGPYICAEWEMGGLPAWLLEKESILLRSSDPDYLAAVDKWLGVLLPKMKPLLYQNGGPVITVQVENEYGSYFACDFDYLRFLQKRFRHHLGDDVVLFTTDGAHKTFLKCGALQGLYTTVDFGTGSNITDAFLSQRKCEPKGPLINSEFYTGWLDHWGQPHSTIKTEAVASSLYDILARGASVNLYMFIGGTNFAYWNGANSPYAAQPTSYDYDAPLSEAGDLTEKYFALRNIIQKFEKVPEGPIPPSTPKFAYGKVTLEKLKTVGAALDILCPSGPIKSLYPLTFIQVKQHYGFVLYRTTLPQDCSNPAPLSSPLNGVHDRAYVAVDGIPQGVLERNNVITLNITGKAGATLDLLVENMGRVNYGAYINDFKGLVSNLTLSSNILTDWTIFPLDTEDAVCSHLGGWGHRDSGHHDEAWAHNSSNYTLPAFYMGNFSIPSGIPDLPQDTFIQFPGWTKGQVWINGFNLGRYWPARGPQLTLFVPQHILMTSAPNTITVLELEWAPCSSDDPELCAVTFVDRPVIGSSVTYDHPSKPVEKRLMPPPPQKNKDSWLDHV

SEQ ID NO: 8460 - protein, 677 aa, Artificial Sequence
  derived and/or modified sequence
MPGFLVRILPLLLVLLLLGPTRGLRNATQRMFEIDYSRDSFLKDGQPFRYISGSIHYSRVPRFYWKDRLLKMKMAGLNAIQTYVPWNFHEPWPGQYQFSEDHDVEYFLRLAHELGLLVILRPGPYICAEWEMGGLPAWLLEKESILLRSSDPDYLAAVDKWLGVLLPKMKPLLYQNGGPVITVQVENEYGSYFACDFDYLRFLQKRFRHHLGDDVVLFTTDGAHKTFLKCGALQGLYTTVDFGTGSNITDAFLSQRKCEPKGPLINSEFYTGWLDHWGQPHSTIKTEAVASSLYDILARGASVNLYMFIGGTNFAYWNGANSPYAAQPTSYDYDAPLSEAGDLTEKYFALRNIIQKFEKVPEGPIPPSTPKFAYGKVTLEKLKTVGAALDILCPSGPIKSLYPLTFIQVKQHYGFVLYRTTLPQDCSNPAPLSSPLNGVHDRAYVAVDGIPQGVLERNNVITLNITGKAGATLDLLVENMGRVNYGAYINDFKGLVSNLTLSSNILTDWTIFPLDTEDAVCSHLGGWGHRDSGHHDEAWAHNSSNYTLPAFYMGNFSIPSGIPDLPQDTFIQFPGWTKGQVWINGFNLGRYWPARGPQLTLFVPQHILMTSAPNTITVLELEWAPCSSDDPELCAVTFVDRPVIGSSVTYDHPSKPVEKRLMPPPPQKNKDSWLDHV

SEQ ID NO: 8461 - DNA, 2604 bp, Artificial Sequence
  derived and/or modified sequence
cacagcggggcggggcgcggggctgagcaggcgcgagggctggctgctgggccgacgaggggcggtgccaggccgtgggtccttagtcaagtgacgcgaagcggccggcctgggcgccgactgcagagccgggaggctggtggtcatgccggggttcctggttcgcatcctccctctgttgctggttctgctgcttctgggccctacgcgcggcttgcgcaatgccacccagaggatgtttgaaattgactatagccgggactccttcctcaaggatggccagccatttcgctacatctcaggaagcattcactactcccgtgtgccccgcttctactggaaggaccggctgctgaagatgaagatggctgggctgaacgccatccagacgtatgtgccctggaactttcatgagccctggccaggacagtaccagttttctgaggaccatgatgtggaatattttcttcggctggctcatgagctgggactgctggttatcctgaggcccgggccctacatctgtgcagagtgggaaatgggaggattacctgcttggctgctagagaaagagtctattcttctccgctcctccgacccagattacctggcagctgtggacaagtggttgggagtccttctgcccaagatgaagcctctcctctatcagaatggagggccagttataacagtgcaggttgaaaatgaatatggcagctactttgcctgtgattttgactacctgcgcttcctgcagaagcgctttcgccaccatctgggggatgatgtggttctgtttaccactgatggagcacataaaacattcctgaaatgtggggccctgcagggcctctacaccacggtggactttggaacaggcagcaacatcacagatgctttcctaagccagaggaagtgtgagcccaaaggacccttgatcaattctgaattctatactggctggctagatcactggggccaacctcactccacaatcaagaccgaagcagtggcttcctccctctatgatatacttgcccgtggggcgagtgtgaacttgtacatgtttataggtgggaccaattttgcctattggaatggggccaactcaccctatgcagcacagcccaccagctacgactatgatgccccactgagtgaggctggggacctcactgagaagtattttgctctgcgaaacatcatccagaagtttgaaaaagtaccagaaggtcctatccctccatctacaccaaagtttgcatatggaaaggtcactttggaaaagttaaagacagtgggagcagctctggacattctgtgtccctctgggcccatcaaaagcctttatcccttgacatttatccaggtgaaacagcattatgggtttgtgctgtaccggacaacacttcctcaagattgcagcaacccagcacctctctcttcacccctcaatggagtccacgatcgagcatatgttgctgtggatgggatcccccagggagtccttgagcgaaacaatgtgatcactctgaacataacagggaaagctggagccactctggaccttctggtagagaacatgggacgtgtgaactatggtgcatatatcaacgattttaagggtttggtttctaacctgactctcagttccaatatcctcacggactggacgatctttccactggacactgaggatgcagtgtgcagccacctggggggctggggacaccgtgacagtggccaccatgatgaagcctgggcccacaactcatccaactacacgctcccggccttttatatggggaacttctccattcccagtgggatcccagacttgccccaggacacctttatccagtttcctggatggaccaagggccaggtctggattaatggctttaaccttggccgctattggccagcccggggccctcagttgaccttgtttgtgccccagcacatcctgatgacctcggccccaaacaccatcaccgtgctggaactggagtgggcaccctgcagcagtgatgatccagaactatgtgctgtgacgttcgtggacaggccagttattggctcatctgtgacctacgatcatccctccaaacctgttgaaaaaagactcatgcccccacccccgcaaaaaaacaaagattcatggctggaccatgtatgatgatgaaagcctgtgtctttgagggattctaccctgaacatacctcacagatcctccctgtcatgccacatttcactgattggaatgtggaaatggaaaaggaatttaggatgtgcattttcacctgaggtttccctgcatccctgcagtgccaaagccccaccttcagggaccacctggaatgtgtgaggggctgacagcacagtaacgtgcatacatatctgcagggctggaatggaagctttaaaggtggtagtgatttttattttggaagaatcatgttacctttttgttaaataaaatttgtactcaaatgatgatgtcactgtttttaatgtgcaggtattgaattatatggtctgacttaaatcataactagacttgagtgggctgaataaaccacttcactaacttgaagttcaaaa

SEQ ID NO: 8462 - DNA, 2034 bp, Artificial Sequence
  derived and/or modified sequence
atgcctgggttcctggtgcggatcctccctttgctgctggtcttactcctgctgggcccaactcgggggctgagaaatgccacacaacgtatgttcgagattgactactcacgggactcattcctcaaggatggccaaccattccgctacatctctggatctatccactacagtagagtacctagattctactggaaagatagactgctcaaaatgaagatggctggtcttaacgccatccagacctacgtgccctggaatttccacgagccatggcccgggcagtaccagttctctgaagaccacgacgtggaatattttctccggctcgctcacgaactcggactcctggtgattcttcggcctggaccatatatttgcgctgagtgggagatgggcggtctccccgcctggttacttgaaaaagagtcgattctattgaggtcttcagaccccgattacctcgcagccgtagataagtggctcggtgttctcttgcctaagatgaagccactactttaccaaaacggcgggccagtgatcacagtccaggtcgagaacgaatacggttcttacttcgcatgcgactttgactacctccgcttcctgcaaaaacgatttcggcaccacctgggcgacgatgtcgttctctttacaacagatggcgcccacaaaacatttctgaaatgcggcgcactgcaagggctgtacaccacggtggatttcgggaccgggtcaaacattactgacgcctttctaagtcagcgcaaatgcgaacctaaagggccactgattaatagcgagttttatacaggttggctcgaccactggggacagcctcactcaacaattaagacagaggcggtcgcgagttccctatatgatatcctcgcacgcggggcaagcgtgaatctgtacatgtttatcggcggtacaaattttgcctattggaatggcgcgaacagcccctacgccgctcagcccaccagctatgattatgatgccccactatccgaagctggagacctgaccgagaagtactttgctctcagaaacatcatccagaagttcgaaaaggtgcccgaaggtccaatccctccttctactcctaagttcgcctacggcaaagttacattagaaaagctgaagaccgtcggtgctgcactggatattctatgtccatctggacccatcaaaagtttgtacccactcacattcattcaggtgaagcaacactacgggtttgttctatatcggaccacccttccccaagattgttcaaaccccgctcctctctcttccccgctcaatggcgtgcatgaccgagcctatgtagccgtagacggcatcccacagggtgtgctcgagcgtaacaacgttattacgctgaatatcactggaaaagcgggagcaactctcgatctgcttgtggagaacatgggtcgcgtaaattacggagcgtatattaacgatttcaagggcctggtatctaatttgaccctcagctcgaatattctgacagattggactatcttcccccttgacacggaggatgcagtgtgtagccacctaggaggatggggacaccgcgattccggccatcatgacgaggcctgggcacacaattctagcaattacactttgccagccttctacatggggaacttttcaataccctcaggcatccctgacctgcctcaggatacctttattcagttccctggttggacaaaaggccaggtatggatcaacggattcaacctgggcagatactggcctgctcggggacctcagttaactttgttcgtgcctcaacatatattgatgactagcgctcccaacaccattaccgtgctggagttggagtgggccccgtgctcaagtgatgatccagagctatgcgcagtgaccttcgtagaccggcctgtaattgggtcctccgtcacctatgatcaccctagtaaacctgtggaaaaacgcttaatgccacctcccccacagaaaaacaaggactcgtggctggatcacgtttag

SEQ ID NO: 8463 - DNA, 2034 bp, Artificial Sequence
  derived and/or modified sequence
atgcctggcttcctggtgcgcatcctgcccctgctgctggtgctgctgctgctgggccccacccggggcctgagaaatgccacccagaggatgtttgaaattgactacagccgggacagcttcctgaaggatggccagcccttccgctacatcagcggcagcatccactacagccgggtgccccgcttctactggaaggaccggctgctgaagatgaagatggccggcctgaatgccatccagacctacgtgccctggaacttccacgagccctggccaggccagtaccagttcagcgaggaccatgatgtggagtacttcctgcggctggcccacgagctgggcctgctggtgatcctgcggcccggcccctacatctgtgccgagtgggagatgggcggcctgcctgcctggctgctggagaaggagagcatcctgctgcggagcagtgaccctgactacctggccgctgtggacaagtggctgggcgtgctgctgcccaagatgaagcccctgctgtaccagaatggaggccctgtgatcaccgtgcaggtggagaatgaatatggcagctactttgcctgtgactttgactacctgcgcttcctgcagaagcgcttccgccaccacctgggagatgatgtggtgctcttcaccacagatggagcccacaagaccttcctgaagtgtggggccctgcagggcctgtacaccaccgtggactttggcaccggcagcaacatcacagatgccttcctgagccagaggaaatgtgagcccaagggccccctcatcaacagcgagttctacacaggctggctggaccactggggccagccccacagcaccatcaagacagaggccgtggccagcagcctgtatgacatcctggcccggggggcctctgtgaacctgtacatgtttattggaggcaccaactttgcctactggaatggagccaacagcccctatgctgcccagcccaccagctatgactatgatgcccccctgtctgaggccggggacctgacagagaagtactttgccctgaggaacatcatccagaagtttgagaaggtgcctgagggccccatcccccccagcacccccaagtttgcctacggcaaggtgaccctggagaagctgaagacagtgggcgccgccctggacatcctgtgccccagcggccccatcaagagcctgtaccccctgaccttcatccaggtgaagcagcactacggctttgtgctgtaccgcaccaccctgccccaggactgcagcaacccagcccccctgagcagccccctgaatggagtgcatgaccgggcctacgtggccgtggatggcatcccccagggcgtgctggagagaaataatgtcatcaccctgaacatcaccgggaaggccggggccaccctggacctgctggtggagaacatgggccgggtgaactatggagcctacatcaatgacttcaagggcctggtgagcaacctgaccctgagcagcaacatcctgacagactggaccatcttccccctggacacagaagatgctgtgtgcagccacctgggcggctggggccaccgggacagcggccaccatgatgaggcctgggcccacaacagcagcaactacaccctgcctgccttctacatgggcaacttcagcatccccagcggcatcccagacctgccccaggacaccttcatccagtttcctggctggaccaagggccaggtgtggatcaatggcttcaacctgggccgctactggccagcccggggcccccagctgaccctgtttgtgccccagcacatcctgatgaccagcgcccccaacaccatcaccgtgctggagctggagtgggccccctgcagcagtgatgatcctgagctgtgtgctgtgacctttgtggacaggcctgtgattggcagctctgtgacctatgaccaccccagcaagcctgtggagaagaggctgatgcctcctccaccccagaagaacaaggacagctggctggaccacgtgtag

SEQ ID NO: 8464 - DNA, 2034 bp, Artificial Sequence
  derived and/or modified sequence
atgcccggcttcctggtgcggatcctgcccctgctgctggtgctgttactcttgggaccaacccgcgggttgcggaatgccacccaaaggatgttcgagatcgattacagccgcgactcatttcttaaggacggccagcctttcagatacataagtggttcaatacattactccagggtgccaaggttctactggaaagacagactcctgaaaatgaagatggccggccttaatgctattcagacatatgtgccttggaattttcatgaaccttggcctggtcagtatcagttcagcgaagatcacgatgtcgagtactttctccgactggcacacgagttgggccttctggtgatcttaagacctgggccttacatctgcgccgagtgggaaatgggaggactgccggcctggctgctggagaaagagtcaatcctacttagaagctcagatccagattatctggcggctgtggacaagtggctgggggtgcttttgccaaagatgaaaccactgctatatcagaacggtgggcccgtcatcactgtccaagtagaaaatgagtatggatcatatttcgcctgcgatttcgattatctgagatttctccaaaagcgctttcgacaccaccttggggatgatgtcgtgctgtttactaccgacggggctcacaagacatttttaaagtgcggagccctgcaggggttgtacacgaccgttgattttggaaccggctcaaatataacggatgcgtttctgtctcaacggaaatgcgaacctaaaggcccacttatcaactctgagttttataccggatggctggaccactggggccagccccacagcacaattaagacggaggcagtagcctcaagcctttacgatatcttagccaggggagcttccgtcaacttgtatatgttcatagggggaactaattttgcatactggaacggggcaaactccccttatgccgcacaacctaccagctatgattatgatgcccctttgtcagaggccggtgacctcacggagaagtatttcgccttgcgaaatatcatacaaaagtttgaaaaggttcctgagggacctatccctccgtccacacccaagttcgcttacggcaaggtgaccctggaaaaactaaagaccgtcggcgctgcgctcgacattttatgtccatcaggcccgatcaagagcctttaccctctgacttttattcaggtgaagcagcactatgggtttgtcctgtataggacaacgctcccccaagactgctctaatcccgctcctttgagcagccccctgaacggcgtccacgatcgggcttatgtcgccgtggacgggataccgcagggtgttcttgagaggaacaatgtaattaccctgaatattaccggaaaggctggcgccaccctcgacctgctggtggagaacatgggcagagtgaactatggggcttacatcaacgattttaaaggactggtctccaacctgacattgagttccaatatcctgactgattggactatttttccattggacacggaagatgcggtgtgtagtcacctcggaggctggggacacagggatagtggacatcacgatgaagcttgggcccacaattctagcaactacaccctacccgccttctatatgggcaacttcagcatcccttcgggaatacctgatctccctcaggacacatttatccagttcccagggtggaccaaggggcaggtctggatcaacggcttcaatctcgggagatactggcccgcgcgtgggccacagctaactttgttcgtcccccagcacatcctgatgacaagcgctccgaatacgattaccgtgctcgagttggaatgggctccatgttccagtgacgatccggagctctgtgcggtcactttcgtggacagaccggttattggtagtagcgtcacatatgaccatcctagcaaacccgtagagaaacgtctgatgcctccacccccacaaaagaacaaggatagttggttagaccatgtctag

SEQ ID NO: 8465 - DNA, 2034 bp, Artificial Sequence
  derived and/or modified sequence
atgccgggttttttggttaggatcctgccgctgctgctcgttcttctattattaggacccaccagaggactccggaacgcaacccagcgcatgtttgagatagactatagtagagactcctttcttaaggacgggcagccatttagatacatctcaggctctattcattactcccgggtccctcggttttattggaaagataggcttttgaagatgaaaatggctgggctgaacgccatccaaacatacgtcccctggaacttccacgaaccctggcctggacagtaccagttttccgaagaccacgatgtagaatacttcctccggctggcccacgagcttggcctgttggtgatcttacgcccaggaccatatatttgtgcagagtgggaaatgggtggactacccgcttggttgctagaaaaagaatccatcttgttgaggagttccgacccagactacttggctgcagtagataagtggctgggcgtcctgctgcccaaaatgaagccgcttctgtaccaaaatggcggacccgtcatcaccgtccaagtcgagaacgaatatggatcatatttcgcgtgcgatttcgactaccttcgattcttacagaagaggtttcgccaccacctgggagacgatgtggtgttgttcacgacagatggggctcacaagaccttcctcaagtgtggcgctctacaaggattgtacaccaccgtcgattttggcacaggaagtaatatcacagacgcctttctgagtcagagaaagtgtgaaccaaagggacctctgatcaacagtgaattttacacagggtggctcgatcattgggggcagcctcactcaaccatcaagaccgaagcagtggcctctagcctctatgacatcttggctcgcggagcgagcgtgaatctgtatatgtttattgggggaacgaacttcgcatactggaacggggcaaactccccctatgctgcccagcccacgtcttatgactacgacgcaccactcagcgaggcgggagatttgactgagaagtatttcgctctgagaaacatcatccaaaagttcgaaaaagtgcccgaaggaccaatacccccatctaccccaaaatttgcatacggaaaggtcacactggaaaagctgaaaaccgtcggggcagctttggatattctgtgtccttctggtccgataaagtctttgtatccgctgactttcattcaggtgaagcagcattacggcttcgtgctgtaccggacaacgctgccgcaagattgttcaaatcccgcaccactgtcttctcctcttaatggagtccatgacagggcatatgtcgccgttgatggaattccccagggggtattggagcgaaataatgtcattacgttgaatatcactggtaaggcaggagccactctggacctcctggtggagaacatgggacgcgtgaactacggagcttacattaatgactttaaggggttagtaagcaatctgacgctctcttccaacatcctgacagattggacaatcttcccattggacacagaggatgcagtatgttcacatttgggtggctggggtcatcgcgacagcgggcatcatgacgaagcctgggcccataactctagcaactacacacttcccgctttctatatgggtaatttctctatacccagcggaatccctgatttgccccaggacacctttatccagttccctggctggacgaagggacaggtttggatcaatggattcaatctggggaggtactggcctgctaggggtccacagctgactctgttcgtgccacaacatattctgatgacctcagcccctaacacaattacagtgctggaattggagtgggctccctgttcatccgacgatccggagctgtgtgctgtcacctttgtcgatcgaccggtgatcggctcgtcagtgacgtacgatcacccttccaagcctgtagagaaacggctgatgccccctcctccccagaaaaataaggattcctggttggatcacgtgtag

SEQ ID NO: 8466 - DNA, 2034 bp, Artificial Sequence
  derived and/or modified sequence
atgcccggcttcctggtgagaatcctgcccctgctgctggtgctgctgctgctgggccccaccagaggcctgagaaacgccacccagagaatgttcgagatcgactacagcagagacagcttcctgaaggacggccagcccttcagatacatcagcggcagcatccactacagcagagtgcccagattctactggaaggacagactgctgaagatgaagatggccggcctgaacgccatccagacctacgtgccctggaacttccacgagccctggcccggccagtaccagttcagcgaggaccacgacgtggagtacttcctgagactggcccacgagctgggcctgctggtgatcctgagacccggcccctacatctgcgccgagtgggagatgggcggcctgcccgcctggctgctggagaaggagagcatcctgctgagaagcagcgaccccgactacctggccgccgtggacaagtggctgggcgtgctgctgcccaagatgaagcccctgctgtaccagaacggcggccccgtgatcaccgtgcaggtggagaacgagtacggcagctacttcgcctgcgacttcgactacctgagattcctgcagaagagattcagacaccacctgggcgacgacgtggtgctgttcaccaccgacggcgcccacaagaccttcctgaagtgcggcgccctgcagggcctgtacaccaccgtggacttcggcaccggcagcaacatcaccgacgccttcctgagccagagaaagtgcgagcccaagggccccctgatcaacagcgagttctacaccggctggctggaccactggggccagccccacagcaccatcaagaccgaggccgtggccagcagcctgtacgacatcctggccagaggcgccagcgtgaacctgtacatgttcatcggcggcaccaacttcgcctactggaacggcgccaacagcccctacgccgcccagcccaccagctacgactacgacgcccccctgagcgaggccggcgacctgaccgagaagtacttcgccctgagaaacatcatccagaagttcgagaaggtgcccgagggccccatcccccccagcacccccaagttcgcctacggcaaggtgaccctggagaagctgaagaccgtgggcgccgccctggacatcctgtgccccagcggccccatcaagagcctgtaccccctgaccttcatccaggtgaagcagcactacggcttcgtgctgtacagaaccaccctgccccaggactgcagcaaccccgcccccctgagcagccccctgaacggcgtgcacgacagagcctacgtggccgtggacggcatcccccagggcgtgctggagagaaacaacgtgatcaccctgaacatcaccggcaaggccggcgccaccctggacctgctggtggagaacatgggcagagtgaactacggcgcctacatcaacgacttcaagggcctggtgagcaacctgaccctgagcagcaacatcctgaccgactggaccatcttccccctggacaccgaggacgccgtgtgcagccacctgggcggctggggccacagagacagcggccaccacgacgaggcctgggcccacaacagcagcaactacaccctgcccgccttctacatgggcaacttcagcatccccagcggcatccccgacctgccccaggacaccttcatccagttccccggctggaccaagggccaggtgtggatcaacggcttcaacctgggcagatactggcccgccagaggcccccagctgaccctgttcgtgccccagcacatcctgatgaccagcgcccccaacaccatcaccgtgctggagctggagtgggccccctgcagcagcgacgaccccgagctgtgcgccgtgaccttcgtggacagacccgtgatcggcagcagcgtgacctacgaccaccccagcaagcccgtggagaagagactgatgcccccccccccccagaagaacaaggacagctggctggaccacgtgtag

SEQ ID NO: 8467 - protein, 193 aa, Artificial Sequence
  derived and/or modified sequence
MQSLMQAPLLIALGLLLAAPAQAHLKKPSQLSSFSWDNCDEGKDPAVIRSLTLEPDPIIVPGNVTLSVMGSTSVPLSSPLKVDLVLEKEVAGLWIKIPCTDYIGSCTFEHFCDVLDMLIPTGEPCPEPLRTYGLPCHCPFKEGTYSLPKSEFVVPDLELPSWLTTGNYRIESVLSSSGKRLGCIKIAASLKGI

SEQ ID NO: 8468 - DNA, 582 bp, Artificial Sequence
  derived and/or modified sequence
atgcaatccctgatgcaggctcccctgttaattgcactgggccttctgttggccgcccctgcccaagcgcacttgaaaaaaccaagtcagcttagttcattcagctgggacaactgcgacgaaggaaaagatcctgcagtgatccgcagtctgactctcgagcccgatccaatcatcgtacctggtaatgtgactctcagtgtgatggggagcacctccgtgcccctttcctccccactgaaggtggacctggtgctggaaaaggaggtagcgggtctgtggatcaaaataccatgcacagattacatcggaagttgtactttcgagcacttttgtgacgtgcttgacatgctgataccaactggagaaccctgccccgaacctcttcgaacctacggcctgccgtgccattgtccattcaaagaagggacgtacagtttgccaaagtcagagttcgtggtcccggacctggagctgccctcttggctaacgactggcaattataggattgagtctgtcctgagttccagcggaaaacggctgggctgcatcaaaatcgccgccagcctgaagggcatttag

SEQ ID NO: 8469 - DNA, 3896 bp, Artificial Sequence
  derived and/or modified sequence
gtgctaagctcccttccgttccagccgccttcagccccgccgcgctcagttccgcccctttctcttccaactccgcctacgccccagagagggaaggccttgacacctacgctagagagacaggctccaatgaaaagagcgagggggcggagccgggaggaatcggtccaattctcggccgggaagtctctggccgggacggggcagggcgaacctgccagtgactggactcagcttctttgcgtaaccaatactggaaggcatttaaaggcacctctgccgccacagaccttgcagttaactccgccctgacccacccttcccgatgcagtccctgatgcaggctcccctcctgatcgccctgggcttgcttctcgcggcccctgcgcaagcccacctgaaaaagccatcccagctcagtagcttttcctgggataactgtgatgaagggaaggaccctgcggtgatcagaagcctgactctggagcctgaccccatcatcgttcctggaaatgtgaccctcagtgtcatgggcagcaccagtgtccccctgagttctcctctgaaggtggatttagttttggagaaggaggtggctggcctctggatcaagatcccatgcacagactacattggcagctgtacctttgaacacttctgtgatgtgcttgacatgttaattcctactggggagccctgcccagagcccctgcgtacctatgggcttccttgccactgtcccttcaaagaaggaacctactcactgcccaagagcgaattcgttgtgcctgacctggagctgcccagttggctcaccaccgggaactaccgcatagagagcgtcctgagcagcagtgggaagcgtctgggctgcatcaagatcgctgcctctctaaagggcatataacatggcatctgccacagcagaatggagcggtgtgaggaaggtcccttttcctctgttttgtgtttgccaaggccaaactcccactctctgcccccctttaatcccctttctacagtgagtccactaccctcactgaaaatcattttgtaccacttacattttaggctggggcaagcagccctgacctaagggagaatgagttggacagttcttgatagcccagggcatctgctgggctgaccacgttactcatccccgttaacattctctctaaagagcctcgttcatttccaaagcagttaaggaatgggaaccagagtgttttaggacctgaagaatctttatgactctctctctttcactcttttttttttttgtcactaagttaaaagcgaagtgagagtattaacgtttttgttctcctccggccccctgttacaatgaaggggcaaaagtatttgctcttagtctattcctcccttaacttctgtgactaatttttatttcctttctagatttgcccaattaatactagggtgcagtgtatcctggagaggtagggtgtgtgggggaggaatcccttgggggagatattaggagtgctctgttgtttacaaactcaggtacccgcagggcctagcaagagacttaaatgactgataagaaccgtgagaaacatgttgcttccaggcttgatttcgatttttcgctttttttttttttgagacagaatctcactttgtcaccaggctggagtgcagtggtgcaatctcacctcactgcaacctccgcctcctgggttcaagcaattctcctgcctcagcctcccaagtagcttggactacaggccctgccaccacgcccggctaatttgtgtatttttagtagagatggggtttcaccatgttggccaggatggtctcgatctcttgacctcgtgatctgtccaccttggccttgcaaagcgctggattacaggcatgagccactacacccagccgatttttcctttttgattaaagatgctattacaatgtaaatatttcttacacagaaagtcacagcacatgtgcccattgatacaaggctgctgaggcctggtctccagttggaaatataattaagggtggcaaggactggagtcagttggagagtgcatagccagtctgtgaagacaactgccagatactggcaatactccagcctggtgacagagtgagactctgtctcaaaaaaaaagtttcaatgtttactcctagagaagccaaaaatccagatttgtatatgaaatcttaccattttaaaagattggcagctaattatttttttaaaaagctgtgcagtgtgatgtgtcccaaacggactggctcatgggtggccacgtcacaacctctgatctcagaccgtgcatgccttgtcctcttaagacaactcctgtggcaccgtttctccctccacagggccaaagccatagtgtccggtcccaaggacaaggctcttccagtgctaggagaggtatgagcagcctctcacctgtgagctgtggggatcacaaggctgcctgcctcagtcttggagtcctgttgggtgaatgaggcagatgggaaagagcctcaccagcagctgcttttggagcaggggtccaaggaagagagggtggcctcgacatcaaactgcctggatttttctaccaccctgttacatcataacaacttctgaaacacacaccagccctgagttctgggctcatttgaagcctggaatagcaataaatctttttaacttgcggacagtttccccttgccttggctgcatatttcactgatcacatctcaggatttcaaaagcatttttggggtggggctcttttggttggaagggtttgttggaacggtacaggtgagccgaggtgattccagggacggacccttctgcaggagcttgagcttgcttgttgtctctgcttcatcgccatccagctcccttgtttgctattttgctttccatcacatcatgactgcggagagcaaaaatcacctagtgaccattgaacaggtcccagagacaaaatctttttatctgaggaatttaaaagggagcaaagaccacctggtgactatcaggccatgcagaggcaaaacgccttatttggggaaaattaaaagtaattagactttcctattatctaaagcaggcatctggttccagatttcttttccccgaaaaaaaccttagaagtaactaaaatttctgtacatctccggaatgccatgctgaaactcactgcaaccccacggtcccgctttaaggtccataaatatccctaaggaaaaatccaccgtggtacattcagtcctctcaccgaggtgccccatggcagtcttctgcagcattcttctaatacctttcctttttcaaacctatactgttgttggtgaattctttttaccaacccacgagttgaccacttcccaatgccggggatctgacacctcacctggcaatgacctccacagccgtttccctctgttggatcttccagccttattctcaacagttcatttttagttcacattcttgaccgaatctcagtagctcagttaatctttttatgtctgctctgctcttgggtcatatgttccgtgaggtttcttaggggtgggggatgaggagttaaaggtggcatcttcaatcgcaggtcaaagcagactttaataaatggtgctgagccaactggaaagccccttggagaaagttgaagttagacctgtacttcacaccatatgcaagaatgaactccatctggatccaggatccaaatgtaagaaaatgaagccatataaatacagaaggaaacgtggtggaaatatccagtggcaacaaaatattgacacatttgactacatgaagataataaaaatgcttagtaaaaacacaataaaatcaaatgactgggagaaaaatttatccagcctatataatagacaaa

SEQ ID NO: 8470 - DNA, 582 bp, Artificial Sequence
  derived and/or modified sequence
atgcagagcctgatgcaggcccccctgctgattgccctgggcctgctgctggccgccccagcccaggcccacctgaagaagcccagccagctgagcagcttctcctgggacaactgtgatgagggcaaggaccctgctgtgatccgcagcctgaccctggagccagaccccatcatcgtgcctggaaatgtgaccctgtctgtgatgggcagcacctctgtgcccctgagcagccccctgaaggtggacctggtgctggagaaggaggtggccggcctgtggatcaagatcccctgcacagactacatcggcagctgcacctttgagcacttctgtgatgtgctggacatgctgatccccactggagagccctgcccagagcccctgcggacctacggcctgccctgccactgccccttcaaggagggcacctacagcctgcccaagtcagaatttgtggtgcctgacctggagctgcccagctggctgaccactggaaactaccgcatcgagagcgtgctgagcagcagcggcaagaggctgggctgcatcaagattgctgccagcctgaagggcatctag

SEQ ID NO: 8471 - DNA, 582 bp, Artificial Sequence
  derived and/or modified sequence
atgcagagcctgatgcaggcccccctgctgatcgccctgggcctgctgttggctgcacccgctcaggcacatcttaagaaaccttctcagctgtcgagtttttcctgggataattgtgacgaggggaaggaccccgccgtgatcaggtccctgacattagaaccagaccccataatcgtgcccggaaacgtcacactgtctgtaatgggctctacctccgttccactgtcaagtccactgaaagtcgacctggtgctcgagaaagaggtggccgggctgtggatcaagatcccctgcacggactatatcggaagttgtacgtttgaacacttttgcgacgtcttagatatgctgattccaacaggagagccatgtccagaacctcttcgaacgtacggactcccttgccactgcccctttaaagagggtacttatagcctgccaaagtccgagtttgttgtgccagatctcgaactacctagttggctgaccacagggaactatcgcatcgaaagtgttctgtcaagctccggcaaaagactgggatgcattaagatcgcagcaagcctcaagggcatctag

SEQ ID NO: 8472 - DNA, 582 bp, Artificial Sequence
  derived and/or modified sequence
atgcagtctctgatgcaggccccattactgatcgccctgggactgctcctggccgcacctgcccaggctcacctgaagaagcccagtcaattgtcttcattcagctgggacaactgtgacgagggaaaagaccctgcagtgattaggagcctgactctcgaacccgaccctataattgttccgggtaacgtgacactgtccgtcatggggagtaccagcgtgccattgagctctccactgaaggtagatctcgtgctggagaaggaagtagccggactgtggataaaaattccatgtactgattatatcggctcctgcacatttgagcatttctgcgatgtcctggacatgcttatccctaccggcgaaccgtgcccggaaccactgagaacttatggcctgccatgtcattgtccatttaaggaaggaacatactccctgccgaaaagtgagtttgttgtaccagaccttgagctcccctcatggctgaccacgggcaattaccgcatagagtctgttctttctagctcagggaagaggttgggatgcataaagatcgctgcatcattaaaggggatttag

SEQ ID NO: 8473 - DNA, 582 bp, Artificial Sequence
  derived and/or modified sequence
atgcagagcctgatgcaggcccccctgctgatcgccctgggcctgctgctggccgcccccgcccaggcccacctgaagaagcccagccagctgagcagcttcagctgggacaactgcgacgagggcaaggaccccgccgtgatcagaagcctgaccctggagcccgaccccatcatcgtgcccggcaacgtgaccctgagcgtgatgggcagcaccagcgtgcccctgagcagccccctgaaggtggacctggtgctggagaaggaggtggccggcctgtggatcaagatcccctgcaccgactacatcggcagctgcaccttcgagcacttctgcgacgtgctggacatgctgatccccaccggcgagccctgccccgagcccctgagaacctacggcctgccctgccactgccccttcaaggagggcacctacagcctgcccaagagcgagttcgtggtgcccgacctggagctgcccagctggctgaccaccggcaactacagaatcgagagcgtgctgagcagcagcggcaagagactgggctgcatcaagatcgccgccagcctgaagggcatctag

SEQ ID NO: 8474 - protein, 286 aa, Artificial Sequence
  derived and/or modified sequence
MPLDATWNITVQWLAVDIACRTLMFLKLMATYSAAFLPVVIGLDRQAAVLNPLGSRSGVRKLLGAAWGLSFLLAFPQLFLFHTVHCAGPVPFTQCVTKGSFKAQWQETTYNLFTFCCLFLLPLTAMAICYSRIVLSVSRPQTRKGSHAPAGEFALPRSFDNCPRVRLRALRLALLILLTFILCWTPYYLLGMWYWFSPTMLTEVPPSLSHILFLLGLLNAPLDPLLYGAFTLGCRRGHQELSIDSSKEGSGRMLQEEIHAFRQLEVQKTVTSRRAGETKGISITSI

SEQ ID NO: 8475 - protein, 292 aa, Artificial Sequence
  derived and/or modified sequence
MSAGNGTPWDATWNITVQWLAVDIACRTLMFLKLMATYSAAFLPVVIGLDRQAAVLNPLGSRSGVRKLLGAAWGLSFLLAFPQLFLFHTVHCAGPVPFTQCVTKGSFKAQWQETTYNLFTFCCLFLLPLTAMAICYSRIVLSVSRPQTRKGSHAPAGEFALPRSFDNCPRVRLRALRLALLILLTFILCWTPYYLLGMWYWFSPTMLTEVPPSLSHILFLLGLLNAPLDPLLYGAFTLGCRRGHQELSIDSSKEGSGRMLQEEIHAFRQLEVQKTVTSRRAGETKGISITSI

SEQ ID NO: 8476 - protein, 328 aa, Artificial Sequence
  derived and/or modified sequence
MANSASPEQNQNHCSAINNSIPLMQGNLPTLTLSGKIRVTVTFFLFLLSATFNASFLLKLQKWTQKKEKGKKLSRMKLLLKHLTLANLLETLIVMPLDGMWNITVQWYAGELLCKVLSYLKLFSMYAPAFMMVVISLDRSLAITRPLALKSNSKVGQSMVGLAWILSSVFAGPQLYIFRMIHLADSSGQTKVFSQCVTHCSFSQWWHQAFYNFFTFSCLFIIPLFIMLICNAKIIFTLTRVLHQDPHELQLNQSKNNIPRARLKTLKMTVAFATSFTVCWTPYYVLGIWYWFDPEMLNRLSDPVNHFFFLFAFLNPCFDPLIYGYFSL

SEQ ID NO: 8477 - DNA, 987 bp, Artificial Sequence
  derived and/or modified sequence
atggccaacagcgccagccccgagcagaaccagaaccactgcagcgccatcaacaacagcatccccctgatgcagggcaacctgcccaccctgaccctgagcggcaagatcagagtgaccgtgaccttcttcctgttcctgctgagcgccaccttcaacgccagcttcctgctgaagctgcagaagtggacccagaagaaggagaagggcaagaagctgagcagaatgaagctgctgctgaagcacctgaccctggccaacctgctggagaccctgatcgtgatgcccctggacggcatgtggaacatcaccgtgcagtggtacgccggcgagctgctgtgcaaggtgctgagctacctgaagctgttcagcatgtacgcccccgccttcatgatggtggtgatcagcctggacagaagcctggccatcaccagacccctggccctgaagagcaacagcaaggtgggccagagcatggtgggcctggcctggatcctgagcagcgtgttcgccggcccccagctgtacatcttcagaatgatccacctggccgacagcagcggccagaccaaggtgttcagccagtgcgtgacccactgcagcttcagccagtggtggcaccaggccttctacaacttcttcaccttcagctgcctgttcatcatccccctgttcatcatgctgatctgcaacgccaagatcatcttcaccctgaccagagtgctgcaccaggacccccacgagctgcagctgaaccagagcaagaacaacatccccagagccagactgaagaccctgaagatgaccgtggccttcgccaccagcttcaccgtgtgctggaccccctactacgtgctgggcatctggtactggttcgaccccgagatgctgaacagactgagcgaccccgtgaaccacttcttcttcctgttcgccttcctgaacccctgcttcgaccccctgatctacggctacttcagcctgtag

SEQ ID NO: 8478 - DNA, 987 bp, Artificial Sequence
  derived and/or modified sequence
atggcaaactcagccagcccagagcagaatcagaaccactgctcggccattaacaactcgatcccgttaatgcagggcaacctgccaaccttaaccctgtcgggcaagatacgagttactgtcacctttttcttattcctcttgtcagccacatttaacgcctcattcctcctaaaactgcagaagtggacccagaaaaaagagaagggcaagaagctatctcggatgaaactcttacttaagcatctcacactggctaatttactggaaacactcatcgttatgcccctggatggaatgtggaacatcacagtgcagtggtatgctggggaactcttgtgcaaggtgttgtcttatctgaagctgttctccatgtatgccccagcgttcatgatggtggtcatctcattggataggagtctggcgattacgcggcctcttgctctgaaatctaacagcaaagtcggtcaatccatggtcgggctcgcgtggatcctcagctcagtgttcgccgggccccagctttacatttttcgcatgattcaccttgccgactccagtgggcagacgaaagtgttttcccaatgtgttacacactgctcatttagtcaatggtggcatcaggccttttacaatttttttacattcagctgcctttttatcatccccctgttcattatgctgatctgcaacgccaagattatatttactctaaccagggttttgcaccaagatccacatgagctgcagctgaatcaatcaaagaacaacattccacgggccagactcaagaccttgaagatgaccgtggccttcgcaacttctttcactgtctgctggacaccgtactatgttttgggtatttggtattggtttgaccctgagatgctcaatagactgtctgatccagtaaaccatttcttcttcctcttcgcctttcttaacccatgttttgaccctctcatctatggctattttagcctttag

SEQ ID NO: 8479 - DNA, 987 bp, Artificial Sequence
  derived and/or modified sequence
atggccaacagcgccagccctgagcagaaccagaaccactgcagcgccatcaacaacagcatccccctgatgcagggcaacctgcccaccctgaccctgagcggcaagatccgggtgacagtgaccttcttcctgttcctgctgagcgccaccttcaatgccagcttcctgctgaagctgcagaagtggacccagaagaaggagaagggcaagaagctgagcaggatgaagctgctgctgaagcacctgaccctggccaacctgctggagaccctgattgtgatgcccctggatggcatgtggaacatcaccgtgcagtggtacgccggggagctgctgtgcaaggtgctgagctacctgaagctgttctccatgtatgccccagccttcatgatggtggtgatcagcctggacaggagcctggccatcacccggcccctggccctgaagagcaacagcaaggtgggccagagcatggtgggcctggcctggatcctgagctctgtgtttgctggcccccagctgtacatcttcaggatgatccacctggccgacagcagcggccagaccaaggtgttcagccagtgtgtgacccactgcagcttcagccagtggtggcaccaggccttctacaacttcttcaccttcagctgcctcttcatcatccccctcttcatcatgctgatctgcaatgccaagatcatcttcaccctgaccagggtgctgcaccaggacccccatgagctgcagctgaaccagagcaagaacaacatcccccgggcccggctgaagaccctgaagatgacagtggcctttgccaccagcttcaccgtgtgctggaccccctactacgtgctgggcatctggtactggtttgatcctgagatgctgaaccggctgagtgaccctgtgaaccacttcttcttcctgtttgccttcctgaacccctgctttgaccccctcatctacggctacttcagcctgtag

SEQ ID NO: 8480 - DNA, 987 bp, Artificial Sequence
  derived and/or modified sequence
atggccaacagcgccagccccgagcagaaccagaaccactgcagcgccatcaacaattctatcccactcatgcaaggaaatctacccacactgacactgtcagggaagattcgcgtgaccgtgacgttttttcttttcctcctgagtgcaacatttaatgcaagcttcctgctgaagttacagaaatggacacagaaaaaagagaaggggaagaagctgtcccggatgaagttgctcctgaaacatctgactctagctaacctgcttgagactctcatcgtcatgcctctggatggtatgtggaatatcactgttcaatggtacgccggagagctattatgcaaagtcctgagttatctcaaacttttctcgatgtacgcaccggctttcatgatggtggttatatccttagatagaagtctggcaataacgaggccactggcactcaagagcaactctaaagtcggccaatctatggtgggcctggcctggatcttatcaagcgtttttgcgggccctcaactgtacatctttagaatgattcatctggcggatagctccggtcagaccaaggttttttcccagtgtgtgacccactgctcatttagccaatggtggcatcaggccttttacaacttcttcacctttagctgtttattcattatccccctttttattatgctgatctgcaacgccaagatcatattcaccctcacccgggtgctccaccaggacccgcacgaactacagttgaatcagagcaaaaacaatattccaagggccagattaaaaacattgaagatgacggttgctttcgcgaccagtttcacagtgtgctggacaccatattatgtgctcgggatttggtattggttcgacccagagatgctgaaccgcctgagcgaccccgtgaaccacttttttttcctgtttgcctttctgaacccctgtttcgatcccctaatttatgggtatttcagcctatag

SEQ ID NO: 8481 - DNA, 987 bp, Artificial Sequence
  derived and/or modified sequence
atggctaacagcgccagccccgagcaaaatcagaaccactgctcggccatcaataacagcattccccttatgcaggggaacttgcctactttgactctttcaggcaagatacgggtgacagtgacatttttcctattccttctctcagcgaccttcaacgcatcattcctactcaagctccagaagtggactcagaagaaggaaaaagggaagaagttgtcacgcatgaagcttctactgaagcacctgacgctcgccaatctgttggaaacactgattgtgatgccactggatggtatgtggaatattacagtgcagtggtacgccggagagctcttatgcaaagtgttgagctacctcaaattgttctccatgtatgcccctgcttttatgatggttgtcatctctctggacaggtcgctggctattaccaggcctcttgcccttaaaagcaacagtaaagtggggcagtccatggtgggtctggcttggattctatcttccgtgttcgcgggacctcagctctacatttttcggatgatccacctggcggattcaagtggccagacaaaggtgttctctcagtgcgtcactcactgcagttttagccagtggtggcaccaggccttttataactttttcacattcagctgcctgtttatcataccactttttataatgttgatctgcaatgcaaagatcatctttacactcaccagggttttacaccaggatccacacgagttgcagctcaaccagagtaagaataatatcccgcgagctaggctgaagactctgaagatgaccgtcgcctttgctacctcttttacagtgtgctggaccccatactacgtgctgggtatctggtattggttcgatccggagatgttgaataggctttctgaccccgtcaaccatttcttcttcctgtttgcattcctgaacccatgcttcgacccgctgatttacgggtatttctctctctag

SEQ ID NO: 8482 - DNA, 861 bp, Artificial Sequence
  derived and/or modified sequence
atgcctctggatgcaacgtggaatataactgtgcagtggctcgctgttgatatagcatgtaggaccctaatgttcctgaagctgatggctacatattccgccgccttcttgcctgtagtaattgggctagatcgacaggccgctgtcctgaatccgctgggatctcggtctggcgtacgaaaacttctgggtgccgcctggggattgagcttcttgctcgctttcccccaattgtttcttttccataccgtgcactgagccgggccagtaccatttactcagtgcgtgacaaaagggagcttcaaggcccagtggcaagaaacgacttacaacctattcacattctgctgtctatttctgcttccattgaccgccatggccatctgttactctcgtattgtcctctcagtgtccaggccccagacccggaaaggctcacacgcccccgccggggagttcgctctgcctcgatcctttgataattgtcccagggttcgattgcgcgcactgcgtctggccctgctgatccttctgacttttattctgtgctggactccatactacctgctcggtatgtggtactggttcagccctacgatgttaacagaggtgccgcccagcctatcacacatactttttctccttggcctgttgaacgccccattggacccactcttgtacggtgccttcacgctgggctgtcggagaggtcatcaggagttgtccattgacagctctaaggagggttccggcagaatgctccaagaagaaatacacgcatttcggcagctcgaagtgcaaaagacagtgacctcaagacgagccggggagaccaagggaatatccattacatccatttag

SEQ ID NO: 8483 - DNA, 879 bp, Artificial Sequence
  derived and/or modified sequence
atgagcgcaggtaatggtaccccctgggacgccacttggaatattaccgttcagtggctagcagtggacattgcctgccggacactgatgtttcttaagctgatggctacctattccgcagccttcctgcctgtagtgattgggctggataggcaggcagctgtccttaaccccttggggtcaagatcgggcgttaggaagttattgggcgccgcctggggtctctctttcttgctagcgtttcctcagctgttccttttccacaccgtgcactgagccggcccagtgcccttcactcagtgcgtgacaaaagggagcttcaaggcacagtggcaggaaaccacctataatctgttcaccttctgttgtctgttcctgctccctcttaccgcgatggctatatgctatagccggattgtgctatccgtttctcgaccccaaacgagaaagggtagccatgcacctgctggcgagttcgccttacctcgatccttcgataattgccctcgggtgcggctacgtgcccttcgtttggctctactcatcttgctcacatttattctatgttggactccatactacttgttaggcatgtggtactggttctcccccacaatgctcaccgaagtaccccccagtctgtctcacatcctcttcctgctcggtcttctcaacgcacctttagaccctctgctgtatggggcttttacactgggatgtcgcagaggacaccaggagctctccattgattcttcgaaggaaggatccggtcgaatgcttcaggaagagatccacgctttcaggcagctggaagtacagaagaccgtaacttcaaggagggcgggagaaacaaagggcatttctatcacctcgatctag

SEQ ID NO: 8484 - DNA, 1599 bp, Artificial Sequence
  derived and/or modified sequence
gatctccacgtcttggaggccgccggcataggtgtgcgcctggcagaacctcacaaatacacatgcacgcaggccccgactgaatccagggctgtaggggctaaagaggtctaggtcagtagaggcctgaagcccaggctggtctgtccaaggaaaaaggagcgtgattggtaccagatcttcgttccctgcagaaccttgacagttgaacaagtgacctcctccagaacagatggagagtctccagaagcagaggctttagtgaacgaaattcgcaataatcagctccagatcctgaaaaggagggcgaagaatcagtggccaaagctaaccgcttcatacccacacttcatcctcctcagtttctctccaggccaccatgtctgcaggcaacggcaccccttggggtcagcagcgggggaggaggtctgggctggatcaggagtggaggtggagggctcagagctgcccaccttctcggcagcagccaaggtccgagtgggagtgaccattgtgctgtttgtttcttcggctggagggaacctggcagtcctgtggtcagtgacacggcgggaacccagccagctccgcccctctccggtcaggagactcttcatccatttagcagccgccgacttactagtcacttttgtggttatgcccctagatgccacctggaatatcactgttcaatggctggctgtggacatcgcatgtcggacactgatgttcctgaaactaatggccacgtattctgcagctttcctgcctgtggtcattggattggaccgccaggcagcagtactcaacccgcttggatcccgttcaggtgtaaggaaacttctgggggcagcctggggacttagtttcctgcttgccttcccccagctgttcctgttccacacggtccactgagctggcccagtccctttcactcagtgtgtcaccaaaggcagcttcaaggctcaatggcaagagaccacctataacctcttcaccttctgctgcctctttctgctgccactgactgccatggccatctgctatagccgcattgtcctcagtgtgtccaggccccagacaaggaaggggagccatgcccctgctggtgaatttgccctcccccgctcctttgacaattgtccccgtgttcgtctccgggccctgagactggccctgcttatcttgctgaccttcatcctctgctggacaccttattacctactgggtatgtggtactggttctcccccaccatgctaactgaagtccctcccagcctgagccacatccttttcctcttgggcctcctcaatgctcctttggatcctctcctctatggggccttcacccttggctgccgaagagggcaccaagaacttagtatagactcttctaaagaagggtctgggagaatgctccaagaggagattcatgcctttagacagctggaagtacaaaaaactgtgacatcaagaagggcaggagaaacaaaaggcatttctataacatctatctgatcctaacagagtatgtaggaacagaatagtaagtctttagtgccataagatcttaacatctcacttctactcctgctctcc

SEQ ID NO: 8485 - DNA, 1035 bp, Artificial Sequence
  derived and/or modified sequence
ccgcttcatacccacacttcatcctcctcagtttctctccaggccaccatgtctgcaggcaacggcaccccttgggatgccacctggaatatcactgttcaatggctggctgtggacatcgcatgtcggacactgatgttcctgaaactaatggccacgtattctgcagctttcctgcctgtggtcattggattggaccgccaggcagcagtactcaacccgcttggatcccgttcaggtgtaaggaaacttctgggggcagcctggggacttagtttcctgcttgccttcccccagctgttcctgttccacacggtccactgagctggcccagtccctttcactcagtgtgtcaccaaaggcagcttcaaggctcaatggcaagagaccacctataacctcttcaccttctgctgcctctttctgctgccactgactgccatggccatctgctatagccgcattgtcctcagtgtgtccaggccccagacaaggaaggggagccatgcccctgctggtgaatttgccctcccccgctcctttgacaattgtccccgtgttcgtctccgggccctgagactggccctgcttatcttgctgaccttcatcctctgctggacaccttattacctactgggtatgtggtactggttctcccccaccatgctaactgaagtccctcccagcctgagccacatccttttcctcttgggcctcctcaatgctcctttggatcctctcctctatggggccttcacccttggctgccgaagagggcaccaagaacttagtatagactcttctaaagaagggtctgggagaatgctccaagaggagattcatgcctttagacagctggaagtacaaaaaactgtgacatcaagaagggcaggagaaacaaaaggcatttctataacatctatctgatcctaacagagtatgtaggaacagaatagtaagtctttagtgccataagatcttaacatctcacttctactcctgctctcctagttccccccaaaaaagaaatactga

SEQ ID NO: 8486 - DNA, 2164 bp, Artificial Sequence
  derived and/or modified sequence
gcttgaagctctgtcctgggaaaatatggcaaacagtgcctctcctgaacagaatcaaaatcactgttcagccatcaacaacagcatcccactgatgcagggcaacctccccactctgaccttgtctggaaagatccgagtgacggttactttcttcctttttctgctctctgcgacctttaatgcttctttcttgttgaaacttcagaagtggacacagaagaaagagaaagggaaaaagctctcaagaatgaagctgctcttaaaacatctgaccttagccaacctgttggagactctgattgtcatgccactggatgggatgtggaacattacagtccaatggtatgctggagagttactctgcaaagttctcagttatctaaagcttttctccatgtatgccccagccttcatgatggtggtgatcagcctggaccgctccctggctatcacgaggcccctagctttgaaaagcaacagcaaagtcggacagtccatggttggcctggcctggatcctcagtagtgtctttgcaggaccacagttatacatcttcaggatgattcatctagcagacagctctggacagacaaaagttttctctcaatgtgtaacacactgcagtttttcacaatggtggcatcaagcattttataactttttcaccttcagctgcctcttcatcatccctcttttcatcatgctgatctgcaatgcaaaaatcatcttcaccctgacacgggtccttcatcaggacccccacgaactacaactgaatcagtccaagaacaatataccaagagcacggctgaagactctaaaaatgacggttgcatttgccacttcatttactgtctgctggactccctactatgtcctaggaatttggtattggtttgatcctgaaatgttaaacaggttgtcagacccagtaaatcacttcttctttctctttgcctttttaaacccatgctttgatccacttatctatggatatttttctctgtgattgatagactacacaagaagtcatatgaagaagggtaaggtaatgaatctctccatctgggaatgattaacacaaatgttggagcatgtttacatacaaacaaagtaggatttacacttaagttatcattcttttagaaactcagtcttcagagcctcaattattaaggaaaagtcttcaggaaaaatactaaaatattttctcttcctcataagcttctaaattaatctctgccttttctgacctcatataacacattatgtaggtttcttatcactttctctttgcataataatgtactaatatttaaaataccttcagcctaaggcacaaggatgccaaaaaaacaaaggtgagaaaccacaacacaggtctaaactcagcatgctttggtgagtttttctccaaaaggggcatattagcaattagagttgtatgctatataatacatagagcacagagccctttgcccataatatcaactttccctcctatagttaaaaagaaaaaaaatgaatctatttttctctttggcttcaaaagcattctgacatttggaggagtcagtaaccaatcccaccaaccactccagcaacctgacaagactatgagtagttctccttcatcctatttatgtggtacaggttgtgaagtatctctatataaagggaaattttagaggggttaggatttggacaggggtttagaacattcctctaagctatctagtctgtggagtttgtggcaattaattgccataaaataacaatgtttccaaatgcaactaagaaaatactcatagtgagtacgctctatgcatagtatgacttctattttaatgtgaagaattttttgtctctctcctgatcttactaaatccatatttcataaataactgagaataattaaaacaaaattaagcaaatgcacaagcaaaaagatgcttgatacacaaaaggaactctggagagaaaactacagcttcagtctgtacagatcaaagaagacagaacatgtcaggggaaggagggaaagatcttgatgcagggtttcttaacctgcagtctatgcacaacactatatttccatgtaatgtttttatttcagccctatttgtattattttgtgcatttaaaaaacacaatcttaagg

SEQ ID NO: 8487 - DNA, 855 bp, Artificial Sequence
  derived and/or modified sequence
atgcccctggatgccacctggaacatcaccgtgcagtggctggccgtggacatcgcctgcaggaccctgatgttcctgaagctgatggccacctacagcgctgccttcctgcctgtggtgattggcctggaccggcaggccgctgtgctgaaccccctgggcagccgctctggagtgaggaagctgctgggcgccgcctggggcctgtccttcctgctggccttcccccagctgttcctgttccacacagtggccggccctgtgcccttcacccagtgtgtgaccaagggcagcttcaaggcccagtggcaggagaccacctacaacctcttcaccttctgctgcctcttcctgctgcccctgacagccatggccatctgctacagcagaattgtgctgtctgtgtcccggccccagaccaggaagggcagccacgccccagctggggagtttgccctgcccaggagctttgacaactgcccccgggtgcggctgcgggccctgcggctggccctgctgatcctgctgaccttcatcctgtgctggaccccctactacctgctgggcatgtggtactggttcagccccaccatgctgacagaggtgccccccagcctgagccacatcctcttcctgctgggcctgctgaatgcccccctggaccccctgctgtatggagccttcaccctgggctgcagaagaggccaccaggagctgagcattgacagcagcaaggagggcagcggccgcatgctgcaggaggagatccacgccttccggcagctggaggtgcagaagacagtgaccagcagaagagctggggagaccaagggcatcagcatcaccagcatctag

SEQ ID NO: 8488 - DNA, 873 bp, Artificial Sequence
  derived and/or modified sequence
atgtctgctggaaatggcaccccctgggatgccacctggaacatcaccgtgcagtggctggccgtggacatcgcctgcaggaccctgatgttcctgaagctgatggccacctacagcgctgccttcctgcctgtggtgattggcctggaccggcaggccgctgtgctgaaccccctgggcagccgctctggagtgaggaagctgctgggcgccgcctggggcctgtccttcctgctggccttcccccagctgttcctgttccacacagtggccggccctgtgcccttcacccagtgtgtgaccaagggcagcttcaaggcccagtggcaggagaccacctacaacctcttcaccttctgctgcctcttcctgctgcccctgacagccatggccatctgctacagcagaattgtgctgtctgtgtcccggccccagaccaggaagggcagccacgccccagctggggagtttgccctgcccaggagctttgacaactgcccccgggtgcggctgcgggccctgcggctggccctgctgatcctgctgaccttcatcctgtgctggaccccctactacctgctgggcatgtggtactggttcagccccaccatgctgacagaggtgccccccagcctgagccacatcctcttcctgctgggcctgctgaatgcccccctggaccccctgctgtatggagccttcaccctgggctgcagaagaggccaccaggagctgagcattgacagcagcaaggagggcagcggccgcatgctgcaggaggagatccacgccttccggcagctggaggtgcagaagacagtgaccagcagaagagctggggagaccaagggcatcagcatcaccagcatctag

SEQ ID NO: 8489 - DNA, 861 bp, Artificial Sequence
  derived and/or modified sequence
atgcccctggacgccacctggaacatcaccgtgcagtggctggccgttgacatcgcttgtcgtactctcatgtttctcaaactgatggcaacttactctgcagcctttctccctgtggtcatcggtttggaccggcaggcagccgttttgaaccccctggggtccagatccggcgtgaggaaactattgggcgctgcttggggtctctcatttctcttggcgtttccacagctctttttattccatactgtgcactgagctggccctgtgccatttactcaatgcgtcactaaaggctctttcaaggcccagtggcaggagacaacctacaatttgtttaccttctgttgcctgtttctgctccctttaaccgcgatggctatctgctattctagaattgtgttgtcagtctcaagaccccagacccggaagggtagccatgccccagccggggagtttgcactacctcgatcatttgacaattgcccccgggtcaggttacgggcattgaggcttgcattgttaatattgctgacgtttatattgtgctggaccccatactacctactcggaatgtggtattggttctcgccaacgatgctcaccgaagttcctccgagcctcagccatatcctgttcctacttggtctgttgaatgcaccccttgatcctctactgtatggcgcttttaccttagggtgcagacggggtcatcaggaactttccatcgactctagtaaggagggctctggacgaatgctgcaggaggaaattcacgcatttcggcagttggaggtgcaaaagaccgtgactagcagacgggcgggtgagaccaagggcatcagtattacatcgatctag

SEQ ID NO: 8490 - DNA, 879 bp, Artificial Sequence
  derived and/or modified sequence
atgagcgccggcaacggcaccccctgggacgccacctggaacatcacagtgcaatggctggccgtggatattgcatgtagaaccctgatgtttcttaaactgatggcgacatactccgccgccttcctccccgtggtcatcggccttgacaggcaggcagcagtgctgaatccactgggttccaggtccggtgtgagaaagcttctgggagctgcgtgggggctctcgttcctactggcctttccacaactgttcctcttccacaccgttcattgagctggacccgtgcccttcacgcagtgtgttacaaagggttctttcaaggctcagtggcaggagactacttacaatctcttcacattttgctgtttatttctgctgccccttacagctatggcgatatgctactccaggatagtcctatctgtcagccgaccacagacgaggaaaggctcgcacgccccagccggtgaattcgcactgccccgctcattcgacaactgcccaagggtgcgtttacgcgcattgagactcgcactgttgattttgctgacattcatattatgctggactccgtactatctgttgggaatgtggtattggttcagccctaccatgctgacggaagtgccgccgtccctgagccatatcctctttctgcttggcctgcttaatgcccccctggaccctttattgtatggtgcattcacacttggatgtcggcgcggccatcaggagcttagcatcgatagttctaaagaggggagtggccgcatgctccaagaggagatccatgcctttcgccagcttgaagtccagaagaccgtcacaagccgacgggctggcgaaaccaaggggattagcatcacatcgatttag

SEQ ID NO: 8491 - DNA, 861 bp, Artificial Sequence
  derived and/or modified sequence
atgcctctggatgccacatggaacatcactgtgcagtggttagctgtggacatcgcttgtcggacactgatgtttctgaaacttatggcaacctactccgcagccttcctcccggttgtgattgggttggaccggcaggccgctgtgctcaatcctctcggatcgagaagcggggtccgaaaactgctaggtgctgcttggggcttgtccttcctgctcgcgttccctcaactgttcctcttccacaccgttcactgagccggacccgttccatttactcagtgtgtcaccaaagggtcttttaaggcccagtggcaggagacgacctataatctgttcacattttgctgcctgttcctgttgccgttgacagcaatggccatttgttactccagaatcgtgttgtccgtgagcagaccacagacacggaagggttcgcatgcaccggcaggagagttcgcattacctaggtcattcgataactgcccgcgagtcaggctgcgtgcactgaggctggccctgctcattctcttgacattcattctgtgctggacaccatattacctgctgggaatgtggtattggttcagccccaccatgctgaccgaggtgcccccatcactgagccatatcctcttcctactgggcttattgaatgcccctctcgatcccctcctttacggggctttcaccctggggtgtaggcgtgggcatcaagagcttagcattgattcgtcaaaggaaggttctggccgaatgttgcaagaggaaatacatgccttccggcagctcgaagtccagaagacagtcacaagcagacgcgcaggggagacaaagggaatctccatcacctccatttag

SEQ ID NO: 8492 - DNA, 879 bp, Artificial Sequence
  derived and/or modified sequence
atgtccgctggtaacggtacaccgtgggacgctacttggaacattaccgtgcagtggttggctgtagacatcgcatgtcgaacactgatgtttctgaaactcatggccacctacagcgcagcctttcttccagtggtcatcggcctagatagacaggccgctgtgttgaatccgctgggctcccgttccggagtcagaaaactgctgggcgcagcgtgggggctgagcttcctactggcttttccccaactgttcctttttcacacagtccattgagccggtccagtgccctttacccagtgtgtgacgaaaggttcgttcaaggcccagtggcaggagactacctacaatttattcacattttgttgtctttttcttctgcccttgaccgccatggctatttgctactcccgcatagtcctgagcgtttcccggccacagacccgaaaaggttcccacgccccagcaggggagttcgctctgccgagaagcttcgataactgcccaagagtgcgcctaagggcgctccgcctagcgctgctgatcctcttaacttttatcttgtgttggacaccctattatctcctgggaatgtggtattggttcagccctacaatgctgacggaggtccctcccagcctgtctcatatcctcttcttgctgggcctcttaaacgccccactcgaccccctgctttatggtgcgtttacactgggatgtaggcgtggccaccaggaactgagcatagacagctccaaggaaggttccggtagaatgctgcaggaggagatacatgctttccggcagctggaagtgcagaagacagtgacttcgagacgggcaggggagacaaagggaatttccataacatctatttag

SEQ ID NO: 8493 - DNA, 861 bp, Artificial Sequence
  derived and/or modified sequence
atgcccctggacgccacctggaacatcaccgtgcagtggctggccgtggacatcgcctgcagaaccctgatgttcctgaagctgatggccacctacagcgccgccttcctgcccgtggtgatcggcctggacagacaggccgccgtgctgaaccccctgggcagcagaagcggcgtgagaaagctgctgggcgccgcctggggcctgagcttcctgctggccttcccccagctgttcctgttccacaccgtgcactgagccggccccgtgcccttcacccagtgcgtgaccaagggcagcttcaaggcccagtggcaggagaccacctacaacctgttcaccttctgctgcctgttcctgctgcccctgaccgccatggccatctgctacagcagaatcgtgctgagcgtgagcagaccccagaccagaaagggcagccacgcccccgccggcgagttcgccctgcccagaagcttcgacaactgccccagagtgagactgagagccctgagactggccctgctgatcctgctgaccttcatcctgtgctggaccccctactacctgctgggcatgtggtactggttcagccccaccatgctgaccgaggtgccccccagcctgagccacatcctgttcctgctgggcctgctgaacgcccccctggaccccctgctgtacggcgccttcaccctgggctgcagaagaggccaccaggagctgagcatcgacagcagcaaggagggcagcggcagaatgctgcaggaggagatccacgccttcagacagctggaggtgcagaagaccgtgaccagcagaagagccggcgagaccaagggcatcagcatcaccagcatctag

SEQ ID NO: 8494 - DNA, 879 bp, Artificial Sequence
  derived and/or modified sequence
atgagcgccggcaacggcaccccctgggacgccacctggaacatcaccgtgcagtggctggccgtggacatcgcctgcagaaccctgatgttcctgaagctgatggccacctacagcgccgccttcctgcccgtggtgatcggcctggacagacaggccgccgtgctgaaccccctgggcagcagaagcggcgtgagaaagctgctgggcgccgcctggggcctgagcttcctgctggccttcccccagctgttcctgttccacaccgtgcactgagccggccccgtgcccttcacccagtgcgtgaccaagggcagcttcaaggcccagtggcaggagaccacctacaacctgttcaccttctgctgcctgttcctgctgcccctgaccgccatggccatctgctacagcagaatcgtgctgagcgtgagcagaccccagaccagaaagggcagccacgcccccgccggcgagttcgccctgcccagaagcttcgacaactgccccagagtgagactgagagccctgagactggccctgctgatcctgctgaccttcatcctgtgctggaccccctactacctgctgggcatgtggtactggttcagccccaccatgctgaccgaggtgccccccagcctgagccacatcctgttcctgctgggcctgctgaacgcccccctggaccccctgctgtacggcgccttcaccctgggctgcagaagaggccaccaggagctgagcatcgacagcagcaaggagggcagcggcagaatgctgcaggaggagatccacgccttcagacagctggaggtgcagaagaccgtgaccagcagaagagccggcgagaccaagggcatcagcatcaccagcatctag

SEQ ID NO: 8495 - protein, 206 aa, Artificial Sequence
  derived and/or modified sequence
MGSGPRGALSLLLLLLAPPSRPAAGCPAPCSCAGTLVDCGRRGLTWASLPTAFPVDTTELVLTGNNLTALPPGLLDALPALRTAHLGANPWRCDCRLVPLRAWLAGRPERAPYRDLRCVAPPALRGRLLPYLAEDELRAACAPGPLCWGALAAQLALLGLGLLHALLLVLLLCRLRRLRARARARAAARLSLTDPLVAERAGTDES

SEQ ID NO: 8496 - protein, 409 aa, Artificial Sequence
  derived and/or modified sequence
MIPSRHTMLRFLPVNAASCPGDRRTMLVNVAAGVRVLRVPLRAGGSGSLSGLRPPAIVCYLPLQRASASGLFLARPQHCGRCGRGRGGAALSLGSPAYASRCRVSRAAVFSPWAPVSLESGRAPGCSLGRPGLRGALVVWLQLGETWVRLRGDFQPACGVVRVERLAGYRDAGHQGLDGAGPAVWVLRDVAQVPADRSAYCGASLAGPRGALSLLLLLLAPPSRPAAGCPAPCSCAGTLVDCGRRGLTWASLPTAFPVDTTELVLTGNNLTALPPGLLDALPALRTAHLGANPWRCDCRLVPLRAWLAGRPERAPYRDLRCVAPPALRGRLLPYLAEDELRAACAPGPLCWGALAAQLALLGLGLLHALLLVLLLCRLRRLRARARARAAARLSLTDPLVAERAGTDES

SEQ ID NO: 8497 - DNA, 621 bp, Artificial Sequence
  derived and/or modified sequence
atgggcagcggtccaagaggagccctcagtctgctcttattactgttggcacctcctagtcggccagcggccggctgccctgctccttgctcgtgcgcaggcaccttagtagactgtggccgcagaggactcacttgggccagccttcccaccgccttcccagtggatacgacagaattggtgctgacagggaacaacctgacggcgttgccccctgggctcttggacgccctgcccgcactccggacggctcacctgggggctaacccctggcggtgcgactgccgactagtgcctttgcgcgcttggctcgcgggccgccctgagcgggccccttatcgtgaccttcggtgtgtcgcgccgcccgcactgcgtggacgcctcctcccttacctcgcagaggacgagttacgggccgcgtgcgcccctggtccactctgctggggggcactggcagctcagttagccctgctgggattggggttgctgcatgccttattacttgtcctactgctgtgccgtctccggaggttgagggctcgcgcacgcgcccgtgccgccgcacgcttatcactcactgatcccctggttgccgaacgtgcggggaccgacgagtcttag

SEQ ID NO: 8498 - DNA, 1230 bp, Artificial Sequence
  derived and/or modified sequence
atgataccgtccaggcacaccatgctccgattcctgccagtcaacgccgcttcctgcccaggggacaggcgtaccatgcttgttaatgtggctgctggggtgcgtgtgttacgagttcccctgagggccggcgggtctggctctctgtccggtttgcggccacccgctattgtttgttacctaccgcttcaaagagcctctgcttcaggcctgttccttgctagacctcaacattgcggccgctgcggacgaggccggggaggtgctgcactcagcttggggagtcccgcctacgcctcgaggtgtcgcgtatcacgggcagcagttttctccccctgggcccccgtttccctagagagcggtcgtgcccccggttgcagccttggtcgcccggggcttcggggggctctggtagtttggctgcaactgggggagacctgggtccggctgagaggcgatttccagcctgcttgtggtgttgttagagtcgaacggttggctggctaccgcgacgctgggcaccaagggcttgacggagccgggcccgccgtctgggttctaagagacgtcgctcaagtgcctgccgaccgaagcgcctactgcggcgcctccctggccggtccacgcggagcgctctccttgttgttgctcctgttagctccaccgagtcgtcccgccgctgggtgtcccgctccctgctcatgtgccggtacattggtggattgtggaaggaggggcctgacctgggcaagtctccctacagccttccccgtagacaccaccgagctagtcctaaccggcaacaatctgactgctttgccacctggtctgctggatgctctgcccgccctgaggacagcacacctgggcgctaatccgtggcggtgtgactgtagattggtgccattgcgggcgtggctggctggaaggccagagagggctccttatcgcgacctcagatgtgtggcccctcctgctctccgtggacggcttcttccatacctcgccgaggacgagctcagagcagcttgtgcacccgggccgctgtgttggggcgctctggccgcccagctggctttgttaggtctcgggctcttgcacgctctgttactggttctgctcctctgcaggctacgcaggttgagggctagggctagagcaagagctgccgccagactcagtttgacagacccactggtcgctgagagggctgggactgatgaatcttag

SEQ ID NO: 8499 - DNA, 1553 bp, Artificial Sequence
  derived and/or modified sequence
gtcttcccttatccccagacgcctagcgggcagggttgggctgaatcaaatgggagccctccagacataaggaggccagaggctgcaaggagcggggtcgtgaccgcttacaccccttctccacagcccggcccgacctggagggcccccggggcactgggcggtgagccacctcctggcaactctcggtgccgtcccctgccctcgctcgaggcctcttctccccagcaccgctgtggtgtgccgggatcctgagcctaggcctcccgatgttcccacccgcatgatcccttcccgccacacgatgctccgttttcttccgttgtgaatgccgcgtcctgtcctggtgacaggagaacaatgttggtgaacgtcgcagcgggtgtccgagtgctccgtgtgcccctgagagcgggtgggagcggaagcctgagcggcctgcggcctccggcgatagtgtgctatctgccgctgcagcgcgcgtccgcgcggcctctgggctatttctggccaggccgcagcactgtggtcggtgcgggcgtggcaggggcggggcggccttatcgctcggctctcccgcctacgcctcccgctgcagagtaagccgggctgccgtcttctcgccatgggctccgggccgcgcggggcgctgagcttactgctcctgctgctggccccgccgagccgcccggccgcaggttgcccggcgccctgtagctgcgcggggacgctcgtggactgcgggcgccgcgggctgacttgggcctcgctgccgaccgccttccctgtcgacacaaccgagctggtgctgaccggcaacaacctgacggcgctgccgccggggctgctggacgcgctgcccgcgctgcgcaccgcacacctgggcgccaacccctggcgctgcgactgccgccttgtgccgctgcgcgcctggctggccggccgccccgagcgtgcgccctaccgcgacctgcgttgcgtggcgcccccagcgctgcgcggccgcctgctgccctatctggccgaggacgagctgcgcgccgcttgcgctcccggcccgctctgctggggggcgctggcggcgcagcttgcgctgctgggccttgggctgctgcacgcgttgctgctggtgctgctgctgtgccgcctgcggaggctgcgggcccgggcccgcgctcgcgccgcagcccggctgtcgctgaccgacccgctggtggccgagcgagccggaaccgacgagtcctgaggagagaaccggtgcgtcctgaggagagaaccggcgctgggcaacacgggcctgcaaactcgacaggaccctgcccgaggggccctcgcgccaacctggaccggtccccgcctcctccgctgcccaatctctcagacccaccccacctgcaggcccagaccacgtgggacagaactcctgcccaccctaccccgagggaggcgaacccgcacttccaggcttgggaggaccatggggcacaatgcggtccagaccctgctgcgtctcccttccaaactctggtgctgaataaacccttctgatctgg

SEQ ID NO: 8500 - DNA, 1230 bp, Artificial Sequence
  derived and/or modified sequence
atgatcccttcccgccacacgatgctccgttttcttccggtgaatgccgcgtcctgtcctggtgacaggagaacaatgttggtgaacgtcgcagcgggtgtccgagtgctccgtgtgcccctgagagcgggtgggagcggaagcctgagcggcctgcggcctccggcgatagtgtgctatctgccgctgcagcgcgcgtccgcgtctgggctatttctggccaggccgcagcactgtggtcggtgcgggcgtggcaggggcggggcggccttatcgctcggctctcccgcctacgcctcccgctgcagagtaagccgggctgccgtcttctcgccatgggctccggtgagtctggagtccggtcgggcccccggctgctccctaggccgacccgggttgagaggagctctggtcgtttggctgcagctgggagagacttgggtcagacttagaggggacttccagccggcgtgcggggtggtcagggtggagaggctggcgggctaccgggacgccgggcatcaggggctggatggagccgggccggcagtctgggtactcagagatgtcgcccaggtgcccgccgaccgctcggcttactgcggcgcttcccttgcagggccgcgcggggcgctgagcttactgctcctgctgctggccccgccgagccgcccggccgcaggttgcccggcgccctgtagctgcgcggggacgctcgtggactgcgggcgccgcgggctgacttgggcctcgctgccgaccgccttccctgtcgacacaaccgagctggtgctgaccggcaacaacctgacggcgctgccgccggggctgctggacgcgctgcccgcgctgcgcaccgcacacctgggcgccaacccctggcgctgcgactgccgccttgtgccgctgcgcgcctggctggccggccgccccgagcgtgcgccctaccgcgacctgcgttgcgtggcgcccccagcgctgcgcggccgcctgctgccctatctggccgaggacgagctgcgcgccgcttgcgctcccggcccgctctgctggggggcgctggcggcgcagcttgcgctgctgggccttgggctgctgcacgcgttgctgctggtgctgctgctgtgccgcctgcggaggctgcgggcccgggcccgcgctcgcgccgcagcccggctgtcgctgaccgacccgctggtggccgagcgagccggaaccgacgagtcctga

SEQ ID NO: 8501 - DNA, 621 bp, Artificial Sequence
  derived and/or modified sequence
atgggcagcggccccaggggggccctgagcctgctgctgctgctgctggccccacccagcaggcctgctgctggctgcccagccccctgcagctgtgccggcaccctggtggactgtggcagaagaggcctgacctgggccagcctgcccacagccttccctgtggacaccacagagctggtgctgactggaaacaacctgacagccctgcccccaggcctgctggatgccctgcctgccctgaggacagcccacctgggcgccaacccctggaggtgtgactgccgcctggtgcccctgcgggcctggctggccggccggcctgagcgggccccctacagagacctgcgctgtgtggcccccccagccctgcggggccgcctgctgccctacctggccgaggatgagctgcgggccgcctgtgcccctggccccctgtgctggggcgccctggccgcccagctggccctgctgggcctgggcctgctgcacgccctgctgctggtgctgctgctgtgccgcctgcggcggctgcgggcccgggcccgggcccgggctgctgcccggctgagcctgacagaccccctggtggccgagagagctggaacagatgagagctag

SEQ ID NO: 8502 - DNA, 1230 bp, Artificial Sequence
  derived and/or modified sequence
atgatccccagccgccacaccatgctgcgcttcctgcctgtgaatgctgccagctgccctggggacaggaggaccatgctggtgaatgtggccgccggcgtgcgggtgctgcgggtgcccctgcgggccggcggcagcggcagcctgagcggcctgcggcccccagccatcgtgtgctacctgcccctgcagagggccagcgccagcggcctcttcctggcccggccccagcactgcggccgctgtggccggggccggggcggggccgccctgagcctgggcagccctgcctatgccagccgctgccgggtgtccagagctgctgtgttcagcccctgggcccctgtgtccctggagagcggccgggcccctggctgcagcctgggccggcccggcctgcggggggccctggtggtgtggctgcagctgggggagacctgggtgcggctgcggggggacttccagcctgcctgtggggtggtgcgggtggagcggctggccggctacagagatgctggccaccagggcctggatggagctggccctgctgtgtgggtgctgagagatgtggcccaggtgcctgctgacagaagtgcctactgtggggccagcctggccggccccaggggggccctgagcctgctgctgctgctgctggccccacccagcaggcctgctgctggctgcccagccccctgcagctgtgccggcaccctggtggactgtggccggcggggcctgacctgggccagcctgcccacagccttccctgtggacaccacagagctggtgctgaccggcaacaacctgacagccctgcccccaggcctgctggatgccctgcctgccctgaggacagcccacctgggcgccaacccctggaggtgtgactgccgcctggtgcccctgcgggcctggctggccggccggcctgagcgggccccctacagagacctgcgctgtgtggcccccccagccctgcggggccgcctgctgccctacctggctgaagatgagctgcgggccgcctgtgcccctggccccctgtgctggggcgccctggccgcccagctggccctgctgggcctgggcctgctgcacgccctgctgctggtgctgctgctgtgccgcctgcggcggctgcgggcccgggcccgggcccgggccgccgcccggctgagcctgacagaccccctggtggccgagcgggccggcacagatgagagctag

SEQ ID NO: 8503 - DNA, 621 bp, Artificial Sequence
  derived and/or modified sequence
atgggcagcggcccccggggcgccctgagcctgctgctgctgctgttggcacccccaagccgacccgctgccgggtgccctgccccatgcagttgtgcagggaccctggtggattgtgggagaaggggcttaacctgggctagcttgcccacagcgtttccagtagacacaaccgagttagtcctaacgggcaacaatctcacagccctgccccccggtctccttgatgctctccctgcgctgagaaccgcccacctgggggccaacccctggcggtgtgattgtaggttggtccctctcagggcgtggttggctggtcggccagaacgtgccccttaccgagacctgcgctgtgtggccccacctgcccttcgtggtcgactgcttccatacctggctgaggatgagctgcgcgcagcttgcgcgcccggcccactgtgttggggggccttggccgcccaattagctctcctgggattagggttacttcatgcacttctgctggtcctgctgctgtgtaggctgcgcagactgcgggcccgcgcccgggcacgtgctgcagcaaggttgtccctcaccgacccactggtggcagaaagagcgggcactgatgagagttag

SEQ ID NO: 8504 - DNA, 1230 bp, Artificial Sequence
  derived and/or modified sequence
atgatccccagccggcacaccatgctgcggttcctgcccgtgaacgccgcctcgtgtcctggcgacagaaggacaatgcttgttaacgtggccgcgggagtacgagttctgagggtgcctttacgagccggtgggtcagggagtctgtccgggcttcgcccacctgcgatcgtgtgctatctccccctgcaacgggcctccgcctccggactattcctagccagaccgcagcattgcggtcggtgtggaagggggagagggggtgccgccctttctctcggcagtcctgcttatgcctctaggtgtagggtatccagagccgccgtttttagtccatgggcacctgtctctctcgagagcggacgagcgcccggctgcagtctggggcgcccgggtctgcggggtgccttggtggtttggctgcaactcggggaaacctgggtgaggctcaggggtgatttccagccggcctgcggggtggtcagagtcgaaaggcttgcaggctaccgggatgccggacatcaagggctggacggtgcaggccctgctgtatgggtcttgcgcgacgtggcccaggttcccgcagacaggagcgcatattgcggggctagtctggccggtccaagaggggccctttctctgttgctgttacttctggctcccccctccaggcccgcagccggctgcccagcaccttgctcatgtgccggcaccctcgtggactgcgggcgacggggtttaacctgggcctccctacctactgcctttcccgtagacacaacagagctggtcctcacagggaacaatcttacagcgttgcctccaggtttactggatgcgttgccggctctgagaaccgcccatctaggggccaatccttggcgctgcgactgtcgcttagtgcctctgcgggcatggcttgccggccgccccgagagagctccataccgcgacctaagatgtgtcgccccccctgctctacgcggaaggttgctgccctatttagcagaggacgagctgagggccgcctgcgcacccggtccactgtgttggggggccctcgccgcccagctagctctgctcggacttggcctgctgcatgcgctgctgcttgtcctcctgctgtgtagactgaggagactgagggcccgggcccgggccagggctgccgcccgactgtcgttgactgaccccctcgttgccgagcgcgctggtaccgatgagtcgtag

SEQ ID NO: 8505 - DNA, 621 bp, Artificial Sequence
  derived and/or modified sequence
atgggctcaggcccacggggagcactctcacttttgttgctgctccttgctcctccttcccggcctgccgctggctgcccggcaccttgtagttgcgcaggaacgctcgtggactgcggtcgcagagggctcacatgggcgagtctgccaacagcgttccccgtggatactaccgagttggttctgaccggcaataacctgaccgcgctccccccaggcctgctggacgccctcccagccctgcgcaccgcacacttgggtgcaaatccatggcggtgcgattgtcgattggtgcctctgcgcgcttggctggctgggcgacccgagcgtgctccttaccgagacctccgttgtgttgctccccctgctctgcgtggccgtctgctgccatatctcgcagaggacgaactgcgcgctgcctgtgccccagggcctctctgttggggagcactcgccgctcagctggcactgctgggcctgggcctgctccatgcgctcttgctggtcctgctgctctgccgtttaaggcgtctgcgcgcaagggcgagggctagagccgctgccaggctgagccttacagacccactggtggcagagagggcaggtaccgacgaatcatag

SEQ ID NO: 8506 - DNA, 1230 bp, Artificial Sequence
  derived and/or modified sequence
atgatcccgtctaggcatacgatgctccggtttcttccagtcaacgcagcgagctgtcctggagataggcggacaatgctggtgaacgtggctgccggtgtgcgggtgctgagggtccccctgagggccggaggaagtggctctctgtccggtctccggccacccgctattgtatgttacttaccactgcaacgcgcatccgcctccggtctctttctcgcaagaccccaacattgcgggaggtgcggacgcggaagaggaggagctgccctgagcctcggatccccagcgtatgccagtcggtgcagggtctcgcgggcagcagttttcagcccctgggcgcctgttagtctggaaagtgggagagccccaggatgcagcctgggaaggcccggacttaggggcgcattggttgtgtggctacagctgggggagacatgggttagacttcggggagatttccagcccgcatgcggcgtcgttcgcgtggaacgcctggctggataccgagacgccggtcatcagggcttggatggggctgggcctgcagtctgggtgctgagagatgtggctcaggtgcccgcagacaggagcgcttattgcggtgcttctcttgcagggcctagaggggctctgtcacttctcctgctgctgctcgccccaccttcgaggcccgcagccggatgccccgctccatgcagctgcgcgggaaccctagtggattgtgggcgacgcggtcttacttgggcttccctcccaactgcatttcccgtggataccaccgagttggtgctgacaggcaacaatttaactgcgctacctccaggcctcttagacgctctcccagcgcttcggacggcccatctcggagctaatccctggcgctgtgattgccgattggttccgctccgtgcctggctggccggaaggccggagagggcaccatacagggatctgcggtgcgttgctcccccagcactaaggggcaggctgctgccgtacctcgctgaggacgagctgcgggctgcatgcgcgccaggccctctgtgctggggcgcactagccgctcagctggcgcttttggggctgggattgctccacgctcttctgctggtccttctgctgtgtaggctgagacggttacgagccagggccagagcacgcgcagcagcccgtctaagtcttactgatcccttggtcgctgaaagagccggaacagacgaatcctag

SEQ ID NO: 8507 - DNA, 621 bp, Artificial Sequence
  derived and/or modified sequence
atgggcagcggccccagaggcgccctgagcctgctgctgctgctgctggccccccccagcagacccgccgccggctgccccgccccctgcagctgcgccggcaccctggtggactgcggcagaagaggcctgacctgggccagcctgcccaccgccttccccgtggacaccaccgagctggtgctgaccggcaacaacctgaccgccctgccccccggcctgctggacgccctgcccgccctgagaaccgcccacctgggcgccaacccctggagatgcgactgcagactggtgcccctgagagcctggctggccggcagacccgagagagccccctacagagacctgagatgcgtggccccccccgccctgagaggcagactgctgccctacctggccgaggacgagctgagagccgcctgcgcccccggccccctgtgctggggcgccctggccgcccagctggccctgctgggcctgggcctgctgcacgccctgctgctggtgctgctgctgtgcagactgagaagactgagagccagagccagagccagagccgccgccagactgagcctgaccgaccccctggtggccgagagagccggcaccgacgagagctag

SEQ ID NO: 8508 - DNA, 1230 bp, Artificial Sequence
  derived and/or modified sequence
atgatccccagcagacacaccatgctgagattcctgcccgtgaacgccgccagctgccccggcgacagaagaaccatgctggtgaacgtggccgccggcgtgagagtgctgagagtgcccctgagagccggcggcagcggcagcctgagcggcctgagaccccccgccatcgtgtgctacctgcccctgcagagagccagcgccagcggcctgttcctggccagaccccagcactgcggcagatgcggcagaggcagaggcggcgccgccctgagcctgggcagccccgcctacgccagcagatgcagagtgagcagagccgccgtgttcagcccctgggcccccgtgagcctggagagcggcagagcccccggctgcagcctgggcagacccggcctgagaggcgccctggtggtgtggctgcagctgggcgagacctgggtgagactgagaggcgacttccagcccgcctgcggcgtggtgagagtggagagactggccggctacagagacgccggccaccagggcctggacggcgccggccccgccgtgtgggtgctgagagacgtggcccaggtgcccgccgacagaagcgcctactgcggcgccagcctggccggccccagaggcgccctgagcctgctgctgctgctgctggccccccccagcagacccgccgccggctgccccgccccctgcagctgcgccggcaccctggtggactgcggcagaagaggcctgacctgggccagcctgcccaccgccttccccgtggacaccaccgagctggtgctgaccggcaacaacctgaccgccctgccccccggcctgctggacgccctgcccgccctgagaaccgcccacctgggcgccaacccctggagatgcgactgcagactggtgcccctgagagcctggctggccggcagacccgagagagccccctacagagacctgagatgcgtggccccccccgccctgagaggcagactgctgccctacctggccgaggacgagctgagagccgcctgcgcccccggccccctgtgctggggcgccctggccgcccagctggccctgctgggcctgggcctgctgcacgccctgctgctggtgctgctgctgtgcagactgagaagactgagagccagagccagagccagagccgccgccagactgagcctgaccgaccccctggtggccgagagagccggcaccgacgagagctag

SEQ ID NO: 8509 - protein, 201 aa, Artificial Sequence
  derived and/or modified sequence
MGNVMEGKSVEELSSTECHQWYKKFMTECPSGQLTLYEFRQFFGLKNLSPSASQYVEQMFETFDFNKDGYIDFMEYVAALSLVLKGKVEQKLRWYFKLYDVDGNGCIDRDELLTIIQAIRAINPCSDTTMTAEEFTDTVFSKIDVNGDGELSLEEFIEGVQKDQMLLDTLTRSLDLTRIVRRLQNGEQDEEGADEAAEAAG

SEQ ID NO: 8510 - protein, 205 aa, Artificial Sequence
  derived and/or modified sequence
MEGKSVEELSSTECHQWYKKFMTECPSGQLTLYEFRQFFGLKNLSPSASQYVEQMFETFDFNKDGYIDFMEYVAALSLVLKGKVEQKLRWYFKLYDVDGNGCIDRDELLTIIQFPHQYQKTAIRAINPCSDTTMTAEEFTDTVFSKIDVNGDGELSLEEFIEGVQKDQMLLDTLTRSLDLTRIVRRLQNGEQDEEGADEAAEAAG

SEQ ID NO: 8511 - protein, 88 aa, Artificial Sequence
  derived and/or modified sequence
MGNVMEGKSVEELSSTECHQWYKKFMTECPSGQLTLYEFRQFFGLKNLSPSASQYVEQMFETFDFNKDGYIDFMEYVAALSLVLKGKV

SEQ ID NO: 8512 - DNA, 606 bp, Artificial Sequence
  derived and/or modified sequence
atggggaacgtcatggaagggaagtccgtggaggagctttccagcaccgaatgccatcagtggtataagaaatttatgacggaatgtcccagtggtcagctgacactgtacgagtttagacagttttttggtctgaagaatttaagtccttcggccagtcagtatgtagaacaaatgtttgaaacatttgacttcaataaagatggctatatcgatttcatggagtacgtggcagctctgtccttggtcctgaaaggtaaagtcgagcagaagctccgttggtacttcaaattgtacgatgtcgatggcaacgggtgcatagacagggacgagctgttgaccattatacaagctattcgggcgataaacccctgtagtgacactaccatgacagctgaggagtttacagatactgtgttctccaaaatcgatgtgaacggggacggggaattgagtctggaggaattcatcgagggtgtgcagaaagatcaaatgctgcttgatacattgacacgatccctggatctgacccgcattgtcaggcggctgcagaatggagagcaggacgaggagggagccgatgaagccgctgaagctgccggctag

SEQ ID NO: 8513 - DNA, 606 bp, Artificial Sequence
  derived and/or modified sequence
atggggaatgttatggagggcaagtccgtggaggagctgtcctccacagagtgtcatcagtggtataaaaagtttatgacagaatgtccctcaggacagctgactctttacgaatttcgacaattttttggtctcaagaaccttagtccgtccgctagtcagtacgtcgaacaaatgttcgagaccttcgatttcaacaaggacggctatatcgactttatggagtatgtcgcagctctgagcttggttcttaagggtaaggtcgaacagaagctgagatggtactttaagctgtacgacgtagacggaaacggctgtatagacagggatgagcttctaactatcatccaggccattcgggcaattaacccttgctcggacacaactatgaccgcagaggaatttaccgatacagtttttagcaagattgacgtcaatggagatggagagctatctcttgaagagtttatcgagggcgtccagaaagatcaaatgctcctcgacactctgacacgctcactggatcttacccggatcgtgaggcgcctgcagaatggcgagcaggatgaggaaggtgcagacgaagccgccgaggctgccggctag

SEQ ID NO: 8514 - DNA, 618 bp, Artificial Sequence
  derived and/or modified sequence
atggaaggaaagtccgtagaagaattatcctccacggaatgccaccagtggtataaaaaattcatgactgagtgtccttcggggcagctcaccctctacgaatttcgacagttctttggcctgaagaacctttccccatcagcctcccaatatgtggaacagatgttcgagactttcgactttaataaagatggctatatcgacttcatggaatacgtggccgccctgtccttagtgttgaaggggaaggtcgagcagaagttgcgctggtacttcaaattgtatgacgttgatggtaacggctgcattgatcgagatgagctgttgacaattatacagttccctcaccagtatcagaaaaccgcaattcgcgccatcaatccttgctccgacacaacgatgactgccgaggaatttaccgacacagttttctccaagattgacgtgaacggcgacggggagcttagcctcgaagaattcatagagggagtacagaaggaccagatgctccttgatactctgactaggagtctggatctcaccaggattgtgcgcagacttcagaatggtgaacaggatgaagaaggggctgatgaagccgctgaagccgccggatag

SEQ ID NO: 8515 - DNA, 606 bp, Artificial Sequence
  derived and/or modified sequence
atgggcaatgtcatggagggcaagagtgtcgaagaattgtcgagcacagagtgtcatcagtggtacaaaaagttcatgactgagtgtccttcaggtcagctgactctttacgagtttaggcagttcttcggactgaagaatttatcaccctccgcaagtcaatatgttgagcaaatgtttgagaccttcgatttcaataaggatgggtacatcgatttcatggaatacgtggccgccctgagcctggttctaaagggaaaggtggaacaaaaactccggtggtattttaaactgtatgatgtcgacgggaacgggtgcattgacagagacgaacttttgactatcatccaggccattagagcgattaatccatgttcagatacaacgatgacagctgaggaattcaccgatacagtattcagcaagatcgacgtcaacggcgatggagagctgtccctggaagaattcatcgagggagttcagaaggaccagatgctgctggatactctgacccggagcctggacctgacccggatagtgcgcagactgcagaatggtgagcaagacgaagagggagccgatgaggccgcagaggctgctggatag

SEQ ID NO: 8516 - DNA, 267 bp, Artificial Sequence
  derived and/or modified sequence
atgggcaacgtgatggaaggcaagtctgtggaagagctcagtagcactgagtgtcatcagtggtataagaaatttatgaccgagtgtccaagcggacagctgacgctgtacgagttccgccaattcttcggtcttaagaatctgtcccccagcgcttcacagtatgtcgagcagatgttcgaaaccttcgactttaataaagacggctacattgactttatggaatacgtggctgctctttcgctggtgctcaaagggaaagtatag

SEQ ID NO: 8517 - DNA, 606 bp, Artificial Sequence
  derived and/or modified sequence
atgggaaacgtgatggaggggaagtctgtggaggagcttagttccactgagtgtcaccagtggtataaaaaatttatgaccgagtgccccagtggccagctgactttgtacgagtttcggcaattcttcggacttaaaaatctgtctccttcagcgagccagtacgtggaacagatgtttgagaccttcgactttaataaggatggttacattgattttatggaatatgtggctgccctatcgctggtcctgaaaggtaaggtggaacaaaagcttagatggtattttaagttgtatgacgtggacggaaatggttgcatagaccgcgatgagctactgaccattatccaggccatcagggccattaacccctgtagcgacactactatgaccgctgaagaattcacagacaccgtgttcagcaagatcgacgtgaatggcgatggcgaattaagccttgaggagttcatcgaaggggtgcagaaggatcagatgctgctagacactctgactcgcagcctcgatcttactagaatagttcggaggctgcagaatggagagcaggatgaagaaggggcagatgaagccgctgaggctgccgggtag

SEQ ID NO: 8518 - DNA, 1874 bp, Artificial Sequence
  derived and/or modified sequence
cagaagttccacctcaccatcaagaaaggccctggtccaggatgtgcaaggtgtgatgaaatcacagggctggggaaggtcagctcggggtcacaagaagcctgatgggcaggaaagagcatgaaagccccagccagcctcacatgtgcggctgggaggactcacagaaaccctctgtacccagtcatgggccaaagacaccgtcatgcaagggggtgaaggctccacactcgtcccggccccgggcgtggaagcaggacctcgagcagtctctggcagcagcctatgtgccggtcgttgtggactctaaggggcagaatccggacaagctcagggtacagtctcccctggggctgcaaggatttagtggagactcttaacaccagttctctggcatctgtgagtttgagtgtgggccatcatcttcttccttctgctctctccctctccacatttcccggtaccatctgatccatcaggcccttctttgctcaggcctgaaggactcaggcctgtgagagaggacggccccgttgtcggccaagacacctttgggcgaggagcagcgaacagggcctgtccatctcagacgtcagccccctgaaggcctgagcaatgggcaacgtgatggagggaaagtcagtggaggagctgagcagcaccgagtgccaccagtggtacaagaagttcatgactgagtgcccctctggccaactcaccctctatgagttccgccagttcttcggcctcaagaacctgagcccgtcggccagccagtacgtggaacagatgtttgagacttttgacttcaacaaggacggctacattgatttcatggagtacgtggcagcgctcagcttggtcctcaaggggaaggtggaacagaagctccgctggtacttcaagctctatgatgtagatggcaacggctgcattgaccgcgatgagctgctcaccatcatccaggccattcgcgccattaacccctgcagcgataccaccatgactgcagaggagttcaccgatacagtgttctccaagattgacgtcaacggggatggggaactctccctggaagagtttatagagggcgtccagaaggaccagatgctcctggacacactgacacgaagcctggaccttacccgcatcgtgcgcaggctccagaatggcgagcaagacgaggagggggctgacgaggccgctgaggcagccggctgagtgcaccgcccggctgcttctgcactagcgggtggggtggtatggtggtgcctgttggtggtgttcttgtcttaaccctagatagaatctaatgaactcagaggcttagctcgcctctttagggtccatggtggcagcagagaggcagaagtgggagtccagagccaggaacagtgaaggatggttcctggcccctctgagtgacagctggtggcagcactccttgctggggggcactgttcaacatccctctgccgtcgggtgaccccctagcccttctgactcctctcccagcttttcccagctttccccactgagcttctccagtccatgctcttctggacgtggactctctgaggcagaactgagcttttccaggcctcttatggaatcctgcagatccagtggctgcagcttcaatcccagtgctgcaatcacacatccattctgccctgggggaccctggagcctacttgtgcgctttgcatttcattgattgacgcctcccttcaacaagcatttactgagcgcctactatgtactaatgctagatgttagatgtacaaagaagacagttttcatcctctaggaactcataggctaatggtgagacacacagacaaacatcattataataaaatatgctaagagaa

SEQ ID NO: 8519 - DNA, 1575 bp, Artificial Sequence
  derived and/or modified sequence
tgcttctctaagccttgttctattttcaactcttttctccagggtacagtctcccctggggctgcaaggatttagtggagactcttaacaccagttctctggcatctgtgagtttgagtgtgggccatcatcttcttccttctgctctctccctctccacatttcccggtaccatctgatccatcaggcccttctttgctcaggcctgaaggactcaggcctgtgagagaggacggccccgttgtcggccaagacacctttgggcgaggagcagcgaacagggcctgtccatctcagacgtcagccccctgaaggcctgagcaatgggcaacgtgatggagggaaagtcagtggaggagctgagcagcaccgagtgccaccagtggtacaagaagttcatgactgagtgcccctctggccaactcaccctctatgagttccgccagttcttcggcctcaagaacctgagcccgtcggccagccagtacgtggaacagatgtttgagacttttgacttcaacaaggacggctacattgatttcatggagtacgtggcagcgctcagcttggtcctcaaggggaaggtggaacagaagctccgctggtacttcaagctctatgatgtagatggcaacggctgcattgaccgcgatgagctgctcaccatcatccaggccattcgcgccattaacccctgcagcgataccaccatgactgcagaggagttcaccgatacagtgttctccaagattgacgtcaacggggatggggaactctccctggaagagtttatagagggcgtccagaaggaccagatgctcctggacacactgacacgaagcctggaccttacccgcatcgtgcgcaggctccagaatggcgagcaagacgaggagggggctgacgaggccgctgaggcagccggctgagtgcaccgcccggctgcttctgcactagcgggtggggtggtatggtggtgcctgttggtggtgttcttgtcttaaccctagatagaatctaatgaactcagaggcttagctcgcctctttagggtccatggtggcagcagagaggcagaagtgggagtccagagccaggaacagtgaaggatggttcctggcccctctgagtgacagctggtggcagcactccttgctggggggcactgttcaacatccctctgccgtcgggtgaccccctagcccttctgactcctctcccagcttttcccagctttccccactgagcttctccagtccatgctcttctggacgtggactctctgaggcagaactgagcttttccaggcctcttatggaatcctgcagatccagtggctgcagcttcaatcccagtgctgcaatcacacatccattctgccctgggggaccctggagcctacttgtgcgctttgcatttcattgattgacgcctcccttcaacaagcatttactgagcgcctactatgtactaatgctagatgttagatgtacaaagaagacagttttcatcctctaggaactcataggctaatggtgagacacacagacaaacatcattataataaaatatgct

SEQ ID NO: 8520 - DNA, 1924 bp, Artificial Sequence
  derived and/or modified sequence
agtatcctgccaagagtcctccctgaccaccagaagttccacctcaccatcaagaaaggccctggtccaggatgtgcaaggtgtgatgaaatcacagggctggggaaggtcagctcggggtcacaagaagcctgatgggcaggaaagagcatgaaagccccagccagcctcacatgtgcggctgggaggactcacagaaaccctctgtacccagtcatgggccaaagacaccgtcatgcaagggggtgaaggctccacactcgtcccggccccgggcgtggaagcaggacctcgagcagtctctggcagcagcctatgtgccggtcgttgtggactctaaggggcagaatccggacaagctcagggtacagtctcccctggggctgcaaggatttagtggagactcttaacaccagttctctggcatctgtgagtttgagtgtgggccatcatcttcttccttctgctctctccctctccacatttcccggtaccatctgatccatcaggcccttctttgctcaggcctgaaggactcaggcctgtgagagaggacggccccgttgtcggccaagacacctttgggcgaggagcagcgaacagggcctgtccatctcagacgtcagccccctgaaggcctgagcaatgggcaacgtgatggagggaaagtcagtggaggagctgagcagcaccgagtgccaccagtggtacaagaagttcatgactgagtgcccctctggccaactcaccctctatgagttccgccagttcttcggcctcaagaacctgagcccgtcggccagccagtacgtggaacagatgtttgagacttttgacttcaacaaggacggctacattgatttcatggagtacgtggcagcgctcagcttggtcctcaaggggaaggtggaacagaagctccgctggtacttcaagctctatgatgtagatggcaacggctgcattgaccgcgatgagctgctcaccatcatccagtttcctcatcaataccaaaagacggccattcgcgccattaacccctgcagcgataccaccatgactgcagaggagttcaccgatacagtgttctccaagattgacgtcaacggggatggggaactctccctggaagagtttatagagggcgtccagaaggaccagatgctcctggacacactgacacgaagcctggaccttacccgcatcgtgcgcaggctccagaatggcgagcaagacgaggagggggctgacgaggccgctgaggcagccggctgagtgcaccgcccggctgcttctgcactagcgggtggggtggtatggtggtgcctgttggtggtgttcttgtcttaaccctagatagaatctaatgaactcagaggcttagctcgcctctttagggtccatggtggcagcagagaggcagaagtgggagtccagagccaggaacagtgaaggatggttcctggcccctctgagtgacagctggtggcagcactccttgctggggggcactgttcaacatccctctgccgtcgggtgaccccctagcccttctgactcctctcccagcttttcccagctttccccactgagcttctccagtccatgctcttctggacgtggactctctgaggcagaactgagcttttccaggcctcttatggaatcctgcagatccagtggctgcagcttcaatcccagtgctgcaatcacacatccattctgccctgggggaccctggagcctacttgtgcgctttgcatttcattgattgacgcctcccttcaacaagcatttactgagcgcctactatgtactaatgctagatgttagatgtacaaagaagacagttttcatcctctaggaactcataggctaatggtgagacacacagacaaacatcattataataaaatatgctaag

SEQ ID NO: 8521 - DNA, 2233 bp, Artificial Sequence
  derived and/or modified sequence
acctcaccatcaagaaaggccctggtccaggatgtgcaaggtgtgatgaaatcacagggctggggaaggtcagctcggggtcacaagaagcctgatgggcaggaaagagcatgaaagccccagccagcctcacatgtgcggctgggaggactcacagaaaccctctgtacccagtcatgggccaaagacaccgtcatgcaagggggtgaaggctccacactcgtcccggccccgggcgtggaagcaggacctcgagcagtctctggcagcagcctatgtgccggtcgttgtggactctaaggggcagaatccggacaagctcaggttcaatttctacacctcccagtactccaactccctgaaccccttctacactttgcagaagcctacctgtggctacctgtaccgccgggacactgaccacacccgcaagcgctttgatgtgcctcctgccaacttggtcttgtggcgctcctaggcctgagccaaacggaagcccccgacccttcaccctcacccctgtgacctcaggtccccaaggggaagggctgctcactgcaggaggagtgacctatattcgggctaagacagctgtgccatgcccacctattgacaatgataaagggaggtctctcttctcagcagcagttaaagtttgtccttcctttccctggcatctgaatgggtggctgtggggtacagtctcccctggggctgcaaggatttagtggagactcttaacaccagttctctggcatctgtgagtttgagtgtgggccatcatcttcttccttctgctctctccctctccacatttcccggtaccatctgatccatcaggcccttctttgctcaggcctgaaggactcaggcctgtgagagaggacggccccgttgtcggccaagacacctttgggcgaggagcagcgaacagggcctgtccatctcagacgtcagccccctgaaggcctgagcaatgggcaacgtgatggagggaaagtcagtggaggagctgagcagcaccgagtgccaccagtggtacaagaagttcatgactgagtgcccctctggccaactcaccctctatgagttccgccagttcttcggcctcaagaacctgagcccgtcggccagccagtacgtggaacagatgtttgagacttttgacttcaacaaggacggctacattgatttcatggagtacgtggcagcgctcagcttggtcctcaaggggaaggtggaacagaagctccgctggtacttcaagctctatgatgtagatggcaacggctgcattgaccgcgatgagctgctcaccatcatccaggccattcgcgccattaacccctgcagcgataccaccatgactgcagaggagttcaccgatacagtgttctccaagattgacgtcaacggggatggggaactctccctggaagagtttatagagggcgtccagaaggaccagatgctcctggacacactgacacgaagcctggaccttacccgcatcgtgcgcaggctccagaatggcgagcaagacgaggagggggctgacgaggccgctgaggcagccggctgagtgcaccgcccggctgcttctgcactagcgggtggggtggtatggtggtgcctgttggtggtgttcttgtcttaaccctagatagaatctaatgaactcagaggcttagctcgcctctttagggtccatggtggcagcagagaggcagaagtgggagtccagagccaggaacagtgaaggatggttcctggcccctctgagtgacagctggtggcagcactccttgctggggggcactgttcaacatccctctgccgtcgggtgaccccctagcccttctgactcctctcccagcttttcccagctttccccactgagcttctccagtccatgctcttctggacgtggactctctgaggcagaactgagcttttccaggcctcttatggaatcctgcagatccagtggctgcagcttcaatcccagtgctgcaatcacacatccattctgccctgggggaccctggagcctacttgtgcgctttgcatttcattgattgacgcctcccttcaacaagcatttactgagcgcctactatgtactaatgctagatgttagatgtacaaagaagacagttttcatcctctaggaactcataggctaatggtgagacacacagacaaacatcattataataaaatatgctaagag

SEQ ID NO: 8522 - DNA, 801 bp, Artificial Sequence
  derived and/or modified sequence
agtatcctgccaagagtcctccctgaccaccagaagttccacctcaccatcaagaaaggccctggtccaggatgtgcaaggactcacagaaaccctctgtacccagtcatgggccaaagacaccgtcatgcaagggggtgaaggctccacactcgtcccggccccgggcgtggaagcaggacctcgagcagtctctggcagcagcctatgtgccggtcgttgtggactctaaggggcagaatccggacaagctcagggtacagtctcccctggggctgcaaggatttagtggagactcttaacaccagttctctggcatctgtgagtttgagtgtgggccatcatcttcttccttctgctctctccctctccacatttcccggtaccatctgatccatcaggcccttctttgctcaggcctgaaggactcaggcctgtgagagaggacggccccgttgtcggccaagacacctttgggcgaggagcagcgaacagggcctgtccatctcagacgtcagccccctgaaggcctgagcaatgggcaacgtgatggagggaaagtcagtggaggagctgagcagcaccgagtgccaccagtggtacaagaagttcatgactgagtgcccctctggccaactcaccctctatgagttccgccagttcttcggcctcaagaacctgagcccgtcggccagccagtacgtggaacagatgtttgagacttttgacttcaacaaggacggctacattgatttcatggagtacgtggcagcgctcagcttggtcctcaaggggaaggtg

SEQ ID NO: 8523 - DNA, 1075 bp, Artificial Sequence
  derived and/or modified sequence
agtatcctgccaagagtcctccctgaccaccagaagttccacctcaccatcaagaaaggccctggtccaggatgtgcaaggtgtgatgaaatcacagggctggggaaggtcagctcggggtcacaagaagcctgatgggcaggaaagagcatgaaagccccagccagcctcacatgtgcggctgggagggtacagtctcccctggggctgcaaggatttagtggagactcttaacaccagttctctggcatctgtgagtttgagtgtgggccatcatcttcttccttctgctctctccctctccacatttcccggtaccatctgatccatcaggcccttctttgctcaggcctgaaggactcaggcctgtgagagaggacggccccgttgtcggccaagacacctttgggcgaggagcagcgaacagggcctgtccatctcagacgtcagccccctgaaggcctgagcaatgggcaacgtgatggagggaaagtcagtggaggagctgagcagcaccgagtgccaccagtggtacaagaagttcatgactgagtgcccctctggccaactcaccctctatgagttccgccagttcttcggcctcaagaacctgagcccgtcggccagccagtacgtggaacagatgtttgagacttttgacttcaacaaggacggctacattgatttcatggagtacgtggcagcgctcagcttggtcctcaaggggaaggtggaacagaagctccgctggtacttcaagctctatgatgtagatggcaacggctgcattgaccgcgatgagctgctcaccatcatccaggccattcgcgccattaacccctgcagcgataccaccatgactgcagaggagttcaccgatacagtgttctccaagattgacgtcaacggggatggggaactctccctggaagagtttatagagggcgtccagaaggaccagatgctcctggacacactgacacgaagcctggaccttacccgcatcgtgcgcaggctccagaatggcgagcaagacgaggagggggctgacgaggccgctgaggcagccggctga

SEQ ID NO: 8524 - DNA, 606 bp, Artificial Sequence
  derived and/or modified sequence
atgggaaatgtgatggagggcaagtctgtggaggagctgagcagcacagagtgccaccagtggtacaagaagttcatgacagagtgccccagcggccagctgaccctgtatgagttccggcagttcttcggcctgaagaacctgagccccagcgccagccagtatgtggagcagatgtttgagacctttgacttcaacaaggatggctacatcgacttcatggagtatgtggccgccctgagcctggtgctgaagggcaaggtggagcagaagctgcgctggtacttcaagctgtatgatgtggatggaaatggctgcatcgacagagatgagctgctgaccatcatccaggccatccgggccatcaacccctgcagcgacaccaccatgacagctgaggagttcacagacaccgtcttcagcaagattgatgtgaatggagatggagagctgagcctggaggagttcattgaaggagtgcagaaggaccagatgctgctggacaccctgaccaggagcctggacctgaccagaattgtgcggcggctgcagaatggagagcaggatgaggagggcgcagatgaggccgctgaggccgccggctag

SEQ ID NO: 8525 - DNA, 618 bp, Artificial Sequence
  derived and/or modified sequence
atggagggcaagtctgtggaggagctgagcagcacagagtgccaccagtggtacaagaagttcatgacagagtgccccagcggccagctgaccctgtatgagttccggcagttcttcggcctgaagaacctgagccccagcgccagccagtatgtggagcagatgtttgagacctttgacttcaacaaggatggctacatcgacttcatggagtatgtggccgccctgagcctggtgctgaagggcaaggtggagcagaagctgcgctggtacttcaagctgtatgatgtggatggaaatggctgcatcgacagagatgagctgctgaccatcatccagttcccccaccagtaccagaagacagccatccgggccatcaacccctgcagcgacaccaccatgacagctgaggagttcacagacaccgtcttcagcaagattgatgtgaatggagatggagagctgagcctggaggagttcattgaaggagtgcagaaggaccagatgctgctggacaccctgaccaggagcctggacctgaccagaattgtgcggcggctgcagaatggagagcaggatgaggagggcgcagatgaggccgctgaggccgccggctag

SEQ ID NO: 8526 - DNA, 267 bp, Artificial Sequence
  derived and/or modified sequence
atgggaaatgtgatggagggcaagtctgtggaggagctgagcagcacagagtgccaccagtggtacaagaagttcatgacagagtgccccagcggccagctgaccctgtatgagttccggcagttcttcggcctgaagaacctgagccccagcgccagccagtatgtggagcagatgtttgagacctttgacttcaacaaggatggctacatcgacttcatggagtatgtggccgccctgagcctggtgctgaagggcaaggtgtag

SEQ ID NO: 8527 - DNA, 606 bp, Artificial Sequence
  derived and/or modified sequence
atgggcaacgtgatggagggcaagagcgtggaggagctgagcagcaccgagtgtcaccagtggtacaagaagttcatgacagagtgcccttcaggccagctgaccctctacgagttccgccagttttttggtctcaagaatctcagtcccagcgcaagtcaatacgtagagcaaatgtttgaaacattcgattttaacaaggacgggtacatcgactttatggagtacgtcgcagcactgagcttggttttgaaagggaaggtcgagcagaaactgaggtggtactttaagttgtacgacgtggatggcaatggctgtatagacagggatgagctcctcactattattcaggctattagagcaattaatccctgctctgacaccactatgaccgcagaagaattcaccgataccgtcttttcgaagatcgatgtgaacggggatggcgagctgagcctcgaggagttcattgagggcgtgcagaaggatcaaatgcttctcgacacactgacaagatccctggacctcacacggattgtacggcgcctgcagaacggagagcaggatgaagaaggggccgacgaggctgctgaggcagctggatag

SEQ ID NO: 8528 - DNA, 606 bp, Artificial Sequence
  derived and/or modified sequence
atgggcaacgtgatggagggcaagagcgtggaggagctgagcagcaccgagtgtcaccagtggtataagaaattcatgaccgaatgcccatctggacaactgaccctatatgaattccgccaattctttggcctgaaaaacttatcaccatcagccagtcagtatgtcgaacagatgtttgaaactttcgacttcaataaggatgggtacattgatttcatggagtacgtggcggcactttcactggtattgaaggggaaggtggaacagaaactgaggtggtacttcaagctttacgacgttgatgggaatgggtgcattgatagggacgagcttctcactattatccaggccatcagagcgatcaacccatgttctgacactaccatgacggccgaagagtttactgacacagtctttagtaagatagacgtcaacggcgacggcgagttgtccctggaagaattcattgaaggtgttcagaaggaccagatgttgctcgataccctgaccagatctcttgacctgacccggattgtgcgccggctgcagaacggcgagcaggacgaggaaggagcagacgaggctgctgaagctgcgggctag

SEQ ID NO: 8529 - DNA, 618 bp, Artificial Sequence
  derived and/or modified sequence
atggagggcaagagcgtggaggagctgagcagcaccgagtgccaccagtggtataagaaattcatgactgagtgcccctcgggacagctcaccctgtatgaattccgccagttcttcggactcaagaacttgtccccttctgctagccagtacgtggagcagatgttcgagacattcgacttcaacaaagatgggtacatagatttcatggaatacgtggctgccctctccctggtgcttaaggggaaggtagagcagaaacttcgctggtactttaagctctacgacgtggacggtaacgggtgcattgatagagacgagctacttacaatcatacagttcccgcaccaataccagaaaacagccatccgagcaattaatccatgttctgatacgactatgactgccgaggaattcaccgataccgtattctctaaaattgatgtgaacggagatggggagctgagcctggaggagttcattgagggcgtgcagaaggatcagatgctgctggatacattgactagatctctcgacctaaccaggattgtgcgacgccttcagaacggcgaacaagatgaggagggcgctgatgaggccgctgaggcggccggctag

SEQ ID NO: 8530 - DNA, 606 bp, Artificial Sequence
  derived and/or modified sequence
atgggcaacgtgatggagggcaagagcgtggaggagctgagcagcacggagtgtcaccagtggtacaaaaagtttatgaccgaatgtccctcagggcagcttaccctatatgaattccgtcagtttttcggattaaagaatctcagcccgagtgcttcgcagtatgtggaacaaatgtttgaaactttcgattttaataaggatggatacatcgattttatggagtatgtggcagcactgtccctggtgctgaaaggcaaagtcgaacagaaactgagatggtacttcaagctttacgatgttgatggtaatggatgcatcgatcgagacgagcttttgaccataatccaggcaattagggcgattaacccttgttcagatacaacaatgactgcagaggagtttactgacaccgtcttctcaaagatcgacgtgaatggggatggagagctcagcctcgaagagtttatcgaaggagttcagaaggaccagatgctgctggatacccttacacggagcctcgatctgacaaggatcgtgagacgcttacagaatggtgaacaagacgaagagggcgccgacgaagctgctgaggctgccgggtag

SEQ ID NO: 8531 - DNA, 267 bp, Artificial Sequence
  derived and/or modified sequence
atgggcaacgtgatggagggcaagagcgtggaggagctgagcagcacagaatgtcaccagtggtataagaaatttatgaccgaatgcccatctgggcagctgaccctgtacgaatttagacagtttttcggccttaagaacctctcccccagcgcttcccagtacgtggagcagatgtttgagacatttgactttaataaagatggttatattgattttatggaatatgtggcagccctgtcactcgtcttaaaaggaaaagtctag

SEQ ID NO: 8532 - DNA, 606 bp, Artificial Sequence
  derived and/or modified sequence
atgggcaacgtgatggagggcaagagcgtggaggagctgagcagcacggagtgtcaccagtggtataagaagttcatgactgaatgcccctctggacagctcacactctacgagttcaggcaatttttcgggctgaagaacctgtcaccttcagcatctcaatacgtggaacagatgttcgaaacgtttgactttaataaagacggatacatcgacttcatggaatatgtcgctgccttgtcactggtcctaaaaggaaaagttgagcagaaactgagatggtattttaagttgtatgatgtggacggcaatggctgtatcgaccgggacgagctgctgacaattatccaggcaattagagcgatcaacccttgctcagatacaactatgaccgccgaggaatttacagataccgtgttttctaagatcgatgtaaatggagatggggaattgtccctagaggaatttatcgagggtgtgcaaaaggatcagatgcttctggacaccctcacaagatccttggacctgacacgcatcgtccggagactgcagaacggggagcaagacgaagagggagccgatgaggctgctgaagccgctgggtag

SEQ ID NO: 8533 - DNA, 606 bp, Artificial Sequence
  derived and/or modified sequence
atgggtaacgtaatggagggcaaaagtgtggaggaactgtcatcaaccgagtgccaccaatggtataagaagttcatgactgaatgcccttccgggcagttgactctgtatgagttccggcagttcttcggccttaaaaacttgtctccatccgcgagccagtatgtcgagcagatgtttgagactttcgactttaacaaggatgggtatattgacttcatggaatatgtggccgcactgtccctggtattgaagggcaaagttgagcaaaaattgcgatggtactttaaactgtacgacgtggatggtaatggctgtatcgacagggatgagcttttaacaatcattcaggccattcgggctattaacccatgttccgatacaactatgaccgctgaggagttcacagacaccgtgttctctaagatcgacgtaaatggggatggcgagctgagcctggaggagtttatagagggggtccagaaagaccagatgctgcttgatacccttaccagatcgctcgatctgacccggatagtaagaaggctgcagaacggggaacaggacgaggagggagccgacgaggctgcagaagccgcaggttag

SEQ ID NO: 8534 - DNA, 606 bp, Artificial Sequence
  derived and/or modified sequence
atgggcaacgtgatggagggtaagtcagtggaagaactttcaagtactgaatgccaccagtggtacaagaaatttatgaccgagtgccccagcggacagctgaccctttatgaatttagacagtttttcgggctcaagaacctgagcccatctgcatcccagtacgtagagcagatgttcgagacatttgacttcaataaagatgggtacattgattttatggaatatgtggctgcccttagccttgtgctcaaaggaaaagtcgaacagaaacttcggtggtactttaagctatatgacgttgatgggaacgggtgcatcgaccgggatgagctgctgacaataatacaggccattcgcgctattaacccatgttctgacactacaatgacagcagaggagtttaccgatactgtcttcagtaaaattgacgtgaatggcgatggcgaactgtctctagaagagttcatagaaggcgtgcaaaaagaccaaatgctcctggatactctcaccaggagcttagacctgacccgcattgtgagacgactgcagaacggcgaacaggacgaagaaggagccgatgaggcagcagaagcggcaggctag

SEQ ID NO: 8535 - DNA, 618 bp, Artificial Sequence
  derived and/or modified sequence
atggagggcaagagcgttgaggagctgagcagcactgaatgccatcagtggtacaagaagttcatgacagagtgcccaagtggacagttgaccttatacgagtttcgccaattctttggcctgaagaacctttctccaagcgcttcacagtatgttgaacagatgtttgagacttttgactttaataaggatggctatattgatttcatggaatacgttgcagccctgtctttggtgctcaaaggaaaagtggagcagaaactgagatggtatttcaagctctacgacgttgacggaaacggatgcatagatcgggatgaattactcaccatcatccagtttccacaccagtaccagaagactgcaatccgtgctattaacccatgcagtgacaccacaatgactgccgaggaatttaccgataccgtcttctccaaaatcgatgtcaacggagacggggagctgtctttggaagagttcatcgaaggcgtgcagaaagaccagatgctgcttgatacgcttactcggagtttggacctgactcggatcgttcgcagactacagaatggcgaacaggacgaggagggcgcagatgaagctgcagaagcagcaggatag

SEQ ID NO: 8536 - DNA, 606 bp, Artificial Sequence
  derived and/or modified sequence
atgggcaacgtgatggagggaaagtcagtggaggaactgagctcgactgagtgtcaccaatggtacaaaaaatttatgacagagtgtccgtccggtcaactaacgttgtacgaatttcggcagttttttggcttaaagaatctgtcccccagcgcatcccagtacgttgagcagatgtttgagacattcgatttcaacaaagatgggtatatcgacttcatggaatacgtggcagcccttagcctggttctgaaaggaaaggtagagcaaaagttacggtggtacttcaagctgtacgatgtggatgggaatggctgtattgatcgtgacgagttgttgacaatcatccaggctatcagggctattaacccctgtagcgacaccaccatgactgccgaggaattcacagacaccgttttcagcaagatcgatgtgaatggagacggagaactctctttggaggagttcatcgaaggcgtccagaaggatcagatgctcctcgacacattaactcgttcattggatcttaccagaatcgtacggaggctccagaacggcgagcaggacgaagagggagccgacgaggctgcagaagcggcaggatag

SEQ ID NO: 8537 - DNA, 267 bp, Artificial Sequence
  derived and/or modified sequence
atgggcaatgtgatggagggaaagagtgtggaagagctaagtagcaccgagtgtcatcagtggtataagaaattcatgacggaatgcccttcgggccagctgactctctatgagtttcgacagtttttcggcttaaaaaatttaagcccatccgcgtcccagtacgttgaacagatgtttgagacctttgactttaacaaagacggttacattgactttatggagtatgtggccgctctgagcctcgtgctcaagggcaaggtgtag

SEQ ID NO: 8538 - DNA, 606 bp, Artificial Sequence
  derived and/or modified sequence
atgggaaatgtaatggagggcaaaagcgtcgaagaactgtcttcgacagaatgccatcagtggtacaaaaaatttatgactgagtgcccatctgggcagctgacgctatacgagttcagacaattttttggcctgaagaacctgagtcccagtgcaagccaatatgtggaacagatgttcgagacttttgacttcaacaaggacgggtatatcgattttatggagtacgtagcagccctcagtttagtgcttaagggcaaggtcgagcagaagcttaggtggtactttaaactctacgacgttgacggaaatggatgcattgacagggatgaacttctgactattatacaggcaattcgagcgatcaacccttgcagcgataccacaatgaccgcagaagagttcactgatacagtgttcagtaaaatcgatgttaacggagacggtgaactgagcctcgaggagttcatagaaggagtgcagaaggatcagatgctgttagacaccctcactcgctcattggatctgactcgtatcgtgagacggcttcaaaatggagagcaagacgaggagggtgcagacgaggccgctgaagccgcaggctag

SEQ ID NO: 8539 - DNA, 606 bp, Artificial Sequence
  derived and/or modified sequence
atgggtaatgtgatggagggaaagtccgtcgaagaactatccagtaccgaatgccaccagtggtacaagaaatttatgactgagtgcccctcagggcagctgacactctacgaattcaggcagttcttcggcctcaaaaatctatctcccagtgccagtcaatacgtggagcaaatgtttgagacctttgactttaacaaagacggctatattgattttatggagtacgtcgccgcattgtcacttgtccttaaggggaaggtggagcaaaaactacgatggtatttcaaactctacgacgttgatgggaacgggtgtattgaccgtgacgaactcttgaccatcatccaggccatccgagctatcaacccgtgtagtgacaccacaatgaccgcggaagagttcacagatacggtattttccaaaattgacgtgaacggagatggcgaactgtcgttggaagagttcatcgagggtgtgcagaaggaccagatgttacttgacacactgactcgtagcctagacctcacacgtatcgttaggcggttacaaaatggtgagcaggatgaagaaggagctgatgaagccgcggaagctgctggctag

SEQ ID NO: 8540 - DNA, 606 bp, Artificial Sequence
  derived and/or modified sequence
atggggaatgtcatggaaggcaaaagcgtcgaagagttgagtagtacagaatgtcatcagtggtacaagaaatttatgaccgagtgtcctagcggacagttgaccctgtacgagtttcgtcaattttttggactgaaaaacttatcaccctcagcctcacagtacgtggaacagatgttcgaaacattcgacttcaacaaagacgggtatattgatttcatggagtacgtggccgccctgtcactggtattgaaaggaaaggtggagcagaaattgaggtggtactttaagctttatgatgtggacgggaacggatgtattgaccgcgatgaacttttaactataatacaagctatccgagccattaacccatgttctgacacaaccatgacagccgaagagttcactgacacagttttttctaaaattgacgtgaacggagacggcgagctgtctctcgaggagttcattgaaggggtacagaaggaccagatgctcctagacactttgaccagatctcttgacctgacccggattgtgcgtagattacagaatggggagcaagacgaagaaggggccgacgaggccgcagaggctgcaggctag

SEQ ID NO: 8541 - DNA, 606 bp, Artificial Sequence
  derived and/or modified sequence
atgggcaacgtgatggagggcaagagcgtggaggagctgagcagcaccgagtgccaccagtggtacaagaagttcatgaccgagtgccccagcggccagctgaccctgtacgagttcagacagttcttcggcctgaagaacctgagccccagcgccagccagtacgtggagcagatgttcgagaccttcgacttcaacaaggacggctacatcgacttcatggagtacgtggccgccctgagcctggtgctgaagggcaaggtggagcagaagctgagatggtacttcaagctgtacgacgtggacggcaacggctgcatcgacagagacgagctgctgaccatcatccaggccatcagagccatcaacccctgcagcgacaccaccatgaccgccgaggagttcaccgacaccgtgttcagcaagatcgacgtgaacggcgacggcgagctgagcctggaggagttcatcgagggcgtgcagaaggaccagatgctgctggacaccctgaccagaagcctggacctgaccagaatcgtgagaagactgcagaacggcgagcaggacgaggagggcgccgacgaggccgccgaggccgccggctag

SEQ ID NO: 8542 - DNA, 618 bp, Artificial Sequence
  derived and/or modified sequence
atggagggcaagagcgtggaggagctgagcagcaccgagtgccaccagtggtacaagaagttcatgaccgagtgccccagcggccagctgaccctgtacgagttcagacagttcttcggcctgaagaacctgagccccagcgccagccagtacgtggagcagatgttcgagaccttcgacttcaacaaggacggctacatcgacttcatggagtacgtggccgccctgagcctggtgctgaagggcaaggtggagcagaagctgagatggtacttcaagctgtacgacgtggacggcaacggctgcatcgacagagacgagctgctgaccatcatccagttcccccaccagtaccagaagaccgccatcagagccatcaacccctgcagcgacaccaccatgaccgccgaggagttcaccgacaccgtgttcagcaagatcgacgtgaacggcgacggcgagctgagcctggaggagttcatcgagggcgtgcagaaggaccagatgctgctggacaccctgaccagaagcctggacctgaccagaatcgtgagaagactgcagaacggcgagcaggacgaggagggcgccgacgaggccgccgaggccgccggctag

SEQ ID NO: 8543 - DNA, 267 bp, Artificial Sequence
  derived and/or modified sequence
atgggcaacgtgatggagggcaagagcgtggaggagctgagcagcaccgagtgccaccagtggtacaagaagttcatgaccgagtgccccagcggccagctgaccctgtacgagttcagacagttcttcggcctgaagaacctgagccccagcgccagccagtacgtggagcagatgttcgagaccttcgacttcaacaaggacggctacatcgacttcatggagtacgtggccgccctgagcctggtgctgaagggcaaggtgtag

SEQ ID NO: 8544 - protein, 348 aa, Artificial Sequence
  derived and/or modified sequence
MGPRARPALLLLMLLQTAVLQGRLLRSHSLHYLFMGASEQDLGLSLFEALGYVDDQLFVFYDHESRRVEPRTPWVSSRISSQMWLQLSQSLKGWDHMFTVDFWTIMENHNHSKESHTLQVILGCEMQEDNSTEGYWKYGYDGQDHLEFCPDTLDWRAAEPRAWPTKLEWERHKIRARQNRAYLERDCPAQLQQLLELGRGVLDQQVPPLVKVTHHVTSSVTTLRCRALNYYPQNITMKWLKDKQPMDAKEFEPKDVLPNGDGTYQGWITLAVPPGEEQRYTCQVEHPGLDQPLIVIWEPSPSGTLVIGVISGIAVFVVILFIGILFIILRKRQGSRGAMGHYVLAERE

SEQ ID NO: 8545 - protein, 121 aa, Artificial Sequence
  derived and/or modified sequence
MENHNHSKESHTLQVILGCEMQEDNSTEGYWKYGYDGQDHLEFCPDTLDWRAAEPRAWPTKLEWERHKIRARQNRAYLERDCPAQLQQLLELGRGVLDQQVPPLVKVTHHVSHPAQPSKES

SEQ ID NO: 8546 - DNA, 1047 bp, Artificial Sequence
  derived and/or modified sequence
atgggccccagagccagacccgccctgctgctgctgatgctgctgcagaccgccgtgctgcagggcagactgctgagaagccacagcctgcactacctgttcatgggcgccagcgagcaggacctgggcctgagcctgttcgaggccctgggctacgtggacgaccagctgttcgtgttctacgaccacgagagcagaagagtggagcccagaaccccctgggtgagcagcagaatcagcagccagatgtggctgcagctgagccagagcctgaagggctgggaccacatgttcaccgtggacttctggaccatcatggagaaccacaaccacagcaaggagagccacaccctgcaggtgatcctgggctgcgagatgcaggaggacaacagcaccgagggctactggaagtacggctacgacggccaggaccacctggagttctgccccgacaccctggactggagagccgccgagcccagagcctggcccaccaagctggagtgggagagacacaagatcagagccagacagaacagagcctacctggagagagactgccccgcccagctgcagcagctgctggagctgggcagaggcgtgctggaccagcaggtgccccccctggtgaaggtgacccaccacgtgaccagcagcgtgaccaccctgagatgcagagccctgaactactacccccagaacatcaccatgaagtggctgaaggacaagcagcccatggacgccaaggagttcgagcccaaggacgtgctgcccaacggcgacggcacctaccagggctggatcaccctggccgtgccccccggcgaggagcagagatacacctgccaggtggagcaccccggcctggaccagcccctgatcgtgatctgggagcccagccccagcggcaccctggtgatcggcgtgatcagcggcatcgccgtgttcgtggtgatcctgttcatcggcatcctgttcatcatcctgagaaagagacagggcagcagaggcgccatgggccactacgtgctggccgagagagagtag

SEQ ID NO: 8547 - DNA, 1047 bp, Artificial Sequence
  derived and/or modified sequence
atgggccctcgcgctaggccggccctgctgctgttaatgctgctgcaaacggcagtcctgcagggtcgacttcttcgatctcactctctgcactacttattcatgggtgcatctgaacaagacttaggattgtccttgttcgaggccctggggtatgtggacgaccagttgtttgtgttttatgaccacgagtcgcgcagggttgagcccagaaccccctgggtgtcttctagaatctcctcccaaatgtggcttcaactgagtcagagcctgaaagggtgggaccacatgttcaccgttgacttctggactataatggagaaccacaaccacagtaaggagtcccatactttgcaggtgatccttggttgcgagatgcaggaagacaactccaccgaaggatactggaaatacggctatgatggccaggatcacctggagttctgccccgacacgctggactggcgggcagccgagcctcgggcatggccaacgaaattagagtgggagcgccataaaatcagagccaggcagaatcgtgcctacctggagcgtgactgcccagcgcaacttcaacagttgctggaattgggaagaggggtgctggatcagcaggtccctcctttggtcaaagtgacccatcatgttacgtccagcgtaacaactctacgctgcagagctctcaactattacccacagaatatcaccatgaagtggcttaaagacaagcagcctatggatgccaaagaattcgaacctaaagacgtgcttcccaatggcgatggaacttaccaggggtggatcacactggctgtccctccaggtgaagagcagcggtacacatgccaagtagagcacccgggactcgatcagcccttaatcgtaatttgggaaccctccccctccggaactctggtgattggggtgatcagcggcatcgcggtatttgtggtgatattgtttataggcatcctgtttataattctacgcaaacgccagggcagcagaggcgccatgggtcactacgtgctcgctgaacgtgaatag

SEQ ID NO: 8548 - DNA, 1047 bp, Artificial Sequence
  derived and/or modified sequence
atgggcccccgggcccggcctgccctgctgctgctgatgctgctgcagacagctgtgctgcagggccgcctgctgcggagccacagcctgcactacctgttcatgggcgccagcgagcaggacctgggcctgagcctgtttgaggccctgggctacgtggatgaccagctgtttgtgttctatgaccacgagagccggcgggtggagcccaggaccccctgggtgagcagccgcatcagcagccagatgtggctgcagctgagccagagcctgaagggctgggaccacatgttcaccgtggacttctggaccatcatggagaaccacaaccacagcaaggagagccacaccctgcaggtgatcctgggctgtgagatgcaggaggacaacagcacagagggctactggaagtatggctatgatggccaggaccacctggagttctgcccagacaccctggactggagggctgctgagccccgggcctggcccaccaagctggagtgggagcggcacaagatccgggcccggcagaacagagcctacctggagcgggactgcccagcccagctgcagcagctgctggagctgggccggggcgtgctggaccagcaggtgccccccctggtgaaggtgacccaccacgtgaccagctctgtgaccaccctgcgctgccgggccctgaactactacccccagaacatcaccatgaagtggctgaaggacaagcagcccatggatgccaaggagtttgagcccaaggatgtgctgcccaatggagatggcacctaccagggctggatcaccctggccgtgcccccaggagaggagcagcgctacacctgccaggtggagcaccctggcctggaccagcccctcatcgtcatctgggagcccagccccagcggcaccctggtgattggagtcatctctggaattgctgtgtttgtggtgatcctcttcatcggcatcctcttcatcatcctgaggaagaggcagggcagcagaggagccatgggccactacgtgctggccgagcgggagtag

SEQ ID NO: 8549 - DNA, 1047 bp, Artificial Sequence
  derived and/or modified sequence
atgggcccccgggcccggcccgccctgctgctgctgatgctgctgcagaccgccgtactccaggggaggctgctgcggtcacattctctgcattatttattcatgggagccagtgaacaggaccttggtctgagtctgtttgaggccctggggtacgtggacgatcaactgtttgtattctacgaccacgagagccggcgggtggagccgcgaactccatgggtgtcctcccgcatctctagccagatgtggctgcagttgtcccagagtttaaagggatgggaccacatgtttactgtcgacttttggaccatcatggaaaaccataaccactccaaggaatcccacacgcttcaggttattcttggctgtgagatgcaagaggacaattctactgagggatactggaaatatgggtacgatggccaggaccacctagagttttgtccagacacacttgattggcgggctgcagagccaagggcttggcccacgaaactggagtgggaaaggcataagataagggcaagacaaaacagggcatacctggagagagattgcccagcacagttacaacaactgctggagctcgggagaggagttctcgaccagcaggtcccccctctggtgaaggtgacacaccatgtgactagcagcgtgacaactctcaggtgtagagccttaaattattatccccagaacattactatgaaatggctgaaggacaaacagcctatggatgctaaagagttcgagccaaaggacgtccttcccaatggcgacggaacttatcagggctggattactctcgccgtaccacccggcgaggagcagcgttacacgtgtcaagtggaacacccaggactggaccaacccttaatcgtaatctgggagccatctccaagcggcacactggtgataggcgtgattagtggaatcgctgtatttgttgtgatactctttatcggaattctgttcataatattaaggaaacggcaaggctcacgaggagccatgggacactacgtcttggccgagcgcgaatag

SEQ ID NO: 8550 - DNA, 5286 bp, Artificial Sequence
  derived and/or modified sequence
ttttactgggcatctcctgagcctaggcaatagctgtagggtgacttctggagccatccccgtttccccgccccccaaaagaagcggagatttaacggggacgtgcggccagagctggggaaatgggcccgcgagccaggccggcgcttctcctcctgatgcttttgcagaccgcggtcctgcaggggcgcttgctgcgttcacactctctgcactacctcttcatgggtgcctcagagcaggaccttggtctttccttgtttgaagctttgggctacgtggatgaccagctgttcgtgttctatgatcatgagagtcgccgtgtggagccccgaactccatgggtttccagtagaatttcaagccagatgtggctgcagctgagtcagagtctgaaagggtgggatcacatgttcactgttgacttctggactattatggaaaatcacaaccacagcaaggagtcccacaccctgcaggtcatcctgggctgtgaaatgcaagaagacaacagtaccgagggctactggaagtacgggtatgatgggcaggaccaccttgaattctgccctgacacactggattggagagcagcagaacccagggcctggcccaccaagctggagtgggaaaggcacaagattcgggccaggcagaacagggcctacctggagagggactgccctgcacagctgcagcagttgctggagctggggagaggtgttttggaccaacaagtgcctcctttggtgaaggtgacacatcatgtgacctcttcagtgaccactctacggtgtcgggccttgaactactacccccagaacatcaccatgaagtggctgaaggataagcagccaatggatgccaaggagttcgaacctaaagacgtattgcccaatggggatgggacctaccagggctggataaccttggctgtaccccctggggaagagcagagatatacgtgccaggtggagcacccaggcctggatcagcccctcattgtgatctgggagccctcaccgtctggcaccctagtcattggagtcatcagtggaattgctgtttttgtcgtcatcttgttcattggaattttgttcataatattaaggaagaggcagggttcaagaggagccatggggcactacgtcttagctgaacgtgagtgacacgcagcctgcagactcactgtgggaaggagacaaaactagagactcaaagagggagtgcatttatgagctcttcatgtttcaggagagagttgaacctaaacatagaaattgcctgacgaactccttgattttagccttctctgttcatttcctcaaaaagatttccccatttaggtttctgagttcctgcatgccggtgatccctagctgtgacctctcccctggaactgtctctcatgaacctcaagctgcatctagaggcttccttcatttcctccgtcacctcagagacatacacctatgtcatttcatttcctatttttggaagaggactccttaaatttgggggacttacatgattcattttaacatctgagaaaagctttgaaccctgggacgtggctagtcataaccttaccagatttttacacatgtatctatgcattttctggacccgttcaacttttcctttgaatcctctctctgtgttacccagtaactcatctgtcaccaagccttggggattcttccatctgattgtgatgtgagttgcacagctatgaaggctgtacactgcacgaatggaagaggcacctgtcccagaaaaagcatcatggctatctgtgggtagtatgatgggtgtttttagcaggtaggaggcaaatatcttgaaaggggttgtgaagaggtgttttttctaattggcatgaaggtgtcatacagatttgcaaagtttaatggtgccttcatttgggatgctactctagtattccagacctgaagaatcacaataattttctacctggtctctccttgttctgataatgaaaattatgataaggatgataaaagcacttacttcgtgtccgactcttctgagcacctacttacatgcattactgcatgcacttcttacaataattctatgagataggtactattatccccatttcttttttaaatgaagaaagtgaagtaggccgggcacggtggctcacgcctgtaatcccagcactttgggaggccaaagcgggtggatcacgaggtcaggagatcgagaccatcctggctaacatggtgaaaccccatctctaataaaaatacaaaaaattagctgggcgtggtggcagacgcctgtagtcccagctactcggaaggctgaggcaggagaatggcatgaacccaggaggcagagcttgcagtgagccgagtttgcgccactgcactccagcctaggtgacagagtgagactccatctcaaaaaaataaaaataaaaataaaaaaatgaaaaaaaaaagaaagtgaagtatagagtatctcatagtttgtcagtgatagaaacaggtttcaaactcagtcaatctgaccgtttgatacatctcagacaccactacattcagtagtttagatgcctagaataaatagagaaggaaggagatggctcttctcttgtctcattgtgtttcttctgagtgagcttgaatcacatgaaggggaacagcagaaaacaaccaactgatcctcagctgtcatgtttcctttaaaagtccctgaaggaaggtcctggaatgtgactcccttgctcctctgttgctctctttggcattcatttctttggaccctacgcaaggactgtaattggtggggacagctagtggccctgctgggcttcacacacggtgtcctccctaggccagtgcctctggagtcagaactctggtggtatttccctcaatgaagtggagtaagctctctcattttgagatggtataatggaagccaccaagtggcttagaggatgcccaggtccttccatggagccactggggttccggtgcacattaaaaaaaaaatctaaccaggacattcaggaattgctagattctgggaaatcagttcaccatgttcaaaagagtcttttttttttttttgagactctattgcccaggctggagtgcaatggcatgatctcggctcactgtaacctctgcctcccaggttcaagcgattctcctgtctcagcctcccaagtagctgggattacaggcgtgcaccaccatgcccggctaatttttgtatttttagtagagacagggtttcaccatgttggccaggctggtctcgaactctcctgacctcgtgatccgcctgcctcggcctcccaaagtgctgagattacaggtgtgagccaccctgcccagccgtcaaaagagtcttaatatatatatccagatggcatgtgtttactttatgttactacatgcacttggctgcataaatgtggtacaagcattctgtcttgaagggcaggtgcttcaggataccatatacagctcagaagtttcttctttaggcattaaattttagcaaagatatctcatctcttcttttaaaccattttctttttttgtggttagaaaagttatgtagaaaaaagtaaatgtgatttacgctcattgtagaaaagctataaaatgaatacaattaaagctgttatttaattagccagtgaaaaactattaacaacttgtctattacctgttagtattattgttgcattaaaaatgcatatactttaataaatgtatattgtattgtatactgcatgattttattgaagttcttgttcatcttgtgtatatacttaatcgctttgtcattttggagacatttattttgcttctaatttctttacattttgtcttacggaatattttcattcaactgtggtagccgaattaatcgtgtttcttcactctagggacattgtcgtctaagttgtaagacattggttattttaccagcaaaccattctgaaagcatatgacaaattatttctctcttaatatcttactatactgaaagcagactgctataaggcttcacttactcttctacctcataaggaatatgttacaattaatttattaggtaagcatttgttttatattggttttatttcacctgggctgagatttcaagaaacaccccagtcttcacagtaacacatttcactaacacatttactaaacatcagcaactgtggcctgttaatttttttaatagaaattttaagtcctcattttctttcggtgttttttaagcttaatttttctggctttattcataaattcttaaggtcaactacatttgaaaaatcaaagacctgcattttaaattcttattcacctctggcaaaaccattcacaaaccatggtagtaaagagaagggtgacacctggtggccataggtaaatgtaccacggtggtccggtgaccagagatgcagcgctgagggttttcctgaaggtaaaggaataaagaatgggtggaggggcgtgcactggaaatcacttgtagagaaaagcccctgaaaatttgagaaaacaaacaagaaactacttaccagctatttgaattgctggaatcacaggccattgctgagctgcctgaactgggaacacaacagaaggaaaacaaaccactctgataatcattgagtcaagtacagcaggtgattgaggactgctgagaggtacaggccaaaattcttatgttgtattataataatgtcatcttataatactgtcagtattttataaaacattcttcacaaactcacacacatttaaaaacaaaacactgtctctaaaatccccaaatttttcataaactcagttttaaactaactttttttcaaaccacaatctgatttaacaatgactatcatttaaatatttctgactttcaaattaaagattttcacatgcaggctgatatttgtaattgtgattctctctgtaggctttgggtataatgtgttcttttccttttttgcatcagcgattaacttctacactctaacatgtagaatgttactacaatattaaagtattttgtatgacaattttatttgaaagcctaggatgcgttgacatcctgcatgcatttattacttgatatgcatgcattctggtatctcaagcattctatttctgagtaattgtttaaggtgtagaagagatagatatggtggatttggagttgatacttatatattttctatttcttggatggatgaatttgtacattaaaagttttccatggcagaaa

SEQ ID NO: 8551 - DNA, 1047 bp, Artificial Sequence
  derived and/or modified sequence
atgggcccacgcgcaagacccgctctcctcctgctcatgctgctgcagaccgctgtcctacaaggaagactgctcagatcgcacagtcttcattacctgttcatgggtgctagcgaacaagatctggggctcagtctgttcgaggcgctgggctacgttgacgatcagctcttcgttttttacgatcacgagagtcgcagggtggaaccgaggaccccatgggttagttctcggatttctagccagatgtggttgcagctctcccagagccttaaggggtgggaccatatgtttactgttgatttctggaccatcatggagaaccacaaccacagtaaggagtcccacactctgcaggtcatcctggggtgtgaaatgcaagaggataattcaactgaaggatactggaaatatgggtacgacggccaagatcatctcgaattctgtcctgacacgctagattggagggctgcagagccaagagcatggcctaccaaactggaatgggagaggcacaagatccgagctcgccaaaaccgcgcatatctcgaacgggattgccccgcacaacttcagcagctgcttgaattggggcgaggtgtcctggatcagcaagtgccccctcttgtaaaagtgacccatcatgtaacgagcagcgtcacaactctgagatgcagggcgctcaactattaccctcagaacatcacgatgaaatggctgaaggataaacagccaatggacgccaaagagttcgagccgaaggacgttctcccgaacggggacggaacataccagggttggataacactggcggtgccccctggggaagagcagaggtacacctgtcaagtggagcaccccggactggaccagcctctcatcgtgatatgggaaccgagcccttcaggcaccttagtcatcggcgtcatctcgggaatcgcagtatttgtggtcattctgttcatcgggatactgttcattattttgcgcaagagacaggggtctagaggagccatgggtcattatgtgcttgccgagcgcgagtag

SEQ ID NO: 8552 - protein, 525 aa, Artificial Sequence
  derived and/or modified sequence
MKALIAALLLITLQYSCAVSPTDCSAVEPEAEKALDLINKRRRDGYLFQLLRIADAHLDRVENTTVYYLVLDVQESDCSVLSRKYWNDCEPPDSRRPSEIVIGQCKVIATRHSHESQDLRVIDFNCTTSSVSSALANTKDSPVLIDFFEDTERYRKQANKALEKYKEENDDFASFRVDRIERVARVRGGEGTGYFVDFSVRNCPRHHFPRHPNVFGFCRADLFYDVEALDLESPKNLVINCEVFDPQEHENINGVPPHLGHPFHWGGHERSSTTKPPFKPHGSRDHHHPHKPHEHGPPPPPDERDHSHGPPLPQGPPPLLPMSCSSCQHATFGTNGAQRHSHNNNSSDLHPHKHHSHEQHPHGHHPHAHHPHEHDTHRQHPHGHHPHGHHPHGHHPHGHHPHGHHPHCHDFQDYGPCDPPPHNQGHCCHGHGPPPGHLRRRGPGKGPRPFHCRQIGSVYRLPPLRKGEVLPLPEANFPSFPLPHHKHPLKPDNQPFPQSVSESCPGKFKSGFPQVSMFFTHTFPK

SEQ ID NO: 8553 - DNA, 1578 bp, Artificial Sequence
  derived and/or modified sequence
atgaaagcactcatagctgccctgctgctcattacactgcaatattcctgtgctgtttcacccaccgattgctctgccgttgaaccagaggctgagaaggccctcgatcttattaataaacggcgccgggatggctatctgtttcagctcctgcgaatcgccgatgctcatctcgaccgagtcgagaataccacagtgtactacctggttctggatgtgcaggaatcggactgctccgtgctgtcgcgcaaatactggaacgattgtgaaccacctgattcacgaaggcctagcgagatcgttatcggccagtgtaaggtgatcgccacccggcatagccacgagtcccaggatttacgggtgattgactttaattgcacgacgagctccgtctctagtgccctggcgaacactaaagactcacctgttcttatcgattttttcgaagataccgaacgttacaggaagcaggcaaataaggctctcgaaaagtataaggaagaaaatgacgatttcgctagctttagagtggatcgaatcgagagagtcgcacgcgtgcgaggaggggaggggaccggctatttcgtggatttctccgtgaggaactgtccacggcatcacttccccagacacccgaatgttttcggattttgtagagcagatctgttctatgatgtggaggctctggaccttgaaagccctaaaaacttagtcataaactgtgaggtatttgatccccaagagcacgaaaatatcaacggcgtgccgcctcacctggggcacccgttccactggggcggacatgaaaggagctccaccaccaagcctccgtttaagcctcacggttctagggaccatcaccatccacacaaaccacacgagcacggtcctccacccccaccagacgagcgagaccatagtcacggaccaccattgcctcaggggcctcctccgctcctgccaatgtcctgtagctcttgtcagcacgccacgttcggaaccaacggtgcacagcgccattcccataacaataactccagtgatctccatccccataagcaccatagccatgaacagcacccgcacggccaccatccacacgcccaccacccacacgaacatgacacccaccgccagcatccccatggccaccatccccatggacaccacccccacggacatcatccccacggccaccacccacacggccatcatccacattgccacgacttccaggattacgggccctgcgaccctcctccacacaatcagggacattgctgccacggccacggcccaccccctgggcacttgcggaggcgggggcccggaaaaggcccgcgcccattccactgtcgtcaaattgggtctgtttacagactgccaccgttaagaaagggagaggttttacccctccccgaagccaattttccgagcttccctcttccacaccacaaacaccctctcaagcctgataaccaacccttccctcagtccgttagtgaatcgtgccccggtaagtttaaatctggatttccgcaggtgagcatgttcttcacccacacttttccaaaatag

SEQ ID NO: 8554 - DNA, 1578 bp, Artificial Sequence
  derived and/or modified sequence
atgaaggccctgattgctgccctgctgctgatcaccctgcagtacagctgtgctgtgagccccacagactgcagcgctgtggagcctgaggccgagaaggccctggacctgatcaacaagagaagaagagatggctacctgttccagctgctgagaattgctgatgcccacctggacagagtggagaacaccaccgtgtactacctggtgctggatgtgcaggagagtgactgcagcgtgctgagcaggaagtactggaatgactgtgagcccccagacagcagaagacccagcgagatcgtcatcggccagtgcaaggtgattgccaccaggcacagccatgagagccaggacctgcgggtcatcgacttcaactgcaccaccagctctgtgtcctctgccctggccaacaccaaggacagccctgtgctgattgacttctttgaggacacagagcgctacaggaagcaggccaacaaggccctggagaagtacaaggaggagaatgatgactttgccagcttccgggtggaccgcatcgagcgggtggcccgggtgcggggcggggagggcaccggctactttgtggacttctctgtgaggaactgccccaggcaccacttccccaggcaccccaacgtgtttggcttctgcagagctgacctcttctatgatgtggaggccctggacctggagagccccaagaacctggtgatcaactgtgaggtgtttgacccccaggagcacgagaacatcaatggagtgcccccccacctgggccaccccttccactggggcggccacgagaggagcagcaccaccaagccacccttcaagccccacggcagccgggaccaccaccacccccacaagccccatgaacatggccccccacctcctccagatgagcgggaccacagccacggcccccccctgccccagggccccccacccctgctgcccatgagctgcagcagctgccagcacgccaccttcggcaccaatggagcccagaggcacagccacaacaacaacagcagtgacctgcacccccacaagcaccacagccatgagcagcacccccacggccaccacccccacgcccaccacccccatgaacatgacacccaccggcagcacccccacggccaccacccccacggccaccacccccacggccaccacccccacggccaccacccccacggccaccacccccactgccacgacttccaggactatggcccctgtgaccccccaccccacaaccagggccactgctgccacggccacggccccccacctggccacctgcggcggcggggccctgggaagggcccccggcccttccactgccggcagatcggctctgtgtaccgcctgccccccctgaggaagggggaggtgctgcccctgcctgaggccaacttccccagcttccccctgccccaccacaagcaccccctgaagccagacaaccagcccttcccccagagcgtgtctgagagctgccctgggaagttcaagagcggcttcccccaggtgtccatgttcttcacccacaccttccccaagtag

SEQ ID NO: 8555 - DNA, 1578 bp, Artificial Sequence
  derived and/or modified sequence
atgaaggccctgatcgccgccctgctgctgatcaccctgcagtactcatgtgcagtttctcctacagactgttccgccgtcgagccggaagcagagaaagccctggacctgattaacaagcggcgccgagacggctacctgttccaactgctaaggatcgcggatgcgcatctggacagagtagaaaacactactgtctattatctggtcctggacgtccaggagtctgattgctccgtactttcccggaaatactggaatgactgtgagcctccagacagcaggcggccaagtgaaatagttattggccagtgtaaagtcattgccacgagacactcacacgaaagccaggatttgcgagtaattgacttcaactgcacgacatcttcagtttcttccgcacttgccaacaccaaggactcacccgtgctaatcgatttttttgaggataccgagagataccgaaagcaggccaataaagccctcgagaaatataaggaggaaaacgatgactttgcatccttcagagtggaccgaattgagcgggttgcacgcgtgagagggggagaggggaccggttactttgtggacttttcggtcaggaactgtcccagacaccatttccctaggcatcccaatgtcttcgggttttgtagggccgatctcttttacgacgtggaagcactagacctcgagtccccaaaaaacctagtgatcaattgcgaagtgtttgacccgcaagagcacgaaaatatcaatggcgtacctccccacttaggacatccattccactgggggggtcatgagcgtagttccaccaccaaaccgccatttaaaccacacgggagtcgtgatcaccaccatcctcacaagcctcatgagcatggaccaccccccccacctgatgagagagaccactcacacgggcctccactacctcaggggccgccccccctcttacctatgagctgcagcagttgccagcatgccaccttcggcacaaatggtgcccagagacactcacacaataacaatagctcagacctccaccctcataagcaccactcacacgagcagcacccccatgggcatcatcctcacgctcatcacccacacgagcatgatacccaccgccagcacccccatggacatcatccacacggacaccacccacacggccaccaccctcacgggcaccatccacacggacaccaccctcactgccacgattttcaggattacggaccctgcgacccccccccccacaaccaggggcactgttgccatggccatggcccgccgccaggccatctgcgacgcagaggaccaggtaaggggccaaggccatttcactgtcggcagatcggatctgtatatcgcttgcctcctttaagaaagggcgaggtcttgccattgccggaggccaattttccctctttccctctgccccaccacaagcatcccttaaagccagacaaccagccatttccccagtctgttagcgagtcttgcccaggcaagttcaaatcaggatttccccaggtctccatgttctttacacacacattccccaagtag

SEQ ID NO: 8556 - DNA, 1578 bp, Artificial Sequence
  derived and/or modified sequence
atgaaggcccttattgctgccctgctgcttataactttgcaatacagctgcgctgtttcacctaccgactgcagcgctgtggaacccgaagccgaaaaagcattggatctcatcaacaagcggagacgtgacggctatctttttcagcttcttcggatagctgacgcacacttagaccgggtggagaataccacagtctactatttggtgctggatgtgcaggagtcagactgctccgtgttaagccgcaaatattggaatgactgtgagccccctgatagcagaaggccgagtgaaatcgtgattggtcagtgcaaggttatcgccacacgacattcacatgagtcacaggacctgcgcgtcatcgacttcaactgtacaacgagctccgtatcctcagcgctggcaaatacaaaggactcgccagtgctgattgacttctttgaggacaccgagaggtaccggaagcaggctaacaaagccctcgagaagtacaaagaagagaatgacgatttcgcaagctttcgggtcgacaggattgagagagtggcccgtgtaaggggcggagaaggcacaggctactttgtcgatttttccgtccggaactgtcctaggcatcacttcccgagacatccaaatgtcttcgggttctgtcgggctgatctgttctatgacgtggaggcacttgacctagagtcgccaaaaaatctggtgattaattgcgaagtcttcgatcctcaggaacatgagaacattaacggcgtgccaccccacctgggacatccttttcattggggagggcatgagcgtagctccactaccaagccaccatttaaaccccatggcagcagggatcaccaccatccccataagccccacgaacatgggccacctccaccgccagatgagcgggatcactcccacggaccccctctgcctcaaggccctccccctctgctgcccatgtcttgctcatcatgccagcatgccactttcggtaccaatggtgcccagaggcacagtcacaacaataatagctccgacttacatccccataaacatcacagtcacgagcagcatccccatggtcaccaccctcacgcccaccacccacatgaacatgacacgcatagacagcatcctcatggacatcacccacacggtcaccacccccacgggcaccaccctcacggtcatcatccgcacggacaccacccccattgccatgacttccaggactacggcccatgtgaccctccccctcacaaccagggacactgttgccatggacatgggcctcctccaggccatcttcgaaggcgaggccctggcaaagggcctcgccctttccattgtcggcagatcggatccgtctatcgcctgcctccattgcggaagggtgaggttctgcccttgccagaagcaaattttccctcattccccttaccgcaccacaagcatccattaaagccagacaatcagccctttccgcaatccgtgtcagagagttgtcccggtaaatttaaaagtgggtttccacaggtgagcatgttcttcacgcatacgttcccaaagtag

SEQ ID NO: 8557 - DNA, 1578 bp, Artificial Sequence
  derived and/or modified sequence
atgaaggccctgatcgccgccctgctgctgatcaccctgcagtacagctgcgccgtgagccccaccgactgcagcgccgtggagcccgaggccgagaaggccctggacctgatcaacaagagaagaagagacggctacctgttccagctgctgagaatcgccgacgcccacctggacagagtggagaacaccaccgtgtactacctggtgctggacgtgcaggagagcgactgcagcgtgctgagcagaaagtactggaacgactgcgagccccccgacagcagaagacccagcgagatcgtgatcggccagtgcaaggtgatcgccaccagacacagccacgagagccaggacctgagagtgatcgacttcaactgcaccaccagcagcgtgagcagcgccctggccaacaccaaggacagccccgtgctgatcgacttcttcgaggacaccgagagatacagaaagcaggccaacaaggccctggagaagtacaaggaggagaacgacgacttcgccagcttcagagtggacagaatcgagagagtggccagagtgagaggcggcgagggcaccggctacttcgtggacttcagcgtgagaaactgccccagacaccacttccccagacaccccaacgtgttcggcttctgcagagccgacctgttctacgacgtggaggccctggacctggagagccccaagaacctggtgatcaactgcgaggtgttcgacccccaggagcacgagaacatcaacggcgtgcccccccacctgggccaccccttccactggggcggccacgagagaagcagcaccaccaagccccccttcaagccccacggcagcagagaccaccaccacccccacaagccccacgagcacggccccccccccccccccgacgagagagaccacagccacggcccccccctgccccagggccccccccccctgctgcccatgagctgcagcagctgccagcacgccaccttcggcaccaacggcgcccagagacacagccacaacaacaacagcagcgacctgcacccccacaagcaccacagccacgagcagcacccccacggccaccacccccacgcccaccacccccacgagcacgacacccacagacagcacccccacggccaccacccccacggccaccacccccacggccaccacccccacggccaccacccccacggccaccacccccactgccacgacttccaggactacggcccctgcgacccccccccccacaaccagggccactgctgccacggccacggccccccccccggccacctgagaagaagaggccccggcaagggccccagacccttccactgcagacagatcggcagcgtgtacagactgccccccctgagaaagggcgaggtgctgcccctgcccgaggccaacttccccagcttccccctgccccaccacaagcaccccctgaagcccgacaaccagcccttcccccagagcgtgagcgagagctgccccggcaagttcaagagcggcttcccccaggtgagcatgttcttcacccacaccttccccaagtag

SEQ ID NO: 8558 - DNA, 2015 bp, Artificial Sequence
  derived and/or modified sequence
ttaatcaattgcgtgtgtttcagaaagtctgtataaaattctctgcagtggcagatcatagcaagggatggtttaacaaaatgaaggcactcattgcagcactgcttttgatcacattgcagtattcgtgtgccgtgagtcccactgactgcagtgctgttgagccggaggctgagaaagctctagacctgatcaataaaaggcgacgggatggctaccttttccaattgctgcggattgctgatgcccacttggacagagtggaaaatacaactgtatattacttagtcttagatgtgcaagaatcggactgttcggtcctatccaggaaatactggaatgactgtgagccacctgattccagacgtccatctgaaatagtgatcggacaatgtaaggtaatagctacaagacattcccatgaatctcaggacctcagagtgattgactttaactgcaccacaagttctgtctcttcagcactggccaataccaaagatagtccggtcctcatagatttctttgaggatactgagcgctacagaaaacaagccaacaaagcccttgagaagtacaaagaggagaatgatgactttgcctctttcagagtggaccgaatcgagagagttgcaagagtgagaggaggggaaggaactggttacttcgtggacttctctgtgcggaactgccccagacaccatttccccagacaccccaatgtctttggattctgcagagcagatttgttctatgatgtagaagccttggacttggaaagcccgaaaaaccttgtcataaactgtgaagtcttcgaccctcaggaacatgagaacatcaatggtgtaccgcctcatttgggacatcccttccactggggtgggcatgagcgttcttctaccaccaagcctccattcaagccccatggatctagagatcatcatcatccccacaagccacacgaacatggacccccacctcctccagatgaaagagatcactcacatggacccccacttccacaaggccctcctccactattgcccatgtcctgctcaagttgtcaacatgccacttttggcacaaatggggcccaaagacattctcataataataattccagtgacctccatccccataagcatcattcccatgaacagcatccccatggacaccatccccatgcacaccatcctcatgaacatgatacccatagacagcatccccatggacaccacccccatggacaccatcctcatggacaccacccccatggacaccatccccatggacaccatccccactgccatgatttccaagactatggaccttgtgacccaccaccccataaccaaggtcactgttgccatggccacggcccaccacctgggcacttaagaaggcgaggcccaggtaaaggaccccgtcccttccattgcagacaaattggatctgtgtaccgactccctcctctaagaaaaggtgaggtgctgccacttcctgaggccaattttcccagcttcccattgccgcaccacaaacatcctctaaagccagacaatcagccctttcctcaatcagtctctgaatcatgtccagggaagttcaagagtgggtttccacaagtttccatgttttttacacatacatttccaaaataaaatgtgattcctttgaagaggaaaatgaataatacattgaattagaaacataaataaaatgaccagtaattgtgaaaattacagttcttttcaacctactttcatactgaagatgcagcaaaatgtgaatgggaaaagagatggcctgagaagagagatcaaatggaaaggagaggaaagaactcagtgctgcctattagtagttaattctgtcactcaccactacatcacttgagacaaatctatgccactcagaatctccttctttcctggacttaactctaattctagagtctctgttactgcttgggctatacctgggcatactaataaagtatggtattgaaactattgtta

SEQ ID NO: 8559 - DNA, 1608 bp, Artificial Sequence
  derived and/or modified sequence
gtgttctgctgcaactacggccactgccccccccggccaccagctctacggccatgccctcctccactccggggacgacctggatccacagagctgaccacaacagccactacgactgcatccactggatccacggccaccccgtcctccaccccgggaacagctccccctcccaaagtgctgaccagcccggccaccacacccacagccaccagttccaaagccacttcctcctccagtccaaggactgcaaccacccttccagtgctgacaagcacagccaccaaatccacagctaccagcgttacacccatcccctcctccacccttgggaccaccgggaccctcccagaacagaccaccacacccgtggccaccatgtccacaatccacccctcctccactccggagaccacccacacctccacagtgctgaccacgaaggccaccacgacaagggccaccagttccacgtccaccccctcctccactccggggacgacctggatcctcacagagctgaccacagcagccactacaactgcagccactggccccacggccaccccgtcctccaccccagggaccacctggatcctcacagagctgaccacaacagccactacgactgcgtccactggatccacggccaccccgtcctccaccccagggaccacctggatcctcacagagccgagcactacagccaccgtgacggtgcccaccggatccacggccaccgcctcctccacccaggcaactgctggcaccccacatgtgagcaccacggccacgacacccacagtcaccagctccaaagccactccctcctccagtccagggactgcaactgcccttccagcactgagaagcacagccaccacccacagctaccagctttacagccatcccctcctcctccctaccacctggacccgcctatcacagaccaccacacccacggccaccatgtccacagccacaccctcctccactccagagactgtccacacctccacagtgcttaccgccacggccaccacaaccgggccggctctgtggccaccccctcctccaccccaggaacagctcacactaccaaagtgccgactaccacaaccacggcacagccaccccctcctccagcccagggacggcactcacgcctccagtgtggatcagcacaaccaccacacccacaaccaccacacccacaaccagtggctccacggtgaccccctcctccatcccggggaccacccacaccgccagagtgctgaccaccaccaccacaactgtactggttctatggcaacaccctcctctagcacacagaccagtggtactcccccatcactgaccaccacggccactacgatcacggccaccggctccaccaccaacccctcctcaactccagggacaacacccatcaccccagtgctgaccagcacggccaccacacccgcagccaccagctccaaagccacttcctcctccagtccaaggactgcaaccacccttccagtgctgacaagcacagccacaaaatccacagctaccagctttacacccatcccctccccctgtggaccacgtggaccgtcc

SEQ ID NO: 8560 - DNA, 837 bp, Artificial Sequence
  derived and/or modified sequence
atgggctgctgcggctgcagcggcggctgcggcagcagctgcggcgggtgtgggtctggctgcggggggtgtggaagcggatgcggtggatgtgggagcggctgcggaggatccggttcgtcatgctgtgtcccagtgtgctgttgtaagccggtctgttgccgggtccccacatgtagttgttccagttgtgggaagggcggatgcggatcctcggggggaagcaaggggggctgtgggagttgtgggggctgtaaaggtggctgcggtagttgtggaggctctaaaggtggttgtggaagttgcgggggcagcaagggtgggtgtgggagctgtggaggttctaaaggaggatgcgggagtggatgtggagggtgcgggagcagctgctgcgtccccgtatgctgttgcaagcccatgtgctgttgcgtcccagcatgcagttgttcgtcttgtgggaagggtgggtgcggatcctgcggctgtagtaagggcgcatgcggaagttgtgggggcagcaaaggcgggtgcgggagctgcggcggatgtaaagggggctgcggtagctgcggtggttcaaaaggcggctgtggctctggctgcggcggttgtgggtcaggctgcggcgtccccgtctgctgttgttcctgctcaagttgtgggtcctgtgccggatccaaggggggttgtgggtcttcgtgcagccaatgttcgtgttgtaagccttgttgctgttccagcgggtgcgggtcaagctgctgccaatcttcatgctgtaagccatgttgttcccaaagcagttgttgcgtccccgtctgttgtcagtgcaagatctag

SEQ ID NO: 8561 - DNA, 775 bp, Artificial Sequence
  derived and/or modified sequence
agcacagagttgggagtgactccagagcctcctgcaagatgctgttgattctgctgtcagtggccttgctggccctgagctcagctcagaacttaaatgaagatgtcagccaggaagaatctccctccctaatagcaggaaatccacaaggaccatccccacaaggaggcaacaagccccagggccccccacctcctccaggaaagccacaaggaccacccccacaaggaggcaacaaacctcaaggtcccccacctccaggaaagccacaaggaccacccccacaaggggacaagtcccgaagtccccgatctcctccaggaaaaccacaaggaccacccccacaaggaggaaagccacaaggaccacccccacaaggaggcaacaaacctcaaggtcccccacctccaggaaagccacaaggaccacccgcacaaggaggcagcaagtcccaaagtgcccgatctcctccaggaaagccacaaggaccaccccaacaagaaggcaacaatcctcaaggtcccccacctccagcaggaggcaatccccagcagcctcaggcacctcctgctggacagccccagggaccaccacgccctcctcaagggggcagaccttccagacctccccagtgacagcctccccagtcatctaggattcaatgacaggaagtgaataagaagatgagagtgattcaaatgattcaaattccatgacattggaaaaaggtcatcatagctctaacttcaatataccaataaaataatcagcttgc

SEQ ID NO: 8562 - DNA, 710 bp, Artificial Sequence
  derived and/or modified sequence
agagttgggagtgactccagagcctcctgcaagatgctgttgattctgctgtcagtggccttgctggccctgagctcagctcagaacttaaatgaagatgtcagccaggaagaatctccctccctaatagcaggaaatccacaaggaccatccccacaaggaggcaacaagccccagggccccccacctcctccaggaaagccacaaggaccacccccacaaggaggcaacaaacctcaaggtcccccacctccaggaaagccacaaggaccacccccacaaggggacaagtcccgaagtccccgatctcctccaggaaaaccacaaggaccacccccacaaggaggaaagccacaaggaccacccgcacaaggaggcagcaagtcccaaagtgcccgatctcctccaggaaagccacaaggaccaccccaacaagaaggcaacaatcctcaaggtcccccacctccagcaggaggcaatccccagcagcctcaggcacctcctgctggacagccccagggaccaccacgccctcctcaagggggcagaccttccagacctccccagtgacagcctccccagtcatctaggattcaatgacaggaagtgaataagaagatgagagtgattcaaatgattcaaattccatgacattggaaaaaggtcatcatagctctaacttcaatataccaataaaataatcagcttgc

SEQ ID NO: 8563 - DNA, 774 bp, Artificial Sequence
  derived and/or modified sequence
gcacagagttgggagtgactccagagcctcctgcaagatgctgttgattctgctgtcagtggccttgctggccctgagctcagctcagaacttaaatgaagatgtcagccaggaagaatctccctccctaatagcaggaaatccacaaggaccatccccacaaggaggcaacaagccccagggccccccacctcctccaggaaagccacaaggaccacccccacaaggaggcaacaaacctcaaggtcccccacctccaggaaagccacaaggaccacccccacaaggggacaagtcccgaagtccccgatctcctccaggaaaaccacaaggaccacccccacaaggaggaaagccacaaggaccacccccacaaggaggcaacaaacctcaaggtcccccacctccaggaaagccacaaggaccacccgcacaaggaggcagcaagtcccaaagtgcccgatctcctccaggaaagccacaaggaccaccccaacaagaaggcaacaatcctcaaggtcccccacctccagcaggaggcaatccccagcagcctcaggcacctcctgctggacagccccagggaccaccacgccctcctcaagggggcagaccttccagacctccccagtgacagcctccccagtcatctaggattcaatgacaggaagtgaataagaagatgagagtgattcaaatgattcaaattccatgacattggaaaaaggtcatcatagctctaacttcaatataccaataaaataatcagcttgc

SEQ ID NO: 8564 - protein, 328 aa, Artificial Sequence
  derived and/or modified sequence
MARTVVLITGCSSGIGLHLAVRLASDPSQSFKVYATLRDLKTQGRLWEAARALACPPGSLETLQLDVRDSKSVAAARERVTEGRVDVLVCNAGLGLLGPLEALGEDAVASVLDVNVVGTVRMLQAFLPDMKRRGSGRVLVTGSVGGLMGLPFNDVYCASKFALEGLCESLAVLLLPFGVHLSLIECGPVHTAFMEKVLGSPEEVLDRTDIHTFHRFYQYLAHSKQVFREAAQNPEEVAEVFLTALRAPKPTLRYFTTERFLPLLRMRLDDPSGSNYVTAMHREVFGDVPAKAEAGAEAGGGAGPGAEDEAGRGAVGDPELGDPPAAPQ

SEQ ID NO: 8565 - DNA, 987 bp, Artificial Sequence
  derived and/or modified sequence
atggcccgtacagtggttctaataacaggttgctccagcggcatagggctgcatctggccgtaaggctggcctctgacccctctcagtcttttaaagtctacgctacactgagagacctgaagacacaaggtcgcctgtgggaagctgcccgagccttagcttgtccgccaggatccctggagactttgcagctcgatgtcagagactcaaaatccgtggctgcagccagggagcgggttaccgagggaagagtcgacgtcctggtatgtaatgctggccttggcctgctgggaccactggaagcactcggagaggatgctgtggctagcgtactggatgtcaacgtggttggaaccgttcggatgctgcaggccttcctgccagacatgaagcgccggggctcaggcagggtcttagtgaccgggagtgtcggcggcctgatgggtctgccctttaacgacgtctactgcgccagcaaatttgctcttgaagggctctgtgaatctctggccgttttactcctcccatttggcgtgcacctatcattgatcgaatgtgggcctgtccataccgcattcatggagaaggttctggggtctccagaggaggtgttagataggaccgacattcacacattccacagattctatcagtacctggcccactcaaagcaggtttttcgagaagcagctcagaaccccgaagaagtcgcagaggtctttctgacagcactgcgagctcccaaacccaccctccggtatttcaccacagagagattcctgcccctcctgcgcatgaggctagatgacccgtctggaagtaattatgtgacagctatgcatagggaggtgttcggtgacgttcctgccaaggccgaggctggcgctgaggcaggtggaggcgccggtccgggcgccgaggatgaggcagggcggggagcagtgggcgatccagagcttggagacccgcccgctgccccccagtag

SEQ ID NO: 8566 - DNA, 987 bp, Artificial Sequence
  derived and/or modified sequence
atggccaggacagtggtgctgatcaccggctgcagcagcggcatcggcctgcacctggccgtgcggctggccagtgaccccagccagagcttcaaggtgtatgccaccctgcgggacctgaagacccagggccgcctgtgggaggccgcccgggccctggcctgccccccaggcagcctggagaccctgcagctggatgtgcgggacagcaagtctgtggccgccgcccgggagcgggtgacagagggccgggtggatgtgctggtgtgcaatgccggcctgggcctgctgggccccctggaggccctgggagaagatgctgtggcctctgtgctggatgtgaatgtggtgggcaccgtgaggatgctgcaggccttcctgcctgacatgaagaggcggggcagcggccgggtgctggtgactggatctgtgggcggcctgatgggcctgcccttcaatgatgtgtactgtgccagcaagtttgccctggagggcctgtgtgagagcctggccgtgctgctgctgccctttggagtgcacctgagcctgattgaatgtggccctgtgcacacagccttcatggagaaggtgctgggcagccctgaggaggtgctggacagaacagacatccacaccttccaccgcttctaccagtacctggcccacagcaagcaggtgttccgggaggccgcccagaaccctgaggaggtggccgaggtgttcctgacagccctgcgggcccccaagcccaccctgcgctacttcaccacagagcgcttcctgcccctgctgaggatgaggctggatgaccccagcggcagcaactacgtgacagccatgcaccgggaggtgtttggagatgtgcctgccaaggccgaggccggggctgaggccggcggcggggccggccctggagcagaagatgaggccggccgcggggctgtgggggaccctgagctgggggaccccccagctgccccccagtag

SEQ ID NO: 8567 - DNA, 987 bp, Artificial Sequence
  derived and/or modified sequence
atggcccggaccgtggtgctgatcaccggctgcagcagcggcatcggcttacacttagccgtgcgtctcgcaagtgatccttcgcagtccttcaaagtgtatgctactctgagagatctcaagacacaaggacggctctgggaagccgccagagctctagcctgcccccccggtagtctggagacacttcaactggatgtccgtgattccaagtctgtcgcggccgccagggaaagagtgacagaaggaagggtagacgtgctggtttgcaacgccggactcggactgttgggccctctggaggcattgggagaggatgccgtcgcttctgtcctcgatgtgaatgtggtgggcacagtgaggatgttgcaggccttcctgccagacatgaagcgcagaggttctggacgagtccttgtaacaggatcagttggaggcctcatgggactcccatttaacgatgtgtactgcgcctccaagtttgccttggaaggactttgcgaaagtcttgctgtcttgctgctgcctttcggcgtgcacctcagcttgatagagtgcggccctgtacatacggcatttatggagaaagtactggggagccctgaagaagtgcttgaccgcactgatatacatacctttcacagattctaccagtacctggcgcacagtaaacaggtgttcagagaagccgcccagaatccagaggaggtggcggaggtgtttctcactgctttaagagctcccaagccaaccctccgctactttacaaccgagaggttcctgccactgcttcgaatgaggctcgatgatcctagcggctccaattatgtgaccgcgatgcaccgagaggtgtttggagatgtgccggcgaaggcagaagctggcgccgaagcaggtggaggcgccggacctggggcagaggatgaggcaggcaggggcgcagtgggagatccagagttgggcgatccacccgctgccccacaatag

SEQ ID NO: 8568 - DNA, 987 bp, Artificial Sequence
  derived and/or modified sequence
atggcaagaacagtggtactgatcaccggttgcagctcaggaattggcctccacctagcagtaagacttgcctctgaccctagccagtcgttcaaggtgtacgccacactgcgggacctgaaaacacagggtagactctgggaggcagcgagagctttggcatgcccccctggtagcctggaaacattgcagctagacgtaagggactctaagtcagtagccgctgctcgggaacgagtgactgagggccgagtggacgtgctggtctgcaacgcaggcctcggacttctgggaccgctcgaggccctcggcgaagacgctgtcgctagtgtgctggatgtgaatgttgttgggacggtgcgcatgctgcaagcctttctgccggacatgaagcgtcgtggttctggacgggtcctcgtcaccgggagtgtcgggggactgatggggctgccattcaatgacgtatactgtgcttccaaattcgcattagaaggcttgtgtgaatcactcgccgtcctgctgctcccctttggggttcacctcagtctgattgaatgtggcccagtccatactgccttcatggaaaaggtgctaggatctcctgaggaagtgctggatcgcacggatatccatacttttcacagattctatcaatatttagctcacagcaaacaggtctttagagaggctgcccagaacccggaagaggtcgcggaggtgttcctcacggcactgagagctccgaaacccacactgcggtacttcaccactgaacgttttttgcccttactgcggatgcggctcgacgatccgagtggatcgaattacgtcactgcaatgcaccgagaggtcttcggcgatgtccctgctaaggcagaggctggtgccgaggccggtgggggtgccggaccgggagccgaagacgaagctgggaggggagccgtgggagaccctgagctgggagacccacctgccgcaccacagtag

SEQ ID NO: 8569 - DNA, 987 bp, Artificial Sequence
  derived and/or modified sequence
atggccagaaccgtggtgctgatcaccggctgcagcagcggcatcggcctgcacctggccgtgagactggccagcgaccccagccagagcttcaaggtgtacgccaccctgagagacctgaagacccagggcagactgtgggaggccgccagagccctggcctgcccccccggcagcctggagaccctgcagctggacgtgagagacagcaagagcgtggccgccgccagagagagagtgaccgagggcagagtggacgtgctggtgtgcaacgccggcctgggcctgctgggccccctggaggccctgggcgaggacgccgtggccagcgtgctggacgtgaacgtggtgggcaccgtgagaatgctgcaggccttcctgcccgacatgaagagaagaggcagcggcagagtgctggtgaccggcagcgtgggcggcctgatgggcctgcccttcaacgacgtgtactgcgccagcaagttcgccctggagggcctgtgcgagagcctggccgtgctgctgctgcccttcggcgtgcacctgagcctgatcgagtgcggccccgtgcacaccgccttcatggagaaggtgctgggcagccccgaggaggtgctggacagaaccgacatccacaccttccacagattctaccagtacctggcccacagcaagcaggtgttcagagaggccgcccagaaccccgaggaggtggccgaggtgttcctgaccgccctgagagcccccaagcccaccctgagatacttcaccaccgagagattcctgcccctgctgagaatgagactggacgaccccagcggcagcaactacgtgaccgccatgcacagagaggtgttcggcgacgtgcccgccaaggccgaggccggcgccgaggccggcggcggcgccggccccggcgccgaggacgaggccggcagaggcgccgtgggcgaccccgagctgggcgacccccccgccgccccccagtag

SEQ ID NO: 8570 - DNA, 450 bp, Artificial Sequence
  derived and/or modified sequence
atggcccgaacagtggtgcttatcaccggctgtagttctggaattggcctccatctggcagttaggcttgcctcagatccatctcagagttttaaggtctacgccactttaagagacttaaaaactcaaggacgtttatgggaggcggcacgtgcgttggcctgtcccccagggtcactggaaacattgcaacttgacgtgcgcgatagtaaaagtgtcgctgcagctagggagagggtgactgaaggcagagttgacgtccttgtgtgtaacgcggggttaggccttctgggaccacttgaagcgctgggggaagacgccgtagcctccgtcctggacgttaacgtcgtggggaccgtcagaatgcttcaggcctttttgcccgacatgaaacgcaggggtagcggaagggtgcttgtcaccggctctgtagggggccttatggcttag

SEQ ID NO: 8571 - DNA, 987 bp, Artificial Sequence
  derived and/or modified sequence
atggccagaaccgtagtactaataaccggatgctcctccggaatcgggctccacctggcagtacgtttagcctcggacccctcgcagagcttcaaggtgtacgcaaccttaagagatctgaagactcagggaagactctgggaagccgctcgtgcccttgcttgcccacctgggtccctagagacactacagctggacgtcagagactctaagagcgtggcagctgcacgcgaaagagttacggaaggccgagtagacgtgctcgtatgcaacgctggactgggtcttttaggtccgctggaggctctgggggaagatgccgtggccagtgtgctggacgtcaatgtggtcgggacggtccggatgctgcaggcgttcctgcctgacatgaagcgccgcggatcagggagggtgctggtgaccggtagcgtgggcgggttaatgggcctccctttcaatgacgtttattgcgcatctaagttcgcactggaagggttgtgcgaatcattggcagtgctccttttgccctttggcgtccacctttcccttattgaatgcgggcctgttcacaccgcatttatggaaaaagtgctcgggtcccccgaggaagtattagatagaacagacattcatacctttcataggttttaccagtacctggcacattctaagcaggtgttccgggaggcagcacagaaccctgaggaagtggcagaggtgtttttgaccgctcttcgagctccaaagccaacactccgttactttaccacagagaggttcctaccattacttcggatgcgcctggacgatccatccggcagcaattacgtgacagcaatgcatcgcgaagtgtttggcgatgtccccgcaaaggcagaggccggtgctgaggccggggggggggctgggcccggggccgaagatgaggctggccgcggcgccgtgggcgaccccgaacttggcgacccaccagctgcaccccagtag

SEQ ID NO: 8572 - DNA, 447 bp, Artificial Sequence
  derived and/or modified sequence
atggcatgtacagtggtgctgattactggctgctcctccggaattggcctgcacctggctattcatctcgccctcgacccctctcaatcttttaaagtgtacgccactctacgcgatcttaaaactcagggccgactatgggaggccgcccgggccctggcatgtcctcagggcagtctggaacgactgcagctggatgttcggaatagtagcagtttggccgccgcccgggaacgtgtgacggagggacgggtcgatgtgctagtttgtgataccggactgggacttctcggaccattgggagaggacgccgtggcatccgtactggatgtgaacgtggttggcaccgtccgcgtgttgcaagactttctgcccgatatgaaacgcccaggcagcggacgtgtgttagtgacggggtccatggggggattgatgggggaatggtag

SEQ ID NO: 8573 - DNA, 2223 bp, Artificial Sequence
  derived and/or modified sequence
gggcctcccaaagtgctgggattacaggcatgagccaccgtgcccagcctcaaagcatattttaaaggatagaaataaacagccatatgaagagatacagacagggcggtctggaagggtccagagcaggagcttctatctccatagagttggggttacgtcaccctctgggcacattctgtcagcctccacacgttcagccctcagaagctcccgaaccctgtcctttgggccttttatggagaactccattggctgtccatgactgaagcatggacaactgtgataatgtgattgggcaaaaagggtctgatctaagcccagcaaggccagtccagattctttgggcctttgtgcagcattcctttctccagggtatggggcaaggacccactctggaatgaggatcctacaacccacaatcagattagagtcctgccttgggcagctgaaaagaggacaggagaaggtcagagagacgaaaggctgttttttgaggcctgaggcaccccaacatgacaacgtaagactgtaaccatggtcatgtgagttatgagctaggaaccctggacgaaaccagcacatatacaatcatctcccacctcccaacgcctttactttcacagcctctgcagcaaactgcggtcactataatcgctcctgtggcacagaggcatacccaggggaatctgcccagggggccactctgtgcccacgtgggaacccacacctgcttgtaaagcctcccctccctctgaccagcaaccaggacagtttgttgttccaagcagtgggctcatgtctgttttggctcagaacagggtggggagagcgggccagggacccgcaggaaggcttatccttgagattgcgtgggagacacaacaaggggtgggggcccgcaggcggggcggggcgaagcaggtgatatcaagcccagagccccagcctctccccacagtctcaccatggcccgcaccgtggtgctcatcaccggctgttcctcgggcatcggcctgcacttggccgtacgtctggcttcagatccatcccagagcttcaaagtgtatgccacgttgagggacctgaaaacacagggccggctgtgggaggcggcccgggccctggcatgccctccgggatccctggagacgttgcagctggacgtaagggactcaaaatccgtggccgctgcccgggaacgcgtgactgagggccgcgtggacgtgctggtgtgtaacgcaggcctgggcctgctggggccgctggaggcgctgggggaggacgccgtggcctctgtgctggacgtgaatgtagtagggactgtgcggatgctgcaggccttcctgccagacatgaagaggcgcggttcgggacgcgtgttggtgaccgggagcgtgggaggattgatggggctgcctttcaatgacgtttattgcgccagcaagttcgcgctcgaaggcttatgcgagagtctggcggttctgctgctgccctttggggtccacttgagcctgatcgagtgcggcccagtgcacaccgccttcatggagaaggtgttgggcagcccagaggaggtgctggaccgcacggacatccacaccttccaccgcttctaccaatacctcgcccacagcaagcaagtctttcgcgaggcggcgcagaaccctgaggaggtggcggaggtcttcctcaccgctttgcgcgccccgaagccgaccctgcgctacttcaccaccgagcgcttcctgcccctgctgcggatgcgcctggacgaccccagcggctccaactacgtcaccgccatgcaccgggaagtgttcggcgacgttccggcaaaggccgaggctggggccgaggctgggggcggggccgggcctggggcagaggacgaggccgggcgcggtgcggtgggggaccctgagctcggcgatcctccggccgccccgcagtaaaggcttcctcagccgctgtctcccgcgcccttctttgtcccctgggtctgtgtggtccctggggatggggcggcggtagcagctgtgggtggctaattaagatagatcgcgttagccagttttaccagcgcagctaggcgcgatggctgtcgcctgtaatgccagcgctttgggaggcggaggcaggaggatcgctcaagccccggagttggagaccagccagagcaacacagtgagacccccatctctacaaaaataaagaaaattt

SEQ ID NO: 8574 - DNA, 4982 bp, Artificial Sequence
  derived and/or modified sequence
agttaggtgggacttgggttggggtagagtcaggttgtgacctgcactccattagccatgagacctcaggcaagttccttgctttctctgagtgctttcctttcctttcccttttcttttcttttttgtttttcttttgttttgagacggagtttcactcttgttgcccagcctggagtgcaatagcgcggtctcagttcaccacaacctctgcctcccgggttcaagtgtagctaggattgcaggcatgtgccaccacgcccagctaattttgtatttttagtagagacgaggtttctccatgttggtcagactggtcttggactcccgacctcaggtgatccgcccgccctggcctctcagagtgctgggattacaggcatgacccaccccatccggccctctgagtctttcttatctgtaaaatgggtataataatacctatctaatcggttttagtaatggtggagataatgcctgaaagtgctagtatagaggtttaatacccagcaaggactgttattagaatgaatagtaatatgactactgtcacattttgcaaatgtgtaaagaagaaagagggctaagtgaatcaaagggagacagccccactcaccctgttctgccccagaggactgagcgatccccaccatctgggaagctgcctcaccaggaggtccagctggggctacaggactggctactttgctacaatggcccatctttcctgagcccagtggagggtcccaggggggcagaagtcattgataggggccagtagggttgtagagccactgtctgaacttctgtggaggtctggtgcaggggaggtgtgaacagataggaggctaggtgaggatgcagcagaggaagggggcaggagtgccccaggagggggcggtaccgaggcagggattcagctgggtctgagagggagggaaggctgagggggatggccctttggagtgggcagggacatgaccacagaaagcctgggaagtggaaacagacaggagcctgctggagctcttggagctttgtgtggggcactaggggaaggaggcaggcactccaccctgacctgcccctacctctggatgagggtcttctctgcctgttggatgatgtgctgcccctgctcttggaggaagaggcctcccagccaccccctcctgccagtcgccttgccctgctgacccagacagatctgctatccctacagcatccaggaaggccacagggagggggcccaggtggcatgggtttctgaggcctgggatctgctctcagtcccgctctcgccaaccccctttgcccctctgtgacagtgtgtgtacatatgcgtgcatgtgtgtacctgtgtggtgtggctcacaaggtcacccctgggggtgggataataagaggtaaagtgtgaccccctctcttccgtacattcattttttcaagcttgtgaatattcacattgttaatataatcttctgcagtcccatgacttcgaatagcacttagatgccgatgacccccccaccaaagaaaccccactgtctcccacagactccaggtctgtatctccaactgcctactcaatacaacacgtccacctgatacaatgaacttaatgtgtctaaaccccaattccacatttccagtcctcctaccggctcctcccccagtcttctctactttactatatgacaactccatttttcccaatactggttttaaaaaccctggagtagtccttgactccagtctctctcacctttcaaccaattcagcagcaaatactgacagctctacctttgctcatcaaagcatatccccaaatcaccctattccagactgcacactgtcatctctcccttcaattacagcagtagcctcctaactagttttcttgattccactcctgcccatcagcagtgaaattaccccagagcagttaaaatgatcttttaggatgggcacagtggctcacgcctgtaataccagcactttgggaggtggaggctggctgatccccttaggttgggagttcaagaccatcctcaccaacagggagaaaccccatctctactaaaaatacaaaaattagccggatgtggtgggacgtgtctgtaatcccaactacttgggaggctgagacaggagaactgcttgaacccgggaggtggaggttgcagtgagccagaatcgtgccacagcactccagcctgggcaagaagcgcgaaactccgtctcaaaataaaataatcttctaaaaatgacagggccaggtggggtggcacttttttataatccgagcactttgggaggctgaggtgggcagatcgcttgacatcaggggtttgagaccagcctggccaacatggtgaaactccgtctctactaaaaatactaaaaattagctgggcgtggtggcgggtgcctgtaatcccagctactcgggaggctgatgcaggagaatcgcctgaaccaggcagatgcaggatgcagtgagccaagattaagacactgcactccaacctaagcaatactttgtctcaaaaataaaaaaaagcctgggaaacaaagtgagaccccgtctctacaaaaaagtcaaaaaattagctgggtatggtggcagtgatggcacacacctgtagtcccggctacttgggaagctttttaatattttttgcagagaccgggtctcactctgttacctggcctggtcttgaactcctgggctccaacaatcccctttcctgggcctcccaaagtgctgggattacaggcatgagccaccgtgcccagcctcaaagcatattttaaaggatagaaataaacagccatatgaagagatacagacagggcggtctggaagggtccagagcaggagcttctatctccatagagttggggttacgtcaccctctgggcacattctgtcagcctccacacgttcagccctcagaagctcccgaaccctgtcctttgggccttttatggagaactccattggctgtccatgactgaagcatggacaactgtgataatgtgattgggcaaaaagggtctgatctaagcccagcaaggccagtccagattctttgggcctttgtgcagcattcctttctccagggtatggggcaaggacccactctggaatgaggatcctacaacccacaatcagattagagtcctgccttgggcagctgaaaagaggacaggagaaggtcagagagacgaaaggctgttttttgaggcctgaggcaccccaacatgacaacgtaagactgtaaccatggtcatgtgagttatgagctaggaaccctggacgaaaccagcacatatacaatcatctcccacctcccaacgcctttactttcacagcctctgcagcaaactgcggtcactataatcgctcctgtggcacagaggcatacccaggggaatctgcccagggggccactctgtgcccacgtgggaacccacacctgcttgtaaagcctcccctccctctgaccagcaaccaggacagtttgttgttccaagcagtgggctcatgtctgttttggctcagaacagggtggggagagcgggccagggacccgcaggaaggcttatccttgagattgcgtgggagacacaacaaggggtgggggcccgcaggcggggcggggcgaagcaggtgatatcaagcccagagccccagcctctccccacagtctcaccatggcccgcaccgtggtgctcatcaccggctgttcctcgggcatcggcctgcacttggccgtacgtctggcttcagatccatcccagagcttcaaagtgtatgccacgttgagggacctgaaaacacagggccggctgtgggaggcggcccgggccctggcatgccctccgggatccctggagacgttgcagctggacgtaagggactcaaaatccgtggccgctgcccgggaacgcgtgactgagggccgcgtggacgtgctggtgtgtaacgcaggcctgggcctgctggggccgctggaggcgctgggggaggacgccgtggcctctgtgctggacgtgaatgtagtagggactgtgcggatgctgcaggccttcctgccagacatgaagaggcgcggttcgggacgcgtgttggtgaccgggagcgtgggaggattgatggggctgcctttcaatgacgtttattgcgccagcaagttcgcgctcgaaggcttatgcgagagtctggcggttctgctgctgccctttggggtccacttgagcctgatcgagtgcggcccagtgcacaccgccttcatggagaaggtgttgggcagcccagaggaggtgctggaccgcacggacatccacaccttccaccgcttctaccaatacctcgcccacagcaagcaagtctttcgcgaggcggcgcagaaccctgaggaggtggcggaggtcttcctcaccgctttgcgcgccccgaagccgaccctgcgctacttcaccaccgagcgcttcctgcccctgctgcggatgcgcctggacgaccccagcggctccaactacgtcaccgccatgcaccgggaagtgttcggcgacgttccggcaaaggccgaggctggggccgaggctgggggcggggccgggcctggggcagaggacgaggccgggcgcggtgcggtgggggaccctgagctcggcgatcctccggccgccccgcagtaaaggcttcctcagccgctgtctcccgcgcccttctttgtcccctgggtctgtgtggtccctggggatggggcggcggtagcagctgtgggtggctaattaagatagatcgcgttagccagttttaccagcgcagctaggcgcgatggctgtcgcctgtaatgccagcgctttgggaggcggaggcaggaggatcgctcaagccccggagttggagaccagccagagcaacacagtgagacccccatctctacaaaaataaagaaaatttaaaaatc

SEQ ID NO: 8575 - DNA, 455 bp, Artificial Sequence
  derived and/or modified sequence
acagtctcaccatggcctgcaccgtggtgctcatcaccggctgttcctcaggtattggcctgcacttggcaatacatctggctttggacccatcccagagcttcaaagtgtatgccacgttgagggacctgaaaacacagggccggctgtgggaggcggcccgggccctggcatgccctcagggatccctggagaggttgcagctggatgtaaggaactcaagctccctggccgctgcccgggaacgcgtgaccgagggccgtgtggatgtgctggtgtgtgacacaggcctgggcctgctggggccgctgggggaggacgctgtggcctctgtactggatgtgaatgtagtaggtactgtgcgggtgctgcaggacttcctgccagacatgaagcggccgggttcgggacgcgtgttggtgactgggagcatgggaggattgatgggtgagtgg

SEQ ID NO: 8576 - DNA, 450 bp, Artificial Sequence
  derived and/or modified sequence
atggccaggacagtggtgctgatcaccggctgcagcagcggcatcggcctgcacctggccgtgcggctggccagtgaccccagccagagcttcaaggtgtatgccaccctgcgggacctgaagacccagggccgcctgtgggaggccgcccgggccctggcctgccccccaggcagcctggagaccctgcagctggatgtgcgggacagcaagtctgtggccgccgcccgggagcgggtgacagagggccgggtggatgtgctggtgtgcaatgccggcctgggcctgctgggccccctggaggccctgggagaagatgctgtggcctctgtgctggatgtgaatgtggtgggcaccgtgaggatgctgcaggccttcctgcctgacatgaagaggcggggcagcggccgggtgctggtgactggatctgtgggcggcctgatggcctag

SEQ ID NO: 8577 - DNA, 447 bp, Artificial Sequence
  derived and/or modified sequence
atggcctgcaccgtggtgctgatcaccggctgcagcagcggcatcggcctgcacctggccatccacctggccctggaccccagccagagcttcaaggtgtatgccaccctgcgggacctgaagacccagggccgcctgtgggaggccgcccgggccctggcctgcccccagggcagcctggagcggctgcagctggatgtgaggaacagcagcagcctggccgccgcccgggagcgggtgacagagggccgggtggatgtgctggtgtgtgacaccggcctgggcctgctgggccccctgggggaggatgctgtggcctctgtgctggatgtgaatgtggtgggcaccgtgcgggtgctgcaggacttcctgcctgacatgaagaggcctggcagcggccgggtgctggtgacaggctccatgggcggcctgatgggagagtggtag

SEQ ID NO: 8578 - DNA, 450 bp, Artificial Sequence
  derived and/or modified sequence
atggcccggaccgtggtgctgatcaccggctgcagcagcggcatcggcctgcacttagctgtcaggctggcatccgacccaagtcagagttttaaggtttatgccactctccgggacttgaagacacagggtcgtctgtgggaggcagccagggccttagcttgtccccctgggtcactcgagaccttgcagcttgacgtgcgcgattccaagtctgtggcggccgcacgcgaacgagtaactgaggggagagttgacgtgttagtgtgtaacgctggactcgggctgcttggcccgcttgaggctttgggtgaagatgcagtggcctctgtactggacgtgaacgttgttggcactgtgcggatgctgcaggccttcctgcccgacatgaagcgaagaggatctggacgggtcctggttaccgggagcgtcggcggactgatggcctag

SEQ ID NO: 8579 - DNA, 987 bp, Artificial Sequence
  derived and/or modified sequence
atggcccggaccgtggtgctgatcaccggctgcagcagcggcatcggactccatctcgccgtgaggctagccagtgacccctcccaatcatttaaggtctatgccacactgcgggacctgaaaactcaaggcaggctgtgggaggccgctagggctttggcgtgcccccctggctcactggagactcttcagctagatgttagggactcaaaatccgtggccgctgcccgggagcgcgttaccgaagggcgggtggacgtgttagtctgtaatgcaggtctcgggctgttggggcctttggaagcactgggggaagacgctgtcgccagtgtgctcgatgtcaatgtggtgggtacggtgcgaatgctgcaggccttcctgcctgacatgaagcggagaggatccgggagagtcctggtgacaggctctgttggggggttgatgggtctgcccttcaacgacgtgtactgtgctagcaagtttgccctggagggcctctgtgagtcgcttgccgtcctgcttctaccctttggggttcatctcagcctgatcgagtgtgggcctgtgcacacagcctttatggagaaggtgttgggcagtcccgaggaagtcctcgatcgcactgatatccacactttccaccggttctatcagtacttggcccactctaagcaggtgttcagggaggccgcacagaatccggaggaggttgctgaagtattcttaaccgcactcagagccccgaagcccacactgcggtacttcacgaccgagcggttcctgcccctcctacggatgaggctggatgacccaagtggctccaattatgtgactgccatgcacagggaagtgttcggagatgttcctgctaaggccgaggccggagcagaagccggtggcggagctggacccggcgctgaggacgaggcgggaaggggcgccgtgggagatccagagctgggggatcccccagcagctccccaatag

SEQ ID NO: 8580 - DNA, 447 bp, Artificial Sequence
  derived and/or modified sequence
atggcctgcaccgtggtgctgatcaccggctgcagcagcggcatcgggttgcatctcgctattcacttggcactggacccatcccaaagctttaaagtgtatgctacactgcgagatctgaagactcagggcaggctctgggaggccgcacgcgcccttgcttgccctcaagggtcattagaaagactgcagttagatgtgcgcaacagctcaagtcttgccgccgccagagaacgggtcactgaaggccgggtagacgtcctcgtgtgcgatactggtttaggcttgttaggccctctgggggaagacgccgttgcctcagttctggatgttaatgttgtaggaactgtgagagtattgcaggatttcctcccagacatgaaaagaccgggaagcgggagggttttggtgacaggctctatgggcggtctgatgggtgagtggtag

SEQ ID NO: 8581 - DNA, 450 bp, Artificial Sequence
  derived and/or modified sequence
atggcaagaacagtcgtcctgattacgggttgttcatctggaatcggactccacctggctgtgagattggcctcggaccctagccagagctttaaagtgtacgcgacattaagggacctaaaaacccagggccgactgtgggaggccgctcgggcactcgcttgcccacctggctcccttgaaacgttacagttggatgtgcgtgactctaagtcggtggcggctgctcgcgagagggtgacggagggacgagtcgacgttctggtatgcaacgctggcttgggactgctcggtccactagaggccctcggcgaggatgcagtggcctccgtgttggacgtgaacgttgtgggcaccgtcaggatgttgcaggctttcctcccagacatgaaacgtcgaggctccggaagagtgctggtgactggctctgtgggcggacttatggcttag

SEQ ID NO: 8582 - DNA, 987 bp, Artificial Sequence
  derived and/or modified sequence
atggccagaactgtggtattaattactggatgttcttccggcatcggcctacatctggcagtccgtctcgctagcgatccaagtcagtcattcaaagtatacgctactttgagggacctgaaaacacaggggcgtctgtgggaagcagcgcgagctttagcctgtcctccagggagcctggagacattgcagctggacgtgcgggactctaagagcgtcgccgctgcaagggagcgcgtgacagaagggagggtagacgttctggtgtgtaatgccggtctcggcctgctcggccctctcgaggccttgggagaggacgccgtggcttctgtgctggatgttaacgtggttgggactgtcagaatgctccaagctttcctgccagatatgaaacggagaggtagcgggagagtgctggtgacaggaagcgtggggggtctcatgggcctaccttttaacgatgtttactgcgcatctaagtttgcactggaggggctgtgcgagagtctggctgttctcctgttacctttcggagtgcacttgagcctcatagaatgtggaccagtgcacaccgcttttatggaaaaggttttggggtccccagaagaggttctagatagaactgacatccatacgtttcatcgcttctatcagtatctcgcacacagcaagcaagtgttccgggaggccgctcagaatcccgaggaggtagcagaagtcttcctaacagcactacgggcacccaagccaaccctgcggtactttacaactgagcgttttctgcctctgctgcgaatgcgtctggacgatcctagtggctccaactatgtaacagccatgcaccgggaggtttttggcgacgtgcccgctaaggccgaggcaggtgccgaggcgggaggtggggcaggccctggagctgaagatgaggccggtcgcggtgcggtgggcgatcctgagttaggagatccacccgcagcaccacaatag

SEQ ID NO: 8583 - DNA, 447 bp, Artificial Sequence
  derived and/or modified sequence
atggcatgcactgtggtgctgattacaggatgttcatccggaatcggacttcacttggctatacacttagccctcgacccaagtcaatcattcaaggtgtatgcgaccttaagggacctgaaaacgcagggtagactttgggaggctgctcgcgctcttgcctgccctcagggaagcctggagcggctgcagttggatgtaagaaattcctcatctctggccgctgctcgggagcgagttactgagggtagggttgatgtgctagtctgcgacactggcttgggcctgctgggaccattaggtgaggatgctgttgcatcagttttggacgtaaacgtcgtgggcacggtccgcgtgctgcaggatttcttgccggacatgaagcgccctggcagcggtcgggttctggtgacaggatccatgggaggtctgatgggtgagtggtag

SEQ ID NO: 8584 - DNA, 450 bp, Artificial Sequence
  derived and/or modified sequence
atggccagaaccgtggtgctgatcaccggctgcagcagcggcatcggcctgcacctggccgtgagactggccagcgaccccagccagagcttcaaggtgtacgccaccctgagagacctgaagacccagggcagactgtgggaggccgccagagccctggcctgcccccccggcagcctggagaccctgcagctggacgtgagagacagcaagagcgtggccgccgccagagagagagtgaccgagggcagagtggacgtgctggtgtgcaacgccggcctgggcctgctgggccccctggaggccctgggcgaggacgccgtggccagcgtgctggacgtgaacgtggtgggcaccgtgagaatgctgcaggccttcctgcccgacatgaagagaagaggcagcggcagagtgctggtgaccggcagcgtgggcggcctgatggcctag

SEQ ID NO: 8585 - DNA, 447 bp, Artificial Sequence
  derived and/or modified sequence
atggcctgcaccgtggtgctgatcaccggctgcagcagcggcatcggcctgcacctggccatccacctggccctggaccccagccagagcttcaaggtgtacgccaccctgagagacctgaagacccagggcagactgtgggaggccgccagagccctggcctgcccccagggcagcctggagagactgcagctggacgtgagaaacagcagcagcctggccgccgccagagagagagtgaccgagggcagagtggacgtgctggtgtgcgacaccggcctgggcctgctgggccccctgggcgaggacgccgtggccagcgtgctggacgtgaacgtggtgggcaccgtgagagtgctgcaggacttcctgcccgacatgaagagacccggcagcggcagagtgctggtgaccggcagcatgggcggcctgatgggcgagtggtag

SEQ ID NO: 8586 - protein, 736 aa, Artificial Sequence
  derived and/or modified sequence
MGSPLRFDGRVVLVTGAGAGLGRAYALAFAERGALVVVNDLGGDFKGVGKGSLAADKVVEEIRRRGGKAVANYDSVEEGEKVVKTALDAFGRIDVVVNNAGILRDRSFARISDEDWDIIHRVHLRGSFQVTRAAWEHMKKQKYGRIIMTSSASGIYGNFGQANYSAAKLGLLGLANSLAIEGRKSNIHCNTIAPNAGSRMTQTVMPEDLVEALKPEYVAPLVLWLCHESCEENGGLFEVGAGWIGKLRWERTLGAIVRQKNHPMTPEAVKANWKKICDFENASKPQSIQESTGSIIEVLSKIDSEGGVSANHTSRATSTATSGFAGAIGQKLPPFSYAYTELEAIMYALGVGASIKDPKDLKFIYEGSSDFSCLPTFGVIIGQKSMMGGGLAEIPGLSINFAKVLHGEQYLELYKPLPRAGKLKCEAVVADVLDKGSGVVIIMDVYSYSEKELICHNQFSLFLVGSGGFGGKRTSDKVKVAVAIPNRPPDAVLTDTTSLNQAALYRLSGDWNPLHIDPNFASLAGFDKPILHGLCTFGFSARRVLQQFADNDVSRFKAIKARFAKPVYPGQTLQTEMWKEGNRIHFQTKVQETGDIVISNAYVDLAPTSGTSAKTPSEGGKLQSTFVFEEIGRRLKDIGPEVVKKVNAVFEWHITKGGNIGAKWTIDLKSGSGKVYQGPAKGAADTTIILSDEDFMEVVLGKLDPQKAFFSGRLKARGNIMLSQKLQMILKDYAKL

SEQ ID NO: 8587 - DNA, 2211 bp, Artificial Sequence
  derived and/or modified sequence
atggggtcacctcttcggtttgatggacgagtcgttctagtgacaggtgccggtgccgggctgggtagggcgtatgcattagccttcgcagagaggggtgccctcgtggtggtaaacgacctggggggtgattttaagggtgtggggaagggatccttggcagctgataaagttgttgaagagattagacgacggggagggaaggcagttgctaattatgactccgtcgaggagggtgaaaaggtcgtgaaaactgctctggacgcctttggacgaatcgatgtggttgttaacaacgccgggattctccgtgatagatccttcgctagaatctccgatgaggattgggatatcatccatagagtacatttacggggttcattccaggttaccagggccgcatgggaacacatgaaaaaacaaaaatacggacggatcattatgacgtcctccgctagcggcatctatgggaatttcggacaagccaattattctgctgctaaactaggcttactcggcttggcgaactctctggcaattgaaggccggaagagcaacatccactgcaatacaatcgcacctaatgcaggatcaaggatgacccagactgtcatgcctgaagatttggtggaagctctcaagcctgagtatgtcgctcccctggtcctgtggctgtgtcatgagagctgtgaggagaacgggggcctgtttgaggtcggagcggggtggattggaaagctgcgctgggagcggaccttgggtgccatcgtcaggcagaagaatcatcctatgaccccggaagctgtgaaggcaaattggaagaaaatttgcgacttcgagaacgccagcaaaccacagagtatccaggaatctacagggtccattatcgaggttctttctaagatcgattccgagggaggcgtctccgcaaaccatacttcccgagcgacatcaactgctacttcaggctttgctggcgccatcggacaaaaactaccgccattctcgtacgcttataccgagctggaagctattatgtatgctcttggggtgggcgcatcaattaaagatcccaaagacttgaagtttatatatgagggatcctcggatttctcttgtctgcctactttcggagttatcatcggccagaaatctatgatgggcggtggcctggccgaaattcccgggctctcaatcaattttgccaaggttctgcacggcgaacagtatttagaactgtacaagcctcttccaagggcaggcaagttgaaatgtgaagctgtcgtggctgacgtgctggataaagggtctggagtggtgattattatggacgtctacagctattccgagaaggagctgatctgccataaccagtttagcctgttcctcgttgggagtgggggatttggcgggaaacgtacttctgataaagtgaaagttgcagtggccattcccaaccgtccgccggatgctgtccttaccgacactacatctcttaaccaggccgctctgtaccgattatccggtgattggaatcctttgcatatcgaccctaactttgcatctcttgccggcttcgataaacccattctgcacggtctatgtactttcggattcagtgctagaagagtgctgcaacagttcgctgacaatgatgtctcacgttttaaggcaatcaaagccagatttgcaaagcccgtgtatccaggacagaccctgcagaccgagatgtggaaagagggcaaccgcatccactttcaaactaaagtgcaagaaaccggcgacattgtcatatctaacgcctatgtggatctggctccaacttcaggcactagcgcgaaaacgccgagcgaaggaggcaagctacagagcacattcgtgtttgaggagattggcaggaggttaaaggacatcgggcccgaggttgtcaagaaggttaacgcagtatttgagtggcacattactaaagggggaaacataggtgccaaatggactattgatctgaaatcggggtccggaaaggtgtatcagggacccgcaaagggagccgcagatacgacgatcatcttgtcagacgaggatttcatggaagtggtgctcggcaaactcgaccctcaaaaggccttcttctcaggccgccttaaggctaggggcaacatcatgctgtctcagaagctccagatgatcctgaaggattacgctaagttgtag

SEQ ID NO: 8588 - DNA, 2683 bp, Artificial Sequence
  derived and/or modified sequence
gctcatcttcctaccagaaatcggcaagtcactgaccctcgtcccgcccccgccattccccgcctcctcctgtcccgcagtcggcgtccagcggctctgcttgttcgtgtgtgtgtcgttgcaggccttattcatgggctcaccgctgaggttcgacgggcgggtggtactggtcaccggcgcgggggcaggattgggccgagcctatgccctggcttttgcagaaagaggagcgttagttgttgtgaatgatttgggaggggacttcaaaggagttggtaaaggctccttagctgctgataaggttgttgaagaaataagaaggagaggtggaaaagcagtggccaactatgattcagtggaagaaggagagaaggttgtgaagacagccctggatgcttttggaagaatagatgttgtggtcaacaatgctggaattctgagggatcgttcctttgctaggataagtgatgaagactgggatataatccacagagttcatttgcggggttcattccaagtgacacgggcagcatgggaacacatgaagaaacagaagtatggaaggattattatgacttcatcagcttcaggaatatatggcaactttggccaggccaattatagtgctgcaaagttgggtcttctgggccttgcaaattctcttgcaattgaaggcaggaaaagcaacattcattgtaacaccattgctcctaatgcgggatcacggatgactcagacagttatgcctgaagatcttgtggaagccctgaagccagagtatgtggcacctcttgtcctttggctttgtcacgagagttgtgaggagaatggtggcttgtttgaggttggagcaggatggattggaaaattacgctgggagcggactcttggagctattgtaagacaaaagaatcacccaatgactcctgaggcagtcaaggctaactggaagaagatctgtgactttgagaatgccagcaagcctcagagtatccaagaatcaactggcagtataattgaagttctgagtaaaatagattcagaaggaggagtttcagcaaatcatactagtcgtgcaacgtctacagcaacatcaggatttgctggagctattggccagaaactccctccattttcttatgcttatacggaactggaagctattatgtatgcccttggagtgggagcgtcaatcaaggatccaaaagatttgaaatttatttatgaaggaagttctgatttctcctgtttgcccaccttcggagttatcataggtcagaaatctatgatgggtggaggattagcagaaattcctggactttcaatcaactttgcaaaggttcttcatggagagcagtacttagagttatataaaccacttcccagagcaggaaaattaaaatgtgaagcagttgttgctgatgtcctagataaaggatccggtgtagtgattattatggatgtctattcttattctgagaaggaacttatatgccacaatcagttctctctctttcttgttggctctggaggctttggtggaaaacggacatcagacaaagtcaaggtagctgtagccatacctaatagacctcctgatgctgtacttacagataccacctctcttaatcaggctgctttgtaccgcctcagtggagactggaatcccttacacattgatcctaactttgctagtctagcaggttttgacaagcccatattacatggattatgtacatttggattttctgccaggcgtgtgttacagcagtttgcagataatgatgtgtcaagattcaaggcaattaaggctcgttttgcaaaaccagtatatccaggacaaactctacaaactgagatgtggaaggaaggaaacagaattcattttcaaaccaaggtccaagaaactggagacattgtcatttcaaatgcatatgtggatcttgcaccaacatctggtacttcagctaagacaccctctgagggcgggaagcttcagagtacctttgtatttgaggaaataggacgccgcctaaaggatattgggcctgaggtggtgaagaaagtaaatgctgtatttgagtggcatataaccaaaggcggaaatattggggctaagtggactattgacctgaaaagtggttctggaaaagtgtaccaaggccctgcaaaaggtgctgctgatacaacaatcatactttcagatgaagatttcatggaggtggtcctgggcaagcttgaccctcagaaggcattctttagtggcaggctgaaggccagagggaacatcatgctgagccagaaacttcagatgattcttaaagactacgccaagctctgaagggcacactacactattaataaaaatggaatcattaaatactctcttcacccaaatatgcttgattattctgcaaaagtgattagaactaagatgcaggggaaattgcttaacattttcagatatcagataactgcagattttcattttctactaatttttcatgtatcattatttttacaaggaactatatataagctagcacataattatccttctgttcttagatctgtatcttcataataaaaaattttgcccaagtcctgtttccttagaatttgtgatagcattgataagttgaaaggaaaattaaatcaataaaggcctttgatacctttg

SEQ ID NO: 8589 - DNA, 2211 bp, Artificial Sequence
  derived and/or modified sequence
atgggcagccccctgcgctttgatggccgggtggtgctggtgactggagctggagctggcctgggccgggcctatgccctggcctttgctgagcggggggccctggtggtggtgaatgacctgggcggggacttcaagggcgtgggcaagggcagcctggccgctgacaaggtggtggaggagatcagaagaagaggaggcaaggctgtggccaactatgattctgtggaggagggggagaaggtggtgaagacagccctggatgccttcggcagaattgatgtggtggtgaacaatgccggcatcctgcgggacaggagctttgcccgcatcagtgatgaggactgggacatcatccaccgggtgcacctgcggggcagcttccaggtgaccagggctgcctgggagcacatgaagaagcagaagtatggccgcatcatcatgaccagcagcgccagcggcatctacggcaactttggccaggccaactacagcgctgccaagctgggcctgctgggcctggccaacagcctggccatcgagggcaggaagagcaacatccactgcaacaccatcgccccaaatgccggcagcaggatgacccagacagtgatgcctgaggacctggtggaggccctgaagccagaatatgtggcccccctggtgctgtggctgtgccacgagagctgtgaggagaatggaggcctgtttgaggtgggcgccggctggattggcaagctgcgctgggagaggaccctgggcgccatcgtgcggcagaagaaccaccccatgaccccagaggccgtgaaggccaactggaagaagatctgtgactttgaaaatgccagcaagccccagagcatccaggagagcacaggcagcatcatcgaggtgctgagcaagattgacagcgagggcggcgtgtctgccaaccacaccagccgggccaccagcacagccaccagcggctttgctggggccatcggccagaagctgccccccttctcctatgcctacacagagctggaggccatcatgtatgccctgggcgtgggcgccagcatcaaggaccccaaggacctgaagttcatctatgagggcagcagtgacttcagctgcctgcccacctttggagtcatcatcggccagaagtccatgatgggcggcggcctggccgagatccctggcctgagcatcaactttgccaaggtgctgcacggggagcagtacctggagctgtacaagcccctgccccgggccggcaagctgaagtgtgaggccgtggtggctgatgtgctggacaagggcagcggcgtggtgatcatcatggatgtgtacagctacagcgagaaggagctgatctgccacaaccagttcagcctcttcctggtgggcagcggcggctttggaggcaagaggaccagtgacaaggtgaaggtggccgtggccatccccaaccggcccccagatgctgtgctgacagacaccaccagcctgaaccaggccgccctgtaccgcctgagcggggactggaaccccctgcacatcgaccccaactttgccagcctggccggctttgacaagcccatcctgcacggcctgtgcaccttcggcttcagcgcccggcgggtgctgcagcagtttgctgacaatgatgtgagccgcttcaaggccatcaaggccaggtttgccaagcctgtgtacccaggccagaccctgcagacagagatgtggaaggagggcaaccgcatccacttccagaccaaggtgcaggagactggagacatcgtcatcagcaatgcctacgtggacctggcccccaccagcggcaccagcgccaagaccccatctgagggcggcaagctgcagagcacctttgtgtttgaggagattggaagaaggctgaaggacatcggccctgaggtggtgaagaaggtgaatgctgtgtttgagtggcacatcaccaagggcggcaacatcggggccaagtggaccatcgacctgaagagcggcagcggcaaggtgtaccagggccctgccaagggagctgctgacaccaccatcatcctgagtgatgaggacttcatggaggtggtgctgggcaagctggacccccagaaggccttcttcagcggccgcctgaaggcccggggcaacatcatgctgagccagaagctgcagatgatcctgaaggactatgccaagctgtag

SEQ ID NO: 8590 - DNA, 2211 bp, Artificial Sequence
  derived and/or modified sequence
atgggcagccccctgcggttcgacggccgggtggtgctggtgaccggcgcaggcgctgggctgggtagagcttacgcgctggcgttcgccgaacgtggggctctcgtggtcgtcaacgacctgggtggcgattttaagggggtcggaaaggggtcacttgcagctgataaagtcgtagaagaaatccggaggaggggcggaaaagccgtcgccaactatgactccgtcgaggaaggcgagaaggtcgtgaagactgccctggatgcattcggcaggatcgatgtggtggtgaacaacgccggcattctgagggatcgcagctttgcacgcatctcggatgaagattgggacatcatccaccgggtgcacctgcgaggatcttttcaggttaccagggccgcttgggagcacatgaaaaaacagaaatatggccggatcattatgacgagttctgcaagcggtatttacggcaactttggtcaggcaaattactccgctgccaagcttgggctgttaggcctggccaactctctggcaatcgagggcaggaaatcaaatattcactgtaatactattgcccccaatgccggatcacgcatgacacagacggtgatgcccgaagacctggtggaggcactgaagccagaatatgtcgcacccctcgtactctggctgtgtcacgagtcctgtgaggaaaatggtgggctgttcgaggtgggcgcaggctggataggtaagctgcgctgggaaaggacccttggcgcaatcgtcagacagaagaatcaccctatgacacctgaggcggtaaaggctaactggaagaaaatttgtgactttgaaaatgcctcaaagccccagagcattcaggagagtaccggcagcataatcgaagtactctccaagattgattctgaggggggcgtctcagcaaatcacacctctcgggcaaccagcacggcaaccagcggctttgccggagctatagggcagaaactcccacccttcagctatgcatatacagagctggaagctatcatgtacgccttgggtgtgggcgcatcaatcaaagacccgaaggaccttaaatttatctacgaaggaagcagcgatttctcttgtctacctaccttcggtgtgataataggccaaaaatctatgatgggcggaggcctggctgaaataccaggactctctatcaatttcgctaaagtgctccacggggagcaataccttgagctctacaagcctctccctcgcgccgggaagcttaagtgcgaagccgtggtggctgatgtactcgacaagggcagtggcgtggtgataattatggatgtctactcatactcagaaaaagagcttatctgccacaaccagttctcactctttctggtaggctcggggggctttggtggcaaaagaacaagcgataaggtgaaggtcgccgtggccattcccaaccgcccccccgatgctgtactgacagatacgaccagcttaaatcaagcggctctgtatcgcctgtctggcgactggaatccactgcacatagatccaaatttcgcttcactcgcggggtttgataaaccgatactgcacggcttgtgtaccttcgggttctctgcgagaagagtgctgcaacagttcgcagataacgatgtctcccggttcaaagccattaaggccaggttcgctaagcccgtatatcccggtcagacgctccaaacagagatgtggaaggagggcaaccgaatacatttccagaccaaagtgcaagaaaccggagacatcgtgatctccaacgcctacgtggaccttgcgcccactagcggaacatctgctaagactccatctgaaggcggaaaattgcagagcacttttgtgttcgaagaaattggcaggcgactgaaggatattggccccgaggtggttaaaaaagttaacgcagtgtttgagtggcacattactaagggaggaaatattggtgccaagtggacaatcgaccttaagagtggtagtggaaaggtgtaccaggggccagccaagggagcagcagacactaccattatcctgtcagacgaggactttatggaggttgtgctggggaaactagacccgcagaaggccttttttagtggacgactgaaagcccgggggaacatcatgttgtcacagaaattacagatgatcctgaaggattatgcgaaactgtag

SEQ ID NO: 8591 - DNA, 2211 bp, Artificial Sequence
  derived and/or modified sequence
atgggatcaccattgaggtttgatggcagagtggtcctcgtgacaggggctggggcaggcctggggagagcgtatgccttggcttttgctgagagaggagccttggtggttgtcaacgacctggggggtgacttcaaaggggtggggaaaggtagcctcgccgctgataaggtggtggaagagattcgccgtcgaggaggaaaggccgtcgctaattatgatagcgttgaggagggcgaaaaggtcgtaaagactgctctggatgccttcggacgtattgatgtggtggtgaataatgccggtatcctgcgagacagaagttttgctaggatttccgacgaagactgggatattatccatcgggtccatctgcgtgggtcatttcaagtgactagagctgcctgggagcacatgaaaaaacagaaatatggcaggataatcatgacaagctccgccagcggcatttacggcaattttggccaagcaaattactcagctgcaaagctgggattgttaggcctggctaactctctggccatcgaggggaggaaatccaatattcactgcaacacaatcgcccctaacgctggcagtcggatgacccagactgttatgcctgaggatctggtggaggcactgaagccggagtacgtagctcccctcgtcctatggctctgccacgaatcatgcgaggaaaatggtggcctgtttgaggtcggagccggatggatcgggaaattgcgttgggaaaggacgttgggagctatcgttagacaaaagaaccaccccatgacgccggaggctgtaaaggccaactggaaaaagatttgcgatttcgaaaatgcttcaaagcctcaaagtattcaggaaagcacaggcagtattatcgaagtcctgagtaaaatcgattctgaagggggtgtgtcagcaaaccacaccagcagggcaacttctacggcaacctctggctttgcaggagctatcgggcaaaagctgccgccattctcctacgcctatacagaactcgaggccatcatgtacgcactcggagtcggggctagtatcaaggaccccaaggatctgaaatttatatatgaaggtagctctgacttctcgtgtctgcccacctttggtgttataatcggacagaagtccatgatgggaggcggactcgccgagattcccggactctcaattaatttcgcgaaggtcctccatggagaacaatacctggagctttataaacctttgcccagggcaggcaaactgaagtgcgaggcagtggtggcggacgtcctggataaagggtcgggcgtcgtgattatcatggacgtgtattcatactccgagaaggaactgatctgccataatcaatttagtctttttctggtggggagcgggggatttgggggtaagcgcacatccgacaaagtgaaagtcgcagttgctattcccaatcgcccaccagatgccgttctcaccgacacaacctcactgaaccaggctgcgctgtaccggctgtccggggactggaacccactgcacatcgatccaaattttgcctcgttggccggtttcgataagccaatcttgcacgggttgtgcactttcggattctctgccaggagagtcctccagcagtttgcagacaatgatgtgagtcgattcaaagccatcaaagcccgatttgcaaaacccgtgtatccaggccagactctacagaccgaaatgtggaaagaagggaacagaatacattttcagacaaaagtgcaagaaactggggacatcgtgatcagtaacgcttatgtagatcttgcaccaacgagtgggactagcgccaagacaccgtctgaggggggtaagctacagtcaaccttcgtattcgaggaaataggacgacgactaaaggatatcggcccagaggtggtgaaaaaggtgaatgctgtgtttgagtggcacattaccaagggcggaaatatcggggctaaatggaccattgacttgaagtctggatccgggaaggtgtaccaggggccagccaagggcgctgctgataccacaattatcctgtctgatgaggattttatggaggttgtgctgggaaagttagacccccagaaagcatttttttctggacggctcaaggctagaggcaatatcatgctgagtcaaaagttgcaaatgatactgaaggattatgcaaaactatag

SEQ ID NO: 8592 - DNA, 2211 bp, Artificial Sequence
  derived and/or modified sequence
atgggcagccccctgagattcgacggcagagtggtgctggtgaccggcgccggcgccggcctgggcagagcctacgccctggccttcgccgagagaggcgccctggtggtggtgaacgacctgggcggcgacttcaagggcgtgggcaagggcagcctggccgccgacaaggtggtggaggagatcagaagaagaggcggcaaggccgtggccaactacgacagcgtggaggagggcgagaaggtggtgaagaccgccctggacgccttcggcagaatcgacgtggtggtgaacaacgccggcatcctgagagacagaagcttcgccagaatcagcgacgaggactgggacatcatccacagagtgcacctgagaggcagcttccaggtgaccagagccgcctgggagcacatgaagaagcagaagtacggcagaatcatcatgaccagcagcgccagcggcatctacggcaacttcggccaggccaactacagcgccgccaagctgggcctgctgggcctggccaacagcctggccatcgagggcagaaagagcaacatccactgcaacaccatcgcccccaacgccggcagcagaatgacccagaccgtgatgcccgaggacctggtggaggccctgaagcccgagtacgtggcccccctggtgctgtggctgtgccacgagagctgcgaggagaacggcggcctgttcgaggtgggcgccggctggatcggcaagctgagatgggagagaaccctgggcgccatcgtgagacagaagaaccaccccatgacccccgaggccgtgaaggccaactggaagaagatctgcgacttcgagaacgccagcaagccccagagcatccaggagagcaccggcagcatcatcgaggtgctgagcaagatcgacagcgagggcggcgtgagcgccaaccacaccagcagagccaccagcaccgccaccagcggcttcgccggcgccatcggccagaagctgccccccttcagctacgcctacaccgagctggaggccatcatgtacgccctgggcgtgggcgccagcatcaaggaccccaaggacctgaagttcatctacgagggcagcagcgacttcagctgcctgcccaccttcggcgtgatcatcggccagaagagcatgatgggcggcggcctggccgagatccccggcctgagcatcaacttcgccaaggtgctgcacggcgagcagtacctggagctgtacaagcccctgcccagagccggcaagctgaagtgcgaggccgtggtggccgacgtgctggacaagggcagcggcgtggtgatcatcatggacgtgtacagctacagcgagaaggagctgatctgccacaaccagttcagcctgttcctggtgggcagcggcggcttcggcggcaagagaaccagcgacaaggtgaaggtggccgtggccatccccaacagaccccccgacgccgtgctgaccgacaccaccagcctgaaccaggccgccctgtacagactgagcggcgactggaaccccctgcacatcgaccccaacttcgccagcctggccggcttcgacaagcccatcctgcacggcctgtgcaccttcggcttcagcgccagaagagtgctgcagcagttcgccgacaacgacgtgagcagattcaaggccatcaaggccagattcgccaagcccgtgtaccccggccagaccctgcagaccgagatgtggaaggagggcaacagaatccacttccagaccaaggtgcaggagaccggcgacatcgtgatcagcaacgcctacgtggacctggcccccaccagcggcaccagcgccaagacccccagcgagggcggcaagctgcagagcaccttcgtgttcgaggagatcggcagaagactgaaggacatcggccccgaggtggtgaagaaggtgaacgccgtgttcgagtggcacatcaccaagggcggcaacatcggcgccaagtggaccatcgacctgaagagcggcagcggcaaggtgtaccagggccccgccaagggcgccgccgacaccaccatcatcctgagcgacgaggacttcatggaggtggtgctgggcaagctggacccccagaaggccttcttcagcggcagactgaaggccagaggcaacatcatgctgagccagaagctgcagatgatcctgaaggactacgccaagctgtag

SEQ ID NO: 8593 - protein, 89 aa, Artificial Sequence
  derived and/or modified sequence
MGILKLQVFLIVLSVALNHLKATPIESHQVEKRKCNTATCATQRLANFLVHSSNNFGAILSSTNVGSNTYGKRNAVEVLKREPLNYLPL

SEQ ID NO: 8594 - protein, 79 aa, Artificial Sequence
  derived and/or modified sequence
MGILKLQVFLIVLSVALNHLKATPIESHQVEKRKCNTATCATQRLANFLVHSSNNFGAILSSTNVGSNTYGKRNAVEVL

SEQ ID NO: 8595 - DNA, 270 bp, Artificial Sequence
  derived and/or modified sequence
atgggtatcctgaagctacaagtatttctgattgtcttgtctgtagccctgaatcacctgaaagccactcctattgagtcgcatcaagtggagaaacggaaatgtaatacagcgacatgcgccacacagcgcctggcaaactttctggttcatagcagcaacaattttggcgctatcctatccagcacaaacgtaggctctaacacatatggcaagagaaacgctgtggaagtgctaaaacgagagcccctgaactacctacctttgtag

SEQ ID NO: 8596 - DNA, 240 bp, Artificial Sequence
  derived and/or modified sequence
atggggatattaaagctgcaagtcttcctcatcgtgctgtcagtggccttgaaccatttgaaagccacacctatcgaatctcatcaagtcgagaaaagaaagtgtaataccgcaacatgcgcaacccaaagactggcaaactttcttgtgcattcatcaaacaatttcggagcgatactgtcttctacgaatgttggttcaaacacttatggtaaacgtaatgccgtagaagtgttgtag

SEQ ID NO: 8597 - DNA, 270 bp, Artificial Sequence
  derived and/or modified sequence
atgggaattctcaaactgcaggtgtttcttattgtgctctcagttgctctcaatcatttgaaagcaaccccgatagagagccatcaggtcgagaagaggaagtgtaatacagcgacttgcgctacccaaaggctcgccaacttcctcgtgcatagttcaaataattttggagctatcctatcttcaacaaatgtgggcagtaacacttatgggaagagaaatgctgttgaagtgctgaagagagagcccctaaattacttacctctgtag

SEQ ID NO: 8598 - DNA, 1958 bp, Artificial Sequence
  derived and/or modified sequence
gattactagttagcaaatgagggggtaaatattccagtggatacaagcttggactcttttcttgaagctttctttctatcagaagcatttgctgatattgctgacattgaaacattaaaagaaaatttgagaagcaatgggcatcctgaagctgcaagtatttctcattgtgctctctgttgcattgaaccatctgaaagctacacccattgaaagtcatcaggtggaaaagcggaaatgcaacactgccacatgtgcaacgcagcgcctggcaaattttttagttcattccagcaacaactttggtgccattctctcatctaccaacgtgggatccaatacatatggcaagaggaatgcagtagaggttttaaagagagagccactgaattacttgcccctttagaggacaatgtaactctatagttattgttttatgttctagtgatttcctgtataatttaacagtgcccttttcatctccagtgtgaatatatggtctgtgtgtctgatgtttgttgctaggacatataccttctcaaaagattgttttatatgtagtactaactaaggtcccataataaaaagatagtatcttttaaaatgaaatgtttttgctatagatttgtattttaaaacataagaacgtcattttgggacctatatctcagtggcacaggtttaagaacgaaggagaaaaaggtagtttgaaccttggtaaattgtaaacagctaataatgaagttattcttgacatgagaaaatcagtaattggaccaggcgcggtggctcttgcctgtaatcccagcactttgggaggccgaggcaggcagatcacaaggtcaggagttcgagaccagcctgaccaacatggtgaaaccctgtctctactaaaaatacaaaaattagccgggggtggtgacatgtgcctgtaatcccagctactcaggaggctaaggcaggagaatcgcttaaacccaggaggcggaggttgcagtgagccgagattgcaccactgcactccagcctgggtggcagagtgagactcgtctcaaaaaaaagaaagaaaattagtaattgtaagtacccctgataagcaaattagtaattgtcaatacccctgttaagcaattcctttttgcagtatatttctgaaatgacagaatgctgttttaaaaacaaagaaataaaatcctgctcctgactcggtcaaaatattttttaaagtctattgtttgttgtgcttgctggtactaagaggctatttaaaagtataaaactgctttgtatccatgagggtttcattgtgtgttagcagcagtgagcttctattaaatgtatatgtcatttattttgtttaagtggctttcagcaaacctcagtcatattcttatgcagggtattgcgaaacaacttgtgttctattaatcgtgtcttcaattaaaagaccacagacttctggaaactctttgctgtataagaattatttcttttgtttaacaaattagacatttctggcagaggttatgtatatgatacactttttttgatagcagctgcaatgttggacagaagatgaaatgctttgctttgagtcagattcttatgaatatctgcttttccctgactttgagttaggtagctttggaagtagcattaattcagataaactgccatcatgctgcgttatgccatttctaaagacactcaacttgtacttttaaaaaaatagaaaaaataagcatttcaatctaagtggaaatttgactcattgacttacatttctaagttaaaatttccctttatgaagtgtgccttaggttaccaaattgtagaggctttcgttggtggtggtaagtggtagcggtagtgagtgtatagaggcagggaaatatatttataataaattctatgtcatgaattacatattgaaataaataggtgaatatacaaattta

SEQ ID NO: 8599 - DNA, 351 bp, Artificial Sequence
  derived and/or modified sequence
aagcttggactcttttcttgaagctttctttctatcagaagcatttgctgatattgctgacattgaaacattaaaagtgctggattattctttgcagaaaatttgagaagcaatgggcatcctgaagctgcaagtatttctcattgtgctctctgttgcattgaaccatctgaaagctacacccattgaaagtcatcaggtggaaaagcggaaatgcaacactgccacatgtgcaacgcagcgcctggcaaattttttagttcattccagcaacaactttggtgccattctctcatctaccaacgtgggatccaatacatatggcaagaggaatgcagtagaggttttaaa

SEQ ID NO: 8600 - DNA, 409 bp, Artificial Sequence
  derived and/or modified sequence
agctttgcacatctccaggtcagacctatcctaatatctacatctacatttccagaaaatttgagaagcaatgggcatcctgaagctgcaagtatttctcattgtgctctctgttgcattgaaccatctgaaagctacacccattgaaagtcatcaggtggaaaagcggaaatgcaacactgccacatgtgcaacgcagcgcctggcaaattttttagttcattccagcaacaactttggtgccattctctcatctaccaacgtgggatccaatacatatggcaagaggaatgcagtagaggttttaaagagagagccactgaattacttgcccctttagaggacaatgtaactctatagttattgttttatgttctagtgatttcctgtataatttaacagtgccctt

SEQ ID NO: 8601 - DNA, 270 bp, Artificial Sequence
  derived and/or modified sequence
atgggcatcctgaagctgcaggtgttcctgattgtgctgtctgtggccctgaaccacctgaaggccacccccatcgagagccaccaggtggagaagaggaagtgcaacacagccacctgtgccacccagaggctggccaacttcctggtgcacagcagcaacaactttggagccatcctgagcagcaccaacgtgggcagcaacacctacggcaagagaaatgctgtggaggtgctgaagcgggagcccctgaactacctgcccctgtag

SEQ ID NO: 8602 - DNA, 240 bp, Artificial Sequence
  derived and/or modified sequence
atgggcatcctgaagctgcaggtgttcctgattgtgctgtctgtggccctgaaccacctgaaggccacccccatcgagagccaccaggtggagaagaggaagtgcaacacagccacctgtgccacccagaggctggccaacttcctggtgcacagcagcaacaactttggagccatcctgagcagcaccaacgtgggcagcaacacctacggcaagagaaatgctgtggaggtgctgtag

SEQ ID NO: 8603 - DNA, 270 bp, Artificial Sequence
  derived and/or modified sequence
atgggcatcctgaagctgcaggtgttcctgatcgtgctgagcgtggcattaaaccacctgaaggccaccccaatcgagtcacatcaggtcgagaagaggaaatgtaatactgccacctgcgctactcagagactggccaacttcctcgtgcactcctcaaataacttcggggccattctgtctagcaccaacgtcggttcaaacacgtacggtaagcggaacgcagtcgaggttctcaaacgcgaacccttgaattacctgccactgtag

SEQ ID NO: 8604 - DNA, 240 bp, Artificial Sequence
  derived and/or modified sequence
atgggcatcctgaagctgcaggtgttcctgatcgtgctgagcgtggcactcaatcacctgaaagccacaccaatcgagtcccaccaggttgagaagagaaaatgcaatacagccacatgtgcaactcagcgactggcgaatttcctcgttcattccagcaacaacttcggcgccatactgtctagcacaaacgtgggaagcaatacatacggaaagcgtaacgccgtggaggttttatag

SEQ ID NO: 8605 - DNA, 270 bp, Artificial Sequence
  derived and/or modified sequence
atgggcatcctgaagctgcaggtgttcctgatcgtgctgagcgtggcattaaaccatctcaaggctaccccaattgaaagccatcaagtggaaaagagaaagtgcaatacagctacttgtgccacccagagactggctaattttctcgtccactctagtaataattttggggctatcctgtctagcactaatgtagggagcaacacctacgggaaaagaaacgcagtagaagtgctgaagcgagagccacttaattatctgccactgtag

SEQ ID NO: 8606 - DNA, 270 bp, Artificial Sequence
  derived and/or modified sequence
atgggcattctcaagttacaagtattccttatcgttctgtcagtggctctgaatcatttaaaagccactcccatcgagagtcaccaggtggagaaacgtaagtgcaacactgctacttgcgccacacagagactcgcaaacttcctcgtccactctagcaataattttggcgctattttaagctcgacaaatgttggcagcaatacctacggaaagagaaacgcagtcgaagtactaaaacgcgagcctctcaactacctgccgctatag

SEQ ID NO: 8607 - DNA, 240 bp, Artificial Sequence
  derived and/or modified sequence
atggggatcctcaagctgcaggtcttcctcattgtgctgagtgtggctttgaatcatctgaaagctaccccaatcgagtcccatcaggtcgaaaaaagaaagtgcaacactgccacatgtgccacgcaacggctggcgaactttctggttcattcttctaataacttcggggctattctatcgtccaccaacgtcggttccaatacctacgggaagcggaacgccgtggaggtgctgtag

SEQ ID NO: 8608 - DNA, 270 bp, Artificial Sequence
  derived and/or modified sequence
atgggtatccttaaattgcaagtcttccttatcgtcctgtcagtggctttaaaccacctgaaggccacccccatcgagtctcaccaggtagaaaagcgcaaatgtaatactgcgacctgcgccacacaaaggctggcgaattttttagtgcactcgagtaataatttcggggctattctttcttcaaccaatgtgggaagtaacacttatggaaagaggaacgccgtagaggtcctgaagcgggagccattgaattacttacctttgtag

SEQ ID NO: 8609 - DNA, 270 bp, Artificial Sequence
  derived and/or modified sequence
atgggcatcctgaagctgcaggtgttcctgatcgtgctgagcgtggccctgaaccacctgaaggccacccccatcgagagccaccaggtggagaagagaaagtgcaacaccgccacctgcgccacccagagactggccaacttcctggtgcacagcagcaacaacttcggcgccatcctgagcagcaccaacgtgggcagcaacacctacggcaagagaaacgccgtggaggtgctgaagagagagcccctgaactacctgcccctgtag

SEQ ID NO: 8610 - DNA, 240 bp, Artificial Sequence
  derived and/or modified sequence
atgggcatcctgaagctgcaggtgttcctgatcgtgctgagcgtggccctgaaccacctgaaggccacccccatcgagagccaccaggtggagaagagaaagtgcaacaccgccacctgcgccacccagagactggccaacttcctggtgcacagcagcaacaacttcggcgccatcctgagcagcaccaacgtgggcagcaacacctacggcaagagaaacgccgtggaggtgctgtag

SEQ ID NO: 8611 - protein, 489 aa, Artificial Sequence
  derived and/or modified sequence
MALLFLLPLVMQGVSRAEMGTADLGPSSVPTPTNVTIESYNMNPIVYWEYQIMPQVPVFTVEVKNYGVKNSEWIDACINISHHYCNISDHVGDPSNSLWVRVKARVGQKESAYAKSEEFAVCRDGKIGPPKLDIRKEEKQIMIDIFHPSVFVNGDEQEVDYDPETTCYIRVYNVYVRMNGSEIQYKILTQKEDDCDEIQCQLAIPVSSLNSQYCVSAEGVLHVWGVTTEKSKEVCITIFNSSIKGSLWIPVVAALLLFLVLSLVFICFYIKKINPLKEKSIILPKSLISVVRSATLETKPESKYVSLITSYQPFSLEKEVVCEEPLSPATVPGMHTEDNPGKVEHTEELSSITEVVTTEENIPDVVPGSHLTPIERESSSPLSSNQSEPGSIALNSYHSRNCSESDHSRNGFDTDSSCLESHSSLSDSEFPPNNKGEIKTEGQELITVIKAPTSFGYDKPHVLVDLLVDDSGKESLIGYRPTEDSKEFS

SEQ ID NO: 8612 - protein, 274 aa, Artificial Sequence
  derived and/or modified sequence
MALLFLLPLVMQGVSRAEMGTADLGPSSVPTPTNVTIESYNMNPIVYWEYQIMPQVPVFTVEVKNYGVKNSEWIDACINISHHYCNISDHVGDPSNSLWVRVKARVGQKESAYAKSEEFAVCRDGKIGPPKLDIRKEEKQIMIDIFHPSVFVNGDEQEVDYDPETTCYIRVYNVYVRMNGSEIQYKILTQKEDDCDEIQCQLAIPVSSLNSQYCVSAEGVLHVWGVTTEKSKEVCITIFNSSIKGSLWIPVVAALLLFCLAWYSSVFILRKLIH

SEQ ID NO: 8613 - protein, 210 aa, Artificial Sequence
  derived and/or modified sequence
MALLFLLPLVMQGVSRAEMGTADLGPSSVPTPTNVTIESYNMNPIVYWEYQIMPQVPVFTVEVKNYGVKARVGQKESAYAKSEEFAVCRDGKIGPPKLDIRKEEKQIMIDIFHPSVFVNGDEQEVDYDPETTCYIRVYNVYVRMNGSEIQYKILTQKEDDCDEIQCQLAIPVSSLNSQYCVSAEGVLHVWGVTTEKSKEVCITIFNSSIK

SEQ ID NO: 8614 - protein, 461 aa, Artificial Sequence
  derived and/or modified sequence
MPTPTNVTIESYNMNPIVYWEYQIMPQVPVFTVEVKNYGVKNSEWIDACINISHHYCNISDHVGDPSNSLWVRVKARVGQKESAYAKSEEFAVCRDGKIGPPKLDIRKEEKQIMIDIFHPSVFVNGDEQEVDYDPETTCYIRVYNVYVRMNGSEIQYKILTQKEDDCDEIQCQLAIPVSSLNSQYCVSAEGVLHVWGVTTEKSKEVCITIFNSSIKGSLWIPVVAALLLFLVLSLVFICFYIKKINPLKEKSIILPKSLISVVRSATLETKPESKYVSLITSYQPFSLEKEVVCEEPLSPATVPGMHTEDNPGKVEHTEELSSITEVVTTEENIPDVVPGSHLTPIERESSSPLSSNQSEPGSIALNSYHSRNCSESDHSRNGFDTDSSCLESHSSLSDSEFPPNNKGEIKTEGQELITVIKAPTSFGYDKPHVLVDLLVDDSGKESLIGYRPTEDSKEFS

SEQ ID NO: 8615 - DNA, 1470 bp, Artificial Sequence
  derived and/or modified sequence
atggccctgttattcctacttccccttgtcatgcagggcgtctcccgagccgaaatgggcactgcagatctcgggccttctagtgtgcccacgcctactaacgtgaccatcgagtcctacaatatgaaccccatcgtgtattgggagtaccaaatcatgccccaggtcccggtctttaccgtcgaggtcaagaactatggcgtcaaaaattcagaatggatcgacgcatgtatcaacatttcccaccactactgcaacataagtgaccatgtcggcgacccgtcaaatagtctgtgggttagagtcaaagcccgcgttggacaaaaagaatctgcatatgcgaagtcggaagagttcgccgtgtgtagagacgggaaaatagggccccccaaactggacatacgtaaggaggaaaagcagatcatgatcgatatatttcatcccagcgtttttgtcaacggcgacgaacaggaggtagattacgaccccgagaccacctgttatattcgcgtgtataacgtgtatgtgaggatgaatggctctgagatacagtataaaatcttaactcagaaggaggatgattgtgacgagattcagtgtcaattagctattcccgtcagttctctcaacagtcagtactgcgtgtcagccgaaggcgtgctgcatgtttggggtgtcactactgagaagtcgaaagaggtatgcatcacgatcttcaactcatctatcaagggaagtttatggatccctgtcgtggccgccctcttactgtttttggtgctgtcactcgtgtttatctgcttctacatcaagaagatcaatccgttaaaggaaaaatcaattatactgcctaaatccttgatctctgtggtgcgctctgctaccctggaaacaaagcccgagagtaaatacgtgtcgttgattacctcttaccagcccttttccctggagaaagaggtggtctgcgaagaacctttgtcacccgctaccgttcccgggatgcacactgaggataacccaggtaaggtggaacacacggaagagctctcctcgattacagaagtcgtcacgaccgaagaaaatatcccagatgtggttcccggatcccaccttactccgatcgaaagggagagcagtagtccactgtcgtctaaccagagcgagcccgggagtatcgcgcttaattcctatcatagtagaaactgctccgaaagtgatcattcacgtaacggctttgacactgactcctcttgtcttgaaagtcacagtagcctgtccgacagcgaattcccaccaaacaacaaaggcgaaataaagacagagggtcaggagctgatcaccgtgataaaggctccaacttcttttggatatgataagccacacgtactggtggatctacttgtggatgattctggtaaagaatcgctcatcggctaccgccccacagaagactcaaaggagttttcgtag

SEQ ID NO: 8616 - DNA, 825 bp, Artificial Sequence
  derived and/or modified sequence
atggcccttctttttctccttcccctcgtgatgcaaggagtgtcccgggcagaaatgggtaccgccgatctaggaccctccagcgtgccaactcctacaaacgtgactattgagtcatataacatgaatccaattgtgtattgggaataccagattatgccacaggtgccggtgtttaccgtggaggtaaaaaattacggcgtgaagaactctgagtggatcgacgcatgtatcaatatcagtcaccattactgcaacatcagcgatcacgtgggggatcctagtaactcactttgggtgagggtaaaagcccgagtgggacagaaggagtctgcatacgcgaaaagcgaggaattcgccgtgtgcagagatggaaaaataggtccaccgaaactcgacattcggaaagaagaaaagcagatcatgattgatattttccacccatccgtctttgtaaacggagatgagcaggaggtagactatgacccagaaactacctgctacatacgtgtgtacaatgtgtatgtgcgaatgaatggcagcgagatccaatacaaaattctgactcagaaagaggacgactgcgacgaaatacagtgccagttggctattcccgtgtcgtcattgaattctcagtactgtgtgagcgccgaaggcgtgcttcacgtgtggggggttactactgagaagtccaaagaagtctgcatcactatctttaattccagcataaaaggctccctgtggataccagtggtggctgccctcctgctcttctgcttggcctggtactccagtgtttttattctgcggaaactgatccattag

SEQ ID NO: 8617 - DNA, 633 bp, Artificial Sequence
  derived and/or modified sequence
atggctcttctttttctgctccctctggtgatgcagggggtgtcgcgcgccgaaatggggaccgctgatcttggaccatcttctgtccctacgccgacaaacgttaccatagaaagttacaacatgaaccctatcgtttactgggagtaccagattatgcctcaggttcctgtgttcaccgtggaggtcaagaactatggcgttaaggcccgcgttggccagaaggaaagcgcgtacgccaagagcgaagagttcgcggtgtgcagagatgggaagattggaccccccaagctggatattaggaaggaagagaagcaaatcatgattgacatcttccatccatcagttttcgtgaacggtgacgaacaagaagtggattacgaccccgaaacaacatgttatatccgggtatacaatgtgtacgtgaggatgaatggcagtgaaatccaatacaagattctgacgcaaaaagaggatgactgtgacgagattcagtgccaattagcaatcccggtctctagcttgaattcgcagtattgtgtttccgcggagggagtgcttcacgtgtggggggtgactacagaaaaaagtaaagaggtgtgcattacaatattcaactcaagcatcaaatag

SEQ ID NO: 8618 - DNA, 2139 bp, Artificial Sequence
  derived and/or modified sequence
gcctcctgccgacgccggcacagaccccggtgacggaagtgacgtaaggccggggctggagggcagtgctgggctggtcccgcaggcgctcggggttggagccagcgaccgtcggtagcagcatggctctcctctttctcctaccccttgtcatgcagggtgtgagcagggctgagatgggcaccgcggatctggggccgtcctcagtgcctacaccaactaatgttacaattgaatcctataacatgaaccctatcgtatattgggagtaccagatcatgccacaggtccctgtttttaccgtagaggtaaagaactatggtgttaagaattcagaatggattgatgcctgcatcaatatttctcatcattattgtaatatttctgatcatgttggtgatccatcaaattctctttgggtcagagttaaagccagggttggacaaaaagaatctgcctatgcaaagtcagaagaatttgctgtatgccgagatggaaaaattggaccacctaaactggatatcagaaaggaggagaagcaaatcatgattgacatatttcacccttcagtttttgtaaatggagacgagcaggaagtcgattatgatcccgaaactacctgttacattagggtgtacaatgtgtatgtgagaatgaacggaagtgagatccagtataaaatactcacgcagaaggaagatgattgtgacgagattcagtgccagttagcgattccagtatcctcactgaattctcagtactgtgtttcagcagaaggagtcttacatgtgtggggtgttacaactgaaaagtcaaaagaagtttgtattaccattttcaatagcagtataaaaggttctctttggattccagttgttgctgctttactactctttctagtgcttagcctggtattcatctgtttttatattaagaaaattaatccattgaaggaaaaaagcataatattacccaagtccttgatctctgtggtaagaagtgctactttagagacaaaacctgaatcaaaatatgtatcactcatcacgtcataccagccattttccttagaaaaggaggtggtctgtgaagagccgttgtctccagcaacagttccaggcatgcataccgaagacaatccaggaaaagtggaacatacagaagaactttctagtataacagaagtggtgactactgaagaaaatattcctgacgtggtcccgggcagccatctgactccaatagagagagagagttcttcacctttaagtagtaaccagtctgaacctggcagcatcgctttaaactcgtatcactccagaaattgttctgagagtgatcactccagaaatggttttgatactgattccagctgtctggaatcacatagctccttatctgactcagaatttcccccaaataataaaggtgaaataaaaacagaaggacaagagctcataaccgtaataaaagcccccacctcctttggttatgataaaccacatgtgctagtggatctacttgtggatgatagcggtaaagagtccttgattggttatagaccaacagaagattccaaagaattttcatgagatcagctaagttgcaccaactttgaagtctgattttcctggacagttttctgctttaatttcatgaaaagattatgatctcagaaattgtatcttagttggtatcaaccaaatggagtgacttagtgtacatgaaagcgtaaagaggatgtgtggcattttcacttttggcttgtaaagtacagacttttttttttttttaaacaaaaaaagcattgtaacttatgaacctttacatccagataggttaccagtaacggaacagtatccagtactcctggttcctaggtgagcaggtgatgccccagggacctttgtagccacttcactttttttcttttctctgccttggtatagcatatgtttttgtaagtttatgcatacagtaattttaagtaatttcagaagaaattctgcaagcttttcaaaattggacttaaaatctaattcaaactaatagaattaatggaatatgtaaatagaaacgtgtatattttttatgaaacattacagttagagatttttaaataaagaattttaaaactcg

SEQ ID NO: 8619 - DNA, 2055 bp, Artificial Sequence
  derived and/or modified sequence
ccgcaggcgctcggggttggagccagcgaccgtcggtagcagcatggctctcctctttctcctaccccttgtcatgcagggtgtgagcagggctgagatgggcaccgcggatctggggccgtcctcagtgcctacaccaactaatgttacaattgaatcctataacatgaaccctatcgtatattgggagtaccagatcatgccacaggtccctgtttttaccgtagaggtaaagaactatggtgttaagaattcagaatggattgatgcctgcatcaatatttctcatcattattgtaatatttctgatcatgttggtgatccatcaaattctctttgggtcagagttaaagccagggttggacaaaaagaatctgcctatgcaaagtcagaagaatttgctgtatgccgagatggaaaaattggaccacctaaactggatatcagaaaggaggagaagcaaatcatgattgacatatttcacccttcagtttttgtaaatggagacgagcaggaagtcgattatgatcccgaaactacctgttacattagggtgtacaatgtgtatgtgagaatgaacggaagtgagatccagtataaaatactcacgcagaaggaagatgattgtgacgagattcagtgccagttagcgattccagtatcctcactgaattctcagtactgtgtttcagcagaaggagtcttacatgtgtggggtgttacaactgaaaagtcaaaagaagtttgtattaccattttcaatagcagtataaaaggttctctttggattccagttgttgctgctttactactcttttgcttagcctggtattcatctgtttttatattaagaaaattaatccattgaaggaaaaaagcataatattacccaagtccttgatctctgtggtaagaagtgctactttagagacaaaacctgaatcaaaatatgtatcactcatcacgtcataccagccattttccttagaaaaggaggtggtctgtgaagagccgttgtctccagcaacagttccaggcatgcataccgaagacaatccaggaaaagtggaacatacagaagaactttctagtataacagaagtggtgactactgaagaaaatattcctgacgtggtcccgggcagccatctgactccaatagagagagagagttcttcacctttaagtagtaaccagtctgaacctggcagcatcgctttaaactcgtatcactccagaaattgttctgagagtgatcactccagaaatggttttgatactgattccagctgtctggaatcacatagctccttatctgactcagaatttcccccaaataataaaggtgaaataaaaacagaaggacaagagctcataaccgtaataaaagcccccacctcctttggttatgataaaccacatgtgctagtggatctacttgtggatgatagcggtaaagagtccttgattggttatagaccaacagaagattccaaagaattttcatgagatcagctaagttgcaccaactttgaagtctgattttcctggacagttttctgctttaatttcatgaaaagattatgatctcagaaattgtatcttagttggtatcaaccaaatggagtgacttagtgtacatgaaagcgtaaagaggatgtgtggcattttcacttttggcttgtaaagtacagacttttttttttttttaaacaaaaaaagcattgtaacttatgaacctttacatccagataggttaccagtaacggaacagtatccagtactcctggttcctaggtgagcaggtgatgccccagggacctttgtagccacttcactttttttcttttctctgccttggtatagcatatgtttttgtaagtttatgcatacagtaattttaagtaatttcagaagaaattctgcaagcttttcaaaattggacttaaaatctaattcaaactaatagaattaatggaatatgtaaatagaaacgtgtatattttttatgaaacattacagttagagatttttaaataaagaattttaaaactc

SEQ ID NO: 8620 - DNA, 753 bp, Artificial Sequence
  derived and/or modified sequence
gcctcctgccgacgccggcacagaccccggtgacggaagtgacgtaaggccggggctggagggcagtgctgggctggtcccgcaggcgctcggggttggagccagcgaccgtcggtagcagcatggctctcctctttctcctaccccttgtcatgcagggtgtgagcagggctgagatgggcaccgcggatctggggccgtcctcagtgcctacaccaactaatgttacaattgaatcctataacatgaaccctatcgtatattgggagtaccagatcatgccacaggtccctgtttttaccgtagaggtaaagaactatggagttaaagccagggttggacaaaaagaatctgcctatgcaaagtcagaagaatttgctgtatgccgagatggaaaaattggaccacctaaactggatatcagaaaggaggagaagcaaatcatgattgacatatttcacccttcagtttttgtaaatggagacgagcaggaagtcgattatgatcccgaaactacctgttacattagggtgtacaatgtgtatgtgagaatgaacggaagtgagatccagtataaaatactcacgcagaaggaagatgattgtgacgagattcagtgccagttagcgattccagtatcctcactgaattctcagtactgtgtttcagcagaaggagtcttacatgtgtggggtgttacaactgaaaagtcaaaagaagtttgtattaccattttcaatagcagtataaaag

SEQ ID NO: 8621 - DNA, 1470 bp, Artificial Sequence
  derived and/or modified sequence
atggccctgctcttcctgctgcccctggtgatgcagggcgtgtccagagctgagatgggcacagctgacctgggccccagctctgtgcccacccccaccaacgtgaccatcgagagctacaacatgaaccccatcgtgtactgggagtaccagatcatgccccaggtgcctgtgttcaccgtggaggtgaagaactacggcgtgaagaacagcgagtggattgatgcctgcatcaacatcagccaccactactgcaacatcagtgaccacgtgggggaccccagcaacagcctgtgggtgcgggtgaaggcccgggtgggccagaaggagagcgcctatgccaagtctgaggagtttgctgtgtgcagagatggcaagattggcccccccaagctggacatcaggaaggaggagaagcagatcatgattgacatcttccaccccagcgtgtttgtgaatggagatgagcaggaggtggactatgaccctgagaccacctgctacatccgggtgtacaacgtgtatgtgaggatgaatggaagtgagatccagtacaagatcctgacccagaaggaggatgactgtgatgagatccagtgccagctggccatccctgtgagcagcctgaacagccagtactgtgtgtctgctgagggcgtgctgcacgtgtggggcgtgaccacagagaagagcaaggaggtgtgcatcaccatcttcaacagcagcatcaagggcagcctgtggatccctgtggtggccgccctgctgctcttcctggtgctgagcctggtgttcatctgcttctacatcaagaagatcaaccccctgaaggagaagagcatcatcctgcccaagagcctcatctctgtggtgcgcagcgccaccctggagaccaagccagagagcaaatatgtgtccctcatcaccagctaccagcccttcagcctggagaaggaggtggtgtgtgaggagcccctgagccctgccaccgtgcccggcatgcacacagaggacaaccctgggaaggtggagcacacagaggagctgagcagcatcacagaggtggtgaccacagaggagaacatcccagatgtggtgcccggcagccacctgacccccatcgagcgggagagcagcagccccctgagcagcaaccagagcgagcccggcagcatcgccctgaacagctaccacagcaggaactgcagcgagagtgaccacagcagaaatggatttgacacagacagcagctgcctggagagccacagcagcctgagtgacagcgagttcccccccaacaacaagggggagatcaagacagagggccaggagctgatcaccgtcatcaaggcccccaccagctttggctatgacaagccccacgtgctggtggacctgctggtggatgattctgggaaggagagcctgattggctaccggcccacagaggacagcaaggagttctcctag

SEQ ID NO: 8622 - DNA, 825 bp, Artificial Sequence
  derived and/or modified sequence
atggccctgctcttcctgctgcccctggtgatgcagggcgtgtccagagctgagatgggcacagctgacctgggccccagctctgtgcccacccccaccaacgtgaccatcgagagctacaacatgaaccccatcgtgtactgggagtaccagatcatgccccaggtgcctgtgttcaccgtggaggtgaagaactacggcgtgaagaacagcgagtggattgatgcctgcatcaacatcagccaccactactgcaacatcagtgaccacgtgggggaccccagcaacagcctgtgggtgcgggtgaaggcccgggtgggccagaaggagagcgcctatgccaagtctgaggagtttgctgtgtgcagagatggcaagattggcccccccaagctggacatcaggaaggaggagaagcagatcatgattgacatcttccaccccagcgtgtttgtgaatggagatgagcaggaggtggactatgaccctgagaccacctgctacatccgggtgtacaacgtgtatgtgaggatgaatggaagtgagatccagtacaagatcctgacccagaaggaggatgactgtgatgagatccagtgccagctggccatccctgtgagcagcctgaacagccagtactgtgtgtctgctgagggcgtgctgcacgtgtggggcgtgaccacagagaagagcaaggaggtgtgcatcaccatcttcaacagcagcatcaagggcagcctgtggatccctgtggtggccgccctgctgctcttctgcctggcctggtacagctctgtgttcatcctgaggaagctgatccactag

SEQ ID NO: 8623 - DNA, 633 bp, Artificial Sequence
  derived and/or modified sequence
atggccctgctcttcctgctgcccctggtgatgcagggcgtgtccagagctgagatgggcacagctgacctgggccccagctctgtgcccacccccaccaacgtgaccatcgagagctacaacatgaaccccatcgtgtactgggagtaccagatcatgccccaggtgcctgtgttcaccgtggaggtgaagaactacggcgtgaaggcccgggtgggccagaaggagagcgcctatgccaagtctgaggagtttgctgtgtgcagagatggcaagattggcccccccaagctggacatcaggaaggaggagaagcagatcatgattgacatcttccaccccagcgtgtttgtgaatggagatgagcaggaggtggactatgaccctgagaccacctgctacatccgggtgtacaacgtgtatgtgaggatgaatggaagtgagatccagtacaagatcctgacccagaaggaggatgactgtgatgagatccagtgccagctggccatccctgtgagcagcctgaacagccagtactgtgtgtctgctgagggcgtgctgcacgtgtggggcgtgaccacagagaagagcaaggaggtgtgcatcaccatcttcaacagcagcatcaagtag

SEQ ID NO: 8624 - DNA, 1470 bp, Artificial Sequence
  derived and/or modified sequence
atggccctgctgttcctgctgcccctggtgatgcagggcgtgagccgcgccgagatgggcaccgcagatctgggacctagttctgtgcctactcccactaatgtcactattgagagctataacatgaacccaatcgtgtactgggagtaccaaataatgccccaagtgccggtattcaccgttgaagttaagaactacggagtcaagaacagcgagtggatagacgcttgcatcaacattagccaccactactgcaatatttcagatcacgtcggggatccatcaaactccctgtgggtgcgagtcaaagcccgggttggccagaaagagtccgcctatgcaaaaagtgaggaattcgctgtgtgtagagatgggaagatcggacctccaaagcttgacatacgcaaggaggaaaagcagatcatgatagacatctttcacccgagcgtgttcgtgaacggggatgagcaggaagtggattatgaccccgagaccacgtgttacataagggtgtataacgtatatgtccgcatgaacggatccgagattcagtataaaattctgacacagaaggaggatgattgcgatgaaattcagtgtcagctggcaatacctgtctcctccctgaattcacagtactgtgtttcagcggaaggcgtacttcacgtctggggtgtgaccactgagaagagcaaagaggtatgcatcacgatatttaatagctctataaagggatccctgtggattccagtcgtggctgcacttctgctgtttttggttctgtcactggtgttcatttgcttttatattaagaaaatcaacccattaaaggagaagtctatcatcctgcctaagagcctcatatccgtagtgagatccgcaaccctagagaccaagcccgagagcaagtacgtatcccttatcacgtcctaccagcccttcagcctggaaaaggaggtggtttgtgaagaacctctgtcccccgccaccgtgcccggcatgcataccgaagacaaccctggcaaagtggagcatacagaggaactcagtagcataactgaggttgtgaccactgaggagaacattccagatgtggtgcctggcagccatctcactccaattgaacgagagagtagcagtcccctatcttctaatcaatccgaaccaggatctattgccctcaattcctaccattctaggaactgctcagagtctgatcactcccgaaatggcttcgatacagatagctcttgtctggaaagccacagctccctgtccgatagtgaatttccccccaataacaaaggcgaaatcaagaccgaggggcaggaacttataaccgtaatcaaggcccccactagcttcggttacgacaagcctcacgtcctcgttgatctgttggtcgacgactcaggaaaggaatccttaataggttacagacccacagaagacagcaaagaattcagctag

SEQ ID NO: 8625 - DNA, 825 bp, Artificial Sequence
  derived and/or modified sequence
atggccctgctgttcctgctgcccctggtgatgcagggcgtgagcagagcagaaatgggcaccgcggacctggggccttccagtgtgcctaccccaactaacgtgaccattgagtcctataatatgaatcctattgtgtactgggagtatcagattatgcctcaggtgcctgtgtttacggtggaagttaagaactatggggtgaagaactctgagtggatcgacgcatgtatcaacatctcccaccattactgtaacatttctgaccacgtcggcgacccatccaatagtttgtgggttcgagtgaaggcccgggtgggccagaaagagtcagcttatgccaagagcgaagagtttgccgtgtgtagggatgggaaaatcggacctccaaaattagacattaggaaagaggagaagcaaatcatgatcgacatatttcaccctagcgtcttcgtcaacggagatgagcaggaagtagattatgacccagaaactacttgttacatcagggtatataatgtttatgtcagaatgaacggtagcgagatccaatacaagatcctgacccaaaaagaggatgactgtgacgagatacagtgtcagctggccattccggtttcatcattgaacagtcagtactgcgtttctgcagaaggcgtgctgcacgtctggggcgtgaccactgagaagagcaaggaagtgtgtatcactatcttcaactcctcaataaagggctccttatggatccctgtggttgccgctctgcttcttttctgtctggcttggtattcgtccgtgtttatcctgcgaaagctgattcactag

SEQ ID NO: 8626 - DNA, 633 bp, Artificial Sequence
  derived and/or modified sequence
atggccctgctgttcctgctgcccctggtgatgcagggcgtgagccgagctgagatgggtactgcggatctggggccttcttccgtccccacccccacaaatgtaacaatcgagtcctacaacatgaatcccattgtgtattgggagtaccagatcatgccacaggtgcctgtgttcaccgtagaggtgaagaattatggtgtgaaggcccgggtgggccagaaggagtcagcttacgcaaaaagcgaggaatttgctgtgtgccgcgacggcaaaatcggtccccctaaactggatattaggaaagaggagaagcagattatgatcgatatattccaccctagtgtcttcgtaaatggcgatgagcaggaagtggactacgatccagagactacatgttatatcagagtctataatgtttacgtgcggatgaatggcagtgagattcagtacaaaattctcacgcagaaagaggacgattgtgacgagatccagtgtcaactggctatccccgtatccagtctcaacagccaatattgtgtgtccgccgagggagtgctgcatgtttggggggtgacgactgagaagtctaaagaagtttgtattacaatttttaacagcagcataaaatag

SEQ ID NO: 8627 - DNA, 1470 bp, Artificial Sequence
  derived and/or modified sequence
atggccttgctgtttttattacctttagtgatgcaaggcgtctccagggcagagatgggcacagccgacctgggaccatctagcgtcccaaccccaacaaatgtgacgattgagtcttacaacatgaacccaatcgtctattgggagtaccagataatgcctcaagtacctgtgttcactgtggaggtcaaaaactatggtgtgaaaaatagtgaatggatagatgcctgcataaatatctctcaccactattgtaacattagtgaccacgtaggggatcctagcaactcattgtgggtcagagtcaaagcacgagtaggacagaaagaatccgcttacgctaaatcagaggagttcgccgtctgcagggacggcaagatcggccctccgaaactggacatccgaaaggaggagaagcagataatgattgatatttttcacccgagtgtattcgtgaacggagatgaacaggaagtggactacgacccggaaacaacctgttatataagagtttacaacgtctatgtgaggatgaatggaagcgagatccagtacaagatattgacacagaaggaggacgattgcgacgagatccaatgccagctggccatccccgtgtcatcgctaaattcgcagtattgtgtatctgccgaaggcgtgcttcacgtttggggagtgaccactgagaagagcaaagaggtctgtatcactattttcaatagttcaatcaaaggctctttgtggattccggtggtggcagctcttttgctctttctggtgttatcccttgtattcatttgcttctacatcaaaaagataaatccgttgaaggagaagagcataatcctgccgaagtccctcatttctgtcgttcggagcgctactctggaaaccaagcctgagtcaaagtacgtttccttgataacaagctatcagcccttctcgctggaaaaagaagtggtatgtgaagagcccctctctcccgcaaccgtgcccggtatgcacaccgaagacaaccctggaaaggtcgagcataccgaggaactttcctctatcacagaagtggtgaccacagaggagaatatccccgatgtagtgcctgggagtcacctcaccccaatcgagcgggagagctcgtcaccccttagctctaatcagtcagagccagggtcaatcgcattgaattcatatcattcacgcaactgctccgagtccgatcatagcagaaatggcttcgataccgactctagttgcctggaaagccacagttcactgtccgactccgaattcccaccaaacaataagggggaaattaaaacagagggccaggagttgataaccgtgatcaaggcccctacctcgtttggatatgacaaaccccatgtgctcgtagatttgttagtagacgattctggcaaagagtctttgatcggatatagacccacagaggattcaaaggagttttcatag

SEQ ID NO: 8628 - DNA, 825 bp, Artificial Sequence
  derived and/or modified sequence
atggctcttctgtttcttctgcccttggttatgcaaggcgtctctagagcggagatgggcacggccgacctcggtccttccagcgtgccgaccccaacaaacgtgactatcgagtcttataatatgaaccctatagtgtactgggaataccaaattatgccacaggtccctgtattcactgtggaggtgaaaaactatggcgtaaaaaactccgagtggatagatgcttgcataaacataagtcatcattactgtaacattagcgatcatgttggcgacccgtctaatagtctctgggtgcgagtcaaagccagggtaggacagaaagagagtgcctacgccaagtcggaggagttcgcagtctgtcgtgacggaaaaatcggccctccaaaattagatatccgcaaagaggaaaagcagatcatgatagacatttttcacccctcggtgtttgtgaacggagacgagcaggaggtggactatgatcccgagactacctgctacattcgggtctacaacgtctacgtacgaatgaacggatccgaaatccaatacaagatcttgacccagaaggaggatgactgcgacgagatccagtgccaactggccattcccgtctcaagcctgaacagccagtattgcgtctcagccgagggggtcctacatgtatggggggtgactacggagaagagtaaggaagtttgcatcacgatctttaatagtagcatcaaaggaagcctgtggataccagtggtggccgctctgcttctcttctgtcttgcctggtattcctctgtctttatcctgcgcaagttgattcactag

SEQ ID NO: 8629 - DNA, 633 bp, Artificial Sequence
  derived and/or modified sequence
atggcactccttttcctactgcccttagtgatgcaaggcgtttcccgcgctgagatgggcaccgccgatctggggccttcttctgtacccacaccaacaaatgtgacaatagagtcttacaacatgaaccctatagtttactgggagtaccagataatgccccaggtgcccgtctttaccgttgaggtaaaaaattatggagtgaaggcacgtgtcgggcaaaaggagtctgcctacgctaagtctgaggagtttgccgtgtgtcgcgatgggaagatcggcccaccaaagctcgatatccgtaaggaggaaaagcagattatgatcgatatctttcacccctcagtgttcgtgaacggagacgaacaggaggtagattatgaccccgagaccacctgttatattagagtttataacgtatatgtccgaatgaatgggagtgaaatccagtacaagatactcactcagaaagaagatgactgcgacgaaatccagtgccagctcgcgattcccgtgagcagccttaactcccaatactgcgtgagcgcagaaggcgtgctgcatgtttggggggttaccaccgagaaatcgaaggaagtatgtattacgatcttcaactccagtattaagtag

SEQ ID NO: 8630 - DNA, 1470 bp, Artificial Sequence
  derived and/or modified sequence
atggccctgctgttcctgctgcccctggtgatgcagggcgtgagcagagccgagatgggcaccgccgacctgggccccagcagcgtgcccacccccaccaacgtgaccatcgagagctacaacatgaaccccatcgtgtactgggagtaccagatcatgccccaggtgcccgtgttcaccgtggaggtgaagaactacggcgtgaagaacagcgagtggatcgacgcctgcatcaacatcagccaccactactgcaacatcagcgaccacgtgggcgaccccagcaacagcctgtgggtgagagtgaaggccagagtgggccagaaggagagcgcctacgccaagagcgaggagttcgccgtgtgcagagacggcaagatcggcccccccaagctggacatcagaaaggaggagaagcagatcatgatcgacatcttccaccccagcgtgttcgtgaacggcgacgagcaggaggtggactacgaccccgagaccacctgctacatcagagtgtacaacgtgtacgtgagaatgaacggcagcgagatccagtacaagatcctgacccagaaggaggacgactgcgacgagatccagtgccagctggccatccccgtgagcagcctgaacagccagtactgcgtgagcgccgagggcgtgctgcacgtgtggggcgtgaccaccgagaagagcaaggaggtgtgcatcaccatcttcaacagcagcatcaagggcagcctgtggatccccgtggtggccgccctgctgctgttcctggtgctgagcctggtgttcatctgcttctacatcaagaagatcaaccccctgaaggagaagagcatcatcctgcccaagagcctgatcagcgtggtgagaagcgccaccctggagaccaagcccgagagcaagtacgtgagcctgatcaccagctaccagcccttcagcctggagaaggaggtggtgtgcgaggagcccctgagccccgccaccgtgcccggcatgcacaccgaggacaaccccggcaaggtggagcacaccgaggagctgagcagcatcaccgaggtggtgaccaccgaggagaacatccccgacgtggtgcccggcagccacctgacccccatcgagagagagagcagcagccccctgagcagcaaccagagcgagcccggcagcatcgccctgaacagctaccacagcagaaactgcagcgagagcgaccacagcagaaacggcttcgacaccgacagcagctgcctggagagccacagcagcctgagcgacagcgagttcccccccaacaacaagggcgagatcaagaccgagggccaggagctgatcaccgtgatcaaggcccccaccagcttcggctacgacaagccccacgtgctggtggacctgctggtggacgacagcggcaaggagagcctgatcggctacagacccaccgaggacagcaaggagttcagctag

SEQ ID NO: 8631 - DNA, 825 bp, Artificial Sequence
  derived and/or modified sequence
atggccctgctgttcctgctgcccctggtgatgcagggcgtgagcagagccgagatgggcaccgccgacctgggccccagcagcgtgcccacccccaccaacgtgaccatcgagagctacaacatgaaccccatcgtgtactgggagtaccagatcatgccccaggtgcccgtgttcaccgtggaggtgaagaactacggcgtgaagaacagcgagtggatcgacgcctgcatcaacatcagccaccactactgcaacatcagcgaccacgtgggcgaccccagcaacagcctgtgggtgagagtgaaggccagagtgggccagaaggagagcgcctacgccaagagcgaggagttcgccgtgtgcagagacggcaagatcggcccccccaagctggacatcagaaaggaggagaagcagatcatgatcgacatcttccaccccagcgtgttcgtgaacggcgacgagcaggaggtggactacgaccccgagaccacctgctacatcagagtgtacaacgtgtacgtgagaatgaacggcagcgagatccagtacaagatcctgacccagaaggaggacgactgcgacgagatccagtgccagctggccatccccgtgagcagcctgaacagccagtactgcgtgagcgccgagggcgtgctgcacgtgtggggcgtgaccaccgagaagagcaaggaggtgtgcatcaccatcttcaacagcagcatcaagggcagcctgtggatccccgtggtggccgccctgctgctgttctgcctggcctggtacagcagcgtgttcatcctgagaaagctgatccactag

SEQ ID NO: 8632 - DNA, 633 bp, Artificial Sequence
  derived and/or modified sequence
atggccctgctgttcctgctgcccctggtgatgcagggcgtgagcagagccgagatgggcaccgccgacctgggccccagcagcgtgcccacccccaccaacgtgaccatcgagagctacaacatgaaccccatcgtgtactgggagtaccagatcatgccccaggtgcccgtgttcaccgtggaggtgaagaactacggcgtgaaggccagagtgggccagaaggagagcgcctacgccaagagcgaggagttcgccgtgtgcagagacggcaagatcggcccccccaagctggacatcagaaaggaggagaagcagatcatgatcgacatcttccaccccagcgtgttcgtgaacggcgacgagcaggaggtggactacgaccccgagaccacctgctacatcagagtgtacaacgtgtacgtgagaatgaacggcagcgagatccagtacaagatcctgacccagaaggaggacgactgcgacgagatccagtgccagctggccatccccgtgagcagcctgaacagccagtactgcgtgagcgccgagggcgtgctgcacgtgtggggcgtgaccaccgagaagagcaaggaggtgtgcatcaccatcttcaacagcagcatcaagtag

SEQ ID NO: 8633 - protein, 263 aa, Artificial Sequence
  derived and/or modified sequence
MDSYLLMWGLLTFIMVPGCQAELCDDDPPEIPHATFKAMAYKEGTMLNCECKRGFRRIKSGSLYMLCTGNSSHSSWDNQCQCTSSATRNTTKQVTPQPEEQKERKTTEMQSPMQPVDQASLPGHCREPPPWENEATERIYHFVVGQMVYYQCVQGYRALHRGPAESVCKMTHGKTRWTQPQLICTGEEKPQASPEGRPESETSCLVTTTDFQIQTEMAATMETSIFTTEYQVAVAGCVFLLISVLLLSGLTWQRRQRKSRRTI

SEQ ID NO: 8634 - protein, 272 aa, Artificial Sequence
  derived and/or modified sequence
MDSYLLMWGLLTFIMVPGCQAELCDDDPPEIPHATFKAMAYKEGTMLNCECKRGFRRIKSGSLYMLCTGNSSHSSWDNQCQCTSSATRNTTKQVTPQPEEQKERKTTEMQSPMQPVDQASLPGHCREPPPWENEATERIYHFVVGQMVYYQCVQGYRALHRGPAESVCKMTHGKTRWTQPQLICTGEMETSQFPGEEKPQASPEGRPESETSCLVTTTDFQIQTEMAATMETSIFTTEYQVAVAGCVFLLISVLLLSGLTWQRRQRKSRRTI

SEQ ID NO: 8635 - DNA, 792 bp, Artificial Sequence
  derived and/or modified sequence
atggactcttatttactaatgtggggcctgctgactttcattatggtgcccggttgccaagcagaactgtgcgacgacgatcctcccgagatccctcacgcaaccttcaaggccatggcctacaaggaagggacgatgcttaactgcgaatgcaagcggggtttccgcagaataaagagcggcagcttgtatatgctatgtaccggaaacagctcccatagctcttgggataaccagtgccagtgtacttcctcagctactcgaaatactactaagcaggtgacacctcaaccagaagaacagaaggagcggaaaacgaccgagatgcaaagcccgatgcagcccgtggaccaagccagtctgccaggccactgtcgcgagccccccccgtgggagaacgaagctaccgaaagaatttatcattttgtggtgggtcagatggtgtattaccagtgcgtgcaggggtacagagcccttcaccgcggaccagcagagagcgtgtgcaagatgactcatggcaagacgcgatggacacagccccagctcatttgtacaggtgaagaaaagcctcaggcttccccggaaggacggcctgaatctgagacgtcttgtcttgtcacaacaactgactttcagatacagaccgagatggccgccacaatggaaaccagcatatttaccactgaatatcaggtggcagtagctggctgcgtcttcctgcttatctcagtcctgctactcagtggtctcacctggcagagaaggcaaaggaaatcaagacgtacgatttag

SEQ ID NO: 8636 - DNA, 819 bp, Artificial Sequence
  derived and/or modified sequence
atggattcttatctgctcatgtggggtctcctgacatttatcatggttcccggctgccaggccgagttgtgcgacgacgatccacccgagattccccacgcaacctttaaagctatggcatataaggaaggcaccatgctcaattgtgaatgcaagcgcgggttcaggaggatcaaatccggaagcctgtacatgctttgcacggggaacagttctcattccagctgggacaaccagtgccagtgtacttccagtgccacaaggaacaccacaaaacaggtcaccccccagccagaggagcaaaaggagcgaaagacaacagagatgcagagtcccatgcagcccgttgatcaggcatctttgcccgggcactgccgagagccaccgccctgggaaaatgaggccacggaacgtatttatcacttcgttgtggggcagatggtatattatcagtgcgtgcaaggctatagggctctgcaccgaggccccgccgaaagtgtttgtaagatgactcacggaaagacacggtggacacagccgcagctgatatgtaccggcgagatggagacatcacagttccccggggaagaaaagccacaggcttcgcccgaaggcaggccagagagtgagacatcgtgtctggtcactactacagattttcagatccagacagagatggctgcaacaatggagacttctatattcacaaccgagtatcaagttgccgtggctggttgcgtctttctcttgatttctgtactgctgttatccggactgacttggcagagaaggcagaggaagtcacgccgaaccatatag

SEQ ID NO: 8637 - DNA, 1006 bp, Artificial Sequence
  derived and/or modified sequence
aagggtgacagcccaggcggaccgatcttcccatcccacatcctccggcgcgatgccaaaaagaggctgacggcaactgggccttctgcagagaaagacctccgcttcactgccccggctggtcccaagggtcaggaagatggattcatacctgctgatgtggggactgctcacgttcatcatggtgcctggctgccaggcagagctctgtgacgatgacccgccagagatcccacacgccacattcaaagccatggcctacaaggaaggaaccatgttgaactgtgaatgcaagagaggtttccgcagaataaaaagcgggtcactctatatgctctgtacaggaaactctagccactcgtcctgggacaaccaatgtcaatgcacaagctctgccactcggaacacaacgaaacaagtgacacctcaacctgaagaacagaaagaaaggaaaaccacagaaatgcaaagtccaatgcagccagtggaccaagcgagccttccaggtcactgcagggaacctccaccatgggaaaatgaagccacagagagaatttatcatttcgtggtggggcagatggtttattatcagtgcgtccagggatacagggctctacacagaggtcctgctgagagcgtctgcaaaatgacccacgggaagacaaggtggacccagccccagctcatatgcacaggtgaagagaagcctcaggcaagccccgaaggccgtcctgagagtgagacttcctgcctcgtcacaacaacagattttcaaatacagacagaaatggctgcaaccatggagacgtccatatttacaacagagtaccaggtagcagtggccggctgtgttttcctgctgatcagcgtcctcctcctgagtgggctcacctggcagcggagacagaggaagagtagaagaacaatctagaaaaccaaaagaacaagaatttcttggtaagaagccgggaacagacaacagaagtcatgaagcccaagtgaaatc

SEQ ID NO: 8638 - DNA, 3176 bp, Artificial Sequence
  derived and/or modified sequence
aactcctgactccgatagagactggatggacccacaagggtgacagcccaggcggaccgatcttcccatcccacatcctccggcgcgatgccaaaaagaggctgacggcaactgggccttctgcagagaaagacctccgcttcactgccccggctggtcccaagggtcaggaagatggattcatacctgctgatgtggggactgctcacgttcatcatggtgcctggctgccaggcagagctctgtgacgatgacccgccagagatcccacacgccacattcaaagccatggcctacaaggaaggaaccatgttgaactgtgaatgcaagagaggtttccgcagaataaaaagcgggtcactctatatgctctgtacaggaaactctagccactcgtcctgggacaaccaatgtcaatgcacaagctctgccactcggaacacaacgaaacaagtgacacctcaacctgaagaacagaaagaaaggaaaaccacagaaatgcaaagtccaatgcagccagtggaccaagcgagccttccaggtcactgcagggaacctccaccatgggaaaatgaagccacagagagaatttatcatttcgtggtggggcagatggtttattatcagtgcgtccagggatacagggctctacacagaggtcctgctgagagcgtctgcaaaatgacccacgggaagacaaggtggacccagccccagctcatatgcacaggtgaaatggagaccagtcagtttccaggtgaagagaagcctcaggcaagccccgaaggccgtcctgagagtgagacttcctgcctcgtcacaacaacagattttcaaatacagacagaaatggctgcaaccatggagacgtccatatttacaacagagtaccaggtagcagtggccggctgtgttttcctgctgatcagcgtcctcctcctgagtgggctcacctggcagcggagacagaggaagagtagaagaacaatctagaaaaccaaaagaacaagaatttcttggtaagaagccgggaacagacaacagaagtcatgaagcccaagtgaaatcaaaggtgctaaatggtcgcccaggagacatccgttgtgcttgcctgcgttttggaagctctgaagtcacatcacaggacacggggcagtggcaaccttgtctctatgccagctcagtcccatcagagagcgagcgctacccacttctaaatagcaatttcgccgttgaagaggaagggcaaaaccactagaactctccatcttattttcatgtatatgtgttcattaaagcatgaatggtatggaactctctccaccctatatgtagtataaagaaaagtaggtttacattcatctcattccaacttcccagttcaggagtcccaaggaaagccccagcactaacgtaaatacacaacacacacactctaccctatacaactggacattgtctgcgtggttcctttctcagccgcttctgactgctgattctcccgttcacgttgcctaataaacatccttcaagaactctgggctgctacccagaaatcattttacccttggctcaatcctctaagctaacccccttctactgagccttcagtcttgaatttctaaaaaacagaggccatggcagaataatctttgggtaacttcaaaacggggcagccaaacccatgaggcaatgtcaggaacagaaggatgaatgaggtcccaggcagagaatcatacttagcaaagttttacctgtgcgttactaattggcctctttaagagttagtttctttgggattgctatgaatgataccctgaatttggcctgcactaatttgatgtttacaggtggacacacaaggtgcaaatcaatgcgtacgtttcctgagaagtgtctaaaaacaccaaaaagggatccgtacattcaatgtttatgcaaggaaggaaagaaagaaggaagtgaagagggagaagggatggaggtcacactggtagaacgtaaccacggaaaagagcgcatcaggcctggcacggtggctcaggcctataaccccagctccctaggagaccaaggcgggagcatctcttgaggccaggagtttgagaccagcctgggcagcatagcaagacacatccctacaaaaaattagaaattggctggatgtggtggcatacgcctgtagtcctagccactcaggaggctgaggcaggaggattgcttgagcccaggagttcgaggctgcagtcagtcatgatggcaccactgcactccagcctgggcaacagagcaagatcctgtctttaaggaaaaaaagacaagatgagcataccagcagtccttgaacattatcaaaaagttcagcatattagaatcaccgggaggccttgttaaaagagttcgctgggcccatcttcagagtctctgagttgttggtctggaatagagccaaatgttttgtgtgtctaacaattcccaggtgctgttgctgctgctactattccaggaacacactttgagaaccattgtgttattgctctgcacgcccacccactctcaactcccacgaaaaaaatcaacttccagagctaagatttcggtggaagtcctggttccatatctggtgcaagatctcccctcacgaatcagttgagtcaacattctagctcaacaacatcacacgattaacattaacgaaaattattcatttgggaaactatcagccagttttcacttctgaaggggcaggagagtgttatgagaaatcacggcagttttcagcagggtccagattcagattaaataactattttctgtcatttctgtgaccaaccacatacaaacagactcatctgtgcactctccccctcccccttcaggtatatgttttctgagtaaagttgaaaagaatctcagaccagaaaatatagatatatatttaaatcttacttgagtagaactgattacgacttttgggtgttgaggggtctataagatcaaaacttttccatgataatactaagatgttatcgaccatttatctgtccttctctcaaaagtgtatggtggaattttccagaagctatgtgatacgtgatgatgtcatcactctgctgttaacatataataaatttattgctattgtttataaaagaataaatgatattttttaaaaa

SEQ ID NO: 8639 - DNA, 792 bp, Artificial Sequence
  derived and/or modified sequence
atggacagctacctgctgatgtggggcctgctgaccttcatcatggtgcccggctgccaggccgagctgtgtgatgatgaccccccagagatcccccacgccaccttcaaggccatggcctacaaggagggcaccatgctgaactgtgagtgcaagaggggcttccgccgcatcaagagcggcagcctgtacatgctgtgcaccggcaacagcagccacagctcctgggacaaccagtgccagtgcaccagcagcgccaccaggaacaccaccaagcaggtgaccccccagcctgaggagcagaaggagaggaagaccacagagatgcagagccccatgcagcctgtggaccaggccagcctgcccggccactgccgggagcccccaccctgggagaatgaggccacagagcgcatctaccactttgtggtgggccagatggtgtactaccagtgtgtgcagggctaccgggccctgcaccggggccctgctgagagcgtgtgcaagatgacccacggcaagacccgctggacccagccccagctgatctgcacaggagaggagaagccccaggccagccctgagggccggcctgagagcgagaccagctgcctggtgaccaccacagacttccagatccagacagagatggccgccaccatggagaccagcatcttcaccacagagtaccaggtggccgtggccggctgtgtgttcctgctgatctctgtgctgctgctgagcggcctgacctggcagaggcggcagaggaagagcaggaggaccatctag

SEQ ID NO: 8640 - DNA, 819 bp, Artificial Sequence
  derived and/or modified sequence
atggacagctacctgctgatgtggggcctgctgaccttcatcatggtgcccggctgccaggccgagctgtgtgatgatgaccccccagagatcccccacgccaccttcaaggccatggcctacaaggagggcaccatgctgaactgtgagtgcaagaggggcttccgccgcatcaagagcggcagcctgtacatgctgtgcaccggcaacagcagccacagctcctgggacaaccagtgccagtgcaccagcagcgccaccaggaacaccaccaagcaggtgaccccccagcctgaggagcagaaggagaggaagaccacagagatgcagagccccatgcagcctgtggaccaggccagcctgcccggccactgccgggagcccccaccctgggagaatgaggccacagagcgcatctaccactttgtggtgggccagatggtgtactaccagtgtgtgcagggctaccgggccctgcaccggggccctgctgagagcgtgtgcaagatgacccacggcaagacccgctggacccagccccagctgatctgcacaggagagatggagaccagccagtttcctggagaggagaagccccaggccagccctgagggccggcctgagagcgagaccagctgcctggtgaccaccacagacttccagatccagacagagatggccgccaccatggagaccagcatcttcaccacagagtaccaggtggccgtggccggctgtgtgttcctgctgatctctgtgctgctgctgagcggcctgacctggcagaggcggcagaggaagagcaggaggaccatctag

SEQ ID NO: 8641 - DNA, 792 bp, Artificial Sequence
  derived and/or modified sequence
atggacagctacctgctgatgtggggcctgctgaccttcatcatggtacctgggtgccaggcagaactgtgcgatgacgaccctcccgagattccacatgcaacgtttaaggccatggcctacaaggagggcaccatgttgaactgcgaatgtaaacgcgggtttaggaggataaaatccggatccttatatatgctgtgtaccggaaatagcagccacagttcttgggataaccagtgccagtgcacatcgtctgcgactcggaatacaacaaaacaggtgacgccacagcccgaagaacaaaaggagaggaagactacagagatgcagtccccaatgcagcccgtggatcaggcctcactgcccggccactgccgcgagccacctccttgggagaacgaggccacggaacgcatttaccacttcgtagtcggccagatggtttactatcaatgcgtgcaaggttatagagccctgcatagaggaccggcagaatctgtgtgcaaaatgacccatggcaagactcgttggacgcagccccagctgatttgcaccggtgaagaaaagccccaggccagtccagagggcagacccgagagcgagacttcctgcctggtgacaacaacagattttcaaattcagacggagatggccgccacaatggagacgagcatcttcaccacagagtaccaggtggctgtggcaggctgcgtgttcctgctgatatccgttctgctgttaagtgggttgacctggcagaggagacagcgaaagtctcggagaacaatctag

SEQ ID NO: 8642 - DNA, 819 bp, Artificial Sequence
  derived and/or modified sequence
atggacagctacctgctgatgtggggcctgctgaccttcatcatggttcctggatgtcaggctgagctgtgtgatgatgaccctccagagatccctcacgcaacattcaaggccatggcctacaaggagggtacaatgcttaattgtgagtgtaagagaggattccggcggatcaaatctggcagcttgtacatgctgtgtactggcaactcctctcattcctcttgggacaaccaatgtcagtgtaccagctccgctaccagaaatactaccaagcaagtgacccctcagccagaagaacagaaagagcgcaaaactaccgaaatgcaatcgcccatgcagcccgttgatcaggcttcccttcccgggcattgccgggagccccctccttgggaaaacgaagcgactgagcggatataccactttgtggtgggtcagatggtttattatcaatgcgtccaggggtacagagcactgcacagggggcctgccgaatcagtctgtaaaatgacccacggcaagaccaggtggactcagccacagctgatctgcaccggagaaatggagacctcccaattccccggggaggaaaagcctcaagcatcgcccgaggggcgccctgagagcgagacttcatgcctggtgacaaccacggatttccaaatccagaccgaaatggccgcaaccatggagacctctatatttactactgagtatcaagtcgccgtggccgggtgcgtgttcctcctgatttccgtgttactgctgagcgggctgacgtggcaacgtcggcagaggaaatcgcggaggacgatttag

SEQ ID NO: 8643 - DNA, 792 bp, Artificial Sequence
  derived and/or modified sequence
atggattcttatttactgatgtggggcttactgacatttattatggtgcctgggtgtcaggctgaactttgcgatgatgaccccccagaaataccacatgccacttttaaagcaatggcctacaaggaaggtaccatgctgaactgtgaatgcaaacgaggttttaggcgcattaagtctggcagcctctacatgctgtgtaccgggaacagctctcactcatcgtgggacaaccaatgccagtgcacaagctccgcaactcggaatacaacaaaacaggttacacctcagcctgaggagcagaaggaacgcaagaccacagagatgcagtctcctatgcagcccgtggatcaggcctccttgcccggacactgccgcgagcctccgccatgggaaaatgaggcgacggaaaggatctaccatttcgttgtagggcaaatggtgtattaccagtgtgtccaaggctatagggctctccaccgcggaccagccgaatccgtatgtaagatgacgcacgggaaaacgcggtggacccagccgcagctgatctgtacaggggaggaaaagccccaggcaagcccagaggggagacccgagtctgaaacctcctgtctggtcacaacaaccgacttccagatccagacagaaatggcggcaacaatggaaaccagcatctttactacggaatatcaggtcgcggtcgccggttgcgtatttttgcttatttccgtgctactgctgagtggactgacctggcagcgaaggcaacggaaatcccggcgtaccatatag

SEQ ID NO: 8644 - DNA, 819 bp, Artificial Sequence
  derived and/or modified sequence
atggatagttacctgctgatgtggggcctgctcacctttattatggttcccggatgccaggcggagctttgtgacgatgacccccctgagatcccacacgccacgttcaaggccatggcatataaggaggggacgatgcttaactgtgagtgcaagaggggatttaggcgcatcaaaagtggttcactttacatgttgtgtaccggaaactcctctcactcatcttgggataatcagtgccagtgcacgtccagtgcaacccgcaatacaactaagcaggtgaccccccagccggaggagcagaaagagaggaagacaactgagatgcagagtcccatgcagcccgttgatcaggcaagtctgcccggacactgtcgtgagcccccaccgtgggagaacgaggcgaccgaaagaatctaccatttcgtggtgggccaaatggtgtactatcagtgcgtgcagggttatcgagccctccatcgaggtccagcggaatctgtgtgtaagatgacacacggtaaaacccgatggactcagccacagctgatctgcaccggggaaatggagaccagtcagtttcctggggaagaaaaaccgcaggcttctcccgagggccgacctgagagtgaaacgagttgcttagtcacaacgactgactttcagatacagactgaaatggccgcaactatggagaccagcattttcaccactgaatatcaggtggccgtagccggatgcgttttcctgcttatcagcgtccttttactctccggattgacctggcagagacggcagaggaagtcgcgcaggactatctag

SEQ ID NO: 8645 - DNA, 792 bp, Artificial Sequence
  derived and/or modified sequence
atggacagctacctgctgatgtggggcctgctgaccttcatcatggtgcccggctgccaggccgagctgtgcgacgacgacccccccgagatcccccacgccaccttcaaggccatggcctacaaggagggcaccatgctgaactgcgagtgcaagagaggcttcagaagaatcaagagcggcagcctgtacatgctgtgcaccggcaacagcagccacagcagctgggacaaccagtgccagtgcaccagcagcgccaccagaaacaccaccaagcaggtgaccccccagcccgaggagcagaaggagagaaagaccaccgagatgcagagccccatgcagcccgtggaccaggccagcctgcccggccactgcagagagccccccccctgggagaacgaggccaccgagagaatctaccacttcgtggtgggccagatggtgtactaccagtgcgtgcagggctacagagccctgcacagaggccccgccgagagcgtgtgcaagatgacccacggcaagaccagatggacccagccccagctgatctgcaccggcgaggagaagccccaggccagccccgagggcagacccgagagcgagaccagctgcctggtgaccaccaccgacttccagatccagaccgagatggccgccaccatggagaccagcatcttcaccaccgagtaccaggtggccgtggccggctgcgtgttcctgctgatcagcgtgctgctgctgagcggcctgacctggcagagaagacagagaaagagcagaagaaccatctag

SEQ ID NO: 8646 - DNA, 819 bp, Artificial Sequence
  derived and/or modified sequence
atggacagctacctgctgatgtggggcctgctgaccttcatcatggtgcccggctgccaggccgagctgtgcgacgacgacccccccgagatcccccacgccaccttcaaggccatggcctacaaggagggcaccatgctgaactgcgagtgcaagagaggcttcagaagaatcaagagcggcagcctgtacatgctgtgcaccggcaacagcagccacagcagctgggacaaccagtgccagtgcaccagcagcgccaccagaaacaccaccaagcaggtgaccccccagcccgaggagcagaaggagagaaagaccaccgagatgcagagccccatgcagcccgtggaccaggccagcctgcccggccactgcagagagccccccccctgggagaacgaggccaccgagagaatctaccacttcgtggtgggccagatggtgtactaccagtgcgtgcagggctacagagccctgcacagaggccccgccgagagcgtgtgcaagatgacccacggcaagaccagatggacccagccccagctgatctgcaccggcgagatggagaccagccagttccccggcgaggagaagccccaggccagccccgagggcagacccgagagcgagaccagctgcctggtgaccaccaccgacttccagatccagaccgagatggccgccaccatggagaccagcatcttcaccaccgagtaccaggtggccgtggccggctgcgtgttcctgctgatcagcgtgctgctgctgagcggcctgacctggcagagaagacagagaaagagcagaagaaccatctag

SEQ ID NO: 8647 - protein, 1039 aa, Artificial Sequence
  derived and/or modified sequence
MARALCPLQALWLLEWVLLLLGPCAAPPAWALNLDPVQLTFYAGPNGSQFGFSLDFHKDSHGRVAIVVGAPRTLGPSQEETGGVFLCPWRAEGGQCPSLLFDLRDETRNVGSQTLQTFKARQGLGASVVSWSDVIVACAPWQHWNVLEKTEEAEKTPVGSCFLAQPESGRRAEYSPCRGNTLSRIYVENDFSWDKRYCEAGFSSVVTQAGELVLGAPGGYYFLGLLAQAPVADIFSSYRPGILLWHVSSQSLSFDSSNPEYFDGYWGYSVAVGEFDGDLNTTEYVVGAPTWSWTLGAVEILDSYYQRLHRLRGEQMASYFGHSVAVTDVNGDGRHDLLVGAPLYMESRADRKLAEVGRVYLFLQPRGPHALGAPSLLLTGTQLYGRFGSAIAPLGDLDRDGYNDIAVAAPYGGPSGRGQVLVFLGQSEGLRSRPSQVLDSPFPTGSAFGFSLRGAVDIDDNGYPDLIVGAYGANQVAVYRAQPVVKASVQLLVQDSLNPAVKSCVLPQTKTPVSCFNIQMCVGATGHNIPQKLSLNAELQLDRQKPRQGRRVLLLGSQQAGTTLNLDLGGKHSPICHTTMAFLRDEADFRDKLSPIVLSLNVSLPPTEAGMAPAVVLHGDTHVQEQTRIVLDCGEDDVCVPQLQLTASVTGSPLLVGADNVLELQMDAANEGEGAYEAELAVHLPQGAHYMRALSNVEGFERLICNQKKENETRVVLCELGNPMKKNAQIGIAMLVSVGNLEEAGESVSFQLQIRSKNSQNPNSKIVLLDVPVRAEAQVELRGNSFPASLVVAAEEGEREQNSLDSWGPKVEHTYELHNNGPGTVNGLHLSIHLPGQSQPSDLLYILDIQPQGGLQCFPQPPVNPLKVDWGLPIPSPSPIHPAHHKRDRRQIFLPEPEQPSRLQDPVLVSCDSAPCTVVQCDLQEMARGQRAMVTVLAFLWLPSLYQRPLDQFVLQSHAWFNVSSLPYAVPPLSLPRGEAQVWTQLLRALEERAIPIWWVLVGVLGGLLLLTILVLAMWKVGFFKRNRPPLEEDDEEGE

SEQ ID NO: 8648 - DNA, 3120 bp, Artificial Sequence
  derived and/or modified sequence
atggctagagcactgtgcccactgcaggcgttgtggctcctagagtgggttctgctcctgttaggcccatgcgccgcccctcctgcgtgggccttgaacctcgaccccgtccaactgaccttctatgccgggccaaatgggtcacagttcggtttcagcctagacttccataaagacagtcacgggcgtgtggccatcgtggtgggagcgcctcgaaccctgggcccgtcccaggaggaaacaggaggagtgtttctatgtccttggcgcgctgagggcggtcaatgtcctagtcttctctttgacctaagggatgagacaaggaacgtggggagtcaaaccctacagaccttcaaggcaaggcaggggcttggcgcctctgtcgtttcttggtctgacgtgatcgtggcttgtgcgccctggcagcactggaatgtgctggaaaaaacagaagaagctgagaaaacacccgtcggatcctgcttcctcgcacagcccgaaagcggcaggagagctgaatatagtccatgcagaggtaacactctgagccgcatttacgtcgagaacgacttcagctgggacaagcgatactgcgaggctggtttctcttccgtcgtcacgcaggctggtgaactagtgcttggtgcccctgggggctactacttcctgggccttctggctcaggcccccgtagcagacatcttcagctcataccgcccgggaattctgctttggcatgtcagtagccagagcttgagtttcgatagttccaatcctgagtattttgacggatactgggggtatagcgtggcagttggagaatttgacggcgatctgaatactaccgaatatgtcgtcggagcgcccacctggtcctggactctgggagcagttgaaatcctcgatagctattaccagcggttacaccgattgcggggggagcagatggcaagttacttcggacattcagtcgcagtgacagatgtgaacggcgacgggagacacgacttactggtcggagcccccttgtacatggagtcacgagcagaccgcaaactggccgaagtaggacgggtatacctattcctccagccgagaggtccgcacgcgcttggtgccccctcattgttgctaacaggtacgcaactgtacggccgtttcggtagcgcaatagcccctcttggtgacttggaccgggacggttacaatgatatcgccgttgcagctccctacggcggaccgtccggacgcggacaggtacttgttttcctggggcagtcagaggggctgcgctctagaccatctcaggtgctcgacagccctttccccacgggcagcgcattcggcttctccctcagaggcgccgtggacattgacgacaacgggtaccctgatctgatcgtgggagcttacggcgccaatcaagtcgccgtctaccgggctcagcctgtcgttaaagcatctgtccagctcctggtacaggatagtctgaaccccgccgtgaagtcatgcgtgctccctcagactaagaccccagtgtcctgttttaacatacagatgtgcgtgggtgccacgggccataatatcccacaaaaactgtctttaaacgctgaacttcagcttgaccgtcagaaacctcgccagggccggagagtgcttctgttgggcagccagcaggccggcactaccctcaacctcgatctgggcggcaaacactcccccatttgccataccaccatggcattcctgagagacgaggccgatttccgtgacaaactgagtcccatcgtgctcagcctaaatgtgtccctcccacctacagaggcgggcatggcgccagccgtggttctccacggagacactcatgtccaggagcagacgaggatcgtgttagactgtggagaagacgatgtgtgtgtcccccaacttcaattgacagccagcgtgactgggtccccacttcttgtcggtgccgataacgtactcgaactgcagatggacgccgccaatgagggcgaaggcgcgtacgaggctgaactcgccgtccacctgccccagggggctcactacatgcgtgccctgagcaatgttgagggctttgagagactaatctgtaaccagaaaaaggaaaatgaaacgagagtggtgctgtgcgagctcgggaatcctatgaaaaaaaatgctcagatcggcatcgccatgctggtttctgtgggcaacttggaagaagcgggtgagagcgtgtcgtttcagctgcagattaggagcaagaacagccaaaatcctaattccaagatcgtcctgctggatgtgccggtcagggcggaggcccaggtggaactgcggggcaattcattccctgcaagcctggtcgtggctgctgaggagggcgagagagaacaaaacagcctagattcgtgggggccaaaggtcgagcacacctacgaactgcacaataatgggcccggcactgtcaacggattgcacttgagcatacatctgcccggacagagccagcctagtgatctgctgtatattttggacatccaaccccagggcggtctgcaatgttttccacagccccccgtgaatccactgaaagtggactggggtttgcccattccctccccgtcccctattcaccccgctcatcacaagagggaccgcaggcaaatctttttaccagaaccagaacaaccctctcgactgcaggatcccgttctggtgtcttgcgatagcgctccctgcacagtagtgcagtgtgatctgcaggagatggcgcgcgggcaaagagccatggttactgtcttagcatttctctggctgcccagtctgtatcagagacccctggatcagtttgttctgcagagccatgcttggttcaatgtatcttctctgccctatgcagtgccccctctctctctgccacggggggaggcgcaggtttggacacagctcctccgcgcactggaagagcgtgctatccccatctggtgggtattggttggggtgctcggggggctgctgctactgaccatcctcgtcttggccatgtggaaagttgggttctttaagaggaaccggcccccattagaggaagacgacgaggaaggcgaatag

SEQ ID NO: 8649 - DNA, 3334 bp, Artificial Sequence
  derived and/or modified sequence
attcctgcctgggaggttgtggaagaaggaagatggccagagctttgtgtccactgcaagccctctggcttctggagtgggtgctgctgctcttgggaccttgtgctgcccctccagcctgggccttgaacctggacccagtgcagctcaccttctatgcaggccccaatggcagccagtttggattttcactggacttccacaaggacagccatgggagagtggccatcgtggtgggcgccccgcggaccctgggccccagccaggaggagacgggcggcgtgttcctgtgcccctggagggccgagggcggccagtgcccctcgctgctctttgacctccgtgatgagacccgaaatgtaggctcccaaactttacaaaccttcaaggcccgccaaggactgggggcgtcggtcgtcagctggagcgacgtcattgtggcctgcgccccctggcagcactggaacgtcctagaaaagactgaggaggctgagaagacgcccgtaggtagctgctttttggctcagccagagagcggccgccgcgccgagtactccccctgtcgcgggaacaccctgagccgcatttacgtggaaaatgattttagctgggacaagcgttactgtgaagcgggcttcagctccgtggtcactcaggccggagagctggtgcttggggctcctggcggctattatttcttaggtctcctggcccaggctccagttgcggatattttctcgagttaccgcccaggcatccttttgtggcacgtgtcctcccagagcctctcctttgactccagcaacccagagtacttcgacggctactgggggtactcggtggccgtgggcgagttcgacggggatctcaacactacagaatatgtcgtcggtgcccccacttggagctggaccctgggagcggtggaaattttggattcctactaccagaggctgcatcggctgcgcggagagcagatggcgtcgtattttgggcattcagtggctgtcactgacgtcaacggggatgggaggcatgatctgctggtgggcgctccactgtatatggagagccgggcagaccgaaaactggccgaagtggggcgtgtgtatttgttcctgcagccgcgaggcccccacgcgctgggtgcccccagcctcctgctgactggcacacagctctatgggcgattcggctctgccatcgcacccctgggcgacctcgaccgggatggctacaatgacattgcagtggctgccccctacgggggtcccagtggccggggccaagtgctggtgttcctgggtcagagtgaggggctgaggtcacgtccctcccaggtcctggacagccccttccccacaggctctgcctttggcttctcccttcgaggtgccgtagacatcgatgacaacggatacccagacctgatcgtgggagcttacggggccaaccaggtggctgtgtacagagctcagccagtggtgaaggcctctgtccagctactggtgcaagattcactgaatcctgctgtgaagagctgtgtcctacctcagaccaagacacccgtgagctgcttcaacatccagatgtgtgttggagccactgggcacaacattcctcagaagctatccctaaatgccgagctgcagctggaccggcagaagccccgccagggccggcgggtgctgctgctgggctctcaacaggcaggcaccaccctgaacctggatctgggcggaaagcacagccccatctgccacaccaccatggccttccttcgagatgaggcagacttccgggacaagctgagccccattgtgctcagcctcaatgtgtccctaccgcccacggaggctggaatggcccctgctgtcgtgctgcatggagacacccatgtgcaggagcagacacgaatcgtcctggactgtggggaagatgacgtatgtgtgccccagcttcagctcactgccagcgtgacgggctccccgctcctagttggggcagataatgtcctggagctgcagatggacgcagccaacgagggcgagggggcctatgaagcagagctggccgtgcacctgccccagggcgcccactacatgcgggccctaagcaatgtcgagggctttgagagactcatctgtaatcagaagaaggagaatgagaccagggtggtgctgtgtgagctgggcaaccccatgaagaagaacgcccagataggaatcgcgatgttggtgagcgtggggaatctggaagaggctggggagtctgtgtccttccagctgcagatacggagcaagaacagccagaatccaaacagcaagattgtgctgctggacgtgccggtccgggcagaggcccaagtggagctgcgagggaactcctttccagcctccctggtggtggcagcagaagaaggtgagagggagcagaacagcttggacagctggggacccaaagtggagcacacctatgagctccacaacaatggccctgggactgtgaatggtcttcacctcagcatccaccttccgggacagtcccagccctccgacctgctctacatcctggatatacagccccaggggggccttcagtgcttcccacagcctcctgtcaaccctctcaaggtggactgggggctgcccatccccagcccctcccccattcacccggcccatcacaagcgggatcgcagacagatcttcctgccagagcccgagcagccctcgaggcttcaggatccagttctcgtaagctgcgactcggcgccctgtactgtggtgcagtgtgacctgcaggagatggcgcgcgggcagcgggccatggtcacggtgctggccttcctgtggctgcccagcctctaccagaggcctctggatcagtttgtgctgcagtcgcacgcatggttcaacgtgtcctccctcccctatgcggtgcccccgctcagcctgccccgaggggaagctcaggtgtggacacagctgctccgggccttggaggagagggccattccaatctggtgggtgctggtgggtgtgctgggtggcctgctgctgctcaccatcctggtcctggccatgtggaaggtcggcttcttcaagcggaaccggccacccctggaagaagatgatgaagagggggagtgatggtgcagcctacactattctagcaggagggttgggcgtgctacctgcaccgccccttctccaacaagttgcctccaagctttgggttggagctgttccattgggtcctcttggtgtcgtttccctcccaacagagctgggctaccccccctcctgctgcctaataaagagactgagccctg

SEQ ID NO: 8650 - DNA, 3120 bp, Artificial Sequence
  derived and/or modified sequence
atggcccgggccctgtgccccctgcaggccctgtggctgctggagtgggtgctgctgctgctgggcccctgtgccgcccccccagcctgggccctgaacctggaccctgtgcagctgaccttctacgccggccccaacggcagccagtttggcttcagcctggacttccacaaggacagccacggccgggtggccatcgtggtgggcgcccccaggaccctgggccccagccaggaggagactggaggagtcttcctgtgcccctggagggctgagggcggccagtgccccagcctgctgtttgacctgagagatgagaccagaaatgtgggcagccagaccctgcagaccttcaaggcccggcagggcctgggcgcctctgtggtgtcctggagcgatgtgattgtggcctgtgccccctggcagcactggaatgtgctggagaagacagaggaggccgagaagacccctgtgggcagctgcttcctggcccagcctgagagcggccggcgggcagagtacagcccctgccggggcaacaccctgagccgcatctacgtggagaatgacttctcctgggacaagcgctactgtgaggccggcttcagctctgtggtgacccaggccggggagctggtgctgggcgcccctgggggctactacttcctgggcctgctggcccaggcccctgtggccgacatcttcagcagctaccggcccggcatcctgctgtggcacgtgagcagccagagcctgagctttgacagcagcaaccctgagtactttgatggctactggggctacagcgtggccgtgggggagtttgatggagacctgaacaccacagaatatgtggtgggcgcccccacctggagctggaccctgggcgctgtggagatcctggacagctactaccagaggctgcaccggctgcggggggagcagatggccagctacttcggccacagcgtggccgtgacagatgtgaatggagatggaagacatgacctgctggtgggcgcccccctgtacatggagagcagagctgacaggaagctggccgaggtgggccgggtgtacctgttcctgcagccccggggcccccacgccctgggcgcccccagcctgctgctgaccggcacccagctgtatggccgctttggaagtgccatcgcccccctgggggacctggacagagatggctacaatgacattgctgtggccgccccctatggaggccccagcggccggggccaggtgctggtgttcctgggccagagcgagggcctgcggagccggcccagccaggtgctggacagccccttccccaccggcagcgccttcggcttcagcctgcggggagctgtggacattgatgacaatggctacccagacctgattgtgggcgcctatggagccaaccaggtggccgtgtaccgggcccagcctgtggtgaaggcctctgtgcagctgctggtgcaggacagcctgaacccagctgtgaagagctgtgtgctgccccagaccaagacccctgtgtcctgcttcaacatccagatgtgtgtgggcgccaccggccacaacatcccccagaagctgagcctgaatgctgagctgcagctggaccggcagaagccccggcagggccggcgggtgctgctgctgggcagccagcaggccggcaccaccctgaacctggacctgggcggcaagcacagccccatctgccacaccaccatggccttcctgagagatgaagctgacttccgggacaagctgagccccatcgtgctgagcctgaatgtgtccctgcccccaacagaagctggcatggccccagctgtggtgctgcacggggacacccacgtgcaggagcagaccagaattgtgctggactgtggagaagatgatgtgtgtgtgccccagctgcagctgacagcctctgtgacaggcagccccctgctggtgggcgctgacaacgtgctggagctgcagatggatgctgccaatgaaggagagggcgcctatgaggccgagctggccgtgcacctgccccagggcgcccactacatgagggccctgagcaatgtggagggctttgagcggctcatctgcaaccagaagaaggaaaatgagaccagggtggtgctgtgtgagctgggcaaccccatgaagaagaatgcccagatcggcatcgccatgctggtgtctgtgggcaacctggaggaggccggggagagcgtgtccttccagctgcagatccgcagcaagaacagccagaaccccaacagcaagatcgtgctgctggatgtgcctgtgcgggcagaggcccaggtggagctgcggggcaacagcttccctgccagcctggtggtggccgctgaggagggggagcgggagcagaacagcctggacagctggggccccaaggtggagcacacctatgagctgcacaacaacggccctggcaccgtgaatggcctgcacctgagcatccacctgcccggccagagccagcccagcgacctgctgtacatcctggacatccagccccagggcggcctgcagtgcttcccccagccccctgtgaaccccctgaaggtggactggggcctgcccatccccagccccagccccatccacccagcccaccacaagagggaccggcggcagatcttcctgcctgagcctgagcagcccagccggctgcaggaccctgtgctggtgtcctgtgacagcgccccctgcaccgtggtgcagtgtgacctgcaggagatggcccggggccagagggccatggtgacagtgctggccttcctgtggctgcccagcctgtaccagaggcccctggaccagtttgtgctgcagagccacgcctggttcaacgtgagcagcctgccctatgctgtgccccccctgagcctgcccagaggagaggcccaggtgtggacccagctgctgcgggccctggaggagcgggccatccccatctggtgggtgctggtgggcgtgctgggcggcctgctgctgctgaccatcctggtgctggccatgtggaaggtgggcttcttcaagaggaacagaccacccctggaggaggatgatgaggagggggagtag

SEQ ID NO: 8651 - DNA, 3120 bp, Artificial Sequence
  derived and/or modified sequence
atggcccgggccctgtgccccctgcaggccctgtggctgctggagtgggtcttattgttgctgggtccttgtgctgcccccccagcgtgggccctcaatctcgatccagtgcagcttacgttttatgctggccccaatggatctcaattcggcttctccctggactttcacaaagacagtcacggtcgggtggccatcgttgtgggcgccccacgcactctaggcccctcccaagaggaaactggcggtgtcttcctttgcccttggcgggctgaaggcgggcagtgtccgtccctcctgttcgatttacgcgacgagacacgcaacgttgggtctcagacactgcaaacctttaaggcccggcagggtttaggcgcatcagtcgtcagctggtccgatgtgattgtggcatgcgcgccttggcagcattggaacgtcttggaaaaaacagaagaagcagaaaagactcctgttggctcatgcttccttgcacagccagaatcaggaagacgtgcggaatacagtccgtgtagaggaaatactctcagccggatctatgtcgagaacgatttctcgtgggacaagcgttactgcgaggcgggcttctcttccgtagtgacccaagccggagagctcgtactcggggctccaggcggttactacttcttagggctcttagcccaggctccagtcgccgacatttttagtagctatcgtcccggaatcctgctgtggcatgttagctcacagagtctctccttcgactcctccaatcctgaatactttgatggctactgggggtattcggtggcagtgggggagttcgatggagatctcaacactactgaatatgtcgtcggggctcccacatggtcctggactctgggagcggtagaaatcctggattcctactaccaacggcttcaccggctgcgaggagagcagatggcctcttattttggccactcagtcgccgtcactgatgttaacggggacggccgtcacgaccttctggtgggcgcacccctatatatggagtccagggctgacagaaaactcgccgaagttggcagggtctatcttttcctgcagcccagagggccgcatgccctgggcgccccctcccttctcctgaccggtacccaactctatgggcgttttgggagcgccattgcacctctgggtgacctggatagggatggttacaatgacattgcggtggccgcaccttatggaggcccaagcggacgcggccaggtcctcgtgtttctgggacaatcagaaggcctgcgatccagacctagtcaggtcctagattccccttttcccaccggcagcgcttttggcttttctttaagaggggccgtggacattgatgacaatggttatcctgatctaattgtgggcgcctatggggcaaatcaggttgctgtatatcgagcccaacccgttgtgaaagcctctgttcagctgctagtacaggacagtttaaaccccgcagtcaagtcttgtgtgctgccgcagacaaaaacacccgtgtcatgctttaatatccagatgtgcgtgggtgccaccgggcataacattccgcagaaactgtcactcaatgccgagctacagctggaccgtcagaagcccagacagggcagacgtgtactcctgctgggctctcagcaggcaggtacaacacttaaccttgaccttggtggcaaacacagccctatctgccacaccacaatggcattcctcagagatgaggcagactttcgagataagctcagtccaatcgtgttgagtctaaatgtcagcctgccgcccaccgaagctggaatggctcctgcggtcgtgctgcacggtgatacccatgttcaggagcagactcgcattgtgctcgactgtggagaggatgatgtgtgtgtgcctcaactccagctgaccgccagcgttaccggaagccctttactggtaggagctgataacgtcttggaactccaaatggatgctgccaacgagggcgaaggtgcatatgaagctgagctggctgtccacctgccacagggagcccattacatgagggccctctcaaacgtggaaggcttcgaacgcttaatttgcaaccaaaagaaagagaatgaaacccgggtggtcctctgcgagctgggcaaccccatgaagaagaatgcccagattggaattgccatgttggtgtcagttggcaacctagaagaggccggagaaagcgtgagctttcagctgcagattcggtctaaaaattcccagaatcccaatagtaagattgttttgctcgacgtgcctgttagagccgaggcccaggtggaactgcgtggcaactccttcccggcatcgctcgtggtcgccgcagaagaaggggagcgcgagcagaacagcctggatagctgggggcctaaagtggaacacacctacgagctgcacaacaatgggcccggcaccgtcaacgggttgcatttgagcatccacttacctgggcaatcacagccaagcgaccttctgtacatcctggacattcagccgcagggggggctccagtgttttccgcagcctccagtcaatcctctgaaggtggactgggggttgcccatcccatcgcctagccccatacaccccgcgcatcataaacgcgataggcgacaaatctttctgccagaaccagagcaaccttcgaggctccaggatcccgtgttggtcagttgtgactcggctccatgtaccgtggttcaatgcgacctgcaagaaatggcgagaggccagcgtgccatggtgactgtgttagcctttctctggctccccagcctttaccagaggcctcttgaccagtttgtactgcagagtcacgcttggtttaatgtatctagccttccatacgccgtaccacccctgagcttgcctcgaggcgaagcccaggtgtggacccagcttcttcgggccctagaggaaagagctataccaatctggtgggtcctggtgggggtactggggggtctccttctactaaccattttagtgcttgctatgtggaaagtaggcttctttaagcgcaaccggcccccacttgaagaggatgacgaggaaggggaatag

SEQ ID NO: 8652 - DNA, 3120 bp, Artificial Sequence
  derived and/or modified sequence
atggctcgtgccctatgcccactgcaggccctctggttgcttgagtgggtgctgctccttttaggcccatgcgctgccccacccgcatgggccttgaacctggatcccgtgcagctgactttctacgccggaccgaacggttcccaatttgggttctctctggattttcacaaggactctcacggacgcgtggccatcgtggttggggcacccagaactctgggtcccagccaggaagagacaggtggggtcttcctctgtccctggagagctgagggtggacaatgcccgtctctgctcttcgatcttagggacgagactagaaacgtcggaagccagacactacagaccttcaaggcccgtcaggggctcggggcaagcgtcgtgagctggagtgatgtgatagtggcatgtgctccttggcagcattggaacgtgttggaaaagacagaggaagctgagaaaactcccgtcgggtcttgcttcttggctcaacccgagtccggtagaagagcagagtacagcccctgtagaggaaatactctttctcggatctacgtggagaacgacttctcgtgggataaacgatactgtgaagcaggtttctcctctgtagtcacgcaagccggagagttggtgttaggtgcaccaggtggatattactttctgggcctgctggcccaagcgccagttgctgacatcttcagcagttacagaccaggcatcctcctctggcatgtttctagccagagcctgagcttcgattcatctaatcctgagtactttgatggatactggggctactccgtggccgtgggggagtttgatggagacctcaataccaccgaatatgtcgttggggcacccacatggagctggacgctcggcgcagttgaaatactcgacagctattatcagcgcttgcatagactgcgaggagagcagatggcctcctatttcggacactcagtggcagttacggacgtaaacggggatggcagacacgacctcctggttggggctcccctctacatggagtcacgcgctgatagaaagctggctgaagttggacgcgtgtatttgttcctgcaacctagaggccctcacgcactgggagctccaagcttactactcacaggtacacaactgtatggtaggtttgggagcgctatagcccctctgggagatttggaccgtgatggatacaatgacattgccgtggcagcgccttacggcggaccaagcggaaggggacaggtattagtgttcctaggtcagagcgaggggttaagatcccgccctagccaagtgctggattccccgttccccaccggatcagcttttggtttttctctgcgcggagcggttgatatcgacgataacggctatcccgatctgatcgttggagcatatggagcgaaccaggtggcagtgtacagggctcagcccgttgtcaaggccagtgtccaactgctggtgcaggacagcctgaacccggctgtgaagtcctgcgtgctcccacagaccaagacccccgtgtcttgcttcaacattcagatgtgcgtaggagcgacaggtcataacataccccagaaactaagcctcaacgcggagctccagcttgatagacagaaacctaggcagggccgaagagtgctcctactcggctctcaacaagccggaactactctgaacctggacctgggcggaaaacatagccctatctgtcacactactatggccttcttaagagacgaggcagattttcgggataaactgtctcctatagtgctgagccttaacgtaagtctccccccaactgaagcaggaatggcccctgccgtggtgctgcacggtgacacgcatgtccaggagcagacaaggatcgtgctcgactgcggcgaagacgacgtctgcgtgccccagctgcaactgactgcgtctgtcacaggcagtccgttgctggtcggcgctgacaacgttttagaactgcagatggatgcggctaatgagggcgagggtgcttacgaggccgaactagctgtacatctgccgcagggggcacactatatgcgagccctttccaatgtggaggggtttgagaggcttatttgcaaccaaaagaaggaaaacgagacccgagtggtgttgtgcgaactgggaaaccccatgaagaaaaacgctcagatcggcatcgccatgcttgtgtccgtcggcaacctggaggaggccggagaaagcgtgtcatttcagcttcaaatacgtagcaaaaattctcaaaatccaaactctaaaatcgtgctgcttgacgtgcctgtcagggcagaggcacaagtcgaattgagagggaactcattcccagcatcactcgttgtcgcagcagaggaaggagagagagagcagaactctctggattcatgggggcctaaagtcgagcacacgtacgagctgcacaacaatggaccaggaacagtgaatgggctacacttgtctatccacttgccgggtcagtctcagcccagtgatctgctatatattttggacatccaaccccagggcggtctccagtgcttccctcaacctcctgttaaccctctgaaagtggactggggcttaccaattcctagtccctctcccattcaccctgcccaccacaaacgggataggaggcagatcttcctgcccgagccagagcagccgagccgcctgcaggatcccgtccttgtatcttgtgactcagcgccatgtactgtggtccagtgcgatctgcaggaaatggctcgaggccagcgggctatggtgacagtgcttgccttcttgtggttaccatccttataccagcgccctctggatcagtttgtcctgcagtcacatgcttggttcaacgtatcatccctcccgtatgccgtaccacccctgtcacttccgcgaggcgaggctcaggtgtggacccagctgttgcgcgctctggaggagagagctatccccatctggtgggtgctggtgggggtgctgggaggccttctgctcctgacgatccttgttctggcaatgtggaaagtgggattctttaaaaggaacagaccccctcttgaggaagacgatgaggagggcgaatag

SEQ ID NO: 8653 - DNA, 3120 bp, Artificial Sequence
  derived and/or modified sequence
atggccagagccctgtgccccctgcaggccctgtggctgctggagtgggtgctgctgctgctgggcccctgcgccgccccccccgcctgggccctgaacctggaccccgtgcagctgaccttctacgccggccccaacggcagccagttcggcttcagcctggacttccacaaggacagccacggcagagtggccatcgtggtgggcgcccccagaaccctgggccccagccaggaggagaccggcggcgtgttcctgtgcccctggagagccgagggcggccagtgccccagcctgctgttcgacctgagagacgagaccagaaacgtgggcagccagaccctgcagaccttcaaggccagacagggcctgggcgccagcgtggtgagctggagcgacgtgatcgtggcctgcgccccctggcagcactggaacgtgctggagaagaccgaggaggccgagaagacccccgtgggcagctgcttcctggcccagcccgagagcggcagaagagccgagtacagcccctgcagaggcaacaccctgagcagaatctacgtggagaacgacttcagctgggacaagagatactgcgaggccggcttcagcagcgtggtgacccaggccggcgagctggtgctgggcgcccccggcggctactacttcctgggcctgctggcccaggcccccgtggccgacatcttcagcagctacagacccggcatcctgctgtggcacgtgagcagccagagcctgagcttcgacagcagcaaccccgagtacttcgacggctactggggctacagcgtggccgtgggcgagttcgacggcgacctgaacaccaccgagtacgtggtgggcgcccccacctggagctggaccctgggcgccgtggagatcctggacagctactaccagagactgcacagactgagaggcgagcagatggccagctacttcggccacagcgtggccgtgaccgacgtgaacggcgacggcagacacgacctgctggtgggcgcccccctgtacatggagagcagagccgacagaaagctggccgaggtgggcagagtgtacctgttcctgcagcccagaggcccccacgccctgggcgcccccagcctgctgctgaccggcacccagctgtacggcagattcggcagcgccatcgcccccctgggcgacctggacagagacggctacaacgacatcgccgtggccgccccctacggcggccccagcggcagaggccaggtgctggtgttcctgggccagagcgagggcctgagaagcagacccagccaggtgctggacagccccttccccaccggcagcgccttcggcttcagcctgagaggcgccgtggacatcgacgacaacggctaccccgacctgatcgtgggcgcctacggcgccaaccaggtggccgtgtacagagcccagcccgtggtgaaggccagcgtgcagctgctggtgcaggacagcctgaaccccgccgtgaagagctgcgtgctgccccagaccaagacccccgtgagctgcttcaacatccagatgtgcgtgggcgccaccggccacaacatcccccagaagctgagcctgaacgccgagctgcagctggacagacagaagcccagacagggcagaagagtgctgctgctgggcagccagcaggccggcaccaccctgaacctggacctgggcggcaagcacagccccatctgccacaccaccatggccttcctgagagacgaggccgacttcagagacaagctgagccccatcgtgctgagcctgaacgtgagcctgccccccaccgaggccggcatggcccccgccgtggtgctgcacggcgacacccacgtgcaggagcagaccagaatcgtgctggactgcggcgaggacgacgtgtgcgtgccccagctgcagctgaccgccagcgtgaccggcagccccctgctggtgggcgccgacaacgtgctggagctgcagatggacgccgccaacgagggcgagggcgcctacgaggccgagctggccgtgcacctgccccagggcgcccactacatgagagccctgagcaacgtggagggcttcgagagactgatctgcaaccagaagaaggagaacgagaccagagtggtgctgtgcgagctgggcaaccccatgaagaagaacgcccagatcggcatcgccatgctggtgagcgtgggcaacctggaggaggccggcgagagcgtgagcttccagctgcagatcagaagcaagaacagccagaaccccaacagcaagatcgtgctgctggacgtgcccgtgagagccgaggcccaggtggagctgagaggcaacagcttccccgccagcctggtggtggccgccgaggagggcgagagagagcagaacagcctggacagctggggccccaaggtggagcacacctacgagctgcacaacaacggccccggcaccgtgaacggcctgcacctgagcatccacctgcccggccagagccagcccagcgacctgctgtacatcctggacatccagccccagggcggcctgcagtgcttcccccagccccccgtgaaccccctgaaggtggactggggcctgcccatccccagccccagccccatccaccccgcccaccacaagagagacagaagacagatcttcctgcccgagcccgagcagcccagcagactgcaggaccccgtgctggtgagctgcgacagcgccccctgcaccgtggtgcagtgcgacctgcaggagatggccagaggccagagagccatggtgaccgtgctggccttcctgtggctgcccagcctgtaccagagacccctggaccagttcgtgctgcagagccacgcctggttcaacgtgagcagcctgccctacgccgtgccccccctgagcctgcccagaggcgaggcccaggtgtggacccagctgctgagagccctggaggagagagccatccccatctggtgggtgctggtgggcgtgctgggcggcctgctgctgctgaccatcctggtgctggccatgtggaaggtgggcttcttcaagagaaacagaccccccctggaggaggacgacgaggagggcgagtag

SEQ ID NO: 8654 - protein, 732 aa, Artificial Sequence
  derived and/or modified sequence
MEGGDQSEEEPRERSQAGGMGTLWSQESTPEERLPVEGSRPWAVARRVLTAILILGLLLCFSVLLFYNFQNCGPRPCETSVCLDLRDHYLASGNTSVAPCTDFFSFACGRAKETNNSFQELATKNKNRLRRILEVQNSWHPGSGEEKAFQFYNSCMDTLAIEAAGTGPLRQVIEELGGWRISGKWTSLNFNRTLRLLMSQYGHFPFFRAYLGPHPASPHTPVIQIDQPEFDVPLKQDQEQKIYAQIFREYLTYLNQLGTLLGGDPSKVQEHSSLSISITSRLFQFLRPLEQRRAQGKLFQMVTIDQLKEMAPAIDWLSCLQATFTPMSLSPSQSLVVHDVEYLKNMSQLVEEMLLKQRDFLQSHMILGLVVTLSPALDSQFQEARRKLSQKLRELTEQPPMPARPRWMKCVEETGTFFEPTLAALFVREAFGPSTRSAAMKLFTAIRDALITRLRNLPWMNEETQNMAQDKVAQLQVEMGASEWALKPELARQEYNDIQLGSSFLQSVLSCVRSLRARIVQSFLQPHPQHRWKVSPWDVNAYYSVSDHVVVFPAGLLQPPFFHPGYPRAVNFGAAGSIMAHELLHIFYQLLLPGGCLACDNHALQEAHLCLKRHYAAFPLPSRTSFNDSLTFLENAADVGGLAIALQAYSKRLLRHHGETVLPSLDLSPQQIFFRSYAQVMCRKPSPQDSHDTHSPPHLRVHGPLSSTPAFARYFRCARGALLNPSSRCQLW

SEQ ID NO: 8655 - DNA, 2199 bp, Artificial Sequence
  derived and/or modified sequence
atggaaggaggcgaccaaagcgaagaagagccacgggagcggagtcaggcagggggcatgggcaccctgtggtcacaagaatccacccctgaagagcgcctgcctgttgagggctcacgtccttgggctgtcgctcggagggtgctgaccgccatcttaatcctgggactgctcctttgtttcagcgttttgctcttttataacttccagaactgcggcccacggccttgcgaaacatccgtatgcctggacttaagagaccactaccttgccagtggaaacaccagtgtggcaccctgcaccgatttcttcagctttgcctgtgggcgggccaaagagactaataattcattccaagaactagccacaaaaaataagaatcgactccggcgcatcttagaggttcagaactcttggcacccagggagtggggaagaaaaggcctttcagttctacaactcttgcatggataccttggccatagaagctgcagggaccggccccctgcgtcaggtgattgaggagctcggcggatggcgaattagtggcaaatggacatcccttaattttaaccggactttgcggctgctgatgagtcagtacggccacttccccttcttccgcgcctatctcggacctcacccagcttcccctcacacacccgtgatccagatcgaccagcctgaatttgacgttcccctgaagcaggaccaagaacaaaaaatttacgcacagatattccgggagtatttgacctatctgaaccaactgggtacgcttctcggcggcgatcccagcaaggtccaggaacattcatcattgtcaatctccattactagccggctgttccagtttctcaggccgctagagcaacggcgtgcccagggcaaactgtttcaaatggtgacaatcgatcagcttaaggagatggccccagctatcgactggctgtcttgtctgcaggcgacatttacacctatgtccctgtctccctcccaaagcctggtcgtccatgacgtcgagtatctgaaaaatatgtcccagctcgtcgaggaaatgctactgaagcagcgggactttctgcagtctcatatgattctgggcctggtggtcacactgtcccctgctcttgattcccagttccaagaagcccgcagaaaactcagccagaagctccgggagctgaccgaacagccaccaatgcccgcccgtccacgctggatgaagtgtgtggaggaaacaggcacttttttcgaacctaccttggctgcattgttcgtccgcgaggcatttggcccgagcaccaggagtgcggcgatgaagctctttaccgcaatccgtgacgctcttatcaccaggcttcgcaatctcccatggatgaatgaagagacacaaaatatggcacaggataaggttgctcaattgcaagtcgaaatgggagcgagcgagtgggctctgaagccagagctggctaggcaggagtacaacgatatccagcttggctcttcgtttttgcagtccgtgctgagctgcgtacggtctctccgggctcggatagtgcagtcatttctccaaccccacccccaacatagatggaaggtgtccccttgggatgtgaacgcatattatagtgtttccgaccacgtggtggtatttccagcgggactgttgcagccaccattttttcacccagggtaccctagagccgtaaacttcggagccgcgggctcgattatggctcacgagttgttgcatatcttctatcagctgcttcttcccggagggtgtctggcgtgcgataatcacgccctccaggaagctcacttatgcctcaaaaggcattatgccgcgtttccactgcctagtcgaacttcctttaatgactccctcaccttcctcgagaacgccgccgacgtggggggcctggctatagcactgcaggcctactcaaagaggcttctgaggcaccacggcgaaacagtcctaccctccctcgacctctcgccacagcagatcttttttagatcctacgcccaggtgatgtgtcgaaaaccatctcctcaggattctcacgacacccacagtcctccacacctcagagtccatggacctctgtcgtcaactccagctttcgcccggtacttccgatgcgcccggggagctcttctcaaccctagtagccgttgtcaactctggtag

SEQ ID NO: 8656 - DNA, 2812 bp, Artificial Sequence
  derived and/or modified sequence
attttgtcatcgcaacactaaacctttgtcggtctggtgctccccaattcatgaattgcttcttacttaaataaactctttaaaattttactgtgcctcatattttttttaatacagaagaaatgagagaaggaagaatattttagaaataaaggaacttcatgggcagagtcacagtgcaagacaaaaggagcagaccaagggcaagattgcttggggagtgaagactccctccctcttctcccctgagaagctgagataaagggggaggagaagcctgggtgccccccactgataagcaggctccacccagaggccagtcctgtgtgtctggggacaaggcgaaagagcagcagaagtgccccttctccaggatcaaggaactggggcggggggtgtttcctggaccccagtcctccgaatcagctcctagagtggaaccaggaaggattctggagccacagaagatagacagatggaaggtggggaccaaagtgaggaagagccgagggaacgcagccaggcaggtggaatgggaactctctggagccaagagagcactccagaagagaggctgcccgtggaagggagcaggccatgggcagtggccaggcgggtgctgacagctatcctgattttgggcctgctcctttgtttttctgtgcttttgttctacaacttccagaactgtggccctcgcccctgtgagacatctgtgtgtttggatctccgggatcattacctggcctctgggaacacaagtgtggccccctgcaccgacttcttcagctttgcctgtggaagggccaaagagaccaataattcttttcaggagcttgccacaaagaacaaaaaccgacttcggagaatactggaggtccagaattcctggcacccaggctctggggaggagaaagccttccagttctacaactcctgcatggatacacttgccattgaagctgcagggactggtcccctcagacaagttattgaggagcttggaggctggcgcatctctggtaaatggacttccttaaactttaaccgaacgctgagacttctgatgagtcagtatggccatttccctttcttcagagcctacctaggacctcatcctgcctctccacacacaccagtcatccagatagaccagccagagtttgatgttcccctcaagcaagatcaagaacagaagatctatgcccagatctttcgggaatacctgacttacctgaatcagctgggaaccttgctgggaggagacccaagcaaggtgcaagaacactcttccttgtcaatctccatcacttcacggctgttccagtttctgaggcccctggagcagcggcgggcacagggcaagctcttccagatggtcactatcgaccagctcaaggaaatggcccccgccatcgactggttgtcctgcttgcaagcgacattcacaccgatgtccctgagcccttctcagtccctcgtggtccatgacgtggaatatttgaaaaacatgtcacaactggtggaggagatgctgctaaagcagagggactttctgcagagccacatgatcttagggctggtggtgaccctttctccagccctggacagtcaattccaggaggcacgcagaaagctcagccagaaactgcgggaactgacagagcaaccacccatgcctgcccgcccacgatggatgaagtgcgtggaggagacaggcacgttcttcgagcccacgctggcggctttgtttgttcgtgaggcctttggcccgagcacccgaagtgctgccatgaaattattcactgcgatccgggatgccctcatcactcgcctcagaaaccttccctggatgaatgaggagacccagaacatggcccaggacaaggttgctcaactgcaggtggagatgggggcttcagaatgggccctgaagccagagctggcccgacaagaatacaacgatatacagcttggatcgagcttcctgcagtctgtcctgagctgtgtccggtccctccgagctagaattgtccagagcttcttgcagcctcacccccaacacaggtggaaggtgtccccttgggacgtcaatgcttactattcggtatctgaccatgtggtagtctttccagctggactcctccaacccccattcttccaccctggctatcccagagccgtgaactttggcgctgctggcagcatcatggcccacgagctgttgcacatcttctaccagctcttactgcctgggggctgcctcgcctgtgacaaccatgccctccaggaagctcacctgtgcctgaagcgccattatgctgcctttccattacctagcagaacctccttcaatgactccctcacattcttagagaatgctgcagacgttggggggctagccatcgcgctgcaggcatacagcaagaggctgttacggcaccatggggagactgtcctgcccagcctggacctcagcccccagcagatcttctttcgaagctatgcccaggtgatgtgtaggaagcccagcccccaggactctcacgacactcacagccctccacacctccgagtccacgggcccctcagcagcaccccagcctttgccaggtatttccgctgtgcacgtggtgctctcttgaacccctccagccgctgccagctctggtaacttggttaccaaagatgccacagcacagaaatatcgaccaacacctccctggtcacatccatggaatcagagcaagatttcctttctgcttctgttccaaaaataaaagctggcacttggcttccgcttgtctcttaa

SEQ ID NO: 8657 - DNA, 2199 bp, Artificial Sequence
  derived and/or modified sequence
atggagggcggggaccagagcgaggaggagccccgggagaggagccaggccggcggcatgggcaccctgtggagccaggagagcaccccagaggagcggctgcctgtggagggcagccggccctgggccgtggcccggcgggtgctgacagccatcctgatcctgggcctgctgctgtgcttctctgtgctgctcttctacaacttccagaactgtggcccccggccctgtgagacctctgtgtgcctggacctgcgggaccactacctggccagcggcaacacctctgtggccccctgcacagacttcttctcctttgcctgtggccgggccaaggagaccaacaacagcttccaggagctggccaccaagaacaagaaccggctgcggcgcatcctggaggtgcagaacagctggcaccctggcagcggggaggagaaggccttccagttctacaacagctgcatggacaccctggccattgaagctgctggcaccggccccctgcggcaggtgattgaggagctgggcggctggaggatcagcggcaagtggaccagcctgaacttcaacagaaccctgcggctgctgatgagccagtatggccacttccccttcttccgggcctacctgggcccccacccagccagcccccacacccctgtgatccagattgaccagcctgagtttgatgtgcccctgaagcaggaccaggagcagaagatctatgcccagatcttccgggagtacctgacctacctgaaccagctgggcaccctgctgggcggggaccccagcaaggtgcaggagcacagcagcctgagcatcagcatcaccagccgcctcttccagttcctgcggcccctggagcagaggcgggcccagggcaagctgttccagatggtgaccatcgaccagctgaaggagatggccccagccatcgactggctgagctgcctgcaggccaccttcacccccatgagcctgagccccagccagagcctggtggtgcatgatgtggagtacctgaagaacatgagccagctggtggaggagatgctgctgaagcagagggacttcctgcagagccacatgatcctgggcctggtggtgaccctgagccctgccctggacagccagttccaggaggcccggaggaagctgagccagaagctgcgggagctgacagagcagccccccatgcctgcccggccccgctggatgaagtgtgtggaggagaccggcaccttctttgagcccaccctggccgccctgtttgtgcgggaggccttcggccccagcaccaggtctgctgccatgaagctgttcaccgccatcagagatgccctgatcacccggctgaggaacctgccctggatgaatgaggagacccagaacatggcccaggacaaggtggcccagctgcaggtggagatgggcgccagcgagtgggccctgaagccagagctggcccggcaggagtacaatgacatccagctgggcagcagcttcctgcagagcgtgctgagctgtgtgcgcagcctgcgggccagaattgtgcagagcttcctgcagccccacccccagcaccgctggaaggtgagcccctgggatgtgaatgcctactacagcgtgtctgaccacgtggtggtgtttcctgctggcctgctgcagccccccttcttccaccctggctaccccagggctgtgaactttggagctgctggcagcatcatggcccacgagctgctgcacatcttctaccagctgctgctgcccggcggctgcctggcctgtgacaaccacgccctgcaggaggcccacctgtgcctgaagaggcactacgccgccttccccctgcccagcaggaccagcttcaatgacagcctgaccttcctggagaatgctgctgatgtgggcggcctggccatcgccctgcaggcctacagcaagaggctgctgcggcaccacggggagaccgtgctgcccagcctggacctgagcccccagcagatcttcttccgctcctatgcccaggtgatgtgcaggaagcccagcccccaggacagccatgacacccacagccccccccacctgcgggtgcacggccccctgagcagcaccccagcctttgcccgctacttccgctgtgcccggggggccctgctgaaccccagcagccgctgccagctgtggtag

SEQ ID NO: 8658 - DNA, 2199 bp, Artificial Sequence
  derived and/or modified sequence
atggagggcggcgaccagagcgaggaggagccccgggagcggagccaggccggagggatgggcactctatggtctcaggaatctacacccgaggagaggttacccgtcgaaggcagccggccctgggctgtggcccgaagggtgttaaccgctatattgatcctgggcctgctcctatgtttctccgttttgctgttttacaacttccagaactgtggtccgcgcccctgcgagacatctgtatgcttggatttgagagaccactatttagccagtgggaacacgagtgtcgccccttgcaccgatttcttcagtttcgcgtgtgggagggccaaagaaaccaataactcttttcaggaactcgcgacgaagaacaagaatagactaaggcggattctcgaggttcagaattcctggcaccccggctccggggaagagaaggcattccagttttacaattcatgtatggatacgctcgccattgaagcagccggcacgggacctcttcgtcaggtgattgaagaacttggtggatggcgcatctccggcaagtggactagtttaaactttaaccgtactctcagactgctgatgagccagtatggacacttccccttctttagggcctacttggggcctcatccagcttcaccacatacccccgtaattcagatcgaccagcctgagttcgatgtgcctctcaagcaggatcaggaacagaagatctacgctcagatctttcgggagtatctgacttatctgaaccagctgggaacactcttgggcggagatccctccaaggttcaggaacacagctctctcagtatttcaattacaagtaggctttttcagtttcttaggcccctggagcaaaggcgcgcccagggcaaactgttccagatggtgacaatagatcagctcaaggaaatggcaccggcaattgactggctgagctgcctccaagctaccttcacgcctatgtccctgtcaccgtcccagtctctcgtcgtgcacgacgttgagtaccttaagaatatgagccagctggtcgaagaaatgctactaaagcaacgcgattttctacagagccatatgattttagggttggttgtgacgttgtcaccagcgctcgactcccagttccaggaggctcggcgcaagctgagtcagaaactgcgggagctgacagaacagccacctatgccagcccgtccacggtggatgaaatgtgttgaggaaacagggacttttttcgaacctactctggctgcattgttcgtacgagaggccttcgggccttccactcgaagcgcggccatgaaactttttactgcaattcgcgatgctttaattactaggctcagaaatctcccatggatgaacgaagagacccagaatatggcccaagataaggtggcccagcttcaagttgagatgggcgcttctgagtgggcgctcaaaccagagcttgctaggcaggaatataatgacatccagctggggagttcattccttcaaagcgtgttgtcttgcgtgcggtcactgagagctcgtatcgtgcagtcgttccttcagcctcatccccagcaccgatggaaagtgtccccctgggatgtgaacgcctattacagtgtgtctgaccacgtggtggtttttccagctgggctgctgcaacctccttttttccacccaggatacccaagagccgtgaattttggcgccgccgggtctattatggcgcacgagctcctgcacattttttatcagctcttactccccggcggatgtttggcttgtgacaatcacgctctgcaggaggcgcatttgtgtcttaaaaggcactatgcagcctttccgctacctagtaggacatcctttaacgactccctgacctttctggagaatgctgccgatgtaggggggctcgccatcgctcttcaggcatactcaaagaggttactgaggcaccacggcgaaactgtgctcccgtccctggatttgtcccctcaacagatcttctttcgcagttacgcccaggtgatgtgcagaaaaccatccccacaggatagccacgacacccacagccccccacacctgcgggtccacggaccattatctagcacccccgccttcgcccgctactttaggtgtgctcggggtgcactccttaaccccagcagcaggtgtcagttgtggtag

SEQ ID NO: 8659 - DNA, 2199 bp, Artificial Sequence
  derived and/or modified sequence
atggagggaggagatcagagtgaggaggagccccgagagagaagccaggccggaggaatgggtaccttgtggtctcaggaatcaacgccagaggaaagattgccagtggaagggtctcggccttgggcagtcgccaggcgcgtgctcacggcaattctaatcttgggccttcttctctgctttagcgtgttgttattctacaactttcagaattgcggtcctaggccctgcgagacgagtgtctgtctggaccttagagaccactatcttgcctcaggcaataccagcgtagcgccttgtacagactttttctcctttgcctgtggcagggccaaggaaactaacaatagctttcaagaactcgcaactaagaacaagaaccgcctgcggagaatcctggaagtgcaaaattcctggcaccctggctctggcgaagagaaggctttccagttctataacagctgcatggacactttggctattgaggccgctggaaccgggcctcttcgacaggttatcgaggagctgggtggttggcgcatctcaggaaaatggacatctctgaatttcaaccgaacactcaggctgctcatgtctcagtatggtcattttccgttctttagagcctacttgggcccacaccctgcctctccacatacaccagtcattcaaattgaccagccagagttcgatgtcccccttaaacaggaccaagagcagaaaatttatgcacaaattttcagggaatatcttacctacctgaaccagctcggcacactgctgggaggagatcccagcaaggtacaagagcatagctccttatctattagcattacctcacgcctgtttcagttccttcggcctctcgaacaaagaagagctcaggggaagttgttccaaatggtgaccattgatcagctgaaagagatggcccctgccatcgactggttgagctgtctgcaggcaacatttaccccaatgagtctctctccatctcagtccctcgtggtgcacgatgttgaatatctgaagaatatgtcccagctggtggaggaaatgttacttaaacaaagggatttcctgcaatcgcatatgattctcggcctagtggtgacgctttctccggcactcgactcacaattccaggaagcgaggaggaagctttctcagaaactccgtgagttaaccgagcagccacctatgcctgcaaggcccaggtggatgaagtgcgtcgaggagactggcacattcttcgaacctactttggccgcactgttcgttagggaagccttcggccctagtacacggagcgccgctatgaagcttttcacagcgatcagagacgcactgatcacacgtctgagaaacttaccatggatgaatgaggagacacagaacatggcccaggataaagtcgcccaattgcaagtggaaatgggggcttcagaatgggcgctcaaacccgagctagccagacaggaatataacgatattcagttaggatcttctttcctccagagtgttctgagctgtgtgcggagcctacgcgcacggatcgtccagtcatttctgcagccccaccctcagcacagatggaaagtctctccctgggacgtgaacgcatactatagcgtgagcgaccatgttgtcgtgttcccagctgggcttctgcagcctcccttcttccacccagggtaccctagggccgtgaactttggcgctgctggcagcataatggcccatgagttgctgcacattttctaccagttgctcctccccggtggttgtctagcatgcgataaccatgcactacaggaggcgcacctctgccttaagaggcactatgcagcctttcctctcccaagccggacctctttcaatgatagcctcacattcctggagaatgccgctgatgtgggcggactggcaatagccctgcaggcctattcaaaaaggctactgcgacatcatggggagaccgtgctgccaagcttagacctgtccccgcagcaaattttttttcgcagttacgcccaggtcatgtgccgcaaaccctctcctcaagactcgcacgacacccacagcccacctcatttgcgagtgcacggcccacttagcagcacccccgcatttgctcggtatttccgctgtgctcggggagctctgttgaacccctctagtagatgccaactttggtag

SEQ ID NO: 8660 - DNA, 2199 bp, Artificial Sequence
  derived and/or modified sequence
atggagggcggcgaccagagcgaggaggagcccagagagagaagccaggccggcggcatgggcaccctgtggagccaggagagcacccccgaggagagactgcccgtggagggcagcagaccctgggccgtggccagaagagtgctgaccgccatcctgatcctgggcctgctgctgtgcttcagcgtgctgctgttctacaacttccagaactgcggccccagaccctgcgagaccagcgtgtgcctggacctgagagaccactacctggccagcggcaacaccagcgtggccccctgcaccgacttcttcagcttcgcctgcggcagagccaaggagaccaacaacagcttccaggagctggccaccaagaacaagaacagactgagaagaatcctggaggtgcagaacagctggcaccccggcagcggcgaggagaaggccttccagttctacaacagctgcatggacaccctggccatcgaggccgccggcaccggccccctgagacaggtgatcgaggagctgggcggctggagaatcagcggcaagtggaccagcctgaacttcaacagaaccctgagactgctgatgagccagtacggccacttccccttcttcagagcctacctgggcccccaccccgccagcccccacacccccgtgatccagatcgaccagcccgagttcgacgtgcccctgaagcaggaccaggagcagaagatctacgcccagatcttcagagagtacctgacctacctgaaccagctgggcaccctgctgggcggcgaccccagcaaggtgcaggagcacagcagcctgagcatcagcatcaccagcagactgttccagttcctgagacccctggagcagagaagagcccagggcaagctgttccagatggtgaccatcgaccagctgaaggagatggcccccgccatcgactggctgagctgcctgcaggccaccttcacccccatgagcctgagccccagccagagcctggtggtgcacgacgtggagtacctgaagaacatgagccagctggtggaggagatgctgctgaagcagagagacttcctgcagagccacatgatcctgggcctggtggtgaccctgagccccgccctggacagccagttccaggaggccagaagaaagctgagccagaagctgagagagctgaccgagcagccccccatgcccgccagacccagatggatgaagtgcgtggaggagaccggcaccttcttcgagcccaccctggccgccctgttcgtgagagaggccttcggccccagcaccagaagcgccgccatgaagctgttcaccgccatcagagacgccctgatcaccagactgagaaacctgccctggatgaacgaggagacccagaacatggcccaggacaaggtggcccagctgcaggtggagatgggcgccagcgagtgggccctgaagcccgagctggccagacaggagtacaacgacatccagctgggcagcagcttcctgcagagcgtgctgagctgcgtgagaagcctgagagccagaatcgtgcagagcttcctgcagccccacccccagcacagatggaaggtgagcccctgggacgtgaacgcctactacagcgtgagcgaccacgtggtggtgttccccgccggcctgctgcagccccccttcttccaccccggctaccccagagccgtgaacttcggcgccgccggcagcatcatggcccacgagctgctgcacatcttctaccagctgctgctgcccggcggctgcctggcctgcgacaaccacgccctgcaggaggcccacctgtgcctgaagagacactacgccgccttccccctgcccagcagaaccagcttcaacgacagcctgaccttcctggagaacgccgccgacgtgggcggcctggccatcgccctgcaggcctacagcaagagactgctgagacaccacggcgagaccgtgctgcccagcctggacctgagcccccagcagatcttcttcagaagctacgcccaggtgatgtgcagaaagcccagcccccaggacagccacgacacccacagccccccccacctgagagtgcacggccccctgagcagcacccccgccttcgccagatacttcagatgcgccagaggcgccctgctgaaccccagcagcagatgccagctgtggtag

SEQ ID NO: 8661 - protein, 584 aa, Artificial Sequence
  derived and/or modified sequence
MSVRYSSSKHYSSSRSGGGGGGGGCGGGGGVSSLRISSSKGSLGGGFSSGGFSGGSFSRGSSGGGCFGGSSGGYGGLGGFGGGSFRGSYGSSSFGGSYGGIFGGGSFGGGSFGGGSFGGGGFGGGGFGGGFGGGFGGDGGLLSGNEKVTMQNLNDRLASYLDKVRALEESNYELEGKIKEWYEKHGNSHQGEPRDYSKYYKTIDDLKNQILNLTTDNANILLQIDNARLAADDFRLKYENEVALRQSVEADINGLRRVLDELTLTKADLEMQIESLTEELAYLKKNHEEEMKDLRNVSTGDVNVEMNAAPGVDLTQLLNNMRSQYEQLAEQNRKDAEAWFNEKSKELTTEIDNNIEQISSYKSEITELRRNVQALEIELQSQLALKQSLEASLAETEGRYCVQLSQIQAQISALEEQLQQIRAETECQNTEYQQLLDIKIRLENEIQTYRSLLEGEGSSGGGGRGGGSFGGGYGGGSSGGGSSGGGHGGGHGGSSGGGYGGGSSGGGSSGGGYGGGSSSGGHGGSSSGGYGGGSSGGGGGGYGGGSSGGGSSSGGGYGGGSSSGGHKSSSSGSVGESSSKGPRY

SEQ ID NO: 8662 - DNA, 1755 bp, Artificial Sequence
  derived and/or modified sequence
atgtctgtgcgttactcttcctctaagcactattcctcgtcccgttcagggggtggaggaggcggagggggctgtggaggaggtggtggggtgagctcattgcggatatctagttcaaaaggtagcctgggcggcggcttttcttccggtggattctcaggcggtagttttagccgcggaagcagcggcgggggttgcttcggcggtagttctggaggatacggtggtctggggggatttggaggagggtcattccgaggctcttatgggagttcatcattcggagggtcctacggaggtatcttcggcggaggaagctttggggggggctctttcggcggggggtcattcggagggggaggctttggcggcggaggtttcgggggcggctttggtggaggcttcgggggagacggcgggctcctcagcggcaatgagaaagtaaccatgcagaacctcaacgacaggctggcgtcctacttggacaaggtccgtgctctcgaggagagtaattacgaactcgagggcaagattaaggaatggtatgagaagcatggcaacagtcatcagggcgagccaagagattattccaaatattacaaaacaatagacgacctgaagaaccagatactcaacctgactactgataacgcaaacatattactgcagatcgataacgcgcgcctcgccgccgatgacttcagactgaagtacgaaaacgaagtagcactgcgccaaagcgttgaagcagacattaacggtctgagaagagtactggacgagctgacactgaccaaagccgaccttgagatgcagatagagtctctgacagaggagctggcctaccttaagaagaaccacgaggaggaaatgaaggacctgcgcaacgtaagcactggagatgttaatgttgagatgaacgccgcccctggagtcgacctgactcagctgctgaataatatgcgttcacagtacgagcagctcgctgaacagaaccggaaagacgcagaagcatggttcaacgagaagagcaaagagttgaccaccgaaatcgacaacaatatagagcagatatcaagctacaaatcagaaataaccgagcttcggagaaatgtgcaagccttagagatcgagctgcagagccagctggccttaaaacagtcccttgaagcgtcgctggctgaaactgagggaaggtactgtgtgcaattgtcacagatacaggctcagatctctgccctggaagaacagcttcagcagatccgggctgaaactgagtgtcagaacacagagtaccagcaactacttgacatcaaaatcaggctggagaatgaaattcaaacgtaccgatcactgctggaaggcgaggggtccagcggaggggggggcaggggaggaggcagtttcggcggcggatatggcgggggcagcagcggaggggggagctccggcggcggccatgggggaggacacggcggcagttccggagggggttatggcggcggctcttcagggggcggttcatctggaggaggctacggcggcggtagctccagtggcgggcatggaggctcgagttcaggcgggtacgggggcggttcctctggaggcggtggcgggggttatggtggaggtagttccggcgggggctccagtagcggggggggatacggaggcggctccagctctggcggacataagagctcttcctcaggctcagtcggggagagcagctctaagggtcctaggtactag

SEQ ID NO: 8663 - DNA, 2124 bp, Artificial Sequence
  derived and/or modified sequence
cagcatcaccatgtctgttcgatacagctcaagcaagcactactcttcctcccgcagtggaggaggaggaggaggaggaggatgtggaggaggaggaggagtgtcatccctaagaatttctagcagcaaaggctcccttggtggaggatttagctcaggggggttcagtggtggctcttttagccgtgggagctctggtgggggctgctttgggggctcatcaggtggctatggaggattaggaggttttggtggaggtagctttcgtggaagctatggaagtagcagctttggtgggagttatggaggcatctttggagggggcagtttcggaggtggcagctttggtgggggcagctttggtggaggcggctttggtggaggcggctttggaggaggctttggtggtggatttggaggagatggtggccttctctctggaaatgaaaaagtaaccatgcagaatctgaatgaccgcctggcttcctacttggacaaagttcgggctctggaagaatcaaactatgagctggaaggcaaaatcaaggagtggtatgaaaagcatggcaactcacatcagggggagcctcgtgactacagcaaatactacaaaaccatcgatgaccttaaaaatcagattctcaacctaacaactgataatgccaacatcctgcttcagatcgacaatgccaggctggcagctgatgacttcaggctgaagtatgagaatgaggtagctctgcgccagagcgtggaggctgacatcaacggcctgcgtagggtgctggatgagctgaccctgaccaaggctgacctggagatgcaaattgagagcctgactgaagagctggcctatctgaagaagaaccacgaggaggaaatgaaagaccttcgaaatgtgtccactggtgatgtgaatgtggaaatgaatgctgccccgggtgttgatctgactcaacttctgaataacatgagaagccaatatgaacaacttgctgaacaaaaccgcaaagatgctgaagcctggttcaatgaaaagagcaaggaactgactacagaaattgataataacattgaacagatatccagctataaatctgagattactgaattgagacgtaatgtacaagctctggagatagaactacagtcccaactggccttgaaacaatccctggaagcctccttggcagaaacagaaggtcgctactgtgtgcagctctcacagattcaggcccagatatccgctctggaagaacagttgcaacagattcgagctgaaaccgagtgccagaatactgaataccaacaactcctggatattaagatccgactggagaatgaaattcaaacctaccgcagcctgctagaaggagagggaagttccggaggcggcggacgcggcggcggaagtttcggcggcggctacggcggcggaagctccggcggcggaagctccggcggcggccacggcggcggccacggcggcagttccggcggcggctacggaggcggaagctccggcggcggaagctccggcggcggctacgggggcggaagctccagcggcggccacggcggcagttccagcggcggctacggtggtggcagttccggcggcggcggcggcggctacgggggcggcagctccggcggcggcagcagctccggcggcggatacggcggcggcagctccagcggaggccacaagtcctcctcttccgggtccgtgggcgagtcttcatctaagggaccaagatactaacaaaaccagagtaatcaagacaattattgaagaggtggcgcccgacggtagagttctttcatctatggttgaatcagaaaccaagaaacactactattaaactgcatcaagaggaaagagtctcccttcacacagaccattatttacagatgcatggaaaacaaagtctccaagaaaacacttctgtcttgatggtctatggaaatagaccttgaaaataaggtgtctacaaggtgttttgtggtttctgtatttcttcttttcactttaccagaaagtgttctttaatggaaagaaaaacaactttctgttctcatttactaatgaatttcaataaactttcttactgatgcaaacta

SEQ ID NO: 8664 - DNA, 1755 bp, Artificial Sequence
  derived and/or modified sequence
atgtctgtgcgctacagcagcagcaagcactacagcagcagccgcagcggcggcggcggcggcggcggcggctgcggcggcggcggcggcgtgagcagcctgcgcatcagcagcagcaagggcagcctgggcggcggcttcagcagcggcggcttcagcggcggcagcttcagccggggcagcagcggcggcggctgctttggaggcagcagcggcggctacggcggcctgggcggctttggaggcggcagcttccggggcagctatggcagcagcagctttggaggcagctatggaggcatctttggaggcggcagctttggaggcggcagctttggaggcggcagctttggaggcggcggctttggaggcggcggctttggaggcggctttggaggcggctttggaggagatggcggcctgctgtctggaaatgagaaggtgaccatgcagaacctgaatgaccggctggccagctacctggacaaggtgcgggccctggaggagagcaactatgagctggagggcaagatcaaggagtggtatgagaagcacggcaacagccaccagggcgagccccgggactacagcaagtactacaagaccattgatgacctgaagaaccagatcctgaacctgaccacagacaatgccaacatcctgctgcagattgacaatgcccggctggccgcagatgacttccggctgaagtatgaaaatgaggtggccctgcggcagagcgtggaggccgacatcaatggcctgcggcgggtgctggatgagctgaccctgaccaaggctgacctggagatgcagatcgagagcctgacagaggagctggcctacctgaagaagaaccacgaggaggagatgaaggacctgagaaatgtgtccactggagatgtgaatgtggagatgaatgctgcccctggggtggacctgacccagctgctgaacaacatgaggagccagtatgagcagctggccgagcagaacaggaaggatgctgaggcctggttcaatgagaagagcaaggagctgaccacagaaattgacaacaacatcgagcagatcagcagctacaagtctgagatcacagagctgcggagaaatgtgcaggccctggagattgagctgcagagccagctggccctgaagcagagcctggaggccagcctggccgagacagagggccgctactgtgtgcagctgagccagatccaggcccagatcagcgccctggaggagcagctgcagcagatccgggcagagacagagtgccagaacacagagtaccagcagctgctggacatcaagatccggctggagaatgagatccagacctaccgcagcctgctggagggggagggcagcagcggcggcggcggccggggcggcggcagctttggaggcggctatggaggcggcagcagcggcggcggcagcagcggcggcggccatggaggcggccatggaggcagcagcggcggcggctatggaggcggcagcagcggcggcggcagcagcggcggcggctatggaggcggcagcagcagcggcggccacggcggcagcagcagcggcggctacggcggcggcagcagcggcggcggcggcggcggctacggcggcggcagcagcggcggcggcagcagcagcggcggcggctatggaggcggcagcagcagcggcggccacaagagcagcagcagcggctctgtgggggagagcagcagcaagggcccccgctactag

SEQ ID NO: 8665 - DNA, 1755 bp, Artificial Sequence
  derived and/or modified sequence
atgagcgtgcggtacagcagcagcaagcactacagcagcagccggagcggcggcgggggtggcggcggaggctgtggtggcggcggtggcgtttcatccttacggatcagttcatcgaaaggtagtctcggcgggggatttagctcgggcgggtttagtggcggctccttctccagaggcagctcagggggaggatgtttcggcggatcctccggaggctatggaggcctgggcggcttcggcggcggctcattcaggggaagctacggaagcagctcatttggcggttcttatggcggaatatttgggggaggctcctttggaggtggttcctttggagggggaagtttcgggggaggtgggtttggcggcggaggctttggcggtgggtttggcggcgggttcggaggtgacggcggccttctttcaggcaatgaaaaagttactatgcagaacctgaacgatcgcctggcctcttacttagacaaagttagagcgcttgaggaatcaaactacgagttggaaggtaaaattaaggagtggtacgagaagcatgggaactcacaccagggtgagccacgcgactactctaaatattacaagactattgatgacctcaagaatcagatcctcaatctgaccaccgacaatgctaacattttactgcagattgataatgcgagactggctgccgacgattttcggttgaaatacgagaatgaagtagctctgagacagtcagtggaggcagacataaacggtctcaggagagtgctcgatgagctgaccctcaccaaagctgatcttgagatgcagattgagtccttaaccgaagagttggcatacctgaagaaaaatcatgaggaggagatgaaggatctacgaaatgtgtcaaccggggatgttaacgtcgagatgaacgccgctcctggcgttgacctgactcaacttttgaacaatatgcgaagccagtatgagcaacttgcagagcagaatagaaaggatgcagaagcatggttcaatgagaagtcgaaggagcttacaaccgagatagataacaatattgagcagatcagcagttacaaaagcgagataaccgaactgcggcgaaatgttcaggccctggaaattgaattgcagagccagctggcactgaaacagagcctggaagcttcgctggctgagaccgaaggcaggtattgcgtgcagcttagtcaaatacaagcccaaattagcgctttagaagaacagctgcaacagatccgggctgagacggaatgtcagaacaccgagtatcagcagctcctggatatcaaaattcggcttgagaatgaaattcagacttacaggtctctgctggagggggagggtagctccggggggggcgggagaggtggcggctcattcggcggcggttatggggggggaagcagcggtggaggcagtagcgggggcggccacggtggaggccacgggggaagtagtgggggcgggtacggtgggggttcaagtggggggggctcatccggaggtggctacgggggtggaagctcctcgggcggacatggagggtcgagcagtggcggctacggtggtgggtctagtggcggcggtggtgggggctatggcggcggtagctccggtggcggatcatcctcaggaggtgggtatggggggggcagtagttctgggggtcacaaatcttcttcgtcagggtctgtgggggagtccagctcgaaaggacctcgttactag

SEQ ID NO: 8666 - DNA, 1755 bp, Artificial Sequence
  derived and/or modified sequence
atgagtgtgcgctactcaagctcaaagcattactctagtagccgctctgggggtgggggtggaggcggaggctgcgggggaggcggaggggtcagcagtctgcggattagcagcagcaaggggtccctggggggtggcttctctagtgggggattttcagggggaagtttctcccggggaagctctggagggggttgttttggcggaagctccggagggtatggcggactgggtgggttcggtggcggttctttcaggggaagctacggaagctccagcttcggcggatcatatggaggcatttttggaggaggatcattcggtggcggatcattcggcggagggtcttttggcggaggtgggtttggagggggaggtttcggtggcggttttggaggcggattcggaggcgacggcggtctcttatcaggcaacgaaaaagtgactatgcagaacctcaatgatcgtctggcctcttacctggacaaagttcgggcattggaagagtctaattacgagctagaggggaagattaaggaatggtacgaaaaacacggtaacagtcatcagggcgaaccacgagattatagcaaatactacaagaccattgatgatctgaagaaccaaattctaaacctcactaccgacaacgcaaacatcttgctccaaattgataacgctcgactggcagctgacgacttcagactcaaatacgaaaatgaagtggctttgcgccagagtgtggaggcagatataaacgggcttcgccgtgttctcgatgaactcacattaactaaggccgatctggagatgcagatcgagtctctgaccgaggagctcgcctacctcaagaaaaaccacgaggaggaaatgaaagacctcagaaatgttagtaccggtgatgtgaatgtcgagatgaacgctgctccaggagttgacttgactcagcttctgaacaatatgaggagccaatatgaacagctggccgagcagaataggaaggatgcagaagcctggtttaatgagaagtccaaggagttgactactgagatagataacaacattgagcagatttcctcttataagagtgaaatcaccgaactgcggaggaacgtgcaagccttggagatcgagcttcagagtcagctagctctgaagcagtctcttgaagcctctctagcagaaacggaaggacgatactgtgtgcagcttagccagatccaggcacagatctccgctcttgaggagcagttgcagcagataagagctgagacagaatgccagaacacagaatatcagcaactcctggacattaagatccgcttagagaacgaaatccagacctacagatcactgttggagggagaggggtccagcggaggtggcggtagggggggaggctcttttggcggtggctatgggggtggatcaagcggcggaggatcgtccggaggaggccacggagggggtcatggaggctccagcggcggtggttacggcggagggtcaagcggaggaggtagttcaggcggagggtatggtggtggatctagtagtggaggacatggtgggtcctcttctggcggatacggcggtggcagctctggaggcggaggcggtgggtacggcggtggcagcagcgggggaggatcgagctcaggaggaggttacggcggtgggtccagttcaggcggacacaaatccagttcctccgggtcagttggcgagagtagtagtaagggcccacgctactag

SEQ ID NO: 8667 - DNA, 1755 bp, Artificial Sequence
  derived and/or modified sequence
atgagcgtgagatacagcagcagcaagcactacagcagcagcagaagcggcggcggcggcggcggcggcggctgcggcggcggcggcggcgtgagcagcctgagaatcagcagcagcaagggcagcctgggcggcggcttcagcagcggcggcttcagcggcggcagcttcagcagaggcagcagcggcggcggctgcttcggcggcagcagcggcggctacggcggcctgggcggcttcggcggcggcagcttcagaggcagctacggcagcagcagcttcggcggcagctacggcggcatcttcggcggcggcagcttcggcggcggcagcttcggcggcggcagcttcggcggcggcggcttcggcggcggcggcttcggcggcggcttcggcggcggcttcggcggcgacggcggcctgctgagcggcaacgagaaggtgaccatgcagaacctgaacgacagactggccagctacctggacaaggtgagagccctggaggagagcaactacgagctggagggcaagatcaaggagtggtacgagaagcacggcaacagccaccagggcgagcccagagactacagcaagtactacaagaccatcgacgacctgaagaaccagatcctgaacctgaccaccgacaacgccaacatcctgctgcagatcgacaacgccagactggccgccgacgacttcagactgaagtacgagaacgaggtggccctgagacagagcgtggaggccgacatcaacggcctgagaagagtgctggacgagctgaccctgaccaaggccgacctggagatgcagatcgagagcctgaccgaggagctggcctacctgaagaagaaccacgaggaggagatgaaggacctgagaaacgtgagcaccggcgacgtgaacgtggagatgaacgccgcccccggcgtggacctgacccagctgctgaacaacatgagaagccagtacgagcagctggccgagcagaacagaaaggacgccgaggcctggttcaacgagaagagcaaggagctgaccaccgagatcgacaacaacatcgagcagatcagcagctacaagagcgagatcaccgagctgagaagaaacgtgcaggccctggagatcgagctgcagagccagctggccctgaagcagagcctggaggccagcctggccgagaccgagggcagatactgcgtgcagctgagccagatccaggcccagatcagcgccctggaggagcagctgcagcagatcagagccgagaccgagtgccagaacaccgagtaccagcagctgctggacatcaagatcagactggagaacgagatccagacctacagaagcctgctggagggcgagggcagcagcggcggcggcggcagaggcggcggcagcttcggcggcggctacggcggcggcagcagcggcggcggcagcagcggcggcggccacggcggcggccacggcggcagcagcggcggcggctacggcggcggcagcagcggcggcggcagcagcggcggcggctacggcggcggcagcagcagcggcggccacggcggcagcagcagcggcggctacggcggcggcagcagcggcggcggcggcggcggctacggcggcggcagcagcggcggcggcagcagcagcggcggcggctacggcggcggcagcagcagcggcggccacaagagcagcagcagcggcagcgtgggcgagagcagcagcaagggccccagatactag

SEQ ID NO: 8668 - protein, 177 aa, Artificial Sequence
  derived and/or modified sequence
MTTSIRQFTSSSSIKGSSGLGGGSSRTSCQLSGGLGAGSCRPGSAGGLGSALGGSSYSSCYSFGSGGGYGSSSFEGVDGLLVGGEKATMQNLNDRLASYLDKVRALEEADTELEVKIRDWYQRQAPGPARDYSQYYRIIEELQNKPPWTMPTSCYILTMPIWLLLTSAPKSWQNEGR

SEQ ID NO: 8669 - protein, 441 aa, Artificial Sequence
  derived and/or modified sequence
MTTSIRQFTSSSSIKGSSGLGGGSSRTSCQLSGGLGAGSCRPGSAGGLGSALGGSSYSSCYSFGSGGGYGSSSFEGVDGLLVGGEKATMQNLNDRLASYLDKVRALEEADTELEVKIRDWYQRQAPGPARDYSQYYRIIEELQNKILTATVDNANILLHIDNAHLAAADFRTKFETEQALCLSVEADINGPCRVLDELTLARADLEMHIENLKEELAYLKKNHEEMNAPRGQVGGEINVEMGAAPGVDLSRILNEMREQYEKMAEKNRKDAEDWFFSKTEELNREVATNSELVQSGKSEISELRCTMQALEIELQSQLSMKASLEGNLAETENRYCMQLSQIQGLIGSVEERLAQLLCEMEQQNQEYKILLDMKMRLELEITTYHRLLEGEDAHEGLLAPTHFKLPASPAAVTTCQVPTIVEEVQDGKVISSREQVRQTTR

SEQ ID NO: 8670 - protein, 177 aa, Artificial Sequence
  derived and/or modified sequence
MTTSIRQFTSSSSIKGSSGLGGGSSRTSCQLSGGLGAGSCRPGSAGGLGSALGGSSYSSCYSFGSGGGYGSSSFEGVDGLLVGGEKATMQNLNDRLASYLDKVRALEEADTELEVKIRDWYQRQAPGPARDYSQYYRIIEELQNKPPWTMPTSCYRMTMPIWLLLTSAPKSWQNEGR

SEQ ID NO: 8671 - protein, 432 aa, Artificial Sequence
  derived and/or modified sequence
MTTSIRQFTSSSSIKGSSGLGGGSSRTSCRLSGGLGAGSCRLGSAGGLGSTLGGSSYSSCYSFGSGGGYGSSFGGVDGLLAGGEKATMQNLNDRLASYLDKVRALEEANTELEVKIRDWYQRQAPGPARDYSQYYRTIEELQNKILTATVDNANILLQIDNARLAADDFRTKFETEQALRLSVEADINGLRRVLDELTLARADLEMQIENLKEELAYLKKNHEEEMNALRGQVGGEINVEMDAAPGVDLSRILNEMRDQYEKMAEKNRKDAEDWFFSKTEELNREVATNSELVQSGKSEISELRRTMQALEIELQSQLSMKASLEGNLAETENRYCVQLSQIQGLIGSVEEQLAQLRCEMEQQNQEYKILLDVKTRLEQEIATYRRLLEGEDAHLTQYKKEPVTTRQVRTIVEEVQDGKVISSREQVHQTTR

SEQ ID NO: 8672 - DNA, 534 bp, Artificial Sequence
  derived and/or modified sequence
atgaccaccagcatcagacagttcaccagcagcagcagcatcaagggcagcagcggcctgggcggcggcagcagcagaaccagctgccagctgagcggcggcctgggcgccggcagctgcagacccggcagcgccggcggcctgggcagcgccctgggcggcagcagctacagcagctgctacagcttcggcagcggcggcggctacggcagcagcagcttcgagggcgtggacggcctgctggtgggcggcgagaaggccaccatgcagaacctgaacgacagactggccagctacctggacaaggtgagagccctggaggaggccgacaccgagctggaggtgaagatcagagactggtaccagagacaggcccccggccccgccagagactacagccagtactacagaatcatcgaggagctgcagaacaagcccccctggaccatgcccaccagctgctacatcctgaccatgcccatctggctgctgctgaccagcgcccccaagagctggcagaacgagggcagatag

SEQ ID NO: 8673 - DNA, 1326 bp, Artificial Sequence
  derived and/or modified sequence
atgaccaccagcatcagacagttcaccagcagcagcagcatcaagggcagcagcggcctgggcggcggcagcagcagaaccagctgccagctgagcggcggcctgggcgccggcagctgcagacccggcagcgccggcggcctgggcagcgccctgggcggcagcagctacagcagctgctacagcttcggcagcggcggcggctacggcagcagcagcttcgagggcgtggacggcctgctggtgggcggcgagaaggccaccatgcagaacctgaacgacagactggccagctacctggacaaggtgagagccctggaggaggccgacaccgagctggaggtgaagatcagagactggtaccagagacaggcccccggccccgccagagactacagccagtactacagaatcatcgaggagctgcagaacaagatcctgaccgccaccgtggacaacgccaacatcctgctgcacatcgacaacgcccacctggccgccgccgacttcagaaccaagttcgagaccgagcaggccctgtgcctgagcgtggaggccgacatcaacggcccctgcagagtgctggacgagctgaccctggccagagccgacctggagatgcacatcgagaacctgaaggaggagctggcctacctgaagaagaaccacgaggagatgaacgcccccagaggccaggtgggcggcgagatcaacgtggagatgggcgccgcccccggcgtggacctgagcagaatcctgaacgagatgagagagcagtacgagaagatggccgagaagaacagaaaggacgccgaggactggttcttcagcaagaccgaggagctgaacagagaggtggccaccaacagcgagctggtgcagagcggcaagagcgagatcagcgagctgagatgcaccatgcaggccctggagatcgagctgcagagccagctgagcatgaaggccagcctggagggcaacctggccgagaccgagaacagatactgcatgcagctgagccagatccagggcctgatcggcagcgtggaggagagactggcccagctgctgtgcgagatggagcagcagaaccaggagtacaagatcctgctggacatgaagatgagactggagctggagatcaccacctaccacagactgctggagggcgaggacgcccacgagggcctgctggcccccacccacttcaagctgcccgccagccccgccgccgtgaccacctgccaggtgcccaccatcgtggaggaggtgcaggacggcaaggtgatcagcagcagagagcaggtgagacagaccaccagatag

SEQ ID NO: 8674 - DNA, 534 bp, Artificial Sequence
  derived and/or modified sequence
atgaccaccagcatcagacagttcaccagcagcagcagcatcaagggcagcagcggcctgggcggcggcagcagcagaaccagctgccagctgagcggcggcctgggcgccggcagctgcagacccggcagcgccggcggcctgggcagcgccctgggcggcagcagctacagcagctgctacagcttcggcagcggcggcggctacggcagcagcagcttcgagggcgtggacggcctgctggtgggcggcgagaaggccaccatgcagaacctgaacgacagactggccagctacctggacaaggtgagagccctggaggaggccgacaccgagctggaggtgaagatcagagactggtaccagagacaggcccccggccccgccagagactacagccagtactacagaatcatcgaggagctgcagaacaagcccccctggaccatgcccaccagctgctacagaatgaccatgcccatctggctgctgctgaccagcgcccccaagagctggcagaacgagggcagatag

SEQ ID NO: 8675 - DNA, 534 bp, Artificial Sequence
  derived and/or modified sequence
atgacaacctccatcagacagttcacgtcgtcaagcagtattaagggaagctcaggtctcggcgggggcagttctcgcacctcttgccagctatcaggcggacttggtgcagggtcatgccgacctgggtctgccggcgggctgggcagtgcactcggtggtagtagctacagctcatgctattcttttggaagcgggggtggctacgggtcatccagttttgagggagtcgatggacttctggttggaggtgaaaaagctacgatgcaaaatcttaacgataggctggccagctatctcgataaagtaagagcactggaggaagccgatacagaactggaggtcaagatcagagattggtaccaaaggcaggccccaggaccagcgcgcgactactcgcagtattacaggatcatcgaagaactgcagaacaaacccccttggacaatgcccacctcatgctatatcctcacaatgcccatctggctattactcacatccgccccgaagtcttggcagaatgagggccgctag

SEQ ID NO: 8676 - DNA, 1326 bp, Artificial Sequence
  derived and/or modified sequence
atgacaacgtcaatcagacagttcactagcagttcaagcataaaaggctcaagtgggctcggcggtggctcttctcgcacctcttgccagctgtccggtggtctcggcgcaggctcttgtaggcctggcagtgccggcggcctgggcagtgcattgggaggcagtagttattcatcttgttactctttcggctccggcggtggctatgggtcttcctcgtttgagggcgtagacgggcttttggttggtggtgagaaagcaactatgcagaatctgaacgaccggctggcttcatacctggataaagttcgagccttagaagaagcagataccgagctagaagtcaaaattcgcgactggtatcagcgacaagccccaggcccagctagagactattcacagtactacaggattattgaggagcttcagaacaagatcctcactgccactgtcgacaacgcaaatattctgcttcacattgacaacgctcaccttgccgctgccgattttaggaccaaattcgagactgaacaggccctgtgtctgagcgtggaggcagacataaatgggccctgtagggtactggacgagcttaccctggctcgcgccgacctggaaatgcatatagagaacttgaaagaggagcttgcttacctaaaaaagaaccatgaggagatgaatgccccccggggacaggttgggggggaaatcaatgtggagatgggcgctgcacctggtgttgatttgagtcgcatactgaatgagatgagagagcagtacgagaaaatggctgagaagaatcggaaagatgctgaagattggtttttttcaaaaacggaggaactaaacagagaggtcgctacaaactctgagcttgtgcagtccgggaaaagtgagataagtgagctgcgctgcacaatgcaagcgctcgagatcgaactacaatcacagctcagcatgaaggcctcactggagggcaaccttgccgagacagaaaaccgctattgcatgcagctttcccagatccagggcttgatagggtccgtcgaagagcggctggcgcagctgctctgcgaaatggagcagcaaaaccaggagtacaagatcctcctcgatatgaaaatgaggttagagctcgaaatcaccacttaccacagactgctcgagggcgaggacgcccatgaaggccttcttgccccaacgcacttcaagcttccagcctcaccagcagccgtgaccacttgtcaggtgccaacgattgttgaagaggtgcaggacggaaaggtcatctcttcccgcgagcaagtgcgtcagaccacgcgatag

SEQ ID NO: 8677 - DNA, 534 bp, Artificial Sequence
  derived and/or modified sequence
atgactaccagcataagacagttcacaagttctagttctatcaaaggctcatcgggactgggtggtggaagttctaggaccagctgccagctgtctggcggcctgggcgcgggctcctgcagacccggctccgctgggggcttaggctcagccttgggcggtagcagttattcctcctgttactcatttggcagcggcgggggatatgggagtagctccttcgagggtgtggacgggctgctcgtcgggggcgagaaagccaccatgcagaacctgaatgaccggctcgccagctacttagacaaggtgcgggcactggaagaggcagatactgagctagaagtgaagatccgcgactggtaccaacgccaagcccctgggcctgcacgagattactcccagtactatcgcattatcgaagagttacaaaataaaccaccctggaccatgccaacatcctgctaccggatgacgatgcccatttggctgcttctcactagtgcccccaagtcttggcagaatgaggggcggtag

SEQ ID NO: 8678 - DNA, 534 bp, Artificial Sequence
  derived and/or modified sequence
atgaccaccagcatccggcagttcaccagcagcagcagcatcaagggcagcagcggcctgggcggcggcagcagcaggaccagctgccagctgagcggcggcctgggcgccggcagctgccggcccggcagcgctgggggcctgggcagcgccctgggcggcagcagctacagcagctgctacagctttggaagtggcggcggctacggcagcagcagctttgagggcgtggatggcctgctggtgggcggggagaaggccaccatgcagaacctgaatgaccggctggccagctacctggacaaggtgcgggccctggaggaggccgacacagagctggaggtgaagatccgggactggtaccagaggcaggcccctggccctgcccgggactacagccagtactaccgcatcatcgaggagctgcagaacaagccaccctggaccatgcccaccagctgctacatcctgaccatgcccatctggctgctgctgaccagcgcccccaagtcctggcagaatgaaggaagatag

SEQ ID NO: 8679 - DNA, 1326 bp, Artificial Sequence
  derived and/or modified sequence
atgaccaccagcatccggcagttcaccagcagcagcagcatcaagggcagcagcggcctgggcggcggcagcagcaggaccagctgccagctgagcggcggcctgggcgccggcagctgccggcccggcagcgctgggggcctgggcagcgccctgggcggcagcagctacagcagctgctacagctttggaagtggcggcggctacggcagcagcagctttgagggcgtggatggcctgctggtgggcggggagaaggccaccatgcagaacctgaatgaccggctggccagctacctggacaaggtgcgggccctggaggaggccgacacagagctggaggtgaagatccgggactggtaccagaggcaggcccctggccctgcccgggactacagccagtactaccgcatcatcgaggagctgcagaacaagatcctgacagccaccgtggacaatgccaacatcctgctgcacatcgacaatgcccacctggccgctgctgacttccgcaccaagtttgaaacagagcaggccctgtgcctgtctgtggaggccgacatcaatggcccctgccgggtgctggatgagctgaccctggcccgggctgacctggagatgcacatcgagaacctgaaggaggagctggcctacctgaagaagaaccacgaggagatgaatgccccccggggccaggtgggcggggagatcaacgtggagatgggcgccgcccctggggtggacctgagccgcatcctgaatgagatgagggagcagtatgagaagatggccgagaagaacaggaaggatgctgaggactggttcttcagcaagacagaggagctgaaccgggaggtggccaccaacagcgagctggtgcagagcggcaagtctgagatcagcgagctgcgctgcaccatgcaggccctggagattgagctgcagagccagctgtccatgaaggccagcctggagggcaacctggccgagacagagaaccgctactgcatgcagctgagccagatccagggcctcatcggctctgtggaggagcggctggcccagctgctgtgtgagatggagcagcagaaccaggagtacaagatcctgctggacatgaagatgaggctggagctggagatcaccacctaccaccggctgctggagggagaagatgcccacgagggcctgctggcccccacccacttcaagctgcctgccagccctgctgctgtgaccacctgccaggtgcccaccatcgtggaggaggtgcaggacggcaaggtgatcagcagccgggagcaggtgcggcagaccaccaggtag

SEQ ID NO: 8680 - DNA, 534 bp, Artificial Sequence
  derived and/or modified sequence
atgaccaccagcatccggcagttcaccagcagcagcagcatcaagggcagcagcggcctgggcggcggcagcagcaggaccagctgccagctgagcggcggcctgggcgccggcagctgccggcccggcagcgctgggggcctgggcagcgccctgggcggcagcagctacagcagctgctacagctttggaagtggcggcggctacggcagcagcagctttgagggcgtggatggcctgctggtgggcggggagaaggccaccatgcagaacctgaatgaccggctggccagctacctggacaaggtgcgggccctggaggaggccgacacagagctggaggtgaagatccgggactggtaccagaggcaggcccctggccctgcccgggactacagccagtactaccgcatcatcgaggagctgcagaacaagccaccctggaccatgcccaccagctgctacaggatgaccatgcccatctggctgctgctgaccagcgcccccaagtcctggcagaatgaaggaagatag

SEQ ID NO: 8681 - DNA, 1174 bp, Artificial Sequence
  derived and/or modified sequence
acactacttggggcccctcttctttccagcccttctcctgtgtgcctgcctcctgccgccgccaccatgaccacctccatccgccagttcacctcctccagctccatcaagggctcctctggcctggggggcggctcgtcccgcacctcctgccagctgtctggcggcctgggtgccggctcctgcaggccgggatctgctggtggcctgggcagcgccctcgggggtagcagctactccagctgctacagctttggctctggcggtggctatggcagcagcagctttgagggcgttgatgggctgctggtcggaggtgagaaggccaccatgcagaacctcaatgaccgcctggcctcctacctggacaaggtgcgtgccctggaggaggccgacactgagctggaggtaaagatccgtgactggtaccagaggcaggccccggggcccgcccgtgactacagccagtactacaggataatcgaggagctgcagaacaagccaccgtggacaatgccaacatcctgctacatattgacaatgcccatctggctgctgctgacttccgcaccaaagtcctggcaaaatgaaggcaggtgagcagccaggacctggacctgcaattccaagcagcctgggctgaagtccctgattcccatggcaggtttgagacagagcaggccctgtgcctgagtgtggaggccgacatcaatggcccgtgcagggtgctggatgagctgaccctggccagagccgacctggagatgcacattgagaacctcaaggaggagctggcctacctgaagaagaaccacgaggagatgaacgccccgcgaggccaggtgggcggtgagatcaatgtggagatgggcgctgccccaggtgtggacctgagccgcatcctgaatgagatgcgtgagcagtatgagaagatggcagagaagaaccgcaaggatgccgaggattggttcttcagcaagacagaggagctgaaccgcgaggtggctaccaacagtgagctggtccagagcggcaagagcgagatttcggagctccggtgcaccatgcaggccttggagatcgagctgcagtcccagctcagcatgaaagcatccctggagggcaacctggcggagacagagaaccgctactgcatgcagctgtcccagatcca

SEQ ID NO: 8682 - DNA, 1546 bp, Artificial Sequence
  derived and/or modified sequence
ctacactacttggggcccctcttctttccagcccttctcctgtgtgcctgcctcctgccgccgccaccatgaccacctccatccgccagttcacctcctccagctccatcaagggctcctctggcctggggggcggctcgtcccgcacctcctgccagctgtctggcggcctgggtgccggctcctgcaggccgggatctgctggtggcctgggcagcgccctcgggggtagcagctactccagctgctacagctttggctctggcggtggctatggcagcagcagctttgagggcgttgatgggctgctggtcggaggtgagaaggccaccatgcagaacctcaatgaccgcctggcctcctacctggacaaggtgcgtgccctggaggaggccgacactgagctggaggtaaagatccgtgactggtaccagaggcaggccccggggcccgcccgtgactacagccagtactacaggataatcgaggagctgcagaacaagatcctcacagccaccgtggacaatgccaacatcctgctacatattgacaatgcccatctggctgctgctgacttccgcaccaagtttgagacagagcaggccctgtgcctgagtgtggaggccgacatcaatggcccgtgcagggtgctggatgagctgaccctggccagagccgacctggagatgcacattgagaacctcaaggaggagctggcctacctgaagaagaaccacgaggagatgaacgccccgcgaggccaggtgggcggtgagatcaatgtggagatgggcgctgccccaggtgtggacctgagccgcatcctgaatgagatgcgtgagcagtatgagaagatggcagagaagaaccgcaaggatgccgaggattggttcttcagcaagacagaggagctgaaccgcgaggtggctaccaacagtgagctggtccagagcggcaagagcgagatttcggagctccggtgcaccatgcaggccttggagatcgagctgcagtcccagctcagcatgaaagcatccctggagggcaacctggcggagacagagaaccgctactgcatgcagctgtcccagatccaggggctgatcggcagtgtggaggagcggctggcccagcttctctgcgagatggagcagcagaaccaggagtacaagatcctcctggacatgaagatgcggctggagctggagatcaccacctaccaccgcctgctggagggcgaggatgcccacgagggcctcctggcccctacccactttaaattgcctgcttctcctgcagcggtgaccacctgtcaggtgcctaccattgtggaagaggtccaggatggtaaggtcatctcctcccgcgagcaggtccgccagaccacccgctgagcactcagctttcctggccggccccccaggaggcagggaggcagcggtcccatctgccccgcggtctccggcctctccaccctcagccccctgcttcagtcccttccccatgcttccctgcgtgatgacaataaagctcgttgactcagcta

SEQ ID NO: 8683 - DNA, 534 bp, Artificial Sequence
  derived and/or modified sequence
atgaccaccagcatccggcagttcaccagcagcagcagcatcaagggcagctccgggctcggcggggggtcctcacgcacgagctgccagctttccggaggactgggggcagggagctgtcggcccgggtctgctggaggcttgggatcagccttaggaggcagcagctattcatcttgctacagctttgggagcggcggagggtatggatcttcttcattcgagggagttgatggcctactcgtgggcggtgaaaaggccaccatgcagaatctgaacgataggctcgcctcctacctcgacaaagtacgagcgctggaggaagccgatacagaattggaagtcaaaatccgagattggtaccagaggcaggcccctggccctgcgagagattactctcaatattatcggatcatagaagagctgcagaacaaaccaccatggacaatgccaacgagctgttacatattaaccatgcctatctggctattgttaaccagcgctccaaagtcgtggcaaaacgagggccgatag

SEQ ID NO: 8684 - DNA, 1326 bp, Artificial Sequence
  derived and/or modified sequence
atgaccaccagcatccggcagttcaccagcagcagcagcatcaagggatcttctggactgggcggtggaagcagtcgaacgtcctgccagttatccggcggactgggtgcaggtagttgtcggcccggcagcgctggaggtcttggatccgcgctaggcggttcttcctacagttcctgttatagtttcggctcgggaggcgggtatggctcatcttctttcgaaggcgtggatggactgctcgtcggtggtgagaaggctactatgcagaatctgaacgaccgcctcgccagttaccttgacaaagtgcgagcgttggaagaagccgatacggaactggaggtgaaaatcagggactggtatcagcggcaggcgccaggacccgcaagggattatagtcagtattataggatcatcgaggaactccagaataagatccttacagctacagtggacaacgccaacattctgctgcatatagacaacgcgcacctggccgctgcagatttccggacaaagtttgagacagagcaggcactttgcctttcagtggaagccgacattaatggcccttgtcgtgtactggatgagctgactctagcccgggccgacctggagatgcatatcgagaacctgaaggaggagctagcctacctaaaaaagaatcatgaagagatgaatgcccctcgggggcaggtcggcggggagatcaacgtcgagatgggcgctgctccgggagtggacctaagcaggattctgaacgaaatgcgggaacaatacgagaagatggccgaaaagaacagaaaggacgccgaagattggttcttcagcaaaactgaggagttgaatcgcgaagtggccacaaactcggagctggtacagtcaggcaaatccgagatttcggaattgcggtgcactatgcaggcattagagattgagctgcaatcccagctctcaatgaaagcatccctggagggaaatttggcagaaacagagaaccgctactgcatgcagcttagccagatccaggggttaatcggatccgtagaggagcgattggcccagttgctgtgtgagatggaacaacagaatcaagaatacaagattctactggatatgaagatgaggcttgagctcgaaattacaacctatcatcggttgctggaaggagaagacgcccacgagggtctattggccccgactcacttcaaattaccggcatctccagccgccgtgactacatgccaggtgcccacgattgttgaggaggtgcaggacggtaaggtgatttcttcaagggaacaagtgagacaaacaacccgttag

SEQ ID NO: 8685 - DNA, 534 bp, Artificial Sequence
  derived and/or modified sequence
atgaccaccagcatccggcagttcaccagcagcagcagcatcaagggatcttccgggctgggagggggaagctcaaggaccagctgtcagttgtcggggggcctgggggccggcagctgccgccctggatccgcaggagggctggggagcgcactcggcgggagttcttactccagctgctactctttcgggtccggcggcggatacgggtcatcttcgttcgaaggagtcgacggcctccttgtgggtggggagaaagcaaccatgcaaaacctgaacgatagattggcctcttatctggacaaggtgcgagcgctggaggaagctgataccgagctagaagtcaagattagggactggtatcagcgtcaggccccagggcccgccagagactactcacagtattaccgcattattgaggagctccagaacaagccaccctggacaatgccaacttcctgctataggatgactatgcccatctggttgctcctgacatctgcacccaaatcctggcagaatgaggggagatag

SEQ ID NO: 8686 - DNA, 534 bp, Artificial Sequence
  derived and/or modified sequence
atgactactagcatacgccagtttactagctcatccagcataaagggttcatccgggttaggcggtggatccagcaggacctcttgccagctctccggcggtctgggagctggatcctgtaggcctggtagcgccggaggcctcggctcggccctcgggggatcttcatactcctcatgctactcgtttgggtccggaggaggctacggttccagctccttcgaaggagtggatggcttactcgtcggaggagaaaaggcgaccatgcagaatctaaatgatcgattggccagctacttagacaaagtgagggctctggaagaggcagatacagagcttgaggtcaagataagagactggtatcagaggcaagcaccaggtcctgcaagagattatagtcaatactaccggattattgaagagcttcagaacaagccaccatggaccatgcctacatcctgctatattctgacaatgcctatctggctgctgctcacttcggcacccaagtcttggcagaacgagggccgatag

SEQ ID NO: 8687 - DNA, 1326 bp, Artificial Sequence
  derived and/or modified sequence
atgaccacatccatacgccagtttaccagtagcagctctatcaagggatcatcaggtctgggaggcggttctagtcgcacgagttgccagttatctgggggactgggggctggaagctgtcgacccggatccgcgggaggtctaggttctgccttgggagggtcctcttattcctcttgttattctttcggttcaggcggaggctatggcagttcctcttttgagggcgtggatgggttgttggtagggggagaaaaggccactatgcagaatttgaacgatcggctggcgtcataccttgacaaagtcagggccctcgaggaggctgacaccgaactcgaagttaagatccgcgattggtaccagaggcaagcccctgggccagcacgcgactattcccaatactatcgaattatcgaggaactgcagaacaaaatccttaccgccaccgtggacaacgccaacatcctcctccatattgacaatgcacacctcgcggctgccgacttcaggacaaagttcgagacggaacaggccctgtgtctcagtgtcgaggctgacataaacgggccttgccgcgtgcttgatgagctcacactggctcgcgcagacctggagatgcatatcgagaacctcaaagaggagctggcctacctcaagaagaatcatgaagagatgaatgcaccccgaggtcaggtgggcggagagatcaatgtcgaaatgggcgcagcacctggcgttgacctttcgcgtattttgaatgaaatgcgtgagcagtatgaaaagatggccgaaaaaaacagaaaagatgcagaggactggtttttttccaaaactgaagagcttaacagggaggtggcaaccaatagcgagctggtccagtcaggcaaatctgaaatttccgagttacgttgcactatgcaggccctggaaatcgaacttcagtcccaactgagcatgaaggccagcctggagggcaatctggctgagacagagaacagatattgcatgcagctctctcagattcagggcctcatcggcagtgttgaggagcgccttgcccaattgctttgtgagatggagcagcaaaaccaggaatacaagatcctgctagacatgaagatgagactggaactggagatcaccacctatcatcgactgctcgaaggcgaggatgcccatgagggtctgttagctccaactcacttcaagctccctgcgtcaccggcagccgtgacgacgtgtcaggtgccgaccattgtcgaggaagtccaggacggcaaggtgatctcatctcgcgaacaggtgcggcagacaactcggtag

SEQ ID NO: 8688 - DNA, 534 bp, Artificial Sequence
  derived and/or modified sequence
atgaccacgagcataaggcaattcacgagttctagctctatcaagggaagcagcggactgggaggaggatcctccaggacatcttgccaactatcgggcggtctgggtgcagggagctgtagacctggaagcgctggaggcctcggtagtgcactgggcggaagtagctatagcagctgctattcttttggatccggaggcggttatgggtcttcttctttcgaaggagtggacggattgcttgtggggggtgagaaggccaccatgcaaaatttgaatgaccggctcgcctcctacctcgacaaagtgcgggcacttgaagaggcggacaccgagctggaggtaaagattagggactggtatcaacggcaggcacctgggcctgcacgagattattctcaatactatcggatcatcgaagagctacagaacaagcctccttggaccatgcccacctcctgctacagaatgacgatgcccatctggctgttgctaacgtcggcaccgaagtcttggcagaacgagggcagatag

SEQ ID NO: 8689 - DNA, 1174 bp, Artificial Sequence
  derived and/or modified sequence
acactacttggggcccctcttctttccagcccttctcctgtgtgcctgcctcctgccgccgccaccatgaccacctccatccgccagttcacctcctccagctccatcaagggctcctctggcctggggggcggctcgtcccgcacctcctgccagctgtctggcggcctgggtgccggctcctgcaggccgggatctgctggtggcctgggcagcgccctcgggggtagcagctactccagctgctacagctttggctctggcggtggctatggcagcagcagctttgagggcgttgatgggctgctggtcggaggtgagaaggccaccatgcagaacctcaatgaccgcctggcctcctacctggacaaggtgcgtgccctggaggaggccgacactgagctggaggtaaagatccgtgactggtaccagaggcaggccccggggcccgcccgtgactacagccagtactacaggataatcgaggagctgcagaacaagccaccgtggacaatgccaacatcctgctacagaatgacaatgcccatctggctgctgctgacttccgcaccaaagtcctggcaaaatgaaggcaggtgagcagccaggacctggacctgcaattccaagcagcctgggctgaagtccctgattcccatggcaggtttgagacagagcaggccctgtgcctgagtgtggaggccgacatcaatggcccgtgcagggtgctggatgagctgaccctggccagagccgacccggagatgcacattgagaacctcaaggaggagctggcctacctgaagaagaaccacgaggagatgaacgccccgcgaggccaggtgggcggtgagatcaatgtggagatgggcgctgccccaggtgtggacctgagccgcatcctgaacgagatgcgtgagcagtatgagaagatggcagagaagaaccgcaaggatgccgaggattggttcttcagcaagacagaggagctgaaccgcgaggtggctaccaacagtgagctggtccagagcggcaagagcgagatttcggagctccggtgcaccatgcaggccttggagatcgagctgcagtcccagctcagcatgaaagcatccctggagggcaacctggcggagacagagaaccgctactgcatgcagctgtcccagatcca

SEQ ID NO: 8690 - DNA, 1299 bp, Artificial Sequence
  derived and/or modified sequence
atgaccacttccatccggcagttcacctcgtcatcctccattaagggctcatctggactgggggggggctcaagccgtacctcttgcaggttatccggcgggctgggtgccggctcgtgtagacttggttcagctggcgggctcggaagtactctgggaggaagctcatattcaagctgctattcctttgggagtggtggcggctatgggtcctcattcgggggcgttgatggactgctcgccgggggagagaaagcgaccatgcagaacctgaacgacagactggcttcttatcttgataaagtcagagccctggaggaagctaacactgaactagaggtgaagattcgtgattggtatcagcggcaagctcctggccccgcccgagactactctcagtactacagaactatcgaggaactgcaaaataaaatccttaccgctaccgtggacaacgccaacatactcctgcagattgacaatgccaggctggctgctgatgattttaggaccaaattcgaaaccgagcaggcactcaggctgtctgtggaagcggatattaatggcctccgccgggtgcttgatgagctcaccctcgcgagagctgaccttgaaatgcaaatcgagaatctgaaggaggagcttgcctaccttaagaagaaccacgaagaagagatgaatgctctgagaggacaggtgggtggggaaattaacgttgagatggacgctgcccctggcgtcgacctgtcgagaattctcaacgaaatgagggatcagtacgaaaagatggctgaaaaaaatagaaaagacgccgaggactggtttttctccaaaacagaagagctgaaccgggaagtggcaacaaactcagaactagtgcagagtgggaaaagcgagatcagcgagttgcgtcgcactatgcaggcactggagatcgaactccagagccagctgtcaatgaaggcttcactggagggcaatttagctgagaccgagaaccgatactgtgtccagctgagtcagatccaaggattgatcgggagcgtagaggagcagttggctcagctgaggtgcgaaatggagcaacaaaaccaggagtacaagatcctcctggatgttaagacccggctggaacaggaaattgctacataccgccggctgctcgagggggaagacgctcatcttacacaatataagaaggaacctgtgactacgcgccaggtgagaactatcgtggaagaagtgcaggacggcaaagtgatctcaagcagagaacaagtgcaccaaacaacgcggtag

SEQ ID NO: 8691 - DNA, 1524 bp, Artificial Sequence
  derived and/or modified sequence
ctacacaacttggggcccctctcctctccagcccttctcctgtgtgcctgcctcctgccgccgccaccatgaccacctccatccgccagttcacctcctccagctccatcaagggctcctccggcctggggggcggctcgtcccgcacctcctgccggctgtctggcggcctgggtgccggctcctgcaggctgggatctgctggcggcctgggcagcaccctcgggggtagcagctactccagctgctacagctttggctctggtggtggctatggcagcagctttgggggtgttgatgggctgctggctggaggtgagaaggccaccatgcagaacctcaatgaccgcctggcctcctacctggacaaggtgcgtgccctggaggaggccaacactgagctggaggtgaagatccgtgactggtaccagaggcaggccccggggcccgcccgtgactacagccagtactacaggacaattgaggagctgcagaacaagatcctcacagccaccgtggacaatgccaacatcctgctacagattgacaatgcccgtctggctgctgatgacttccgcaccaagtttgagacagagcaggccctgcgcctgagtgtggaggccgacatcaatggcctgcgcagggtgctggatgagctgaccctggccagagccgacctggagatgcagattgagaacctcaaggaggagctggcctacctgaagaagaaccacgaggaggagatgaacgccctgcgaggccaggtgggtggtgagatcaatgtggagatggacgctgccccaggcgtggacctgagccgcatcctcaacgagatgcgtgaccagtatgagaagatggcagagaagaaccgcaaggatgccgaggattggttcttcagcaagacagaggaactgaaccgcgaggtggccaccaacagtgagctggtgcagagtggcaagagtgagatctcggagctccggcgcaccatgcaggccttggagatagagctgcagtcccagctcagcatgaaagcatccctggagggcaacctggcggagacagagaaccgctactgcgtgcagctgtcccagatccaggggctgattggcagcgtggaggagcagctggcccagcttcgctgcgagatggagcagcagaaccaggaatacaaaatcctgctggatgtgaagacgcggctggagcaggagattgccacctaccgccgcctgctggagggagaggatgcccacctgactcagtacaagaaagaaccggtgaccacccgtcaggtgcgtaccattgtggaagaggtccaggatggcaaggtcatctcctcccgcgagcaggtccaccagaccacccgctgaggactcagctaccccggccggccacccaggaggcagggaggcagccgccccatctgccccacagtctccggcctctccagcctcagccccctgcttcagtcccttccccatgcttccttgcctgatgacaataaagcttgttgactcagctatgaaa

SEQ ID NO: 8692 - DNA, 1299 bp, Artificial Sequence
  derived and/or modified sequence
atgaccaccagcatccggcagttcaccagcagcagcagcatcaagggcagcagcggcctgggcggcggcagcagcaggaccagctgccgcctgagcggcggcctgggcgccggcagctgccgcctgggcagcgctgggggcctgggcagcaccctgggcggcagcagctacagcagctgctacagctttggaagtggcggcggctacggcagcagctttggaggagtggatggcctgctggccggcggggagaaggccaccatgcagaacctgaatgaccggctggccagctacctggacaaggtgcgggccctggaggaggccaacacagagctggaggtgaagatccgggactggtaccagaggcaggcccctggccctgcccgggactacagccagtactaccgcaccatcgaggagctgcagaacaagatcctgacagccaccgtggacaatgccaacatcctgctgcagattgacaatgcccggctggccgcagatgacttccgcaccaagtttgaaacagagcaggccctgcggctgtctgtggaggccgacatcaatggcctgcggcgggtgctggatgagctgaccctggcccgggctgacctggagatgcagatcgagaacctgaaggaggagctggcctacctgaagaagaaccacgaggaggagatgaatgccctgcggggccaggtgggcggggagatcaacgtggagatggatgctgcccctggggtggacctgagccgcatcctgaatgagatgagggaccagtatgagaagatggccgagaagaacaggaaggatgctgaggactggttcttcagcaagacagaggagctgaaccgggaggtggccaccaacagcgagctggtgcagagcggcaagtctgagatcagcgagctgcggaggaccatgcaggccctggagattgagctgcagagccagctgtccatgaaggccagcctggagggcaacctggccgagacagagaaccgctactgtgtgcagctgagccagatccagggcctcatcggctctgtggaggagcagctggcccagctgcgctgtgagatggagcagcagaaccaggagtacaagatcctgctggatgtgaagacccggctggagcaggagatcgccacctacagaaggctgctggagggagaagatgcccacctgacccagtacaagaaggagcctgtgaccacccggcaggtgaggaccatcgtggaggaggtgcaggacggcaaggtgatcagcagccgggagcaggtgcaccagaccaccaggtag

SEQ ID NO: 8693 - DNA, 1299 bp, Artificial Sequence
  derived and/or modified sequence
atgaccaccagcatccggcagttcaccagcagcagcagcatcaagggctctagcggcctggggggcggcagtagccggaccagctgcagactgtccggcgggctcggagcaggaagctgtcggcttgggtctgcggggggcctgggctctactctcggagggtcatcatattccagttgctactcctttggaagtggagggggctacggctctagcttcgggggagttgatggcctgctggccggaggagaaaaggccaccatgcagaacttgaacgatagactcgcttcctatttggataaggtgagggccctggaggaggccaacacggagctcgaggtaaaaattcgggactggtatcagcggcaggcaccaggcccagctagagactactcgcagtactaccgtacaatcgaggagttacagaacaaaatcttgacggctacagttgataatgccaatatcctgctacagatcgacaacgcaaggctcgccgctgatgattttcgcactaagtttgagacagagcaggccctgcggcttagcgttgaggccgacattaatgggctccggcgggttctggacgaattaacacttgcccgagccgacctggaaatgcagattgaaaatcttaaggaagaactcgcctacctaaagaagaaccatgaagaggagatgaacgcattacgcggacaggtcggaggcgagataaacgtggaaatggatgcagccccaggagttgacctgtcgagaattctgaacgagatgagggaccagtacgagaaaatggcagagaagaatcgaaaagacgcagaggattggttctttagtaaaactgaggagctgaatagggaggtcgctactaattctgaattagtgcagtcgggtaagagcgagatctcagaattgcggagaaccatgcaggctctggagatcgagcttcagagccagttaagcatgaaagcgtccctggagggtaacctggctgagacagaaaatcgctactgtgttcagctgagccagatacagggtctgattgggtcagtggaggagcagctggcccagcttaggtgtgagatggagcagcagaatcaagaatacaagatcctacttgacgtcaaaactcgcttagaacaagagattgccacgtacagacgtttactcgagggagaagatgcccacctgacccagtataaaaaggagcccgttacaactaggcaggttcggacaattgttgaagaagttcaagatgggaaagtcatatctagtagagagcaggtacatcagactactcgatag

SEQ ID NO: 8694 - DNA, 1299 bp, Artificial Sequence
  derived and/or modified sequence
atgaccacctcaataaggcagtttacctctagtagcagcattaaagggagttctggtctcggtggaggatcgagccggacatcttgtcggctgtccggaggactcggggcaggctcttgtagactcggctctgccggaggcttgggatccacattaggaggaagcagctacagcagctgttacagtttcgggagtggtggaggttacggaagctcattcggcggagtggacgggcttttggcgggaggcgaaaaagcgaccatgcagaacctcaacgaccgcttagcaagttacctggataaggtacgagccctggaagaagcaaataccgagctcgaagtgaaaatcagagattggtatcagaggcaggccccagggcctgctcgggactactctcagtattatcggactatcgaggagctccagaacaagatcctcactgccaccgtagacaacgcgaatatcctgttgcagatcgacaatgcgagacttgctgccgatgatttccgaacgaaatttgagaccgagcaggccctgaggctgtccgtggaagcggacatcaacggcctcaggcgtgttctagatgagctcactttggctagggctgatctggagatgcaaatagagaatctcaaagaagagctggcttaccttaaaaaaaaccatgaagaggagatgaatgctctccgcggacaggtcggtggggaaattaacgttgagatggacgctgctccaggcgttgatttatcgcgcatcttaaacgaaatgcgagaccagtatgagaaaatggccgagaagaatcgtaaagatgctgaggactggttcttcagtaaaaccgaagagttaaatagagaggtcgccactaactccgaactggtgcagtccggaaagagcgaaatttccgaacttaggcggactatgcaggccctcgaaatcgagcttcagtcccaattatccatgaaggcctcactggaagggaacctggccgaaacggaaaatcgctattgcgtccagttgagccagattcagggtttgatcgggtccgtcgaggaacagctggctcaactacgctgcgagatggaacagcagaaccaggaatataaaatacttctcgacgtgaaaactagactggaacaagagatagccacttaccgcaggctcctggaaggcgaagacgcacacctgacacaatacaagaaagaacctgtgaccacccggcaggttagaactattgtcgaggaggtacaggatggaaaagttattagttcacgcgagcaggtgcatcagactacccggtag

SEQ ID NO: 8695 - DNA, 1299 bp, Artificial Sequence
  derived and/or modified sequence
atgaccaccagcatcagacagttcaccagcagcagcagcatcaagggcagcagcggcctgggcggcggcagcagcagaaccagctgcagactgagcggcggcctgggcgccggcagctgcagactgggcagcgccggcggcctgggcagcaccctgggcggcagcagctacagcagctgctacagcttcggcagcggcggcggctacggcagcagcttcggcggcgtggacggcctgctggccggcggcgagaaggccaccatgcagaacctgaacgacagactggccagctacctggacaaggtgagagccctggaggaggccaacaccgagctggaggtgaagatcagagactggtaccagagacaggcccccggccccgccagagactacagccagtactacagaaccatcgaggagctgcagaacaagatcctgaccgccaccgtggacaacgccaacatcctgctgcagatcgacaacgccagactggccgccgacgacttcagaaccaagttcgagaccgagcaggccctgagactgagcgtggaggccgacatcaacggcctgagaagagtgctggacgagctgaccctggccagagccgacctggagatgcagatcgagaacctgaaggaggagctggcctacctgaagaagaaccacgaggaggagatgaacgccctgagaggccaggtgggcggcgagatcaacgtggagatggacgccgcccccggcgtggacctgagcagaatcctgaacgagatgagagaccagtacgagaagatggccgagaagaacagaaaggacgccgaggactggttcttcagcaagaccgaggagctgaacagagaggtggccaccaacagcgagctggtgcagagcggcaagagcgagatcagcgagctgagaagaaccatgcaggccctggagatcgagctgcagagccagctgagcatgaaggccagcctggagggcaacctggccgagaccgagaacagatactgcgtgcagctgagccagatccagggcctgatcggcagcgtggaggagcagctggcccagctgagatgcgagatggagcagcagaaccaggagtacaagatcctgctggacgtgaagaccagactggagcaggagatcgccacctacagaagactgctggagggcgaggacgcccacctgacccagtacaagaaggagcccgtgaccaccagacaggtgagaaccatcgtggaggaggtgcaggacggcaaggtgatcagcagcagagagcaggtgcaccagaccaccagatag

SEQ ID NO: 8696 - protein, 639 aa, Artificial Sequence
  derived and/or modified sequence
MSCQISCKSRGRGGGGGGFRGFSSGSAVVSGGSRRSTSSFSCLSRHGGGGGGFGGGGFGSRSLVGLGGTKSISISVAGGGGGFGAAGGFGGRGGGFGGGSSFGGGSGFSGGGFGGGGFGGGRFGGFGGPGGVGGLGGPGGFGPGGYPGGIHEVSVNQSLLQPLNVKVDPEIQNVKAQEREQIKTLNNKFASFIDKVRFLEQQNQVLQTKWELLQQMNVGTRPINLEPIFQGYIDSLKRYLDGLTAERTSQNSELNNMQDLVEDYKKKYEDEINKRTAAENDFVTLKKDVDNAYMIKVELQSKVDLLNQEIEFLKVLYDAEISQIHQSVTDTNVILSMDNSRNLDLDSIIAEVKAQYEEIAQRSKEEAEALYHSKYEELQVTVGRHGDSLKEIKIEISELNRVIQRLQGEIAHVKKQCKNVQDAIADAEQRGEHALKDARNKLNDLEEALQQAKEDLARLLRDYQELMNVKLALDVEIATYRKLLEGEECRMSGDLSSNVTVSVTSSTISSNVASKAAFGGSGGRGSSSGGGYSSGSSSYGSGGRQSGSRGGSGGGGSISGGGYGSGGGSGGRYGSGGGSKGGSISGGGYGSGGGKHSSGGGSRGGSSSGGGYGSGGGGSSSVKGSSGEAFGSSVTFSFR

SEQ ID NO: 8697 - DNA, 1920 bp, Artificial Sequence
  derived and/or modified sequence
atgtcatgtcagatttcttgcaaaagccgcggaaggggaggcggaggcggggggtttagagggttctccagtggttcagctgtagtgagcgggggttcacgcagatcaacttcctccttctcttgcctctctaggcacggtgggggcggcggtggctttgggggaggtgggttcggctcccgttcactagtaggtctggggggtaccaagagcatcagtatttcggtcgcggggggtgggggcggcttcggagctgctgggggctttggagggcgaggtggcgggttcggaggcggatcctcattcggcggaggtagcggctttagtggaggaggcttcggtggggggggcttcggtggcggtcgctttggcgggttcggagggcctgggggggtcgggggtctgggaggtcctggggggtttggaccagggggatatcctggcggcatccacgaagtcagcgttaatcagtctttgttacaacccctgaatgttaaggtggatcctgaaattcagaatgttaaagcacaagagagggagcaaatcaagaccctgaacaataaatttgcttcttttattgataaggttaggttcctggaacagcagaaccaggttctgcaaactaaatgggagctgctgcagcagatgaacgtgggcactcgcccaattaacctggagcccatcttccagggctacatcgacagcctaaagcgctaccttgacgggctgactgcggaaaggacctcgcagaatagtgagttgaataacatgcaggatctggtggaagactataaaaaaaaatacgaggacgagatcaacaagaggacagcagctgagaatgattttgtcacgctgaagaaggacgtggacaatgcttatatgatcaaggtggagctgcagagtaaggtggacttgctaaatcaggagattgagttcctgaaagtcttgtatgatgcagagatcagtcagattcatcagtcagtgacagacaccaatgtcattctgagtatggataacagtcgcaacttggacttagactcaatcattgctgaggtgaaggcccagtatgaagaaatagcacagcgctcaaaggaagaagcagaagcgctatatcactcgaagtatgaggagctgcaggtaacagtgggaagacacggggactctctgaaagaaattaagatcgagatctccgagctcaatcgggtgatccaacgattgcaaggcgagattgctcacgtaaagaagcagtgtaagaatgtgcaggacgccatcgccgacgccgaacagcgaggcgaacatgctctgaaggacgccaggaacaagctaaacgatctcgaggaggccctccaacaagcaaaagaagaccttgctaggctgttgagggattatcaggaactgatgaatgtcaagctggcactcgatgtggagatcgccacatacagaaaactcctagagggcgaagagtgccggatgtccggtgacctgtcttccaacgtgacagtcagtgttactagcagtacaatctcttcgaacgtcgcatcaaaggccgcattcggcggcagcggaggccggggttctagcagcggtgggggctactcctccggcagcagctcctatggaagcggaggtaggcagtcaggaagtaggggaggctctggaggcggtgggagcatcagtggtgggggttacggatcgggcggcgggagcgggggacgctacggcagcggcggcggttccaagggcggttctatcagcggtggtggttacgggtcagggggcgggaagcactcttcgggaggtgggtctcgcggtggcagctctagtggaggtggctacggatccggaggcggcggaagtagcagtgtgaagggatcttcaggtgaggccttcggtagcagcgtgaccttttcctttcgatag

SEQ ID NO: 8698 - DNA, 2403 bp, Artificial Sequence
  derived and/or modified sequence
ttcctccctggacaaaggcatcatgagttgtcagatctcttgcaaatctcgaggaagaggaggaggtggaggaggattccggggcttcagcagcggctcagctgtggtgtctggtggaagccggagatcaacttccagcttctcctgcttgagccgccatggtggtggtggcgggggcttcggtggaggcggctttggcagtcggagtcttgttggccttggagggaccaagagcatctccattagtgtggctggaggaggtggtggctttggcgccgctggtggatttggtggcagaggaggtggttttggaggcggcagcagctttggaggtggcagcggcttcagtggtggtggtttcggtggaggcggctttggtggaggccgctttggaggttttgggggccctggtggtgttggaggtttagggggtcctggtggctttgggcctggaggataccctggtggcatccacgaagtctctgtcaaccagagcctcctgcagcctctcaacgtgaaagttgacccagagatccagaatgtgaaggcccaagagcgtgagcagatcaaaactctcaacaacaaatttgcctccttcattgacaaggtgcggttcttggagcagcagaaccaggtgttacagaccaaatgggagctgctacaacaaatgaatgttggcacccgccccatcaacctggagcccatcttccaggggtatatcgacagcctcaagagatatctggatgggctcactgcagaaagaacatcacagaattcagagctgaataacatgcaggatcttgtggaggattataagaagaagtatgaggatgaaatcaataagcgcacagctgctgagaatgattttgtgacgcttaaaaaggacgtggacaatgcctacatgataaaggtggagttgcagtccaaggtggacctgctgaaccaggaaattgagtttctgaaagttctctatgatgcggagatatcccagatacatcagagtgtcactgacaccaacgtcatcctctccatggacaacagccgcaacctggacttggatagcatcatcgccgaggtcaaggcccagtatgaggagatcgcccagaggagcaaggaagaagcggaggccctgtaccacagcaagtatgaggagctccaggtgactgtcgggagacatggagacagcctgaaagagatcaagatagagatcagcgagctgaaccgcgtgatccagaggctgcagggggagatcgcacatgtgaagaagcagtgtaagaatgtgcaagatgccatcgcagatgccgagcagcgtggggagcatgccctcaaggatgccaggaacaagttgaatgacctggaggaggccctgcagcaggccaaggaggacttggcgcggctgctgcgtgactaccaggagctgatgaacgtgaagctggccctagatgtggagatcgccacctaccgcaaactgctggagggcgaggagtgcaggatgtctggagacctcagcagcaatgtgactgtgtctgtgacaagcagcaccatttcatcaaatgtggcatccaaggctgcctttggaggttctggaggtagagggtccagttccggaggaggatacagctctggaagcagcagttatggctctggaggccgacagtctggctccagaggcggtagtggaggaggaggttctatctctggaggaggatatggctctggcggtggttctggaggaagatacggatctggtggtggctctaagggagggtccatctctggaggaggatatggctctggaggtggaaaacacagctctggaggtggctctagaggaggctccagctctggaggaggatatggctctggaggtgggggttctagctctgtaaagggtagctcaggtgaagcttttggttccagcgtgaccttctcttttagataaagatgagcccccaccaccaccgactctcccaacccagactctcccactccagaatgtagaagcctgtctctgtacctctaactggcagcaagttaaatttttgtcatttatctctgatggcactttgagggaaaagaatgtccacatacagtttttgaaagatcttctctccaaaccagttagttagagccagtgacgcctctgtgttctggggcggaatctgtgctgtctaggtttgtgcttctagccatgcccattcccgcccccaccatgcctctttgcattgcccattttccagatgtgtattctgttgaggacccaggcccatccagggatttcatctctaagcctggcagtgctggggggaaatgtgtttctgtgtatatagctcctcttgtccactctgctttcggaagtgctgtggtctgggggtcttcataataaacctcatttgcaattca

SEQ ID NO: 8699 - DNA, 1920 bp, Artificial Sequence
  derived and/or modified sequence
atgagctgccagatcagctgcaagagccggggccggggcggcggcggcggcggcttccggggcttcagcagcggcagcgctgtggtgtctgggggcagccgccgcagcaccagcagcttcagctgcctgagccgccacggcggcggcggcggcggctttggaggcggcggcttcggcagccgcagcctggtgggcctgggcggcaccaagagcatcagcatctctgtggccggcggcggcggcggctttggagctgctgggggctttggaggccggggcggcggctttggaggcggcagcagctttggaggcggcagcggcttcagcggcggcggctttggaggcggcggctttggaggcggccgctttggaggctttggaggccctggaggagtgggcggcctgggcggccctgggggctttggacctgggggctacccaggcggcatccacgaggtgtctgtgaaccagagcctgctgcagcccctgaatgtgaaggtggaccctgagatccagaatgtgaaggcccaggagcgggagcagatcaagaccctgaacaacaagtttgccagcttcatcgacaaggtgcgcttcctggagcagcagaaccaggtgctgcagaccaagtgggagctgctgcagcagatgaatgtgggcacccggcccatcaacctggagcccatcttccagggctacatcgacagcctgaagcgctacctggatggcctgacagctgagaggaccagccagaacagcgagctgaacaacatgcaggacctggtggaggactacaagaagaagtatgaagatgagatcaacaagaggacagctgctgaaaatgactttgtgaccctgaagaaggatgtggacaatgcctacatgatcaaggtggagctgcagagcaaggtggacctgctgaaccaggagattgagttcctgaaggtgctgtatgatgctgagatcagccagatccaccagagcgtgacagacaccaacgtcatcctgtccatggacaacagcaggaacctggacctggacagcatcatcgccgaggtgaaggcccagtatgaggagatcgcccagaggagcaaggaggaggccgaggccctgtaccacagcaaatatgaggagctgcaggtgacagtgggcagacatggagacagcctgaaggagatcaagattgagatcagcgagctgaacagagtcatccagaggctgcagggcgagatcgcccacgtgaagaagcagtgcaagaatgtgcaggatgccatcgcagatgctgagcagagaggagaacatgccctgaaggatgccaggaacaagctgaatgacctggaggaggccctgcagcaggccaaggaggacctggcccggctgctgcgggactaccaggagctgatgaatgtgaagctggccctggatgtggagatcgccacctacaggaagctgctggagggggaggagtgcaggatgtctggggacctgagcagcaatgtgacagtgtctgtgaccagcagcaccatcagcagcaatgtggccagcaaggccgccttcggcggcagcggcggccggggcagcagcagcggcggcggctacagcagcggcagcagcagctatggcagcggcggccggcagagcggcagccggggcggcagcggcggcggcggcagcatcagcggcggcggctacggcagcggcggcggcagcggcggccgctatggcagcggcggcggcagcaagggcggcagcatcagcggcggcggctacggcagcggcggcggcaagcacagcagcggcggcggcagccggggcggcagcagcagcggcggcggctacggcagcggcggcggcggcagcagctctgtgaagggcagcagcggggaggccttcggcagctctgtgaccttctccttcagatag

SEQ ID NO: 8700 - DNA, 1920 bp, Artificial Sequence
  derived and/or modified sequence
atgagctgccagatcagctgcaagagccggggccggggcggcggcgggggaggttttcgggggtttagcagcggctcagccgtcgtgagcggaggcagccgtaggtcaacctcttcattctcctgtttgtcccgccacggagggggaggcgggggcttcggcggtggcggtttcggaagtcgatctttggtcggcctaggtggaaccaaaagcatcagtatctctgtggccggtgggggcggtggctttggtgcagccggaggctttggcggcaggggtggcggtttcggtggaggttccagctttggggggggtagtgggttctccggtggcgggttcgggggagggggcttcggaggcggcagattcggcggttttgggggtccaggcggagtcggaggtttgggagggccaggaggctttggaccgggaggctatcctggtggcattcacgaagtctccgtcaaccagtctctgcttcagccgctcaatgttaaggtcgacccagagatccaaaacgtcaaagcccaggagcgggaacagatcaaaacactcaacaacaaatttgcttcctttattgataaggttagattcttggagcagcagaaccaagtgctgcagaccaagtgggaactgcttcagcaaatgaatgtggggaccaggcctatcaacctggagcccatcttccagggttatatcgacagcctgaagaggtaccttgacggccttactgcggaacggacctcacaaaattcagagttgaataacatgcaggacctcgtggaggattacaagaagaaatacgaggacgaaattaataagcgtactgccgccgagaatgacttcgttaccttgaagaaagacgtggacaacgcctatatgatcaaggtggagctccagtcgaaggtcgatttgctgaaccaagaaatagagttcctgaaagtgctctacgacgcggagatctcacaaatccatcagtcagtgacagatacaaatgtgatcctctcaatggacaactctaggaacctggacctggattccatcattgccgaagtcaaagcacaatatgaggagattgcgcaacggagtaaggaggaagcagaagccctctatcactccaagtacgaggagctgcaggttacagtaggtcggcacggggattctctgaaggaaataaagatcgaaatcagtgaactcaacagagtgatccaaaggttacaaggggaaatcgctcacgttaagaaacagtgcaaaaacgtacaagacgccatcgctgatgccgagcagagaggagagcacgcccttaaagacgccagaaacaagctgaacgacttagaggaggccctgcagcaggctaaagaagatcttgcgagactcctcagagattatcaagagctgatgaacgttaagctcgccctggatgtcgagatcgcaacatacagaaaactactggaaggagaagagtgcagaatgtccggcgacctgtcctccaatgtgactgtgagcgtcacatcttctacaatctcgagtaatgtcgcttccaaggcagccttcggggggagtggcggcagagggtcctcgtcaggcggcggctattcgagtggctcctcctcttacgggagtggaggaaggcaaagcgggagccgggggggcagcggggggggtggttcgatctctgggggaggttatggttctggggggggctccggcggcaggtatgggagcggagggggcagtaaagggggctccatatccggaggaggctatggaagcggtgggggtaaacacagctccggggggggaagtaggggcggttcatccagcggcggcggatacgggtccggcggcggagggagcagcagcgtaaaggggtcatccggggaagccttcggatcgtcggttaccttttccttccgctag

SEQ ID NO: 8701 - DNA, 1920 bp, Artificial Sequence
  derived and/or modified sequence
atgagctgtcagatcagctgcaaatcaaggggcaggggaggcggaggcggaggatttcggggattttccagcggatctgccgtggtctccggcggtagccgcagatcaactagctcattctcctgtttgagcagacacggagggggtggtggagggtttggtggagggggattcgggagccgttccttggtgggcttaggaggcaccaaatctatcagtatcagtgtggcaggaggagggggaggctttggggctgcagggggttttgggggtcgcggaggtggtttcggcggtggctctagttttgggggagggagtggtttctccgggggtgggtttgggggtggcggattcgggggaggtcgctttgggggtttcgggggtccgggtggtgtggggggacttggagggccaggcggtttcgggcctgggggttaccctgggggaatccacgaagtgagcgttaaccagtctttgctccagccacttaatgtgaaggtggatccggagatacagaacgtcaaagcacaggagcgagagcaaatcaagaccctcaataataagttcgcaagcttcatcgacaaagtgcggttcctggagcagcaaaatcaggtcctgcagaccaaatgggaactgctgcagcaaatgaacgtgggtacaagacccatcaacttggagcctatctttcagggctacatcgactcgctgaaaaggtatctggatgggcttacagcagagaggacgtcccagaactctgagctgaataacatgcaggatctcgtcgaggattataagaaaaagtacgaggacgagatcaataaacggaccgctgcggagaacgactttgtgacactgaagaaagacgtggataacgcctacatgattaaagttgagctgcaaagcaaagtggatttactcaaccaagagattgagtttctgaaagtgttgtacgatgcagaaattagccagattcatcagtctgtcacagacactaacgtgattctgtcaatggataattcgcgaaatctagatttagattccataattgcagaggtgaaggcgcagtatgaagagatagcccagagatcaaaagaggaagcggaagctctatatcactcaaaatacgaagagctgcaggtaaccgtaggtagacacggtgattcactgaaggagattaaaatcgagatcagtgagcttaacagggttatccagcgtttacaaggcgaaatagctcacgtcaagaagcaatgtaaaaatgtgcaagatgccatagccgacgccgaacagcgaggcgagcacgccttgaaagacgcccgtaataagctgaacgatctggaggaggccctacagcaggcgaaggaagatctggccaggctgctgagggactaccaggaattgatgaatgtcaaattggctttagacgtggaaatagctacatatcgtaaactgctggagggcgaggaatgtcgcatgtctggagacctctcctctaacgtcactgtgtccgtcacttcaagcacaattagctcaaacgttgcctcaaaggctgcattcggcggatcaggtggcagaggcagctcatcaggaggaggctacagcagtggatccagctcctatggctccgggggaagacaatcaggttcgcgagggggttctggaggaggcggatcaatcagcggaggtggctacggatccggaggaggcagtgggggaaggtatggctccggcggaggcagtaagggcggaagcatcagtggtggcggatatgggtcaggaggcggtaagcactccagtggagggggaagcagaggaggctctagtagcggaggcggatacggaagtggtgggggtggatcaagttccgtgaaggggtcctctggagaggcgttcgggtcttctgtgacattcagcttccggtag

SEQ ID NO: 8702 - DNA, 1920 bp, Artificial Sequence
  derived and/or modified sequence
atgagctgccagatcagctgcaagagcagaggcagaggcggcggcggcggcggcttcagaggcttcagcagcggcagcgccgtggtgagcggcggcagcagaagaagcaccagcagcttcagctgcctgagcagacacggcggcggcggcggcggcttcggcggcggcggcttcggcagcagaagcctggtgggcctgggcggcaccaagagcatcagcatcagcgtggccggcggcggcggcggcttcggcgccgccggcggcttcggcggcagaggcggcggcttcggcggcggcagcagcttcggcggcggcagcggcttcagcggcggcggcttcggcggcggcggcttcggcggcggcagattcggcggcttcggcggccccggcggcgtgggcggcctgggcggccccggcggcttcggccccggcggctaccccggcggcatccacgaggtgagcgtgaaccagagcctgctgcagcccctgaacgtgaaggtggaccccgagatccagaacgtgaaggcccaggagagagagcagatcaagaccctgaacaacaagttcgccagcttcatcgacaaggtgagattcctggagcagcagaaccaggtgctgcagaccaagtgggagctgctgcagcagatgaacgtgggcaccagacccatcaacctggagcccatcttccagggctacatcgacagcctgaagagatacctggacggcctgaccgccgagagaaccagccagaacagcgagctgaacaacatgcaggacctggtggaggactacaagaagaagtacgaggacgagatcaacaagagaaccgccgccgagaacgacttcgtgaccctgaagaaggacgtggacaacgcctacatgatcaaggtggagctgcagagcaaggtggacctgctgaaccaggagatcgagttcctgaaggtgctgtacgacgccgagatcagccagatccaccagagcgtgaccgacaccaacgtgatcctgagcatggacaacagcagaaacctggacctggacagcatcatcgccgaggtgaaggcccagtacgaggagatcgcccagagaagcaaggaggaggccgaggccctgtaccacagcaagtacgaggagctgcaggtgaccgtgggcagacacggcgacagcctgaaggagatcaagatcgagatcagcgagctgaacagagtgatccagagactgcagggcgagatcgcccacgtgaagaagcagtgcaagaacgtgcaggacgccatcgccgacgccgagcagagaggcgagcacgccctgaaggacgccagaaacaagctgaacgacctggaggaggccctgcagcaggccaaggaggacctggccagactgctgagagactaccaggagctgatgaacgtgaagctggccctggacgtggagatcgccacctacagaaagctgctggagggcgaggagtgcagaatgagcggcgacctgagcagcaacgtgaccgtgagcgtgaccagcagcaccatcagcagcaacgtggccagcaaggccgccttcggcggcagcggcggcagaggcagcagcagcggcggcggctacagcagcggcagcagcagctacggcagcggcggcagacagagcggcagcagaggcggcagcggcggcggcggcagcatcagcggcggcggctacggcagcggcggcggcagcggcggcagatacggcagcggcggcggcagcaagggcggcagcatcagcggcggcggctacggcagcggcggcggcaagcacagcagcggcggcggcagcagaggcggcagcagcagcggcggcggctacggcagcggcggcggcggcagcagcagcgtgaagggcagcagcggcgaggccttcggcagcagcgtgaccttcagcttcagatag

SEQ ID NO: 8703 - protein, 590 aa, Artificial Sequence
  derived and/or modified sequence
MSRQSSVSFRSGGSRSFSTASAITPSVSRTSFTSVSRSGGGGGGGFGRVSLAGACGVGGYGSRSLYNLGGSKRISISTSGGSFRNRFGAGAGGGYGFGGGAGSGFGFGGGAGGGFGLGGGAGFGGGFGGPGFPVCPPGGIQEVTVNQSLLTPLNLQIDPSIQRVRTEEREQIKTLNNKFASFIDKVRFLEQQNKVLDTKWTLLQEQGTKTVRQNLEPLFEQYINNLRRQLDSIVGERGRLDSELRNMQDLVEDFKNKYEDEINKRTTAENEFVMLKKDVDAAYMNKVELEAKVDALMDEINFMKMFFDAELSQMQTHVSDTSVVLSMDNNRNLDLDSIIAEVKAQYEEIANRSRTEAESWYQTKYEELQQTAGRHGDDLRNTKHEISEMNRMIQRLRAEIDNVKKQCANLQNAIADAEQRGELALKDARNKLAELEEALQKAKQDMARLLREYQELMNTKLALDVEIATYRKLLEGEECRLSGEGVGPVNISVVTSSVSSGYGSGSGYGGGLGGGLGGGLGGGLAGGSSGSYYSSSSGGVGLGGGLSVGGSGFSASSGRGLGVGFGSGGGSSSSVKFVSTTSSSRKSFKS

SEQ ID NO: 8704 - protein, 555 aa, Artificial Sequence
  derived and/or modified sequence
MSRQSSVSFRSGGSRSFSTASAITPSVSRTSFTSVSRSGGGGGGGFGRVSLAGACGVGGYGFGGGAGSGFGFGGGAGGGFGLGGGAGFGGGFGGPGFPVCPPGGIQEVTVNQSLLTPLNLQIDPSIQRVRTEEREQIKTLNNKFASFIDKVRFLEQQNKVLDTKWTLLQEQGTKTVRQNLEPLFEQYINNLRRQLDSIVGERGRLDSELRNMQDLVEDFKNKYEDEINKRTTAENEFVMLKKDVDAAYMNKVELEAKVDALMDEINFMKMFFDAELSQMQTHVSDTSVVLSMDNNRNLDLDSIIAEVKAQYEEIANRSRTEAESWYQTKYEELQQTAGRHGDDLRNTKHEISEMNRMIQRLRAEIDNVKKQCANLQNAIADAEQRGELALKDARNKLAELEEALQKAKQDMARLLREYQELMNTKLALDVEIATYRKLLEGEECRLSGEGVGPVNISVVTSSVSSGYGSGSGYGGGLGGGLGGGLGGGLAGGSSGSYYSSSSGGVGLGGGLSVGGSGFSASSGRGLGVGFGSGGGSSSSVKFVSTTSSSRKSFKS

SEQ ID NO: 8705 - protein, 132 aa, Artificial Sequence
  derived and/or modified sequence
MSRQSSVSFRSGGSRSFSTASAITPSVSRTSFTSVSRSGGGGGGGFGRVSLAGACGVGGYGSRSLYNLGGSKRISISTSGGSFRNRFGAGAGGGYGFGGGAGSGFGFGGGAGGGFGLGGGAGFGGGFGGPGF

SEQ ID NO: 8706 - DNA, 1773 bp, Artificial Sequence
  derived and/or modified sequence
atgagcagacagagcagcgtgagcttcagaagcggcggcagcagaagcttcagcaccgccagcgccatcacccccagcgtgagcagaaccagcttcaccagcgtgagcagaagcggcggcggcggcggcggcggcttcggcagagtgagcctggccggcgcctgcggcgtgggcggctacggcagcagaagcctgtacaacctgggcggcagcaagagaatcagcatcagcaccagcggcggcagcttcagaaacagattcggcgccggcgccggcggcggctacggcttcggcggcggcgccggcagcggcttcggcttcggcggcggcgccggcggcggcttcggcctgggcggcggcgccggcttcggcggcggcttcggcggccccggcttccccgtgtgcccccccggcggcatccaggaggtgaccgtgaaccagagcctgctgacccccctgaacctgcagatcgaccccagcatccagagagtgagaaccgaggagagagagcagatcaagaccctgaacaacaagttcgccagcttcatcgacaaggtgagattcctggagcagcagaacaaggtgctggacaccaagtggaccctgctgcaggagcagggcaccaagaccgtgagacagaacctggagcccctgttcgagcagtacatcaacaacctgagaagacagctggacagcatcgtgggcgagagaggcagactggacagcgagctgagaaacatgcaggacctggtggaggacttcaagaacaagtacgaggacgagatcaacaagagaaccaccgccgagaacgagttcgtgatgctgaagaaggacgtggacgccgcctacatgaacaaggtggagctggaggccaaggtggacgccctgatggacgagatcaacttcatgaagatgttcttcgacgccgagctgagccagatgcagacccacgtgagcgacaccagcgtggtgctgagcatggacaacaacagaaacctggacctggacagcatcatcgccgaggtgaaggcccagtacgaggagatcgccaacagaagcagaaccgaggccgagagctggtaccagaccaagtacgaggagctgcagcagaccgccggcagacacggcgacgacctgagaaacaccaagcacgagatcagcgagatgaacagaatgatccagagactgagagccgagatcgacaacgtgaagaagcagtgcgccaacctgcagaacgccatcgccgacgccgagcagagaggcgagctggccctgaaggacgccagaaacaagctggccgagctggaggaggccctgcagaaggccaagcaggacatggccagactgctgagagagtaccaggagctgatgaacaccaagctggccctggacgtggagatcgccacctacagaaagctgctggagggcgaggagtgcagactgagcggcgagggcgtgggccccgtgaacatcagcgtggtgaccagcagcgtgagcagcggctacggcagcggcagcggctacggcggcggcctgggcggcggcctgggcggcggcctgggcggcggcctggccggcggcagcagcggcagctactacagcagcagcagcggcggcgtgggcctgggcggcggcctgagcgtgggcggcagcggcttcagcgccagcagcggcagaggcctgggcgtgggcttcggcagcggcggcggcagcagcagcagcgtgaagttcgtgagcaccaccagcagcagcagaaagagcttcaagagctag

SEQ ID NO: 8707 - DNA, 1668 bp, Artificial Sequence
  derived and/or modified sequence
atgagcagacagagcagcgtgagcttcagaagcggcggcagcagaagcttcagcaccgccagcgccatcacccccagcgtgagcagaaccagcttcaccagcgtgagcagaagcggcggcggcggcggcggcggcttcggcagagtgagcctggccggcgcctgcggcgtgggcggctacggcttcggcggcggcgccggcagcggcttcggcttcggcggcggcgccggcggcggcttcggcctgggcggcggcgccggcttcggcggcggcttcggcggccccggcttccccgtgtgcccccccggcggcatccaggaggtgaccgtgaaccagagcctgctgacccccctgaacctgcagatcgaccccagcatccagagagtgagaaccgaggagagagagcagatcaagaccctgaacaacaagttcgccagcttcatcgacaaggtgagattcctggagcagcagaacaaggtgctggacaccaagtggaccctgctgcaggagcagggcaccaagaccgtgagacagaacctggagcccctgttcgagcagtacatcaacaacctgagaagacagctggacagcatcgtgggcgagagaggcagactggacagcgagctgagaaacatgcaggacctggtggaggacttcaagaacaagtacgaggacgagatcaacaagagaaccaccgccgagaacgagttcgtgatgctgaagaaggacgtggacgccgcctacatgaacaaggtggagctggaggccaaggtggacgccctgatggacgagatcaacttcatgaagatgttcttcgacgccgagctgagccagatgcagacccacgtgagcgacaccagcgtggtgctgagcatggacaacaacagaaacctggacctggacagcatcatcgccgaggtgaaggcccagtacgaggagatcgccaacagaagcagaaccgaggccgagagctggtaccagaccaagtacgaggagctgcagcagaccgccggcagacacggcgacgacctgagaaacaccaagcacgagatcagcgagatgaacagaatgatccagagactgagagccgagatcgacaacgtgaagaagcagtgcgccaacctgcagaacgccatcgccgacgccgagcagagaggcgagctggccctgaaggacgccagaaacaagctggccgagctggaggaggccctgcagaaggccaagcaggacatggccagactgctgagagagtaccaggagctgatgaacaccaagctggccctggacgtggagatcgccacctacagaaagctgctggagggcgaggagtgcagactgagcggcgagggcgtgggccccgtgaacatcagcgtggtgaccagcagcgtgagcagcggctacggcagcggcagcggctacggcggcggcctgggcggcggcctgggcggcggcctgggcggcggcctggccggcggcagcagcggcagctactacagcagcagcagcggcggcgtgggcctgggcggcggcctgagcgtgggcggcagcggcttcagcgccagcagcggcagaggcctgggcgtgggcttcggcagcggcggcggcagcagcagcagcgtgaagttcgtgagcaccaccagcagcagcagaaagagcttcaagagctag

SEQ ID NO: 8708 - DNA, 399 bp, Artificial Sequence
  derived and/or modified sequence
atgagcagacagagcagcgtgagcttcagaagcggcggcagcagaagcttcagcaccgccagcgccatcacccccagcgtgagcagaaccagcttcaccagcgtgagcagaagcggcggcggcggcggcggcggcttcggcagagtgagcctggccggcgcctgcggcgtgggcggctacggcagcagaagcctgtacaacctgggcggcagcaagagaatcagcatcagcaccagcggcggcagcttcagaaacagattcggcgccggcgccggcggcggctacggcttcggcggcggcgccggcagcggcttcggcttcggcggcggcgccggcggcggcttcggcctgggcggcggcgccggcttcggcggcggcttcggcggccccggcttctag

SEQ ID NO: 8709 - DNA, 1773 bp, Artificial Sequence
  derived and/or modified sequence
atgtctaggcagtcatccgtcagcttccgctccggcggctctcgatcatttagcacagcgagcgcaattacccccagtgtgagcaggacctcctttacgagcgtgtctcgaagcggcggaggcggtggtggcggtttcggcagggtgtctttggcaggagcctgtggggttggggggtatggcagtaggagtctttacaacttgggaggaagcaaaagaatttcgattagcacatcaggcgggtcttttcgtaatcgttttggggctggagctggcggcgggtacggcttcggtggcggggcaggctccgggtttggctttggaggcggcgccggcgggggtttcggattgggcggcggagccgggtttggcggtggcttcggtggtcccggattcccagtgtgcccacccggcggaattcaagaggtgacggtgaatcagtcgttgcttacaccgctcaatctgcagatcgacccttctatccagagagttcggacagaggagcgggaacagatcaagactctaaataacaaatttgcctcattcatcgacaaagttcggttcttggaacagcagaacaaggtcctggataccaaatggaccctcttgcaggagcaaggaacaaagaccgtgcggcaaaaccttgagcctctgttcgagcaatacatcaacaatcttcggagacagctcgactccattgttggcgaaagaggcagactggatagcgagcttagaaacatgcaggacctcgtggaggatttcaaaaataagtacgaggacgaaattaataagcggacaactgcggaaaatgagtttgtcatgctcaagaaagatgtcgatgcggcatatatgaacaaagtggagctcgaggctaaggtggacgcgttgatggacgaaatcaactttatgaagatgttttttgacgccgagctttcacaaatgcagactcatgtttccgacaccagtgttgttctgagcatggataacaatcgcaacctcgacctggatagtatcattgccgaggtgaaggctcagtacgaggagatcgcaaatcgctcgcggaccgaggctgaaagctggtatcaaacaaagtacgaagagttgcagcaaacagcaggacgccacggtgacgatctgcgaaacaccaaacacgaaataagtgagatgaatcgtatgatccagagactgcgcgcagagattgataacgtgaaaaagcagtgcgctaacctccagaatgcaatcgctgacgccgaacagcgcggtgagctcgcacttaaggatgctcgcaataagcttgctgagctggaagaagcccttcagaaggccaaacaagacatggcgcggttgcttcgcgaataccaggaactcatgaatactaagctagccttagacgtcgagatcgcaacataccggaagcttctggagggagaggagtgcaggctcagtggggaaggggtaggccctgtaaacatcagcgtcgtgacaagttctgtcagttctggatacggctccggctcaggctacggagggggactcggaggcggacttggcggcggcttgggcggcggcttagctggaggttcctccggcagctactacagcagcagttccggaggggtcggactcggtggcggtttatccgtcggagggtccggtttctctgcaagttccggcaggggccttggagtggggttcggcagcggcggcggcagctcaagttctgtgaaattcgtctctacaacctcttcgtctcggaagtcttttaagtcttag

SEQ ID NO: 8710 - DNA, 1668 bp, Artificial Sequence
  derived and/or modified sequence
atgtctcggcagagcagcgtgagcttcaggagcggaggatcaagatcttttagcacagcaagcgccatcaccccgtctgttagtcggaccagctttacaagtgtgtcccgctctgggggcggtgggggggggggcttcgggcgggtatcacttgcgggggcatgtggagtggggggttatgggtttggcggaggggccggaagcggcttcggattcggcggaggagcaggaggtggcttcggtctgggcggcggtgccggcttcgggggcggatttggcggacccggttttccagtttgtccccccggagggatacaggaggttaccgtcaatcagtctctgttgaccccgctgaacctccagatagacccatcgatccagcgcgtgcgaacagaggagagagaacagattaagacactgaacaacaagttcgctagctttattgacaaagttcgatttctggagcagcagaacaaagtcctggatactaaatggactctcctacaggagcagggaactaagaccgttaggcagaaccttgaaccactgttcgagcaatacattaataatctgcgtaggcagctagatagcatcgttggcgaacgaggaaggcttgactctgagctaaggaacatgcaggacctggtggaagacttcaagaacaagtacgaagatgaaatcaataagcggaccacagccgagaatgaattcgtgatgctgaagaaggatgtggacgcagcctacatgaataaagtggaactagaggctaaagtggacgcactgatggacgagataaattttatgaaaatgttcttcgacgctgagttaagtcagatgcagacgcacgtctccgacacctccgttgtgctaagtatggataacaacagaaatctcgacttggattcaataatcgcagaagtgaaagcacagtacgaagagatcgctaaccgaagccggacggaagcggaatcctggtatcagaccaagtatgaggaattacaacagactgccggtagacacggggatgatctccggaatacaaagcacgaaattagcgagatgaatagaatgatccagcgactgcgcgcggaaatcgacaacgtcaaaaaacagtgtgccaacctgcagaatgcaattgctgacgcggagcagagaggggagcttgccctcaaggacgctcgcaataagttggccgagctcgaagaggcgttgcagaaggccaaacaggacatggcaagactgctgcgtgaatatcaggaactcatgaatacaaaactggctttggatgtggagatcgccacatatcggaagctgctggaaggtgaggaatgccggctgagcggagagggagttggacccgttaatatctccgtcgtcaccagcagcgtctcgagtgggtatggatccgggtcagggtatggcggcggactcggcggtggcctgggtggcggacttgggggaggtcttgccgggggatcaagtggaagctattactccagctcttccggcggagtagggttgggtggtggcctgtccgtgggaggctctggcttctctgcatctagcggtaggggattgggtgtagggtttggtagtggtggtggctcgtccagcagcgtaaagttcgtaagtaccacttccagttcgagaaaatctttcaagagttag

SEQ ID NO: 8711 - DNA, 399 bp, Artificial Sequence
  derived and/or modified sequence
atgtccaggcaaagctcagtgagtttccggagcggcgggagtcgtagcttttccactgcttcagctataacacctagcgttagcaggacctcatttacatctgtttcacggtcgggcggcggggggggcgggggctttggcagggtgagcctggctggggcctgtggcgtaggaggctatggctctcgaagcctgtataacctgggcggaagcaaacggatctccatttctacttcaggaggctctttcaggaatagatttggcgccggtgccggcggcgggtacggtttcggaggtggcgctggaagcgggttcggattcgggggcggcgctgggggaggattcggattgggcggcggagctggatttggtggtggctttgggggccccgggttttag

SEQ ID NO: 8712 - DNA, 1773 bp, Artificial Sequence
  derived and/or modified sequence
atgagccggcagagctctgtgtccttccgcagcggcggcagccgctccttcagcacagccagcgccatcacccccagcgtgtccaggaccagcttcacctctgtgagccgcagcggcggcggcggcggcggcggcttcggccgggtgtccctggccggggcctgtggggtgggcggctacggcagccgcagcctgtacaacctgggcggcagcaagaggatcagcatcagcaccagcggcggcagcttcaggaacagatttggagctggagctgggggcggctacggctttggaggaggagctggcagcggctttggatttggaggaggagctgggggcggcttcggcctgggcggcggggccggctttggaggcggctttggaggccctggcttccctgtgtgccccccaggcggcatccaggaggtgacagtgaaccagagcctgctgacccccctgaacctgcagattgaccccagcatccagagggtgaggacagaggagcgggagcagatcaagaccctgaacaacaagtttgccagcttcatcgacaaggtgcgcttcctggagcagcagaacaaggtgctggacaccaagtggaccctgctgcaggagcagggcaccaagacagtgcggcagaacctggagcccctgtttgagcagtacatcaacaacctgcggcggcagctggacagcatcgtgggggagcggggccgcctggacagcgagctgaggaacatgcaggacctggtggaggacttcaagaacaagtatgaagatgagatcaacaagaggaccacagcagaaaatgaatttgtgatgctgaagaaggatgtggatgctgcctacatgaacaaggtggagctggaggccaaggtggatgccctgatggatgagatcaacttcatgaagatgttctttgatgctgagctgagccagatgcagacccacgtgtctgacacctctgtggtgctgtccatggacaacaacagaaacctggacctggacagcatcatcgccgaggtgaaggcccagtatgaggagatcgccaacagaagcaggacagaagctgagagctggtaccagaccaagtatgaggagctgcagcagacagctggaagacatggagatgacctgaggaacaccaagcatgagatcagcgagatgaacaggatgatccagaggctgcgggcagaaattgacaacgtgaagaagcagtgtgccaacctgcagaatgccatcgcagatgctgagcagagaggagagctggccctgaaggatgccaggaacaagctggccgagctggaggaggccctgcagaaggccaagcaggacatggcccggctgctgcgggagtaccaggagctgatgaacaccaagctggccctggatgtggagatcgccacctacaggaagctgctggagggggaggagtgccgcctgagcggggagggcgtgggccctgtgaacatctctgtggtgaccagctctgtgagcagcggctacggcagcggcagcggctacggcggcggcctgggcggcggcctgggcggcggcctgggcggcggcctggccggcggcagcagcggcagctactacagcagcagcagtggaggagtgggcctgggcggcggcctgtctgtgggcggcagcggcttcagcgccagcagcggccggggcctgggcgtgggctttggaagtggcggcggcagcagcagctctgtgaagtttgtgtccaccaccagcagcagcaggaagagcttcaagagctag

SEQ ID NO: 8713 - DNA, 1668 bp, Artificial Sequence
  derived and/or modified sequence
atgagccggcagagctctgtgtccttccgcagcggcggcagccgctccttcagcacagccagcgccatcacccccagcgtgtccaggaccagcttcacctctgtgagccgcagcggcggcggcggcggcggcggcttcggccgggtgtccctggccggggcctgtggggtgggcggctacggctttggaggaggagctggcagcggcttcggctttggaggaggagctgggggcggcttcggcctgggcggcggggccggctttggaggcggctttggaggccctggcttccctgtgtgccccccaggcggcatccaggaggtgacagtgaaccagagcctgctgacccccctgaacctgcagattgaccccagcatccagagggtgaggacagaggagcgggagcagatcaagaccctgaacaacaagtttgccagcttcatcgacaaggtgcgcttcctggagcagcagaacaaggtgctggacaccaagtggaccctgctgcaggagcagggcaccaagacagtgcggcagaacctggagcccctgtttgagcagtacatcaacaacctgcggcggcagctggacagcatcgtgggggagcggggccgcctggacagcgagctgaggaacatgcaggacctggtggaggacttcaagaacaagtatgaagatgagatcaacaagaggaccacagcagaaaatgaatttgtgatgctgaagaaggatgtggatgctgcctacatgaacaaggtggagctggaggccaaggtggatgccctgatggatgagatcaacttcatgaagatgttctttgatgctgagctgagccagatgcagacccacgtgtctgacacctctgtggtgctgtccatggacaacaacagaaacctggacctggacagcatcatcgccgaggtgaaggcccagtatgaggagatcgccaacagaagcaggacagaggccgagagctggtaccagaccaagtatgaggagctgcagcagacagctggaagacatggagatgacctgaggaacaccaagcatgagatcagcgagatgaacaggatgatccagaggctgcgggcagaaattgacaacgtgaagaagcagtgtgccaacctgcagaatgccatcgcagatgctgagcagagaggagagctggccctgaaggatgccaggaacaagctggccgagctggaggaggccctgcagaaggccaagcaggacatggcccggctgctgcgggagtaccaggagctgatgaacaccaagctggccctggatgtggagatcgccacctacaggaagctgctggagggggaggagtgccgcctgtctggagagggcgtgggccctgtgaacatctctgtggtgaccagctctgtgagcagcggctacggcagcggcagcggctatggaggcggcctgggcggcggcctgggcggcggcctgggcggcggcctggccggcggcagcagcggcagctactacagcagcagcagcggcggcgtgggcctgggcggcggcctgtctgtgggcggcagcggcttcagcgccagcagcggccggggcctgggcgtgggcttcggcagcggcggcggcagcagcagctctgtgaagtttgtgtccaccaccagcagcagcaggaagagcttcaagagctag

SEQ ID NO: 8714 - DNA, 399 bp, Artificial Sequence
  derived and/or modified sequence
atgagccggcagagctctgtgtccttccgcagcggcggcagccgctccttcagcacagccagcgccatcacccccagcgtgtccaggaccagcttcacctctgtgagccgcagcggcggcggcggcggcggcggcttcggccgggtgtccctggccggggcctgtggggtgggcggctacggcagccgcagcctgtacaacctgggcggcagcaagaggatcagcatcagcaccagcggcggcagcttcaggaacagatttggagctggagctgggggcggctacggctttggaggaggagctggcagcggctttggatttggaggaggagctgggggcggcttcggcctgggcggcggggccggctttggaggcggctttggaggccctggcttctag

SEQ ID NO: 8715 - DNA, 2531 bp, Artificial Sequence
  derived and/or modified sequence
gcatcctttttgggctgctcacagcccccagcctctatggtgaagacatacttgctagcagcgtcaccaacttgctgccaagagatcagtgctgcaaggcaaggttatttctaactgagcagagcctgccaggaagaaagcgtttgcaccccacaccactgtgcaggtgtgaccggtgagctcacagctgccccccaggcatgcccagcccacttaatcattcacagctcgacagctctctcgcccagcccagttctggaagggataaaaagggggcatcaccgttcctgggtaacagagccaccttctgcgtcctgctgagctctgttctctccagcacctcccaacccactagtgcctggttctcttgctccaccaggaacaagccaccatgtctcgccagtcaagtgtgtccttccggagcgggggcagtcgtagcttcagcaccgcctctgccatcaccccgtctgtctcccgcaccagcttcacctccgtgtcccggtccgggggtggcggtggtggtggcttcggcagggtcagccttgcgggtgcttgtggagtgggtggctatggcagccggagcctctacaacctggggggctccaagaggatatccatcagcactagtggtggcagcttcaggaaccggtttggtgctggtgctggaggcggctatggctttggaggtggtgccggtagtggatttggtttcggcggtggagctggtggtggctttgggctcggtggcggagctggctttggaggtggcttcggtggccctggctttcctgtctgccctcctggaggtatccaagaggtcactgtcaaccagagtctcctgactcccctcaacctgcaaatcgaccccagcatccagagggtgaggaccgaggagcgcgagcagatcaagaccctcaacaataagtttgcctccttcatcgacaaggtgcggttcctggagcagcagaacaaggttctggacaccaagtggaccctgctgcaggagcagggcaccaagactgtgaggcagaacctggagccgttgttcgagcagtacatcaacaacctcaggaggcagctggacagcatcgtgggggaacggggccgcctggactcagagctgagaaacatgcaggacctggtggaagacttcaagaacaagtatgaggatgaaatcaacaagcgtaccactgctgagaatgagtttgtgatgctgaagaaggatgtagatgctgcctacatgaacaaggtggagctggaggccaaggttgatgcactgatggatgagattaacttcatgaagatgttctttgatgcggagctgtcccagatgcagacgcatgtctctgacacctcagtggtcctctccatggacaacaaccgcaacctggacctggatagcatcatcgctgaggtcaaggcccagtatgaggagattgccaaccgcagccggacagaagccgagtcctggtatcagaccaagtatgaggagctgcagcagacagctggccggcatggcgatgacctccgcaacaccaagcatgagatctctgagatgaaccggatgatccagaggctgagagccgagattgacaatgtcaagaaacagtgcgccaatctgcagaacgccattgcggatgccgagcagcgtggggagctggccctcaaggatgccaggaacaagctggccgagctggaggaggccctgcagaaggccaagcaggacatggcccggctgctgcgtgagtaccaggagctcatgaacaccaagctggccctggacgtggagatcgccacttaccgcaagctgctggagggcgaggaatgcagactcagtggagaaggagttggaccagtcaacatctctgttgtcacaagcagtgtttcctctggatatggcagtggcagtggctatggcggtggcctcggtggaggtcttggcggcggcctcggtggaggtcttgccggaggtagcagtggaagctactactccagcagcagtgggggtgtcggcctaggtggtgggctcagtgtggggggctctggcttcagtgcaagcagtggccgagggctgggggtgggctttggcagtggcgggggtagcagctccagcgtcaaatttgtctccaccacctcctcctcccggaagagcttcaagagctaagaacctgctgcaagtcactgccttccaagtgcagcaacccagcccatggagattgcctcttctaggcagttgctcaagccatgttttatccttttctggagagtagtctagaccaagccaattgcagaaccacattctttggttcccaggagagccccattcccagcccctggtctcccgtgccgcagttctatattctgcttcaaatcagccttcaggtttcccacagcatggcccctgctgacacgagaacccaaagttttcccaaatctaaatcatcaaaacagaatccccaccccaatcccaaattttgttttggttctaactacctccagaatgtgttcaataaaatgcttttataatataa

SEQ ID NO: 8716 - DNA, 2131 bp, Artificial Sequence
  derived and/or modified sequence
aacagagccaccttctgcgtcctgctgagctctgttctctccagcacctcccaacccactagtgcctggttctcttgctccaccaggaacaagccaccatgtctcgccagtcaagtgtgtccttccggagcgggggcagtcgtagcttcagcaccgcctctgccatcaccccgtctgtctcccgcaccagcttcacctccgtgtcccggtccgggggtggcggtggtggtggcttcggcagggtcagccttgcgggtgcttgtggagtgggtggctatggctttggaggtggtgccggtagtggatttggtttcggcggtggagctggtggtggctttgggctcggtggcggagctggctttggaggtggcttcggtggccctggctttcctgtctgccctcctggaggtatccaagaggtcactgtcaaccagagtctcctgactcccctcaacctgcaaatcgaccccagcatccagagggtgaggaccgaggagcgcgagcagatcaagaccctcaacaataagtttgcctccttcatcgacaaggtgcggttcctggagcagcagaacaaggttctggacaccaagtggaccctgctgcaggagcagggcaccaagactgtgaggcagaacctggagccgttgttcgagcagtacatcaacaacctcaggaggcagctggacagcatcgtgggggaacggggccgcctggactcagagctgagaaacatgcaggacctggtggaagacttcaagaacaagtatgaggatgaaatcaacaagcgtaccactgctgagaatgagtttgtgatgctgaagaaggatgtagatgctgcctacatgaacaaggtggagctggaggccaaggttgatgcactgatggatgagattaacttcatgaagatgttctttgatgcggagctgtcccagatgcagacgcatgtctctgacacctcagtggtcctctccatggacaacaaccgcaacctggacctggatagcatcatcgctgaggtcaaggcccagtatgaggagattgccaaccgcagccggacagaagccgagtcctggtatcagaccaagtatgaggagctgcagcagacagctggccggcatggcgatgacctccgcaacaccaagcatgagatctctgagatgaaccggatgatccagaggctgagagccgagattgacaatgtcaagaaacagtgcgccaatctgcagaacgccattgcggatgccgagcagcgtggggagctggccctcaaggatgccaggaacaagctggccgagctggaggaggccctgcagaaggccaagcaggacatggcccggctgctgcgtgagtaccaggagctcatgaacaccaagctggccctggacgtggagatcgccacttaccgcaagctgctggagggcgaggaatgcagactcagtggagaaggagttggaccagtcaacatctctgttgtcacaagcagtgtttcctctggatatggcagtggcagtggctatggcggtggcctcggtggaggtcttggcggcggcctcggtggaggtcttgccggaggtagcagtggaagctactactccagcagcagtgggggtgtcggcctaggtggtgggctcagtgtggggggctctggcttcagtgcaagcagtggccgagggctgggggtgggctttggcagtggcgggggtagcagctccagcgtcaaatttgtctccaccacctcctcctcccggaagagcttcaagagctaagaacctgctgcaagtcactgccttccaagtgcagcaacccagcccatggagattgcctcttctaggcagttgctcaagccatgttttatccttttctggagagtagtctagaccaagccaattgcagaaccacattctttggttcccaggagagccccattcccagcccctggtctcccgtgccgcagttctatattctgcttcaaatcagccttcaggtttcccacagcatggcccctgctgacacgagaacccaaagttttcccaaatctaaatcatcaaaacagaatccccaccccaatcccaaattttgttttggttctaactacctccagaatgtgttcaataaaatgcttttataatat

SEQ ID NO: 8717 - DNA, 542 bp, Artificial Sequence
  derived and/or modified sequence
actgtgcaggtgtgaccggtgagctcacagctgccccccaggcatgcccagcccacttaatcattcacagctcgacagctctctcgcccagcccagttctggaagggataaaaagggggcatcaccgttcctgggaacaagccaccatgtctcgccagtcaagtgtgtccttccggagcgggggcagtcgtagcttcagcaccgcctctgccatcaccccgtctgtctcccgcaccagcttcacctccgtgtcccggtccgggggtggcggtggtggtggcttcggcagggtcagccttgcgggtgcttgtggagtgggtggctatggcagccggagcctctacaacctggggggctccaagaggatatccatcagcactagtggtggcagcttcaggaaccggtttggtgctggtgctggaggcggctatggctttggaggtggtgccggtagtggatttggtttcggcggtggagctggtggtggctttgggctcggtggcggagctggctttggaggtggcttcggtggccctggcttt

SEQ ID NO: 8718 - DNA, 1773 bp, Artificial Sequence
  derived and/or modified sequence
atgagccggcagagcagcgtgagcttccggagcggcggcagccggtccttctctactgcaagtgccattacacctagcgtcagtcgtaccagctttacctcggtctctcgctccggtgggggaggagggggaggctttgggcgtgtgtcactggcgggcgcatgtggggtcggcgggtatggcagcaggtccctctataatttgggggggtcgaaacggataagcatatctacttctgggggcagcttccggaaccggtttggcgctggtgctggaggtgggtatggatttgggggcggggccggcagcggtttcggtttcgggggcggggctggtggaggatttggtctgggcggcggagctggctttgggggcggcttcggcgggcctggcttcccagtctgcccacctggagggattcaggaggtcacagtgaaccagtccctcctgacacctttgaacctccagatcgacccatccatccagcgggtgaggacggaagaaagggagcagattaagactcttaataacaaatttgcctcattcatagataaggtgcggtttttggaacagcagaacaaggtgttggataccaagtggactctgctgcaggagcaaggaacaaaaacagtccggcagaatctcgagcccttgttcgagcagtacataaacaatttgcgacgacagctagatagtattgttggggaaaggggccggctagattctgaactccggaatatgcaggacctggtcgaagactttaagaataagtacgaggatgagattaataagcggacaaccgctgagaatgaattcgtgatgctgaagaaagatgttgatgctgcctacatgaacaaggtggaattggaggctaaagttgatgcactgatggatgagattaactttatgaaaatgtttttcgacgctgagctgagtcagatgcaaacacacgttagcgatacaagcgtggtcctgtctatggataacaatagaaacctcgacctggattctatcattgcagaggtgaaggctcagtatgaggagatcgccaaccgaagcaggaccgaagcagaatcgtggtaccagaccaaatacgaggaactccaacagaccgcaggccgccacggagatgacctcagaaatactaaacacgaaatctctgaaatgaaccgcatgatccagcgcctcagggctgaaattgacaatgtaaaaaaacaatgcgcgaacctgcagaacgcgattgcagacgccgagcagcggggagagctcgctttgaaggacgctcggaacaagctagcagaattggaggaggcactgcagaaagctaagcaggacatggcacggctgctccgggaatatcaggagctcatgaacaccaagttggctttagacgtcgaaatcgccacttacaggaaactgctggaaggagaggaatgtaggctctctggcgaaggagtggggcctgttaatattagtgtggtgacatcaagtgtatcatccggctacggatccgggtcaggctacggcggagggttggggggcggacttggcggaggtctgggcggcggcctcgccggcggatcttcaggctcttactattcatcatcatctggaggcgtgggcctgggcggtggactttccgtggggggcagtggattcagcgcctcctccggccgcggactgggagtgggctttggaagcggaggtgggagtagttcaagtgtgaagttcgtctcaaccacatcatccagcagaaagagtttcaaatcatag

SEQ ID NO: 8719 - DNA, 1668 bp, Artificial Sequence
  derived and/or modified sequence
atgagccggcagagcagcgtgagcttccggagcggcggcagccggtccttttctactgcatccgcgattacccccagtgtaagtcgcacatcgttcacttccgtgtctcggagtggtggggggggcggaggcggttttgggcgagtatccctcgcaggggcttgcggcgtgggggggtatggttttggtggtggcgccgggtccggtttcgggtttggcggaggggcgggcggagggttcgggctcggtggcggagccgggttcgggggaggctttggagggcctggttttccagtctgtccccccggcggcatccaagaagtcacagtgaatcagagtctccttacccccctgaacctgcagatagatccctccatccagagagttcgaacagaggaacgggagcaaatcaaaaccttaaataataagttcgcatccttcattgataaggtccggtttttagagcagcaaaataaagtcctggatacaaagtggacacttctccaggaacagggtactaagacagtgagacagaacctcgagccactgttcgaacagtatatcaacaacttgagaagacaactggattcaatcgtaggcgagagggggcggttggatagcgagctccgaaacatgcaggatttagtggaagactttaagaacaagtacgaggatgagatcaataagagaacaaccgcggagaatgagtttgtcatgcttaaaaaggacgtggacgccgcttacatgaacaaggtggaactggaggctaaggtggatgctctcatggacgagattaactttatgaaaatgtttttcgacgctgagctgtcccagatgcagacacacgtgtccgatacatctgttgtgctgagcatggacaacaacagaaacctggatctggattctattatagccgaggtgaaggcccagtacgaagagatcgccaatagaagtcggaccgaggccgagtcatggtaccagaccaaatacgaggagcttcagcaaacggcaggtcgccacggggatgacttgaggaatacgaaacatgagatcagcgaaatgaaccgcatgattcaaagattgcgcgctgagatcgacaatgtcaaaaagcagtgcgcaaacctgcagaacgccatcgcagatgcagagcagaggggagaactggctcttaaagacgctcgaaacaaattagcagagctcgaagaagccctccagaaggctaagcaggacatggcccgcctccttcgggaataccaagagttgatgaatacaaagctggctctggatgtcgagatcgcaacctaccggaagctgctggaaggcgaagagtgccggctaagcggggaaggagtgggacccgtgaatatatctgttgtgacctcctccgtgtcttctgggtatggatctgggtcaggctacggcggcggactgggcggaggattgggcggcggactgggaggagggctcgctggcggatctagcgggagttattattcttcctcctctgggggggtggggctcggcggagggttgtccgtgggcggttctggcttcagcgccagctctgggagaggcctgggtgtcggattcggttctggaggcggcagtagtagcagtgtgaaattcgtgagcactacaagctctagccggaagagctttaagagctag

SEQ ID NO: 8720 - DNA, 399 bp, Artificial Sequence
  derived and/or modified sequence
atgagccggcagagcagcgtgagcttccggagcggcggcagccggagcttttccaccgcctctgccatcaccccttccgtttctcgcacatcgtttacctccgttagtagaagcggtggaggcggcggtggcggcttcggacgggtgtctcttgctggcgcctgtggtgtagggggctacggctccagatctctgtataatctcgggggctctaagagaattagtatctccacatctggtggctcgtttcgaaaccggttcggagcgggcgctggcggcggctacggcttcgggggtggggccggttccgggttcggctttggaggaggggcagggggcgggtttggccttgggggcggggccggcttcggaggaggtttcggagggccaggtttctag

SEQ ID NO: 8721 - DNA, 1773 bp, Artificial Sequence
  derived and/or modified sequence
atgtctagacagtcaagtgtgagtttccggtccggcggttcccggtccttttcaaccgcttcagccatcacgccctcggtgtccaggacatccttcacgtctgtcagccgaagcggcggaggaggcggaggcggatttggacgggtcagcctagcgggagcatgcggggtggggggatatggctccagatctctgtacaacctggggggttccaaacgcatttccatcagcacctctggaggctctttccggaatcgctttggggctggcgcaggaggcggatacgggttcggcggaggcgctggcagcggcttcggctttggcggaggggctgggggtggtttcggtctcggcggtggagccggatttggtgggggtttcggagggccaggctttccagtctgccctccgggtggcatacaagaagttaccgtgaatcaatccctgctcacgcctctgaatttgcagatcgacccctctatccaaagagtgaggactgaggagagggagcagatcaaaaccttaaataataaattcgccagcttcatagacaaggtcagattcttagagcaacagaacaaggtgcttgacacaaagtggacactcctgcaggagcaaggtacaaaaaccgttcggcagaacctcgaacccctattcgagcaatatattaataatctcagacggcaactggactctattgtcggtgagcgtggtcgactggattctgagctgagaaacatgcaggatctggtggaggacttcaagaacaagtatgaagacgagatcaacaaacgcaccacagctgaaaatgaatttgtgatgctgaagaaagatgtcgatgccgcatacatgaacaaggtggagcttgaagccaaagtggatgctctgatggatgagatcaatttcatgaaaatgttcttcgacgccgagctgtcccagatgcagacacacgtcagtgacaccagcgtcgtgctttcaatggacaacaaccgtaatctggatcttgactctatcattgccgaagtgaaggcccagtatgaggagatcgcgaatagaagcagaacagaggccgaaagctggtatcagacgaaatatgaggagttacagcagacggccggaagacacggtgacgacctgaggaatacgaagcatgaaataagcgagatgaatcgaatgatccagagactgcgggcagagattgacaacgtgaaaaaacagtgtgccaatttacaaaatgctatcgctgacgccgaacaacgcggagagctggccctgaaagatgcacgcaataaactagccgaactcgaagaggcgcttcagaaggcaaagcaggacatggcgagattattacgggagtatcaggagttaatgaacacaaagctagcgttggacgtggaaatcgcaacatataggaagctgcttgagggtgaggaatgccgcctgtccggagaaggggtgggtcctgtcaacatctctgtggtgacttcttctgtctcttctggctacggctcaggttcaggctacggaggcggactgggaggcggactggggggtggcctggggggaggactggcaggtggctcttccggatcatattacagctccagcagtggcggagtaggcctgggagggggtttatccgtcggaggcagcgggttcagcgccagctcagggagaggactgggagtgggcttcggctcaggcggaggtagctcttcatccgtaaagtttgtctcaacaactagctcgtctcggaagtcttttaaatcctag

SEQ ID NO: 8722 - DNA, 1668 bp, Artificial Sequence
  derived and/or modified sequence
atgagcaggcagagcagcgtctcttttagatccgggggatcccggtccttctccactgcatctgccattacgccctcagtcagtaggacatctttcacctcggtttctaggtcgggtggcggaggaggcggagggttcggaagagtgtctctagcaggggcttgtggtgttggcggatacggattcggcggtggagccggaagcgggtttggattcggcggaggcgctggcggaggatttgggctcggcggaggggcagggttcggcggaggcttcggcggacctggcttccctgtatgcccaccgggaggcatccaggaggtgactgtgaatcagagtttactcacccccctcaatcttcaaattgacccatctattcagcgggttcgaactgaagagagagagcaaataaaaacactcaacaataagtttgccagctttatcgataaggtgcgattcttagaacagcagaataaggtgctggacactaagtggacgctgctgcaggagcaaggaactaaaaccgtgcgccagaatcttgagcccttgttcgagcagtacatcaacaacttgcgtaggcagctggattccattgtgggagaaagaggacggttagactcagagctgcggaatatgcaggacttagtggaagatttcaagaacaagtatgaggatgaaatcaacaaaagaaccacggctgagaacgagttcgtaatgttaaaaaaagacgtggatgctgcatatatgaataaggtcgaacttgaggctaaggtggacgcactcatggatgaaatcaacttcatgaaaatgttcttcgacgcagagctaagccagatgcagacccacgtgtccgatacatctgttgtgcttagtatggataacaaccgcaatttggatttagactcaattattgcagaagtgaaggctcagtatgaggagattgccaacaggtcacgcacagaggcagaatcctggtaccagaccaagtatgaggagcttcaacaaacggccggaaggcatggagatgacctgagaaacacaaaacatgagatctctgaaatgaaccgtatgattcaacgtctacgggctgagattgataacgttaagaagcagtgtgccaacctgcagaatgctatcgcggatgctgagcagaggggcgaattagccctgaaagatgcccgaaacaagctggcagagctcgaggaagcacttcaaaaagcaaagcaggacatggcgagactgctcagggagtaccaagagttgatgaacacaaaactcgccctcgacgtggaaatagccacttatagaaagcttttagagggggaagagtgccggctgagtggcgaaggagtgggcccagttaatatctctgtcgtgacatccagcgtttcttcaggatacggatcaggaagcggttatggcggaggactcggagggggactcggcggaggcttaggcggtggtcttgccggtggatcaagcgggtcctactacagctcttctagtggaggggtgggactgggagggggtctcagcgtcggcggaagtggctttagcgccagctccgggaggggacttggcgtggggttcggcagtggcggaggaagctcatcatccgtaaagttcgtctctaccactagcagtagtcgcaaatcattcaaatcatag

SEQ ID NO: 8723 - DNA, 399 bp, Artificial Sequence
  derived and/or modified sequence
atgtcaagacagagcagcgtgtctttccgctcagggggttctagaagtttctcaaccgcctccgcaatcacaccctccgttagtcggaccagttttacgagtgtgtcaagaagcgggggaggaggtggcggtggatttggtcgtgtctctctggcgggtgcttgtggggtaggagggtacggctcgcggagcctgtacaacctggggggtagcaagaggatttcaattagcacctcaggaggaagctttagaaatcgttttggggcaggcgcaggcggaggctatgggtttggcggaggcgctggtagcgggttcgggttcggcggtggcgcagggggtggattcggactcggagggggtgccggatttggcggtggctttggtggtcctggtttctag

SEQ ID NO: 8724 - protein, 1257 aa, Artificial Sequence
  derived and/or modified sequence
MVVALRYVWPLLLCSPCLLIQIPEEYEGHHVMEPPVITEQSPRRLVVFPTDDISLKCEASGKPEVQFRWTRDGVHFKPKEELGVTVYQSPHSGSFTITGNNSNFAQRFQGIYRCFASNKLGTAMSHEIRLMAEGAPKWPKETVKPVEVEEGESVVLPCNPPPSAEPLRIYWMNSKILHIKQDERVTMGQNGNLYFANVLTSDNHSDYICHAHFPGTRTIIQKEPIDLRVKATNSMIDRKPRLLFPTNSSSHLVALQGQPLVLECIAEGFPTPTIKWLRPSGPMPADRVTYQNHNKTLQLLKVGEEDDGEYRCLAENSLGSARHAYYVTVEAAPYWLHKPQSHLYGPGETARLDCQVQGRPQPEVTWRINGIPVEELAKDQKYRIQRGALILSNVQPSDTMVTQCEARNRHGLLLANAYIYVVQLPAKILTADNQTYMAVQGSTAYLLCKAFGAPVPSVQWLDEDGTTVLQDERFFPYANGTLGIRDLQANDTGRYFCLAANDQNNVTIMANLKVKDATQITQGPRSTIEKKGSRVTFTCQASFDPSLQPSITWRGDGRDLQELGDSDKYFIEDGRLVIHSLDYSDQGNYSCVASTELDVVESRAQLLVVGSPGPVPRLVLSDLHLLTQSQVRVSWSPAEDHNAPIEKYDIEFEDKEMAPEKWYSLGKVPGNQTSTTLKLSPYVHYTFRVTAINKYGPGEPSPVSETVVTPEAAPEKNPVDVKGEGNETTNMVITWKPLRWMDWNAPQVQYRVQWRPQGTRGPWQEQIVSDPFLVVSNTSTFVPYEIKVQAVNSQGKGPEPQVTIGYSGEDYPQAIPELEGIEILNSSAVLVKWRPVDLAQVKGHLRGYNVTYWREGSQRKHSKRHIHKDHVVVPANTTSVILSGLRPYSSYHLEVQAFNGRGSGPASEFTFSTPEGVPGHPEALHLECQSNTSLLLRWQPPLSHNGVLTGYVLSYHPLDEGGKGQLSFNLRDPELRTHNLTDLSPHLRYRFQLQATTKEGPGEAIVREGGTMALSGISDFGNISATAGENYSVVSWVPKEGQCNFRFHILFKALGEEKGGASLSPQYVSYNQSSYTQWDLQPDTDYEIHLFKERMFRHQMAVKTNGTGRVRLPPAGFATEGWFIGFVSAIILLLLVLLILCFIKRSKGGKYSVKDKEDTQVDSEARPMKDETFGEYRSLESDNEEKAFGSSQPSLNGDIKPLGSDDSLADYGGSVDVQFNEDGSFIGQYSGKKEKEAAGGNDSSGATSPINPAVALE

SEQ ID NO: 8725 - protein, 151 aa, Artificial Sequence
  derived and/or modified sequence
MVVALRYVWPLLLCSPCLLIQIPEEYEGHHVMEPPVITEQSPRRLVVFPTDDISLKCEASGKPEVQFRWTRDGVHFKPKEELGVTVYQSPHSGSFTITGNNSNFAQRFQGIYRCFASNKLGTAMSHEIRLMAEGAPKWPKETVKPVEVEEG

SEQ ID NO: 8726 - protein, 116 aa, Artificial Sequence
  derived and/or modified sequence
MAEGAPKWPKETVKPVEVEEGESVVLPCNPPPSAEPLRIYWMNSKILHIKQDERVTMGQNGNLYFANVLTSDNHSDYICHAHFPGTRTIIQKEPIDLRVKATNSMIDRKPRLLFPT

SEQ ID NO: 8727 - protein, 1259 aa, Artificial Sequence
  derived and/or modified sequence
MVVALRYVWPLLLCSPCLLIQIPEESFPGHRVVMEPPVITEQSPRRLVVFPTDDISLKCEASGKPEVQFRWTRDGVHFKPKEELGVTVYQSPHSGSFTITGNNSNFAQRFQGIYRCFASNKLGTAMSHEIRLMAEGAPKWPKETVKPVEVEEGESVVLPCNPPPSAEPLRIYWMNSKILHIKQDERVTMGQNGNLYFANVLTSDNHSDYICHAHFPGTRTIIQKEPIDLRVKATNSMIDRKPRLLFPTNSSSHLVALQGQPLVLECIAEGFPTPTIKWLRPSGPMPADRVTYQNHNKTLQLLKVGEEDDGEYRCLAENSLGSARHAYYVTVEAAPYWLHKPQSHLYGPGETARLDCQVQGRPQPEVTWRINGIPVEELAKDQKYRIQRGALILSNVQPSDTMVTQCEARNRHGLLLANAYIYVVQLPAKILTADNQTYMAVQGSTAYLLCKAFGAPVPSVQWLDEDGTTVLQDERFFPYANGTLGIRDLQANDTGRYFCLAANDQNNVTIMANLKVKDATQITQGPRSTIEKKGSRVTFTCQASFDPSLQPSITWRGDGRDLQELGDSDKYFIEDGRLVIHSLDYSDQGNYSCVASTELDVVESRAQLLVVGSPGPVPRLVLSDLHLLTQSQVRVSWSPAEDHNAPIEKYDIEFEDKEMAPEKWYSLGKVPGNQTSTTLKLSPYVHYTFRVTAINKYGPGEPSPVSETVVTPEAAPEKNPVDVKGEGNETTNMVITWKPLRWMDWNAPQVQYRVQWRPQGTRGPWQEQIVSDPFLVVSNTSTFVPYEIKVQAVNSQGKGPEPQVTIGYSGEDYPQAIPELEGIEILNSSAVLVKWRPVDLAQVKGHLRGYNVTYWREGSQRKHSKRHIHKDHVVVPANTTSVILSGLRPYSSYHLEVQAFNGRGSGPASEFTFSTPEGVPGHPEALHLECQSNTSLLLRWQPPLSHNGVLTGYVLSYHPLDEGGKGQLSFNLRDPELRTHNLTDLSPHLRYRFQLQATTKEGPGEAIVREGGTMALSGISDFGNISATAGENYSVVSWVPKEGQCNFRFHILFKALGEEKGGASLSPQYVSYNQSSYTQWDLQPDTDYEIHLFKERMFRHQMAVKTNGTGRVRLPPAGFATEGWFIGFVSAIILLLLVLLILCFIKRSKGGKYSVKDKEDTQVDSEARPMKDETFGEYRSLESDNEEKAFGSSQPSLNGDIKPLGSDDSLADYGGSVDVQFNEDGSFIGQYSGKKEKEAAGGNDSSGATSPINPAVALE

SEQ ID NO: 8728 - DNA, 3774 bp, Artificial Sequence
  derived and/or modified sequence
atggtggtggccctgagatacgtgtggcccctgctgctgtgcagcccctgcctgctgatccagatccccgaggagtacgagggccaccacgtgatggagccccccgtgatcaccgagcagagccccagaagactggtggtgttccccaccgacgacatcagcctgaagtgcgaggccagcggcaagcccgaggtgcagttcagatggaccagagacggcgtgcacttcaagcccaaggaggagctgggcgtgaccgtgtaccagagcccccacagcggcagcttcaccatcaccggcaacaacagcaacttcgcccagagattccagggcatctacagatgcttcgccagcaacaagctgggcaccgccatgagccacgagatcagactgatggccgagggcgcccccaagtggcccaaggagaccgtgaagcccgtggaggtggaggagggcgagagcgtggtgctgccctgcaaccccccccccagcgccgagcccctgagaatctactggatgaacagcaagatcctgcacatcaagcaggacgagagagtgaccatgggccagaacggcaacctgtacttcgccaacgtgctgaccagcgacaaccacagcgactacatctgccacgcccacttccccggcaccagaaccatcatccagaaggagcccatcgacctgagagtgaaggccaccaacagcatgatcgacagaaagcccagactgctgttccccaccaacagcagcagccacctggtggccctgcagggccagcccctggtgctggagtgcatcgccgagggcttccccacccccaccatcaagtggctgagacccagcggccccatgcccgccgacagagtgacctaccagaaccacaacaagaccctgcagctgctgaaggtgggcgaggaggacgacggcgagtacagatgcctggccgagaacagcctgggcagcgccagacacgcctactacgtgaccgtggaggccgccccctactggctgcacaagccccagagccacctgtacggccccggcgagaccgccagactggactgccaggtgcagggcagaccccagcccgaggtgacctggagaatcaacggcatccccgtggaggagctggccaaggaccagaagtacagaatccagagaggcgccctgatcctgagcaacgtgcagcccagcgacaccatggtgacccagtgcgaggccagaaacagacacggcctgctgctggccaacgcctacatctacgtggtgcagctgcccgccaagatcctgaccgccgacaaccagacctacatggccgtgcagggcagcaccgcctacctgctgtgcaaggccttcggcgcccccgtgcccagcgtgcagtggctggacgaggacggcaccaccgtgctgcaggacgagagattcttcccctacgccaacggcaccctgggcatcagagacctgcaggccaacgacaccggcagatacttctgcctggccgccaacgaccagaacaacgtgaccatcatggccaacctgaaggtgaaggacgccacccagatcacccagggccccagaagcaccatcgagaagaagggcagcagagtgaccttcacctgccaggccagcttcgaccccagcctgcagcccagcatcacctggagaggcgacggcagagacctgcaggagctgggcgacagcgacaagtacttcatcgaggacggcagactggtgatccacagcctggactacagcgaccagggcaactacagctgcgtggccagcaccgagctggacgtggtggagagcagagcccagctgctggtggtgggcagccccggccccgtgcccagactggtgctgagcgacctgcacctgctgacccagagccaggtgagagtgagctggagccccgccgaggaccacaacgcccccatcgagaagtacgacatcgagttcgaggacaaggagatggcccccgagaagtggtacagcctgggcaaggtgcccggcaaccagaccagcaccaccctgaagctgagcccctacgtgcactacaccttcagagtgaccgccatcaacaagtacggccccggcgagcccagccccgtgagcgagaccgtggtgacccccgaggccgcccccgagaagaaccccgtggacgtgaagggcgagggcaacgagaccaccaacatggtgatcacctggaagcccctgagatggatggactggaacgccccccaggtgcagtacagagtgcagtggagaccccagggcaccagaggcccctggcaggagcagatcgtgagcgaccccttcctggtggtgagcaacaccagcaccttcgtgccctacgagatcaaggtgcaggccgtgaacagccagggcaagggccccgagccccaggtgaccatcggctacagcggcgaggactacccccaggccatccccgagctggagggcatcgagatcctgaacagcagcgccgtgctggtgaagtggagacccgtggacctggcccaggtgaagggccacctgagaggctacaacgtgacctactggagagagggcagccagagaaagcacagcaagagacacatccacaaggaccacgtggtggtgcccgccaacaccaccagcgtgatcctgagcggcctgagaccctacagcagctaccacctggaggtgcaggccttcaacggcagaggcagcggccccgccagcgagttcaccttcagcacccccgagggcgtgcccggccaccccgaggccctgcacctggagtgccagagcaacaccagcctgctgctgagatggcagccccccctgagccacaacggcgtgctgaccggctacgtgctgagctaccaccccctggacgagggcggcaagggccagctgagcttcaacctgagagaccccgagctgagaacccacaacctgaccgacctgagcccccacctgagatacagattccagctgcaggccaccaccaaggagggccccggcgaggccatcgtgagagagggcggcaccatggccctgagcggcatcagcgacttcggcaacatcagcgccaccgccggcgagaactacagcgtggtgagctgggtgcccaaggagggccagtgcaacttcagattccacatcctgttcaaggccctgggcgaggagaagggcggcgccagcctgagcccccagtacgtgagctacaaccagagcagctacacccagtgggacctgcagcccgacaccgactacgagatccacctgttcaaggagagaatgttcagacaccagatggccgtgaagaccaacggcaccggcagagtgagactgccccccgccggcttcgccaccgagggctggttcatcggcttcgtgagcgccatcatcctgctgctgctggtgctgctgatcctgtgcttcatcaagagaagcaagggcggcaagtacagcgtgaaggacaaggaggacacccaggtggacagcgaggccagacccatgaaggacgagaccttcggcgagtacagaagcctggagagcgacaacgaggagaaggccttcggcagcagccagcccagcctgaacggcgacatcaagcccctgggcagcgacgacagcctggccgactacggcggcagcgtggacgtgcagttcaacgaggacggcagcttcatcggccagtacagcggcaagaaggagaaggaggccgccggcggcaacgacagcagcggcgccaccagccccatcaaccccgccgtggccctggagtag

SEQ ID NO: 8729 - DNA, 3774 bp, Artificial Sequence
  derived and/or modified sequence
atggtggtcgccctccgatacgtgtggccactcctgctgtgctcaccttgcttgctgattcagatcccagaggagtacgagggacaccacgtaatggagccacccgtcatcacagagcaaagccctagaagactagtggttttccccacagacgacatctcactgaagtgtgaagctagcgggaagccagaggtccagttccgctggactcgcgatggtgtgcacttcaagcccaaggaggaactgggcgttactgtgtaccagtctccccattccggtagcttcacaattaccggcaataattccaactttgcacagcgttttcagggcatttatagatgtttcgcctctaacaagttgggtacagcgatgtctcacgaaatccgactgatggctgagggggcccctaagtggcccaaggaaacggtcaagcccgtggaggtggaggaaggcgagagtgtcgttctgccttgcaatcccccgccctccgcagagccactacgcatttactggatgaacagcaagattttacacatcaagcaggatgagagagtgacaatgggccaaaatggaaatctgtatttcgccaacgtgctaaccagtgataaccattctgattacatttgtcacgcacattttccggggacaaggaccataattcaaaaggagccaatcgacctgcgcgtgaaagcaacaaacagcatgatcgaccggaagcccagactcttatttcctactaattcatcctcacacctggtggccttacagggtcagcctttggtcctggagtgtattgcagagggcttcccaactcccacgatcaaatggctccgtcccagtggccctatgcccgcagacagagtaacgtaccagaaccacaataagacgctgcaactgttgaaagtcggtgaagaggatgatggagagtaccggtgcctggccgaaaatagtttgggctcggcccgccatgcatattacgtgactgtagaagctgccccttactggcttcataagcctcaaagccacctgtacgggcccggtgagacagctaggcttgactgtcaggtgcaggggcggccacagccagaggtgacctggagaatcaacggcatcccggtggaagaactggcaaaggaccagaaatacaggatacagaggggcgcacttatcctgtctaacgtacagcccagcgatactatggtgacgcagtgcgaagctcgaaaccggcatggactgctcttagcaaatgcctatatttacgtcgttcagctccccgctaagatcctgaccgccgataaccaaacatacatggcagtgcaggggtcaaccgcttacctgctgtgcaaagccttcggcgccccggtcccctccgtgcaatggctggacgaagatggcacaaccgtgctccaggacgagagatttttcccgtacgcgaacggcacactggggatccgagacctgcaagccaacgatactggcagatatttttgccttgcggcaaatgaccagaataatgtgacaatcatggccaatctgaaggttaaggacgccacccagatcacccagggaccgcggtctaccattgagaagaaaggatcgagggtgactttcacctgccaggccagttttgacccctctcttcagccaagtataacctggagaggagacggccgggaccttcaggagctgggtgatagcgataagtattttattgaggacggccgcctggtgattcactctctagactattccgatcaaggcaactactcctgcgtggcctctacagagcttgacgtcgtggaatcccgagctcagctcctggtagtggggagcccaggccccgtgccacgcctggtgttaagcgatctacatctactaactcagtcacaggttagggtgtcctggtcccctgctgaggaccacaacgcaccaatcgaaaaatacgatattgaattcgaagacaaagagatggctcccgaaaagtggtattcactcggaaaagtacccggcaaccagacttcaacgacactaaagctcagcccctatgtacactataccttcagggtgacggcgatcaataagtatggaccaggagagccctcgcctgtgtccgagaccgtggttacaccggaggcagctccagaaaagaatcccgtggatgtcaaaggggaggggaacgagacgaccaatatggttatcacctggaaacccctgcgttggatggattggaacgccccccaagttcagtacagagtccagtggagaccccagggcactcggggaccctggcaggagcagatcgtgagtgacccattccttgtggtaagtaacactagtacctttgttccctatgagattaaggtgcaagctgtgaactcccaaggtaagggccccgagccccaggtcactatagggtattccggcgaggattacccccaggcgattcccgagttggaggggatagaaattctaaactctagcgctgtcctggtgaagtggaggcccgtagacctcgcccaagttaagggccacctccgtgggtataatgtgacctactggcgggagggaagtcaacgtaaacactcgaagagacacattcataaggatcacgtggttgtgcctgccaacaccactagtgtgatcctatcaggccttcgtccctactcatcgtatcatctggaggtgcaggctttcaacgggcgcggaagtgggcctgcctcagagtttacgttcagcaccccagaaggggtacccgggcaccctgaagcactgcacctggaatgtcagtcgaatacgtctctgttgttgcgctggcagcctcctttatcccataacggagtactgaccggttacgtgctgtcttaccatcctctagatgaagggggaaagggacagttgtcgtttaacctcagggaccctgaactgcgaacgcacaacctgaccgatctatccccacacttgagatatagatttcagctgcaggcaactacaaaagaaggtcctggagaggctattgtcagagaaggcggcacgatggcactgtccgggatttctgattttggaaacatcagcgccacagcaggtgagaactattctgtcgtgtcttgggtgccgaaggaggggcagtgcaactttagatttcacattttattcaaagccctcggggaagagaagggaggggcgagcctaagcccccagtacgtcagctacaatcagtcaagttacacacaatgggatctgcagccagacaccgactacgagatccacctattcaaggaacgtatgtttcgacatcagatggccgtgaagacaaatggtactgggagagtacgtctccctcctgcaggatttgccacagaaggatggttcataggttttgtcagcgcaattattctgttgctgctggtgttactgattctttgtttcattaaacggtctaagggtggtaagtattcagtgaaagacaaggaggacacacaggtcgactccgaggcaagacccatgaaagacgaaacatttggtgagtaccggtccctggaaagtgataacgaggaaaaagcatttgggtcatcccagcccagcttgaatggggacatcaaacctttgggatcagatgattcccttgccgattacgggggttcagtggatgtccagttcaatgaggatgggagttttataggacagtacagtgggaaaaaggagaaggaagcagctggtggcaatgattcctccggtgctacttctcctattaatcctgccgttgcacttgagtag

SEQ ID NO: 8730 - DNA, 3774 bp, Artificial Sequence
  derived and/or modified sequence
atggtggtggccctgcgctacgtgtggcccctgctgctgtgcagcccctgcctgctgatccagatccctgaggagtatgagggccaccacgtgatggagccccctgtgatcacagagcagagcccccggcggctggtggtgttccccacagatgacatcagcctgaagtgtgaggccagcggcaagccagaggtgcagttccgctggaccagagatggagtgcacttcaagcccaaggaggagctgggcgtgacagtgtaccagagcccccacagcggcagcttcaccatcaccggcaacaacagcaactttgcccagcgcttccagggcatctaccgctgctttgccagcaacaagctgggcacagccatgagccatgagatccggctgatggccgagggcgcccccaagtggcccaaggagaccgtgaagcctgtggaggtggaggagggggagagcgtggtgctgccctgcaaccccccaccttctgctgagcccctgcgcatctactggatgaacagcaagatcctgcacatcaagcaggatgagcgggtgaccatgggccagaatggaaacctgtactttgccaacgtgctgaccagtgacaaccacagcgactacatctgccacgcccacttccctggcaccaggaccatcatccagaaggagcccatcgacctgcgggtgaaggccaccaacagcatgattgacaggaagccccggctgctcttccccaccaacagcagcagccacctggtggccctgcagggccagcccctggtgctggagtgcatcgccgagggcttccccacccccaccatcaagtggctgcggcccagcggccccatgcctgctgacagagtgacctaccagaaccacaacaagaccctgcagctgctgaaggtgggggaggaggatgatggagagtaccgctgcctggccgagaacagcctgggcagcgcccggcatgcctactacgtgacagtggaggccgccccctactggctgcacaagccccagagccacctgtatggccctggagaaacagcccggctggactgccaggtgcagggccggccccagcctgaggtgacctggaggatcaatggcatccctgtggaggagctggccaaggaccagaagtaccgcatccagagaggagccctgatcctgagcaatgtgcagcccagcgacaccatggtgacccagtgtgaggccaggaacagacatggcctgctgctggccaatgcctacatctacgtggtgcagctgcctgccaagatcctgacagctgacaaccagacctacatggctgtgcagggcagcacagcctacctgctgtgcaaggcctttggagcccctgtgcccagcgtgcagtggctggatgaagatggcaccaccgtgctgcaggatgagcgcttcttcccctatgccaacggcaccctgggcatccgggacctgcaggccaatgacaccggccgctacttctgcctggccgccaatgaccagaacaacgtgaccatcatggccaacctgaaggtgaaggatgccacccagatcacccagggccccaggagcaccatcgagaagaagggcagccgggtgaccttcacctgccaggccagctttgaccccagcctgcagcccagcatcacctggagaggagatggccgggacctgcaggagctgggggacagcgacaagtacttcattgaagatggccgcctggtgatccacagcctggactacagcgaccagggcaactacagctgtgtggccagcacagagctggatgtggtggagagccgggcccagctgctggtggtgggcagccctggccctgtgccccggctggtgctgagtgacctgcacctgctgacccagagccaggtgcgggtgtcctggagccctgctgaggaccacaatgcccccatcgagaagtatgacatcgagtttgaggacaaggagatggcccctgagaagtggtacagcctgggcaaggtgcccggcaaccagaccagcaccaccctgaagctgagcccctacgtgcactacaccttccgggtgacagccatcaacaagtatggccctggagagcccagccctgtgtctgagaccgtggtgaccccagaggccgcccctgagaagaaccctgtggatgtgaagggggagggcaatgagaccaccaacatggtgatcacctggaagcccctgcgctggatggactggaatgccccccaggtgcagtacagagtgcagtggaggccccagggcacccggggcccctggcaggagcagatcgtgtctgaccccttcctggtggtgagcaacaccagcacctttgtgccctatgagatcaaggtgcaggccgtgaacagccagggcaagggccctgagccccaggtgaccatcggctacagcggggaggactacccccaggccatccctgagctggagggcatcgagatcctgaacagcagcgctgtgctggtgaagtggaggcctgtggacctggcccaggtgaagggccacctgcggggctacaacgtgacctactggagggagggcagccagaggaagcacagcaagaggcacatccacaaggaccacgtggtggtgcctgccaacaccaccagcgtcatcctgagcggcctgcggccctacagcagctaccacctggaggtgcaggccttcaacggccggggcagcggccctgccagcgagttcaccttcagcaccccagagggcgtgcccggccaccctgaggccctgcacctggagtgccagagcaacaccagcctgctgctgcgctggcagccccccctgagccacaatggagtgctgaccggctacgtgctgagctaccaccccctggatgaaggaggcaagggccagctgtccttcaacctgcgggaccctgagctgcggacccacaacctgacagacctgagcccccacctgcgctaccgcttccagctgcaggccaccaccaaggagggccctggagaggccatcgtgcgggagggcggcaccatggccctgagcggcatcagtgactttggaaacatcagcgccacagctggggagaactacagcgtggtgtcctgggtgcccaaggagggccagtgcaacttccgcttccacatcctcttcaaggccctgggggaggagaagggcggggccagcctgagcccccagtatgtgtcctacaaccagagcagctacacccagtgggacctgcagcctgacacagattatgagatccacctgttcaaggagaggatgttccgccaccagatggctgtgaagaccaatggaacaggccgggtgcggctgcccccagctggctttgccacagagggctggttcatcggctttgtgtctgccatcatcctgctgctgctggtgctgctgatcctgtgcttcatcaagaggagcaaaggaggcaagtacagcgtgaaggacaaggaggacacccaggtggacagcgaggcccggcccatgaaggatgagacctttggagagtaccgcagcctggagagtgacaatgaggagaaggccttcggcagcagccagcccagcctgaatggagacatcaagcccctgggcagtgatgacagcctggccgactatggaggctctgtggatgtgcagttcaatgaagatggcagcttcatcggccagtacagcggcaagaaggagaaggaggccgccggcggcaatgacagcagcggggccaccagccccatcaacccagctgtggccctggagtag

SEQ ID NO: 8731 - DNA, 5113 bp, Artificial Sequence
  derived and/or modified sequence
tcgcagacgcgctcgggcggcgggtccgaggccggcgtgcgcggaggctgggcgggcagcccgagcggtggccgcagcgcagtgcccccactcccaactcccgccccaagccgcccaccagcccccttcccctccggccggagcctgaaccgagcccggctggctgtgctgcgcggtgccgccgggaaagatggtcgtggcgctgcggtacgtgtggcctctcctcctctgcagcccctgcctgcttatccagatccccgaggaatatgaaggacaccatgtgatggagccacctgtcatcacggaacagtctccacggcgcctggttgtcttccccacagatgacatcagcctcaagtgtgaggccagtggcaagcccgaagtgcagttccgctggacgagggatggtgtccacttcaaacccaaggaagagctgggtgtgaccgtgtaccagtcgccccactctggctccttcaccatcacgggcaacaacagcaactttgctcagaggttccagggcatctaccgctgctttgccagcaataagctgggcaccgccatgtcccatgagatccggctcatggccgagggtgcccccaagtggccaaaggagacagtgaagcccgtggaggtggaggaaggggagtcagtggttctgccttgcaaccctcccccaagtgcagagcctctccggatctactggatgaacagcaagatcttgcacatcaagcaggacgagcgggtgacgatgggccagaacggcaacctctactttgccaatgtgctcacctccgacaaccactcagactacatctgccacgcccacttcccaggcaccaggaccatcattcagaaggaacccattgacctccgggtcaaggccaccaacagcatgattgacaggaagccgcgcctgctcttccccaccaactccagcagccacctggtggccttgcaggggcagccattggtcctggagtgcatcgccgagggctttcccacgcccaccatcaaatggctgcgccccagtggccccatgccagccgaccgtgtcacctaccagaaccacaacaagaccctgcagctgctgaaagtgggcgaggaggatgatggcgagtaccgctgcctggccgagaactcactgggcagtgcccggcatgcgtactatgtcaccgtggaggctgccccgtactggctgcacaagccccagagccatctatatgggccaggagagactgcccgcctggactgccaagtccagggcaggccccaaccagaggtcacctggagaatcaacgggatccctgtggaggagctggccaaagaccagaagtaccggattcagcgtggcgccctgatcctgagcaacgtgcagcccagtgacacaatggtgacccaatgtgaggcccgcaaccggcacgggctcttgctggccaatgcctacatctacgttgtccagctgccagccaagatcctgactgcggacaatcagacgtacatggctgtccagggcagcactgcctaccttctgtgcaaggccttcggagcgcctgtgcccagtgttcagtggctggacgaggatgggacaacagtgcttcaggacgaacgcttcttcccctatgccaatgggaccctgggcattcgagacctccaggccaatgacaccggacgctacttctgcctggctgccaatgaccaaaacaatgttaccatcatggctaacctgaaggttaaagatgcaactcagatcactcaggggccccgcagcacaatcgagaagaaaggttccagggtgaccttcacgtgccaggcctcctttgacccctccttgcagcccagcatcacctggcgtggggacggtcgagacctccaggagcttggggacagtgacaagtacttcatagaggatgggcgcctggtcatccacagcctggactacagcgaccagggcaactacagctgcgtggccagtaccgaactggatgtggtggagagtagggcacagctcttggtggtggggagccctgggccggtgccacggctggtgctgtccgacctgcacctgctgacgcagagccaggtgcgcgtgtcctggagtcctgcagaagaccacaatgcccccattgagaaatatgacattgaatttgaggacaaggaaatggcgcctgaaaaatggtacagtctgggcaaggttccagggaaccagacctctaccaccctcaagctgtcgccctatgtccactacacctttagggttactgccataaacaaatatggccccggggagcccagcccggtctctgagactgtggtcacacctgaggcagccccagagaagaaccctgtggatgtgaagggggaaggaaatgagaccaccaatatggtcatcacgtggaagccgctccggtggatggactggaacgccccccaggttcagtaccgcgtgcagtggcgccctcaggggacacgagggccctggcaggagcagattgtcagcgaccccttcctggtggtgtccaacacgtccaccttcgtgccctatgagatcaaagtccaggccgtcaacagccagggcaagggaccagagccccaggtcactatcggctactctggagaggactacccccaggcaatccctgagctggaaggcattgaaatcctcaactcaagtgccgtgctggtcaagtggcggccggtggacctggcccaggtcaagggccacctccgcggatacaatgtgacgtactggagggagggcagtcagaggaagcacagcaagagacatatccacaaagaccatgtggtggtgcccgccaacaccaccagtgtcatcctcagtggcttgcggccctatagctcctaccacctggaggtgcaggcctttaacgggcgaggatcggggcccgccagcgagttcaccttcagcaccccagagggagtgcctggccaccccgaggcgttgcacctggagtgccagtcgaacaccagcctgctgctgcgctggcagcccccactcagccacaacggcgtgctcaccggctacgtgctctcctaccaccccctggatgaggggggcaaggggcaactgtccttcaaccttcgggaccccgaacttcggacacacaacctgaccgatctcagcccccacctgcggtaccgcttccagcttcaggccaccaccaaagagggccctggtgaagccatcgtacgggaaggaggcactatggccttgtctgggatctcagattttggcaacatctcagccacagcgggtgaaaactacagtgtcgtctcctgggtccccaaggagggccagtgcaacttcaggttccatatcttgttcaaagccttgggagaagagaagggtggggcttccctttcgccacagtatgtcagctacaaccagagctcctacacgcagtgggacctgcagcctgacactgactacgagatccacttgtttaaggagaggatgttccggcaccaaatggctgtgaagaccaatggcacaggccgcgtgaggctccctcctgctggcttcgccactgagggctggttcatcggctttgtgagtgccatcatcctcctgctcctcgtcctgctcatcctctgcttcatcaagcgcagcaagggcggcaaatactcagtgaaggataaggaggacacccaggtggactctgaggcccgaccgatgaaagatgagaccttcggcgagtacaggtccctggagagtgacaacgaggagaaggcctttggcagcagccagccatcgctcaacggggacatcaagcccctgggcagtgacgacagcctggccgattatgggggcagcgtggatgttcagttcaacgaggatggttcgttcattggccagtacagtggcaagaaggagaaggaggcggcagggggcaatgacagctcaggggccacttcccccatcaaccctgccgtggccctagaatagtggagtccaggacaggagatgctgtgcccctggccttgggatccaggcccctccctctccagcaggcccatgggaggctggagttggggcagaggagaacttgctgcctcggatccccttcctaccacccggtccccactttattgccaaaacccagctgcaccccttcctgggcacacgctgctctgccccagcttgggcagatctcccacatgccaggggcctttgggtgctgttttgccagcccatttgggcagagaggctgtggtttgggggagaagaagtaggggtggcccgaaagggtctccgaaatgctgtctttcttgctccctgactgggggcagacatggtggggtctcctcaggaccagggttggcaccttccccctcccccagccactccccagccagcctggctgggactgggaacagaactcggtgtccccaccatctgctgtcttttctttgccatctctgctccaaccgggatgggagccgggcaaactggccgcgggggcaggggaggccatctggagagcccagagtccccccactcccagcatcgcactctggcagcaccgcctcttcccgccgcccagcccaccccatggccggctttcaggagctccatacacacgctgccttcggtacccaccacacaacatccaagtggcctccgtcactacctggctgcggggcgggcacacctcctcccactgcccactggccggcctcttccagccgcccccaccccccaggaccccttagcagccctgccctccctatcgtctgaacagttgtcttcctcagcctcctcccgcccccaccttgggaatgtaaatacaccgtgactttgaaagtttgtacccctgtccttccctttacgccactagtgtgtaggcagatgtctgagtccctaggtggtttctaggattgatagcaattagctttgatgaacccatcccaggaaaaataaaaacagacaaaaaaaaaggaaagattggttctcccagcactgctcagcagccacagcctccctgtatgcctgtgcttggtctactgataagccctctacaaaaaaacaaaagtatatatatatatgtacataatatcagaattataacaggcaaataaaacctgaaaatcaaga

SEQ ID NO: 8732 - DNA, 3774 bp, Artificial Sequence
  derived and/or modified sequence
atggtggtggccctgcggtacgtgtggcccctgctgctgtgcagcccatgcttactgatccagatcccagaagaatatgaaggacaccatgttatggagccgcctgtgattaccgaacagagtcctagacgacttgtcgtttttcctacggacgatatcagcctgaaatgtgaagccagtggcaagccagaggtgcagttcaggtggaccagagatggcgttcacttcaaacctaaagaggaacttggcgtaaccgtatatcagagccctcattctggaagctttacgatcaccggcaataattcgaattttgctcagcgattccagggcatctacaggtgcttcgcttccaacaagcttggcacagcgatgtcccacgagatcaggcttatggccgaaggggcccctaaatggcccaaagaaactgtgaagcccgtcgaggtggaagagggggaatctgtagttctgccttgtaaccctccaccgagcgccgaacctttgagaatttattggatgaacagcaagatcctgcacattaagcaagacgagcgagtcactatgggccaaaacggaaatctgtattttgccaatgttctgacttctgataatcactccgactatatctgccatgcccatttccccgggacgagaaccataattcagaaggagcccatagatctgagggtcaaggctacgaattcaatgatcgatagaaaaccaaggcttctcttccccactaacagcagtagtcacctcgtggctcttcagggccaacccctcgtgctggagtgcatcgctgaggggttccccacacccacaataaaatggttaaggccctcggggccaatgcccgcggaccgcgtgacataccagaatcacaacaaaacattacaactgctgaaagttggggaagaggacgatggcgaatatcgatgtctggccgaaaattcactcggcagcgcgagacatgcttattacgtgactgttgaggctgcaccctactggctccacaaaccccagtcccacctctacggccctggcgaaactgccagattggattgccaggtgcaagggagaccccagcctgaagttacctggagaatcaacgggatacccgtagaggagctggccaaggaccagaaataccgcattcagagaggagcactgatattgtctaacgttcaacccagcgacactatggttactcagtgcgaggcacgaaataggcacggactgctcttggctaacgcttacatctatgttgtgcagcttccggccaagattctaacggccgacaatcagacttacatggccgtacaaggtagcacggcctatttgctctgtaaagccttcggagcacctgtgcccagtgtgcaatggctcgacgaggacggcacaaccgtgctccaggacgagcgatttttcccttacgcaaacggaactctgggcattcgggacttacaagcaaacgacaccggacggtacttctgtctcgccgctaatgaccagaacaatgtaaccatcatggcaaacttgaaggttaaagatgcaactcagatcactcagggacctcggagcacaattgagaagaaaggctctcgggtcacattcacctgccaggcctccttcgacccttccctgcagccttctatcacctggcgtggcgacggccgagacctccaggagttgggagattccgataagtattttattgaggacggccgcctggtcatccacagcctggactactccgatcagggaaactattcctgtgtcgcatccaccgagcttgacgtggtggagtctagggcccagctcctggtggtcggcagcccgggccccgtaccaagactggtccttagtgatctccatcttctgactcagtcccaggtgagggtgagctggagcccggccgaggaccataacgcaccgattgagaaatatgatatcgagtttgaagacaaggaaatggctcccgagaagtggtactctctcgggaaggtgcctggcaatcaaactagcactaccctgaagctgtcaccttacgtgcactacacattccgggtcacagctatcaacaagtatgggcctggcgaaccttcaccggtcagtgagaccgtggtcactccagaggcagcccctgagaaaaaccctgttgacgtcaaaggcgaaggcaatgagacaacgaacatggttattacatggaagcccctaaggtggatggattggaacgctccccaggtgcaatatcgagttcaatggcgtccccagggaacaaggggaccatggcaggagcagattgtgtcagaccctttcctggtggtgtccaatacctcaaccttcgtgccgtatgaaattaaggtacaggccgtcaatagccagggcaaggggcccgaaccacaggttacaatcggatactcaggagaggactaccctcaggccatccctgaactcgagggtattgagattcttaacagctcggctgtcctggtcaagtggcggcctgtggaccttgctcaggtaaagggccacctgcgcggctataacgtcacttattggagagaagggagccagcgcaagcacagcaagcggcacatccataaagaccatgtcgtggtcccggcgaacaccacaagcgtcatcttgtccggcttacgcccttatagtagttaccatctggaggtgcaggcctttaacggtagagggagtggcccggcctcggaatttactttttctactcctgaaggggtccccggccatcctgaggcactgcacctggaatgccagagcaatacatctctactcttgaggtggcaacccccacttagccataatggtgtcctcactgggtatgttctgtcttaccatcccctggatgagggaggcaaagggcagctgtcctttaacctgagagatccagagcttaggacccacaacctcacagaccttagtccgcaccttcgttatcgcttccagctgcaggccactacaaaggagggacctggtgaggctatagtcagagaagggggcacaatggccctttctgggattagcgactttggtaacatctccgcaactgctggagaaaactactccgtggtgagttgggtgccaaaggagggccagtgtaattttaggtttcacatcctgtttaaagctctgggtgaagagaaaggaggcgcgagcctcagccctcagtatgtaagctacaatcagagttcatatactcagtgggatttgcaacccgataccgattacgaaatccacctattcaaggaaagaatgtttaggcaccagatggcagtgaaaacaaacgggacggggcgcgtgagattaccacctgctggattcgcaacagagggctggtttattggattcgtatctgcgattattctgttgctgttggtccttctgatcctttgtttcatcaagagaagcaaaggggggaagtatagcgtgaaggataaagaggatacacaggttgatagcgaggcccggcctatgaaggacgagacattcggagagtacagatctcttgagtctgataacgaggagaaagcattcggctcctctcagcccagtctgaacggagatatcaaacccctcggcagtgacgactccctcgctgattatggagggtccgtggacgttcagttcaacgaagatggtagcttcattggacagtactccgggaagaaggaaaaggaggctgctggcggaaatgactctagcggcgctactagccccatcaatcccgcagtagcattagagtag

SEQ ID NO: 8733 - DNA, 3774 bp, Artificial Sequence
  derived and/or modified sequence
atggtggttgcgttaagatacgtgtggcctctactattatgttctccttgtcttctgatacagatccctgaagaatatgagggccatcacgttatggaaccgccagtgatcacagaacagtcaccaaggagactggttgtattccccactgacgacatttccctcaaatgcgaggctagcggaaagccagaggtccagtttcgatggacccgcgacggagtccacttcaagccaaaggaagaactcggggtcaccgtgtaccagtcaccacatagcggttcatttaccattacaggaaataattctaacttcgcccagcgattccagggaatctaccggtgctttgcgtcaaataagctgggaactgccatgagtcacgaaatcaggctaatggccgaaggtgcacccaaatggcccaaggagacagtcaaacctgtcgaggtggaagaaggggagtccgtcgtccttccatgcaatcccccaccatcagccgaacctctgagaatctactggatgaactctaaaatcctgcatattaagcaggacgaaagagtgacaatgggacagaacggcaacttgtatttcgccaatgtcttgaccagcgataaccacagcgactacatttgccacgcccacttcccagggacccggaccataattcagaaagagccaatcgatcttagggtaaaagccaccaacagtatgatcgatcgcaagccccgactcctcttccccaccaacagttcctcccatctagtggccctccaagggcagcccttggtgctggaatgtatcgccgaggggttccccacaccaaccattaagtggctgagaccctccggacctatgcctgccgacagggtcacttaccagaatcataataagaccttacagctactgaaggttggagaggaggacgacggtgaatacaggtgtctggccgagaactccctgggatccgccagacacgcgtactatgtaaccgttgaggcggcaccttactggctgcacaagccacagtcccacctctacgggcctggggaaaccgcacgactcgattgccaggttcaagggagaccgcagccggaagtgacatggcgaattaacggaattccagtcgaggaactggctaaggaccagaagtacaggattcagcgaggggctctcatattgtctaacgttcagccgagcgacactatggtgacgcagtgtgaagccagaaaccgacatgggctcctgttggctaacgcctacatttatgtggtgcagctccccgcaaaaatcttgacagccgacaatcagacatacatggcagtccaaggctccacagcatacctgttatgtaaggcttttggcgctcccgtgccctcagtccagtggctggatgaagacggtaccaccgtgctgcaagatgaacgcttcttcccttacgctaatggtaccttaggaatacgagatcttcaagctaacgatacaggtcggtacttttgcctggccgcaaacgatcagaataatgtgacaattatggcgaacttaaaggtgaaggacgctacccagatcacccagggccctcggtcaactattgagaaaaaaggctcacgggtgaccttcacatgtcaggcttcgtttgacccatctctccagccaagtatcacgtggcgtggagacggaagggatctgcaggaactgggtgactccgataagtactttatcgaggacggcagactggtcattcattcgttggactactccgaccaagggaactactcatgtgtcgcaagcaccgaactggatgtcgtagaaagtcgcgctcagctgttagtggtgggaagccctgggcctgtcccacgcctcgtgctgagcgacctccacctgcttacccagtcccaggtacgcgtcagctggagcccagccgaggaccacaacgcgccaatagagaaatacgatatcgagttcgaagacaaggagatggcccctgaaaaatggtactcactagggaaagtacccggaaaccagaccagcactactttaaagctctccccttacgttcactacacattccgagtcactgccattaataaatacggccctggggaaccaagccctgttagcgagaccgtggtgacaccggaagcagctcccgaaaaaaaccccgtcgatgtgaagggggagggcaatgagaccacaaatatggttatcacctggaaacctttacgttggatggactggaatgccccacaggtgcagtaccgcgtccagtggcgcccacagggcacgaggggcccatggcaggagcagatcgtttctgatccttttttagtagtttccaacacctcgacattcgttccttacgagattaaggtccaggcagttaatagccaagggaagggacctgagccacaagttaccattggttattcaggggaggattaccctcaggccatacccgagctggaaggcatagagatcttgaattctagtgctgtgctggtgaaatggagaccggtagacctggcccaggtgaagggacacctgcggggttacaatgttacgtactggcgcgaggggtctcaaagaaagcactctaagcgacacattcataaggaccatgtcgtcgtacccgctaatactacctccgtgatcctgagcgggcttagaccgtattcttcataccatcttgaggtgcaggcattcaacggacgaggaagtggaccggctagcgaattcactttctcaactcccgaaggcgtcccagggcatcctgaggctctccatctcgagtgccagagtaacacgtctcttctgctacgctggcagccccctctctctcataacggcgtgctgaccggatacgtgcttagctatcatcctctcgacgaggggggtaagggacagctctcattcaacctccgcgaccccgagcttcggacccacaatttgacagacctttccccacacctgcgataccgcttccagctgcaggcgaccacaaaggagggtcccggagaagccatcgtgagggaaggcggaactatggccctaagcggcatatcagacttcgggaacatttccgctactgctggggaaaactactctgtcgtctcatgggtgcccaaagaagggcagtgcaacttccggttccatatcctttttaaagccctgggggaggagaaaggaggcgctagcctgagccctcagtacgtgtcctacaatcagtcgagctacacccagtgggatctccaacctgataccgactacgagatccatctatttaaagaaaggatgttcagacaccagatggcagtgaagactaacggcactgggcgtgtcaggctgccgcctgccggtttcgccaccgaggggtggtttattggctttgtgagtgctattattttgctcttgcttgtgctcctgatactttgcttcattaaacggtcaaagggcggaaagtattcagtgaaagacaaggaagacacccaggtcgatagcgaagcacggccaatgaaggacgagacgttcggagaatatcggagcctggagagtgacaacgaggagaaggcctttggctcctctcaaccgtctctcaatggcgacattaagccattaggctctgatgacagcctggccgactacggcggtagcgtcgacgttcagtttaacgaggacggctcgttcatagggcagtattccggaaagaaagagaaggaagctgcaggaggaaatgatagctcaggagctacttctcctattaaccccgctgtggctctggagtag

SEQ ID NO: 8734 - DNA, 3774 bp, Artificial Sequence
  derived and/or modified sequence
atggtggtggcccttcgatacgtttggcccctgcttctttgttccccatgcctcctgatccagataccagaagagtatgagggccaccatgtaatggagcctccagttatcacagagcagtcccccaggcggctggttgtgtttccgactgacgacattagtctgaagtgcgaggccagcggcaaacctgaagtacagtttcgatggaccagggacggggtgcatttcaaacccaaagaagaactgggagttacagtctaccaatccccacattcgggctctttcacgatcactggcaacaactccaatttcgcccagaggttccaaggcatctatcggtgctttgcatctaataaactcggcaccgccatgtcccacgagattcgtctgatggctgagggcgccccaaagtggcccaaagagaccgttaagcctgtggaagtggaagagggggagtctgtggtgttgccatgcaatccacctccaagcgcagagccgctgcgtatctactggatgaattccaagatcctgcatattaaacaggacgagagagtgacaatgggccaaaacggcaacctgtactttgcaaatgtgctgactagtgacaatcattcagattatatttgccacgcacattttcccggcacgcgcacaattattcagaaagagcctatcgaccttcgggtcaaggcgaccaactctatgattgatagaaaaccgcggctgttattcccaacaaactcatcatcacacctggtggctttgcagggccagcctttggtcctggagtgcatcgcggagggattccccacacctactataaaatggctgcgccccagcggtccaatgcccgctgacagagtcacttatcagaatcacaacaagaccctgcagctgctcaaggtaggggaggaggacgatggtgagtatcggtgcctagctgagaatagtctggggtctgctcgccatgcctattatgtgaccgtggaggccgcaccctattggttgcacaaaccccagagtcacttatacggtcctggggagaccgcccgcctcgattgtcaggtccaagggagaccgcaacccgaggtgacttggaggattaacggaatcccagtggaagaattggccaaggaccagaagtatcgcatccagcgcggggcgctgatcctatctaacgtgcaaccctcagatacaatggtgacccagtgcgaagcccggaacaggcacggactgctactggccaacgcctatatctacgtcgtgcagctgcccgcaaagatcctaacagccgacaatcagacatacatggccgtgcaggggagtacggcttatctcctgtgtaaagcgttcggcgcccccgtgccgagcgttcagtggctggacgaagacggcaccactgttctgcaagatgagcgtttctttccgtacgccaacggaacacttggaatcagagatctacaggccaatgacaccggcaggtatttttgcctggccgcaaacgaccagaacaacgttacgatcatggccaacctgaaggtaaaggatgcaacgcagatcactcaaggcccaaggtcgacaatagaaaaaaagggatctcgggtgacattcacatgccaggcttcattcgaccctagccttcagcctagtatcacttggcgcggggacgggagggacctacaggagctgggcgattctgacaaatactttatcgaggacggtcgacttgttatacattccctggattatagtgaccaggggaactattcctgtgtcgctagtacagagctagatgtcgtagaatcaagggctcagcttttggtggtggggtcaccgggacctgtgccccggctagtgctcagcgacctgcacctcctgacacaaagccaagtgagggtttcctggtccccggctgaggaccacaatgcacccattgaaaaatatgatattgagttcgaggataaagagatggcgccagaaaaatggtatagtctgggaaaggtgccagggaatcagacaagtacaacgcttaagctgagcccctacgtgcactatacctttcgggtaaccgccatcaataaatatggtccaggcgaaccgtctcctgtgtcggaaaccgtcgtaacccctgaggccgcacccgaaaaaaatcccgttgacgtcaagggtgagggaaatgagacaactaatatggtaatcacatggaaacctttgcggtggatggactggaacgcccctcaggttcagtaccgggtgcagtggcgccctcagggtacacgagggccatggcaggaacagattgtgtccgacccattccttgtggtctctaatacctcgacctttgtcccgtatgagattaaggtccaagccgtgaactctcaggggaaagggcctgagccccaagtaacgattggatactcaggcgaagactacccccaggctatcccagaactcgaaggaatcgagatcctcaactctagtgccgtgctcgtcaaatggcgccctgtggatcttgctcaggtgaaaggacacctaagggggtacaacgtgacctattggcgcgagggttcacagcgtaaacattccaaacgccatatccacaaggatcacgtcgtggtccctgcaaacacaactagtgtcattctgagtggcctacggccgtacagcagctaccatctggaggttcaagcgtttaatggaaggggttccgggccagctagcgagttcacgttctccactccagaaggagttccaggacatcccgaagcgctgcacctggaatgtcagtcaaacacaagcctgctcttacggtggcaacctcctctgtctcacaatggggtactaacggggtacgttcttagttaccacccattagatgagggcgggaaagggcagctctccttcaatttgcgcgatcccgaattgcggacgcataacctgactgacctgagcccccacctgcgctacaggtttcagctgcaagctacgaccaaagaaggtcccggtgaagcaatagtccgtgaggggggcactatggctttatcgggcatatccgacttcggaaacatcagcgcaactgccggcgagaactacagtgttgtgagctgggttccaaaggagggacagtgcaactttcggtttcatatcttgttcaaggctctcggcgaggagaaaggtggcgcgtccttgagcccccaatatgtgagctacaaccagtccagttatacccagtgggatcttcagccagatacagactacgaaatccacctgttcaaggaaaggatgttccgacaccagatggccgtgaagaccaacggcaccggacgcgtcagattgccgcctgccggcttcgcaactgaaggatggtttattgggttcgtttctgcgattattttactgctgctggtcctgcttattctgtgctttataaagcgatctaagggcggcaaatactcagtcaaggataaggaagacactcaggtggactccgaggcgagaccaatgaaggatgaaacttttggcgagtaccggtctctggaatctgacaatgaggagaaggctttcggctcatcacagcctagcctaaacggggacattaagccattgggctcagatgattcactggcagattatggtggcagtgtggacgttcagttcaacgaagatggcagttttatcggacaatacagcgggaagaaggagaaggaggccgctggcgggaacgattcttccggcgccacaagcccaatcaaccctgccgtcgcgctcgagtag

SEQ ID NO: 8735 - DNA, 3774 bp, Artificial Sequence
  derived and/or modified sequence
atggtggtggcactgaggtacgtttggccactcctgctgtgttctccttgtctactgatacaaatcccagaggagtacgaaggccatcatgtcatggagcccccagtgattaccgagcagagcccccgacggctggtcgtgttcccaaccgacgacatctctctgaagtgtgaggcaagtgggaagccagaggtgcaattcaggtggaccagggatggtgttcacttcaaacccaaggaggaactcggtgtgacagtctatcagtcacctcacagtggctcttttaccattacaggtaataattcaaactttgcccaaagattccaggggatctatcgatgctttgcttcgaacaagttagggactgcaatgagccatgagataaggcttatggctgagggcgccccaaagtggccaaaggagaccgtgaagccggttgaagtcgaagaaggcgagagcgtagtgctgccttgcaatccgccgccatcagccgagccactgagaatctattggatgaactcaaagattcttcatattaagcaggatgaacgagtcactatgggtcaaaacggcaacctgtacttcgctaacgtgctcacatccgacaaccactcagactatatatgtcatgcccactttcctggaacgagaacgattatacaaaaggaaccaattgatcttcgggtaaaggctactaacagcatgatagaccggaaacctcgccttctctttccgaccaacagctcaagccacctggttgccttgcagggccagcctcttgtgctggaatgcatcgccgaagggttcccaacccctacaattaagtggctgcggcctagcggccctatgccagctgaccgagtcacctaccagaatcataataagactttgcagctgctgaaggtcggcgaagaagatgatggagagtaccgttgtttagccgaaaattcactgggttcagcacgtcacgcatattacgttacggtcgaagctgccccgtactggctgcacaagccacaatcacatctatatggccctggagagactgcccggctggactgccaggtgcagggccggccccagcctgaagttacatggcgaatcaacggtatccccgttgaggaacttgcaaaggatcagaaataccggatccagcgaggggctctgatccttagtaacgtgcagccaagcgatactatggtgacccagtgcgaagctcgtaatagacacggcctgttactggcgaacgcttatatctacgtcgttcaattacctgccaagatcctaacagccgataatcaaacctacatggcagtacaaggatccaccgcatatctgctctgtaaggcattcggagctccggttccttcggtgcagtggctggatgaggacggaactactgtcttgcaggatgaacggttttttccttacgctaatggtactctaggtattagggatttgcaggcaaatgacactggccggtatttttgcctggccgcaaatgaccaaaataacgtgacaatcatggctaatctgaaggtgaaagatgctactcagattacacaggggcctcgctcaaccattgagaaaaagggaagccgggttacgtttacatgtcaggctagctttgacccctcactccaaccttctatcacgtggagaggggacggaagagatctgcaggaactcggtgatagcgacaagtactttattgaggacggccgattagtaatacatagcctggactacagtgatcagggcaattactcctgcgtggccagcaccgaacttgatgtggtggaatcacgcgctcagttgcttgtcgtgggttcgccaggtccagtgccgaggctggttttgtctgacttacatttactgacacagagccaggtgcgagtttcatggtcccctgctgaggaccataatgcaccaatcgagaagtacgatatcgagttcgaggacaaggagatggcacctgaaaagtggtatagcttagggaaagtaccaggcaaccagacaagcacaacgctgaagctgagtccgtatgtgcattacacattccgggtgacggctatcaataagtacggcccaggtgagcccagcccagtgagcgagaccgtcgtgacgccggaggcggcgcctgaaaagaatccggtggatgttaaaggagaaggaaacgagacgacaaacatggtcataacctggaagccactgaggtggatggattggaacgccccccaggtgcagtatagagttcagtggagaccccaggggaccaggggcccctggcaggaacagattgtttcagacccgttcctcgtggtatcaaatacaagcacattcgtaccctacgaaattaaagtgcaagcagtcaactctcaaggtaagggacccgagccccaggtgactatcggctacagcggagaagattaccctcaggctatccctgagctcgaaggaatagagattcttaactcgagcgccgtgctggttaaatggcggcccgttgatttggcacaggtgaaaggccacttgagggggtacaacgtaacgtattggagagaggggagccaaaggaaacattcgaagcgccatattcataaagaccacgtggttgtgcctgctaacactacttctgtcatcctgagtggccttcgtccctatagtagctatcacctggaggtgcaagctttcaatggccgcgggtccggccctgctagcgaatttaccttctctacccccgaaggagttcctggtcatcccgaggccttgcacctcgaatgccagagtaatacttctctgctgctcaggtggcagccccccttgagccacaacggggtactaacgggctacgtgctatcatatcatcctctggatgaggggggtaagggccagctcagtttcaatctcagggaccctgagcttagaacgcacaatctgactgacctgagccctcacctgcgctatagattccaattgcaggctaccactaaggagggaccaggggaagcaattgtccgcgaaggggggacaatggcactgtctggaatctccgactttggaaacatcagtgccactgcaggggagaactattctgtggtaagctgggtgcctaaagaggggcagtgcaactttcgcttccacattctgttcaaagcccttggggaagagaagggaggagcgagtttgtcccctcagtacgtttcctataatcagtcttcctacacccagtgggatctgcagcccgacacagactacgagatacaccttttcaaggaaaggatgttccgccatcaaatggctgtgaaaaccaatggaaccggccgggtcagattgccccccgccggatttgcaaccgaagggtggttcatcggatttgtaagcgccatcatccttctgctcctggtgttgctgattctctgttttatcaaacgctccaaagggggcaagtactccgtcaaagacaaagaagatacacaggtggactcagaggctcgtccaatgaaggatgaaacttttggtgaatatcgaagtctagaatcagacaatgaggagaaggcctttggaagctcccagcctagtctgaacggagacatcaagccactcggttcagacgactcgttagcggattacggcgggagtgtcgatgtgcagttcaatgaagacggcagctttataggccaatactctggcaagaaggaaaaggaggccgcaggtgggaatgacagctctggagccaccagccccatcaaccccgcagtcgccctcgagtag

SEQ ID NO: 8736 - DNA, 255 bp, Artificial Sequence
  derived and/or modified sequence
atggtagtggccttgcggtacgtatggcccctattattgtgcagcccctgtttattgatacagatccccgaagagtacgagggacatcatgtgatggagccgccggtcataactgaacaaagtcccaggcgactcgtggtattccccacagacgatatttcactgaaatgcgaggccagcggtaaacccgaggtgcagttccgttggactcgggacggcgtgcactttaaacctaaggaggaacttggagtctag

SEQ ID NO: 8737 - DNA, 351 bp, Artificial Sequence
  derived and/or modified sequence
atggctgaaggtgctccgaaatggccgaaggaaactgttaagcccgtggaagtggaggaaggtgaaagcgtcgtacttccgtgcaaccccccccctagtgccgagccattgagaatctattggatgaatagcaagattctgcatataaagcaggacgagcgcgttacaatgggtcagaacggcaatttgtactttgccaacgtcctaaccagcgataaccactcggactacatctgtcacgcccatttccctgggacaagaaccatcatccagaaggaacctatcgacctgagagtgaaggcgactaatagcatgattgacagaaaaccacgattactgtttcctacttag

SEQ ID NO: 8738 - DNA, 3780 bp, Artificial Sequence
  derived and/or modified sequence
atggtggtggcgttgagatacgtgtggcccttgctgctgtgctctccctgcctcctcatccagattccagaggagagtttccccggacacagggttgtgatggaacccccagtgatcaccgagcagtcccccaggagactcgtagtcttcccaactgatgacatcagcctgaaatgcgaggcaagcggcaaacccgaagtccagttcagatggacccgcgacggtgtacacttcaaacctaaagaggagttgggcgtcactgtgtatcagtcaccccacagcggcagcttcaccatcaccggcaataactccaattttgcccagcgatttcaaggcatctaccgttgctttgcctctaacaagctcgggactgccatgagtcatgagattcgtttaatggccgaaggtgccccaaaatggcccaaggaaactgtcaagcctgttgaggtggaagagggtgaatctgtggtgctgccgtgcaaccctccacctagcgccgagccactgcgcatttattggatgaattcaaagatattacatatcaaacaggatgaacgggtgaccatgggacagaatggtaatctctactttgcaaatgtgctgacaagcgacaaccacagtgactacatatgtcacgcccattttccaggcaccaggaccatcattcagaaggagccaatcgacctccgggtaaaggcaactaactccatgattgaccgtaagccgcggctcctgtttcctactaactcctctagccacctggtcgcgctgcagggacaacccctagtactagagtgtattgccgaaggattcccgacgcctacaattaaatggctccgtccatccggcccgatgccagcggaccgagtgacttaccagaaccacaacaagaccctgcagctgctcaaagtaggtgaagaggacgatggagagtatcgttgcttagctgaaaattccctggggtcagctagacacgcctactacgtgactgtcgaagccgcaccatactggttacataagccgcaatctcacctctacggccccggtgaaaccgcccgactggactgccaggtgcaggggcggcctcagccagaagtgacatggcggataaatggcattccggtggaagagctggcgaaagaccagaagtaccgcatacagcggggggctctcattctgtccaacgtgcaaccttcagataccatggttacccagtgcgaagcccggaatagacatgggcttctccttgccaacgcgtacatctacgtagtgcagctgccagctaagattctgaccgcagacaaccaaacttacatggctgtgcagggaagcacagcctacctattatgcaaggctttcggggctcccgtccctagtgtacagtggctggacgaggacgggacgaccgtactccaggacgagcgattctttccgtatgctaacggtacattaggtattagggatttgcaggcaaacgacacaggaaggtatttttgtctggcagccaacgatcaaaacaacgtgaccatcatggctaatctgaaagtaaaggatgcgacccagattactcagggtcctcggtcaacaatcgaaaaaaagggcagcagggtgacattcacttgccaagcctcttttgacccatctctccaaccctctatcacttggagaggagatggcagggacttacaggaactcggcgactctgataaatacttcatagaggatggccgtttagtgatccacagcctggactactccgaccaagggaactattcctgtgtcgcttcgacggaactggacgtggtggagagcagagctcaattgcttgttgtgggatctcctggacctgttccaaggctggtactatctgacctccacttactgacacagtcccaggtccgggtgtcatggtcccctgctgaggaccataacgcccctattgaaaagtatgacatcgaatttgaggataaggaaatggccccagagaagtggtattcccttgggaaagtaccaggcaatcagacgtctacaactctgaaactatctccgtatgtccactacaccttcagggtgacggcaataaataagtatgggcctggggagccatctccagtgtccgagacggttgtaacccctgaggctgccccagagaaaaacccagtcgatgtcaagggggaaggtaacgagaccactaatatggtaatcacctggaaaccgctgagatggatggattggaacgccccccaggtgcaataccgcgtgcagtggaggccccagggaactcgggggccatggcaagagcagattgtgtccgatccatttctagtggtgtccaataccagcacttttgtgccgtacgaaattaaggtccaggctgtgaatagccagggtaagggtcctgagccacaggtaacaatagggtattctggagaggactatccgcaggcgattccggagctcgaaggaattgaaatcctgaacagcagcgctgtgcttgtcaaatggaggcctgtggatctcgctcaggtcaaaggtcacctgcgcggatacaacgtcacctactggcgcgaaggatcacagcggaagcactcaaagagacacatccacaaggatcacgtggtagttcccgccaacacgacaagcgttattctttctggtctgaggccttattccagctatcatttggaggttcaggcattcaacgggaggggttccggaccggctagcgagttcacatttagcacacccgaaggagtgccgggacatccggaggccttgcacctggagtgccagtccaatacatcactactgctgcgttggcagccacctctcagtcataatggtgtcctgactgggtatgtactgtcctatcatcctctggacgagggcggaaagggccaactgagcttcaacctccgagacccagaactgagaacacataatttaacggacctgagcccacacctcaggtatcgattccaattacaggccacaacaaaagagggtccgggggaggcgatcgtccgcgaaggtggcactatggctctttccggtatttcggatttcgggaacatttccgcaactgccggagagaactattccgttgtcagctgggttcctaaggaagggcaatgcaacttccggtttcatatattattcaaggctctgggagaagagaagggtggcgccagcctctctccacagtacgtttcgtataaccaaagttcgtacacacagtgggatctgcagccggacacggattacgagatacatctctttaaggaacggatgtttcgccatcagatggctgtgaagacaaacggcaccggccgcgtgaggctgccaccagccggatttgcaaccgagggctggtttatcggatttgtcagcgctattatcttgctgctgctcgttctactcattctctgcttcatcaagcgcagtaaaggcggaaaatacagtgtgaaagataaggaggacacccaggtggatagtgaagccagacctatgaaggatgaaaccttcggtgagtatcgctccctggaaagcgacaatgaggaaaaagccttcggatcgagccagccaagtttgaacggggacatcaaacccttggggtccgatgacagcttagccgattacggcgggagcgttgacgttcaattcaacgaggacggatctttcatcgggcaatacagtggaaagaaagaaaaagaagccgctggagggaacgattcatctggcgccaccagcccaatcaatccagctgtggccctggagtag

SEQ ID NO: 8739 - DNA, 5027 bp, Artificial Sequence
  derived and/or modified sequence
tgcccccactcccaactcccgccccaagccgcccaccagcccccttcccctccggccggagcctgaaccgagcccggctggctgtgctgcgcggtgccgccgggaaagatggtcgtggcgctgcggtacgtgtggcctctcctcctctgcagcccctgcctgcttatccagatccccgaggaatatgaaggacaccatgtgatggagccacctgtcatcacggaacagtctccacggcgcctggttgtcttccccacagatgacatcagcctcaagtgtgaggccagtggcaagcccgaagtgcagttccgctggacgagggatggtgtccacttcaaacccaaggaagagctgggtgtgaccgtgtaccagtcgccccactctggctccttcaccatcacgggcaacaacagcaactttgctcagaggttccagggcatctaccgctgctttgccagcaataagctgggcaccgccatgtcccatgagatccggctcatggccgagggtgcccccaagtggccaaaggagacagtgaagcccgtggaggtggaggaaggggagtcagtggttctgccttgcaaccctcccccaagtgcagagcctctccggatctactggatgaacagcaagatcttgcacatcaagcaggacgagcgggtgacgatgggccagaacggcaacctctactttgccaatgtgctcacctccgacaaccactcagactacatctgccacgcccacttcccaggcaccaggaccatcattcagaaggaacccattgacctccgggtcaaggccaccaacagcatgattgacaggaagccgcgcctgctcttccccaccaactccagcagccacctggtggccttgcaggggcagccattggtcctggagtgcatcgccgagggctttcccacgcccaccatcaaatggctgcgccccagtggccccatgccagccgaccgtgtcacctaccagaaccacaacaagaccctgcagctgctgaaagtgggcgaggaggatgatggcgagtaccgctgcctggccgagaactcactgggcagtgcccggcatgcgtactatgtcaccgtggaggctgccccgtactggctgcacaagccccagagccatctatatgggccaggagagactgcccgcctggactgccaagtccagggcaggccccaaccagaggtcacctggagaatcaacgggatccctgtggaggagctggccaaagaccagaagtaccggattcagcgtggcgccctgatcctgagcaacgtgcagcccagtgacacaatggtgacccaatgtgaggcccgcaaccggcacgggctcttgctggccaatgcctacatctacgttgtccagctgccagccaagatcctgactgcggacaatcagacgtacatggctgtccagggcagcactgcctaccttctgtgcaaggccttcggagcgcctgtgcccagtgttcagtggctggacgaggatgggacaacagtgcttcaggacgaacgcttcttcccctatgccaatgggaccctgggcattcgagacctccaggccaatgacaccggacgctacttctgcctggctgccaatgaccaaaacaatgttaccatcatggctaacctgaaggttaaagatgcaactcagatcactcaggggccccgcagcacaatcgagaagaaaggttccagggtgaccttcacgtgccaggcctcctttgacccctccttgcagcccagcatcacctggcgtggggacggtcgagacctccaggagcttggggacagtgacaagtacttcatagaggatgggcgcctggtcatccacagcctggactacagcgaccagggcaactacagctgcgtggccagtaccgaactggatgtggtggagagtagggcacagctcttggtggtggggagccctgggccggtgccacggctggtgctgtccgacctgcacctgctgacgcagagccaggtgcgcgtgtcctggagtcctgcagaagaccacaatgcccccattgagaaatatgacattgaatttgaggacaaggaaatggcgcctgaaaaatggtacagtctgggcaaggttccagggaaccagacctctaccaccctcaagctgtcgccctatgtccactacacctttagggttactgccataaacaaatatggccccggggagcccagcccggtctctgagactgtggtcacacctgaggcagccccagagaagaaccctgtggatgtgaagggggaaggaaatgagaccaccaatatggtcatcacgtggaagccgctccggtggatggactggaacgccccccaggttcagtaccgcgtgcagtggcgccctcaggggacacgagggccctggcaggagcagattgtcagcgaccccttcctggtggtgtccaacacgtccaccttcgtgccctatgagatcaaagtccaggccgtcaacagccagggcaagggaccagagccccaggtcactatcggctactctggagaggactacccccaggcaatccctgagctggaaggcattgaaatcctcaactcaagtgccgtgctggtcaagtggcggccggtggacctggcccaggtcaagggccacctccgcggatacaatgtgacgtactggagggagggcagtcagaggaagcacagcaagagacatatccacaaagaccatgtggtggtgcccgccaacaccaccagtgtcatcctcagtggcttgcggccctatagctcctaccacctggaggtgcaggcctttaacgggcgaggatcggggcccgccagcgagttcaccttcagcaccccagagggagtgcctggccaccccgaggcgttgcacctggagtgccagtcgaacaccagcctgctgctgcgctggcagcccccactcagccacaacggcgtgctcaccggctacgtgctctcctaccaccccctggatgaggggggcaaggggcaactgtccttcaaccttcgggaccccgaacttcggacacacaacctgaccgatctcagcccccacctgcggtaccgcttccagcttcaggccaccaccaaagagggccctggtgaagccatcgtacgggaaggaggcactatggccttgtctgggatctcagattttggcaacatctcagccacagcgggtgaaaactacagtgtcgtctcctgggtccccaaggagggccagtgcaacttcaggttccatatcttgttcaaagccttgggagaagagaagggtggggcttccctttcgccacagtatgtcagctacaaccagagctcctacacgcagtgggacctgcagcctgacactgactacgagatccacttgtttaaggagaggatgttccggcaccaaatggctgtgaagaccaatggcacaggccgcgtgaggctccctcctgctggcttcgccactgagggctggttcatcggctttgtgagtgccatcatcctcctgctcctcgtcctgctcatcctctgcttcatcaagcgcagcaagggcggcaaatactcagtgaaggataaggaggacacccaggtggactctgaggcccgaccgatgaaagatgagaccttcggcgagtacaggtccctggagagtgacaacgaggagaaggcctttggcagcagccagccatcgctcaacggggacatcaagcccctgggcagtgacgacagcctggccgattatgggggcagcgtggatgttcagttcaacgaggatggttcgttcattggccagtacagtggcaagaaggagaaggaggcggcagggggcaatgacagctcaggggccacttcccccatcaaccctgccgtggccctagaatagtggagtccaggacaggagatgctgtgcccctggccttgggatccaggcccctccctctccagcaggcccatgggaggctggagttggggcagaggagaacttgctgcctcggatccccttcctaccacccggtccccactttattgccaaaacccagctgcaccccttcctgggcacacgctgctctgccccagcttgggcagatctcccacatgccaggggcctttgggtgctgttttgccagcccatttgggcagagaggctgtggtttgggggagaagaagtaggggtggcccgaaagggtctccgaaatgctgtctttcttgctccctgactgggggcagacatggtggggtctcctcaggaccagggttggcaccttccccctcccccagccactccccagccagcctggctgggactgggaacagaactcggtgtccccaccatctgctgtcttttctttgccatctctgctccaaccgggatgggagccgggcaaactggccgcgggggcaggggaggccatctggagagcccagagtccccccactcccagcatcgcactctggcagcaccgcctcttcccgccgcccagcccaccccatggccggctttcaggagctccatacacacgctgccttcggtacccaccacacaacatccaagtggcctccgtcactacctggctgcggggcgggcacacctcctcccactgcccactggccggcctcttccagccgcccccaccccccaggaccccttagcagccctgccctccctatcgtctgaacagttgtcttcctcagcctcctcccgcccccaccttgggaatgtaaatacaccgtgactttgaaagtttgtacccctgtccttccctttacgccactagtgtgtaggcagatgtctgagtccctaggtggtttctaggattgatagcaattagctttgatgaacccatcccaggaaaaataaaaacagacaaaaaaaaaggaaagattggttctcccagcactgctcagcagccacagcctccctgtatgcctgtgcttggtctactgataagccctctacaaaaaaacaaaagtatatatatatatgtacataatatcagaattataacaggcaaataaaacctgaaaatc

SEQ ID NO: 8740 - DNA, 5033 bp, Artificial Sequence
  derived and/or modified sequence
tgcccccactcccaactcccgccccaagccgcccaccagcccccttcccctccggccggagcctgaaccgagcccggctggctgtgctgcgcggtgccgccgggaaagatggtcgtggcgctgcggtacgtgtggcctctcctcctctgcagcccctgcctgcttatccagatccccgaggaatcctttcctgggcacagggtggtgatggagccacctgtcatcacggaacagtctccacggcgcctggttgtcttccccacagatgacatcagcctcaagtgtgaggccagtggcaagcccgaagtgcagttccgctggacgagggatggtgtccacttcaaacccaaggaagagctgggtgtgaccgtgtaccagtcgccccactctggctccttcaccatcacgggcaacaacagcaactttgctcagaggttccagggcatctaccgctgctttgccagcaataagctgggcaccgccatgtcccatgagatccggctcatggccgagggtgcccccaagtggccaaaggagacagtgaagcccgtggaggtggaggaaggggagtcagtggttctgccttgcaaccctcccccaagtgcagagcctctccggatctactggatgaacagcaagatcttgcacatcaagcaggacgagcgggtgacgatgggccagaacggcaacctctactttgccaatgtgctcacctccgacaaccactcagactacatctgccacgcccacttcccaggcaccaggaccatcattcagaaggaacccattgacctccgggtcaaggccaccaacagcatgattgacaggaagccgcgcctgctcttccccaccaactccagcagccacctggtggccttgcaggggcagccattggtcctggagtgcatcgccgagggctttcccacgcccaccatcaaatggctgcgccccagtggccccatgccagccgaccgtgtcacctaccagaaccacaacaagaccctgcagctgctgaaagtgggcgaggaggatgatggcgagtaccgctgcctggccgagaactcactgggcagtgcccggcatgcgtactatgtcaccgtggaggctgccccgtactggctgcacaagccccagagccatctatatgggccaggagagactgcccgcctggactgccaagtccagggcaggccccaaccagaggtcacctggagaatcaacgggatccctgtggaggagctggccaaagaccagaagtaccggattcagcgtggcgccctgatcctgagcaacgtgcagcccagtgacacaatggtgacccaatgtgaggcccgcaaccggcacgggctcttgctggccaatgcctacatctacgttgtccagctgccagccaagatcctgactgcggacaatcagacgtacatggctgtccagggcagcactgcctaccttctgtgcaaggccttcggagcgcctgtgcccagtgttcagtggctggacgaggatgggacaacagtgcttcaggacgaacgcttcttcccctatgccaatgggaccctgggcattcgagacctccaggccaatgacaccggacgctacttctgcctggctgccaatgaccaaaacaatgttaccatcatggctaacctgaaggttaaagatgcaactcagatcactcaggggccccgcagcacaatcgagaagaaaggttccagggtgaccttcacgtgccaggcctcctttgacccctccttgcagcccagcatcacctggcgtggggacggtcgagacctccaggagcttggggacagtgacaagtacttcatagaggatgggcgcctggtcatccacagcctggactacagcgaccagggcaactacagctgcgtggccagtaccgaactggatgtggtggagagtagggcacagctcttggtggtggggagccctgggccggtgccacggctggtgctgtccgacctgcacctgctgacgcagagccaggtgcgcgtgtcctggagtcctgcagaagaccacaatgcccccattgagaaatatgacattgaatttgaggacaaggaaatggcgcctgaaaaatggtacagtctgggcaaggttccagggaaccagacctctaccaccctcaagctgtcgccctatgtccactacacctttagggttactgccataaacaaatatggccccggggagcccagcccggtctctgagactgtggtcacacctgaggcagccccagagaagaaccctgtggatgtgaagggggaaggaaatgagaccaccaatatggtcatcacgtggaagccgctccggtggatggactggaacgccccccaggttcagtaccgcgtgcagtggcgccctcaggggacacgagggccctggcaggagcagattgtcagcgaccccttcctggtggtgtccaacacgtccaccttcgtgccctatgagatcaaagtccaggccgtcaacagccagggcaagggaccagagccccaggtcactatcggctactctggagaggactacccccaggcaatccctgagctggaaggcattgaaatcctcaactcaagtgccgtgctggtcaagtggcggccggtggacctggcccaggtcaagggccacctccgcggatacaatgtgacgtactggagggagggcagtcagaggaagcacagcaagagacatatccacaaagaccatgtggtggtgcccgccaacaccaccagtgtcatcctcagtggcttgcggccctatagctcctaccacctggaggtgcaggcctttaacgggcgaggatcggggcccgccagcgagttcaccttcagcaccccagagggagtgcctggccaccccgaggcgttgcacctggagtgccagtcgaacaccagcctgctgctgcgctggcagcccccactcagccacaacggcgtgctcaccggctacgtgctctcctaccaccccctggatgaggggggcaaggggcaactgtccttcaaccttcgggaccccgaacttcggacacacaacctgaccgatctcagcccccacctgcggtaccgcttccagcttcaggccaccaccaaagagggccctggtgaagccatcgtacgggaaggaggcactatggccttgtctgggatctcagattttggcaacatctcagccacagcgggtgaaaactacagtgtcgtctcctgggtccccaaggagggccagtgcaacttcaggttccatatcttgttcaaagccttgggagaagagaagggtggggcttccctttcgccacagtatgtcagctacaaccagagctcctacacgcagtgggacctgcagcctgacactgactacgagatccacttgtttaaggagaggatgttccggcaccaaatggctgtgaagaccaatggcacaggccgcgtgaggctccctcctgctggcttcgccactgagggctggttcatcggctttgtgagtgccatcatcctcctgctcctcgtcctgctcatcctctgcttcatcaagcgcagcaagggcggcaaatactcagtgaaggataaggaggacacccaggtggactctgaggcccgaccgatgaaagatgagaccttcggcgagtacaggtccctggagagtgacaacgaggagaaggcctttggcagcagccagccatcgctcaacggggacatcaagcccctgggcagtgacgacagcctggccgattatgggggcagcgtggatgttcagttcaacgaggatggttcgttcattggccagtacagtggcaagaaggagaaggaggcggcagggggcaatgacagctcaggggccacttcccccatcaaccctgccgtggccctagaatagtggagtccaggacaggagatgctgtgcccctggccttgggatccaggcccctccctctccagcaggcccatgggaggctggagttggggcagaggagaacttgctgcctcggatccccttcctaccacccggtccccactttattgccaaaacccagctgcaccccttcctgggcacacgctgctctgccccagcttgggcagatctcccacatgccaggggcctttgggtgctgttttgccagcccatttgggcagagaggctgtggtttgggggagaagaagtaggggtggcccgaaagggtctccgaaatgctgtctttcttgctccctgactgggggcagacatggtggggtctcctcaggaccagggttggcaccttccccctcccccagccactccccagccagcctggctgggactgggaacagaactcggtgtccccaccatctgctgtcttttctttgccatctctgctccaaccgggatgggagccgggcaaactggccgcgggggcaggggaggccatctggagagcccagagtccccccactcccagcatcgcactctggcagcaccgcctcttcccgccgcccagcccaccccatggccggctttcaggagctccatacacacgctgccttcggtacccaccacacaacatccaagtggcctccgtcactacctggctgcggggcgggcacacctcctcccactgcccactggccggcctcttccagccgcccccaccccccaggaccccttagcagccctgccctccctatcgtctgaacagttgtcttcctcagcctcctcccgcccccaccttgggaatgtaaatacaccgtgactttgaaagtttgtacccctgtccttccctttacgccactagtgtgtaggcagatgtctgagtccctaggtggtttctaggattgatagcaattagctttgatgaacccatcccaggaaaaataaaaacagacaaaaaaaaaggaaagattggttctcccagcactgctcagcagccacagcctccctgtatgcctgtgcttggtctactgataagccctctacaaaaaaacaaaagtatatatatatatgtacataatatcagaattataacaggcaaataaaacctgaaaatc

SEQ ID NO: 8741 - DNA, 255 bp, Artificial Sequence
  derived and/or modified sequence
atggtggtggccctgcgctacgtgtggcccctgctgctgtgcagcccctgcctgctgatccagatccctgaggagtatgagggccaccacgtgatggagccccctgtgatcacagagcagagcccccggcggctggtggtgttccccacagatgacatcagcctgaagtgtgaggccagcggcaagccagaggtgcagttccgctggaccagagatggagtgcacttcaagcccaaggaggagctgggcgtgtag

SEQ ID NO: 8742 - DNA, 351 bp, Artificial Sequence
  derived and/or modified sequence
atggccgagggcgcccccaagtggcccaaggagaccgtgaagcctgtggaggtggaggagggggagagcgtggtgctgccctgcaaccccccaccttctgctgagcccctgcgcatctactggatgaacagcaagatcctgcacatcaagcaggatgagcgggtgaccatgggccagaatggaaacctgtactttgccaacgtgctgaccagtgacaaccacagcgactacatctgccacgcccacttccctggcaccaggaccatcatccagaaggagcccatcgacctgcgggtgaaggccaccaacagcatgattgacaggaagccccggctgctcttccccacctag

SEQ ID NO: 8743 - DNA, 3780 bp, Artificial Sequence
  derived and/or modified sequence
atggtggtggccctgcgctacgtgtggcccctgctgctgtgcagcccctgcctgctgatccagatccctgaggagagcttccctggccaccgggtggtgatggagccccctgtgatcacagagcagagcccccggcggctggtggtgttccccacagatgacatcagcctgaagtgtgaggccagcggcaagccagaggtgcagttccgctggaccagagatggagtgcacttcaagcccaaggaggagctgggcgtgacagtgtaccagagcccccacagcggcagcttcaccatcaccggcaacaacagcaactttgcccagcgcttccagggcatctaccgctgctttgccagcaacaagctgggcacagccatgagccatgagatccggctgatggccgagggcgcccccaagtggcccaaggagaccgtgaagcctgtggaggtggaggagggggagagcgtggtgctgccctgcaaccccccaccttctgctgagcccctgcgcatctactggatgaacagcaagatcctgcacatcaagcaggatgagcgggtgaccatgggccagaatggaaacctgtactttgccaacgtgctgaccagtgacaaccacagcgactacatctgccacgcccacttccctggcaccaggaccatcatccagaaggagcccatcgacctgcgggtgaaggccaccaacagcatgattgacaggaagccccggctgctcttccccaccaacagcagcagccacctggtggccctgcagggccagcccctggtgctggagtgcatcgccgagggcttccccacccccaccatcaagtggctgcggcccagcggccccatgcctgctgacagagtgacctaccagaaccacaacaagaccctgcagctgctgaaggtgggggaggaggatgatggagagtaccgctgcctggccgagaacagcctgggcagcgcccggcatgcctactacgtgacagtggaggccgccccctactggctgcacaagccccagagccacctgtatggccctggagaaacagcccggctggactgccaggtgcagggccggccccagcctgaggtgacctggaggatcaatggcatccctgtggaggagctggccaaggaccagaagtaccgcatccagagaggagccctgatcctgagcaatgtgcagcccagcgacaccatggtgacccagtgtgaggccaggaacagacatggcctgctgctggccaatgcctacatctacgtggtgcagctgcctgccaagatcctgacagctgacaaccagacctacatggctgtgcagggcagcacagcctacctgctgtgcaaggcctttggagcccctgtgcccagcgtgcagtggctggatgaagatggcaccaccgtgctgcaggatgagcgcttcttcccctatgccaacggcaccctgggcatccgggacctgcaggccaatgacaccggccgctacttctgcctggccgccaatgaccagaacaacgtgaccatcatggccaacctgaaggtgaaggatgccacccagatcacccagggccccaggagcaccatcgagaagaagggcagccgggtgaccttcacctgccaggccagctttgaccccagcctgcagcccagcatcacctggagaggagatggccgggacctgcaggagctgggggacagcgacaagtacttcattgaagatggccgcctggtgatccacagcctggactacagcgaccagggcaactacagctgtgtggccagcacagagctggatgtggtggagagccgggcccagctgctggtggtgggcagccctggccctgtgccccggctggtgctgagtgacctgcacctgctgacccagagccaggtgcgggtgtcctggagccctgctgaggaccacaatgcccccatcgagaagtatgacatcgagtttgaggacaaggagatggcccctgagaagtggtacagcctgggcaaggtgcccggcaaccagaccagcaccaccctgaagctgagcccctacgtgcactacaccttccgggtgacagccatcaacaagtatggccctggagagcccagccctgtgtctgagaccgtggtgaccccagaggccgcccctgagaagaaccctgtggatgtgaagggggagggcaatgagaccaccaacatggtgatcacctggaagcccctgcgctggatggactggaatgccccccaggtgcagtacagagtgcagtggaggccccagggcacccggggcccctggcaggagcagatcgtgtctgaccccttcctggtggtgagcaacaccagcacctttgtgccctatgagatcaaggtgcaggccgtgaacagccagggcaagggccctgagccccaggtgaccatcggctacagcggggaggactacccccaggccatccctgagctggagggcatcgagatcctgaacagcagcgctgtgctggtgaagtggaggcctgtggacctggcccaggtgaagggccacctgcggggctacaacgtgacctactggagggagggcagccagaggaagcacagcaagaggcacatccacaaggaccacgtggtggtgcctgccaacaccaccagcgtcatcctgagcggcctgcggccctacagcagctaccacctggaggtgcaggccttcaacggccggggcagcggccctgccagcgagttcaccttcagcaccccagagggcgtgcccggccaccctgaggccctgcacctggagtgccagagcaacaccagcctgctgctgcgctggcagccccccctgagccacaatggagtgctgaccggctacgtgctgagctaccaccccctggatgaaggaggcaagggccagctgtccttcaacctgcgggaccctgagctgcggacccacaacctgacagacctgagcccccacctgcgctaccgcttccagctgcaggccaccaccaaggagggccctggagaggccatcgtgcgggagggcggcaccatggccctgagcggcatcagtgactttggaaacatcagcgccacagctggggagaactacagcgtggtgtcctgggtgcccaaggagggccagtgcaacttccgcttccacatcctcttcaaggccctgggggaggagaagggcggggccagcctgagcccccagtatgtgtcctacaaccagagcagctacacccagtgggacctgcagcctgacacagattatgagatccacctgttcaaggagaggatgttccgccaccagatggctgtgaagaccaatggaacaggccgggtgcggctgcccccagctggctttgccacagagggctggttcatcggctttgtgtctgccatcatcctgctgctgctggtgctgctgatcctgtgcttcatcaagaggagcaaaggaggcaagtacagcgtgaaggacaaggaggacacccaggtggacagcgaggcccggcccatgaaggatgagacctttggagagtaccgcagcctggagagtgacaatgaggagaaggccttcggcagcagccagcccagcctgaatggagacatcaagcccctgggcagtgatgacagcctggccgactatggaggctctgtggatgtgcagttcaatgaagatggcagcttcatcggccagtacagcggcaagaaggagaaggaggccgccggcggcaatgacagcagcggggccaccagccccatcaacccagctgtggccctggagtag

SEQ ID NO: 8744 - DNA, 3774 bp, Artificial Sequence
  derived and/or modified sequence
atggtggtggccctgcggtacgtgtggcccctgctgctgtgcagcccttgcctgctgatacagattccagaggagtacgaaggacaccatgtgatggaaccaccggtcattacagagcagagccctcgccgtctagtcgtctttcccaccgacgacatttccctaaagtgcgaagcaagcggcaagcctgaggtacaattccggtggacccgagacggagtgcacttcaagcccaaagaagaactaggcgtcacagtctatcaaagcccacactctggcagcttcaccatcaccggaaacaatagcaacttcgctcaacgtttccagggaatctacaggtgcttcgcttccaataaactcgggaccgccatgagtcacgaaatcaggttaatggccgagggggcaccaaagtggcccaaagaaacagtgaagcccgtcgaggtggaggaaggggagagcgtggtcttgccatgcaatccacccccttccgccgagcccctgcggatttattggatgaactccaaaattcttcatatcaaacaggacgaacgcgtaactatggggcagaacggcaacctgtatttcgccaacgtgctgacctctgataaccactccgactacatttgccatgctcatttcccaggaacccgcacaatcatccaaaaagaaccgattgatctccgtgtgaaggccacaaatagcatgattgaccgcaagcctcgcctgctatttccgactaactccagttcccacctcgtcgcccttcagggacagcctctggtactggagtgcatcgccgaaggatttcctacacccacgatcaagtggctgcggccctctggccctatgcctgctgatcgggtcacctaccagaatcataataaaaccttgcaactcctcaaggtgggggaggaggatgatggagagtatcgatgcctagccgaaaacagcctgggaagcgcccgccacgcatactatgtcactgtggaggcggccccttactggctgcacaaaccccagtcccacctgtacgggcccggcgaaacagccagattggactgccaggtccaaggacggccgcaacccgaggtcacttggaggataaatggtatccctgtggaggagcttgctaaggaccagaaataccgcatccagagaggcgctctcatcctgagtaacgtgcaaccctctgatacgatggtgactcagtgcgaggccaggaatagacacggcctcctattagccaatgcctatatttacgtcgtacagctaccagctaagattctgacagcagacaatcagacttacatggcggtccagggctcaaccgcctatctcctatgcaaggccttcggagccccagtgccctcagtccagtggctcgacgaagatggcaccaccgtgctccaggatgagcgctttttcccctacgcaaatgggaccttgggaatccgggacctccaagccaacgacaccggtaggtatttttgtctggccgccaacgaccagaacaacgtaactattatggccaatctgaaggtgaaggacgccacgcaaatcactcagggaccgcggagtactatcgagaaaaagggaagtcgcgtgacgttcacctgccaggccagttttgatcctagtctgcagcctagcataacatggcgaggtgacggacgggatctacaagagttgggcgactctgacaaatattttatcgaggatggaagactcgtgattcacagcctggactactccgatcaaggaaactactcttgtgtggcctcaaccgagctcgacgtggtcgagagccgggcacagcttttagtcgtgggcagccccggaccggtgccgaggctagtcctgagtgacctccatctgctcacccaatctcaggtgagagttagttggagccctgcagaggatcacaatgcgcctatcgaaaagtacgacattgaattcgaagacaaagagatggcgccagaaaagtggtatagtttagggaaggtgccaggaaatcagacctcaaccaccctaaaattgtcaccttatgtgcattacacattcagggtgacggcgatcaacaagtacggccccggagaaccttcccccgtgtccgaaaccgtggtgactcccgaggctgctcccgaaaagaatcccgtggacgtgaagggagagggaaatgaaactaccaatatggtgatcacatggaagcccctgaggtggatggactggaatgccccacaggtgcagtacagggtgcagtggcggccacagggcacacgaggaccctggcaagaacaaattgtctctgaccccttcttggtggttagcaacacaagcacatttgtaccgtacgaaatcaaggtgcaggctgttaactctcagggtaagggccctgagccccaggtgaccattggatatagtggcgaagattatcctcaggcaatccccgagctggagggcatagagatcctgaactcctctgcagtgctggtcaagtggaggcccgtggatctagcccaagtaaaaggtcacctgcgcggatataatgtgacctattggcgggagggcagtcagcgaaagcattcgaaacggcatattcacaaggatcacgtagtcgtgccagcaaataccaccagtgtgattctgtcaggattgagaccatactcttcttatcatttggaggttcaagcctttaacggtagaggctcgggccccgcgtctgaatttacgttttcaacccctgagggcgtgccaggacaccctgaagctctacatctggagtgccagagcaatacgtcacttctgctccgctggcaaccacccttgagtcataatggtgtactcacggggtatgttctgtcctaccaccccctggacgagggtgggaaggggcaactgtctttcaacctacgtgatcccgagctcaggacacacaacctcacggacctgtccccgcacctgcggtacaggtttcagctccaggccacaacaaaggagggcccaggcgaggcaattgtgcgcgagggcggaacaatggccttgtccggcattagtgacttcggaaatatcagcgctaccgccggcgagaattattcagtagtgtcttgggtccctaaagagggccagtgcaattttcgctttcacatactatttaaggccctgggcgaggagaagggcggtgctagtttatctcctcagtacgtgagctacaaccagagttcttacacccagtgggacctccagcccgatacagactatgagattcaccttttcaaggagaggatgtttcgccaccagatggctgttaagacgaacggcaccggcagggtgcggttacctccagctggcttcgcaaccgagggatggtttattgggttcgttagcgccatcatcctgctcctgctcgtactactcatactgtgctttatcaaacgctccaaaggcggcaaatactcagttaaagataaggaggacacacaggtagattccgaggcgcgtcctatgaaagatgagacattcggcgagtatagaagcctagaatccgacaacgaagaaaaggcctttggttctagccagccctccctgaacggagatatcaaacctttaggatccgacgactctctggctgactacggcggatcagtggatgtgcagtttaatgaagacggaagtttcatcggccaatatagtggtaagaaggagaaggaagccgctggaggcaatgattcttccggtgccacctctcccataaacccggccgtggcactcgaatag

SEQ ID NO: 8745 - DNA, 3774 bp, Artificial Sequence
  derived and/or modified sequence
atggtggtggccctgcggtacgtgtggcccctgctgctgtgcagcccctgtctgttgatccagatacctgaggaatatgaggggcaccacgttatggagccacccgtcatcacagagcaaagcccccgacgcctggtggttttccctactgatgatatcagcctcaaatgtgaggcttctggcaagccagaggtgcaattccgctggactagggatggggtccatttcaaaccgaaggaagagctcggcgttactgtctatcagtcaccccatagtggatcattcactataactggaaataacagtaatttcgcccaaaggttccagggcatctatcggtgctttgccagcaacaagcttggaactgctatgtcacacgaaatacggttgatggctgagggagcccccaaatggcctaaagaaactgtgaaacccgtagaagtggaagagggagagtccgtggtgctgccttgcaacccgccaccttctgcagaaccactgcgcatctactggatgaactccaagatcttgcacattaagcaggacgaacgcgttacgatgggtcagaacgggaacctttacttcgcaaatgtactgactagtgataaccattccgattatatttgtcacgcccacttcccagggaccagaacaatcatccaaaaagagcccatcgacctacgcgttaaagcaacaaattccatgatcgatcgtaaaccaaggctgcttttcccaacgaatagcagctcccatctggtggctcttcaggggcagcctctagtcctagagtgtatagcagagggcttccccacaccaacgatcaagtggctgcgaccatctggcccgatgcctgctgatcgagtaacttaccagaatcacaataagaccctgcagctcctgaaggtgggagaggaggacgacggagagtaccgctgtctggctgagaactcccttggctctgcccgccacgcttattacgtcacagtggaagcagctccctactggctacacaagccgcagagccatttatacggccccggagagaccgcccgcctggactgtcaggtccagggccggccacagcctgaagtcacgtggaggatcaatggcattccagttgaagaattggctaaggatcagaagtataggatccagcgcggagctctcattctctcaaacgtgcagccgagcgacaccatggtgacacagtgcgaagccaggaaccgccacgggctccttctcgccaatgcgtacatttatgtcgtgcagttgccagccaaaattttaaccgccgataaccagacttatatggctgtgcagggcagcacagcctacctcctgtgcaaggcttttggtgctcccgtcccttctgtccagtggctggacgaagatgggaccaccgtactgcaggacgagcgattttttccttacgcaaatgggaccttgggaattcgcgatctacaagcaaatgacacgggccggtatttttgcctagctgcaaacgaccagaacaacgtgacaatcatggctaacttaaaggtaaaggacgccacccagatcactcaggggccccggtcaaccatcgagaagaaaggatcccgggttactttcacgtgccaggcaagcttcgatcccagcctgcagccatccattacctggaggggcgatggaagggatcttcaggagcttggagattccgacaagtattttatagaagacgggaggttagttatccattccctcgattattccgaccaaggaaactacagttgcgtcgcatcaacagagctcgatgttgtggagtctcgtgctcagttgctggtggtcggaagccccggccccgtgccacggttagtgctgtccgacctccatcttctgacccaatcgcaggttagggtgtcttggagcccagcagaggaccacaacgctccgatagaaaagtacgatattgagttcgaggataaagagatggccccagagaaatggtactctttagggaaagtgccaggcaaccagacatcgacgactctcaagctttcaccttatgtgcattatacattccgtgtgacggctattaacaagtatgggcccggggaaccctcgcccgtaagcgagaccgttgttactcccgaggccgctccagaaaagaaccccgtggacgtgaagggtgagggcaacgagaccactaatatggtaattacttggaagccgctccgttggatggactggaatgcacctcaggtgcagtatcgcgtacaatggcgtcctcaggggaccagaggcccttggcaggaacaaattgtgagcgatccctttctggttgttagtaatactagcacatttgtcccgtacgaaatcaaagtgcaggccgtaaatagtcaaggaaaaggtcctgaaccccaggtgactattggctattctggagaagattatccccaggctatcccagagctggagggcatcgaaatccttaactcctccgccgtgctggtgaaatggcgccctgtggatttggcacaggttaaaggccatctccggggatacaacgtgacatactggcgcgagggtagtcagcggaagcactcaaagcgtcacatccacaaagaccacgttgtggtgcctgcaaatacgacctcagtcatcctgtcgggcttaagaccttacagttcatatcacctggaagtgcaagctttcaatggccggggatctggtccagccagcgagttcacatttagtacacccgagggcgtgccgggccaccctgaggcactgcacctggaatgccagagcaatacttccctgcttttaaggtggcaaccaccactcagccacaacggcgtccttaccggctacgtactcagttatcacccccttgacgaggggggtaaaggtcaactcagttttaacttgcgagacccggagttacgcacacataacttgaccgatctgtcgccccacctacgatacaggtttcaactacaggccacaactaaggagggcccaggagaggccattgtcagggagggcggaacaatggctctgagcgggatctcggattttgggaacatttcagcaaccgcaggagagaactactcagtggtgagctgggtccccaaggagggacaatgcaacttcagatttcatattctgtttaaggcactgggggaggagaagggcggcgcttcattatccccgcagtatgtgagttacaatcagtcttcatacacccagtgggacctgcagccggacacagattatgagatccatctgtttaaggagcggatgttccgtcaccagatggcagtcaagacaaacggtacaggcagagtcagacttcctccagcgggattcgccactgagggctggttcattggcttcgttagcgccattatcctcctgctgctcgtgttgctgattctgtgcttcattaaaaggagcaaaggaggaaagtactcagttaaggataaagaggacacccaggtggactctgaagctaggcccatgaaagacgagactttcggcgagtatcgaagcctcgagtctgacaacgaggaaaaagcattcgggtcctcacagccgtccctgaacggagatattaagcccctggggagcgacgacagcctcgccgattatggaggaagcgttgacgtgcagttcaatgaggatggctcttttatcgggcagtatagcggtaagaaagagaaagaggcagccggcgggaacgactcttctggagccacgagtcctattaacccggccgtggctttggagtag

SEQ ID NO: 8746 - DNA, 255 bp, Artificial Sequence
  derived and/or modified sequence
atggtggtggccctgcggtacgtgtggcccctgctgctgtgcagcccctgcctgctcatccagatccctgaggaatacgaaggacaccacgtgatggaaccaccggtgatcacggaacagagtccgcgccggctcgtcgttttcccaactgatgacatcagcttgaagtgtgaggcttcaggcaaacccgaagtacaattcaggtggacgagagatggcgtgcacttcaagccaaaggaagagttaggggtttag

SEQ ID NO: 8747 - DNA, 351 bp, Artificial Sequence
  derived and/or modified sequence
atggccgagggcgcccccaagtggcccaaggagaccgtgaagcccgttgaagtggaggagggtgagtctgtagtcctgccctgtaatcctcctccctcagccgaaccactccgcatctactggatgaacagcaaaatcctccacatcaaacaagacgagcgtgtgaccatggggcagaatgggaacctatacttcgccaatgtactgactagtgataatcattctgattatatctgtcacgcacacttccccggaactcggaccatcatacagaaagagcccattgatcttagagttaaagcgacaaattccatgatcgatcggaagcctagacttctgtttcccacatag

SEQ ID NO: 8748 - DNA, 3780 bp, Artificial Sequence
  derived and/or modified sequence
atggtggtggccctgcggtacgtgtggcccctgctgctgtgcagcccatgccttctcattcaaataccagaggagagttttcctggccacagggtcgtcatggaacctccagtaatcacggaacaatctcctagaaggctcgtggtcttccccacggacgatatatctcttaaatgtgaggcctctggcaagcccgaagtgcagtttagatggaccagagacggcgttcactttaaaccaaaggaggagctaggagtcacagtctatcagtctccccatagcggatctttcaccattactggtaataactccaacttcgcacagcgattccaaggtatttatagatgtttcgcgagcaacaaattgggaactgccatgtcgcatgagataaggctgatggctgagggggcccctaaatggcctaaggagacggtgaagcccgtagaggtagaagagggggaatccgtggtgttgccttgcaatccccccccctccgcggagcctctcaggatctactggatgaacagtaaaattctgcacatcaaacaggatgagagggttacaatggggcagaacgggaatctgtactttgctaacgtgctgacgagtgataaccatagtgattacatctgccacgcccattttccgggaacccggactattattcagaaagagcccatcgatttgcgcgtgaaagctacaaattccatgatcgatcgcaagcctcgactcctgttccctaccaattcttccagccacctggtggctctgcagggacagccattagtcctcgagtgtattgccgaaggattccccactcccacgatcaaatggctaagaccaagcggacctatgcccgcagaccgcgtgacctaccagaatcacaataagactctgcagctcctgaaggtgggcgaagaagatgatggcgagtatcggtgccttgctgagaattctctcggttctgcccggcatgcctactatgtgaccgtggaggccgctccatactggctccacaaaccacaatcccatctttacggccctggagagactgcccgactggattgtcaggtccagggtaggccgcagcccgaagtgacttggcggatcaatgggattcccgtggaggaacttgcaaaggatcagaagtaccggatccagagaggggctcttatcctaagcaacgttcaaccaagcgacactatggtcactcaatgtgaggctcgtaatagacatggtctccttctggccaacgcttatatttatgtggtgcagctccctgctaagatactcactgccgacaaccagacctatatggcagtgcaggggtcaactgcctatctgctctgcaaggcatttggggcacctgtaccatccgtgcagtggcttgacgaggatggtaccactgtgctgcaggacgagaggttttttccttacgcaaatggcaccttaggtatacgagacctgcaggcgaatgatacaggtcggtacttttgcctggctgctaacgaccagaacaacgttactatcatggctaacctgaaagtcaaggacgcgacccagattacccagggtccccgtagtactatcgagaagaaggggtcacgcgtaacctttacctgtcaggcctcgttcgacccctcactgcagccaagcatcacttggcggggcgacggaagggacctgcaagagctgggcgattcagacaagtattttatcgaggatggaagactggtgattcattcccttgattattcagatcaggggaactactcttgtgttgcttccactgaattagatgtcgtcgaaagcagagcccaactactggtggtgggatccccggggccagtacctcgcctcgtactttcagacctgcatttgttgacgcaaagtcaggtccgtgtcagttggagccctgctgaagatcacaacgcccccatcgaaaaatacgatattgagttcgaggacaaggagatggcgcctgaaaagtggtacagcttggggaaggtgcctggcaaccagacctccacaacgctgaagctgtcgccctatgtgcactacacattcagagtcacagcaatcaataaatacggcccaggagagccgagtcctgtatccgagactgtcgtcacaccggaagcagccccagagaagaaccctgttgatgtgaagggagagggaaacgagacaactaatatggttatcacatggaagcctttgcgatggatggattggaacgctccgcaggttcagtaccgggtccagtggcgacctcagggaacccgaggaccttggcaggagcagatagtgtctgatccatttcttgtggtcagcaatacctccacattcgtgccgtatgaaattaaagttcaggcggtcaactcccagggcaaagggccggagccgcaggtgaccattggatatagcggcgaagattatccccaagccatcccagagctcgaaggaattgagatactgaacagctcggccgttctcgtgaagtggaggccagttgacctggcccaggtgaaaggccacctcagaggctataatgttacatactggagggaagggtcacaaaggaaacattctaagagacacattcacaaagatcacgtggtggttcctgccaacacgacctccgtgattctatctggcctccgcccctattcaagctaccatctcgaggtgcaagcatttaacggccgcgggagtggccccgccagcgagtttacgttctcgacccccgagggagtgcccggtcaccccgaagcccttcatctagagtgtcagagtaatacgtctctgctgctgcgatggcaaccgccactcagccacaacggcgtcctgacagggtacgtgctgtcttatcatccgcttgatgagggcggcaagggccaacttagcttcaacctgagagaccctgagctcaggacccataatctaactgacctgagtcctcacctgaggtacagattccagctccaggctacaacaaaggagggcccgggtgaggccatcgtccgggaaggcggcactatggcgttaagcggcatttcagattttgggaacattagcgccactgcaggggaaaactactcggtggtgtcttgggtccccaaagaggggcagtgtaattttaggttccacatcctgtttaaggccctcggagaggagaaaggtggcgctagcttgagcccacagtacgtctcctataaccagagttcctacacgcagtgggatctacaacccgataccgactacgaaatccatctgtttaaggagcgcatgttccggcaccagatggccgtcaagacgaatggaactggccgagtacgtttaccacccgctggatttgctactgaaggatggttcattggcttcgtctcggccattattctgcttttattagtgctgctgatcctctgtttcataaagcggagtaaggggggcaaatattccgtgaaggataaagaagacacgcaggtggattccgaagccagaccgatgaaagatgagacgttcggagaatacagatcactggagtccgataacgaggagaaggcgtttggaagctcgcaaccatcactgaacggggatatcaagccactggggagtgatgattctctggcagattatggaggaagtgtagacgtccagtttaacgaagacggatcttttatcgggcaatattctggtaaaaaggaaaaggaggccgcaggaggcaacgattcaagtggtgccacgtcccctattaaccccgctgtagctttggagtag

SEQ ID NO: 8749 - DNA, 3774 bp, Artificial Sequence
  derived and/or modified sequence
atggtagtggcattacgatacgtgtggccgctacttttgtgctcaccatgtctgctgattcagatacctgaagagtacgaaggccatcatgtgatggaaccccctgtcattactgagcaatcaccacgcagactcgtcgtttttcctacagatgacatttcactcaagtgtgaggccagcgggaagcccgaggtacagttccgatggaccagggacggggtacatttcaaacctaaagaagagttgggtgtgaccgtgtaccagtccccacattccggcagtttcacaattacaggaaataactccaatttcgcccagcgctttcaaggcatataccgttgctttgcttccaataaacttggcacagctatgtctcatgaaatccggctgatggcggaaggcgctcctaagtggccaaaggaaacggtgaagccagtggaggtggaagaaggggagtctgtagtcctgccctgcaatccccctccaagcgcagaacccctgcggatatattggatgaactcaaaaattttgcatattaagcaggatgagagagtgacaatgggccagaacgggaacctttatttcgccaatgtgctgacctccgacaaccacagcgattacatatgccacgcgcatttccctggcactcggaccattatccagaaagagcctatcgacctgcgcgtgaaagctaccaattccatgatcgatcgaaagcctcgcctactgtttcctactaattcatcctcgcatctcgtcgctctgcagggacagccgctggtgttggagtgcatcgccgagggttttcctacaccgaccatcaaatggcttcgcccatctggtcccatgcctgctgatcgcgtaacgtaccagaaccacaataagactttgcaactccttaaagtcggtgaggaagatgatggcgagtacagatgcctggcagaaaactctctaggcagtgcacgccatgcatactacgttaccgtagaggccgctccctactggctgcataagccccaaagtcatctctacggccctggtgaaaccgcccgtcttgattgtcaggtacagggcagacctcaacctgaggtcacatggagaattaacgggattcctgtggaagaactggctaaggaccagaagtaccgaattcaacgcggtgctctgatccttagcaacgtgcaaccgtctgacaccatggtgacccaatgtgaggcacgaaaccgccatggtctgttactcgctaacgcatatatctacgtggtgcaactgcctgccaaaatcctcactgccgataatcagacatacatggcagtccagggatccacagcctatctgttgtgcaaggcctttggcgcacccgtgccatccgtgcaatggttggacgaggacggcactaccgttctccaagacgagagatttttcccatatgccaatggcacactagggattcgagacctccaggcaaatgatacaggcaggtacttctgcttggcagccaatgaccagaacaatgtaacgataatggccaacttaaaggttaaggacgcaacgcagataacccagggcccacgctctacgatcgaaaaaaagggtagcagagtcaccttcacctgtcaagccagcttcgatcccagcctacagccaagcattacctggcgtggtgatggcagggatctgcaagagttgggtgattcagataaatactttatcgaagacggcagactagtcattcattccttggactatagtgaccaaggaaactactcatgtgtggctagcaccgagttggatgtcgtcgagtcacgtgcccagctgctggtggtagggtcccccggacctgtgcctaggttggtactttctgacctgcacctactaacccaatcccaggtgagagtgtcctggagtcccgcagaagatcacaacgcccctatcgagaagtatgatatcgagtttgaagataaagaaatggcccctgagaagtggtatagtctcggtaaagtacctgggaatcagacatctaccacacttaaactgtcgccatacgtgcattacacctttcgcgtgaccgcaatcaacaaatacggacctggagagccgagccccgtgagtgagacagttgtgacacccgaggcggcaccggagaagaatccagtcgacgtgaaaggggaaggaaatgagaccactaacatggtgattacgtggaaacctttgcgctggatggattggaatgcccctcaggttcaatatagagtacaatggagaccgcaagggaccaggggaccatggcaggaacagatcgtgtcagatccatttctggtggtgtccaatacctcaacctttgtgccatatgaaatcaaggttcaggctgttaacagtcagggcaaaggcccagaaccacaggtgaccattggttacagcggcgaagactacccccaggctattcccgaattggagggaatcgagattcttaattcctccgctgtgctggtaaaatggaggcccgtcgacctcgcccaggtgaaggggcatctccggggttacaatgtgacctactggcgagagggcagtcagcgcaagcattccaagcgtcacatccacaaggaccacgtggtggtgcccgcaaataccaccagtgtgattctgagtggactccggccatacagctcgtaccatctggaagtgcaagccttcaatgggcgtggtagtgggcctgcctccgagttcaccttctctaccccagagggggttccgggacaccctgaggcactccacctggaatgccagtctaatacatcactattgttacggtggcagcccccactgtcccataacggcgttctcaccgggtacgtcttatcttatcatcccctcgacgaggggggtaagggccagttgtccttcaaccttagagaccctgagctgcgcacccacaatctgactgatctcagcccccacttgaggtaccggtttcaacttcaggccacaacaaaagaaggaccgggagaggccatcgtgcgggagggcggtacaatggccctctcaggcattagtgattttggcaacatttcagctaccgctggggagaattacagcgttgtgagctgggtgcccaaagagggccaatgcaactttaggtttcatattctgtttaaagcgctcggggaggaaaagggcggagctagcctgagtccgcaatatgtatcatacaatcaatcttcttacacacagtgggatctgcagcccgatacagactatgagatccacctttttaaagagcgtatgttccgccaccaaatggccgtcaagacaaacggaacagggagggtacgtcttcctcctgcaggtttcgccactgaagggtggtttattggcttcgtgagcgcaattattcttcttctcctcgtccttctcatattatgctttattaagcgctctaagggtggcaagtattcagtgaaggacaaggaggatacccaggtcgactccgaagcccgtcccatgaaagatgagactttcggggagtaccgaagccttgagtcagacaacgaggagaaggccttcggaagctctcagccctcgctgaacggtgacattaagcccttggggtctgacgacagcttagccgactatgggggatcagtggacgtgcagttcaatgaggatggatcctttattggccagtatagcgggaaaaaagaaaaggaagcagccggtggtaacgatagctcgggcgctacctcccctataaatccggcagttgctcttgaatag

SEQ ID NO: 8750 - DNA, 3774 bp, Artificial Sequence
  derived and/or modified sequence
atggtggtagccctgaggtacgtatggcccttgttactctgctcaccgtgtctactgatccagattcccgaggaatatgagggacatcacgtcatggagcctcctgtgattaccgaacagtcacccagacggctggtggtattcccaacagatgacatttccttgaagtgcgaggcctccggaaagccagaggtacaattccgctggacccgggatggagtccacttcaaaccaaaagaggagctgggggtgacggtgtaccagagcccccattctggttcattcacaattacaggcaataactccaactttgcccagaggtttcagggtatctataggtgctttgcctctaacaaattgggtacagcaatgagtcacgagattaggctgatggccgagggcgcaccaaaatggcctaaagagacagtcaagcctgttgaggtggaggaaggtgaaagcgtggttctcccatgtaatcctccccctagcgccgaacccctccgaatctactggatgaattcaaagatcctgcacatcaagcaggacgaacgtgtgacaatgggtcagaacgggaacttatatttcgccaacgtccttaccagcgacaatcattcagattacatttgtcatgctcacttccctgggacaaggactattatccagaaagagcctatcgacctgagagtgaaggccaccaatagtatgattgatagaaagcctcgcctcctgttccctacaaacagctcttcgcatctggtggctctgcagggtcagcctctcgtgctagaatgtatcgcagaaggtttccctacccccactatcaagtggctgagacccagtggccctatgcccgcagatcgcgtcacttaccagaaccataataaaacactccagttgttaaaggtgggtgaggaggacgatggagaatatagatgcctcgcagagaactccctaggttctgctaggcacgcttattatgtaaccgttgaagcggcaccctactggctgcacaagcctcagtctcacctttatggccctggtgagactgccagacttgattgccaggtgcagggacgccctcagcccgaggtgacctggcggatcaatggtattccagtggaggaactcgctaaggaccagaagtaccgtatacagcggggagccctgatcctatcaaacgtccagccgtctgacacaatggtcacccagtgcgaagctagaaaccgccatgggctgttactcgcgaatgcatatatctatgttgtgcaactgcccgcaaagattctcactgctgacaatcagacttatatggctgttcagggctcaacggcctacctgctatgcaaagcgttcggtgcccctgtgccaagcgttcagtggttggacgaggacggcactactgtcttgcaggacgagcgttttttcccatatgccaatggtaccctcgggatcagggacctccaagcaaacgacactggacgatatttctgcctggccgctaacgaccaaaacaacgtgacaattatggccaacttgaaagtcaaagacgccacgcagatcacacagggacctagatccactatcgaaaagaaaggcagccgagtcacttttacctgtcaagctagtttcgatccaagtctgcaaccttcgattacttggcggggtgatgggagggatctgcaggaactgggggattcagacaaatacttcattgaagacggccgtctcgtgatccacagtctcgactatagcgatcagggtaactattcctgtgtggcttccaccgaactagatgtagttgagagtagagcacaactgctggtcgtcggctcccctggcccagtcccgagattggtgttgtctgacctccacctgcttacgcagtctcaggttagagtgagttggagccccgctgaagaccataacgcacctattgagaagtacgatatcgaatttgaggacaaggaaatggcacccgagaagtggtatagtctgggcaaggttcccggaaatcaaacctctaccaccctcaagttgtcaccatatgttcactatacattcagagtgacagctatcaacaaatacgggccaggagagccttcccccgtgtcggagaccgtggtgacccctgaggccgcacccgagaagaaccctgttgacgttaagggagaggggaacgaaaccacgaacatggtcatcacatggaagcccctgaggtggatggactggaatgcaccacaggtgcagtacagggtgcagtggcggccacagggaacgagaggaccctggcaggagcagatcgtgagcgatccgttcttggtggttagcaatacgtctacattcgtcccttacgagatcaaagtccaagctgtgaacagtcagggcaaaggcccagagccccaggttaccataggatacagcggtgaagattacccgcaggccattccagaactcgagggcattgagatattaaatagctctgctgtgctagtgaaatggcgcccagtggatctagcccaggtaaaggggcatttgaggggctacaatgtaacgtactggagggaggggtctcaaagaaagcacagtaagagacatatccacaaagatcacgtcgtcgtgcccgcaaacaccacaagcgtaatcctgtcaggtttaagaccttacagttcctatcatctcgaggtgcaggcttttaacggtcgcggttcaggacccgctagtgagtttaccttctccacccccgagggggtcccaggccatccagaagctcttcacctggaatgccagagcaacacctcactgctgttgcggtggcaacccccactgtcccataatggcgtgctgactggctacgtactgtcgtatcaccctcttgacgaggggggaaaagggcaactaagctttaatctgagagatccagagctccggacccataatctgaccgatctcagcccccacttgaggtacaggtttcaactgcaggccacaacgaaagagggccctggggaagcgatcgtgcgcgaagggggaacaatggcgctttcaggaattagtgacttcgggaatatatcagcaactgctggcgagaattacagtgtggtatcttgggtcccaaaggagggccaatgcaactttcggttccacatcttgttcaaggccctgggggaagagaaaggaggggcatcattatccccacaatatgtctcatataatcaatcctcctacacccagtgggatctccagcccgacacagactatgagattcacttgttcaaggagagaatgttccgtcaccagatggccgtgaagaccaatggtactgggcgtgtgagactgccgccagccggattcgcaaccgagggctggttcataggattcgtgtctgccatcatcctgttgctcttggtgctgctgatactgtgcttcatcaaacggagtaagggtggcaaatactcggtcaaggacaaggaagacactcaggtggactccgaggctcggcctatgaaagacgaaacatttggtgaatatcggtctttggaatcagacaacgaagaaaaggctttcggtagttcgcaacccagccttaacggcgacattaagccactcggatccgacgacagcttagcggattatggcggatctgttgatgtgcaattcaatgaagacgggtctttcatcgggcagtactcaggtaaaaaggagaaagaggccgctggtggaaacgacagctccggcgcaacctcaccgattaatcccgcagtggccttagaatag

SEQ ID NO: 8751 - DNA, 255 bp, Artificial Sequence
  derived and/or modified sequence
atggtcgttgccctgcgttacgtttggccactattgctctgcagcccatgccttctgatccagatccctgaagaatatgagggccaccacgtaatggagccaccagtgatcaccgagcagtcccctagacgtcttgtggtgttccctaccgacgacatctctctcaaatgcgaggctagtggcaaaccagaagtgcagttcaggtggacacgggacggtgtgcacttcaaacctaaggaagagctgggggtttag

SEQ ID NO: 8752 - DNA, 351 bp, Artificial Sequence
  derived and/or modified sequence
atggcagaaggggctcctaagtggcctaaagagactgttaagcctgtagaagttgaggaaggcgaatctgtcgtccttccctgtaatcccccaccttcggccgaacctctgcggatctactggatgaattccaaaattctacacattaagcaagacgagcgcgtgaccatgggccagaacggtaacctgtatttcgccaatgtcctcactagtgacaatcatagtgattacatttgtcatgcacacttccccggtacaaggacaataatccaaaaggaacctattgatctccgcgttaaggctacgaacagtatgatcgatcgcaagcctcggcttctcttcccgacgtag

SEQ ID NO: 8753 - DNA, 3780 bp, Artificial Sequence
  derived and/or modified sequence
atggttgtggccctccggtacgtctggccgctgctgctgtgctctccatgcctgctgatccagattccggaagaaagcttcccaggccatagagtggtgatggagccaccagtaatcacggaacagtctcctagacgtctggtggttttcccaacagacgacatctccctgaagtgcgaagcttcggggaagcctgaagtgcagttcagatggacacgagatggggtccacttcaagccaaaagaggaactgggagtgaccgtataccagtcgccccactcaggttcattcacaattacgggcaataacagcaactttgcgcagcgattccaaggaatctaccgatgctttgcttccaacaaactgggtacagcaatgtcgcatgagatccgcctgatggccgagggggctcctaagtggcccaaggaaaccgtgaaaccagttgaagttgaggagggagaaagcgtcgtgctgccctgtaacccaccgccaagcgccgagccgctgcgcatttactggatgaactcaaagatcctgcatataaaacaagacgagcgtgtgacgatgggccagaacggcaacctctattttgcaaacgtattgaccagcgacaatcactcagactacatatgtcacgctcacttccccggaacgcgaactatcattcagaaagagccaattgatctgcgcgtgaaagccacaaattctatgatcgatagaaaacccagactcctgttcccaacaaattcctcgtcacatctcgtcgcattgcagggccagccgcttgtcctcgaatgtatcgcagagggatttcccaccccaacaatcaaatggttgcgcccatctgggccaatgcccgcagatagagtgacctatcaaaaccacaacaagactctgcagctgttgaaggtgggcgaagaggatgatggagagtaccgctgcttggccgaaaactcgctgggctcggcccgacacgcgtattatgtgactgtggaagcagcaccttattggttgcataaaccgcagtcacatttgtatgggccaggagaaactgctcggctcgactgtcaggtccaaggcaggccacagccggaagttacctggagaataaacggaattcctgtggaagagttggctaaggaccagaagtacagaatccagcggggtgccctcatcttgtctaacgtccagccaagcgacaccatggtcacccagtgcgaggccagaaatcgccacggccttctacttgctaacgcttacatctacgtcgtccagcttccagctaaaatcctgacagcagataaccagacatacatggccgtacagggcagcacagcataccttctgtgtaaagcgttcggagctccggtcccgtccgttcagtggctcgatgaagatgggaccactgtcctgcaggacgagagatttttcccctatgccaacggcacactggggattagagacctgcaggccaatgacactggacgatacttctgcctggccgcaaacgaccaaaacaatgtgaccattatggcaaatcttaaagtgaaggatgcaactcagatcactcaggggccacgctctacaattgagaaaaaaggttcacgcgtcacgtttacctgccaggcatcatttgacccaagcctccagccatccattacatggaggggggatggacgggatctacaggagctgggcgacagcgacaaatatttcatcgaggacggccgattggtgatccactcattggactacagtgatcagggtaactactcctgtgttgcttccaccgagctcgatgtggtcgagtccagggctcaactgctggtcgtcggttcaccgggtccagtaccgagactggtgttgagcgatctgcacctgctgacccagtcacaagtgcgtgtcagttggtctcccgctgaggaccacaacgctccaatcgaaaaatacgatattgagtttgaggacaaggagatggctccggaaaagtggtactcgctcggaaaagtgcctgggaaccagacaagcaccaccctgaaactttcgccctatgtgcattatacattccgagtgaccgcaattaacaaatacggtccaggcgaaccctcaccagtctcagaaacagtggtcactcctgaagccgcaccggaaaagaaccctgtggacgtgaaaggcgagggcaatgaaacaaccaatatggtgatcacctggaagcctcttcgatggatggattggaacgcccctcaggttcagtacagagtgcaatggcggcctcagggcacccgaggtccctggcaggagcagatcgtgtcagacccatttctagtagtcagcaacacttctaccttcgttccctatgaaattaaagtgcaggccgtcaactcccaaggcaaaggccctgagcctcaggtgaccattgggtacagcggtgaagactatccgcaagctattccagagctagaaggcatagaaattctcaatagtagcgcggtcctcgtgaagtggaggcccgtcgatctggcccaggtaaagggccatctgcggggatataacgtgacatattggagagaaggctcgcaacgaaaacatagtaagaggcatatccacaaggatcacgtcgtggtcccagccaatacaaccagcgtgattctgtcaggactccgaccatacagctcttaccaccttgaagtccaggcattcaatggacgcggaagtgggcctgcttctgagttcacgttctcgacacctgaaggagtgcccggtcatccagaggctctgcacttggaatgtcagtccaatacaagcctgctgctacgttggcaacctcctctttctcacaatggggtgctcactggatatgtcctttcttaccaccccctggacgaaggtggaaaggggcagctgtcctttaatctcagggatcccgaactgcggacgcataacctgactgacttgagcccacatctgcggtaccgctttcagttgcaggcgacaaccaaggagggtccgggtgaggctatagttcgcgaggggggtactatggcactcagcgggatctctgacttcggaaacattagtgcaaccgctggagaaaactattccgtggtctcttgggttccaaaagaggggcagtgcaatttccgatttcacatactcttcaaggcactaggtgaggaaaaggggggagcttcactgtccccacagtatgtttcttacaatcaatcttcctacacccagtgggacctacagcctgatactgattatgaaatacacttgttcaaggaaagaatgtttcggcatcagatggccgtgaagaccaatggcactgggagggtgcgcctgccccctgcagggtttgcaaccgagggctggtttattgggttcgtgtccgccatcatactgcttctgctagtccttctgattctttgctttattaagcgctcgaagggcggaaagtactctgtcaaagataaagaggacacccaggttgactctgaggccaggcccatgaaggacgagaccttcggagaataccgatctctcgaatcagacaacgaggagaaagcttttgggtcgtcccagccctccctcaatggggatattaaacctcttggatctgacgatagtctcgcagactatggaggctcagtcgatgtgcagttcaatgaggacggatcattcataggtcaatattctggaaagaaagagaaggaggcagctggtgggaacgactctagcggggctacatcccctataaaccccgctgtggcgctggagtag

SEQ ID NO: 8754 - DNA, 255 bp, Artificial Sequence
  derived and/or modified sequence
atggtggtggccctgagatacgtgtggcccctgctgctgtgcagcccctgcctgctgatccagatccccgaggagtacgagggccaccacgtgatggagccccccgtgatcaccgagcagagccccagaagactggtggtgttccccaccgacgacatcagcctgaagtgcgaggccagcggcaagcccgaggtgcagttcagatggaccagagacggcgtgcacttcaagcccaaggaggagctgggcgtgtag

SEQ ID NO: 8755 - DNA, 351 bp, Artificial Sequence
  derived and/or modified sequence
atggccgagggcgcccccaagtggcccaaggagaccgtgaagcccgtggaggtggaggagggcgagagcgtggtgctgccctgcaaccccccccccagcgccgagcccctgagaatctactggatgaacagcaagatcctgcacatcaagcaggacgagagagtgaccatgggccagaacggcaacctgtacttcgccaacgtgctgaccagcgacaaccacagcgactacatctgccacgcccacttccccggcaccagaaccatcatccagaaggagcccatcgacctgagagtgaaggccaccaacagcatgatcgacagaaagcccagactgctgttccccacctag

SEQ ID NO: 8756 - DNA, 3780 bp, Artificial Sequence
  derived and/or modified sequence
atggtggtggccctgagatacgtgtggcccctgctgctgtgcagcccctgcctgctgatccagatccccgaggagagcttccccggccacagagtggtgatggagccccccgtgatcaccgagcagagccccagaagactggtggtgttccccaccgacgacatcagcctgaagtgcgaggccagcggcaagcccgaggtgcagttcagatggaccagagacggcgtgcacttcaagcccaaggaggagctgggcgtgaccgtgtaccagagcccccacagcggcagcttcaccatcaccggcaacaacagcaacttcgcccagagattccagggcatctacagatgcttcgccagcaacaagctgggcaccgccatgagccacgagatcagactgatggccgagggcgcccccaagtggcccaaggagaccgtgaagcccgtggaggtggaggagggcgagagcgtggtgctgccctgcaaccccccccccagcgccgagcccctgagaatctactggatgaacagcaagatcctgcacatcaagcaggacgagagagtgaccatgggccagaacggcaacctgtacttcgccaacgtgctgaccagcgacaaccacagcgactacatctgccacgcccacttccccggcaccagaaccatcatccagaaggagcccatcgacctgagagtgaaggccaccaacagcatgatcgacagaaagcccagactgctgttccccaccaacagcagcagccacctggtggccctgcagggccagcccctggtgctggagtgcatcgccgagggcttccccacccccaccatcaagtggctgagacccagcggccccatgcccgccgacagagtgacctaccagaaccacaacaagaccctgcagctgctgaaggtgggcgaggaggacgacggcgagtacagatgcctggccgagaacagcctgggcagcgccagacacgcctactacgtgaccgtggaggccgccccctactggctgcacaagccccagagccacctgtacggccccggcgagaccgccagactggactgccaggtgcagggcagaccccagcccgaggtgacctggagaatcaacggcatccccgtggaggagctggccaaggaccagaagtacagaatccagagaggcgccctgatcctgagcaacgtgcagcccagcgacaccatggtgacccagtgcgaggccagaaacagacacggcctgctgctggccaacgcctacatctacgtggtgcagctgcccgccaagatcctgaccgccgacaaccagacctacatggccgtgcagggcagcaccgcctacctgctgtgcaaggccttcggcgcccccgtgcccagcgtgcagtggctggacgaggacggcaccaccgtgctgcaggacgagagattcttcccctacgccaacggcaccctgggcatcagagacctgcaggccaacgacaccggcagatacttctgcctggccgccaacgaccagaacaacgtgaccatcatggccaacctgaaggtgaaggacgccacccagatcacccagggccccagaagcaccatcgagaagaagggcagcagagtgaccttcacctgccaggccagcttcgaccccagcctgcagcccagcatcacctggagaggcgacggcagagacctgcaggagctgggcgacagcgacaagtacttcatcgaggacggcagactggtgatccacagcctggactacagcgaccagggcaactacagctgcgtggccagcaccgagctggacgtggtggagagcagagcccagctgctggtggtgggcagccccggccccgtgcccagactggtgctgagcgacctgcacctgctgacccagagccaggtgagagtgagctggagccccgccgaggaccacaacgcccccatcgagaagtacgacatcgagttcgaggacaaggagatggcccccgagaagtggtacagcctgggcaaggtgcccggcaaccagaccagcaccaccctgaagctgagcccctacgtgcactacaccttcagagtgaccgccatcaacaagtacggccccggcgagcccagccccgtgagcgagaccgtggtgacccccgaggccgcccccgagaagaaccccgtggacgtgaagggcgagggcaacgagaccaccaacatggtgatcacctggaagcccctgagatggatggactggaacgccccccaggtgcagtacagagtgcagtggagaccccagggcaccagaggcccctggcaggagcagatcgtgagcgaccccttcctggtggtgagcaacaccagcaccttcgtgccctacgagatcaaggtgcaggccgtgaacagccagggcaagggccccgagccccaggtgaccatcggctacagcggcgaggactacccccaggccatccccgagctggagggcatcgagatcctgaacagcagcgccgtgctggtgaagtggagacccgtggacctggcccaggtgaagggccacctgagaggctacaacgtgacctactggagagagggcagccagagaaagcacagcaagagacacatccacaaggaccacgtggtggtgcccgccaacaccaccagcgtgatcctgagcggcctgagaccctacagcagctaccacctggaggtgcaggccttcaacggcagaggcagcggccccgccagcgagttcaccttcagcacccccgagggcgtgcccggccaccccgaggccctgcacctggagtgccagagcaacaccagcctgctgctgagatggcagccccccctgagccacaacggcgtgctgaccggctacgtgctgagctaccaccccctggacgagggcggcaagggccagctgagcttcaacctgagagaccccgagctgagaacccacaacctgaccgacctgagcccccacctgagatacagattccagctgcaggccaccaccaaggagggccccggcgaggccatcgtgagagagggcggcaccatggccctgagcggcatcagcgacttcggcaacatcagcgccaccgccggcgagaactacagcgtggtgagctgggtgcccaaggagggccagtgcaacttcagattccacatcctgttcaaggccctgggcgaggagaagggcggcgccagcctgagcccccagtacgtgagctacaaccagagcagctacacccagtgggacctgcagcccgacaccgactacgagatccacctgttcaaggagagaatgttcagacaccagatggccgtgaagaccaacggcaccggcagagtgagactgccccccgccggcttcgccaccgagggctggttcatcggcttcgtgagcgccatcatcctgctgctgctggtgctgctgatcctgtgcttcatcaagagaagcaagggcggcaagtacagcgtgaaggacaaggaggacacccaggtggacagcgaggccagacccatgaaggacgagaccttcggcgagtacagaagcctggagagcgacaacgaggagaaggccttcggcagcagccagcccagcctgaacggcgacatcaagcccctgggcagcgacgacagcctggccgactacggcggcagcgtggacgtgcagttcaacgaggacggcagcttcatcggccagtacagcggcaagaaggagaaggaggccgccggcggcaacgacagcagcggcgccaccagccccatcaaccccgccgtggccctggagtag

SEQ ID NO: 8757 - protein, 3121 aa, Artificial Sequence
  derived and/or modified sequence
MPGAAGVLLLLLLSGGLGGVQAQRPQQQRQSQAHQQRGLFPAVLNLASNALITTNATCGEKGPEMYCKLVEHVPGQPVRNPQCRICNQNSSNPNQRHPITNAIDGKNTWWQSPSIKNGIEYHYVTITLDLQQVFQIAYVIVKAANSPRPGNWILERSLDDVEYKPWQYHAVTDTECLTLYNIYPRTGPPSYAKDDEVICTSFYSKIHPLENGEIHISLINGRPSADDPSPELLEFTSARYIRLRFQRIRTLNADLMMFAHKDPREIDPIVTRRYYYSVKDISVGGMCICYGHARACPLDPATNKSRCECEHNTCGDSCDQCCPGFHQKPWRAGTFLTKTECEACNCHGKAEECYYDENVARRNLSLNIRGKYIGGGVCINCTQNTAGINCETCTDGFFRPKGVSPNYPRPCQPCHCDPIGSLNEVCVKDEKHARRGLAPGSCHCKTGFGGVSCDRCARGYTGYPDCKACNCSGLGSKNEDPCFGPCICKENVEGGDCSRCKSGFFNLQEDNWKGCDECFCSGVSNRCQSSYWTYGKIQDMSGWYLTDLPGRIRVAPQQDDLDSPQQISISNAEARQALPHSYYWSAPAPYLGNKLPAVGGQLTFTISYDLEEEEEDTERVLQLMIILEGNDLSISTAQDEVYLHPSEEHTNVLLLKEESFTIHGTHFPVRRKEFMTVLANLKRVLLQITYSFGMDAIFRLSSVNLESAVSYPTDGSIAAAVEVCQCPPGYTGSSCESCWPRHRRVNGTIFGGICEPCQCFGHAESCDDVTGECLNCKDHTGGPYCDKCLPGFYGEPTKGTSEDCQPCACPLNIPSNNFSPTCHLDRSLGLICDGCPVGYTGPRCERCAEGYFGQPSVPGGSCQPCQCNDNLDFSIPGSCDSLSGSCLICKPGTTGRYCELCADGYFGDAVDAKNCQPCRCNAGGSFSEVCHSQTGQCECRANVQGQRCDKCKAGTFGLQSARGCVPCNCNSFGSKSFDCEESGQCWCQPGVTGKKCDRCAHGYFNFQEGGCTACECSHLGNNCDPKTGRCICPPNTIGEKCSKCAPNTWGHSITTGCKACNCSTVGSLDFQCNVNTGQCNCHPKFSGAKCTECSRGHWNYPRCNLCDCFLPGTDATTCDSETKKCSCSDQTGQCTCKVNVEGIHCDRCRPGKFGLDAKNPLGCSSCYCFGTTTQCSEAKGLIRTWVTLKAEQTILPLVDEALQHTTTKGIVFQHPEIVAHMDLMREDLHLEPFYWKLPEQFEGKKLMAYGGKLKYAIYFEAREETGFSTYNPQVIIRGGTPTHARIIVRHMAAPLIGQLTRHEIEMTEKEWKYYGDDPRVHRTVTREDFLDILYDIHYILIKATYGNFMRQSRISEISMEVAEQGRGTTMTPPADLIEKCDCPLGYSGLSCEACLPGFYRLRSQPGGRTPGPTLGTCVPCQCNGHSSLCDPETSICQNCQHHTAGDFCERCALGYYGIVKGLPNDCQQCACPLISSSNNFSPSCVAEGLDDYRCTACPRGYEGQYCERCAPGYTGSPGNPGGSCQECECDPYGSLPVPCDPVTGFCTCRPGATGRKCDGCKHWHAREGWECVFCGDECTGLLLGDLARLEQMVMSINLTGPLPAPYKMLYGLENMTQELKHLLSPQRAPERLIQLAEGNLNTLVTEMNELLTRATKVTADGEQTGQDAERTNTRAKSLGEFIKELARDAEAVNEKAIKLNETLGTRDEAFERNLEGLQKEIDQMIKELRRKNLETQKEIAEDELVAAEALLKKVKKLFGESRGENEEMEKDLREKLADYKNKVDDAWDLLREATDKIREANRLFAVNQKNMTALEKKKEAVESGKRQIENTLKEGNDILDEANRLADEINSIIDYVEDIQTKLPPMSEELNDKIDDLSQEIKDRKLAEKVSQAESHAAQLNDSSAVLDGILDEAKNISFNATAAFKAYSNIKDYIDEAEKVAKEAKDLAHEATKLATGPRGLLKEDAKGCLQKSFRILNEAKKLANDVKENEDHLNGLKTRIENADARNGDLLRTLNDTLGKLSAIPNDTAAKLQAVKDKARQANDTAKDVLAQITELHQNLDGLKKNYNKLADSVAKTNAVVKDPSKNTVADADATVKNLEQEADRLIDKLKPIKELEDNLKKNISEIKELINQARKQANSIKVSVSSGGDCIRTYKPEIKKGSYNNIVVNVKTAVADNLLFYLGSAKFIDFLAIEMRKGKVSFLWDVGSGVGRVEYPDLTIDDSYWYRIVASRTGRNGTISVRALDGPKASIVPSTHHSTSPPGYTILDVDANAMLFVGGLTGKLKKADAVRVITFTGCMGETYFDNKPIGLWNFREKEGDCKGCTVSPQVEDSEGTIQFDGEGYALVSRPIRWYPNISTVMFKFRTFSSSALLMYLATRDLRDFMSVELTDGHIKVSYDLGSGMASVVSNQNHNDGKWKSFTLSRIQKQANISIVDIDTNQEENIATSSSGNNFGLDLKADDKIYFGGLPTLRNLSMKARPEVNLKKYSGCLKDIEISRTPYNILSSPDYVGVTKGCSLENVYTVSFPKPGFVELSPVPIDVGTEINLSFSTKNESGIILLGSGGTPAPPRRKRRQTGQAYYAILLNRGRLEVHLSTGARTMRKIVIRPEPNLFHDGREHSVHVERTRGIFTVQVDENRRYMQNLTVEQPIEVKKLFVGGAPPEFQPSPLRNIPPFEGCIWNLVINSVPMDFARPVSFKNADIGRCAHQKLREDEDGAAPAEIVIQPEPVPTPAFPTPTPVLTHGPCAAESEPALLIGSKQFGLSRNSHIAIAFDDTKVKNRLTIELEVRTEAESGLLFYMARINHADFATVQLRNGLPYFSYDLGSGDTHTMIPTKINDGQWHKIKIMRSKQEGILYVDGASNRTISPKKADILDVVGMLYVGGLPINYTTRRIGPVTYSIDGCVRNLHMAEAPADLEQPTSSFHVGTCFANAQRGTYFDGTGFAKAVGGFKVGLDLLVEFEFRTTTTTGVLLGISSQKMDGMGIEMIDEKLMFHVDNGAGRFTAVYDAGVPGHLCDGQWHKVTANKIKHRIELTVDGNQVEAQSPNPASTSADTNDPVFVGGFPDDLKQFGLTTSIPFRGCIRSLKLTKGTGKPLEVNFAKALELRGVQPVSCPAN

SEQ ID NO: 8758 - protein, 3122 aa, Artificial Sequence
  derived and/or modified sequence
MPGAAGVLLLLLLSGGLGGVQAQRPQQQRQSQAHQQRGLFPAVLNLASNALITTNATCGEKGPEMYCKLVEHVPGQPVRNPQCRICNQNSSNPNQRHPITNAIDGKNTWWQSPSIKNGIEYHYVTITLDLQQVFQIAYVIVKAANSPRPGNWILERSLDDVEYKPWQYHAVTDTECLTLYNIYPRTGPPSYAKDDEVICTSFYSKIHPLENGEIHISLINGRPSADDPSPELLEFTSARYIRLRFQRIRTLNADLMMFAHKDPREIDPIVTRRYYYSVKDISVGGMCICYGHARACPLDPATNKSRCECEHNTCGDSCDQCCPGFHQKPWRAGTFLTKTECEACNCHGKAEECYYDENVARRNLSLNIRGKYIGGGVCINCTQNTAGINCETCTDGFFRPKGVSPNYPRPCQPCHCDPIGSLNEVCVKDEKHARRGLAPGSCHCKTGFGGVSCDRCARGYTGYPDCKACNCSGLGSKNEDPCFGPCICKENVEGGDCSRCKSGFFNLQEDNWKGCDECFCSGVSNRCQSSYWTYGKIQDMSGWYLTDLPGRIRVAPQQDDLDSPQQISISNAEARQALPHSYYWSAPAPYLGNKLPAVGGQLTFTISYDLEEEEEDTERVLQLMIILEGNDLSISTAQDEVYLHPSEEHTNVLLLKEESFTIHGTHFPVRRKEFMTVLANLKRVLLQITYSFGMDAIFRLSSVNLESAVSYPTDGSIAAAVEVCQCPPGYTGSSCESCWPRHRRVNGTIFGGICEPCQCFGHAESCDDVTGECLNCKDHTGGPYCDKCLPGFYGEPTKGTSEDCQPCACPLNIPSNNFSPTCHLDRSLGLICDGCPVGYTGPRCERCAEGYFGQPSVPGGSCQPCQCNDNLDFSIPGSCDSLSGSCLICKPGTTGRYCELCADGYFGDAVDAKNCQPCRCNAGGSFSEVCHSQTGQCECRANVQGQRCDKCKAGTFGLQSARGCVPCNCNSFGSKSFDCEESGQCWCQPGVTGKKCDRCAHGYFNFQEGGCTACECSHLGNNCDPKTGRCICPPNTIGEKCSKCAPNTWGHSITTGCKACNCSTVGSLDFQCNVNTGQCNCHPKFSGAKCTECSRGHWNYPRCNLCDCFLPGTDATTCDSETKKCSCSDQTGQCTCKVNVEGIHCDRCRPGKFGLDAKNPLGCSSCYCFGTTTQCSEAKGLIRTWVTLKAEQTILPLVDEALQHTTTKGIVFQHPEIVAHMDLMREDLHLEPFYWKLPEQFEGKKLMAYGGKLKYAIYFEAREETGFSTYNPQVIIRGGTPTHARIIVRHMAAPLIGQLTRHEIEMTEKEWKYYGDDPRVHRTVTREDFLDILYDIHYILIKATYGNFMRQSRISEISMEVAEQGRGTTMTPPADLIEKCDCPLGYSGLSCEACLPGFYRLRSQPGGRTPGPTLGTCVPCQCNGHSSLCDPETSICQNCQHHTAGDFCERCALGYYGIVKGLPNDCQQCACPLISSSNNFSPSCVAEGLDDYRCTACPRGYEGQYCERCAPGYTGSPGNPGGSCQECECDPYGSLPVPCDPVTGFCTCRPGATGRKCDGCKHWHAREGWECVFCGDECTGLLLGDLARLEQMVMSINLTGPLPAPYKMLYGLENMTQELKHLLSPQRAPERLIQLAEGNLNTLVTEMNELLTRATKVTADGEQTGQDAERTNTRAKSLGEFIKELARDAEAVNEKAIKLNETLGTRDEAFERNLEGLQKEIDQMIKELRRKNLETQKEIAEDELVAAEALLKKVKKLFGESRGENEEMEKDLREKLADYKNKVDDAWDLLREATDKIREANRLFAVNQKNMTALEKKKEAVESGKRQIENTLKEGNDILDEANRLADEINSIIDYVEDIQTKLPPMSEELNDKIDDLSQEIKDRKLAEKVSQAESHAAQLNDSSAVLDGILDEAKNISFNATAAFKAYSNIKDYIDEAEKVAKEAKDLAHEATKLATGPRGLLKEDAKGCLQKSFRILNEAKKLANDVKENEDHLNGLKTRIENADARNGDLLRTLNDTLGKLSAIPNDTAAKLQAVKDKARQANDTAKDVLAQITELHQNLDGLKKNYNKLADSVAKTNAVVKDPSKNKIVADADATVKNLEQEADRLIDKLKPIKELEDNLKKNISEIKELINQARKQANSIKVSVSSGGDCIRTYKPEIKKGSYNNIVVNVKTAVADNLLFYLGSAKFIDFLAIEMRKGKVSFLWDVGSGVGRVEYPDLTIDDSYWYRIVASRTGRNGTISVRALDGPKASIVPSTHHSTSPPGYTILDVDANAMLFVGGLTGKLKKADAVRVITFTGCMGETYFDNKPIGLWNFREKEGDCKGCTVSPQVEDSEGTIQFDGEGYALVSRPIRWYPNISTVMFKFRTFSSSALLMYLATRDLRDFMSVELTDGHIKVSYDLGSGMASVVSNQNHNDGKWKSFTLSRIQKQANISIVDIDTNQEENIATSSSGNNFGLDLKADDKIYFGGLPTLRNLRLFNRPEVNLKKYSGCLKDIEISRTPYNILSSPDYVGVTKGCSLENVYTVSFPKPGFVELSPVPIDVGTEINLSFSTKNESGIILLGSGGTPAPPRRKRRQTGQAYYAILLNRGRLEVHLSTGARTMRKIVIRPEPNLFHDGREHSVHVERTRGIFTVQVDENRRYMQNLTVEQPIEVKKLFVGGAPPEFQPSPLRNIPPFEGCIWNLVINSVPMDFARPVSFKNADIGRCAHQKLREDEDGAAPAEIVIQPEPVPTPAFPTPTPVLTHGPCAAESEPALLIGSKQFGLSRNSHIAIAFDDTKVKNRLTIELEVRTEAESGLLFYMARINHADFATVQLRNGLPYFSYDLGSGDTHTMIPTKINDGQWHKIKIMRSKQEGILYVDGASNRTISPKKADILDVVGMLYVGGLPINYTTRRIGPVTYSIDGCVRNLHMAEAPADLEQPTSSFHVGTCFANAQRGTYFDGTGFAKAVGGFKVGLDLLVEFEFRTTTTTGVLLGISSQKMDGMGIEMIDEKLMFHVDNGAGRFTAVYDAGVPGHLCDGQWHKVTANKIKHRIELTVDGNQVEAQSPNPASTSADTNDPVFVGGFPDDLKQFGLTTSIPFRGCIRSLKLTKGTGKPLEVNFAKALELRGVQPVSCPAN

SEQ ID NO: 8759 - protein, 3122 aa, Artificial Sequence
  derived and/or modified sequence
MPGAAGVLLLLLLSGGLGGVQAQRPQQQRQSQAHQQRGLFPAVLNLASNALITTNATCGEKGPEMYCKLVEHVPGQPVRNPQCRICNQNSSNPNQRHPITNAIDGKNTWWQSPSIKNGIEYHYVTITLDLQQVFQIAYVIVKAANSPRPGNWILERSLDDVEYKPWQYHAVTDTECLTLYNIYPRTGPPSYAKDDEVICTSFYSKIHPLENGEIHISLINGRPSADDPSPELLEFTSARYIRLRFQRIRTLNADLMMFAHKDPREIDPIVTRRYYYSVKDISVGGMCICYGHARACPLDPATNKSRCECEHNTCGDSCDQCCPGFHQKPWRAGTFLTKTECEACNCHGKAEECYYDENVARRNLSLNIRGKYIGGGVCINCTQNTAGINCETCTDGFFRPKGVSPNYPRPCQPCHCDPIGSLNEVCVKDEKHARRGLAPGSCHCKTGFGGVSCDRCARGYTGYPDCKACNCSGLGSKNEDPCFGPCICKENVEGGDCSRCKSGFFNLQEDNWKGCDECFCSGVSNRCQSSYWTYGKIQDMSGWYLTDLPGRIRVAPQQDDLDSPQQISISNAEARQALPHSYYWSAPAPYLGNKLPAVGGQLTFTISYDLEEEEEDTERVLQLMIILEGNDLSISTAQDEVYLHPSEEHTNVLLLKEESFTIHGTHFPVRRKEFMTVLANLKRVLLQITYSFGMDAIFRLSSVNLESAVSYPTDGSIAAAVEVCQCPPGYTGSSCESCWPRHRRVNGTIFGGICEPCQCFGHAESCDDVTGECLNCKDHTGGPYCDKCLPGFYGEPTKGTSEDCQPCACPLNIPSNNFSPTCHLDRSLGLICDGCPVGYTGPRCERCAEGYFGQPSVPGGSCQPCQCNDNLDFSIPGSCDSLSGSCLICKPGTTGRYCELCADGYFGDAVDAKNCQPCRCNAGGSFSEVCHSQTGQCECRANVQGQRCDKCKAGTFGLQSARGCVPCNCNSFGSKSFDCEESGQCWCQPGVTGKKCDRCAHGYFNFQEGGCTACECSHLGNNCDPKTGRCICPPNTIGEKCSKCAPNTWGHSITTGCKACNCSTVGSLDFQCNVNTGQCNCHPKFSGAKCTECSRGHWNYPRCNLCDCFLPGTDATTCDSETKKCSCSDQTGQCTCKVNVEGIHCDRCRPGKFGLDAKNPLGCSSCYCFGTTTQCSEAKGLIRTWVTLKAEQTILPLVDEALQHTTTKGIVFQHPEIVAHMDLMREDLHLEPFYWKLPEQFEGKKLMAYGGKLKYAIYFEAREETGFSTYNPQVIIRGGTPTHARIIVRHMAAPLIGQLTRHEIEMTEKEWKYYGDDPRVHRTVTREDFLDILYDIHYILIKATYGNFMRQSRISEISMEVAEQGRGTTMTPPADLIEKCDCPLGYSGLSCEACLPGFYRLRSQPGGRTPGPTLGTCVPCQCNGHSSLCDPETSICQNCQHHTAGDFCERCALGYYGIVKGLPNDCQQCACPLISSSNNFSPSCVAEGLDDYRCTACPRGYEGQYCERCAPGYTGSPGNPGGSCQECECDPYGSLPVPCDPVTGFCTCRPGATGRKCDGCKHWHAREGWECVFCGDECTGLLLGDLARLEQMVMSINLTGPLPAPYKMLYGLENMTQELKHLLSPQRAPERLIQLAEGNLNTLVTEMNELLTRATKVTADGEQTGQDAERTNTRAKSLGEFIKELARDAEAVNEKAIKLNETLGTRDEAFERNLEGLQKEIDQMIKELRRKNLETQKEIAEDELVAAEALLKKVKKLFGESRGENEEMEKDLREKLADYKNKVDDAWDLLREATDKIREANRLFAVNQKNMTALEKKKEAVESGKRQIENTLKEGNDILDEANRLADEINSIIDYVEDIQTKLPPMSEELNDKIDDLSQEIKDRKLAEKVSQAESHAAQLNDSSAVLDGILDEAKNISFNATAAFKAYSNIKDYIDEAEKVAKEAKDLAHEATKLATGPRGLLKEDAKGCLQKSFRILNEAKKLANDVKENEDHLNGLKTRIENADARNGDLLRTLNDTLGKLSAIPNDTAAKLQAVKDKARQANDTAKDVLAQITELHQNLDGLKKNYNKLADSVAKTNAVVKDPSKNKIIADADATVKNLEQEADRLIDKLKPIKELEDNLKKNISEIKELINQARKQANSIKVSVSSGGDCIRTYKPEIKKGSYNNIVVNVKTAVADNLLFYLGSAKFIDFLAIEMRKGKVSFLWDVGSGVGRVEYPDLTIDDSYWYRIVASRTGRNGTISVRALDGPKASIVPSTHHSTSPPGYTILDVDANAMLFVGGLTGKLKKADAVRVITFTGCMGETYFDNKPIGLWNFREKEGDCKGCTVSPQVEDSEGTIQFDGEGYALVSRPIRWYPNISTVMFKFRTFSSSALLMYLATRDLRDFMSVELTDGHIKVSYDLGSGMASVVSNQNHNDGKWKSFTLSRIQKQANISIVDIDTNQEENIATSSSGNNFGLDLKADDKIYFGGLPTLRNLSMKARPEVNLKKYSGCLKDIEISRTPYNILSSPDYVGVTKGCSLENVYTVSFPKPGFVELSPVPIDVGTEINLSFSTKNESGIILLGSGGTPAPPRRKRRQTGQAYYAILLNRGRLEVHLSTGARTMRKIVIRPEPNLFHDGREHSVHVERTRGIFTVQVDENRRYMQNLTVEQPIEVKKLFVGGAPPEFQPSPLRNIPPFEGCIWNLVINSVPMDFARPVSFKNADIGRCAHQKLREDEDGAAPAEIVIQPEPVPTPAFPTPTPVLTHGPCAAESEPALLIGSKQFGLSRNSHIAIAFDDTKVKNRLTIELEVRTEAESGLLFYMARINHADFATVQLRNGLPYFSYDLGSGDTHTMIPTKINDGQWHKIKIMRSKQEGILYVDGASNRTISPKKADILDVVGMLYVGGLPINYTTRRIGPVTYSIDGCVRNLHMAEAPADLEQPTSSFHVGTCFANAQRGTYFDGTGFAKAVGGFKVGLDLLVEFEFRTTTTTGVLLGISSQKMDGMGIEMIDEKLMFHVDNGAGRFTAVYDAGVPGHLCDGQWHKVTANKIKHRIELTVDGNQVEAQSPNPASTSADTNDPVFVGGFPDDLKQFGLTTSIPFRGCIRSLKLTKGTGKPLEVNFAKALELRGVQPVSCPAN

SEQ ID NO: 8760 - DNA, 9366 bp, Artificial Sequence
  derived and/or modified sequence
atgcccggtgcagcgggcgtgctgctgctgctgttattatctggcgggcttggcggggttcaagctcagcgcccccagcagcaacgtcaaagccaagcacaccagcagcgtgggctgttccctgcggtgctgaacctcgcctcaaatgccctaattacgaccaacgccacctgcggggagaaaggccccgagatgtactgcaagctggtggagcacgtgccaggccaacccgttaggaatcctcagtgcaggatttgtaaccagaactcctccaaccccaatcagcggcaccccatcaccaatgcaatcgatggaaagaacacatggtggcagtccccatctatcaagaatggcatcgaataccactacgtgaccatcacgctggacctacaacaggtttttcagattgcatatgtgattgttaaggccgctaactcaccaagaccggggaattggatcctggagcggagcctcgacgatgtggagtataagccatggcagtatcacgcagtgaccgacaccgaatgtcttaccttgtacaacatttacccacgcaccggcccccctagctacgctaaggacgatgaagttatatgcacctctttttatagtaaaatccacccactcgaaaacggcgagatccacatatccctgatcaatggaaggcccagtgctgatgaccccagcccagagcttctggagttcacatcggcccgctacatcagactgaggtttcagcgcattaggactctaaatgccgatttgatgatgtttgcccacaaggaccccagagagatcgacccgatcgtgaccagacgctattattattcagttaaggatatctccgttggggggatgtgcatttgctatggccacgcccgagcctgtcccctggaccccgctacgaataagtcaagatgtgaatgcgagcataacacatgcggagatagctgcgaccagtgctgccctggtttccatcagaagccttggagagcaggcacattcctaacgaaaactgaatgtgaagcatgcaactgtcatggcaaggccgaagagtgctattacgatgagaatgtagcaaggagaaacctgtctctcaacatccgcgggaaatacataggggggggggtctgtataaattgcacacagaacacagctggaattaattgtgaaacgtgtacagatggcttcttcagaccaaagggcgtatcccctaactaccctagaccatgtcagccttgccactgcgatccgatcggaagccttaatgaagtgtgtgttaaggacgaaaaacacgctcgccgcggacttgcccccggctcttgtcattgcaaaactggatttgggggggtgtcctgtgataggtgtgccagaggttatactgggtacccagactgtaaagcatgcaattgctctggtctggggagtaaaaatgaagacccctgtttcggcccctgcatttgtaaagaaaacgttgaaggcggcgactgctctaggtgtaagtcaggtttcttcaatctgcaggaagacaattggaagggatgtgatgagtgtttctgctctggagtttccaacaggtgccagtctagctattggacatacgggaagatccaggacatgagtggttggtatcttactgacctccccgggcggatcagggtggctcctcaacaggatgacctggattcccctcaacagatctcaattagtaatgctgaggcaaggcaggcactgccccattcttattactggtccgcccccgcgccctacctcgggaataaactcccagccgtcggtggccaactgaccttcacaatttcctatgacttggaggaggaggaggaagacacggaacgcgtgctacagctgatgatcatcctggagggaaacgatctgagcatttccactgcgcaagacgaggtctatctccatccttcagaagagcacacaaacgtgctccttctgaaggaggaatcgtttacaatccacggaactcatttccccgtcaggcggaaggaatttatgaccgttctggccaacctaaaacgtgtactgttgcagataacttatagcttcggaatggacgctatattccggctgtcatctgtgaatctcgaaagcgcagtgtcttatcccactgatggttctatcgcggccgcagtagaagtatgtcaatgtcctcctggctacacaggctcttcatgtgagtcttgttggcctcgtcatcgccgggttaacggcaccatcttcggagggatttgtgaaccatgtcagtgttttgggcacgcggaaagttgtgacgacgtcactggcgaatgtctgaattgtaaggaccacacaggcggcccatactgcgataagtgtttacctggtttctacggtgagcccacgaagggcacatcagaggactgccagccctgcgcatgtcccctcaacataccctccaacaatttctccccaacatgtcacctcgatcggtcactgggactgatatgcgatggctgtccagtgggttataccggcccccggtgcgagcgctgtgcagagggttattttggacagccatcagtccccgggggctcgtgccaaccttgtcagtgcaacgataatctagatttttctatcccaggttcgtgcgacagcttaagtggaagttgcttaatttgtaaacctgggaccactggccgatactgcgagctctgcgcagacggatattttggagatgcagtggacgcaaagaattgccagccttgtcgctgtaatgctggcggctccttctccgaggtgtgccacagtcagactggccagtgcgaatgccgagccaatgtgcaggggcagaggtgcgacaaatgcaaagccgggaccttcggtctccagagcgcaagggggtgcgtgccatgtaattgcaactccttcggatctaagtcctttgattgtgaagagagtgggcagtgttggtgccaacctggggtcaccggcaagaagtgtgaccggtgcgctcacgggtactttaatttccaggaagggggttgtactgcctgtgagtgtagtcatttgggaaacaactgcgatccaaaaaccgggcgctgtatctgtcctcctaatactattggggagaagtgctctaagtgcgcccctaacacttggggtcacagcataaccactggatgcaaggcatgcaactgtagcacagtcggtagcctggatttccagtgtaatgtgaatactggacaatgcaactgtcaccccaagttttccggcgcgaaatgtaccgaatgctctagagggcactggaattacccgcgatgtaatctctgcgattgctttctgccaggcaccgatgcaaccacatgcgacagtgaaactaagaagtgcagctgctccgaccaaacagggcagtgcacatgcaaagtgaatgtcgagggcattcattgtgataggtgtcgcccgggcaagtttggtttagatgcgaaaaatcccctgggttgtagctcatgctattgcttcgggacgacgacccagtgctccgaagccaagggactcatccgaacgtgggtaactctgaaggctgaacagactatccttcctctggtggatgaggcgctgcagcacaccactaccaagggaatcgtgttccagcatcctgagattgttgcccatatggatcttatgagagaggatctccatctcgaaccattttattggaaattaccagagcagttcgagggcaaaaaactgatggcgtacggcgggaagctgaagtacgcaatctacttcgaggcccgggaagagaccggcttcagcacctacaacccccaagtgattattcgcggaggcaccccgacccacgcgaggattatcgtacgtcatatggccgcccccctgatcggacagctgacgcggcacgagatcgagatgaccgaaaaagagtggaaatattacggcgatgaccctagagtgcataggacagtgacccgcgaggacttcctcgatatcttgtacgacatccactatatcctgatcaaggcgacttacgggaattttatgaggcagagccggatctcagagatctcaatggaagttgccgagcaggggagaggtactaccatgactccccctgccgaccttatcgagaaatgcgactgccccctggggtattccggactgtcttgtgaggcttgccttccgggcttttaccggctccgttcccaacccgggggaaggacacccgggcccaccttgggcacgtgcgtgccttgtcaatgtaatggccacagctccctttgcgaccccgagacttctatttgccagaactgccagcaccacaccgctggggacttctgtgagcggtgtgcactgggctattacgggattgtaaaaggtctgcccaacgattgccagcaatgtgcttgccctctgatctcctcatcaaataatttctctcctagctgcgtggctgaggggctggatgactaccgctgtaccgcatgtccccgagggtacgagggtcagtattgcgagaggtgtgcaccaggatatacaggatcaccgggaaatcccggaggaagctgccaggagtgcgagtgtgatccctatggctctctgccggtgccatgtgatcccgtgactgggttctgcacatgtagaccaggcgcaactgggaggaagtgcgacggctgcaagcactggcacgcacgcgaaggttgggaatgtgtcttctgtggggatgaatgcacaggactcctgctcggcgacctggcgcgactggaacaaatggttatgagcattaatctcacaggccctctgcccgccccctataagatgctttatggactagagaatatgacacaagaactgaagcatctactttctcctcagagggctccggagagactgatccagcttgccgagggaaaccttaataccttggttaccgagatgaacgagctgttgacccgcgcgaccaaggtgacagcagacggcgaacaaacaggacaagatgcggagcggacaaatacacgcgcaaaatcactgggggaatttatcaaggaattggcacgggatgccgaggctgtgaatgagaaggcaatcaagctgaacgagaccttgggcactagagacgaggctttcgagcggaacctcgaagggctccagaaggaaatcgaccagatgatcaaagagttacgcaggaagaatttggaaacgcagaaagagattgccgaggacgagctcgtggctgccgaggccttgctgaagaaggtcaagaagctgttcggagagagccgcggcgaaaatgaagagatggaaaaggacctaagagagaagttggcggactacaagaacaaggtggacgacgcctgggatctcctgcgggaggcgacagataaaattcgggaggccaatcggctgtttgctgtgaaccagaagaacatgaccgcattggaaaaaaaaaaagaggccgtagagagtggcaagcgccagatagaaaatactcttaaggagggcaatgacatcttggatgaagcaaacagacttgcggacgagatcaatagtatcatagactacgtggaggatatccagacaaagctcccacccatgtcagaggaacttaacgacaaaatcgatgacctttctcaggaaattaaagaccgcaaactcgccgaaaaagtgagccaagccgaatcccatgccgcgcagctcaatgacagttcagccgttctggacgggatactggatgaggcaaaaaatatctcctttaatgccactgccgcgtttaaagcctacagtaatatcaaagattatattgatgaagctgaaaaggttgcaaaggaggcgaaggaccttgcacatgaggccactaagctcgccactggcccacgcggtctgctgaaagaggacgctaaaggctgcttgcaaaaatctttcaggattttgaacgaagccaaaaaactggccaatgacgtcaaggagaacgaggaccacctgaatggcctgaaaacacgtattgagaatgctgatgccagaaatggcgatcttttgaggacactgaacgatacactgggaaaattgagcgctattcccaatgacactgcagctaagctccaagccgttaaagataaggcacgccaggcaaatgacacagccaaggacgtcctggctcagatcacagaattacaccagaatttggacggactaaagaagaactacaataaactagctgacagcgtcgctaagaccaatgccgtggtgaaggacccaagcaaaaacaccgtagccgatgcagatgctaccgtaaaaaacctggagcaggaggcggatcgactgatcgataaattaaaaccaattaaggaactggaggataatttaaaaaagaacatttcagaaatcaaagagctcatcaaccaggcccgcaagcaggccaacagtattaaagtctctgtctcatcaggtggcgactgcattcgcacctacaaacctgaaataaagaaagggagttataataacattgtagtgaatgtcaagacggccgtcgcagataatcttctgttttacctcggaagtgctaaatttatcgacttcctggcaattgaaatgagaaagggtaaggtatcctttctatgggatgtcgggtctggagtcgggagggtggagtaccccgacctcactatcgatgactcttactggtaccgcatcgtggcctctcggacaggcagaaatggaaccatttcggttagggcactggacggaccgaaggcatcgattgtgccctccacccaccacagcacttctccacccggttatactattctggatgttgacgccaacgccatgctctttgtgggtggtctgacgggaaagctgaaaaaggccgatgccgttagggttattactttcaccggctgtatgggagagacgtactttgataataagcccatcggattgtggaatttccgggagaaggagggcgactgcaaagggtgcacagtgagcccgcaggttgaggattctgaggggactatccagttcgacggagaaggatacgctttagtctcccgacccatccgatggtatcctaacatttcaaccgttatgttcaagttccggaccttctcttcatctgccctgcttatgtacctggctacaagagatcttagagattttatgagtgttgaattgaccgacggacatattaaagtatcgtacgacctcggcagtggaatggctagtgtcgttagcaaccagaaccataacgacggaaagtggaaaagctttactctgagtcgcatccagaagcaggcaaatatctcaatagtagacatagatactaatcaggaggagaacatagccacttcttcaagcggaaacaatttcgggctggacttgaaggccgatgataagatttacttcggtggtctgcccaccctccgcaatctgagtatgaaggctaggcctgaggtcaacctcaagaagtacagcggttgcctgaaagacatcgagatcagtagaactccttacaacattttaagttctcccgactatgtgggggtcaccaaagggtgtagcctggagaatgtttacacagtctccttccctaaaccgggattcgtggagctgagccctgtgcccatcgatgttgggaccgagatcaatctgagttttagtacaaagaatgaatccggtattatcctactagggtctggcggaacacctgctcctccgagacggaaacggcgacagactgggcaggcttattacgctattctgttaaataggggacggttggaggtacatttaagcactggagcccgcactatgaggaaaatcgttatccgccctgagcctaacctattccatgatgggagggaacactccgtgcacgtcgaacgcacccgcgggatcttcacggtccaggtcgatgagaaccgtagatacatgcagaatctaaccgttgaacagccaatcgaggtgaagaaactcttcgtgggcggcgcacctccagaatttcagccctcacctctacggaacatcccaccctttgaagggtgcatatggaatctggtgattaattcggtgccaatggatttcgcaagacctgtgagtttcaaaaatgcggatattggccgctgcgcacaccagaaactcagggaagatgaggatggagctgcgccagcagaaatagtgatccaacctgagccggtccccactccggcattccctactcccacgccagtgctgactcacgggccatgcgcggcagaaagtgaaccagccctcctgatcggtagtaagcaattcgggctctcacggaactcgcacatagcaatagcatttgacgataccaaagtgaaaaatcgtctcaccattgaattagaggtgcggaccgaggcagaatccggactgttattttacatggctcgcatcaatcacgctgatttcgcaactgtgcagctgaggaacgggctaccctacttcagctatgacctgggaagcggagatactcacacaatgatcccaactaaaatcaacgacgggcaatggcataaaataaagattatgcgttccaaacaagagggcattctgtacgtcgatggggcgtctaatcgtacaatcagtccgaagaaagccgatatcctcgacgtggtgggcatgctgtacgtcggtggactgcccataaactataccacacgcaggattggccccgtgacctactcaatagacggctgtgtgcgtaacttgcacatggccgaggcccctgcagatttggagcaacccacttctagttttcacgtgggtacatgttttgccaatgctcagcgcggtacctatttcgatggaacaggtttcgcgaaagctgtagggggtttcaaggttggattagaccttctagtggagtttgagtttagaacaactaccacgacaggagtgctcctggggatcagctcccagaaaatggatggaatgggcatagagatgatcgatgagaagctgatgttccacgtggacaacggagccggtcggttcacagcggtgtatgatgcaggcgttccagggcatttgtgcgatggccagtggcacaaggtcacagcaaataaaattaagcacaggattgagctcacggtcgacggcaatcaggtggaggctcaatcacccaacccagcgtctacctctgccgacactaacgaccccgtgttcgtggggggcttccccgacgatcttaagcagttcggcttaacaacttccataccattccgcgggtgtattaggagcctgaagctgaccaaaggaactgggaaacctcttgaggtaaatttcgcgaaagctctcgagctaaggggagtgcagccggtctcgtgccccgccaactag

SEQ ID NO: 8761 - DNA, 9369 bp, Artificial Sequence
  derived and/or modified sequence
atgcccggcgctgcaggggtgttactcctgctcctgctgagcggagggctggggggcgtacaggctcagcgcccgcagcagcagaggcagagtcaagcgcatcaacagcgcgggttgtttccagcagttttgaatctggcatcaaatgctttaattaccacaaacgctacatgcggcgagaagggtcccgaaatgtattgcaaattggtggagcacgtgccaggccaaccggtgagaaatccccagtgtcggatctgcaaccagaactcttccaacccaaatcagcgacaccccatcactaatgcgatcgacgggaagaatacttggtggcagtctccatccattaaaaatggcatcgagtaccactacgtgaccattacattagacttgcaacaagtctttcagatagcttatgtgatcgtgaaggccgccaatagtcctcgccccgggaattggatacttgaacgttcgttggacgacgttgaatataagccttggcaatatcatgcagtcaccgacaccgagtgcttgaccttatataatatctatcctcgtacgggccctccatcatacgccaaggatgatgaagtcatctgtacctccttttactctaaaatccatcccctggaaaatggggagattcatatcagtctgattaacggacgccctagcgcggacgatccctctccggagctgctggaatttacgtcggcacgctatattcggctgagatttcagcggattcggaccttgaacgccgatctcatgatgttcgcccacaaagatcccagggagatcgatcccatcgtgacgagacggtactattactcagtcaaggacatctctgtgggcgggatgtgcatctgctatggccacgcccgtgcatgtcccttagatcccgctactaacaagagccgctgcgagtgtgaacacaatacctgtggagactcctgtgatcaatgctgccccgggtttcatcagaagccttggagagcgggaacctttctgactaagactgagtgcgaggcctgtaattgccacggcaaagccgaggagtgctattatgacgagaatgtggccagaaggaacctctctcttaatattagagggaaatacatcggtggcggggtgtgcataaactgcacgcagaacacggccgggatcaattgcgagacctgtaccgatgggttttttcgccccaagggcgtctcaccaaattatcctcgaccatgtcaaccatgtcactgcgaccctattgggagcctgaacgaggtatgcgtgaaagacgagaagcatgcgcggagaggactggcccccggatcgtgccattgcaaaacaggttttggcggagtcagctgcgaccgatgtgcgagaggttacacagggtatcccgactgcaaggcgtgtaattgcagcggcctcgggagcaagaatgaggacccttgcttcgggccttgtatctgtaaagagaatgttgaagggggcgactgtagtcggtgcaaaagcgggttcttcaatctgcaagaggataactggaagggttgtgacgaatgtttctgctccggtgtctcaaatcgctgtcagagcagctactggacctatgggaaaatccaggacatgagcgggtggtaccttaccgacctacctgggagaatccgagtggcacctcagcaggatgatcttgactcgccccagcaaatctctatttccaatgccgaggcccgccaggccctcccgcactcctactattggagtgcacccgcgccatatcttggaaacaaactcccagcagtgggcggacagcttactttcaccatcagttatgatcttgaagaagaagaggaagataccgaacgcgtccttcagttgatgatcattcttgaggggaatgacctctccatttccacggcacaggatgaagtgtacctgcacccttcagaggagcacactaacgtcctgctgcttaaagaggaatccttcacaatccacggaacacactttcccgttagacgcaaggaattcatgaccgtactggcgaacctcaaacgcgtgctgctccagataacatactcattcggcatggacgcaatcttccgcctctcatcagtaaacctcgagagcgccgtgagttacccgaccgatggctctatcgcggcggccgttgaggtttgccagtgcccccccggatacactggttcttcctgcgaatcttgctggcctcgacacagacgagtgaatggcaccatattcggcggcatctgtgagccatgccagtgcttcggacatgcggagagctgcgatgacgtgaccggagaatgcttgaattgcaaggaccataccggagggccctattgcgacaagtgccttcctggtttctacggtgaaccgacaaagggcacctcagaggactgtcagccctgcgcctgtcctcttaatattccctccaacaacttcagccccacctgtcaccttgacaggtccctggggcttatatgcgacgggtgtccagtcggatatactggacctcgctgcgagcgatgtgctgagggctacttcggacagccgagcgtccccggcgggagctgtcagccatgccagtgtaatgacaatcttgactttagtatcccaggcagctgcgactcgctgtccggtagttgtctgatttgcaaacctggaacgacaggacggtattgtgaactgtgtgcagacggttatttcggagatgcggtggacgctaaaaactgtcagccatgcaggtgtaacgcgggaggcagcttttccgaggtgtgtcacagccagacaggccaatgcgagtgcagagccaacgtacaggggcaacgctgcgataaatgcaaggctggcactttcggcctacagtctgccagaggatgtgtgccctgtaactgcaactcctttggatctaagagctttgactgtgaggaatcaggacagtgttggtgtcagcccggggtcactggcaaaaaatgcgatcgttgcgcccatggatacttcaatttccaggagggtgggtgcacagcctgtgaatgctcacacttgggtaacaactgtgacccgaaaacagggcgatgcatctgtcccccgaataccatcggcgagaagtgcagtaagtgcgcccctaatacatggggccacagtattaccacaggctgcaaggcatgtaactgttcgaccgttgggagtctggacttccagtgtaacgttaacaccggtcagtgtaactgccaccccaagttcagcggtgccaagtgcaccgagtgcagccgggggcactggaattatccacggtgcaatctgtgtgattgctttttacccggtacagatgcaacaacttgcgacagtgagacgaaaaaatgctcttgttccgaccagacaggtcagtgtacctgcaaagtgaatgtggaaggaattcattgcgaccgctgccgcccggggaagtttggcctcgatgccaagaacccactcgggtgctcttcgtgttactgctttggaaccacaacccaatgcagcgaagccaaaggtttgataagaacatgggtgacactgaaagccgagcagacaatcttgccactcgtggacgaggccctgcagcacaccacaaccaagggcatagtcttccagcacccggaaatcgtggcacatatggacctgatgagggaagacctccacttagaacctttttattggaagctccccgagcagttcgaagggaagaagctgatggcttatggtggaaagctgaagtacgctatctactttgaggcgagagaagaaaccggattttctacatataaccctcaggtgatcattagagggggaacccctactcacgctagaatcattgtgcgacatatggcagcacccttgatcggccagcttacaagacatgaaattgagatgaccgaaaaggaatggaagtactacggagacgacccacgcgtccaccggaccgttacccgggaagatttcctcgatatactatatgatattcactacatccttatcaaggcaacttacgggaacttcatgaggcagagtcggatcagcgagattagtatggaggtggcggaacaggggcgcggcaccacaatgactcctccggcggatctcattgagaaatgtgattgcccactgggatactcggggctatcttgcgaagcatgcctaccaggcttctaccgcctccgctcccagccaggcggacgcacccccggaccaaccctgggaacatgtgtcccttgtcaatgcaacggacactcctccctgtgcgatcctgagacatcaatttgccaaaattgccagcaccacaccgccggcgacttttgcgaacggtgtgccctgggttattatggcatcgtaaaaggcctgcctaacgattgtcagcagtgtgcatgccccctcatttctagctctaacaactttagcccgagctgcgtggccgagggcctggatgactaccgatgtaccgcatgccctcggggctatgaaggacagtattgtgagaggtgtgccccaggatataccggctctcccggaaaccctgggggcagctgtcaggaatgcgaatgcgatccgtatggtagcctcccggttccgtgcgacccagtcacaggtttctgcacatgccggcccggtgcaaccggcaggaaatgtgatgggtgtaagcattggcatgcccgggagggttgggaatgcgtcttctgcggtgacgagtgcaccggcctcctcctgggggacctggctagactggagcagatggtcatgtccatcaacctgaccggccctctccctgcgccctacaagatgctgtacggactggagaacatgactcaggagcttaagcacctgctttcaccccagcgtgctccagagagactaatacagttggccgagggcaacctgaataccttggtgactgagatgaatgagctgctcacaagggcgacaaaggtaacagccgatggcgaacagaccggtcaagacgcagaacggaccaatacccgcgctaagtccctcggggaatttatcaaagaattagcacgggatgctgaagcagttaatgaaaaagctatcaaattaaacgaaacacttggaactcgggatgaagccttcgagcgcaatcttgaaggattgcagaaggagatagaccaaatgattaaagagttgcggagaaaaaacttagaaacccagaaggagatcgcagaggacgagcttgtggccgccgaggctttgttgaagaaggtgaagaaactatttggagagagtcgtggggagaacgaagaaatggagaaggacctgcgggaaaagttggctgactacaagaacaaagttgatgatgcctgggatctgctaagggaagcaacggataagattagggaagcaaacagacttttcgctgttaaccagaagaacatgactgccctggagaaaaaaaaggaggcggttgagagtggaaagcgccagatagagaacaccctgaaggagggcaatgatattctcgacgaggctaatcgactggccgatgagatcaattcaatcatcgattatgtggaggacatccagacaaagctcccccccatgtcagaggagttgaatgataagattgacgacctgtcacaagagattaaggaccgcaagctcgccgagaaggtctctcaagccgaatcccacgccgcacagctgaacgattcttctgctgtactggacggtatactggacgaggctaagaacatcagttttaatgcgactgctgccttcaaagcatatagcaatattaaggactacatagatgaagctgaaaaagttgctaaagaagcgaaggatctggcgcacgaagcgactaagctcgctactggccctcgcgggctactcaaggaggatgcaaaaggatgtctgcagaaatccttccggatcttgaacgaggccaagaaacttgcaaacgacgtcaaagagaatgaggaccaccttaatggcttgaaaaccagaatagagaatgctgacgctcggaacggcgatcttctgagaaccctcaatgacaccttgggcaaattgagtgcgattcctaatgatactgccgctaagttgcaagccgtcaaggataaggcccggcaagccaacgacactgctaaggatgtgttggcacagattaccgagctgcaccagaatctggacggcctcaaaaaaaattacaataagcttgccgattcggtggcaaaaaccaacgcggtcgtgaaggaccccagtaaaaacaaaattgttgccgacgctgacgccaccgtcaagaacctggaacaggaggcggatcgcctgatcgacaaactgaagccgataaaggaacttgaggacaatctgaagaagaacatctccgagataaaggaattgatcaaccaggcccgaaagcaagctaattctattaaggtgtcagtgagttctggaggagactgcatcagaacctataaacctgagattaagaaaggttcttacaacaatatcgtggtaaacgtcaaaacagctgtggccgataacctcctgttttacctaggttcagcgaagttcatagattttttggccatcgagatgcgcaaggggaaggtcagctttctgtgggatgtagggtcaggcgttggaagagttgaatacccagaccttacaattgatgatagttactggtaccgcatcgtggcatcaaggaccggacgaaacggaaccatctctgttcgtgcactggacggaccgaaagcttcaatcgttcctagtacccaccactctacatcaccacctggttatacgattcttgacgtcgacgcaaatgcaatgctgtttgtcgggggcctcacaggcaagctgaagaaagcagacgccgtccgcgtaataacatttacaggctgcatgggtgaaacttactttgacaacaagcctatcggcctctggaactttcgagagaaagagggggactgtaaaggttgtaccgtttccccccaggtggaagactcagagggtacaatacaatttgatggggaggggtatgctctagtcagtagacctatccgatggtacccgaatatctctacagtgatgtttaagtttcggacattctcaagcagtgccctactgatgtatctggcaacaagagacctgcgtgactttatgtccgtggaactcacagatgggcacatcaaagtaagttacgatctgggaagcgggatggcatctgtggtctcaaaccaaaaccataatgacggcaaatggaagtcattcacactgagtagaattcaaaaacaggcaaatatctccatcgtggatatcgacacaaaccaggaagaaaacattgccacttcgagctccggcaacaactttggcctcgacttaaaagcagatgataagatctatttcggggggttaccaacactacgcaatctgcgcttgttcaaccggcctgaggtaaacttaaagaagtattcaggatgcctgaaggacattgaaatctctcgcactccatataatatactgagtagcccagattatgtgggagtcacaaaagggtgcagcctcgaaaatgtgtacacggtctccttcccgaaacccggttttgtggaactgtcacccgtcccgatcgacgtgggtaccgaaatcaacctatccttctccactaaaaatgagtccggaatcatcttattaggaagcggcggaacgcccgccccgccacgtcggaaacgtagacagaccggccaagcctactacgctattctgctgaacagaggacgtctagaggttcacttatcaaccggagccaggaccatgcggaagattgtgattagaccagaacctaatctgttccatgacggaagagagcattcagtgcatgtggagcggacgaggggcattttcacagtccaggtggacgaaaataggcgctatatgcagaacctgacggtcgagcagcccatcgaagtgaaaaaactgtttgtgggcggtgctcccccggagttccagcccagtccactgcgcaatataccccccttcgaaggctgtatatggaacctggtcattaactcggtgccgatggatttcgcacggcccgtgagcttcaaaaacgccgacatcggcagatgtgcccaccaaaaacttagagaggatgaggacggagccgccccagctgaaatcgtcatccagcctgagccagtccccactcctgcgtttccgacccccacacccgtgctcacacacgggccgtgtgcagcggaatcagaacctgctttgttgatcgggtccaagcagtttgggttgtcccggaacagccacatagcgatcgcgtttgacgacaccaaggtcaaaaaccgattaacgattgagcttgaggtgcgcacggaggccgaaagcgggctgcttttttatatggcccggattaatcacgccgactttgcaacagtgcagctgcgaaatggtttgccatactttagctacgatttgggatctggagatactcacaccatgatacccactaagatcaacgatggccaatggcacaagattaaaattatgaggtcaaagcaggagggcatcctctatgtcgatggggcatctaaccgcaccatttcccctaagaaggctgatattctggatgttgtcggcatgctgtacgttggagggttgccaattaactacacgacgaggcgtataggccccgtcacttattcaattgatggatgtgtgagaaacctacacatggctgaggctcccgccgacctggagcagcccacctcttctttccacgtgggcacatgctttgccaatgcccagcggggtacgtacttcgacggcacaggttttgcgaaggcggtcgggggcttcaaagtggggctggacctgctggtggaatttgagttcaggaccaccaccacgacaggtgtgttgctggggatcagttcgcagaagatggatggtatgggcatagaaatgatcgacgagaagctgatgttccacgtcgacaacggagcgggacgcttcacagccgtgtacgatgccggtgttccaggccatctgtgtgacgggcagtggcataaagttaccgcaaataaaatcaaacacaggatagaattgaccgtagacgggaaccaggtcgaggcccagagccccaacccggcatcaacatcagctgacactaacgacccagtgtttgtcggaggcttcccggatgatctgaagcagtttgggcttacaacatccattccatttcggggctgtattagatccctgaagcttacaaaaggcactggcaaacccctagaagttaacttcgctaaagcgttagagctccgtggcgttcagccagtgagctgtcctgctaactag

SEQ ID NO: 8762 - DNA, 9369 bp, Artificial Sequence
  derived and/or modified sequence
atgcccggagcagctggcgttctgcttctgctgctgctctctggcgggctaggtggcgtgcaagctcagaggccccaacagcagcgccaatctcaagcccatcagcaaagaggtctgtttccggccgtgctgaacttagcttcgaacgccttaattacgaccaacgctacttgtggagagaagggcccggagatgtattgtaaactggtagagcatgtaccaggacagcctgtgagaaatccccagtgccggatttgtaatcagaacagtagtaatcctaatcaacggcaccccattactaatgccattgatggtaagaacacctggtggcagagcccatcgataaagaacgggatcgaataccactacgtgaccataactctagatcttcagcaggtctttcagatcgcctacgtgattgtaaaggcagctaactcccctcggccaggaaattggatactggaacgatccctcgacgatgtggaatataagccttggcagtaccatgcagtgacagacaccgagtgcctgacactttataatatttatccacggacggggccgccctcatacgcgaaagatgatgaggtgatctgcacctcattttattccaagattcatcccctggagaacggtgaaatccacatctctttgattaatgggcgtcccagcgctgatgatccttcccccgaacttctcgagttcacatcggctcgatatataagacttaggttccagcgtatcagaacccttaatgctgatctgatgatgttcgctcacaaggatccgagagaaattgatcctatcgttacccgacggtactattacagcgtgaaggacatctcagttggcgggatgtgcatctgttatggacatgccagagcttgtccactagaccctgcgactaacaagtcaagatgtgaatgtgagcataacacttgtggtgacagctgcgatcaatgctgccccggctttcaccagaagccgtggcgggctggcacctttttgacaaaaaccgaatgtgaagcttgcaactgccatggcaaggccgaagagtgctactacgacgaaaatgtcgctcgccgcaatctgtctctgaatatcagggggaaatacatcgggggaggagtatgcatcaactgcactcaaaataccgctggcataaactgcgagacttgtactgatggcttctttaggcctaagggggtgagcccaaattacccaaggccttgccagccctgtcactgtgacccaatcggttcactcaatgaggtttgtgttaaggacgagaagcatgctagacgcggtttggcccctggctcttgccactgtaagacaggcttcgggggcgtctcttgcgacaggtgcgctcggggatacaccggataccctgactgtaaagcatgcaactgtagtggtctgggatccaagaacgaagatccatgcttcgggccctgcatctgcaaggaaaacgtagagggaggggattgtagccgatgtaaaagtgggttttttaatctgcaggaggataattggaaagggtgcgatgagtgcttctgttctggggtaagtaaccggtgccagagctcgtattggacgtatgggaagattcaggacatgtctggatggtatttgacagacttgcccggcagaataagagtggctcctcagcaggacgacttggactcccctcagcaaatttccatcagtaacgctgaagctaggcaggcgctgcctcattcctactactggagtgctcctgcaccttacctcggaaataaactgccagccgtcgggggtcagcttactttcacaatcagctacgatctggaggaagaggaagaggacactgagagagttctacagctgatgatcatcctggaagggaatgacctctcaatcagcaccgcccaggacgaagtatacttacatccctccgaggagcatacgaacgttcttttgctcaaggaggagagcttcaccattcacggcacacactttcccgtgcgacggaaagaatttatgacagtgctggccaatctgaaacgtgttctccttcagattacatacagttttggtatggatgcaatctttagattgtcttctgtgaacctggagagtgccgtaagctacccaaccgacggcagcatcgcagctgccgtggaagtttgtcagtgcccaccaggatacactggttcaagttgcgaatcctgttggcctcggcacagacgagtcaacgggacaatcttcggggggatctgtgagccctgtcaatgcttcgggcacgctgaaagttgtgatgatgtgaccggggaatgtttgaactgcaaagaccataccggaggaccctattgcgataagtgtcttccagggttttacggagagcctaccaagggaaccagtgaggattgtcaaccatgtgcttgtcccctgaacattccatcaaacaacttctccccaacatgtcatctcgatcgatctttaggactgatctgcgatggatgcccggtggggtataccggccctcggtgcgaacgatgcgccgaggggtattttggacaaccatcagtgccaggagggtcttgtcagccctgccagtgcaatgacaatttagacttctctattcccggaagctgcgactctctgagtggaagctgcctgatatgcaaaccgggtacaaccggaagatactgcgagctgtgcgccgatggctacttcggtgacgcagtggacgctaaaaattgtcagccctgccgctgcaacgcaggcggatctttcagcgaggtatgtcactctcagacgggccagtgcgagtgtcgcgccaatgtgcagggccagcgatgcgataagtgcaaggcagggactttcgggctgcagtctgccagagggtgtgttccgtgtaattgcaatagtttcggctctaagtcattcgactgcgaagagtctgggcagtgttggtgccaacctggggtgacgggtaaaaagtgtgaccgttgcgcccacggctatttcaatttccaagagggcggctgcacagcctgcgagtgctcccacttgggcaacaactgtgatcccaagactgggcggtgtatctgcccacccaataccatcggggaaaaatgcagcaaatgtgcgcctaatacatgggggcactccattaccactgggtgtaaggcctgtaattgctcaaccgtcgggagccttgacttccagtgcaatgtcaatactggccagtgtaactgtcatcccaagttcagcggtgcaaagtgcaccgagtgttcccgtggacactggaactatccaagatgtaacctgtgcgactgctttcttcctggcaccgatgccacaacatgcgactctgaaaccaagaagtgcagttgttctgatcaaaccggacagtgcacttgtaaggtgaacgttgaagggatccactgtgatagatgccggccgggcaagttcggattagatgctaagaaccctttggggtgcagcagttgctattgctttggcaccactactcagtgctctgaagcgaagggactaatccgcacatgggtaaccctgaaagcagaacagacgatacttccgctagtcgacgaggctctgcagcatacaactacaaaaggaatcgtctttcaacatcccgagattgtcgcacacatggatcttatgcgcgaggatctccatcttgagcccttctattggaagcttccggagcaattcgagggaaagaaactcatggcctatggggggaagctcaagtacgccatctacttcgaggctcgggaagaaacggggttctccacctacaatccacaggtgataattaggggaggcacccctacacacgcacggattatcgtgcggcacatggcagcacccctcatcgggcagctaacccgccacgagattgagatgaccgagaaagagtggaagtattatggtgacgatccacgcgtgcacagaaccgtgacgagagaggacttcctggacatcctctacgacattcattacatcctgattaaagccacatacggcaacttcatgcgccaatcccgcatttcagagattagcatggaggttgccgagcagggccgcggcacgacgatgacaccacctgcagatttaattgaaaagtgcgattgtccgcttggttactccgggctgtcctgcgaggcatgtttgcccggattttaccggttgcgtagccagccgggagggcgcacccccggccctacccttggaacctgcgtcccgtgccagtgtaatggacacagctctctgtgcgacccagaaacatctatctgtcagaattgccagcatcataccgccggtgacttctgcgagcgctgtgctctgggctactacggcatcgtgaagggtctccctaatgattgccagcagtgcgcttgcccactgatttcctccagcaataattttagtccatcttgcgttgcagaagggctggatgattacaggtgtaccgcctgccctcgcggatatgaagggcaatactgtgaacggtgtgcacctgggtacacagggtcacctgggaacccaggagggtcctgtcaggaatgtgagtgcgacccctatggttctctcccagttccctgcgaccccgtgaccggattttgtacctgcagacctggagccaccggccgaaagtgtgatggatgcaaacactggcatgctcgcgagggatgggaatgtgtgttctgtggagatgaatgtaccgggctgctgctgggcgacctggccaggcttgagcagatggtgatgtctatcaatttgacgggaccgctccctgctccttacaagatgctgtacggcttggaaaatatgacacaggagttgaagcatttgctgagtcctcagcgggcaccagagagactgattcagctcgctgagggtaatcttaataccctggtgactgaaatgaacgagctgttgacccgcgccaccaaagtgacagcagatggagagcagacaggtcaggatgccgagcgcacaaataccagagcaaaatccctgggcgagttcatcaaggagctcgcccgggatgctgaggccgttaacgaaaaagccattaaactgaacgagactctaggaactcgcgacgaagcgtttgaacggaacttggaagggctgcagaaagagatcgaccagatgattaaggagctgcggcgtaagaatcttgagacgcagaaggagattgccgaggatgaactggtagctgccgaggctctgctgaaaaaagtgaagaagctgttcggtgagtcccgcggtgaaaatgaggagatggaaaaggatttgagagaaaagctggctgattataagaataaagtggacgatgcctgggacctgttaagggaggctactgacaagatccgggaggctaatcgtctgttcgccgtgaaccagaaaaacatgactgccctggaaaaaaaaaaggaggcagtagaaagtggaaaaaggcagattgagaatacactcaaagagggcaatgatattctggacgaggccaaccgtttagctgatgaaattaacagcatcatagattatgtcgaagatatacagaccaaactgccacccatgagcgaggagctgaacgataaaatagacgacctgtctcaggagattaaggaccgtaagctcgccgagaaggtgtcccaagcagagtcccacgctgctcagctgaatgactcctctgctgttttagatggcattctagatgaagctaagaatattagttttaatgctaccgcagcgtttaaagcctatagcaatatcaaggattacatcgacgaagctgagaaggtggcgaaagaggccaaggatttggcacatgaggccacgaagctggctactggcccacgcgggctgctgaaagaagatgcaaagggatgtcttcagaaatcatttagaatcctcaatgaagccaagaaattagcaaacgacgtaaaagaaaatgaagaccatttaaacggtttaaagaccagaattgaaaacgcggatgcgcgtaatggtgacctcctgaggacccttaatgatacgttggggaagctgtccgctattccgaacgatactgcagcaaagttgcaagctgtgaaagacaaggcccggcaggcaaatgacacagctaaggatgtcttggcacaaatcacagaacttcatcagaacctggatggacttaagaagaactacaacaagctagcagatagcgtagctaaaactaacgccgtcgtgaaggacccatctaagaataagattatcgcggatgcagatgcaaccgtgaagaatttagaacaagaggctgacagactgatcgacaagctgaagcccatcaaagaattagaagataatcttaaaaagaacatatcagagattaaggagctgatcaatcaggccaggaagcaagcaaactcgatcaaagttagcgtatcttctgggggcgattgtattcggacctataaaccggagattaaaaagggcagctacaataatatagtggtgaatgtgaaaaccgcggtggcggacaatctcctgttttacctggggagtgcaaaatttattgactttctggccattgagatgcggaaagggaaggtgagctttctgtgggacgtgggaagtggagtcggtcgggtggaatatccagacctcaccatagatgattcatattggtatcgcattgtggccagccgcacaggacgcaacgggacaatatctgtgagagcccttgacgggccgaaggcctctattgtaccttcgacacatcactccacgagtccccccggatacacgattttggatgtggatgcaaatgcaatgctatttgtcggggggctaaccggaaaactgaaaaaggctgacgccgtgcgagtgatcactttcaccgggtgcatgggtgaaacgtattttgacaataaacctattggcctctggaattttcgagagaaagagggcgattgtaaaggctgtactgtctctccccaggtagaagattcggaaggcaccattcaattcgacggcgaaggatatgctctggtcagtaggccgataagatggtatcctaatatcagcacagtcatgttcaaatttcgtacattttccagctctgctttactgatgtacctggccactcgcgacctgagggacttcatgtctgtggaactgacagatggccacattaaggtttcctacgatctaggtagcggaatggctagtgtggtaagtaaccagaatcacaacgatggaaagtggaagtcctttactctctcacgcattcagaaacaggcgaacatcagcatcgtggatatcgacacgaatcaggaggagaacatcgcaacatcctcgtccggaaataatttcgggctcgatttgaaagccgatgataaaatctacttcggtggactgccaacacttagaaacctgtctatgaaggctagaccagaggttaatttaaaaaaatatagcggttgtcttaaggatattgaaatttccaggaccccatacaacattcttagctcgcccgactatgtcggcgttaccaaaggatgtagcttggaaaatgtctataccgtgagttttcctaaaccaggattcgtggaactgtccccagtgcctattgatgtgggcaccgagattaacctgagcttctccactaaaaatgagtctgggattatcctgttgggatctgggggcaccccagcaccgccaagaaggaaacggagacaaacagggcaggcttattacgcaatcctgctgaatagaggacgcctggaagtccacctaagtaccggagccagaactatgcgcaaaatagtaattcggccagaacccaacttgtttcacgatggcagagagcattccgtgcacgtcgagcggactcggggaatcttcactgtccaggttgacgagaatcgacggtatatgcaaaatcttactgtggaacaacccatcgaagttaagaaactgttcgttggtggtgccccccctgaattccaaccttctcctctgcggaatataccaccctttgagggctgcatctggaatctggtgataaattccgtgccaatggacttcgctagacctgtcagttttaaaaatgccgacattggaaggtgtgctcatcagaaattgcgcgaggatgaagatggagcagctcctgccgaaatcgttatccaacctgaaccagtcccaacgcctgccttccctacacctaccccagtcctgactcacgggccctgcgccgccgagtcggaacccgccctgcttatcggaagtaagcagtttggtttatcaaggaactcccatatcgcgatcgccttcgacgatactaaggtaaagaaccgcttaactattgaattggaagtacggacagaggctgaatcgggcttgcttttctatatggcaagaattaaccatgccgatttcgccaccgtgcagctaagaaacgggctaccatactttagttacgacctcggatcgggagatacacacactatgatacccaccaaaatcaacgatggtcagtggcacaagatcaagatcatgagatctaaacaggaaggcattctttatgtggacggcgcaagtaataggactattagcccaaagaaggccgacattcttgacgtagtgggaatgctttacgtgggggggctgcccatcaactacactacccggagaatcggtccggtgacgtatagtatcgatgggtgtgtgcggaacctacatatggctgaggcccctgcggatctggagcagccaacatccagcttccacgttggaacttgttttgcaaatgcccagcgcgggacatattttgacggcaccgggtttgccaaggccgtgggcggcttcaaagtggggttggatctccttgtcgagtttgagtttagaaccaccactaccaccggagtcctcctgggcatctcttctcagaagatggatggaatgggaattgaaatgatcgatgaaaagttgatgttccacgttgataacggggctgggcggtttaccgccgtttatgacgccggcgtacccggacatctgtgcgatggacagtggcataaggtgaccgcaaacaaaattaagcatagaatagagctaaccgtcgacggaaatcaggtggaagcccagtctcccaacccggcttccacgtccgccgacacaaatgaccctgtgttcgttggcggcttcccggatgacctgaagcagttcggcctcactactagcatcccgttcaggggctgtatccgcagcctcaagctgaccaagggcacgggtaaacctctagaggttaactttgcaaaagccctggaactccgaggagtgcagcccgtctcctgccccgccaactag

SEQ ID NO: 8763 - DNA, 9687 bp, Artificial Sequence
  derived and/or modified sequence
ttccccagcagctgctgctcgctcagctcacaagccaaggccaggggacagggcggcagcgactcctctggctcccgagaagtggatccggtcgcggccactacgatgccgggagccgccggggtcctcctccttctgctgctctccggaggcctcgggggcgtacaggcgcagcggccgcagcagcagcggcagtcacaggcacatcagcaaagaggtttattccctgctgtcctgaatcttgcttctaatgctcttatcacgaccaatgcaacatgtggagaaaaaggacctgaaatgtactgcaaattggtagaacatgtccctgggcagcctgtgaggaacccgcagtgtcgaatctgcaatcaaaacagcagcaatccaaaccagagacacccgattacaaatgctattgatggaaagaacacttggtggcagagtcccagtattaagaatggaatcgaataccattatgtgacaattaccctggatttacagcaggtgttccagatcgcgtatgtgattgtgaaggcagctaactccccccggcctggaaactggattttggaacgctctcttgatgatgttgaatacaagccctggcagtatcatgctgtgacagacacggagtgcctaacgctttacaatatttatccccgcactgggccaccgtcatatgccaaagatgatgaggtcatctgcacttcattttactccaagatacaccccttagaaaatggagagattcacatctctttaatcaatgggagaccaagtgccgatgatccttctccagaactgctagaatttacctccgctcgctatattcgcctgagatttcagaggatccgcacactgaatgctgacttgatgatgtttgctcacaaagacccaagagaaattgaccccattgtcaccagaagatattactactcggtcaaggatatttcagttggagggatgtgcatctgctatggtcatgccagggcttgtccacttgatccagcgacaaataaatctcgctgtgagtgtgagcataacacatgtggcgatagctgtgatcagtgctgtccaggattccatcagaaaccctggagagctggaacttttctaactaaaactgaatgtgaagcatgcaattgtcatggaaaagctgaagaatgctattatgatgaaaatgttgccagaagaaatctgagtttgaatatacgtggaaagtacattggagggggtgtctgcattaattgtacccaaaacactgctggtataaactgcgagacatgtactgatggcttcttcagacccaaaggggtatctccaaattatccaaggccatgccagccatgtcattgcgatccaattggttccttaaatgaagtctgtgtcaaggatgagaaacatgctcgacgaggtttggcacctggatcctgtcattgcaaaactggttttggaggtgtgagctgtgatcggtgtgccaggggctacactggctacccggactgcaaagcctgtaactgcagtgggttagggagcaaaaatgaggatccttgttttggcccctgtatctgcaaggaaaatgttgaaggaggagactgtagtcgttgcaaatccggcttcttcaatttgcaagaggataattggaaaggctgcgatgagtgtttctgttcaggggtttcaaacagatgtcagagttcctactggacctatggcaaaatacaagatatgagtggctggtatctgactgaccttcctggccgcattcgagtggctccccagcaggacgacttggactcacctcagcagatcagcatcagtaacgcggaggcccggcaagccctgccgcacagctactactggagcgcgccggctccctatctgggaaacaaactcccagcagtaggaggacagttgacatttaccatatcatatgaccttgaagaagaggaagaagatacagaacgtgttctccagcttatgattatcttagagggtaatgacttgagcatcagcacagcccaagatgaggtgtacctgcacccatctgaagaacatactaatgtattgttacttaaagaagaatcatttaccatacatggcacacattttccagtccgtagaaaggaatttatgacagtgcttgcgaatttgaagagagtcctcctacaaatcacatacagctttgggatggatgccatcttcaggttgagctctgttaaccttgaatccgctgtctcctatcctactgatggaagcattgcagcagctgtagaagtgtgtcagtgcccaccagggtatactggctcctcttgtgaatcttgttggcctaggcacaggcgagttaacggcactatttttggtggcatctgtgagccatgtcagtgctttggtcatgcggagtcctgtgatgacgtcactggagaatgcctgaactgtaaggatcacacaggtggcccatattgtgataaatgtcttcctggtttctatggcgagcctactaaaggaacctctgaagactgtcaaccctgtgcctgtccactcaatatcccatccaataactttagcccaacgtgccatttagaccggagtcttggattgatctgtgatggatgccctgtcgggtacacaggaccacgctgtgagaggtgtgcagaaggctattttggacaaccctctgtacctggaggatcatgtcagccatgccaatgcaatgacaaccttgacttctccatccctggcagctgtgacagcttgtctggctcctgtctgatatgtaaaccaggtacaacaggccggtactgtgagctctgtgctgatggatattttggagatgcagttgatgcgaagaactgtcagccctgtcgctgtaatgccggtggctctttctctgaggtttgccacagtcaaactggacagtgtgagtgcagagccaacgttcagggtcagagatgtgacaaatgcaaggctgggacctttggcctacaatcagcaaggggctgtgttccctgcaactgcaattcttttgggtctaagtcattcgactgtgaagagagtggacaatgttggtgccaacctggagtcacagggaagaaatgtgaccgctgtgcccacggctatttcaacttccaagaaggaggctgcacagcttgtgaatgttctcatctgggtaataattgtgacccaaagactgggcgatgcatttgccctcccaataccattggagagaaatgttctaaatgtgcacccaatacctggggccacagcattaccactggttgtaaggcttgtaactgcagcacagtgggatccttggatttccaatgcaatgtaaatacaggccaatgcaactgtcatccaaaattctctggtgcaaaatgtacagagtgcagtcgaggtcactggaactaccctcgctgcaatctctgtgactgcttcctccctgggacagatgccacaacctgtgattcagagactaaaaaatgctcctgtagtgatcaaactgggcagtgcacttgtaaggtgaatgtggaaggcatccactgtgacagatgccggcctggcaaattcggactcgatgccaagaatccacttggctgcagcagctgctattgcttcggcactactacccagtgctctgaagcaaaaggactgatccggacgtgggtgactctgaaggctgagcagaccattctacccctggtagatgaggctctgcagcacacgaccaccaagggcattgtttttcaacatccagagattgttgcccacatggacctgatgagagaagatctccatttggaacctttttattggaaacttccagaacaatttgaaggaaagaagttgatggcctatgggggcaaactcaagtatgcaatctatttcgaggctcgggaagaaacaggtttctctacatataatcctcaagtgatcattcgaggtgggacacctactcatgctagaattatcgtcaggcatatggctgctcctctgattggccaattgacaaggcatgaaattgaaatgacagagaaagaatggaaatattatggggatgatcctcgagtccatagaactgtgacccgagaagacttcttggatatactatatgatattcattacattcttatcaaagctacttatggaaatttcatgcgacaaagcaggatttctgaaatctcaatggaggtagctgaacaaggacgtggaacaacaatgactcctccagctgacttgattgaaaaatgtgattgtcccctgggctattctggcctgtcctgtgaggcatgcttgccgggattttatcgactgcgttctcaaccaggtggccgcacccctggaccaaccctgggcacctgtgttccatgtcaatgtaatggacacagcagcctgtgtgaccctgaaacatcgatatgccagaattgtcaacatcacactgctggtgacttctgtgaacgatgtgctcttggatactatggaattgtcaagggattgccaaatgactgtcagcaatgtgcctgccctctgatttcttccagtaacaatttcagcccctcttgtgtcgcagaaggacttgacgactaccgctgcacggcttgtccacggggatatgaaggccagtactgtgaaaggtgtgcccctggctatactggcagtccaggcaaccctggaggctcctgccaagaatgtgagtgtgatccctatggctcactgcctgtgccctgtgaccctgtcacaggattctgcacgtgccgacctggagccacgggaaggaagtgtgacggctgcaagcactggcatgcacgcgagggctgggagtgtgttttttgtggagatgagtgcactggccttcttctcggtgacttggctcgcctggagcagatggtcatgagcatcaacctcactggtccgctgcctgcgccatataaaatgctgtatggtcttgaaaatatgactcaggagctaaagcacttgctgtcacctcagcgggccccagagaggcttattcagctggcagagggcaatctgaatacactcgtgaccgaaatgaacgagctgctgaccagggctaccaaagtgacagcagatggcgagcagaccggacaggatgctgagaggaccaacacaagagcaaagtccctgggagaattcattaaggagcttgcccgggatgcagaagctgtaaatgaaaaagctataaaactaaatgaaactctaggaactcgagacgaggcctttgagagaaatttggaagggcttcagaaagagattgaccagatgattaaagaactgaggaggaaaaatctagagacacaaaaggaaattgctgaagatgagttggtagctgcagaagcccttctgaaaaaagtgaagaagctgtttggagagtcccggggggaaaatgaagaaatggagaaggatctccgggaaaaactggctgactacaaaaacaaagttgatgatgcttgggaccttttgagagaagccacagataaaatcagagaagctaatcgcctatttgcagtaaatcagaaaaacatgactgcattggagaaaaagaaggaggctgttgaaagcggcaaacgacaaattgagaacactttaaaagagggcaatgacatactcgatgaagccaaccgtcttgcagatgaaatcaactccatcatagactatgttgaagacatccaaactaaattgccacctatgtctgaggagcttaatgataaaatagatgacctctcccaagaaataaaggacaggaagcttgctgagaaggtgtcccaggctgagagccacgcagctcagttgaatgactcatctgctgtccttgatggaatccttgatgaggctaaaaacatctccttcaatgccactgcagccttcaaagcttacagcaatattaaggactatattgatgaagctgagaaagttgccaaagaagccaaagatcttgcacatgaagctacaaaactggcaacaggtcctcggggtttattaaaggaagatgccaaaggctgtcttcagaaaagcttcaggattcttaacgaagccaagaagttagcaaatgatgtaaaagaaaatgaagaccatctaaatggcttaaaaaccaggatagaaaatgctgatgctagaaatggggatctcttgagaactttgaatgacactttgggaaagttatcagctattccaaatgatacagctgctaaactgcaagctgttaaggacaaagccagacaagccaacgacacagctaaagatgtactggcacagattacagagctccaccagaacctcgatggcctgaagaagaattacaataaactagcagacagcgtcgccaaaacgaatgctgtggttaaagatccttccaagaacacagttgccgatgcagatgccactgtcaaaaatttagaacaggaagctgaccggctaatagataaactcaaacccatcaaggaacttgaggataacctaaagaaaaacatctctgagataaaggaattgataaaccaagctcggaaacaagccaattctatcaaagtatctgtgtcttcaggaggtgactgcattcgaacatacaaaccagaaatcaagaaaggaagttacaataatattgttgtcaacgtaaagacagctgttgctgataacctcctcttttatcttggaagtgccaaatttattgactttctggctatagaaatgcgtaaaggcaaagtcagcttcctctgggatgttggatctggagttggacgtgtagagtacccagatttgactattgatgactcatattggtaccgtatcgtagcatcaagaactgggagaaatggaactatttctgtgagagccctggatggacccaaagccagcattgtgcccagcacacaccattcgacgtctcctccagggtacacgattctagatgtggatgcaaatgcaatgctgtttgttggtggcctgactgggaaattaaagaaggctgatgctgtacgtgtgattacattcactggctgcatgggagaaacatactttgacaacaaacctataggtttgtggaatttccgagaaaaagaaggtgactgcaaaggatgcactgtcagtcctcaggtggaagatagtgaggggactattcaatttgatggagaaggttatgcattggtcagccgtcccattcgctggtaccccaacatctccactgtcatgttcaagttcagaacattttcttcgagtgctcttctgatgtatcttgccacacgagacctgagagatttcatgagtgtggagctcactgatgggcacataaaagtcagttacgatctgggctcaggaatggcttccgttgtcagcaatcaaaaccataatgatgggaaatggaaatcattcactctgtcaagaattcaaaaacaagccaatatatcaattgtagatatagatactaatcaggaggagaatatagcaacttcgtcttctggaaacaactttggtcttgacttgaaagcagatgacaaaatatattttggtggcctgccaacgctgagaaacttgagtatgaaagcaaggccagaagtaaatctgaagaaatattccggctgcctcaaagatattgaaatttcaagaactccgtacaatatactcagtagtcccgattatgttggtgttaccaaaggatgttccctggagaatgtttacacagttagctttcctaagcctggttttgtggagctctcccctgtgccaattgatgtaggaacagaaatcaacctgtcattcagcaccaagaatgagtccggcatcattcttttgggaagtggagggacaccagcaccacctaggagaaaacgaaggcagactggacaggcctattatgcaatactcctcaacaggggccgtctggaagtgcatctctccacaggggcacgaacaatgaggaaaattgtgatcagaccagagccgaatctgtttcatgatggaagagaacattccgttcatgtagagcgaactagaggcatctttacagttcaagtggatgaaaacagaagatacatgcaaaacctgacagttgaacagcctatcgaagttaaaaagcttttcgttgggggtgctccacctgaatttcaaccttccccactcagaaatattcctccttttgaaggctgcatatggaatcttgttattaactctgtccccatggactttgcaaggcctgtgtccttcaaaaatgctgacattggtcgctgtgcccatcagaaactccgtgaagatgaagatggagcagctccagctgaaatagttatccagcctgagccagttcccaccccagcctttcctacgcccaccccagttctgacacatggtccttgtgctgcagaatcagaaccagctcttttgatagggagcaagcagttcgggctttcaagaaacagtcacattgcaattgcatttgatgacaccaaagttaaaaaccgtctcacaattgagttggaagtaagaaccgaagctgaatccggcttgcttttttacatggctcgcatcaatcatgctgattttgcaacagttcagctgagaaatggattgccctacttcagctatgacttggggagtggggacacccacaccatgatccccaccaaaatcaatgatggccagtggcacaagattaagataatgagaagtaagcaagaaggaattctttatgtagatggggcttccaacagaaccatcagtcccaaaaaagccgacatcctggatgtcgtgggaatgctgtatgttggtgggttacccatcaactacactacccgaagaattggtccagtgacctatagcattgatggctgcgtcaggaatctccacatggcagaggcccctgccgatctggaacaacccacctccagcttccatgttgggacatgttttgcaaatgctcagaggggaacatattttgacggaaccggttttgccaaagcagttggtggattcaaagtgggattggaccttcttgtagaatttgaattccgcacaactacaacgactggagttcttctggggatcagtagtcaaaaaatggatggaatgggtattgaaatgattgatgaaaagttgatgtttcatgtggacaatggtgcgggcagattcactgctgtctatgatgctggggttccagggcatttgtgtgatggacaatggcataaagtcactgccaacaagatcaaacaccgcattgagctcacagtcgatgggaaccaggtggaagcccaaagcccaaacccagcatctacatcagctgacacaaatgaccctgtgtttgttggaggcttcccagatgacctcaagcagtttggcctaacaaccagtattccgttccgaggttgcatcagatccctgaagctcaccaaaggcacaggcaagccactggaggttaattttgccaaggccctggaactgaggggcgttcaacctgtatcatgcccagccaactaataaaaataagtgtaaccccaggaagagtctgtcaaaacaagtatatcaagtaaaacaaacaaatatattttacctatatatgttaattaaactaatttgtgcatgtacatagaattctttctgtattcagatggtgctaattcagactccagactgaattttaattcaagttctttctcaagtctataaataatattaaactgattatttcattct

SEQ ID NO: 8764 - DNA, 9690 bp, Artificial Sequence
  derived and/or modified sequence
ttccccagcagctgctgctcgctcagctcacaagccaaggccaggggacagggcggcagcgactcctctggctcccgagaagtggatccggtcgcggccactacgatgccgggagccgccggggtcctcctccttctgctgctctccggaggcctcgggggcgtacaggcgcagcggccgcagcagcagcggcagtcacaggcacatcagcaaagaggtttattccctgctgtcctgaatcttgcttctaatgctcttatcacgaccaatgcaacatgtggagaaaaaggacctgaaatgtactgcaaattggtagaacatgtccctgggcagcctgtgaggaacccgcagtgtcgaatctgcaatcaaaacagcagcaatccaaaccagagacacccgattacaaatgctattgatggaaagaacacttggtggcagagtcccagtattaagaatggaatcgaataccattatgtgacaattaccctggatttacagcaggtgttccagatcgcgtatgtgattgtgaaggcagctaactccccccggcctggaaactggattttggaacgctctcttgatgatgttgaatacaagccctggcagtatcatgctgtgacagacacggagtgcctaacgctttacaatatttatccccgcactgggccaccgtcatatgccaaagatgatgaggtcatctgcacttcattttactccaagatacaccccttagaaaatggagagattcacatctctttaatcaatgggagaccaagtgccgatgatccttctccagaactgctagaatttacctccgctcgctatattcgcctgagatttcagaggatccgcacactgaatgctgacttgatgatgtttgctcacaaagacccaagagaaattgaccccattgtcaccagaagatattactactcggtcaaggatatttcagttggagggatgtgcatctgctatggtcatgccagggcttgtccacttgatccagcgacaaataaatctcgctgtgagtgtgagcataacacatgtggcgatagctgtgatcagtgctgtccaggattccatcagaaaccctggagagctggaacttttctaactaaaactgaatgtgaagcatgcaattgtcatggaaaagctgaagaatgctattatgatgaaaatgttgccagaagaaatctgagtttgaatatacgtggaaagtacattggagggggtgtctgcattaattgtacccaaaacactgctggtataaactgcgagacatgtactgatggcttcttcagacccaaaggggtatctccaaattatccaaggccatgccagccatgtcattgcgatccaattggttccttaaatgaagtctgtgtcaaggatgagaaacatgctcgacgaggtttggcacctggatcctgtcattgcaaaactggttttggaggtgtgagctgtgatcggtgtgccaggggctacactggctacccggactgcaaagcctgtaactgcagtgggttagggagcaaaaatgaggatccttgttttggcccctgtatctgcaaggaaaatgttgaaggaggagactgtagtcgttgcaaatccggcttcttcaatttgcaagaggataattggaaaggctgcgatgagtgtttctgttcaggggtttcaaacagatgtcagagttcctactggacctatggcaaaatacaagatatgagtggctggtatctgactgaccttcctggccgcattcgagtggctccccagcaggacgacttggactcacctcagcagatcagcatcagtaacgcggaggcccggcaagccctgccgcacagctactactggagcgcgccggctccctatctgggaaacaaactcccagcagtaggaggacagttgacatttaccatatcatatgaccttgaagaagaggaagaagatacagaacgtgttctccagcttatgattatcttagagggtaatgacttgagcatcagcacagcccaagatgaggtgtacctgcacccatctgaagaacatactaatgtattgttacttaaagaagaatcatttaccatacatggcacacattttccagtccgtagaaaggaatttatgacagtgcttgcgaatttgaagagagtcctcctacaaatcacatacagctttgggatggatgccatcttcaggttgagctctgttaaccttgaatccgctgtctcctatcctactgatggaagcattgcagcagctgtagaagtgtgtcagtgcccaccagggtatactggctcctcttgtgaatcttgttggcctaggcacaggcgagttaacggcactatttttggtggcatctgtgagccatgtcagtgctttggtcatgcggagtcctgtgatgacgtcactggagaatgcctgaactgtaaggatcacacaggtggcccatattgtgataaatgtcttcctggtttctatggcgagcctactaaaggaacctctgaagactgtcaaccctgtgcctgtccactcaatatcccatccaataactttagcccaacgtgccatttagaccggagtcttggattgatctgtgatggatgccctgtcgggtacacaggaccacgctgtgagaggtgtgcagaaggctattttggacaaccctctgtacctggaggatcatgtcagccatgccaatgcaatgacaaccttgacttctccatccctggcagctgtgacagcttgtctggctcctgtctgatatgtaaaccaggtacaacaggccggtactgtgagctctgtgctgatggatattttggagatgcagttgatgcgaagaactgtcagccctgtcgctgtaatgccggtggctctttctctgaggtttgccacagtcaaactggacagtgtgagtgcagagccaacgttcagggtcagagatgtgacaaatgcaaggctgggacctttggcctacaatcagcaaggggctgtgttccctgcaactgcaattcttttgggtctaagtcattcgactgtgaagagagtggacaatgttggtgccaacctggagtcacagggaagaaatgtgaccgctgtgcccacggctatttcaacttccaagaaggaggctgcacagcttgtgaatgttctcatctgggtaataattgtgacccaaagactgggcgatgcatttgccctcccaataccattggagagaaatgttctaaatgtgcacccaatacctggggccacagcattaccactggttgtaaggcttgtaactgcagcacagtgggatccttggatttccaatgcaatgtaaatacaggccaatgcaactgtcatccaaaattctctggtgcaaaatgtacagagtgcagtcgaggtcactggaactaccctcgctgcaatctctgtgactgcttcctccctgggacagatgccacaacctgtgattcagagactaaaaaatgctcctgtagtgatcaaactgggcagtgcacttgtaaggtgaatgtggaaggcatccactgtgacagatgccggcctggcaaattcggactcgatgccaagaatccacttggctgcagcagctgctattgcttcggcactactacccagtgctctgaagcaaaaggactgatccggacgtgggtgactctgaaggctgagcagaccattctacccctggtagatgaggctctgcagcacacgaccaccaagggcattgtttttcaacatccagagattgttgcccacatggacctgatgagagaagatctccatttggaacctttttattggaaacttccagaacaatttgaaggaaagaagttgatggcctatgggggcaaactcaagtatgcaatctatttcgaggctcgggaagaaacaggtttctctacatataatcctcaagtgatcattcgaggtgggacacctactcatgctagaattatcgtcaggcatatggctgctcctctgattggccaattgacaaggcatgaaattgaaatgacagagaaagaatggaaatattatggggatgatcctcgagtccatagaactgtgacccgagaagacttcttggatatactatatgatattcattacattcttatcaaagctacttatggaaatttcatgcgacaaagcaggatttctgaaatctcaatggaggtagctgaacaaggacgtggaacaacaatgactcctccagctgacttgattgaaaaatgtgattgtcccctgggctattctggcctgtcctgtgaggcatgcttgccgggattttatcgactgcgttctcaaccaggtggccgcacccctggaccaaccctgggcacctgtgttccatgtcaatgtaatggacacagcagcctgtgtgaccctgaaacatcgatatgccagaattgtcaacatcacactgctggtgacttctgtgaacgatgtgctcttggatactatggaattgtcaagggattgccaaatgactgtcagcaatgtgcctgccctctgatttcttccagtaacaatttcagcccctcttgtgtcgcagaaggacttgacgactaccgctgcacggcttgtccacggggatatgaaggccagtactgtgaaaggtgtgcccctggctatactggcagtccaggcaaccctggaggctcctgccaagaatgtgagtgtgatccctatggctcactgcctgtgccctgtgaccctgtcacaggattctgcacgtgccgacctggagccacgggaaggaagtgtgacggctgcaagcactggcatgcacgcgagggctgggagtgtgttttttgtggagatgagtgcactggccttcttctcggtgacttggctcgcctggagcagatggtcatgagcatcaacctcactggtccgctgcctgcgccatataaaatgctgtatggtcttgaaaatatgactcaggagctaaagcacttgctgtcacctcagcgggccccagagaggcttattcagctggcagagggcaatctgaatacactcgtgaccgaaatgaacgagctgctgaccagggctaccaaagtgacagcagatggcgagcagaccggacaggatgctgagaggaccaacacaagagcaaagtccctgggagaattcattaaggagcttgcccgggatgcagaagctgtaaatgaaaaagctataaaactaaatgaaactctaggaactcgagacgaggcctttgagagaaatttggaagggcttcagaaagagattgaccagatgattaaagaactgaggaggaaaaatctagagacacaaaaggaaattgctgaagatgagttggtagctgcagaagcccttctgaaaaaagtgaagaagctgtttggagagtcccggggggaaaatgaagaaatggagaaggatctccgggaaaaactggctgactacaaaaacaaagttgatgatgcttgggaccttttgagagaagccacagataaaatcagagaagctaatcgcctatttgcagtaaatcagaaaaacatgactgcattggagaaaaagaaggaggctgttgaaagcggcaaacgacaaattgagaacactttaaaagagggcaatgacatactcgatgaagccaaccgtcttgcagatgaaatcaactccatcatagactatgttgaagacatccaaactaaattgccacctatgtctgaggagcttaatgataaaatagatgacctctcccaagaaataaaggacaggaagcttgctgagaaggtgtcccaggctgagagccacgcagctcagttgaatgactcatctgctgtccttgatggaatccttgatgaggctaaaaacatctccttcaatgccactgcagccttcaaagcttacagcaatattaaggactatattgatgaagctgagaaagttgccaaagaagccaaagatcttgcacatgaagctacaaaactggcaacaggtcctcggggtttattaaaggaagatgccaaaggctgtcttcagaaaagcttcaggattcttaacgaagccaagaagttagcaaatgatgtaaaagaaaatgaagaccatctaaatggcttaaaaaccaggatagaaaatgctgatgctagaaatggggatctcttgagaactttgaatgacactttgggaaagttatcagctattccaaatgatacagctgctaaactgcaagctgttaaggacaaagccagacaagccaacgacacagctaaagatgtactggcacagattacagagctccaccagaacctcgatggcctgaagaagaattacaataaactagcagacagcgtcgccaaaacgaatgctgtggttaaagatccttccaagaacaaaatagttgccgatgcagatgccactgtcaaaaatttagaacaggaagctgaccggctaatagataaactcaaacccatcaaggaacttgaggataacctaaagaaaaacatctctgagataaaggaattgataaaccaagctcggaaacaagccaattctatcaaagtatctgtgtcttcaggaggtgactgcattcgaacatacaaaccagaaatcaagaaaggaagttacaataatattgttgtcaacgtaaagacagctgttgctgataacctcctcttttatcttggaagtgccaaatttattgactttctggctatagaaatgcgtaaaggcaaagtcagcttcctctgggatgttggatctggagttggacgtgtagagtacccagatttgactattgatgactcatattggtaccgtatcgtagcatcaagaactgggagaaatggaactatttctgtgagagccctggatggacccaaagccagcattgtgcccagcacacaccattcgacgtctcctccagggtacacgattctagatgtggatgcaaatgcaatgctgtttgttggtggcctgactgggaaattaaagaaggctgatgctgtacgtgtgattacattcactggctgcatgggagaaacatactttgacaacaaacctataggtttgtggaatttccgagaaaaagaaggtgactgcaaaggatgcactgtcagtcctcaggtggaagatagtgaggggactattcaatttgatggagaaggttatgcattggtcagccgtcccattcgctggtaccccaacatctccactgtcatgttcaagttcagaacattttcttcgagtgctcttctgatgtatcttgccacacgagacctgagagatttcatgagtgtggagctcactgatgggcacataaaagtcagttacgatctgggctcaggaatggcttccgttgtcagcaatcaaaaccataatgatgggaaatggaaatcattcactctgtcaagaattcaaaaacaagccaatatatcaattgtagatatagatactaatcaggaggagaatatagcaacttcgtcttctggaaacaactttggtcttgacttgaaagcagatgacaaaatatattttggtggcctgccaacgctgagaaacttgagactattcaataggccagaagtaaatctgaagaaatattccggctgcctcaaagatattgaaatttcaagaactccgtacaatatactcagtagtcccgattatgttggtgttaccaaaggatgttccctggagaatgtttacacagttagctttcctaagcctggttttgtggagctctcccctgtgccaattgatgtaggaacagaaatcaacctgtcattcagcaccaagaatgagtccggcatcattcttttgggaagtggagggacaccagcaccacctaggagaaaacgaaggcagactggacaggcctattatgcaatactcctcaacaggggccgtctggaagtgcatctctccacaggggcacgaacaatgaggaaaattgtgatcagaccagagccgaatctgtttcatgatggaagagaacattccgttcatgtagagcgaactagaggcatctttacagttcaagtggatgaaaacagaagatacatgcaaaacctgacagttgaacagcctatcgaagttaaaaagcttttcgttgggggtgctccacctgaatttcaaccttccccactcagaaatattcctccttttgaaggctgcatatggaatcttgttattaactctgtccccatggactttgcaaggcctgtgtccttcaaaaatgctgacattggtcgctgtgcccatcagaaactccgtgaagatgaagatggagcagctccagctgaaatagttatccagcctgagccagttcccaccccagcctttcctacgcccaccccagttctgacacatggtccttgtgctgcagaatcagaaccagctcttttgatagggagcaagcagttcgggctttcaagaaacagtcacattgcaattgcatttgatgacaccaaagttaaaaaccgtctcacaattgagttggaagtaagaaccgaagctgaatccggcttgcttttttacatggctcgcatcaatcatgctgattttgcaacagttcagctgagaaatggattgccctacttcagctatgacttggggagtggggacacccacaccatgatccccaccaaaatcaatgatggccagtggcacaagattaagataatgagaagtaagcaagaaggaattctttatgtagatggggcttccaacagaaccatcagtcccaaaaaagccgacatcctggatgtcgtgggaatgctgtatgttggtgggttacccatcaactacactacccgaagaattggtccagtgacctatagcattgatggctgcgtcaggaatctccacatggcagaggcccctgccgatctggaacaacccacctccagcttccatgttgggacatgttttgcaaatgctcagaggggaacatattttgacggaaccggttttgccaaagcagttggtggattcaaagtgggattggaccttcttgtagaatttgaattccgcacaactacaacgactggagttcttctggggatcagtagtcaaaaaatggatggaatgggtattgaaatgattgatgaaaagttgatgtttcatgtggacaatggtgcgggcagattcactgctgtctatgatgctggggttccagggcatttgtgtgatggacaatggcataaagtcactgccaacaagatcaaacaccgcattgagctcacagtcgatgggaaccaggtggaagcccaaagcccaaacccagcatctacatcagctgacacaaatgaccctgtgtttgttggaggcttcccagatgacctcaagcagtttggcctaacaaccagtattccgttccgaggttgcatcagatccctgaagctcaccaaaggcacaggcaagccactggaggttaattttgccaaggccctggaactgaggggcgttcaacctgtatcatgcccagccaactaataaaaataagtgtaaccccaggaagagtctgtcaaaacaagtatatcaagtaaaacaaacaaatatattttacctatatatgttaattaaactaatttgtgcatgtacatagaattctttctgtattcagatggtgctaattcagactccagactgaattttaattcaagttctttctcaagtctataaataatattaaactgattatttcattct

SEQ ID NO: 8765 - DNA, 9640 bp, Artificial Sequence
  derived and/or modified sequence
cagcgactcctctggctcccgagaagtggatccggtcgcggccactacgatgccgggagccgccggggtcctcctccttctgctgctctccggaggcctcgggggcgtacaggcgcagcggccgcagcagcagcggcagtcacaggcacatcagcaaagaggtttattccctgctgtcctgaatcttgcttctaatgctcttatcacgaccaatgcaacatgtggagaaaaaggacctgaaatgtactgcaaattggtagaacatgtccctgggcagcctgtgaggaacccgcagtgtcgaatctgcaatcaaaacagcagcaatccaaaccagagacacccgattacaaatgctattgatggaaagaacacttggtggcagagtcccagtattaagaatggaatcgaataccattatgtgacaattaccctggatttacagcaggtgttccagatcgcgtatgtgattgtgaaggcagctaactccccccggcctggaaactggattttggaacgctctcttgatgatgttgaatacaagccctggcagtatcatgctgtgacagacacggagtgcctaacgctttacaatatttatccccgcactgggccaccgtcatatgccaaagatgatgaggtcatctgcacttcattttactccaagatacaccccttagaaaatggagagattcacatctctttaatcaatgggagaccaagtgccgatgatccttctccagaactgctagaatttacctccgctcgctatattcgcctgagatttcagaggatccgcacactgaatgctgacttgatgatgtttgctcacaaagacccaagagaaattgaccccattgtcaccagaagatattactactcggtcaaggatatttcagttggagggatgtgcatctgctatggtcatgccagggcttgtccacttgatccagcgacaaataaatctcgctgtgagtgtgagcataacacatgtggcgatagctgtgatcagtgctgtccaggattccatcagaaaccctggagagctggaacttttctaactaaaactgaatgtgaagcatgcaattgtcatggaaaagctgaagaatgctattatgatgaaaatgttgccagaagaaatctgagtttgaatatacgtggaaagtacattggagggggtgtctgcattaattgtacccaaaacactgctggtataaactgcgagacatgtactgatggcttcttcagacccaaaggggtatctccaaattatccaaggccatgccagccatgtcattgcgatccaattggttccttaaatgaagtctgtgtcaaggatgagaaacatgctcgacgaggtttggcacctggatcctgtcattgcaaaactggttttggaggtgtgagctgtgatcggtgtgccaggggctacactggctacccggactgcaaagcctgtaactgcagtgggttagggagcaaaaatgaggatccttgttttggcccctgtatctgcaaggaaaatgttgaaggaggagactgtagtcgttgcaaatccggcttcttcaatttgcaagaggataattggaaaggctgcgatgagtgtttctgttcaggggtttcaaacagatgtcagagttcctactggacctatggcaaaatacaagatatgagtggctggtatctgactgaccttcctggccgcattcgagtggctccccagcaggacgacttggactcacctcagcagatcagcatcagtaacgcggaggcccggcaagccctgccgcacagctactactggagcgcgccggctccctatctgggaaacaaactcccagcagtaggaggacagttgacatttaccatatcatatgaccttgaagaagaggaagaagatacagaacgtgttctccagcttatgattatcttagagggtaatgacttgagcatcagcacagcccaagatgaggtgtacctgcacccatctgaagaacatactaatgtattgttacttaaagaagaatcatttaccatacatggcacacattttccagtccgtagaaaggaatttatgacagtgcttgcgaatttgaagagagtcctcctacaaatcacatacagctttgggatggatgccatcttcaggttgagctctgttaaccttgaatccgctgtctcctatcctactgatggaagcattgcagcagctgtagaagtgtgtcagtgcccaccagggtatactggctcctcttgtgaatcttgttggcctaggcacaggcgagttaacggcactatttttggtggcatctgtgagccatgtcagtgctttggtcatgcggagtcctgtgatgacgtcactggagaatgcctgaactgtaaggatcacacaggtggcccatattgtgataaatgtcttcctggtttctatggcgagcctactaaaggaacctctgaagactgtcaaccctgtgcctgtccactcaatatcccatccaataactttagcccaacgtgccatttagaccggagtcttggattgatctgtgatggatgccctgtcgggtacacaggaccacgctgtgagaggtgtgcagaaggctattttggacaaccctctgtacctggaggatcatgtcagccatgccaatgcaatgacaaccttgacttctccatccctggcagctgtgacagcttgtctggctcctgtctgatatgtaaaccaggtacaacaggccggtactgtgagctctgtgctgatggatattttggagatgcagttgatgcgaagaactgtcagccctgtcgctgtaatgccggtggctctttctctgaggtttgccacagtcaaactggacagtgtgagtgcagagccaacgttcagggtcagagatgtgacaaatgcaaggctgggacctttggcctacaatcagcaaggggctgtgttccctgcaactgcaattcttttgggtctaagtcattcgactgtgaagagagtggacaatgttggtgccaacctggagtcacagggaagaaatgtgaccgctgtgcccacggctatttcaacttccaagaaggaggctgcacagcttgtgaatgttctcatctgggtaataattgtgacccaaagactgggcgatgcatttgccctcccaataccattggagagaaatgttctaaatgtgcacccaatacctggggccacagcattaccactggttgtaaggcttgtaactgcagcacagtgggatccttggatttccaatgcaatgtaaatacaggccaatgcaactgtcatccaaaattctctggtgcaaaatgtacagagtgcagtcgaggtcactggaactaccctcgctgcaatctctgtgactgcttcctccctgggacagatgccacaacctgtgattcagagactaaaaaatgctcctgtagtgatcaaactgggcagtgcacttgtaaggtgaatgtggaaggcatccactgtgacagatgccggcctggcaaattcggactcgatgccaagaatccacttggctgcagcagctgctattgcttcggcactactacccagtgctctgaagcaaaaggactgatccggacgtgggtgactctgaaggctgagcagaccattctacccctggtagatgaggctctgcagcacacgaccaccaagggcattgtttttcaacatccagagattgttgcccacatggacctgatgagagaagatctccatttggaacctttttattggaaacttccagaacaatttgaaggaaagaagttgatggcctatgggggcaaactcaagtatgcaatctatttcgaggctcgggaagaaacaggtttctctacatataatcctcaagtgatcattcgaggtgggacacctactcatgctagaattatcgtcaggcatatggctgctcctctgattggccaattgacaaggcatgaaattgaaatgacagagaaagaatggaaatattatggggatgatcctcgagtccatagaactgtgacccgagaagacttcttggatatactatatgatattcattacattcttatcaaagctacttatggaaatttcatgcgacaaagcaggatttctgaaatctcaatggaggtagctgaacaaggacgtggaacaacaatgactcctccagctgacttgattgaaaaatgtgattgtcccctgggctattctggcctgtcctgtgaggcatgcttgccgggattttatcgactgcgttctcaaccaggtggccgcacccctggaccaaccctgggcacctgtgttccatgtcaatgtaatggacacagcagcctgtgtgaccctgaaacatcgatatgccagaattgtcaacatcacactgctggtgacttctgtgaacgatgtgctcttggatactatggaattgtcaagggattgccaaatgactgtcagcaatgtgcctgccctctgatttcttccagtaacaatttcagcccctcttgtgtcgcagaaggacttgacgactaccgctgcacggcttgtccacggggatatgaaggccagtactgtgaaaggtgtgcccctggctatactggcagtccaggcaaccctggaggctcctgccaagaatgtgagtgtgatccctatggctcactgcctgtgccctgtgaccctgtcacaggattctgcacgtgccgacctggagccacgggaaggaagtgtgacggctgcaagcactggcatgcacgcgagggctgggagtgtgttttttgtggagatgagtgcactggccttcttctcggtgacttggctcgcctggagcagatggtcatgagcatcaacctcactggtccgctgcctgcgccatataaaatgctgtatggtcttgaaaatatgactcaggagctaaagcacttgctgtcacctcagcgggccccagagaggcttattcagctggcagagggcaatctgaatacactcgtgaccgaaatgaacgagctgctgaccagggctaccaaagtgacagcagatggcgagcagaccggacaggatgctgagaggaccaacacaagagcaaagtccctgggagaattcattaaggagcttgcccgggatgcagaagctgtaaatgaaaaagctataaaactaaatgaaactctaggaactcgagacgaggcctttgagagaaatttggaagggcttcagaaagagattgaccagatgattaaagaactgaggaggaaaaatctagagacacaaaaggaaattgctgaagatgagttggtagctgcagaagcccttctgaaaaaagtgaagaagctgtttggagagtcccggggggaaaatgaagaaatggagaaggatctccgggaaaaactggctgactacaaaaacaaagttgatgatgcttgggaccttttgagagaagccacagataaaatcagagaagctaatcgcctatttgcagtaaatcagaaaaacatgactgcattggagaaaaagaaggaggctgttgaaagcggcaaacgacaaattgagaacactttaaaagagggcaatgacatactcgatgaagccaaccgtcttgcagatgaaatcaactccatcatagactatgttgaagacatccaaactaaattgccacctatgtctgaggagcttaatgataaaatagatgacctctcccaagaaataaaggacaggaagcttgctgagaaggtgtcccaggctgagagccacgcagctcagttgaatgactcatctgctgtccttgatggaatccttgatgaggctaaaaacatctccttcaatgccactgcagccttcaaagcttacagcaatattaaggactatattgatgaagctgagaaagttgccaaagaagccaaagatcttgcacatgaagctacaaaactggcaacaggtcctcggggtttattaaaggaagatgccaaaggctgtcttcagaaaagcttcaggattcttaacgaagccaagaagttagcaaatgatgtaaaagaaaatgaagaccatctaaatggcttaaaaaccaggatagaaaatgctgatgctagaaatggggatctcttgagaactttgaatgacactttgggaaagttatcagctattccaaatgatacagctgctaaactgcaagctgttaaggacaaagccagacaagccaacgacacagctaaagatgtactggcacagattacagagctccaccagaacctcgatggcctgaagaagaattacaataaactagcagacagcgtcgccaaaacgaatgctgtggttaaagatccttccaagaacaaaatcattgccgatgcagatgccactgtcaaaaatttagaacaggaagctgaccggctaatagataaactcaaacccatcaaggaacttgaggataacctaaagaaaaacatctctgagataaaggaattgataaaccaagctcggaaacaagccaattctatcaaagtatctgtgtcttcaggaggtgactgcattcgaacatacaaaccagaaatcaagaaaggaagttacaataatattgttgtcaacgtaaagacagctgttgctgataacctcctcttttatcttggaagtgccaaatttattgactttctggctatagaaatgcgtaaaggcaaagtcagcttcctctgggatgttggatctggagttggacgtgtagagtacccagatttgactattgatgactcatattggtaccgtatcgtagcatcaagaactgggagaaatggaactatttctgtgagagccctggatggacccaaagccagcattgtgcccagcacacaccattcgacgtctcctccagggtacacgattctagatgtggatgcaaatgcaatgctgtttgttggtggcctgactgggaaattaaagaaggctgatgctgtacgtgtgattacattcactggctgcatgggagaaacatactttgacaacaaacctataggtttgtggaatttccgagaaaaagaaggtgactgcaaaggatgcactgtcagtcctcaggtggaagatagtgaggggactattcaatttgatggagaaggttatgcattggtcagccgtcccattcgctggtaccccaacatctccactgtcatgttcaagttcagaacattttcttcgagtgctcttctgatgtatcttgccacacgagacctgagagatttcatgagtgtggagctcactgatgggcacataaaagtcagttacgatctgggctcaggaatggcttccgttgtcagcaatcaaaaccataatgatgggaaatggaaatcattcactctgtcaagaattcaaaaacaagccaatatatcaattgtagatatagatactaatcaggaggagaatatagcaacttcgtcttctggaaacaactttggtcttgacttgaaagcagatgacaaaatatattttggtggcctgccaacgctgagaaacttgagtatgaaagcaaggccagaagtaaatctgaagaaatattccggctgcctcaaagatattgaaatttcaagaactccgtacaatatactcagtagtcccgattatgttggtgttaccaaaggatgttccctggagaatgtttacacagttagctttcctaagcctggttttgtggagctctcccctgtgccaattgatgtaggaacagaaatcaacctgtcattcagcaccaagaatgagtccggcatcattcttttgggaagtggagggacaccagcaccacctaggagaaaacgaaggcagactggacaggcctattatgcaatactcctcaacaggggccgtctggaagtgcatctctccacaggggcacgaacaatgaggaaaattgtgatcagaccagagccgaatctgtttcatgatggaagagaacattccgttcatgtagagcgaactagaggcatctttacagttcaagtggatgaaaacagaagatacatgcaaaacctgacagttgaacagcctatcgaagttaaaaagcttttcgttgggggtgctccacctgaatttcaaccttccccactcagaaatattcctccttttgaaggctgcatatggaatcttgttattaactctgtccccatggactttgcaaggcctgtgtccttcaaaaatgctgacattggtcgctgtgcccatcagaaactccgtgaagatgaagatggagcagctccagctgaaatagttatccagcctgagccagttcccaccccagcctttcctacgcccaccccagttctgacacatggtccttgtgctgcagaatcagaaccagctcttttgatagggagcaagcagttcgggctttcaagaaacagtcacattgcaattgcatttgatgacaccaaagttaaaaaccgtctcacaattgagttggaagtaagaaccgaagctgaatccggcttgcttttttacatggctcgcatcaatcatgctgattttgcaacagttcagctgagaaatggattgccctacttcagctatgacttggggagtggggacacccacaccatgatccccaccaaaatcaatgatggccagtggcacaagattaagataatgagaagtaagcaagaaggaattctttatgtagatggggcttccaacagaaccatcagtcccaaaaaagccgacatcctggatgtcgtgggaatgctgtatgttggtgggttacccatcaactacactacccgaagaattggtccagtgacctatagcattgatggctgcgtcaggaatctccacatggcagaggcccctgccgatctggaacaacccacctccagcttccatgttgggacatgttttgcaaatgctcagaggggaacatattttgacggaaccggttttgccaaagcagttggtggattcaaagtgggattggaccttcttgtagaatttgaattccgcacaactacaacgactggagttcttctggggatcagtagtcaaaaaatggatggaatgggtattgaaatgattgatgaaaagttgatgtttcatgtggacaatggtgcgggcagattcactgctgtctatgatgctggggttccagggcatttgtgtgatggacaatggcataaagtcactgccaacaagatcaaacaccgcattgagctcacagtcgatgggaaccaggtggaagcccaaagcccaaacccagcatctacatcagctgacacaaatgaccctgtgtttgttggaggcttcccagatgacctcaagcagtttggcctaacaaccagtattccgttccgaggttgcatcagatccctgaagctcaccaaaggcacaggcaagccactggaggttaattttgccaaggccctggaactgaggggcgttcaacctgtatcatgcccagccaactaataaaaataagtgtaaccccaggaagagtctgtcaaaacaagtatatcaagtaaaacaaacaaatatattttacctatatatgttaattaaactaatttgtgcatgtacatagaattctttctgtattcagatggtgctaattcagactccagactgaattttaattcaagttctttctcaagtctataaataatattaaactgattatttcattctaaataa

SEQ ID NO: 8766 - DNA, 9366 bp, Artificial Sequence
  derived and/or modified sequence
atgcctggagctgctggggtgctgctgctgctgctgctgagcggcggcctgggcggcgtgcaggcccagaggccccagcagcagaggcagagccaggcccaccagcagaggggcctcttccctgctgtgctgaacctggccagcaatgccctgatcaccaccaatgccacctgtggggagaagggccctgagatgtactgcaagctggtggagcacgtgcccggccagcctgtgaggaacccccagtgccgcatctgcaaccagaacagcagcaaccccaaccagaggcaccccatcaccaatgccattgatggcaagaacacctggtggcagagccccagcatcaagaatggaattgagtaccactacgtgaccatcaccctggacctgcagcaggtgttccagatcgcctacgtgattgtgaaggccgccaacagccccaggcctggcaactggatcctggagaggagcctggatgatgtggagtacaagccctggcagtaccacgctgtgacagacacagaatgtctgaccctgtacaacatctaccccaggacaggcccccccagctatgccaaggatgatgaagtcatctgcaccagcttctacagcaagatccaccccctggagaatggagagatccacatcagcctcatcaatggccggcccagcgcagatgaccccagccctgagctgctggagttcaccagcgcccgctacatccggctgcgcttccagaggatccgcaccctgaatgctgacctgatgatgtttgcccacaaggacccccgggagattgaccccatcgtgacccggcgctactactacagcgtgaaggacatctctgtgggcggcatgtgcatctgctacggccacgcccgggcctgccccctggaccctgccaccaacaagagccgctgtgaatgtgagcacaacacctgtggggacagctgtgaccagtgctgccccggcttccaccagaagccctggagggctggcaccttcctgaccaagacagaatgtgaggcctgcaactgccacggcaaggccgaggagtgctactatgatgaaaatgtggcccggaggaacctgagcctgaacatccggggcaagtacatcggcggcggcgtgtgcatcaactgcacccagaacacagctggcatcaactgtgagacctgcacagatggcttcttccggcccaagggcgtgagccccaactacccccggccctgccagccctgccactgtgaccccatcggcagcctgaatgaggtgtgtgtgaaggatgagaagcacgcccggcggggcctggcccctggcagctgccactgcaagacaggctttggaggagtgtcctgtgacagatgtgcccggggctacacaggctacccagactgcaaggcctgcaactgcagcggcctgggcagcaagaatgaagacccctgcttcggcccctgcatctgcaaggaaaatgtggagggcggggactgcagccgctgcaagagcggcttcttcaacctgcaggaggacaactggaagggctgtgatgagtgcttctgcagcggcgtgagcaaccgctgccagagcagctactggacctacggcaagatccaggacatgagcggctggtacctgacagacctgcccggccgcatccgggtggccccccagcaggatgacctggacagcccccagcagatcagcatcagcaatgctgaggcccggcaggccctgccccacagctactactggagcgccccagccccctacctgggcaacaagctgcctgctgtgggcggccagctgaccttcaccatctcctatgacctggaggaggaggaggaggacacagagcgggtgctgcagctgatgatcatcctggagggcaatgacctgagcatcagcacagcccaggatgaggtgtacctgcaccccagcgaggagcacaccaacgtgctgctgctgaaggaggagagcttcaccatccacggcacccacttccctgtgcggaggaaggagttcatgacagtgctggccaacctgaagagggtgctgctgcagatcacctacagctttggcatggatgccatcttccggctgagctctgtgaacctggagagcgctgtgtcctaccccacagatggcagcattgctgctgctgtggaggtgtgccagtgccccccaggctacacaggcagcagctgtgagagctgctggcccaggcacagaagagtgaatggcaccatctttggaggcatctgtgagccctgccagtgcttcggccatgctgagagctgtgatgatgtgactggagagtgcctgaactgcaaggaccacactggaggcccctactgtgacaagtgcctgcccggcttctatggagagcccaccaagggcaccagcgaggactgccagccctgtgcctgccccctgaacatccccagcaacaacttcagccccacctgccacctggacaggagcctgggcctcatctgtgatggctgccctgtgggctacacaggcccccgctgtgagcgctgtgccgagggctacttcggccagcccagcgtgcctgggggcagctgccagccctgccagtgcaatgacaacctggacttcagcatccctggcagctgtgacagcctgagcggcagctgcctgatctgcaagccaggcaccaccggccgctactgtgagctgtgtgctgatggctactttggagatgctgtggatgccaagaactgccagccctgccgctgcaatgctgggggcagcttcagcgaggtgtgccacagccagacaggccagtgtgagtgccgggccaacgtgcagggccagagatgtgacaagtgcaaggccggcaccttcggcctgcagagcgcccggggctgtgtgccctgcaactgcaacagctttggcagcaagagctttgactgtgaggagagcggccagtgctggtgccagcccggggtgacaggcaagaagtgtgacagatgtgcccacggctacttcaacttccaggagggcggctgcacagcctgtgaatgtagccacctgggcaacaactgtgaccccaagacaggccgctgcatctgcccccccaacaccatcggggagaagtgcagcaaatgtgcccccaacacctggggccacagcatcaccaccggctgcaaggcctgcaactgcagcacagtgggcagcctggacttccagtgcaatgtgaacacaggccagtgcaactgccaccccaagttcagcggggccaagtgcacagagtgcagccggggccactggaactacccccgctgcaacctgtgtgactgcttcctgcctggaacagatgccaccacctgtgacagcgagaccaagaagtgcagctgcagcgaccagacaggccagtgcacctgcaaggtgaatgtggagggcatccactgtgaccgctgcaggcctgggaagtttggcctggatgccaagaaccccctgggctgcagcagctgctactgcttcggcaccaccacccagtgcagcgaggccaagggcctcatccgcacctgggtgaccctgaaggccgagcagaccatcctgcccctggtggatgaggccctgcagcacaccaccaccaagggcatcgtgttccagcaccctgagatcgtggcccacatggacctgatgagggaggacctgcacctggagcccttctactggaagctgcctgagcagtttgagggcaagaagctgatggcctatggaggcaagctgaagtatgccatctactttgaggcccgggaggagaccggcttcagcacctacaacccccaggtgatcatccggggcggcacccccacccacgcccgcatcatcgtgcgccacatggccgcccccctcatcggccagctgaccaggcatgaaattgagatgacagagaaggagtggaagtactatggagatgacccccgggtgcacaggacagtgacccgggaggacttcctggacatcctgtatgacatccactacatcctgatcaaggccacctacggcaacttcatgaggcagagccgcatcagcgagatctccatggaggtggccgagcagggccggggcaccaccatgaccccacctgctgacctgattgaaaaatgtgactgccccctgggctacagcggcctgagctgtgaggcctgcctgcccggcttctaccgcctgcggagccagcccggcggccgcaccccaggccccaccctgggcacctgtgtgccctgccagtgcaatggccacagcagcctgtgtgaccctgagaccagcatctgccagaactgccagcaccacacagctggggacttctgtgagcgctgtgccctgggctactacggcatcgtgaagggcctgcccaatgactgccagcagtgtgcctgccccctcatcagcagcagcaacaacttcagccccagctgtgtggccgagggcctggatgactaccgctgcacagcctgcccccggggctatgagggccagtactgtgagcgctgtgcccctggctacacaggcagccctggcaaccctgggggcagctgccaggagtgtgaatgtgacccctacggcagcctgcctgtgccctgtgaccctgtgacaggcttctgcacctgcaggcctggggccactggaagaaaatgtgatggctgcaagcactggcacgcccgggagggctgggagtgtgtgttctgtggagatgaatgtacaggcctgctgctgggggacctggcccggctggagcagatggtgatgagcatcaacctgaccggccccctgcctgccccctacaagatgctgtatggcctggagaacatgacccaggagctgaagcacctgctgagcccccagagggcccctgagcggctcatccagctggccgagggcaacctgaacaccctggtgacagagatgaatgagctgctgacccgggccaccaaggtgacagcagatggagagcagacaggccaggatgctgagaggaccaacacccgggccaagagcctgggggagttcatcaaggagctggccagagatgctgaggccgtgaatgagaaggccatcaagctgaatgagaccctgggcaccagagatgaggcctttgagaggaacctggagggcctgcagaaggagattgaccagatgatcaaggagctgcggaggaagaacctggagacccagaaggagattgctgaagatgagctggtggccgctgaggccctgctgaagaaggtgaagaagctgtttggagagagcagaggagaaaatgaggagatggagaaggacctgcgggagaagctggccgactacaagaacaaggtggatgatgcctgggacctgctgcgggaggccacagacaagatccgggaggccaacagactctttgctgtgaaccagaagaacatgacagccctggagaagaagaaggaggccgtggagagcggcaagaggcagatcgagaacaccctgaaggagggcaatgacatcctggatgaggccaaccggctggctgatgagatcaacagcatcattgattatgtggaggacatccagaccaagctgccccccatgtctgaggagctgaatgacaagattgatgacctgagccaggagatcaaggacaggaagctggccgagaaggtgtcccaggccgagagccatgctgcccagctgaatgacagcagcgctgtgctggatggcatcctggatgaggccaagaacatctccttcaatgccacagctgccttcaaggcctacagcaacatcaaggactacattgatgaggccgagaaggtggccaaggaggccaaggacctggcccacgaggccaccaagctggccaccggcccccggggcctgctgaaggaggatgccaagggctgcctgcagaagagcttccgcatcctgaatgaggccaagaagctggccaatgatgtgaaggaaaatgaagaccacctgaatggcctgaagaccagaattgaaaatgctgatgccagaaatggagacctgctgcggaccctgaatgacaccctgggcaagctgagcgccatccccaatgacacagctgccaagctgcaggccgtgaaggacaaggcccggcaggccaatgacacagccaaggatgtgctggcccagatcacagagctgcaccagaacctggatggcctgaagaagaactacaacaagctggccgacagcgtggccaagaccaatgctgtggtgaaggaccccagcaagaacacagtggctgatgctgatgccaccgtgaagaacctggagcaggaggccgaccggctgattgacaagctgaagcccatcaaggagctggaggacaacctgaagaagaacatcagcgagatcaaggagctgatcaaccaggccaggaagcaggccaacagcatcaaggtgtctgtgtcctctggaggagactgcatccgcacctacaagccagagatcaagaagggcagctacaacaacatcgtggtgaatgtgaagacagctgtggccgacaacctgctcttctacctgggcagcgccaagttcatcgacttcctggccatcgagatgaggaagggcaaggtgtccttcctgtgggatgtgggcagcggcgtgggccgggtggagtacccagacctgaccattgatgacagctactggtacagaattgtggccagcaggactggaagaaatggcaccatctctgtgcgggccctggatggccccaaggccagcatcgtgcccagcacccaccacagcaccagccccccaggctacaccatcctggatgtggatgccaatgccatgctgtttgtgggcggcctgaccgggaagctgaagaaggcagatgctgtgcgggtcatcaccttcaccggctgcatgggagagacctactttgacaacaagcccatcggcctgtggaacttccgggagaaggagggggactgcaagggctgcaccgtgagcccccaggtggaggacagcgagggcaccatccagtttgatggagagggctacgccctggtgtcccggcccatccgctggtaccccaacatcagcacagtgatgttcaagttccgcaccttcagcagcagcgccctgctgatgtacctggccacccgggacctgcgggacttcatgtctgtggagctgacagatggccacatcaaggtgtcctatgacctgggcagcggcatggcctctgtggtgagcaaccagaaccacaatgatggcaagtggaagagcttcaccctgagccgcatccagaagcaggccaacatcagcatcgtggacatcgacaccaaccaggaggagaacatcgccaccagcagcagcggcaacaactttggcctggacctgaaggcagatgacaagatctactttggaggcctgcccaccctgaggaacctgtccatgaaggcccggcctgaggtgaacctgaagaagtacagcggctgcctgaaggacatcgagatcagcaggaccccctacaacatcctgagcagcccagactatgtgggcgtgaccaagggctgcagcctggagaatgtgtacacagtgtccttccccaagccaggctttgtggagctgagccctgtgcccattgatgtgggcacagagatcaacctgtccttcagcaccaagaatgaaagtggcatcatcctgctgggcagcggcggcaccccagccccacccaggaggaagaggcggcagacaggccaggcctactatgccatcctgctgaacagaggccgcctggaggtgcacctgagcactggagcccggaccatgaggaagatcgtcatccggcctgagcccaacctcttccatgatggccgggagcacagcgtgcacgtggagaggacccggggcatcttcaccgtgcaggtggatgagaacagacgctacatgcagaacctgactgtggagcagcccatcgaggtgaagaagctgtttgtgggcggggcccctcctgagttccagcccagccccctgaggaacatccccccatttgagggctgcatctggaacctggtgatcaacagcgtgcccatggactttgcccggcctgtgtccttcaagaatgctgacatcggccgctgtgcccaccagaagctgcgggaggatgaagatggagctgccccagctgagatcgtcatccagcctgagcctgtgcccaccccagccttccccacccccacccctgtgctgacccacggcccctgtgccgctgagagcgagcccgccctgctgattggcagcaagcagtttggcctgagcaggaacagccacatcgccatcgcctttgatgacaccaaggtgaagaaccggctgaccatcgagctggaggtgaggacagaggccgagagcggcctgctcttctacatggcccgcatcaaccacgccgactttgccaccgtgcagctgagaaatggcctgccctacttctcctatgacctgggcagcggggacacccacaccatgatccccaccaagatcaatgatggccagtggcacaagatcaagatcatgaggagcaagcaggagggcatcctgtatgtggatggagccagcaacagaaccatcagccccaagaaggctgacatcctggatgtggtgggcatgctgtatgtgggcggcctgcccatcaactacaccacccggcgcatcggccctgtgacctacagcattgatggctgtgtgaggaacctgcacatggccgaggccccagctgacctggagcagcccaccagcagcttccacgtgggcacctgctttgccaatgcccagaggggcacctactttgatggcaccggctttgccaaggctgtgggcggcttcaaggtgggcctggacctgctggtggagtttgagttccgcaccaccaccaccactggagtgctgctgggcatcagcagccagaagatggatggcatgggcatcgagatgattgatgagaagctgatgtttcatgtggacaacggggccggccgcttcaccgctgtgtatgatgctggggtgcccggccacctgtgtgatggccagtggcacaaggtgacagccaacaagatcaagcaccgcatcgagctgactgtggatggcaaccaggtggaggcccagagccccaacccagccagcaccagcgctgacaccaatgaccctgtgtttgtgggcggcttcccagatgacctgaagcagtttggcctgaccaccagcatccccttccggggctgcatccgcagcctgaagctgaccaagggcaccgggaagcccctggaggtgaactttgccaaggccctggagctgcggggcgtgcagcctgtgtcctgcccagccaactag

SEQ ID NO: 8767 - DNA, 9369 bp, Artificial Sequence
  derived and/or modified sequence
atgcctggagctgctggggtgctgctgctgctgctgctgagcggcggcctgggcggcgtgcaggcccagaggccccagcagcagaggcagagccaggcccaccagcagaggggcctcttccctgctgtgctgaacctggccagcaatgccctgatcaccaccaatgccacctgtggggagaagggccctgagatgtactgcaagctggtggagcacgtgcccggccagcctgtgaggaacccccagtgccgcatctgcaaccagaacagcagcaaccccaaccagaggcaccccatcaccaatgccattgatggcaagaacacctggtggcagagccccagcatcaagaatggaattgagtaccactacgtgaccatcaccctggacctgcagcaggtgttccagatcgcctacgtgattgtgaaggccgccaacagccccaggcctggcaactggatcctggagaggagcctggatgatgtggagtacaagccctggcagtaccacgctgtgacagacacagaatgtctgaccctgtacaacatctaccccaggacaggcccccccagctatgccaaggatgatgaagtcatctgcaccagcttctacagcaagatccaccccctggagaatggagagatccacatcagcctcatcaatggccggcccagcgcagatgaccccagccctgagctgctggagttcaccagcgcccgctacatccggctgcgcttccagaggatccgcaccctgaatgctgacctgatgatgtttgcccacaaggacccccgggagattgaccccatcgtgacccggcgctactactacagcgtgaaggacatctctgtgggcggcatgtgcatctgctacggccacgcccgggcctgccccctggaccctgccaccaacaagagccgctgtgaatgtgagcacaacacctgtggggacagctgtgaccagtgctgccccggcttccaccagaagccctggagggctggcaccttcctgaccaagacagaatgtgaggcctgcaactgccacggcaaggccgaggagtgctactatgatgaaaatgtggcccggaggaacctgagcctgaacatccggggcaagtacatcggcggcggcgtgtgcatcaactgcacccagaacacagctggcatcaactgtgagacctgcacagatggcttcttccggcccaagggcgtgagccccaactacccccggccctgccagccctgccactgtgaccccatcggcagcctgaatgaggtgtgtgtgaaggatgagaagcacgcccggcggggcctggcccctggcagctgccactgcaagacaggctttggaggagtgtcctgtgacagatgtgcccggggctacacaggctacccagactgcaaggcctgcaactgcagcggcctgggcagcaagaatgaagacccctgcttcggcccctgcatctgcaaggaaaatgtggagggcggggactgcagccgctgcaagagcggcttcttcaacctgcaggaggacaactggaagggctgtgatgagtgcttctgcagcggcgtgagcaaccgctgccagagcagctactggacctacggcaagatccaggacatgagcggctggtacctgacagacctgcccggccgcatccgggtggccccccagcaggatgacctggacagcccccagcagatcagcatcagcaatgctgaggcccggcaggccctgccccacagctactactggagcgccccagccccctacctgggcaacaagctgcctgctgtgggcggccagctgaccttcaccatctcctatgacctggaggaggaggaggaggacacagagcgggtgctgcagctgatgatcatcctggagggcaatgacctgagcatcagcacagcccaggatgaggtgtacctgcaccccagcgaggagcacaccaacgtgctgctgctgaaggaggagagcttcaccatccacggcacccacttccctgtgcggaggaaggagttcatgacagtgctggccaacctgaagagggtgctgctgcagatcacctacagctttggcatggatgccatcttccggctgagctctgtgaacctggagagcgctgtgtcctaccccacagatggcagcattgctgctgctgtggaggtgtgccagtgccccccaggctacacaggcagcagctgtgagagctgctggcccaggcacagaagagtgaatggcaccatctttggaggcatctgtgagccctgccagtgcttcggccatgctgagagctgtgatgatgtgactggagagtgcctgaactgcaaggaccacactggaggcccctactgtgacaagtgcctgcccggcttctatggagagcccaccaagggcaccagcgaggactgccagccctgtgcctgccccctgaacatccccagcaacaacttcagccccacctgccacctggacaggagcctgggcctcatctgtgatggctgccctgtgggctacacaggcccccgctgtgagcgctgtgccgagggctacttcggccagcccagcgtgcctgggggcagctgccagccctgccagtgcaatgacaacctggacttcagcatccctggcagctgtgacagcctgagcggcagctgcctgatctgcaagccaggcaccaccggccgctactgtgagctgtgtgctgatggctactttggagatgctgtggatgccaagaactgccagccctgccgctgcaatgctgggggcagcttcagcgaggtgtgccacagccagacaggccagtgtgagtgccgggccaacgtgcagggccagagatgtgacaagtgcaaggccggcaccttcggcctgcagagcgcccggggctgtgtgccctgcaactgcaacagctttggcagcaagagctttgactgtgaggagagcggccagtgctggtgccagcccggggtgacaggcaagaagtgtgacagatgtgcccacggctacttcaacttccaggagggcggctgcacagcctgtgaatgtagccacctgggcaacaactgtgaccccaagacaggccgctgcatctgcccccccaacaccatcggggagaagtgcagcaaatgtgcccccaacacctggggccacagcatcaccaccggctgcaaggcctgcaactgcagcacagtgggcagcctggacttccagtgcaatgtgaacacaggccagtgcaactgccaccccaagttcagcggggccaagtgcacagagtgcagccggggccactggaactacccccgctgcaacctgtgtgactgcttcctgcctggaacagatgccaccacctgtgacagcgagaccaagaagtgcagctgcagcgaccagacaggccagtgcacctgcaaggtgaatgtggagggcatccactgtgaccgctgcaggcctgggaagtttggcctggatgccaagaaccccctgggctgcagcagctgctactgcttcggcaccaccacccagtgcagcgaggccaagggcctcatccgcacctgggtgaccctgaaggccgagcagaccatcctgcccctggtggatgaggccctgcagcacaccaccaccaagggcatcgtgttccagcaccctgagatcgtggcccacatggacctgatgagggaggacctgcacctggagcccttctactggaagctgcctgagcagtttgagggcaagaagctgatggcctatggaggcaagctgaagtatgccatctactttgaggcccgggaggagaccggcttcagcacctacaacccccaggtgatcatccggggcggcacccccacccacgcccgcatcatcgtgcgccacatggccgcccccctcatcggccagctgaccaggcatgaaattgagatgacagagaaggagtggaagtactatggagatgacccccgggtgcacaggacagtgacccgggaggacttcctggacatcctgtatgacatccactacatcctgatcaaggccacctacggcaacttcatgaggcagagccgcatcagcgagatctccatggaggtggccgagcagggccggggcaccaccatgaccccacctgctgacctgattgaaaaatgtgactgccccctgggctacagcggcctgagctgtgaggcctgcctgcccggcttctaccgcctgcggagccagcccggcggccgcaccccaggccccaccctgggcacctgtgtgccctgccagtgcaatggccacagcagcctgtgtgaccctgagaccagcatctgccagaactgccagcaccacacagctggggacttctgtgagcgctgtgccctgggctactacggcatcgtgaagggcctgcccaatgactgccagcagtgtgcctgccccctcatcagcagcagcaacaacttcagccccagctgtgtggccgagggcctggatgactaccgctgcacagcctgcccccggggctatgagggccagtactgtgagcgctgtgcccctggctacacaggcagccctggcaaccctgggggcagctgccaggagtgtgaatgtgacccctacggcagcctgcctgtgccctgtgaccctgtgacaggcttctgcacctgcaggcctggggccactggaagaaaatgtgatggctgcaagcactggcacgcccgggagggctgggagtgtgtgttctgtggagatgaatgtacaggcctgctgctgggggacctggcccggctggagcagatggtgatgagcatcaacctgaccggccccctgcctgccccctacaagatgctgtatggcctggagaacatgacccaggagctgaagcacctgctgagcccccagagggcccctgagcggctcatccagctggccgagggcaacctgaacaccctggtgacagagatgaatgagctgctgacccgggccaccaaggtgacagcagatggagagcagacaggccaggatgctgagaggaccaacacccgggccaagagcctgggggagttcatcaaggagctggccagagatgctgaggccgtgaatgagaaggccatcaagctgaatgagaccctgggcaccagagatgaggcctttgagaggaacctggagggcctgcagaaggagattgaccagatgatcaaggagctgcggaggaagaacctggagacccagaaggagattgctgaagatgagctggtggccgctgaggccctgctgaagaaggtgaagaagctgtttggagagagcagaggagaaaatgaggagatggagaaggacctgcgggagaagctggccgactacaagaacaaggtggatgatgcctgggacctgctgcgggaggccacagacaagatccgggaggccaacagactctttgctgtgaaccagaagaacatgacagccctggagaagaagaaggaggccgtggagagcggcaagaggcagatcgagaacaccctgaaggagggcaatgacatcctggatgaggccaaccggctggctgatgagatcaacagcatcattgattatgtggaggacatccagaccaagctgccccccatgtctgaggagctgaatgacaagattgatgacctgagccaggagatcaaggacaggaagctggccgagaaggtgtcccaggccgagagccatgctgcccagctgaatgacagcagcgctgtgctggatggcatcctggatgaggccaagaacatctccttcaatgccacagctgccttcaaggcctacagcaacatcaaggactacattgatgaggccgagaaggtggccaaggaggccaaggacctggcccacgaggccaccaagctggccaccggcccccggggcctgctgaaggaggatgccaagggctgcctgcagaagagcttccgcatcctgaatgaggccaagaagctggccaatgatgtgaaggaaaatgaagaccacctgaatggcctgaagaccagaattgaaaatgctgatgccagaaatggagacctgctgcggaccctgaatgacaccctgggcaagctgagcgccatccccaatgacacagctgccaagctgcaggccgtgaaggacaaggcccggcaggccaatgacacagccaaggatgtgctggcccagatcacagagctgcaccagaacctggatggcctgaagaagaactacaacaagctggccgacagcgtggccaagaccaatgctgtggtgaaggaccccagcaagaacaagatcgtggctgatgctgatgccaccgtgaagaacctggagcaggaggccgaccggctgattgacaagctgaagcccatcaaggagctggaggacaacctgaagaagaacatcagcgagatcaaggagctgatcaaccaggccaggaagcaggccaacagcatcaaggtgtctgtgagcagcggcggggactgcatccgcacctacaagccagagatcaagaagggcagctacaacaacatcgtggtgaatgtgaagacagctgtggccgacaacctgctcttctacctgggcagcgccaagttcatcgacttcctggccatcgagatgaggaagggcaaggtgtccttcctgtgggatgtgggcagcggcgtgggccgggtggagtacccagacctgaccattgatgacagctactggtaccgcatcgtggccagcaggactggaagaaatggcaccatctctgtgcgggccctggatggccccaaggccagcatcgtgcccagcacccaccacagcaccagccccccaggctacaccatcctggatgtggatgccaatgccatgctgtttgtgggcggcctgaccgggaagctgaagaaggcagatgctgtgcgggtcatcaccttcaccggctgcatgggagagacctactttgacaacaagcccatcggcctgtggaacttccgggagaaggagggggactgcaagggctgcaccgtgagcccccaggtggaggacagcgagggcaccatccagtttgatggagagggctacgccctggtgtcccggcccatccgctggtaccccaacatcagcacagtgatgttcaagttccgcaccttcagcagcagcgccctgctgatgtacctggccacccgggacctgcgggacttcatgtctgtggagctgacagatggccacatcaaggtgtcctatgacctgggcagcggcatggcctctgtggtgagcaaccagaaccacaatgatggcaagtggaagagcttcaccctgagccgcatccagaagcaggccaacatcagcatcgtggacatcgacaccaaccaggaggagaacatcgccaccagcagcagcggcaacaactttggcctggacctgaaggcagatgacaagatctactttggaggcctgcccaccctgaggaacctgcggctcttcaacagacctgaggtgaacctgaagaagtacagcggctgcctgaaggacatcgagatcagcaggaccccctacaacatcctgagcagcccagactatgtgggcgtgaccaagggctgcagcctggagaatgtgtacacagtgtccttccccaagccaggctttgtggagctgagccctgtgcccattgatgtgggcacagagatcaacctgtccttcagcaccaagaatgaaagtggcatcatcctgctgggcagcggcggcaccccagccccacccaggaggaagaggcggcagacaggccaggcctactatgccatcctgctgaacagaggccgcctggaggtgcacctgagcactggagcccggaccatgaggaagatcgtcatccggcctgagcccaacctcttccatgatggccgggagcacagcgtgcacgtggagaggacccggggcatcttcaccgtgcaggtggatgaaaatcgccgctacatgcagaacctgactgtggagcagcccatcgaggtgaagaagctgtttgtgggcggggcccctcctgagttccagcccagccccctgaggaacatccccccatttgagggctgcatctggaacctggtgatcaacagcgtgcccatggactttgcccggcctgtgtccttcaagaatgctgacatcggccgctgtgcccaccagaagctgagagaagatgaagatggagctgccccagctgagatcgtcatccagcctgagcctgtgcccaccccagccttccccacccccacccctgtgctgacccacggcccctgtgccgctgagagcgagcccgccctgctgattggcagcaagcagtttggcctgagcaggaacagccacatcgccatcgcctttgatgacaccaaggtgaagaaccggctgaccatcgagctggaggtgaggacagaagctgagagcggcctgctcttctacatggcccgcatcaaccacgccgactttgccaccgtgcagctgagaaatggcctgccctacttctcctatgacctgggcagcggggacacccacaccatgatccccaccaagatcaatgatggccagtggcacaagatcaagatcatgaggagcaagcaggagggcatcctgtatgtggatggagccagcaacagaaccatcagccccaagaaggctgacatcctggatgtggtgggcatgctgtatgtgggcggcctgcccatcaactacaccaccaggagaattggccctgtgacctacagcattgatggctgtgtgaggaacctgcacatggccgaggccccagctgacctggagcagcccaccagcagcttccacgtgggcacctgctttgccaatgcccagaggggcacctactttgatggcactggatttgccaaggctgtgggcggcttcaaggtgggcctggacctgctggtggagtttgagttccgcaccaccaccaccaccggggtgctgctgggcatcagcagccagaagatggatggcatgggcatcgagatgattgatgagaagctgatgttccacgtggacaatggagctggccgcttcaccgctgtgtatgatgctggggtgcccggccacctgtgtgatggccagtggcacaaggtgacagccaacaagatcaagcacagaattgagctgactgtggatggcaaccaggtggaggcccagagccccaacccagccagcaccagcgctgacaccaatgaccctgtgtttgtgggcggcttcccagatgacctgaagcagtttggcctgaccaccagcatccccttccggggctgcatccgcagcctgaagctgaccaagggcaccgggaagcccctggaggtgaactttgccaaggccctggagctgcggggcgtgcagcctgtgtcctgcccagccaactag

SEQ ID NO: 8768 - DNA, 9369 bp, Artificial Sequence
  derived and/or modified sequence
atgcctggagctgctggggtgctgctgctgctgctgctgagcggcggcctgggcggcgtgcaggcccagaggccccagcagcagaggcagagccaggcccaccagcagaggggcctcttccctgctgtgctgaacctggccagcaatgccctgatcaccaccaatgccacctgtggggagaagggccctgagatgtactgcaagctggtggagcacgtgcccggccagcctgtgaggaacccccagtgccgcatctgcaaccagaacagcagcaaccccaaccagaggcaccccatcaccaatgccattgatggcaagaacacctggtggcagagccccagcatcaagaatggaattgagtaccactacgtgaccatcaccctggacctgcagcaggtgttccagatcgcctacgtgattgtgaaggccgccaacagccccaggcctggcaactggatcctggagaggagcctggatgatgtggagtacaagccctggcagtaccacgctgtgacagacacagaatgtctgaccctgtacaacatctaccccaggacaggcccccccagctatgccaaggatgatgaagtcatctgcaccagcttctacagcaagatccaccccctggagaatggagagatccacatcagcctcatcaatggccggcccagcgcagatgaccccagccctgagctgctggagttcaccagcgcccgctacatccggctgcgcttccagaggatccgcaccctgaatgctgacctgatgatgtttgcccacaaggacccccgggagattgaccccatcgtgacccggcgctactactacagcgtgaaggacatctctgtgggcggcatgtgcatctgctacggccacgcccgggcctgccccctggaccctgccaccaacaagagccgctgtgaatgtgagcacaacacctgtggggacagctgtgaccagtgctgccccggcttccaccagaagccctggagggctggcaccttcctgaccaagacagaatgtgaggcctgcaactgccacggcaaggccgaggagtgctactatgatgaaaatgtggcccggaggaacctgagcctgaacatccggggcaagtacatcggcggcggcgtgtgcatcaactgcacccagaacacagctggcatcaactgtgagacctgcacagatggcttcttccggcccaagggcgtgagccccaactacccccggccctgccagccctgccactgtgaccccatcggcagcctgaatgaggtgtgtgtgaaggatgagaagcacgcccggcggggcctggcccctggcagctgccactgcaagacaggctttggaggagtgtcctgtgacagatgtgcccggggctacacaggctacccagactgcaaggcctgcaactgcagcggcctgggcagcaagaatgaagacccctgcttcggcccctgcatctgcaaggaaaatgtggagggcggggactgcagccgctgcaagagcggcttcttcaacctgcaggaggacaactggaagggctgtgatgagtgcttctgcagcggcgtgagcaaccgctgccagagcagctactggacctacggcaagatccaggacatgagcggctggtacctgacagacctgcccggccgcatccgggtggccccccagcaggatgacctggacagcccccagcagatcagcatcagcaatgctgaggcccggcaggccctgccccacagctactactggagcgccccagccccctacctgggcaacaagctgcctgctgtgggcggccagctgaccttcaccatctcctatgacctggaggaggaggaggaggacacagagcgggtgctgcagctgatgatcatcctggagggcaatgacctgagcatcagcacagcccaggatgaggtgtacctgcaccccagcgaggagcacaccaacgtgctgctgctgaaggaggagagcttcaccatccacggcacccacttccctgtgcggaggaaggagttcatgacagtgctggccaacctgaagagggtgctgctgcagatcacctacagctttggcatggatgccatcttccggctgagctctgtgaacctggagagcgctgtgtcctaccccacagatggcagcattgctgctgctgtggaggtgtgccagtgccccccaggctacacaggcagcagctgtgagagctgctggcccaggcacagaagagtgaatggcaccatctttggaggcatctgtgagccctgccagtgcttcggccatgctgagagctgtgatgatgtgactggagagtgcctgaactgcaaggaccacactggaggcccctactgtgacaagtgcctgcccggcttctatggagagcccaccaagggcaccagcgaggactgccagccctgtgcctgccccctgaacatccccagcaacaacttcagccccacctgccacctggacaggagcctgggcctcatctgtgatggctgccctgtgggctacacaggcccccgctgtgagcgctgtgccgagggctacttcggccagcccagcgtgcctgggggcagctgccagccctgccagtgcaatgacaacctggacttcagcatccctggcagctgtgacagcctgagcggcagctgcctgatctgcaagccaggcaccaccggccgctactgtgagctgtgtgctgatggctactttggagatgctgtggatgccaagaactgccagccctgccgctgcaatgctgggggcagcttcagcgaggtgtgccacagccagacaggccagtgtgagtgccgggccaacgtgcagggccagagatgtgacaagtgcaaggccggcaccttcggcctgcagagcgcccggggctgtgtgccctgcaactgcaacagctttggcagcaagagctttgactgtgaggagagcggccagtgctggtgccagcccggggtgacaggcaagaagtgtgacagatgtgcccacggctacttcaacttccaggagggcggctgcacagcctgtgaatgtagccacctgggcaacaactgtgaccccaagacaggccgctgcatctgcccccccaacaccatcggggagaagtgcagcaaatgtgcccccaacacctggggccacagcatcaccaccggctgcaaggcctgcaactgcagcacagtgggcagcctggacttccagtgcaatgtgaacacaggccagtgcaactgccaccccaagttcagcggggccaagtgcacagagtgcagccggggccactggaactacccccgctgcaacctgtgtgactgcttcctgcctggaacagatgccaccacctgtgacagcgagaccaagaagtgcagctgcagcgaccagacaggccagtgcacctgcaaggtgaatgtggagggcatccactgtgaccgctgcaggcctgggaagtttggcctggatgccaagaaccccctgggctgcagcagctgctactgcttcggcaccaccacccagtgcagcgaggccaagggcctcatccgcacctgggtgaccctgaaggccgagcagaccatcctgcccctggtggatgaggccctgcagcacaccaccaccaagggcatcgtgttccagcaccctgagatcgtggcccacatggacctgatgagggaggacctgcacctggagcccttctactggaagctgcctgagcagtttgagggcaagaagctgatggcctatggaggcaagctgaagtatgccatctactttgaggcccgggaggagaccggcttcagcacctacaacccccaggtgatcatccggggcggcacccccacccacgcccgcatcatcgtgcgccacatggccgcccccctcatcggccagctgaccaggcatgaaattgagatgacagagaaggagtggaagtactatggagatgacccccgggtgcacaggacagtgacccgggaggacttcctggacatcctgtatgacatccactacatcctgatcaaggccacctacggcaacttcatgaggcagagccgcatcagcgagatctccatggaggtggccgagcagggccggggcaccaccatgaccccacctgctgacctgattgaaaaatgtgactgccccctgggctacagcggcctgagctgtgaggcctgcctgcccggcttctaccgcctgcggagccagcccggcggccgcaccccaggccccaccctgggcacctgtgtgccctgccagtgcaatggccacagcagcctgtgtgaccctgagaccagcatctgccagaactgccagcaccacacagctggggacttctgtgagcgctgtgccctgggctactacggcatcgtgaagggcctgcccaatgactgccagcagtgtgcctgccccctcatcagcagcagcaacaacttcagccccagctgtgtggccgagggcctggatgactaccgctgcacagcctgcccccggggctatgagggccagtactgtgagcgctgtgcccctggctacacaggcagccctggcaaccctgggggcagctgccaggagtgtgaatgtgacccctacggcagcctgcctgtgccctgtgaccctgtgacaggcttctgcacctgcaggcctggggccactggaagaaaatgtgatggctgcaagcactggcacgcccgggagggctgggagtgtgtgttctgtggagatgaatgtacaggcctgctgctgggggacctggcccggctggagcagatggtgatgagcatcaacctgaccggccccctgcctgccccctacaagatgctgtatggcctggagaacatgacccaggagctgaagcacctgctgagcccccagagggcccctgagcggctcatccagctggccgagggcaacctgaacaccctggtgacagagatgaatgagctgctgacccgggccaccaaggtgacagcagatggagagcagacaggccaggatgctgagaggaccaacacccgggccaagagcctgggggagttcatcaaggagctggccagagatgctgaggccgtgaatgagaaggccatcaagctgaatgagaccctgggcaccagagatgaggcctttgagaggaacctggagggcctgcagaaggagattgaccagatgatcaaggagctgcggaggaagaacctggagacccagaaggagattgctgaagatgagctggtggccgctgaggccctgctgaagaaggtgaagaagctgtttggagagagcagaggagaaaatgaggagatggagaaggacctgcgggagaagctggccgactacaagaacaaggtggatgatgcctgggacctgctgcgggaggccacagacaagatccgggaggccaacagactctttgctgtgaaccagaagaacatgacagccctggagaagaagaaggaggccgtggagagcggcaagaggcagatcgagaacaccctgaaggagggcaatgacatcctggatgaggccaaccggctggctgatgagatcaacagcatcattgattatgtggaggacatccagaccaagctgccccccatgtctgaggagctgaatgacaagattgatgacctgagccaggagatcaaggacaggaagctggccgagaaggtgtcccaggccgagagccatgctgcccagctgaatgacagcagcgctgtgctggatggcatcctggatgaggccaagaacatctccttcaatgccacagctgccttcaaggcctacagcaacatcaaggactacattgatgaggccgagaaggtggccaaggaggccaaggacctggcccacgaggccaccaagctggccaccggcccccggggcctgctgaaggaggatgccaagggctgcctgcagaagagcttccgcatcctgaatgaggccaagaagctggccaatgatgtgaaggaaaatgaagaccacctgaatggcctgaagaccagaattgaaaatgctgatgccagaaatggagacctgctgcggaccctgaatgacaccctgggcaagctgagcgccatccccaatgacacagctgccaagctgcaggccgtgaaggacaaggcccggcaggccaatgacacagccaaggatgtgctggcccagatcacagagctgcaccagaacctggatggcctgaagaagaactacaacaagctggccgacagcgtggccaagaccaatgctgtggtgaaggaccccagcaagaacaagatcatcgcagatgctgatgccaccgtgaagaacctggagcaggaggccgaccggctgattgacaagctgaagcccatcaaggagctggaggacaacctgaagaagaacatcagcgagatcaaggagctgatcaaccaggccaggaagcaggccaacagcatcaaggtgtctgtgagcagcggcggggactgcatccgcacctacaagccagagatcaagaagggcagctacaacaacatcgtggtgaatgtgaagacagctgtggccgacaacctgctcttctacctgggcagcgccaagttcatcgacttcctggccatcgagatgaggaagggcaaggtgtccttcctgtgggatgtgggcagcggcgtgggccgggtggagtacccagacctgaccattgatgacagctactggtaccgcatcgtggccagcaggactggaagaaatggcaccatctctgtgcgggccctggatggccccaaggccagcatcgtgcccagcacccaccacagcaccagccccccaggctacaccatcctggatgtggatgccaatgccatgctgtttgtgggcggcctgaccgggaagctgaagaaggcagatgctgtgcgggtcatcaccttcaccggctgcatgggagagacctactttgacaacaagcccatcggcctgtggaacttccgggagaaggagggggactgcaagggctgcaccgtgagcccccaggtggaggacagcgagggcaccatccagtttgatggagagggctacgccctggtgtcccggcccatccgctggtaccccaacatcagcacagtgatgttcaagttccgcaccttcagcagcagcgccctgctgatgtacctggccacccgggacctgcgggacttcatgtctgtggagctgacagatggccacatcaaggtgtcctatgacctgggcagcggcatggcctctgtggtgagcaaccagaaccacaatgatggcaagtggaagagcttcaccctgagccgcatccagaagcaggccaacatcagcatcgtggacatcgacaccaaccaggaggagaacatcgccaccagcagcagcggcaacaactttggcctggacctgaaggcagatgacaagatctactttggaggcctgcccaccctgaggaacctgtccatgaaggcccggcctgaggtgaacctgaagaagtacagcggctgcctgaaggacatcgagatcagcaggaccccctacaacatcctgagcagcccagactatgtgggcgtgaccaagggctgcagcctggagaatgtgtacacagtgtccttccccaagccaggctttgtggagctgagccctgtgcccattgatgtgggcacagagatcaacctgtccttcagcaccaagaatgaaagtggcatcatcctgctgggcagcggcggcaccccagccccacccaggaggaagaggcggcagacaggccaggcctactatgccatcctgctgaacagaggccgcctggaggtgcacctgagcactggagcccggaccatgaggaagatcgtcatccggcctgagcccaacctcttccatgatggccgggagcacagcgtgcacgtggagaggacccggggcatcttcaccgtgcaggtggatgaaaatcgccgctacatgcagaacctgactgtggagcagcccatcgaggtgaagaagctgtttgtgggcggggcccctcctgagttccagcccagccccctgaggaacatccccccatttgagggctgcatctggaacctggtgatcaacagcgtgcccatggactttgcccggcctgtgtccttcaagaatgctgacatcggccgctgtgcccaccagaagctgagagaagatgaagatggagctgccccagctgagatcgtcatccagcctgagcctgtgcccaccccagccttccccacccccacccctgtgctgacccacggcccctgtgccgctgagagcgagcccgccctgctgattggcagcaagcagtttggcctgagcaggaacagccacatcgccatcgcctttgatgacaccaaggtgaagaaccggctgaccatcgagctggaggtgaggacagaagctgagagcggcctgctcttctacatggcccgcatcaaccacgccgactttgccaccgtgcagctgagaaatggcctgccctacttctcctatgacctgggcagcggggacacccacaccatgatccccaccaagatcaatgatggccagtggcacaagatcaagatcatgaggagcaagcaggagggcatcctgtatgtggatggagccagcaacagaaccatcagccccaagaaggctgacatcctggatgtggtgggcatgctgtatgtgggcggcctgcccatcaactacaccaccaggagaattggccctgtgacctacagcattgatggctgtgtgaggaacctgcacatggccgaggccccagctgacctggagcagcccaccagcagcttccacgtgggcacctgctttgccaatgcccagaggggcacctactttgatggcactggatttgccaaggctgtgggcggcttcaaggtgggcctggacctgctggtggagtttgagttccgcaccaccaccaccaccggggtgctgctgggcatcagcagccagaagatggatggcatgggcatcgagatgattgatgagaagctgatgttccacgtggacaatggagctggccgcttcaccgctgtgtatgatgctggggtgcccggccacctgtgtgatggccagtggcacaaggtgacagccaacaagatcaagcacagaattgagctgactgtggatggcaaccaggtggaggcccagagccccaacccagccagcaccagcgctgacaccaatgaccctgtgtttgtgggcggcttcccagatgacctgaagcagtttggcctgaccaccagcatccccttccggggctgcatccgcagcctgaagctgaccaagggcaccgggaagcccctggaggtgaactttgccaaggccctggagctgcggggcgtgcagcctgtgtcctgcccagccaactag

SEQ ID NO: 8769 - DNA, 9366 bp, Artificial Sequence
  derived and/or modified sequence
atgcccggcgccgccggcgtgctgctgctgctgctgctgagcggcggcttagggggcgtacaagcccagcgaccacaacagcagcgccagagtcaggcacaccagcagaggggcctcttccccgcggtgctgaatctcgcctctaacgcgcttatcaccaccaatgccacatgtggagagaagggccctgagatgtattgcaaactggtggagcacgtgcccggtcagccggtacgaaacccccagtgccggatttgtaaccagaactcttctaatccaaatcagaggcaccctatcactaacgccattgacggaaaaaatacttggtggcagagccccagtatcaaaaacggtattgaataccattacgtaactataacactggatttgcagcaggtcttccagatcgcctacgtgattgtgaaagccgccaacagtccacggcccgggaactggatcctggaaaggtcgttagatgatgtcgaatacaagccttggcagtaccatgccgtgacagacacagagtgcttgacactctacaacatataccctagaacagggccaccgagttacgcaaaagacgacgaggtcatatgtacctccttttactccaagatccatcctcttgagaacggagagatccacatcagcctgattaatggccgcccgtccgctgatgatccctccccagagctgctcgagttcacatctgctcgatacatccgactcaggttccagagaatcaggactcttaacgcagatctgatgatgtttgctcacaaggatccgagagagatcgaccccattgttactaggcgatattattatagcgtaaaagacatctctgtggggggtatgtgtatttgttacggccatgcccgtgcttgtcccctggatcccgctacgaataagagcagatgcgagtgcgagcacaatacatgtggagattcatgtgatcaatgttgccccggcttccaccagaagccatggagagcgggcaccttcttgacaaagaccgaatgcgaggcgtgtaactgccatgggaaagctgaggagtgctattacgatgagaacgtggcaagacggaacctgagcctgaatatacgggggaaatacattggagggggtgtctgtattaattgtacacaaaatacggcaggcatcaattgcgagacatgcaccgatggctttttccggcctaagggcgttagccctaattaccctcgcccatgccagccttgccactgtgacccaattggatctctgaatgaagtgtgcgtcaaggatgaaaaacacgcccggcgaggactggctccaggctcctgccattgtaagaccgggtttggcggcgtaagctgcgacagatgcgctcgtggctacacgggctatcccgattgtaaagcctgtaactgctctgggctaggctccaagaacgaagacccatgttttggcccttgtatatgcaaggagaatgtggaggggggcgattgctcacggtgtaagagcggcttcttcaacctgcaggaggataattggaagggatgtgatgagtgtttctgcagcggcgtttctaatagatgtcagtcctcttactggacatacggcaagattcaggacatgtctgggtggtacttgacagacttgcccggtcgcatccgggtagcaccccagcaggacgatttggatagtccacagcagattagcatcagcaatgctgaggctcggcaggcactgccccacagttactattggtctgcccctgcgccttacctggggaataagctgcctgcggtcggggggcagctgactttcaccattagctatgatctcgaggaagaggaggaagatacagagcgagtcctccagctcatgatcattctggaaggaaacgatctcagcatcagcactgcccaggatgaggtgtatcttcatccatccgaggagcacactaatgtgctgttgttgaaggaggagagctttaccatccatggaacacacttccccgtccggcggaaagagtttatgaccgtactggcaaatctcaaaagggtacttctgcagatcacctattcattcgggatggacgccattttccgtctctctagtgtcaatctcgagagcgccgtcagttaccccacagatggttcaatagcagccgcagtggaagtttgccagtgtccacctggctatacaggaagcagctgcgagagctgttggccacgtcaccgaagagtgaatggtaccatctttgggggaatatgtgaaccctgtcagtgcttcggacatgccgagtcttgcgacgacgtgactggcgaatgccttaactgtaaggatcacacaggaggcccctattgcgataaatgcctcccaggattctacggtgaaccaaccaagggcacttctgaagattgtcaaccgtgcgcttgtccgcttaacattcccagcaataacttcagccctacgtgccacctggacagatctttgggactgatttgcgatgggtgccccgtgggatacacggggcccagatgcgagcgctgtgctgagggatacttcggccagccgtccgtgcccggtggtagctgccagccatgtcagtgtaacgataatcttgacttttcgattcccggatcatgcgactccctttcaggctcctgtctgatctgtaaaccaggcacaaccggccgatattgcgaactttgcgccgacggctactttggtgatgctgtagacgctaaaaattgccagccctgtcgctgcaatgcaggtggtagtttctcagaggtatgtcactcccagacaggacaatgcgagtgcagagctaacgttcaaggacaaagatgtgacaagtgcaaagccggtacattcggcttgcagtctgctcgaggctgtgtgccatgtaactgcaattcctttggctccaagtcctttgattgcgaagaaagtggccagtgttggtgtcagccaggggttactggcaaaaaatgcgatagatgtgcccacggctactttaatttccaagagggcggctgcaccgcatgtgagtgtagtcacctaggtaataactgcgacccgaagactggtagatgtatctgccctccgaacaccattggtgaaaaatgcagcaagtgtgcgcccaacacatgggggcatagcattacaactgggtgtaaagcatgcaattgcagtaccgtgggctccctggattttcagtgcaacgtgaataccggacagtgcaattgtcaccccaaatttagcggagccaagtgcactgagtgtagcagaggccattggaactacccgaggtgcaatttatgtgattgcttcctgccagggactgacgccaccacctgcgactccgagacaaagaagtgctcttgttctgatcagaccgggcagtgtacctgcaaggttaacgtcgaggggatacattgcgacagatgcaggcctgggaagttcggtctggacgccaaaaatcccctgggatgttccagctgttactgctttggcaccactacccagtgcagtgaggccaaaggccttatcagaacatgggtcacccttaaagccgaacaaactattctccccctggtggatgaggcactgcagcatacgaccaccaaagggatcgtgttccagcatccagagattgtggcccacatggaccttatgcgagaagatcttcatttagagcctttctattggaaactgccagagcaattcgagggcaagaagctgatggcctacggaggcaagttgaaatacgcgatttatttcgaagctcgcgaagagaccgggttctcaacgtacaaccctcaggtgatcatccggggtggtacgcccacacacgcccgcattatcgtgcgccatatggccgctccactcatcggacagttgacccgccacgaaattgagatgactgaaaaagagtggaagtactacggagatgatccccgcgtgcacaggaccgtgacacgagaagacttcctcgacatactttatgacattcattacattctgataaaggctacctacggcaacttcatgcgacagtctcgaatttctgagatttccatggaggtcgcggagcaaggccgagggacaaccatgacccctcccgcggatttgatagagaaatgcgactgtccacttgggtattcaggactgtcctgtgaggcctgcctgcctggcttctatagactgagatctcagccagggggccggacgcccggcccaacattaggtacctgtgtgccgtgtcaatgtaatggacacagttccttatgtgacccagagacgagcatctgtcagaactgtcagcaccatacagccggagacttttgtgagagatgcgctctgggctattatggcatcgtcaaaggtttgcccaacgactgtcagcagtgtgcttgccctctgattagctcaagcaataatttctcccccagctgtgttgccgagggactggacgactaccgctgcacagcatgtccccgcggttacgagggtcagtattgcgagaggtgtgcccccggctacactggatctccagggaaccctggaggtagttgtcaggagtgcgaatgtgacccctatggttcactcccagttccatgtgaccccgtcacggggttctgcacctgtaggcccggcgccaccggtcggaaatgtgacggatgcaaacactggcatgcccgtgaaggctgggaatgcgtcttctgcggagatgaatgtaccggcttgttgctaggtgatcttgcacggctcgaacaaatggtgatgtcaattaatctgactgggcctttgccagctccctataagatgctatacggtttagagaacatgacccaagagctgaagcacctacttagtccgcagcgggcccccgagagactaatccagcttgcagaggggaacctgaatacactggtcactgagatgaatgagttgctcacaagagcaacaaaggtgaccgcggatggtgaacagacggggcaggatgctgaacgcaccaatacaagagctaagagcctcggcgaatttattaaagagcttgccagagacgcagaggccgtcaacgaaaaagcaatcaagctcaatgagacgcttggaaccagagatgaagcattcgagagaaatctcgaaggactccagaaagaaatcgatcaaatgatcaaagagctccgccggaaaaacttggagacgcagaaggagatcgccgaagatgaattggtcgctgccgaagcactgctgaagaaagtaaaaaaactgtttggggagagccgaggggaaaacgaggagatggagaaggatctgagggagaaactggccgattacaagaacaaagtggacgacgcatgggaccttctcagggaggccactgacaagatcagagaggctaataggttgtttgctgtgaatcaaaagaatatgacagcacttgagaaaaagaaagaggccgtggagtcaggtaaaaggcaaattgagaatacgctaaaggaaggaaacgatatcctcgacgaggccaaccggcttgcagacgaaattaattcaattatagactatgtggaagacatacagaccaagctccccccgatgtcagaagaattgaacgataagatcgatgatttgtctcaggagatcaaagacaggaagctcgctgaaaaagtttcacaggccgaatcccacgccgcccaactgaacgatagtagtgctgttctggatggtatcctggatgaggccaaaaatatttctttcaacgcgacagctgcattcaaagcttactccaacattaaagactacatcgacgaggccgaaaaagtggccaaggaagctaaggatcttgcgcatgaggccacgaagttggctactgggccccgcggactcttgaaagaagatgcaaaaggctgcctccagaagtccttcagaattctcaatgaggctaagaaactggcaaacgacgtgaaagagaatgaagatcatctcaacggcctcaaaactaggatcgagaacgccgatgccagaaatggagacctgctgcggactttgaatgatacactcggcaaattgtccgctatccccaacgatacagcagccaagctccaagcggtgaaagataaagcccgtcaggctaacgacacggccaaagacgtgctagctcagatcactgagctgcaccagaatctggatggcctgaaaaagaattacaacaagctggctgactccgttgcgaaaactaatgctgtggtaaaggatcccagcaagaatacagtggccgatgccgacgctacggttaagaacctcgaacaggaggccgacagactcattgacaagctgaagcccattaaggaactcgaggacaacctcaagaaaaacataagtgagatcaaagagttaatcaaccaggctaggaaacaggccaattctataaaggtcagcgtgagttccggcggagactgtataaggacgtacaagcctgaaattaagaaaggaagctataataacatagttgtcaacgttaaaaccgctgtggctgacaacctgctgttttatttagggtccgcgaaattcattgactttctcgcgatcgaaatgcggaagggaaaggtgtcattcttatgggacgtgggatccggagtgggacgagtggaataccccgaccttactatcgatgacagttactggtatagaattgtggcttcaaggacgggtaggaacggcaccatctctgttagggctctggacggacctaaagcttcgattgtacccagtactcaccatagcacaagcccacccggatatactatactagatgtagatgccaatgcaatgctgttcgtgggtgggttgaccggaaagctcaaaaaggccgatgctgtgcgggtgataactttcactggatgtatgggcgaaacctatttcgataataaacccatcggcctttggaattttcgggagaaagaaggcgactgtaaagggtgcacagtgagcccacaggtagaggactctgagggaacaattcagtttgatggcgaagggtatgccctcgtcagcagacccataaggtggtatcccaatatctcaacagtgatgtttaaattcaggacgttctctagttccgctctcctgatgtatctggccacccgagatctccgggatttcatgtctgtggaattgaccgacggccacatcaaagtgtcctacgacttagggagtggaatggcatccgtagtgagtaaccagaatcataacgacgggaagtggaagtctttcacgctgagccgcatccagaaacaggcaaatattagtattgtcgacattgacacgaaccaggaggagaatattgcaacatcttcctctggcaataacttcggcttggatttgaaggcagacgacaaaatttatttcggcgggctacctacccttcggaacctcagtatgaaggccagacccgaggtgaatctgaaaaagtactccggctgccttaaggatatcgagataagccgaacaccatacaacatcctatcctcccccgattatgtaggcgtgactaaagggtgctctctggagaatgtgtatactgtctcattcccaaagcctgggtttgtagagctcagccccgtcccaatcgatgtgggaacagaaatcaacctttcgttttccactaaaaacgaaagcggcatcatcctgcttggatctggcggaactcccgcccctccacggcgcaagcggagacagactgggcaggcctattatgccattcttttgaacagaggtcgattagaagtgcatctcagcacaggggcacggacaatgagaaagatagtcatccgtcccgaacctaacctgttccatgacgggcgcgaacacagcgtccatgtagagcgaaccaggggtatctttacagtacaggttgatgagaataggcgttatatgcagaatctgactgttgaacagccaattgaggtaaagaaattatttgtaggtggagccccaccggagtttcagcccagcccccttcgcaatataccaccctttgagggatgcatctggaacctcgtgattaactcagttcctatggactttgcacgccctgtgtccttcaagaacgctgatatcggccggtgcgcacaccagaagctccgcgaggatgaggatggcgcagcccccgccgaaatagttatacagcctgagccagtgccgacacccgcttttcccacccccacgcccgtcctcactcatggcccctgcgccgcagagtcagagccagccctgctcataggtagcaaacagttcgggctgtctcgaaactctcacattgccatcgcatttgacgacacaaaggtgaagaacaggctcaccattgagctggaagtcagaaccgaagccgaatccgggctgctcttctacatggcgagaatcaaccacgccgactttgcaactgtccagctacggaatggactcccctattttagttatgatctgggatctggtgatacgcacactatgatacccacaaagataaacgacggccaatggcataagatcaaaattatgcgttctaagcaggagggtatcttatacgtggatggagcgtctaataggacgatttctcctaagaaggcagatattctggacgtggtcggcatgctttatgtggggggactgcccataaattacacgactcgacgcatcgggcccgtgacttatagtatagatggctgtgttcggaatctgcacatggcagaggctcctgccgatctggaacagccgacttcctccttccatgtcggtacatgctttgcaaatgctcagcgaggaacgtactttgatggaactggctttgcaaaggccgtaggcggttttaaggtcggcctggacctgcttgtggaattcgagttcaggaccaccacaactacgggtgtccttctgggaatcagttcacagaagatggacggaatgggcattgaaatgatagacgagaaattgatgttccacgtcgacaatggggccgggcggttcactgctgtgtacgatgctggcgtgccgggacacttgtgcgacggtcagtggcacaaagttaccgctaataagattaagcatagaattgagctcaccgtcgacgggaaccaagtggaagctcagtcccctaatcccgccagtacaagtgccgacaccaacgacccggtgtttgtgggagggtttcccgacgacctgaagcaatttggacttactacgagtatccctttccgagggtgcatcaggagcctgaagttaaccaagggcacgggcaagccactggaagtcaattttgctaaagctcttgaactgagaggagtccagccagtatcttgccccgctaactag

SEQ ID NO: 8770 - DNA, 9369 bp, Artificial Sequence
  derived and/or modified sequence
atgcccggcgccgccggcgtgctgctgctgctgctgctgagcggcggtttaggtggcgtgcaggcacagaggccccagcaacagcgccagagccaagctcatcagcagcgcggccttttcccagccgtgttgaacctggcatccaacgctctcattaccactaacgctacatgcggggagaagggaccagagatgtactgcaaacttgttgagcacgtaccaggacagccggttaggaacccacaatgccggatatgcaatcagaacagctccaatcctaatcaacgacatcccattaccaacgcgattgacgggaaaaatacatggtggcagtcaccttcaattaaaaacggcatcgaataccattacgtgactataacgctggaccttcagcaagtttttcagatcgcctacgtgattgttaaagcggctaactctccaagacctggtaactggatcctggagcggtccctggatgacgtagagtacaaaccatggcaataccatgccgtgacagacacagagtgcctcactctttataatatctatccgcgcacaggcccacccagttacgcgaaggacgacgaggtcatttgcacaagtttctactcaaagatccatcctcttgagaatggagaaatacacatttcactgattaacggtagacccagcgccgacgacccgagcccagaactgctagagtttacttcggctagatacatccgccttcggtttcagagaatccgcacattaaatgccgatcttatgatgtttgcccacaaggacccacgggaaatcgaccctattgtgaccagacgctactactacagtgtcaaggatatcagcgtcggcggcatgtgtatttgctatggccacgctagagcatgcccactggatcctgcgacaaataagagtcgctgtgagtgcgagcataacacctgtggggacagctgcgaccagtgttgcccaggctttcatcagaagccatggagagcagggaccttcttgaccaagactgagtgtgaggcatgtaactgtcacggaaaagcggaggagtgctattatgatgaaaatgtcgcccggaggaacctctccctcaatattcggggcaaatacatcggaggcggtgtttgtatcaactgcacccaaaacaccgcgggcattaattgtgagacctgtacagacggctttttcagacctaaaggagtctctccaaactaccctcgaccctgccagccctgtcattgcgacccaatcggctcccttaacgaagtgtgcgttaaggatgagaaacatgcccgacgaggattggcgcccggttcatgtcactgcaagaccggtttcggtggcgtcagttgcgaccggtgtgctcgcggatatactggatatcctgactgtaaagcctgcaactgcagtggattgggtagcaagaatgaagacccctgttttggcccttgtatctgcaaagagaatgttgagggcggggattgtagcaggtgtaagtcaggatttttcaatctgcaggaggacaattggaagggttgcgacgagtgcttctgcagcggagtgtcgaatcgttgccagtccagctattggacttacggcaagattcaggatatgtcgggatggtacttgacagaccttcccggacgtatccgcgtcgcaccacagcaggatgatctggattctcctcagcagatctcaatttcaaacgctgaggcaagacaagccctgcctcattcctattactggtctgcacccgccccttatttgggcaacaaacttcctgcagtcggagggcagttaacctttaccattagctacgacctggaggaagaggaagaagatactgagcgggtcctacaactcatgatcatcttggaggggaacgacctgagtatctctacagctcaggatgaggtctacctacatccgtcggaagaacatactaatgtactgcttctgaaagaagagagttttacgatccacggcacacattttcctgtgcggagaaaggaattcatgaccgtgctcgcgaacctgaagagagtcctgctgcagatcacctattctttcggtatggatgccatatttcggctaagctcagtcaacctggagagtgccgtctcataccctacagatggcagcattgctgctgctgtcgaggtttgccaatgccctccaggctacacgggctccagttgtgagtcatgttggccaagacaccgcagggtgaacgggaccattttcggtggcatctgcgagccatgccagtgtttcgggcatgccgagagttgtgacgacgttaccggggaatgcttgaactgcaaagatcatactggaggcccatattgcgataaatgcctccccggattctacggagagcccacaaaggggacatccgaagactgccaaccatgtgcttgccccctcaatatacctagcaacaatttcagtcccacctgtcacctcgatagatcattgggactgatttgcgacggctgccccgtgggatacaccggaccaaggtgcgagcgctgtgctgaaggctactttggtcagccgtctgtcccaggcgggagctgccagccctgtcagtgcaacgataacttggacttttccatacctggctcttgcgactctctgtcaggatcatgcctgatctgtaagccgggaactacaggacgctattgtgagctgtgtgcagacggttatttcggagacgccgtggacgcaaagaattgccagccctgcagatgtaacgctggcgggtctttttccgaggtctgccactctcaaactggtcagtgtgaatgtagggccaatgttcagggccagagatgtgataagtgtaaagccggtaccttcgggctccaatctgctagaggctgcgtcccttgcaattgcaactcctttggttccaagtcatttgattgtgaggaaagcggacagtgctggtgtcagcccggtgtgactgggaagaagtgtgataggtgtgcccatgggtactttaatttccaggagggcggatgtactgcctgtgagtgctctcaccttgggaataactgcgacccaaagactggtagatgcatatgccctcctaacacaattggagaaaagtgttccaaatgcgcaccgaacacgtgggggcacagtatcaccaccggctgtaaggcatgcaactgcagtaccgttgggagtctagattttcagtgcaatgttaacactgggcagtgcaattgccatcccaagtttagcggcgccaaatgtaccgagtgctccaggggtcactggaactatccaagatgcaatctgtgtgattgttttttgccaggcactgatgccaccacttgcgactctgaaaccaagaagtgctcatgctctgaccagaccggacagtgtacctgcaaagtgaacgttgagggcattcactgcgaccgatgtcggcctggaaaatttggcctggacgccaaaaatcccctggggtgcagctcatgttactgcttcgggactaccacccagtgtagtgaggcaaagggtctgattcgaacctgggtcacgctcaaggccgaacagaccatcctgcccttggtagacgaagcgctccaacataccaccaccaaagggattgtcttccagcaccccgaaatcgtggcccatatggatctgatgcgagaagatctccatctggagccattctattggaagctgccagaacagtttgagggaaaaaaactgatggcctacggcggcaaactgaaatatgctatttactttgaggcccgggaggagacaggatttagcacctacaatcctcaggtaatcatccggggtggaacccctacacacgctaggattatagttagacacatggcggcgccgctgattggtcagttgacaaggcatgagatcgaaatgacagaaaaggaatggaagtactacggggatgatccacgagtccatagaacagtaactcgtgaagactttctcgacattttgtacgacatccattatatactgataaaggccacatatggaaattttatgcgtcaatctcgtatctccgagatctcgatggaggtggcagagcagggtaggggcacaacaatgaccccccccgccgacctgattgaaaagtgcgattgccctctgggctacagcggtctgtcctgtgaggcttgtctgcctggcttttatcgccttagatctcagcctggaggccggacacctgggcccacactcggaacctgcgtaccttgccaatgcaatgggcattcttcgctttgtgacccggagaccagtatctgccaaaattgccagcatcatactgctggcgatttttgcgaaaggtgcgccctcggatattacggaatcgtcaaaggactgccaaacgattgccagcagtgtgcatgcccactgatatcatccagcaacaactttagcccctcgtgcgtggccgagggactggatgattatcggtgtacggcgtgcccgagggggtacgaggggcagtactgtgaacgctgcgctccagggtacacaggttctcctggcaatccgggcggtagttgtcaggaatgtgagtgcgacccatatggctcactccccgtgccctgcgatccagtgacggggttttgtacttgccgaccaggcgctaccggccgaaaatgtgacggctgcaagcactggcatgcgcgggaagggtgggagtgtgtattctgcggggatgagtgtacaggactgctgctgggcgacttagccagacttgagcagatggtaatgagcattaatctgaccgggcctctgccagcaccgtacaaaatgctgtacggcctggaaaatatgactcaggaattgaagcatttgctgtctcctcagcgtgctccagaaaggctcatacagctggctgagggaaatttaaacaccttggtgactgagatgaatgaactgcttacgagggcaacaaaggtcaccgcagacggtgagcaaacagggcaggatgcagagcgcactaatactcgtgctaagtccctgggggaattcataaaggagttggcccgggatgcggaggccgtgaacgagaaggcaatcaagcttaatgaaacccttggcacaagagacgaagcgttcgagcggaacctggagggtttacagaaggagatagatcagatgattaaggaacttcggcgcaagaacctcgaaacccagaaagagatagccgaggatgagctggtcgcagctgaagccctgctgaagaaggtgaagaagctgtttggggagtcacggggcgagaatgaagaaatggaaaaggatctgagagaaaagctcgccgactataaaaataaagtcgatgatgcatgggatctgctgagagaagctactgataagatacgcgaggcgaatcgactgttcgctgtgaaccagaagaacatgacagccctggaaaaaaaaaaagaggcagtggagtccggaaaacgccaaatcgagaacacactgaaagagggaaacgatatcctggacgaggctaatagactcgcggacgagattaactcaatcattgattacgtggaagacattcagactaaactgccacccatgtccgaagagctgaatgataagatagacgatctatctcaggagattaaggatcgaaagctggccgaaaaagtgtcacaggccgaatcccacgcagctcaactgaacgactcctccgctgtgctagacggtattttagacgaagccaaaaacatatcattcaacgcaaccgccgcctttaaagcatactcgaacataaaagattacattgacgaggctgagaaggttgccaaggaagcaaaggatctagcacacgaggccaccaagctggccacagggccacgagggttactgaaggaggacgccaaaggctgtctgcagaaaagttttcgcatcctcaatgaagccaaaaaactggccaacgacgttaaggagaatgaggaccacctaaacggactaaaaacaagaatcgagaacgccgatgcccggaacggagatctgctgagaactctcaatgacacccttgggaagctgtccgccatccccaatgataccgccgccaaactgcaggccgtgaaagacaaggctcggcaggcaaatgacacagctaaggatgtgctcgcacagatcacagagctccatcagaatctcgatggactaaagaagaattacaataagctggcagatagcgtggccaaaaccaacgccgtggtaaaggacccttctaaaaataagatagttgctgacgccgatgcaacggtgaaaaatctcgaacaggaggcagaccggttaatcgacaagttgaagccaattaaagagctggaagacaacttgaagaaaaatatctccgagatcaaagaacttataaaccaggccaggaagcaagccaattcgattaaggttagcgtctcctcaggcggggactgcattagaacctacaaacctgaaataaaaaagggctcctacaataatatcgtggtcaatgtcaaaaccgcagtggccgacaatctgctgttttatctgggctcagccaaattcattgatttcctggctattgaaatgagaaagggaaaggtcagctttctttgggacgtcgggtccggtgtgggccgtgtcgaataccctgacctcaccatagacgattcatactggtatcggatcgtggcctctagaacgggtcgcaatggaaccataagcgtgcgggcccttgacgggccaaaggccagcatagttccctccactcatcacagcaccagccctcccgggtataccatcctggacgtagacgccaatgcaatgctatttgtcggcggactgacaggcaagctgaaaaaggccgacgctgtcagggtcatcacctttaccggttgcatgggagaaacatacttcgacaataagcccatagggctgtggaattttcgtgaaaaggagggcgactgcaaggggtgcacggtgtctccgcaggtggaagattccgaaggcacaatccaattcgatggggaaggctatgcccttgtaagccgacctatcagatggtatccgaacattagcactgtgatgttcaaattccgcaccttcagctcctccgccctgctgatgtaccttgcaactagagacctccgggactttatgagcgtggagctaactgatggacatattaaggtaagctatgatcttgggagtggcatggcctccgtcgtatcgaaccagaatcacaacgacggcaagtggaaatcattcactttgagccggatacagaaacaagcaaatattagcattgtggatatcgatactaatcaagaggagaacattgctaccagctcaagtggcaataactttggactggacctgaaggccgacgataaaatctacttcggaggcctccccacccttagaaatctccgcctattcaacaggcccgaagtcaacctgaaaaagtactctggttgtctgaaagacatcgagatctctcgaaccccttacaacattctttcttcacctgactacgtgggggtgaccaagggttgctctttagagaacgtgtatacggtctccttcccaaagcctggtttcgttgaactgtcgcctgtcccgatcgacgtcgggaccgaaatcaacctttctttcagcactaagaacgaaagcggtatcatcctgctgggctccggcggtacacctgctcccccccggcggaagaggcgacagacaggacaggcatactatgctattctgctgaatcgggggcgcttggaagtgcatctctccacaggagcgaggacaatgaggaagatcgttatccgacccgaacctaacttatttcacgatggacgcgagcatagcgtacatgttgagcgtacgaggggcatctttacagtgcaagtggacgagaacaggaggtatatgcaaaatctgaccgtcgaacagcctatcgaagtcaaaaaactcttcgtgggtggagcaccacccgagtttcagccctctcctttgcgcaacattcctccctttgagggttgtatttggaatctggttattaattccgtgcccatggattttgctcgccccgttagctttaaaaatgctgacatcggtagatgtgcacaccagaaattgcgggaggacgaggacggggccgcacctgcagagatcgtgatacagcctgagcccgtacccacccctgcttttcctactccgaccccagtattaacccacggcccatgtgctgccgaatctgaacccgcactcctaatcggaagtaaacagttcggcttgtcgcggaactcccatatcgccattgccttcgacgacacaaaagtaaagaacaggttgacaattgaactggaagtgcgcacggaagcagaatctggcctgctgttctacatggccagaatcaaccacgccgacttcgcaactgttcaactacgcaacggattgccgtattttagttacgaccttgggtcaggtgatactcacaccatgattcccacgaagatcaatgatgggcaatggcacaaaattaaaatcatgcggtctaaacaagagggtatcttgtatgtggatggcgcttcaaaccggaccatttcacccaagaaggccgacattctggacgtcgtggggatgctctacgtgggcggcctgcccataaattacacgacgaggcgcattggacctgtcacttactcaatagatgggtgcgttagaaacttacacatggcggaggccccagctgatctcgagcagcctacatctagctttcacgttggtacatgtttcgctaatgcacagaggggaacctatttcgacggcacaggcttcgctaaggcagtcggcggctttaaggtgggattagatctgctggttgaatttgagttccgcaccacgactactactggagtccttctcggcatatcatcccagaagatggatggcatgggcattgagatgattgatgagaaactgatgttccatgtggacaacggcgcaggcagattcacggctgtgtacgacgccggggttccaggccacctgtgcgacggacagtggcacaaggtaacagccaacaaaatcaagcaccgcatcgagctgactgtggatggtaatcaggtagaggcccagagcccaaaccccgcttccacaagtgccgacaccaatgaccccgtgttcgtcggaggcttccctgacgatttaaaacagttcggattgaccactagtattccatttcgtgggtgtattcgcagtctgaaactgaccaaagggaccgggaagcccctcgaagtgaactttgcaaaagccctggaactacgcggggtgcagccggtctcgtgccctgctaattag

SEQ ID NO: 8771 - DNA, 9369 bp, Artificial Sequence
  derived and/or modified sequence
atgcccggcgccgccggcgtgctgctgctgctgctgctgagcggcggcctgggcggggttcaggcgcaaaggccacagcagcagcgtcagagccaagcacatcagcagcgaggtctgttcccagccgttcttaatctggcctctaatgctctgattaccactaatgcaacatgcggagagaagggcccagagatgtattgcaagctcgtcgagcatgtgcctggacagccagtgagaaatccacagtgccgcatctgcaaccagaactcctcaaacccgaatcagcgccatccaattaccaatgcgatagacggaaagaatacctggtggcagagtccctcaatcaagaatgggatcgagtaccactatgtaactatcaccttggaccttcagcaggtgttccagattgcttacgttatagtcaaggcagccaactcgcctagaccaggtaactggattctggaacgttcacttgatgatgtggaatacaagccttggcagtaccacgctgttacagacacagaatgcctgactttgtataatatttatccacgcactggacccccaagttacgccaaagatgacgaggttatttgcacgtcattctatagcaaaatccaccctctggagaatggggagatccatattagtctgattaatggtagaccatcagccgacgatccttctcctgagttacttgagtttacctcagcccgctacatacggttacgcttccaacgcattagaacactgaatgcggacctgatgatgtttgcccacaaggacccacgcgagattgaccctattgtgacccgccgctattactattctgttaaagatatcagtgtggggggaatgtgtatctgctatggccacgcccgcgcatgtccactcgatcccgcaaccaataaatccagatgcgaatgtgaacacaatacttgtggtgatagttgcgatcagtgttgcccagggtttcaccaaaagccctggagggcgggaaccttcctaacaaagaccgaatgtgaagcttgcaattgccacggtaaggctgaagagtgctattatgatgaaaacgtggcaagaaggaatctgagtctgaatatccgcggtaaatatattggtggtggtgtgtgtataaattgcacccagaatactgctggcatcaactgtgagacttgcacggatggcttcttcaggccaaaaggtgtgtcccctaattaccctagaccatgccagccctgccattgtgaccctattggttccctaaatgaagtgtgcgtcaaggacgagaaacatgcacgaagagggctcgcacctgggagctgccattgtaagacgggttttgggggcgtgagctgtgaccgatgtgccaggggatacaccggctaccctgattgcaaggcatgtaactgttcagggctcggtagtaaaaatgaggatccatgctttggtccctgcatttgcaaagagaacgtggagggaggggattgctcgaggtgtaaatcaggctttttcaatcttcaagaggacaactggaaagggtgcgacgaatgcttctgcagtggcgtcagtaatagatgccagagttcgtactggacctatggaaaaatccaagatatgtcaggatggtacctgaccgaccttccaggcagaatccgagtggcccctcagcaggacgatcttgattctccccagcagattagtatctccaatgccgaagctagacaggcgcttcctcacagctactactggagtgcacctgcaccttacctcggaaataagctgcccgctgtcggcgggcaactcacgtttacaatctcttatgacctcgaggaggaggaggaagatactgagcgcgtcttgcagctgatgattatcctcgaagggaatgacctgtctatctcaaccgcccaggatgaagtttacttgcacccatcggaagagcacacgaatgtgcttcttctcaaggaagaaagttttacaattcacggcacgcatttccctgtccgtcggaaggagttcatgaccgtcttggcaaaccttaagagggtgctgttgcagataacctattcctttggaatggacgccattttccggctgtcatcagttaatctggaatcggccgtgtcgtacccaacagatgggagtatcgctgcagctgtcgaagtgtgccagtgtcctccagggtacacgggaagtagctgcgagtcctgttggccacgtcatagacgcgtgaatggtacgatcttcggaggaatctgcgaaccctgtcagtgtttcgggcatgctgagtcttgcgatgacgtcaccggagagtgcctaaattgcaaggatcataccggtggtccgtattgtgataagtgtctgcctggattttacggcgagcctacaaaagggacttccgaggattgccagccctgcgcctgccccctcaatatcccaagcaataacttctctcctacgtgccacctagatcggtctttaggtctgatttgcgatggatgtcccgtaggctacactggcccccgttgcgagcgatgcgcagagggttacttcggacaaccttctgttccaggaggcagctgccaaccatgccagtgcaatgataatctggactttagcattcctggcagctgcgattctctctctggcagttgtctgatatgtaaaccagggactacaggccggtactgcgaattgtgtgcggatggttatttcggagatgcagtggacgcgaaaaactgccagccttgtaggtgtaacgctggcggaagctttagcgaggtctgtcactcccagactgggcagtgcgaatgcagggcgaatgtccaggggcagcggtgtgacaaatgtaaagctggtacttttggtcttcagtccgctcgcggatgtgtcccttgcaactgtaattccttcggtagtaaatcctttgactgcgaggaatcgggtcagtgctggtgccagcctggagtgacaggaaagaaatgtgatagatgcgcccatggatacttcaatttccaagagggggggtgcaccgcttgtgagtgctcccatctaggcaacaactgtgacccaaagaccggacgatgtatctgcccaccaaatacaataggagaaaagtgtagtaaatgcgcccccaacacttggggccacagtatcactacgggatgcaaagcctgtaactgttccaccgtcgggagcctcgactttcagtgtaacgtgaataccgggcagtgcaactgtcacccaaagttttctggagctaagtgtacggagtgcagccgtggtcattggaactaccctaggtgcaacctgtgcgactgctttctcccgggtaccgacgcaacaacatgcgactctgaaactaaaaagtgtagctgctctgaccaaaccggccaatgcacctgcaaggtgaacgtggagggaattcattgtgaccgctgccggcctggcaagttcggacttgacgccaagaatccgctcggttgcagctcgtgctattgcttcggaacgacaacacagtgttcagaagctaaaggactcattaggacttgggtgaccttaaaagccgaacagacgatcctcccgctcgtcgacgaggctctccagcacacaacaactaagggtatagtcttccaacaccctgaaattgtggctcacatggatctgatgcgggaagatctccacttggaaccgttctattggaagttaccggaacagttcgaaggaaagaagctaatggcatatggggggaagctgaagtatgctatatactttgaggcgcgcgaggagacagggttctcaacctacaaccctcaggtcattattagggggggcaccccaacccatgctagaatcattgtgcggcatatggctgcccccctgatcggccagttgacacggcatgaaattgagatgaccgaaaaagagtggaaatactacggcgatgaccccagagtccaccgtacggtcacccgcgaagattttttggacatcttatacgacattcattacattcttatcaaggcaacgtacggcaacttcatgagacaatctcgcatttctgagatttctatggaggtggcagaacaggggcgcggcaccacaatgacaccacctgcagacttaatcgagaagtgtgactgtccattaggctatagtggcttaagttgcgaggcttgcttgcctggattttaccgactgaggtcgcagccgggtggcagaacgcccggccctactctggggacctgtgtgccttgccagtgcaacggccactctagtctgtgcgaccccgaaacctctatttgtcagaattgtcagcaccacaccgcgggagatttctgcgaaaggtgtgccctgggttattacggtattgtgaaaggccttccaaatgattgccagcaatgtgcttgtcctctgatctcaagcagtaataatttttcaccatcctgcgttgccgaggggctagacgactacagatgtactgcctgcccccgaggatatgaaggccaatattgcgagaggtgtgcaccaggttacacaggttcccccggtaatccaggaggatcctgccaggagtgtgagtgtgatccctatgggtctttaccagtcccctgtgaccctgtgacggggttctgcacctgtagacctggggctactggtcggaagtgtgacggttgtaaacactggcatgcgcgggaagggtgggagtgcgtgttttgcggggacgaatgcactgggttactcctgggtgaccttgctcggctggagcagatggtgatgtccatcaatttaaccggacccttgcccgccccatacaaaatgctctacggccttgaaaacatgacacaggaacttaagcatctactctctccccagcgggcgcccgaacgtttgattcagctggccgaaggaaatctgaatactttggtgaccgaaatgaacgaacttctgacaagggccactaaagttacggcggatggagaacagacaggtcaagacgccgaacgcacaaatacaagggccaagtctttaggtgagttcataaaagaactggcgcgcgacgccgaggcagtgaatgagaaggccatcaaattaaacgagactctaggaactagagacgaggccttcgagagaaatctggaaggattacagaaggaaatagaccaaatgattaaggaactgaggagaaaaaatctcgagacccagaaggagatagcagaagacgagctggtggctgcagaggctctgctgaagaaagttaagaagctgttcggcgaatcccgaggggaaaacgaggagatggagaaggatttaagagaaaaactcgctgattacaaaaacaaggtggatgatgcctgggacctgcttagagaagccactgacaagattagggaagcgaacaggctgttcgctgttaatcagaaaaatatgaccgctctggagaagaagaaggaagctgtcgaaagcggtaaaaggcagatcgaaaacaccctaaaagagggtaatgacatcctggatgaggccaacaggctcgccgacgagattaatagtattattgattacgtggaggacattcagaccaaactgcctcccatgtcagaggaactcaatgacaaaatcgacgatttgtcacaggagattaaggaccggaagctggccgaaaaggtgtcacaggccgagagtcacgctgcccagctcaatgattcttccgcggtgctggacggaatactcgatgaggcgaagaatatcagtttcaacgctacggccgcatttaaggcttattccaatatcaaagactacatcgacgaggccgaaaaagtggcaaaggaagcaaaggatctagctcacgaagctaccaagctcgccacgggtcctcgggggttgctgaaggaggacgctaagggctgtctgcagaagtcctttcgtatcctgaatgaggctaagaaactcgccaacgatgtaaaggaaaacgaggaccacttgaatggactgaaaacaaggatcgagaatgcagatgctaggaacggggatctgctgcggacactcaatgacacccttgggaagctctctgccataccaaacgataccgcagcaaagctgcaagctgtgaaggataaggccaggcaggctaacgataccgctaaagacgtgctcgcgcagatcactgagctgcaccagaacctggatggacttaaaaagaattacaataaactcgcggactctgttgcgaaaaccaacgccgtcgtgaaggatcccagtaagaacaaaataattgcggatgccgacgccactgtcaaaaaccttgaacaggaggcggaccgactcattgacaaactcaagcccataaaggagctggaggacaatcttaagaaaaatatttccgagattaaggagctcatcaaccaggccagaaagcaggccaattctattaaggtttcagtttcctccggcggagattgcattcgcacctataagcctgagattaagaagggcagctataataacattgtggtgaatgtgaaaacagccgtagccgacaacttgttattctacctggggtctgcgaagttcattgatttcctcgccatcgagatgcgcaagggcaaagtcagctttctgtgggatgtcgggagcggagtgggaagggtggaataccccgacctcaccattgatgactcttactggtatcggattgtggccagtaggacaggaagaaatggaactatctccgtgcgggctttggatggtccgaaagcctcaattgttcccagcacacaccattcaacctctcctccagggtacacaattcttgacgtagacgcaaacgcaatgctgttcgtcggcggcttgacaggtaaactgaagaaggcagatgctgtacgggttattactttcaccggatgtatgggcgagacgtactttgataacaagccaatcggactctggaacttcagagaaaaagagggggactgtaagggatgtaccgtaagtccacaggtcgaggattctgagggcaccatccagtttgatggggagggctatgcactggtgagcagacctatccgttggtatcccaacattagcaccgttatgttcaagttccgtaccttcagctcttccgcgttactgatgtacctggccaccagagacctcagggatttcatgtctgtcgaactcacagacggtcacattaaggtctcctatgacctcggatctggcatggcctccgtggtgagcaatcagaaccacaatgacgggaaatggaaatcctttacactctcccggattcaaaaacaggccaatatcagcatcgtggacatcgataccaatcaggaagagaatattgcaacctcaagctccgggaacaatttcggactggacctgaaagccgatgataagatttacttcggcggcctccctacactcagaaatctgagtatgaaggccagacctgaagtcaacctgaaaaagtactctggttgtctcaaagatatcgaaatttcccgcaccccatacaacatactgtcttcacccgactatgtaggggtcactaaaggatgtagcttggaaaacgtgtataccgtctccttcccaaaacccggtttcgtggaattgtcccccgtaccaattgacgtgggcaccgagatcaatctctctttttccacaaaaaatgagtccggcattattctgctcggctctgggggcacccccgcacctcctagacggaagcgacggcagactggacaagcctattacgctattctgctgaaccgcggcaggctcgaggtacatctctccaccggagcccgcactatgcgcaagatcgtgatccgaccggaaccgaatctatttcacgatgggcgagaacactcagtgcacgtggaaaggacccggggcatattcaccgtccaggtagacgaaaaccgcagatatatgcagaatctcactgtggaacagcccattgaagttaagaagttgttcgtgggaggcgccccacccgaattccagccatctccactgagaaacatccctccttttgagggatgcatttggaatctcgtgatcaactctgtgcccatggactttgcaagacccgtctctttcaaaaatgccgatatagggaggtgcgcccaccagaaattgcgagaagatgaagatggagccgcgccagccgaaattgtgatccaacctgagccagtgccaacacccgccttccccactcctactcctgtgttgacccatgggccatgcgccgctgagtccgagccagccctgctgatcgggtccaagcagttcggcttgtctcggaacagtcatattgccatagcatttgacgatacaaaggtgaaaaaccggctgaccatcgagcttgaggtgcggaccgaagccgagtccggactgctcttttacatggctaggattaatcatgccgatttcgccactgtgcaacttcggaacggactgccgtattttagctacgacctcggctctggagatactcatacgatgatcccaactaagatcaacgacggccagtggcacaaaattaaaatcatgagaagcaagcaggaggggattctctacgtagacggggcttcaaacagaactattagtccaaagaaggcggatatcttagacgtggtgggtatgctctacgttggaggactgccaataaattacaccacccggcggattgggcctgtgacctatagtatagatggctgcgtgagaaacctccacatggccgaggctcccgccgacctcgagcagccaacctcctccttccatgttgggacttgcttcgccaacgcacagcgaggtacatactttgacggcaccggttttgctaaagccgtgggcgggtttaaagtgggactggacctcttggtggagttcgaatttcggactaccacgactactggggtccttctcggcatctcctcccagaaaatggacggcatgggaatcgagatgatcgatgagaagctgatgttccatgttgacaatggagctggccgcttcacagcagtgtacgacgcgggcgtacctgggcacctgtgtgatggacagtggcataaggtcaccgcgaacaagataaaacacagaattgagcttacggttgatggtaatcaagtcgaagcccagagtcccaatccagcgagcacatcagctgatacaaacgaccctgtgttcgtgggggggttccccgacgacctaaaacagtttggcttgaccacaagtattcctttccggggatgcatcagaagtctgaagctgacaaagggtaccgggaaaccgctggaggtgaactttgctaaggcactcgagctgaggggagtgcagcctgtcagttgtcccgctaattag

SEQ ID NO: 8772 - DNA, 9365 bp, Artificial Sequence
  derived and/or modified sequence
atgcccggagcagcaggtgtgctgctgctgcttctgttgagtggcggtttgggtggagttcaggctcaacggcctcaacagcagcgccagtctcaggcccaccaacagagaggcctttttcctgctgtgttaaacctcgcttccaacgctctcattacaacgaacgctacctgcggggaaaagggccctgaaatgtactgcaagcttgtcgagcatgtgccaggccagcccgtgcgtaaccctcagtgtcgcatctgtaatcaaaactcgagtaatccaaaccagcgacaccccatcacgaatgccattgatggaaagaacacatggtggcaatcaccgagcattaagaatggaatcgaataccattacgttaccataaccttagacctgcagcaagtctttcagatcgcctacgtgatagtcaaagctgccaattcccccagacccggtaattggatcctcgaaagatccttggacgacgtggagtataagccatggcagtatcatgccgtaacagatacagagtgcctcacactgtacaatatttatcccaggactggtccaccatcttacgctaaagatgatgaagtaatctgtacctcattctactcgaagatccaccccctcgagaacggcgaaatccacattagtctcattaatgggagacccagtgctgacgatccgtcccctgaactgctcgagtttactagcgcacgatacatcagattgcgctttcaaagaatacggactctcaatgctgacttaatgatgtttgcacataaggaccccagagagatagatcccatagtcacccggaggtactattactctgttaaagatatctctgtcggtgggatgtgcatctgttatggacatgcccgagcatgcccacttgaccctgcgacaaacaagagtaggtgcgaatgcgagcacaatacgtgcggggatagctgtgatcagtgttgccctgggttccaccaaaagccatggcgcgcaggcacttttctgaccaagacggagtgcgaggcgtgtaattgccatggtaaagcagaggagtgttactatgatgagaacgttgcaagacgcaacttgtctctgaatatccgcggaaagtatataggaggcggagtctgcattaattgcacacagaacaccgcaggaatcaactgcgagacttgcacagatggcttcttcaggcctaaaggagtgagtccaaactacccacgtccatgtcagccttgtcactgtgatcctatcggctcccttaatgaagtatgtgtcaaagacgaaaagcatgccagacgcggactggctcccggtagttgtcattgcaaaactggctttggaggagtcagttgcgaccggtgtgcccgtggttatacaggttatccagactgcaaggcctgtaactgttcaggtttggggtcaaaaaatgaggatccgtgttttggaccatgcatatgcaaggagaatgtggagggcggagactgcagtagatgcaaatccgggttttttaacctccaagaggacaactggaaaggttgtgacgaatgcttttgcagtggagtgtctaataggtgtcagagctcatattggacctatggaaaaattcaggacatgagcgggtggtacctgactgatctgcccggtaggatcagggtggcaccacagcaagacgatctggactcccctcagcagatctctatatcaaacgccgaggcaagacaggcactaccacatagttactactggtcagctcccgctccataccttggaaacaaactgccagcagtggggggacaattgacttttaccatctcatacgatctggaagaggaggaagaagataccgaacgggtcctgcagttaatgatcattcttgaggggaacgacttgtctattagcactgcacaggatgaagtataccttcatccttccgaggagcatactaatgtgctgttgctgaaagaagaaagcttcacaattcacggaactcatttcccggtgaggaggaaggagttcatgactgttctggcaaacctgaaaagggtgcttctgcagattacctatagttttggtatggatgcaatctttcgcctgtcatcagtcaacctggagagcgctgttagttaccctaccgacggaagcatcgcagctgccgttgaagtctgccaatgcccgccaggatataccggctcatcctgcgaatcgtgttggcctaggcacagacgggtgaacggcactatcttcggcggaatctgtgaaccgtgccagtgtttcggacacgccgaatcctgcgacgatgtcaccggagaatgtctcaattgtaaggaccatacggggggtccctattgcgataaatgcttacctggcttttatggtgagcccacaaaaggtacaagtgaggattgtcagccctgtgcttgcccacttaacattccttcaaataacttttctcctacctgccatctggaccgaagccttggacttatctgcgacggatgccccgtcggatacactggcccacgttgtgagcgctgtgccgaaggatattttggccaaccctctgtacccggagggagctgccagccatgccagtgcaacgataacttggatttcagcatccccggatcttgcgacagccttagcgggtcctgcctcatatgtaagcctggaactacaggcaggtattgtgagttatgcgctgacgggtattttggagacgcagtcgacgctaagaattgtcagccatgtcggtgcaatgcaggtggtagcttctcagaggtctgccacagccagaccggacagtgtgagtgcagagcgaacgtacaggggcagcgttgcgataaatgtaaagccggaacttttggccttcagtccgcacgagggtgtgtgccttgcaactgcaacagttttggctctaaatcttttgactgtgaagaaagcggccaatgttggtgccagccaggggtgaccggaaaaaagtgcgacaggtgtgcgcacggttacttcaattttcaggaaggaggttgcacagcatgtgaatgctctcaccttggcaataattgtgaccctaagacggggaggtgcatatgccctccaaacaccattggtgagaaatgttctaaatgtgctcccaatacttggggtcacagcattactaccgggtgtaaggcctgcaactgctcaacggtgggatccctggatttccagtgtaacgttaataccggtcagtgcaactgccaccctaagttctcaggtgctaagtgcacagaatgttcccggggtcattggaattacccacgatgcaacctgtgcgactgcttcctgcctggcactgacgcaacaacttgtgattcggaaacgaagaaatgtagttgctcagatcagacagggcaatgcacatgtaaagtcaacgtcgagggcatacactgtgatcgctgcaggcctggcaaatttgggttggatgcgaagaaccccctcggttgcagcagctgttattgttttggcacaacaacccagtgctccgaggcaaaggggctgatacgaacctgggtgacactcaaggccgaacagaccattctgcccttggtcgacgaagctctgcagcatacaaccacgaagggcatcgtctttcagcaccccgagatcgttgcacacatggatctgatgcgagaggatcttcatctggagcccttctattggaaactccccgaacagttcgaaggcaaaaagctgatggcttatggcggaaaactgaagtatgccatttactttgaggctcgagaagagaccggattttctacatataatcctcaggtgatcattagaggaggcacaccaacccatgccaggatcatcgtgcgccacatggccgctcctcttattggccagctcacacgtcatgaaatcgagatgactgaaaaggaatggaagtattatggggacgacccgcgtgtccaccgcactgtgactcgagaggacttcctggatatcctgtatgacatccactacattctgatcaaagccacctacggaaattttatgcgtcagtctcgcattagtgagatttctatggaggttgcggaacaaggtcgcggtacgaccatgactccccctgcggacttgatagagaaatgtgattgtccgctgggctactctggtctgtcatgtgaagcgtgcctgcctgggttttacagactaaggtcccaacctggaggaaggactcctgggccaacgttgggcacctgtgtgccctgtcaatgcaacggacacagcagcctgtgcgaccctgaaacttctatctgtcagaattgccagcaccacacagctggggatttctgcgaaagatgtgcgctcggctactatggaatcgtcaagggtttgccaaatgactgccagcagtgtgcgtgcccattgatctcgtcctctaataacttctccccttcttgcgtggccgagggcctagacgactatagatgtactgcctgcccgagaggctatgagggccaatactgcgaacgctgcgccccaggttacactggaagccctgggaacccaggcggatcttgtcaggaatgcgaatgtgacccctatggttccctcccagtgccctgtgatcctgtcaccggtttttgcacatgccggcctggtgcaaccggccgaaaatgcgacgggtgcaagcactggcatgcccgagagggttgggagtgcgtattttgcggcgacgagtgcacaggcctgcttctcggggaccttgctaggctcgagcagatggttatgtctatcaacctgactggaccacttccagctccgtacaagatgttgtacggcctcgagaacatgactcaggaactcaagcatctcctctcgccacaacgggcacccgagcgactgattcaattagccgaggggaatctgaatacgctggtcacggagatgaatgagctactcacccgcgctacgaaggtcaccgctgatggagaacagacaggccaggacgccgagaggaccaatactcgtgccaaaagcttgggagaattcatcaaggaattagcgcgtgatgccgaagctgtgaatgagaaggccataaagctcaatgagaccttgggtactagggatgaggcctttgagcggaaccttgagggactacagaaggagatcgatcaaatgatcaaagaacttcggcgaaagaatcttgagactcagaaggagatcgccgaggatgaacttgtcgctgcagaggctctactgaagaaggtgaaaaaactgttcggggaatctcggggagaaaatgaagagatggagaaagatctaagggagaagctcgcagactacaagaacaaagttgatgacgcctgggacttgcttagggaagcgaccgacaaaatcagagaggccaatcggctttttgccgtgaaccagaagaacatgaccgctttagagaaaaagaaagaagctgttgagtccggcaagcgacagatcgagaacactcttaaagaagggaacgacatcctggacgaagcaaaccggctggccgatgagatcaattccatcattgattacgtggaggacatccagacgaagcttcccccaatgtctgaggagctgaacgacaagattgacgatctgagtcaggaaattaaagaccgaaaacttgccgagaaggtttcccaggctgaatcccacgcagcccagctcaatgattcctccgcagttctggatggaattttggacgaagcaaagaatatctctttcaatgccacagctgccttcaaggcatacagcaacataaaagactatatcgacgaagctgaaaaggtggccaaagaggcaaaagatctggcccacgaagccacaaaattggccaccggtccacgaggactgctaaaagaggacgccaagggatgcctgcagaagtcctttaggatcttgaatgaagccaagaaactggccaatgatgtgaaggagaacgaggaccatctgaacggattaaagacccgaattgaaaatgcagacgctaggaatggagatctccttcgcacactaaacgatacgcttgggaaactgtccgctattccaaatgatactgccgctaaactgcaggccgtcaaggacaaggcgaggcaggccaacgacacggcaaaggacgtcctcgcacagatcacggaactgcaccagaatctcgacgggttaaaaaaaaactataataagctcgcagacagcgttgccaagacgaacgctgtagtgaaggatccctctaagaatacggttgcggatgctgatgctaccgtgaagaacctagagcaggaggcggaccgactgattgataagcttaagcctattaaggaattagaggacaatctgaagaaaaatatttctgaaatcaaggaacttatcaaccaggcgcgaaaacaggctaatagcattaaggtgtcggttagtagcgggggagattgcataaggacctacaagcctgaaataaagaagggcagctataacaacattgttgtgaacgtgaagaccgcagtggccgataacctacttttttacctgggaagcgccaaatttatcgattttttggcaattgaaatgcggaaaggcaaggtgtcatttttgtgggacgtgggatcaggcgtcgggagggtggagtatccagacctcaccatcgatgattcttattggtacaggattgttgccagcaggactggcaggaacgggaccatctcagtgagggctctcgacggtccaaaagcttccattgtgccttcaactcatcactccacctcacctccgggttacacgatactcgatgtcgacgctaatgccatgctgtttgtcgggggactcaccggcaagcttaaaaaagcagacgcggttcgagtgatcacgtttacaggctgcatgggtgagacgtattttgacaacaaacccatcggactgtggaattttcgcgagaaagagggggactgcaagggatgcacagtgtcacctcaggtggaagactctgagggaacaatacagtttgacggtgagggttatgccctggtgtcccgccctattcgatggtacccaaacatcagtacggtgatgttcaaattcagaacttttagctccagtgctctactgatgtacctggcaacccgtgatctgcgcgatttcatgagtgttgagctgactgatggacatatcaaggtctcctatgacctggggtctggcatggccagcgtggtctctaatcaaaatcacaatgacggcaagtggaagagtttcacactcagtcgcattcagaagcaagctaacatctctattgtggacatcgacactaatcaagaggagaacattgccacatctagcagcggtaataactttggcctggatctgaaagccgatgacaaaatttacttcggtgggctgccaactctcaggaacctgagcatgaaggcacgtccggaagtaaacctgaagaagtactccggttgtcttaaggacattgagatatcaagaaccccatataatattctctcttcaccggactatgtgggggtaacaaaaggatgcagcctcgaaaacgtgtataccgtgtcctttcctaagcctgggtttgtagaactttctcccgtgccaattgatgtgggaaccgagataaatctgtctttctcaactaagaacgagtccgggatcatcttattgggcagcgggggaactccagcaccacctcgcaggaagcgccgacaaactggacaggcatactacgcgatcctattaaatcgtggtaggcttgaagttcacctttccaccggagccagaaccatgcggaaaatagtaatcaggcctgaacccaatctatttcatgacggccgtgaacacagcgtccatgtggagcgcactcggggaatcttcaccgtgcaggtcgatgagaatcgcaggtacatgcaaaatttgaccgtggaacagccaatagaggtgaagaagctgttcgttgggggagcccctcctgagttccagccgagccccctgcgtaacatcccaccattcgagggttgtatttggaacttggtgattaactcagtgcctatggatttcgcccgacccgtctcctttaaaaacgccgatataggcaggtgtgcacaccaaaagcttagggaagatgaagacggagccgctcccgcagagattgtcattcaaccagagccagtgcccacacctgcgtttcctactcctacaccagtcctgactcatggtccctgcgccgctgagtccgaacccgctctgctaatagggtctaagcagtttgggcttagcagaaactcccatattgctatcgccttcgacgacacgaaggtgaagaataggctcacaattgagctggaagtgcgcaccgaggcggaaagcgggcttttgttttacatggcccgaataaaccatgcagatttcgccacagtgcagctccgcaatggcctgccgtacttttcatatgatttgggatccggagacacccacactatgataccaaccaaaatcaatgacggtcagtggcataagattaagatcatgcgctcaaagcaagagggcatcctctatgtagacggggctagtaatcgcacaatttcccctaagaaagccgatattttggacgtggtcgggatgctgtacgtcggaggccttcctattaattatacgacgcggcgaattggtcctgtgacttattctatcgacgggtgcgtccgaaacctgcacatggccgaggctccggctgatctagagcagcctacatcttctttccacgtggggacatgttttgcgaacgcacagagaggtacttattttgacggcaccgggttcgcaaaagccgtcggcggattcaaggtaggtctggacctgttagtcgaattcgagttcaggactactacaacaaccggcgtgttactgggcattagtagtcaaaaaatggatggcatgggcattgagatgatagatgaaaaactgatgttccatgtggacaatggcgcaggaagattcaccgctgtatatgatgctggtgtgccaggacacctctgtgacggtcagtggcacaaggttaccgctaataagattaaacaccgcatcgagctgaccgtggacggtaatcaggtggaagctcagtcccctaaccccgctagcacctcagccgacactaatgatccggtgtttgtgggaggatttccagatgatctcaaacagtttggactgaccacctccatcccttttcgaggttgcatccggtctcttaagctcacaaaagggacaggaaagcctctggaggtcaatttcgctaaagccctggaactgagaggcgtgcagccagtgtcctgccccgcaaatta

SEQ ID NO: 8773 - DNA, 9368 bp, Artificial Sequence
  derived and/or modified sequence
atgccaggcgctgccggagtgctgctgttgctgctgttatccgggggattaggaggcgtgcaggctcagcgccctcaacagcagcgccagtcccaggctcatcagcagaggggtttatttcctgccgtgctaaacctcgccagtaacgctctgataacaacaaacgccacttgcggagaaaagggccctgaaatgtactgcaagctcgtagaacatgtgcccggacagcccgtcagaaatccacaatgtcggatctgtaatcagaactcgagtaacccaaatcagagacaccctattacaaatgcaatagatggcaaaaacacttggtggcagtccccatcaatcaaaaacggcatcgaataccattacgttacaataaccctggacctacagcaggtctttcaaatcgcctacgtaattgttaaggccgcaaatagccctagaccgggaaattggattctggaacggtcactggatgacgtggagtacaagccatggcagtaccatgcagtaaccgatacagaatgtctcacattgtataacatctatcctcgtactgggcctccatcatacgccaaggacgacgaagttatctgtaccagcttttattctaaaatccacccattggagaatggggagattcacatctcattaattaatggtagacccagtgccgatgatccatcacccgagcttctggagttcacatccgcccgatacattcgcctgagattccaaaggatccgcacactaaacgccgacctcatgatgtttgcacacaaggacccaagagaaatcgaccccatagtcacccggcgatattactattcagtgaaagacatctctgttggagggatgtgtatttgctacggccacgcgagagcatgcccactggatcccgctacgaacaaatcccggtgcgaatgtgagcataatacatgtggtgacagttgtgaccagtgttgccccggattccatcaaaagccgtggcgcgcagggactttcctcaccaagacagagtgcgaggcctgcaactgtcacggcaaggctgaagagtgctattatgatgaaaatgtggcacgtcgtaacttgagcctgaatattcgagggaagtatattggcggaggcgtttgtattaactgtacacagaatacagccggtataaactgcgaaacgtgcaccgacgggttttttcggcctaagggggtcagcccaaattacccacggccttgccagccttgccactgtgatccgattggatccctaaatgaggtatgcgtcaaggatgagaagcacgctaggagaggcctggcgccaggttcttgccactgcaagacaggctttggtggggttagttgtgatcgctgtgctagaggttatactggctaccccgactgcaaggcgtgcaactgttctggtctgggtagtaagaatgaagacccatgcttcggtccttgcatctgtaaagaaaacgttgaggggggtgattgtagccggtgcaaaagtggcttcttcaatctgcaggaggataattggaaaggatgcgatgagtgcttttgctcaggagtgtcaaataggtgtcagtccagctactggacttacggaaaaatccaagacatgtctggatggtacctgaccgatctacctggtcgtataagagtggcacctcagcaggatgacctggattctccgcagcagatcagcatcagcaatgcggaagcaaggcaggcactgccgcattcttactactggagcgccccagcaccttacttggggaataagctcccagcagttggtgggcagcttactttcactattagttacgatctagaggaggaagaggaggataccgaacgagtgctgcagctgatgattatccttgagggaaatgatctgtccatctccacagcacaggatgaagtgtaccttcatccatctgaagagcacaccaacgtgctattgttgaaggaggagagtttcaccattcacgggacacattttccagtgcgcagaaaagagttcatgacagttctagcaaaccttaagagagtactgcttcagataacttattcattcgggatggatgctatctttaggcttagtagcgtcaacctggaatccgcggtcagttatccaacagatggatcaatcgccgcagcagtcgaagtatgtcagtgtccgcctggttatactgggtcctcctgcgaatcatgttggccacggcataggcgagtgaacggaactatctttggcggtatctgtgaaccctgtcagtgtttcggtcacgcagagtcttgtgatgatgtaaccggcgagtgcctgaattgtaaggatcatactggcggaccttattgtgataaatgtctcccaggtttctacggcgagccaaccaaaggtaccagcgaggattgccaaccctgtgcttgtcctctgaatatcccttctaataatttcagcccaacatgccacttagaccgaagcctgggcctaatttgcgacgggtgcccagtgggatataccggtcccagatgcgaacgttgcgctgaaggctattttggccagccctctgtgccaggagggtcatgccagccctgccagtgtaacgataacctagacttttccattccaggatcttgcgactcattgtcaggatcctgcctgatatgcaagccgggaaccacagggagatattgtgaactgtgcgctgacggatatttcggcgacgccgtagatgccaaaaattgtcagccatgtcgctgtaacgccggaggctccttcagcgaggtctgccactctcagaccgggcaatgtgagtgtagagccaatgtacagggtcaacgatgcgacaagtgcaaagcaggaacatttggactgcagtcagcccgaggctgcgtgccctgtaattgcaacagtttcgggagcaaatcctttgattgcgaggagagcgggcaatgttggtgccagcctggggttactgggaagaagtgcgatcgctgcgcacatggctacttcaatttccaagaaggaggatgtaccgcatgcgaatgttctcatctggggaataactgcgacccaaagacgggtcgctgcatctgccccccaaatacaattggtgagaagtgcagcaagtgcgcaccaaatacctgggggcattccataactacaggatgtaaggcttgcaattgctcgacggttgggagcctggatttccagtgtaacgtgaacactggccaatgtaactgtcaccctaagttttcgggagctaaatgcaccgaatgctccagaggccattggaactaccctagatgcaacctgtgcgattgtttcctcccaggcaccgacgccacaacatgcgacagcgaaacaaagaagtgtagctgtagtgaccagaccggccaatgtacttgcaaagtgaacgtggaggggattcattgtgaccgctgcagaccgggaaagtttggcctggatgccaaaaatcccctcggctgctcgagttgctattgcttcggtaccactacgcagtgtagcgaagccaagggattgataaggacttgggtgacccttaaggccgaacaaactatcttgcccctggtggacgaggccctccaacatacaaccactaaaggaatcgtcttccaacatcctgagatagtggctcacatggatttgatgagagaagatttacacttggagcctttttattggaaattgcccgaacaatttgagggaaagaagcttatggcctatgggggaaagttaaagtacgctatttactttgaggccagggaagaaacagggttctccacctataatcctcaagtgatcatcaggggaggcactcccactcacgctcgtattattgtcaggcatatggcggcacccctgatcggccagcttacccgtcatgagatcgagatgaccgaaaaggagtggaaatactatggagatgatccacgggttcatcgaaccgtgacccgcgaagactttctggatattctctatgacattcactacatcttgattaaggctacctacggaaacttcatgcgtcagtcccgcatttccgaaataagtatggaagtggctgagcagggtcgaggtactactatgactcctcctgcagatttgatcgaaaagtgcgattgtccgctgggatacagtggtctttcatgtgaagcttgtcttccgggattttaccgacttagaagtcagcccggaggacgcactccgggacccacactcgggacctgcgttccttgtcagtgtaatggtcacagttccctctgcgacccagagactagtatctgccagaattgccagcatcacactgcgggtgacttctgcgagcgctgtgctttgggctattacggaattgtgaaggggcttcccaatgattgtcagcagtgcgcatgccccctgatatcctcgtcaaacaatttttctccaagttgtgtcgccgaaggcctggatgactaccgttgtactgcttgccctaggggatacgagggtcagtactgcgagaggtgcgccccaggctataccggctctccgggtaaccccggaggatcatgccaggaatgcgagtgcgacccatacggtagcttacccgtgccctgcgaccctgtgactggattctgcacctgcagacccggagctaccggcaggaaatgtgacggctgtaagcattggcacgccagagagggatgggagtgtgttttctgcggtgacgaatgcactggcctgctacttggcgacctcgcgagactggaacagatggtgatgtctattaatttgacggggccactaccagccccatataaaatgctgtatggcctggagaacatgactcaggaactgaagcacctgttgtctccacagagggcgccagagcgcttaatccaacttgctgagggaaatcttaacacgctcgtcacagagatgaacgaactgctgactcgcgcaacaaaagttacggcggacggtgagcagacaggccaggacgccgaacgtaccaatacgagggccaagtccctcggagaattcataaaggagcttgccagagatgccgaggccgtcaacgagaaagctatcaaattgaacgaaacactcggaacccgtgacgaggcattcgagcgtaatttagagggtctccaaaaagagattgatcagatgataaaggaattgaggcggaagaatcttgaaacacagaaagagatagccgaggatgaattagtcgccgcagaggccttgctgaagaaggttaagaaattgtttggcgagtcacgaggggaaaatgaagagatggagaaggacctgagggagaaactcgccgattacaagaacaaggtggatgatgcctgggacctgctccgagaagctactgataaaattcgagaagcaaaccgcctctttgcggtcaatcagaagaacatgaccgccctagagaaaaagaaggaagccgtggagagtggcaaacggcaaattgaaaacacactgaaggaaggcaacgatattctggacgaagccaatcgcctcgccgatgaaatcaacagtatcattgattatgtggaggatatccaaacgaagctgccccctatgagtgaggagctcaatgataagattgatgacctctcgcaggagatcaaagatcggaagctcgctgaaaaggttagccaggccgagagccacgccgctcagctgaacgacagttccgctgtgctcgatggaatcctcgatgaagccaagaatatttctttcaatgcaaccgctgcgttcaaggcttattctaacatcaaagattatattgatgaggctgagaaagtcgcgaaagaggctaaagaccttgcccatgaggctacgaagctcgctacaggtcccaggggattgctgaaggaagacgccaaagggtgcctccagaaatccttccggattctgaacgaggccaagaagctcgccaacgatgtgaaggaaaacgaagatcatctgaacggactaaagacccggatcgagaatgctgacgcacggaatggagacttgctcagaaccttgaatgacaccctgggcaagctcagcgcgatccccaacgatacggcagccaagctgcaggcagtgaaggacaaagctcgacaggcaaatgacacagccaaggatgtactggcacaaataaccgagctgcaccagaatctagacggcttgaagaagaactacaacaagctagccgactctgttgccaagactaacgccgtggtcaaagatccctcaaagaacaaaatcgtggcagacgccgacgcaactgtgaaaaatctggaacaggaagcagacagacttatcgataaactcaagcctatcaaggagctagaggacaacttaaaaaaaaacatctccgaaattaaggaactgattaaccaggccagaaagcaggctaacagcattaaagtcagtgtaagctctggcggagattgtataagaacctataagcccgagatcaaaaaaggctcctataacaacattgtagttaacgtgaaaactgcagtggctgacaacctgctgttttacttaggcagtgctaaattcatcgatttcctcgcaatcgagatgaggaagggaaaggtcagtttcctctgggacgtggggtccggtgttggcagagtggagtatccagatttgacaatcgatgattcttattggtatcggattgtggcctccaggaccggccgaaacggcacaatcagtgtgcgtgctctcgatggacctaaggcaagtatcgtgccatctacacaccacagcacttccccacctggatataccatcttagacgtagatgccaatgccatgctcttcgtagggggattgacaggcaaattaaaaaaggcagacgcagtccgggtaataacatttaccggctgtatgggcgagacatatttcgacaataagcctattgggctgtggaattttcgtgagaaagagggcgactgtaaaggatgtacagtgtcgcctcaagtcgaagatagcgaggggactattcaatttgatggtgaggggtatgccctcgttagtcggccaatcaggtggtacccaaacatttctacagtgatgtttaagttcagaaccttcagctcgtccgcacttcttatgtaccttgcaacaagggatttgcgcgactttatgtccgtggagctgacggatggccacattaaggtatcctacgatcttggatccggcatggccagtgtggtgtctaaccagaatcacaatgacggcaaatggaagtcttttaccttatctcggatccagaaacaggctaatatctcgatcgtcgatatcgacacaaatcaggaagaaaacatcgccacctccagttccggaaataatttcggactggacctgaaggcagatgacaaaatctactttggagggctgcctaccttgcgaaatcttagattattcaacaggccagaggtgaatctgaagaagtatagcggctgcttaaaagacattgagatatcccggacaccctacaacatcctttcgtcccctgactatgtcggagttactaagggatgctctctcgagaacgtgtataccgtgagtttccccaaaccagggtttgtcgagttatccccggttccaatcgatgtgggcacagaaatcaacctgagcttttcaaccaagaacgagtctggcattatcttgctgggcagcggaggcaccccagccccacccagacggaagcggcgacagacaggtcaagcctattatgcaatactgctcaatcggggaaggctcgaggtgcacctgagtacgggcgctcgaaccatgcggaaaatcgtgattaggcccgaacccaatctgttccacgacggtcgcgaacattcagtacatgtcgagcggacacggggaattttcactgttcaggtggatgaaaacaggaggtatatgcaaaatttgacagtagagcagccaattgaggtaaaaaagctctttgtggggggagcaccaccagagttccagccgtccccacttcggaacattccaccctttgagggctgcatatggaatctagttatcaattctgtgccgatggattttgcacgcccagtgagcttcaaaaatgctgatatcgggcgatgcgctcaccagaaacttcgggaagacgaagacggcgcagcccctgccgagattgtgatccagcccgaacccgtgcctaccccagccttcccgactccaactccggttctgactcatgggccatgtgctgctgagagcgaacctgccctgcttattggcagtaagcagttcgggctgtctcggaactcccatattgctattgcctttgacgatactaaagttaagaaccggctcacgattgagcttgaggtccgcactgaggcagaaagcggcttactcttttatatggccaggatcaaccacgcagacttcgcgacagtccaactcaggaacggattgccatatttttcttatgatctgggatccggcgacacccacaccatgatacccactaagatcaatgacggccagtggcataaaatcaagattatgcggagcaagcaggaggggatcctgtatgtggacggggcttcgaatcgcaccatcagcccgaaaaaagctgacattctggacgtggtaggcatgctctatgtcggcggacttccaattaactatacaacacgtcgaatcggaccggtgacttactcgattgacggatgcgttcggaacctgcatatggcggaagctcccgcagaccttgaacaacccacttctagctttcacgtgggtacgtgcttcgcaaacgcccagcggggtacatacttcgatggtacagggttcgctaaggccgtggggggattcaaagtggggctcgatctgcttgtcgagttcgagtttcggaccacgactacaaccggagtgctgttaggcatcagcagccagaagatggacggaatggggattgaaatgatcgatgagaagcttatgttccatgtggataacggggctggcaggtttaccgctgtctacgacgccggagtgccagggcacctttgtgacgggcagtggcataaagtcacagctaacaagatcaaacatagaattgagctcacagtggacggaaatcaggtggaggcccagagtccaaatccggcatctacctccgcagacacgaacgaccctgtgttcgtggggggttttcctgatgatctaaagcaattcgggctgacaacaagcattcccttccgaggctgtattcggtccctgaagctgaccaagggcacggggaaaccattggaagtgaactttgctaaggccctggagctccgtggcgtccagccagtgtcctgtccggctaatta

SEQ ID NO: 8774 - DNA, 9368 bp, Artificial Sequence
  derived and/or modified sequence
atgcctggagccgctggcgtgctgttacttctgctcctttccggcggactcgggggtgtgcaagcccagcggcctcaacagcaaagacagagccaagcacatcagcaaagagggctgttccccgctgtgctcaacctggcttctaacgccctgatcacaacaaacgccacttgtggggaaaaagggccagaaatgtactgtaagttagtggagcacgttcccggacagccggtgaggaatccccaatgcaggatatgtaaccagaatagctccaatccgaatcagcggcatcccattacaaatgctatcgacggaaaaaatacatggtggcagtctccgtctatcaagaacggcatagagtaccactatgtcactattacgcttgatctacagcaggttttccaaatcgcttacgtgatagtgaaggctgccaactctccaagacccggaaattggattctggaacggtcactggacgacgtcgagtacaagccatggcagtatcatgctgtgacggacactgagtgcctgacactgtataatatatatcccaggaccgggcctccatcctatgcgaaagatgacgaagtcatatgcacatccttttatagtaaaatacacccactggaaaatggggaaatccacatctcactgatcaatggacgacccagcgccgacgatccatcccctgagctcctggagttcaccagtgcgcgatacataaggctgcgcttccagaggatccgcacattgaacgccgaccttatgatgtttgcacacaaagacccaagagaaatagatcctattgtaacccggcgttactattactcagtcaaggacataagcgttggaggtatgtgtatttgttacgggcacgcaagggcatgccccctggatcccgcaactaacaagtcccggtgtgaatgcgagcataacacctgtggggactcctgtgaccagtgctgccctggatttcatcagaaaccatggcgcgcaggcacatttctcactaagacggaatgtgaggcctgtaattgccatggtaaagcggaggaatgctattatgatgagaacgtggcccgaagaaatctatccctgaatatcagaggaaagtacataggaggtggcgtgtgtattaactgcactcaaaacactgcgggtatcaactgcgagacctgtactgacggattctttagacctaaaggagtgtcccccaactacccaaggccgtgtcagccatgccactgtgatccgatcggtagtctcaacgaagtgtgtgtgaaagacgaaaaacatgctcgtagaggtcttgccccagggtcctgtcactgcaagaccggatttggaggcgtgtcctgcgatcggtgcgcgcgtggatacacgggctatcctgattgcaaggcttgcaactgttcagggcttgggtctaaaaatgaggacccatgttttggtccttgcatttgcaaggagaacgttgagggcggagactgctcacggtgtaagagcgggtttttcaatctccaggaggacaactggaaaggctgtgatgagtgtttttgtagcggtgtatctaaccgatgccagagctcttactggacttatggaaagattcaagacatgtccggatggtatttgacagatctgcctggtcgaatacgggtggctccccagcaagacgacttggatagtccacagcagatctcaattagcaacgcagaggccaggcaggctctgccccactcatattactggtccgcccctgccccatatctcggcaataagcttccagctgttggaggccaacttacgtttactatctcctacgacctggaagaagaagaggaggacacagaaagggtgctacagctgatgattatactcgagggaaacgatctgtccatttctactgcgcaggatgaggtctatctgcacccctctgaggaacacacgaatgtgctcctcctgaaagaggagtcattcacaattcatgggacacacttccccgtaaggcggaaggagttcatgaccgtgttggcaaacctaaagcgggttctcctgcagattacgtacagctttggaatggacgcaatcttccgcctaagcagcgttaatttagagtcagcagtatcctatccaactgacggttctattgcggctgctgtggaggtctgccagtgccctcccggatatactggctcttcttgcgaatcttgttggcctcggcacagacgcgtgaatggtacaatattcggtgggatttgcgagccctgtcagtgctttggccatgccgagagctgcgacgatgtgaccggggagtgtctgaactgtaaggaccacaccgggggaccgtattgtgacaagtgccttcctggattttatggtgagcctactaaaggcacatcagaggactgtcagccctgcgcgtgtcccctgaacattcctagtaacaactttagcccaacatgccatctcgatcggtcattaggactgatttgtgacggctgccctgtgggatatacggggccacggtgcgagcggtgcgctgaaggttacttcggccagccttctgtaccgggagggagttgccagccatgtcagtgcaacgataacttagacttctctatcccaggctcttgtgactccttatccggcagctgcttgatctgtaagcccggaacaaccggaaggtactgtgagctatgcgcagatggttacttcggcgatgccgtggatgcgaagaattgccagccttgtcggtgcaatgcaggcggttcgttcagcgaggtgtgccacagccagacgggtcaatgtgagtgccgagcaaatgtgcagggccagcggtgtgataaatgcaaagcaggcacatttgggctgcagagtgcgaggggctgcgttccttgtaactgtaattcctttggatcaaagagcttcgactgtgaagagagcggccagtgctggtgtcagcccggtgtgaccgggaagaaatgcgatagatgcgctcacgggtactttaactttcaagaagggggttgcacagcttgcgagtgcagtcacctgggaaacaactgtgatcctaagaccggaagatgcatttgccccccaaatacaatcggcgagaaatgtagcaaatgtgcgcctaatacctgggggcacagcatcacaactggttgtaaagcctgcaactgttccacagtgggatctcttgattttcagtgcaacgtgaatactggtcagtgtaactgtcacccaaaatttagcggggcaaaatgcaccgaatgtagccgcggacactggaactaccccaggtgtaacctgtgtgattgctttcttcctggaacggacgccacaacatgtgattctgaaacgaagaaatgctcttgcagcgaccagaccgggcagtgtacctgcaaggtcaacgtcgaggggatacactgcgacaggtgcaggccaggtaaattcgggctggacgccaagaaccctctgggctgttcatcctgctactgcttcggcacgactacgcagtgtagtgaagcgaaaggcctcattcggacatgggtgaccctgaaggccgaacagactatcctcccgctggttgacgaggcattacagcacacaacgacgaaggggatcgtgttccagcaccctgagattgttgctcacatggacctcatgcgcgaggacctccacctagaaccattttactggaagctgcctgaacaatttgaggggaagaaacttatggcctatggaggcaaacttaaatacgcaatttattttgaggcgagagaggagacaggcttttctacttacaaccctcaagtgatcatcagaggcggtacacccacccacgcccgaataattgtgcgtcacatggcagcacctttgataggacagcttactaggcacgaaattgaaatgacggaaaaagaatggaagtactacggggatgatccgagagtgcacagaactgtcacaagggaggattttcttgacatcttatacgatattcattatatcttgatcaaggcaacctacggaaattttatgcggcagtcgcgcatttcagaaataagtatggaggtggctgaacaggggcgaggaaccactatgacaccgccagcagatttgattgagaagtgtgactgccccctcggctacagcgggctgtcttgtgaggcctgcctgccgggtttctaccgactgcgaagccagccaggcggacggactcccggtcctacattggggacctgtgtcccctgccagtgcaatggccattcctctctttgcgacccagagacaagcatttgtcagaactgccaacatcatacagccggtgatttctgtgaacgatgcgccctaggctactatgggatcgttaaaggcctgcctaatgattgccagcagtgtgcatgtccccttatctcaagcagtaataacttcagcccgagctgtgttgccgagggactggatgactatcgctgtaccgcttgccctcgtgggtatgaaggacagtactgtgagcgctgcgcacctggctacactggctcccccggaaatcccggtggatcatgccaagagtgtgaatgcgatccctatggctccctaccagtaccctgcgatccggtgacaggattttgcacctgtcggcctggcgctaccgggcgaaagtgtgacgggtgcaaacattggcacgctagagaaggctgggagtgcgtcttctgcggggatgagtgcacagggctcttgcttggcgacttggctcggctcgagcagatggtgatgagcatcaatctgacaggtcccttgccagctccctataagatgctttacggcttggaaaatatgactcaggagttaaaacacctgctctccccgcagagagcccctgaaaggctgatccagctagcggagggcaatctgaatacgcttgttaccgagatgaatgagttgctgacacgggcaacaaaggtcacggccgacggagagcagaccggccaggatgccgagcgaaccaacacacgggctaaatcattgggggagtttataaaggaactagcaagagatgccgaagctgttaacgagaaagctatcaagctgaacgaaactcttgggactagggacgaggcttttgaaaggaacctggaaggactgcagaaagaaatagatcagatgatcaaagaactgagacgaaaaaatttggaaacccaaaaggagattgcagaggacgagcttgtcgccgcagaggcccttctgaaaaaagtgaagaaactatttggggagtcccggggtgaaaacgaggagatggagaaagatcttcgggagaagttggcagattacaagaacaaagtcgatgacgcttgggacctgcttcgtgaggctacagataagatcagagaggccaatcggctttttgcggttaatcagaagaacatgaccgcacttgaaaagaagaaagaggcggtggagagcggcaagcgccagattgaaaataccctgaaggaaggtaatgacattctcgacgaagcgaacagattggcagacgaaatcaattcaataatcgattacgttgaagatattcagacaaaactgcctccgatgtcggaagaattgaacgataaaatcgacgacctgtctcaagagatcaaggataggaagctggctgaaaaggtgtctcaggccgagagccatgcggctcagcttaacgatagctctgctgttttggacggcattttagacgaagctaagaatatctcctttaacgctacagcagctttcaaggcctactcaaacatcaaagactatatcgacgaagccgaaaaagtggcaaaagaggcaaaagatttagcccacgaagcaactaagcttgctaccggcccacggggacttctgaaggaggatgccaaagggtgcctccagaaatcgttccgaatcctgaatgaagccaaaaaactggctaatgacgtcaaggagaatgaggatcacctgaacggtctgaaaaccagaatcgagaatgctgacgcaagaaacggtgatcttctgaggaccctcaacgacactttgggaaagctttcggctatcccgaacgacactgcagctaagctccaggcagtcaaggacaaagcccgtcaagccaacgatacagctaaagacgtgttagcccagatcactgagctgcatcagaacctggacggactcaaaaagaattataataagctggcagattcagtcgccaagacaaacgcagtggtgaaagatcctagtaaaaataaaattatcgctgacgctgacgcgactgttaagaatctcgaacaagaggctgatcgcttgatcgacaagctaaagccaattaaggaactcgaggataacctcaagaaaaacatcagtgaaattaaagagttaattaaccaggctcggaagcaggccaacagtatcaaggtctccgtctctagtggcggtgactgcattagaacatataagcctgagatcaaaaaaggctcatataacaatatcgttgtgaatgtgaaaacggctgttgctgacaatctgcttttctatctgggatccgctaaattcatcgatttccttgccattgaaatgcggaaagggaaagtttcgttcctgtgggacgtaggttctggggtgggacgggttgagtatcccgatttgactattgacgacagctattggtatagaattgtggccagcaggactggccgaaatgggactatttcagtgcgcgctctggacgggcctaaagcctccatcgtgccttctactcaccactccacgtcgcctccaggctacaccatcctggacgttgatgccaacgccatgttatttgtgggcggactgacaggcaaactgaaaaaggctgacgccgtgagagtgattacatttacaggctgtatgggggaaacctacttcgacaataaaccaatcgggctgtggaacttccgagaaaaagagggcgactgcaaggggtgtacagtgagcccccaggtggaggattctgaaggaaccatccagttcgatggggagggatatgctctggtcagtcggcctatcagatggtacccaaacattagcacagtgatgttcaagttccggactttttcttcttcagcattgctcatgtatctggcgaccagagatttaagagattttatgtctgtcgagctgacggacggacatatcaaagtgtcctacgatctggggtcgggaatggcatcagtcgtatcaaaccaaaaccacaatgatgggaaatggaaaagcttcaccctttccagaatccagaagcaagctaacattagcatagtggatatcgatacaaatcaggaggaaaacatcgcaacatcctctagtggcaacaatttcggcctggatctcaaagccgatgataaaatatacttcggtggactccccacgctccgaaatttgtcaatgaaagccaggcctgaagtgaacctcaagaaatatagtggatgtttgaaggacattgaaatctctcgtacaccgtataacattctatcatcacccgattacgtgggtgtaaccaagggctgctctttggaaaatgtatacactgtctctttcccaaaacctggtttcgtggaactctccccagtccccatagatgtgggcacggagatcaacctaagcttttccacaaaaaacgagtccggtatcatcctgttggggtctggagggactccagcacctcctcgaaggaaaaggcggcagaccgggcaggcgtattacgctattcttctgaatcgcggacgcctcgaagtacacctgagtacaggcgcacggacaatgcgcaaaattgtgatccgtcccgaacccaatctgtttcacgatggaagagagcactcagtccacgtcgaaagaacgcgagggatcttcaccgtgcaggttgacgagaaccggaggtacatgcaaaatctcactgtcgagcagcccatagaggtaaaaaagctatttgtgggcggtgcaccccctgagttccagcctagtccattgcgcaacatacccccattcgaaggatgtatctggaatctggtgataaattctgttccaatggattttgcacggccagtgtctttcaaaaacgcagacataggcaggtgcgctcaccagaagctgcgtgaagacgaagatggcgcagcccctgctgagattgtcatacaaccagagccagtgccaacaccagccttccccacccccacgccggttctgacccatgggccatgtgctgcggagagcgaacccgcactgttgatcgggtctaaacagtttggtttgagcagaaatagtcatatcgctattgcattcgatgacacaaaagtcaagaatcgcctgactattgagttggaggtgcgcaccgaggcagaaagcggtctgcttttttatatggcacggatcaatcatgccgacttcgctaccgtgcagctccggaatggtctgccttatttcagctatgacctgggatcaggtgatacacacaccatgattcctacaaagattaacgacggacagtggcataaaataaagatcatgagaagcaaacaggagggtatattgtatgtggatggggcaagtaatagaaccattagtccaaaaaaggcggatattctggacgtggtgggcatgctatatgtggggggactccctatcaattacacaactagacggattggaccagttacctatagtatagatgggtgcgtaaggaacctacatatggctgaagcccctgccgacctggagcagccaacatcttccttccacgtaggcacatgttttgctaatgctcaacgcggaacctatttcgacggtactggctttgcaaaagcagttggcggattcaaagtgggtctcgatctattagtggaatttgagtttagaaccacaaccaccaccggagttctcttgggcatctcttctcagaagatggatggcatgggaatcgagatgattgacgagaaactgatgttccatgttgacaacggggctggccgttttacagcagtgtacgatgcaggcgtgcccggacatttgtgtgacggacagtggcataaggtcactgctaataagataaaacacaggatcgaattaacagtggatggaaatcaggttgaagcacagtccccaaatcctgccagtaccagcgcagacactaatgatcccgtatttgtcgggggtttcccagacgatctgaagcaatttgggcttaccacctctatcccatttcgcggatgtattcggagcctgaaattgacaaagggtacaggcaagcccctggaggtgaatttcgctaaagcgctggaactgcgcggtgtgcagccggtgagctgccccgctaacta

SEQ ID NO: 8775 - DNA, 9366 bp, Artificial Sequence
  derived and/or modified sequence
atgcccggcgccgccggcgtgctgctgctgctgctgctgagcggcggcctgggcggcgtgcaggcccagagaccccagcagcagagacagagccaggcccaccagcagagaggcctgttccccgccgtgctgaacctggccagcaacgccctgatcaccaccaacgccacctgcggcgagaagggccccgagatgtactgcaagctggtggagcacgtgcccggccagcccgtgagaaacccccagtgcagaatctgcaaccagaacagcagcaaccccaaccagagacaccccatcaccaacgccatcgacggcaagaacacctggtggcagagccccagcatcaagaacggcatcgagtaccactacgtgaccatcaccctggacctgcagcaggtgttccagatcgcctacgtgatcgtgaaggccgccaacagccccagacccggcaactggatcctggagagaagcctggacgacgtggagtacaagccctggcagtaccacgccgtgaccgacaccgagtgcctgaccctgtacaacatctaccccagaaccggcccccccagctacgccaaggacgacgaggtgatctgcaccagcttctacagcaagatccaccccctggagaacggcgagatccacatcagcctgatcaacggcagacccagcgccgacgaccccagccccgagctgctggagttcaccagcgccagatacatcagactgagattccagagaatcagaaccctgaacgccgacctgatgatgttcgcccacaaggaccccagagagatcgaccccatcgtgaccagaagatactactacagcgtgaaggacatcagcgtgggcggcatgtgcatctgctacggccacgccagagcctgccccctggaccccgccaccaacaagagcagatgcgagtgcgagcacaacacctgcggcgacagctgcgaccagtgctgccccggcttccaccagaagccctggagagccggcaccttcctgaccaagaccgagtgcgaggcctgcaactgccacggcaaggccgaggagtgctactacgacgagaacgtggccagaagaaacctgagcctgaacatcagaggcaagtacatcggcggcggcgtgtgcatcaactgcacccagaacaccgccggcatcaactgcgagacctgcaccgacggcttcttcagacccaagggcgtgagccccaactaccccagaccctgccagccctgccactgcgaccccatcggcagcctgaacgaggtgtgcgtgaaggacgagaagcacgccagaagaggcctggcccccggcagctgccactgcaagaccggcttcggcggcgtgagctgcgacagatgcgccagaggctacaccggctaccccgactgcaaggcctgcaactgcagcggcctgggcagcaagaacgaggacccctgcttcggcccctgcatctgcaaggagaacgtggagggcggcgactgcagcagatgcaagagcggcttcttcaacctgcaggaggacaactggaagggctgcgacgagtgcttctgcagcggcgtgagcaacagatgccagagcagctactggacctacggcaagatccaggacatgagcggctggtacctgaccgacctgcccggcagaatcagagtggccccccagcaggacgacctggacagcccccagcagatcagcatcagcaacgccgaggccagacaggccctgccccacagctactactggagcgcccccgccccctacctgggcaacaagctgcccgccgtgggcggccagctgaccttcaccatcagctacgacctggaggaggaggaggaggacaccgagagagtgctgcagctgatgatcatcctggagggcaacgacctgagcatcagcaccgcccaggacgaggtgtacctgcaccccagcgaggagcacaccaacgtgctgctgctgaaggaggagagcttcaccatccacggcacccacttccccgtgagaagaaaggagttcatgaccgtgctggccaacctgaagagagtgctgctgcagatcacctacagcttcggcatggacgccatcttcagactgagcagcgtgaacctggagagcgccgtgagctaccccaccgacggcagcatcgccgccgccgtggaggtgtgccagtgcccccccggctacaccggcagcagctgcgagagctgctggcccagacacagaagagtgaacggcaccatcttcggcggcatctgcgagccctgccagtgcttcggccacgccgagagctgcgacgacgtgaccggcgagtgcctgaactgcaaggaccacaccggcggcccctactgcgacaagtgcctgcccggcttctacggcgagcccaccaagggcaccagcgaggactgccagccctgcgcctgccccctgaacatccccagcaacaacttcagccccacctgccacctggacagaagcctgggcctgatctgcgacggctgccccgtgggctacaccggccccagatgcgagagatgcgccgagggctacttcggccagcccagcgtgcccggcggcagctgccagccctgccagtgcaacgacaacctggacttcagcatccccggcagctgcgacagcctgagcggcagctgcctgatctgcaagcccggcaccaccggcagatactgcgagctgtgcgccgacggctacttcggcgacgccgtggacgccaagaactgccagccctgcagatgcaacgccggcggcagcttcagcgaggtgtgccacagccagaccggccagtgcgagtgcagagccaacgtgcagggccagagatgcgacaagtgcaaggccggcaccttcggcctgcagagcgccagaggctgcgtgccctgcaactgcaacagcttcggcagcaagagcttcgactgcgaggagagcggccagtgctggtgccagcccggcgtgaccggcaagaagtgcgacagatgcgcccacggctacttcaacttccaggagggcggctgcaccgcctgcgagtgcagccacctgggcaacaactgcgaccccaagaccggcagatgcatctgcccccccaacaccatcggcgagaagtgcagcaagtgcgcccccaacacctggggccacagcatcaccaccggctgcaaggcctgcaactgcagcaccgtgggcagcctggacttccagtgcaacgtgaacaccggccagtgcaactgccaccccaagttcagcggcgccaagtgcaccgagtgcagcagaggccactggaactaccccagatgcaacctgtgcgactgcttcctgcccggcaccgacgccaccacctgcgacagcgagaccaagaagtgcagctgcagcgaccagaccggccagtgcacctgcaaggtgaacgtggagggcatccactgcgacagatgcagacccggcaagttcggcctggacgccaagaaccccctgggctgcagcagctgctactgcttcggcaccaccacccagtgcagcgaggccaagggcctgatcagaacctgggtgaccctgaaggccgagcagaccatcctgcccctggtggacgaggccctgcagcacaccaccaccaagggcatcgtgttccagcaccccgagatcgtggcccacatggacctgatgagagaggacctgcacctggagcccttctactggaagctgcccgagcagttcgagggcaagaagctgatggcctacggcggcaagctgaagtacgccatctacttcgaggccagagaggagaccggcttcagcacctacaacccccaggtgatcatcagaggcggcacccccacccacgccagaatcatcgtgagacacatggccgcccccctgatcggccagctgaccagacacgagatcgagatgaccgagaaggagtggaagtactacggcgacgaccccagagtgcacagaaccgtgaccagagaggacttcctggacatcctgtacgacatccactacatcctgatcaaggccacctacggcaacttcatgagacagagcagaatcagcgagatcagcatggaggtggccgagcagggcagaggcaccaccatgaccccccccgccgacctgatcgagaagtgcgactgccccctgggctacagcggcctgagctgcgaggcctgcctgcccggcttctacagactgagaagccagcccggcggcagaacccccggccccaccctgggcacctgcgtgccctgccagtgcaacggccacagcagcctgtgcgaccccgagaccagcatctgccagaactgccagcaccacaccgccggcgacttctgcgagagatgcgccctgggctactacggcatcgtgaagggcctgcccaacgactgccagcagtgcgcctgccccctgatcagcagcagcaacaacttcagccccagctgcgtggccgagggcctggacgactacagatgcaccgcctgccccagaggctacgagggccagtactgcgagagatgcgcccccggctacaccggcagccccggcaaccccggcggcagctgccaggagtgcgagtgcgacccctacggcagcctgcccgtgccctgcgaccccgtgaccggcttctgcacctgcagacccggcgccaccggcagaaagtgcgacggctgcaagcactggcacgccagagagggctgggagtgcgtgttctgcggcgacgagtgcaccggcctgctgctgggcgacctggccagactggagcagatggtgatgagcatcaacctgaccggccccctgcccgccccctacaagatgctgtacggcctggagaacatgacccaggagctgaagcacctgctgagcccccagagagcccccgagagactgatccagctggccgagggcaacctgaacaccctggtgaccgagatgaacgagctgctgaccagagccaccaaggtgaccgccgacggcgagcagaccggccaggacgccgagagaaccaacaccagagccaagagcctgggcgagttcatcaaggagctggccagagacgccgaggccgtgaacgagaaggccatcaagctgaacgagaccctgggcaccagagacgaggccttcgagagaaacctggagggcctgcagaaggagatcgaccagatgatcaaggagctgagaagaaagaacctggagacccagaaggagatcgccgaggacgagctggtggccgccgaggccctgctgaagaaggtgaagaagctgttcggcgagagcagaggcgagaacgaggagatggagaaggacctgagagagaagctggccgactacaagaacaaggtggacgacgcctgggacctgctgagagaggccaccgacaagatcagagaggccaacagactgttcgccgtgaaccagaagaacatgaccgccctggagaagaagaaggaggccgtggagagcggcaagagacagatcgagaacaccctgaaggagggcaacgacatcctggacgaggccaacagactggccgacgagatcaacagcatcatcgactacgtggaggacatccagaccaagctgccccccatgagcgaggagctgaacgacaagatcgacgacctgagccaggagatcaaggacagaaagctggccgagaaggtgagccaggccgagagccacgccgcccagctgaacgacagcagcgccgtgctggacggcatcctggacgaggccaagaacatcagcttcaacgccaccgccgccttcaaggcctacagcaacatcaaggactacatcgacgaggccgagaaggtggccaaggaggccaaggacctggcccacgaggccaccaagctggccaccggccccagaggcctgctgaaggaggacgccaagggctgcctgcagaagagcttcagaatcctgaacgaggccaagaagctggccaacgacgtgaaggagaacgaggaccacctgaacggcctgaagaccagaatcgagaacgccgacgccagaaacggcgacctgctgagaaccctgaacgacaccctgggcaagctgagcgccatccccaacgacaccgccgccaagctgcaggccgtgaaggacaaggccagacaggccaacgacaccgccaaggacgtgctggcccagatcaccgagctgcaccagaacctggacggcctgaagaagaactacaacaagctggccgacagcgtggccaagaccaacgccgtggtgaaggaccccagcaagaacaccgtggccgacgccgacgccaccgtgaagaacctggagcaggaggccgacagactgatcgacaagctgaagcccatcaaggagctggaggacaacctgaagaagaacatcagcgagatcaaggagctgatcaaccaggccagaaagcaggccaacagcatcaaggtgagcgtgagcagcggcggcgactgcatcagaacctacaagcccgagatcaagaagggcagctacaacaacatcgtggtgaacgtgaagaccgccgtggccgacaacctgctgttctacctgggcagcgccaagttcatcgacttcctggccatcgagatgagaaagggcaaggtgagcttcctgtgggacgtgggcagcggcgtgggcagagtggagtaccccgacctgaccatcgacgacagctactggtacagaatcgtggccagcagaaccggcagaaacggcaccatcagcgtgagagccctggacggccccaaggccagcatcgtgcccagcacccaccacagcaccagcccccccggctacaccatcctggacgtggacgccaacgccatgctgttcgtgggcggcctgaccggcaagctgaagaaggccgacgccgtgagagtgatcaccttcaccggctgcatgggcgagacctacttcgacaacaagcccatcggcctgtggaacttcagagagaaggagggcgactgcaagggctgcaccgtgagcccccaggtggaggacagcgagggcaccatccagttcgacggcgagggctacgccctggtgagcagacccatcagatggtaccccaacatcagcaccgtgatgttcaagttcagaaccttcagcagcagcgccctgctgatgtacctggccaccagagacctgagagacttcatgagcgtggagctgaccgacggccacatcaaggtgagctacgacctgggcagcggcatggccagcgtggtgagcaaccagaaccacaacgacggcaagtggaagagcttcaccctgagcagaatccagaagcaggccaacatcagcatcgtggacatcgacaccaaccaggaggagaacatcgccaccagcagcagcggcaacaacttcggcctggacctgaaggccgacgacaagatctacttcggcggcctgcccaccctgagaaacctgagcatgaaggccagacccgaggtgaacctgaagaagtacagcggctgcctgaaggacatcgagatcagcagaaccccctacaacatcctgagcagccccgactacgtgggcgtgaccaagggctgcagcctggagaacgtgtacaccgtgagcttccccaagcccggcttcgtggagctgagccccgtgcccatcgacgtgggcaccgagatcaacctgagcttcagcaccaagaacgagagcggcatcatcctgctgggcagcggcggcacccccgccccccccagaagaaagagaagacagaccggccaggcctactacgccatcctgctgaacagaggcagactggaggtgcacctgagcaccggcgccagaaccatgagaaagatcgtgatcagacccgagcccaacctgttccacgacggcagagagcacagcgtgcacgtggagagaaccagaggcatcttcaccgtgcaggtggacgagaacagaagatacatgcagaacctgaccgtggagcagcccatcgaggtgaagaagctgttcgtgggcggcgccccccccgagttccagcccagccccctgagaaacatcccccccttcgagggctgcatctggaacctggtgatcaacagcgtgcccatggacttcgccagacccgtgagcttcaagaacgccgacatcggcagatgcgcccaccagaagctgagagaggacgaggacggcgccgcccccgccgagatcgtgatccagcccgagcccgtgcccacccccgccttccccacccccacccccgtgctgacccacggcccctgcgccgccgagagcgagcccgccctgctgatcggcagcaagcagttcggcctgagcagaaacagccacatcgccatcgccttcgacgacaccaaggtgaagaacagactgaccatcgagctggaggtgagaaccgaggccgagagcggcctgctgttctacatggccagaatcaaccacgccgacttcgccaccgtgcagctgagaaacggcctgccctacttcagctacgacctgggcagcggcgacacccacaccatgatccccaccaagatcaacgacggccagtggcacaagatcaagatcatgagaagcaagcaggagggcatcctgtacgtggacggcgccagcaacagaaccatcagccccaagaaggccgacatcctggacgtggtgggcatgctgtacgtgggcggcctgcccatcaactacaccaccagaagaatcggccccgtgacctacagcatcgacggctgcgtgagaaacctgcacatggccgaggcccccgccgacctggagcagcccaccagcagcttccacgtgggcacctgcttcgccaacgcccagagaggcacctacttcgacggcaccggcttcgccaaggccgtgggcggcttcaaggtgggcctggacctgctggtggagttcgagttcagaaccaccaccaccaccggcgtgctgctgggcatcagcagccagaagatggacggcatgggcatcgagatgatcgacgagaagctgatgttccacgtggacaacggcgccggcagattcaccgccgtgtacgacgccggcgtgcccggccacctgtgcgacggccagtggcacaaggtgaccgccaacaagatcaagcacagaatcgagctgaccgtggacggcaaccaggtggaggcccagagccccaaccccgccagcaccagcgccgacaccaacgaccccgtgttcgtgggcggcttccccgacgacctgaagcagttcggcctgaccaccagcatccccttcagaggctgcatcagaagcctgaagctgaccaagggcaccggcaagcccctggaggtgaacttcgccaaggccctggagctgagaggcgtgcagcccgtgagctgccccgccaactag

SEQ ID NO: 8776 - DNA, 9369 bp, Artificial Sequence
  derived and/or modified sequence
atgcccggcgccgccggcgtgctgctgctgctgctgctgagcggcggcctgggcggcgtgcaggcccagagaccccagcagcagagacagagccaggcccaccagcagagaggcctgttccccgccgtgctgaacctggccagcaacgccctgatcaccaccaacgccacctgcggcgagaagggccccgagatgtactgcaagctggtggagcacgtgcccggccagcccgtgagaaacccccagtgcagaatctgcaaccagaacagcagcaaccccaaccagagacaccccatcaccaacgccatcgacggcaagaacacctggtggcagagccccagcatcaagaacggcatcgagtaccactacgtgaccatcaccctggacctgcagcaggtgttccagatcgcctacgtgatcgtgaaggccgccaacagccccagacccggcaactggatcctggagagaagcctggacgacgtggagtacaagccctggcagtaccacgccgtgaccgacaccgagtgcctgaccctgtacaacatctaccccagaaccggcccccccagctacgccaaggacgacgaggtgatctgcaccagcttctacagcaagatccaccccctggagaacggcgagatccacatcagcctgatcaacggcagacccagcgccgacgaccccagccccgagctgctggagttcaccagcgccagatacatcagactgagattccagagaatcagaaccctgaacgccgacctgatgatgttcgcccacaaggaccccagagagatcgaccccatcgtgaccagaagatactactacagcgtgaaggacatcagcgtgggcggcatgtgcatctgctacggccacgccagagcctgccccctggaccccgccaccaacaagagcagatgcgagtgcgagcacaacacctgcggcgacagctgcgaccagtgctgccccggcttccaccagaagccctggagagccggcaccttcctgaccaagaccgagtgcgaggcctgcaactgccacggcaaggccgaggagtgctactacgacgagaacgtggccagaagaaacctgagcctgaacatcagaggcaagtacatcggcggcggcgtgtgcatcaactgcacccagaacaccgccggcatcaactgcgagacctgcaccgacggcttcttcagacccaagggcgtgagccccaactaccccagaccctgccagccctgccactgcgaccccatcggcagcctgaacgaggtgtgcgtgaaggacgagaagcacgccagaagaggcctggcccccggcagctgccactgcaagaccggcttcggcggcgtgagctgcgacagatgcgccagaggctacaccggctaccccgactgcaaggcctgcaactgcagcggcctgggcagcaagaacgaggacccctgcttcggcccctgcatctgcaaggagaacgtggagggcggcgactgcagcagatgcaagagcggcttcttcaacctgcaggaggacaactggaagggctgcgacgagtgcttctgcagcggcgtgagcaacagatgccagagcagctactggacctacggcaagatccaggacatgagcggctggtacctgaccgacctgcccggcagaatcagagtggccccccagcaggacgacctggacagcccccagcagatcagcatcagcaacgccgaggccagacaggccctgccccacagctactactggagcgcccccgccccctacctgggcaacaagctgcccgccgtgggcggccagctgaccttcaccatcagctacgacctggaggaggaggaggaggacaccgagagagtgctgcagctgatgatcatcctggagggcaacgacctgagcatcagcaccgcccaggacgaggtgtacctgcaccccagcgaggagcacaccaacgtgctgctgctgaaggaggagagcttcaccatccacggcacccacttccccgtgagaagaaaggagttcatgaccgtgctggccaacctgaagagagtgctgctgcagatcacctacagcttcggcatggacgccatcttcagactgagcagcgtgaacctggagagcgccgtgagctaccccaccgacggcagcatcgccgccgccgtggaggtgtgccagtgcccccccggctacaccggcagcagctgcgagagctgctggcccagacacagaagagtgaacggcaccatcttcggcggcatctgcgagccctgccagtgcttcggccacgccgagagctgcgacgacgtgaccggcgagtgcctgaactgcaaggaccacaccggcggcccctactgcgacaagtgcctgcccggcttctacggcgagcccaccaagggcaccagcgaggactgccagccctgcgcctgccccctgaacatccccagcaacaacttcagccccacctgccacctggacagaagcctgggcctgatctgcgacggctgccccgtgggctacaccggccccagatgcgagagatgcgccgagggctacttcggccagcccagcgtgcccggcggcagctgccagccctgccagtgcaacgacaacctggacttcagcatccccggcagctgcgacagcctgagcggcagctgcctgatctgcaagcccggcaccaccggcagatactgcgagctgtgcgccgacggctacttcggcgacgccgtggacgccaagaactgccagccctgcagatgcaacgccggcggcagcttcagcgaggtgtgccacagccagaccggccagtgcgagtgcagagccaacgtgcagggccagagatgcgacaagtgcaaggccggcaccttcggcctgcagagcgccagaggctgcgtgccctgcaactgcaacagcttcggcagcaagagcttcgactgcgaggagagcggccagtgctggtgccagcccggcgtgaccggcaagaagtgcgacagatgcgcccacggctacttcaacttccaggagggcggctgcaccgcctgcgagtgcagccacctgggcaacaactgcgaccccaagaccggcagatgcatctgcccccccaacaccatcggcgagaagtgcagcaagtgcgcccccaacacctggggccacagcatcaccaccggctgcaaggcctgcaactgcagcaccgtgggcagcctggacttccagtgcaacgtgaacaccggccagtgcaactgccaccccaagttcagcggcgccaagtgcaccgagtgcagcagaggccactggaactaccccagatgcaacctgtgcgactgcttcctgcccggcaccgacgccaccacctgcgacagcgagaccaagaagtgcagctgcagcgaccagaccggccagtgcacctgcaaggtgaacgtggagggcatccactgcgacagatgcagacccggcaagttcggcctggacgccaagaaccccctgggctgcagcagctgctactgcttcggcaccaccacccagtgcagcgaggccaagggcctgatcagaacctgggtgaccctgaaggccgagcagaccatcctgcccctggtggacgaggccctgcagcacaccaccaccaagggcatcgtgttccagcaccccgagatcgtggcccacatggacctgatgagagaggacctgcacctggagcccttctactggaagctgcccgagcagttcgagggcaagaagctgatggcctacggcggcaagctgaagtacgccatctacttcgaggccagagaggagaccggcttcagcacctacaacccccaggtgatcatcagaggcggcacccccacccacgccagaatcatcgtgagacacatggccgcccccctgatcggccagctgaccagacacgagatcgagatgaccgagaaggagtggaagtactacggcgacgaccccagagtgcacagaaccgtgaccagagaggacttcctggacatcctgtacgacatccactacatcctgatcaaggccacctacggcaacttcatgagacagagcagaatcagcgagatcagcatggaggtggccgagcagggcagaggcaccaccatgaccccccccgccgacctgatcgagaagtgcgactgccccctgggctacagcggcctgagctgcgaggcctgcctgcccggcttctacagactgagaagccagcccggcggcagaacccccggccccaccctgggcacctgcgtgccctgccagtgcaacggccacagcagcctgtgcgaccccgagaccagcatctgccagaactgccagcaccacaccgccggcgacttctgcgagagatgcgccctgggctactacggcatcgtgaagggcctgcccaacgactgccagcagtgcgcctgccccctgatcagcagcagcaacaacttcagccccagctgcgtggccgagggcctggacgactacagatgcaccgcctgccccagaggctacgagggccagtactgcgagagatgcgcccccggctacaccggcagccccggcaaccccggcggcagctgccaggagtgcgagtgcgacccctacggcagcctgcccgtgccctgcgaccccgtgaccggcttctgcacctgcagacccggcgccaccggcagaaagtgcgacggctgcaagcactggcacgccagagagggctgggagtgcgtgttctgcggcgacgagtgcaccggcctgctgctgggcgacctggccagactggagcagatggtgatgagcatcaacctgaccggccccctgcccgccccctacaagatgctgtacggcctggagaacatgacccaggagctgaagcacctgctgagcccccagagagcccccgagagactgatccagctggccgagggcaacctgaacaccctggtgaccgagatgaacgagctgctgaccagagccaccaaggtgaccgccgacggcgagcagaccggccaggacgccgagagaaccaacaccagagccaagagcctgggcgagttcatcaaggagctggccagagacgccgaggccgtgaacgagaaggccatcaagctgaacgagaccctgggcaccagagacgaggccttcgagagaaacctggagggcctgcagaaggagatcgaccagatgatcaaggagctgagaagaaagaacctggagacccagaaggagatcgccgaggacgagctggtggccgccgaggccctgctgaagaaggtgaagaagctgttcggcgagagcagaggcgagaacgaggagatggagaaggacctgagagagaagctggccgactacaagaacaaggtggacgacgcctgggacctgctgagagaggccaccgacaagatcagagaggccaacagactgttcgccgtgaaccagaagaacatgaccgccctggagaagaagaaggaggccgtggagagcggcaagagacagatcgagaacaccctgaaggagggcaacgacatcctggacgaggccaacagactggccgacgagatcaacagcatcatcgactacgtggaggacatccagaccaagctgccccccatgagcgaggagctgaacgacaagatcgacgacctgagccaggagatcaaggacagaaagctggccgagaaggtgagccaggccgagagccacgccgcccagctgaacgacagcagcgccgtgctggacggcatcctggacgaggccaagaacatcagcttcaacgccaccgccgccttcaaggcctacagcaacatcaaggactacatcgacgaggccgagaaggtggccaaggaggccaaggacctggcccacgaggccaccaagctggccaccggccccagaggcctgctgaaggaggacgccaagggctgcctgcagaagagcttcagaatcctgaacgaggccaagaagctggccaacgacgtgaaggagaacgaggaccacctgaacggcctgaagaccagaatcgagaacgccgacgccagaaacggcgacctgctgagaaccctgaacgacaccctgggcaagctgagcgccatccccaacgacaccgccgccaagctgcaggccgtgaaggacaaggccagacaggccaacgacaccgccaaggacgtgctggcccagatcaccgagctgcaccagaacctggacggcctgaagaagaactacaacaagctggccgacagcgtggccaagaccaacgccgtggtgaaggaccccagcaagaacaagatcgtggccgacgccgacgccaccgtgaagaacctggagcaggaggccgacagactgatcgacaagctgaagcccatcaaggagctggaggacaacctgaagaagaacatcagcgagatcaaggagctgatcaaccaggccagaaagcaggccaacagcatcaaggtgagcgtgagcagcggcggcgactgcatcagaacctacaagcccgagatcaagaagggcagctacaacaacatcgtggtgaacgtgaagaccgccgtggccgacaacctgctgttctacctgggcagcgccaagttcatcgacttcctggccatcgagatgagaaagggcaaggtgagcttcctgtgggacgtgggcagcggcgtgggcagagtggagtaccccgacctgaccatcgacgacagctactggtacagaatcgtggccagcagaaccggcagaaacggcaccatcagcgtgagagccctggacggccccaaggccagcatcgtgcccagcacccaccacagcaccagcccccccggctacaccatcctggacgtggacgccaacgccatgctgttcgtgggcggcctgaccggcaagctgaagaaggccgacgccgtgagagtgatcaccttcaccggctgcatgggcgagacctacttcgacaacaagcccatcggcctgtggaacttcagagagaaggagggcgactgcaagggctgcaccgtgagcccccaggtggaggacagcgagggcaccatccagttcgacggcgagggctacgccctggtgagcagacccatcagatggtaccccaacatcagcaccgtgatgttcaagttcagaaccttcagcagcagcgccctgctgatgtacctggccaccagagacctgagagacttcatgagcgtggagctgaccgacggccacatcaaggtgagctacgacctgggcagcggcatggccagcgtggtgagcaaccagaaccacaacgacggcaagtggaagagcttcaccctgagcagaatccagaagcaggccaacatcagcatcgtggacatcgacaccaaccaggaggagaacatcgccaccagcagcagcggcaacaacttcggcctggacctgaaggccgacgacaagatctacttcggcggcctgcccaccctgagaaacctgagactgttcaacagacccgaggtgaacctgaagaagtacagcggctgcctgaaggacatcgagatcagcagaaccccctacaacatcctgagcagccccgactacgtgggcgtgaccaagggctgcagcctggagaacgtgtacaccgtgagcttccccaagcccggcttcgtggagctgagccccgtgcccatcgacgtgggcaccgagatcaacctgagcttcagcaccaagaacgagagcggcatcatcctgctgggcagcggcggcacccccgccccccccagaagaaagagaagacagaccggccaggcctactacgccatcctgctgaacagaggcagactggaggtgcacctgagcaccggcgccagaaccatgagaaagatcgtgatcagacccgagcccaacctgttccacgacggcagagagcacagcgtgcacgtggagagaaccagaggcatcttcaccgtgcaggtggacgagaacagaagatacatgcagaacctgaccgtggagcagcccatcgaggtgaagaagctgttcgtgggcggcgccccccccgagttccagcccagccccctgagaaacatcccccccttcgagggctgcatctggaacctggtgatcaacagcgtgcccatggacttcgccagacccgtgagcttcaagaacgccgacatcggcagatgcgcccaccagaagctgagagaggacgaggacggcgccgcccccgccgagatcgtgatccagcccgagcccgtgcccacccccgccttccccacccccacccccgtgctgacccacggcccctgcgccgccgagagcgagcccgccctgctgatcggcagcaagcagttcggcctgagcagaaacagccacatcgccatcgccttcgacgacaccaaggtgaagaacagactgaccatcgagctggaggtgagaaccgaggccgagagcggcctgctgttctacatggccagaatcaaccacgccgacttcgccaccgtgcagctgagaaacggcctgccctacttcagctacgacctgggcagcggcgacacccacaccatgatccccaccaagatcaacgacggccagtggcacaagatcaagatcatgagaagcaagcaggagggcatcctgtacgtggacggcgccagcaacagaaccatcagccccaagaaggccgacatcctggacgtggtgggcatgctgtacgtgggcggcctgcccatcaactacaccaccagaagaatcggccccgtgacctacagcatcgacggctgcgtgagaaacctgcacatggccgaggcccccgccgacctggagcagcccaccagcagcttccacgtgggcacctgcttcgccaacgcccagagaggcacctacttcgacggcaccggcttcgccaaggccgtgggcggcttcaaggtgggcctggacctgctggtggagttcgagttcagaaccaccaccaccaccggcgtgctgctgggcatcagcagccagaagatggacggcatgggcatcgagatgatcgacgagaagctgatgttccacgtggacaacggcgccggcagattcaccgccgtgtacgacgccggcgtgcccggccacctgtgcgacggccagtggcacaaggtgaccgccaacaagatcaagcacagaatcgagctgaccgtggacggcaaccaggtggaggcccagagccccaaccccgccagcaccagcgccgacaccaacgaccccgtgttcgtgggcggcttccccgacgacctgaagcagttcggcctgaccaccagcatccccttcagaggctgcatcagaagcctgaagctgaccaagggcaccggcaagcccctggaggtgaacttcgccaaggccctggagctgagaggcgtgcagcccgtgagctgccccgccaactag

SEQ ID NO: 8777 - DNA, 9369 bp, Artificial Sequence
  derived and/or modified sequence
atgcccggcgccgccggcgtgctgctgctgctgctgctgagcggcggcctgggcggcgtgcaggcccagagaccccagcagcagagacagagccaggcccaccagcagagaggcctgttccccgccgtgctgaacctggccagcaacgccctgatcaccaccaacgccacctgcggcgagaagggccccgagatgtactgcaagctggtggagcacgtgcccggccagcccgtgagaaacccccagtgcagaatctgcaaccagaacagcagcaaccccaaccagagacaccccatcaccaacgccatcgacggcaagaacacctggtggcagagccccagcatcaagaacggcatcgagtaccactacgtgaccatcaccctggacctgcagcaggtgttccagatcgcctacgtgatcgtgaaggccgccaacagccccagacccggcaactggatcctggagagaagcctggacgacgtggagtacaagccctggcagtaccacgccgtgaccgacaccgagtgcctgaccctgtacaacatctaccccagaaccggcccccccagctacgccaaggacgacgaggtgatctgcaccagcttctacagcaagatccaccccctggagaacggcgagatccacatcagcctgatcaacggcagacccagcgccgacgaccccagccccgagctgctggagttcaccagcgccagatacatcagactgagattccagagaatcagaaccctgaacgccgacctgatgatgttcgcccacaaggaccccagagagatcgaccccatcgtgaccagaagatactactacagcgtgaaggacatcagcgtgggcggcatgtgcatctgctacggccacgccagagcctgccccctggaccccgccaccaacaagagcagatgcgagtgcgagcacaacacctgcggcgacagctgcgaccagtgctgccccggcttccaccagaagccctggagagccggcaccttcctgaccaagaccgagtgcgaggcctgcaactgccacggcaaggccgaggagtgctactacgacgagaacgtggccagaagaaacctgagcctgaacatcagaggcaagtacatcggcggcggcgtgtgcatcaactgcacccagaacaccgccggcatcaactgcgagacctgcaccgacggcttcttcagacccaagggcgtgagccccaactaccccagaccctgccagccctgccactgcgaccccatcggcagcctgaacgaggtgtgcgtgaaggacgagaagcacgccagaagaggcctggcccccggcagctgccactgcaagaccggcttcggcggcgtgagctgcgacagatgcgccagaggctacaccggctaccccgactgcaaggcctgcaactgcagcggcctgggcagcaagaacgaggacccctgcttcggcccctgcatctgcaaggagaacgtggagggcggcgactgcagcagatgcaagagcggcttcttcaacctgcaggaggacaactggaagggctgcgacgagtgcttctgcagcggcgtgagcaacagatgccagagcagctactggacctacggcaagatccaggacatgagcggctggtacctgaccgacctgcccggcagaatcagagtggccccccagcaggacgacctggacagcccccagcagatcagcatcagcaacgccgaggccagacaggccctgccccacagctactactggagcgcccccgccccctacctgggcaacaagctgcccgccgtgggcggccagctgaccttcaccatcagctacgacctggaggaggaggaggaggacaccgagagagtgctgcagctgatgatcatcctggagggcaacgacctgagcatcagcaccgcccaggacgaggtgtacctgcaccccagcgaggagcacaccaacgtgctgctgctgaaggaggagagcttcaccatccacggcacccacttccccgtgagaagaaaggagttcatgaccgtgctggccaacctgaagagagtgctgctgcagatcacctacagcttcggcatggacgccatcttcagactgagcagcgtgaacctggagagcgccgtgagctaccccaccgacggcagcatcgccgccgccgtggaggtgtgccagtgcccccccggctacaccggcagcagctgcgagagctgctggcccagacacagaagagtgaacggcaccatcttcggcggcatctgcgagccctgccagtgcttcggccacgccgagagctgcgacgacgtgaccggcgagtgcctgaactgcaaggaccacaccggcggcccctactgcgacaagtgcctgcccggcttctacggcgagcccaccaagggcaccagcgaggactgccagccctgcgcctgccccctgaacatccccagcaacaacttcagccccacctgccacctggacagaagcctgggcctgatctgcgacggctgccccgtgggctacaccggccccagatgcgagagatgcgccgagggctacttcggccagcccagcgtgcccggcggcagctgccagccctgccagtgcaacgacaacctggacttcagcatccccggcagctgcgacagcctgagcggcagctgcctgatctgcaagcccggcaccaccggcagatactgcgagctgtgcgccgacggctacttcggcgacgccgtggacgccaagaactgccagccctgcagatgcaacgccggcggcagcttcagcgaggtgtgccacagccagaccggccagtgcgagtgcagagccaacgtgcagggccagagatgcgacaagtgcaaggccggcaccttcggcctgcagagcgccagaggctgcgtgccctgcaactgcaacagcttcggcagcaagagcttcgactgcgaggagagcggccagtgctggtgccagcccggcgtgaccggcaagaagtgcgacagatgcgcccacggctacttcaacttccaggagggcggctgcaccgcctgcgagtgcagccacctgggcaacaactgcgaccccaagaccggcagatgcatctgcccccccaacaccatcggcgagaagtgcagcaagtgcgcccccaacacctggggccacagcatcaccaccggctgcaaggcctgcaactgcagcaccgtgggcagcctggacttccagtgcaacgtgaacaccggccagtgcaactgccaccccaagttcagcggcgccaagtgcaccgagtgcagcagaggccactggaactaccccagatgcaacctgtgcgactgcttcctgcccggcaccgacgccaccacctgcgacagcgagaccaagaagtgcagctgcagcgaccagaccggccagtgcacctgcaaggtgaacgtggagggcatccactgcgacagatgcagacccggcaagttcggcctggacgccaagaaccccctgggctgcagcagctgctactgcttcggcaccaccacccagtgcagcgaggccaagggcctgatcagaacctgggtgaccctgaaggccgagcagaccatcctgcccctggtggacgaggccctgcagcacaccaccaccaagggcatcgtgttccagcaccccgagatcgtggcccacatggacctgatgagagaggacctgcacctggagcccttctactggaagctgcccgagcagttcgagggcaagaagctgatggcctacggcggcaagctgaagtacgccatctacttcgaggccagagaggagaccggcttcagcacctacaacccccaggtgatcatcagaggcggcacccccacccacgccagaatcatcgtgagacacatggccgcccccctgatcggccagctgaccagacacgagatcgagatgaccgagaaggagtggaagtactacggcgacgaccccagagtgcacagaaccgtgaccagagaggacttcctggacatcctgtacgacatccactacatcctgatcaaggccacctacggcaacttcatgagacagagcagaatcagcgagatcagcatggaggtggccgagcagggcagaggcaccaccatgaccccccccgccgacctgatcgagaagtgcgactgccccctgggctacagcggcctgagctgcgaggcctgcctgcccggcttctacagactgagaagccagcccggcggcagaacccccggccccaccctgggcacctgcgtgccctgccagtgcaacggccacagcagcctgtgcgaccccgagaccagcatctgccagaactgccagcaccacaccgccggcgacttctgcgagagatgcgccctgggctactacggcatcgtgaagggcctgcccaacgactgccagcagtgcgcctgccccctgatcagcagcagcaacaacttcagccccagctgcgtggccgagggcctggacgactacagatgcaccgcctgccccagaggctacgagggccagtactgcgagagatgcgcccccggctacaccggcagccccggcaaccccggcggcagctgccaggagtgcgagtgcgacccctacggcagcctgcccgtgccctgcgaccccgtgaccggcttctgcacctgcagacccggcgccaccggcagaaagtgcgacggctgcaagcactggcacgccagagagggctgggagtgcgtgttctgcggcgacgagtgcaccggcctgctgctgggcgacctggccagactggagcagatggtgatgagcatcaacctgaccggccccctgcccgccccctacaagatgctgtacggcctggagaacatgacccaggagctgaagcacctgctgagcccccagagagcccccgagagactgatccagctggccgagggcaacctgaacaccctggtgaccgagatgaacgagctgctgaccagagccaccaaggtgaccgccgacggcgagcagaccggccaggacgccgagagaaccaacaccagagccaagagcctgggcgagttcatcaaggagctggccagagacgccgaggccgtgaacgagaaggccatcaagctgaacgagaccctgggcaccagagacgaggccttcgagagaaacctggagggcctgcagaaggagatcgaccagatgatcaaggagctgagaagaaagaacctggagacccagaaggagatcgccgaggacgagctggtggccgccgaggccctgctgaagaaggtgaagaagctgttcggcgagagcagaggcgagaacgaggagatggagaaggacctgagagagaagctggccgactacaagaacaaggtggacgacgcctgggacctgctgagagaggccaccgacaagatcagagaggccaacagactgttcgccgtgaaccagaagaacatgaccgccctggagaagaagaaggaggccgtggagagcggcaagagacagatcgagaacaccctgaaggagggcaacgacatcctggacgaggccaacagactggccgacgagatcaacagcatcatcgactacgtggaggacatccagaccaagctgccccccatgagcgaggagctgaacgacaagatcgacgacctgagccaggagatcaaggacagaaagctggccgagaaggtgagccaggccgagagccacgccgcccagctgaacgacagcagcgccgtgctggacggcatcctggacgaggccaagaacatcagcttcaacgccaccgccgccttcaaggcctacagcaacatcaaggactacatcgacgaggccgagaaggtggccaaggaggccaaggacctggcccacgaggccaccaagctggccaccggccccagaggcctgctgaaggaggacgccaagggctgcctgcagaagagcttcagaatcctgaacgaggccaagaagctggccaacgacgtgaaggagaacgaggaccacctgaacggcctgaagaccagaatcgagaacgccgacgccagaaacggcgacctgctgagaaccctgaacgacaccctgggcaagctgagcgccatccccaacgacaccgccgccaagctgcaggccgtgaaggacaaggccagacaggccaacgacaccgccaaggacgtgctggcccagatcaccgagctgcaccagaacctggacggcctgaagaagaactacaacaagctggccgacagcgtggccaagaccaacgccgtggtgaaggaccccagcaagaacaagatcatcgccgacgccgacgccaccgtgaagaacctggagcaggaggccgacagactgatcgacaagctgaagcccatcaaggagctggaggacaacctgaagaagaacatcagcgagatcaaggagctgatcaaccaggccagaaagcaggccaacagcatcaaggtgagcgtgagcagcggcggcgactgcatcagaacctacaagcccgagatcaagaagggcagctacaacaacatcgtggtgaacgtgaagaccgccgtggccgacaacctgctgttctacctgggcagcgccaagttcatcgacttcctggccatcgagatgagaaagggcaaggtgagcttcctgtgggacgtgggcagcggcgtgggcagagtggagtaccccgacctgaccatcgacgacagctactggtacagaatcgtggccagcagaaccggcagaaacggcaccatcagcgtgagagccctggacggccccaaggccagcatcgtgcccagcacccaccacagcaccagcccccccggctacaccatcctggacgtggacgccaacgccatgctgttcgtgggcggcctgaccggcaagctgaagaaggccgacgccgtgagagtgatcaccttcaccggctgcatgggcgagacctacttcgacaacaagcccatcggcctgtggaacttcagagagaaggagggcgactgcaagggctgcaccgtgagcccccaggtggaggacagcgagggcaccatccagttcgacggcgagggctacgccctggtgagcagacccatcagatggtaccccaacatcagcaccgtgatgttcaagttcagaaccttcagcagcagcgccctgctgatgtacctggccaccagagacctgagagacttcatgagcgtggagctgaccgacggccacatcaaggtgagctacgacctgggcagcggcatggccagcgtggtgagcaaccagaaccacaacgacggcaagtggaagagcttcaccctgagcagaatccagaagcaggccaacatcagcatcgtggacatcgacaccaaccaggaggagaacatcgccaccagcagcagcggcaacaacttcggcctggacctgaaggccgacgacaagatctacttcggcggcctgcccaccctgagaaacctgagcatgaaggccagacccgaggtgaacctgaagaagtacagcggctgcctgaaggacatcgagatcagcagaaccccctacaacatcctgagcagccccgactacgtgggcgtgaccaagggctgcagcctggagaacgtgtacaccgtgagcttccccaagcccggcttcgtggagctgagccccgtgcccatcgacgtgggcaccgagatcaacctgagcttcagcaccaagaacgagagcggcatcatcctgctgggcagcggcggcacccccgccccccccagaagaaagagaagacagaccggccaggcctactacgccatcctgctgaacagaggcagactggaggtgcacctgagcaccggcgccagaaccatgagaaagatcgtgatcagacccgagcccaacctgttccacgacggcagagagcacagcgtgcacgtggagagaaccagaggcatcttcaccgtgcaggtggacgagaacagaagatacatgcagaacctgaccgtggagcagcccatcgaggtgaagaagctgttcgtgggcggcgccccccccgagttccagcccagccccctgagaaacatcccccccttcgagggctgcatctggaacctggtgatcaacagcgtgcccatggacttcgccagacccgtgagcttcaagaacgccgacatcggcagatgcgcccaccagaagctgagagaggacgaggacggcgccgcccccgccgagatcgtgatccagcccgagcccgtgcccacccccgccttccccacccccacccccgtgctgacccacggcccctgcgccgccgagagcgagcccgccctgctgatcggcagcaagcagttcggcctgagcagaaacagccacatcgccatcgccttcgacgacaccaaggtgaagaacagactgaccatcgagctggaggtgagaaccgaggccgagagcggcctgctgttctacatggccagaatcaaccacgccgacttcgccaccgtgcagctgagaaacggcctgccctacttcagctacgacctgggcagcggcgacacccacaccatgatccccaccaagatcaacgacggccagtggcacaagatcaagatcatgagaagcaagcaggagggcatcctgtacgtggacggcgccagcaacagaaccatcagccccaagaaggccgacatcctggacgtggtgggcatgctgtacgtgggcggcctgcccatcaactacaccaccagaagaatcggccccgtgacctacagcatcgacggctgcgtgagaaacctgcacatggccgaggcccccgccgacctggagcagcccaccagcagcttccacgtgggcacctgcttcgccaacgcccagagaggcacctacttcgacggcaccggcttcgccaaggccgtgggcggcttcaaggtgggcctggacctgctggtggagttcgagttcagaaccaccaccaccaccggcgtgctgctgggcatcagcagccagaagatggacggcatgggcatcgagatgatcgacgagaagctgatgttccacgtggacaacggcgccggcagattcaccgccgtgtacgacgccggcgtgcccggccacctgtgcgacggccagtggcacaaggtgaccgccaacaagatcaagcacagaatcgagctgaccgtggacggcaaccaggtggaggcccagagccccaaccccgccagcaccagcgccgacaccaacgaccccgtgttcgtgggcggcttccccgacgacctgaagcagttcggcctgaccaccagcatccccttcagaggctgcatcagaagcctgaagctgaccaagggcaccggcaagcccctggaggtgaacttcgccaaggccctggagctgagaggcgtgcagcccgtgagctgccccgccaactag

SEQ ID NO: 8778 - protein, 312 aa, Artificial Sequence
  derived and/or modified sequence
MSYQKKQPTPQPPVDCVKTSGGGGGGGGSGGGGCGFFGGGGSGGGSSGSGCGYSGGGGYSGGGCGGGSSGGGGGGGIGGCGGGSGGSVKYSGGGGSSGGGSGCFSSGGGGSGCFSSGGGGSSGGGSGCFSSGGGGSSGGGSGCFSSGGGGFSGQAVQCQSYGGVSSGGSSGGGSGCFSSGGGGGSVCGYSGGGSGCGGGSSGGSGSGYVSSQQVTQTSCAPQPSYGGGSSGGGGSGGSGCFSSGGGGGSSGCGGGSSGIGSGCIISGGGSVCGGGSSGGGGGGSSVGGSGSGKGVPICHQTQQKQAPTWPSK

SEQ ID NO: 8779 - protein, 333 aa, Artificial Sequence
  derived and/or modified sequence
MSYQKKQPTPQPPVDCVKTSGGGGGGGGSGGGGCGFFGGGGSGGGSSGSGCGYSGGGGYSGGGCGGGSSGGGGGGGIGGCGGGSGGSVKYSGGGGSSGGGSGCFSSGGGGSGCFSSGGGGSSGGGSGCFSSGGGGSSGGGSGCFSSGGGGFSGQAVQCQSYGGVSSGGSSGGGSGCFSSGGGGGSVCGYSGGGSGCGGGSSGGSGSGYVSSQQVTQTSCAPQPSYGGGVRRRRQRRKRLLLQRRGRRELRLRRRLLRDWQRLHHQWRGLRLRRWFLWRRRRRLLRGWLREWQGRPDLPPDPAEAGAYLAVQIDPPGYHGGEGVGGVFQGHRWA

SEQ ID NO: 8780 - DNA, 600 bp, Artificial Sequence
  derived and/or modified sequence
atgctgcctgtgcagaggaggaagctggaccccctgctgaagaagtaccgccaccacaagaaggccaccaggaccaagagaagaaggaaggagaagatggaggcccagtgcagccctgtgccccccacccccagcaccccaccccagagcgaggaggatgaagctgtggacaagaagcccaccctgctgagcgcccaggaggacaccccagacctgctgcatgaagatcggctgcagtacctgcaggaggagggcagcggcgtgatgcaccaggagtgccagatccagagctgtgagctgtctgtggcccagaagccccggcccagcagccctgctgtgaccagcctggccagcccccccctgtgcttcggcagcttcctgagctgtgtgtgccagaccttcagccgcagcaggaagcagaagccacccaggaggaagggcaacaaccaggccgaggccggaggagatgctgaggtgctgcggcccggccctgccaagccagagctgagcctgagcaagacctgcagccacctgaagagcattgagctgagctttgtgttctccttcatcgtgctgtctgtgtgccactgcagcagctag

SEQ ID NO: 8781 - DNA, 1002 bp, Artificial Sequence
  derived and/or modified sequence
atgtcttaccaaaaaaaacagccgactccacaacctcccgtagattgcgtaaaaaccagcgggggcggaggggggggaggaggctcgggagggggcgggtgcggctttttcggggggggtggctccggagggggttccagtggaagtggttgcggctattcaggcggggggggatactccgggggaggctgtggaggaggcagcagcggcgggggcggaggcggcggcattggaggttgtgggggaggctccggtggcagcgtgaaatattcagggggaggaggtagcagcggcgggggcagtggttgttttagcagcggaggcggagggagcggctgcttttctagcggtgggggcgggagcagcgggggagggagtggatgtttttcctctggcggaggcgggtcctccgggggcggcagtgggtgcttctcgagtggcggaggcggttttagtggtcaagccgtgcagtgtcagagttacgggggggtgagtagtggtgggagcagcggcggtggcagtggatgtttctcctcaggaggtggtggagggtctgtgtgcggatactccgggggcgggagtggttgcggtggaggctcttctgggggcagcggctctgggtatgtctcatctcagcaggtgactcagacatcatgtgctcctcaaccatcttacggcggtggggtgcggcggagaagacagcgcaggaagcgcctgttgctgcaaaggcgtgggcgccgcgagctgagactgagaagacgccttcttcgcgattggcaaagactccaccatcagtggcgcggtctacgcttaaggagatggtttctgtggcggaggcggcgcagattgctgcgcgggtggctgcgtgagtggcaaggtcgcccagatttgcctccagatcccgccgaagcgggtgcctacctggcagttcagattgatcctcctggatatcacggaggtgagggcgtgggtggtgtcttccagggacacaggtgggcatag

SEQ ID NO: 8782 - protein, 1821 aa, Artificial Sequence
  derived and/or modified sequence
MRPRTKARSPGRALRNPWRGFLPLTLALFVGAGHAQRDPVGRYEPAGGDANRLRRPGGSYPAAAAAKVYSLFREQDAPVAGLQPVERAQPGWGSPRRPTEAEARRPSRAQQSRRVQPPAQTRRSTPLGQQQPAPRTRAAPALPRLGTPQRSGAAPPTPPRGRLTGRNVCGGQCCPGWTTANSTNHCIKPVCEPPCQNRGSCSRPQLCVCRSGFRGARCEEVIPDEEFDPQNSRLAPRRWAERSPNLRRSSAAGEGTLARAQPPAPQSPPAPQSPPAGTLSGLSQTHPSQQHVGLSRTVRLHPTATASSQLSSNALPPGPGLEQRDGTQQAVPLEHPSSPWGLNLTEKIKKIKIVFTPTICKQTCARGHCANSCERGDTTTLYSQGGHGHDPKSGFRIYFCQIPCLNGGRCIGRDECWCPANSTGKFCHLPIPQPDREPPGRGSRPRALLEAPLKQSTFTLPLSNQLASVNPSLVKVHIHHPPEASVQIHQVAQVRGGVEEALVENSVETRPPPWLPASPGHSLWDSNNIPARSGEPPRPLPPAAPRPRGLLGRCYLNTVNGQCANPLLELTTQEDCCGSVGAFWGVTLCAPCPPRPASPVIENGQLECPQGYKRLNLTHCQDINECLTLGLCKDAECVNTRGSYLCTCRPGLMLDPSRSRCVSDKAISMLQGLCYRSLGPGTCTLPLAQRITKQICCCSRVGKAWGSECEKCPLPGTEAFREICPAGHGYTYASSDIRLSMRKAEEEELARPPREQGQRSSGALPGPAERQPLRVVTDTWLEAGTIPDKGDSQAGQVTTSVTHAPAWVTGNATTPPMPEQGIAEIQEEQVTPSTDVLVTLSTPGIDRCAAGATNVCGPGTCVNLPDGYRCVCSPGYQLHPSQAYCTDDNECLRDPCKGKGRCINRVGSYSCFCYPGYTLATSGATQECQDINECEQPGVCSGGQCTNTEGSYHCECDQGYIMVRKGHCQDINECRHPGTCPDGRCVNSPGSYTCLACEEGYRGQSGSCVDVNECLTPGVCAHGKCTNLEGSFRCSCEQGYEVTSDEKGCQDVDECASRASCPTGLCLNTEGSFACSACENGYWVNEDGTACEDLDECAFPGVCPSGVCTNTAGSFSCKDCDGGYRPSPLGDSCEDVDECEDPQSSCLGGECKNTVGSYQCLCPQGFQLANGTVCEDVNECMGEEHCAPHGECLNSHGSFFCLCAPGFVSAEGGTSCQDVDECATTDPCVGGHCVNTEGSFNCLCETGFQPSPESGECVDIDECEDYGDPVCGTWKCENSPGSYRCVLGCQPGFHMAPNGDCIDIDECANDTMCGSHGFCDNTDGSFRCLCDQGFEISPSGWDCVDVNECELMLAVCGAALCENVEGSFLCLCASDLEEYDAQEGHCRPRGAGGQSMSEAPTGDHAPAPTRMDCYSGQKGHAPCSSVLGRNTTQAECCCTQGASWGDACDLCPSEDSAEFSEICPSGKGYIPVEGAWTFGQTMYTDADECVIFGPGLCPNGRCLNTVPGYVCLCNPGFHYDASHKKCEDHDECQDLACENGECVNTEGSFHCFCSPPLTLDLSQQRCMNSTSSTEDLPDHDIHMDICWKKVTNDVCSEPLRGHRTTYTECCCQDGEAWSQQCALCPPRSSEVYAQLCNVARIEAEREAGVHFRPGYEYGPGPDDLHYSIYGPDGAPFYNYLGPEDTVPEPAFPNTAGHSADRTPILESPLQPSELQPHYVASHPEPPAGFEGLQAEECGILNGCENGRCVRVREGYTCDCFEGFQLDAAHMACVDVNECDDLNGPAVLCVHGYCENTEGSYRCHCSPGYVAEAGPPHCTAKE

SEQ ID NO: 8783 - DNA, 5466 bp, Artificial Sequence
  derived and/or modified sequence
atgaggccacgaactaaagcccgcagcccaggcagggcgttgcgcaatccatggagagggtttctcccactcacactggctctgttcgtaggggccggccacgctcagcgggaccccgttggacggtatgagccagccggcggcgatgctaacaggctgcgacgacctggtgggagctatccagccgctgccgcagcaaaggtgtacagtctgtttcgggagcaggacgctccagtggcaggtctgcaacctgtggaacgagcccagccaggatggggatccccccgaaggccgactgaggccgaagcgagaagacctagccgcgctcaacaatccagaagggtgcagccacccgctcaaacccgcagaagtacgcccctgggtcagcagcagcccgccccacgcacccgcgccgctcccgccctgcctcgcttaggcactcctcaaagatcaggcgccgcaccaccgaccccaccccgggggcgactgaccgggcgaaatgtttgcggcggtcagtgctgcccaggttggaccacggcaaatagcacgaaccactgcatcaaacctgtgtgcgaaccgccctgtcagaatcggggcagttgctcgagaccccaattgtgtgtgtgtcgttccgggttccggggcgcaaggtgcgaagaggtgatccccgacgaagagtttgatccacagaactccagactggccccacgacgctgggccgaaaggtccccaaacctgcggaggagtagcgcagcgggcgagggaactctcgctcgggctcaaccgcctgcacctcagtcaccgcctgcgccgcagagtcctcccgccggcacactgtccgggctctcacagacccacccatctcagcagcacgtgggcctctctcgaactgttaggctgcaccctaccgcgacggcaagctctcagctgtctagtaatgcccttcctcctgggccagggctcgaacagagggacggaactcagcaggctgtgcccctcgaacacccaagctctccttgggggttgaatctcacagagaagatcaagaaaattaaaatcgtgtttacccctacgatttgcaaacagacttgcgcaaggggacattgtgctaatagttgtgaacggggagacaccaccactctgtacagtcaaggcggacatggacacgaccccaagagcgggttccggatctatttttgccagattccatgtcttaatggaggtcgctgcataggcagggatgaatgctggtgccctgctaacagtaccggaaagttttgtcatctgcccataccccaacctgatagggagcccccagggagagggtcacgcccccgagcactgttggaagcccctctgaagcaatcgaccttcactctgccattgagtaatcagctagcgagcgtgaatccctcgcttgtcaaagtgcacatccatcacccacccgaagcatctgtgcagattcatcaagtggcccaggtcaggggtggagtggaggaggcccttgtggaaaacagtgtcgagactagacccccaccctggttgccagcgtcacccgggcacagcctgtgggactcaaacaacatccccgcaaggtcgggtgagcctccgcgtcctctccctcctgccgcaccccggccccgtggcctgttagggcgctgctatctcaatacagtgaacggccagtgcgcaaatccattgctcgaattaaccactcaggaggattgctgtggatctgtaggggctttttggggcgtgaccctgtgtgccccttgtccccctagaccagcatcccccgtgatcgagaacggccaactcgagtgccctcaggggtacaagcggttgaacctaacccattgccaggacataaacgagtgccttactctcggactgtgcaaagatgctgagtgtgtaaataccagaggaagctacttgtgcacatgccggcccgggttgatgctggatccctcccgcagtaggtgcgtgagtgacaaggccatcagcatgctgcagggcttatgctacaggagtttgggaccagggacttgtacattacccctagcacagagaattaccaagcagatctgttgctgctcccgcgtaggcaaggcctggggaagcgaatgtgagaaatgtcctctcccaggtacagaggccttcagggaaatatgcccagcggggcacggatatacctatgcaagctctgacattcgtctgagcatgcggaaagctgaagaggaggaactggcccgtcccccccgggagcagggccagagatccagcggagccctccccggacctgccgaacggcagccactgcgggttgtgaccgacacttggctggaggcggggacgatcccagacaagggagactcccaggccggtcaagtgacgacatccgtgactcacgcgcccgcctgggtgacgggcaacgcaactacccctcccatgcccgagcagggaattgcagagatccaggaggaacaagtcacgcctagtactgacgtgcttgtgaccctgagtactccagggattgataggtgtgctgcgggagcaacaaatgtgtgtggcccaggcacctgcgtcaatctgcccgatggataccgttgtgtgtgctcccctggctaccagctgcatcctagccaagcttactgtacagatgataacgaatgtcttagagacccgtgcaagggcaagggcagatgtattaatagggtgggaagttattcctgcttttgctatcctggctacaccctggcaacgagcggcgctacacaggagtgccaggatatcaatgaatgcgagcaaccgggggtttgctctggcggtcagtgcacaaatactgaaggctcatatcactgtgagtgcgaccaagggtatataatggtacggaaggggcactgccaggatatcaatgaatgtcggcacccaggcacatgccccgatggccgctgcgttaacagcccagggagctatacttgtctggcctgcgaggaagggtacagagggcagagcggcagctgtgtagatgtcaacgaatgtctgactcccggagtatgtgctcacggtaagtgtactaatctcgagggttcctttcgctgttcttgtgaacagggatatgaggtcactagtgacgaaaagggatgccaagacgtcgatgagtgcgccagcagagcctcatgtcccaccggtctttgtttaaatacagagggtagcttcgcatgcagcgcctgtgagaatggctactgggtcaatgaagatgggaccgcctgtgaagatctggatgagtgcgctttccccggagtgtgtcccagcggcgtgtgtactaacacagcagggagtttctcatgcaaagactgtgatggcggctacagaccaagtccgctgggagattcatgtgaagatgtcgatgaatgtgaggacccacagagttcctgccttggcggtgaatgtaaaaataccgtggggtcttaccaatgtctttgccctcaaggatttcagctagccaacggcaccgtatgtgaagacgtgaatgagtgcatgggcgaagagcactgtgcaccacatggggaatgtctaaactctcacggtagtttcttctgtctgtgtgcaccaggattcgtcagcgcggagggcggaactagctgccaggacgtcgatgagtgtgccacaaccgatccatgtgtgggaggacattgcgttaacacagaaggaagcttcaactgcctctgcgaaacagggtttcaaccctccccagaaagcggcgaatgcgtagatatagatgaatgcgaagactacggggacccagtgtgcgggacttggaagtgtgagaacagcccaggatcataccggtgcgtgctgggctgccaaccggggtttcacatggccccaaacggcgattgtatagacattgacgaatgcgcaaacgacaccatgtgcggatcacacggcttttgcgataacactgacgggtcttttcgctgcctttgcgatcaaggatttgaaatttcccccagcgggtgggattgcgtcgatgtgaatgagtgcgagctgatgttagctgtttgcggcgcagcgctctgcgaaaatgtcgagggcagttttctatgtctgtgtgcatctgacctggaagaatatgatgcacaggaaggtcactgtaggccacgcggagcaggtggacagagtatgtccgaggcgccaaccggagaccatgcccctgcaccgactagaatggattgctattccggccaaaagggccacgctccttgctcctccgtcctggggaggaatactacccaggccgagtgctgttgcactcagggcgcttcatggggagacgcgtgtgatctgtgcccctctgaagattcagctgaattcagcgagatatgcccttccggaaaggggtacattccggtggaaggcgcctggacatttggacagactatgtacactgatgctgatgaatgtgtgatctttggacctggcctttgccccaatggccgatgtctgaatactgtccccggatacgtttgtctgtgcaaccctggatttcactatgacgcctcacacaagaaatgtgaagaccacgatgaatgccaagacctggcttgcgagaacggagagtgtgtgaacaccgagggcagcttccactgtttttgctccccgccgctgaccctcgatctctctcagcagcgctgcatgaacagcacctcctccactgaggacctcccagaccatgacatacatatggacatatgttggaaaaaggtcacaaatgatgtttgcagcgagcccttacgcggacatcggaccacttatacagaatgctgctgccaggatggggaggcttggtctcaacaatgtgccctgtgtcctcccagatcctctgaggtatatgcacagctatgtaatgtggcccgcattgaggcagagagagaggctggagtgcacttccggcccggctacgagtacgggccaggacctgacgatctgcattattccatctacggtcccgatggggcccccttttacaattacctcggcccagaagatacggtccctgagccagcgtttcccaataccgccggacatagcgctgacaggacacctatcctggagtcacctctgcaaccttcagagctccagccacactacgtggcatcccatcccgaaccacccgctggattcgaggggttgcaggctgaggaatgcggcattttgaatggctgcgaaaatgggcggtgcgttagggtccgggagggatacacatgcgactgcttcgagggattccagttggatgctgcccacatggcctgcgtagatgtaaacgagtgcgatgacctcaacgggcccgccgttctgtgtgttcacgggtactgcgagaataccgaaggctcctaccggtgccactgttcgcccggctacgtggctgaggctgggcctccccattgcacggccaaggagtag

SEQ ID NO: 8784 - DNA, 8567 bp, Artificial Sequence
  derived and/or modified sequence
cctcgctccctctccggtaatgagggggctgagctgtccctccgaggagggggcctggtgtggataaaagagacgaaaaagccgggggaggtttccaaaaataaaaccgtccgggtccccttcagacggctgcaggcacagggaggaggcgcgaaggtgcagcagccgtgcgagcccagctggagtaggagcgcggactcgaggctcggggcgcgcagccctcgttccgccgagagccgggcccccagtcggccgcttcagggccccctagactcagagaagctggccgccgggcggggccgggagaacagcccgcgggcgtccagcgtgccgaccacaaagctcttcgcggtgcccgcgcgcaccactctccagccgccccgcgccatgaggccgcggaccaaagcccgcagcccggggcgcgccctgcggaacccctggagaggcttcctgccgctcaccctggctctcttcgtgggcgcgggtcatgcccaaagggaccccgtagggagatacgagccggctggtggagacgcgaatcgactgcggcgccctgggggcagctacccggcagcggctgcagccaaggtgtacagtctgttccgggagcaggacgcgcctgtcgcgggcttgcagcccgtggagcgggcccagccgggctgggggagccccaggaggcccaccgaggcggaggccaggaggccgtcccgcgcgcagcagtcgcggcgtgtccagccacctgcgcagacccggagaagcactcccctgggccagcagcaaccagcaccccggacccgggccgcgccggctctcccacgcctggggaccccacagcggtctggggctgcgcccccaaccccgccgcgagggcggctcacggggaggaacgtctgcgggggacagtgctgcccaggatggacaacagcaaacagcaccaaccactgtatcaaacccgtttgcgagccgccgtgccagaaccggggctcctgcagccgcccgcagctctgtgtctgccgctctggtttccgtggagcccgctgcgaggaggtcattcccgatgaggaatttgacccccagaactccaggctggcacctcgacgctgggccgagcgttcacccaacctgcgcaggagcagtgcggctggagagggcaccttggccagagcacagccgccagcaccacagtcgccgcccgcaccacagtcgccaccagctgggaccctgagtggcctcagccagacccacccttcccagcagcacgtggggttgtcccgcactgtccgacttcacccgactgccacggccagtagccagctctcttccaacgccctgcccccgggaccaggccttgagcagagagatggcacccaacaggcggtacctctggagcacccctcatccccctgggggctgaacctcacggagaaaatcaagaagatcaagatcgtcttcactcccaccatctgcaagcagacctgtgcccgtggacactgtgccaacagctgtgagaggggcgacaccaccaccctgtacagccagggcggccatgggcacgatcccaagtctggcttccgcatctatttctgccagatcccctgcctgaacggaggccgctgcatcggcagggacgaatgctggtgccccgccaactccaccgggaagttctgccacctgcctatcccgcagccggacagggagcctccagggagggggtcccgccccagggccttgctggaagccccactgaagcagtccactttcacactgccgctctccaaccagctggcctccgtgaacccctccctggtgaaggtgcacattcaccacccacccgaggcctcagtgcagatccaccaggtggcccaggtgcggggcggggtggaggaggccctagtggagaacagcgtggagaccagacccccgccctggctgcctgccagccctggccacagcctctgggacagcaacaacatccctgctcggtctggagagccccctcggccactgcccccagcagcacccaggcctcgaggactgctgggccggtgttacctgaacactgtgaacggacagtgtgccaaccctctgctggagctgactacccaggaggactgctgtggcagtgtgggagccttctggggggtgactttgtgtgccccatgcccacccagaccagcctccccggtgattgagaatggccagctggagtgtcctcaggggtacaagagactgaacctcactcactgccaagatatcaacgagtgcttgaccctgggcctgtgcaaggacgcggagtgtgtgaataccaggggcagctacctgtgcacatgcagacctggcctcatgctggatccatcgcggagccgctgtgtgtcggacaaggcaatctccatgctgcagggactgtgctaccggtcgctggggcccggcacctgcaccctgcctttggcccagcggatcaccaagcagatatgctgctgcagccgcgtgggcaaagcatggggcagcgagtgtgagaaatgccctctgcctggcacagaggccttcagagagatctgccctgccggccacggctacacctacgcgagctccgacatccgcctgtccatgaggaaagccgaggaggaggaactggcaaggcccccaagggagcaagggcagaggagcagcggggcactgcccgggccagcagagaggcagcccctccgggtcgtcacggacacctggcttgaggccgggaccatccctgacaagggtgactctcaggctggccaggtcacgaccagtgtcactcatgcacctgcctgggtcacagggaatgccacaaccccaccaatgcctgaacaggggattgcagagatacaggaagaacaagtgaccccctccactgatgtgctggtgaccctgagcaccccaggcattgacagatgcgctgctggagccaccaacgtctgtggccctggaacctgcgtgaacctccccgatggatacagatgtgtctgcagccctggctaccagctgcaccccagccaggcctactgcacagatgacaacgagtgtctgagggacccctgcaagggaaaagggcgctgcatcaaccgcgtggggtcctactcctgcttctgctaccctggctacactctggccacctcaggggcgacacaggagtgtcaagatatcaatgagtgtgagcagccaggggtgtgcagcggggggcagtgcaccaacaccgagggctcgtaccactgcgagtgtgatcagggctacatcatggtcaggaaaggacactgccaagatatcaacgaatgccgtcaccccggtacctgccctgatgggagatgcgtcaattcccctggctcctacacttgtctggcctgtgaggagggctaccggggccagagtgggagctgtgtagatgtgaatgagtgtctgactcccggggtctgtgcccatggaaagtgcaccaacctagaaggctccttcagatgctcttgtgagcagggctatgaggtcacctcagatgagaagggctgccaagatgtggatgagtgtgccagccgggcctcatgccccacaggcctctgcctcaacacggagggctccttcgcctgctctgcctgtgagaacgggtactgggtgaatgaagacggcactgcctgtgaagacctagatgagtgtgccttcccgggagtctgcccctccggagtctgcaccaacacggctggctccttctcctgcaaggactgcgatgggggctaccggcccagccccctgggtgactcctgtgaagatgtggatgaatgtgaagacccccagagcagctgcctgggaggcgagtgcaagaacactgtgggctcctaccagtgcctctgtccccagggcttccagctggccaatggcaccgtgtgtgaggatgtgaatgagtgcatgggggaggagcactgcgcaccccacggcgagtgcctcaacagccacgggtctttcttctgtctgtgcgcgcctggcttcgtcagcgcagaggggggcaccagctgccaggatgtggacgagtgtgccaccacagacccgtgtgtgggagggcactgtgtcaacaccgagggctccttcaactgtctatgtgagactggcttccagccctccccagagagtggagagtgtgtggatattgacgagtgtgaggactatggagacccggtgtgtggcacctggaagtgtgaaaacagccctggctcctaccgctgtgttctgggctgccagcctggcttccacatggccccgaacggagactgcattgacatagacgagtgcgccaacgacaccatgtgtggcagccacggcttctgtgacaacactgatggctccttccgctgcctctgtgaccagggcttcgagatctctccctcaggctgggactgtgtggatgtgaacgagtgtgagcttatgctggcggtatgtggggccgcgctctgtgagaacgtggagggctccttcctgtgcctctgtgccagtgacctggaggagtacgatgcccaggaggggcactgccgcccacggggggctggaggtcagagtatgtctgaggccccaacgggggaccatgccccggcccccacccgcatggactgctactccgggcagaagggccatgcgccctgctccagtgtcctgggccggaacaccacacaggctgaatgctgctgcacccagggcgctagctggggagatgcctgtgacctctgcccgtctgaggactcagctgaattcagcgagatctgccctagtggaaaaggctacattcctgtggaaggagcctggacgtttggacagaccatgtacacagatgcggatgagtgtgtgatattcgggcctggtctctgcccgaacggccggtgcctcaacaccgtgcctggttatgtctgcctgtgcaatcccggcttccactacgatgcttcccacaagaagtgtgaggatcacgatgagtgccaggacctggcctgtgagaatggcgagtgcgtcaacacggagggctccttccactgcttctgcagccccccgctcaccctggacctcagccagcagcgctgcatgaacagcaccagcagcacggaggacctccctgaccacgacatccacatggacatctgctggaaaaaagtcaccaatgatgtgtgcagcgaacccctgcgtgggcaccgcaccacctacacggaatgctgctgccaggacggcgaggcctggagccagcagtgtgctctgtgtcccccgaggagctctgaggtctatgctcagctgtgcaacgtggctcgcattgaggcagagcgggaggccggggtccacttccggccaggctatgagtatggccccgggcccgatgacctgcactacagcatctatggcccagatggggcccccttctacaactacctgggccccgaggacaccgtccctgagcctgccttccccaacacagccggtcactcagcggaccgcacacccatccttgagtctcctttgcagccctcagaactccagccccactacgtggccagccatccagagcccccagccggcttcgaagggcttcaggcggaggagtgcggcatcctgaacggctgtgagaatggccgctgtgtgcgcgtgcgggagggctacacctgtgactgttttgagggcttccagctggatgcggcccacatggcctgcgtagatgtgaatgagtgtgatgacttgaacgggcctgctgtgctctgtgtccatggttactgcgagaacacagagggctcctaccgctgccactgctccccgggatatgtggctgaggcagggcccccccactgcactgccaaggagtagcagtcaggggtcagtgtggcaactacctggaaatggcctccagtcacaggcaggggccttgaggatgatttcctagctgggaagacaccgtgacatcaggccagaggtttccaatcagccttgcctgctttcatctctcccagcttagcctctggctgtaagcttcggtcattgcctccatgcccttgcttggctcaagcaccaccaatcgctttaatgcttcagccaccgcatgaggccctgtccaccacctttcctggccttgctatgggatgcttaccaaaggatggccctcatccaccctcccaagctgtgcgagcatgcaaggccccatggcctcacactgcagacacccctttccagccacaatccaccatcatcctgacgatcccacaactgggacagaggctacatctgccctagggaggtccttcagaatctgtggagcaagaaaggatttggggaagcttggggactgactccagagccccctcctaagaaccatcaccaccactcagccaatctgttctgggccctgattttgccacacctccatcctgtagcccattctctgaccccaaggagtggcagaagatcccttcactcagagaagcaaggctgatattagcttgttgaatgtaagagacacaaatgaagaagaacaaagagcctgagaaagcagcaagaggacatgatgaaaaatacgtggagttgatgagaaaggggagccaaggctttatacgtctaaagaaaatattcagtagctgaatccgcccagtgatagcctgtgggcaccagcagcaagggctgccatgggatacagcacccatctacaaagacctctattacataaacactgcttcttacaggaaacaaacctcttctgggatctccttttgtgaaaaccagtttgatgtgctaaaagtaaaaagtctattttccagtgtggtcttgttcagaagcagccagatttccaatgttgtttttcccctccactcagaaacccctgccctttcccttcagaaaacgatggcaggcattcctctgagtttacaagcagagactcactccaacccaaactagctgggagttcagaaccatggtggaataaagaaatgtgcatctggtctcttctgttgtttttatttcatatcagattaaatttctttaccatgttggctaagtctaaatattagagatgaggctgtgcctactccctggccagctctgctgatagcctatgatgggttccaatgggaaatgactctttactattaaaagacaaggaaagctctgacttcgtacttctctgatgaatggcaatgtaaatgaacaaggctccatgtgactggagcatggaagtgaatgctactttcttaatttaatctgccctgtcctacctgctcctctgattgttagccatcacataacttattgaatgcttgccatgtgccaggcactgtgctgagtgccatacatacatttcatttaattatccaataatcctacttactattgtttattctcaatttacaggtgaggaaactgagacatagaaagcttaaataatttgctctaggtccctatactaattgagatgttttcagcagacaaaaataagtcactcttacgcatgtaaaaatattctttcactcataataaaagaaatgcaacttaaaaccatactgagatcctttttaaaactgtcagattggcaaagatcaaaaagcttgttaagactcctagctggcaagcatgtgggaaataggtactctcataacagctgacagaagtacatattgaagaggacaatatggcaatgtccttcaaaattataaaagcactaactctttgatccagtagtttccacttctaggaacttaaccttcagatatattttcaccagatataaaatgacatacgtaagaagttattactgcatcatttgtaatagctaaagattagaaacaattaattgctatggaacccttaaaaaaggtggctctaaattccttaagaaagatatccaaaacaaattaaggggaaaagggagggttgcataacagcatgtaacataacactatttgtctaaagaatggggaaagagaagcggttgtctgttcacctcatccttgccactccgccttatacctcaccatcggagaacttaccatcccccaaatatatcctgctggcactacaccttcgtaactgctgttcccactgcccccacaacactccaatctccaccttcctgccaaccttgagatattgtatgcatatatacatatttcctttgtttaaaatacaaatagcatactatgcatgctgttctgcactttgctttttttttatacttgcaattagagctgcctcatttcattttacagctgtatactattccattgaatggataaaccataatttatttaatcagtccctcactgacagacgtttccattgtttcctgtcttttgctataaataatgctgtaatgaatattcttgtgcatatttcacattaatttatgggattacatctgcaggataaattcttagaaccaatggtggtttgtggggagggtgacagggtggataggtacaggattgggagacttttcactgtatctccttttgtatttttttgaattttgtaccatatgtatcacctattcaaaaaaaataaaatatttttaaatacagttgctggccaaa

SEQ ID NO: 8785 - DNA, 5466 bp, Artificial Sequence
  derived and/or modified sequence
atgaggcccaggaccaaggcccggagccctggccgggccctgaggaacccctggaggggcttcctgcccctgaccctggccctgtttgtgggcgccggccacgcccagagggaccctgtgggccgctatgagcctgctggaggagatgccaaccggctgcggcggcctgggggcagctacccagctgctgctgctgccaaggtgtacagcctcttccgggagcaggatgcccctgtggccggcctgcagcctgtggagcgggcccagcccggctggggcagcccccggcggcccacagaagctgaggcccggcggcccagccgggcccagcagagcagaagagtgcagcccccagcccagacccggcgcagcacccccctgggccagcagcagcctgcccccaggacccgggccgccccagccctgccccggctgggcaccccccagaggtctggagctgccccacccaccccaccccggggccgcctgaccggcagaaatgtgtgtggcggccagtgctgccccggctggaccacagccaacagcaccaaccactgcatcaagcctgtgtgtgagcccccctgccagaacagaggcagctgcagccggccccagctgtgtgtgtgccgcagcggcttccggggggcccgctgtgaggaggtgatcccagatgaggagtttgacccccagaacagccggctggccccccggcgctgggccgagaggagccccaacctgcggcgcagcagcgctgctggggagggcaccctggcccgggcccagcccccagccccccagagccccccagccccccagagccccccagctggcaccctgagcggcctgagccagacccaccccagccagcagcacgtgggcctgagcaggacagtgcggctgcaccccacagccacagccagcagccagctgagcagcaatgccctgcccccaggccctggcctggagcagagagatggcacccagcaggccgtgcccctggagcaccccagcagcccctggggcctgaacctgacagagaagatcaagaagatcaagatcgtgttcacccccaccatctgcaagcagacctgtgcccggggccactgtgccaacagctgtgagcggggggacaccaccaccctgtacagccagggcggccacggccatgaccccaagagcggcttccgcatctacttctgccagatcccctgcctgaatggaggccgctgcatcggcagagatgagtgctggtgcccagccaacagcacaggcaagttctgccacctgcccatcccccagcctgaccgggagcccccaggccggggcagccggccccgggccctgctggaggcccccctgaagcagagcaccttcaccctgcccctgagcaaccagctggcctctgtgaaccccagcctggtgaaggtgcacatccaccaccccccagaggcctctgtgcagatccaccaggtggcccaggtgcggggcggcgtggaggaggccctggtggagaacagcgtggagacccggcccccaccctggctgcctgccagccctggccacagcctgtgggacagcaacaacatcccagcccggtctggagagcccccccggcccctgcccccagctgccccccggccccggggcctgctgggccgctgctacctgaacacagtgaatggccagtgtgccaaccccctgctggagctgaccacccaggaggactgctgcggctctgtgggcgccttctggggcgtgaccctgtgtgccccctgcccccccaggcctgccagccctgtgattgaaaatggccagctggagtgcccccagggctacaagaggctgaacctgacccactgccaggacatcaatgaatgtctgaccctgggcctgtgcaaggatgctgaatgtgtgaacacccggggcagctacctgtgcacctgccggcccggcctgatgctggaccccagccgcagccgctgtgtgtctgacaaggccatctccatgctgcagggcctgtgctaccgcagcctgggccctggcacctgcaccctgcccctggcccagaggatcaccaagcagatctgctgctgcagccgggtgggcaaggcctggggctctgaatgtgagaagtgccccctgcctggaacagaggccttccgggagatctgcccagctggccacggctacacctacgccagcagtgacatccggctgtccatgaggaaggccgaggaggaggagctggcccggcccccccgggagcagggccagaggagcagcggggccctgcccggccctgctgagcggcagcccctgcgggtggtgacagacacctggctggaggccggcaccatcccagacaagggggacagccaggccggccaggtgaccacctctgtgacccacgccccagcctgggtgactggaaatgccaccaccccacccatgcctgagcagggcattgctgagatccaggaggagcaggtgacccccagcacagatgtgctggtgaccctgagcaccccaggcatcgacagatgtgccgccggggccaccaacgtgtgtggccctggcacctgtgtgaacctgcctgatggctaccgctgtgtgtgcagccctggctaccagctgcaccccagccaggcctactgcacagatgacaatgaatgtctgcgggacccctgcaagggcaagggccgctgcatcaacagagtgggcagctacagctgcttctgctacccaggctacaccctggccaccagcggggccacccaggagtgccaggacatcaatgaatgtgagcagcccggggtgtgcagcggcggccagtgcaccaacacagagggcagctaccactgtgaatgtgaccagggctacatcatggtgaggaagggccactgccaggacatcaatgaatgtcgccaccctggcacctgcccagatggccgctgtgtgaacagccctggcagctacacctgcctggcctgtgaggagggctaccggggccagagcggcagctgtgtggatgtgaatgaatgtctgaccccaggagtgtgtgcccacggcaagtgcaccaacctggagggcagcttccgctgcagctgtgagcagggctatgaggtgaccagtgatgagaagggctgccaggatgtggatgaatgtgccagccgggccagctgccccaccggcctgtgcctgaacacagagggcagctttgcctgcagcgcctgtgaaaatggctactgggtgaatgaagatggaacagcctgtgaggacctggatgaatgtgccttccctggggtgtgccccagcggcgtgtgcaccaacacagctggcagcttcagctgcaaggactgtgatggcggctaccggcccagccccctgggggacagctgtgaagatgtggatgaatgtgaggacccccagagcagctgcctgggcggggagtgcaagaacacagtgggcagctaccagtgcctgtgcccccagggcttccagctggccaacggcaccgtgtgtgaagatgtgaatgaatgcatgggagaggagcactgtgcccctcatggagaatgtctgaacagccacggcagcttcttctgcctgtgtgcccctggctttgtgtctgctgagggcggcaccagctgccaggatgtggatgaatgtgccaccacagacccctgtgtgggcggccactgtgtgaacacagagggcagcttcaactgcctgtgtgagaccggcttccagcccagccctgagagcggggagtgtgtggacattgatgaatgtgaggactatggagaccctgtgtgtggcacctggaagtgtgagaacagccctggcagctaccgctgtgtgctgggctgccagcccggcttccacatggcccccaacggggactgcatcgacattgatgaatgtgccaatgacaccatgtgtggcagccacggcttctgtgacaacacagatggcagcttccgctgcctgtgtgaccagggctttgagatcagccccagcggctgggactgtgtggatgtgaatgaatgtgagctgatgctggccgtgtgtggggccgccctgtgtgaaaatgtggagggcagcttcctgtgcctgtgtgccagtgacctggaggagtatgatgcccaggagggccactgccggcccagaggagctgggggccagagcatgtctgaggcccccactggagaccacgccccagcccccaccaggatggactgctacagcggccagaagggccacgccccctgcagctctgtgctgggcaggaacaccacccaggccgagtgctgctgcacccagggcgcctcctggggagatgcctgtgacctgtgccccagcgaggacagcgctgagttcagcgagatctgccccagcggcaagggctacatccctgtggagggcgcctggaccttcggccagaccatgtacacagatgctgatgaatgtgtgatcttcggccctggcctgtgccccaacggccgctgcctgaacacagtgcccggctacgtgtgcctgtgcaaccctggcttccactatgatgccagccacaagaagtgtgaagatcatgatgagtgccaggacctggcctgtgaaaatggagaatgtgtgaacacagagggcagcttccactgcttctgcagcccccccctgaccctggacctgagccagcagcgctgcatgaacagcaccagcagcacagaggacctgcctgaccatgacatccacatggacatctgctggaagaaggtgaccaatgatgtgtgcagcgagcccctgcggggccacaggaccacctacacagagtgctgctgccaggatggagaggcctggagccagcagtgtgccctgtgccccccaagaagcagcgaggtgtatgcccagctgtgcaatgtggccagaattgaagctgagcgggaggccggcgtgcacttccggcccggctatgaatatggccctggcccagatgacctgcactacagcatctacggcccagatggagcccccttctacaactacctgggcccagaagatactgtgcctgagcccgccttccccaacacagctggccacagcgctgacaggacccccatcctggagagccccctgcagcccagcgagctgcagccccactacgtggccagccaccctgagcccccagctggctttgagggcctgcaggccgaggagtgtggcatcctgaatggctgtgaaaatggccgctgtgtgcgggtgcgggagggctacacctgtgactgctttgagggcttccagctggatgctgcccacatggcctgtgtggatgtgaatgaatgtgatgacctgaatggacctgctgtgctgtgtgtgcacggctactgtgagaacacagagggcagctaccgctgccactgcagccctggctacgtggccgaggccggccccccccactgcacagccaaggagtag

SEQ ID NO: 8786 - DNA, 5466 bp, Artificial Sequence
  derived and/or modified sequence
atgcggccccggaccaaggcccggagccccggccgggccctgcggaatccttggcgcggcttcttgcctctcacgcttgcgctcttcgtgggtgccggtcatgctcagcgcgatcccgtcggccgctacgaacctgccggtggggatgcaaatcggctgagaagacctgggggatcctatcccgcagccgctgccgccaaggtgtactccctgttcagggagcaagatgcccccgttgccggtttgcagcccgtggagcgggcccagccaggttggggatctcctcggaggcctaccgaggccgaggctaggagaccttcgagggcacaacaatcaagacgcgtgcagccacctgctcagaccaggagatctacacccttaggccaacagcagccagccccaagaacacgggctgcaccagccctccccagactcggcactccacaaaggtcgggcgccgcccccccaactccgccccggggtcggctaaccggaagaaatgtctgtggggggcagtgctgccccgggtggactactgccaatagcaccaaccattgtataaaacctgtttgcgagccgccgtgccagaaccgtggctcttgttcccgcccgcaactctgcgtatgccgatccggcttccgcggggcgcgatgtgaagaggtgattcccgacgaggagtttgacccgcagaactctcgcctggccccccggaggtgggcagaacggagcccgaatctgaggcgctcctctgcagccggggaagggacccttgccagggcccagccacccgcgccccagtcacctcccgctcctcagtctccacccgctggcacgctgtccggactgtcacagactcatcctagtcagcagcatgtgggtctgagtcgaacggtcagattgcatcccaccgcaaccgcgagcagccaactttcttcaaacgctctcccacccggccccggtctggagcagagagacggcactcaacaggctgttcccctagagcacccctcgtcaccatggggcctgaacctgacagagaagattaagaagattaaaatcgtattcacaccgaccatatgcaagcagacatgtgcacggggtcattgcgcaaactcctgtgaaaggggcgatacaacgaccctctactcccagggaggccacggtcacgaccccaagtccggtttccgtatctacttttgtcaaatcccttgtctgaacggggggcgttgcattggtagggacgaatgctggtgccccgcgaactcaaccggcaagttttgccacctacctatcccccaaccagacagggagccgcccggacgcggaagcagaccacgcgcactgctcgaagccccgctgaagcagtctaccttcactctcccactcagcaatcagctggcgtccgtaaatcccagtctcgtcaaggtgcatatccaccaccctccggaggccagtgtgcaaatacaccaggtggcacaggtgagagggggggtcgaggaagccctggtagaaaactcagtcgagacccggcctccaccatggctccccgcgtcacccgggcactctctatgggactcgaacaatattccggctaggtccggagaaccaccacgccccctccccccagctgcgccaagaccgcgcggcctgctcgggcgatgttatttaaacacggtcaacggtcaatgcgccaatcctctgcttgagctgacaactcaagaagactgttgcggctcggtgggggccttttggggggtcaccttgtgcgcgccctgtcctcccaggcccgcaagcccagttatcgaaaatgggcagctcgaatgcccccaggggtacaagcggctgaatctaacacattgtcaggatatcaacgagtgccttacactcgggttgtgtaaggacgcagagtgcgtcaatacaagaggatcttatttgtgcacctgtcgccccggcctgatgctggatcccagtaggtctagatgcgtctccgacaaagctatctcaatgctgcaagggctatgttatcggtccttggggcctggaacctgcactctgccgctcgcgcagagaattacaaaacagatatgttgctgctctcgagtgggcaaagcgtggggctctgaatgtgagaagtgccccttacccggaacagaagccttcagagagatttgcccagcaggacatggctatacgtacgcctcaagtgacattcggctcagcatgcggaaagctgaggaggaggaactggcccgcccacctagggagcagggtcagagatcgagcggagccttaccaggccccgctgaacggcaaccactgagggtggttacggatacctggcttgaggccggcactattccagataaaggagattcacaggctgggcaggttaccacaagcgtgactcacgcacccgcctgggtgactggcaacgccactactccgcccatgcctgaacagggcattgccgagatccaggaagagcaggttacaccatccactgatgtgcttgtcacactgagcacacccggtatcgacagatgcgctgcaggggccaccaatgtctgcggtcccggaacatgtgtcaacttaccggatggatacagatgcgtctgctcgccaggctatcagctgcatccgagtcaggcttattgcacagacgacaatgaatgcctgagagatccctgtaaaggcaagggcaggtgtattaaccgggtgggatcatattcatgcttctgctatcccggttacacactggctaccagtggagcaacacaagaatgtcaggacattaatgaatgcgagcaacctggcgtgtgtagtggcggtcagtgcaccaacaccgaaggaagttatcactgtgagtgtgatcaaggttacattatggtgaggaagggacattgccaggacatcaacgaatgccgtcaccctgggacctgtccagatggacgctgcgtgaactctcccggctcgtacacttgtttggcgtgcgaagagggttatcgcgggcagagcgggagctgtgtggacgtgaatgagtgcctgacgcctggcgtgtgcgcccatggtaaatgcactaaccttgagggatctttcagatgctcctgcgagcagggctacgaagtcacaagtgatgaaaaaggctgccaggatgtggacgagtgtgcctcccgggcctcctgcccaacaggtttatgtttaaacactgagggctcattcgcttgcagtgcttgcgagaacggctattgggttaatgaggacgggaccgcgtgtgaggacttagacgagtgtgctttccccggagtgtgtccaagtggggtgtgtaccaacaccgccggatctttttcatgtaaagactgtgacggcggttatcgcccatcccctcttggtgactcttgtgaggatgtggatgaatgtgaggatccacagagtagttgcctaggcggcgagtgcaagaacacagttggaagttatcagtgcctgtgcccacagggctttcaacttgccaatggtactgtctgtgaggacgttaacgagtgcatgggggaggaacactgtgctcctcacggggagtgcctgaatagtcacggaagctttttctgcctgtgcgcgccaggattcgtgtccgcggagggaggaactagctgccaggacgtggatgaatgcgccactaccgacccttgtgtgggagggcactgtgtaaacacagagggctccttcaactgcttgtgcgaaactgggtttcagccctcacctgagtccggcgaatgtgttgatatcgatgaatgcgaagattacggagatcctgtgtgtgggacctggaaatgtgaaaattctccaggctcctataggtgtgtcctgggctgccaacccggcttccacatggctcccaatggggactgtatagacattgatgagtgcgccaacgacaccatgtgtggatcccacggcttctgcgacaacactgatggctcatttcgctgtttgtgtgaccagggatttgagatctcaccttctgggtgggattgtgtcgatgtcaacgaatgtgaattgatgctagcagtgtgcggcgcagccctgtgtgaaaacgttgaggggtctttcctgtgcctctgcgcatctgatttggaggagtacgacgctcaggaaggtcactgtcgtccgcggggcgctggcggacagagcatgtcagaggctccaacaggggaccacgctccagcacctaccaggatggattgctactccgggcagaaggggcacgctccttgcagcagcgtgctcggacgtaacacaactcaggcagagtgctgttgtacccagggtgcgagctggggggacgcatgtgacttatgccctagcgaggattccgcggagtttagcgaaatctgcccttccgggaagggctatatacccgtcgaaggtgcctggacctttggccaaaccatgtatactgacgcggacgagtgcgtcattttcggcccaggcctgtgtcccaacgggcgctgcttgaatactgtacccggctatgtatgtttgtgtaaccctggattccattacgacgccagtcacaaaaaatgtgaagaccacgacgaatgtcaagatttggcctgcgagaatggggaatgcgttaatactgagggctctttccattgtttctgtagcccgcctctgaccctagacctttcacaacagcggtgcatgaactccaccagttccactgaggacctccccgaccatgacatacacatggacatatgctggaagaaggttaccaatgatgtgtgttcagagcccctgcgtgggcatagaacaacatacaccgagtgctgctgtcaggacggggaagcgtggtcacagcagtgcgcactctgcccacccagatctagcgaggtctacgctcagctctgcaacgtagccagaatcgaagcagaacgagaggcaggggtacattttagacctggctatgaatacggccccggccccgatgatctgcattactctatttatggacctgacggggcgcctttttacaactatctggggccagaggatacagtgcctgaacccgccttcccgaacactgcgggccattccgcagaccgaactcctatacttgagtccccactacagccctccgagttacagccacactacgtagcaagccaccccgagcccccggccggcttcgaaggcctccaggctgaggagtgtgggatattaaatggctgtgagaatggaagatgcgttcgagtgcgggagggctatacatgcgattgctttgaagggttccagctcgatgccgcccacatggcttgcgtggacgtgaacgaatgcgacgatcttaatggtcctgcagtgttgtgcgtccacggatactgcgaaaatacagaggggtcttataggtgccactgttcccctggctatgtggccgaagctgggccacctcactgcacagctaaggaatag

SEQ ID NO: 8787 - DNA, 5466 bp, Artificial Sequence
  derived and/or modified sequence
atgaggcctaggactaaagcccgaagcccaggtagagccttaaggaatccatggcggggattcctccccctgacactcgcgctgtttgtcggcgctggccatgctcaacgagaccccgtgggccgttatgagcccgctggcggagacgcgaacagacttcgcagacctggaggatcttacccagctgcagcggcagctaaggtctattccttatttcgcgaacaggatgcccctgtcgcaggactccagcctgtggagcgcgcacagccaggctgggggtccccaaggcgacccaccgaggccgaggcccgaagaccctcacgggcacaacaatcacgcagggtgcaacccccagctcagacgagacggagcacccctctgggtcaacagcagcccgcacccaggactagagcggctcccgctttacctaggttggggacaccacagagatcaggagctgcacctcctaccccaccgcgaggtcgtcttaccggccgaaacgtgtgtggcggacagtgttgtccaggatggaccactgccaactccaccaaccactgcatcaaacctgtgtgtgaacccccttgtcagaacagaggatcttgtagcaggcctcagttatgcgtgtgtcggagtggcttcagaggagcacgttgcgaagaggttatacccgacgaagagttcgacccccagaactctcgcttagcacccaggagatgggccgagaggtctccaaacctcaggagaagcagcgccgcaggagaggggaccttagcacgagcacagccaccagccccacaatccccacctgcgcctcagagccccccagccggaaccttaagtggcctatcccaaacacatccttctcaacaacacgtcgggctctccaggactgtacgattacaccccaccgccaccgcatcatcccagctgtcatcaaacgccttgcctcccggacccggactggagcagagagatggtactcagcaggccgtgcctctggagcatccctcctcaccttggggcctgaacctgacagagaagatcaagaaaatcaaaattgtgtttactcccacaatttgcaagcagacatgtgcgagagggcactgtgcaaattcgtgtgaacggggagatacaacgaccttatatagtcaggggggacacggccatgacccgaagtctggcttccgtatctacttttgtcagattccctgcctgaacggagggaggtgtatcgggagggatgagtgctggtgtccagccaactccaccggcaagttttgccacctccccatccctcaaccagatagagagccacccggtaggggatcccgccctcgcgcactgctcgaagcccctctgaaacagagcacctttacgctgccactgagcaatcaactggcaagcgtgaacccctcactggtcaaagttcatatacatcatccccctgaagcttccgttcaaattcaccaggtcgcgcaggttcgcggtggggtcgaggaagccctcgtggaaaacagcgtcgagacaaggccccctccatggttacccgcttctcccggacattccctctgggactctaacaacatccctgccagatctggagagccacccaggcccctgcctccggcagcccctagaccgcgaggcttacttggcaggtgctatctgaacaccgtgaacggccaatgtgcgaatcccctgcttgagctcaccactcaggaagattgctgcggctccgtaggagccttttggggggtgactctgtgtgccccttgcccgccaaggcccgcatccccggtgatcgaaaacggacaactggaatgtccacagggctacaagcgactgaatttaacacattgccaagacatcaatgagtgtcttacactcgggctctgtaaagatgcagagtgcgtgaatactcgcggttcttacctgtgtacgtgccggccaggcctgatgctagacccatctcgatcacggtgtgtgtctgacaaagccatctccatgctgcagggattgtgttacaggtccctgggcccaggcacctgtaccctccctctggctcaaagaatcaccaaacagatctgttgttgcagtagggtgggaaaagcctgggggagcgaatgtgagaagtgtcccctcccgggtaccgaggcctttcgggagatctgccccgcagggcacggctatacctacgctagctcagacatcagactgagcatgcgtaaggctgaggaagaagagctcgctcgacctcccagggagcagggacaaagaagctccggagctctgcctggaccagcggagcgccagcccctgcgagtggtcaccgacacctggctggaagccggtaccattccagataagggcgatagccaggccggacaggtaacaacatccgtgacacatgcgcctgcctgggtcactggcaacgccaccacacctccaatgccagagcagggcatcgctgagattcaagaagagcaggtgacaccaagcactgacgtactggtgaccctttctacccccggaatagacaggtgcgccgcaggggctactaacgtgtgcggacctggcacctgcgtaaatctccccgacggctatcgctgtgtgtgttcccctggttatcagctgcatccatcccaggcatactgcactgacgacaatgagtgtctccgggacccatgtaaagggaagggcagatgtatcaacagggtggggtcctacagctgcttttgttacccaggctatactctcgcaaccagcggcgctacgcaggagtgtcaagacatcaatgaatgtgagcagcccggtgtttgctcaggtggtcaatgtacaaataccgagggtagctaccattgcgagtgtgatcaagggtacatcatggtgcggaaggggcactgccaagatattaatgagtgccggcacccaggaacatgccctgacggtagatgcgtcaattcgcccggatcttacacgtgccttgcctgcgaggagggttaccggggacagtccggttcctgcgttgacgtgaacgaatgtctcacccccggtgtgtgtgcacatggcaagtgtacaaacctggaaggcagctttcggtgtagttgcgagcaggggtatgaggtcacctcagacgaaaaaggatgtcaggacgtggatgaatgtgcttctcgcgcatcttgccctacgggcttgtgcttgaacactgagggtagtttcgcctgctctgcctgtgagaacggatattgggtgaatgaggatggaacagcttgtgaagatctcgatgaatgcgccttcccgggagtgtgtcccagcggagtctgtaccaataccgcaggctcctttagctgtaaagactgtgacggaggatacagaccctctcctctcggcgattcatgtgaggatgtcgatgaatgtgaggaccctcagagcagttgcctaggcggagagtgcaagaatactgtcggttcctaccagtgtttgtgcccccagggttttcagctagcaaacggaaccgtgtgtgaggatgtgaacgagtgcatgggcgaagagcactgcgcgcctcacggcgagtgcctgaacagtcacgggagtttcttttgtctgtgtgctcccggatttgtcagtgctgaggggggaacctcctgccaagatgtagacgagtgcgccaccacagatccttgtgtggggggacactgcgtcaacacggaaggcagtttcaattgtctgtgtgaaaccggcttccagccctcccccgaatctggcgaatgcgtcgatattgacgaatgcgaggactacggcgatccagtgtgcggaacttggaaatgcgaaaattctccaggttcataccgatgtgtcttgggctgccaacccggatttcatatggcaccgaacggcgattgcatagacattgacgagtgtgcaaacgacacaatgtgtggatcccatggtttctgtgacaatacagacggctccttccggtgcttgtgtgaccagggattcgagatttctccgtccggctgggattgtgtggatgtgaatgaatgtgaactcatgcttgccgtctgcggggcagcactatgtgaaaacgttgaggggagttttttatgcctgtgcgcctccgacctggaagagtacgacgcacaggaaggacattgccgaccccgaggagctggtggacagagcatgagtgaggctcccacaggagatcacgccccagcccctacaagaatggactgctactcggggcagaaagggcacgcaccctgttcctctgttctggggaggaataccacacaggccgagtgctgctgtactcagggagcttcctggggcgatgcgtgcgacctctgtccttcggaagacagcgccgagttctcagagatctgcccaagcggcaaaggctacattccagtagaaggcgcttggacattcggccagacaatgtacactgacgctgacgagtgtgtgattttcggacccggtctgtgtcccaatggcagatgcctaaacactgtacccggatacgtctgcctctgtaatcctggcttccactatgatgcatcacacaagaaatgtgaggaccacgacgagtgccaggaccttgcttgtgagaacggtgagtgtgtgaacaccgagggatccttccactgcttttgttccccacccctcaccctggatctgtcccagcagcgctgtatgaatagcaccagtagtaccgaagacttgcccgatcatgacatccacatggatatctgttggaagaaagtcacaaacgacgtctgttctgagccccttcgcggacacaggacaacatacactgaatgttgctgccaagacggcgaggcctggtcgcagcaatgtgccctgtgcccccctcgtagttccgaagtgtacgcccagctgtgcaatgtggctcggatcgaagctgagcgcgaagcgggagtgcatttcagaccaggatatgaatacgggccaggtcccgacgatctgcactatagcatttatggacccgatggagcacctttttacaactacttaggacctgaagacaccgtgcccgaacccgcttttcccaacacggccggtcatagtgccgacaggacccccatcttggagagtcctttgcagcccagcgagctgcaaccacattatgtggcatcccaccccgagcccccagctggttttgaaggtctgcaagcagaggagtgtggaatcttgaacgggtgtgagaatggtaggtgtgtgagggtgagggagggctacacctgtgactgcttcgagggattccagctggatgccgcacatatggcatgtgtcgatgtgaacgaatgcgatgacctgaatggccctgccgtcttgtgtgtgcatggctactgcgaaaatacagaaggctcttaccgatgtcattgtagtcctggttatgtcgcagaagccggaccacctcactgtaccgcaaaggaatag

SEQ ID NO: 8788 - DNA, 5466 bp, Artificial Sequence
  derived and/or modified sequence
atgagacccagaaccaaggccagaagccccggcagagccctgagaaacccctggagaggcttcctgcccctgaccctggccctgttcgtgggcgccggccacgcccagagagaccccgtgggcagatacgagcccgccggcggcgacgccaacagactgagaagacccggcggcagctaccccgccgccgccgccgccaaggtgtacagcctgttcagagagcaggacgcccccgtggccggcctgcagcccgtggagagagcccagcccggctggggcagccccagaagacccaccgaggccgaggccagaagacccagcagagcccagcagagcagaagagtgcagccccccgcccagaccagaagaagcacccccctgggccagcagcagcccgcccccagaaccagagccgcccccgccctgcccagactgggcaccccccagagaagcggcgccgccccccccaccccccccagaggcagactgaccggcagaaacgtgtgcggcggccagtgctgccccggctggaccaccgccaacagcaccaaccactgcatcaagcccgtgtgcgagcccccctgccagaacagaggcagctgcagcagaccccagctgtgcgtgtgcagaagcggcttcagaggcgccagatgcgaggaggtgatccccgacgaggagttcgacccccagaacagcagactggcccccagaagatgggccgagagaagccccaacctgagaagaagcagcgccgccggcgagggcaccctggccagagcccagccccccgccccccagagcccccccgccccccagagcccccccgccggcaccctgagcggcctgagccagacccaccccagccagcagcacgtgggcctgagcagaaccgtgagactgcaccccaccgccaccgccagcagccagctgagcagcaacgccctgccccccggccccggcctggagcagagagacggcacccagcaggccgtgcccctggagcaccccagcagcccctggggcctgaacctgaccgagaagatcaagaagatcaagatcgtgttcacccccaccatctgcaagcagacctgcgccagaggccactgcgccaacagctgcgagagaggcgacaccaccaccctgtacagccagggcggccacggccacgaccccaagagcggcttcagaatctacttctgccagatcccctgcctgaacggcggcagatgcatcggcagagacgagtgctggtgccccgccaacagcaccggcaagttctgccacctgcccatcccccagcccgacagagagccccccggcagaggcagcagacccagagccctgctggaggcccccctgaagcagagcaccttcaccctgcccctgagcaaccagctggccagcgtgaaccccagcctggtgaaggtgcacatccaccacccccccgaggccagcgtgcagatccaccaggtggcccaggtgagaggcggcgtggaggaggccctggtggagaacagcgtggagaccagaccccccccctggctgcccgccagccccggccacagcctgtgggacagcaacaacatccccgccagaagcggcgagccccccagacccctgccccccgccgcccccagacccagaggcctgctgggcagatgctacctgaacaccgtgaacggccagtgcgccaaccccctgctggagctgaccacccaggaggactgctgcggcagcgtgggcgccttctggggcgtgaccctgtgcgccccctgcccccccagacccgccagccccgtgatcgagaacggccagctggagtgcccccagggctacaagagactgaacctgacccactgccaggacatcaacgagtgcctgaccctgggcctgtgcaaggacgccgagtgcgtgaacaccagaggcagctacctgtgcacctgcagacccggcctgatgctggaccccagcagaagcagatgcgtgagcgacaaggccatcagcatgctgcagggcctgtgctacagaagcctgggccccggcacctgcaccctgcccctggcccagagaatcaccaagcagatctgctgctgcagcagagtgggcaaggcctggggcagcgagtgcgagaagtgccccctgcccggcaccgaggccttcagagagatctgccccgccggccacggctacacctacgccagcagcgacatcagactgagcatgagaaaggccgaggaggaggagctggccagaccccccagagagcagggccagagaagcagcggcgccctgcccggccccgccgagagacagcccctgagagtggtgaccgacacctggctggaggccggcaccatccccgacaagggcgacagccaggccggccaggtgaccaccagcgtgacccacgcccccgcctgggtgaccggcaacgccaccaccccccccatgcccgagcagggcatcgccgagatccaggaggagcaggtgacccccagcaccgacgtgctggtgaccctgagcacccccggcatcgacagatgcgccgccggcgccaccaacgtgtgcggccccggcacctgcgtgaacctgcccgacggctacagatgcgtgtgcagccccggctaccagctgcaccccagccaggcctactgcaccgacgacaacgagtgcctgagagacccctgcaagggcaagggcagatgcatcaacagagtgggcagctacagctgcttctgctaccccggctacaccctggccaccagcggcgccacccaggagtgccaggacatcaacgagtgcgagcagcccggcgtgtgcagcggcggccagtgcaccaacaccgagggcagctaccactgcgagtgcgaccagggctacatcatggtgagaaagggccactgccaggacatcaacgagtgcagacaccccggcacctgccccgacggcagatgcgtgaacagccccggcagctacacctgcctggcctgcgaggagggctacagaggccagagcggcagctgcgtggacgtgaacgagtgcctgacccccggcgtgtgcgcccacggcaagtgcaccaacctggagggcagcttcagatgcagctgcgagcagggctacgaggtgaccagcgacgagaagggctgccaggacgtggacgagtgcgccagcagagccagctgccccaccggcctgtgcctgaacaccgagggcagcttcgcctgcagcgcctgcgagaacggctactgggtgaacgaggacggcaccgcctgcgaggacctggacgagtgcgccttccccggcgtgtgccccagcggcgtgtgcaccaacaccgccggcagcttcagctgcaaggactgcgacggcggctacagacccagccccctgggcgacagctgcgaggacgtggacgagtgcgaggacccccagagcagctgcctgggcggcgagtgcaagaacaccgtgggcagctaccagtgcctgtgcccccagggcttccagctggccaacggcaccgtgtgcgaggacgtgaacgagtgcatgggcgaggagcactgcgccccccacggcgagtgcctgaacagccacggcagcttcttctgcctgtgcgcccccggcttcgtgagcgccgagggcggcaccagctgccaggacgtggacgagtgcgccaccaccgacccctgcgtgggcggccactgcgtgaacaccgagggcagcttcaactgcctgtgcgagaccggcttccagcccagccccgagagcggcgagtgcgtggacatcgacgagtgcgaggactacggcgaccccgtgtgcggcacctggaagtgcgagaacagccccggcagctacagatgcgtgctgggctgccagcccggcttccacatggcccccaacggcgactgcatcgacatcgacgagtgcgccaacgacaccatgtgcggcagccacggcttctgcgacaacaccgacggcagcttcagatgcctgtgcgaccagggcttcgagatcagccccagcggctgggactgcgtggacgtgaacgagtgcgagctgatgctggccgtgtgcggcgccgccctgtgcgagaacgtggagggcagcttcctgtgcctgtgcgccagcgacctggaggagtacgacgcccaggagggccactgcagacccagaggcgccggcggccagagcatgagcgaggcccccaccggcgaccacgcccccgcccccaccagaatggactgctacagcggccagaagggccacgccccctgcagcagcgtgctgggcagaaacaccacccaggccgagtgctgctgcacccagggcgccagctggggcgacgcctgcgacctgtgccccagcgaggacagcgccgagttcagcgagatctgccccagcggcaagggctacatccccgtggagggcgcctggaccttcggccagaccatgtacaccgacgccgacgagtgcgtgatcttcggccccggcctgtgccccaacggcagatgcctgaacaccgtgcccggctacgtgtgcctgtgcaaccccggcttccactacgacgccagccacaagaagtgcgaggaccacgacgagtgccaggacctggcctgcgagaacggcgagtgcgtgaacaccgagggcagcttccactgcttctgcagcccccccctgaccctggacctgagccagcagagatgcatgaacagcaccagcagcaccgaggacctgcccgaccacgacatccacatggacatctgctggaagaaggtgaccaacgacgtgtgcagcgagcccctgagaggccacagaaccacctacaccgagtgctgctgccaggacggcgaggcctggagccagcagtgcgccctgtgcccccccagaagcagcgaggtgtacgcccagctgtgcaacgtggccagaatcgaggccgagagagaggccggcgtgcacttcagacccggctacgagtacggccccggccccgacgacctgcactacagcatctacggccccgacggcgcccccttctacaactacctgggccccgaggacaccgtgcccgagcccgccttccccaacaccgccggccacagcgccgacagaacccccatcctggagagccccctgcagcccagcgagctgcagccccactacgtggccagccaccccgagccccccgccggcttcgagggcctgcaggccgaggagtgcggcatcctgaacggctgcgagaacggcagatgcgtgagagtgagagagggctacacctgcgactgcttcgagggcttccagctggacgccgcccacatggcctgcgtggacgtgaacgagtgcgacgacctgaacggccccgccgtgctgtgcgtgcacggctactgcgagaacaccgagggcagctacagatgccactgcagccccggctacgtggccgaggccggccccccccactgcaccgccaaggagtag

SEQ ID NO: 8789 - protein, 239 aa, Artificial Sequence
  derived and/or modified sequence
MTIKLWDFQGFECIRTMHGHDHNVSSVAIMPNGDHIVSASRDKTIKMWEVQTGYCVKTFTGHREWVRMVRPNQDGTLIASCSNDQTVRVWVVATKECKAELREHEHVVECISWAPESSYSSISEATGSETKKSGKPGPFLLSGSRDKTIKMWDVSTGMCLMTLVGHDNWVRGVLFHSGGKFILSCADDKTLRVWDYKNKRCMKTLNAHEHFVTSLDFHKTAPYVVTGSVDQTVKVWECR

SEQ ID NO: 8790 - protein, 410 aa, Artificial Sequence
  derived and/or modified sequence
MVLSQRQRDELNRAIADYLRSNGYEEAYSVFKKEAELDVNEELDKKYAGLLEKKWTSVIRLQKKVMELESKLNEAKEEFTSGGPLGQKRDPKEWIPRPPEKYALSGHRSPVTRVIFHPVFSVMVSASEDATIKVWDYETGDFERTLKGHTDSVQDISFDHSGKLLASCSADMTIKLWDFQGFECIRTMHGHDHNVSSVAIMPNGDHIVSASRDKTIKMWEVQTGYCVKTFTGHREWVRMVRPNQDGTLIASCSNDQTVRVWVVATKECKAELREHEHVVECISWAPESSYSSISEATGSETKKSGKPGPFLLSGSRDKTIKMWDVSTGMCLMTLVGHDNWVRGVLFHSGGKFILSCADDKTLRVWDYKNKRCMKTLNAHEHFVTSLDFHKTAPYVVTGSVDQTVKVWECR

SEQ ID NO: 8791 - protein, 205 aa, Artificial Sequence
  derived and/or modified sequence
MTIKLWDFQGFECIRTMHGHDHNVSSVAIMPNGDHIVSASRDKTIKMWEVQTGYCVKTFTGHREWVRMVRPNQDGTLIASCSNDQTVRVWVVATKECKAELREHEHVVECISWAPESSYSSISEATGSEVGHDNWVRGVLFHSGGKFILSCADDKTLRVWDYKNKRCMKTLNAHEHFVTSLDFHKTAPYVVTGSVDQTVKVWECR

SEQ ID NO: 8792 - DNA, 720 bp, Artificial Sequence
  derived and/or modified sequence
atgaccattaaactgtgggactttcagggcttcgaatgcatccggacgatgcatggccatgaccacaatgttagcagcgtggccattatgccgaatggagatcatatagtcagcgcctcacgggataagacaataaagatgtgggaagttcaaaccggttattgcgtgaagacgttcacagggcatcgcgaatgggtgagaatggtaaggccgaaccaagacgggaccctcatagcctcttgcagtaatgatcagacggtccgcgtgtgggtggtcgcaaccaaagaatgtaaggccgaacttcgcgaacatgaacacgtggttgagtgtatctcttgggctcccgagtcctcctattcgtctattagtgaagccacggggtcagagacaaagaagagcggcaagcctggacctttcctcttgtcagggtcacgggacaaaaccataaagatgtgggacgtcagcaccggcatgtgtctcatgaccctggtgggtcacgacaactgggtccgtggtgttcttttccactccgggggtaagtttatcctgtcatgcgccgacgataagaccttgcgcgtttgggattacaagaataagcgatgcatgaagaccctgaacgcacatgaacacttcgtcactagcctggattttcacaagactgccccttatgtcgtcacgggtagtgtggatcagaccgtcaaggtttgggagtgtagatag

SEQ ID NO: 8793 - DNA, 1233 bp, Artificial Sequence
  derived and/or modified sequence
atggtgttgagtcagcggcaacgcgatgagctcaacagggccattgccgactatctccggtctaacggttatgaggaggcatactcagtgtttaagaaggaggctgaactggatgtgaacgaagaacttgacaaaaagtatgctggtctgttggaaaagaaatggacttccgtcatccggcttcagaagaaggtcatggaactcgaatcaaaactcaacgaagctaaggaggagttcaccagcggcgggcccttgggtcagaaacgagatcccaaggaatggataccccgcccccctgagaaatatgccttaagtggccatcgctcacccgtgacccgggtgatttttcatccagttttttccgtgatggtgagtgccagtgaagacgcaacaatcaaagtgtgggactatgagacaggagatttcgaaaggacactgaaagggcacacagatagcgtgcaggatatttccttcgatcacagcggtaaactgctggcatcctgttctgccgacatgacgattaaattgtgggattttcagggcttcgagtgcatacgaactatgcacggccatgaccacaatgtctcctcagtggccataatgcctaatggcgaccatattgtatcggcatctagggacaagaccatcaaaatgtgggaggttcagaccggctattgcgtcaagacatttacggggcaccgtgaatgggtgcgcatggtgcgcccaaaccaggacggaacactgattgcgtcctgttcgaatgaccagaccgtccgggtatgggtcgtagccacaaaagagtgtaaagcagagctgagagagcatgaacacgttgtcgagtgtatttcctgggcccctgagagttcctatagcagtatcagcgaagccaccgggagcgagactaagaagtcgggcaagccaggcccattcttgctgagcggtagccgggataagacaattaagatgtgggatgtgagcaccggaatgtgtctgatgaccctggtgggacatgacaactgggtccgcggggtgttgtttcattccggaggcaaattcatcttatcttgcgctgacgacaagaccttgcgggtctgggattataaaaacaagcgttgtatgaaaactcttaacgcccacgaacactttgtaacaagcctggatttccataaaacggcgccttacgttgtcaccgggagcgtggaccaaactgttaaagtgtgggaatgtaggtag

SEQ ID NO: 8794 - DNA, 618 bp, Artificial Sequence
  derived and/or modified sequence
atgaccataaagctatgggattttcagggattcgagtgtattagaaccatgcacggccacgatcacaacgtcagcagcgttgccattatgccaaacggggaccacatcgttagcgcgtcacgcgataagactatcaagatgtgggaagttcagacaggatactgcgttaaaactttcactggacaccgagagtgggtgcgcatggtgcggcctaatcaggatggcacgttaatcgcatcatgtagcaatgaccagacagtgcgggtttgggttgtggcaactaaagaatgcaaggctgagctgagagagcacgagcacgtagtggagtgtattagctgggcgcccgagagttcctacagctccatctcggaggctactggctctgaggtgggtcacgacaactgggtccgcggggtcctttttcacagcggaggaaaattcatactgtcatgtgcagacgacaaaaccctccgcgtgtgggactataagaacaagcggtgcatgaaaaccttgaacgcccacgagcactttgtcacatcattggatttccacaagactgccccgtacgttgtgacaggctccgttgatcagactgttaaagtttgggagtgtcgatag

SEQ ID NO: 8795 - DNA, 720 bp, Artificial Sequence
  derived and/or modified sequence
atgaccatcaagctgtgggacttccagggctttgagtgcatccgcaccatgcacggccatgaccacaacgtgtcctctgtggccatcatgcccaacggggaccacatcgtgtctgccagccgggacaagaccatcaagatgtgggaggtgcagacaggctactgtgtgaagaccttcaccggccaccgggagtgggtgaggatggtgcggcccaaccaggacggcaccctcatcgccagctgcagcaatgaccagacagtgcgggtgtgggtggtggccaccaaggagtgcaaggccgagctgcgggagcacgagcacgtggtggagtgcatctcctgggcccctgagagcagctacagcagcatcagcgaggccaccggcagcgagaccaagaagagcggcaagccaggccccttcctgctgagcggcagccgggacaagaccatcaagatgtgggatgtgtccacaggcatgtgcctgatgaccctggtgggccatgacaactgggtgcggggcgtgctcttccacagcggcggcaagttcatcctgagctgtgctgatgacaagaccctgcgggtgtgggactacaagaacaagcgctgcatgaagaccctgaatgcccacgagcactttgtgaccagcctggacttccacaagacagccccctacgtggtgacaggctctgtggaccagacagtgaaggtgtgggagtgcaggtag

SEQ ID NO: 8796 - DNA, 1233 bp, Artificial Sequence
  derived and/or modified sequence
atggtgctgagccagaggcagagagatgagctgaacagagccatcgctgactacctgcggagcaatggctatgaggaggcctacagcgtcttcaagaaggaggccgagctggatgtgaatgaggagctggacaagaagtatgccggcctgctggagaagaagtggaccagcgtcatccggctgcagaagaaggtgatggagctggagagcaagctgaatgaggccaaggaggagttcaccagcggcggccccctgggccagaagagggaccccaaggagtggatcccccggcccccagagaagtatgccctgagcggccacaggagccctgtgaccagggtcatcttccaccctgtgttttctgtgatggtgtctgcctctgaagatgccaccatcaaggtgtgggactatgaaacaggagactttgagaggaccctgaagggccacacagacagcgtgcaggacatcagctttgaccacagcggcaagctgctggccagctgcagcgctgacatgaccatcaagctgtgggacttccagggctttgagtgcatccgcaccatgcacggccatgaccacaacgtgtcctctgtggccatcatgcccaatggagaccacatcgtgtctgccagccgggacaagaccatcaagatgtgggaggtgcagacaggctactgtgtgaagaccttcaccggccaccgggagtgggtgaggatggtgcggcccaaccaggacggcaccctgattgccagctgcagcaatgaccagacagtgcgggtgtgggtggtggccaccaaggagtgcaaggccgagctgcgggagcatgaacatgtggtggagtgcatctcctgggcccctgagagcagctacagcagcatcagcgaggccactggaagtgagaccaagaagagcggcaagccaggccccttcctgctgagcggcagccgggacaagaccatcaagatgtgggatgtgtccacaggcatgtgcctgatgaccctggtgggccatgacaactgggtgcggggcgtgctcttccacagcggcggcaagttcatcctgagctgtgctgatgacaagaccctgcgggtgtgggactacaagaacaagcgctgcatgaagaccctgaatgcccacgagcactttgtgaccagcctggacttccacaagacagccccctacgtggtgactggatctgtggaccagacagtgaaggtgtgggagtgcaggtag

SEQ ID NO: 8797 - DNA, 618 bp, Artificial Sequence
  derived and/or modified sequence
atgaccatcaagctgtgggacttccagggctttgagtgcatccgcaccatgcacggccatgaccacaacgtgtcctctgtggccatcatgcccaacggggaccacatcgtgtctgccagccgggacaagaccatcaagatgtgggaggtgcagacaggctactgtgtgaagaccttcaccggccaccgggagtgggtgaggatggtgcggcccaaccaggacggcaccctcatcgccagctgcagcaatgaccagacagtgcgggtgtgggtggtggccaccaaggagtgcaaggccgagctgcgggagcacgagcacgtggtggagtgcatctcctgggcccctgagagcagctacagcagcatcagcgaggccaccggcagcgaggtgggccatgacaactgggtgcggggcgtgctcttccacagcggcggcaagttcatcctgagctgtgctgatgacaagaccctgcgggtgtgggactacaagaacaagcgctgcatgaagaccctgaatgcccacgagcactttgtgaccagcctggacttccacaagacagccccctacgtggtgacaggctctgtggaccagacagtgaaggtgtgggagtgcaggtag

SEQ ID NO: 8798 - DNA, 720 bp, Artificial Sequence
  derived and/or modified sequence
atgaccatcaagctgtgggacttccagggcttcgagtgcatccggacaatgcatggccacgatcataatgtgagcagtgtggccattatgcccaatggagaccacatcgttagcgccagccgggacaagactatcaagatgtgggaagtgcaaactggttactgcgtcaaaacctttacaggccaccgagaatgggtaaggatggtccggcccaatcaggacggtaccctaattgctagctgtagcaacgatcagaccgtaagggtgtgggtggtggctacaaaggagtgcaaggccgaactgagggagcatgaacacgtggtggagtgtatttcctgggcgccagaatcctcttatagttccatcagcgaagccacgggctcagagaccaaaaagtccggtaaaccgggacctttcttactgagtggaagccgcgacaagactattaaaatgtgggatgtgtccacagggatgtgcttaatgacactggttggtcacgataattgggtccggggcgtgctcttccacagcggaggcaagttcatactgtcatgcgccgatgataagacactcagagtgtgggattataaaaacaaacgatgtatgaagacactaaacgctcacgaacatttcgttacatccctcgacttccacaagacagcaccctatgtggtgactggctccgtggaccagacagtcaaggtttgggaatgtagatag

SEQ ID NO: 8799 - DNA, 1233 bp, Artificial Sequence
  derived and/or modified sequence
atggtgctgagccagcggcagcgggacgagctgaaccgggccatcgcagattatcttagaagcaatgggtacgaggaggcctattccgtgttcaagaaggaagccgaactggacgttaatgaggaacttgataaaaaatatgctggattactggagaagaagtggaccagcgttatccgcctccaaaagaaagtgatggaattagaatcaaagctgaacgaagcgaaggaagagttcacctctggggggccactgggccaaaagagagatcccaaagagtggattccacgtcctcccgagaagtatgcgctgagcggacacaggagccctgtaacacgggtgattttccatccggtttttagcgtcatggtaagcgcctccgaagacgctactatcaaggtttgggactatgagacaggcgactttgaacggactttgaaaggccacactgattcggtgcaggacatcagttttgatcattctggaaagttgctggcttcttgcagcgctgacatgacaattaaactctgggacttccaggggttcgagtgcattagaaccatgcatggtcatgatcacaacgtctcaagtgtagccatcatgcccaacggggatcacattgtgagcgctagccgggacaaaacaattaagatgtgggaagtccagaccggctattgtgtgaaaacatttaccgggcatcgggaatgggtgcgcatggttcgcccaaatcaggatgggaccctaatcgcttcctgttcaaacgaccagacggtaagggtgtgggtggttgctacaaaggaatgtaaggctgaactgcgcgaacacgaacacgtggtggagtgcatttcgtgggcccctgagtcatcttattcaagtatctcagaggccactgggagtgagactaaaaaaagcggcaaacccgggccgttcctgttgtctgggagcagagacaaaacaatcaaaatgtgggacgtgagcacagggatgtgtctgatgaccctggtcgggcacgacaattgggttaggggggtgcttttccactctggtggaaaattcattttgtcttgcgctgacgataagactctgagggtctgggactacaagaacaaaaggtgcatgaagaccttgaatgcccacgaacatttcgtgacgagcctggattttcataaaacggcgccctacgtggttacgggtagcgtggatcagaccgttaaggtctgggaatgtcgctag

SEQ ID NO: 8800 - DNA, 618 bp, Artificial Sequence
  derived and/or modified sequence
atgaccatcaagctgtgggacttccagggcttcgagtgcatccggacaatgcacggacacgatcataatgtgtcctcagtggccattatgcccaacggtgatcacattgtgagcgccagccgggacaaaacaattaaaatgtgggaagtacagaccgggtattgcgttaagactttcaccggacaccgcgagtgggtcagaatggtgcgtccaaaccaggacgggactttgattgcgtcttgctcaaatgaccagactgtgagggtttgggtggtcgcgacaaaggaatgtaaggctgaactgcgggagcatgagcacgttgtcgagtgcatcagctgggccccggaaagtagctactctagtatatcagaggctaccggctcagaagtcggccacgataactgggtgcggggtgtattgttccacagcggaggaaagttcatcctgtcctgtgcagatgacaaaactctgcgggtgtgggattacaagaacaaacgttgtatgaaaacgctgaacgcccacgaacacttcgtgacttcacttgacttccacaagacagcaccgtacgtcgtaactgggtcagtggatcagactgtcaaagtgtgggagtgtaggtag

SEQ ID NO: 8801 - DNA, 1277 bp, Artificial Sequence
  derived and/or modified sequence
actgcactccagcctgggcgacagagccacactctgtctcaaaaaaaaaaagcagacttaatagggtgaagaaaattaaaagatcctgaaaatgagggcctatgaagagggacaggaggtactctgaaacgtgtgatttggttctaaatcttaaaagacagaattggaataaaatatcattgtggctcctgagaggcatgctgccaggtgtgggattatgagactggagattttgaacgaactcttaaaggacatacagactctgtacaggacatttcattcgaccacagcggcaagcttctggcttcctgttctgcagatatgaccattaaactatgggattttcagggctttgaatgcatcagaaccatgcacggccatgaccacaatgtttcttcagtagccatcatgcccaatggagatcatatagtgtctgcctcaagggataaaactataaaaatgtgggaagtgcaaactggctactgtgtgaagacattcacaggacacagagaatgggtacgtatggtacggccaaatcaagatggcactctgatagccagctgttccaatgaccagactgtgcgtgtatgggtcgtagcaacaaaggaatgcaaggctgagctccgagagcatgagcatgtggtagaatgcatttcctgggctccagaaagctcatattcctccatctctgaagcaacaggatctgagactaaaaaaagtggtaaacctgggccattcttgctgtctggatccagagacaagactattaagatgtgggatgtcagtactggcatgtgccttatgaccctcgtgggtcatgataactgggtacgtggagttctgttccattctggggggaagtttattttgagttgtgctgatgacaagaccctacgcgtatgggattacaagaacaagcgatgcatgaagaccctcaatgcgcatgaacactttgttacctccttggatttccacaagacggcaccctatgtcgtcactggcagcgtagatcaaacagtaaaagtgtgggagtgccgttgattgtgtctccttcggcccctcctccctcttttcctctggatgcactctgatgataccatggttaccccattgagctctgtttaaataaatattgtcctttcatgtaaattattctggatgtagattgagcttattaaatgttacacacaaagtattcatgcatggtgaatccaaattgtatactgtaaatttacatacgttgtctagaagtaccatagggtttaaaaacctgggct

SEQ ID NO: 8802 - DNA, 5614 bp, Artificial Sequence
  derived and/or modified sequence
agggcgttggggcagctcctgtgacagacggagctggagcggcggggcggcggcggagtccggcggccgggagagcgagtgagcgagcggaggagcagcgacacgggagtctagggagcgagaaggagaaggaggggagcgctcgggcgcgagcgagagaaaccgcgagcgccgagcttggactcgagccccggaacggctgaggagcccgcccgctcccctcccctccccctccccgggcccgggcccagcgcgccatcctcccccctccttccctccctccctccttcctccctcccctctccctccccctcccccgccggtggatgggagtgaaggacggaagaggccctgcggaggcggcggtgcagcgctccggtggaatgaatcttacttgttgaatatcttctggttactagttggattcatttgtgaaagaatcattttcccctgtgtggaagacacttagtggcatatttaaattataagtccacggatcaaaaagctttttgatttcccaaaggagggacataccactatatcagataagcttgacattacagccaagatggtgctgtcccagagacaacgagatgaactaaatcgagctatagcagattatcttcgttcaaatggctatgaagaggcatattcagtttttaaaaaggaagctgaattagatgtgaatgaagaattagataaaaagtatgctggtcttttggaaaaaaaatggacatctgttattagattacaaaagaaggttatggaattagaatcaaagctaaatgaagcaaaagaagaatttacgtcaggtggacctcttggtcagaaacgagacccaaaagaatggattccccgtccgccagaaaaatatgcattgagtggtcacaggagtccagtcactcgagtcattttccatcctgtgttcagtgttatggtctctgcttcagaggatgctacaattaaggtgtgggattatgagactggagattttgaacgaactcttaaaggacatacagactctgtacaggacatttcattcgaccacagcggcaagcttctggcttcctgttctgcagatatgaccattaaactatgggattttcagggctttgaatgcatcagaaccatgcacggccatgaccacaatgtttcttcagtagccatcatgcccaatggagatcatatagtgtctgcctcaagggataaaactataaaaatgtgggaagtgcaaactggctactgtgtgaagacattcacaggacacagagaatgggtacgtatggtacggccaaatcaagatggcactctgatagccagctgttccaatgaccagactgtgcgtgtatgggtcgtagcaacaaaggaatgcaaggctgagctccgagagcatgagcatgtggtagaatgcatttcctgggctccagaaagctcatattcctccatctctgaagcaacaggatctgagactaaaaaaagtggtaaacctgggccattcttgctgtctggatccagagacaagactattaagatgtgggatgtcagtactggcatgtgccttatgaccctcgtgggtcatgataactgggtacgtggagttctgttccattctggggggaagtttattttgagttgtgctgatgacaagaccctacgcgtatgggattacaagaacaagcgatgcatgaagaccctcaatgcgcatgaacactttgttacctccttggatttccacaagacggcaccctatgtcgtcactggcagcgtagatcaaacagtaaaagtgtgggagtgccgttgattgtgtctccttcggcccctcctccctcttttcctctggatgcactctgatgataccatggttaccccattgagctctgtttaaataaatattgtcctttcatgtaaattattctggatgtagattgagcttattaaatgttacacacaaagtattcatgcatggtgaatccaaattgtatactgtaaatttacatacgttgtctagaagtaccatagggtttaaaaacctgggctggcattggtcacaccaggcctaagaaggcagaagttgaatcaattgaactagggcactaaactgaatagttgacagtgtcattttatgttggattattaattcctgtttttctttctgctatctgttggtgcctgacttgatggcctcatttggggaaaagtggtggttattagggctttttctgaaatgtgtatctatgtaacatcacttaagtgtgcttaataaatcttctgtaaggattttagatgataaggctacaattcagaatcttctgaaccatctatgtaatgaatggggattatacattggaatttttgtcatgacacatttgccaaatcagtaggatatatttgttttggcagcctatcacgcagaggctagtggtatatttatgtaagaaaatgactgtaaatctcaagaaaaatctcagcagctaatagcaactcatttatttcattttggtcttaatgctttgtaaacaggtcaaaaaatactgtcatactctaagcttctattttccacactggacatacttctagttgtattctccatactattagactgtgtagtgatgtgacttccaagtagaatttaatctccccattgagtgtgtcatggtacaaatcactattcgtttttggtgttttttagggatgtgcaatgtgcattacataatgacagaaatactgagaaggttctgtgtgcccatttgaaaggagtgggaggaatacagcagtttgtttttcaacatgaatctgatattgatttaaactgtgtttcacttacaagttttaaaaaaatgacagggtttaatggagcgtgcataaaaatgtactgttttcaccttttgtttatatgtaaatgtttgtaagtatatgggcctatctgtaagtggataagtctgtatgtgtgtatcatacacatcaacctccatgtccttagtcctgggtttttgaaaaagtgctaaaacggacaagtagaataaatgttgctgtggaatgccatgctttagaacaaaccctttttgatcttaatgcttctgaaaactaggtctgactctggggatttttttccagccgaaggaaaatcacttccgttatgtccccctctaatttagccgctcgacattttacacaacccggatatgttgtatattttgacccaaagttacaggtaggtttaagagaatttttagccatgacttttggagcactattccattgtcagttattaataaagaattccattgcttagctaaccaacaggttttttttgtttccaagagagttatttgaaaagttaacagaacaatgagataacagtgacagtttaacaaagataaaattctgaactgcgttttattcatttgtgtactatgtgattttttaaatgtcccctttagtatttaatggaaaattggttcctgcaaaagacaaagggtgagagttagcgtcctgtagatacacacagagactaggccgtatattaactagaagcagctttatgtctagcttgtgtctttttgtttgtttgcttgtttgtttttagattcctgagagatgtctctggaagggaaagttttgagaactaatggctatttttgaggacaaaaattacatcttaagctaattccttaaatacatacagtaggtgaattttcaggacaatattgcctcacaaccctgcttacattgaaaagtctttttcccttagctcttctgactggatttttctacaaaaactatggaaaatatctttgttcttgtttgctgctattttctgtcctattttgagaaatataaatacatagaaatggtgcatcttaacatttgtttgtacatgtataaatgtcttgtattttaattcatttttagcatgaattgtttaagggtaagccacaacatctagaaatcactcatagatattgaacaataaaggagaatggtaccgatgcaggaggaagcaagcgtgtcttcccctgcagcacacagcgacttgcgttgacaaaggaggaggaaacgattactctgtaaacaaagttatccttacttgggagattgccacagcctgctgctgagttgagttaccagacatcctccatgtgagaagcagcgaacattgaatctcagggatggcccacaactgggtccacatgtaatgagccctgtttaataacgaaggggtgggggagagcagtccgtctacaacctggaatcagatttgcaaaatttcctgcactgctgtctgacactgtcctgttgatgccctttctgactgtgttctctgttttctctgtctgctgtctaaccctgtgccttgcctgggataaggacaatgatgaggttactggtttggattgtaagtagaggacttttattaattggtttagaggttcactgctgctttgtcactttctcaatcaaattggccacttaagaaataaagagctggtagaattgcatcctcagatgattattgactgtgtgtgtgtgtgaaaacagacattccagtgccacccaaatatatatctgtaacgtgcccaagaaatcctagctgcgctcttgagagtgcatgccatggagactggtttagacaccgcgtggagcctagttgcctgttgtcacggcatcttgcactttaggagactaagaccgtcctggttcgtctgtgtgtggtgtgaccaatggtgtgcccagagcactactctcaaaatcactagtgttagcaagtcgtcccgggctggggagcgttcgccgtagtctttggaagctttggctttagatttaccaagccccgcctccccgctgccagtgccctgctctcccgttcgcctctttctgtttctgtgtgaactttcccggtaatatcactcgttaaataggttttctttaaacttaattaaagaaaaactatttaaaggtaaaggatattttgttgacatcggtggctcgatcatccttaagcaactgaagttaaaattgttgaaggaaaaggcacttaaattggttactttcatgtccagctgtatataagtccagtgtgttcatctagatgacgcaaagaatctcctggtagagaagcgacatgtaaaaaactggtggaaaaaggttttggattttttttccagtggggtggggggagggcaagctggatttacaggtcacggctggactgaatgggcctttttatcttcccactgtatcatggaagtagctgcttgcttgtactgtccatccttcaggcatccctaaagctcactctgaagatgttagagacaaacacaaactcttcgagttaaagttgatcctgacactgacatgaaggcaagccttgatttcgtatgaacgttgctgaagtggtaattgaggaaaacagttccccagattgttaagagttcactgaagatattgacacaattttaaaaaatcagtaaaggaatgtatataatattgctctcgtgttttacagtaagatttgttgctctcagactgtgtaaaacaaaatttattcatgttttctgcatattaaaaaatcttattgtaccaactggtaaactattaaatgcctataaaacta

SEQ ID NO: 8803 - DNA, 1021 bp, Artificial Sequence
  derived and/or modified sequence
tctgcagatatgaccattaaactatgggattttcagggctttgaatgcatcagaaccatgcacggccatgaccacaatgtttcttcagtagccatcatgcccaatggagatcatatagtgtctgcctcaagggataaaactataaaaatgtgggaagtgcaaactggctactgtgtgaagacattcacaggacacagagaatgggtacgtatggtacggccaaatcaagatggcactctgatagccagctgttccaatgaccagactgtgcgtgtatgggtcgtagcaacaaaggaatgcaaggctgagctccgagagcatgagcatgtggtagaatgcatttcctgggctccagaaagctcatattcctccatctctgaagcaacaggatctgaggtgggtcatgataactgggtacgtggagttctgttccattctggggggaagtttattttgagttgtgctgatgacaagaccctacgcgtatgggattacaagaacaagcgatgcatgaagaccctcaatgcgcatgaacactttgttacctccttggatttccacaagacggcaccctatgtcgtcactggcagcgtagatcaaacagtaaaagtgtgggagtgccgttgattgtgtctccttcggcccctcctccctcttttcctctggatgcactctgatgataccatggttaccccattgagctctgtttaaataaatattgtcctttcatgtaaattattctggatgtagattgagcttattaaatgttacacacaaagtattcatgcatggtgaatccaaattgtatactgtaaatttacatacgttgtctagaagtaccatagggtttaaaaacctgggctggcattggtcacaccaggcctaagaaggcagaagttgaatcaattgaactagggcactaaactgaatagttgacagtgtcattttatgttggattattaattcctgtttttctttctgctatctgttggtgcctgacttgatggcctcatttggggaa

SEQ ID NO: 8804 - DNA, 720 bp, Artificial Sequence
  derived and/or modified sequence
atgaccatcaaactgtgggattttcagggctttgagtgcatccgcacgatgcatggccatgaccataatgtgtcaagcgttgccatcatgcccaacggggaccacatcgtctcagcgtcacgcgataagactataaaaatgtgggaggtgcagacaggttactgcgtaaagacttttactggccacagggaatgggttagaatggtacgccctaatcaggatggtactctcattgcctcctgtagtaacgatcaaaccgtgagagtatgggtggttgccacaaaagagtgtaaggccgagctgcgagagcatgaacacgttgtggagtgtatttcttgggcacccgaatcgagctactcatctatctcagaggctaccggcagcgaaactaaaaaaagcggcaaacccggtccattcctgttgagcggcagtcgtgataaaaccattaaaatgtgggacgtgtcaactggcatgtgtctcatgacattagtgggccacgacaactgggtgagaggcgtccttttccactctggcggaaaattcattctgtcttgtgctgacgacaaaaccttgcgtgtctgggattataagaataagcggtgtatgaaaaccctaaatgcccatgagcatttcgtgacgagtctggattttcacaaaaccgctccgtatgtcgtcaccgggtctgtggaccaaacagtaaaggtgtgggaatgccgctag

SEQ ID NO: 8805 - DNA, 1233 bp, Artificial Sequence
  derived and/or modified sequence
atggtcctgagtcaaagacagcgcgatgagctgaatcgagccattgctgattacctgagaagcaatggttatgaggaagcttattccgtctttaaaaaggaagccgagctcgatgtgaatgaagagctggataagaagtacgccggactactcgagaagaaatggacctccgtgatccgcttgcagaaaaaagtgatggagctggaaagcaagctcaatgaagccaaggaggaatttacaagtgggggtcctctggggcaaaagagagatccgaaggaatggattcccaggcccccagagaagtatgctctgagcgggcatcggtcccccgtgacccgtgtgatatttcaccccgtgttttccgtgatggtgtccgcatctgaggatgccacaatcaaagtttgggattacgagaccggagactttgaacgcacactcaagggccacacagattcggttcaggatatttcctttgaccattcgggaaaacttttagctagttgttccgccgatatgactatcaaactgtgggattttcaggggtttgaatgtatcaggacaatgcacggccacgatcacaacgtgtcctccgtagcaatcatgcctaacggcgatcacatcgtcagtgcaagtagggacaaaacaataaaaatgtgggaagttcagaccggatactgtgtgaagaccttcacgggacatcgcgaatgggtcaggatggtgcggcctaatcaggatggcactttaatcgcttcctgctccaatgaccagactgtccgggtttgggtggtggccacgaaggagtgtaaggcagagcttcgtgagcacgagcacgttgtggaatgtattagttgggcgcctgagtcatcctacagtagtatatctgaagcgacagggtccgagactaagaagtctggtaaacctggcccattccttctttccgggagtagggacaagacaatcaagatgtgggatgtgtcgactgggatgtgcctcatgacactggtcggtcatgataattgggtgcgcggagtgctgtttcattcgggagggaagttcattttatcctgcgctgacgacaaaacactccgggtgtgggactataagaacaagagatgcatgaagaccctgaatgcacacgaacattttgttacatcactggactttcataaaaccgctccatatgtcgtcaccggctcggttgatcagaccgtcaaagtgtgggaatgcaggtag

SEQ ID NO: 8806 - DNA, 618 bp, Artificial Sequence
  derived and/or modified sequence
atgaccatcaaactgtgggacttccaggggtttgaatgcatacgtacaatgcacggtcacgatcacaatgtaagtagcgttgccattatgccaaatggtgatcatatcgtgagcgcttccagagataaaaccattaagatgtgggaggttcaaacaggatattgtgtaaagacattcactggtcacagagagtgggtcagaatggtgcggccaaatcaggacggcacacttatcgcttcttgttcgaacgaccaaactgtccgagtgtgggtcgtagccaccaaagaatgtaaggccgagctgagggagcatgaacatgtggtagagtgcatttcttgggctccagagagcagctactcatctatttccgaagcaactgggtccgaggtcgggcacgataattgggtgaggggggtcctctttcactctggaggaaaattcatattatcctgtgcggacgacaaaaccctgcgtgtctgggactataaaaacaagcgatgtatgaagacactcaacgctcacgagcatttcgtcacatctctagacttccacaagacggccccatatgtcgttaccgggagtgtcgatcagacggttaaagtttgggagtgccgctag

SEQ ID NO: 8807 - DNA, 720 bp, Artificial Sequence
  derived and/or modified sequence
atgaccatcaagctgtgggacttccagggcttcgagtgcatcagaaccatgcacggccacgaccacaacgtgagcagcgtggccatcatgcccaacggcgaccacatcgtgagcgccagcagagacaagaccatcaagatgtgggaggtgcagaccggctactgcgtgaagaccttcaccggccacagagagtgggtgagaatggtgagacccaaccaggacggcaccctgatcgccagctgcagcaacgaccagaccgtgagagtgtgggtggtggccaccaaggagtgcaaggccgagctgagagagcacgagcacgtggtggagtgcatcagctgggcccccgagagcagctacagcagcatcagcgaggccaccggcagcgagaccaagaagagcggcaagcccggccccttcctgctgagcggcagcagagacaagaccatcaagatgtgggacgtgagcaccggcatgtgcctgatgaccctggtgggccacgacaactgggtgagaggcgtgctgttccacagcggcggcaagttcatcctgagctgcgccgacgacaagaccctgagagtgtgggactacaagaacaagagatgcatgaagaccctgaacgcccacgagcacttcgtgaccagcctggacttccacaagaccgccccctacgtggtgaccggcagcgtggaccagaccgtgaaggtgtgggagtgcagatag

SEQ ID NO: 8808 - DNA, 1233 bp, Artificial Sequence
  derived and/or modified sequence
atggtgctgagccagagacagagagacgagctgaacagagccatcgccgactacctgagaagcaacggctacgaggaggcctacagcgtgttcaagaaggaggccgagctggacgtgaacgaggagctggacaagaagtacgccggcctgctggagaagaagtggaccagcgtgatcagactgcagaagaaggtgatggagctggagagcaagctgaacgaggccaaggaggagttcaccagcggcggccccctgggccagaagagagaccccaaggagtggatccccagaccccccgagaagtacgccctgagcggccacagaagccccgtgaccagagtgatcttccaccccgtgttcagcgtgatggtgagcgccagcgaggacgccaccatcaaggtgtgggactacgagaccggcgacttcgagagaaccctgaagggccacaccgacagcgtgcaggacatcagcttcgaccacagcggcaagctgctggccagctgcagcgccgacatgaccatcaagctgtgggacttccagggcttcgagtgcatcagaaccatgcacggccacgaccacaacgtgagcagcgtggccatcatgcccaacggcgaccacatcgtgagcgccagcagagacaagaccatcaagatgtgggaggtgcagaccggctactgcgtgaagaccttcaccggccacagagagtgggtgagaatggtgagacccaaccaggacggcaccctgatcgccagctgcagcaacgaccagaccgtgagagtgtgggtggtggccaccaaggagtgcaaggccgagctgagagagcacgagcacgtggtggagtgcatcagctgggcccccgagagcagctacagcagcatcagcgaggccaccggcagcgagaccaagaagagcggcaagcccggccccttcctgctgagcggcagcagagacaagaccatcaagatgtgggacgtgagcaccggcatgtgcctgatgaccctggtgggccacgacaactgggtgagaggcgtgctgttccacagcggcggcaagttcatcctgagctgcgccgacgacaagaccctgagagtgtgggactacaagaacaagagatgcatgaagaccctgaacgcccacgagcacttcgtgaccagcctggacttccacaagaccgccccctacgtggtgaccggcagcgtggaccagaccgtgaaggtgtgggagtgcagatag

SEQ ID NO: 8809 - DNA, 618 bp, Artificial Sequence
  derived and/or modified sequence
atgaccatcaagctgtgggacttccagggcttcgagtgcatcagaaccatgcacggccacgaccacaacgtgagcagcgtggccatcatgcccaacggcgaccacatcgtgagcgccagcagagacaagaccatcaagatgtgggaggtgcagaccggctactgcgtgaagaccttcaccggccacagagagtgggtgagaatggtgagacccaaccaggacggcaccctgatcgccagctgcagcaacgaccagaccgtgagagtgtgggtggtggccaccaaggagtgcaaggccgagctgagagagcacgagcacgtggtggagtgcatcagctgggcccccgagagcagctacagcagcatcagcgaggccaccggcagcgaggtgggccacgacaactgggtgagaggcgtgctgttccacagcggcggcaagttcatcctgagctgcgccgacgacaagaccctgagagtgtgggactacaagaacaagagatgcatgaagaccctgaacgcccacgagcacttcgtgaccagcctggacttccacaagaccgccccctacgtggtgaccggcagcgtggaccagaccgtgaaggtgtgggagtgcagatag

SEQ ID NO: 8810 - protein, 166 aa, Artificial Sequence
  derived and/or modified sequence
MAPKKAKKRAGGANSNVFSMFEQTQIQEFKEAFTIMDQNRDGFIDKNDLRDTFAALGRVNVKNEEIDEMIKEAPGPINFTVFLTMFGEKLKGADPEETILNAFKVFDPEGKGVLKADYVREMLTTQAERFSKEEVDQMFAAFPPDVTGNLDYKNLVHIITHGEEKD

SEQ ID NO: 8811 - DNA, 501 bp, Artificial Sequence
  derived and/or modified sequence
atggctccaaaaaaggccaaaaagagggccggcggggccaactcaaatgttttcagcatgtttgaacagacacagattcaagaattcaaggaagcatttacgatcatggaccaaaacagggacggtttcatagataaaaatgacctgcgcgacacgttcgcagctctcgggagagtgaacgtgaagaatgaggagatcgacgaaatgattaaggaagccccagggcctataaactttaccgtcttcttgacaatgttcggtgaaaagctgaagggtgccgaccccgaggagacaatcctaaacgcctttaaagtcttcgaccccgagggtaagggcgtactcaaagctgattacgtgagggagatgttaaccacccaggctgaaagattctcaaaggaggaggtagatcagatgttcgcggccttccctccggatgtcactggtaacctcgactacaagaatctcgtgcatatcatcactcatggcgaagagaaagattag

SEQ ID NO: 8812 - DNA, 501 bp, Artificial Sequence
  derived and/or modified sequence
atggcccccaagaaggccaagaagagagctgggggcgccaacagcaatgtgttctccatgtttgagcagacccagatccaggagttcaaggaggccttcaccatcatggaccagaacagagatggcttcatcgacaagaatgacctgcgggacacctttgctgccctgggccgggtgaatgtgaagaatgaggagattgatgagatgatcaaggaggcccctggccccatcaacttcaccgtcttcctgaccatgtttggagagaagctgaagggagctgaccctgaggagaccatcctgaatgccttcaaggtgtttgatcctgagggcaaaggagtgctgaaggctgactatgtgcgggagatgctgaccacccaggccgagcgcttcagcaaggaggaggtggaccagatgtttgctgccttccccccagatgtgactggaaacctggactacaagaacctggtgcacatcatcacccatggagaggagaaggactag

SEQ ID NO: 8813 - DNA, 792 bp, Artificial Sequence
  derived and/or modified sequence
gcggagtgtggaattcttctcgggaggcagtgctgggtcctttccaccatggcacctaagaaagcaaagaagagagccgggggcgccaactccaacgtgttctccatgttcgaacagacccaaatccaggaatttaaggaggccttcactatcatggaccagaacagggatggcttcattgacaagaacgatctgagagacacctttgctgcccttgggcgagtgaacgtgaaaaatgaagaaattgatgaaatgatcaaggaggctccgggtccaattaactttactgtgttcctcacaatgtttggggagaaacttaagggagcggaccctgaggaaaccattctcaacgcattcaaagtgtttgaccctgaaggcaaaggggtgctgaaggctgattacgttcgggaaatgctgaccacgcaggcggagaggttttccaaggaggaggttgaccagatgttcgccgccttcccccctgacgtgactggcaacttggactacaagaacctggtgcacatcatcacccacggagaagagaaggactaggagggggctcgctgctgcgccctgggctcgtctttgcagagtggtccctgccctcatctctctcccccgagtaccgcctctgtccctaccttgtctgttagccatgtggctgccccatttatccacctccatcttctttgcagcctgggtggctatgggtacttcgtggccgcacatcctacagttggaaatccatccagaggccatgttccaataaacaggaggtcgtgtatttggtcacga

SEQ ID NO: 8814 - DNA, 501 bp, Artificial Sequence
  derived and/or modified sequence
atggcccccaagaaggccaagaagcgggccggcggcgccaacagcaacgtgttctccatgttcgagcagactcagatacaagagtttaaagaggcctttactattatggaccagaatagggacggctttattgacaagaacgacctgcgggacacctttgctgccttagggagagtgaatgttaaaaatgaggagattgacgagatgattaaggaggcgcctggtcccataaactttacagtgtttctcacaatgtttggcgagaaactgaaaggggccgaccctgaggagacgattctcaacgcatttaaggtgtttgaccctgaaggcaagggcgtgttgaaagcagactacgtaagggaaatgctgacaacccaggctgaaagattctcaaaagaagaagtggaccagatgttcgccgcctttcctcctgatgtcacaggaaacctggattataaaaatctcgtccacattattactcacggagaagaaaaagactag

SEQ ID NO: 8815 - DNA, 501 bp, Artificial Sequence
  derived and/or modified sequence
atggcaccaaaaaaagcaaagaagagagccggaggagccaatagcaacgtcttctccatgttcgaacaaactcagatccaggagttcaaagaggccttcactatcatggatcagaacagagacggcttcattgataagaacgacctgagagataccttcgccgcactgggacgcgtcaacgtgaagaatgaggagattgacgagatgatcaaagaagccccaggcccaatcaattttaccgtattcttaaccatgtttggcgagaaattgaaaggggcagatccagaggaaaccattctgaacgccttcaaggtgttcgatccagaagggaaaggggtgctgaaggcagactacgttagagagatgcttacaacacaggccgaaagattttctaaggaggaagtggaccagatgtttgcagcctttccaccggacgtgactggcaatttggactataaaaatctggtacatatcattacacacggagaggaaaaggactag

SEQ ID NO: 8816 - DNA, 501 bp, Artificial Sequence
  derived and/or modified sequence
atggcccccaagaaggccaagaagagagccggcggcgccaacagcaacgtgttcagcatgttcgagcagacccagatccaggagttcaaggaggccttcaccatcatggaccagaacagagacggcttcatcgacaagaacgacctgagagacaccttcgccgccctgggcagagtgaacgtgaagaacgaggagatcgacgagatgatcaaggaggcccccggccccatcaacttcaccgtgttcctgaccatgttcggcgagaagctgaagggcgccgaccccgaggagaccatcctgaacgccttcaaggtgttcgaccccgagggcaagggcgtgctgaaggccgactacgtgagagagatgctgaccacccaggccgagagattcagcaaggaggaggtggaccagatgttcgccgccttcccccccgacgtgaccggcaacctggactacaagaacctggtgcacatcatcacccacggcgaggagaaggactag

SEQ ID NO: 8817 - protein, 415 aa, Artificial Sequence
  derived and/or modified sequence
MTGERPSTALPDRRWGPRILGFWGGCRVWVFAAIFLLLSLAASWSKAENDFGLVQPLVTMEQLLWVSGRQIGSVDTFRIPLITATPRGTLLAFAEARKMSSSDEGAKFIALRRSMDQGSTWSPTAFIVNDGDVPDGLNLGAVVSDVETGVVFLFYSLCAHKAGCQVASTMLVWSKDDGVSWSTPRNLSLDIGTEVFAPGPGSGIQKQREPRKGRLIVCGHGTLERDGVFCLLSDDHGASWRYGSGVSGIPYGQPKQENDFNPDECQPYELPDGSVVINARNQNNYHCHCRIVLRSYDACDTLRPRDVTFDPELVDPVVAAGAVVTSSGIVFFSNPAHPEFRVNLTLRWSFSNGTSWRKETVQLWPGPSGYSSLATLEGSMDGEEQAPQLYVLYEKGRNHYTESISVAKISVYGTL

SEQ ID NO: 8818 - DNA, 1248 bp, Artificial Sequence
  derived and/or modified sequence
atgaccggggagaggccctctactgccttgcctgatcgcaggtggggaccgcggatcctgggtttctggggcggatgtcgcgtgtgggtctttgctgctattttcctgctcttgtccctcgcagcatcgtggtctaaagctgagaatgactttggcttagtgcagcccctggtaacgatggagcagctgctgtgggtttcgggccggcagattggctctgtcgacactttccggattcccttgatcaccgccacaccccgggggaccctgctcgcattcgctgaggcccggaaaatgagtagctcagatgagggggcaaaatttatcgctctgcgccgttcaatggaccaaggaagcacctggtccccaactgcattcatagttaacgacggcgatgtccccgacggtttgaatcttggggctgtggtttcagacgtagagacgggcgtggtgtttttattttactctctgtgcgcccataaggctgggtgtcaagtggcttccacaatgctagtgtggtccaaggacgatggagtgagctggtccacccctcgcaacctctcgcttgacataggcactgaggtcttcgcccctgggcccggatcaggtatccagaagcagcgcgagccgcgtaagggacgtctgattgtttgcggccatggtacactggaaagagacggggttttctgtctactgtcagacgaccacggcgcctcatggcgctatggatctggggtgagtggcattccctatggacagccaaagcaggagaatgactttaatcctgatgagtgccagccatacgagcttcctgatgggtccgtggtcatcaacgcgcgaaatcagaacaactaccactgccactgcaggatagtcctgcggtcgtatgacgcttgcgacacactccggccaagagacgttacctttgatcccgagcttgtggacccagtggtagctgctggcgcagtggtgaccagctcaggcatcgtgttctttagtaatcctgcgcaccccgaattcagagtcaatctcaccctcaggtggtccttctctaacggaacttcttggcggaaggagactgtccagctgtggccaggtccgagcggctactcctccttagcaacattggaaggttctatggatggtgaagagcaggcaccccagctgtatgtcctatacgaaaagggaaggaaccactacacggaatcaatctctgttgctaaaatatcagtttatggtacactatag

SEQ ID NO: 8819 - DNA, 1248 bp, Artificial Sequence
  derived and/or modified sequence
atgaccggggaacgtccctctactgctctgcctgaccgccggtggggaccaagaatcctgggtttctggggcggctgccgcgtctgggtctttgccgccatcttcctgctcctcagccttgcggcgagctggagcaaagcagagaatgacttcggtctggtgcagccacttgtgaccatggaacagcttctgtgggtatctggccgacaaattggttctgtggatacattcagaatacccctgatcacggccaccccacggggcacactgctagccttcgcagaggctaggaagatgtcctccagcgacgaaggtgccaaatttatagctctcagaaggagcatggatcagggctcaacctggagtccaacggccttcatcgtgaacgatggcgatgtacccgatgggctgaatctcggcgcagtcgtgtccgacgtcgagaccggcgtcgtgttccttttttattccttatgtgcccataaggctggatgccaggtggccagcacaatgttggtatggagcaaggatgatggtgtatcgtggagtactccacggaacctgtcacttgatatagggaccgaagtctttgcaccgggacccggttccgggatccagaaacagcgcgagcctaggaaggggaggctcattgtgtgcggccatggcacattagagcgggacggagtcttctgcctgctttcagacgaccacggggccagctggaggtatggctccggggtgtcaggcatcccttatggacagcccaagcaggaaaacgatttcaaccctgatgagtgccagccctatgaactgccagacggatccgtggtgattaacgccaggaatcagaacaattaccactgtcattgtaggattgtgttgcgctcttatgatgcctgtgacaccctcagacctagggacgtaacctttgaccctgagcttgtcgaccccgtggtggctgccggggcggtcgtcaccagctccggaatcgttttcttttccaatcctgcccatccagagttccgcgtgaatctgacactcaggtggagcttctctaacggaacctcatggagaaaagaaaccgtccagctgtggcccggcccaagcggatattcgtccttggctactcttgaaggcagtatggatggggaggaacaagcacctcagctgtatgtcctctatgagaaaggccggaatcattatacagaatcgatcagtgtggctaagattagcgtctacgggaccctgtag

SEQ ID NO: 8820 - DNA, 1248 bp, Artificial Sequence
  derived and/or modified sequence
atgacaggggaacgtccctcaactgccctccctgataggagatggggtcccaggatactcggcttttggggcgggtgtcgggtatgggtctttgctgccatttttcttctcctttccctggccgcctcttggtctaaagctgaaaacgattttggactggtgcagcctcttgtgaccatggagcagctcttatgggtatccggcaggcaaatcggttccgtcgacacatttcggattcccttgataacggcaacacccagagggacgctgctcgcctttgctgaagcgcgaaaaatgtcttctagcgacgaaggagccaaatttattgctctccgccggtcgatggaccaggggtcaacatggtctcccacagctttcatagtgaatgacggtgacgtgcctgatgggctgaatctcggggccgtagtcagtgacgttgaaaccggagtcgtcttcctgttctacagcctctgcgcacataaggcggggtgccaagtcgcatccaccatgcttgtctggtctaaagatgatggggtgtcatggtccacccctcggaaccttagtcttgatattgggacagaagtgtttgcacccggtcctgggagcggtatccagaagcaacgcgagccacgcaaggggcggcttatcgtttgcggacatggtacactcgaacgggatggcgtgttctgcctgcttagtgacgaccatggtgcttcttggcgttatggtagcggcgtctctgggatcccatacggccagccaaagcaagaaaatgacttcaaccctgatgaatgccagccatatgagttacccgatggctctgtggtcattaacgccaggaatcaaaacaattatcattgccactgcaggatcgtcctccggtcatacgacgcctgcgataccctgaggcccagagacgtaacgttcgaccccgaattggtagatcccgttgtcgcagccggcgctgtggtgacctccagtggtattgtattctttagtaatcctgcccatcccgagtttagggtaaatctgactctgcgttggtctttttcgaacggtacaagctggcgcaaagagactgtgcaactgtggcccggaccgtccggctattcttccctggcaacactcgaaggcagcatggacggcgaggagcaagccccacaactgtatgtcctctacgagaagggcaggaaccactacacagagtccatctctgtggccaaaatctctgtgtacggcaccctctag

SEQ ID NO: 8821 - DNA, 1248 bp, Artificial Sequence
  derived and/or modified sequence
atgaccggggaacgaccaagcacggctcttccagacaggcggtggggacccaggatccttggcttctggggcggatgtcgcgtctgggttttcgctgcaattttcctgcttctgtctctggccgccagctggagcaaagctgagaatgatttcggtctggtgcagccactcgtcacaatggagcagttgctctgggtcagcggtaggcagatcgggtcagtggacaccttcagaatccctctgattacggccacaccccgcggcacgctcctggcgttcgccgaggcacgaaagatgtccagtagcgacgagggagcaaaattcattgcacttaggcggagcatggatcaaggctctacctggtccccaactgcttttatagtcaacgacggggacgtgcctgatgggctgaatctgggcgcagtcgtgtctgacgtggagactggcgttgttttccttttctacagtctatgcgcccataaggcagggtgtcaagtcgcttccaccatgttggtgtggtccaaggacgatggcgtatcctggtcgactccaaggaacttatccttggacatcggcactgaggtgtttgcccctgggccaggtagcggcatccagaagcagcgggagccacgcaagggtaggctgattgtctgtggccacgggactcttgagagagacggtgttttctgtctgttgtccgacgaccacggcgccagctggaggtacggctctggagtctccgggattccatacggccagccaaaacaggagaatgactttaatccagatgagtgtcagccttacgaacttccggatggttccgtcgtgataaacgcaagaaaccaaaataattatcattgccattgtcggatagtacttcgctcttacgatgcttgcgatacactgagaccccgagacgtgacctttgatcccgaattggttgatccagtggtggctgccggtgccgtagtgacaagttctgggattgtgttcttttcaaaccccgcacatcccgagttcagagtgaatttgacattgcgctggtccttcagtaatggaactagttggcggaaggaaaccgtgcaattgtggcctggaccatctggatatagcagcctggccactctcgagggatctatggatggcgaggaacaggcaccccaactttatgttctctacgaaaagggtagaaaccactataccgagagtatttccgtggctaagatctctgtatatggaactctgtag

SEQ ID NO: 8822 - DNA, 1248 bp, Artificial Sequence
  derived and/or modified sequence
atgacgggagagaggccttcaaccgctctccctgatcgcagatggggacccagaatcctcgggttttgggggggctgcagagtatgggtattcgcggctattttccttcttctgagtctggctgcgagttggtctaaggctgagaacgattttgggttagtgcagccattagtcacgatggaacagttgctgtgggtttccgggcggcagataggatccgtggatactttccgtatccccttgattacagccacaccccgagggaccctgctagcctttgcagaagcaaggaaaatgagtagctctgatgagggcgcaaaattcatcgcactccggaggtccatggatcaggggtctacatggtccccaacagcattcatcgtgaatgacggcgacgtgccagatggactaaatctcggagccgtagtctctgacgtggaaactggagtcgtctttctcttctactccttgtgtgcccataaggctggatgccaagtcgcgagtacaatgctagtgtggtcaaaggacgacggcgtctcctggagcacaccccggaatctgagcctggatattggtaccgaggttttcgcgcccgggcccggatccgggattcagaagcagagagagccccgcaaaggaaggctgattgtctgtggccacggtaccttggaacgcgacggcgtgttctgtctcctgtccgacgatcacggcgcttcttggcgctacggcagcggcgtgtctggtatcccttacgggcaacccaagcaggaaaacgatttcaatcctgacgagtgtcagccctacgaactgcccgatggcagcgtggtcattaacgcccggaatcaaaataactaccattgccactgcagaatcgtcctgcgctcctatgacgcctgtgataccctgagacctagggatgtgactttcgaccctgaacttgttgaccccgttgtggccgccggagccgttgtgactagctcaggtatagttttctttagtaatccagctcacccggagttccgtgtcaatctgacccttaggtggtctttcagcaatgggactagctggagaaaggagactgtccagttatggcccggcccatccgggtatagcagccttgctaccctggagggcagcatggacggggaagaacaagcaccccagctctacgtgctctacgagaaaggaagaaatcattatactgagtctatatccgtcgctaaaataagtgtctacggcacattgtag

SEQ ID NO: 8823 - DNA, 1248 bp, Artificial Sequence
  derived and/or modified sequence
atgacaggtgaaagaccctccactgctctgcctgacagaaggtggggacccaggattctcggcttctggggcggttgtagggtttgggtctttgcggccatcttcttacttctgtcgctcgccgccagttggtcaaaagctgagaatgacttcggtctggtacagcccctggtcactatggaacagctgttatgggtatctggccgtcagatcggctctgtggatacattccggattcccctcataacagcgacaccgcgaggcaccctcctggcgttcgctgaggcgcgaaaaatgtcctcaagcgacgagggggccaagtttatagctctgcgacggagtatggatcaaggcagcacctggagccctacagcgtttatagttaatgacggagatgttccagacgggcttaatctcggggccgtcgttagcgatgtggaaacaggagttgtttttcttttctacagtctttgcgcacacaaagccgggtgtcaggtggcgagtactatgttggtgtggtctaaagacgacggcgtgtcatggtcgacaccgcgaaacttatctctagatatcggaaccgaagtgttcgcgccaggcccaggttcaggcatacaaaaacagagagagccaagaaaagggcggctgatcgtctgcgggcacggaactctcgaacgtgatggggtgttttgtttactgtccgatgatcatggcgccagttggagatatgggagcggagtatcagggataccttacgggcagcctaagcaggagaacgattttaatcccgatgagtgtcagccttatgaattaccggacggttctgtggtgatcaacgctcgcaatcagaataactaccactgccattgtcggatcgtgttgcggtcctatgatgcatgcgacactttgcgccctcgggacgtgacatttgacccagagctggtcgacccagtagttgccgccggcgccgttgttacatcctccggaattgttttcttttcaaatccagctcaccccgagttccgcgtgaaccttacattgaggtggagcttcagtaatgggacatcctggcgcaaggaaacagtgcagctgtggccaggcccatccgggtactcctctcttgctacacttgaaggctctatggatggcgaggagcaggctccacaattgtatgttctatacgaaaagggcagaaaccattacaccgaatctatatctgtggcaaagatctccgtatatgggaccttatag

SEQ ID NO: 8824 - DNA, 1248 bp, Artificial Sequence
  derived and/or modified sequence
atgacaggggagaggcctagtacagcattgccggataggcggtggggcccacggattctgggattctggggggggtgtcgggtctgggtgtttgccgctatctttcttcttttaagcctcgcagccagctggtcaaaagcggagaacgatttcggactggttcagccactggtgactatggagcagctgctgtgggtgtcaggaaggcagatcggctccgttgatacttttaggatacctctgatcaccgccaccccacgcggaactctgctggcgtttgccgaggcacgaaaaatgagcagttctgacgaaggggccaaattcatcgccctccgtaggtccatggatcagggctccacatggtcacccactgcatttatcgttaacgacggcgatgtcccagatggcctgaacctgggcgcggtagtcagcgacgtagaaactggggtggttttcctattttatagcctttgtgctcataaagctggttgccaggtggccagtactatgctggtgtggagcaaagacgatggcgtgagttggtctacaccaagaaatctttccctggacatcggcactgaggttttcgcccccggacccggaagcggaatccagaagcaaagagagccccgtaaaggacgcttaattgtctgcggccacggtacgctggagcgcgacggcgtgttttgtctcctctccgacgatcatggagcctcctggcgttatggcagtggtgtctccggtattccttacgggcaacccaagcaggaaaatgattttaaccctgatgagtgccagccatatgagctgcctgatggttccgtagttattaatgcccgtaatcagaacaattaccactgccactgccggattgtgctgcgctcctacgatgcatgtgacactcttcgccctcgagacgtgactttcgatccagagctggtggaccccgtggtggccgccggcgccgtcgtcacatcctctggtattgtgttcttttcaaatcccgctcatccagagttccgcgtcaatctcactctccggtggagcttttccaatggtacttcatggcgaaaagaaacagtccaattgtggccgggcccttcaggttacagtagcctggctacgctggaaggtagcatggatggagaagagcaggcccctcagttgtacgttctttacgagaaaggccgcaaccactatactgagtccatatcagtggcaaagataagcgtgtacgggactttgtag

SEQ ID NO: 8825 - DNA, 1248 bp, Artificial Sequence
  derived and/or modified sequence
atgaccggagaacgaccctctaccgccctacccgatcggcgctggggaccccggatcttggggttttggggaggatgccgcgtctgggtctttgcagctatttttcttttgctgtccctggcagcgagttggagcaaagcagagaacgattttggtctggtccagcctctcgtaactatggaacaactgctctgggtgtcaggaagacagatcggttctgtggatacgttccgcatcccattaattaccgccacgccccgaggaacactcctggcatttgccgaagcgagaaagatgtcctcctccgatgagggagctaagttcatcgccctgagacggagcatggatcagggctcaacttggtcacccaccgctttcattgtgaacgacggtgatgtccccgacgggttgaacctgggcgcagtggtgagcgatgtcgagacaggtgtcgtgtttctcttttactcactctgtgcccataaagcaggctgccaagtagctagcaccatgctggtgtggtcaaaggatgacggcgtcagttggagcacccctcggaacctgagccttgatatcgggacggaggtcttcgcccccggcccagggtccggcattcaaaaacagagggagcctagaaaggggcgcctgatcgtgtgtgggcatgggacccttgaaagagacggagttttctgtctcctcagcgatgatcatggggcgtcctggaggtacggctctggcgtgtctggaatcccatacgggcagcccaaacaggagaacgatttcaaccctgacgaatgccagccgtacgagctccccgacggcagcgtagtgataaatgcacggaaccaaaacaactaccactgccactgccggattgtcttgcggtcatacgatgcctgcgataccctgaggcctcgggacgtgacctttgacccagagctggttgaccccgtagtcgcagctggagccgttgtgacaagctcaggaatcgtcttcttctcaaacccagcacatcctgaatttcgggtcaacctgactcttcgctggagtttttccaatgggaccagctggcgaaaggagaccgtgcaactatggcccggaccgagcggttactcctccctcgctacattggaagggagtatggatggtgaggagcaggccccgcagctgtatgtcctttacgaaaagggacggaaccattacacggaatccatatctgtcgccaagatttcagtgtatgggaccttatag

SEQ ID NO: 8826 - DNA, 1248 bp, Artificial Sequence
  derived and/or modified sequence
atgaccggggagcggcccagcacagccctgcctgaccggcgctggggcccccgcatcctgggcttctggggcggctgccgggtgtgggtgtttgctgccatcttcctgctgctgagcctggccgcctcctggagcaaggccgagaatgactttggcctggtgcagcccctggtgaccatggagcagctgctgtgggtgtctggccggcagatcggctctgtggacaccttccgcatccccctcatcacagccaccccccggggcaccctgctggcctttgctgaggccaggaagatgagcagcagtgatgaaggagccaagttcatcgccctgcggcgctccatggaccagggcagcacctggagccccacagccttcatcgtgaatgatggagatgtgcctgatggcctgaacctgggcgctgtggtgtctgatgtggagaccggggtggtgttcctgttctacagcctgtgtgcccacaaggccggctgccaggtggccagcaccatgctggtgtggagcaaggatgatggagtgtcctggagcaccccaagaaacctgagcctggacattggaacagaggtgtttgcccctggccctggcagcggcatccagaagcagcgggagcccaggaagggccgcctcatcgtgtgtggccacggcaccctggagagagatggagtcttctgcctgctgagtgatgaccacggggcctcctggaggtatggcagcggcgtgtctggcatcccctacggccagcccaagcaggagaatgacttcaacccagatgagtgccagccctatgagctgcctgatggctctgtggtgatcaatgccaggaaccagaacaactaccactgccactgcagaattgtgctgcggagctatgatgcctgtgacaccctgcggcccagagatgtgacctttgatcctgagctggtggaccctgtggtggccgccggggctgtggtgaccagcagcggcatcgtgttcttcagcaacccagcccaccctgagttccgggtgaacctgaccctgcgctggagcttcagcaatggcacctcctggaggaaggagaccgtgcagctgtggccaggccccagcggctacagcagcctggccaccctggagggctccatggatggagaggagcaggccccccagctgtatgtgctgtatgaaaaaggaagaaaccactacacagagagcatctctgtggccaagatctctgtgtatggcaccctgtag

SEQ ID NO: 8827 - DNA, 1248 bp, Artificial Sequence
  derived and/or modified sequence
atgaccggcgagcggcccagcaccgccctgcccgaccggcggtggggaccgaggattcttgggttttgggggggctgccgggtctgggtgttcgctgctattttcctgctgttaagtttagcagcctcctggtcaaaggccgaaaatgactttgggttagtgcaacctctagtgacaatggagcagttgctctgggtgtcaggtcgtcaaattgggtccgtggacaccttcaggatccctttgatcactgcaacccctagagggaccctgctggccttcgcagaggcccgcaaaatgtcaagcagtgatgagggagcgaaattcatcgccctgaggcggtcaatggaccaaggctccacctggtccccaacagcgttcattgtaaatgacggtgacgtgcccgatgggcttaacctcggggcagttgtctccgacgttgaaactggcgttgtctttttgttctactctctgtgtgctcataaggcgggatgtcaggtcgcctctaccatgctggtctggagtaaggatgatggcgtgtcttggtccactcctcgaaatttatcactggacatcgggacggaagtgttcgcccccggaccagggagcggcatacagaagcagagagagcctaggaaagggaggctgatagtttgtggacatggtactctcgagcgggatggtgtattctgtctgctgagcgacgatcatggagccagctggcggtatggttctggtgtaagcggcatcccgtatggccaacctaagcaggagaatgactttaaccccgatgagtgccagccttatgagctccccgacggatccgtggttattaatgcccgcaaccagaataactatcactgtcactgtcggatagtgctacgctcatatgatgcatgtgatactctccgaccccgagacgtaactttcgaccccgaactcgttgatccagttgtggcagcgggggctgtcgtcactagcagtggcatcgtcttcttcagtaacccagctcatcccgagttccgcgtgaatttgacattaagatggtccttttcaaacggtacttcatggaggaaggagactgtacagttatggccaggcccaagcggatattcttctctcgccacactggagggctcgatggacggtgaggaacaagcgccacagctgtatgtgctctacgaaaaggggagaaaccattatactgagtccatctccgtggctaagatcagcgtgtacggtaccctttag

SEQ ID NO: 8828 - DNA, 1248 bp, Artificial Sequence
  derived and/or modified sequence
atgaccggcgagcggcccagcaccgccctgcccgaccggcggtggggaccacgcatcctggggttttggggcgggtgtcgtgtctgggttttcgcggctatctttcttctgctgtctctagccgcaagctggtcaaaggcggaaaatgactttggcctcgtgcagccattggtcacgatggagcagctactgtgggtatctgggcggcagatcggcagcgtggatacctttcgaatcccgctgataacggccactccacggggtaccttactggcttttgctgaggcccgaaagatgtcatcatccgacgagggagcaaaattcattgccctccggcgatcaatggatcagggttcaacatggtctccaaccgcattcatagttaatgacggcgacgtgccagacgggttaaacctcggtgccgtcgtcagcgatgtcgaaactggggtggtcttcctgttctactctctttgcgcgcataaggctgggtgccaggtggcctctaccatgctggtgtggtcaaaggacgacggcgtttcttggtctacaccaagaaacttgagtctggacataggcacagaggtgtttgcacctgggccagggagcggtattcagaaacaaagggaaccaagaaagggaagactgattgtgtgcggccacggcaccttggagcgcgacggtgttttttgtctactctcagatgaccacggagcaagctggcggtacgggagcggggtgagtggaatcccttatggccagccaaagcaggaaaatgacttcaaccccgacgagtgccaaccatacgagctaccagatgggagcgtggtaattaacgcacgcaaccaaaacaactaccactgtcactgccgcatagtcttaagatcttacgatgcctgcgacaccctcagaccaagagacgtcactttcgacccagaactggtcgaccccgtcgtagctgccggtgcagtcgttacaagttccggaattgtattcttctctaatcccgcacatccagagtttagggtgaatctgaccttgcgatggagtttctctaacggcacaagctggaggaaggaaaccgtgcagctgtggcccggtccctcaggctattcctcactggccacgctggaggggagcatggacggtgaggaacaggcaccgcagttatacgtgctgtatgaaaagggaagaaaccactatacagaaagtatttccgttgcaaaaatatcagtttacggtaccctctag

SEQ ID NO: 8829 - DNA, 1248 bp, Artificial Sequence
  derived and/or modified sequence
atgaccggcgagcggcccagcaccgccctgcccgaccggcggtggggacctcgcattctaggcttctggggtgggtgtcgtgtatgggtcttcgcagccattttcctgctgcttagcctcgctgccagttggtcaaaggccgagaatgatttcgggctggtgcagcctttggttactatggagcagctcctgtgggtgagcggtcgtcagattggatccgtggatacctttcggattcctctgattactgcaacacccagggggaccctgctcgcttttgccgaagcacgcaaaatgtcatcttccgatgaaggcgccaagtttattgctctgaggagatcgatggaccaggggagcacctggtccccgactgcttttatcgttaatgatggggacgtgcccgatggcctgaacttgggcgcagtcgttagtgatgtggagacaggagtcgtcttccttttttattccctgtgcgctcacaaagccggctgccaggtggccagcaccatgctggtgtggagcaaagatgacggagtcagttggtcaactccccgaaatctgagcctggacatcgggacagaggtcttcgcgccaggacctggttcgggcattcaaaaacagcgtgagcctagaaagggccggctgattgtgtgcggccacggcacactggagcgggatggtgtgttttgtttacttagtgacgatcatggggcatcttggcgctacgggtccggcgtgagcgggattccttatggccagccgaaacaagaaaatgacttcaatcccgacgagtgtcagccttatgagctgcctgacggctctgtggttatcaatgcacgcaatcaaaataattatcattgccactgccgtatagtgcttcggtcttacgatgcgtgcgacaccctccgtcccagagatgtgacttttgaccccgaactcgtggaccccgtggttgctgcaggcgctgttgtgacaagctcaggcatagtcttcttctctaacccggctcaccctgagtttagagtcaatctgacactgagatggtcgttttcaaatggaacatcctggcgaaaggagactgttcaattatggcccggcccaagcggatacagtagcctcgcgacactggagggttcgatggacggagaggagcaggcacctcaactctatgttctgtacgaaaaaggccgcaaccactacacagaaagtatatcagtagctaaaatttcagtatatggtactctttag

SEQ ID NO: 8830 - DNA, 1248 bp, Artificial Sequence
  derived and/or modified sequence
atgaccggcgagcggcccagcaccgccctgcccgaccggcggtggggcccccggatcctcggcttctgggggggttgtcgtgtgtgggtgttcgcagcgatttttctgctgctgtccctggccgccagctggtctaaagcagagaacgattttggcctggttcagccactcgtgactatggagcagctgctctgggtgtccggtagacagatcgggtcggttgatacctttcgcattccactgataacagcgactcccaggggcaccctgcttgcattcgctgaggctcgtaaaatgtcctccagcgacgaaggggcaaagtttatcgcactacgccgctcaatggatcagggctccacctggtctccgactgccttcatcgtgaacgacggggacgttcccgatgggctcaacctcggtgctgtcgtgagtgacgtcgaaaccggcgtggtcttcctcttttattctctttgtgctcataaggcagggtgccaggtggctagcacaatgcttgtctggagcaaggatgatggtgtgtcatggagcacccctcggaacctttccctcgacataggcaccgaagtatttgctcctgggcctgggtctggtatacagaagcaacgggagccgcgcaagggacggctgattgtgtgcggccacggaaccctggagcgcgatggagtgttttgcctattgagcgatgaccacggcgcgagttggagatacggctctggggttagtggtataccatatggccagcctaagcaggaaaacgactttaatccagacgaatgccagccgtatgagctgcctgacggtagcgtggtcataaatgctcgcaatcagaataactaccactgccactgcaggatcgtcctgcggtcttatgacgcgtgtgacacactccgcccccgggacgtgacgttcgacccagaactcgtggatcccgtggtggcagccggggctgttgttacgagcagtggtatcgttttcttctctaatcccgctcacccagagtttcgagttaacttgacacttcgatggtccttctcgaacggaacctcctggagaaaggaaactgtgcagttatggccaggcccttccggctacagctccctggccacacttgagggatccatggacggagaggaacaggcaccccagttgtacgtgctgtatgagaaaggccggaaccattacacagagtctatctcagtcgccaaaatctcagtctatggtactctgtag

SEQ ID NO: 8831 - DNA, 1248 bp, Artificial Sequence
  derived and/or modified sequence
atgaccggcgagcggcccagcaccgccctgcccgaccggcggtgggggcctcggatcctaggtttttggggcggttgccgcgtgtgggtgtttgcagccattttcctgctgctatcgctggctgcgtcctggagcaaggcggaaaatgacttcgggctcgtacagcctctggtgaccatggaacagcttctgtgggtgagcgggcgtcagatcgggtctgtggacacctttcgtattccattgattaccgccactcctcggggaaccttgcttgccttcgcggaagccaggaaaatgtctagcagtgatgagggcgcgaagtttattgcactgaggcggagtatggaccaggggtctacatggtcccctaccgcgtttatcgttaacgacggagacgtgccagatggcttgaacctgggagcagtcgtgtcagatgtagaaactggagtggtcttcctattttacagcctctgcgcccataaggcaggttgtcaagtcgcatccacaatgctggtctggtccaaggatgacggggtgagctggtccacaccaaggaacctcagcttagatatcggaactgaagttttcgccccaggtcccggctcaggcatccagaagcagagggagccccgcaaaggtagattgattgtgtgcgggcatggaactctagagagggacggtgtcttttgtttattgtccgatgaccatggcgcgtcctggaggtatggttccggcgtgtccggtataccatatgggcagccgaaacaggaaaatgattttaaccctgatgaatgtcaaccttacgagctccctgacggatcagtcgtaattaatgcacgcaaccagaataattaccattgccattgccgcatcgtgctgagaagctacgacgcctgcgataccctgcggcccagggacgttactttcgaccccgaactggtcgacccagttgttgccgccggcgcagtcgtgacatctagtggaattgtgtttttctccaatccagcccatccagaattccgcgttaatctcactcttagatggagcttcagcaatgggacctcatggcggaaggagacagtgcaactgtggccaggaccctctggctactctagtctagccacgctggaaggaagtatggatggggaagagcaggcaccacagctatacgtcctttacgaaaaaggacgaaaccattatactgaaagtatcagtgtggctaagatctccgtatacgggaccctgtag

SEQ ID NO: 8832 - DNA, 1248 bp, Artificial Sequence
  derived and/or modified sequence
atgaccggcgagcggcccagcaccgccctgcccgaccggcggtgggggccccggatcttaggattttggggagggtgtcgggtatgggtgttcgctgccattttcctccttttatcgttagccgctagctggtccaaagcagaaaatgactttggacttgtgcaacctctcgttactatggagcagctgctgtgggtatctgggcgccagatcggatcagttgacactttcagaattccattaatcaccgccacgcccagaggtacactgttggcgtttgctgaggcacggaaaatgagctcaagcgatgaaggggctaagtttattgcactgaggcgctccatggatcagggtagtacttggtcacccactgcctttattgtgaatgatggtgacgtcccagatgggttgaacttgggggcagtagtgagtgatgttgaaaccggcgtcgtcttcctgttttactccctgtgtgcccataaggctggatgtcaggtcgcctcgactatgctggtgtggagtaaagatgatggggtgtcttggagtacacctcggaatctaagtttagatattggaacggaggtgttcgcccccggccccggatccggcatacaaaagcagcgtgaaccgagaaaggggagattaattgtgtgtggccacggcacactggagcgcgatggcgttttttgtttgctatcagacgaccacggagcttcttggagatatggttctggggtcagcggtattccctatggccagcccaaacaggagaacgattttaaccctgacgagtgccagccatatgagctgccggatgggtctgtggtcatcaacgctcgaaaccagaacaattatcattgccactgcagaatcgttctccggtcttacgatgcgtgtgacaccctgcgtcctcgtgacgtcacattcgatcccgagcttgtggatcctgttgtggccgctggagctgttgttacttcatctgggatcgtatttttttctaaccccgctcaccctgaatttagggtgaatctgaccttaaggtggtcctttagcaacggtacatcctggcggaaagaaaccgtgcagctatggccgggcccaagtgggtattcgtccctcgctaccttagaaggtagtatggacggcgaggagcaggcacctcaattgtatgtattgtatgagaagggccgtaatcactacacggagagcatcagcgtggccaaaatctcagtctacggaacgctatag

SEQ ID NO: 8833 - DNA, 1248 bp, Artificial Sequence
  derived and/or modified sequence
atgaccggcgagcggcccagcaccgccctgcccgaccggcggtggggccctcgcattttgggcttttgggggggctgcagagtttgggtgttcgcagcaattttcctgctactgtctcttgctgccagctggtctaaggccgagaacgatttcggccttgtgcaacctctggtgaccatggagcagcttctctgggtctccgggaggcagatcggaagcgtcgatacgtttaggatccccctcatcacagccacccccaggggcacactgctggcctttgcagaagcgaggaaaatgtctagctctgatgagggcgctaaatttatcgccttaagaagatcaatggaccaggggtctacttggagtcctaccgcttttattgtcaacgatggagacgtgcccgacggcctaaacctgggagctgtggtctcagatgtggagaccggagtcgtctttctgttctattctctgtgcgcacacaaagctggttgtcaggtagcgtctactatgctcgtgtggtccaaagacgatggggttagctggtccacccctagaaatctcagcctggatatcggcaccgaagtgtttgcccctggcccaggtagtggaatccagaaacagcgggaaccacgcaaaggccgactgattgtttgtggtcacggcacactagagcgcgacggtgtgttctgcttgctatcagacgatcatggcgcaagttggaggtacggttccggggtgagcggcatcccatatggccaacctaagcaagagaacgattttaatccagacgaatgtcagccttacgaattgcccgacggctcagttgtgattaatgccaggaaccagaacaattaccactgccactgtcggatagttctacggagctatgacgcatgcgatacactgaggccacgggatgttacatttgatcccgaacttgttgacccagtggtggcggccggtgccgtagtgaccagcagcggcatcgtgtttttctctaacccggcccatccagaatttagggtgaaccttactctcagatggtcattcagtaatggtacaagttggcgcaaagagaccgtgcagctgtggcccggccccagtggttactcttcactcgctacgctggaaggaagcatggatggtgaagagcaggcccctcaactgtacgttttgtacgaaaagggcagaaatcattatactgaaagtatttcagtcgcaaagatcagcgtatacggaactctgtag

SEQ ID NO: 8834 - DNA, 1248 bp, Artificial Sequence
  derived and/or modified sequence
atgaccggcgagcggcccagcaccgccctgcccgaccggcggtggggccctcgcatactgggtttctggggcgggtgtcgggtctgggtgtttgccgccatcttcctccttctcagtctggccgcgtcttggtccaaagccgaaaacgatttcgggctggtccaaccgttggtgacgatggagcaacttctgtgggtctctggtaggcagatagggtccgtcgacactttccgaatccctttgataacagccactccccgcggaacactgttagcgttcgccgaggcccgcaagatgtcttcctctgacgaaggcgctaaattcatagcattgcggaggagcatggatcagggatcgacttggtcccccacagctttcattgtcaatgatggggatgtgcccgatggactcaatctaggggcggtggtgtccgacgttgagacaggggtagtgttcctgttctatagcctatgtgcccacaaagctggctgtcaagtcgcgtctactatgcttgtttggtctaaagacgacggggtgagctggagtactcctcggaaccttagcttagacattggcaccgaggtgttcgcaccaggccctggcagcggtatccagaagcagcgggagcctcgcaagggcaggcttatagtatgtggccacgggaccctggagcgggacggtgtgttttgcctactgtcagatgatcatggggcatcttggagatatgggagcggagtgagcggtattccgtacggtcaacccaagcaagaaaacgatttcaaccccgacgagtgccaaccttacgagctgcctgatggatcagtcgtcattaacgcacgaaatcagaacaactaccattgccactgtcggatcgtactgcggagttatgatgcttgtgacaccttgaggccacgcgacgtgacattcgatccagagttggttgaccctgtcgtagcagccggcgccgtggtgacgtccagcggtattgtgttcttttcgaaccccgctcacccagagttccgggtgaatctgacccttagatggtctttctcaaatgggaccagttggcgtaaagaaactgtgcagctgtggccaggccctagtggctactcctctcttgctactctggagggctccatggatggggaggaacaggctcctcagctctacgttctctacgagaaagggagaaaccattatacagaaagtattagcgtggctaagatctccgtgtatggaaccctttag

SEQ ID NO: 8835 - DNA, 1248 bp, Artificial Sequence
  derived and/or modified sequence
atgacgggcgaaagaccttctactgctttgcctgatagaagatggggtccccgaattctcggcttttggggaggctgccgggtgtgggtgtttgccgcaatctttttattgttgagtctggccgcttcatggtccaaggcagagaacgatttcgggctggtccagccactggtgacaatggagcagcttctgtgggtcagcggcaggcagatcggttctgtggacaccttcaggatcccgctcattaccgctacaccccgaggaacactgctcgcatttgccgaggccaggaagatgagctccagcgatgaaggggcaaagtttatcgccctgcgcagaagcatggaccagggtagtacctggagtcctactgcatttattgttaacgatggagacgtccccgatggcttaaacttaggagcagttgtaagcgacgtggagactggtgtcgtgtttctgttttattctctttgtgcacataaggctggttgccaggtcgcaagcactatgctagtgtggagtaaggatgacggagtttcatggtccacacccagaaacctcagtctagacatcggcacggaagtgtttgcgccaggcccagggtctggaatccagaagcagcgggaaccacgtaaaggaaggcttatagtatgtggtcacgggaccctcgaacgcgacggcgtgttttgcctgctgtccgatgatcacggtgcctcatggagatatggatcaggtgtgagcggcatcccatacgggcagcctaaacaggagaacgatttcaacccagatgaatgccagccatacgagctgcccgacggcagcgtggtaattaacgctagaaatcagaacaactaccattgccattgtaggatagtcctgaggagttatgacgcttgcgacactctccggccacgggatgtgacctttgacccagagttggtcgacccagtcgtcgccgcaggagctgtggtgacttcctctggaattgttttcttcagcaacccagcccaccctgaattcagagtgaacctgacccttaggtggtccttttctaacggcacatcgtggcgcaaggaaaccgtgcagctgtggcccggaccatcaggatatagcagccttgcgactctggaggggtcaatggacggtgaagaacaggctccacaactctatgtactttatgaaaagggtcggaaccactataccgaaagtatctccgttgccaagatttcagtttacggcacactgtag

SEQ ID NO: 8836 - DNA, 1248 bp, Artificial Sequence
  derived and/or modified sequence
atgaccggtgaacggccttctacagcactgcctgacagacgatggggtcctcgcatcctcggcttctggggcggatgtagggtgtgggtgttcgcagccatcttcttgcttctgagtctagcggctagctggtcgaaggccgaaaatgactttggcctcgtgcaaccgctggttaccatggaacaactgctgtgggttagcggacggcagataggctcagtggataccttcagaatccctctgataaccgcaaccccaaggggtacactcctggcttttgccgaggcccgaaagatgtcgtccagcgacgaaggggcaaaatttattgcccttagacgatcgatggatcaggggagtacttggtcccctaccgctttcattgtgaatgatggagacgtgcctgatgggctgaatctcggcgcagtggtgtctgacgtggaaactggggtggtgtttctgttctatagcctctgcgcacacaaggcgggatgccaagtggcgtccaccatgctagtgtggtccaaagacgatggggtctcctggtccacccctaggaatctctctctcgatatcgggactgaagtgtttgctcccggacccggaagtggcattcagaaacaaagggagccgaggaagggcagactgatcgtgtgcggacatgggacgctagaacgcgacggggtcttttgcctgctctcagacgatcatggtgcttcctggcgctacggctctggggtctccgggatcccatacggccagcccaagcaggagaacgactttaacccagacgaatgccagccctatgaactgcccgatgggtccgtagtgatcaacgcccgaaaccagaacaactatcattgtcattgccgtatagtgttgaggtcatacgacgcttgcgatacacttcgcccaagggacgtcacctttgaccctgagctcgttgatcccgttgttgcggctggggctgtcgttacatcttccggtattgtatttttctccaaccccgcacacccagaatttcgcgtgaacttaacgcttcgctggtctttctctaatggaacatcatggaggaaagaaaccgtccaactgtggccaggaccttccggctattcctctttagctactctggagggtagtatggacggcgaggagcaagcgcctcagctttatgtattatacgaaaaaggcagaaatcactacaccgaatcaatctccgttgcaaagatctcagtatacgggacactctag

SEQ ID NO: 8837 - DNA, 1248 bp, Artificial Sequence
  derived and/or modified sequence
atgactggcgagagacctagcacagctctgccagacagacgttggggtcctcgtatcttggggttctggggcggatgtagggtctgggtgtttgccgctatctttctcttactatctttagccgcttcttggtccaaggcagagaacgactttggactggttcaaccgctcgttaccatggagcagctgctgtgggtatctggtcgtcagattggaagtgtggacacattccgaattcctctcattacggcgacacccagaggcacactgctcgcttttgcagaagcccgaaagatgtcatcatccgacgaaggagcgaagtttattgctctgcggcgatcaatggaccagggtagcacttggtcacccaccgcttttattgtcaacgatggcgatgtgcccgacgggctaaatctgggggcagtggtgagcgatgtggaaacaggcgtggtattcctgttttacagtctgtgcgcccataaagccggatgccaagtggcaagcaccatgttagtttggtcaaaagacgacggggtatcctggtccacacccagaaatctgtcattagacatcggaacagaggtgtttgctcccggacccggtagtgggattcagaagcagcgagagccgaggaagggaaggctcattgtctgcggccacgggaccctagagagggatggcgtgttttgcctcctgtcagacgatcatggcgcaagctggagatacggatccggcgtgtcagggatcccctatgggcaaccaaaacaggagaatgatttcaatcccgatgaatgtcagccatacgaacttccggatgggagcgtggtgattaatgccagaaatcaaaataactatcattgccactgccgcatcgtattgagatcgtatgacgcatgtgatacattgcgccctcgcgacgtcacatttgaccccgagttggttgaccccgtggttgcagctggcgcagtcgtaaccagctccggcatagttttcttttctaatccggctcatcccgagttccgagtgaacctgacactccggtggagcttcagtaatggcacgtcatggcgtaaggagaccgtgcagctgtggccgggaccctccggctatagttcgctggcgactctggagggcagcatggacggggaggaacaggctccacagctctacgtactctacgaaaagggaagaaaccactatacagagtctatatctgtcgccaagatctctgtttatggtactctgtag

SEQ ID NO: 8838 - DNA, 1248 bp, Artificial Sequence
  derived and/or modified sequence
atgaccggcgaacggccaagtaccgctctgcctgaccggagatggggcccaaggatcctcggcttctgggggggttgccgcgtctgggtatttgccgcaatcttcctcctgctcagccttgctgcctcctggtctaaggccgagaacgactttggccttgtccagccgcttgttacaatggaacagctgctgtgggtctcagggcgacagatcggcagcgtcgataccttccgtattcctctcattaccgcgacaccccgtggcaccctcctagcgtttgctgaggctcgcaaaatgtccagctccgacgagggtgccaagtttatcgctctgcgcagaagcatggatcaagggtccacttggtcaccgaccgccttcattgtcaacgacggcgacgtgcctgacggactgaacttgggtgcggtggtgtcggacgttgaaacgggcgtcgtgttcctcttctactccctgtgtgcccataaagctggctgccaggtcgcatccaccatgctggtttggagcaaagacgacggcgtgtcgtggtcgacccctcgcaacctgtctttagatatcgggaccgaagttttcgcgccaggcccaggatctggaatccagaagcaaagagaaccgaggaagggacggcttatcgtgtgcggtcacggtactttggaacgagacggtgtcttctgcttgctctctgacgatcacggagcttcgtggcggtatggatccggggtgtccggcattccatacggacagcccaagcaggaaaatgattttaatcccgatgagtgccagccatacgagttgccagatggatctgtggttatcaacgcaaggaaccaaaataactaccattgtcattgcagaatcgtgctgcgttcttacgacgcctgcgatactttaagaccacgggacgtaacattcgatcctgagctggtggatcctgtggtcgcagcaggcgcagtcgtgacctcttcaggcattgttttcttctcaaacccagcacatccggaattcagggttaacctgacgctccgttggtccttctcaaacggtaccagctggagaaaggagacagtgcagctgtggcccggtccttctggttatagctcccttgccaccctggagggctcaatggatggggaggagcaagcccctcagctgtatgtgctgtacgaaaagggcagaaatcactataccgagagcatcagcgtcgcaaaaatatccgtgtatgggactctttag

SEQ ID NO: 8839 - DNA, 1248 bp, Artificial Sequence
  derived and/or modified sequence
atgacaggcgagcgcccaagcaccgccctgcctgatcgtaggtgggggcctcgcattttaggcttctggggcggttgccgggtctgggtcttcgctgctatttttttgcttctgagcttagctgcttcctggtctaaggctgagaatgacttcggcttagtacagccccttgtaaccatggagcagctgctttgggtttctggacgccaaatcgggagcgtggacaccttccgcattccccttattaccgcaacaccgaggggaaccttactggccttcgctgaggcccgaaagatgtcgtcttctgatgagggggcaaaattcatcgcgctgcgacggtccatggatcaggggagtacatggagcccgactgcctttatcgtgaacgacggggacgtgccagatggcctaaacctcggagctgtcgtgtccgacgtggagactggcgtagtgtttcttttttatagcctgtgcgcccataaagccggatgtcaagtcgctagtacgatgttggtttggtcaaaagatgacggtgttagctggtcaacacccagaaacctcagtctcgacatcgggactgaggttttcgcacccggacctggcagcggtattcagaagcagcgggagccaaggaaagggagactgatagtctgcggacacgggactctcgaacgcgatggggtgttttgtcttttgtctgacgaccatggagcaagctggaggtacggcagcggcgtttcgggtataccatatggccaacctaagcaagaaaacgacttcaaccccgatgagtgccagccttacgagctgccagacggctccgtggtgatcaatgcccgaaaccagaataactaccattgtcactgcagaatagttttgcgatcatacgatgcatgcgacacactgcgtccaagagacgtcactttcgacccggaactcgtggatccggtagtggccgctggcgcagtggtgacttcaagcggcattgtatttttcagtaaccctgcacatcccgagtttcgtgtgaacctgacgctgcggtggtccttcagcaacggcaccagctggcggaaagagaccgtgcaactgtggcctgggccttcaggatactcgtccctggccaccctcgagggctcaatggatggagaggagcaggctccccagctgtacgtcttgtacgagaaggggaggaatcattatacggagagtatttccgtcgcaaaaattagcgtttatggaacactctag

SEQ ID NO: 8840 - DNA, 1248 bp, Artificial Sequence
  derived and/or modified sequence
atgaccggggaaaggccttccacagctctcccagaccgtcgttggggacctcgcatcttgggcttttgggggggttgcagagtgtgggtctttgccgctatatttttgctgctgtccctggccgcatcatggagcaaagccgagaacgattttggcttagtgcaacccttggttacaatggagcagctgctctgggtctcagggaggcagatcgggtcagttgatacttttcgcatccccctaattaccgctacaccccgtggaactctgctggcctttgcagaagctcgaaaaatgtcctcttccgacgaaggcgcaaaattcatcgccttgagacggagcatggatcagggctccacatggtcaccaacagcttttattgtgaacgatggagatgtccctgacgggctgaatctgggggcagtagttagcgacgtagagacaggagtggtgtttctgttctactctttgtgcgcacacaaggccggatgtcaagtcgctagcaccatgctggtttggagtaaagacgacggagtcagttggagcacccctaggaacctatctctggacatcggaaccgaggtcttcgctccaggaccaggcagcggtatccagaagcagagagagcctcgaaaggggagactgattgtctgtgggcacggcacactcgaacgggatggcgtgttctgcctgctgtccgatgaccacggagcttcttggcggtacggttcaggggtgagcggtattccttacggccagcctaagcaggagaacgatttcaaccccgacgaatgccagccctatgagttgcctgatggatccgtggtgattaatgccaggaatcagaacaattatcactgccactgccgaattgtgctgcggagctacgacgcctgtgataccctgcgacccagagatgtgacattcgatcctgagttggtagaccccgtcgtcgcagccggtgccgtggtgacttcctctggcatcgtatttttttcaaatccagcgcaccctgagtttagagttaatttgacactgaggtggtccttttctaatggcacttcctggagaaaggaaacagtgcagctctggcccggtcccagtggatactcatctctggctactctcgaaggctctatggatggggaggagcaggcccctcaactctatgtgctgtatgagaagggacgcaaccattataccgaatccatctctgtggcaaagatctccgtgtacgggacactgtag

SEQ ID NO: 8841 - DNA, 1248 bp, Artificial Sequence
  derived and/or modified sequence
atgacgggagaaaggccctcgaccgctctgcccgaccgtagatggggtcctagaatcctggggttttggggcggttgccgggtgtgggttttcgccgctatctttctacttctgtcactggccgcatcctggtctaaggcagaaaacgactttggcctcgtacagcctttggtaactatggagcagctgctatgggtgagtggacgccaaattggatctgtggacaccttcagaatccccttaatcacagccacgcctcgcggaacattattggccttcgcagaagctaggaagatgagctcctctgatgagggtgccaagtttatagccctcaggcgctcaatggaccaagggagcacctggtctcctacagcatttatcgtgaatgacggggacgtcccagatggactgaacctcggcgcagtagtgtctgacgtggaaaccggggtggtgtttttattttattctctctgtgctcacaaggcaggctgccaggtggcaagcacaatgctcgtgtggtctaaagatgatggcgttagttggtcaactccacgaaacctgtctctggatatcggcaccgaagtcttcgctcctggccctggctcaggtattcagaaacagagggagccacggaaggggcgacttatcgtttgtggccatggaactcttgagcgagacggcgtgttttgcttgttatctgacgaccacggagcatcatggcggtacggctccggagtgtctggcattccttacggacaacctaaacaagaaaacgatttcaaccccgacgagtgccagccttacgagcttcctgatggtagcgtggtcataaatgctaggaaccagaacaactatcactgtcattgcaggatcgtcctgcgctcttatgatgcctgcgataccctgagaccgagggacgtgacatttgaccccgagttggtggatcctgtggtcgctgctggagcggtggtgacatcctctggaatcgtttttttcagtaatcctgctcacccggagttccgagtaaaccttaccttgcggtggagtttttctaacgggacaagttggcgcaaggagacggtccagctctggccaggcccatcaggctatagtagtctggcaaccctcgagggatctatggacggcgaagaacaagccccacagttatacgtcctgtatgagaagggacgcaatcattacacagaatcaatttccgttgctaaaatctctgtctacggaactctgtag

SEQ ID NO: 8842 - DNA, 1248 bp, Artificial Sequence
  derived and/or modified sequence
atgacgggcgaacgcccttccacagcgctgcctgacaggcggtggggacccaggattcttggcttttggggaggctgtagagtctgggtcttcgctgccattttcctcctattgtccctggctgcctcctggtcaaaggctgagaacgactttggccttgtgcagccccttgtaaccatggagcagctattgtgggtctcaggcagacagatcggctctgtcgataccttcaggattccgctgatcaccgcgacgccccgaggcaccctcctggccttcgccgaggctcgtaaaatgagcagctccgacgaaggggctaaatttatcgcccttcgacgcagtatggaccagggctcaacttggtccccaaccgcattcatcgtgaatgacggagatgtcccagatggactaaatctgggcgctgtagtcagcgacgttgaaacaggggtggtcttcctgttttactcactgtgcgcccataaggccggttgccaggtggcttcaactatgctagtgtggtcaaaagacgacggggtgagctggtccacgccccgtaacttgtccttggacatcggcactgaggtgtttgctcccggacctggctccggcattcagaaacagagagaacccaggaagggcaggctgattgtgtgcggccatgggaccctcgagcgtgatggagtgttctgcttactgtcagatgaccacggagcctcctggagatatggaagcggtgtatccggaatcccgtacggccagccaaagcaggagaatgacttcaatcctgacgagtgccagccttacgagctgccggacggttctgttgtgattaacgcccgtaaccaaaacaactatcattgccattgccgtatcgtgttaagaagctacgatgcttgtgatacgctgcgcccaagggatgtcacatttgatcctgagctggtggatcctgtcgtcgcagcaggcgctgttgttacatccagtggcatcgtgttcttttccaatccagcgcaccctgaattcagggtgaacctgacattgcgctggagttttagcaatggcacatcttggaggaaggaaaccgtgcagctgtggcctgggccttccggatactcctccctggccaccctggaaggctctatggatggcgaggaacaggccccacagctttatgtgctgtacgagaaaggaagaaaccactacaccgagtctatcagtgtcgctaaaattagcgtttacggcactctttag

SEQ ID NO: 8843 - DNA, 2045 bp, Artificial Sequence
  derived and/or modified sequence
cgggaagcgcggcggggcctccagaccggggcgggcttaagggtgacatctgcgctttaaagggtccgggtcagctgactcccgactctgtggagtctagctgccagggtcgcggcagctgcggggagagatgactggggagcgacccagcacggcgctcccggacagacgctgggggccgcggattctgggcttctggggaggctgtagggtttgggtgtttgccgcgatcttcctgctgctgtctctggcagcctcctggtccaaggctgagaacgacttcggtctggtgcagccgctggtgaccatggagcaactgctgtgggtgagcgggagacagatcggctcagtggacaccttccgcatcccgctcatcacagccactccgcggggcactcttctcgcctttgctgaggcgaggaaaatgtcctcatccgatgagggggccaagttcatcgccctgcggaggtccatggaccagggcagcacatggtctcctacagcgttcattgtcaatgatggggatgtccccgatgggctgaaccttggggcagtagtgagcgatgttgagacaggagtagtatttcttttctactccctttgtgctcacaaggccggctgccaggtggcctctaccatgttggtatggagcaaggatgatggtgtttcctggagcacaccccggaatctctccctggatattggcactgaagtgtttgcccctggaccgggctctggtattcagaaacagcgggagccacggaagggccgcctcatcgtgtgtggccatgggacgctggagcgggacggagtcttctgtctcctcagcgatgatcatggtgcctcctggcgctacggaagtggggtcagcggcatcccctacggtcagcccaagcaggaaaatgatttcaatcctgatgaatgccagccctatgagctcccagatggctcagtcgtcatcaatgcccgaaaccagaacaactaccactgccactgccgaattgtcctccgcagctatgatgcctgtgatacactaaggccccgtgatgtgaccttcgaccctgagctcgtggaccctgtggtagctgcaggagctgtagtcaccagctccggcattgtcttcttctccaacccagcacatccagagttccgagtgaacctgaccctgcgatggagcttcagcaatggtacctcatggcggaaagagacagtccagctatggccaggccccagtggctattcatccctggcaaccctggagggcagcatggatggagaggagcaggccccccagctctacgtcctgtatgagaaaggccggaaccactacacagagagcatctccgtggccaaaatcagtgtctatgggacactctgagctgtgccactgccacaggggtattctgccttcaggactctgccttcaggaacacgggtctgtagagggtctgctggagacgcctgaaagacagttccatcttcctttagactccagccttggcaaaatcaccttccctttaccagggaaatcacttcctttaggactgaaagctaggcgtcctctcccacaaaaaagtcctgccctcatctgagaatactgtctttccatatggctaagtgtggccccaccaccctctctgccctcccgggacattgattggtcctgtcttgggcaggtctagtgagctgtagaattgaatcaatgtgaactcagggaactggggaaggctgagcctcctctttggtgttgcggtaagataaccgacagggctggtgaaagtccccagatggcaggatatttggtttcagagtaaggactaggtgcaccaccatgactgactatcaatcaaaatgtttgtaacttaaaatttttaatgaaggataatgaatatttgtagagtctctatggttctgtcaatgcacatcttcgtgtctgttttcctcatgtatccttgtgagcctgggtgagttctggggagagacctgatgtgcgtactgcctgtgaaaatctgactttggcaaatcaaatcctcttttccttttga

SEQ ID NO: 8844 - DNA, 2071 bp, Artificial Sequence
  derived and/or modified sequence
gagctacttgaagaccaattagagtccgggaagcgcggcggggcctccagaccggggcgggcttaagggtgacatctgcgctttaaagggtccgggtcagctgactcccgactctgtggagtctagctgccagggtcgcggcagctgcggggagagatgactggggagcgacccagcacggcgctcccggacagacgctgggggccgcggattctgggcttctggggaggctgtagggtttgggtgtttgccgcgatcttcctgctgctgtctctggcagcctcctggtccaaggctgagaacgacttcggtctggtgcagccgctggtgaccatggagcaactgctgtgggtgagcgggagacagatcggctcagtggacaccttccgcatcccgctcatcacagccactccgcggggcactcttctcgcctttgctgaggcgaggaaaatgtcctcatccgatgagggggccaagttcatcgccctgcggaggtccatggaccagggcagcacatggtctcctacagcgttcattgtcaatgatggggatgtccccgatgggctgaaccttggggcagtagtgagcgatgttgagacaggagtagtatttcttttctactccctttgtgctcacaaggccggctgccaggtggcctctaccatgttggtatggagcaaggatgatggtgtttcctggagcacaccccggaatctctccctggatattggcactgaagtgtttgcccctggaccgggctctggtattcagaaacagcgggagccacggaagggccgcctcatcgtgtgtggccatgggacgctggagcgggacggagtcttctgtctcctcagcgatgatcatggtgcctcctggcgctacggaagtggggtcagcggcatcccctacggtcagcccaagcaggaaaatgatttcaatcctgatgaatgccagccctatgagctcccagatggctcagtcgtcatcaatgcccgaaaccagaacaactaccactgccactgccgaattgtcctccgcagctatgatgcctgtgatacactaaggccccgtgatgtgaccttcgaccctgagctcgtggaccctgtggtagctgcaggagctgtagtcaccagctccggcattgtcttcttctccaacccagcacatccagagttccgagtgaacctgaccctgcgatggagcttcagcaatggtacctcatggcggaaagagacagtccagctatggccaggccccagtggctattcatccctggcaaccctggagggcagcatggatggagaggagcaggccccccagctctacgtcctgtatgagaaaggccggaaccactacacagagagcatctccgtggccaaaatcagtgtctatgggacactctgagctgtgccactgccacaggggtattctgccttcaggactctgccttcaggaacacgggtctgtagagggtctgctggagacgcctgaaagacagttccatcttcctttagactccagccttggcaaaatcaccttccctttaccagggaaatcacttcctttaggactgaaagctaggcgtcctctcccacaaaaaagtcctgccctcatctgagaatactgtctttccatatggctaagtgtggccccaccaccctctctgccctcccgggacattgattggtcctgtcttgggcaggtctagtgagctgtagaattgaatcaatgtgaactcagggaactggggaaggctgagcctcctctttggtgttgcggtaagataaccgacagggctggtgaaagtccccagatggcaggatatttggtttcagagtaaggactaggtgcaccaccatgactgactatcaatcaaaatgtttgtaacttaaaatttttaatgaaggataatgaatatttgtagagtctctatggttctgtcaatgcacatcttcgtgtctgttttcctcatgtatccttgtgagcctgggtgagttctggggagagacctgatgtgcgtactgcctgtgaaaatctgactttggcaaatcaaatcctcttttccttttga

SEQ ID NO: 8845 - DNA, 2045 bp, Artificial Sequence
  derived and/or modified sequence
cgggaagcgcggcggggcctccagaccggggcgggcttaagggtgacatctgcgctttaaagggtccgggtcagctgactcccgactctgtggagtctagctgccagggtcgcggcagctgcggggagagatgactggggagcgacccagcacggcgctcccggacagacgctgggggccgcggattctgggcttctggggaggctgtagggtttgggtgtttgccgcgatcttcctgctgctgtctctggcagcctcctggtccaaggctgagaacgacttcggtctggtgcagccgctggtgaccatggagcaactgctgtgggtgagcgggagacagatcggctcagtggacaccttccgcatcccgctcatcacagccactccgcggggcactcttctcgcctttgctgaggcgaggaaaatgtcctcatccgatgagggggccaagttcatcgccctgcggaggtccatggaccagggcagcacatggtctcctacagcgttcattgtcaatgatggggatgtccccgatgggctgaaccttggggcagtagtgagcgatgttgagacaggagtagtatttcttttctactccctttgtgctcacaaggccggctgccaggtggcctctaccatgttggtatggagcaaggatgatggtgtttcctggagcacaccccggaatctctccctggatattggcactgaagtgtttgcccctggaccgggctctggtattcagaaacagcgggagccacggaagggccgcctcatcgtgtgtggccatgggacgctggagcgggacggagtcttctgtctcctcagcgatgatcatggtgcctcctggcgctacggaagtggggtcagcggcatcccctacggtcagcccaagcaggaaaatgatttcaatcctgatgaatgccagccctatgagctcccagatggctcagtcgtcatcaatgcccgaaaccagaacaactaccactgccactgccgaattgtcctccgcagctatgatgcctgtgatacactaaggccccgtgatgtgaccttcgaccctgagctcgtggaccctgtggtagctgcaggagctgtagtcaccagctccggcattgtcttcttctccaacccagcacatccagagttccgagtgaacctgaccctgcgatggagcttcagcaatggtacctcatggcggaaagagacagtccagctatggccaggccccagtggctattcatccctggcaaccctggagggcagcatggatggagaggagcaggccccccagctctacgtcctgtatgagaaaggccggaaccactacacagagagcatctccgtggccaaaatcagtgtctatgggacactctgagctgtgccactgccacaggggtattctgccttcaggactctgccttcaggaacacaggtctgtagagggtctgctggagacgcctgaaagacagttccatcttcctttagactccagccttggcaaaatcaccttccctttaccagggaaatcacttcctttaggactgaaagctaggcgtcctctcccacaaaaaagtcctgccctcatctgagaatactgtctttccatatggctaagtgtggccccaccaccctctctgccctcccgggacattgattggtcctgtcttgggcaggtctagtgagctgtagaattgaatcaatgtgaactcagggaactggggaaggctgagcctcctctttggtgttgcggtaagataaccgacagggctggtgaaagtccccagatggcaggatatttggtttcagagtaaggactaggtgcaccaccatgactgactatcaatcaaaatgtttgtaacttaaaatttttaatgaaggataatgaatatttgtagagtctctatggttctgtcaatgcacatcttcgtgtctgttttcctcatgtatccttgtgagcctgggtgagttctggggagagacctgatgtgcgtactgcctgtgaaaatctgactttggcaaatcaaatcctcttttccttttga

SEQ ID NO: 8846 - DNA, 1248 bp, Artificial Sequence
  derived and/or modified sequence
atgaccggcgagagacccagcaccgccctgcccgacagaagatggggccccagaatcctgggcttctggggcggctgcagagtgtgggtgttcgccgccatcttcctgctgctgagcctggccgccagctggagcaaggccgagaacgacttcggcctggtgcagcccctggtgaccatggagcagctgctgtgggtgagcggcagacagatcggcagcgtggacaccttcagaatccccctgatcaccgccacccccagaggcaccctgctggccttcgccgaggccagaaagatgagcagcagcgacgagggcgccaagttcatcgccctgagaagaagcatggaccagggcagcacctggagccccaccgccttcatcgtgaacgacggcgacgtgcccgacggcctgaacctgggcgccgtggtgagcgacgtggagaccggcgtggtgttcctgttctacagcctgtgcgcccacaaggccggctgccaggtggccagcaccatgctggtgtggagcaaggacgacggcgtgagctggagcacccccagaaacctgagcctggacatcggcaccgaggtgttcgcccccggccccggcagcggcatccagaagcagagagagcccagaaagggcagactgatcgtgtgcggccacggcaccctggagagagacggcgtgttctgcctgctgagcgacgaccacggcgccagctggagatacggcagcggcgtgagcggcatcccctacggccagcccaagcaggagaacgacttcaaccccgacgagtgccagccctacgagctgcccgacggcagcgtggtgatcaacgccagaaaccagaacaactaccactgccactgcagaatcgtgctgagaagctacgacgcctgcgacaccctgagacccagagacgtgaccttcgaccccgagctggtggaccccgtggtggccgccggcgccgtggtgaccagcagcggcatcgtgttcttcagcaaccccgcccaccccgagttcagagtgaacctgaccctgagatggagcttcagcaacggcaccagctggagaaaggagaccgtgcagctgtggcccggccccagcggctacagcagcctggccaccctggagggcagcatggacggcgaggagcaggccccccagctgtacgtgctgtacgagaagggcagaaaccactacaccgagagcatcagcgtggccaagatcagcgtgtacggcaccctgtag

SEQ ID NO: 8847 - protein, 2321 aa, Artificial Sequence
  derived and/or modified sequence
MGPGARGRRRRRRPMSPPPPPPPVRALPLLLLLAGPGAAAPPCLDGSPCANGGRCTQLPSREAACLCPPGWVGERCQLEDPCHSGPCAGRGVCQSSVVAGTARFSCRCPRGFRGPDCSLPDPCLSSPCAHGARCSVGPDGRFLCSCPPGYQGRSCRSDVDECRVGEPCRHGGTCLNTPGSFRCQCPAGYTGPLCENPAVPCAPSPCRNGGTCRQSGDLTYDCACLPGFEGQNCEVNVDDCPGHRCLNGGTCVDGVNTYNCQCPPEWTGQFCTEDVDECQLQPNACHNGGTCFNTLGGHSCVCVNGWTGESCSQNIDDCATAVCFHGATCHDRVASFYCACPMGKTGLLCHLDDACVSNPCHEDAICDTNPVNGRAICTCPPGFTGGACDQDVDECSIGANPCEHLGRCVNTQGSFLCQCGRGYTGPRCETDVNECLSGPCRNQATCLDRIGQFTCICMAGFTGTYCEVDIDECQSSPCVNGGVCKDRVNGFSCTCPSGFSGSTCQLDVDECASTPCRNGAKCVDQPDGYECRCAEGFEGTLCDRNVDDCSPDPCHHGRCVDGIASFSCACAPGYTGTRCESQVDECRSQPCRHGGKCLDLVDKYLCRCPSGTTGVNCEVNIDDCASNPCTFGVCRDGINRYDCVCQPGFTGPLCNVEINECASSPCGEGGSCVDGENGFRCLCPPGSLPPLCLPPSHPCAHEPCSHGICYDAPGGFRCVCEPGWSGPRCSQSLARDACESQPCRAGGTCSSDGMGFHCTCPPGVQGRQCELLSPCTPNPCEHGGRCESAPGQLPVCSCPQGWQGPRCQQDVDECAGPAPCGPHGICTNLAGSFSCTCHGGYTGPSCDQDINDCDPNPCLNGGSCQDGVGSFSCSCLPGFAGPRCARDVDECLSNPCGPGTCTDHVASFTCTCPPGYGGFHCEQDLPDCSPSSCFNGGTCVDGVNSFSCLCRPGYTGAHCQHEADPCLSRPCLHGGVCSAAHPGFRCTCLESFTGPQCQTLVDWCSRQPCQNGGRCVQTGAYCLCPPGWSGRLCDIRSLPCREAAAQIGVRLEQLCQAGGQCVDEDSSHYCVCPEGRTGSHCEQEVDPCLAQPCQHGGTCRGYMGGYMCECLPGYNGDNCEDDVDECASQPCQHGGSCIDLVARYLCSCPPGTLGVLCEINEDDCGPGPPLDSGPRCLHNGTCVDLVGGFRCTCPPGYTGLRCEADINECRSGACHAAHTRDCLQDPGGGFRCLCHAGFSGPRCQTVLSPCESQPCQHGGQCRPSPGPGGGLTFTCHCAQPFWGPRCERVARSCRELQCPVGVPCQQTPRGPRCACPPGLSGPSCRSFPGSPPGASNASCAAAPCLHGGSCRPAPLAPFFRCACAQGWTGPRCEAPAAAPEVSEEPRCPRAACQAKRGDQRCDRECNSPGCGWDGGDCSLSVGDPWRQCEALQCWRLFNNSRCDPACSSPACLYDNFDCHAGGRERTCNPVYEKYCADHFADGRCDQGCNTEECGWDGLDCASEVPALLARGVLVLTVLLPPEELLRSSADFLQRLSAILRTSLRFRLDAHGQAMVFPYHRPSPGSEPRARRELAPEVIGSVVMLEIDNRLCLQSPENDHCFPDAQSAADYLGALSAVERLDFPYPLRDVRGEPLEPPEPSVPLLPLLVAGAVLLLVILVLGVMVARRKREHSTLWFPEGFSLHKDVASGHKGRREPVGQDALGMKNMAKGESLMGEVATDWMDTECPEAKRLKVEEPGMGAEEAVDCRQWTQHHLVAADIRVAPAMALTPPQGDADADGMDVNVRGPDGFTPLMLASFCGGALEPMPTEEDEADDTSASIISDLICQGAQLGARTDRTGETALHLAARYARADAAKRLLDAGADTNAQDHSGRTPLHTAVTADAQGVFQILIRNRSTDLDARMADGSTALILAARLAVEGMVEELIASHADVNAVDELGKSALHWAAAVNNVEATLALLKNGANKDMQDSKEETPLFLAAREGSYEAAKLLLDHFANREITDHLDRLPRDVAQERLHQDIVRLLDQPSGPRSPPGPHGLGPLLCPPGAFLPGLKAAQSGSKKSRRPPGKAGLGPQGPRGRGKKLTLACPGPLADSSVTLSPVDSLDSPRPFGGPPASPGGFPLEGPYAAATATAVSLAQLGGPGRAGLGRQPPGGCVLSLGLLNPVAVPLDWARLPPPAPPGPSFLLPLAPGPQLLNPGTPVSPQERPPPYLAVPGHGEEYPAAGAHSSPPKARFLRVPSEHPYLTPSPESPEHWASPSPPSLSDWSESTPSPATATGAMATTTGALPAQPLPLSVPSSLAQAQTQLGPQPEVTPKRQVLA

SEQ ID NO: 8848 - DNA, 66 bp, Artificial Sequence
  derived and/or modified sequence
atgggagaccatctggacctgctcttaggcgtggtgctgatggccggaccagtgttcggcatatag

SEQ ID NO: 8849 - DNA, 6966 bp, Artificial Sequence
  derived and/or modified sequence
atgggtccaggggctcgcgggagaagaagaagaagaagaccaatgtcaccacctcctcctccaccccccgtgagggctctgcctttgctgttgctcctcgccggccccggcgctgcggccccaccgtgccttgacgggtcgccgtgcgccaacggtgggagatgtacccagctaccgagcagagaagctgcatgcttatgcccgcctggctgggtgggagagaggtgccagctggaggacccctgtcacagcggcccctgcgctggtaggggtgtgtgccagagttcagtggtggccggcaccgctagattctcttgccgatgccctagaggctttagggggcccgattgttccttacccgacccgtgtctctcctcaccctgcgctcacggtgcccgctgttctgtgggccctgacggtagattcctgtgtagctgtccccctgggtatcaagggagatcatgccggtcagacgttgatgagtgccgcgtgggagaaccgtgccggcatgggggtacctgtctcaatacacccggcagtttcaggtgccagtgccctgctgggtatacaggacctctgtgcgagaatccagctgttccttgcgctccatcgccttgtcgaaatggagggacctgtcgccaaagtggagacttgacctatgattgtgcctgcttgcccggctttgaaggccagaattgtgaggtgaacgtagacgactgtcccggccacaggtgcctaaacggcgggacatgcgtggacggcgtgaacacatacaactgtcagtgccccccagagtggaccggtcagttctgcaccgaagatgttgatgaatgccagctgcagccaaatgcatgtcataatggagggacttgctttaatactcttggtggtcattcctgtgtctgcgtaaatggttggaccggagagagttgctctcagaacatcgatgattgtgccacagcagtctgctttcatggagcaacctgtcacgatagagtggcctccttttactgtgcgtgtcccatggggaagacgggtctactgtgccatcttgatgacgcctgtgtgtctaatccatgccacgaggatgccatatgcgatacaaatcctgtgaatgggcgcgccatttgtacctgtcctcccggttttacgggtggtgcatgtgatcaggatgtcgacgagtgtagcattggcgcaaatccctgcgagcacctcgggcgctgcgtgaacacccagggctcattcctttgccaatgcggtagagggtacaccggtccacggtgcgagacagatgtgaatgaatgcctttccgggccgtgccgaaaccaagctacatgcctggacagaatagggcagttcacctgtatctgcatggctggttttacaggaacctattgtgaggtggatattgatgaatgccaatctagcccatgtgtgaatgggggagtgtgtaaagaccgcgttaatggattctcctgcacctgcccctctggcttctctgggtctacctgccaactggacgtggacgagtgcgcatctactccatgcagaaacggagcaaaatgtgtggatcagcctgatgggtacgaatgccggtgcgccgagggcttcgagggaacgctgtgcgaccgcaacgtggacgattgctctccagacccctgccaccatggtagatgcgttgacggcattgctagcttctcatgcgcctgtgcccctggatatactggaactcggtgcgaatcccaagtggatgaatgtcggtcgcagccctgtagacacggtggaaagtgcttagacctagtcgacaaatatctttgccgctgtccaagtggtaccacgggcgtgaattgcgaggtgaacatagacgactgcgcctctaatccctgcactttcggcgtttgcagggacggtataaaccgctacgactgcgtgtgccagcctgggttcaccggacccctttgcaacgtggagatcaatgaatgtgcttcatcgccatgtggtgaaggaggcagctgtgtggacggcgagaacggttttcgttgtctgtgtccccctgggagtctgcctcccttgtgcctccccccaagccatccctgcgcccacgaaccttgtagtcacggcatttgctatgatgctcctggcgggtttcggtgcgtgtgtgagcctggatggagcggtcctagatgcagccagtctcttgcaagggatgcctgtgaatctcagccctgccgggctggagggacatgttcttccgacggaatgggcttccactgcacgtgcccaccaggagtccaaggccggcagtgcgaactcttaagtccatgcacccccaatccttgtgaacacgggggaagatgtgagagtgcccctgggcagctaccagtatgctcttgtcctcagggctggcaaggccccagatgtcagcaggatgtggatgagtgtgcgggccccgccccctgtgggcctcacggtatatgcactaacctggccgggtcattctcatgtacttgccacggtggctacacaggtcccagctgcgaccaggatataaatgattgtgaccccaatccttgtctaaacggagggtcatgccaggacggtgttgggtcattcagctgttcctgcctgcctggattcgcaggccccagatgcgccagagacgtggacgagtgtttgagcaatccatgtggcccagggacctgtacggaccacgtggctagctttacctgcacctgtcctcccggttatggcggattccactgcgagcaggacctgccagactgctcccctagctcatgctttaatggtgggacctgcgtggacggggtaaatagcttcagttgtctatgtagacctggatacaccggtgcccattgtcagcatgaggccgatccttgcctgtcaagaccgtgcctgcacggcggggtctgtagcgctgcccaccccggtttccggtgcacctgtctggagagttttactggtccacagtgccagacgttggtcgactggtgttctaggcagccttgtcagaacggggggaggtgcgtgcagacaggggcgtattgtctgtgcccccccggctggagcggaagactgtgtgacatccgctcactgccttgtagggaggccgcagcccagattggcgtgcggttggaacaattgtgtcaagccggcggacaatgcgtggatgaggattcttcccactattgtgtgtgccccgaaggcaggacagggtcccattgtgagcaggaggtagatccttgtctggctcagccatgtcaacacgggggcacgtgcagggggtatatgggcggttatatgtgtgagtgtcttcccggctacaacggagacaattgtgaggacgatgtggatgagtgtgcctcccagccatgtcagcatggaggcagttgtatcgacctggtggcccggtatctgtgtagctgcccacccgggaccctgggtgtgctttgcgaaatcaatgaagatgactgtggacccggcccccctctcgactccggcccaagatgtctccacaatggcacctgtgtcgaccttgtcggtgggtttcgctgcacatgcccacctggctatacaggacttcgttgtgaggctgacatcaatgaatgccggagcggggcttgccatgcagcccacaccagggactgccttcaggacccaggaggaggctttcgttgcctgtgtcacgcaggcttcagtggacccaggtgtcagaccgtactaagcccatgcgaatcacaaccctgccagcacggtggccagtgtagaccatccccaggtcccggaggcgggttgacattcacctgccattgtgcccagcctttttggggcccccgctgtgaacgcgtggctaggtcgtgcagggaactgcagtgtcctgttggcgtaccatgccagcaaactccccgcggcccaaggtgtgcctgtccccctgggttatctgggccgtcatgtagaagctttcccggatcgcctccaggtgcgtctaatgcctcctgcgccgcagccccatgcctccacgggggctcgtgcaggcctgcaccactggcccctttttttagatgcgcctgcgcccagggttggacaggacctaggtgcgaagcccccgccgccgcaccagaggtgtcagaagagccacgatgcccccgggcagcttgtcaggctaagcgtggggatcagagatgtgatcgcgagtgcaactctccaggctgcggttgggatgggggcgactgctccctctcggtcggggacccgtggcgacagtgtgaagccctccaatgctggcggctcttcaataactccagatgcgaccccgcttgctcttcccctgcttgcttgtatgacaatttcgattgccacgccggcggcagggaaagaacatgtaatcctgtctatgaaaagtattgtgccgaccactttgctgacgggagatgtgaccagggttgcaatacagaggagtgcggctgggacgggctggattgcgccagtgaggtgcctgccttacttgcccggggggtgcttgtcttgacagtgctcctgcctcccgaagagctgctcaggtcttcggccgattttctccagaggctgtccgccatactccgcacatcactaagattccggctggacgctcacggccaagctatggtgtttccctaccatagaccctcccccggcagcgagccacgcgcaagaagggagctggccccagaagtcataggcagtgtggtgatgctggaaattgataatagactctgtttgcagagccccgaaaatgaccactgtttccccgatgcacagagcgccgcagactacctcggtgcactgtccgctgtcgaaaggttagactttccatatccactgagagatgtcagaggagaacccttggagcccccggagccgtccgtacccctgctccctttgctggtggccggtgctgttctgctactcgtcatcctggtgctgggcgtgatggtggccagacggaaacgcgagcatagtactttgtggtttccagagggttttagtctgcataaggatgtggcctccggtcacaaaggacggagagaacctgtgggtcaagacgcgttaggcatgaagaatatggccaagggcgagagtctgatgggggaggtggctaccgattggatggatacagaatgccccgaagcaaaacgcttgaaggtggaagagcccgggatgggtgcggaggaagccgttgattgccggcagtggacgcagcaccacctggtagctgctgatattcgcgttgcccccgcgatggctctgacacccccccagggggacgcagacgccgatggcatggacgtgaatgtgcgcgggcccgatggcttcacacctctgatgctcgcaagcttctgcggaggcgctctggagcccatgcccaccgaagaagatgaggctgatgatacctccgctagtatcatatcagatctaatctgtcaaggagcccagctcggtgcccgaaccgaccgcaccggggagactgctttgcatttggccgcgaggtacgcaagggcagacgcagccaaaagattactagacgctggggctgatacaaacgcccaggaccacagcgggcggactccattgcatactgccgttactgccgatgcgcagggtgtatttcagattctcattagaaatcgttcaaccgatctcgacgcgaggatggcagatggctcgaccgcacttattttagccgcccgactggcagtggaaggcatggtggaagaacttatcgcttcccacgccgacgttaatgccgtcgacgagctgggtaagtctgctctacattgggccgccgccgtcaacaacgtggaggctaccttggctctcctgaagaatggcgccaacaaagacatgcaggacagcaaggaggagacacccctgttcctggctgccagggaggggtcctacgaggcagccaagctgctcttagaccactttgctaatcgagagatcacagaccacctggacaggcttcccagggatgtggctcaagagcgccttcaccaggatattgttcgactgctcgatcaaccctcaggacctcggtcaccccccggacctcatggtctggggcctctgctgtgtcctccgggagctttccttcctggcctaaaggctgcacagagtggatcaaaaaagagccggcgcccccctggaaaggccgggctcggcccgcagggtcctagaggtagaggcaagaaactgaccctggcatgtccgggtcctcttgccgatagctctgtgaccctctcacctgtggactcactcgattcccccagaccatttggtggacctccagccagcccggggggttttccactggagggtccttacgctgcggcgacagctaccgccgtcagcctggcccagctagggggccctgggagagctggcctgggccgccagccgccagggggctgcgtactctcattgggactgctcaaccctgtggctgtgcctctcgattgggcccggcttcccccccctgcacctcctgggccttcctttctccttcctttggctccggggcctcagctgttaaacccaggaacacccgtttcccctcaggagcgaccacccccataccttgccgtgcccggtcacggcgaagagtatccagctgctggagcacatagctctcccccaaaagccagatttctccgggtgccaagtgaacacccttatctgactccatcacccgagtcacccgaacattgggcaagtccatcacccccatcgctcagcgattggagcgaaagcaccccatcaccagcaacagctaccggcgccatggctacgactactggggccctgcccgctcagcccctgcccttatctgtccctagttccttggcccaggcccaaactcagctgggaccacagccagaagtaacccctaaacgccaagttcttgcatag

SEQ ID NO: 8850 - DNA, 6966 bp, Artificial Sequence
  derived and/or modified sequence
atgggccctggggcccggggcagaagaagaagaagaagacccatgagccccccacctcctcctcctcctgtgcgggccctgcccctgctgctgctgctggccggccctggagctgctgccccaccctgcctggatggcagcccctgtgccaatggaggccgctgcacccagctgcccagccgggaggccgcctgcctgtgccccccaggctgggtgggggagcgctgccagctggaggacccctgccacagcggcccctgtgccggccggggcgtgtgccagagctctgtggtggccggcacagcccgcttcagctgccgctgcccccggggcttccggggccctgactgcagcctgcctgacccctgcctgagcagcccctgtgcccacggggcccgctgcagcgtgggcccagatggccgcttcctgtgcagctgccccccaggctaccagggccgcagctgccgcagtgatgtggatgaatgtcgggtgggggagccctgccgccacggcggcacctgcctgaacaccccaggcagcttccgctgccagtgcccagctggctacacaggccccctgtgtgaaaatcctgctgtgccctgtgcccccagcccctgcagaaatggaggcacctgccggcagagcggggacctgacctatgactgtgcctgcctgcccggctttgagggccagaactgtgaggtgaatgtggatgactgccccggccaccgctgcctgaatggaggcacctgtgtggatggagtgaacacctacaactgccagtgccccccagagtggacaggccagttctgcacagaagatgtggatgagtgccagctgcagcccaatgcctgccacaatggaggcacctgcttcaacaccctgggcggccacagctgtgtgtgtgtgaatggctggacaggagagagctgcagccagaacattgatgactgtgccacagctgtgtgcttccatggagccacctgccacgacagagtggccagcttctactgtgcctgccccatgggcaagacaggcctgctgtgccacctggatgatgcctgtgtgagcaacccctgccatgaagatgccatctgtgacaccaaccctgtgaatggccgggccatctgcacctgccccccaggcttcaccggcggggcctgtgaccaggatgtggatgagtgcagcattggagccaacccctgtgagcacctgggccgctgtgtgaacacccagggcagcttcctgtgccagtgtggccggggctacacaggcccccgctgtgaaacagatgtgaatgaatgtctgagcggcccctgcaggaaccaggccacctgcctggaccgcatcggccagttcacctgcatctgcatggccggcttcaccggcacctactgtgaggtggacattgatgagtgccagagcagcccctgtgtgaatggaggagtgtgcaaggacagagtgaatggcttcagctgcacctgccccagcggcttcagcggcagcacctgccagctggatgtggatgaatgtgccagcaccccctgcagaaatggagccaagtgtgtggaccagccagatggctatgagtgccgctgtgccgagggctttgagggcaccctgtgtgacagaaatgtggatgactgcagcccagacccctgccaccacggccgctgtgtggatggcatcgccagcttcagctgtgcctgtgcccctggctacacaggcacccgctgtgagagccaggtggatgaatgtcgcagccagccctgcagacatggaggcaagtgcctggacctggtggacaagtacctgtgccgctgccccagcggcaccactggagtgaactgtgaggtgaacattgatgactgtgccagcaacccctgcacctttggagtgtgcagagatggcatcaacagatatgactgtgtgtgccagcccggcttcaccggccccctgtgcaatgtggagatcaatgaatgtgccagcagcccctgtggggagggcggcagctgtgtggatggagaaaatggcttccgctgcctgtgccccccaggcagcctgccccccctgtgcctgccccccagccacccctgtgcccacgagccctgcagccacggcatctgctatgatgcccctgggggcttccgctgtgtgtgtgagcccggctggagcggcccccgctgcagccagagcctggccagagatgcctgtgagagccagccctgcagagctgggggcacctgcagcagtgatggcatgggcttccactgcacctgccccccaggagtgcagggccggcagtgtgagctgctgagcccctgcacccccaacccctgtgagcacggcggccgctgtgagagcgcccctggccagctgcctgtgtgcagctgcccccagggctggcagggcccccgctgccagcaggatgtggatgaatgtgccggccctgccccctgtggcccccacggcatctgcaccaacctggccggcagcttcagctgcacctgccacggcggctacacaggccccagctgtgaccaggacatcaatgactgtgaccccaacccctgcctgaatggaggcagctgccaggatggagtgggcagcttcagctgcagctgcctgcccggctttgctggcccccgctgtgccagagatgtggatgagtgcctgagcaacccctgtggccctggcacctgcacagaccacgtggccagcttcacctgcacctgccccccaggctacggcggcttccactgtgagcaggacctgcctgactgcagccccagcagctgcttcaatggaggcacctgtgtggatggagtgaacagcttcagctgcctgtgccggcccggctacacaggagcccactgccagcatgaagctgacccctgcctgagccggccctgcctgcatggaggagtgtgcagcgctgcccaccctggcttccgctgcacctgcctggagagcttcaccggcccccagtgccagaccctggtggactggtgcagccggcagccctgccagaatggaggccgctgtgtgcagacaggagcctactgcctgtgccccccaggctggagcggccgcctgtgtgacatccgcagcctgccctgccgggaggccgccgcccagattggagtgcggctggagcagctgtgccaggccggcggccagtgtgtggatgaggacagcagccactactgtgtgtgcccagagggccgcacaggcagccactgtgagcaggaggtggacccctgcctggcccagccctgccagcacggcggcacctgccggggctacatgggcggctacatgtgtgaatgtctgcccggctacaatggagacaactgtgaagatgatgtggatgaatgtgccagccagccctgccagcacggcggcagctgcatcgacctggtggcccgctacctgtgcagctgccccccaggcaccctgggcgtgctgtgtgagatcaatgaagatgactgtggccctggcccccccctggacagcggcccccgctgcctgcacaacggcacctgtgtggacctggtgggcggcttccgctgcacctgccccccaggctacacaggcctgcgctgtgaggccgacatcaatgaatgtagaagtggggcctgccacgccgcccacacccgggactgcctgcaggaccccggcggcggcttccgctgcctgtgccacgccggcttcagcggcccccgctgccagacagtgctgagcccctgtgagagccagccctgccagcacggcggccagtgccggcccagccctggccctgggggcggcctgaccttcacctgccactgtgcccagcccttctggggcccccgctgtgagcgggtggcccggagctgccgggagctgcagtgccctgtgggcgtgccctgccagcagaccccccggggcccccgctgtgcctgccccccaggcctgagcggccccagctgccgctccttccctggcagccccccaggggccagcaatgccagctgtgccgccgccccctgcctgcacggcggcagctgcaggcctgcccccctggcccccttcttccgctgtgcctgtgcccagggctggacaggcccccgctgtgaggccccagctgctgcccctgaggtgtctgaggagccccgctgcccccgggccgcctgccaggccaagagaggagaccagagatgtgaccgggagtgcaacagccctggctgcggctgggatggaggagactgcagcctgtctgtgggggacccctggaggcagtgtgaggccctgcagtgctggaggctcttcaacaacagccgctgtgaccctgcctgcagcagccctgcctgcctgtatgacaactttgactgccacgccggcggccgggagaggacctgcaaccctgtgtatgagaagtactgtgccgaccactttgctgatggccgctgtgaccagggctgcaacacagaggagtgtggctgggatggcctggactgtgccagcgaggtgcctgccctgctggcccggggcgtgctggtgctgactgtgctgctgcccccagaggagctgctgcggagcagcgctgacttcctgcagaggctgagcgccatcctgcggaccagcctgcgcttccggctggatgcccacggccaggccatggtgttcccctaccaccggcccagccctggcagcgagccccgggcccggcgggagctggcccctgaggtgattggctctgtggtgatgctggagattgacaaccggctgtgcctgcagagcccagaaaatgaccactgcttcccagatgcccagagcgctgctgactacctgggcgccctgtctgctgtggagcggctggacttcccctaccccctgagagatgtgcggggggagcccctggagcccccagagcccagcgtgcccctgctgcccctgctggtggccggggctgtgctgctgctggtgatcctggtgctgggcgtgatggtggcccggaggaagcgggagcacagcaccctgtggttccctgagggcttcagcctgcacaaggatgtggccagcggccacaagggcagaagagagcctgtgggccaggatgccctgggcatgaagaacatggccaagggggagagcctgatgggagaggtggccacagactggatggacacagaatgtcctgaggccaagaggctgaaggtggaggagcccggcatgggcgctgaggaggccgtggactgccggcagtggacccagcaccacctggtggccgctgacatccgggtggccccagccatggccctgaccccaccccagggagatgctgatgctgatggcatggatgtgaatgtgcggggcccagatggcttcacccccctgatgctggccagcttctgtggcggggccctggagcccatgcccacagaggaggatgaagcagatgacaccagcgccagcatcatcagtgacctgatctgccagggcgcccagctgggcgccaggacagacagaactggagaaacagccctgcacctggccgcccgctatgcccgggcagatgctgccaagaggctgctggatgctggagctgacaccaatgcccaggaccacagcggccgcacccccctgcacacagctgtgacagcagatgcccagggcgtcttccagatcctgatccggaacagaagcacagacctggatgccaggatggctgatggcagcacagccctgatcctggccgcccggctggccgtggagggcatggtggaggagctgattgccagccatgctgatgtgaatgctgtggatgagctgggcaagagcgccctgcactgggccgctgctgtgaacaacgtggaggccaccctggccctgctgaagaatggagccaacaaggacatgcaggacagcaaggaggagacccccctcttcctggccgcccgggagggcagctatgaagctgccaagctgctgctggaccactttgccaaccgggagatcacagaccacctggaccggctgcccagagatgtggcccaggagcggctgcaccaggacatcgtgcggctgctggaccagcccagcggccccaggagccccccaggcccccacggcctgggccccctgctgtgccccccaggggccttcctgcccggcctgaaggccgcccagagcggcagcaagaagagccggcggcccccaggcaaggccggcctgggcccccagggcccccggggccggggcaagaagctgaccctggcctgccccggccccctggccgacagctctgtgaccctgagccctgtggacagcctggacagcccccggccctttggaggccccccagccagccctgggggcttccccctggagggcccctatgctgctgccacagccacagctgtgtccctggcccagctgggcggccctggccgggccggcctgggccggcagcccccaggcggctgtgtgctgagcctgggcctgctgaaccctgtggccgtgcccctggactgggcccggctgcccccaccagcccctcctggccccagcttcctgctgcccctggcccctggcccccagctgctgaaccctggcacccctgtgagcccccaggagcggcccccaccctacctggccgtgcccggccatggagaggagtacccagctgctggggcccacagcagcccccccaaggcccgcttcctgcgggtgcccagcgagcacccctacctgacccccagccctgagagccctgagcactgggccagccccagcccccccagcctgagtgactggagcgagagcacccccagccctgccacagccactggagccatggccaccaccaccggggccctgcctgcccagcccctgcccctgtctgtgcccagcagcctggcccaggcccagacccagctgggcccccagcctgaggtgacccccaagaggcaggtgctggcctag

SEQ ID NO: 8851 - DNA, 6966 bp, Artificial Sequence
  derived and/or modified sequence
atgggccccggcgcccggggccggcggcggcggcggcggcccatgtcccccccacctccaccgccaccggtccgggccctgcccctgttgctgttactggccggccctggggctgccgctccaccatgccttgatggtagtccatgtgccaatggcggtaggtgcactcagctgccatccagggaggctgcatgcctctgtccccctggatgggtcggagagcggtgccagctggaggatccatgccactccgggccttgcgccggccgcggagtgtgtcaatccagtgtggtcgccggaaccgccagattctcctgtcggtgccctcgcgggtttcgcggccctgattgttcacttcccgatccgtgtctgtctagcccgtgcgctcatggagccagatgtagcgtcggacccgatgggaggtttttgtgctcttgtccaccaggctaccagggtcgaagctgccgatccgatgttgacgaatgcagggtgggggagccatgcagacacggagggacttgtttaaacacccctggcagctttcgatgtcagtgccctgcaggctacactggcccattgtgtgaaaatccagcggtaccatgtgcaccgagcccctgtcgtaatggtggtacatgtagacagtccggagatttaacctatgattgcgcatgcctgccaggattcgagggccaaaattgcgaggtcaacgtggacgactgtccagggcatcgctgcctcaacggggggacatgcgtggatggcgtgaacacatataattgtcagtgccctccagagtggactggacaattttgtacagaggacgtagacgagtgtcagttgcagcccaatgcttgccataatggcgggacttgtttcaacacactcggaggacattcctgcgtgtgtgttaacggatggactggtgagtcttgttcccagaacatcgacgactgcgcaaccgctgtgtgttttcatggcgctacatgtcacgatcgcgtggcatcattttattgtgcttgtccgatgggaaaaactggactgctatgccatctggatgacgcctgcgtcagtaacccatgccatgaggacgccatatgcgacaccaaccccgtcaacggtcgggccatttgcacgtgtccccccggatttactggtggagcatgcgatcaggacgtggacgagtgttccattggcgctaatccgtgcgaacaccttggcaggtgtgtgaacacccaggggagttttctgtgtcaatgcggccgcggttacaccggtccgcgctgcgaaaccgatgtcaacgagtgtctgagcggtccctgtcggaaccaggctacctgtcttgaccgaataggtcagtttacctgcatttgcatggccggctttaccggaacatattgcgaggtggacatagatgagtgtcaatcttctccttgtgttaacgggggcgtttgcaaggatcgggttaacgggttcagctgcacatgcccctccggatttagtggatcgacgtgtcaactggatgttgacgaatgtgcctccacgccctgccgtaacggcgctaaatgcgtggaccagcctgacggttatgaatgcagatgtgccgaggggtttgagggcacactgtgtgacaggaacgtagacgactgcagtcctgacccatgtcaccacgggagatgcgtcgacggcattgcaagcttctcatgtgcatgcgcaccaggatacacgggaacccgttgcgagagtcaagtcgatgaatgccgcagccagccttgtaggcatggtggcaagtgcttggacctggtggacaaatacttatgcagatgcccttcaggcacaaccggtgtgaattgcgaagtgaacatcgacgactgcgcttccaacccctgcacctttggtgtttgcagggatgggatcaatagatatgattgcgtctgtcagccaggcttcacaggaccactgtgcaatgtagagattaacgaatgcgcctcctccccatgcggcgaaggggggtcatgcgtcgacggtgagaatggattccggtgtctttgccccccgggctccctcccccccctgtgccttccccctagccatccttgcgctcacgagccctgttctcacggaatatgctacgatgcacctggcggatttcgctgtgtttgtgagcctggttggtccggtcctaggtgctctcagtctctggccagagatgcgtgcgagtcccagccctgcagagctggaggcacatgctctagcgacggaatgggcttccactgcacctgtcctcccggcgtccaaggtaggcagtgtgagctgcttagtccctgtacccctaacccctgcgagcacggaggcagatgtgaatccgcccctggacagttaccagtttgttcatgcccacaggggtggcaaggcccccgatgtcaacaagacgtagacgagtgtgccggacctgccccctgcggaccccatgggatatgcaccaacctggccgggtccttcagctgtacgtgtcacggtgggtacacagggcccagttgtgatcaggatataaatgactgtgacccaaacccttgtctcaacggggggtcatgccaggacggggtgggctcattttcatgcagctgtctgcccggttttgccggaccccggtgtgctagagacgttgatgagtgtctgagcaatccttgcgggcccggcacatgcacagatcacgtggcctcctttacatgcacatgccccccaggctatgggggattccattgtgaacaggaccttccggactgttctcctagttcttgcttcaatgggggaacttgcgtggacggggtgaacagcttctcctgcctgtgtcgaccagggtacactggtgcccactgtcagcacgaagctgatccctgcctgtcaagaccgtgtctgcatggaggtgtgtgctccgccgcacatccagggttccgatgcacttgtctggagtcatttacagggcctcagtgtcaaactctggtggattggtgctcaagacagccctgtcagaacggcggcagatgcgttcagaccggtgcctattgcttgtgcccaccaggatggagcggcaggctctgcgatataagatccctcccttgcagggaggcagccgcccagatcggcgtgcgcctcgagcagctttgccaagcaggggggcagtgcgtggatgaggactcttctcattactgcgtctgccctgaaggacggacaggcagccactgcgagcaggaggtggatccctgtctggctcagccatgccagcatggcgggacctgtagagggtatatgggggggtacatgtgcgagtgcctgcccgggtataacggagataactgtgaggacgacgtggacgagtgcgcgtctcagccatgccaacatggaggatcctgcatcgacctcgtggcacgctacctgtgctcttgtcctccagggacattaggagtgttatgtgaaatcaacgaagatgattgcggtccaggcccaccactggactcaggtcccagatgcttacataatggcacctgtgttgatcttgtcggaggattcagatgcacgtgtccacctggttacaccggactcagatgtgaggctgatattaatgaatgccgctccggcgcctgccacgccgcacatacccgcgactgtctgcaggaccccggcggaggctttcggtgcctctgtcacgccggattctccggcccacggtgccagaccgtcctctctccatgtgagagccagccttgtcagcacgggggccagtgtcggccgagcccagggccaggaggcggactaacttttacatgtcattgcgcacagccattctggggaccccgctgcgagcgagtcgctcgctcatgtagggaattacaatgccccgtgggagtcccgtgtcagcagaccccacgtggtcccagatgtgcctgccctccaggtctatctgggccttcttgtaggtcatttcccggctcccccccaggagcgtcaaatgcttcttgtgcagccgccccctgtctgcacggaggatcctgtagacctgcgcccctcgcaccattcttccgctgtgcgtgcgctcaaggttggaccgggcctcggtgcgaagcgcctgccgcggctccggaagtaagcgaagagccacgctgtcctcgcgcagcatgtcaggcaaaacgaggagaccaaagatgcgaccgcgagtgcaattcacccggctgtggttgggatggaggcgactgcagtctgagcgtaggggatccatggaggcagtgcgaggctcttcagtgttggcgcctgtttaacaattcccggtgtgaccctgcctgtagctcccccgcctgtctctatgacaatttcgattgtcacgccggtggccgggagcgaacctgtaaccccgtgtatgagaagtattgtgccgatcacttcgccgacggcaggtgtgatcagggctgtaatacagaggagtgtggctgggacggcctcgattgtgcttctgaggtccccgccttgctcgcaaggggtgtccttgtgcttacagtcttgttaccaccagaagagctgcttcggtctagtgccgacttcctccagcggctgtccgccattctgaggaccagcctgcgatttcgcctagacgcccacggccaggcaatggtttttccatatcaccggccatccccgggatccgagcctcgagcaagaagggagctggcccccgaggtgatcggttctgtcgtgatgctagagatcgacaacagactctgtctgcagtcaccagagaacgatcactgctttcccgacgcacagagcgccgccgactacctgggtgctttgagcgccgtggaaagactggatttcccctatccactgcgagatgtgcgcggcgaacctctagagccacccgaaccgtccgttcccctccttcctttgctggtggccggagcggtcctgcttctggtgatactggtgttaggggtcatggtggcccggcggaaacgcgagcactccacattatggttcccagaggggtttagcttacataaagatgtggcatctgggcacaaagggagaagggagcccgtcggtcaggacgccttgggaatgaaaaatatggcaaagggcgaatcattgatgggagaggtggcaaccgattggatggatacggagtgccccgaggctaaaagactcaaggtcgaagaaccaggaatgggagccgaagaggcggttgactgcaggcagtggacgcaacatcatctcgtcgctgcggatatccgtgtggctccagctatggctctgacccccccacagggcgatgccgatgccgatggtatggatgtgaacgtccggggtcccgatgggtttaccccacttatgctggctagcttttgtgggggagctctggaaccaatgcccaccgaggaggatgaggccgatgacacatctgcgagcatcatttccgacctcatttgccagggggcacaactcggtgcaagaactgaccgcactggtgagaccgctctacacctcgccgcgcgatacgcaagagctgacgcggcaaaaagactgttagacgccggggcggatacgaacgcccaggaccacagcgggagaacccccctgcacaccgccgtcactgcagatgcccagggtgtgtttcagatcttaatcagaaatcgaagcacagacttggatgctagaatggctgacggaagcacagcactgatactggccgccaggctagccgtagaggggatggtggaggagctaattgcatcccacgcagatgtcaacgccgtggatgagctcggtaagtcggccctccactgggcggcagctgttaacaacgttgaagccaccctcgccctgcttaaaaatggcgccaacaaagacatgcaggatagtaaggaggaaacacctcttttcttagccgccagggagggcagctatgaggcagccaaactgctcctggatcatttcgctaaccgcgagatcaccgaccatctggatcgtcttcctcgagatgtggcccaagagcgactccatcaggacatcgtgagactcttagatcagcccagcggaccacggtcaccgccaggaccccacggactggggcctctgttgtgccctcctggcgccttcctgcccggcttaaaagctgctcagagtggatctaagaagagtaggcgaccacctggtaaggccggcttggggccgcaagggcctaggggtcgcggcaagaagttgacactggcatgtcctggccccctcgcagattcttcagttactctgagccctgtggactctctggactctccacgaccttttggcgggcctcccgctagtccaggtggttttccattagagggaccatacgctgccgctacggctaccgcggtgtccctggctcagcttggggggcccggcagagccggattaggcaggcagccacctgggggctgtgttctgagtctggggcttctcaaccccgttgctgtgccactcgattgggcacgtctgccgcccccggctccaccaggcccatcattcttgcttcccctggctcctgggccccagttgctgaatcccggcacacccgtgtctccccaggagcgccccccgccatacctggcagtcccgggtcacggggaagaatatcccgccgcaggagcgcatagctcgccgccgaaagctcggtttttacgggtaccctctgagcacccatatctcaccccgtctcccgaatctcccgagcactgggcttcccctagccctccaagtttgagcgactggtcagaaagtacaccatctcccgccacagccaccggagccatggcaacgactacgggcgctttgcctgcccagccattgcccctgtccgtgccgagttccctcgcacaggcgcagacccagctggggcctcagcccgaagttactccaaaaagacaggtgttggcctag

SEQ ID NO: 8852 - DNA, 8070 bp, Artificial Sequence
  derived and/or modified sequence
gcggcgcggaggctggcccgggacgcgcccggagcccagggaaggagggaggaggggagggtcgcggccggccgccatggggccgggggcccgtggccgccgccgccgccgtcgcccgatgtcgccgccaccgccaccgccacccgtgcgggcgctgcccctgctgctgctgctagcggggccgggggctgcagcccccccttgcctggacggaagcccgtgtgcaaatggaggtcgttgcacccagctgccctcccgggaggctgcctgcctgtgcccgcctggctgggtgggtgagcggtgtcagctggaggacccctgtcactcaggcccctgtgctggccgtggtgtctgccagagttcagtggtggctggcaccgcccgattctcatgccggtgcccccgtggcttccgaggccctgactgctccctgccagatccctgcctcagcagcccttgtgcccacggtgcccgctgctcagtggggcccgatggacgcttcctctgctcctgcccacctggctaccagggccgcagctgccgaagcgacgtggatgagtgccgggtgggtgagccctgccgccatggtggcacctgcctcaacacacctggctccttccgctgccagtgtccagctggctacacagggccactatgtgagaaccccgcggtgccctgtgcaccctcaccatgccgtaacgggggcacctgcaggcagagtggcgacctcacttacgactgtgcctgtcttcctgggtttgagggtcagaattgtgaagtgaacgtggacgactgtccaggacaccgatgtctcaatggggggacatgcgtggatggcgtcaacacctataactgccagtgccctcctgagtggacaggccagttctgcacggaggacgtggatgagtgtcagctgcagcccaacgcctgccacaatgggggtacctgcttcaacacgctgggtggccacagctgcgtgtgtgtcaatggctggacaggcgagagctgcagtcagaatatcgatgactgtgccacagccgtgtgcttccatggggccacctgccatgaccgcgtggcttctttctactgtgcctgccccatgggcaagactggcctcctgtgtcacctggatgacgcctgtgtcagcaacccctgccacgaggatgctatctgtgacacaaatccggtgaacggccgggccatttgcacctgtcctcccggcttcacgggtggggcatgtgaccaggatgtggacgagtgctctatcggcgccaacccctgcgagcacttgggcaggtgcgtgaacacgcagggctccttcctgtgccagtgcggtcgtggctacactggacctcgctgtgagaccgatgtcaacgagtgtctgtcggggccctgccgaaaccaggccacgtgcctcgaccgcataggccagttcacctgtatctgtatggcaggcttcacaggaacctattgcgaggtggacattgacgagtgtcagagtagcccctgtgtcaacggtggggtctgcaaggaccgagtcaatggcttcagctgcacctgcccctcgggcttcagcggctccacgtgtcagctggacgtggacgaatgcgccagcacgccctgcaggaatggcgccaaatgcgtggaccagcccgatggctacgagtgccgctgtgccgagggctttgagggcacgctgtgtgatcgcaacgtggacgactgctcccctgacccatgccaccatggtcgctgcgtggatggcatcgccagcttctcatgtgcctgtgctcctggctacacgggcacacgctgcgagagccaggtggacgaatgccgcagccagccctgccgccatggcggcaaatgcctagacctggtggacaagtacctctgccgctgcccttctgggaccacaggtgtgaactgcgaagtgaacattgacgactgtgccagcaacccctgcacctttggagtctgccgtgatggcatcaaccgctacgactgtgtctgccaacctggcttcacagggcccctttgtaacgtggagatcaatgagtgtgcttccagcccatgcggcgagggaggttcctgtgtggatggggaaaatggcttccgctgcctctgcccgcctggctccttgcccccactctgcctccccccgagccatccctgtgcccatgagccctgcagtcacggcatctgctatgatgcacctggcgggttccgctgtgtgtgtgagcctggctggagtggcccccgctgcagccagagcctggcccgagacgcctgtgagtcccagccgtgcagggccggtgggacatgcagcagcgatggaatgggtttccactgcacctgcccgcctggtgtccagggacgtcagtgtgaactcctctccccctgcaccccgaacccctgtgagcatgggggccgctgcgagtctgcccctggccagctgcctgtctgctcctgcccccagggctggcaaggcccacgatgccagcaggatgtggacgagtgtgctggccccgcaccctgtggccctcatggtatctgcaccaacctggcagggagtttcagctgcacctgccatggagggtacactggcccttcctgcgatcaggacatcaatgactgtgaccccaacccatgcctgaacggtggctcgtgccaagacggcgtgggctccttttcctgctcctgcctccctggtttcgccggcccacgatgcgcccgcgatgtggatgagtgcctgagcaacccctgcggcccgggcacctgtaccgaccacgtggcctccttcacctgcacctgcccgccaggctacggaggcttccactgcgaacaggacctgcccgactgcagccccagctcctgcttcaatggcgggacctgtgtggacggcgtgaactcgttcagctgcctgtgccgtcccggctacacaggagcccactgccaacatgaggcagacccctgcctctcgcggccctgcctacacgggggcgtctgcagcgccgcccaccctggcttccgctgcacctgcctcgagagcttcacgggcccgcagtgccagacgctggtggattggtgcagccgccagccttgtcaaaacgggggtcgctgcgtccagactggggcctattgcctttgtccccctggatggagcggacgcctctgtgacatccgaagcttgccctgcagggaggccgcagcccagatcggggtgcggctggagcagctgtgtcaggcgggtgggcagtgtgtggatgaagacagctcccactactgcgtgtgcccagagggccgtactggtagccactgtgagcaggaggtggacccctgcttggcccagccctgccagcatggggggacctgccgtggctatatggggggctacatgtgtgagtgtcttcctggctacaatggtgataactgtgaggacgacgtggacgagtgtgcctcccagccctgccagcacgggggttcatgcattgacctcgtggcccgctatctctgctcctgtcccccaggaacgctgggggtgctctgcgagattaatgaggatgactgcggcccaggcccaccgctggactcagggccccggtgcctacacaatggcacctgcgtggacctggtgggtggtttccgctgcacctgtcccccaggatacactggtttgcgctgcgaggcagacatcaatgagtgtcgctcaggtgcctgccacgcggcacacacccgggactgcctgcaggacccaggcggaggtttccgttgcctttgtcatgctggcttctcaggtcctcgctgtcagactgtcctgtctccctgcgagtcccagccatgccagcatggaggccagtgccgtcctagcccgggtcctgggggtgggctgaccttcacctgtcactgtgcccagccgttctggggtccgcgttgcgagcgggtggcgcgctcctgccgggagctgcagtgcccggtgggcgtcccatgccagcagacgccccgcgggccgcgctgcgcctgccccccagggttgtcgggaccctcctgccgcagcttcccggggtcgccgccgggggccagcaacgccagctgcgcggccgccccctgtctccacgggggctcctgccgccccgcgccgctcgcgcccttcttccgctgcgcttgcgcgcagggctggaccgggccgcgctgcgaggcgcccgccgcggcacccgaggtctcggaggagccgcggtgcccgcgcgccgcctgccaggccaagcgcggggaccagcgctgcgaccgcgagtgcaacagcccaggctgcggctgggacggcggcgactgctcgctgagcgtgggcgacccctggcggcaatgcgaggcgctgcagtgctggcgcctcttcaacaacagccgctgcgaccccgcctgcagctcgcccgcctgcctctacgacaacttcgactgccacgccggtggccgcgagcgcacttgcaacccggtgtacgagaagtactgcgccgaccactttgccgacggccgctgcgaccagggctgcaacacggaggagtgcggctgggatgggctggattgtgccagcgaggtgccggccctgctggcccgcggcgtgctggtgctcacagtgctgctgccgccagaggagctactgcgttccagcgccgactttctgcagcggctcagcgccatcctgcgcacctcgctgcgcttccgcctggacgcgcacggccaggccatggtcttcccttaccaccggcctagtcctggctccgaaccccgggcccgtcgggagctggcccccgaggtgatcggctcggtagtaatgctggagattgacaaccggctctgcctgcagtcgcctgagaatgatcactgcttccccgatgcccagagcgccgctgactacctgggagcgttgtcagcggtggagcgcctggacttcccgtacccactgcgggacgtgcggggggagccgctggagcctccagaacccagcgtcccgctgctgccactgctagtggcgggcgctgtcttgctgctggtcattctcgtcctgggtgtcatggtggcccggcgcaagcgcgagcacagcaccctctggttccctgagggcttctcactgcacaaggacgtggcctctggtcacaagggccggcgggaacccgtgggccaggacgcgctgggcatgaagaacatggccaagggtgagagcctgatgggggaggtggccacagactggatggacacagagtgcccagaggccaagcggctaaaggtagaggagccaggcatgggggctgaggaggctgtggattgccgtcagtggactcaacaccatctggttgctgctgacatccgcgtggcaccagccatggcactgacaccaccacagggcgacgcagatgctgatggcatggatgtcaatgtgcgtggcccagatggcttcaccccgctaatgctggcttccttctgtgggggggctctggagccaatgccaactgaagaggatgaggcagatgacacatcagctagcatcatctccgacctgatctgccagggggctcagcttggggcacggactgaccgtactggcgagactgctttgcacctggctgcccgttatgcccgtgctgatgcagccaagcggctgctggatgctggggcagacaccaatgcccaggaccactcaggccgcactcccctgcacacagctgtcacagccgatgcccagggtgtcttccagattctcatccgaaaccgctctacagacttggatgcccgcatggcagatggctcaacggcactgatcctggcggcccgcctggcagtagagggcatggtggaagagctcatcgccagccatgctgatgtcaatgctgtggatgagcttgggaaatcagccttacactgggctgcggctgtgaacaacgtggaagccactttggccctgctcaaaaatggagccaataaggacatgcaggatagcaaggaggagacccccctattcctggccgcccgcgagggcagctatgaggctgccaagctgctgttggaccactttgccaaccgtgagatcaccgaccacctggacaggctgccgcgggacgtagcccaggagagactgcaccaggacatcgtgcgcttgctggatcaacccagtgggccccgcagcccccccggtccccacggcctggggcctctgctctgtcctccaggggccttcctccctggcctcaaagcggcacagtcggggtccaagaagagcaggaggccccccgggaaggcggggctggggccgcaggggccccgggggcggggcaagaagctgacgctggcctgcccgggccccctggctgacagctcggtcacgctgtcgcccgtggactcgctggactccccgcggcctttcggtgggccccctgcttcccctggtggcttcccccttgaggggccctatgcagctgccactgccactgcagtgtctctggcacagcttggtggcccaggccgggcgggtctagggcgccagccccctggaggatgtgtactcagcctgggcctgctgaaccctgtggctgtgcccctcgattgggcccggctgcccccacctgcccctccaggcccctcgttcctgctgccactggcgccgggaccccagctgctcaacccagggacccccgtctccccgcaggagcggcccccgccttacctggcagtcccaggacatggcgaggagtacccggcggctggggcacacagcagccccccaaaggcccgcttcctgcgggttcccagtgagcacccttacctgaccccatcccccgaatcccctgagcactgggccagcccctcacctccctccctctcagactggtccgaatccacgcctagcccagccactgccactggggccatggccaccaccactggggcactgcctgcccagccacttcccttgtctgttcccagctcccttgctcaggcccagacccagctggggccccagccggaagttacccccaagaggcaagtgttggcctgagacgctcgtcagttcttagatcttgggggcctaaagagacccccgtcctgcctcctttctttctctgtctcttccttccttttagtctttttcatcctcttctctttccaccaaccctcctgcatccttgccttgcagcgtgaccgagataggtcatcagcccagggcttcagtcttcctttatttataatgggtgggggctaccacccaccctctcagtcttgtgaagagtctgggacctccttcttccccacttctctcttccctcattcctttctctctccttctggcctctcatttccttacactctgacatgaatgaattattattatttttatttttctttttttttttacattttgtatagaaacaaattcatttaaacaaacttattattattattttttacaaaatatatatatggagatgctccctccccctgtgaaccccccagtgcccccgtggggctgagtctgtgggcccattcggccaagctggattctgtgtacctagtacacaggcatgactgggatcccgtgtaccgagtacacgacccaggtatgtaccaagtaggcacccttgggcgcacccactggggccaggggtcgggggagtgttgggagcctcctccccaccccacctccctcacttcactgcattccagatgggacatgttccatagccttgctggggaagggcccactgccaactccctctgccccagccccacccttggccatctccctttgggaactagggggctgctggtgggaaatgggagccagggcagatgtatgcattcctttgtgtccctgtaaatgtgggactacaagaagaggagctgcctgagtggtactttctcttcctggtaatcctctggcccagcctcatggcagaatagaggtatttttaggctatttttgtaatatggcttctggtcaaaatccctgtgtagctgaattcccaagccctgcattgtacagccccccactcccctcaccacctaataaaggaatagttaacactc

SEQ ID NO: 8853 - DNA, 6966 bp, Artificial Sequence
  derived and/or modified sequence
atgggcccaggcgcacgcggtagacgacgcagacggagacccatgagccctccacctccgccaccccctgtgagggccttgcccctccttctgctgctggctggcccaggcgctgccgcacctccatgcctggacggctctccctgtgccaacggcggtagatgcacccagctgccctcacgcgaggccgcatgcctctgcccacctggctgggtcggggaacggtgtcagctggaggacccatgtcacagcgggccatgtgccggaaggggtgtgtgtcagagctccgtggtcgctggtacagcaaggttctcctgtcgctgcccaaggggcttcaggggccctgactgtagcctgcctgacccatgtctgtcatccccatgcgcccatggcgcacgttgtagcgttggtccagatgggaggttcctgtgctcctgcccccctgggtatcagggaaggtcatgtcgatccgacgtggacgaatgccgggtgggcgagccctgcaggcacggaggcacctgtctgaacaccccaggatccttcaggtgccagtgcccagcaggctacaccggcccactatgtgagaacccagctgtcccctgcgctccttccccttgtcgcaatggagggacctgtcggcagtctggggacttgacatacgattgcgcctgccttcctggatttgagggtcaaaattgtgaggtgaacgtagatgactgccctgggcaccgatgtctgaacgggggaacatgtgtggacggcgtgaacacatacaattgccaatgcccccctgagtggacagggcagttctgcacggaggacgtggacgaatgtcagctccagcccaacgcatgtcataatggcggtacctgtttcaataccctgggcggacactcctgtgtatgcgtgaacgggtggacaggagagtcctgtagtcagaatatcgatgactgtgcaactgcagtgtgctttcatggagctacctgtcatgatcgagtcgcatctttctactgcgcttgtcctatgggcaagacagggttgctgtgtcatctggacgatgcttgtgttagcaatccatgtcacgaggatgcgatttgtgacaccaatcccgtgaacggccgtgcaatctgtacttgcccacccggttttacgggcggagcatgtgaccaggatgtagatgaatgcagcatcggcgctaatccctgcgagcatctcggccgatgcgtgaatacccagggaagcttcctttgtcaatgtgggcgaggctacaccgggcctcgctgtgagacagacgtgaacgaatgtctctccggcccttgtcgaaaccaggccacttgtctggataggatcggtcagtttacatgtatctgcatggctgggtttactggcacctactgtgaggtggacattgatgagtgccagtccagtccttgcgtgaatggcggtgtgtgcaaggacagggttaacgggtttagctgtacctgtcccagcgggttttctggttccacctgccagctagatgtggatgagtgtgcctcaacaccctgtagaaatggcgcaaaatgcgtcgatcagcctgatggctacgagtgccgttgtgcagaaggctttgagggtacactctgtgaccgcaatgtcgacgactgttccccggatccctgccaccatggacggtgcgtagacggaattgccagtttcagctgtgcctgtgccccaggttatactgggaccagatgcgagtcacaggtggacgagtgtcggagccagccatgccgtcacggtggtaaatgtctggacttggttgataagtacttgtgccgctgtccatccgggaccaccggggtgaactgtgaggtgaacatcgacgactgtgccagcaatccatgcacctttggagtgtgcagagatggaatcaaccgctatgattgcgtctgtcagcctgggtttactggtcctctatgtaatgtagagatcaatgagtgcgcatcctcgccttgcggcgagggaggatcatgtgttgatggcgagaatgggtttagatgtctgtgcccccctggctccctgcctcctctttgccttcccccatctcatccctgtgcccatgagccttgcagccacggcatttgctacgacgccccagggggatttaggtgcgtatgcgagccagggtggagcggccctcgctgctcccagtcactggctcgtgacgcttgcgaatcacagccatgccgagctggagggacttgctccagcgacggaatgggattccattgcacatgcccaccgggagtccaaggtcgacagtgtgagctcctgtcaccttgtactccaaacccgtgtgaacatggcggacgatgcgagtccgcgcctggacagctaccagtgtgtagctgtccccaggggtggcagggcccaaggtgtcagcaagacgtggatgagtgtgccggacccgctccttgtgggccacatggaatatgtaccaacctggctggcagctttagctgcacttgtcatggcggatacacaggaccgtcttgtgaccaggacatcaatgattgcgatcccaacccttgtctgaatggaggcagctgccaggacggtgtgggatcttttagctgcagctgccttccgggatttgccggtccgcgttgtgccagggatgttgacgaatgcttatctaacccttgcggacccggaacctgtacagatcacgtcgctagtttcacctgtacttgcccgcctggatatggcggattccattgtgagcaggacctgcctgattgcagtccctcctcctgtttcaatggaggaacctgtgtggatggggtgaatagcttctcttgtctgtgcaggcccggttatacaggcgctcattgccagcatgaggccgacccttgcttatcacggccatgtcttcatgggggtgtgtgcagcgccgctcaccccggatttcggtgcacatgtctggagtcattcaccggccctcagtgccagaccctcgtggattggtgctcaaggcaaccgtgccagaatggtggtaggtgcgtgcaaaccggggcttactgtctgtgccctcccggttggtctgggaggttatgcgatattcgctctctgccttgtagagaagccgctgcacaaataggggtccggctcgagcaattgtgccaggccggaggccagtgtgtcgatgaggatagctcccattactgcgtgtgcccagagggacgtactggttcccactgtgaacaggaggtggatccctgtctggcccagccctgtcagcatggcggaacttgccgcggttatatgggtgggtatatgtgcgagtgcctgcccggatacaacggggacaactgtgaggatgatgttgacgaatgcgcttctcaaccctgtcagcatggtgggtcttgcatcgaccttgtggcacgctatctctgttcatgtcctcctggaaccttgggcgtcctgtgtgagattaatgaagatgattgcggacctgggccaccgctggatagtggccctaggtgtttgcataatggaacctgcgtggacctcgtcggtggctttcgctgtacctgcccacccggatacacagggctacgctgcgaagcagatataaatgagtgcaggagcggcgcatgtcacgcggcacatacccgcgattgcttgcaggatcccggtgggggattccggtgtctctgccatgccggatttagtggaccgcgttgccagaccgttctctccccttgcgagagtcagccctgtcaacatggcggtcagtgtagacctagccctggcccaggcggaggcctgacattcacttgccactgtgcgcagccattttgggggcctcggtgcgagagagtggccagatcttgtcgggaacttcaatgccccgtcggagtgccttgtcaacaaaccccaagaggccctaggtgcgcttgtccccctggcttatccggacccagctgtcgcagcttccctggaagcccgcctggggcatccaacgccagttgcgccgcagccccttgcttgcacggaggttcatgccgcccagcacctctggcacccttcttcagatgtgcctgcgcccagggatggactggacctagatgcgaggcccctgctgccgcaccagaagtcagcgaagagccgagatgtcccagggccgcttgccaggcgaaacggggtgaccagaggtgtgaccgagagtgcaatagccccggatgtggctgggatggtggggattgtagccttagcgtgggagatccctggcgtcaatgtgaggcccttcagtgctggcgcctctttaacaacagtcgttgcgacccagcatgcagttcacctgcctgcctttacgataattttgattgccatgcaggtggccgtgaacggacatgcaatcccgtgtacgagaaatattgtgcagatcacttcgcagacggacgatgtgatcagggatgcaacactgaagagtgcggctgggacggcttggattgtgcctccgaggtgccagccctgctggcgaggggcgtgttggttcttacagtactcctgccacccgaggagctcctgcgttccagtgcggatttcctgcagcggctgagcgcaatcctcagaaccagcctccgttttagacttgacgcccatggtcaggctatggtttttccctatcatcggccaagccccggttctgaaccaagggccagaagagaactggcccctgaagtgataggcagcgtggtgatgctcgagattgataataggttatgtctacagtcaccggagaatgatcactgtttcccggatgctcagagcgccgcagactacctcggcgctctgtcagcggtcgagagactggactttccttatccattacgcgatgtgaggggtgagcctctcgaaccgcctgagccatcagttccactgcttcctttgttggttgccggagctgtgcttctgttagtgatactggtgctcggggtgatggtcgctagaagaaagagagaacatagcacattgtggttcccggaagggttctctttgcacaaggatgtcgcctccggacataaaggccgaagggaaccagtgggccaggatgccctgggaatgaagaatatggctaagggggagtcactcatgggtgaggtagctacggactggatggacaccgagtgtcccgaggcaaagcgcctcaaagtggaagaaccaggcatgggagctgaagaagctgtggattgccgccagtggacccagcaccacttggtggccgctgacattagggttgcgccagccatggccctaacccccccacagggcgatgctgacgccgacggtatggatgtaaacgtccggggtccagacggtttcacacctctgatgttagcttcattttgcggaggagccctggaacctatgcccactgaagaggacgaagctgacgacacttctgccagtataatctcagacctcatttgccagggagcccaactcggcgctagaaccgaccgcacaggagagactgccctgcatctggccgctcggtatgcaagggcggatgcggcaaagaggctgctggacgcaggagcggatactaacgcccaggatcactctggccgaaccccgctacatactgccgttacggcggacgcccagggagtctttcagatcttgattaggaatagatcgaccgatctggacgccaggatggccgatggttccacagcattaatcctggccgctcgtctggccgttgaaggaatggttgaggaactgatagccagccatgcagacgtcaacgctgtcgacgagctgggcaagagcgctctccactgggcagctgctgtgaacaatgtggaagccaccctggcccttctcaaaaacggagcgaataaagacatgcaagattctaaggaagaaactcctctttttttggccgcacgagaggggtcctacgaagccgctaagttattactagatcattttgcgaaccgagaaatcacagaccacctggatagactccctcgcgacgtggcccaggaaagactccaccaagatatcgtccgcctgttggatcaaccaagtgggcctcgtagccctccagggcctcatgggctgggaccactgctctgtccaccaggggctttcctccccggattgaaggccgcacagtctggttcaaaaaagagtaggcgtcctccagggaaagcaggactcggcccacaaggacccagaggacgcggaaagaagctgaccctggcgtgccccggtcccctcgctgactctagcgttactttgagcccagttgattccctggatagccctcgtccttttgggggacctcccgcatctcccggagggttccccttagaaggaccatacgcagccgcaaccgcaactgcagtttctctggcccagctgggagggcctggcagggctggactcggcagacagccacccggaggatgcgtacttagcctggggttgctcaaccccgtcgccgtgccactggattgggctcgactccctcccccagccccacctgggcctagctttctgctgcccctcgccccaggcccacaacttttgaatcccggtacaccggtttctccacaggagaggcctcctccctatttggccgtccccggtcatggagaggagtacccagccgcaggggcacattcaagccctcctaaggcaaggttcctgcgcgtgccgagcgaacacccctacctgacacctagccctgaatctcctgaacattgggcgtcaccctctccaccaagtctgtccgactggtcggagagtacaccatccccagcaactgccactggtgcgatggccaccaccactggggctctcccggctcaacctcttccccttagtgtgccatctagtttggcccaggctcagactcaactcggcccacagccagaagtgacaccgaagcggcaggtgctggcatag

SEQ ID NO: 8854 - DNA, 6966 bp, Artificial Sequence
  derived and/or modified sequence
atgggccccggcgccagaggcagaagaagaagaagaagacccatgagccccccccccccccccccccccgtgagagccctgcccctgctgctgctgctggccggccccggcgccgccgcccccccctgcctggacggcagcccctgcgccaacggcggcagatgcacccagctgcccagcagagaggccgcctgcctgtgcccccccggctgggtgggcgagagatgccagctggaggacccctgccacagcggcccctgcgccggcagaggcgtgtgccagagcagcgtggtggccggcaccgccagattcagctgcagatgccccagaggcttcagaggccccgactgcagcctgcccgacccctgcctgagcagcccctgcgcccacggcgccagatgcagcgtgggccccgacggcagattcctgtgcagctgcccccccggctaccagggcagaagctgcagaagcgacgtggacgagtgcagagtgggcgagccctgcagacacggcggcacctgcctgaacacccccggcagcttcagatgccagtgccccgccggctacaccggccccctgtgcgagaaccccgccgtgccctgcgcccccagcccctgcagaaacggcggcacctgcagacagagcggcgacctgacctacgactgcgcctgcctgcccggcttcgagggccagaactgcgaggtgaacgtggacgactgccccggccacagatgcctgaacggcggcacctgcgtggacggcgtgaacacctacaactgccagtgcccccccgagtggaccggccagttctgcaccgaggacgtggacgagtgccagctgcagcccaacgcctgccacaacggcggcacctgcttcaacaccctgggcggccacagctgcgtgtgcgtgaacggctggaccggcgagagctgcagccagaacatcgacgactgcgccaccgccgtgtgcttccacggcgccacctgccacgacagagtggccagcttctactgcgcctgccccatgggcaagaccggcctgctgtgccacctggacgacgcctgcgtgagcaacccctgccacgaggacgccatctgcgacaccaaccccgtgaacggcagagccatctgcacctgcccccccggcttcaccggcggcgcctgcgaccaggacgtggacgagtgcagcatcggcgccaacccctgcgagcacctgggcagatgcgtgaacacccagggcagcttcctgtgccagtgcggcagaggctacaccggccccagatgcgagaccgacgtgaacgagtgcctgagcggcccctgcagaaaccaggccacctgcctggacagaatcggccagttcacctgcatctgcatggccggcttcaccggcacctactgcgaggtggacatcgacgagtgccagagcagcccctgcgtgaacggcggcgtgtgcaaggacagagtgaacggcttcagctgcacctgccccagcggcttcagcggcagcacctgccagctggacgtggacgagtgcgccagcaccccctgcagaaacggcgccaagtgcgtggaccagcccgacggctacgagtgcagatgcgccgagggcttcgagggcaccctgtgcgacagaaacgtggacgactgcagccccgacccctgccaccacggcagatgcgtggacggcatcgccagcttcagctgcgcctgcgcccccggctacaccggcaccagatgcgagagccaggtggacgagtgcagaagccagccctgcagacacggcggcaagtgcctggacctggtggacaagtacctgtgcagatgccccagcggcaccaccggcgtgaactgcgaggtgaacatcgacgactgcgccagcaacccctgcaccttcggcgtgtgcagagacggcatcaacagatacgactgcgtgtgccagcccggcttcaccggccccctgtgcaacgtggagatcaacgagtgcgccagcagcccctgcggcgagggcggcagctgcgtggacggcgagaacggcttcagatgcctgtgcccccccggcagcctgccccccctgtgcctgccccccagccacccctgcgcccacgagccctgcagccacggcatctgctacgacgcccccggcggcttcagatgcgtgtgcgagcccggctggagcggccccagatgcagccagagcctggccagagacgcctgcgagagccagccctgcagagccggcggcacctgcagcagcgacggcatgggcttccactgcacctgcccccccggcgtgcagggcagacagtgcgagctgctgagcccctgcacccccaacccctgcgagcacggcggcagatgcgagagcgcccccggccagctgcccgtgtgcagctgcccccagggctggcagggccccagatgccagcaggacgtggacgagtgcgccggccccgccccctgcggcccccacggcatctgcaccaacctggccggcagcttcagctgcacctgccacggcggctacaccggccccagctgcgaccaggacatcaacgactgcgaccccaacccctgcctgaacggcggcagctgccaggacggcgtgggcagcttcagctgcagctgcctgcccggcttcgccggccccagatgcgccagagacgtggacgagtgcctgagcaacccctgcggccccggcacctgcaccgaccacgtggccagcttcacctgcacctgcccccccggctacggcggcttccactgcgagcaggacctgcccgactgcagccccagcagctgcttcaacggcggcacctgcgtggacggcgtgaacagcttcagctgcctgtgcagacccggctacaccggcgcccactgccagcacgaggccgacccctgcctgagcagaccctgcctgcacggcggcgtgtgcagcgccgcccaccccggcttcagatgcacctgcctggagagcttcaccggcccccagtgccagaccctggtggactggtgcagcagacagccctgccagaacggcggcagatgcgtgcagaccggcgcctactgcctgtgcccccccggctggagcggcagactgtgcgacatcagaagcctgccctgcagagaggccgccgcccagatcggcgtgagactggagcagctgtgccaggccggcggccagtgcgtggacgaggacagcagccactactgcgtgtgccccgagggcagaaccggcagccactgcgagcaggaggtggacccctgcctggcccagccctgccagcacggcggcacctgcagaggctacatgggcggctacatgtgcgagtgcctgcccggctacaacggcgacaactgcgaggacgacgtggacgagtgcgccagccagccctgccagcacggcggcagctgcatcgacctggtggccagatacctgtgcagctgcccccccggcaccctgggcgtgctgtgcgagatcaacgaggacgactgcggccccggcccccccctggacagcggccccagatgcctgcacaacggcacctgcgtggacctggtgggcggcttcagatgcacctgcccccccggctacaccggcctgagatgcgaggccgacatcaacgagtgcagaagcggcgcctgccacgccgcccacaccagagactgcctgcaggaccccggcggcggcttcagatgcctgtgccacgccggcttcagcggccccagatgccagaccgtgctgagcccctgcgagagccagccctgccagcacggcggccagtgcagacccagccccggccccggcggcggcctgaccttcacctgccactgcgcccagcccttctggggccccagatgcgagagagtggccagaagctgcagagagctgcagtgccccgtgggcgtgccctgccagcagacccccagaggccccagatgcgcctgcccccccggcctgagcggccccagctgcagaagcttccccggcagcccccccggcgccagcaacgccagctgcgccgccgccccctgcctgcacggcggcagctgcagacccgcccccctggcccccttcttcagatgcgcctgcgcccagggctggaccggccccagatgcgaggcccccgccgccgcccccgaggtgagcgaggagcccagatgccccagagccgcctgccaggccaagagaggcgaccagagatgcgacagagagtgcaacagccccggctgcggctgggacggcggcgactgcagcctgagcgtgggcgacccctggagacagtgcgaggccctgcagtgctggagactgttcaacaacagcagatgcgaccccgcctgcagcagccccgcctgcctgtacgacaacttcgactgccacgccggcggcagagagagaacctgcaaccccgtgtacgagaagtactgcgccgaccacttcgccgacggcagatgcgaccagggctgcaacaccgaggagtgcggctgggacggcctggactgcgccagcgaggtgcccgccctgctggccagaggcgtgctggtgctgaccgtgctgctgccccccgaggagctgctgagaagcagcgccgacttcctgcagagactgagcgccatcctgagaaccagcctgagattcagactggacgcccacggccaggccatggtgttcccctaccacagacccagccccggcagcgagcccagagccagaagagagctggcccccgaggtgatcggcagcgtggtgatgctggagatcgacaacagactgtgcctgcagagccccgagaacgaccactgcttccccgacgcccagagcgccgccgactacctgggcgccctgagcgccgtggagagactggacttcccctaccccctgagagacgtgagaggcgagcccctggagccccccgagcccagcgtgcccctgctgcccctgctggtggccggcgccgtgctgctgctggtgatcctggtgctgggcgtgatggtggccagaagaaagagagagcacagcaccctgtggttccccgagggcttcagcctgcacaaggacgtggccagcggccacaagggcagaagagagcccgtgggccaggacgccctgggcatgaagaacatggccaagggcgagagcctgatgggcgaggtggccaccgactggatggacaccgagtgccccgaggccaagagactgaaggtggaggagcccggcatgggcgccgaggaggccgtggactgcagacagtggacccagcaccacctggtggccgccgacatcagagtggcccccgccatggccctgacccccccccagggcgacgccgacgccgacggcatggacgtgaacgtgagaggccccgacggcttcacccccctgatgctggccagcttctgcggcggcgccctggagcccatgcccaccgaggaggacgaggccgacgacaccagcgccagcatcatcagcgacctgatctgccagggcgcccagctgggcgccagaaccgacagaaccggcgagaccgccctgcacctggccgccagatacgccagagccgacgccgccaagagactgctggacgccggcgccgacaccaacgcccaggaccacagcggcagaacccccctgcacaccgccgtgaccgccgacgcccagggcgtgttccagatcctgatcagaaacagaagcaccgacctggacgccagaatggccgacggcagcaccgccctgatcctggccgccagactggccgtggagggcatggtggaggagctgatcgccagccacgccgacgtgaacgccgtggacgagctgggcaagagcgccctgcactgggccgccgccgtgaacaacgtggaggccaccctggccctgctgaagaacggcgccaacaaggacatgcaggacagcaaggaggagacccccctgttcctggccgccagagagggcagctacgaggccgccaagctgctgctggaccacttcgccaacagagagatcaccgaccacctggacagactgcccagagacgtggcccaggagagactgcaccaggacatcgtgagactgctggaccagcccagcggccccagaagcccccccggcccccacggcctgggccccctgctgtgcccccccggcgccttcctgcccggcctgaaggccgcccagagcggcagcaagaagagcagaagaccccccggcaaggccggcctgggcccccagggccccagaggcagaggcaagaagctgaccctggcctgccccggccccctggccgacagcagcgtgaccctgagccccgtggacagcctggacagccccagacccttcggcggcccccccgccagccccggcggcttccccctggagggcccctacgccgccgccaccgccaccgccgtgagcctggcccagctgggcggccccggcagagccggcctgggcagacagccccccggcggctgcgtgctgagcctgggcctgctgaaccccgtggccgtgcccctggactgggccagactgcccccccccgccccccccggccccagcttcctgctgcccctggcccccggcccccagctgctgaaccccggcacccccgtgagcccccaggagagaccccccccctacctggccgtgcccggccacggcgaggagtaccccgccgccggcgcccacagcagcccccccaaggccagattcctgagagtgcccagcgagcacccctacctgacccccagccccgagagccccgagcactgggccagccccagcccccccagcctgagcgactggagcgagagcacccccagccccgccaccgccaccggcgccatggccaccaccaccggcgccctgcccgcccagcccctgcccctgagcgtgcccagcagcctggcccaggcccagacccagctgggcccccagcccgaggtgacccccaagagacaggtgctggcctag

SEQ ID NO: 8855 - protein, 520 aa, Artificial Sequence
  derived and/or modified sequence
MAALKLLSSGLRLCASARGSGATWYKGCVCSFSTSAHRHTKFYTDPVEAVKDIPDGATVLVGGFGLCGIPENLIDALLKTGVKGLTAVSNNAGVDNFGLGLLLRSKQIKRMVSSYVGENAEFERQYLSGELEVELTPQGTLAERIRAGGAGVPAFYTPTGYGTLVQEGGSPIKYNKDGSVAIASKPREVREFNGQHFILEEAITGDFALVKAWKADRAGNVIFRKSARNFNLPMCKAAETTVVEVEEIVDIGAFAPEDIHIPQIYVHRLIKGEKYEKRIERLSIRKEGDGEAKSAKPGDDVRERIIKRAALEFEDGMYANLGIGIPLLASNFISPNITVHLQSENGVLGLGPYPRQHEADADLINAGKETVTILPGASFFSSDESFAMIRGGHVDLTMLGAMQVSKYGDLANWMIPGKMVKGMGGAMDLVSSAKTKVVVTMEHSAKGNAHKIMEKCTLPLTGKQCVNRIITEKAVFDVDKKKGLTLIELWEGLTVDDVQKSTGCDFAVSPKLMPMQQIAN

SEQ ID NO: 8856 - protein, 334 aa, Artificial Sequence
  derived and/or modified sequence
MMVREFNGQHFILEEAITGDFALVKAWKADRAGNVIFRKSARNFNLPMCKAAETTVVEVEEIVDIGAFAPEDIHIPQIYVHRLIKGEKYEKRIERLSIRKEGDGEAKSAKPGDDVRERIIKRAALEFEDGMYANLGIGIPLLASNFISPNITVHLQSENGVLGLGPYPRQHEADADLINAGKETVTILPGASFFSSDESFAMIRGGHVDLTMLGAMQVSKYGDLANWMIPGKMVKGMGGAMDLVSSAKTKVVVTMEHSAKGNAHKIMEKCTLPLTGKQCVNRIITEKAVFDVDKKKGLTLIELWEGLTVDDVQKSTGCDFAVSPKLMPMQQIAN

SEQ ID NO: 8857 - protein, 123 aa, Artificial Sequence
  derived and/or modified sequence
MLGAMQVSKYGDLANWMIPGKMVKGMGGAMDLVSSAKTKVVVTMEHSAKGNAHKIMEKCTLPLTGKQCVNRIITEKAVFDVDKKKGLTLIELWEGLTVDDVQKSTGCDFAVSPKLMPMQQIAN

SEQ ID NO: 8858 - protein, 150 aa, Artificial Sequence
  derived and/or modified sequence
SNAYKVDNFGLGLLLRSKQIKRMVSSYVGENAEFERQYLSGELEVELTPQGTLAERIRAGGAGVPAFYTPTGYGTLVQEGGSPIKYNKDGSVAIASKPREVREFNGQHFILEEAITGDFALVKAWKADRAGNVIFRKSARNFNLPMCKAA

SEQ ID NO: 8859 - DNA, 1563 bp, Artificial Sequence
  derived and/or modified sequence
atggcagctctgaagctgctttcctccggcctgaggctgtgcgccagcgcacgcgggtctggcgccacatggtataaaggatgtgtgtgtagctttagtacatctgcacatcgtcacacaaagttttacaccgatccagtagaagctgtcaaagacattccagacggtgctactgtcctggtgggaggattcggactgtgtggaatccctgagaacctgattgacgcactgctgaagactggagtgaaagggcttacagcagtgtctaataacgcaggagttgacaattttgggttagggctgctgcttcgaagcaagcagattaaacggatggtttccagttacgtgggagagaatgctgagtttgaaaggcagtatctctccggtgaactggaggtggagctcacacctcaggggacccttgcggagagaatcagggctggaggagcaggggttccggctttttatacaccaaccggatacggaactctagtacaggaaggcggcagccccatcaaatacaataaagatgggtcagtggcaattgccagcaagcctagagaagtgagggagtttaatgggcagcactttatactggaagaggcaataactggcgacttcgctctcgttaaagcgtggaaggccgacagggctggcaacgtgatttttcgcaagagcgctagaaactttaatcttccgatgtgtaaggccgcagaaaccaccgtggtcgaagtggaggagattgtggacatcggtgcattcgcccccgaagacatacacatcccccagatctacgtgcacaggctgatcaagggggagaagtatgaaaagcgtattgagcgccttagcattcgcaaagaaggggacggagaggctaagagcgctaaacctggagacgacgttagagagaggatcattaagagggccgctctggaatttgaggatggtatgtatgcaaatcttgggattgggataccgctgctcgcctccaactttatttcacctaacatcactgtccacctgcagagcgaaaacggcgtgctgggcttgggcccttaccccagacagcatgaggccgatgccgatctgatcaatgccggcaaggaaaccgtaacaattctgcccggggccagcttcttctcctctgatgaaagtttcgccatgattcgcggtgggcacgtggacctcacgatgctaggcgccatgcaggtctcaaaatacggggaccttgcgaactggatgatcccggggaaaatggtcaagggcatggggggcgcaatggacctggtatcatcagctaaaaccaaagtcgtcgtgacaatggaacattccgccaaaggaaatgctcataagattatggaaaagtgcaccctaccacttacaggtaaacaatgtgttaacagaattatcacagaaaaggccgtctttgatgtggataaaaaaaaggggctgaccctgatcgaactttgggagggactgacagtggacgacgtgcaaaaatccacaggatgcgactttgccgtctctcccaaacttatgccgatgcagcaaattgcaaattag

SEQ ID NO: 8860 - DNA, 1005 bp, Artificial Sequence
  derived and/or modified sequence
atgatggtcagagagttcaatggacaacacttcattcttgaggaggcaatcacaggcgattttgccctcgtgaaggcgtggaaggccgatcgggccgggaatgttatattccgcaagtccgctcgcaacttcaatctgcccatgtgtaaagccgctgaaacaactgttgtggaggtagaggagatagtggatattggcgcctttgctcctgaagatatccacataccacagatttatgtacaccgcctcattaaaggcgaaaaatacgaaaagagaatagagcgtttgtccatcaggaaagagggcgacggcgaagctaagtccgccaagcccggggacgacgttcgagaacgcatcattaagcgtgctgctctggagtttgaagatgggatgtacgcaaacttgggtatcggaattccgttgcttgcctccaactttatctctcccaacattactgtacacctgcagtccgaaaacggcgtccttggacttggcccatatcctcggcaacatgaggcagacgccgatttaatcaatgcgggaaaggaaacagttacgatccttccaggcgcttctttcttcagcagcgacgagagtttcgctatgattaggggtggtcacgttgacctgaccatgctcggggccatgcaggtgagtaagtatggtgatcttgcaaattggatgatccccggaaaaatggtgaaaggtatgggaggcgctatggacctcgtgtcctctgcaaagaccaaggtcgtggttactatggagcattccgctaagggcaatgctcacaaaattatggagaagtgtacattgcctctgactggtaaacagtgcgttaatcgaattattaccgagaaagcagtgttcgatgttgataagaaaaaaggacttacgttaattgaactttgggagggcctgactgtggacgacgtgcagaagtctaccgggtgcgattttgctgtatccccaaaacttatgccaatgcagcagatcgccaattag

SEQ ID NO: 8861 - DNA, 372 bp, Artificial Sequence
  derived and/or modified sequence
atgctgggtgcgatgcaggtctccaaatacggcgatcttgctaattggatgatcccaggtaaaatggtgaaggggatgggaggcgcaatggatctcgtcagtagcgctaaaaccaaggtagttgtgactatggagcattccgctaaaggcaacgctcacaaaattatggagaaatgtacacttccactgacaggtaagcagtgtgtcaaccgcattattactgagaaggcagtattcgacgtggacaagaagaagggcctgacccttatcgaactgtgggagggtctcacagtagacgacgtacagaaaagtactggatgcgatttcgcggtttccccgaagctgatgccaatgcagcagatagccaattag

SEQ ID NO: 8862 - DNA, 372 bp, Artificial Sequence
  derived and/or modified sequence
atgctcggtgctatgcaggtgtccaagtacggggatttggcgaactggatgatcccgggcaaaatggtaaaggggatgggtggcgcaatggatctggtgagttctgcaaagacaaaggtggtggtcaccatggagcacagtgccaagggaaatgcccacaaaattatggagaagtgcacactccctttaacaggcaagcagtgcgtaaatcggatcatcactgaaaaggcggtgtttgacgtagataaaaagaagggtttaacgctcatcgaactgtgggagggcctgacagtcgacgatgtgcagaaaagcactggatgcgatttcgcggtgtcacccaagttgatgccaatgcagcagatagcgaattag

SEQ ID NO: 8863 - DNA, 453 bp, Artificial Sequence
  derived and/or modified sequence
tccaacgcttataaagtcgataactttgggctcggattattgctacgctcaaagcagatcaagcgtatggtgagcagctatgtgggagagaacgctgagttcgaacgccagtacctgtcaggtgaattagaggtggaacttacacctcaggggacattggccgaacgtatccgcgctggcggagccggagtgccggcgttttatactcctaccggctacgggaccttggtgcaggagggaggttcgccgataaaatacaataaggatgggagcgttgctattgcttcaaagccacgggaagtgcgcgaattcaacggccaacacttcattctggaggaagccatcactggagacttcgccctagttaaggcctggaaggccgacagggcaggcaatgtcatcttccggaaaagcgctcggaacttcaatcttccaatgtgcaaggctgcatag

SEQ ID NO: 8864 - DNA, 1563 bp, Artificial Sequence
  derived and/or modified sequence
atggccgccctgaagctgctgagcagcggcctgcggctgtgtgccagcgcccggggcagcggggccacctggtacaagggctgtgtgtgcagcttcagcaccagcgcccaccgccacaccaagttctacacagatcctgtggaggccgtgaaggacatcccagatggagccaccgtgctggtgggcggcttcggcctgtgtggcatccctgagaacctgattgatgccctgctgaagacaggagtgaagggcctgacagctgtgagcaacaatgctggggtggacaactttggcctgggcctgctgctgcggagcaagcagatcaagaggatggtgagcagctatgtgggggagaatgctgagtttgagcggcagtacctgagcggggagctggaggtggagctgaccccccagggcaccctggccgagcgcatccgggccggcggggccggcgtgcctgccttctacacccccaccggctacggcaccctggtgcaggagggcggcagccccatcaagtacaacaaggatggctctgtggccatcgccagcaagccccgggaggtgcgggagttcaacggccagcacttcatcctggaggaggccatcaccggggactttgccctggtgaaggcctggaaggctgacagagctggaaatgtcatcttcaggaagagcgccaggaacttcaacctgcccatgtgcaaggctgctgagaccaccgtggtggaggtggaggagatcgtggacattggagcctttgcccctgaggacatccacatcccccagatctacgtgcacaggctcatcaagggggagaagtatgagaagagaattgagcggctgagcatcaggaaggagggagatggagaggccaagagcgccaagccaggagatgatgtgcgggagcgcatcatcaagagagctgccctggagtttgaagatggcatgtatgccaacctgggcatcggcatccccctgctggccagcaacttcatcagccccaacatcaccgtgcacctgcagagtgaaaatggagtgctgggcctgggcccctacccccggcagcatgaagcagatgctgacctgatcaatgctgggaaggagaccgtgaccatcctgcccggggccagcttcttcagcagtgatgagagctttgccatgatccggggcggccacgtggacctgaccatgctgggcgccatgcaggtgtccaaatatggagacctggccaactggatgatccctgggaagatggtgaagggcatgggcggggccatggacctggtgagcagcgccaagaccaaggtggtggtgaccatggagcacagcgccaagggaaatgcccacaagatcatggagaagtgcaccctgcccctgaccgggaagcagtgtgtgaaccgcatcatcacagagaaggctgtgtttgatgtggacaagaagaagggcctgaccctgattgagctgtgggagggcctgactgtggatgatgtgcagaagagcacaggctgtgactttgctgtgagccccaagctgatgcccatgcagcagatcgccaactag

SEQ ID NO: 8865 - DNA, 1005 bp, Artificial Sequence
  derived and/or modified sequence
atgatggtgcgggagttcaacggccagcacttcatcctggaggaggccatcaccggggactttgccctggtgaaggcctggaaggctgacagagctggaaatgtcatcttcaggaagagcgccaggaacttcaacctgcccatgtgcaaggctgctgagaccaccgtggtggaggtggaggagatcgtggacattggagcctttgcccctgaggacatccacatcccccagatctacgtgcacaggctcatcaagggggagaagtatgagaagagaattgagcggctgagcatcaggaaggagggagatggagaggccaagagcgccaagccaggagatgatgtgcgggagcgcatcatcaagagagctgccctggagtttgaagatggcatgtatgccaacctgggcatcggcatccccctgctggccagcaacttcatcagccccaacatcaccgtgcacctgcagagtgaaaatggagtgctgggcctgggcccctacccccggcagcatgaagcagatgctgacctgatcaatgctgggaaggagaccgtgaccatcctgcccggggccagcttcttcagcagtgatgagagctttgccatgatccggggcggccacgtggacctgaccatgctgggcgccatgcaggtgtccaaatatggagacctggccaactggatgatccctgggaagatggtgaagggcatgggcggggccatggacctggtgagcagcgccaagaccaaggtggtggtgaccatggagcacagcgccaagggaaatgcccacaagatcatggagaagtgcaccctgcccctgaccgggaagcagtgtgtgaaccgcatcatcacagagaaggctgtgtttgatgtggacaagaagaagggcctgaccctgattgagctgtgggagggcctgactgtggatgatgtgcagaagagcacaggctgtgactttgctgtgagccccaagctgatgcccatgcagcagatcgccaactag

SEQ ID NO: 8866 - DNA, 372 bp, Artificial Sequence
  derived and/or modified sequence
atgctgggcgccatgcaggtgtccaagtacggggacctggccaactggatgatccctgggaagatggtgaagggcatgggcggggccatggacctggtgtcctctgccaagaccaaggtggtggtgaccatggagcacagcgccaagggaaatgcccacaagatcatggagaagtgcaccctgcccctgaccgggaagcagtgtgtgaaccgcatcatcacagagaaggctgtgtttgatgtggacaagaagaagggcctgaccctcatcgagctgtgggagggcctgactgtggatgatgtgcagaagagcacaggctgtgactttgctgtgagccccaagctgatgcccatgcagcagatcgccaactag

SEQ ID NO: 8867 - DNA, 453 bp, Artificial Sequence
  derived and/or modified sequence
agcaatgcctacaaggtggacaactttggcctgggcctgctgctgcggagcaagcagatcaagaggatggtgagcagctatgtgggggagaatgctgagtttgagcggcagtacctgagcggggagctggaggtggagctgaccccccagggcaccctggccgagcgcatccgggccggcggggccggcgtgcctgccttctacacccccaccggctacggcaccctggtgcaggagggcggcagccccatcaagtacaacaaggatggctctgtggccatcgccagcaagccccgggaggtgcgggagttcaacggccagcacttcatcctggaggaggccatcaccggggactttgccctggtgaaggcctggaaggctgacagagctggaaatgtcatcttcaggaagagcgccaggaacttcaacctgcccatgtgcaaggccgcctag

SEQ ID NO: 8868 - DNA, 1563 bp, Artificial Sequence
  derived and/or modified sequence
atggccgccctgaagctgctgagcagcggcctgcggctgtgcgccagcgcacgcgggagtggggccacttggtacaagggctgtgtgtgctcattctctacctctgcccataggcacaccaagttctacaccgatcctgtggaggccgtgaaggatatcccagatggggcaacagtgctggtgggcggcttcggcctatgcgggattcctgagaacctgatagacgcattgctgaaaacgggcgttaagggcctgaccgcagtctcaaataatgccggcgttgataacttcgggttggggctgttgctgcggagcaaacagatcaaacgtatggtaagcagctatgtgggggaaaacgcagagtttgagaggcagtacctttccggcgagttggaagttgagttgaccccccagggaactcttgcggagcgaattagggccgggggagcgggggtcccagccttttatacacccaccgggtatggaacattagtgcaagaaggcggctcccccatcaaatacaacaaagacggttcagtcgcgatcgctagtaaacctagagaagttcgtgagttcaacgggcagcattttatccttgaagaggccattaccggggatttcgctctcgtgaaggcgtggaaggccgaccgggcggggaacgttattttccggaagagcgccaggaattttaacctgccaatgtgtaaggccgccgaaacaaccgtggttgaagtggaagaaatcgtcgacatcggcgccttcgcccccgaggatatccacattcctcagatttacgttcaccggctgataaaaggcgaaaagtacgagaaaagaattgagcgcttgtcaattcgaaaggaaggtgatggagaggccaagtccgctaaaccaggagatgacgtacgcgaacggatcatcaagagggccgccctggagttcgaggatgggatgtatgccaatttgggaataggtatccccctgctggcaagcaattttatatctcctaacataactgtgcatctgcagagcgagaacggggtcctgggattaggcccttatcctcgacagcacgaggctgacgctgacctaattaatgcaggaaaggaaacagtgacaattctgcctggtgcaagttttttttcctccgatgagtccttcgctatgattagaggagggcacgtggacctgaccatgctgggcgccatgcaggtgtcgaagtacggagacctcgcaaattggatgatccctggaaaaatggtcaaggggatgggcggagctatggacttggtgtcatctgctaagactaaggttgtggtgacaatggagcattctgctaagggcaatgctcacaaaatcatggagaagtgcacacttcccctgaccggtaaacaatgcgtgaatcgaattatcactgagaaggcagtcttcgacgtcgacaagaaaaagggactgaccctaatagagctttgggaagggctgactgtggacgatgtgcagaagtctaccggatgtgattttgcagtctcacccaaattgatgccgatgcagcagattgcgaactag

SEQ ID NO: 8869 - DNA, 1005 bp, Artificial Sequence
  derived and/or modified sequence
atgatggtgcgggagttcaacggccagcacttcatcctggaggaggcaataactggcgacttcgcactggtaaaggcttggaaggccgatagagcgggaaatgttatcttcaggaaaagcgcacggaacttcaacttgccaatgtgcaaagctgccgaaacaacggtcgtggaggtggaagagatcgtggatatcggggcctttgcccctgaggacatccatatccctcaaatatatgtccaccggctgatcaagggagaaaagtacgaaaaacgcatcgagcggctcagtattcgcaaggagggcgacggcgaagcaaaatcagcgaaacctggagacgatgtgagagagcgtataatcaagagagcagctctggagtttgaggacggaatgtatgctaacttggggattggaatcccactcctcgcatcaaattttatcagcccgaacatcactgtgcatctccagagtgagaatggcgtgctcgggctgggcccgtaccctcggcagcacgaggccgacgccgacctgattaacgccggcaaggaaaccgttacgatcctccccggggcttcctttttctcttctgacgaaagctttgcaatgattcgcggcgggcacgtggacctcactatgctcggcgccatgcaagtctccaagtatggcgacctggccaactggatgatacctggcaagatggttaaagggatgggtggcgctatggatcttgtgtccagtgcaaaaaccaaagtggtggtaacgatggaacattcagcaaagggcaacgcccataaaattatggaaaaatgtacactccccttgactggcaaacagtgcgtcaataggattatcacagagaaggctgttttcgacgtagataagaagaagggcctaactctcattgagttgtgggaggggttgactgtcgacgacgttcagaagtcaacaggatgtgatttcgccgtttcaccaaaacttatgccaatgcagcagattgccaattag

SEQ ID NO: 8870 - DNA, 372 bp, Artificial Sequence
  derived and/or modified sequence
atgctgggcgccatgcaggtgagcaagtacggcgacctggccaactggatgatccccggcaaaatggttaagggaatgggtggggcgatggatttagtctcatcggccaagacaaaggtcgtggtgactatggaacactctgccaaaggtaatgcccacaagattatggaaaagtgtacgctgcccctcaccggcaagcagtgtgtcaaccgaataattaccgaaaaggctgttttcgacgtggacaaaaaaaaaggcctgacactgatcgaactgtgggagggacttacggtggatgatgtgcagaagagtaccggctgtgactttgcagtgagccccaagctgatgcctatgcagcagatcgcaaattag

SEQ ID NO: 8871 - DNA, 372 bp, Artificial Sequence
  derived and/or modified sequence
atgctgggcgccatgcaggtgagcaagtacggcgacctggccaactggatgatccccggcaaaatggtgaagggcatgggaggggccatggatcttgtcagcagcgcaaagaccaaagtagtggtaactatggaacacagcgcgaagggtaacgcccacaagatcatggagaaatgtactcttccattaaccggaaagcagtgcgtgaaccggataattacagaaaaagctgtgttcgatgtggacaaaaagaagggcctcaccttgatagagctctgggaaggtctgaccgtggacgacgttcagaagtcgacaggatgtgattttgctgttagccccaaacttatgcctatgcagcaaattgccaattag

SEQ ID NO: 8872 - DNA, 453 bp, Artificial Sequence
  derived and/or modified sequence
agcaacgcctacaaggtggacaacttcggcctgggcctgctgctgaggtcgaagcagattaagaggatggtgtcctcctacgttggggagaatgctgaattcgagcgccagtacctgagtggggagctggaagtcgaattaactccccaggggacacttgctgaacgtatccgagccggtggtgccggagtacccgccttctacacccctacgggctacgggaccctagtccaagaaggcggaagcccaataaagtacaacaaagacggcagtgtagcaatcgcgtcgaagcccagggaagtgagagagtttaacggacagcatttcatcctggaagaggccattactggagattttgctctcgtgaaggcctggaaggctgatcgggcgggaaacgtgatcttccgtaaatccgcccggaattttaatctcccaatgtgtaaagcagcttag

SEQ ID NO: 8873 - DNA, 1563 bp, Artificial Sequence
  derived and/or modified sequence
atggcagccctgaaactcctttcttcaggcctcagactgtgtgcaagtgcaagaggttctggcgctacctggtataaaggctgcgtctgcagctttagcacatccgctcacagacacactaaattctatactgatcccgttgaagccgtgaaggatatcccagatggtgccacggtgctggtgggagggttcggcttatgcggaattcctgagaatcttatagatgctctgcttaaaaccggcgtcaaaggtctgactgccgtgagtaataacgcaggagtcgataactttggcctggggctcctgctgcgttctaagcaaataaagaggatggttagtagctacgttggcgaaaacgctgaatttgagaggcagtacttgagcggtgagcttgaggtggagttaacaccgcaggggacattagccgagcgcattagagctggcggagcaggggttcctgccttttatacccctaccggttatgggacgttggtccaagagggaggatctcccatcaaatataataaggacggcagcgttgctattgccagcaaaccaagagaagtcagggagtttaacgggcaacattttatactggaggaggccataacaggtgactttgcactggtaaaggcatggaaagccgacagagccggaaatgtcatcttccggaaatctgcaaggaatttcaatcttcctatgtgcaaagctgccgaaactactgtagtcgaggtggaagaaatcgtagacatcggggcttttgctcccgaggacatccatattccacagatttatgttcaccggctgatcaaaggagaaaagtatgaaaagcgaatcgagaggctgagcattcgcaaggaaggcgatggagaggccaagagcgccaagccgggagatgacgtgagagagcggataatcaaaagagcagctcttgagtttgaggatggcatgtacgctaatttagggatcggcattccattgctggcttccaactttatttcccccaacatcacggtgcacctgcagagcgagaacggggtcttgggactgggaccatacccaagacagcacgaagctgatgcagacttgattaacgccggtaaagagacagtgaccatacttcctggcgcaagtttcttcagcagcgacgaatctttcgccatgattcggggaggccatgtggacctgacaatgttgggtgcgatgcaggttagcaagtatggcgaccttgcgaactggatgatccctggtaagatggtaaagggcatgggcggtgccatggatctagtatccagtgccaagacgaaagtggtggtgacaatggaacacagtgctaaaggcaatgctcacaaaatcatggagaagtgtaccctgcccctgaccggcaaacagtgtgttaacaggattattacggagaaggctgtgtttgatgtggacaaaaagaaaggcctcacgctcatcgagctctgggagggtttgactgtcgatgatgtgcagaaatccactggttgcgactttgctgtcagccctaagctcatgcccatgcaacagattgctaactag

SEQ ID NO: 8874 - DNA, 1005 bp, Artificial Sequence
  derived and/or modified sequence
atgatggttcgagagttcaacggccaacattttatcctggaggaggctatcaccggcgactttgctctagtgaaggcctggaaggccgatcgggctgggaacgttatattccgtaagtctgccagaaatttcaatctgcctatgtgtaaagctgcagaaacaacagtcgtcgaggttgaagagatagtcgatatcggagcctttgccccagaggacatccacatcccacagatatatgtacaccgattgataaagggcgaaaaatatgagaagcggatcgaaagactgagtatccgtaaagagggggatggggaagccaaatcggccaagcccggtgacgatgttcgggagagaattattaaacgcgctgccctcgaatttgaggatggcatgtatgctaacctggggatcggaataccgctgctcgcatcaaacttcatctcccccaatatcactgtacacttgcagtctgagaacggggtcctagggttgggaccttaccctagacaacacgaggccgacgctgatctgatcaacgccggtaaagaaacggttaccatcctcccaggggctagcttcttctcctcagatgaaagttttgccatgattcgtggcggtcacgtggacttgaccatgttgggagctatgcaagtgtctaagtatggagatctagctaattggatgatacctggaaagatggtcaagggcatgggcggagctatggatctcgtgagctccgcgaagacgaaagtggtagtcacaatggagcatagcgcaaagggcaacgcacacaaaattatggaaaagtgtaccctgcctctcacagggaaacagtgcgtcaaccgcattattacagaaaaagccgtgtttgatgtggacaagaagaaaggcctgactctcatagagctttgggaagggctgacggttgatgatgtccagaagagcacaggatgcgactttgcggtttccccgaaactaatgcctatgcagcagattgcaaattag

SEQ ID NO: 8875 - DNA, 372 bp, Artificial Sequence
  derived and/or modified sequence
atgctgggtgcgatgcaagtgtccaagtacggtgacctggccaactggatgattcctggaaagatggtaaaaggtatgggtggcgctatggacctcgttagcagcgcaaaaacaaaggttgtggtcactatggaacattcagctaaaggcaacgcacacaaaataatggagaagtgtaccctgcccctcacaggaaaacagtgcgttaacaggatcatcacagagaaggctgttttcgatgtagacaagaagaaaggcttgactttaattgagctgtgggagggactcaccgtcgatgacgtccagaaatccactggttgcgacttcgctgtgtctcctaagctcatgcccatgcagcaaatagcaaactag

SEQ ID NO: 8876 - DNA, 372 bp, Artificial Sequence
  derived and/or modified sequence
atgctgggcgcaatgcaagtgtccaagtatggcgatctggcaaactggatgatccccggtaagatggtcaagggaatgggcggtgctatggatttagtgagctccgccaaaactaaggtggtggtgacgatggaacattccgccaaaggtaacgcccacaaaatcatggaaaaatgcaccctccctctgactgggaaacaatgtgtgaacaggataattacggagaaggcggtgtttgacgtcgataagaaaaaagggcttaccctcatcgagctctgggaggggttgacagtcgacgatgtccaaaaaagcacaggctgcgatttcgcagtcagtcctaagctcatgcctatgcagcagattgccaactag

SEQ ID NO: 8877 - DNA, 453 bp, Artificial Sequence
  derived and/or modified sequence
tctaacgcgtacaaagtcgacaactttggcctggggctacttctcaggtccaaacagatcaaaaggatggtctccagttatgtgggagaaaatgcggaatttgaaaggcaatatctgtcaggggaacttgaggttgaattgacccctcagggaactttagcagagcgaatcagagcgggtggtgccggagtacccgcattttacaccccgaccggatacgggacattagtgcaagagggaggctctcccatcaagtataataaggatggttccgtggcgatcgcctctaagcccagagaggtgcgggaattcaacggtcagcactttatcctggaggaggccattacaggtgactttgctttggtcaaagcgtggaaagcagatagggcaggtaacgtcatctttcgcaaatccgcgaggaatttcaacttgccaatgtgtaaagcagcctag

SEQ ID NO: 8878 - DNA, 3388 bp, Artificial Sequence
  derived and/or modified sequence
agcagccagcagcgcgccggtggcgtgcggctcgaaaggccgggaggacgtcatcgacgcgctgtcgagcctccagcccgcccgggtttccttcgcagtcgcgcaccgacgctcaaacgcgcgctccaacccgcagcctcctcctgcctcaccgcccgaagatggcggctctcaaactcctctcctccgggcttcggctctgcgcctctgcccgcggatctggggcaacctggtacaagggatgtgtttgttccttttccaccagtgctcatcgccataccaagttttatacagatccagtagaagctgtaaaagacatccctgatggtgccacggttttggttggtggttttgggctatgtggaattccagagaatcttatagatgctttactgaaaactggagtaaaaggactaactgcagtcagcaacaatgcaggggttgacaattttggtttggggcttttgcttcggtccaagcagataaaacgcatggtctcttcatatgtgggagaaaatgcagaatttgaacgacagtacttatctggtgaattagaagtggagctgacaccacagggcacacttgcagagaggatccgtgcaggcggggctggagttcctgcattttacaccccaacagggtatgggaccctggtacaagaaggaggatcgcccatcaaatacaacaaagatggcagtgttgccattgccagtaagccaagagaggtgagggagttcaatggtcagcactttattttggaggaagcaattacaggggattttgctttggtgaaagcctggaaggcggaccgagcaggaaacgtgattttcaggaaaagtgcaaggaatttcaacttgccaatgtgcaaagctgcagaaaccacagtggtagaggttgaagaaattgtggatattggagcatttgctccagaagacatccatattcctcagatttatgtacatcgccttataaagggagaaaaatatgagaaaagaattgagcgtttatcaatccggaaagagggagatggggaagccaaatctgctaaacctggagatgacgtaagggaacgaatcatcaagagggccgctcttgagtttgaggatggcatgtatgctaatttgggcataggaatccctctcctggccagcaattttatcagcccaaatataactgttcatcttcaaagtgaaaatggagttctgggtttgggtccatatccacgacaacatgaagctgatgcagatctcatcaatgcaggcaaggaaacagttactattcttccaggagcctcttttttctccagcgatgaatcatttgcaatgattagaggtggacacgtcgatctgacaatgctaggagcgatgcaggtttccaaatatggtgacctggctaactggatgatacctgggaagatggtgaaaggaatgggaggtgctatggatttagtgtccagtgcgaaaaccaaagtggtggtcaccatggagcattctgcaaagggaaatgcacataaaatcatggagaaatgtacattaccattgactggaaagcaatgtgtcaaccgcattattactgaaaaggctgtgtttgatgtggacaagaagaaagggttgactctgattgagctctgggaaggcctgacagtggatgacgtacagaagagtactgggtgtgattttgcagtttcaccaaaactcatgccaatgcagcagatcgcaaattgaaatatggatatttgtaccaggctgcgtgtttttcattttaaacacacaagatttaattgaaaggacatcaataatcataattgtgtatttaacaggtggttttttattagttttcttgtgtttcagactttatgcagccatataaactgttctctaggcatgctgtgacattttaataaaaagcaaaaggagcatttataattatctcatttgttaaggctgagaaggttgtttttataataggtaattatattgaatgcattttcactgaatatggtatgtatgctaaattatatgaacctttccccaagaagggccctagaaattgatgtggctttcctcttaaatattaattattagtcctgaaagaaagataacatatgtgatttttgtggttaggagagttgctgtcatgattgttttttcttcagcctcctctgacttttcttttggggcttcagattttatgattacatcttgtccccctagaacatcccccttcctcccatactgcttttaaacagatgcccaagaaggcaagcaggaatgcctcttgtgggggagggcagggagaaataactagttcaaaccaactatctatctatgctttgcaaagactaaggcgtattataggaagagggctagaaacctaactgattcttctcagttttctcattttaaaacagcccagtattcctttgtatcctcaagggtccttgagaatacttctgttattgagaccctgtgggctacttgtactgtacctcctctcaagccaagaagggctgtgggataatttaccatgaatccttagtagcaatgacagcagagttaaaaaataaaaggtgttttactttcaggctcttgttttggttcagaggagattttaaatattgaatgacacttctacagaacaacggtttttcttctgccaaggctacttcctttaacgaagtgcctttaattcagccttatccaactagggaaaataatgttggacaagtctaggatttgaagagtcagtgaacttttagtgtcagggaataaacatggtgggtagattaggtttgaaaaaaacttccttagaggtatttattctcaatacctgacaggggcccatgggaatgacttcagaagcatcccggataatagatgggtaaaaagtctaggcaccctgaagaacaggtgagacagctggcctctggacagaggtaggcatagtacagtacgatatatcattcctctggtcctaaatatacaaacttattcatgtttttaggtgatgatggtcattgaaactcacttcttttcaggtgtagctacaattgtgtaatgtacaatattagagaaaggacaggctttttatgagtaacacacaccatatataaaacagcctttctggctgaccacatggttaaatgcataccttcccagtactggggggaaaaaatgacccttcttagaatgtgcaagttccatgagagtaatatattgatatgattttgaaaagaattgttgatagttacatcttcaaacttatcattccagtatgcatctttaagataatgtgattctaagtagatgactttatattcttgattgaagagtgctatacatgttaagaaatgcattaaggaatacaataaatattctaaagtgatgta

SEQ ID NO: 8879 - DNA, 1441 bp, Artificial Sequence
  derived and/or modified sequence
cattttgtgcagtgatggagtgtggcaatggatgcttgttttaattcccggaaataaaccgtcaagaataaaagaacatgatggtgagggagttcaatggtcagcactttattttggaggaagcaattacaggggattttgctttggtgaaagcctggaaggcggaccgagcaggaaacgtgattttcaggaaaagtgcaaggaatttcaacttgccaatgtgcaaagctgcagaaaccacagtggtagaggttgaagaaattgtggatattggagcatttgctccagaagacatccatattcctcagatttatgtacatcgccttataaagggagaaaaatatgagaaaagaattgagcgtttatcaatccggaaagagggagatggggaagccaaatctgctaaacctggagatgacgtaagggaacgaatcatcaagagggccgctcttgagtttgaggatggcatgtatgctaatttgggcataggaatccctctcctggccagcaattttatcagcccaaatataactgttcatcttcaaagtgaaaatggagttctgggtttgggtccatatccacgacaacatgaagctgatgcagatctcatcaatgcaggcaaggaaacagttactattcttccaggagcctcttttttctccagcgatgaatcatttgcaatgattagaggtggacacgtcgatctgacaatgctaggagcgatgcaggtttccaaatatggtgacctggctaactggatgatacctgggaagatggtgaaaggaatgggaggtgctatggatttagtgtccagtgcgaaaaccaaagtggtggtcaccatggagcattctgcaaagggaaatgcacataaaatcatggagaaatgtacattaccattgactggaaagcaatgtgtcaaccgcattattactgaaaaggctgtgtttgatgtggacaagaagaaagggttgactctgattgagctctgggaaggcctgacagtggatgacgtacagaagagtactgggtgtgattttgcagtttcaccaaaactcatgccaatgcagcagatcgcaaattgaaatatggatatttgtaccaggctgcgtgtttttcattttaaacacacaagatttaattgaaaggacatcaataatcataattgtgtatttaacaggtggttttttattagttttcttgtgtttcagactttatgcagccatataaactgttctctaggcatgctgtgacattttaataaaaagcaaaaggagcatttataattatctcatttgttaaggctgagaaggttgtttttataataggtaattatattgaatgcattttcactgaatatggtatgtatgctaaattatatgaacctttccccaagaagggccctagaaattgatgtggctttcctcttaaatattaattatta

SEQ ID NO: 8880 - DNA, 1441 bp, Artificial Sequence
  derived and/or modified sequence
atttcccagccagaaaactatcaggagtttgttcggctgcagggtgtgaaattattcacatcgaatgttgggcattgaatatccagcccactgttaggaaaagaacccccaaaatggaatccatgcctttgtgccaaccatactgaaataaacatttctaagtggacacgtcgatctgacaatgctaggagcgatgcaggtttccaaatatggtgacctggctaactggatgatacctgggaagatggtgaaaggaatgggaggtgctatggatttagtgtccagtgcgaaaaccaaagtggtggtcaccatggagcattctgcaaagggaaatgcacataaaatcatggagaaatgtacattaccattgactggaaagcaatgtgtcaaccgcattattactgaaaaggctgtgtttgatgtggacaagaagaaagggttgactctgattgagctctgggaaggcctgacagtggatgacgtacagaagagtactgggtgtgattttgcagtttcaccaaaactcatgccaatgcagcagatcgcaaattgaaatatggatatttgtaccaggctgcgtgtttttcattttaaacacacaagatttaattgaaaggacatcaataatcataattgtgtatttaacaggtggttttttattagttttcttgtgtttcagactttatgcagccatataaactgttctctaggcatgctgtgacattttaataaaaagcaaaaggagcatttataattatctcatttgttaaggctgagaaggttgtttttataataggtaattatattgaatgcattttcactgaatatggtatgtatgctaaattatatgaacctttccccaagaagggccctagaaattgatgtggctttcctcttaaatattaattattagtcctgaaagaaagataacatatgtgatttttgtggttaggagagttgctgtcatgattgttttttcttcagcctcctctgacttttcttttggggcttcagattttatgattacatcttgtccccctagaacatcccccttcctcccatactgcttttaaacagatgcccaagaaggcaagcaggaatgcctcttgtgggggagggcagggagaaataactagttcaaaccaactatctatctatgctttgcaaagactaaggcgtattataggaagagggctagaaacctaactgattcttctcagttttctcattttaaaacagcccagtattcctttgtatcctcaagggtccttgagaatacttctgttattgagaccctgtgggctacttgtactgtacctcctctcaagccaagaagggctgtgggataatttaccatgaatccttagtagcaatgacagcagagttaaaaaataaaaggtgttttactttcaggctcttgttttggttcagaggagatttt

SEQ ID NO: 8881 - DNA, 1593 bp, Artificial Sequence
  derived and/or modified sequence
actttctagctagtgtttgtgttcaagtagtcacattctgcctcactgaaggaaacagtcttcctgtgtacacctgttcatagtttgttattgaaacaatgtatactgtaacttttttttcaaaaagaatttttagtgattatttctctgtcagcatggagctgatctattaggaaatcagttgtgtggtgggggaagcaagtatattttggtgtggacacgtcgatctgacaatgctaggagcgatgcaggtttccaaatatggtgacctggctaactggatgatacctgggaagatggtgaaaggaatgggaggtgctatggatttagtgtccagtgcgaaaaccaaagtggtggtcaccatggagcattctgcaaagggaaatgcacataaaatcatggagaaatgtacattaccattgactggaaagcaatgtgtcaaccgcattattactgaaaaggctgtgtttgatgtggacaagaagaaagggttgactctgattgagctctgggaaggcctgacagtggatgacgtacagaagagtactgggtgtgattttgcagtttcaccaaaactcatgccaatgcagcagatcgcaaattgaaatatggatatttgtaccaggctgcgtgtttttcattttaaacacacaagatttaattgaaaggacatcaataatcataattgtgtatttaacaggtggttttttattagttttcttgtgtttcagactttatgcagccatataaactgttctctaggcatgctgtgacattttaataaaaagcaaaaggagcatttataattatctcatttgttaaggctgagaaggttgtttttataataggtaattatattgaatgcattttcactgaatatggtatgtatgctaaattatatgaacctttccccaagaagggccctagaaattgatgtggctttcctcttaaatattaattattagtcctgaaagaaagataacatatgtgatttttgtggttaggagagttgctgtcatgattgttttttcttcagcctcctctgacttttcttttggggcttcagattttatgattacatcttgtccccctagaacatcccccttcctcccatactgcttttaaacagatgcccaagaaggcaagcaggaatgcctcttgtgggggagggcagggagaaataactagttcaaaccaactatctatctatgctttgcaaagactaaggcgtattataggaagagggctagaaacctaactgattcttctcagttttctcattttaaaacagcccagtattcctttgtatcctcaagggtccttgagaatacttctgttattgagaccctgtgggctacttgtactgtacctcctctcaagccaagaagggctgtgggataatttaccatgaatccttagtagcaatgacagcagagttaaaaaataaaaggtgttttactttcaggctcttgttttggttcagaggagattttaaatattgaatgacacttctacagaacaacggtttttcttctgccaaggctacttcctttaacgaagtgcctttaattcagccttatccaactagggaaa

SEQ ID NO: 8882 - DNA, 2962 bp, Artificial Sequence
  derived and/or modified sequence
tcaaatgcctataaggttgacaattttggtttggggcttttgcttcggtccaagcagataaaacgcatggtctcttcatatgtgggagaaaatgcagaatttgaacgacagtacttatctggtgaattagaagtggagctgacaccacagggcacacttgcagagaggatccgtgcaggcggggctggagttcctgcattttacaccccaacagggtatgggaccctggtacaagaaggaggatcgcccatcaaatacaacaaagatggcagtgttgccattgccagtaagccaagagaggtgagggagttcaatggtcagcactttattttggaggaagcaattacaggggattttgctttggtgaaagcctggaaggcggaccgagcaggaaacgtgattttcaggaaaagtgcaaggaatttcaacttgccaatgtgcaaagctgcagaaaccacagtggtagaggttgaagaaattgtggatattggagcatttgctccagaagacatccatattcctcagatttatgtacatcgccttataaagggagaaaaatatgagaaaagaattgagcgtttatcaatccggaaagagggagatggggaagccaaatctgctaaacctggagatgacgtaagggaacgaatcatcaagagggccgctcttgagtttgaggatggcatgtatgctaatttgggcataggaatccctctcctggccagcaattttatcagcccaaatataactgttcatcttcaaagtgaaaatggagttctgggtttgggtccatatccacgacaacatgaagctgatgcagatctcatcaatgcaggcaaggaaacagttactattcttccaggagcctcttttttctccagcgatgaatcatttgcaatgattagaggtggacacgtcgatctgacaatgctaggagcgatgcaggtttccaaatatggtgacctggctaactggatgatacctgggaagatggtgaaaggaatgggaggtgctatggatttagtgtccagtgcgaaaaccaaagtggtggtcaccatggagcattctgcaaagggaaatgcacataaaatcatggagaaatgtacattaccattgactggaaagcaatgtgtcaaccgcattattactgaaaaggctgtgtttgatgtggacaagaagaaagggttgactctgattgagctctgggaaggcctgacagtggatgacgtacagaagagtactgggtgtgattttgcagtttcaccaaaactcatgccaatgcagcagatcgcaaattgaaatatggatatttgtaccaggctgcgtgtttttcattttaaacacacaagatttaattgaaaggacatcaataatcataattgtgtatttaacaggtggttttttattagttttcttgtgtttcagactttatgcagccatataaactgttctctaggcatgctgtgacattttaataaaaagcaaaaggagcatttataattatctcatttgttaaggctgagaaggttgtttttataataggtaattatattgaatgcattttcactgaatatggtatgtatgctaaattatatgaacctttccccaagaagggccctagaaattgatgtggctttcctcttaaatattaattattagtcctgaaagaaagataacatatgtgatttttgtggttaggagagttgctgtcatgattgttttttcttcagcctcctctgacttttcttttggggcttcagattttatgattacatcttgtccccctagaacatcccccttcctcccatactgcttttaaacagatgcccaagaaggcaagcaggaatgcctcttgtgggggagggcagggagaaataactagttcaaaccaactatctatctatgctttgcaaagactaaggcgtattataggaagagggctagaaacctaactgattcttctcagttttctcattttaaaacagcccagtattcctttgtatcctcaagggtccttgagaatacttctgttattgagaccctgtgggctacttgtactgtacctcctctcaagccaagaagggctgtgggataatttaccatgaatccttagtagcaatgacagcagagttaaaaaataaaaggtgttttactttcaggctcttgttttggttcagaggagattttaaatattgaatgacacttctacagaacaacggtttttcttctgccaaggctacttcctttaacgaagtgcctttaattcagccttatccaactagggaaaataatgttggacaagtctaggatttgaagagtcagtgaacttttagtgtcagggaataaacatggtgggtagattaggtttgaaaaaaacttccttagaggtatttattctcaatacctgacaggggcccatgggaatgacttcagaagcatcccggataatagatgggtaaaaagtctaggcaccctgaagaacaggtgagacagctggcctctggacagaggtaggcatagtacagtacgatatatcattcctctggtcctaaatatacaaacttattcatgtttttaggtgatgatggtcattgaaactcacttcttttcaggtgtagctacaattgtgtaatgtacaatattagagaaaggacaggctttttatgagtaacacacaccatatataaaacagcctttctggctgaccacatggttaaatgcataccttcccagtactggggggaaaaaatgacccttcttagaatgtgcaagttccatgagagtaatatattgatatgattttgaaaagaattgttgatagttacatcttcaaacttatcattccagtatgcatctttaagataatgtgattctaagtagatgactttatattcttgattgaagagtgctatacatgttaagaaatgcattaaggaatacaataaatattctaaagtgatgt

SEQ ID NO: 8883 - DNA, 1563 bp, Artificial Sequence
  derived and/or modified sequence
atggccgccctgaagctgctgagcagcggcctgagactgtgcgccagcgccagaggcagcggcgccacctggtacaagggctgcgtgtgcagcttcagcaccagcgcccacagacacaccaagttctacaccgaccccgtggaggccgtgaaggacatccccgacggcgccaccgtgctggtgggcggcttcggcctgtgcggcatccccgagaacctgatcgacgccctgctgaagaccggcgtgaagggcctgaccgccgtgagcaacaacgccggcgtggacaacttcggcctgggcctgctgctgagaagcaagcagatcaagagaatggtgagcagctacgtgggcgagaacgccgagttcgagagacagtacctgagcggcgagctggaggtggagctgaccccccagggcaccctggccgagagaatcagagccggcggcgccggcgtgcccgccttctacacccccaccggctacggcaccctggtgcaggagggcggcagccccatcaagtacaacaaggacggcagcgtggccatcgccagcaagcccagagaggtgagagagttcaacggccagcacttcatcctggaggaggccatcaccggcgacttcgccctggtgaaggcctggaaggccgacagagccggcaacgtgatcttcagaaagagcgccagaaacttcaacctgcccatgtgcaaggccgccgagaccaccgtggtggaggtggaggagatcgtggacatcggcgccttcgcccccgaggacatccacatcccccagatctacgtgcacagactgatcaagggcgagaagtacgagaagagaatcgagagactgagcatcagaaaggagggcgacggcgaggccaagagcgccaagcccggcgacgacgtgagagagagaatcatcaagagagccgccctggagttcgaggacggcatgtacgccaacctgggcatcggcatccccctgctggccagcaacttcatcagccccaacatcaccgtgcacctgcagagcgagaacggcgtgctgggcctgggcccctaccccagacagcacgaggccgacgccgacctgatcaacgccggcaaggagaccgtgaccatcctgcccggcgccagcttcttcagcagcgacgagagcttcgccatgatcagaggcggccacgtggacctgaccatgctgggcgccatgcaggtgagcaagtacggcgacctggccaactggatgatccccggcaagatggtgaagggcatgggcggcgccatggacctggtgagcagcgccaagaccaaggtggtggtgaccatggagcacagcgccaagggcaacgcccacaagatcatggagaagtgcaccctgcccctgaccggcaagcagtgcgtgaacagaatcatcaccgagaaggccgtgttcgacgtggacaagaagaagggcctgaccctgatcgagctgtgggagggcctgaccgtggacgacgtgcagaagagcaccggctgcgacttcgccgtgagccccaagctgatgcccatgcagcagatcgccaactag

SEQ ID NO: 8884 - DNA, 1005 bp, Artificial Sequence
  derived and/or modified sequence
atgatggtgagagagttcaacggccagcacttcatcctggaggaggccatcaccggcgacttcgccctggtgaaggcctggaaggccgacagagccggcaacgtgatcttcagaaagagcgccagaaacttcaacctgcccatgtgcaaggccgccgagaccaccgtggtggaggtggaggagatcgtggacatcggcgccttcgcccccgaggacatccacatcccccagatctacgtgcacagactgatcaagggcgagaagtacgagaagagaatcgagagactgagcatcagaaaggagggcgacggcgaggccaagagcgccaagcccggcgacgacgtgagagagagaatcatcaagagagccgccctggagttcgaggacggcatgtacgccaacctgggcatcggcatccccctgctggccagcaacttcatcagccccaacatcaccgtgcacctgcagagcgagaacggcgtgctgggcctgggcccctaccccagacagcacgaggccgacgccgacctgatcaacgccggcaaggagaccgtgaccatcctgcccggcgccagcttcttcagcagcgacgagagcttcgccatgatcagaggcggccacgtggacctgaccatgctgggcgccatgcaggtgagcaagtacggcgacctggccaactggatgatccccggcaagatggtgaagggcatgggcggcgccatggacctggtgagcagcgccaagaccaaggtggtggtgaccatggagcacagcgccaagggcaacgcccacaagatcatggagaagtgcaccctgcccctgaccggcaagcagtgcgtgaacagaatcatcaccgagaaggccgtgttcgacgtggacaagaagaagggcctgaccctgatcgagctgtgggagggcctgaccgtggacgacgtgcagaagagcaccggctgcgacttcgccgtgagccccaagctgatgcccatgcagcagatcgccaactag

SEQ ID NO: 8885 - DNA, 372 bp, Artificial Sequence
  derived and/or modified sequence
atgctgggcgccatgcaggtgagcaagtacggcgacctggccaactggatgatccccggcaagatggtgaagggcatgggcggcgccatggacctggtgagcagcgccaagaccaaggtggtggtgaccatggagcacagcgccaagggcaacgcccacaagatcatggagaagtgcaccctgcccctgaccggcaagcagtgcgtgaacagaatcatcaccgagaaggccgtgttcgacgtggacaagaagaagggcctgaccctgatcgagctgtgggagggcctgaccgtggacgacgtgcagaagagcaccggctgcgacttcgccgtgagccccaagctgatgcccatgcagcagatcgccaactag

SEQ ID NO: 8886 - DNA, 453 bp, Artificial Sequence
  derived and/or modified sequence
agcaacgcctacaaggtggacaacttcggcctgggcctgctgctgagaagcaagcagatcaagagaatggtgagcagctacgtgggcgagaacgccgagttcgagagacagtacctgagcggcgagctggaggtggagctgaccccccagggcaccctggccgagagaatcagagccggcggcgccggcgtgcccgccttctacacccccaccggctacggcaccctggtgcaggagggcggcagccccatcaagtacaacaaggacggcagcgtggccatcgccagcaagcccagagaggtgagagagttcaacggccagcacttcatcctggaggaggccatcaccggcgacttcgccctggtgaaggcctggaaggccgacagagccggcaacgtgatcttcagaaagagcgccagaaacttcaacctgcccatgtgcaaggccgcctag

SEQ ID NO: 8887 - protein, 215 aa, Artificial Sequence
  derived and/or modified sequence
MTTLAGAVPRMMRPGPGQNYPRSGFPLEVSTPLGQGRVNQLGGVFINGRPLPNHIRHKIVEMAHHGIRPCVISRQLRVSHGCVSKILCRYQETGSIRPGAIGGSKPKQVTTPDVEKKIEEYKRENPGMFSWEIRDKLLKDAVCDRNTVPSVSSISRILRSKFGKGEEEEADLERKEAEESEKKAKHSIDGILSERGKRWRLGRRTCWVTWRASAS

SEQ ID NO: 8888 - DNA, 1489 bp, Artificial Sequence
  derived and/or modified sequence
aggaggagactcaggcaggccgcgctccagcctcaccaggctccccggctcgccgtggctctctgagcccccttttcagggaccccagtcgctggaacatttgcccagactcgtaccaaacttttccgccctgggctcgggatcctggactccggggcctccccgtcctcccctttcccgggttccagctccggcctctggactaggaaccgacagcccccctccccgcgtccctccctctctctccagccgttttggggaggggctctccacgctccggatagttcccgagggtcatccgcgccgcactcgcctttccgtttcgccttcacctggatataatttccgagcgaagctgcccccaggatgaccacgctggccggcgctgtgcccaggatgatgcggccgggcccggggcagaactacccgcgtagcgggttcccgctggaagtgtccactcccctcggccagggccgcgtcaaccagctcggcggtgtttttatcaacggcaggccgctgcccaaccacatccgccacaagatcgtggagatggcccaccacggcatccggccctgcgtcatctcgcgccagctgcgcgtgtcccacggctgcgtctccaagatcctgtgcaggtaccaggagactggctccatacgtcctggtgccatcggcggcagcaagcccaagcaggtgacaacgcctgacgtggagaagaaaattgaggaatacaaaagagagaacccgggcatgttcagctgggaaatccgagacaaattactcaaggacgcggtctgtgatcgaaacaccgtgccgtcagtgagttccatcagccgcatcctgagaagtaaattcgggaaaggtgaagaggaggaggccgacttggagaggaaggaggcagaggaaagcgagaagaaggccaaacacagcatcgacggcatcctgagcgagcgaggtaagcggtggcgccttgggcggcgcacttgctgggtgacttggagggcatcggctagctgacattggtgatctgacggcagccaagcccagctcggatcaaggtcccttcatgcgcggtgtctctgcgcctgagtaacgacatggaactgaaagaccagagggacactaggaatcaaaacaaacatttctattctgcttagtttttctgttttgtaaatctttctttcttaaccactttcagcccctgggattctagaactgtgaattgtgctctgttgtagggggcaggggaagctctcactctgttgccattaaatgtatgagactgggcatctctgagcaattgtagggccggggatagagggtacttgaatcttcagaagttgaagtagcttttatgccctcaggaaaggccctggtctccggagtttcctcgcattaaaggagagagagagagagtactcttttgggcaacggccctccaaaattgcccccacattggctgccttataaatatgtctgtgtgttgactggt

SEQ ID NO: 8889 - DNA, 648 bp, Artificial Sequence
  derived and/or modified sequence
atgaccaccttagccggcgcagtgccacggatgatgagacccggccctggccagaattaccccaggtcaggttttccgttagaggtctctacccccttggggcagggtagagtgaaccagctgggaggcgtgttcatcaacggccgcccattacctaatcatattcgacacaagatcgtggaaatggcccatcatgggatcagaccatgtgtcatctcgcgtcagctgagggtttcccacgggtgcgtgagtaaaatcctgtgtcgctatcaggaaacaggcagtatcaggccaggagctataggcggtagtaagcctaagcaagtcactacccctgatgttgagaaaaaaattgaggagtacaaacgggagaaccctgggatgttcagttgggaaatccgtgataaactgctgaaggacgccgtatgcgaccggaataccgtgcccagcgtcagctctatcagtagaatactccggtccaaattcggaaagggcgaagaggaggaggccgacctggagcgaaaagaggcagaagagtcggagaagaaagcaaagcactcaattgatggcatattgtccgagcggggaaagcgatggaggctagggagaaggacatgttgggtgacgtggcgagcaagtgcctcatag

SEQ ID NO: 8890 - DNA, 648 bp, Artificial Sequence
  derived and/or modified sequence
atgaccaccctggccggggctgtgcccaggatgatgaggcctggccctggccagaactaccccaggagcggcttccccctggaggtgtccacccccctgggccagggccgggtgaaccagctgggcggcgtcttcatcaatggccggcccctgcccaaccacatccgccacaagatcgtggagatggcccaccacggcatccggccctgcgtcatcagccggcagctgcgggtgagccacggctgtgtgtccaagatcctgtgccgctaccaggagaccggcagcatccggcctggggccatcggcggcagcaagcccaagcaggtgaccaccccagatgtggagaagaagattgaggagtacaagcgggagaaccctggcatgttctcctgggagatccgggacaagctgctgaaggatgctgtgtgtgacaggaacacagtgcccagcgtgagcagcatcagccgcatcctgcggagcaagtttgggaagggggaggaggaggaggccgacctggagaggaaggaggccgaggagagcgagaagaaggccaagcacagcattgatggcatcctgtctgagcggggcaagcgctggaggctgggccgccgcacctgctgggtgacctggagggccagcgccagctag

SEQ ID NO: 8891 - DNA, 648 bp, Artificial Sequence
  derived and/or modified sequence
atgaccaccctggccggcgccgtgccccggatgatgcggcccggccctggccaaaattaccctcgatctgggtttccactggaagtgtccacacctctgggccaggggcgcgtgaaccaactggggggtgtcttcataaacggaagaccactgccgaatcacatccgtcacaagattgtcgagatggcccatcacggcatccggccttgcgtcatttcgagacagctaagggttagccatggatgcgtgtccaagatactgtgcaggtatcaagaaaccggctcaatccgtcccggcgccatcggaggatctaagcctaaacaggttacaacacccgacgtggagaaaaaaatcgaggagtataagcgagaaaatcccggcatgttctcttgggagattagagacaaactcctgaaagacgcagtctgcgaccggaacactgtcccgtcggtgagcagcatctctcgcattctgaggtcgaaatttggcaaaggtgaagaggaagaagctgacctggaacggaaggaagctgaggaatccgagaaaaaagccaaacattccattgacgggatcctgtcagaacggggtaagcggtggcgcctgggcagacggacgtgctgggttacctggcgagcctctgcgtcttag

SEQ ID NO: 8892 - DNA, 1254 bp, Artificial Sequence
  derived and/or modified sequence
ccctctctctccagccgttttggggaggggctctccacgctccggatagttcccgagggtcatccgcgccgcactcgcctttccgtttcgccttcacctggatataatttccgagcgaagctgcccccaggatgaccacgctggccggcgctgtgcccaggatgatgcggccgggcccggggcagaactacccgcgtagcgggttcccgctggaagtgtccactcccctcggccagggccgcgtcaaccagctcggcggtgtttttatcaacggcaggccgctgcccaaccacatccgccacaagatcgtggagatggcccaccacggcatccggccctgcgtcatctcgcgccagctgcgcgtgtcccacggctgcgtctccaagatcctgtgcaggtaccaggagactggctccatacgtcctggtgccatcggcggcagcaagcccaagcaggtgacaacgcctgacgtggagaagaaaattgaggaatacaaaagagagaacccgggcatgttcagctgggaaatccgagacaaattactcaaggacgcggtctgtgatcgaaacaccgtgccgtcagtgagttccatcagccgcatcctgagaagtaaattcgggaaaggtgaagaggaggaggccgacttggagaggaaggaggcagaggaaagcgagaagaaggccaaacacagcatcgacggcatcctgagcgagcgaggtaagcggtggcgccttgggcggcgcacttgctgggtgacttggagggcatcggctagctgacattggtgatctgacggcagccaagcccagctcggatcaaggtcccttcatgcgcggtgtctctgcgcctgagtaacgacatggaactgaaagaccagagggacactaggaatcaaaacaaacatttctattctgcttagtttttctgttttgtaaatctttctttcttaaccactttcagcccctgggattctagaactgtgaattgtgctctgttgtagggggcaggggaagctctcactctgttgccattaaatgtatgagactgggcatctctgagcaattgtagggccggggatagagggtacttgaatcttcagaagttgaagtagcttttatgccctcaggaaaggccctggtctccggagtttcctcgcattaaaggagagagagagagagtactcttttgggcaacggccctccaaaattgcccccacattggctgccttataaatatgtctgtgtgttgactggt

SEQ ID NO: 8893 - DNA, 648 bp, Artificial Sequence
  derived and/or modified sequence
atgaccacactggctggagcggtaccacgaatgatgcgtcctggccctgggcagaactaccccagatctggattcccattggaggtatccacgcctctcggacaggggcgagtaaaccagctcggtggcgtttttatcaacgggaggccgctgccaaatcacattcgccacaaaatcgtggagatggcacatcacggtatcagaccttgtgtgatctctaggcaactgagggtgtctcacgggtgcgtttccaaaatcctatgccgctaccaggaaaccggatctatccgcccaggtgctataggcggaagtaagcctaaacaagtgacaaccccagatgtggagaagaagattgaagaatataagagagagaatcccggtatgttttcctgggaaattcgggataagttgctcaaagatgccgtgtgtgaccgcaacacagttccctccgtgtcatctatcagcaggatccttcggagtaaatttggaaaaggcgaggaggaggaagccgatcttgaaaggaaggaagcggaggaatccgagaaaaaagcaaagcacagcattgacgggattttaagcgagagaggtaagaggtggaggctgggcagacggacttgctgggtgacttggagggctagtgcgtcatag

SEQ ID NO: 8894 - DNA, 648 bp, Artificial Sequence
  derived and/or modified sequence
atgaccaccctggccggcgccgtgcccagaatgatgagacccggccccggccagaactaccccagaagcggcttccccctggaggtgagcacccccctgggccagggcagagtgaaccagctgggcggcgtgttcatcaacggcagacccctgcccaaccacatcagacacaagatcgtggagatggcccaccacggcatcagaccctgcgtgatcagcagacagctgagagtgagccacggctgcgtgagcaagatcctgtgcagataccaggagaccggcagcatcagacccggcgccatcggcggcagcaagcccaagcaggtgaccacccccgacgtggagaagaagatcgaggagtacaagagagagaaccccggcatgttcagctgggagatcagagacaagctgctgaaggacgccgtgtgcgacagaaacaccgtgcccagcgtgagcagcatcagcagaatcctgagaagcaagttcggcaagggcgaggaggaggaggccgacctggagagaaaggaggccgaggagagcgagaagaaggccaagcacagcatcgacggcatcctgagcgagagaggcaagagatggagactgggcagaagaacctgctgggtgacctggagagccagcgccagctag

SEQ ID NO: 8895 - protein, 753 aa, Artificial Sequence
  derived and/or modified sequence
MERRAWSLQCTAFVLFCAWCALNSAKAKRQFVNEWAAEIPGGPEAASAIAEELGYDLLGQIGSLENHYLFKHKNHPRRSRRSAFHITKRLSDDDRVIWAEQQYEKERSKRSALRDSALNLFNDPMWNQQWYLQDTRMTAALPKLDLHVIPVWQKGITGKGVVITVLDDGLEWNHTDIYANYDPEASYDFNDNDHDPFPRYDPTNENKHGTRCAGEIAMQANNHKCGVGVAYNSKVGGIRMLDGIVTDAIEASSIGFNPGHVDIYSASWGPNDDGKTVEGPGRLAQKAFEYGVKQGRQGKGSIFVWASGNGGRQGDNCDCDGYTDSIYTISISSASQQGLSPWYAEKCSSTLATSYSSGDYTDQRITSADLHNDCTETHTGTSASAPLAAGIFALALEANPNLTWRDMQHLVVWTSEYDPLANNPGWKKNGAGLMVNSRFGFGLLNAKALVDLADPRTWRSVPEKKECVVKDNDFEPRALKANGEVIIEIPTRACEGQENAIKSLEHVQFEATIEYSRRGDLHVTLTSAAGTSTVLLAERERDTSPNGFKNWDFMSVHTWGENPIGTWTLRITDMSGRIQNEGRIVNWKLILHGTSSQPEHMKQPRVYTSYNTVQNDRRGVEKMVDPGEEQPTQENPKENTLVSKSPSSSSVGGRRDELEEGAPSQAMLRLLQSAFSKNSPPKQSPKKSPSAKLNIPYENFYEALEKLNKPSQLKDSEDSLYNDYVDVFYNTKPYKHRDDRLLQALVDILNEEN

SEQ ID NO: 8896 - protein, 158 aa, Artificial Sequence
  derived and/or modified sequence
MERRAWSLQCTAFVLFCAWCALNSAKAKRQFVNEWAAEIPGGPEAASAIAEELGYDLLGQIGSLENHYLFKHKNHPRRSRRSAFHITKRLSDDDRVIWAEQQYEKERSKRSALRDSALNLFNDPMWNQQWYLQDTRMTAALPKLDLHVIPVWQKGITG

SEQ ID NO: 8897 - DNA, 2262 bp, Artificial Sequence
  derived and/or modified sequence
atggagcgcagagcgtggtccttgcagtgtacggcattcgtactcttctgtgcttggtgtgccctgaactccgccaaggcaaaacgccaatttgtgaacgagtgggctgcagagatccccggaggtcctgaggccgccagcgctatcgccgaggagctcggctacgacttgctagggcaaatcggttcactggaaaatcactacctgttcaagcacaagaatcaccctcggaggtcacgtcgtagcgccttccacataactaagcgcctgtcagacgatgacagagtaatttgggcagagcagcagtatgaaaaggagaggtcaaagcgatctgccctgagagactccgccctgaatttgtttaacgaccctatgtggaaccaacagtggtacctgcaggatacccgtatgaccgcggcgcttccaaaactggatctccacgttatacccgtgtggcagaaaggaattacaggcaaaggagtggtgatcaccgtgctggacgacgggcttgagtggaaccatacggacatctacgcaaattacgacccagaggcatcttatgactttaatgataacgaccatgatccgttcccacggtatgacccaaccaacgaaaataaacatgggacccgttgcgccggtgagatcgcgatgcaggccaacaaccacaaatgtggggtgggtgtcgcctataattctaaggtgggcggaatccgcatgctcgatgggattgtgactgatgccatcgaggcttcaagtattggattcaaccctgggcacgtggatatctacagcgccagctggggaccaaatgacgacggtaagacagtggaggggcccgggcgactggctcagaaggcctttgagtacggggtgaagcagggaaggcagggcaaaggatccatcttcgtttgggccagtgggaacggagggcggcagggagataattgtgactgcgatgggtacacagactccatctacaccatttcaatctcatccgcatcccagcaggggctctccccctggtatgccgagaagtgctcttcaacgttggccactagttattcttctggggattatacagatcagagaatcacttcggctgacctgcacaatgactgcaccgagacacacaccgggacctccgctagcgccccgctagccgcagggatttttgcgctggctctggaagccaatccgaatctgacctggcgggatatgcaacatctggttgtctggactagcgaatacgaccccctggctaacaaccccggttggaagaagaatggggccggtctgatggtgaattcccgattcggattcggtctactgaatgctaaagcattagtcgacctggccgatcctcgcacgtggcgcagcgtcccagagaaaaaagaatgtgtcgtgaaggacaacgacttcgaaccgagagccctgaaagccaacggtgaggtgataattgaaatacccacacgcgcctgtgagggtcaggagaatgcgattaagtctctggagcatgtccagttcgaagcaacaatcgagtactcaagaagaggagatttgcacgtaacccttacctcggcagccggaacttctaccgtgctgcttgctgagagagagagggacacttctccaaacggtttcaagaactgggattttatgagtgtgcacacatggggagagaatccgattggtacgtggactttgagaattacagacatgagcggtaggattcagaacgaaggaaggattgtcaactggaagttaattcttcacggcacctcctcccaacctgagcacatgaaacagcccagggtctatacctcatacaacacagtgcaaaacgatcggcggggcgtggagaaaatggtcgaccctggagaggaacaacccacgcaggaaaatccaaaagagaacaccctggtaagcaagagcccaagtagcagtagtgtgggcggacgccgggatgagctcgaggagggcgctccatcacaggctatgctgagactcctgcagtctgctttttccaaaaacagtccacccaagcagtcacccaaaaagtcaccaagcgctaaactgaatattccatacgagaacttttatgaagcgctcgagaagctgaacaaaccctcacagctgaaggactccgaagacagtctttacaatgattatgtcgatgtgttctataacacaaagccttataaacaccgcgatgacaggctgttgcaggcgctggtagacatcctcaatgaggagaattag

SEQ ID NO: 8898 - DNA, 477 bp, Artificial Sequence
  derived and/or modified sequence
atggagaggagagcatggagtctgcagtgtaccgcatttgtgttgttttgcgcttggtgcgccctgaactccgcgaaggcaaagaggcagttcgtgaacgagtgggccgcagagatacccgggggtcctgaggccgcaagcgcgatcgccgaggaactgggatacgacctccttggtcaaatcggctcactggagaaccactatctgttcaaacataagaaccatcctagaaggagcagaagatccgcttttcatattacgaaacggttgtctgatgacgaccgggtgatctgggccgagcagcaatacgaaaaggaaaggagcaagcgcagtgcactgcgagacagcgccctgaacctgttcaatgaccccatgtggaatcagcagtggtatcttcaggatacccggatgaccgctgcacttccaaagctggatttgcatgtgattcctgtctggcaaaaggggatcacaggatag

SEQ ID NO: 8899 - DNA, 2262 bp, Artificial Sequence
  derived and/or modified sequence
atggagcggcgggcctggagcctgcagtgcacagcctttgtgctcttctgtgcctggtgtgccctgaacagcgccaaggccaagaggcagtttgtgaatgagtgggccgctgagatccctgggggccctgaggccgccagcgccatcgccgaggagctgggctatgacctgctgggccagatcggcagcctggagaaccactacctgttcaagcacaagaaccaccccaggaggagccgccgcagcgccttccacatcaccaagaggctgagtgatgatgacagagtcatctgggccgagcagcagtatgagaaggagaggagcaagaggtctgccctgcgggacagcgccctgaacctcttcaatgaccccatgtggaaccagcagtggtacctgcaggacaccaggatgacagctgccctgcccaagctggacctgcacgtgattcctgtgtggcagaagggcatcactggaaaaggagtggtgatcaccgtgctggatgatggcctggagtggaaccacacagacatctatgccaactatgaccctgaggccagctatgacttcaatgacaatgaccatgaccccttccccaggtatgaccccaccaatgaaaacaagcacggcacccgctgtgccggggagatcgccatgcaggccaacaaccacaagtgtggggtgggcgtggcctacaacagcaaggtgggcggcatccgcatgctggatggcatcgtgacagatgccatcgaggccagcagcatcggcttcaaccctggccacgtggacatctacagcgcctcctggggccccaatgatgatggcaagacagtggagggccctggccgcctggcccagaaggcctttgaatatggagtgaagcagggccggcagggcaagggcagcatctttgtgtgggccagcggaaatggaggccggcagggcgacaactgtgactgtgatggctacacagacagcatctacaccatcagcatcagcagcgccagccagcagggcctgagcccctggtacgccgagaagtgcagcagcaccctggccaccagctacagcagcggggactacacagaccagaggatcaccagcgctgacctgcacaatgactgcacagagacccacacaggcaccagcgccagcgcccccctggccgccggcatctttgccctggccctggaggccaaccccaacctgacctggagggacatgcagcacctggtggtgtggaccagtgaatatgaccccctggccaacaaccctggctggaagaagaatggagctggcctgatggtgaacagcagatttggatttggcctgctgaatgccaaggccctggtggacctggccgaccccaggacctggaggtctgtgcctgagaagaaggaatgtgtggtgaaggacaatgactttgagccccgggccctgaaggccaacggggaggtgatcatcgagatccccacccgggcctgtgagggccaggagaatgccatcaagagcctggagcacgtgcagtttgaggccaccatcgagtacagcagaagaggagacctgcacgtgaccctgaccagcgctgctggcaccagcacagtgctgctggccgagcgggagcgggacaccagccccaacggcttcaagaactgggacttcatgtctgtgcacacctggggcgagaaccccatcggcacctggaccctgcgcatcacagacatgagcggccgcatccagaatgaaggccgcatcgtgaactggaagctgatcctgcacggcaccagcagccagcctgagcacatgaagcagccccgggtgtacaccagctacaacacagtgcagaatgacagaagaggagtggagaagatggtggaccccggggaggagcagcccacccaggagaaccccaaggagaacaccctggtgtccaagagccccagcagcagctctgtgggcggcagaagagatgagctggaggagggcgcccccagccaggccatgctgcggctgctgcagagcgccttcagcaagaacagcccccccaagcagagccccaagaagagccccagcgccaagctgaacatcccctatgagaacttctatgaggccctggagaagctgaacaagcccagccagctgaaggacagcgaggacagcctgtacaatgactatgtggatgtgttctacaacaccaagccctacaagcacagagatgaccggctgctgcaggccctggtggacatcctgaatgaggagaactag

SEQ ID NO: 8900 - DNA, 477 bp, Artificial Sequence
  derived and/or modified sequence
atggagcggcgggcctggagcctgcagtgcacagcctttgtgctcttctgtgcctggtgtgccctgaacagcgccaaggccaagaggcagtttgtgaatgagtgggccgctgagatccctgggggccctgaggccgccagcgccatcgccgaggagctgggctatgacctgctgggccagatcggcagcctggagaaccactacctgttcaagcacaagaaccaccccaggaggagccgccgcagcgccttccacatcaccaagaggctgagtgatgatgacagagtcatctgggccgagcagcagtatgagaaggagaggagcaagaggtctgccctgcgggacagcgccctgaacctcttcaatgaccccatgtggaaccagcagtggtacctgcaggacaccaggatgacagctgccctgcccaagctggacctgcacgtgattcctgtgtggcagaagggcatcactggatag

SEQ ID NO: 8901 - DNA, 2262 bp, Artificial Sequence
  derived and/or modified sequence
atggagcggcgggcctggagcctgcagtgcaccgccttcgtgctgttttgcgcctggtgcgccctgaatagcgcaaaggcaaagcggcaatttgtgaatgaatgggccgctgaaattcccggtgggccagaggctgcgtcggctattgccgaggagttaggttatgacctgctggggcaaattggatcgctggagaaccactatctttttaagcacaaaaaccaccctcgaaggtctaggcgcagcgctttccatatcacaaagcggctcagcgacgatgatcgcgtgatctgggcggaacagcaatacgaaaaagagcggtccaagcggtctgcgctcagagatagcgcgctgaacctcttcaacgacccgatgtggaaccagcaatggtatctacaggacacccgaatgacggcggccctcccaaagttagaccttcatgttatccccgtatggcagaagggcattactggcaaaggcgtcgttattaccgtattagacgatggactagagtggaaccatacagacatttatgctaactatgatcccgaggccagctatgattttaacgataacgaccacgacccatttccaaggtatgatccaacaaacgaaaataagcacggaactcgctgcgccggggaaatcgcaatgcaggctaataaccacaagtgtggggtgggagtggcctataactctaaagtggggggaattcgtatgctggatggaattgtgacagacgctattgaagcctctagcatcggcttcaatcctggccatgtcgacatatatagcgcaagctgggggcctaacgatgacggaaaaactgttgaaggaccaggacgacttgctcaaaaagcatttgagtacggagtgaaacaaggccgccagggaaagggaagtatttttgtctgggcatcaggaaatggagggcgccagggggataattgtgactgcgatggctacactgacagtatttacacaatcagcatcagctcagccagtcagcaagggctaagcccctggtatgcggagaagtgcagctcaacacttgctacatcctattcttcaggggactacaccgatcagagaattacttcagcggacctccacaacgactgcactgaaacccatactggaacgtctgcgtcagcaccgctcgccgccggtattttcgccctggccttggaagcgaacccaaacctgacttggagggacatgcagcatctggtggtttggaccagcgagtacgaccccttagctaacaacccaggatggaaaaagaacggcgccggcttaatggttaactcacgatttgggtttgggttgctgaacgcaaaagccctcgtagacttggccgatccacgcacttggcgcagtgtgcccgaaaaaaaagagtgcgtggtcaaggacaatgatttcgaaccacgcgcactcaaggctaacggcgaggtgataatcgagatacccacacgggcttgtgagggccaggagaacgcgatcaagtcactggagcacgtacagtttgaggccacgatagagtactcaagaaggggtgatctgcatgttacattgacctcggcagccggaacatctacagtcttactagccgagcgagaacgtgatacctcacccaacgggttcaagaattgggatttcatgagcgttcacacctggggcgagaaccccataggcacttggacacttcggattacggacatgagcggaaggattcaaaatgaggggagaattgtgaactggaagcttatactgcacggcacatcctcccagcccgagcatatgaaacagccaagagtgtacacgagttacaatacggttcagaacgacaggcgtggcgttgagaaaatggttgaccctggcgaggagcaacccactcaggaaaatcctaaggaaaatactttagtctccaagtcaccaagcagttccagtgtgggcggccgcagagacgagctggaggaaggggccccgtcccaggctatgctgcgactgctccagtcagcattttctaaaaactccccgcccaagcagtcccccaaaaagagcccctccgctaaactaaacatcccctatgagaatttctacgaggccttggagaaactcaacaaaccctcccagctcaaagactctgaagactccttgtacaatgactacgtcgatgttttctataacaccaaaccatataagcacagagacgatcgtttactgcaggccttagtggatatactgaacgaagagaattag

SEQ ID NO: 8902 - DNA, 477 bp, Artificial Sequence
  derived and/or modified sequence
atggagcggcgggcctggagcctgcagtgcaccgccttcgtgctgttctgcgcctggtgtgccctgaactccgccaaggcaaagaggcagttcgtgaatgagtgggccgcagagattcctggagggcccgaagctgcctccgccatcgccgaagaattgggctatgatctccttggccagattggttcactcgaaaaccattatctcttcaagcacaagaaccatcctagacgcagtcgaagatctgcctttcacataactaagaggctatcagacgacgacagggtgatctgggccgagcagcagtacgagaaagagaggagcaaacgctccgcattgagggactcagcgctaaacctgttcaacgatcctatgtggaatcaacagtggtacctgcaggacacaagaatgactgcggccctgcctaagctggatctccatgttatacccgtgtggcaaaaggggatcacggggtag

SEQ ID NO: 8903 - DNA, 2262 bp, Artificial Sequence
  derived and/or modified sequence
atggagaggcgggcttggtcgctccagtgtactgcctttgtgcttttttgcgcctggtgcgctcttaacagcgcgaaagccaagcgccagttcgtgaatgagtgggccgcagaaatccctggcggacccgaggctgctagcgccatcgccgaagaattgggatacgacctgctgggccagataggttccctcgaaaaccactacttgtttaagcacaaaaatcatccgagaaggagccgcaggtctgcttttcacatcactaaacgtttgtcagatgacgatcgggtcatctgggccgaacagcagtatgaaaaggagaggtcgaaacggtcagccttaagagatagcgcgctcaatctgtttaatgaccccatgtggaaccagcagtggtatctccaggacacgcgcatgaccgccgctctgccaaagttggacctacatgtcattcctgtctggcagaaaggtatcaccggcaaaggtgtagtgattacagtactcgacgacggtcttgaatggaaccataccgatatttatgctaactacgatcccgaagcaagctacgactttaacgataacgaccacgatccttttcctcgctatgaccccacaaacgaaaacaaacacggcacgagatgtgctggggagatcgcaatgcaggcaaataaccacaaatgtggggttggagtggcttataatagcaaagtcggaggcatccggatgctggatggcatcgtcactgacgcgatcgaggcgtcatctattgggttcaatcctggccatgttgatatctattcagcatcctggggcccaaacgacgatgggaagaccgtcgaagggccagggagactggcgcagaaggcctttgaatatggagtcaaacagggcagacagggcaaaggcagcatatttgtttgggccagtggcaacggtgggcgacagggcgataattgcgattgcgacggatataccgacagcatatacaccatttccatttcctcggcctctcaacagggcttatccccatggtacgccgagaagtgtagtagcactctggcaacatcttactcaagcggcgactataccgatcagagaatcacatcagccgatcttcataatgactgcacggagacccatacaggtacaagcgcatcagccccactcgcagcgggtatcttcgctctggcactggaagccaatcctaacctgacctggcgcgacatgcagcatctggtggtttggaccagtgaatacgacccactcgctaataatcccggttggaaaaagaacggcgcagggctgatggtgaattcccgcttcggcttcggacttcttaacgccaaggccctggtcgacttggccgaccccagaacttggcggtctgtgccagagaaaaaggaatgtgtggtcaaggataacgacttcgagccacgggcactgaaagcaaatggtgaggttataatcgaaataccgacccgagcatgcgaaggccaggagaacgccattaagtctctcgagcacgttcaattcgaggccactatcgagtactctcggagaggcgatctacacgtcaccctgacttccgccgctggcacctccacagtgcttctagcggagagggagcgagatacctcaccaaatggctttaagaattgggattttatgagcgtgcacacttggggggagaatcccatcgggacttggacactacgaattactgatatgagcgggcgtatccagaatgagggacgaattgtcaactggaaattgatactgcatggcacctcatcccagcctgagcacatgaagcagccaagagtctacacatcctataataccgtgcagaacgacaggcgcggtgtagagaagatggtggaccctggggaggagcagcctacacaggagaatccaaaggagaacaccttggtgtcgaaatctcccagttcctcctctgtgggcggtagaagagacgagctggaggaaggcgcaccatcccaggccatgctgaggttgctgcagagcgccttctctaaaaatagcccacccaaacagtcgcccaagaagtccccttccgccaaactcaacattccttacgaaaatttctacgaagctctggaaaaactcaataaaccaagccagttgaaggacagcgaggactcactatataacgattatgtagacgtgttttacaacacaaagccctacaagcaccgagatgaccgattactgcaggctttggtggatatccttaacgaggaaaactag

SEQ ID NO: 8904 - DNA, 477 bp, Artificial Sequence
  derived and/or modified sequence
atggagcgccgtgcatggagcctccaatgtactgcattcgttctgttctgtgcttggtgtgcgctgaatagtgccaaagcgaagcgccagttcgtcaacgagtgggccgctgaaatccctggaggaccggaagcagcatccgctatcgctgaggaactggggtacgatctcctgggccaaattggatcactggagaaccactacctgtttaagcataagaaccaccccaggcgatcccgacgcagcgcctttcacatcaccaaacgtctgtcagacgatgaccgcgtgatctgggctgagcagcagtatgaaaaagagagatccaaacgttcggccttaagggattccgcactgaacctgtttaacgacccaatgtggaaccagcagtggtatctgcaggacacacgcatgacagcagccctgcccaaattggacctgcatgtgatcccggtttggcagaaaggcattactggatag

SEQ ID NO: 8905 - DNA, 5086 bp, Artificial Sequence
  derived and/or modified sequence
tttccattctggctgggaagggctggggctccactcagcctggagaccgaagcgcttcactgagcgctcgccgccgcccagcctctcctctcgcgcctcctagctcttcgcagagcaaccaggagccaggagtggtctagagcccgagggtgggaagggggagtctgtctggcttttctcctatcttgcttctttttcctcttcccttcccactcttgttcaagcgagtgtgtgagctatggagcgaagagcctggagtctgcagtgcactgctttcgtcctcttttgcgcttggtgtgcactgaacagtgcaaaagcgaaaaggcaatttgtcaatgaatgggcagcggagatccccgggggcccggaagcagcctcggccatcgccgaggagctgggctatgaccttttgggtcagattggttcacttgaaaatcactacttattcaaacataaaaaccaccccagaaggtctcgaaggagtgcctttcatatcactaagagattatctgatgatgatcgtgtgatatgggctgaacaacagtatgaaaaagaaagaagtaaacgttcagctctaagggactcagcactaaatctcttcaatgatcccatgtggaatcagcaatggtacttgcaagataccaggatgacggcagccctgcccaagctggaccttcatgtgatacctgtttggcaaaaaggcattacgggcaaaggagttgttatcaccgtactggatgatggtttggagtggaatcacacggacatttatgccaactatgatccagaggctagctatgattttaatgataatgaccatgatccatttccccgatatgatcccacaaacgagaacaaacacgggaccagatgtgcaggagaaattgccatgcaagcaaataatcacaaatgcggggttggagttgcatacaattccaaagttggaggcataagaatgctggatggcattgtgacggatgctattgaggccagttcaattggattcaatcctggacacgtggatatttacagtgcaagctggggccctaatgatgatgggaaaactgtggaggggcctggccggctagcccagaaggcttttgaatatggtgtcaaacaggggagacaggggaaggggtccatcttcgtctgggcttcgggaaacggggggcgtcagggagataattgtgactgtgatggctacacagacagcatctacaccatctccatcagcagtgcctcccagcaaggcctatccccctggtacgctgagaagtgctcctccacactggccacctcttacagcagcggagattacaccgaccagagaatcacgagcgctgacctgcacaatgactgcacggagacgcacacaggcacctcggcctctgcacctctggctgctggcatcttcgctctggccctggaagcaaacccaaatctcacctggcgagatatgcagcacctggttgtctggacctctgagtatgacccgctggccaataaccctggatggaaaaagaatggagcaggcttgatggtgaatagtcgatttggatttggcttgctaaatgccaaagctctggtggatttagctgaccccaggacctggaggagcgtgcctgagaagaaagagtgtgttgtaaaggacaatgactttgagcccagagccctgaaagctaatggagaagttatcattgaaattccaacaagagcttgtgaaggacaagaaaatgctatcaagtccctggagcatgtacaatttgaagcaacaattgaatattcccgaagaggagaccttcatgtcacacttacttctgctgctggaactagcactgtgctcttggctgaaagagaacgggatacatctcctaatggctttaagaattgggacttcatgtctgttcacacatggggagagaaccctataggtacttggactttgagaattacagacatgtctggaagaattcaaaatgaaggaagaattgtgaactggaagctgattttgcacgggacctcttctcagccagagcatatgaagcagcctcgtgtgtacacgtcctacaacactgttcagaatgacagaagaggggtggagaagatggtggatccaggggaggagcagcccacacaagagaaccctaaggagaacaccctggtgtccaaaagccccagcagcagcagcgtagggggccggagggatgagttggaggagggagccccttcccaggccatgctgcgactcctgcaaagtgctttcagtaaaaactcaccgccaaagcaatcaccaaagaagtccccaagtgcaaagctcaacatcccttatgaaaacttctacgaagccctggaaaagctgaacaaaccttcccagcttaaagactctgaagacagtctgtataatgactatgttgatgttttttataacactaaaccttacaagcacagagacgaccggctgcttcaagctctggtggacattctgaatgaggaaaattaaaataagtgtgtggtcccaagttggaaatattcatgcttcttccttaccctgcgattttgcctgtgtctgaagtggttgttttgtcatgaattcttatgcttataatatcctttgtggcaccttttctttttctccctaaactgtacatgtgaaggggatgagctcaagcaggaagttcaacttccagaattgatcataggtatttcaaaacacatctttcctgtctgcacaagtgaagtgttttgttctttctggagtcacagttgacaaaaagctcttacactacattagaacactgcattagagcccatttcaattctcaaaagaaaaggcaaaacctgggatatcaattaatttgaaaacataatctgcaaagaatgagaaggagtcagaaactgtttctgtagcttgttccctgtcttgtccatgtggttcttcaaattttgatgccaagaaagtatttggtaggcctaatgaaggagttcactgtaagactcattccctagatctttctattccaaagtgccactcattcctgtagtcaaaatctggtcatgttggtcaaaagctggattatttagatctagaaacagatcttgaaatctgaatgctctggtttgagcaattttcgaacattctttgcctggtgcactgtgtctgtggtgccagaggcgtccgtggatccagaggtggttatgactcgtgctgcatgcctggtctttcctctgtttctccttctgaaagttttctatacctgtctcctttctcagccacaaaataaatgttgggagaaatgatatataccactttcccagaaaaaaaaaaacttacacttgggacttggcaaattcctagtcacaatttttttcagcagtaacaggaaaccacttatcacatggagacctaatgtaataatagaaaaatactcataatagggagaaaccaagagaagttttgtttttgtttttttccaactgtgttcattagaacagcgtgttctaagtatttgaaactgaatgtttattccttgatactaaaagttcttctccaatcctatcactgatagtgtccaaattctcaccaaattgctcctaagcttcaaatcagaagcagaaactggcaggccatggaccttaattgtccctcaggtagattttgtttggtatgcagaatgtttttaaaatatgagtggttattgaaaatatgatgtttcacataaaacctcattctcggacccatctttgctcatggcaacagttagctggagctgagtagcagctgcctgattagatgactctcagtccccatggcaccctgctccatgttacctagagcaggcacttgattccttgctgggcagtatccaataggcatttgattttgcccactcctacactaagcgaatgtgtacaaagtgtaaatgcattaggaaaaacaaactacccgcatcttctgttaggcaggatctgtacaataataattatgagtttgcttatgtaatctcacctcacctggatgatcactaatactaattcatttattactaaccttctggcttccttctctcaatatgcttacaaagtctccagtcacctacaatgctggctttctcccactgagtttgctgtttgcaatttttccatgaagtttgaacttcataaggtaattcatggcattgaactggttcatgaaaagaacactagagtctgtcatttgctttggcttgaagtatggttggtaacacaaattttcacctgctcttctaccatttgaatttgtgtagagggtgtttgcagagcaatgcccgtaatgcttagagaatgttctcctaaaagacttgcggaatcactctgtccttggaagtttcatatattgtttgatatgaagtgttagatagaatttccaatattggagcatatcaaaaagtattaaaactaaaaaggaccagagaattcttagattggcccggaaaggccaataaagagttagaatgaaaactcattacttttccattcccaatctagtgctagatgtataaatctttcttttgattcttcctaacaaaatattttctgggttaaaaccccagccaactcattgggttgtagccaaaggttcactctcaagaagctttaatatttaaataaaatcatattgaatgtttccaacctggagtataatattcagatataaaacagttttgtcagtctttcttagtgcctgtgtggatttttgtgaaaatgtcaaagagaaaacttatatactatttcccttgaaattttaaactatattttctttacaggtatttataatataccaatgcttttatcaaacagaattttaaagagcataataaattatattaaagaaccaaaagttttcctgagaataagaaagtttcacccaataaaatatttttgaaaggcatgttcctctgtcaatgaaaaaaagtacatgtatgtgttgtgatattaaaagtgacatttgtctaatagcctaatacaacatgtagctgagtttaacatgtgtggtcttggtattcttaagggaacttccacattatacatttgatgtattgaccagaat

SEQ ID NO: 8906 - DNA, 565 bp, Artificial Sequence
  derived and/or modified sequence
ttttatgggaaagtaatggcacagctccagctcagcaccaaagtgaagagctctactgaggcacaatggaaagtcgagcgagtgtgtgagctatggagcgaagagcctggagtctgcagtgcactgctttcgtcctcttttgcgcttggtgtgcactgaacagtgcaaaagcgaaaaggcaatttgtcaatgaatgggcagcggagatccccgggggcccggaagcagcctcggccatcgccgaggagctgggctatgaccttttgggtcagattggttcacttgaaaatcactacttattcaaacataaaaaccaccccagaaggtctcgaaggagtgcctttcatatcactaagagattatctgatgatgatcgtgtgatatgggctgaacaacagtatgaaaaagaaagaagtaaacgttcagctctaagggactcagcactaaatctcttcaatgatcccatgtggaatcagcaatggtacttgcaagataccaggatgacggcagccctgcccaagctggaccttcatgtgatacctgtttggcaaaaaggcattacggg

SEQ ID NO: 8907 - DNA, 2262 bp, Artificial Sequence
  derived and/or modified sequence
atggagagaagagcctggagcctgcagtgcaccgccttcgtgctgttctgcgcctggtgcgccctgaacagcgccaaggccaagagacagttcgtgaacgagtgggccgccgagatccccggcggccccgaggccgccagcgccatcgccgaggagctgggctacgacctgctgggccagatcggcagcctggagaaccactacctgttcaagcacaagaaccaccccagaagaagcagaagaagcgccttccacatcaccaagagactgagcgacgacgacagagtgatctgggccgagcagcagtacgagaaggagagaagcaagagaagcgccctgagagacagcgccctgaacctgttcaacgaccccatgtggaaccagcagtggtacctgcaggacaccagaatgaccgccgccctgcccaagctggacctgcacgtgatccccgtgtggcagaagggcatcaccggcaagggcgtggtgatcaccgtgctggacgacggcctggagtggaaccacaccgacatctacgccaactacgaccccgaggccagctacgacttcaacgacaacgaccacgaccccttccccagatacgaccccaccaacgagaacaagcacggcaccagatgcgccggcgagatcgccatgcaggccaacaaccacaagtgcggcgtgggcgtggcctacaacagcaaggtgggcggcatcagaatgctggacggcatcgtgaccgacgccatcgaggccagcagcatcggcttcaaccccggccacgtggacatctacagcgccagctggggccccaacgacgacggcaagaccgtggagggccccggcagactggcccagaaggccttcgagtacggcgtgaagcagggcagacagggcaagggcagcatcttcgtgtgggccagcggcaacggcggcagacagggcgacaactgcgactgcgacggctacaccgacagcatctacaccatcagcatcagcagcgccagccagcagggcctgagcccctggtacgccgagaagtgcagcagcaccctggccaccagctacagcagcggcgactacaccgaccagagaatcaccagcgccgacctgcacaacgactgcaccgagacccacaccggcaccagcgccagcgcccccctggccgccggcatcttcgccctggccctggaggccaaccccaacctgacctggagagacatgcagcacctggtggtgtggaccagcgagtacgaccccctggccaacaaccccggctggaagaagaacggcgccggcctgatggtgaacagcagattcggcttcggcctgctgaacgccaaggccctggtggacctggccgaccccagaacctggagaagcgtgcccgagaagaaggagtgcgtggtgaaggacaacgacttcgagcccagagccctgaaggccaacggcgaggtgatcatcgagatccccaccagagcctgcgagggccaggagaacgccatcaagagcctggagcacgtgcagttcgaggccaccatcgagtacagcagaagaggcgacctgcacgtgaccctgaccagcgccgccggcaccagcaccgtgctgctggccgagagagagagagacaccagccccaacggcttcaagaactgggacttcatgagcgtgcacacctggggcgagaaccccatcggcacctggaccctgagaatcaccgacatgagcggcagaatccagaacgagggcagaatcgtgaactggaagctgatcctgcacggcaccagcagccagcccgagcacatgaagcagcccagagtgtacaccagctacaacaccgtgcagaacgacagaagaggcgtggagaagatggtggaccccggcgaggagcagcccacccaggagaaccccaaggagaacaccctggtgagcaagagccccagcagcagcagcgtgggcggcagaagagacgagctggaggagggcgcccccagccaggccatgctgagactgctgcagagcgccttcagcaagaacagcccccccaagcagagccccaagaagagccccagcgccaagctgaacatcccctacgagaacttctacgaggccctggagaagctgaacaagcccagccagctgaaggacagcgaggacagcctgtacaacgactacgtggacgtgttctacaacaccaagccctacaagcacagagacgacagactgctgcaggccctggtggacatcctgaacgaggagaactag

SEQ ID NO: 8908 - DNA, 477 bp, Artificial Sequence
  derived and/or modified sequence
atggagagaagagcctggagcctgcagtgcaccgccttcgtgctgttctgcgcctggtgcgccctgaacagcgccaaggccaagagacagttcgtgaacgagtgggccgccgagatccccggcggccccgaggccgccagcgccatcgccgaggagctgggctacgacctgctgggccagatcggcagcctggagaaccactacctgttcaagcacaagaaccaccccagaagaagcagaagaagcgccttccacatcaccaagagactgagcgacgacgacagagtgatctgggccgagcagcagtacgagaaggagagaagcaagagaagcgccctgagagacagcgccctgaacctgttcaacgaccccatgtggaaccagcagtggtacctgcaggacaccagaatgaccgccgccctgcccaagctggacctgcacgtgatccccgtgtggcagaagggcatcaccggctag

SEQ ID NO: 8909 - protein, 860 aa, Artificial Sequence
  derived and/or modified sequence
MGEVTAEEVEKFLDSNIGFAKQYYNLHYRAKLISDLLGAKEAAVDFSNYHSPSSMEESEIIFDLLRDFQENLQTEKCIFNVMKKLCFLLQADRMSLFMYRTRNGIAELATRLFNVHKDAVLEDCLVMPDQEIVFPLDMGIVGHVAHSKKIANVPNTEEDEHFCDFVDILTEYKTKNILASPIMNGKDVVAIIMAVNKVDGSHFTKRDEEILLKYLNFANLIMKVYHLSYLHNCETRRGQILLWSGSKVFEELTDIERQFHKALYTVRAFLNCDRYSVGLLDMTKQKEFFDVWPVLMGEVPPYSGPRTPDGREINFYKVIDYILHGKEDIKVIPNPPPDHWALVSGLPAYVAQNGLICNIMNAPAEDFFAFQKEPLDESGWMIKNVLSMPIVNKKEEIVGVATFYNRKDGKPFDEMDETLMESLTQFLGWSVLNPDTYESMNKLENRKDIFQDIVKYHVKCDNEEIQKILKTREVYGKEPWECEEEELAEILQAELPDADKYEINKFHFSDLPLTELELVKCGIQMYYELKVVDKFHIPQEALVRFMYSLSKGYRKITYHNWRHGFNVGQTMFSLLVTGKLKRYFTDLEALAMVTAAFCHDIDHRGTNNLYQMKSQNPLAKLHGSSILERHHLEFGKTLLRDESLNIFQNLNRRQHEHAIHMMDIAIIATDLALYFKKRTMFQKIVDQSKTYESEQEWTQYMMLEQTRKEIVMAMMMTACDLSAITKPWEVQSQVALLVAAEFWEQGDLERTVLQQNPIPMMDRNKADELPKLQVGFIDFVCTFVYKEFSRFHEEITPMLDGITNNRKEWKALADEYDAKMKVQEEKKQKQQSAKSAAAGNQPGGNPSPGGATTSKSCCIQ

SEQ ID NO: 8910 - DNA, 2583 bp, Artificial Sequence
  derived and/or modified sequence
atgggagaggtcactgccgaggaggtcgaaaagttccttgatagtaatatcggcttcgcaaaacaatactataacctgcactaccgagccaagctgatttctgacttgctgggcgctaaagaagcagctgtcgatttctcgaactatcatagcccatcgtctatggaggaatccgaaataatcttcgatctgctgagagacttccaggagaatttacagaccgagaaatgcatttttaacgtaatgaagaaactgtgcttcttgctgcaggctgacaggatgtctttgtttatgtataggactcgcaacggcattgctgaactggccactcgtttatttaatgtccataaggacgcagtgctagaagattgtctggtgatgcccgaccaagagatcgtgttcccgctggatatgggcatcgttggacacgttgcccattccaaaaaaattgccaacgtccccaataccgaggaggacgaacatttctgcgattttgtcgacatcttaaccgagtacaagacaaagaatatacttgcaagtcctataatgaacggcaaggacgtagtcgccataattatggcggtgaataaagtcgacgggagccacttcacaaagagggacgaagagattttacttaagtatctgaatttcgccaacctcatcatgaaagtctaccatttatcatatcttcataactgcgagactaggcgggggcagatattgctgtggagtggcagtaaggtcttcgaggagctcacagatattgagcgccagttccacaaggccctgtataccgtccgtgccttcctgaactgtgataggtactctgttgggctcttggacatgacaaagcagaaagagttctttgatgtctggcccgtactgatgggggaggtgcccccttactctggcccccggacacctgacggcagagaaattaacttttataaggtcatcgactacattctgcacgggaaagaggacatcaaggtcattcccaacccacctcctgaccattgggctcttgtgtccgggctccctgcctacgtggcccagaacggcttaatctgcaacatcatgaacgcccctgctgaggattttttcgccttccaaaaggagccgctagacgagtccggctggatgatcaaaaatgtgctgtcaatgccaatagtgaacaagaaggaggagatagtaggtgtcgccacattttacaacagaaaggacgggaaaccctttgacgagatggacgaaaccctgatggagtcacttacccagtttctcggatggtcagttcttaacccagatacctacgagagcatgaacaagttagagaaccggaaagatatcttccaagatatcgtgaaatatcatgtaaagtgtgataatgaagagatccagaagatccttaaaacacgggaagtgtatgggaaagagccatgggagtgcgaggaagaagagctcgctgaaatactccaggccgagctgccggatgctgacaaatatgaaatcaataaatttcatttcagtgatctgccccttacggagctggaactcgtcaagtgcggtatccagatgtattatgaattgaaggtggtcgataaatttcatatcccacaggaggcactcgtccggttcatgtactcattgagcaagggctatagaaaaatcacataccacaattggcgtcacggctttaatgtagggcaaacaatgtttagcctgctggtcactggaaagctcaagagatactttacagatcttgaagcccttgcgatggtgacggcagccttctgccatgacatcgatcatagaggcacaaacaacctatatcagatgaaatcgcagaacccgcttgcaaaactgcacggatctagcatcttagaacgtcaccatttggagttcggtaaaacactcctgcgcgacgagagtctgaatattttccagaatcttaacaggcgccaacacgagcacgccattcatatgatggacatcgccattattgccacggacctggccctctatttcaagaagaggacaatgttccagaaaattgtggaccagagcaaaacttatgagtcagaacaggagtggacccagtatatgatgcttgaacagactagaaaggaaatcgtgatggctatgatgatgacggcgtgtgacctaagcgccattaccaagccctgggaggtgcagagtcaggttgctcttctggtggctgccgagttctgggaacagggcgatcttgagcgaacagttctgcagcagaacccaatcccgatgatggacagaaataaagccgatgaacttcccaagctgcaagtgggtttcattgatttcgtctgcacatttgtctataaggaattcagcaggtttcacgaagagattacccccatgctggacggtatcactaataataggaaggagtggaaagcattagccgatgagtatgacgctaaaatgaaagtccaagaggagaagaagcaaaagcagcagagtgccaaaagcgccgcagccggaaatcaaccgggtggaaatccatccccggggggggccactaccagcaagtcctgctgcatacagtag

SEQ ID NO: 8911 - DNA, 2583 bp, Artificial Sequence
  derived and/or modified sequence
atgggagaggtgacagctgaggaggtggagaagttcctggacagcaacattggatttgccaagcagtactacaacctgcactaccgggccaagctgatcagtgacctgctgggcgccaaggaggccgctgtggacttcagcaactaccacagccccagctccatggaggagagcgagatcatctttgacctgctgcgggacttccaggagaacctgcagacagagaagtgcatcttcaacgtgatgaagaagctgtgcttcctgctgcaggccgacaggatgagcctcttcatgtaccgcaccagaaatggaattgctgagctggccaccaggctcttcaacgtgcacaaggatgctgtgctggaggactgcctggtgatgccagaccaggagatcgtgttccccctggacatgggcatcgtgggccacgtggcccacagcaagaagatcgccaacgtgcccaacacagaggaggatgagcacttctgtgactttgtggacatcctgacagagtacaagaccaagaacatcctggccagccccatcatgaatggcaaggatgtggtggccatcatcatggctgtgaacaaggtggatggcagccacttcaccaagagagatgaggagatcctgctgaagtacctgaactttgccaacctgatcatgaaggtgtaccacctgagctacctgcacaactgtgagacccggcggggccagatcctgctgtggagcggcagcaaggtgtttgaggagctgacagacatcgagcggcagttccacaaggccctgtacacagtgcgggccttcctgaactgtgaccgctacagcgtgggcctgctggacatgaccaagcagaaggagttctttgatgtgtggcctgtgctgatgggagaggtgcccccctacagcggccccaggaccccagatggccgggagatcaacttctacaaggtgattgactacatcctgcacggcaaggaggacatcaaggtgatccccaaccccccaccagaccactgggccctggtgtctggcctgcctgcctacgtggcccagaatggcctcatctgcaacatcatgaatgccccagctgaggacttctttgccttccagaaggagcccctggatgagagcggctggatgatcaagaatgtgctgtccatgcccatcgtgaacaagaaggaggagatcgtgggcgtggccaccttctacaacaggaaggatggcaagccctttgatgagatggatgagaccctgatggagagcctgacccagttcctgggctggagcgtgctgaacccagacacctatgaatccatgaacaagctggagaacaggaaggacatcttccaggacatcgtgaagtaccacgtgaagtgtgacaatgaggagatccagaagatcctgaagacccgggaggtgtatggcaaggagccctgggagtgtgaggaggaggagctggccgagatcctgcaggccgagctgcctgatgctgacaagtatgagatcaacaagttccacttcagtgacctgcccctgacagagctggagctggtgaagtgtggcatccagatgtactatgagctgaaggtggtggacaagttccacatcccccaggaggccctggtgcgcttcatgtacagcctgagcaagggctacaggaagatcacctaccacaactggaggcatggcttcaacgtgggccagaccatgttcagcctgctggtgacaggcaagctgaagcgctacttcacagacctggaggccctggccatggtgacagctgccttctgccacgacatcgaccaccggggcaccaacaacctgtaccagatgaagagccagaaccccctggccaagctgcacggcagcagcatcctggagcggcaccacctggagtttgggaagaccctgctgagagatgagagcctgaacatcttccagaacctgaacagacggcagcatgaacatgccatccacatgatggacatcgccatcatcgccacagacctggccctgtacttcaagaagaggaccatgttccagaagatcgtggaccagagcaagacctatgaaagtgagcaggagtggacccagtacatgatgctggagcagaccaggaaggagatcgtgatggccatgatgatgacagcctgtgacctgagcgccatcaccaagccctgggaggtgcagagccaggtggccctgctggtggccgctgagttctgggagcagggcgacctggagaggacagtgctgcagcagaaccccatccccatgatggacaggaacaaggcagatgagctgcccaagctgcaggtgggcttcatcgactttgtgtgcacctttgtgtacaaggagttcagccgcttccacgaggagatcacccccatgctggatggcatcaccaacaacaggaaggagtggaaggccctggctgatgaatatgatgccaagatgaaggtgcaggaggagaagaagcagaagcagcagagcgccaagtctgctgctgctggcaaccagcccggcggcaaccccagccctgggggcgccaccaccagcaagagctgctgcatccagtag

SEQ ID NO: 8912 - DNA, 2583 bp, Artificial Sequence
  derived and/or modified sequence
atgggcgaggtgaccgccgaggaggtggagaagttcctggacagcaatattgggtttgccaaacagtactacaacctccattaccgtgccaagctgatctcagacctgttaggcgcgaaggaggctgccgtggacttttctaactaccactcaccatcctctatggaggaaagtgaaatcatttttgatctcctgcgcgacttccaggagaacctacaaaccgaaaaatgcatttttaatgtgatgaagaaactttgttttcttctccaggctgaccggatgagcctgtttatgtatcgaacccggaacggtattgctgagctggcaacgaggctgtttaacgtgcataaagacgctgtactggaggactgtctggtgatgccggaccaggaaattgtcttccccctcgatatgggcatcgtcggccacgtcgctcatagcaaaaaaatagcaaacgtacctaataccgaggaagacgaacacttctgtgacttcgtggacatactcaccgaatataaaactaagaacatcctggcaagccccattatgaatggaaaggacgtggtggccataatcatggccgtgaacaaagtagacggttcacactttactaagagggatgaagaaattctcctgaagtatctgaacttcgctaatttgatcatgaaagtttaccacctgtcctatctacacaattgtgaaactagaagaggccagatcctcctctggagtggcagtaaagtgtttgaggaattgaccgatatcgaacgtcaatttcacaaagctctttatactgtgcgggcatttctgaactgcgaccggtacagtgttgggttgctcgacatgacaaaacagaaggagttttttgatgtatggcctgtgctaatgggtgaggtcccaccatatagcggtccccgtacacccgatggacgggaaattaatttttataaagtgattgactacatactccacggtaaagaagatattaaggtaatacccaaccctccacctgatcactgggctctggtcagtgggttgcccgcttacgtggcacagaacggactgatctgtaacataatgaacgccccagcggaggactttttcgccttccagaaagaaccactggatgaatcaggttggatgatcaagaatgtgctctcaatgcccatcgtcaacaaaaaagaagagatagtgggtgtagccacattctataataggaaggacgggaaaccttttgatgagatggatgagactttgatggagtcactcacgcagtttctcggttggtcagtgctcaaccctgatacctatgagtcgatgaacaagctggaaaatagaaaggacatcttccaagatatagtgaaatatcacgtgaaatgtgacaatgaagagatccaaaaaatcttgaagacgcgggaggtttacgggaaagagccctgggagtgcgaggaggaagagcttgccgagatccttcaggctgaattacctgacgcagacaagtacgaaattaataagtttcatttctccgatctcccactgactgagctcgaactggtgaaatgcggaattcagatgtactacgagctcaaggtagtggacaaattccacataccccaggaagcgcttgtgagatttatgtactccctgagcaaaggatatcgcaagattacataccacaattggcgccatggttttaatgttggacagactatgttcagcctcctggtcacaggaaagcttaaaaggtacttcactgacctcgaggccctcgccatggtgacggccgccttctgccacgacattgaccacagggggacaaacaatctgtaccagatgaaatcacaaaatccactagcaaagctgcacggtagctctattctggagcggcatcacctggaatttgggaaaaccctcctccgcgatgaatccctcaacattttccagaacctcaacagacgccagcatgaacacgccatacacatgatggatattgcaataattgctaccgatctagcgctgtacttcaagaagcgaaccatgttccagaaaattgttgaccagtcaaagacatacgaatccgagcaggaatggacccagtatatgatgctggagcaaacccgcaaggagatcgtgatggctatgatgatgactgcctgcgatctctctgcgatcaccaaaccgtgggaggtccagagtcaggttgccctgctggtggccgccgagttctgggagcagggagatctggagaggaccgtgctccagcagaacccgatcccgatgatggatagaaataaagccgatgagctccccaaattgcaggtcggatttattgacttcgtgtgtacgtttgtttataaggagttcagtagattccatgaagagatcacccctatgctggacggtattacaaataaccgaaaggagtggaaagctctggccgacgaatacgacgccaagatgaaggttcaggaggagaaaaaacagaagcaacaatccgccaagagtgccgctgcaggaaaccagccaggcgggaatcccagccccggcggcgccactacctccaaaagctgctgtattcagtag

SEQ ID NO: 8913 - DNA, 5642 bp, Artificial Sequence
  derived and/or modified sequence
agtatgttttgcagacaagacccagagaagtccagactggacttgttgcagactgcaaaactgccattggaaggcctccgtcccagtccttctacagagtagccagtgggattcccagccatgggcgaggtgacagcagaggaggtggagaagttcctggactcgaatattggctttgccaaacagtactacaacctccactaccgggccaagctcatctccgacctccttggggccaaggaggctgccgtggacttcagcaactaccactccccgagcagcatggaggagagcgaaatcatctttgatctcctgcgggactttcaggagaatttacagacagagaaatgcatcttcaatgtcatgaagaagctgtgcttcctcctgcaggcagaccgcatgagcctgttcatgtaccggacccgcaatggcatcgcagagctggccaccaggcttttcaatgtccacaaggatgctgtcctcgaggactgcctggtgatgcccgaccaagagatcgtcttccctttggacatgggcatcgtgggccatgtcgcacactctaagaagattgctaacgtccccaacacagaggaggatgagcatttctgtgactttgtggacatcctcacagagtacaagaccaagaacatcttggcttcccccataatgaatgggaaggatgtggtggccataatcatggctgtgaataaagtggatggatcccacttcaccaagagagatgaagagattcttctcaagtacctcaattttgcaaatctaatcatgaaggtgtaccacctgagttacctgcacaactgtgaaactcgacgtggccagatactgctgtggtctgggagcaaagtctttgaagaacttacggacatcgaacgacagttccacaaagccctgtacacagtccgtgctttcctcaactgtgacagatactctgtgggtctcttagacatgaccaagcagaaggaattttttgatgtgtggccggttctgatgggtgaagttccaccttactctggtcccaggactccggatggaagagaaattaacttttacaaggtcattgactacatcctgcatggcaaagaggacatcaaagtcatcccgaatccacctcctgaccattgggctttagtaagcggtctcccagcttatgttgcccagaatggcctgatttgcaacatcatgaatgcgcctgcggaggacttttttgcatttcagaaagaacctctggatgagtctggatggatgattaaaaatgtgctttcaatgccgattgtgaacaagaaggaagaaattgttggagtggccacattttacaatcgtaaagatgggaagccctttgatgaaatggatgagacgctcatggagtctttgactcaatttctgggctggtctgtcttaaatcctgacacctatgagtcaatgaataaacttgaaaataggaaggatattttccaggacatagtaaaatatcatgtgaagtgtgacaatgaagaaattcagaaaatcttgaaaaccagagaggtgtatgggaaggagccatgggagtgtgaggaagaggagctggctgagatcctgcaagcggagctgccagatgcagataaatacgaaattaataaatttcacttcagtgacttacccctaacagaactggagctggtaaaatgtggaatacagatgtattatgagctcaaagtggtggataaatttcacattccacaagaggccctggtgcggttcatgtactccctgagtaagggctaccgcaagatcacctaccacaactggcggcacggcttcaacgtggggcagaccatgttctccctgctggtgacgggaaagctgaagcgctacttcacggacctagaggccttggccatggtcactgctgctttctgccatgacattgaccacagaggcaccaataacctctaccagatgaaatcccagaacccactggccaagctccatgggtcctctatcttggaaagacaccacttggagtttggcaaaacactgctcagagacgagagcctgaatatctttcaaaacctcaatcgtcgacagcatgagcatgccatccacatgatggacattgcaatcattgccacagacctcgccctgtatttcaagaagaggacgatgttccaaaagatcgtggatcagtctaagacatatgagagtgaacaggagtggacacagtacatgatgctggagcagacacggaaggaaatcgttatggccatgatgatgaccgcctgtgatctctcagccatcaccaaaccctgggaggtgcagagccaggtagctctgctggtggctgctgaattctgggaacaaggtgacctggagcgcacggtgctgcaacagaatcccattcccatgatggacagaaacaaagcagatgaactccctaagcttcaagtcggcttcattgactttgtttgcaccttcgtctacaaggaattctcccgtttccacgaggagatcaccccaatgttggacgggatcaccaacaatcgcaaggagtggaaggcgcttgctgatgagtacgatgccaagatgaaggtgcaggaggagaagaagcagaaacagcagtcggccaagtcagcagccgcaggaaatcagccggggggaaaccccagcccagggggtgcaactacatccaagtcctgctgcatccagtaacaccactggggatgtgctggctggacggcaccaccctttcctgggaagagatgactcaagccagtggaagaccacacaccttgagaagtagaagagtcataggatttgaaagctgttagagaatttagcttccaggactgttcaatcttttggcttccctgggccacattggaagaattgtcttgggtcacacataaaatacagtaacactaatgatagctgttgaacttaaaaaaaaaaatcgccaaaaaaaaaaatttcataatgttttaagaaagtttatgaatttgtgttgggccgcattcaaagccgtcctgggctgcatgtggcccacgggccgtgggttgaacaagcttggcttataccttatccagtggcttttaaacattcttttagtcttgagaactgcctattgagctaaaaccaatattctagctttcatagacatcagttaaacatttaattacatttaattaatgccagattcactggcttgcttagaatcatttttgttcttatactttcagttaatgtattgtaaaaattttcaatcattttcaaaagtagagaattgtacgttgaatccccacatacccatcacccagattccaatatcaagattttgctacatgcatttcgtctgtcctttttacattttcttttcaattttttttcttacctgaagtgtttaaaggcaaatcctggccaggcgtggtggctcacacctgtaatcccagcacttcaggaggctgaggtgggcagactgcatgagcccaggagtctgagaccaacctgagcaaaatggcaaaaccctgtctctacaaaaaatacaaaaattagcactcacctgtagtctcagctacctgggaggcagaggtgagaggatctcttgaacccaggaggcggaagttgcagtgagctgagatcatgctactgcactccagcttgggcgaccgagcgagactctgactcaaacaaaagcaaaagaaaaggcaaatcccaaacatatcatttcacacctctactatctcatctttaaagaaataagtatgttttctaacataaccacatcactggcccatgcaaccaatgcctgcctaatacccagctgtgatctatgctttgatgggctgcacagaccccaagcttcagcaaaggacttgggaccccaccagctttgagtgctgttgacagacccttagtatcaaccccatcaggtgttactgcagccttccccagggtggcctacacccaatgactgatccatgccaggtggagaggcctggccatcttggctgagcatgggataactgtgcagggctgttccagctccacgactcctcgtggggtccactaaggctgtcgctgggctcacatcccaactcgacttctccctctgcccactcctatttccttcccttccccaagcatcggtccccagggcactgcttaataagcatcctgcagactaagtccattttagagtctgctttctgggacacccaacttgtgatgccagcccttaatcaaccttccttcattctcatgaacgttttcaatggttggcttgcctgaatctgatccaaacaaattcacatattgaatttagttgtttctttttgttggtttttagaaaaaagaagatgtactttttattcttggatttttcattgatttcacagagtataaattaagtcagattattctcaattccagaacttctgtttcttaaattagcaggcattctgttggtttaaaaagatagatgttggccgggcgcggtggctcacgcctgtaattccagcactttgggaggccaaggtgggtggatcacctgaggtcaggagttcaagaccagcctggccaacatggtgaaaccccatctctactaaaaatacaaaaattagctgggtgtggtggtgtgcacctgtaatcccagctactcaggaggctgaggcaggagaatcgcttgaacctgggaggcgaaggttgcagtgagctgagatcatgccactgcactccagcctgggcaacaagagcaagactccgtctcaaaaaaaaaaaaaagaaaaaaaaaagatgtggcagatagaatttctctctttctctatctttcatgacgaggtctcactctgtcgcccaggctggagtgcagtggtatgaccatagctcactggagccccagctgcccgggctcaagcaatcctccatctcagcttaccaagcagcggtgaccacaggcatgcaccaccatgcccagctaattttttaaaacctatctttgtagacatggggtctcattctgttgcccaggctggcctcaaactcctgacttcaagcaatcctcctgcctcagcctcccaaagtgttgggattacaggcgtgagccactgcacctggccaggacttatttcttttaaaccgaatctaagtatgttctggcaagtatgcaatacctagcggaatgcactggcctgatcagcattcataccatagtaactgatgttgaaaacagcacaaataaaccagaagttgaaaatggcaataacatgctaaaaatttgcaagtcaatttgttacacttgtccaaatcttgattttttttccttctctatcgttccccccccaccaccagctttatggaggtataattagcaaataaaaagtatacatatttaaggtatacactgtgatgttttgatatacattgtgaaatggttaccataattaagctaattaatatatccatcacctcacatagccatggttaagtttctgaagtctcttttaatctacaaagtactccttccttttttccattgtcatcaccttgcagaaacagagtcagttttcccacattctgtatttatctgtttgtttctttgtggccgcatgtaacacattcctctgtctcattctaataaatggacattagctcta

SEQ ID NO: 8914 - DNA, 2583 bp, Artificial Sequence
  derived and/or modified sequence
atgggggaagtcacagccgaggaagttgaaaaattcctggatagtaatataggtttcgccaagcagtactacaatctgcattatcgggcaaaactgatttccgacctgttgggcgctaaagaagctgccgttgatttttctaattaccacagcccatcatctatggaagaatctgagatcattttcgacctcttgagagacttccaggaaaaccttcagactgagaaatgcatattcaacgtgatgaagaaactgtgctttctgctacaggctgaccgtatgtctcttttcatgtacagaaccagaaacgggattgcagagttggcaaccagactcttcaacgtgcacaaagacgcagtactggaggattgtttagtgatgccagatcaagaaatcgtgtttcctctcgatatgggcatcgttggccatgtggcgcacagcaaaaagatagcaaacgtgccaaataccgaggaggatgagcatttttgtgatttcgtagacatcctcacagaatacaaaacaaaaaatattcttgcgagtccgattatgaacggtaaagatgtggtggctattattatggcggtcaacaaggtcgacggaagccacttcacaaagagagatgaggaaatacttctgaaatacctgaacttcgctaacctgataatgaaggtataccatttaagctatcttcacaactgtgagaccaggagaggccaaattctgttatggtctggttcaaaggtctttgaggaattgaccgatatagagcgtcagttccataaggcattgtacacagtccgagccttcctgaactgcgatcgctacagtgtaggactgctggatatgaccaagcagaaagaattttttgatgtttggccggtactcatgggcgaggttccaccttactcgggcccacgcactcccgacggccgagaaatcaatttctataaggtgatagattacattctgcacggaaaggaggacattaaggttatcccaaatcctcctccagatcattgggcgctggtgagcgggctgccggcatatgtggcacagaacggattgatctgcaatatcatgaacgctcctgcagaggatttcttcgctttccagaaggagcccctcgacgaaagcggatggatgatcaagaatgtgcttagcatgcccattgtcaataaaaaagaagagattgtcggcgttgcaactttctacaacagaaaggatgggaagccttttgatgagatggacgagaccctgatggagagtctaacgcagttcttaggctggtcagtcctgaatcctgatacatacgagagtatgaataaattggagaacagaaaggacatttttcaagatattgtgaagtaccacgtcaaatgcgacaacgaagagattcagaaaatcttgaagacaagagaggtgtacggcaaggagccctgggaatgcgaggaggaggaattggccgagatactgcaggcggaattgccagacgccgacaagtatgagattaataagtttcacttcagcgacctgcctctgactgagttggagctagtcaaatgtggcatccagatgtactatgagctgaaagtagttgacaaattccacatcccccaagaagccttggtgcgtttcatgtacagtctgtccaaggggtatcggaagattacgtatcataattggagacacggcttcaacgttggtcagacaatgtttagcctgttggtcaccggcaagctaaaaaggtattttactgacttggaagccctcgctatggtgaccgcagccttttgccatgacatcgaccacaggggaaccaacaacctctaccagatgaagagccagaatcccctcgcaaagctccatggatctagcatcctcgaaaggcaccaccttgagtttgggaaaaccctgcttagagacgagagcctgaacatctttcagaatctgaatcggcgtcagcacgaacacgctatacatatgatggatatcgcaatcatcgctactgatctggccctctattttaagaaacggacaatgttccagaaaattgtggaccagagcaagacttatgagtctgaacaagagtggacacagtacatgatgttggagcagactcggaaggagattgtgatggcgatgatgatgacagcctgtgacttgtctgcaatcacgaagccctgggaagtccagtcacaagtcgccctactcgtggctgcagaattttgggagcagggcgacttggagaggactgtgctgcaacagaacccaataccgatgatggatcggaacaaagccgatgagctgcctaagctccaggtcggcttcatcgacttcgtctgtaccttcgtttataaagaatttagtcgatttcacgaagagatcacacccatgctggatggcattacgaataatcgaaaagaatggaaggcactggccgacgaatatgacgctaagatgaaggttcaggaagagaaaaaacagaaacagcaatctgctaaatcagcggctgccggtaaccagccgggaggaaatccctctccagggggagcaacaaccagtaaaagttgctgcatccaatag

SEQ ID NO: 8915 - DNA, 2583 bp, Artificial Sequence
  derived and/or modified sequence
atgggcgaggtgaccgccgaggaggtggagaagttcctggacagcaacatcggcttcgccaagcagtactacaacctgcactacagagccaagctgatcagcgacctgctgggcgccaaggaggccgccgtggacttcagcaactaccacagccccagcagcatggaggagagcgagatcatcttcgacctgctgagagacttccaggagaacctgcagaccgagaagtgcatcttcaacgtgatgaagaagctgtgcttcctgctgcaggccgacagaatgagcctgttcatgtacagaaccagaaacggcatcgccgagctggccaccagactgttcaacgtgcacaaggacgccgtgctggaggactgcctggtgatgcccgaccaggagatcgtgttccccctggacatgggcatcgtgggccacgtggcccacagcaagaagatcgccaacgtgcccaacaccgaggaggacgagcacttctgcgacttcgtggacatcctgaccgagtacaagaccaagaacatcctggccagccccatcatgaacggcaaggacgtggtggccatcatcatggccgtgaacaaggtggacggcagccacttcaccaagagagacgaggagatcctgctgaagtacctgaacttcgccaacctgatcatgaaggtgtaccacctgagctacctgcacaactgcgagaccagaagaggccagatcctgctgtggagcggcagcaaggtgttcgaggagctgaccgacatcgagagacagttccacaaggccctgtacaccgtgagagccttcctgaactgcgacagatacagcgtgggcctgctggacatgaccaagcagaaggagttcttcgacgtgtggcccgtgctgatgggcgaggtgcccccctacagcggccccagaacccccgacggcagagagatcaacttctacaaggtgatcgactacatcctgcacggcaaggaggacatcaaggtgatccccaaccccccccccgaccactgggccctggtgagcggcctgcccgcctacgtggcccagaacggcctgatctgcaacatcatgaacgcccccgccgaggacttcttcgccttccagaaggagcccctggacgagagcggctggatgatcaagaacgtgctgagcatgcccatcgtgaacaagaaggaggagatcgtgggcgtggccaccttctacaacagaaaggacggcaagcccttcgacgagatggacgagaccctgatggagagcctgacccagttcctgggctggagcgtgctgaaccccgacacctacgagagcatgaacaagctggagaacagaaaggacatcttccaggacatcgtgaagtaccacgtgaagtgcgacaacgaggagatccagaagatcctgaagaccagagaggtgtacggcaaggagccctgggagtgcgaggaggaggagctggccgagatcctgcaggccgagctgcccgacgccgacaagtacgagatcaacaagttccacttcagcgacctgcccctgaccgagctggagctggtgaagtgcggcatccagatgtactacgagctgaaggtggtggacaagttccacatcccccaggaggccctggtgagattcatgtacagcctgagcaagggctacagaaagatcacctaccacaactggagacacggcttcaacgtgggccagaccatgttcagcctgctggtgaccggcaagctgaagagatacttcaccgacctggaggccctggccatggtgaccgccgccttctgccacgacatcgaccacagaggcaccaacaacctgtaccagatgaagagccagaaccccctggccaagctgcacggcagcagcatcctggagagacaccacctggagttcggcaagaccctgctgagagacgagagcctgaacatcttccagaacctgaacagaagacagcacgagcacgccatccacatgatggacatcgccatcatcgccaccgacctggccctgtacttcaagaagagaaccatgttccagaagatcgtggaccagagcaagacctacgagagcgagcaggagtggacccagtacatgatgctggagcagaccagaaaggagatcgtgatggccatgatgatgaccgcctgcgacctgagcgccatcaccaagccctgggaggtgcagagccaggtggccctgctggtggccgccgagttctgggagcagggcgacctggagagaaccgtgctgcagcagaaccccatccccatgatggacagaaacaaggccgacgagctgcccaagctgcaggtgggcttcatcgacttcgtgtgcaccttcgtgtacaaggagttcagcagattccacgaggagatcacccccatgctggacggcatcaccaacaacagaaaggagtggaaggccctggccgacgagtacgacgccaagatgaaggtgcaggaggagaagaagcagaagcagcagagcgccaagagcgccgccgccggcaaccagcccggcggcaaccccagccccggcggcgccaccaccagcaagagctgctgcatccagtag

SEQ ID NO: 8916 - protein, 780 aa, Artificial Sequence
  derived and/or modified sequence
MAAPGGRSEPPQLPEYSCSYMVSRPVYSELAFQQQHERRLQERKTLRESLAKCCSCSRKRAFGVLKTLVPILEWLPKYRVKEWLLSDVISGVSTGLVATLQGMAYALLAAVPVGYGLYSAFFPILTYFIFGTSRHISVGPFPVVSLMVGSVVLSMAPDEHFLVSSSNGTVLNTTMIDTAARDTARVLIASALTLLVGIIQLIFGGLQIGFIVRYLADPLVGGFTTAAAFQVLVSQLKIVLNVSTKNYNGVLSIIYTLVEIFQNIGDTNLADFTAGLLTIVVCMAVKELNDRFRHKIPVPIPIEVIVTIIATAISYGANLEKNYNAGIVKSIPRGFLPPELPPVSLFSEMLAASFSIAVVAYAIAVSVGKVYATKYDYTIDGNQEFIAFGISNIFSGFFSCFVATTALSRTAVQESTGGKTQVAGIISAAIVMIAILALGKLLEPLQKSVLAAVVIANLKGMFMQLCDIPRLWRQNKIDAVIWVFTCIVSIILGLDLGLLAGLIFGLLTVVLRVQFPSWNGLGSIPSTDIYKSTKNYKNIEEPQGVKILRFSSPIFYGNVDGFKKCIKSTVGFDAIRVYNKRLKALRKIQKLIKSGQLRATKNGIISDAVSTNNAFEPDEDIEDLEELDIPTKEIEIQVDWNSELPVKVNVPKVPIHSLVLDCGAISFLDVVGVRSLRVIVKEFQRIDVNVYFASLQDYVIEKLEQCGFFDDNIRKDTFFLTVHDAILYLQNQVKSQEGQGSILETITLIQDCKDTLELIETELTEEELDVQDEAMRTLAS

SEQ ID NO: 8917 - protein, 131 aa, Artificial Sequence
  derived and/or modified sequence
MAAPGGRSEPPQLPEYSCSYMVSRPVYSELAFQQQHERRLQERKTLRESLAKCCSCSRKRAFGVLKTLVPILEWLPKYRVKEWLLSDVISGVSTGLVATLQGMAYALLAAVPVGYGLYSAFFPILTYFIFG

SEQ ID NO: 8918 - protein, 341 aa, Artificial Sequence [sequence omitted]

SEQ ID NO: 8919 - protein, 349 aa, Artificial Sequence
  derived and/or modified sequence
MIAILALGKLLEPLQKSVLAAVVIANLKGMFMQLCDIPRLWRQNKIDAVIWVFTCIVSIILGLDLGLLAGLIFGLLTVVLRVQFPSWNGLGSIPSTDIYKSTKNYKNIEEPQGVKILRFSSPIFYGNVDGFKKCIKSTVGFDAIRVYNKRLKALRKIQKLIKSGQLRATKNGIISDAVSTNNAFEPDEDIEDLEELDIPTKEIEIQVDWNSELPVKVNVPKVPIHSLVLDCGAISFLDVVGVRSLRVIVKEFQRIDVNVYFASLQDYVIEKLEQCGFFDDNIRKDTFFLTVHDAILYLQNQVKSQEGQGSILETITLIQDCKDTLELIETELTEEELDVQDEAMRTLAS

SEQ ID NO: 8920 - protein, 367 aa, Artificial Sequence [sequence omitted]

SEQ ID NO: 8921 - DNA, 2343 bp, Artificial Sequence
  derived and/or modified sequence
atggctgcgcctggaggacgctccgaacctccacagctgcccgaatatagctgtagttacatggtgagccgcccggtgtattcagagctagctttccagcagcagcacgagcgtcgtttgcaagagaggaagacgctgcgggagagcctcgctaaatgctgctcttgttccaggaagagagcatttggcgtattgaagaccctagttccaatcctcgaatggctacctaagtacagggtcaaggaatggctcctaagtgacgtcataagcggagtttcgacaggcctggtagcaactttgcaggggatggcgtatgcccttctggcagccgtaccggtgggatacggactgtactctgcgtttttccctatccttacgtacttcatctttggtacctctagacacattagtgttggccccttccccgtcgtgtcacttatggtgggatcagtagtcctatctatggccccagatgagcactttttggtctcctcctctaatggaacggtgctcaacacaacaatgatcgatactgcggcccgagacacagctcgcgtcctcattgcctctgcgctgaccctgctggtggggattattcagctcatcttcggcggccttcagatcgggttcatcgtgaggtatctagcggaccctctagttggtggatttaccactgccgccgctttccaagtgttggtgtcgcagctgaagattgtgctcaatgtgagcacaaagaactacaatggcgtgctcagtattatctacacattagtagagatatttcaaaacataggggataccaatctggctgacttcacagccgggttactcactatcgtggtctgtatggccgtgaaagaattaaatgacagattcagacataaaatccccgtccccatacccatagaagttatcgtgacaattattgcaactgcaatttcttatggcgccaacctggagaagaattacaacgcaggtatagtaaagagcatcccccggggcttcctgccacctgaattaccccctgtgtccctattttccgagatgctggctgcatcttttagcatcgctgttgtcgcgtacgcgattgcagtgtcagtgggcaaggtgtatgctaccaagtacgactacacaatcgacggaaaccaagagttcattgcctttggtatctctaacatctttagcgggttcttttcttgctttgttgcaaccacggcgctgagccgtactgcagtccaggaaagcacaggcgggaagactcaggtggcagggatcatcagtgctgccatagtgatgatcgctattctagccctgggaaagcttctcgagccactacagaaaagcgtgctagccgctgtcgtcattgcaaaccttaagggcatgtttatgcagctgtgcgatattccccgcctgtggcgccagaataagatcgacgcagtcatttgggtcttcacctgtatcgtgagtattatcttgggactggatctgggcctcctggctggcctgatctttgggttgttaaccgtagtgttacgcgtgcagtttccctcatggaatggcctgggtagtattcccagcactgacatctataaatcaaccaaaaattacaaaaatatagaagagccccagggggtcaagatactcaggttctccagcccaattttctacggtaacgtcgacggtttcaaaaaatgcatcaagagtactgtgggatttgacgctattcgcgtgtataacaaacgcctgaaagctttacgcaagattcagaagctgatcaagagcgggcaactcagggctaccaagaacggtattattagtgacgcggtgagcaccaacaacgcattcgagccggacgaggacatcgaggacctggaggagctggacatccccacaaaggagatcgagatacaagtggattggaatagtgagctgccagtaaaggtcaacgttccaaaggttcctatccattctctggttctcgactgtggtgccatttcctttttagatgtggtcggcgttcgctctctaagagtgattgtaaaggaattccagcggattgatgtgaacgtgtatttcgcatctcttcaggattacgtgatcgagaaactggagcagtgtggcttcttcgacgacaatataaggaaggataccttttttctgaccgtgcacgacgccattttgtacctgcagaaccaagtaaagagtcaagaagggcaaggtagtatactagaaacaattactttgatacaggactgtaaggatacactagagctgatagagaccgagctgacagaggaggagctggacgtgcaggatgaggctatgcgcaccctggccagttag

SEQ ID NO: 8922 - DNA, 1026 bp, Artificial Sequence
  derived and/or modified sequence
atgcgccacgggctggcagtaccaagtgttttagcagctgttgtgattgctaatttgaagggaatgtttatgcagttatgcgatattccacggctgtggaggcagaacaagatagacgcagttatttgggtttttacgtgtattgtgagcatcattttgggtctggaccttggcctcctagcagggcttatttttgggctcctgacagtggtactgcgggtgcagttcccttcttggaatggtctaggatcaatcccatccaccgatatatacaaaagcacaaagaactataagaacatcgaggaaccacagggagttaagatcctccgcttcagcagtcccatcttttatggcaatgtggacggcttcaaaaagtgcataaaaagcacagtgggatttgacgccattagagtgtacaacaagagactgaaggctctcaggaagatccaaaagctgataaaatcaggacaactacgtgctactaagaatgggatcataagcgatgccgtaagcaccaacaacgctttcgagcccgacgaggacatcgaagatttggaagagttggacatccccacaaaagagatcgagattcaggtggactggaactccgaactgccagttaaggtaaacgtgcctaaagtgcctatccacagcctggtcctagactgcggagccatttcattcttagacgttgttggtgtcagatctctccgggtgattgtcaaagagtttcagcgaatcgatgtgaacgtctattttgccagccttcaggattacgtaatcgagaaacttgaacagtgcgggttcttcgacgacaatatccggaaggatacgtttttcctgacagtacatgacgccatactgtaccttcagaatcaggtaaagtcccaggagggtcaagggtcaattctggaaaccatcacactcatccaggactgtaaggacaccctcgaactcatcgagacggaactgactgaagaggaactggacgtgcaggacgaggcgatgagaactctagcaagttag

SEQ ID NO: 8923 - DNA, 1050 bp, Artificial Sequence
  derived and/or modified sequence
atgatcgcaatcttagccctcgggaaacttctcgagcccttacagaagagcgtgctggccgctgtggtaattgccaatctgaagggaatgtttatgcagctgtgcgacatcccacgcctttggaggcagaacaagatcgacgctgttatatgggttttcacatgcatcgtctcaattattctcgggttggacctcggattactggctgggctgatcttcgggcttctgactgtggtgctgcgagtccagtttccatcctggaatgggctcgggtctatcccaagcaccgacatttacaagtcgactaagaactacaaaaacattgaggagccacagggcgtgaagattctgagattcagttctccaatattctacggcaatgtcgacgggtttaagaaatgcataaaaagcaccgtaggcttcgacgcaatcagggtctataacaaaaggctgaaggcacttcgaaagatacagaagctcattaagtcaggccaactgcgagccaccaagaacggaatcattagcgacgccgtctcaactaacaacgcgttcgaacctgatgaggacatcgaggatcttgaagaattggatatccctacgaaagaaatagagatccaggtggactggaactctgagctgccggtaaaagtgaacgtacccaaggtccctattcactctctggttttggactgcggcgcaatttctttcctggatgtggtaggtgtgcgcagtctgcgagtgatcgttaaagagtttcagcgcatagacgttaatgtgtatttcgctagtctgcaggattacgttatcgaaaagctcgagcagtgcggctttttcgacgacaatattcggaaagatacatttttcctaaccgtccacgatgccatactgtatctgcagaatcaggtgaaaagccaggagggccaggggtccattttggagaccatcactttgattcaggattgcaaagacacactggagctcattgagaccgagctcaccgaagaagaactagacgtgcaggatgaggccatgagaacactcgcgtcctag

SEQ ID NO: 8924 - DNA, 1104 bp, Artificial Sequence
  derived and/or modified sequence
atgaggcatggacttgcagtcccagtggcaggaataatctctgcagccatcgtaatgatcgccattttggccttgggcaaactgctcgagccactccagaaatcggtgttggcagcggtggtcatcgctaatctgaaggggatgtttatgcagctttgcgatataccacggctgtggagacagaacaagatagatgcggtaatatgggtctttacttgcattgtgtctatcatcctggggcttgatctcgggttgctggccgggcttatcttcgggctgcttaccgtcgtgctgcgtgtacagttcccttcctggaacggcctgggctcaatccccagcactgatatatacaaaagcactaaaaactacaagaacattgaagagccgcagggcgtgaagattctgcgtttttctagtcccatcttttatgggaacgtggatggttttaaaaagtgcatcaagtctactgtcggtttcgatgctatccgggtctataataaacgactaaaggccctccgcaagatccagaaactgatcaagagcgggcaactccgggcaacgaagaatgggataatttcggatgccgtatcgaccaacaatgcatttgagcctgatgaggatattgaggacctggaggagttggacatcccaactaaagaaatcgagatacaggttgattggaatagtgaactccccgtgaaggtaaatgtgcctaaagttcctatccatagtcttgtattagactgtggagctatttcctttttggacgtggtgggagtacggtcactgcgcgttatagtgaaagagtttcagcgcatcgatgtcaatgtgtacttcgccagcctgcaggattatgtcattgagaagctcgagcagtgcggattttttgacgacaacatcaggaaagacacgtttttcttgaccgtccacgacgccattttgtacctgcagaatcaggttaagtcacaggagggtcaggggagtattctcgagactatcactctgatccaggactgcaaggacacactggagctgatcgagaccgagctgacggaggaggagctcgacgtccaggacgaggctatgcgaactctcgcatcttag

SEQ ID NO: 8925 - DNA, 2343 bp, Artificial Sequence
  derived and/or modified sequence
atggccgcccctgggggccgctctgagcccccccagctgcctgagtacagctgcagctacatggtgtccaggcctgtgtacagcgagctggccttccagcagcagcacgagcggcggctgcaggagaggaagaccctgcgggagagcctggccaagtgctgcagctgcagcaggaagagggccttcggcgtgctgaagaccctggtgcccatcctggagtggctgcccaagtacagagtgaaggagtggctgctgagtgatgtgatcagcggcgtgtccacaggcctggtggccaccctgcagggcatggcctatgccctgctggccgctgtgcctgtgggctacggcctgtacagcgccttcttccccatcctgacctacttcatcttcggcaccagccgccacatctctgtgggccccttccctgtggtgtccctgatggtgggctctgtggtgctgtccatggccccagatgagcacttcctggtgagcagcagcaatggaacagtgctgaacaccaccatgattgacacagctgcccgggacacagcccgggtgctgattgccagcgccctgaccctgctggtgggcatcatccagctgatctttggaggcctgcagatcggcttcatcgtgcgctacctggccgaccccctggtgggcggcttcaccacagctgctgccttccaggtgctggtgtcccagctgaagatcgtgctgaatgtgtccaccaagaactacaacggggtgctgagcatcatctacaccctggtggagatcttccagaacatcggggacaccaacctggccgacttcaccgctggcctgctgaccatcgtggtgtgcatggctgtgaaggagctgaatgaccgcttccgccacaagatccctgtgcccatccccatcgaggtgattgtgaccatcatcgccacagccatctcctatggagccaacctggagaagaactacaatgccggcatcgtgaagagcatcccccggggcttcctgcccccagagctgccccctgtgtccctcttcagcgagatgctggccgccagcttcagcattgctgtggtggcctatgccatcgctgtgtctgtgggcaaggtgtatgccaccaagtatgactacaccattgatggcaaccaggagttcatcgccttcggcatcagcaacatcttcagcggcttcttcagctgctttgtggccaccacagccctgagcaggacagctgtgcaggagagcactggaggcaagacccaggtggccggcatcatctctgctgccatcgtgatgattgccatcctggccctgggcaagctgctggagcccctgcagaagtctgtgctggccgctgtggtgattgccaacctgaagggcatgttcatgcagctgtgtgacatcccccggctgtggaggcagaacaagattgatgctgtgatctgggtgttcacctgcatcgtgtccatcatcctgggcctggacctgggcctgctggccggcctcatcttcggcctgctgactgtggtgctgcgggtgcagttccccagctggaatggcctgggcagcatccccagcacagacatctacaagagcaccaagaactacaagaacatcgaggagccccagggcgtgaagatcctgcgcttcagcagccccatcttctatggaaatgtggatggcttcaagaagtgcatcaagagcacagtgggctttgatgccatccgggtgtacaacaagaggctgaaggccctgaggaagatccagaagctgatcaagagcggccagctgcgggccaccaagaatggcatcatcagtgatgctgtgtccaccaacaatgcctttgagccagatgaagatattgaggacctggaggagctggacatccccaccaaggagattgagatccaggtggactggaacagcgagctgcctgtgaaggtgaatgtgcccaaggtgcccatccacagcctggtgctggactgtggggccatctccttcctggatgtggtgggcgtgcgcagcctgcgggtgattgtgaaggagttccagagaattgatgtgaatgtgtactttgccagcctgcaggactatgtgattgagaagctggagcagtgtggcttctttgatgacaacatcaggaaggacaccttcttcctgactgtgcatgatgccatcctgtacctgcagaaccaggtgaagagccaggagggccagggcagcatcctggagaccatcaccctcatccaggactgcaaggacaccctggagctgattgaaacagagctgacagaggaggagctggatgtgcaggatgaggccatgaggaccctggccagctag

SEQ ID NO: 8926 - DNA, 1026 bp, Artificial Sequence
  derived and/or modified sequence
atgagacatggcctggccgtgcccagcgtgctggccgctgtggtgattgccaacctgaagggcatgttcatgcagctgtgtgacatcccccggctgtggaggcagaacaagattgatgctgtgatctgggtgttcacctgcatcgtgtccatcatcctgggcctggacctgggcctgctggccggcctcatcttcggcctgctgactgtggtgctgcgggtgcagttccccagctggaatggcctgggcagcatccccagcacagacatctacaagagcaccaagaactacaagaacatcgaggagccccagggcgtgaagatcctgcgcttcagcagccccatcttctatggaaatgtggatggcttcaagaagtgcatcaagagcacagtgggctttgatgccatccgggtgtacaacaagaggctgaaggccctgaggaagatccagaagctgatcaagagcggccagctgcgggccaccaagaatggcatcatcagtgatgctgtgtccaccaacaatgcctttgagccagatgaggacatcgaggacctggaggagctggacatccccaccaaggagattgagatccaggtggactggaacagcgagctgcctgtgaaggtgaatgtgcccaaggtgcccatccacagcctggtgctggactgtggggccatctccttcctggatgtggtgggcgtgcgcagcctgcgggtcatcgtgaaggagttccagagaattgatgtgaatgtgtactttgccagcctgcaggactatgtgattgagaagctggagcagtgtggcttctttgatgacaacatcaggaaggacaccttcttcctgactgtgcatgatgccatcctgtacctgcagaaccaggtgaagagccaggagggccagggcagcatcctggagaccatcaccctcatccaggactgcaaggacaccctggagctgattgaaacagagctgacagaggaggagctggatgtgcaggatgaggccatgaggaccctggccagctag

SEQ ID NO: 8927 - DNA, 1050 bp, Artificial Sequence
  derived and/or modified sequence
atgattgccatcctggccctgggcaagctgctggagcccctgcagaagtctgtgctggccgctgtggtgattgccaacctgaagggcatgttcatgcagctgtgtgacatcccccggctgtggaggcagaacaagattgatgctgtgatctgggtgttcacctgcatcgtgtccatcatcctgggcctggacctgggcctgctggccggcctcatcttcggcctgctgactgtggtgctgcgggtgcagttccccagctggaatggcctgggcagcatccccagcacagacatctacaagagcaccaagaactacaagaacatcgaggagccccagggcgtgaagatcctgcgcttcagcagccccatcttctatggaaatgtggatggcttcaagaagtgcatcaagagcacagtgggctttgatgccatccgggtgtacaacaagaggctgaaggccctgaggaagatccagaagctgatcaagagcggccagctgcgggccaccaagaatggcatcatcagtgatgctgtgtccaccaacaatgcctttgagccagatgaggacatcgaggacctggaggagctggacatccccaccaaggagattgagatccaggtggactggaacagcgagctgcctgtgaaggtgaatgtgcccaaggtgcccatccacagcctggtgctggactgtggggccatctccttcctggatgtggtgggcgtgcgcagcctgcgggtcatcgtgaaggagttccagagaattgatgtgaatgtgtactttgccagcctgcaggactatgtgattgagaagctggagcagtgtggcttctttgatgacaacatcaggaaggacaccttcttcctgactgtgcatgatgccatcctgtacctgcagaaccaggtgaagagccaggagggccagggcagcatcctggagaccatcaccctcatccaggactgcaaggacaccctggagctgattgaaacagagctgacagaggaggagctggatgtgcaggatgaggccatgaggaccctggccagctag

SEQ ID NO: 8928 - DNA, 1104 bp, Artificial Sequence
  derived and/or modified sequence
atgagacatggcctggccgtgcctgtggccggcatcatctctgctgccatcgtgatgattgccatcctggccctgggcaagctgctggagcccctgcagaagtctgtgctggccgctgtggtgattgccaacctgaagggcatgttcatgcagctgtgtgacatcccccggctgtggaggcagaacaagattgatgctgtgatctgggtgttcacctgcatcgtgtccatcatcctgggcctggacctgggcctgctggccggcctcatcttcggcctgctgactgtggtgctgcgggtgcagttccccagctggaatggcctgggcagcatccccagcacagacatctacaagagcaccaagaactacaagaacatcgaggagccccagggcgtgaagatcctgcgcttcagcagccccatcttctatggaaatgtggatggcttcaagaagtgcatcaagagcacagtgggctttgatgccatccgggtgtacaacaagaggctgaaggccctgaggaagatccagaagctgatcaagagcggccagctgcgggccaccaagaatggcatcatcagtgatgctgtgtccaccaacaatgcctttgagccagatgaggacatcgaggacctggaggagctggacatccccaccaaggagattgagatccaggtggactggaacagcgagctgcctgtgaaggtgaatgtgcccaaggtgcccatccacagcctggtgctggactgtggggccatctccttcctggatgtggtgggcgtgcgcagcctgcgggtcatcgtgaaggagttccagagaattgatgtgaatgtgtactttgccagcctgcaggactatgtgattgagaagctggagcagtgtggcttctttgatgacaacatcaggaaggacaccttcttcctgactgtgcatgatgccatcctgtacctgcagaaccaggtgaagagccaggagggccagggcagcatcctggagaccatcaccctcatccaggactgcaaggacaccctggagctgattgaaacagagctgacagaggaggagctggatgtgcaggatgaggccatgaggaccctggccagctag

SEQ ID NO: 8929 - DNA, 2343 bp, Artificial Sequence
  derived and/or modified sequence
atggccgcccccggcggccggagcgagcccccccagctgcccgagtattcttgctcctacatggtatcgcgccctgtgtatagcgagctggcctttcagcagcagcacgagcgaagattgcaggagcgtaagacactcagggaatcactcgccaagtgctgttcatgctctcgaaagcgcgcctttggtgtcctaaagacattggtacctatcctggagtggctgccaaagtatagggtgaaagagtggctgctgagtgatgtgatttccggggtgtccaccggactggtggctacccttcagggtatggcttatgccctccttgctgctgtgcccgttgggtacggcctgtactctgctttctttcctattctcacatactttatttttggcaccagcagacacatctctgtcggtccatttccagtagtgtcgctgatggtgggtagtgtggtcctcagcatggctcccgacgaacactttttggtgagctcaagtaacggaaccgtactgaacacaacgatgattgataccgctgcccgagacaccgcccgggttctcattgccagtgcactgacactcctggtgggtatcatacagctgatctttggtggcctgcaaattggattcattgtccggtacctggctgatccccttgttgggggattcacgacagctgctgccttccaagtcctggtgagccagctgaagatcgttttgaatgtgtctactaaaaactataatggtgtcctctcgatcatctacactcttgtcgaaatttttcagaatatcggcgacaccaatctggccgacttcaccgccggattgctgaccatagttgtgtgtatggctgtgaaggagctgaatgatcgcttcagacacaaaatccctgtcccaatccccatcgaggtgatcgtgaccatcattgcaacagccatatcatatggtgccaacctcgaaaagaattacaacgctgggattgtgaagtccatcccgagaggcttcctgcctccggaactgcctcctgtgagtcttttttccgagatgttggcggcctcattcagcatcgcggtggtggcttatgccatcgctgtctctgtcggaaaggtgtatgctaccaaatacgattacaccatagacggaaaccaggagtttattgcattcggcatcagcaatattttttcaggttttttcagctgttttgtggccactaccgccctttctagaacggctgtgcaggaaagcacggggggtaaaacgcaggtggcgggaattatttctgcggccatcgttatgatcgcaatactcgctcttgggaaactgctcgaaccactgcagaaaagtgtgttagcagctgtggttattgcaaatctcaaaggaatgttcatgcagctgtgcgacattcctcgtttatggcgccaaaataagatcgatgctgtcatatgggtctttacatgcattgtatctatcatcctgggcttggatttaggactcctagccggccttatttttgggttactgaccgtggtgttaagggtccagttcccttcctggaatggactcggttccattcctagcacagacatctataaatcaacaaaaaattataagaatattgaagagcctcaaggagtcaagattttgagattctcgtcgccgatcttctatggtaacgtggatggatttaaaaaatgtattaagtctaccgtaggttttgacgctatccgcgtctacaacaagagacttaaggctctgcgcaagattcagaagctcatcaagtctgggcagttgcgagctaccaaaaacggcatcatctctgacgctgtgtctacaaataacgcctttgaacctgacgaggacatcgaggacctcgaagagctcgatatccctaccaaagagatcgagatccaggtggactggaacagcgagttgccagtgaaggttaatgtcccaaaggtacccatccatagcctcgtgctggactgcggagctattagttttctggacgtggtcggcgtccgttcactgcgtgtgatagtaaaggagtttcagagaattgatgtgaatgtctatttcgcgagtctacaggactatgtcattgaaaaacttgagcagtgtggattttttgatgataacataagaaaagatactttttttcttacagtccacgacgccatcctttacctgcaaaatcaagtaaaaagtcaggagggacagggctcgatattagagacgattacattgattcaagactgtaaggacacacttgagctaatcgagacagagctgaccgaggaggagctggatgtacaagatgaagccatgcgcacacttgcatcatag

SEQ ID NO: 8930 - DNA, 1026 bp, Artificial Sequence
  derived and/or modified sequence
atgcggcacggcctggccgtgcccagcgtgctggccgccgtggtgattgcaaacctcaagggcatgttcatgcagctttgcgacatcccaaggctgtggcggcagaacaaaatagacgccgtgatctgggttttcacctgtatcgttagtatcatactgggtctcgacctgggattgttggcaggactcatatttggcctgctgactgttgtactgagagttcagttcccatcctggaatggactgggtagcattcctagtaccgatatatacaagagcaccaagaattataaaaacatcgaagagccccagggtgttaagatcctcagattctcgtcgccaattttttacgggaatgtggatgggttcaaaaagtgtatcaaaagcacagtgggctttgacgcaattcgagtgtacaacaagcgattgaaggccctgaggaagatccaaaagttgatcaaatccggccagctgcgtgctacaaagaatggaattatctccgacgctgtgtcaacgaataatgcttttgagccagacgaagatatcgaagacttagaagaattggacataccgacaaaggaaatcgagattcaagtggattggaactctgagttaccagtgaaggtgaacgtgcctaaggttcctatccattcactcgttttggactgcggggcaatcagctttcttgatgtggtgggcgtgaggtccctgagagtgattgtcaaggagttccagcgaattgacgttaacgtctacttcgcctccttgcaggattacgtcattgaaaagttggaacagtgcggttttttcgatgacaacatcaggaaagacacctttttcctgacggtgcacgacgcaatactgtatctgcaaaatcaagtcaaaagccaggaggggcagggaagcatccttgagactatcacattgatacaggattgcaaagatacccttgaacttatcgagaccgagctgacggaagaggagttggatgtacaggacgaggccatgcggactctcgcatcgtag

SEQ ID NO: 8931 - DNA, 1050 bp, Artificial Sequence
  derived and/or modified sequence
atgatcgccatcctggccctgggcaagctgctggagcccctgcagaagtcagtgctagcggccgtggtgatcgcgaatctcaaaggcatgtttatgcagctttgtgatattcctcgtctttggaggcagaacaaaattgacgcggtcatttgggtttttacctgtattgttagcattatcttggggttagacctgggtctgctagcagggctgatttttggactactaactgtggtgctgcgcgttcagttccctagctggaatggcctcgggtctatcccatcgactgacatctacaagtcgacaaaaaactacaaaaatattgaagaaccacagggggtgaagatactgcgattttcttcaccgattttttacgggaatgtcgacggatttaagaagtgtattaagtccacggtcggcttcgacgccatccgcgtgtacaataagagactcaaggcgctgcgtaaaatccaaaaactgatcaagagcggtcagttgcgcgccactaagaatggcattatcagcgacgcagtgtctacaaacaatgctttcgagcctgacgaagatattgaggacctcgaggagttagacatcccgaccaaggagatcgaaatccaggtggactggaatagtgagctgcctgtgaaggtaaatgttcccaaagtccccatccacagcctggttctcgactgcggtgcaatttcattcctagatgtggtgggcgtgcgctccttgcgcgtgatcgtgaaagaattccaaaggatagatgtgaatgtgtactttgcgtcactgcaggactacgtgattgaaaaacttgaacagtgtggcttttttgacgataatatcagaaaggacaccttttttttgacagtgcacgatgccattctttacctccaaaaccaagtgaagagccaggaggggcaaggatcgatcctcgagacgataacacttatccaagactgtaaagataccctggaactcatcgaaaccgagcttacagaggaggaacttgacgtgcaagatgaggccatgcggacgttggcctcttag

SEQ ID NO: 8932 - DNA, 1104 bp, Artificial Sequence
  derived and/or modified sequence
atgcggcacggcctggccgtgcccgtggccggcatcatcagcgccgccattgttatgatcgccattttagccctgggaaagcttctggagcccctccagaaaagtgtcctcgccgctgtggtgattgcaaatttgaaaggcatgttcatgcagctatgtgatatccctaggctgtggcgacaaaacaagatcgacgccgtgatatgggtcttcacctgtattgtgtctattattctgggactcgatctgggactcttggcgggcttaatctttggattgttaacagtggtcttgcgagtgcaatttccttcatggaatggtctcggctcaatcccctctacggatatctataagtctacaaaaaattataagaacatagaagaaccccagggtgtgaagattctgaggtttagctcccctattttttatggaaacgttgacggatttaaaaagtgcattaaatccacagtaggctttgatgccatcagagtttataataaacgccttaaggctctgagaaagatccaaaagttgattaagtctggtcagttacgcgccaccaaaaatgggataatctctgatgccgttagtacgaacaacgcctttgaacccgatgaagacattgaggacctggaagaactggacatccccacaaaggagatcgagatccaggttgattggaattccgagctgcccgtgaaggtgaacgtgccgaaagtccccatccactctctggtcctggattgtggcgccatcagctttctcgatgtcgtaggggtgagaagtctccgcgtgattgtcaaggagtttcaacgaattgatgtcaatgtttattttgccagcctgcaggactatgttatcgagaagctagaacagtgcggattcttcgacgataatatccgcaaggacacattttttcttacagtgcatgatgctattttgtacctgcagaatcaagttaaatcccaggaaggccaaggttctattctggagactatcacgctgatccaagattgtaaagacacccttgagctgatcgaaaccgaactgacggaagaggaattggacgtccaggacgaggccatgcgtacactggctagctag

SEQ ID NO: 8933 - DNA, 2343 bp, Artificial Sequence
  derived and/or modified sequence
atggcagctccaggcggtagaagtgaaccacctcagctaccggagtactcctgtagctacatggtgagtagacccgtctattcagagctggcttttcagcagcagcatgaacgcaggctgcaggaacgaaagacgcttcgcgaaagcctggcgaagtgttgctcatgttcccgcaagagggcgtttggtgtgctcaaaaccttagtccctattctggagtggctacctaagtaccgggtcaaggaatggctgttgagtgacgtaatctcaggagtgagcacaggccttgtcgccacgctccaggggatggcatacgcactgctggccgcagtccctgttgggtatgggctgtactcagccttcttcccgattttgacatacttcatattcggcacgtcccggcacattagtgtgggtccattcccagttgtctccctgatggtaggctccgtcgtcctgagcatggccccagacgagcattttttggttagcagtagtaacggcacagtgttaaatacaacaatgattgacaccgctgcaagagataccgccagagtactgatcgcatctgcgcttaccctacttgtcggcattatccagctgattttcggcggtttgcagatagggtttattgttcggtacctggctgatcctctggtgggagggtttaccacagccgctgccttccaggtactggtgtctcaattgaagatcgttttgaacgtatcaaccaaaaattataatggagtgctcagcattatctacacattggtggagatatttcagaatattggggatacgaacttggctgatttcacagctggactcctgaccatcgttgtttgcatggccgtgaaggagctcaatgatagatttaggcacaaaatccccgtgcccatccccatcgaagtgatcgtcacaatcattgctaccgctatttcatacggtgctaacctcgagaaaaattacaatgcaggaatcgtaaagagtatccccaggggttttctgccaccagagctcccgccagtgtcgctgttctcagagatgctggctgcctccttttcaattgcagtggtcgcctacgctatcgccgtgtctgtcgggaaagtgtacgctacaaaatacgactacaccatcgacggaaatcaggaatttatagccttcggaatatccaacatctttagcgggttctttagctgttttgtagccactacggcgctgtccagaacagccgtccaggagagcactggagggaagacccaagtggctggcattatctctgctgccattgttatgatagcaatcctggctctggggaagctgcttgaacctctgcagaaaagcgtactggcggcagttgttatcgccaaccttaaggggatgttcatgcaactgtgcgatataccacgcctgtggaggcagaacaaaatcgacgcagttatctgggtgtttacttgcatcgtttccataattcttggcctcgatctgggacttctggctggccttatctttggcttactaacagtggtgttgagagtgcaattccccagttggaacggtttgggtagcattcccagtaccgacatttataagagcacaaagaactacaagaacatcgaagagccacaaggagtcaaaatcctgcgattttcctcccctatattttatggcaatgtggacggattcaaaaaatgcattaagtctactgttggctttgacgccattagagtgtataataagcggttgaaggccctgagaaagattcagaaattgatcaagagcgggcagctccgcgcaactaagaatggtatcatctcggacgcagtgagcaccaataatgcattcgagccggatgaagatatcgaagacctcgaagagctcgacatccctaccaaggaaatagaaatccaggtggactggaactcagaactgcctgttaaagtcaacgtacccaaggtgcctattcattcgctggttttagactgtggagcaataagcttcctcgacgtggtgggtgtacgctccctgagagtgatagttaaggaattccagcggattgacgttaacgtgtattttgcctccctgcaggattacgtcatcgaaaaacttgagcagtgtgggttcttcgacgataacatcaggaaggataccttcttcctgaccgtgcatgacgctatcctgtaccttcagaatcaagttaaaagccaagaaggacaaggcagcatcttagagaccatcacccttattcaggattgtaaggatacacttgaacttatcgaaacagaactgaccgaggaggaactggacgttcaggatgaagctatgagaacgctcgcgagctag

SEQ ID NO: 8934 - DNA, 1026 bp, Artificial Sequence
  derived and/or modified sequence
atgaggcatgggctcgccgtcccctcagtccttgctgcagttgtcatcgccaatctgaaagggatgtttatgcagttgtgcgacataccccgactgtggagacagaacaagatcgacgcagtgatctgggttttcacttgtatcgtgtcaattatcctggggttggatcttgggctcctggctggtctgatatttgggctgctcaccgtcgtactcagagtacagttcccttcgtggaacgggcttggatccatcccttccactgacatttataagtccactaagaattataagaatatcgaagagccccagggggtgaagatcctacgcttctccagcccaattttctatgggaacgtggacggttttaagaagtgtatcaaatcaacagtgggcttcgatgccataagggtctataataaaaggctcaaggccctgcggaagattcagaagttaattaagagtggtcagctccgcgctacgaaaaacggcattatttctgatgcggtgagcactaacaacgccttcgagcctgacgaagacattgaagacctggaggaattggacattccaacgaaagagatcgagatccaggtcgattggaactccgagctgcccgtgaaagtgaacgtcccaaaagtgccaatccacagcctcgtgctggactgtggcgcaatctcatttcttgacgtggtgggcgtgcgctccctacgtgtgatcgtgaaggagttccagagaatcgacgttaacgtgtatttcgcatctctgcaggactatgtgatcgaaaagcttgagcagtgtggcttcttcgatgacaatattagaaaggatacattttttctgactgtccacgacgccatcttgtaccttcagaaccaggtaaaaagccaagagggacagggtagcattctggagacaataacattgatccaggactgcaaagataccctagagttgattgaaactgagttgaccgaggaagagctcgacgtccaagatgaagccatgcgcactctggcaagctag

SEQ ID NO: 8935 - DNA, 1050 bp, Artificial Sequence
  derived and/or modified sequence
atgatcgccattctggctcttggtaaattgctagagccccttcagaagagtgtgctggctgctgtcgtgattgccaatctcaagggaatgtttatgcagctgtgtgatattccacgcctgtggcgtcagaataagattgacgcggtgatctgggtgtttacctgcatcgtatcaattattcttggcttagatctcggcctgctcgctggactcatatttgggcttttaaccgtggtcttgagagtacaattccccagttggaacggcttgggtagtattccgtccaccgacatctataaaagtacaaaaaattataagaacatcgaggagcctcagggggtaaagattctaagattttccagcccaatcttttacgggaacgtcgacggatttaagaagtgcattaaaagcaccgtcggattcgacgccattagggtgtataacaaaaggttgaaagctctgaggaaaatacaaaaactcattaagtccggtcagctgcgggcaacaaagaacggcatcatatccgatgcagtcagcaccaataacgcatttgagcccgatgaagatattgaggacctggaggagctcgatattcctactaaggaaatcgagatccaagtagattggaactccgaactgcccgtaaaagtgaacgttccgaaagtcccaatccattcacttgtgttagattgtggggctatctcattcctggacgtggttggggtaaggagcctgagagttatcgttaaggagttccaacgtattgacgttaacgtttactttgccagtctgcaagattatgtcattgagaaactggagcagtgtggtttctttgacgacaacataagaaaggacacctttttccttaccgtacatgacgctatcctttaccttcaaaatcaggtaaaaagccaggaggggcaaggaagtattctggagaccatcaccctcattcaggactgtaaggacaccctggagctaattgaaacggagcttacggaagaggaactagacgtccaggacgaagccatgagaaccctggcaagttag

SEQ ID NO: 8936 - DNA, 1104 bp, Artificial Sequence
  derived and/or modified sequence
atgcgtcatggactggcagtccctgtagccggaattatcagcgccgcaatcgtgatgattgccattttagccctggggaagctgctggagcccctgcagaaatccgtgcttgccgcagtggtgattgctaatctaaaagggatgttcatgcagctgtgtgatattcccaggttgtggagacagaataagattgacgctgtgatttgggtgtttacttgcatcgtcagcataatcttaggcctggacttaggactgctggcaggactgattttcggtctgcttaccgtggtattgagagtgcagttccctagctggaacgggcttgggagtatcccttccaccgacatttacaagtccacgaagaactataagaatatagaagagcctcagggcgtcaagatcttaaggttttcctcccctatcttttacgggaacgtggatgggtttaaaaaatgcataaagtccacggtaggctttgatgctattcgtgtctataacaagagacttaaggccctccgaaaaattcagaagctgattaagtccgggcagctacgggcaactaagaatgggatcatttctgatgcagtgagtacaaacaacgccttcgaaccagacgaggacatcgaggatttggaggagctggacatccctactaaggaaatcgagatccaagttgactggaacagcgagctccccgtcaaagtgaatgtacctaaagtcccaatccattccctagttctggactgtggtgccatcagttttctggatgtcgttggcgtccggtccctgcgggtgatcgtaaaagagtttcagcggattgatgttaacgtgtactttgcctctcttcaagactacgttatcgaaaaactggagcaatgcggtttctttgatgacaacattcgaaaagacaccttttttctgaccgtccacgacgccattctctatctccagaatcaggttaaatcgcaggaaggccaaggctcaattttagagactatcactctaatccaggactgcaaagacacgttggagctaatcgagacggagcttaccgaggaggaactggatgtgcaagacgaagccatgcgtacgctcgccagttag

SEQ ID NO: 8937 - DNA, 4930 bp, Artificial Sequence
  derived and/or modified sequence
ctcagccttcccggttcgggaaaggggaagaatgcaggaggggtaggatttctttcctgataggatcggttgggaaagaccgcagcctgtgtgtgtctttcccttcgaccaaggtgtctgttgctccgtaaataaaacgtcccactgccttctgagagcgctataaaggcagcggaagggtagtccgcggggcattccgggcggggcgcgagcagagacaggtcatggcagcgccaggcggcaggtcggagccgccgcagctccccgagtacagctgcagctacatggtgtcgcggccggtctacagcgagctcgctttccagcaacagcacgagcggcgcctgcaggagcgcaagacgctgcgggagagcctggccaagtgctgcagttgttcaagaaagagagcctttggtgtgctaaagactcttgtgcccatcttggagtggctccccaaataccgagtcaaggaatggctgcttagtgacgtcatttcgggagttagtactgggctagtggccacgctgcaagggatggcatatgccctactagctgcagttcctgtcggatatggtctctactctgcttttttccctatcctgacatactttatctttggaacatcaagacatatctcagttggaccttttccagtggtgagtttaatggtgggatctgttgttctgagcatggcccccgacgaacactttctcgtatccagcagcaatggaactgtattaaatactactatgatagacactgcagctagagatacagctagagtcctgattgccagtgccctgactctgctggttggaattatacagttgatatttggtggcttgcagattggattcatagtgaggtacttggcagatcctttggttggtggcttcacaacagctgctgccttccaagtgctggtctcacagctaaagattgtcctcaatgtttcaaccaaaaactacaatggagttctctctattatctatacgctggttgagatttttcaaaatattggtgataccaatcttgctgatttcactgctggattgctcaccattgtcgtctgtatggcagttaaggaattaaatgatcggtttagacacaaaatcccagtccctattcctatagaagtaattgtgacgataattgctactgccatttcatatggagccaacctggaaaaaaattacaatgctggcattgttaaatccatcccaagggggtttttgcctcctgaacttccacctgtgagcttgttctcggagatgctggctgcatcattttccatcgctgtggtggcttatgctattgcagtgtcagtaggaaaagtatatgccaccaagtatgattacaccatcgatgggaaccaggaattcattgcctttgggatcagcaacatcttctcaggattcttctcttgttttgtggccaccactgctctttcccgcacggccgtccaggagagcactggaggaaagacacaggttgctggcatcatctctgctgcgattgtgatgatcgccattcttgccctggggaagcttctggaacccttgcagaagtcggtcttggcagctgttgtaattgccaacctgaaagggatgtttatgcagctgtgtgacattcctcgtctgtggagacagaataagattgatgctgttatctgggtgtttacgtgtatagtgtccatcattctggggctggatctcggtttactagctggccttatatttggactgttgactgtggtcctgagagttcagtttccttcttggaatggccttggaagcatccctagcacagatatctacaaaagtaccaagaattacaaaaacattgaagaacctcaaggagtgaagattcttagattttccagtcctattttctatggcaatgtcgatggttttaaaaaatgtatcaagtccacagttggatttgatgccattagagtatataataagaggctgaaagcgctgaggaaaatacagaaactaataaaaagtggacaattaagagcaacaaagaatggcatcataagtgatgctgtttcaacaaataatgcttttgagcctgatgaggatattgaagatctggaggaacttgatatcccaaccaaggaaatagagattcaagtggattggaactctgagcttccagtcaaagtgaacgttcccaaagtgccaatccatagccttgtgcttgactgtggagctatatctttcctggacgttgttggagtgagatcactgcgggtgattgtcaaagaattccaaagaattgatgtgaatgtgtattttgcatcacttcaagattatgtgatagaaaagctggagcaatgcgggttctttgacgacaacattagaaaggacacattctttttgacggtccatgatgctatactctatctacagaaccaagtgaaatctcaagagggtcaaggttccattttagaaacgatcactctcattcaggattgtaaagatacccttgaattaatagaaacagagctgacggaagaagaacttgatgtccaggatgaggctatgcgtacacttgcatcctgaaagtgggttcgggaggtctctatgagcaaggaatacaagacaaaacttcctcaatgcattgactatttcttcagactcaaaacactcattcttttttctattaagccattgaaagagaagcactaagactgcttctaggctttatttataaaataaacaccttatccctaacatgggcaaaatggctagaattattcagacgatttggcagcgtccagggtaagctggtgttataatacgctgctgatctacatcacagatttgctaataatgttcacgtgggccctggcatatctctgttcagttagagtgagtgctgacccaacagcctctgtggtcaagcgagtcacgaatgattaatcataaagaaaaatcagtttttgactgacctggatatccatgagctgcactgatcaccatgtaaggtcacatttagtaaatgctgaaataaaatgattaatgcatttatcaataaaagcctttgaaaatactttggataataaattggagttttaaaaatgcaaatttgcttagtatctaataatgaagtgttattacatatagccggaattgaggatctctttgatcctggaaatggtttacctaaaagctacagaaccaggccaatatattttgaaatattgatgcagacaaatgaaataataaagagattttcatggtttataaaaatcttttttgatatgataataatcatgatcacaactgagatcaaaaaaatatatgacagattattttgtttaaaaatgcagttttaattatcttagtctatagaaatgatcattgcatggaggcatgtataggtatgatctgtgtaaaatctgacataaaaacagtgctattctgagtgaaaatttttttgatgtgcttacataaccatggtgattaaaatgagtttatattttttctcaaaaattttagcagtgtgtaaagtaagtaatctttaactgaactctgaccacttaaaaaaaaatctaaaaattgaactacctatagtagtctgtgtttaaagtgaatttttaaagacaaagcattctaaatgaactcaatataaaaacattcatttggaatgtacatactgaaaaatacaggtttttttgaccaaaagtttttatatcttttctttttatttatttttttcctaagtgccaacaattttctagatattatatacaacacaggctttgatcttggggacttttcccatatatttcacactggagtgaatgaagttgtacttcatttctagagaaaagttatacccaggtccccaattgagaatgtcttgcttgattgaaaacgacatcatcccttggtatactccagggattggtttcaggacccctgcatttaccaaaatttgtgcacactcaagtcctgcagtcacccctgcctaaagatagaatggcttctctgtttttcttctgaaatacaaccagaaacaatgtgtctatttctgaaagaataggattaatgatcatacaaatgggttaatcctgaattctggttgtaaatctggttacagcataactaggattataatgctgcctcattttcacagcactacttgcttatattgacaacaaatcatctcgctaaagagtgaatgtaggccaggcgcggtggctcatgcctgtaatcccagcactttgggaggccgaggcgggtggatcacgaggtcaggagatcgagaccatcctggctaacatggtaaaaccccgtctctactaaaaatagaaaaaaagaaattagcctagcgtggtggctggcgggcgcctgtagtcccagctatttgggaggctaaggcaggagaatggcgtgaacccgggaggcggagcttgcagtgagccgaggtcgtgccactgcactccagcctgggcgacagagcaagactccgtctcaaaaaaaaaaaaaaaaaaaaaaaaagagtgaatgtaatagtcttgcagaaaatgaatgaatacctttgttcaataaaggaaatatgcactgctcacttttttgaaggaaatgccaaagttacgttttacaacaaggctagagtttgtaaattctgggttcatttgtgatgacataagtcagcaaactgcgggaatactgtctcttctatgtattttgtgaatagtaagcataattttagttttgtattatcaatgaaaatttcacttgaaattaaagctgccttttgttatatttttaacctataggataagattccagtattgtatatgagttttaacaaattaaaaaatcaaatcatgtacatttgaaaatatttgcacacatttaaaaataaatgtaaagttgtcttttaaactactcggatgtgtcctttctgaacaaaa

SEQ ID NO: 8938 - DNA, 1471 bp, Artificial Sequence
  derived and/or modified sequence
aaagctgtgcacatttcaggctgcagctgtcagcagcaggaacttctgctgctttcatttgagacggagcactgacaagctctccagagcacatggtcttcagcgggtgcaggcaaatctcaaactgctgatgtccattctcctgatgttacctccaggctcaaatgaggcatgggctggctgtcccatcggtcttggcagctgttgtaattgccaacctgaaagggatgtttatgcagctgtgtgacattcctcgtctgtggagacagaataagattgatgctgttatctgggtgtttacgtgtatagtgtccatcattctggggctggatctcggtttactagctggccttatatttggactgttgactgtggtcctgagagttcagtttccttcttggaatggccttggaagcatccctagcacagatatctacaaaagtaccaagaattacaaaaacattgaagaacctcaaggagtgaagattcttagattttccagtcctattttctatggcaatgtcgatggttttaaaaaatgtatcaagtccacagttggatttgatgccattagagtatataataagaggctgaaagcgctgaggaaaatacagaaactaataaaaagtggacaattaagagcaacaaagaatggcatcataagtgatgctgtttcaacaaataatgcttttgagcctgatgaggatattgaagatctggaggaacttgatatcccaaccaaggaaatagagattcaagtggattggaactctgagcttccagtcaaagtgaacgttcccaaagtgccaatccatagccttgtgcttgactgtggagctatatctttcctggacgttgttggagtgagatcactgcgggtgattgtcaaagaattccaaagaattgatgtgaatgtgtattttgcatcacttcaagattatgtgatagaaaagctggagcaatgcgggttctttgacgacaacattagaaaggacacattctttttgacggtccatgatgctatactctatctacagaaccaagtgaaatctcaagagggtcaaggttccattttagaaacgatcactctcattcaggattgtaaagatacccttgaattaatagaaacagagctgacggaagaagaacttgatgtccaggatgaggctatgcgtacacttgcatcctgaaagtgggttcgggaggtctctatgagcaaggaatacaagacaaaacttcctcaatgcattgactatttcttcagactcaaaacactcattcttttttctattaagccattgaaagagaagcactaagactgcttctaggctttatttataaaataaacaccttatccctaacatgggcaaaatggctagaattattcagacgatttggcagcgtccagggtaagctggtgttataatacgctgctgatctacatcacagatttgctaataatgttcacgtg

SEQ ID NO: 8939 - DNA, 1726 bp, Artificial Sequence
  derived and/or modified sequence
tattgcctcaggctgacccaactataatctaaatataaatgatcaatttgccaggtagagcaagtgctttctaattttctgtttatatttgctgtgtctgtctcccgtaactcagaccttttgcactagacagtacttgtgctcaacaaaatcttcccagttgtttcctctctgattgctttgcttgtagttccctgtctccttttcttctttgtttcagagcttctaatcttcatcttggctctgccccagctgtctcaacagagaattcattggtcatctaatcaaacgagagagtagtccccaccccctcagcctctctcctaactagtatggatcttaggagagctatttttgccagcgaaggttgctggcatcatctctgctgcgattgtgatgatcgccattcttgccctggggaagcttctggaacccttgcagaagtcggtcttggcagctgttgtaattgccaacctgaaagggatgtttatgcagctgtgtgacattcctcgtctgtggagacagaataagattgatgctgttatctgggtgtttacgtgtatagtgtccatcattctggggctggatctcggtttactagctggccttatatttggactgttgactgtggtcctgagagttcagtttccttcttggaatggccttggaagcatccctagcacagatatctacaaaagtaccaagaattacaaaaacattgaagaacctcaaggagtgaagattcttagattttccagtcctattttctatggcaatgtcgatggttttaaaaaatgtatcaagtccacagttggatttgatgccattagagtatataataagaggctgaaagcgctgaggaaaatacagaaactaataaaaagtggacaattaagagcaacaaagaatggcatcataagtgatgctgtttcaacaaataatgcttttgagcctgatgaggatattgaagatctggaggaacttgatatcccaaccaaggaaatagagattcaagtggattggaactctgagcttccagtcaaagtgaacgttcccaaagtgccaatccatagccttgtgcttgactgtggagctatatctttcctggacgttgttggagtgagatcactgcgggtgattgtcaaagaattccaaagaattgatgtgaatgtgtattttgcatcacttcaagattatgtgatagaaaagctggagcaatgcgggttctttgacgacaacattagaaaggacacattctttttgacggtccatgatgctatactctatctacagaaccaagtgaaatctcaagagggtcaaggttccattttagaaacgatcactctcattcaggattgtaaagatacccttgaattaatagaaacagagctgacggaagaagaacttgatgtccaggatgaggctatgcgtacacttgcatcctgaaagtgggttcgggaggtctctatgagcaaggaatacaagacaaaacttcctcaatgcattgactatttcttcagactcaaaacactcattcttttttctattaagccattgaaagagaagcactaagactgcttctaggctttatttataaaataaacaccttatccctaacatgggcaaaatggctagaattattcagacgatttggcagcgtccagggtaagctggtgttataatacgctgctgatctacatcacagatttgctaataatgttcacgt

SEQ ID NO: 8940 - DNA, 1440 bp, Artificial Sequence
  derived and/or modified sequence
gtgcacatttcaggctgcagctgtcagcagcaggaacttctgctgctttcatttgagacggagcactgacaagctctccagagcacatggtcttcagcgggtgcaggcaaatctcaaactgctgatgtccattctcctgatgttacctccaggctcaaatgaggcatgggctggctgtcccagttgctggcatcatctctgctgcgattgtgatgatcgccattcttgccctggggaagcttctggaacccttgcagaagtcggtcttggcagctgttgtaattgccaacctgaaagggatgtttatgcagctgtgtgacattcctcgtctgtggagacagaataagattgatgctgttatctgggtgtttacgtgtatagtgtccatcattctggggctggatctcggtttactagctggccttatatttggactgttgactgtggtcctgagagttcagtttccttcttggaatggccttggaagcatccctagcacagatatctacaaaagtaccaagaattacaaaaacattgaagaacctcaaggagtgaagattcttagattttccagtcctattttctatggcaatgtcgatggttttaaaaaatgtatcaagtccacagttggatttgatgccattagagtatataataagaggctgaaagcgctgaggaaaatacagaaactaataaaaagtggacaattaagagcaacaaagaatggcatcataagtgatgctgtttcaacaaataatgcttttgagcctgatgaggatattgaagatctggaggaacttgatatcccaaccaaggaaatagagattcaagtggattggaactctgagcttccagtcaaagtgaacgttcccaaagtgccaatccatagccttgtgcttgactgtggagctatatctttcctggacgttgttggagtgagatcactgcgggtgattgtcaaagaattccaaagaattgatgtgaatgtgtattttgcatcacttcaagattatgtgatagaaaagctggagcaatgcgggttctttgacgacaacattagaaaggacacattctttttgacggtccatgatgctatactctatctacagaaccaagtgaaatctcaagagggtcaaggttccattttagaaacgatcactctcattcaggattgtaaagatacccttgaattaatagaaacagagctgacggaagaagaacttgatgtccaggatgaggctatgcgtacacttgcatcctgaaagtgggttcgggaggtctctatgagcaaggaatacaagacaaaacttcctcaatgcattgactatttcttcagactcaaaacactcattcttttttctattaagccattgaaagagaagcactaagactgcttctaggctttatttataaaataaacaccttatccctaacatgggc

SEQ ID NO: 8941 - DNA, 2343 bp, Artificial Sequence
  derived and/or modified sequence
atggccgcccccggcggcagaagcgagcccccccagctgcccgagtacagctgcagctacatggtgagcagacccgtgtacagcgagctggccttccagcagcagcacgagagaagactgcaggagagaaagaccctgagagagagcctggccaagtgctgcagctgcagcagaaagagagccttcggcgtgctgaagaccctggtgcccatcctggagtggctgcccaagtacagagtgaaggagtggctgctgagcgacgtgatcagcggcgtgagcaccggcctggtggccaccctgcagggcatggcctacgccctgctggccgccgtgcccgtgggctacggcctgtacagcgccttcttccccatcctgacctacttcatcttcggcaccagcagacacatcagcgtgggccccttccccgtggtgagcctgatggtgggcagcgtggtgctgagcatggcccccgacgagcacttcctggtgagcagcagcaacggcaccgtgctgaacaccaccatgatcgacaccgccgccagagacaccgccagagtgctgatcgccagcgccctgaccctgctggtgggcatcatccagctgatcttcggcggcctgcagatcggcttcatcgtgagatacctggccgaccccctggtgggcggcttcaccaccgccgccgccttccaggtgctggtgagccagctgaagatcgtgctgaacgtgagcaccaagaactacaacggcgtgctgagcatcatctacaccctggtggagatcttccagaacatcggcgacaccaacctggccgacttcaccgccggcctgctgaccatcgtggtgtgcatggccgtgaaggagctgaacgacagattcagacacaagatccccgtgcccatccccatcgaggtgatcgtgaccatcatcgccaccgccatcagctacggcgccaacctggagaagaactacaacgccggcatcgtgaagagcatccccagaggcttcctgccccccgagctgccccccgtgagcctgttcagcgagatgctggccgccagcttcagcatcgccgtggtggcctacgccatcgccgtgagcgtgggcaaggtgtacgccaccaagtacgactacaccatcgacggcaaccaggagttcatcgccttcggcatcagcaacatcttcagcggcttcttcagctgcttcgtggccaccaccgccctgagcagaaccgccgtgcaggagagcaccggcggcaagacccaggtggccggcatcatcagcgccgccatcgtgatgatcgccatcctggccctgggcaagctgctggagcccctgcagaagagcgtgctggccgccgtggtgatcgccaacctgaagggcatgttcatgcagctgtgcgacatccccagactgtggagacagaacaagatcgacgccgtgatctgggtgttcacctgcatcgtgagcatcatcctgggcctggacctgggcctgctggccggcctgatcttcggcctgctgaccgtggtgctgagagtgcagttccccagctggaacggcctgggcagcatccccagcaccgacatctacaagagcaccaagaactacaagaacatcgaggagccccagggcgtgaagatcctgagattcagcagccccatcttctacggcaacgtggacggcttcaagaagtgcatcaagagcaccgtgggcttcgacgccatcagagtgtacaacaagagactgaaggccctgagaaagatccagaagctgatcaagagcggccagctgagagccaccaagaacggcatcatcagcgacgccgtgagcaccaacaacgccttcgagcccgacgaggacatcgaggacctggaggagctggacatccccaccaaggagatcgagatccaggtggactggaacagcgagctgcccgtgaaggtgaacgtgcccaaggtgcccatccacagcctggtgctggactgcggcgccatcagcttcctggacgtggtgggcgtgagaagcctgagagtgatcgtgaaggagttccagagaatcgacgtgaacgtgtacttcgccagcctgcaggactacgtgatcgagaagctggagcagtgcggcttcttcgacgacaacatcagaaaggacaccttcttcctgaccgtgcacgacgccatcctgtacctgcagaaccaggtgaagagccaggagggccagggcagcatcctggagaccatcaccctgatccaggactgcaaggacaccctggagctgatcgagaccgagctgaccgaggaggagctggacgtgcaggacgaggccatgagaaccctggccagctag

SEQ ID NO: 8942 - DNA, 1026 bp, Artificial Sequence
  derived and/or modified sequence
atgagacacggcctggccgtgcccagcgtgctggccgccgtggtgatcgccaacctgaagggcatgttcatgcagctgtgcgacatccccagactgtggagacagaacaagatcgacgccgtgatctgggtgttcacctgcatcgtgagcatcatcctgggcctggacctgggcctgctggccggcctgatcttcggcctgctgaccgtggtgctgagagtgcagttccccagctggaacggcctgggcagcatccccagcaccgacatctacaagagcaccaagaactacaagaacatcgaggagccccagggcgtgaagatcctgagattcagcagccccatcttctacggcaacgtggacggcttcaagaagtgcatcaagagcaccgtgggcttcgacgccatcagagtgtacaacaagagactgaaggccctgagaaagatccagaagctgatcaagagcggccagctgagagccaccaagaacggcatcatcagcgacgccgtgagcaccaacaacgccttcgagcccgacgaggacatcgaggacctggaggagctggacatccccaccaaggagatcgagatccaggtggactggaacagcgagctgcccgtgaaggtgaacgtgcccaaggtgcccatccacagcctggtgctggactgcggcgccatcagcttcctggacgtggtgggcgtgagaagcctgagagtgatcgtgaaggagttccagagaatcgacgtgaacgtgtacttcgccagcctgcaggactacgtgatcgagaagctggagcagtgcggcttcttcgacgacaacatcagaaaggacaccttcttcctgaccgtgcacgacgccatcctgtacctgcagaaccaggtgaagagccaggagggccagggcagcatcctggagaccatcaccctgatccaggactgcaaggacaccctggagctgatcgagaccgagctgaccgaggaggagctggacgtgcaggacgaggccatgagaaccctggccagctag

SEQ ID NO: 8943 - DNA, 1050 bp, Artificial Sequence
  derived and/or modified sequence
atgatcgccatcctggccctgggcaagctgctggagcccctgcagaagagcgtgctggccgccgtggtgatcgccaacctgaagggcatgttcatgcagctgtgcgacatccccagactgtggagacagaacaagatcgacgccgtgatctgggtgttcacctgcatcgtgagcatcatcctgggcctggacctgggcctgctggccggcctgatcttcggcctgctgaccgtggtgctgagagtgcagttccccagctggaacggcctgggcagcatccccagcaccgacatctacaagagcaccaagaactacaagaacatcgaggagccccagggcgtgaagatcctgagattcagcagccccatcttctacggcaacgtggacggcttcaagaagtgcatcaagagcaccgtgggcttcgacgccatcagagtgtacaacaagagactgaaggccctgagaaagatccagaagctgatcaagagcggccagctgagagccaccaagaacggcatcatcagcgacgccgtgagcaccaacaacgccttcgagcccgacgaggacatcgaggacctggaggagctggacatccccaccaaggagatcgagatccaggtggactggaacagcgagctgcccgtgaaggtgaacgtgcccaaggtgcccatccacagcctggtgctggactgcggcgccatcagcttcctggacgtggtgggcgtgagaagcctgagagtgatcgtgaaggagttccagagaatcgacgtgaacgtgtacttcgccagcctgcaggactacgtgatcgagaagctggagcagtgcggcttcttcgacgacaacatcagaaaggacaccttcttcctgaccgtgcacgacgccatcctgtacctgcagaaccaggtgaagagccaggagggccagggcagcatcctggagaccatcaccctgatccaggactgcaaggacaccctggagctgatcgagaccgagctgaccgaggaggagctggacgtgcaggacgaggccatgagaaccctggccagctag

SEQ ID NO: 8944 - DNA, 1104 bp, Artificial Sequence
  derived and/or modified sequence
atgagacacggcctggccgtgcccgtggccggcatcatcagcgccgccatcgtgatgatcgccatcctggccctgggcaagctgctggagcccctgcagaagagcgtgctggccgccgtggtgatcgccaacctgaagggcatgttcatgcagctgtgcgacatccccagactgtggagacagaacaagatcgacgccgtgatctgggtgttcacctgcatcgtgagcatcatcctgggcctggacctgggcctgctggccggcctgatcttcggcctgctgaccgtggtgctgagagtgcagttccccagctggaacggcctgggcagcatccccagcaccgacatctacaagagcaccaagaactacaagaacatcgaggagccccagggcgtgaagatcctgagattcagcagccccatcttctacggcaacgtggacggcttcaagaagtgcatcaagagcaccgtgggcttcgacgccatcagagtgtacaacaagagactgaaggccctgagaaagatccagaagctgatcaagagcggccagctgagagccaccaagaacggcatcatcagcgacgccgtgagcaccaacaacgccttcgagcccgacgaggacatcgaggacctggaggagctggacatccccaccaaggagatcgagatccaggtggactggaacagcgagctgcccgtgaaggtgaacgtgcccaaggtgcccatccacagcctggtgctggactgcggcgccatcagcttcctggacgtggtgggcgtgagaagcctgagagtgatcgtgaaggagttccagagaatcgacgtgaacgtgtacttcgccagcctgcaggactacgtgatcgagaagctggagcagtgcggcttcttcgacgacaacatcagaaaggacaccttcttcctgaccgtgcacgacgccatcctgtacctgcagaaccaggtgaagagccaggagggccagggcagcatcctggagaccatcaccctgatccaggactgcaaggacaccctggagctgatcgagaccgagctgaccgaggaggagctggacgtgcaggacgaggccatgagaaccctggccagctag

SEQ ID NO: 8945 - protein, 1279 aa, Artificial Sequence
  derived and/or modified sequence
MDLEAAKNGTAWRPTSAEGDFELGISSKQKRKKTKTVKMIGVLTLFRYSDWQDKLFMSLGTIMAIAHGSGLPLMMIVFGEMTDKFVDTAGNFSFPVNFSLSLLNPGKILEEEMTRYAYYYSGLGAGVLVAAYIQVSFWTLAAGRQIRKIRQKFFHAILRQEIGWFDINDTTELNTRLTDDISKISEGIGDKVGMFFQAVATFFAGFIVGFIRGWKLTLVIMAISPILGLSAAVWAKILSAFSDKELAAYAKAGAVAEEALGAIRTVIAFGGQNKELERYQKHLENAKEIGIKKAISANISMGIAFLLIYASYALAFWYGSTLVISKEYTIGNAMTVFFSILIGAFSVGQAAPCIDAFANARGAAYVIFDIIDNNPKIDSFSERGHKPDSIKGNLEFNDVHFSYPSRANVKILKGLNLKVQSGQTVALVGSSGCGKSTTVQLIQRLYDPDEGTINIDGQDIRNFNVNYLREIIGVVSQEPVLFSTTIAENICYGRGNVTMDEIKKAVKEANAYEFIMKLPQKFDTLVGERGAQLSGGQKQRIAIARALVRNPKILLLDEATSALDTESEAEVQAALDKAREGRTTIVIAHRLSTVRNADVIAGFEDGVIVEQGSHSELMKKEGVYFKLVNMQTSGSQIQSEEFELNDEKAATRMAPNGWKSRLFRHSTQKNLKNSQMCQKSLDVETDGLEANVPPVSFLKVLKLNKTEWPYFVVGTVCAIANGGLQPAFSVIFSEIIAIFGPGDDAVKQQKCNIFSLIFLFLGIISFFTFFLQGFTFGKAGEILTRRLRSMAFKAMLRQDMSWFDDHKNSTGALSTRLATDAAQVQGATGTRLALIAQNIANLGTGIIISFIYGWQLTLLLLAVVPIIAVSGIVEMKLLAGNAKRDKKELEAAGKIATEAIENIRTVVSLTQERKFESMYVEKLYGPYRNSVQKAHIYGITFSISQAFMYFSYAGCFRFGAYLIVNGHMRFRDVILVFSAIVFGAVALGHASSFAPDYAKAKLSAAHLFMLFERQPLIDSYSEEGLKPDKFEGNITFNEVVFNYPTRANVPVLQGLSLEVKKGQTLALVGSSGCGKSTVVQLLERFYDPLAGTVLLDGQEAKKLNVQWLRAQLGIVSQEPILFDCSIAENIAYGDNSRVVSQDEIVSAAKAANIHPFIETLPHKYETRVGDKGTQLSGGQKQRIAIARALIRQPQILLLDEATSALDTESEKVVQEALDKAREGRTCIVIAHRLSTIQNADLIVVFQNGRVKEHGTHQQLLAQKGIYFSMVSVQAGTQNL

SEQ ID NO: 8946 - DNA, 3837 bp, Artificial Sequence
  derived and/or modified sequence
atggacctggaggccgccaagaacggcaccgcctggcgccccaccagcgccgagggcgacttcgagctgggcatcagcagcaagcagaagcgcaagaagaccaagaccgtgaagatgatcggcgtgctgaccctgttccgctacagcgactggcaggacaagctgttcatgagcctgggcaccatcatggccatcgcccacggcagcggcctgcccctgatgatgatcgtgttcggcgagatgaccgacaagttcgtggacaccgccggcaacttcagcttccccgtgaacttcagcctgagcctgctgaaccccggcaagatcctggaggaggagatgacccgctacgcctactactacagcggcctgggcgccggcgtgctggtggccgcctacatccaggtgagcttctggaccctggccgccggccgccagatccgcaagatccgccagaagttcttccacgccatcctgcgccaggagatcggctggttcgacatcaacgacaccaccgagctgaacacccgcctgaccgacgacatcagcaagatcagcgagggcatcggcgacaaggtgggcatgttcttccaggccgtggccaccttcttcgccggcttcatcgtgggcttcatccgcggctggaagctgaccctggtgatcatggccatcagccccatcctgggcctgagcgccgccgtgtgggccaagatcctgagcgccttcagcgacaaggagctggccgcctacgccaaggccggcgccgtggccgaggaggccctgggcgccatccgcaccgtgatcgccttcggcggccagaacaaggagctggagcgctaccagaagcacctggagaacgccaaggagatcggcatcaagaaggccatcagcgccaacatcagcatgggcatcgccttcctgctgatctacgccagctacgccctggccttctggtacggcagcaccctggtgatcagcaaggagtacaccatcggcaacgccatgaccgtgttcttcagcatcctgatcggcgccttcagcgtgggccaggccgccccctgcatcgacgccttcgccaacgcccgcggcgccgcctacgtgatcttcgacatcatcgacaacaaccccaagatcgacagcttcagcgagcgcggccacaagcccgacagcatcaagggcaacctggagttcaacgacgtgcacttcagctaccccagccgcgccaacgtgaagatcctgaagggcctgaacctgaaggtgcagagcggccagaccgtggccctggtgggcagcagcggctgcggcaagagcaccaccgtgcagctgatccagcgcctgtacgaccccgacgagggcaccatcaacatcgacggccaggacatccgcaacttcaacgtgaactacctgcgcgagatcatcggcgtggtgagccaggagcccgtgctgttcagcaccaccatcgccgagaacatctgctacggccgcggcaacgtgaccatggacgagatcaagaaggccgtgaaggaggccaacgcctacgagttcatcatgaagctgccccagaagttcgacaccctggtgggcgagcgcggcgcccagctgagcggcggccagaagcagcgcatcgccatcgcccgcgccctggtgcgcaaccccaagatcctgctgctggacgaggccaccagcgccctggacaccgagagcgaggccgaggtgcaggccgccctggacaaggcccgcgagggccgcaccaccatcgtgatcgcccaccgcctgagcaccgtgcgcaacgccgacgtgatcgccggcttcgaggacggcgtgatcgtggagcagggcagccacagcgagctgatgaagaaggagggcgtgtacttcaagctggtgaacatgcagaccagcggcagccagatccagagcgaggagttcgagctgaacgacgagaaggccgccacccgcatggcccccaacggctggaagagccgcctgttccgccacagcacccagaagaacctgaagaacagccagatgtgccagaagagcctggacgtggagaccgacggcctggaggccaacgtgccccccgtgagcttcctgaaggtgctgaagctgaacaagaccgagtggccctacttcgtggtgggcaccgtgtgcgccatcgccaacggcggcctgcagcccgccttcagcgtgatcttcagcgagatcatcgccatcttcggccccggcgacgacgccgtgaagcagcagaagtgcaacatcttcagcctgatcttcctgttcctgggcatcatcagcttcttcaccttcttcctgcagggcttcaccttcggcaaggccggcgagatcctgacccgccgcctgcgcagcatggccttcaaggccatgctgcgccaggacatgagctggttcgacgaccacaagaacagcaccggcgccctgagcacccgcctggccaccgacgccgcccaggtgcagggcgccaccggcacccgcctggccctgatcgcccagaacatcgccaacctgggcaccggcatcatcatcagcttcatctacggctggcagctgaccctgctgctgctggccgtggtgcccatcatcgccgtgagcggcatcgtggagatgaagctgctggccggcaacgccaagcgcgacaagaaggagctggaggccgccggcaagatcgccaccgaggccatcgagaacatccgcaccgtggtgagcctgacccaggagcgcaagttcgagagcatgtacgtggagaagctgtacggcccctaccgcaacagcgtgcagaaggcccacatctacggcatcaccttcagcatcagccaggccttcatgtacttcagctacgccggctgcttccgcttcggcgcctacctgatcgtgaacggccacatgcgcttccgcgacgtgatcctggtgttcagcgccatcgtgttcggcgccgtggccctgggccacgccagcagcttcgcccccgactacgccaaggccaagctgagcgccgcccacctgttcatgctgttcgagcgccagcccctgatcgacagctacagcgaggagggcctgaagcccgacaagttcgagggcaacatcaccttcaacgaggtggtgttcaactaccccacccgcgccaacgtgcccgtgctgcagggcctgagcctggaggtgaagaagggccagaccctggccctggtgggcagcagcggctgcggcaagagcaccgtggtgcagctgctggagcgcttctacgaccccctggccggcaccgtgctgctggacggccaggaggccaagaagctgaacgtgcagtggctgcgcgcccagctgggcatcgtgagccaggagcccatcctgttcgactgcagcatcgccgagaacatcgcctacggcgacaacagccgcgtggtgagccaggacgagatcgtgagcgccgccaaggccgccaacatccaccccttcatcgagaccctgccccacaagtacgagacccgcgtgggcgacaagggcacccagctgagcggcggccagaagcagcgcatcgccatcgcccgcgccctgatccgccagccccagatcctgctgctggacgaggccaccagcgccctggacaccgagagcgagaaggtggtgcaggaggccctggacaaggcccgcgagggccgcacctgcatcgtgatcgcccaccgcctgagcaccatccagaacgccgacctgatcgtggtgttccagaacggccgcgtgaaggagcacggcacccaccagcagctgctggcccagaagggcatctacttcagcatggtgagcgtgcaggccggcacccagaacctg

SEQ ID NO: 8947 - DNA, 3840 bp, Artificial Sequence
  derived and/or modified sequence
atggacctggaggccgccaagaacggcaccgcctggagacccaccagcgccgagggcgacttcgagctgggcatcagcagcaagcagaagagaaagaagaccaagaccgtgaagatgatcggcgtgctgaccctgttcagatacagcgactggcaggacaagctgttcatgagcctgggcaccatcatggccatcgcccacggcagcggcctgcccctgatgatgatcgtgttcggcgagatgaccgacaagttcgtggacaccgccggcaacttcagcttccccgtgaacttcagcctgagcctgctgaaccccggcaagatcctggaggaggagatgaccagatacgcctactactacagcggcctgggcgccggcgtgctggtggccgcctacatccaggtgagcttctggaccctggccgccggcagacagatcagaaagatcagacagaagttcttccacgccatcctgagacaggagatcggctggttcgacatcaacgacaccaccgagctgaacaccagactgaccgacgacatcagcaagatcagcgagggcatcggcgacaaggtgggcatgttcttccaggccgtggccaccttcttcgccggcttcatcgtgggcttcatcagaggctggaagctgaccctggtgatcatggccatcagccccatcctgggcctgagcgccgccgtgtgggccaagatcctgagcgccttcagcgacaaggagctggccgcctacgccaaggccggcgccgtggccgaggaggccctgggcgccatcagaaccgtgatcgccttcggcggccagaacaaggagctggagagataccagaagcacctggagaacgccaaggagatcggcatcaagaaggccatcagcgccaacatcagcatgggcatcgccttcctgctgatctacgccagctacgccctggccttctggtacggcagcaccctggtgatcagcaaggagtacaccatcggcaacgccatgaccgtgttcttcagcatcctgatcggcgccttcagcgtgggccaggccgccccctgcatcgacgccttcgccaacgccagaggcgccgcctacgtgatcttcgacatcatcgacaacaaccccaagatcgacagcttcagcgagagaggccacaagcccgacagcatcaagggcaacctggagttcaacgacgtgcacttcagctaccccagcagagccaacgtgaagatcctgaagggcctgaacctgaaggtgcagagcggccagaccgtggccctggtgggcagcagcggctgcggcaagagcaccaccgtgcagctgatccagagactgtacgaccccgacgagggcaccatcaacatcgacggccaggacatcagaaacttcaacgtgaactacctgagagagatcatcggcgtggtgagccaggagcccgtgctgttcagcaccaccatcgccgagaacatctgctacggcagaggcaacgtgaccatggacgagatcaagaaggccgtgaaggaggccaacgcctacgagttcatcatgaagctgccccagaagttcgacaccctggtgggcgagagaggcgcccagctgagcggcggccagaagcagagaatcgccatcgccagagccctggtgagaaaccccaagatcctgctgctggacgaggccaccagcgccctggacaccgagagcgaggccgaggtgcaggccgccctggacaaggccagagagggcagaaccaccatcgtgatcgcccacagactgagcaccgtgagaaacgccgacgtgatcgccggcttcgaggacggcgtgatcgtggagcagggcagccacagcgagctgatgaagaaggagggcgtgtacttcaagctggtgaacatgcagaccagcggcagccagatccagagcgaggagttcgagctgaacgacgagaaggccgccaccagaatggcccccaacggctggaagagcagactgttcagacacagcacccagaagaacctgaagaacagccagatgtgccagaagagcctggacgtggagaccgacggcctggaggccaacgtgccccccgtgagcttcctgaaggtgctgaagctgaacaagaccgagtggccctacttcgtggtgggcaccgtgtgcgccatcgccaacggcggcctgcagcccgccttcagcgtgatcttcagcgagatcatcgccatcttcggccccggcgacgacgccgtgaagcagcagaagtgcaacatcttcagcctgatcttcctgttcctgggcatcatcagcttcttcaccttcttcctgcagggcttcaccttcggcaaggccggcgagatcctgaccagaagactgagaagcatggccttcaaggccatgctgagacaggacatgagctggttcgacgaccacaagaacagcaccggcgccctgagcaccagactggccaccgacgccgcccaggtgcagggcgccaccggcaccagactggccctgatcgcccagaacatcgccaacctgggcaccggcatcatcatcagcttcatctacggctggcagctgaccctgctgctgctggccgtggtgcccatcatcgccgtgagcggcatcgtggagatgaagctgctggccggcaacgccaagagagacaagaaggagctggaggccgccggcaagatcgccaccgaggccatcgagaacatcagaaccgtggtgagcctgacccaggagagaaagttcgagagcatgtacgtggagaagctgtacggcccctacagaaacagcgtgcagaaggcccacatctacggcatcaccttcagcatcagccaggccttcatgtacttcagctacgccggctgcttcagattcggcgcctacctgatcgtgaacggccacatgagattcagagacgtgatcctggtgttcagcgccatcgtgttcggcgccgtggccctgggccacgccagcagcttcgcccccgactacgccaaggccaagctgagcgccgcccacctgttcatgctgttcgagagacagcccctgatcgacagctacagcgaggagggcctgaagcccgacaagttcgagggcaacatcaccttcaacgaggtggtgttcaactaccccaccagagccaacgtgcccgtgctgcagggcctgagcctggaggtgaagaagggccagaccctggccctggtgggcagcagcggctgcggcaagagcaccgtggtgcagctgctggagagattctacgaccccctggccggcaccgtgctgctggacggccaggaggccaagaagctgaacgtgcagtggctgagagcccagctgggcatcgtgagccaggagcccatcctgttcgactgcagcatcgccgagaacatcgcctacggcgacaacagcagagtggtgagccaggacgagatcgtgagcgccgccaaggccgccaacatccaccccttcatcgagaccctgccccacaagtacgagaccagagtgggcgacaagggcacccagctgagcggcggccagaagcagagaatcgccatcgccagagccctgatcagacagccccagatcctgctgctggacgaggccaccagcgccctggacaccgagagcgagaaggtggtgcaggaggccctggacaaggccagagagggcagaacctgcatcgtgatcgcccacagactgagcaccatccagaacgccgacctgatcgtggtgttccagaacggcagagtgaaggagcacggcacccaccagcagctgctggcccagaagggcatctacttcagcatggtgagcgtgcaggccggcacccagaacctgtag

SEQ ID NO: 8948 - DNA, 3840 bp, Artificial Sequence
  derived and/or modified sequence
atggatttggaggctgccaaaaatggtacggcctggagaccaacgagcgccgagggcgacttcgagttgggaatctcttcaaagcagaaaagaaaaaagactaagacagtaaagatgattggtgtcctgactctattccgatactctgattggcaggacaagctgttcatgtcactggggactattatggctatcgcacacggcagcggtctgccacttatgatgattgttttcggagagatgactgataagttcgtggacaccgccggaaatttctctttcccagtgaacttcagtctgagtctgctgaaccctggcaagattctggaggaggaaatgacgagatatgcctactactacagcgggttgggtgctggagtgcttgtggctgcatacattcaggtatcattttggactctcgctgccggcagacagatcaggaagataagacagaaattttttcacgcaatactgcggcaggagatcggctggttcgacattaatgataccactgaattgaataccaggctaactgacgatataagtaagatttccgaaggtataggcgataaagtaggtatgttctttcaagccgttgccaccttcttcgcgggcttcatagtggggtttattcgtggctggaagcttacattggtgatcatggcgatcagccctatccttgggctgagtgccgctgtgtgggcaaaaattctgagcgcatttagtgacaaggaattggctgcttatgcaaaggccggcgcagttgccgaggaggctttgggagccattcgaaccgttattgcatttggcggccaaaataaggagctggaacgataccagaaacatctggaaaacgcaaaggaaattgggatcaagaaagccatctctgctaatatctcaatgggcattgccttcctcctcatttatgcgagctatgctctcgcattttggtatggatctactctggtaatctctaaagaatataccattggcaatgccatgactgtctttttctccatcctaattggcgcctttagtgtaggtcaggccgccccttgcatagatgctttcgctaatgctcgaggagccgcttacgtcatttttgacatcatcgacaataacccgaaaatagactcattctctgagaggggacataaacccgacagtattaaggggaatctggagtttaatgacgtgcacttctcctacccgtcaagagcaaacgttaaaatcctgaaaggcctgaacttaaaggtacagagcggacagaccgtagccctcgtaggcagttcagggtgtggcaagagcactacggtgcagctgatccagagactgtacgacccagatgagggcacaattaacatcgatggacaggacatccggaacttcaatgtgaactacctcagagagattatcggcgtcgtgagccaggagcctgtccttttttccacaaccatcgctgaaaacatctgctacggccgaggcaacgtgaccatggatgagatcaaaaaagcggtgaaggaagctaatgcctacgagttcatcatgaagctgcctcagaagttcgacacacttgtcggcgaaaggggagctcagctgtccggtgggcagaagcagcgtatcgcaattgctagggccctggtgcggaatcccaagatccttctacttgatgaagcaaccagtgctcttgatactgaatcggaggcggaggtgcaggccgccctggacaaggctcgggaggggcgtaccacgattgttatcgcccaccgattatcaacagtccggaatgcggacgtaatcgccggattcgaggatggcgtaatcgtggagcaggggagtcactctgagcttatgaagaaagagggagtgtactttaaactcgtgaacatgcagacatctggttcccaaatccaatcagaggaattcgagctcaatgatgaaaaagccgccacccgcatggctccgaatggctggaaaagccgattgttccggcacagtacccagaaaaatctcaagaattctcaaatgtgccagaagagtttggatgtcgagacggatgggttggaggccaacgtgccaccagtcagcttcctgaaggttttgaagctgaacaagaccgagtggccctatttcgtagtcgggaccgtatgcgccatcgctaatggcgggctgcagcctgccttctctgtgatcttcagtgagattatcgctatcttcggcccaggggacgacgctgttaagcaacaaaagtgcaacatcttctcattgattttcctgttcctgggtatcatttctttctttactttttttctgcagggcttcacattcggcaaggcaggtgaaatactgactcgacgcctgcggtctatggcattcaaggcgatgttaagacaggacatgagctggtttgatgatcacaaaaattccaccggagccctgtccacaaggctggcgaccgacgcagcacaagtccagggggccacggggacacggctggccttgattgcacagaacattgctaacttaggcaccggcatcatcatcagtttcatttacgggtggcagttgaccctcctgcttctggctgtggtgcctattatcgcagtatcaggaattgtggagatgaaactcctggctggtaacgcaaaacgggacaagaaagaactggaagccgctggcaagatcgccaccgaggctatcgaaaacatccgtaccgtggtcagcctgacacaggagaggaagtttgaatccatgtatgtcgagaaactgtacgggccatatagaaacagtgtgcagaaagcacatatctacggtatcaccttttcaatctcccaggctttcatgtattttagctatgcggggtgcttccgattcggcgcatacctcatcgtcaacgggcacatgcgttttagagatgtgattctggtcttcagcgcgatagtgtttggggccgttgccctggggcacgcttcctcttttgctcctgattatgctaaggcaaagctctccgcagcacatctgtttatgctgtttgaacgccagcccctaatagatagctattccgaagaggggcttaagccagacaagtttgaaggcaacatcaccttcaacgaggttgtgttcaattatccaacccgtgccaatgtgcccgtactgcaaggcctgagcttggaggtgaaaaagggccaaactctggcgcttgttggctctagtggttgtgggaagtccaccgtggtacaattgctcgaaaggttttacgacccgcttgccggcaccgtgctgctggatgggcaggaggccaaaaagctgaatgtacagtggttacgtgctcagttgggtatagtctcccaggaacccattctcttcgactgcagtatcgccgagaatatcgcctacggcgataattctagagtcgtgtcccaggacgaaatagtttccgccgccaaagccgcaaatattcaccccttcattgagactctgcctcataagtatgaaacacgtgttggcgataaggggacacaactgagcggaggccaaaagcaacgcattgccatcgcccgagcactcatacggcagccccaaatactgttgctggacgaagcaacatctgcactagatacagaaagcgagaaggtggtgcaagaggcactcgataaggcgcgcgaaggtaggacctgtatcgtcatcgcacaccgtctgagcactattcaaaacgcagacctcattgtcgtttttcagaacggaagagtcaaagagcacggtactcaccagcagctgctcgctcagaaaggaatttacttcagcatggtgagcgttcaggctggtactcaaaacctctag

SEQ ID NO: 8949 - DNA, 3840 bp, Artificial Sequence
  derived and/or modified sequence
atggatctggaggctgcaaagaacggcacagcctggcggcccacctcagccgagggcgactttgaacttggtatctcaagcaagcagaagcgaaagaaaaccaagacagtgaagatgatcggggttctaactctgttccgctactcagattggcaagataagctcttcatgtctctgggaacaatcatggccatcgcccacgggtctggcttacccttaatgatgatagtgttcggagaaatgaccgacaaatttgtggatacagctggaaatttctctttccctgtgaactttagcttgagcctacttaatcccggcaaaattctcgaggaagaaatgacacgctacgcatactactacagcggtctgggggccggcgtgctcgtcgcagcatatattcaggtgagtttctggactcttgcagccggacggcagattcggaagatacgacaaaaattctttcatgccatccttaggcaggagatcggatggtttgacattaacgataccaccgagctgaacacaagattgacggacgatatcagcaagatatcggagggtatcggagacaaggttggaatgttttttcaggcggtggcaacgtttttcgcaggcttcatcgtggggtttatccgggggtggaagctgactctggtgattatggcaatctctccaatcctgggactgagcgccgctgtgtgggccaagattcttagcgctttcagcgacaaggagctggcagcttacgcaaaggcaggagccgtcgccgaggaggccctcggggccattcggacagttatcgcttttgggggccagaataaagagctcgaacgataccagaagcatctggaaaatgctaaggaaattgggataaagaaagcgatctcggccaacatatccatgggcattgctttcctactcatttacgccagctacgcgctggcattctggtacgggtcaactctggttataagcaaggagtacaccataggaaacgccatgaccgtgttcttctcaatcctgatcggagcattttcagtcgggcaggcagcgccttgtatcgacgcattcgccaatgccagaggagcggcgtatgtgatatttgacattattgataacaaccccaaaatcgattcattcagtgagagaggtcacaaaccagacagcatcaagggcaaccttgagtttaacgatgtgcatttttcatacccctcccgggccaacgtgaagattctgaagggtctgaacctaaaagtccagagcgggcagaccgtagctcttgtgggctccagcggctgtggcaaatccactacagttcagttgattcagagactgtacgaccccgatgagggaacaattaatatcgacggccaagacatcaggaacttcaatgtcaattacctgagagaaattatcggggtcgtgagccaagaaccagttctgttctctactaccatagctgaaaatatttgctacggtcgagggaatgtgaccatggacgaaattaagaaggccgtgaaggaggcgaatgcctatgaattcataatgaaactgccccagaaatttgataccctggtcggagagcggggggctcagctgagcggtggccaaaagcagaggatagcaattgctcgggccctcgtcagaaaccctaagattctgctgctagacgaggctacttctgctttagacacagaaagtgaggcggaggtgcaggcggcactggacaaggcccgggagggacgaaccacaattgtgatagcccatagactgtccaccgtgcgcaatgcggatgtgatagccggctttgaggatggcgtgattgtcgaacagggcagtcacagcgagctgatgaagaaagagggagtttattttaagctcgttaacatgcagacatcagggtcccaaatccaatcagaggaatttgagttaaatgacgagaaggcagccacaaggatggcccctaatggatggaaaagccgactatttcggcattcgacccagaagaacctaaagaactctcaaatgtgccagaaatccctcgacgtcgagacagatggactggaagcgaacgtgccaccagtttcatttctaaaagtcttgaaacttaataagaccgagtggccatatttcgtggttggaaccgtgtgtgctatagcaaacggagggcttcagcccgctttctcggtgatcttcagcgaaatcattgcaatcttcgggcccggggacgatgctgtgaagcagcagaaatgcaacatcttttccctgatttttctatttctgggcataattagctttttcaccttttttctgcaggggtttactttcgggaaagcgggcgaaattctgactcgcaggttgcggtccatggccttcaaggctatgcttcgccaggacatgtcctggtttgacgatcacaagaacagcactggcgctttgtccacccgattagccacagacgccgcacaggtccagggggccaccggtaccaggctggccctcattgcccagaatatcgccaacctgggcaccggtattatcatttcattcatctacggctggcagctcacccttttgctgctcgcagtggtccccatcatcgcagttagtggcatcgttgaaatgaaactcctggccggaaacgccaaaagggacaaaaaggagctggaagctgctggaaaaatcgccacagaggctatcgagaatattagaactgtggtcagcctgacccaagagcgtaaatttgagtccatgtatgtggagaaactgtacgggccatataggaactctgtgcagaaggcccacatctatggaatcacattcagtatctctcaggcctttatgtacttttcctacgccggatgttttcggtttggggcttatctcattgtgaatggccacatgagatttagagacgttatattggtgttctcggccatcgttttcggggccgtcgcattagggcacgcgagttcattcgccccagattacgccaaggccaagctctccgcggcccatctgttcatgctgttcgaacgccagcctctgatagactcctacagtgaagaaggtttgaagccagataaattcgaaggcaacattacattcaacgaggtagtgttcaattatcctacccgcgctaacgttcctgtgctccaaggcctaagcctggaagtgaaaaagggccagacccttgccctcgtgggaagctctggttgcggcaaatcaacagtcgtccagctgctggaacggttttatgatccactagcaggcaccgtgcttctagatggccaagaggccaagaaattgaatgtccagtggttgcgagcccagctcgggatcgtgtcacaagagcccattctctttgattgtagcattgcggaaaatatagcctatggggacaactcccgtgtggtgtcacaggacgagatcgttagcgctgctaaagctgccaatatacatcccttcattgagaccctgccgcacaaatatgagaccagagtgggcgataaaggtacacagctttctgggggacagaaacaacgaatcgctattgcgagggccctgattagacagccccagattttgctcctggatgaagccacttctgccctggacactgaatctgagaaagtggtgcaggaggccctggacaaggcgagagaaggccgtacttgtatcgtcatcgcccaccggctgagtactattcagaacgcagacctgattgtggtcttccagaacggtcgggtcaaagagcacggcactcatcagcagttgctcgctcagaaaggtatttatttttctatggtgagcgtacaggcaggaacccagaatctgtag

SEQ ID NO: 8950 - DNA, 3923 bp, Artificial Sequence
  derived and/or modified sequence
cctgccagacacgcgcgaggttcgaggctgagatggatcttgaggcggcaaagaacggaacagcctggcgccccacgagcgcggagggcgactttgaactgggcatcagcagcaaacaaaaaaggaaaaaaacgaagacagtgaaaatgattggagtattaacattgtttcgatactccgattggcaggataaattgtttatgtcgctgggtaccatcatggccatagctcacggatcaggtctccccctcatgatgatagtatttggagagatgactgacaaatttgttgatactgcaggaaacttctcctttccagtgaacttttccttgtcgctgctaaatccaggcaaaattctggaagaagaaatgactagatatgcatattactactcaggattgggtgctggagttcttgttgctgcctatatacaagtttcattttggactttggcagctggtcgacagatcaggaaaattaggcagaagttttttcatgctattctacgacaggaaataggatggtttgacatcaacgacaccactgaactcaatacgcggctaacagatgacatctccaaaatcagtgaaggaattggtgacaaggttggaatgttctttcaagcagtagccacgttttttgcaggattcatagtgggattcatcagaggatggaagctcacccttgtgataatggccatcagccctattctaggactctctgcagccgtttgggcaaagatactctcggcatttagtgacaaagaactagctgcttatgcaaaagcaggcgccgtggcagaagaggctctgggggccatcaggactgtgatagctttcgggggccagaacaaagagctggaaaggtatcagaaacatttagaaaatgccaaagagattggaattaaaaaagctatttcagcaaacatttccatgggtattgccttcctgttaatatatgcatcatatgcactggccttctggtatggatccactctagtcatatcaaaagaatatactattggaaatgcaatgacagtttttttttcaatcctaattggagctttcagtgttggccaggctgccccatgtattgatgcttttgccaatgcaagaggagcagcatatgtgatctttgatattattgataataatcctaaaattgacagtttttcagagagaggacacaaaccagacagcatcaaagggaatttggagttcaatgatgttcacttttcttacccttctcgagctaacgtcaagatcttgaagggcctcaacctgaaggtgcagagtgggcagacggtggccctggttggaagtagtggctgtgggaagagcacaacggtccagctgatacagaggctctatgaccctgatgagggcacaattaacattgatgggcaggatattaggaactttaatgtaaactatctgagggaaatcattggtgtggtgagtcaggagccggtgctgttttccaccacaattgctgaaaatatttgttatggccgtggaaatgtaaccatggatgagataaagaaagctgtcaaagaggccaacgcctatgagtttatcatgaaattaccacagaaatttgacaccctggttggagagagaggggcccagctgagtggtgggcagaagcagaggatcgccattgcacgtgccctggttcgcaaccccaagatccttctgctggatgaggccacgtcagcattggacacagaaagtgaagctgaggtacaggcagctctggataaggccagagaaggccggaccaccattgtgatagcacaccgactgtctacggtccgaaatgcagatgtcatcgctgggtttgaggatggagtaattgtggagcaaggaagccacagcgaactgatgaagaaggaaggggtgtacttcaaacttgtcaacatgcagacatcaggaagccagatccagtcagaagaatttgaactaaatgatgaaaaggctgccactagaatggccccaaatggctggaaatctcgcctatttaggcattctactcagaaaaaccttaaaaattcacaaatgtgtcagaagagccttgatgtggaaaccgatggacttgaagcaaatgtgccaccagtgtcctttctgaaggtcctgaaactgaataaaacagaatggccctactttgtcgtgggaacagtatgtgccattgccaatggggggcttcagccggcattttcagtcatattctcagagatcatagcgatttttggaccaggcgatgatgcagtgaagcagcagaagtgcaacatattctctttgattttcttatttctgggaattatttctttttttactttcttccttcagggtttcacgtttgggaaagctggcgagatcctcaccagaagactgcggtcaatggcttttaaagcaatgctaagacaggacatgagctggtttgatgaccataaaaacagtactggtgcactttctacaagacttgccacagatgctgcccaagtccaaggagccacaggaaccaggttggctttaattgcacagaatatagctaaccttggaactggtattatcatatcatttatctacggttggcagttaaccctattgctattagcagttgttccaattattgctgtgtcaggaattgttgaaatgaaattgttggctggaaatgccaaaagagataaaaaagaactggaagctgctggaaagattgcaacagaggcaatagaaaatattaggacagttgtgtctttgacccaggaaagaaaatttgaatcaatgtatgttgaaaaattgtatggaccttacaggaattctgtgcagaaggcacacatctatggaattacttttagtatctcacaagcatttatgtatttttcctatgccggttgttttcgatttggtgcatatctcattgtgaatggacatatgcgcttcagagatgttattctggtgttttctgcaattgtatttggtgcagtggctctaggacatgccagttcatttgctccagactatgctaaagctaagctgtctgcagcccacttattcatgctgtttgaaagacaacctctgattgacagctacagtgaagaggggctgaagcctgataaatttgaaggaaatataacatttaatgaagtcgtgttcaactatcccacccgagcaaacgtgccagtgcttcaggggctgagcctggaggtgaagaaaggccagacactagccctggtgggcagcagtggctgtgggaagagcacggtggtccagctcctggagcggttctacgaccccttggcggggacagtgcttctcgatggtcaagaagcaaagaaactcaatgtccagtggctcagagctcaactcggaatcgtgtctcaggagcctatcctatttgactgcagcattgccgagaatattgcctatggagacaacagccgggttgtatcacaggatgaaattgtgagtgcagccaaagctgccaacatacatcctttcatcgagacgttaccccacaaatatgaaacaagagtgggagataaggggactcagctctcaggaggtcaaaaacagaggattgctattgcccgagccctcatcagacaacctcaaatcctcctgttggatgaagctacatcagctctggatactgaaagtgaaaaggttgtccaagaagccctggacaaagccagagaaggccgcacctgcattgtgattgctcaccgcctgtccaccatccagaatgcagacttaatagtggtgtttcagaatgggagagtcaaggagcatggcacgcatcagcagctgctggcacagaaaggcatctatttttcaatggtcagtgtccaggctgggacacagaacttatgaacttttgctacagtatattttaaaaataaattcaaattattctaccatttt

SEQ ID NO: 8951 - DNA, 3840 bp, Artificial Sequence
  derived and/or modified sequence
atggatcttgaggcggcaaagaacggaacagcctggcgccccacgagcgcggagggcgactttgaactgggcatcagcagcaaacaaaaaaggaaaaaaacgaagacagtgaaaatgattggagtattaacattgtttcgatactccgattggcaggataaattgtttatgtcgctgggtaccatcatggccatagctcacggatcaggtctccccctcatgatgatagtatttggagagatgactgacaaatttgttgatactgcaggaaacttctcctttccagtgaacttttccttgtcgctgctaaatccaggcaaaattctggaagaagaaatgactagatatgcatattactactcaggattgggtgctggagttcttgttgctgcctatatacaagtttcattttggactttggcagctggtcgacagatcaggaaaattaggcagaagttttttcatgctattctacgacaggaaataggatggtttgacatcaacgacaccactgaactcaatacgcggctaacagatgacatctccaaaatcagtgaaggaattggtgacaaggttggaatgttctttcaagcagtagccacgttttttgcaggattcatagtgggattcatcagaggatggaagctcacccttgtgataatggccatcagccctattctaggactctctgcagccgtttgggcaaagatactctcggcatttagtgacaaagaactagctgcttatgcaaaagcaggcgccgtggcagaagaggctctgggggccatcaggactgtgatagctttcgggggccagaacaaagagctggaaaggtatcagaaacatttagaaaatgccaaagagattggaattaaaaaagctatttcagcaaacatttccatgggtattgccttcctgttaatatatgcatcatatgcactggccttctggtatggatccactctagtcatatcaaaagaatatactattggaaatgcaatgacagtttttttttcaatcctaattggagctttcagtgttggccaggctgccccatgtattgatgcttttgccaatgcaagaggagcagcatatgtgatctttgatattattgataataatcctaaaattgacagtttttcagagagaggacacaaaccagacagcatcaaagggaatttggagttcaatgatgttcacttttcttacccttctcgagctaacgtcaagatcttgaagggcctcaacctgaaggtgcagagtgggcagacggtggccctggttggaagtagtggctgtgggaagagcacaacggtccagctgatacagaggctctatgaccctgatgagggcacaattaacattgatgggcaggatattaggaactttaatgtaaactatctgagggaaatcattggtgtggtgagtcaggagccggtgctgttttccaccacaattgctgaaaatatttgttatggccgtggaaatgtaaccatggatgagataaagaaagctgtcaaagaggccaacgcctatgagtttatcatgaaattaccacagaaatttgacaccctggttggagagagaggggcccagctgagtggtgggcagaagcagaggatcgccattgcacgtgccctggttcgcaaccccaagatccttctgctggatgaggccacgtcagcattggacacagaaagtgaagctgaggtacaggcagctctggataaggccagagaaggccggaccaccattgtgatagcacaccgactgtctacggtccgaaatgcagatgtcatcgctgggtttgaggatggagtaattgtggagcaaggaagccacagcgaactgatgaagaaggaaggggtgtacttcaaacttgtcaacatgcagacatcaggaagccagatccagtcagaagaatttgaactaaatgatgaaaaggctgccactagaatggccccaaatggctggaaatctcgcctatttaggcattctactcagaaaaaccttaaaaattcacaaatgtgtcagaagagccttgatgtggaaaccgatggacttgaagcaaatgtgccaccagtgtcctttctgaaggtcctgaaactgaataaaacagaatggccctactttgtcgtgggaacagtatgtgccattgccaatggggggcttcagccggcattttcagtcatattctcagagatcatagcgatttttggaccaggcgatgatgcagtgaagcagcagaagtgcaacatattctctttgattttcttatttctgggaattatttctttttttactttcttccttcagggtttcacgtttgggaaagctggcgagatcctcaccagaagactgcggtcaatggcttttaaagcaatgctaagacaggacatgagctggtttgatgaccataaaaacagtactggtgcactttctacaagacttgccacagatgctgcccaagtccaaggagccacaggaaccaggttggctttaattgcacagaatatagctaaccttggaactggtattatcatatcatttatctacggttggcagttaaccctattgctattagcagttgttccaattattgctgtgtcaggaattgttgaaatgaaattgttggctggaaatgccaaaagagataaaaaagaactggaagctgctggaaagattgcaacagaggcaatagaaaatattaggacagttgtgtctttgacccaggaaagaaaatttgaatcaatgtatgttgaaaaattgtatggaccttacaggaattctgtgcagaaggcacacatctatggaattacttttagtatctcacaagcatttatgtatttttcctatgccggttgttttcgatttggtgcatatctcattgtgaatggacatatgcgcttcagagatgttattctggtgttttctgcaattgtatttggtgcagtggctctaggacatgccagttcatttgctccagactatgctaaagctaagctgtctgcagcccacttattcatgctgtttgaaagacaacctctgattgacagctacagtgaagaggggctgaagcctgataaatttgaaggaaatataacatttaatgaagtcgtgttcaactatcccacccgagcaaacgtgccagtgcttcaggggctgagcctggaggtgaagaaaggccagacactagccctggtgggcagcagtggctgtgggaagagcacggtggtccagctcctggagcggttctacgaccccttggcggggacagtgcttctcgatggtcaagaagcaaagaaactcaatgtccagtggctcagagctcaactcggaatcgtgtctcaggagcctatcctatttgactgcagcattgccgagaatattgcctatggagacaacagccgggttgtatcacaggatgaaattgtgagtgcagccaaagctgccaacatacatcctttcatcgagacgttaccccacaaatatgaaacaagagtgggagataaggggactcagctctcaggaggtcaaaaacagaggattgctattgcccgagccctcatcagacaacctcaaatcctcctgttggatgaagctacatcagctctggatactgaaagtgaaaaggttgtccaagaagccctggacaaagccagagaaggccgcacctgcattgtgattgctcaccgcctgtccaccatccagaatgcagacttaatagtggtgtttcagaatgggagagtcaaggagcatggcacgcatcagcagctgctggcacagaaaggcatctatttttcaatggtcagtgtccaggctgggacacagaacttatga

SEQ ID NO: 8952 - DNA, 3840 bp, Artificial Sequence
  derived and/or modified sequence
atggacctggaggccgccaagaatggaacagcctggaggcccaccagcgctgagggggactttgagctgggcatcagcagcaagcagaagaggaagaagaccaagacagtgaagatgattggagtgctgaccctcttccgctacagcgactggcaggacaagctgttcatgagcctgggcaccatcatggccatcgcccacggcagcggcctgcccctgatgatgattgtgtttggagagatgacagacaagtttgtggacacagctggcaacttctccttccctgtgaacttcagcctgagcctgctgaaccctgggaagatcctggaggaggagatgaccaggtatgcctactactacagcggcctgggcgccggcgtgctggtggccgcctacatccaggtgtccttctggaccctggccgccggccggcagatcaggaagatccggcagaagttcttccacgccatcctgcggcaggagatcggctggtttgacatcaatgacaccacagagctgaacacccggctgacagatgacatcagcaagatcagcgagggcatcggggacaaggtgggcatgttcttccaggccgtggccaccttctttgctggcttcatcgtgggcttcatccggggctggaagctgaccctggtgatcatggccatcagccccatcctgggcctgtctgctgctgtgtgggccaagatcctgagcgccttcagtgacaaggagctggccgcctatgccaaggccggggctgtggccgaggaggccctgggcgccatcagaacagtgattgcctttggaggccagaacaaggagctggagcgctaccagaagcacctggagaatgccaaggagatcggcatcaagaaggccatcagcgccaacatctccatgggcatcgccttcctgctgatctatgccagctatgccctggccttctggtacggcagcaccctggtgatcagcaaggagtacaccatcggaaatgccatgacagtgttcttcagcatcctgattggagccttctctgtgggccaggccgccccctgcattgatgcctttgccaatgcccggggagctgcctacgtgatctttgacatcatcgacaacaaccccaagattgacagcttcagcgagcggggccacaagccagacagcatcaagggcaacctggagttcaatgatgtgcacttctcctaccccagccgggccaacgtgaagatcctgaagggcctgaacctgaaggtgcagagcggccagacagtggccctggtgggcagcagcggctgcggcaagagcaccaccgtgcagctgatccagaggctgtatgaccctgatgagggcaccatcaacattgatggccaggacatccggaacttcaacgtgaactacctgcgggagatcatcggcgtggtgtcccaggagcctgtgctcttcagcaccaccatcgccgagaacatctgctacggcagaggaaatgtgaccatggatgagatcaagaaggctgtgaaggaggccaatgcctatgagttcatcatgaagctgccccagaagtttgacaccctggtgggggagcggggggcccagctgagcggcggccagaagcagagaattgccatcgcccgggccctggtgaggaaccccaagatcctgctgctggatgaggccaccagcgccctggacacagaaagtgaagctgaggtgcaggccgccctggacaaggcccgggagggccgcaccaccatcgtgattgcccaccggctgagcacagtgagaaatgctgatgtgattgctggctttgaagatggagtcatcgtggagcagggcagccacagcgagctgatgaagaaggagggcgtgtacttcaagctggtgaacatgcagaccagcggcagccagatccagagcgaggagtttgagctgaatgatgagaaggccgccaccaggatggcccccaacggctggaagagccgcctcttccgccacagcacccagaagaacctgaagaacagccagatgtgccagaagagcctggatgtggagacagatggcctggaggccaacgtgccccctgtgtccttcctgaaggtgctgaagctgaacaagacagagtggccctactttgtggtgggcaccgtgtgtgccatcgccaatggaggcctgcagcctgccttcagcgtcatcttcagcgagatcatcgccatctttggacctggagatgatgctgtgaagcagcagaagtgcaacatcttcagcctcatcttcctgttcctgggcatcatctccttcttcaccttcttcctgcagggcttcaccttcggcaaggccggggagatcctgacccggcggctgcgctccatggccttcaaggccatgctgcggcaggacatgtcctggtttgatgaccacaagaacagcactggagccctgagcacccggctggccacagatgctgcccaggtgcagggcgccaccggcacccggctggccctgattgcccagaacatcgccaacctgggcaccggcatcatcatctccttcatctacggctggcagctgaccctgctgctgctggccgtggtgcccatcatcgctgtgtctggcatcgtggagatgaagctgctggccggaaatgccaagagggacaagaaggagctggaggccgccggcaagatcgccacagaggccatcgagaacatcagaacagtggtgtccctgacccaggagaggaagtttgagagcatgtatgtggagaagctgtatggcccctacagaaacagcgtgcagaaggcccacatctacggcatcaccttcagcatcagccaggccttcatgtacttctcctatgccggctgcttccgctttggagcctacctgattgtgaatggccacatgaggttcagagatgtgatcctggtgttcagcgccatcgtgtttggagctgtggccctgggccacgccagcagctttgccccagactatgccaaggccaagctgtctgctgcccacctgttcatgctgtttgagcggcagcccctgattgacagctacagcgaggagggcctgaagccagacaagtttgagggcaacatcaccttcaatgaggtggtgttcaactaccccacccgggccaacgtgcctgtgctgcagggcctgagcctggaggtgaagaagggccagaccctggccctggtgggcagcagcggctgcggcaagagcacagtggtgcagctgctggagcgcttctatgaccccctggccggcaccgtgctgctggatggccaggaggccaagaagctgaatgtgcagtggctgcgggcccagctgggcatcgtgtcccaggagcccatcctgtttgactgcagcattgctgagaacatcgcctacggggacaacagccgggtggtgtcccaggatgagatcgtgtctgctgccaaggccgccaacatccaccccttcatcgagaccctgccccacaagtatgagaccagggtgggggacaagggcacccagctgagcggcggccagaagcagagaattgccatcgcccgggccctgatccggcagccccagatcctgctgctggatgaggccaccagcgccctggacacagaaagtgagaaggtggtgcaggaggccctggacaaggcccgggagggccgcacctgcatcgtgattgcccaccggctgagcaccatccagaatgctgacctgattgtggtgttccagaatggccgggtgaaggagcacggcacccaccagcagctgctggcccagaagggcatctacttctccatggtgtctgtgcaggccggcacccagaacctgtag

SEQ ID NO: 8953 - DNA, 3840 bp, Artificial Sequence
  derived and/or modified sequence
atggacctggaggccgccaagaacggcaccgcctggcggcccacctccgctgagggagatttcgaactgggaatctccagcaagcagaaacggaaaaagaccaagactgtcaaaatgattggagtgctgactctgtttagatatagtgattggcaggataaactgtttatgtctctgggcaccatcatggccatcgcccatggttcagggctgcccctgatgatgatagtctttggagaaatgacagacaaattcgttgatactgcaggtaactttagctttccggtgaacttttcgttgtcattgctcaacccaggcaaaattctggaagaagaaatgacaagatacgcttactactattccgggttgggcgcgggcgtgctggtcgccgcctacatccaggtaagcttctggaccctcgccgcaggccggcaaatccgaaaaatccgacagaagttcttccacgccatcctacggcaggaaatcggttggttcgacataaacgatacaacagaacttaatacacggctgacagatgatatctcaaaaatctcagagggcatcggtgataaagtcggcatgttctttcaggcggtggccacctttttcgccggcttcatcgtaggcttcatacgcggctggaagcttaccctagttatcatggccatctctcccatactggggctgagcgccgcagtctgggctaaaatcttatccgcattttccgataaagaacttgcagcgtatgccaaagctggagcagtcgccgaggaagccctcggggccatccggaccgtaatcgcgttcgggggacaaaataaggagttagaacggtaccaaaagcacctcgaaaatgcaaaagagattggtataaagaaagctattagtgccaacatcagcatggggatagcatttttactgatttacgcctcttacgctctggcattctggtacggctccacgcttgtgataagtaaggaatacactattggaaacgccatgaccgtgttcttcagtattttgatcggagccttttccgttggccaggccgctccctgcattgacgcctttgctaatgcgagaggggccgcttatgtgatcttcgatatcattgataataaccccaaaatagatagtttctctgagaggggccataagcccgattctatcaaagggaatttggaattcaacgacgtgcactttagctatccaagccgcgccaacgttaagatcctgaaggggctgaaccttaaggtgcagtctggtcagactgtggcactggtaggttcaagcgggtgcgggaaaagcactacagtgcagctgattcagcgtctgtacgaccccgatgagggcacaatcaacattgacgggcaggacatccgcaacttcaatgtcaactatttgagagagattattggagtcgtctcacaggaacctgttttattctctacgacaatcgctgagaatatctgctatggtcgcggcaatgtgacaatggatgaaatcaaaaaagcagttaaagaggcaaatgcatatgaattcattatgaagctccctcagaagttcgacaccctggtgggagaaaggggtgctcaactatccggagggcagaagcagaggatcgctattgccagagccctggtcagaaaccccaagatcctgctgctggatgaggccacctccgcactggatacagagtcagaggctgaggtgcaggccgcgctggacaaggcccgagagggcagaacaactatagtgattgcgcatagactgtcgacagtgcgcaatgcagacgtgatcgctggttttgaagacggcgtaatagtggagcagggctctcactctgagttgatgaagaaagaaggtgtgtattttaagctggtaaatatgcagacttccgggagccaaatccagagcgaggagttcgaactcaatgacgagaaagcagctacccgcatggcccccaacggttggaagtcgagactttttcggcattctacacagaagaaccttaaaaactcccagatgtgccagaaatcactcgacgtggagacagatggccttgaagcgaacgtccctcctgtgtcgttcctgaaagttctcaaactaaacaaaacagaatggccctatttcgttgtgggcaccgtgtgtgccatcgccaacggcggccttcagcctgccttcagtgtcattttttctgaaatcatagctatattcggacctggtgatgatgctgtgaagcaacaaaaatgcaatatcttcagcctaatttttcttttccttgggattatctctttcttcactttcttcttgcaaggtttcacgttcgggaaggccggtgaaattttaactaggagactgcgaagcatggcttttaaggccatgctccgtcaggatatgagttggttcgacgatcataagaattctactggtgcattaagcacaagattagctaccgacgcggctcaagtgcaaggcgccacaggcacccgcctggccttaattgctcagaatatcgccaacctgggcactgggataatcatctcatttatttatggatggcaactgaccctgctcctgcttgctgtggtgcccattatcgcagtgagcggaatagtggaaatgaagcttctggccggcaacgccaagagagataagaaggaactggaagccgcaggcaagatcgccaccgaggccattgaaaatatccgtactgtagtaagcctcacacaggagaggaagttcgagagcatgtacgtggaaaagctctacggaccttaccgtaacagcgtccaaaaggctcatatctacgggatcactttttcaatctcccaggcatttatgtacttttcctatgccggctgctttaggttcggagcgtaccttatagtgaatggtcacatgagatttcgcgatgtcatcctcgtttttagcgccatcgtcttcggcgctgtagcgctgggccatgcctcctcttttgccccagactatgccaaggccaagctgagtgcagcacacttattcatgctgttcgaaagacagcccttgattgacagttatagtgaagagggtctcaaacctgacaaattcgaagggaacattacattcaacgaagtggtgtttaattaccccacccgggcaaacgtacctgtacttcagggcctgtctcttgaagtgaaaaagggtcaaaccttggctttggttgggtcctctggttgcggcaaatccactgtagtgcagctgcttgagaggttctatgaccctttggcaggaactgtccttctggatggccaggaggccaaaaagctcaatgtacagtggctgcgggcacagcttggcatcgtgtcccaagaacccattctgttcgattgctccatcgccgagaatatcgcttacggagacaactctcgcgtggtgagtcaggatgaaattgtgtcagctgctaaggcagctaatattcatcccttcattgagactctcccacacaagtatgagactcgagtgggcgacaagggaacccagctctccggcggccagaagcagagaatcgctatagcacgagcgctcattaggcaaccacaaatcctcctcctcgatgaggccacatctgccctggatactgagtcagagaaagtagtgcaggaagctttggacaaagctcgcgagggtcgcacctgtattgtgatcgcacatagactcagcacaatccagaatgctgacctgatcgtcgtgttccaaaatggtcgagtcaaagaacacggaacccatcaacagctcctggctcagaaggggatctacttctcaatggtgtccgtccaggccggtactcagaacctttag

SEQ ID NO: 8954 - DNA, 3840 bp, Artificial Sequence
  derived and/or modified sequence
atggacctggaggccgccaagaacggcaccgcctggcggcccaccagcgctgaaggtgactttgagcttggaattagtagtaagcagaagaggaaaaagactaagacagttaagatgattggagtgctaaccctcttccggtactcggattggcaagacaaactattcatgagtctgggcactatcatggcaattgcacatggctcaggtcttcctcttatgatgatagtttttggcgagatgaccgataagttcgtggatacagccggaaatttcagctttccagtgaacttctccttatccctgctgaatcctggaaaaatacttgaggaggagatgaccaggtacgcctactactacagtgggttgggtgctggcgtcctggtggccgcttacatccaggtgtccttctggacactggctgcggggcgccagattcgtaaaatacggcaaaagtttttccatgccatattgcgccaggagattggatggttcgacattaatgacaccaccgaactcaatactcgcctcactgatgacatcagtaagattagtgagggaatcggcgataaggttggcatgtttttccaggccgtggctactttctttgccggttttatcgtgggctttatcagaggctggaagcttactctagtcattatggctatcagccctatcctgggtctttctgcagcagtgtgggcgaaaattctgtctgcattctcggacaaggaactggccgcctacgcaaaggctggcgcggttgcggaggaagctctgggcgccattcggacagtgatcgcttttggtggccagaataaagaattagagaggtatcagaagcatctggaaaacgctaaggaaataggaattaagaaggctataagcgccaatatctcgatgggaatcgccttcctgctgatttatgccagctatgccctcgcattttggtatggctcaaccctggttatttcaaaggaatacaccatcggcaatgcaatgaccgtatttttttccattctaattggagcatttagtgtcgggcaggcagctccatgtattgatgctttcgcgaacgctaggggagcagcctatgttatctttgacattatcgataataatcccaaaatcgatagtttttccgaacgagggcacaagcctgactccattaaaggtaacctggagttcaacgacgtgcacttcagttatccctcacgtgctaatgtcaagattctgaaaggtctcaatcttaaagtccagtcaggacagaccgttgccctggttggcagcagcgggtgtgggaagagcactacggtgcaactgatccagcggttatatgacccagacgaagggaccatcaacatagacgggcaggacattagaaacttcaatgtgaattacctgcgcgagattatcggagtcgttagtcaggaacctgttctgtttagtacaacaattgcggagaatatctgctacgggagagggaacgttactatggacgaaataaagaaagctgtgaaggaagctaatgcctatgagttcataatgaagctcccacagaaatttgacacacttgtcggggagagaggagcccagttgagcggcggtcagaagcagcgcattgcaattgccagggcattagtacgcaatcccaagatccttctcctggatgaggccacttctgctctggatacagaatccgaagctgaggtgcaggcagcactggacaaggccagggaggggcggactaccatagttatcgcacatagactttccacagtacgcaacgccgacgtgattgccggatttgaggatggtgtgattgtggagcagggatcgcactccgaactgatgaaaaaagaaggggtttatttcaagcttgtgaacatgcagacatccggatcccagatccagagtgaagaattcgagttgaacgatgagaaagctgctaccagaatggctcccaacggatggaagtcaaggctgttccgccatagcacccaaaagaacctaaaaaactcacagatgtgtcaaaagtccttggatgttgaaacagatggcctcgaagccaatgtgccgcccgtctcattcctaaaggtactgaagctcaataaaactgagtggccgtattttgttgtaggaactgtgtgtgctatcgcgaatgggggtcttcagcccgccttttccgtaattttctcagagataatcgccatttttggtccaggagacgacgccgttaagcagcagaagtgcaacatcttcagtctgatcttcttatttctggggatcatatcattttttacgttctttctgcagggattcacctttggaaaggctggcgagattcttaccaggaggctgagatctatggccttcaaggctatgctgcgtcaagatatgagttggtttgacgaccataagaattccaccggcgcactgtccactcgattagccaccgatgccgcccaggtgcaaggggccactggtaccagactggccctcatcgcacaaaatattgcaaacctgggcaccggaatcataattagcttcatctatggatggcaattaacactgctgctgttagctgtggtgcctattatcgcagtcagtggaatcgtggaaatgaagttattggccggtaatgcaaagagggacaagaaagagttagaggccgccggtaaaatcgcgactgaggccatcgagaacatacggaccgttgtgtccctgacccaagaacgcaagttcgaaagcatgtacgtggagaagctgtatgggccctaccggaattcagttcagaaagcccacatctacggtatcactttttcaatcagtcaagccttcatgtacttctcctacgctggatgtttcagattcggagcttacctgatagtgaacggccatatgaggttcagagatgtcatccttgtgttttctgctatagtatttggggcagtcgctctgggccatgcatcctccttcgcccctgattacgctaaagccaagctgagcgcagcgcatctgttcatgctgttcgagagacaacccttgatagactcatactccgaggaggggctcaaaccggataaattcgaagggaatatcacattcaacgaggtcgtgttcaactaccctacacgcgcaaatgtgccagttcttcagggcctgagcctcgaagttaaaaaggggcagaccctggcgttggttgggtcttccggatgtggaaaaagcaccgtagtgcagctcttggagcgtttctacgatccactagccggtacggtgctcctcgatggccaggaggcaaagaaactgaacgtccagtggctcagggcccagttggggattgtgagccaggaaccaatcctgttcgattgtagcatagcagaaaacattgcctacggcgacaattccagggtggtgtctcaggatgaaattgtatccgccgctaaggctgcgaacatacacccctttatcgaaacactcccgcacaaatacgagaccagagtgggcgataaaggcactcagctctctggagggcagaaacagcgcattgcaatcgcaagagctctgattagacagcctcagatacttctgctggatgaggccacaagtgccttggacacggaatcagaaaaggtagttcaggaagctctggataaggcacgcgagggccgcacctgcattgttattgcccatagactcagcactattcaaaatgccgacctgattgtggtattccagaatggccgagtaaaggagcacggaacccaccagcagctgctggcgcagaaggggatctacttcagcatggtgtccgtgcaggccggaacccagaatctgtag

SEQ ID NO: 8955 - DNA, 3840 bp, Artificial Sequence
  derived and/or modified sequence
atggacttggaggcagcgaagaatggaaccgcgtggagacctacttcagctgaaggggatttcgagctgggcatctcttcaaagcagaagagaaagaagactaaaacagtgaaaatgataggcgttttaacccttttccgttattcagactggcaggataaactcttcatgtccctgggtaccatcatggccattgcacatgggtcaggcctcccattgatgatgatcgtatttggagaaatgaccgacaagtttgttgatacagcaggcaacttttctttccctgttaacttcagcctcagtctgttgaacccagggaaaatccttgaggaggaaatgactagatatgcctattactactcagggttgggagctggggtgttggttgccgcatatatccaggtgagcttttggactttagccgctggaagacagatccggaagattcgccagaaattcttccacgccattctgcgacaagaaattggctggtttgatatcaatgatactaccgaacttaacacccgtttaaccgacgacatctctaaaataagtgaggggattggagataaggtgggcatgttttttcaagcggtcgccactttcttcgctgggtttatcgtgggcttcattcgcggttggaaactgacccttgtgattatggccatttcgccaattttggggctttctgcggcagtttgggctaaaatcctttcagccttcagcgataaggaactggcggcttatgcaaaggcaggagccgtcgcagaggaggccctaggggctatcagaacagtgatagcctttggaggccaaaacaaggagttagaaaggtaccagaagcacttggaaaacgctaaggagatagggatcaaaaaggctattagtgccaatatttcaatgggcattgctttcctcctcatctacgcctcctacgctctggccttctggtatggttccacccttgtgatttccaaagaatacactataggtaacgccatgacagtgttctttagtatcctgatcggggcattttccgtgggccaggcagccccttgtattgatgcattcgccaatgcacgtggagctgcctacgtcatttttgatatcattgataacaaccccaaaatcgattcttttagcgaacggggacataaacctgatagcattaaaggcaaccttgaatttaacgacgtccatttttcctatccatcacgagctaatgttaaaatcctgaaggggcttaacctgaaagttcagagcggtcagaccgtggcgctagttgggagcagcgggtgtggaaagagtactaccgtgcagctgatacagagactttatgaccccgacgaaggcaccattaacattgacggccaggacatccggaattttaacgtcaattacttgcgagaaattatcggggtggtcagccaggaacctgttcttttttcgacaactatcgccgaaaatatttgctatggacggggtaacgtgactatggacgagatcaagaaggctgtcaaggaagccaatgcatacgagtttatcatgaagcttcctcagaagtttgacactctggtgggagagcggggagcccagctcagtggagggcagaagcagcggattgctatcgccagagcactggtgcgtaatccaaagatattactcctggatgaggccacctccgctctggatacagaatctgaagcggaagtccaggcggcattagacaaagctagagagggaagaactaccatcgttatagctcaccggctcagcacggtgcgtaatgctgacgtgatagctggcttcgaggacggcgtgatagttgagcagggtagccattctgaactaatgaagaaggagggagtctatttcaaacttgttaatatgcaaacttccggctcgcaaattcaatcagaggagttcgagctgaatgacgagaaggccgctactcgcatggcgcctaacgggtggaaatcacgcttgtttaggcactccacacagaaaaatctgaagaactcgcaaatgtgtcagaagtctctggatgttgagactgacggtctggaggccaatgtgcccccagtgtcttttctgaaagtgctcaagcttaacaaaactgagtggccctatttcgtcgtgggtacggtgtgtgcaattgccaatgggggactgcagcccgctttcagtgtcattttctcagaaataattgccatcttcggccctggcgatgatgccgtgaagcagcagaaatgcaatatattctcactcatcttcctgtttctcggcataatcagcttctttacattcttcctgcagggctttacttttggaaaggcaggagaaattctgacgcggcgtctgcggtccatggcatttaaggcgatgttgaggcaggatatgtcctggtttgatgaccataagaactcaactggcgcattgtcgactagattggccaccgatgccgcacaggtgcagggggctaccggtactcggctggcccttatcgcacaaaatattgcaaatttgggaaccggaattatcatatcctttatttatggctggcagttaacactgctgctacttgctgttgtccccatcatcgctgtctcaggcattgtagaaatgaagctgctggccggtaatgccaagcgggacaaaaaggagttggaggccgcaggcaagatcgcgactgaggcaatcgaaaacattcggactgtagtctcccttacacaagagcgcaaatttgagtctatgtacgttgaaaaactgtatggaccttaccgtaattctgtgcagaaggctcacatatatggtattaccttctccattagccaggcattcatgtatttcagttacgctgggtgcttccgctttggcgcatacttaatcgtgaatggacacatgcgattccgcgatgttatcttagtgttctcagcaattgtgttcggtgcagttgctttgggtcatgcttcaagctttgccccagactatgctaaggctaaactttccgccgcacacctctttatgctcttcgaacgacaaccactaatcgactcttattccgaggaggggctgaagcctgataagtttgaaggcaatataacgtttaacgaagtcgtgtttaattaccctactcgggctaacgttcctgtcctgcaaggactctctctggaggtcaaaaagggccaaactctcgccctcgtaggttcttcaggatgtggaaagagcactgttgtgcagcttctggagcgattctatgacccgttggcgggtacagtgctcctggatggacaggaggctaagaagcttaacgtgcagtggctccgagctcaactgggcatcgtgagccaggagcccatcctcttcgactgctccatcgcggagaacatcgcttacggcgacaactcgcgggtggtcagccaggatgaaatcgtgtcagcagccaaagcagccaatatccacccgttcattgaaactctgccacataagtacgagacccgcgtgggagacaaggggacccaactctccggaggtcagaaacagcgaatagcaattgcacgtgcactgatcaggcagccgcaaatcttactgctggacgaggccacttccgccctggacaccgagtccgaaaaagttgtgcaggaagcgctggacaaggccagagagggcagaacgtgtattgtgatcgcccacagactaagcacaatccaaaacgccgatttaatcgttgtcttccagaacgggcgagtcaaggaacacgggactcatcagcagctcctggctcagaaaggcatttattttagcatggtgtccgtgcaggctggtacacaaaatctatag

SEQ ID NO: 8956 - DNA, 3840 bp, Artificial Sequence
  derived and/or modified sequence
atggatcttgaggccgcaaaaaatggaactgcttggcgtccgactagtgcagaaggcgacttcgaactcggaattagctccaaacagaagaggaaaaagacaaagaccgtaaaaatgatcggagtactcaccctgttcaggtactcagattggcaggacaagctgttcatgagcctcgggacaataatggccatagcacatgggtcaggcctccccctcatgatgatagtgttcggggagatgaccgataagtttgttgacaccgccggaaattttagctttccggtcaacttctctctgtccctcttaaatcccggtaagatcctggaagaagaaatgactaggtacgcttactattacagtggccttggagcaggagtgctcgttgctgcatatatacaggtcagcttctggacactcgcagcaggaagacaaatcagaaaaattagacagaagttcttccacgccattttacgacaagagatcggatggttcgacatcaatgacaccactgagcttaacacgcggttgactgacgacattagcaaaatctccgaaggcataggagacaaggtgggcatgtttttccaagccgtggccaccttctttgctgggttcatcgtgggttttatccggggttggaaactgacgctcgttattatggccatcagccccatcctgggtctgtccgccgcagtatgggcaaaaatcttgagcgcgttctctgacaaagaattagctgcatatgccaaggcaggcgctgtcgctgaagaggcactgggagctatcagaacggtgattgcgttcgggggacagaataaggaactggaacggtaccagaaacacctggagaatgctaaagagatcggcatcaagaaagccatctctgcaaacatatccatggggatcgctttcctcctgatctacgcaagctatgcactggctttttggtatggcagcaccttggtcatttccaaagagtacaccattggaaacgccatgaccgtttttttcagcatcctgatcggagccttttccgttgggcaggcggctccctgcattgatgcctttgccaatgcaagaggggctgcatacgtgatcttcgatatcatcgataacaaccctaagatagactcatttagcgaaaggggccataaaccagactccattaagggaaatctggagttcaacgatgtgcacttcagctatccttcgcgcgctaatgtaaaaatcctgaaaggtctcaacctgaaggtccagtccggccagaccgtggccctcgtgggaagcagcggctgtggcaaaagcaccactgtacagctgattcagagattgtacgaccccgacgagggcaccatcaatatagatggccaggacatcagaaatttcaatgtgaactaccttagagagatcataggtgtggtctctcaggaaccagtcctcttcagcacaactatcgccgaaaacatttgctacggacggggaaatgtcactatggatgagattaagaaggcagtgaaggaagcgaatgcttacgagttcatcatgaaactgccgcaaaaatttgatacacttgttggagaacggggagcacagctttcggggggacaaaaacagcgtattgcaattgccagggctctagttcggaacccaaagatccttctgctggacgaggccactagtgctctggatacagaatcggaggccgaggtgcaggccgctctggataaggcgagggagggcagaacaactatcgtgatagctcaccggctctccactgtccgaaatgccgacgtgattgcgggtttcgaggacggcgttattgttgaacagggcagccacagcgaactgatgaagaaggagggagtttacttcaagttggtcaacatgcagactagcggttcccaaatccagagcgaggagttcgaattgaacgacgagaaggcagcaacacggatggccccaaatggatggaaatctcgcctgttcaggcactccactcagaaaaatctgaagaatagccaaatgtgtcagaaaagcttggacgttgaaactgacggcctcgaagctaacgtccccccagtgtctttcttaaaagttctcaagttgaacaagacggagtggccatattttgtggtggggactgtttgtgccatagcaaacgggggattacagccggctttttccgttatcttctcagaaataatcgccatcttcggccctggcgacgatgccgtgaagcagcaaaaatgtaacatcttttccttgatattcctgttcctaggcattatatctttcttcacgttcttcctgcaagggttcactttcggcaaggccggtgaaattttgaccagaaggctgcgatctatggcgttcaaagccatgcttaggcaagatatgtcatggtttgatgatcacaagaacagtaccggagccctgtcaactagactggcaactgacgccgctcaggttcagggggcaactggtactagactcgctctcattgcccagaatatagcaaatctgggcactggtattattatctccttcatctatgggtggcagctaacccttctgctgctggcagttgtgcccatcatcgcagtatcgggcatcgttgaaatgaagctgctcgctgggaacgccaagcgtgataagaaggagttagaagctgctggcaagatcgccactgaagcaatcgagaacatccgaactgtcgtatcactgacacaggagaggaaattcgaaagtatgtatgtggagaagctgtatggcccatacaggaactctgtacaaaaagctcatatttatgggattacgttttcgatttctcaggccttcatgtattttagttatgcaggctgtttccgtttcggagcttacctaatcgtgaatggacatatgcggttcagggacgtcattctcgttttctcagcgatcgtgtttggagcagtggctcttggacacgctagttcctttgctcctgactatgctaaggctaagctgtccgcagcccacctgtttatgttgtttgagaggcagccactcattgactcatattcagaagaaggcctgaagcctgacaagtttgagggcaacatcacattcaacgaagtagtgttcaattatccgactagagctaatgtgcctgtgctgcagggcctatccctggaggttaaaaaggggcagactctggctctcgtaggctcctctgggtgtggaaagagtactgtggtgcagttgctcgagagattctacgatccactggcaggcacggtactgttggatgggcaggaggccaaaaaattaaatgtgcagtggctcagggcccagctgggcatagtaagtcaggaacccatcctctttgactgtagtatagcggaaaacattgcatacggggataattccagagtggtgagccaggacgagatcgtgtcagctgccaaggctgccaacattcacccctttattgagaccctgccacacaagtatgagacaagggtcggtgacaagggaacacagctctctggcggacagaaacagaggatagccattgccagagccctgattagacagccccagattctactgttggacgaggccaccagcgccctcgacacggagtccgagaaggttgtgcaagaagccttagataaggctcgggaaggcaggacctgtattgtcattgctcatcggctgagcacaatccagaacgctgatctgatcgtggtgtttcagaatggcagagtgaaagagcatggcacccaccaacaactcttggcacagaagggcatatactttagcatggtgagtgtgcaggccggaacccaaaacctgtag

SEQ ID NO: 8957 - protein, 749 aa, Artificial Sequence
  derived and/or modified sequence
MEAETGSSVETGKKANRGTRIALVVFVGGTLVLGTILFLVSQGLLSLQAKQEYCLKPECIEAAAAILSKVNLSVDPCDNFFRFACDGWISNNPIPEDMPSYGVYPWLRHNVDLKLKELLEKSISRRRDTEAIQKAKILYSSCMNEKAIEKADAKPLLHILRHSPFRWPVLESNIGPEGVWSERKFSLLQTLATFRGQYSNSVFIRLYVSPDDKASNEHILKLDQATLSLAVREDYLDNSTEAKSYRDALYKFMVDTAVLLGANSSRAEHDMKSVLRLEIKIAEIMIPHENRTSEAMYNKMNISELSAMIPQFDWLGYIKKVIDTRLYPHLKDISPSENVVVRVPQYFKDLFRILGSERKKTIANYLVWRMVYSRIPNLSRRFQYRWLEFSRVIQGTTTLLPQWDKCVNFIESALPYVVGKMFVDVYFQEDKKEMMEELVEGVRWAFIDMLEKENEWMDAGTKRKAKEKARAVLAKVGYPEFIMNDTHVNEDLKAIKFSEADYFGNVLQTRKYLAQSDFFWLRKAVPKTEWFTNPTTVNAFYSASTNQIRFPAGELQKPFFWGTEYPRSLSYGAIGVIVGHEFTHGFDNNGRKYDKNGNLDPWWSTESEEKFKEKTKCMINQYSNYYWKKAGLNVKGKRTLGENIADNGGLREAFRAYRKWINDRRQGLEEPLLPGITFTNNQLFFLSYAHVRCNSYRPEAAREQVQIGAHSPPQFRVNGAISNFEEFQKAFNCPPNSTMNRGMDSCRLW

SEQ ID NO: 8958 - protein, 452 aa, Artificial Sequence
  derived and/or modified sequence
MIHLPRPPKVLGLQFDWLGYIKKVIDTRLYPHLKDISPSENVVVRVPQYFKDLFRILGSERKKTIANYLVWRMVYSRIPNLSRRFQYRWLEFSRVIQGTTTLLPQWDKCVNFIESALPYVVGKMFVDVYFQEDKKEMMEELVEGVRWAFIDMLEKENEWMDAGTKRKAKEKARAVLAKVGYPEFIMNDTHVNEDLKAIKFSEADYFGNVLQTRKYLAQSDFFWLRKAVPKTEWFTNPTTVNAFYSASTNQIRFPAGELQKPFFWGTEYPRSLSYGAIGVIVGHEFTHGFDNNGRKYDKNGNLDPWWSTESEEKFKEKTKCMINQYSNYYWKKAGLNVKGKRTLGENIADNGGLREAFRAYRKWINDRRQGLEEPLLPGITFTNNQLFFLSYAHVRCNSYRPEAAREQVQIGAHSPPQFRVNGAISNFEEFQKAFNCPPNSTMNRGMDSCRLW

SEQ ID NO: 8959 - protein, 652 aa, Artificial Sequence
  derived and/or modified sequence
MPSYGVYPWLRHNVDLKLKELLEKSISRRRDTEAIQKAKILYSSCMNEKAIEKADAKPLLHILRHSPFRWPVLESNIGPEGVWSERKFSLLQTLATFRGQYSNSVFIRLYVSPDDKASNEHILKLDQATLSLAVREDYLDNSTEAKSYRDALYKFMVDTAVLLGANSSRAEHDMKSVLRLEIKIAEIMIPHENRTSEAMYNKMNISELSAMIPQFDWLGYIKKVIDTRLYPHLKDISPSENVVVRVPQYFKDLFRILGSERKKTIANYLVWRMVYSRIPNLSRRFQYRWLEFSRVIQGTTTLLPQWDKCVNFIESALPYVVGKMFVDVYFQEDKKEMMEELVEGVRWAFIDMLEKENEWMDAGTKRKAKEKARAVLAKVGYPEFIMNDTHVNEDLKAIKFSEADYFGNVLQTRKYLAQSDFFWLRKAVPKTEWFTNPTTVNAFYSASTNQIRFPAGELQKPFFWGTEYPRSLSYGAIGVIVGHEFTHGFDNNGRKYDKNGNLDPWWSTESEEKFKEKTKCMINQYSNYYWKKAGLNVKGKRTLGENIADNGGLREAFRAYRKWINDRRQGLEEPLLPGITFTNNQLFFLSYAHVRCNSYRPEAAREQVQIGAHSPPQFRVNGAISNFEEFQKAFNCPPNSTMNRGMDSCRLW

SEQ ID NO: 8960 - DNA, 2250 bp, Artificial Sequence
  derived and/or modified sequence
atggaggccgagaccggtagctccgtggaaactggtaagaaggccaatagggggaccaggatcgcgctggtcgtatttgtaggtggcacgctagttttagggacgatactctttctcgtaagccaggggctgttatcactgcaggctaaacaagaatactgtcttaagccggagtgcatcgaggcagcagccgccatcctcagcaaagtcaatctgagtgtagacccctgtgataacttctttcgattcgcatgcgatggctggatcagtaacaaccccattcccgaggacatgccaagttatggcgtgtatccatggctgagacacaacgtggacttgaaactgaaggagctgctcgaaaaatctatctcacggaggcgggacaccgaagcgatccagaaggcaaagattctgtactctagctgtatgaatgaaaaagcgattgaaaaggccgatgctaaacccctcctccacattctgcgccactccccattccggtggcccgtactagaaagcaacatcgggccagagggagtgtggtcagagcggaaattttccttgctgcaaacacttgctactttcaggggacagtattctaacagcgtcttcatccgactctacgtgtcccctgatgataaggcctctaatgagcacattctgaaactggaccaggcaactctgtccttagccgttcgggaagactacctggacaactctactgaagctaaatcctaccgcgacgccctctacaaattcatggtagatactgccgtcctgctaggagccaattcatcgagggctgagcacgatatgaaatcagttctccgcttagaaattaaaattgctgaaatcatgattcctcacgagaaccgcacctcagaggctatgtataacaagatgaacatttccgaactcagtgcaatgatcccccaattcgactggcttgggtatataaagaaagtgatcgataccagactgtacccgcatctgaaggatatcagcccctctgaaaatgtggtcgtccgagtaccccagtacttcaaggacctcttcaggatactaggttcggaaagaaagaagactattgccaactaccttgtatggcgcatggtctactctcgaatcccgaatttgtcacgacgttttcagtaccggtggctcgagttttcccgagttattcaggggacaacaactctgttgcctcagtgggataagtgtgttaacttcattgagtcagcccttccttatgttgttggcaagatgttcgtggacgtctattttcaagaagacaaaaaggagatgatggaagagctggtggagggtgtccgttgggccttcatagatatgttggaaaaagagaacgagtggatggatgctggcaccaagcgtaaagcaaaggagaaggctcgggctgtgctggcaaaagttggctaccccgagttcattatgaatgatactcatgtaaacgaggacctcaaagccatcaaatttagtgaggcagactactttggcaacgtgctgcagacaagaaaatatctggcacaaagcgacttcttttggttgcgcaaggcagttccaaaaaccgagtggttcacgaaccccaccacagtgaatgcattttattctgctagcactaatcagatccgattccccgccggtgaacttcagaaacccttcttctggggcacagaatacccgcggtctttgtcctacggggccattggggttatcgttggccatgagttcacacacggatttgacaataacggccgcaagtacgataagaatggcaacctcgatccatggtggagcacagagagtgaggaaaaattcaaagagaaaactaagtgtatgattaaccaatacagcaactactattggaaaaaggccggcctgaatgtgaaagggaagcgtacattgggagaaaacattgctgacaacgggggactgagggaggccttccgagcctacaggaaatggatcaatgatcgccgccaagggctggaggaacccctcctgcctggcatcacattcacgaataatcaactgttctttctcagctatgctcacgtgcgatgtaattcttatcggccagaggccgctcgagaacaggtccagatcggcgcacactcccctcctcaatttcgggttaacggagccatctccaacttcgaagaattccagaaggcgttcaattgcccgccaaatagtactatgaacagagggatggattcatgtcggttatggtag

SEQ ID NO: 8961 - DNA, 1959 bp, Artificial Sequence
  derived and/or modified sequence
atgccttcgtatggcgtctatccgtggctccgacataatgtggatctaaagctcaaggagttgcttgagaaaagtatatcaaggagacgggataccgaagccatccagaaagccaagatcctgtattcatcttgcatgaatgagaaagctatcgagaaagcagacgctaaacctcttctgcatatcctccgccactctccatttcgctggcccgttcttgagtctaatattggacccgagggagtgtggtcagagcgcaaattttcgcttctgcagactctcgcgacatttagaggtcagtactcgaatagtgtcttcatccggttatatgttagtcccgatgataaagctagcaatgaacatatcttaaagctggaccaggctacactctctctcgctgtgagggaagattacctcgacaattctacagaggcaaaaagctaccgggacgccctttataagttcatggtggatacagccgttctgttgggggctaacagctcccgtgcagaacacgacatgaagtccgtgctgaggttagaaatcaaaattgcagagataatgataccccatgagaataggacctcagaggctatgtataataagatgaacatctctgaactttcagcaatgatcccacagtttgattggctgggctatattaaaaaagtaattgatactagactgtatcctcacttgaaggacatttccccttctgagaatgtcgtggtaagggttccccagtatttcaaggacctctttagaatactgggcagtgaaaggaaaaaaacgatagccaattacctggtgtggcgaatggtgtactcgcgtattccgaacctcagtcggagattccaatacagatggttagaattttcgcgcgtcatacaaggtaccacaacattgctgccacaatgggacaagtgcgtcaactttatcgaatctgcactaccatatgttgtcggcaaaatgttcgttgatgtgtattttcaggaggataagaaggaaatgatggaagaactagtcgaaggagtccgctgggcctttatagatatgctagagaaagaaaacgagtggatggatgccggaaccaaacgaaaggccaaggaaaaagcacgggctgtcctggccaaagtggggtacccagagttcatcatgaatgacacccacgtcaacgaggacctaaaggcgatcaaatttagtgaggccgactactttgggaacgtgcttcaaactagaaaatacttagcacagagcgacttcttctggttaaggaaggcagtgcccaagaccgagtggttcactaatcctacgactgtgaatgctttttactctgcgagtacaaaccagatccggtttcctgctggagagctgcagaaaccattcttctggggaaccgaatatccccggagcctcagctatggtgccattggagtgattgtgggacacgagttcactcacgggtttgataacaatggtagaaagtacgacaagaacggcaacttagacccttggtggtcaaccgaatccgaggagaagttcaaagagaagactaagtgcatgataaaccagtattctaattactattggaaaaaagccggcctgaatgttaaagggaagcgaacgctcggagagaacatcgctgataacggtggcttgcgcgaggccttccgagcttaccggaaatggattaatgacagacggcagggtttggaggaacccttgctgcctggcatcacgtttactaataaccagttattcttcctgtcctacgcccacgtaaggtgcaacagttaccgcccagaggcggccagggagcaggtgcagatcggagcgcattcacctccacagttcagagtgaatggcgccatatccaattttgaggagtttcagaaggcctttaactgcccccctaactccacaatgaatagaggcatggacagctgccgtctgtggtag

SEQ ID NO: 8962 - DNA, 2250 bp, Artificial Sequence
  derived and/or modified sequence
atggaggccgagaccggcagctctgtggagaccgggaagaaggccaacagaggcaccagaattgccctggtggtgtttgtgggcggcaccctggtgctgggcaccatcctcttcctggtgtcccagggcctgctgagcctgcaggccaagcaggagtactgcctgaagccagagtgcatcgaggccgccgccgccatcctgagcaaggtgaacctgtctgtggacccctgtgacaacttcttccgctttgcctgtgatggctggatcagcaacaaccccatccctgaggacatgcccagctatggagtgtacccctggctgcggcacaacgtggacctgaagctgaaggagctgctggagaagagcatcagcagaagaagagacacagaggccatccagaaggccaagatcctgtacagcagctgcatgaatgagaaggccatcgagaaggcagatgccaagcccctgctgcacatcctgcggcacagccccttccgctggcctgtgctggagagcaacatcggccctgagggcgtgtggagcgagaggaagttcagcctgctgcagaccctggccaccttccggggccagtacagcaacagcgtcttcatccggctgtatgtgtccccagatgacaaggccagcaatgagcacatcctgaagctggaccaggccaccctgagcctggccgtgcgggaggactacctggacaacagcacagaggccaagagctacagagatgccctgtacaagttcatggtggacacagctgtgctgctgggcgccaacagcagcagagctgagcatgacatgaagtctgtgctgcggctggagatcaagattgctgagatcatgatcccccatgaaaatagaacatctgaggccatgtacaacaagatgaacatcagcgagctgagcgccatgatcccccagtttgactggctgggctacatcaagaaggtgattgacacccggctgtacccccacctgaaggacatcagccccagtgaaaatgtggtggtgcgggtgccccagtacttcaaggacctcttccgcatcctgggcagcgagaggaagaagaccatcgccaactacctggtgtggaggatggtgtacagccgcatccccaacctgagccgccgcttccagtaccgctggctggagttcagcagggtcatccagggcaccaccaccctgctgccccagtgggacaagtgtgtgaacttcatcgagagcgccctgccctacgtggtgggcaagatgtttgtggatgtgtacttccaggaggacaagaaggagatgatggaggagctggtggagggcgtgcgctgggccttcatcgacatgctggagaaggaaaatgagtggatggatgctggcaccaagaggaaggccaaggagaaggcccgggctgtgctggccaaggtgggctacccagagttcatcatgaatgacacccacgtgaatgaagacctgaaggccatcaagttcagcgaggccgactactttggaaatgtgctgcagaccaggaagtacctggcccagagcgacttcttctggctgaggaaggctgtgcccaagacagagtggttcaccaaccccaccaccgtgaatgccttctacagcgccagcaccaaccagatccgcttccctgctggggagctgcagaagcccttcttctggggcacagagtaccccaggagcctgtcctatggagccatcggcgtgattgtgggccacgagttcacccacggctttgacaacaatggaagaaaatatgacaagaatggaaacctggacccctggtggagcacagaaagtgaggagaagttcaaggagaagaccaagtgcatgatcaaccagtacagcaactactactggaagaaggccggcctgaatgtgaagggcaagaggaccctgggggagaacattgctgacaatggaggcctgcgggaggccttccgggcctacaggaagtggatcaatgaccggcggcagggcctggaggagcccctgctgcccggcatcaccttcaccaacaaccagctgttcttcctgtcctatgcccacgtgcgctgcaacagctacagacctgaggccgcccgggagcaggtgcagattggagcccacagccccccccagttccgggtgaatggagccatcagcaactttgaggagttccagaaggccttcaactgcccccccaacagcaccatgaacagaggcatggacagctgccgcctgtggtag

SEQ ID NO: 8963 - DNA, 1959 bp, Artificial Sequence
  derived and/or modified sequence
atgcccagctatggagtgtacccctggctgcggcacaacgtggacctgaagctgaaggagctgctggagaagagcatcagcagaagaagagacacagaggccatccagaaggccaagatcctgtacagcagctgcatgaatgagaaggccatcgagaaggcagatgccaagcccctgctgcacatcctgcggcacagccccttccgctggcctgtgctggagagcaacatcggccctgagggcgtgtggagcgagaggaagttcagcctgctgcagaccctggccaccttccggggccagtacagcaacagcgtcttcatccggctgtatgtgtccccagatgacaaggccagcaatgagcacatcctgaagctggaccaggccaccctgagcctggccgtgcgggaggactacctggacaacagcacagaggccaagagctacagagatgccctgtacaagttcatggtggacacagctgtgctgctgggcgccaacagcagcagagctgagcatgacatgaagtctgtgctgcggctggagatcaagattgctgagatcatgatcccccatgagaacagaaccagcgaggccatgtacaacaagatgaacatcagcgagctgagcgccatgatcccccagtttgactggctgggctacatcaagaaggtgattgacacccggctgtacccccacctgaaggacatcagccccagtgaaaatgtggtggtgcgggtgccccagtacttcaaggacctcttccgcatcctgggcagcgagaggaagaagaccatcgccaactacctggtgtggaggatggtgtacagccgcatccccaacctgagccgccgcttccagtaccgctggctggagttcagcagggtcatccagggcaccaccaccctgctgccccagtgggacaagtgtgtgaacttcattgaaagtgccctgccctacgtggtgggcaagatgtttgtggatgtgtacttccaggaggacaagaaggagatgatggaggagctggtggagggcgtgcgctgggccttcatcgacatgctggagaaggaaaatgagtggatggatgctggcaccaagaggaaggccaaggagaaggcccgggctgtgctggccaaggtgggctacccagagttcatcatgaatgacacccacgtgaatgaagacctgaaggccatcaagttcagcgaggccgactactttggaaatgtgctgcagaccaggaagtacctggcccagagcgacttcttctggctgaggaaggctgtgcccaagacagagtggttcaccaaccccaccaccgtgaatgccttctacagcgccagcaccaaccagatccgcttccctgctggggagctgcagaagcccttcttctggggcacagagtaccccaggagcctgtcctatggagccatcggggtcatcgtgggccacgagttcacccacggctttgacaacaacggcaggaaatatgacaagaatggaaacctggacccctggtggagcacagagagcgaggagaagttcaaggagaagaccaagtgcatgatcaaccagtacagcaactactactggaagaaggccggcctgaatgtgaagggcaagaggaccctgggagaaaatattgctgacaatggaggcctgcgggaggccttccgggcctacaggaagtggatcaatgaccggcggcagggcctggaggagcccctgctgcccggcatcaccttcaccaacaaccagctgttcttcctgtcctatgcccacgtgcgctgcaacagctacagacctgaggccgcccgggagcaggtgcagatcggggcccacagccccccccagttccgggtgaatggagccatcagcaactttgaggagttccagaaggccttcaactgcccccccaacagcaccatgaacagaggcatggacagctgccgcctgtggtag

SEQ ID NO: 8964 - DNA, 2250 bp, Artificial Sequence
  derived and/or modified sequence
atggaggccgagaccggcagcagcgtggagaccggcaagaaggccaatcggggtactaggattgccttggtagtgttcgtgggcggcactctcgttctgggcaccatactgtttctggtgtctcaggggctccttagcttgcaggctaagcaggagtattgtctgaaaccggagtgcatcgaggcggcagccgccatcctcagtaaggtcaatctttccgtagatccctgtgacaattttttccgcttcgcatgcgacggatggatttccaacaatccaatccctgaggatatgccttcttacggcgtgtatccctggttaaggcacaacgtggatttaaaactgaaggagttgctggagaagtccataagcaggagaagggacacagaagccattcaaaaggcgaagattctgtatagctcctgtatgaatgaaaaggcgattgagaaagctgacgctaagccgctgctccatattctgaggcactcaccgtttagatggcccgtcctagagtccaacattgggcccgagggagtctggtcagagcggaagttctccttgcttcagacgctggccactttcaggggacaatattctaatagtgttttcatccgcctgtacgtgagtcccgacgataaggcctcaaacgagcatatcctgaaactggaccaggcgacattaagtttagctgttcgggaagactacctggacaattcgactgaagcaaaatcatatcgcgatgcattgtataaatttatggttgataccgcggtcctgctgggcgcaaacagcagccgagctgaacatgatatgaagtccgtgctgaggcttgagattaaaatagcagagataatgatcccacatgagaatagaacgtcggaggccatgtacaacaagatgaatatctcagagctgagtgccatgatccctcagtttgattggctgggctacatcaagaaggtgatcgatacccggctctacccccaccttaaggatatttccccctcagagaacgtggtggtcagggttccacaatacttcaaggacctgttcaggattctgggttccgaaaggaaaaaaaccattgccaactatctagtatggcggatggtctactccaggatccctaatcttagcagacgcttccagtatcggtggctcgagttcagcagggtgattcagggcactaccaccctcttgccacagtgggataaatgcgtgaacttcattgaatctgcgcttccctacgttgtcggcaagatgtttgtggatgtgtatttccaggaggataagaaggagatgatggaagaactggttgagggagtgcggtgggccttcatcgatatgttagaaaaggaaaacgagtggatggacgctggcaccaagaggaaagccaaggagaaggcacgcgcagtgcttgccaaagtcgggtatccagaattcattatgaatgatactcacgtgaatgaagatttaaaggcgatcaagttctctgaggctgattattttggcaacgtactgcaaactcggaaatatttagctcagagtgactttttttggcttagaaaggctgtcccgaaaactgaatggttcaccaatcccaccaccgtgaatgccttctacagcgcttccaccaaccagattaggttcccagcaggggaattgcaaaaaccctttttttgggggaccgagtaccctagatccttgagctatggtgccatcggtgtaatagtgggccacgagtttacgcatggtttcgacaataacggtcgcaagtatgataaaaatggcaatctcgatccctggtggagcactgagtcagaagagaaattcaaagagaagaccaaatgcatgattaaccagtatagtaattactattggaagaaggctggtctgaacgtgaaagggaagcgcacactgggagaaaacatcgccgataacggcgggctcagagaggcctttcgcgcgtaccgaaagtggataaacgatcgtcgccagggcctggaagagccattactgcctggcatcactttcactaataaccagctgttcttcttatcatacgcacacgtgcgctgcaacagttacagaccagaggccgccagagagcaagtgcagatcggcgctcactccccgccacagttcagagtgaatggggcaattagcaatttcgaagagtttcaaaaggcctttaactgcccgcctaattccactatgaatcggggcatggattcttgtcggctgtggtag

SEQ ID NO: 8965 - DNA, 1959 bp, Artificial Sequence
  derived and/or modified sequence
atgcccagctacggcgtgtacccctggctgcggcacaacgtggacttaaagctcaaggaactcctggagaagagtattagccggcggcgagatacggaggcgattcaaaaggccaagatcctgtactcctcttgcatgaatgaaaaagccatcgaaaaggccgatgccaagcctctgctgcacatattgcgccactctccattcaggtggccagtgttggagagcaatattgggccggagggggtttggtctgaacgtaaattcagcctgctacagaccctggctactttccgcggacagtactctaatagtgtcttcatccgcctctacgtgtcccccgacgataaagcctctaatgaacacattctaaagttggaccaggcaacacttagtctcgcagtgcgcgaggattacctggataatagcacagaggcaaagtcatatagggacgcactttacaagtttatggtggatacagccgtgcttctgggagcgaacagcagccgagccgaacatgatatgaaatctgtgctgagactggagattaaaatagcagagatcatgattccccacgagaatcggacaagtgaggcaatgtataacaagatgaacattagcgaactgagtgccatgatcccccagtttgactggctagggtacatcaaaaaagtcattgatacccgtctctatccccaccttaaggacattagcccttctgaaaacgtcgtcgtccgggtaccacagtactttaaggacctcttcagaattctaggaagcgaaagaaagaagactatcgccaactatctggtttggagaatggtgtatagtagaattccgaacttgtccagaagatttcagtatagatggctggaattctccagggtgatccaaggaactacaacactgctcccacagtgggacaagtgtgtcaactttattgaatctgcccttccctacgttgtggggaagatgtttgtcgatgtctacttccaggaggataagaaggagatgatggaggagctggtggaaggagtaaggtgggcattcattgacatgttggagaaggaaaatgaatggatggacgcagggacaaagaggaaagccaaagaaaaagcgagggccgtactggcaaaagtgggatacccggagttcatcatgaacgacacccacgtaaatgaagatctgaaggccattaagttctcggaagccgattattttggaaatgtgttacagactagaaagtatttagctcagtccgacttcttctggcttcgtaaggccgtacctaagaccgagtggttcacaaatcccacgaccgttaacgctttttattccgcatccaccaatcagattcgatttccggccggcgagcttcagaagccgttcttctgggggactgaatacccccgcagcctaagctatggggctatcggagtgattgtgggacatgagtttacccacggattcgataacaacggacgtaagtacgataagaatggaaacctggacccatggtggagtacagagagcgaggaaaaatttaaagagaaaactaaatgtatgatcaaccagtattctaactactattggaagaaagcaggcctcaatgtaaagggcaaaaggaccttaggcgaaaatatcgcagacaatggaggcctcagagaggcctttcgggcgtaccgtaagtggattaatgacaggcggcaggggctcgaggagccccttctgccgggcatcacttttactaataaccagctcttttttctctcttatgcccacgtgaggtgcaatagctatcgccctgaagccgccagagagcaggtccagatcggagctcactcgccaccccagtttcgcgtcaatggagcaatttccaacttcgaggagtttcagaaagcctttaattgcccgccgaactctactatgaaccgaggcatggactcctgtcgcttatggtag

SEQ ID NO: 8966 - DNA, 6172 bp, Artificial Sequence
  derived and/or modified sequence
aagggactcacacactgaaagaatatctttgatgaagacaattcaggcaagcagaatgattcttgcaacagaattacatgattaattgagatcttgaagtgggtccggtgaatcctggccacctaacttatcatgatttgggggagtttcacgagaatccagttttgataaaacaattgtttttttcctccccaagtgactatacatttaaatagctaaaacatctgttcagcaacatagtaaaacatatatactcggaacgcttgagagaagagcctgccaaacagggactttgctgagggagagcaccaagataaagcaacactgtttgttttgtctagtcagggggaaagccaaggcaaccaatattttggtttttataattttcatttgtgaagaattatttgagaaagggtggcgaggggagatttcctgacggcagtttcttaagctgtccattagtagaagagcaagaaagccttggatgtcaacgcctcgctcttgagaccagccaccaaaccacgaaaagtgactttcttctcgtgtgctctctacggcccttctgatggaagcagaaacagggagcagcgtggagactggaaagaaggccaacagaggcactcgaattgccctggtcgtgtttgtcggtggcaccctagttctgggcacgatcctctttctagtgagtcaaggtctcttaagtctccaagctaaacaggagtactgcctgaagccagaatgcatcgaagcggctgctgccatcttaagtaaagtaaatctgtctgtggatccttgtgataatttcttccggttcgcttgtgatggctggataagcaataatccaattcccgaagatatgccaagctatggggtttatccttggctgagacataatgttgacctcaagttgaaggaacttttggagaaatcaatcagtagaaggcgggacaccgaagccatacagaaagccaaaatcctttattcatcctgcatgaatgagaaagcgattgaaaaagcagatgccaagccactgctacacatcctacggcattcacctttccgctggcccgtgcttgaatctaatattggccctgaaggggtttggtcagagagaaagttcagccttctgcagacacttgcaacgtttcgtggtcaatacagcaattctgtgttcatccgtttgtatgtgtcccctgatgacaaagcatccaatgaacatatcttgaagctggaccaagcaacactctccctggccgtgagggaagactaccttgataacagtacagaagccaagtcttatcgggatgccctttacaagttcatggtggatactgccgtgcttttaggagctaacagttccagagcagagcatgacatgaagtcagtgctcagattggaaattaagatagctgagataatgattccacatgaaaaccgaaccagcgaggccatgtacaacaaaatgaacatttctgaactgagtgctatgattccccagttcgactggctgggctacatcaagaaggtcattgacaccagactctacccccatctgaaagacatcagcccctccgagaatgtggtggtccgcgtcccgcagtactttaaagatttgtttaggatattagggtctgagagaaagaagaccattgccaactatttggtgtggagaatggtttattccagaattccaaaccttagcaggcgctttcagtatagatggctggaattctcaagggtaatccaggggaccacaactttgctgcctcaatgggacaaatgtgtaaactttattgaaagtgccctcccttatgttgttggaaagatgtttgtagatgtgtacttccaggaagataagaaggaaatgatggaggaattggttgagggcgttcgctgggcctttattgacatgctagagaaagaaaatgagtggatggatgcaggaacgaaaaggaaagccaaagaaaaggcgagagctgttttggcaaaagttggctatccagagtttataatgaatgatactcatgttaatgaagacctcaaagctatcaagttttcagaagccgactactttggcaacgtcctacaaactcgcaagtatttagcacagtctgatttcttctggctaagaaaagccgttccaaaaacagagtggtttacaaatccgacgactgtcaatgccttctacagtgcatccaccaaccagatccgatttccagcaggagagctccagaagcctttcttttggggaacagaatatcctcgatctctgagttatggtgctataggagtaattgtcggacatgaatttacacatggatttgataataatggtagaaaatatgataaaaatggaaacctggatccttggtggtctactgaatcagaagaaaagtttaaggaaaaaacaaaatgcatgattaaccagtatagcaactattattggaagaaagctggcttaaatgtcaaggggaagaggaccctgggagaaaatattgctgataatggaggcctgcgggaagcttttagggcttacaggaaatggataaatgacagaaggcagggacttgaggagcctcttctaccaggcatcacattcaccaacaaccagctcttcttcctgagttatgctcatgtgaggtgcaattcctacagaccagaagctgcccgagaacaagtccaaattggtgctcacagtccccctcagtttagggtcaatggtgcaattagtaactttgaagaattccagaaagcttttaactgtccacccaattccacgatgaacagaggcatggactcctgccgactctggtagctgggacgctggtttatggcatcctgagacagttgcacagtgccagcggaggctgcactgagccttcatcgcccattgctttaggcctggagactttcatttttagtgcattttcattatttgggtaggtgacctgcttggatctagacagcatctgttcaaagttgtagggcttataaagtggaatataagaatgaactaagtatgtttctttagaaaatcaaaccaacaaaaataaatccctaggctacttttgttaaaatgctatctgctaaattgttgctattgtccattttagggtgttggccacagttatgtggtacatagcatttcaatctatagctttgtgggaagcctaaattgatgtatcctttaaaagttcaatctattaaacttgtagcctctcaatgatgaagacatgtgcatgaatacctgggagggcttgctgctctgtggaatgcagtgcacgtttttatggacagtaattacacagcattcctcaactgtaaggtagttaaattagaaatatgtttgatctccattttacactttttgatgaagttcttgccttcagctttggagtctgttggaatgaaactgtgtctcacagcttgcatctgatgtagcagattgccctgttcaagtcagcatgaacaaagctcgcagaaaggctactaggtaacggatttgagtttattcagtagaaaaaaagggaatgaggacatatctttaggtcccagaagcagcaaaacctcctagttacataacagcagggaaactaggagatgaaatctccaaaattttgtccagtctgtatgaactgcagtgattgtctgtctgctagacacttttttttagcctaattcttgttcgtttcattaccttcatatgtgtgcattgtactggttttgaaatgagcagacattgagaaaacaattttctgattccccattaggaacatatgattttcatttccctttagtgcaaaggaacaaacatcacattgaggagggagaagtgtacccttctttttcagcttaatgttacctctctttaaaaaaaaaacatttttgaaaaatttcttgactgatgacattctagaatttattgattcaatttaaaattccctgcatagtccaaataaacataatttttactcttcaagtcatctaaagagttgtgagaaagagcagtactatgtgttttatccttagagcattatccttctaagtgaactcctttcttattactgagcgtgtgtgtgtgtgtgtgtgtgtgtgtgtgtgtaggataaaattgtaatggccttaaagttgttacctggcatttttggtttcttaaaataggcatccccctactccctttacattattcattagacatgaggtgctgggttaagtgggccaataggaaaatctcaaaagcaaaatgacaaattcagattaaccacaggaagccattgtgtgtccctgtgatttgtgattcttttaaaaaaaaaaaaaatatatatatatatatatatatatatatatatgtatatctacctaagtgtgtgccatgtccttttgtagccatgggaacgtttgaatggagaaaaatggaggggcaccatcatgaggaaacaattatactgcattagtcagaggagagcgattttccctttgacttcttcctctctgaatggataaacttgtgaagggcagctaccttgtcctcctcttaacctggcttaatgtgaccttagtttgtatttccaaaaacaagcagtattaggttggaattgtatgtgtcttttctctggaggaagcattctgacttggtttagacatataagatactctgttttattcctggacttgggtgtttaaaatcagctgaggtttatcatgcttatatgaatagtgtttcccttctagatttcctttataaactccaaataaacacattcctgcaggtcagagaaagtgtttgataaaagcatagaattatggctttggaaagacaaactaagtcacttgttggtttagcaaaactggttggtgattagttggggccctcacagtttctagatgagaagcttaccttatcctgattaactttacttgctgtaactgttataccgaaaattgtaggtaggatgtccattactcaaacaaagcagaacaaaacaacaaaccaaaagcagcaataccaaatcatcactactagctagaacaatgagaaggattgaatttccaaatacatgcttatgtttaactcaactcttccaattacattctcattgtcctttctcttggataccgattgctaagataaacagacactgattaagtggtagaaagagaaaggtaaaatgcaactggaagggaaagaaaaaagtagggagaagctggcctatggatgtggctttgaagagaagacaggattttggcattccttgctaagcacgttcaatggaggagagccatgaagttttacaaaaataattatggtaaattaaaaggatattagatattggatctcagactagggctgctataatacagttctctgattcgcacaccagatgttctgccagcgaactgttgtctgggcattggaaggagttaggttttttgtgtttgtgaaaatctcctggattagtaaaaaaattttctagatataaagtggttttatttgggctcatgaccattgcccaaagtgtactgagcttttcactaagtgctcagcattggcctcctgttctcatttattcattttatgagatggacttggacatcactaatgcaaacacaggattcataaattattctgaagtttatttagtgccttgcctcaatggagcttaaagcatagcacataaattttatcttatttagccctggagcatcactaagaagcagctaggaactatggcttgccagacagattatgcttgtgccagagaagtggagaagcctgaaatcccttgtcaagtattccacaggaaggaaaggtagtctttgggctttggtctactgacctgtggattaaactctatcccttagattatcccatttctaaatacatttattcaatcagtatttctataatcacttagcatttgataggcttcttccttgatacatttaacataacgcctcagttgcatattacattatggaagaatatacgattgcttcatataacaacattctcatcaccagtgacagtgtcctactggtttgaagaaagatattcttggattatgtgttttatatctaaatggttattctgagactggttgtattttcttctcctactcgtgaaacgatgtgaacaagcattttaaggacaataaaaagttagctggttgaa

SEQ ID NO: 8967 - DNA, 2891 bp, Artificial Sequence
  derived and/or modified sequence
atatttgagcatgtatcggaatcacctggggggcttgttaaaccgcagatggctgggccccacccccagggtttctgagtcaagatcttggagtggctttctaacaagcttccaggtgcagcagcagcagctgctgctgctctagagaccacactcttaggagctctggtctagttatactcacttatcttacgtacgagagaactgagtttcaaagcaaccaagagtcttaccaaggttatttagctagcagctagagtctggtttcgtgacattgaaccaactgggttttggaataccgtgtcaacactgagaaggatgaactgatatcaaatatcttgcgtatgtttccgagggtggtttaccggatggtggtctgctacaactcagccatttattgtggtctgttttttcagtgagtcaaggtctcttaagtctccaagctaaacaggagtactgcctgaagccagaatgcatcgaagcggctgctgccatcttaagtaaagtaaatctgtctgtggatccttgtgataatttcttccggttcgcttgtgatggctggataagcaataatccaattcccgaagatatgccaagctatggggtttatccttggctgagacataatgttgacctcaagttgaaggaacttttggagaaatcaatcagtagaaggcgggacaccgaagccatacagaaagccaaaatcctttattcatcctgcatgaatgagaaagcgattgaaaaagcagatgccaagccactgctacacatcctacggcattcacctttccgctggcccgtgcttgaatctaatattggccctgaaggggtttggtcagagagaaagttcagccttctgcagacacttgcaacgtttcgtggtcaatacagcaattctgtgttcatccgtttgtatgtgtcccctgatgacaaagcatccaatgaacatatcttgaagctggaccaagcaacactctccctggccgtgagggaagactaccttgataacagtacagaagccaagtcttatcgggatgccctttacaagttcatggtggatactgccgtgcttttaggagctaacagttccagagcagagcatgacatgaagtcagtgctcagattggaaattaagatagctgagataatgattccacatgaaaaccgaaccagcgaggccatgtacaacaaaatgaacatttctgaactgagtgctatgattccccagttcgactggctgggctacatcaagaaggtcattgacaccagactctacccccatctgaaagacatcagcccctccgagaatgtggtggtccgcgtcccgcagtactttaaagatttgtttaggatattagggtctgagagaaagaagaccattgccaactatttggtgtggagaatggtttattccagaattccaaaccttagcaggcgctttcagtatagatggctggaattctcaagggtaatccaggggaccacaactttgctgcctcaatgggacaaatgtgtaaactttattgaaagtgccctcccttatgttgttggaaagatgtttgtagatgtgtacttccaggaagataagaaggaaatgatggaggaattggttgagggcgttcgctgggcctttattgacatgctagagaaagaaaatgagtggatggatgcaggaacgaaaaggaaagccaaagaaaaggcgagagctgttttggcaaaagttggctatccagagtttataatgaatgatactcatgttaatgaagacctcaaagctatcaagttttcagaagccgactactttggcaacgtcctacaaactcgcaagtatttagcacagtctgatttcttctggctaagaaaagccgttccaaaaacagagtggtttacaaatccgacgactgtcaatgccttctacagtgcatccaccaaccagatccgatttccagcaggagagctccagaagcctttcttttggggaacagaatatcctcgatctctgagttatggtgctataggagtaattgtcggacatgaatttacacatggatttgataataatggtagaaaatatgataaaaatggaaacctggatccttggtggtctactgaatcagaagaaaagtttaaggaaaaaacaaaatgcatgattaaccagtatagcaactattattggaagaaagctggcttaaatgtcaaggggaagaggaccctgggagaaaatattgctgataatggaggcctgcgggaagcttttagggcttacaggaaatggataaatgacagaaggcagggacttgaggagcctcttctaccaggcatcacattcaccaacaaccagctcttcttcctgagttatgctcatgtgaggtgcaattcctacagaccagaagctgcccgagaacaagtccaaattggtgctcacagtccccctcagtttagggtcaatggtgcaattagtaactttgaagaattccagaaagcttttaactgtccacccaattccacgatgaacagaggcatggactcctgccgactctggtagctgggacgctggtttatggcatcctgagacagttgcacagtgccagcggaggctgcactgagccttcatcgcccattgctttaggcctggagactttcatttttagtgcattttcattatttgggtaggtgacctgcttggatctagacagcatctgttcaaagttgtagggcttataaagtggaatataagaatgaactaagtatgtttctttagaaaatcaaaccaacaaaaataaatccctaggctacttttgttaaaatgctatctgctaaattgttgctattgtccattttagggtgttggccacagttatgtggtacatagcatttcaatctatagc

SEQ ID NO: 8968 - DNA, 2250 bp, Artificial Sequence
  derived and/or modified sequence
atggaggccgaaacggggtccagcgtggagaccggaaagaaggctaatcgtggaactcggattgcgctggtggttttcgtgggcggaaccctggttctaggcaccattcttttcctggtgagtcaggggttattgagtttacaggccaagcaggaatactgtctgaaaccagagtgtatcgaagcagccgctgccatactgagtaaagtgaatctatcagtggatccctgtgataatttctttaggtttgcgtgcgacggctggatctccaacaaccccatacccgaagatatgccatcctacggcgtgtacccatggttgaggcacaacgttgatttaaaattgaaagagctcctggagaaaagtattagtcggcgacgtgataccgaagccatccagaaggccaagatactctattcaagctgcatgaacgagaaagcaattgaaaaggccgatgccaaaccactgctgcatatcctgcggcattcccccttcagatggcccgtgctcgagtctaatatcggacccgagggcgtgtggtccgaaagaaagttttctttgctccaaacactagccaccttccgcggacagtattccaacagcgtattcataagactgtacgtgagccccgatgataaagcttctaacgagcatatccttaagctggatcaggccacgctttctctcgctgtgagagaagattacctggataactctaccgaggccaaaagttatagggacgctctctataaatttatggtggacactgccgtgcttttgggtgcaaattcaagcagggcggagcatgacatgaaaagcgtgctgagactggaaattaaaatcgccgaaattatgatcccccacgaaaatcgtacttctgaagcaatgtacaacaagatgaatatctccgagctctcggccatgattcctcagttcgactggctgggttatatcaaaaaggtgatcgatacccgcctataccctcatctaaaggacatctctccatctgagaacgtggtggtgagggtcccccagtactttaaagacttgttccgcatactgggtagcgaacggaagaagactattgcgaattatctcgtttggcgcatggtgtacagcaggatacctaatctgtcaagaaggttccaataccggtggttagagttttcccgagtgattcagggcaccacgactttgctgccccagtgggacaagtgcgtcaatttcattgagtcagcattgccgtatgtggtgggaaagatgtttgtagacgtttattttcaggaggacaagaaagagatgatggaggaacttgtggaaggagtcaggtgggccttcattgatatgttggagaaggagaatgagtggatggatgcgggaacaaaaaggaaggccaaagaaaaggccagagctgtcctggctaaagttggatatccagaattcattatgaacgacacccatgtgaatgaggatctgaaagccatcaagtttagcgaggcagattactttggtaatgtgctgcagacccgaaagtatttggcccagtctgactttttctggctgcggaaggctgttcccaaaaccgagtggttcacaaatccgactaccgtgaatgccttttactcagcttcaactaaccagattaggtttcccgctggggaactacaaaaacccttcttttgggggacggagtaccctcgctcactgagttatggcgcaatcggcgtaatcgtcggccatgagtttacccacggcttcgataataatgggcgtaagtacgacaaaaacggcaacttggatccatggtggtcgacagaaagcgaggaaaaattcaaagagaagaccaaatgtatgattaatcaatattctaactattactggaaaaaagctggcctcaacgtgaagggcaagagaaccttaggagagaacattgcagataacgggggacttcgggaggctttccgggcatataggaaatggatcaacgaccgacgccagggcctggaagagccgctgttgcccggaatcacctttaccaacaatcagctattttttctcagctacgcccatgtccgttgtaacagctacaggccggaggctgccagggagcaggtccagattggagctcactcgcctccccagttcagagtgaacggagcgatttcaaattttgaagagtttcagaaggcttttaactgcccccctaactctaccatgaataggggcatggatagttgccgcctttggtag

SEQ ID NO: 8969 - DNA, 1959 bp, Artificial Sequence
  derived and/or modified sequence
atgccctcatatggggtctacccttggctccgccataacgtggacctgaagcttaaagagttgctggagaagagcatctcgagacgtagagacactgaagccattcaaaaggctaaaatactttacagcagctgcatgaatgagaaagccatcgagaaggcagacgctaagcccctgcttcatatacttcgacatagccctttccgttggcccgtgctggaaagtaatatagggccagaaggcgtgtggagtgaaaggaagttctcactgctacagactcttgcgacctttagaggccagtattcaaactccgtttttattcgtctatatgtaagccctgacgataaggcctccaatgagcacattctgaagctggaccaggccactctctcattagccgtgcgagaggactatttagataattctacagaggccaagtcctatagggacgcgttgtacaaattcatggtggatacggccgtgttgctcggtgcaaactcttcgcgagccgaacatgacatgaaatccgtgctccggctggagatcaagatcgccgaaataatgatccctcatgaaaaccgaacgtcagaggccatgtataacaagatgaatatctccgagctttctgccatgattccacagtttgactggctggggtatattaaaaaggtcatcgataccaggctatatcctcatctgaaggatatcagcccctcagagaatgtagtggttagagtgccccaatacttcaaggatctgttccgaattctggggtccgagcgcaaaaaaactattgcgaactatctggtttggagaatggtgtacagccgcatcccaaacctctctaggcgattccaatatcggtggctggagttctcccgcgtgatccaaggtaccacaaccctccttccccaatgggacaaatgcgtcaattttattgagagcgcactgccgtacgtggtgggaaaaatgtttgtcgacgtctatttccaggaggataagaaagaaatgatggaagagctggtggagggcgtccgttgggcattcatcgatatgctcgagaaggagaatgagtggatggatgccggaaccaagcgaaaagccaaggagaaagcgagagctgttctggcaaaagtgggctatccagagttcattatgaacgacactcatgtgaacgaagaccttaaggcaatcaagtttagcgaggcagactactttggtaatgtactccagacccgtaagtacctcgcccaatccgattttttctggctcagaaaggccgtccccaagactgaatggttcacaaacccaacaacagtcaacgcattctactctgcttcaacgaatcaaattcgctttccagccggtgagctgcagaaaccctttttttggggcacagaatacccccgaagccttagctacggggcaataggtgtcatcgtcggccacgaattcacacacggatttgacaataacgggaggaaatacgataagaacgggaatttagacccttggtggtctacagaatcagaagagaaatttaaggagaaaaccaagtgtatgattaatcagtatagcaactactattggaaaaaagcaggactgaatgtgaaagggaaaaggacactgggtgaaaacattgcagataacggtggattaagggaggcattccgggcatacagaaagtggatcaacgatcggagacaaggtctggaggaacctttgcttcctggcattaccttcactaataatcagctgttttttctgtcttatgcccacgtaagatgtaattcatacaggcccgaagcggctcgtgaacaggtccagatcggcgcacattcaccaccccagttccgtgtgaacggggcaatatcgaattttgaggagtttcagaaagcctttaactgcccccctaacagcaccatgaaccggggtatggactcatgccgcctgtggtag

SEQ ID NO: 8970 - DNA, 2250 bp, Artificial Sequence
  derived and/or modified sequence
atggaggccgagaccggcagcagcgtggagaccggcaagaaggccaacagaggcaccagaatcgccctggtggtgttcgtgggcggcaccctggtgctgggcaccatcctgttcctggtgagccagggcctgctgagcctgcaggccaagcaggagtactgcctgaagcccgagtgcatcgaggccgccgccgccatcctgagcaaggtgaacctgagcgtggacccctgcgacaacttcttcagattcgcctgcgacggctggatcagcaacaaccccatccccgaggacatgcccagctacggcgtgtacccctggctgagacacaacgtggacctgaagctgaaggagctgctggagaagagcatcagcagaagaagagacaccgaggccatccagaaggccaagatcctgtacagcagctgcatgaacgagaaggccatcgagaaggccgacgccaagcccctgctgcacatcctgagacacagccccttcagatggcccgtgctggagagcaacatcggccccgagggcgtgtggagcgagagaaagttcagcctgctgcagaccctggccaccttcagaggccagtacagcaacagcgtgttcatcagactgtacgtgagccccgacgacaaggccagcaacgagcacatcctgaagctggaccaggccaccctgagcctggccgtgagagaggactacctggacaacagcaccgaggccaagagctacagagacgccctgtacaagttcatggtggacaccgccgtgctgctgggcgccaacagcagcagagccgagcacgacatgaagagcgtgctgagactggagatcaagatcgccgagatcatgatcccccacgagaacagaaccagcgaggccatgtacaacaagatgaacatcagcgagctgagcgccatgatcccccagttcgactggctgggctacatcaagaaggtgatcgacaccagactgtacccccacctgaaggacatcagccccagcgagaacgtggtggtgagagtgccccagtacttcaaggacctgttcagaatcctgggcagcgagagaaagaagaccatcgccaactacctggtgtggagaatggtgtacagcagaatccccaacctgagcagaagattccagtacagatggctggagttcagcagagtgatccagggcaccaccaccctgctgccccagtgggacaagtgcgtgaacttcatcgagagcgccctgccctacgtggtgggcaagatgttcgtggacgtgtacttccaggaggacaagaaggagatgatggaggagctggtggagggcgtgagatgggccttcatcgacatgctggagaaggagaacgagtggatggacgccggcaccaagagaaaggccaaggagaaggccagagccgtgctggccaaggtgggctaccccgagttcatcatgaacgacacccacgtgaacgaggacctgaaggccatcaagttcagcgaggccgactacttcggcaacgtgctgcagaccagaaagtacctggcccagagcgacttcttctggctgagaaaggccgtgcccaagaccgagtggttcaccaaccccaccaccgtgaacgccttctacagcgccagcaccaaccagatcagattccccgccggcgagctgcagaagcccttcttctggggcaccgagtaccccagaagcctgagctacggcgccatcggcgtgatcgtgggccacgagttcacccacggcttcgacaacaacggcagaaagtacgacaagaacggcaacctggacccctggtggagcaccgagagcgaggagaagttcaaggagaagaccaagtgcatgatcaaccagtacagcaactactactggaagaaggccggcctgaacgtgaagggcaagagaaccctgggcgagaacatcgccgacaacggcggcctgagagaggccttcagagcctacagaaagtggatcaacgacagaagacagggcctggaggagcccctgctgcccggcatcaccttcaccaacaaccagctgttcttcctgagctacgcccacgtgagatgcaacagctacagacccgaggccgccagagagcaggtgcagatcggcgcccacagccccccccagttcagagtgaacggcgccatcagcaacttcgaggagttccagaaggccttcaactgcccccccaacagcaccatgaacagaggcatggacagctgcagactgtggtag

SEQ ID NO: 8971 - DNA, 1959 bp, Artificial Sequence
  derived and/or modified sequence
atgcccagctacggcgtgtacccctggctgagacacaacgtggacctgaagctgaaggagctgctggagaagagcatcagcagaagaagagacaccgaggccatccagaaggccaagatcctgtacagcagctgcatgaacgagaaggccatcgagaaggccgacgccaagcccctgctgcacatcctgagacacagccccttcagatggcccgtgctggagagcaacatcggccccgagggcgtgtggagcgagagaaagttcagcctgctgcagaccctggccaccttcagaggccagtacagcaacagcgtgttcatcagactgtacgtgagccccgacgacaaggccagcaacgagcacatcctgaagctggaccaggccaccctgagcctggccgtgagagaggactacctggacaacagcaccgaggccaagagctacagagacgccctgtacaagttcatggtggacaccgccgtgctgctgggcgccaacagcagcagagccgagcacgacatgaagagcgtgctgagactggagatcaagatcgccgagatcatgatcccccacgagaacagaaccagcgaggccatgtacaacaagatgaacatcagcgagctgagcgccatgatcccccagttcgactggctgggctacatcaagaaggtgatcgacaccagactgtacccccacctgaaggacatcagccccagcgagaacgtggtggtgagagtgccccagtacttcaaggacctgttcagaatcctgggcagcgagagaaagaagaccatcgccaactacctggtgtggagaatggtgtacagcagaatccccaacctgagcagaagattccagtacagatggctggagttcagcagagtgatccagggcaccaccaccctgctgccccagtgggacaagtgcgtgaacttcatcgagagcgccctgccctacgtggtgggcaagatgttcgtggacgtgtacttccaggaggacaagaaggagatgatggaggagctggtggagggcgtgagatgggccttcatcgacatgctggagaaggagaacgagtggatggacgccggcaccaagagaaaggccaaggagaaggccagagccgtgctggccaaggtgggctaccccgagttcatcatgaacgacacccacgtgaacgaggacctgaaggccatcaagttcagcgaggccgactacttcggcaacgtgctgcagaccagaaagtacctggcccagagcgacttcttctggctgagaaaggccgtgcccaagaccgagtggttcaccaaccccaccaccgtgaacgccttctacagcgccagcaccaaccagatcagattccccgccggcgagctgcagaagcccttcttctggggcaccgagtaccccagaagcctgagctacggcgccatcggcgtgatcgtgggccacgagttcacccacggcttcgacaacaacggcagaaagtacgacaagaacggcaacctggacccctggtggagcaccgagagcgaggagaagttcaaggagaagaccaagtgcatgatcaaccagtacagcaactactactggaagaaggccggcctgaacgtgaagggcaagagaaccctgggcgagaacatcgccgacaacggcggcctgagagaggccttcagagcctacagaaagtggatcaacgacagaagacagggcctggaggagcccctgctgcccggcatcaccttcaccaacaaccagctgttcttcctgagctacgcccacgtgagatgcaacagctacagacccgaggccgccagagagcaggtgcagatcggcgcccacagccccccccagttcagagtgaacggcgccatcagcaacttcgaggagttccagaaggccttcaactgcccccccaacagcaccatgaacagaggcatggacagctgcagactgtggtag

SEQ ID NO: 8972 - protein, 4574 aa, Artificial Sequence
  derived and/or modified sequence
MSGEDAEVRAVSEDVSNGSSGSPSPGDTLPWNLGKTQRSRRSGGGAGSNGSVLDPAERAVIRIADERDRVQKKTFTKWVNKHLIKAQRHISDLYEDLRDGHNLISLLEVLSGDSLPREKGRMRFHKLQNVQIALDYLRHRQVKLVNIRNDDIADGNPKLTLGLIWTIILHFQISDIQVSGQSEDMTAKEKLLLWSQRMVEGYQGLRCDNFTSSWRDGRLFNAIIHRHKPLLIDMNKVYRQTNLENLDQAFSVAERDLGVTRLLDPEDVDVPQPDEKSIITYVSSLYDAMPRVPDVQDGVRANELQLRWQEYRELVLLLLQWMRHHTAAFEERRFPSSFEEIEILWSQFLKFKEMELPAKEADKNRSKGIYQSLEGAVQAGQLKVPPGYHPLDVEKEWGKLHVAILEREKQLRSEFERLECLQRIVTKLQMEAGLCEEQLNQADALLQSDVRLLAAGKVPQRAGEVERDLDKADSMIRLLFNDVQTLKDGRHPQGEQMYRRVYRLHERLVAIRTEYNLRLKAGVAAPATQVAQVTLQSVQRRPELEDSTLRYLQDLLAWVEENQHRVDGAEWGVDLPSVEAQLGSHRGLHQSIEEFRAKIERARSDEGQLSPATRGAYRDCLGRLDLQYAKLLNSSKARLRSLESLHSFVAAATKELMWLNEKEEEEVGFDWSDRNTNMTAKKESYSALMRELELKEKKIKELQNAGDRLLREDHPARPTVESFQAALQTQWSWMLQLCCCIEAHLKENAAYFQFFSDVREAEGQLQKLQEALRRKYSCDRSATVTRLEDLLQDAQDEKEQLNEYKGHLSGLAKRAKAVVQLKPRHPAHPMRGRLPLLAVCDYKQVEVTVHKGDECQLVGPAQPSHWKVLSSSGSEAAVPSVCFLVPPPNQEAQEAVTRLEAQHQALVTLWHQLHVDMKSLLAWQSLRRDVQLIRSWSLATFRTLKPEEQRQALHSLELHYQAFLRDSQDAGGFGPEDRLMAEREYGSCSHHYQQLLQSLEQGAQEESRCQRCISELKDIRLQLEACETRTVHRLRLPLDKEPARECAQRIAEQQKAQAEVEGLGKGVARLSAEAEKVLALPEPSPAAPTLRSELELTLGKLEQVRSLSAIYLEKLKTISLVIRGTQGAEEVLRAHEEQLKEAQAVPATLPELEATKASLKKLRAQAEAQQPTFDALRDELRGAQEVGERLQQRHGERDVEVERWRERVAQLLERWQAVLAQTDVRQRELEQLGRQLRYYRESADPLGAWLQDARRRQEQIQAMPLADSQAVREQLRQEQALLEEIERHGEKVEECQRFAKQYINAIKDYELQLVTYKAQLEPVASPAKKPKVQSGSESVIQEYVDLRTHYSELTTLTSQYIKFISETLRRMEEEERLAEQQRAEERERLAEVEAALEKQRQLAEAHAQAKAQAEREAKELQQRMQEEVVRREEAAVDAQQQKRSIQEELQQLRQSSEAEIQAKARQAEAAERSRLRIEEEIRVVRLQLEATERQRGGAEGELQALRARAEEAEAQKRQAQEEAERLRRQVQDESQRKRQAEVELASRVKAEAEAAREKQRALQALEELRLQAEEAERRLRQAEVERARQVQVALETAQRSAEAELQSKRASFAEKTAQLERSLQEEHVAVAQLREEAERRAQQQAEAERAREEAERELERWQLKANEALRLRLQAEEVAQQKSLAQAEAEKQKEEAEREARRRGKAEEQAVRQRELAEQELEKQRQLAEGTAQQRLAAEQELIRLRAETEQGEQQRQLLEEELARLQREAAAATQKRQELEAELAKVRAEMEVLLASKARAEEESRSTSEKSKQRLEAEAGRFRELAEEAARLRALAEEAKRQRQLAEEDAARQRAEAERVLAEKLAAIGEATRLKTEAEIALKEKEAENERLRRLAEDEAFQRRRLEEQAAQHKADIEERLAQLRKASDSELERQKGLVEDTLRQRRQVEEEILALKASFEKAAAGKAELELELGRIRSNAEDTLRSKEQAELEAARQRQLAAEEERRRREAEERVQKSLAAEEEAARQRKAALEEVERLKAKVEEARRLRERAEQESARQLQLAQEAAQKRLQAEEKAHAFAVQQKEQELQQTLQQEQSVLDQLRGEAEAARRAAEEAEEARVQAEREAAQSRRQVEEAERLKQSAEEQAQARAQAQAAAEKLRKEAEQEAARRAQAEQAALRQKQAADAEMEKHKKFAEQTLRQKAQVEQELTTLRLQLEETDHQKNLLDEELQRLKAEATEAARQRSQVEEELFSVRVQMEELSKLKARIEAENRALILRDKDNTQRFLQEEAEKMKQVAEEAARLSVAAQEAARLRQLAEEDLAQQRALAEKMLKEKMQAVQEATRLKAEAELLQQQKELAQEQARRLQEDKEQMAQQLAEETQGFQRTLEAERQRQLEMSAEAERLKLRVAEMSRAQARAEEDAQRFRKQAEEIGEKLHRTELATQEKVTLVQTLEIQRQQSDHDAERLREAIAELEREKEKLQQEAKLLQLKSEEMQTVQQEQLLQETQALQQSFLSEKDSLLQRERFIEQEKAKLEQLFQDEVAKAQQLREEQQRQQQQMEQERQRLVASMEEARRRQHEAEEGVRRKQEELQQLEQQRRQQEELLAEENQRLREQLQLLEEQHRAALAHSEEVTASQVAATKTLPNGRDALDGPAAEAEPEHSFDGLRRKVSAQRLQEAGILSAEELQRLAQGHTTVDELARREDVRHYLQGRSSIAGLLLKATNEKLSVYAALQRQLLSPGTALILLEAQAASGFLLDPVRNRRLTVNEAVKEGVVGPELHHKLLSAERAVTGYKDPYTGQQISLFQAMQKGLIVREHGIRLLEAQIATGGVIDPVHSHRVPVDVAYRRGYFDEEMNRVLADPSDDTKGFFDPNTHENLTYLQLLERCVEDPETGLCLLPLTDKAAKGGELVYTDSEARDVFEKATVSAPFGKFQGKTVTIWEIINSEYFTAEQRRDLLRQFRTGRITVEKIIKIIITVVEEQEQKGRLCFEGLRSLVPAAELLESRVIDRELYQQLQRGERSVRDVAEVDTVRRALRGANVIAGVWLEEAGQKLSIYNALKKDLLPSDMAVALLEAQAGTGHIIDPATSARLTVDEAVRAGLVGPEFHEKLLSAEKAVTGYRDPYTGQSVSLFQALKKGLIPREQGLRLLDAQLSTGGIVDPSKSHRVPLDVACARGCLDEETSRALSAPRADAKAYSDPSTGEPATYGELQQRCRPDQLTGLSLLPLSEKAARARQEELYSELQARETFEKTPVEVPVGGFKGRTVTVWELISSEYFTAEQRQELLRQFRTGKVTVEKVIKILITIVEEVETLRQERLSFSGLRAPVPASELLASGVLSRAQFEQLKDGKTTVKDLSELGSVRTLLQGSGCLAGIYLEDTKEKVSIYEAMRRGLLRATTAALLLEAQAATGFLVDPVRNQRLYVHEAVKAGVVGPELHEQLLSAEKAVTGYRDPYSGSTISLFQAMQKGLVLRQHGIRLLEAQIATGGIIDPVHSHRVPVDVAYQRGYFSEEMNRVLADPSDDTKGFFDPNTHENLTYRQLLERCVEDPETGLRLLPLKGAEKAEVVETTQVYTEEETRRAFEETQIDIPGGGSHGGSTMSLWEVMQSDLIPEEQRAQLMADFQAGRVTKERMIIIIIEIIEKTEIIRQQGLASYDYVRRRLTAEDLFEARIISLETYNLLREGTRSLREALEAESAWCYLYGTGSVAGVYLPGSRQTLSIYQALKKGLLSAEVARLLLEAQAATGFLLDPVKGERLTVDEAVRKGLVGPELHDRLLSAERAVTGYRDPYTEQTISLFQAMKKELIPTEEALRLLDAQLATGGIVDPRLGFHLPLEVAYQRGYLNKDTHDQLSEPSEVRSYVDPSTDERLSYTQLLRRCRRDDGTGQLLLPLSDARKLTFRGLRKQITMEELVRSQVMDEATALQLREGLTSIEEVTKNLQKFLEGTSCIAGVFVDATKERLSVYQAMKKGIIRPGTAFELLEAQAATGYVIDPIKGLKLTVEEAVRMGIVGPEFKDKLLSAERAVTGYKDPYSGKLISLFQAMKKGLILKDHGIRLLEAQIATGGIIDPEESHRLPVEVAYKRGLFDEEMNEILTDPSDDTKGFFDPNTEENLTYLQLMERCITDPQTGLCLLPLKEKKRERKTSSKSSVRKRRVVIVDPETGKEMSVYEAYRKGLIDHQTYLELSEQECEWEEITISSSDGVVKSMIIDRRSGRQYDIDDAIAKNLIDRSALDQYRAGTLSITEFADMLSGNAGGFRSRSSSVGSSSSYPISPAVSRTQLASWSDPTEETGPVAGILDTETLEKVSITEAMHRNLVDNITGQRLLEAQACTGGIIDPSTGERFPVTDAVNKGLVDKIMVDRINLAQKAFCGFEDPRTKTKMSAAQALKKGWLYYEAGQRFLEVQYLTGGLIEPDTPGRVPLDEALQRGTVDARTAQKLRDVGAYSKYLTCPKTKLKISYKDALDRSMVEEGTGLRLLEAAAQSTKGYYSPYSVSGSGSTAGSRTGSRTGSRAGSRRGSFDATGSGFSMTFSSSSYSSSGYGRRYASGSSASLGGPESAVA

SEQ ID NO: 8973 - protein, 4570 aa, Artificial Sequence
  derived and/or modified sequence
MSGEDAEVRAVSEDVSNGSSGSPSPGDTLPWNLGKTQRSRRSGGGAGSNGSVLDPAERAVIRIADERDRVQKKTFTKWVNKHLIKAQRHISDLYEDLRDGHNLISLLEVLSGDSLPREKGRMRFHKLQNVQIALDYLRHRQVKLVNIRNDDIADGNPKLTLGLIWTIILHFQISDIQVSGQSEDMTAKEKLLLWSQRMVEGYQGLRCDNFTSSWRDGRLFNAIIHRHKPLLIDMNKVYRQTNLENLDQAFSVAERDLGVTRLLDPEDVDVPQPDEKSIITYVSSLYDAMPRVPDVQDGELQLRWQEYRELVLLLLQWMRHHTAAFEERRFPSSFEEIEILWSQFLKFKEMELPAKEADKNRSKGIYQSLEGAVQAGQLKVPPGYHPLDVEKEWGKLHVAILEREKQLRSEFERLECLQRIVTKLQMEAGLCEEQLNQADALLQSDVRLLAAGKVPQRAGEVERDLDKADSMIRLLFNDVQTLKDGRHPQGEQMYRRVYRLHERLVAIRTEYNLRLKAGVAAPATQVAQVTLQSVQRRPELEDSTLRYLQDLLAWVEENQHRVDGAEWGVDLPSVEAQLGSHRGLHQSIEEFRAKIERARSDEGQLSPATRGAYRDCLGRLDLQYAKLLNSSKARLRSLESLHSFVAAATKELMWLNEKEEEEVGFDWSDRNTNMTAKKESYSALMRELELKEKKIKELQNAGDRLLREDHPARPTVESFQAALQTQWSWMLQLCCCIEAHLKENAAYFQFFSDVREAEGQLQKLQEALRRKYSCDRSATVTRLEDLLQDAQDEKEQLNEYKGHLSGLAKRAKAVVQLKPRHPAHPMRGRLPLLAVCDYKQVEVTVHKGDECQLVGPAQPSHWKVLSSSGSEAAVPSVCFLVPPPNQEAQEAVTRLEAQHQALVTLWHQLHVDMKSLLAWQSLRRDVQLIRSWSLATFRTLKPEEQRQALHSLELHYQAFLRDSQDAGGFGPEDRLMAEREYGSCSHHYQQLLQSLEQGAQEESRCQRCISELKDIRLQLEACETRTVHRLRLPLDKEPARECAQRIAEQQKAQAEVEGLGKGVARLSAEAEKVLALPEPSPAAPTLRSELELTLGKLEQVRSLSAIYLEKLKTISLVIRGTQGAEEVLRAHEEQLKEAQAVPATLPELEATKASLKKLRAQAEAQQPTFDALRDELRGAQEVGERLQQRHGERDVEVERWRERVAQLLERWQAVLAQTDVRQRELEQLGRQLRYYRESADPLGAWLQDARRRQEQIQAMPLADSQAVREQLRQEQALLEEIERHGEKVEECQRFAKQYINAIKDYELQLVTYKAQLEPVASPAKKPKVQSGSESVIQEYVDLRTHYSELTTLTSQYIKFISETLRRMEEEERLAEQQRAEERERLAEVEAALEKQRQLAEAHAQAKAQAEREAKELQQRMQEEVVRREEAAVDAQQQKRSIQEELQQLRQSSEAEIQAKARQAEAAERSRLRIEEEIRVVRLQLEATERQRGGAEGELQALRARAEEAEAQKRQAQEEAERLRRQVQDESQRKRQAEVELASRVKAEAEAAREKQRALQALEELRLQAEEAERRLRQAEVERARQVQVALETAQRSAEAELQSKRASFAEKTAQLERSLQEEHVAVAQLREEAERRAQQQAEAERAREEAERELERWQLKANEALRLRLQAEEVAQQKSLAQAEAEKQKEEAEREARRRGKAEEQAVRQRELAEQELEKQRQLAEGTAQQRLAAEQELIRLRAETEQGEQQRQLLEEELARLQREAAAATQKRQELEAELAKVRAEMEVLLASKARAEEESRSTSEKSKQRLEAEAGRFRELAEEAARLRALAEEAKRQRQLAEEDAARQRAEAERVLAEKLAAIGEATRLKTEAEIALKEKEAENERLRRLAEDEAFQRRRLEEQAAQHKADIEERLAQLRKASDSELERQKGLVEDTLRQRRQVEEEILALKASFEKAAAGKAELELELGRIRSNAEDTLRSKEQAELEAARQRQLAAEEERRRREAEERVQKSLAAEEEAARQRKAALEEVERLKAKVEEARRLRERAEQESARQLQLAQEAAQKRLQAEEKAHAFAVQQKEQELQQTLQQEQSVLDQLRGEAEAARRAAEEAEEARVQAEREAAQSRRQVEEAERLKQSAEEQAQARAQAQAAAEKLRKEAEQEAARRAQAEQAALRQKQAADAEMEKHKKFAEQTLRQKAQVEQELTTLRLQLEETDHQKNLLDEELQRLKAEATEAARQRSQVEEELFSVRVQMEELSKLKARIEAENRALILRDKDNTQRFLQEEAEKMKQVAEEAARLSVAAQEAARLRQLAEEDLAQQRALAEKMLKEKMQAVQEATRLKAEAELLQQQKELAQEQARRLQEDKEQMAQQLAEETQGFQRTLEAERQRQLEMSAEAERLKLRVAEMSRAQARAEEDAQRFRKQAEEIGEKLHRTELATQEKVTLVQTLEIQRQQSDHDAERLREAIAELEREKEKLQQEAKLLQLKSEEMQTVQQEQLLQETQALQQSFLSEKDSLLQRERFIEQEKAKLEQLFQDEVAKAQQLREEQQRQQQQMEQERQRLVASMEEARRRQHEAEEGVRRKQEELQQLEQQRRQQEELLAEENQRLREQLQLLEEQHRAALAHSEEVTASQVAATKTLPNGRDALDGPAAEAEPEHSFDGLRRKVSAQRLQEAGILSAEELQRLAQGHTTVDELARREDVRHYLQGRSSIAGLLLKATNEKLSVYAALQRQLLSPGTALILLEAQAASGFLLDPVRNRRLTVNEAVKEGVVGPELHHKLLSAERAVTGYKDPYTGQQISLFQAMQKGLIVREHGIRLLEAQIATGGVIDPVHSHRVPVDVAYRRGYFDEEMNRVLADPSDDTKGFFDPNTHENLTYLQLLERCVEDPETGLCLLPLTDKAAKGGELVYTDSEARDVFEKATVSAPFGKFQGKTVTIWEIINSEYFTAEQRRDLLRQFRTGRITVEKIIKIIITVVEEQEQKGRLCFEGLRSLVPAAELLESRVIDRELYQQLQRGERSVRDVAEVDTVRRALRGANVIAGVWLEEAGQKLSIYNALKKDLLPSDMAVALLEAQAGTGHIIDPATSARLTVDEAVRAGLVGPEFHEKLLSAEKAVTGYRDPYTGQSVSLFQALKKGLIPREQGLRLLDAQLSTGGIVDPSKSHRVPLDVACARGCLDEETSRALSAPRADAKAYSDPSTGEPATYGELQQRCRPDQLTGLSLLPLSEKAARARQEELYSELQARETFEKTPVEVPVGGFKGRTVTVWELISSEYFTAEQRQELLRQFRTGKVTVEKVIKILITIVEEVETLRQERLSFSGLRAPVPASELLASGVLSRAQFEQLKDGKTTVKDLSELGSVRTLLQGSGCLAGIYLEDTKEKVSIYEAMRRGLLRATTAALLLEAQAATGFLVDPVRNQRLYVHEAVKAGVVGPELHEQLLSAEKAVTGYRDPYSGSTISLFQAMQKGLVLRQHGIRLLEAQIATGGIIDPVHSHRVPVDVAYQRGYFSEEMNRVLADPSDDTKGFFDPNTHENLTYRQLLERCVEDPETGLRLLPLKGAEKAEVVETTQVYTEEETRRAFEETQIDIPGGGSHGGSTMSLWEVMQSDLIPEEQRAQLMADFQAGRVTKERMIIIIIEIIEKTEIIRQQGLASYDYVRRRLTAEDLFEARIISLETYNLLREGTRSLREALEAESAWCYLYGTGSVAGVYLPGSRQTLSIYQALKKGLLSAEVARLLLEAQAATGFLLDPVKGERLTVDEAVRKGLVGPELHDRLLSAERAVTGYRDPYTEQTISLFQAMKKELIPTEEALRLLDAQLATGGIVDPRLGFHLPLEVAYQRGYLNKDTHDQLSEPSEVRSYVDPSTDERLSYTQLLRRCRRDDGTGQLLLPLSDARKLTFRGLRKQITMEELVRSQVMDEATALQLREGLTSIEEVTKNLQKFLEGTSCIAGVFVDATKERLSVYQAMKKGIIRPGTAFELLEAQAATGYVIDPIKGLKLTVEEAVRMGIVGPEFKDKLLSAERAVTGYKDPYSGKLISLFQAMKKGLILKDHGIRLLEAQIATGGIIDPEESHRLPVEVAYKRGLFDEEMNEILTDPSDDTKGFFDPNTEENLTYLQLMERCITDPQTGLCLLPLKEKKRERKTSSKSSVRKRRVVIVDPETGKEMSVYEAYRKGLIDHQTYLELSEQECEWEEITISSSDGVVKSMIIDRRSGRQYDIDDAIAKNLIDRSALDQYRAGTLSITEFADMLSGNAGGFRSRSSSVGSSSSYPISPAVSRTQLASWSDPTEETGPVAGILDTETLEKVSITEAMHRNLVDNITGQRLLEAQACTGGIIDPSTGERFPVTDAVNKGLVDKIMVDRINLAQKAFCGFEDPRTKTKMSAAQALKKGWLYYEAGQRFLEVQYLTGGLIEPDTPGRVPLDEALQRGTVDARTAQKLRDVGAYSKYLTCPKTKLKISYKDALDRSMVEEGTGLRLLEAAAQSTKGYYSPYSVSGSGSTAGSRTGSRTGSRAGSRRGSFDATGSGFSMTFSSSSYSSSGYGRRYASGSSASLGGPESAVA

SEQ ID NO: 8974 - protein, 355 aa, Artificial Sequence [sequence omitted]

SEQ ID NO: 8975 - protein, 355 aa, Artificial Sequence
  derived and/or modified sequence
MGKLVALVLLGVGLSLVGEMFLAFRERVNASREVEPVEPENCHLIEELETGSEDLEILPNGLAFISSGLKYPGIKSFNPNSPGKILLMDLNEEDPTVLELGITGSKFDVSSFNPHGISTFTDEDNAMYLLVVNHPDAKSTVELFKFQEEEKSLLHLKTIRHKLLPNLNDIVAVGPEHFYGTNDHYFLDPYLQSWEMYLGLAWSYVVYYSPSEVRVVAEGFDFANGINISPDGKYVYIAELLAHKIHVYEKHANWTLTPLKSLDFNTLVDNISVDPETGDLWVGCHPNGMKIFFYDSENPPASEVLRIQNILTEEPKVTQVYAENGTVLQGSTVASVYKGKLLIGTVFHKALYCEL

SEQ ID NO: 8976 - DNA, 1068 bp, Artificial Sequence
  derived and/or modified sequence
atggcaaagctaattgcgctgactcttctgggcatggggcttgcgctctttagaaatcatcagtcttcttaccagacccgcctgaatgcactgagagaagtccaacctgtggaactgccaaactgcaatctcgtgaaaggaatcgagaccggaagcgaagatctcgaaatcctccctaacggactcgcatttatcagctccggtttgaaatatcctggaattaagagttttaacccaaatagccctggcaagattctgctcatggatcttaacgaagaggatccgacagtcctggaactcgggatcaccggttcaaagttcgacgtgagctccttcaatcctcacggaattagtactttcaccgacgaagataatgccatgtatctcctagtggtcaaccatccagatgcgaagtcgacagtggagttattcaagttccaggaggaggaaaagtctctcctccatcttaagactatacggcacaagctccttcctaaccttaacgacattgtggccgtcggacctgagcatttctatggaaccaacgatcactacttcctggatccttacctgcagagttgggaaatgtacctgggccttgcgtggtcctatgtggtttattattcaccgtccgaagtccgggttgtagccgaaggcttcgacttcgccaacggaattaatatcagtccagatggaaaatatgtctacatagcggagctactcgcccataaaattcacgtgtatgaaaagcacgccaattggaccctgacccccctcaaatcgctggattttaacacccttgtggataatatctccgtggaccccgaaaccggagatctatgggtggggtgccatcccaacgggatgaagatattcttctacgactcggagaatcctccagctagtgaagtgctgcgtatccagaacattttaacagaagaaccaaaggtcacacaggtgtacgctgaaaacggcacagtcctgcagggatcaacagttgcaagtgtttataagggcaagctgctgatcggaaccgtttttcacaaagccttgtattgtgagctctag

SEQ ID NO: 8977 - DNA, 1068 bp, Artificial Sequence
  derived and/or modified sequence
atgggcaagctggtcgcattggtgctgctcggcgtcggcctcagtttggtcggtgagatgtttctggcattccgggaaagagtgaacgcaagccgcgaggtggaaccggtcgagcccgagaactgtcatctcattgaagaacttgaaactggcagcgaagacctggaaattttacccaacggtctggcctttatctctagcggtctgaagtatccgggcataaagtcattcaacccaaactctcctgggaaaatcctccttatggacctgaacgaggaagaccctaccgtactggaactgggcatcaccgggtctaaatttgacgtgagttctttcaatccccacggtataagcacatttacagacgaggataacgccatgtatctgctcgtggtaaaccaccctgatgccaagagcaccgtcgagttattcaagttccaggaggaggagaaaagtttgctgcatctcaagactataagacataagctgctccccaacttaaatgacattgtcgctgttggcccggagcacttctatggtaccaacgatcactactttctcgacccgtacctgcaaagctgggagatgtatctaggtcttgcctggagctatgtggtgtactactcaccttcggaagtgcgtgtggtggccgagggcttcgacttcgctaacggcattaacatctcccctgacggcaagtatgtttatattgctgaactcctagcccataagatccatgtgtatgagaagcacgctaattggactctgacgcccctgaagtccctagatttcaatactcttgtggacaatatatcagtggacccagagacaggggacttatgggtagggtgccacccaaacggtatgaaaatctttttttatgattccgagaatcctcccgcctccgaggttctacgcatccaaaacattctgacagaggaacctaaggtgactcaggtctatgctgaaaatggaactgtcttgcagggctcaactgttgcctcagtgtataaggggaagctcctgattggcaccgtgttccataaagcattgtactgtgaactgtag

SEQ ID NO: 8978 - DNA, 1068 bp, Artificial Sequence
  derived and/or modified sequence
atggccaagctgattgccctgaccctgctgggcatgggcctggccctcttcaggaaccaccagagcagctaccagacccggctgaatgccctgcgggaggtgcagcctgtggagctgcccaactgcaacctggtgaagggcatcgagaccggcagcgaggacctggagatcctgcccaacggcctggccttcatcagcagcggcctgaagtacccaggcatcaagagcttcaaccccaacagccctgggaagatcctgctgatggacctgaatgaggaggaccccaccgtgctggagctgggcatcaccggcagcaagtttgatgtgtcctccttcaacccccacggcatcagcaccttcacagatgaagataatgccatgtacctgctggtggtgaaccacccagatgccaagagcacagtggagctgttcaagttccaggaggaggagaagagcctgctgcacctgaagaccatccgccacaagctgctgcccaacctgaatgacatcgtggccgtgggccctgagcacttctacggcaccaatgaccactacttcctggacccctacctgcagagctgggagatgtacctgggcctggcctggagctatgtggtgtactacagccccagcgaggtgcgggtggtggccgagggctttgattttgccaacggcatcaacatcagcccagatggcaagtatgtgtacatcgccgagctgctggcccacaagatccacgtgtatgagaagcacgccaactggaccctgacccccctgaagagcctggacttcaacaccctggtggacaacatctctgtggaccctgagactggagacctgtgggtgggctgccaccccaacggcatgaagatcttcttctatgacagtgaaaatcctccagccagcgaggtgctgcgcatccagaacatcctgacagaggagcccaaggtgacccaggtgtatgcagaaaatggcaccgtgctgcagggcagcacagtggcctctgtgtacaagggcaagctgctgattggaacagtgttccacaaggccctgtactgtgagctgtag

SEQ ID NO: 8979 - DNA, 1068 bp, Artificial Sequence
  derived and/or modified sequence
atgggcaagctggtggccctggtgctgctgggcgtgggcctgagcctggtgggggagatgttcctggccttccgggagcgggtgaatgccagccgggaggtggagcctgtggagcctgagaactgccacctgattgaggagctggagaccggcagcgaggacctggagatcctgcccaacggcctggccttcatcagcagcggcctgaagtacccaggcatcaagagcttcaaccccaacagccctgggaagatcctgctgatggacctgaatgaggaggaccccaccgtgctggagctgggcatcaccggcagcaagtttgatgtgtcctccttcaacccccacggcatcagcaccttcacagatgaagataatgccatgtacctgctggtggtgaaccacccagatgccaagagcacagtggagctgttcaagttccaggaggaggagaagagcctgctgcacctgaagaccatccgccacaagctgctgcccaacctgaatgacatcgtggccgtgggccctgagcacttctacggcaccaatgaccactacttcctggacccctacctgcagagctgggagatgtacctgggcctggcctggagctatgtggtgtactacagccccagcgaggtgcgggtggtggccgagggctttgattttgccaacggcatcaacatcagcccagatggcaagtatgtgtacatcgccgagctgctggcccacaagatccacgtgtatgagaagcacgccaactggaccctgacccccctgaagagcctggacttcaacaccctggtggacaacatctctgtggaccctgagactggagacctgtgggtgggctgccaccccaacggcatgaagatcttcttctatgacagtgaaaatcctccagccagcgaggtgctgcgcatccagaacatcctgacagaggagcccaaggtgacccaggtgtatgcagaaaatggcaccgtgctgcagggcagcacagtggcctctgtgtacaagggcaagctgctgattggaacagtgttccacaaggccctgtactgtgagctgtag

SEQ ID NO: 8980 - DNA, 1068 bp, Artificial Sequence
  derived and/or modified sequence
atggccaagctgatcgccctgaccctgctgggcatgggcctggccctattcaggaaccaccaatctagctaccagacgcgcctcaacgctttgagagaggtgcagcctgtcgagcttcccaactgtaacttggtaaaaggcattgagaccgggtccgaagatttggaaatcctgcctaacggcctggctttcatttcctcaggcctgaaatatccggggattaagtctttcaaccccaactctcccggaaaaatactgctgatggacctgaacgaagaggatccaacagtcctggaactgggtattacaggatccaaatttgatgtatcttccttcaacccgcatgggattagcaccttcaccgacgaggacaatgcgatgtacctgctggtcgtgaaccatcctgatgctaagtctacagtggaactctttaagtttcaggaagaggagaaatcccttttacacctgaagaccatccgacataagctgctgcccaatttgaacgatatcgtggccgtgggcccagagcatttctacgggacaaacgaccactatttcctagacccctatttgcagtcctgggaaatgtatttggggctggcttggagctatgtcgtttattattccccatctgaggtacgcgtcgtcgccgaaggcttcgattttgcaaacgggatcaatatctctccagacggcaagtatgtctacatcgccgagttgttggcccataaaattcacgtctacgaaaaacacgctaactggactttaaccccattgaagagcctcgattttaacactctcgtggacaacatcagtgttgatccagagaccggagacctgtgggtcggctgccatcccaacggcatgaagattttcttttacgactcagagaatccacctgcaagcgaggtgctgcgaattcaaaatattctgactgaggagccaaaagttacccaggtctacgcggaaaatggcacagtacttcaggggtcaaccgtcgctagcgtgtataaggggaaactgctgatagggactgtatttcacaaggctctgtattgtgaactgtag

SEQ ID NO: 8981 - DNA, 1068 bp, Artificial Sequence
  derived and/or modified sequence
atgggcaagctggtggccctggtgctgctgggcgtgggcctgagcctagttggggaaatgtttctggccttcagggagcgtgtgaacgcgtccagagaagtagaaccggttgagcctgaaaactgccatcttatcgaggagctggaaacaggtagtgaagatttggagatcctgcccaatggcttggcgttcatttcttcagggttgaagtaccccggcattaaatcatttaatcccaacagcccgggaaagattcttctaatggatctcaacgaggaggatcccacggtgctggagctaggaataacaggcagcaagttcgatgtcagttcctttaatcctcacggcatcagtacattcacagacgaggacaatgccatgtacctgctggtggtcaaccacccagacgccaaatctacagtggaactatttaagttccaagaggaagagaaatcattgctgcaccttaaaacaatccggcataagctgttgcccaatctcaacgacattgtggcagtgggacctgagcatttctatggaaccaacgatcactactttcttgacccctaccttcagtcttgggagatgtatctggggctggcgtggagctacgtagtgtactacagtccctctgaggtccgagtcgtggccgaaggattcgattttgcaaacgggatcaatatcagcccggacggtaagtacgtttacattgcagaacttttagctcacaaaatccatgtctatgaaaaacatgccaattggaccctaacacccttgaagtctctggacttcaacacactggtggacaatataagcgttgacccagaaacaggagatttatgggtcgggtgccaccccaacggcatgaagatctttttctatgattccgagaaccccccagctagcgaggtcttgcgaatccaaaacatactgactgaagaacctaaagtgacgcaggtctacgcagaaaacggaaccgtgctgcagggtagtacagtggcctctgtgtataaaggtaaattgctgattgggacagtgttccacaaggccctctactgtgaactctag

SEQ ID NO: 8982 - DNA, 2568 bp, Artificial Sequence
  derived and/or modified sequence
gttggaaggagcaaaatgggacttttggctgaaagtgctgagctcctgcggtgggggctgaccgcaagccacgccttctgtgcacctggtcggcccagctagctgccgacccggcggggaggggcggggcgggccaatcggcgctgccccagcagggctgcggctgcaggcaggcagagcctcctagcccgtcggtgtctgcgcccatcgatccctttgtctatccccgaccatggcgaagctgattgcgctcaccctcttggggatgggactggcactcttcaggaaccaccagtcttcttaccaaacacgacttaatgctctccgagaggtacaacccgtagaacttcctaactgtaatttagttaaaggaatcgaaactggctctgaagacttggagatactgcctaatggactggctttcattagctctggattaaagtatcctggaataaagagcttcaaccccaacagtcctggaaaaatacttctgatggacctgaatgaagaagatccaacagtgttggaattggggatcactggaagtaaatttgatgtatcttcatttaaccctcatgggattagcacattcacagatgaagataatgccatgtacctcctggtggtgaaccatccagatgccaagtccacagtggagttgtttaaatttcaagaagaagaaaaatcgcttttgcatctaaaaaccatcagacataaacttctgcctaatttgaatgatattgttgctgtgggacctgagcacttttatggcacaaatgatcactattttcttgacccctacttacaatcctgggagatgtatttgggtttagcgtggtcgtatgttgtctactatagtccaagtgaagttcgagtggtggcagaaggatttgattttgctaatggaatcaacatttcacccgatggcaagtatgtctatatagctgagttgctggctcataagattcatgtgtatgaaaagcatgctaattggactttaactccattgaagtcccttgactttaataccctcgtggataacatatctgtggatcctgagacaggagacctttgggttggatgccatcccaatggcatgaaaatcttcttctatgactcagagaatcctcctgcatcagaggtgcttcgaatccagaacattctaacagaagaacctaaagtgacacaggtttatgcagaaaatggcacagtgttgcaaggcagtacagttgcctctgtgtacaaagggaaactgctgattggcacagtgtttcacaaagctctttactgtgagctctaacagaccgatttgcacccatgccatagaaactgaggccattatttcaaccgcttgccatattccgaggacccagtgttcttagctgaacaatgaatgctgaccctaaatgtggacatcatgaagcatcaaagcactgtttaactgggagtgatatgatgtgtagggcttttttttgagaatacactatcaaatcagtcttggaatacttgaaaacctcatttaccataaaaatccttctcactaaaatggataaatcagttatgtcaattgtcagatattaaataacagtgtgtgaccccaaaagtacttaccctaaaacatgtgttgcctggaagcacatgtgtgtatcgctgccttgccatgtcttgttcagaagacacaggggagcagggttagctcacgtgtctttagaactccagtactcacccagggactccagttcacaggccagaaaacatatgcattatgaagttcccctctactccatgcacatagtaagtctgactatggcagtcagacttacttactcccattttcccttcgatatatgactttttctcagtaaatattaacctgaattattccaactccccttgtactcttgctttttcaattctcctgttgcaatgacacataggaaaatcttaaaattcttgggagtgttgtcacacctgaaaattatgagtctctatgatcttggcacaaattgtacatttgagtgtctttgacttggttaaaggaagtttgttcacttcgatgactggatacagaatgaatcccataattgacatgggcgaagctaaaagtgtccccaaagactacactgttgttgaggtggtggtagtgctggtgggtttttgtttaatatttaaacttcttgttgtggaggctgaaaagaaaaaaaataatagaaaggtaaacaaacaaataaatagaaaagatcaacaacccctttggctatctactgagacatgactaggaagaaaacatgactttatcattttgttatagaaactgatatataaaggttacacattttcatttatttgtttttctgatttgaaggtataaccttcatgatgaattacttcttcagggtgttaaggcagtgactttagaaacaaatttttttcttgtttttgttttgtttttgagaccgaatctcactctgttgcccaggctggagtgcagtggtgcgatcttggctcactgcaacttctacctccgaggttcaagagattcttgtgcctcagcctcccggatagctg

SEQ ID NO: 8983 - DNA, 1112 bp, Artificial Sequence
  derived and/or modified sequence
accccgagaccatggggaagctcgtggcgctggtcctgctgggggtcggcctgtccttagtcggggagatgttcctggcgtttagagaaagggtgaatgcctctcgagaagtggagccagtagaacctgaaaactgccaccttattgaggaacttgaaactggctctgaagacttggagatactgcctaatggactggctttcattagctctggattaaagtatcctggaataaagagcttcaaccccaacagtcctggaaaaatacttctgatggacctgaatgaagaagatccaacagtgttggaattggggatcactggaagtaaatttgatgtatcttcatttaaccctcatgggattagcacattcacagatgaagataatgccatgtacctcctggtggtgaaccatccagatgccaagtccacagtggagttgtttaaatttcaagaagaagaaaaatcgcttttgcatctaaaaaccatcagacataaacttctgcctaatttgaatgatattgttgctgtgggacctgagcacttttatggcacaaatgatcactattttcttgacccctacttacaatcctgggagatgtatttgggtttagcgtggtcgtatgttgtctactatagtccaagtgaagttcgagtggtggcagaaggatttgattttgctaatggaatcaacatttcacccgatggcaagtatgtctatatagctgagttgctggctcataagattcatgtgtatgaaaagcatgctaattggactttaactccattgaagtcccttgactttaataccctcgtggataacatatctgtggatcctgagacaggagacctttgggttggatgccatcccaatggcatgaaaatcttcttctatgactcagagaatcctcctgcatcagaggtgcttcgaatccagaacattctaacagaagaacctaaagtgacacaggtttatgcagaaaatggcacagtgttgcaaggcagtacagttgcctctgtgtacaaagggaaactgctgattggcacagtgtttcacaaagctctttactgtgagctctaacagaccgatttgcacccatgccatagaaactga

SEQ ID NO: 8984 - DNA, 1068 bp, Artificial Sequence
  derived and/or modified sequence
atggctaagcttattgccttaaccttactaggcatgggacttgcgcttttccggaaccatcagtcatcctaccagacacgactgaacgcactaagagaggtacagcctgtggagttgcctaactgcaacctggtcaaggggatagagactggctctgaggacctggagatccttcccaacggtctggcctttattagcagcggacttaaatatccaggaattaagtccttcaatccgaatagtccgggtaaaatcctcctcatggacctgaatgaggaagaccccaccgtgctcgagctcggcattactggtagcaagttcgacgtgagttcgtttaacccacacgggatctcaacgttcacagatgaagataatgccatgtaccttttggtagtgaaccaccccgacgctaaatcaactgtggagctttttaagtttcaggaggaggagaagagcctgttgcacctgaagactatccggcacaagttgctccctaacctgaatgacatagtcgcagttggccctgagcatttttacggcaccaacgatcactacttcctggacccttaccttcagtcttgggagatgtacttgggtttagcatggtcatatgtggtttactacagtcctagtgaggtgcgggttgtcgcagagggtttcgacttcgctaacggaataaatatttcccctgatgggaagtatgtctacatcgccgagctgctggctcacaaaatccatgtgtatgagaagcacgcgaattggaccctgaccccactcaaatctctggattttaatacgttagtggataatatctccgtggatccggagacaggtgacctgtgggtggggtgccaccccaacggcatgaagatttttttttatgactctgagaatccccctgcctctgaggttctgcgaatacagaatatactgaccgaggagccgaaagtcacacaggtgtacgccgaaaatgggaccgtattacagggcagcacagtggcttccgtatataaagggaagctgttaattggcaccgtctttcacaaggcgctttactgtgaactctag

SEQ ID NO: 8985 - DNA, 1068 bp, Artificial Sequence
  derived and/or modified sequence
atgggcaagcttgttgcactggtcctgctgggcgtgggcctctccctagtaggagagatgttcttggctttcagagagcgggtgaacgcctcgcgggaagttgaaccagtggaacccgagaattgtcacttaatcgaggagttagaaacaggtagcgaagatctcgaaattttgcccaatggcctggctttcatatcatccggactcaaatatcctggcattaaatcatttaatccgaatagtccgggaaaaatactgttaatggatttaaacgaggaagatcctaccgtgctcgagctgggcatcactggatcgaaattcgatgtcagttcttttaatccacatgggatctcaaccttcactgacgaagataatgccatgtatttgttggtggtgaatcatcccgacgcaaaaagcactgtggagttattcaagtttcaggaggaggagaagtccctcttacaccttaaaactattcggcacaagctgctcccaaatctgaatgacatcgttgccgtcggacctgagcacttctatggtaccaacgaccattatttcctcgacccatatctgcagtcctgggaaatgtaccttggccttgcatggtcctatgtggtgtactacagcccatctgaggtccgagtagtagctgaggggtttgacttcgccaatggcataaatatctcaccggacgggaagtatgtgtatattgcagagctgctggcccataagattcatgtttacgaaaaacatgccaattggacgttgacacctctgaagagcttagacttcaatacccttgtcgataacatcagcgtggaccctgagactggcgatctctgggtgggatgtcacccaaacggaatgaaaatcttcttctatgatagcgagaacccacctgccagcgaggtcctgcggatccaaaacatactgaccgaggagcctaaagtcacacaggtgtacgctgagaacggcacagtgctgcagggctcaactgtggcatccgtttacaagggcaagctccttatcggaacagttttccacaaggccttgtactgcgaattgtag

SEQ ID NO: 8986 - DNA, 1068 bp, Artificial Sequence
  derived and/or modified sequence
atggccaagctgatcgccctgaccctgctgggcatgggcctggccctgttcagaaaccaccagagcagctaccagaccagactgaacgccctgagagaggtgcagcccgtggagctgcccaactgcaacctggtgaagggcatcgagaccggcagcgaggacctggagatcctgcccaacggcctggccttcatcagcagcggcctgaagtaccccggcatcaagagcttcaaccccaacagccccggcaagatcctgctgatggacctgaacgaggaggaccccaccgtgctggagctgggcatcaccggcagcaagttcgacgtgagcagcttcaacccccacggcatcagcaccttcaccgacgaggacaacgccatgtacctgctggtggtgaaccaccccgacgccaagagcaccgtggagctgttcaagttccaggaggaggagaagagcctgctgcacctgaagaccatcagacacaagctgctgcccaacctgaacgacatcgtggccgtgggccccgagcacttctacggcaccaacgaccactacttcctggacccctacctgcagagctgggagatgtacctgggcctggcctggagctacgtggtgtactacagccccagcgaggtgagagtggtggccgagggcttcgacttcgccaacggcatcaacatcagccccgacggcaagtacgtgtacatcgccgagctgctggcccacaagatccacgtgtacgagaagcacgccaactggaccctgacccccctgaagagcctggacttcaacaccctggtggacaacatcagcgtggaccccgagaccggcgacctgtgggtgggctgccaccccaacggcatgaagatcttcttctacgacagcgagaacccccccgccagcgaggtgctgagaatccagaacatcctgaccgaggagcccaaggtgacccaggtgtacgccgagaacggcaccgtgctgcagggcagcaccgtggccagcgtgtacaagggcaagctgctgatcggcaccgtgttccacaaggccctgtactgcgagctgtag

SEQ ID NO: 8987 - DNA, 1068 bp, Artificial Sequence
  derived and/or modified sequence
atgggcaagctggtggccctggtgctgctgggcgtgggcctgagcctggtgggcgagatgttcctggccttcagagagagagtgaacgccagcagagaggtggagcccgtggagcccgagaactgccacctgatcgaggagctggagaccggcagcgaggacctggagatcctgcccaacggcctggccttcatcagcagcggcctgaagtaccccggcatcaagagcttcaaccccaacagccccggcaagatcctgctgatggacctgaacgaggaggaccccaccgtgctggagctgggcatcaccggcagcaagttcgacgtgagcagcttcaacccccacggcatcagcaccttcaccgacgaggacaacgccatgtacctgctggtggtgaaccaccccgacgccaagagcaccgtggagctgttcaagttccaggaggaggagaagagcctgctgcacctgaagaccatcagacacaagctgctgcccaacctgaacgacatcgtggccgtgggccccgagcacttctacggcaccaacgaccactacttcctggacccctacctgcagagctgggagatgtacctgggcctggcctggagctacgtggtgtactacagccccagcgaggtgagagtggtggccgagggcttcgacttcgccaacggcatcaacatcagccccgacggcaagtacgtgtacatcgccgagctgctggcccacaagatccacgtgtacgagaagcacgccaactggaccctgacccccctgaagagcctggacttcaacaccctggtggacaacatcagcgtggaccccgagaccggcgacctgtgggtgggctgccaccccaacggcatgaagatcttcttctacgacagcgagaacccccccgccagcgaggtgctgagaatccagaacatcctgaccgaggagcccaaggtgacccaggtgtacgccgagaacggcaccgtgctgcagggcagcaccgtggccagcgtgtacaagggcaagctgctgatcggcaccgtgttccacaaggccctgtactgcgagctgtag

SEQ ID NO: 8988 - protein, 610 aa, Artificial Sequence
  derived and/or modified sequence
MIASQFLSALTLVLLIKESGAWSYNTSTEAMTYDEASAYCQQRYTHLVAIQNKEEIEYLNSILSYSPSYYWIGIRKVNNVWVWVGTQKPLTEEAKNWAPGEPNNRQKDEDCVEIYIKREKDVGMWNDERCSKKKLALCYTAACTNTSCSGHGECVETINNYTCKCDPGFSGLKCEQIVNCTALESPEHGSLVCSHPLGNFSYNSSCSISCDRGYLPSSMETMQCMSSGEWSAPIPACNVVECDAVTNPANGFVECFQNPGSFPWNTTCTFDCEEGFELMGAQSLQCTSSGNWDNEKPTCKAVTCRAVRQPQNGSVRCSHSPAGEFTFKSSCNFTCEEGFMLQGPAQVECTTQGQWTQQIPVCEAFQCTALSNPERGYMNCLPSASGSFRYGSSCEFSCEQGFVLKGSKRLQCGPTGEWDNEKPTCEAVRCDAVHQPPKGLVRCAHSPIGEFTYKSSCAFSCEEGFELHGSTQLECTSQGQWTEEVPSCQVVKCSSLAVPGKINMSCSGEPVFGTVCKFACPEGWTLNGSAARTCGATGHWSGLLPTCEAPTESNIPLVAGLSAAGLSLLTLAPFLLWLRKCLRKAKKFVPASSCQSLESDGSYQKPSYIL

SEQ ID NO: 8989 - protein, 484 aa, Artificial Sequence
  derived and/or modified sequence
MIASQFLSALTLVLLIKESGAWSYNTSTEAMTYDEASAYCQQRYTHLVAIQNKEEIEYLNSILSYSPSYYWIGIRKVNNVWVWVGTQKPLTEEAKNWAPGEPNNRQKDEDCVEIYIKREKDVGMWNDERCSKKKLALCYTAACTNTSCSGHGECVETINNYTCKCDPGFSGLKCEQIVNCTALESPEHGSLVCSHPLGNFSYNSSCSISCDRGYLPSSMETMQCMSSGEWSAPIPACNVVECDAVTNPANGFVECFQNPGSFPWNTTCTFDCEEGFELMGAQSLQCTSSGNWDNEKPTCKAVTCRAVRQPQNGSVRCSHSPAGEFTFKSSCNFTCEEGFMLQGPAQVECTTQGQWTQQIPVCEVVKCSSLAVPGKINMSCSGEPVFGTVCKFACPEGWTLNGSAARTCGATGHWSGLLPTCEAPTESNIPLVAGLSAAGLSLLTLAPFLLWLRKCLRKAKKFVPASSCQSLESDGSYQKPSYIL

SEQ ID NO: 8990 - protein, 485 aa, Artificial Sequence
  derived and/or modified sequence
MIASQFLSALTLVLLIKESGAWSYNTSTEAMTYDEASAYCQQRYTHLVAIQNKEEIEYLNSILSYSPSYYWIGIRKVNNVWVWVGTQKPLTEEAKNWAPGEPNNRQKDEDCVEIYIKREKDVGMWNDERCSKKKLALCYTAACTNTSCSGHGECVETINNYTCKCDPGFSGLKCEQMVECDAVTNPANGFVECFQNPGSFPWNTTCTFDCEEGFELMGAQSLQCTSSGNWDNEKPTCKAVTCRAVRQPQNGSVRCSHSPAGEFTFKSSCNFTCEEGFMLQGPAQVECTTQGQWTQQIPVCEAVRCDAVHQPPKGLVRCAHSPIGEFTYKSSCAFSCEEGFELHGSTQLECTSQGQWTEEVPSCQVVKCSSLAVPGKINMSCSGEPVFGTVCKFACPEGWTLNGSAARTCGATGHWSGLLPTCEAPTESNIPLVAGLSAAGLSLLTLAPFLLWLRKCLRKAKKFVPASSCQSLESDGSYQKPSYIL

SEQ ID NO: 8991 - protein, 547 aa, Artificial Sequence
  derived and/or modified sequence
MIASQFLSALTLVLLIKESGAWSYNTSTEAMTYDEASAYCQQRYTHLVAIQNKEEIEYLNSILSYSPSYYWIGIRKVNNVWVWVGTQKPLTEEAKNWAPGEPNNRQKDEDCVEIYIKREKDVGMWNDERCSKKKLALCYTAACTNTSCSGHGECVETINNYTCKCDPGFSGLKCEQIVNCTALESPEHGSLVCSHPLGNFSYNSSCSISCDRGYLPSSMETMQCMSSGEWSAPIPACNVVECDAVTNPANGFVECFQNPGSFPWNTTCTFDCEEGFELMGAQSLQCTSSGNWDNEKPTCKAVTCRAVRQPQNGSVRCSHSPAGEFTFKSSCNFTCEEGFMLQGPAQVECTTQGQWTQQIPVCEAVRCDAVHQPPKGLVRCAHSPIGEFTYKSSCAFSCEEGFELHGSTQLECTSQGQWTEEVPSCQVVKCSSLAVPGKINMSCSGEPVFGTVCKFACPEGWTLNGSAARTCGATGHWSGLLPTCEAPTESNIPLVAGLSAAGLSLLTLAPFLLWLRKCLRKAKKFVPASSCQSLESDGSYQKPSYIL

SEQ ID NO: 8992 - protein, 547 aa, Artificial Sequence
  derived and/or modified sequence
MIASQFLSALTLVLLIKESGAWSYNTSTEAMTYDEASAYCQQRYTHLVAIQNKEEIEYLNSILSYSPSYYWIGIRKVNNVWVWVGTQKPLTEEAKNWAPGEPNNRQKDEDCVEIYIKREKDVGMWNDERCSKKKLALCYTAACTNTSCSGHGECVETINNYTCKCDPGFSGLKCEQIVNCTALESPEHGSLVCSHPLGNFSYNSSCSISCDRGYLPSSMETMQCMSSGEWSAPIPACNVVECDAVTNPANGFVECFQNPGSFPWNTTCTFDCEEGFELMGAQSLQCTSSGNWDNEKPTCKAVTCRAVRQPQNGSVRCSHSPAGEFTFKSSCNFTCEEGFMLQGPAQVECTTQGQWTQQIPVCEAFQCTALSNPERGYMNCLPSASGSFRYGSSCEFSCEQGFVLKGSKRLQCGPTGEWDNEKPTCEVVKCSSLAVPGKINMSCSGEPVFGTVCKFACPEGWTLNGSAARTCGATGHWSGLLPTCEAPTESNIPLVAGLSAAGLSLLTLAPFLLWLRKCLRKAKKFVPASSCQSLESDGSYQKPSYIL

SEQ ID NO: 8993 - DNA, 1833 bp, Artificial Sequence
  derived and/or modified sequence
atgattgcaagccagttcctgtcagcgttgaccttagtgttgctgattaaagagtcaggcgcctggagctataatactagcacagaggcaatgacctacgatgaggcctccgcctattgccagcagcggtacacccatcttgtcgccatacagaataaggaagagattgagtacctgaactcaattttgtcatattctccctcatactactggatcggaatccggaaggtgaataacgtgtgggtgtgggtggggacacagaaacccctgacagaggaggccaaaaactgggctccgggggagccgaacaatagacagaaggacgaggattgcgtggaaatctacattaaaagagagaaagacgtcgggatgtggaatgatgaacgatgctctaaaaagaagttagcgctgtgctacaccgctgcatgtacaaacacaagctgctctggtcatggggagtgtgtcgagacaatcaacaattacacatgcaagtgcgatccaggtttttcaggtctgaagtgcgaacaaattgtgaattgtacagcgcttgaaagtcccgagcatggatccctggtctgcagtcaccccctgggcaatttctcgtataacagttcctgtagcatcagctgtgatcgaggctatctcccgagtagtatggagacaatgcagtgtatgtccagcggagagtggagcgcccccattcccgcttgcaatgtggtggagtgtgatgcagtgactaatcccgctaacggattcgtggagtgttttcagaatccaggcagcttcccctggaacacaacatgcacatttgactgtgaagaaggcttcgaactgatgggcgctcagtccctccagtgcacatctagcgggaactgggataatgagaagcccacctgcaaagccgtcacttgtcgcgcagtgagacagccccagaacggttctgttcgatgcagccattcaccagcaggagaatttacattcaaaagttcctgcaatttcacttgtgaagaggggtttatgcttcagggccccgcccaggtcgagtgcactacccaaggacaatggactcagcagatccctgtgtgcgaagcttttcagtgcacggccctgtctaacccagagagggggtacatgaactgcctgccttccgcaagcggtagttttcgatacggatcatcgtgtgaattctcttgcgaacagggtttcgtcctcaaaggttctaagcgcctgcagtgtgggccaaccggagagtgggacaatgagaaaccgacctgtgaggctgtccgatgtgatgcagtacatcagcctcctaaaggactggtgaggtgtgctcatagcccaataggcgagtttacatataagtcctcgtgcgccttctcatgcgaggagggtttcgagttacacggatccacacaacttgagtgtacgtcccaaggccaatggacagaagaagttccaagctgtcaggtggtaaagtgctctagtctggcagtgcctggaaagatcaacatgagctgcagcggggagccggtgtttgggacagtgtgtaagtttgcctgtcccgagggatggacattaaacggctccgccgctcggacctgcggggcaacgggccactggagtgggctcctgcccacctgcgaagcaccaacggagtccaatatcccgctggttgctggtctttcagcggctggactgtccctgctcaccttggcacctttcctgctgtggctgcggaaatgtctccgaaaagccaaaaagttcgtccccgcttccagttgtcagtccctggagagcgacggatcctaccaaaagccttcctatattctttag

SEQ ID NO: 8994 - DNA, 1455 bp, Artificial Sequence
  derived and/or modified sequence
atgatagccagccaatttctgagtgccctgaccttggtacttctcatcaaggagtctggagcatggagttataacacttccaccgaggccatgacctatgacgaagctagtgcgtattgccaacagcgatacacgcacctcgtagccatacagaacaaggaggaaatagaatacctcaactcaatcctgtcttattcaccatcttattactggataggcatccggaaggtcaataatgtctgggtttgggtgggaacgcagaagccgctgaccgaggaggcaaagaattgggcccccggcgaacccaataacagacagaaagatgaggactgtgttgagatttatatcaagcgggagaaagacgttggaatgtggaatgacgagcgctgcagcaagaaaaagctggcgttatgttataccgctgcatgtactaacacctcctgctctggacacggggagtgcgtggaaaccatcaacaattacacatgcaagtgcgacccgggtttttccggtcttaagtgcgaacagatagtgaactgtactgcgctggaatcccccgagcatgggagcctggtgtgtagccaccctttaggcaacttctcttataactcatcctgttccatatcctgcgatcgcggttacttgccaagtagcatggaaaccatgcagtgcatgagtagcggagagtggtccgcccctattccggcctgtaatgtggtggagtgcgatgccgtgactaacccagctaacggctttgtggagtgtttccaaaatcctggttcctttccctggaacaccacatgcacgtttgattgcgaggaggggttcgagttgatgggcgctcaaagtctgcaatgtacatcatccggcaattgggataatgagaagcccacctgcaaagctgtaacatgtagggctgtgcgacagccacaaaatgggagcgtaaggtgttctcatagtccagctggagagtttactttcaaaagcagctgtaatttcacatgcgaagaaggattcatgctccagggtccagctcaggtggagtgcacgacccaggggcagtggacgcagcaaattcctgtctgcgaggtggtcaaatgttccagcttagcagtcccagggaaaataaatatgagttgttcaggagagccagtctttggcactgtctgcaagttcgcctgtccagagggatggaccctgaatggaagcgcagctcggacttgcggtgccacagggcactggagcgggctactccctacgtgtgaagcccctacagagagtaatatccccttggtcgcgggcctatccgccgccggcctatccctgcttactctggcacccttcctgctgtggctgcggaagtgtctgagaaaggctaagaagttcgttcctgcatctagttgtcagtcactggaatccgatggttcttaccagaagccgagttatatcctttag

SEQ ID NO: 8995 - DNA, 1458 bp, Artificial Sequence
  derived and/or modified sequence
atgatagccagccaatttctgtctgcactgactttggtgctgcttataaaggagagtggggcgtggtcttacaacacaagcacagaggcaatgacctatgacgaggcctccgcctactgccaacagcgatacactcatcttgttgcaattcaaaataaggaagaaattgaatatcttaatagcattctctcttacagcccgtcttattattggatcggcatccgaaaagtgaataacgtgtgggtgtgggtcggcactcagaaacccctgacagaagaggcaaaaaattgggctcctggcgagccaaataatcggcagaaagatgaagactgcgtggagatatatatcaaaagagagaaagacgtcggcatgtggaacgatgagcgatgcagcaaaaagaaattggcgctatgctacaccgctgcctgtacgaatacgtcgtgctccggccacggcgagtgtgtcgaaaccattaataactacacctgcaaatgcgacccgggctttagcggcttgaaatgcgagcagatggtagaatgtgacgctgtcaccaacccggccaacggcttcgtagagtgttttcaaaatccgggatcatttccgtggaatacgacctgcacatttgattgtgaggaaggctttgagcttatgggcgctcaatcgctccagtgcacgagttccggtaactgggacaacgagaaacccacatgcaaagcagtcacatgccgtgctgtccggcaaccccagaacgggtcagtgcgttgtagtcactctcccgccggcgaatttactttcaaatcatcttgcaatttcacttgtgaggaaggctttatgcttcagggcccagcccaggtggaatgtacaacccaaggacaatggacccaacagattccagtctgcgaggccgtccggtgtgacgccgtgcatcagcccccaaagggtctcgtgaggtgcgcacacagcccaataggtgagttcacttataagtcatcctgcgctttcagttgcgaagaaggattcgaactacacggcagtacacagctggagtgcactagtcaggggcagtggacagaagaggtcccctcatgccaagtcgtgaaatgttcctcactcgccgtgccaggcaaaattaatatgtcatgctcaggcgaacccgtgttcggtaccgtgtgcaaatttgcttgtcctgaaggatggaccctgaatgggtccgccgcccgcacgtgtggcgccacaggacattggagcgggctgttgccaacctgcgaggccccaacagagagtaatatccccctggtagcaggcctgtcagccgccgggctgtccctgctcaccctagctccattcctcctctggttgaggaagtgtctcagaaaggctaagaagtttgtgccggcctcatcctgccagagtcttgagtcagacggctcttatcagaagccatcatacattctttag

SEQ ID NO: 8996 - DNA, 1644 bp, Artificial Sequence
  derived and/or modified sequence
atgatcgcatctcagtttctgagcgcgctgactcttgtgctgctgataaaggagtccggggcgtggagctacaatacatcaacagaggccatgacttacgatgaggcgtctgcgtattgtcaacagagatatacacacctcgtcgctatccagaataaagaggagatcgagtatctgaattctattctgtcctatagtcctagctactattggattggaattcgaaaggtcaacaatgtgtgggtatgggttggaacacagaagccgctgactgaggaagctaaaaactgggcccctggcgagcccaataatcggcagaaagacgaggactgcgtggaaatctatatcaagcgcgagaaagatgtcggcatgtggaacgatgagagatgctctaagaagaagctcgccctgtgctacacagctgcctgcaccaatacctcctgtagtggccacggagagtgcgttgaaaccattaacaactatacttgcaaatgcgatcctggcttcagtgggctgaaatgtgaacagatagtgaattgtacagctctagagtccccggagcacggaagtctggtgtgctcccaccctctcggcaacttttcttataattcttcttgcagcatcagctgtgaccgtgggtatcttccctcaagtatggaaacaatgcagtgcatgtccagtggggaatggagcgcacctatccctgcctgcaatgtggtggagtgtgacgccgtgacaaaccccgctaatggattcgtggagtgtttccaaaatccagggagcttcccctggaacactacctgtacgttcgactgcgaggaaggtttcgagcttatgggcgcccagtcacttcaatgcacttcctctggcaactgggacaacgagaagcctacatgtaaagccgtgacttgcagagccgtgcgccagccacaaaacggtagtgtgaggtgctctcacagccctgccggtgagtttacctttaagtcatcttgtaactttacatgcgaggagggtttcatgctgcaagggccagcacaggtagagtgcactacacagggccagtggacgcaacaaattcccgtgtgtgaggcagtgcggtgcgatgccgtccaccagccaccgaaaggattagtacggtgcgcgcactcacctatcggagagtttacgtacaagagttcatgtgccttttcctgtgaggaaggctttgagcttcatgggtcaacacagttggaatgcacctctcagggtcagtggaccgaagaagtgccctcctgccaggttgtcaagtgcagcagcctcgctgtgcccggaaagatcaatatgtcttgttcaggggaaccagtctttggcactgtttgcaagtttgcctgtccagagggatggacacttaacgggtcagctgcgcggacttgtggcgcaacgggtcattggtcgggacttcttccgacctgtgaggcccctacagagtccaacatcccactcgtggcgggacttagtgccgccggcctatcactgctcacccttgcccccttcctcttgtggttacgcaagtgcttgcgcaaagccaaaaaattcgtgcctgccagctcttgtcagtcactggagtcagatggtagttatcagaaaccaagctacatactgtag

SEQ ID NO: 8997 - DNA, 1644 bp, Artificial Sequence
  derived and/or modified sequence
atgattgccagccagtttctgtctgcgttgaccctggttctgctcatcaaagagagcggagcctggtcctataatacctctacggaagcgatgacatatgacgaagcttccgcctattgtcagcaacgctacacacacctcgttgcgatccagaacaaagaggaaatcgagtatctgaactccatccttagttatagccccagttattattggattggtatacgaaaggtcaacaacgtgtgggtgtgggtagggacccagaaaccactaactgaggaggcaaaaaactgggcgcccggcgagcccaacaaccggcagaaagatgaggattgtgtcgaaatctatataaagcgtgaaaaggatgtcgggatgtggaatgatgagcgctgcagtaagaaaaagctcgctttatgctacaccgcagcttgcacaaatacgagttgcagcgggcacggtgaatgcgtagagaccatcaacaactacacatgtaagtgcgaccccgggttttctggccttaagtgcgaacaaatagtaaactgcactgcattagagtccccagagcatggaagtcttgtgtgttctcatccattaggtaattttagctataattcaagttgctccattagttgcgataggggctatctgcctagctctatggagaccatgcagtgtatgtctagcggcgagtggtcggcccccatcccggcgtgcaacgtggtggagtgtgacgccgtgactaaccccgctaatggatttgtggaatgcttccagaatcccgggagcttcccctggaataccacttgcaccttcgactgcgaggagggattcgagctgatgggcgcacagagcttacagtgtacatcaagcggcaactgggataacgagaagccaacatgtaaggcagtgacatgcagagctgtgaggcagccccagaatggctccgtgaggtgttcccatagcccagccggagagttcacctttaagtcatcgtgcaacttcacgtgtgaagaaggcttcatgctgcagggcccggctcaggtcgaatgcaccacacaagggcaatggacccaacagattcccgtgtgtgaggcattccagtgtacggcgctcagcaaccctgagagggggtacatgaattgtctgcctagtgcctccggatcctttcgatatgggtccagttgcgagttctcttgcgagcaggggttcgtgcttaagggctcaaagaggctgcagtgtggcccaacaggtgagtgggacaatgagaaaccgacttgcgaagtagtaaagtgcagctcattggccgtgcccggcaagataaatatgagctgctcaggggagccggtgtttggtactgtttgcaagtttgcatgtcctgaaggatggaccctgaacgggagcgctgctaggacctgcggcgccactggacattggtcagggctcctgccaacatgcgaagctcccaccgaaagcaacatcccactcgtggcaggcctctccgcagctggactgtccctgctaacactcgctcccttcctgttgtggctgagaaagtgcttgcgaaaagctaagaaattcgtgcctgcttcatcatgtcagtccctggagagcgatggaagctaccaaaagccatcttacattctctag

SEQ ID NO: 8998 - DNA, 1455 bp, Artificial Sequence
  derived and/or modified sequence
atgatcgcatctcaattcctgtccgcattaacgctcgtcctcctgattaaagagagcggcgcctggtcttataacaccagcactgaagccatgacatacgacgaggccagcgcatactgtcagcaacggtacacccaccttgttgccatccagaacaaagaggaaattgaatatttgaattccattctgagctactctcctagctactactggattggcatcagaaaggtgaataatgtgtgggtatgggtgggtacacaaaaaccattaacggaggaagctaagaactgggcccccggagagccgaacaaccgccagaaagatgaggattgtgtcgagatatatattaagcgcgaaaaggatgtgggtatgtggaacgacgagcgatgttccaagaaaaaactggctctgtgttacactgcagcctgtacaaatactagctgctccggccatggcgagtgtgtagagactatcaataactacacctgtaaatgcgatcccggctttagtgggctcaaatgtgaacagatagtgaattgcaccgcactggaatcacctgaacacggaagcctggtgtgctcccatcctctcggcaatttctcttataactccagctgctcaattagttgtgaccgggggtatctcccctcatccatggaaacaatgcagtgtatgtcctcaggagaatggtccgcacccatacccgcgtgtaacgtggtggaatgcgacgcagtcaccaatcccgcgaatggcttcgtagagtgtttccaaaaccctggtagctttccatggaacacaacttgcacttttgattgtgaagaggggttcgaactcatgggcgctcagagcctgcaatgtacaagttctgggaattgggacaatgagaagccaacttgcaaagcagtaacttgtagagcagtgaggcaaccgcaaaacggcagcgtaagatgtagtcactcccccgcgggggagtttacatttaagtcatcttgtaactttacttgtgaggaaggtttcatgcttcaaggtccggctcaagttgaatgcaccactcagggccagtggactcaacagatcccggtgtgcgaagtggttaagtgcagctcattagccgttcccggtaaaatcaacatgtcttgctctggcgagcccgtttttggtacggtttgtaagtttgcctgccccgaaggttggaccctgaatgggtccgccgccaggacctgtggggcaactggccactggagcgggttgctccctacatgtgaggcacccactgagagtaatatacccctggtggccgggcttagcgctgccggcctgtcccttctaacactggcgccatttttgctctggttacggaaatgcctgcgtaaagcaaaaaaatttgtgccggcgtccagctgtcaaagcctggaaagtgacggttcttaccagaagccatcgtacattttgtag

SEQ ID NO: 8999 - DNA, 1458 bp, Artificial Sequence
  derived and/or modified sequence
atgatcgcctctcagttcttatcagctctgacactggtgctgttgataaaagaatcaggagcctggtcctataatacttcgaccgaggcgatgacctacgacgaagccagtgcatattgccagcagcggtacacacacctcgtcgccatccagaataaagaagagattgagtacttgaattcaattctctcttatagcccaagctactactggattggaatccgcaaggtgaacaacgtttgggtctgggtcgggacacagaagcccctgacagaggaggcgaaaaattgggctcccggcgaacccaacaaccgccagaaagatgaggattgcgtggagatctatataaaacgcgaaaaggacgtaggtatgtggaacgacgagcggtgtagtaaaaaaaagctcgccctttgctacacggccgcgtgcacaaatacatcctgcagcggacacggagaatgtgtggaaacgataaataactacacttgcaagtgcgatcctggcttcagcggcttgaaatgcgaacagatggtggaatgtgatgcggtcacaaacccagccaacgggttcgtggagtgtttccagaaccccgggtccttcccatggaataccacttgcacatttgattgcgaagaggggttcgagctcatgggtgctcagtcactacaatgtacaagctctggcaactgggacaacgaaaagcctacctgtaaagctgtgacatgtcgggcagttcgacagccccagaacgggtccgtgcgatgcagtcactctccagctggggaatttacattcaagagctcttgcaactttacctgtgaggaggggtttatgttgcaagggccggcacaggtcgaatgtaccacgcagggccagtggacccagcagatacccgtgtgcgaggccgttcgctgcgatgccgtccatcagcctcctaagggtctcgtgagatgcgcccacagccctatcggtgaatttacatacaaaagctcgtgtgctttttcctgcgaggaaggtttcgagctgcacggcagcactcaattagagtgtacttctcaggggcagtggactgaagaggtgccaagctgccaggtcgtaaaatgtagttccctcgccgtgcccggaaaaatcaacatgtcttgtagcggcgagcccgtttttgggaccgtctgcaaatttgcctgcccagagggatggaccttaaatggaagtgccgcaaggacttgtggtgccacagggcattggagtggactacttccaacatgtgaggcccccacagaatccaacatacccctcgtggcgggcttgtcggcggcaggcttgtcgctgctaacattggcaccattcctgctgtggctgcggaagtgcctccgtaaggccaaaaaatttgttcctgcctcaagctgtcagtcactggaatctgacggcagctaccagaagccttcatatattctttag

SEQ ID NO: 9000 - DNA, 1644 bp, Artificial Sequence
  derived and/or modified sequence
atgatagcctctcaatttctgagcgctctaacactcgtccttttaattaaggagtccggagcttggagttataataccagcactgaagccatgacctacgatgaggcttccgcctactgccagcagcgttatacccatcttgtggctatccagaacaaagaagaaatcgaatacctcaattccattctctcttatagccccagctactattggatcgggatcagaaaagtcaataatgtctgggtgtgggttggcacacagaaaccactgacagaggaggctaagaattgggcacctggcgaacctaacaacagacagaaggacgaggattgcgtcgagatctacataaaacgtgaaaaggacgttggcatgtggaatgatgagagatgtagcaaaaaaaagctggcactgtgttacactgctgcctgcactaacaccagttgttcgggacacggggagtgcgtcgagaccatcaacaactatacatgtaagtgcgatccggggttcagcggtctgaaatgtgaacagatcgtgaactgcacagcccttgagtcccctgagcacggaagtctagtgtgcagccacccactgggcaacttctcctataattccagttgttcaatctcttgcgatagggggtacctgccatcaagtatggagacgatgcaatgtatgagttcaggtgaatggtctgctcctatccctgcttgtaatgtggttgaatgcgatgctgtgactaatcctgcaaacgggttcgtggagtgcttccagaatcccggttccttcccatggaataccacttgtactttcgattgtgaagaaggattcgagctgatgggagctcaatccctgcaatgtacgtccagtgggaattgggataacgagaagccgacatgcaaggcagtgacatgccgcgctgtacgtcagcctcagaatggaagtgtaagatgctcccacagccctgctggagagttcacattcaagagcagttgcaacttcacttgtgaggagggtttcatgctgcagggacctgcccaagtcgagtgcacaacacaaggccaatggacccagcagattccagtatgtgaggccgttagatgcgacgccgtacatcagcctccgaaaggactggttcggtgcgcgcacagcccgatcggagaattcacatacaaatcttcatgtgccttttcttgtgaggaaggctttgaactgcatggcagtactcaactggaatgcaccagtcagggacagtggacggaggaagtgccatcatgtcaggtggtaaaatgcagctcattagcagtccctggtaagattaatatgtcttgttctggagagcctgtgttcggtactgtgtgcaagttcgcctgcccagaaggttggaccctgaatggcagcgcagccaggacgtgtggagccaccgggcactggtccggactgcttcccacttgcgaagcccctactgagtctaacattcccctggttgcaggtctttcagctgcaggtctctcactgctgacactagccccatttttactttggctccggaaatgcctaagaaaagccaagaagtttgtgcccgcctcttcatgccagtcacttgagtccgacggcagttaccagaagccaagttacattttgtag

SEQ ID NO: 9001 - DNA, 1644 bp, Artificial Sequence
  derived and/or modified sequence
atgattgctagccagtttctatccgctctgaccttagtgctccttattaaagagtcgggagcctggtcatacaatacctctactgaggctatgacgtatgatgaggcctcggcctactgtcagcaacggtacactcatctggtcgccatccagaacaaagaagaaattgaatacttgaatagcatcctgtcatatagcccttcttactattggatagggatacgtaaggtgaacaatgtttgggtgtgggtggggacccaaaaaccactcactgaggaagccaagaactgggctccaggagaacccaacaatcgtcagaaagacgaggactgtgtggaaatttacatcaagagggagaaagatgtggggatgtggaacgatgagcggtgcagcaagaagaaactggctctctgttatactgctgcatgcactaacacgagctgcagcggtcatggcgaatgcgtggagaccataaataactatacctgcaaatgtgacccagggttttctgggctgaaatgcgagcagatcgtgaattgtacagctctcgagtcccccgagcacggttccttggtgtgtagccatccactggggaacttctcctacaacagctcttgcagtatcagttgcgaccggggctatctgccttcatcaatggagaccatgcaatgcatgtccagtggcgaatggtctgcaccgatacccgcctgtaatgttgtcgagtgtgacgccgtaactaaccccgcaaatggattcgtggagtgctttcagaacccggggagcttcccctggaacaccacgtgcactttcgactgcgaagaaggattcgagctcatgggcgcccagagcctgcagtgcaccagtagcggtaactgggataatgaaaaaccaacttgcaaggcagttacgtgccgcgcggttaggcagcctcagaatggctctgtgcgctgctctcatagcccagccggcgaattcactttcaagtcgtcttgcaactttacatgcgaggagggtttcatgctccaggggccggcccaggtggagtgcaccacgcagggtcaatggacccagcaaatccccgtatgcgaggccttccaatgcactgctctgagcaatccagagagaggctatatgaactgccttcccagcgcctcaggtagcttccggtacgggagctcctgtgagttcagctgtgagcagggattcgtgctgaagggtagcaagcggttacagtgtgggcctaccggagagtgggacaatgagaagccaacctgtgaggttgtgaagtgcagctccttggcagtccccggaaagattaacatgagttgcagcggcgagccagtgtttgggacggtctgcaagtttgcatgccccgagggctggaccctcaacggtagcgccgccaggacatgcggtgccaccggccactggtctgggttgcttcctacatgcgaagcacccacggaaagcaacattccattagttgccggtctttccgcggcagggttgtctctgcttaccctggccccgttccttctgtggctaagaaaatgcctgcggaaagctaaaaagtttgtgccagcctcttcttgccaaagcctggagagcgatgggtcctaccaaaagcctagttacattttgtag

SEQ ID NO: 9002 - DNA, 1833 bp, Artificial Sequence
  derived and/or modified sequence
atgattgccagccagttcctgagcgccctgaccctggtgctgctgatcaaggagagcggggcctggagctacaacaccagcacagaggccatgacctatgatgaggccagcgcctactgccagcagcgctacacccacctggtggccatccagaacaaggaggagattgagtacctgaacagcatcctgagctacagccccagctactactggattggcatcaggaaggtgaacaacgtgtgggtgtgggtgggcacccagaagcccctgacagaggaggccaagaactgggcccctggagagcccaacaaccggcagaaggatgaggactgtgtggagatctacatcaagcgggagaaggatgtgggcatgtggaatgatgagcgctgcagcaagaagaagctggccctgtgctacacagctgcctgcaccaacaccagctgcagcggccatggagaatgtgtggagaccatcaacaactacacctgcaagtgtgaccccggcttcagcggcctgaagtgtgagcagatcgtgaactgcacagccctggagagccctgagcacggcagcctggtgtgcagccaccccctgggcaacttctcctacaacagcagctgcagcatcagctgtgaccggggctacctgcccagctccatggagaccatgcagtgcatgagcagtggagagtggagcgcccccatcccagcctgcaatgtggtggagtgtgatgctgtgaccaacccagccaacggctttgtggagtgcttccagaaccctggcagcttcccctggaacaccacctgcacctttgactgtgaggagggctttgagctgatgggcgcccagagcctgcagtgcaccagcagcggcaactgggacaatgagaagcccacctgcaaggctgtgacctgcagagctgtgcggcagccccagaatggatctgtgcgctgcagccacagccctgctggggagttcaccttcaagagcagctgcaacttcacctgtgaggagggcttcatgctgcagggccctgcccaggtggagtgcaccacccagggccagtggacccagcagatccctgtgtgtgaggccttccagtgcacagccctgagcaaccctgagcggggctacatgaactgcctgcccagcgccagcggcagcttccgctatggcagcagctgtgagttcagctgtgagcagggctttgtgctgaagggcagcaagaggctgcagtgtggccccactggagagtgggacaatgagaagcccacctgtgaggccgtgcgctgtgatgctgtgcaccagccccccaagggcctggtgcgctgtgcccacagccccatcggggagttcacctacaagagcagctgtgccttcagctgtgaggagggctttgagctgcacggcagcacccagctggagtgcaccagccagggccagtggacagaggaggtgcccagctgccaggtggtgaagtgcagcagcctggccgtgcctgggaagatcaacatgagctgcagcggggagcctgtgtttggcaccgtgtgcaagtttgcctgcccagagggctggaccctgaatggatctgctgcccggacctgtggggccaccggccactggagcggcctgctgcccacctgtgaggcccccacagagagcaacatccccctggtggccggcctgtctgctgctggcctgagcctgctgaccctggcccccttcctgctgtggctgaggaagtgcctgaggaaggccaagaagtttgtgcctgccagcagctgccagagcctggagagtgatggcagctaccagaagcccagctacatcctgtag

SEQ ID NO: 9003 - DNA, 1455 bp, Artificial Sequence
  derived and/or modified sequence
atgattgccagccagttcctgagcgccctgaccctggtgctgctgatcaaggagagcggggcctggagctacaacaccagcacagaggccatgacctatgatgaggccagcgcctactgccagcagcgctacacccacctggtggccatccagaacaaggaggagattgagtacctgaacagcatcctgagctacagccccagctactactggattggcatcaggaaggtgaacaacgtgtgggtgtgggtgggcacccagaagcccctgacagaggaggccaagaactgggcccctggagagcccaacaaccggcagaaggatgaggactgtgtggagatctacatcaagcgggagaaggatgtgggcatgtggaatgatgagcgctgcagcaagaagaagctggccctgtgctacacagctgcctgcaccaacaccagctgcagcggccatggagaatgtgtggagaccatcaacaactacacctgcaagtgtgaccccggcttcagcggcctgaagtgtgagcagatcgtgaactgcacagccctggagagccctgagcacggcagcctggtgtgcagccaccccctgggcaacttctcctacaacagcagctgcagcatcagctgtgaccggggctacctgcccagctccatggagaccatgcagtgcatgagcagtggagagtggagcgcccccatcccagcctgcaatgtggtggagtgtgatgctgtgaccaacccagccaacggctttgtggagtgcttccagaaccctggcagcttcccctggaacaccacctgcacctttgactgtgaggagggctttgagctgatgggcgcccagagcctgcagtgcaccagcagcggcaactgggacaatgagaagcccacctgcaaggctgtgacctgcagagctgtgcggcagccccagaatggatctgtgcgctgcagccacagccctgctggggagttcaccttcaagagcagctgcaacttcacctgtgaggagggcttcatgctgcagggccctgcccaggtggagtgcaccacccagggccagtggacccagcagatccctgtgtgtgaggtggtgaagtgcagcagcctggccgtgcctgggaagatcaacatgagctgcagcggggagcctgtgtttggcaccgtgtgcaagtttgcctgcccagagggctggaccctgaatggatctgctgcccggacctgtggggccaccggccactggagcggcctgctgcccacctgtgaggcccccacagagagcaacatccccctggtggccggcctgtctgctgctggcctgagcctgctgaccctggcccccttcctgctgtggctgaggaagtgcctgaggaaggccaagaagtttgtgcctgccagcagctgccagagcctggagagtgatggcagctaccagaagcccagctacatcctgtag

SEQ ID NO: 9004 - DNA, 1458 bp, Artificial Sequence
  derived and/or modified sequence
atgattgccagccagttcctgagcgccctgaccctggtgctgctgatcaaggagagcggggcctggagctacaacaccagcacagaggccatgacctatgatgaggccagcgcctactgccagcagcgctacacccacctggtggccatccagaacaaggaggagattgagtacctgaacagcatcctgagctacagccccagctactactggattggcatcaggaaggtgaacaacgtgtgggtgtgggtgggcacccagaagcccctgacagaggaggccaagaactgggcccctggagagcccaacaaccggcagaaggatgaggactgtgtggagatctacatcaagcgggagaaggatgtgggcatgtggaatgatgagcgctgcagcaagaagaagctggccctgtgctacacagctgcctgcaccaacaccagctgcagcggccatggagaatgtgtggagaccatcaacaactacacctgcaagtgtgaccccggcttcagcggcctgaagtgtgagcagatggtggagtgtgatgctgtgaccaacccagccaacggctttgtggagtgcttccagaaccctggcagcttcccctggaacaccacctgcacctttgactgtgaggagggctttgagctgatgggcgcccagagcctgcagtgcaccagcagcggcaactgggacaatgagaagcccacctgcaaggctgtgacctgcagagctgtgcggcagccccagaatggatctgtgcgctgcagccacagccctgctggggagttcaccttcaagagcagctgcaacttcacctgtgaggagggcttcatgctgcagggccctgcccaggtggagtgcaccacccagggccagtggacccagcagatccctgtgtgtgaggccgtgcgctgtgatgctgtgcaccagccccccaagggcctggtgcgctgtgcccacagccccatcggggagttcacctacaagagcagctgtgccttcagctgtgaggagggctttgagctgcacggcagcacccagctggagtgcaccagccagggccagtggacagaggaggtgcccagctgccaggtggtgaagtgcagcagcctggccgtgcctgggaagatcaacatgagctgcagcggggagcctgtgtttggaacagtgtgcaagtttgcctgcccagagggctggaccctgaatggcagcgctgcccggacctgtggggccaccggccactggagcggcctgctgcccacctgtgaggcccccacagagagcaacatccccctggtggccggcctgtctgctgctggcctgagcctgctgaccctggcccccttcctgctgtggctgaggaagtgcctgaggaaggccaagaagtttgtgcctgccagcagctgccagagcctggagagtgatggcagctaccagaagcccagctacatcctgtag

SEQ ID NO: 9005 - DNA, 1644 bp, Artificial Sequence
  derived and/or modified sequence
atgattgccagccagttcctgagcgccctgaccctggtgctgctgatcaaggagagcggggcctggagctacaacaccagcacagaggccatgacctatgatgaggccagcgcctactgccagcagcgctacacccacctggtggccatccagaacaaggaggagattgagtacctgaacagcatcctgagctacagccccagctactactggattggcatcaggaaggtgaacaacgtgtgggtgtgggtgggcacccagaagcccctgacagaggaggccaagaactgggcccctggagagcccaacaaccggcagaaggatgaggactgtgtggagatctacatcaagcgggagaaggatgtgggcatgtggaatgatgagcgctgcagcaagaagaagctggccctgtgctacacagctgcctgcaccaacaccagctgcagcggccatggagaatgtgtggagaccatcaacaactacacctgcaagtgtgaccccggcttcagcggcctgaagtgtgagcagatcgtgaactgcacagccctggagagccctgagcacggcagcctggtgtgcagccaccccctgggcaacttctcctacaacagcagctgcagcatcagctgtgaccggggctacctgcccagctccatggagaccatgcagtgcatgagcagtggagagtggagcgcccccatcccagcctgcaatgtggtggagtgtgatgctgtgaccaacccagccaacggctttgtggagtgcttccagaaccctggcagcttcccctggaacaccacctgcacctttgactgtgaggagggctttgagctgatgggcgcccagagcctgcagtgcaccagcagcggcaactgggacaatgagaagcccacctgcaaggctgtgacctgcagagctgtgcggcagccccagaatggatctgtgcgctgcagccacagccctgctggggagttcaccttcaagagcagctgcaacttcacctgtgaggagggcttcatgctgcagggccctgcccaggtggagtgcaccacccagggccagtggacccagcagatccctgtgtgtgaggccgtgcgctgtgatgctgtgcaccagccccccaagggcctggtgcgctgtgcccacagccccatcggggagttcacctacaagagcagctgtgccttcagctgtgaggagggctttgagctgcacggcagcacccagctggagtgcaccagccagggccagtggacagaggaggtgcccagctgccaggtggtgaagtgcagcagcctggccgtgcctgggaagatcaacatgagctgcagcggggagcctgtgtttggaacagtgtgcaagtttgcctgcccagagggctggaccctgaatggcagcgctgcccggacctgtggggccaccggccactggagcggcctgctgcccacctgtgaggcccccacagagagcaacatccccctggtggccggcctgtctgctgctggcctgagcctgctgaccctggcccccttcctgctgtggctgaggaagtgcctgaggaaggccaagaagtttgtgcctgccagcagctgccagagcctggagagtgatggcagctaccagaagcccagctacatcctgtag

SEQ ID NO: 9006 - DNA, 1644 bp, Artificial Sequence
  derived and/or modified sequence
atgattgccagccagttcctgagcgccctgaccctggtgctgctgatcaaggagagcggggcctggagctacaacaccagcacagaggccatgacctatgatgaggccagcgcctactgccagcagcgctacacccacctggtggccatccagaacaaggaggagattgagtacctgaacagcatcctgagctacagccccagctactactggattggcatcaggaaggtgaacaacgtgtgggtgtgggtgggcacccagaagcccctgacagaggaggccaagaactgggcccctggagagcccaacaaccggcagaaggatgaggactgtgtggagatctacatcaagcgggagaaggatgtgggcatgtggaatgatgagcgctgcagcaagaagaagctggccctgtgctacacagctgcctgcaccaacaccagctgcagcggccatggagaatgtgtggagaccatcaacaactacacctgcaagtgtgaccccggcttcagcggcctgaagtgtgagcagatcgtgaactgcacagccctggagagccctgagcacggcagcctggtgtgcagccaccccctgggcaacttctcctacaacagcagctgcagcatcagctgtgaccggggctacctgcccagctccatggagaccatgcagtgcatgagcagtggagagtggagcgcccccatcccagcctgcaatgtggtggagtgtgatgctgtgaccaacccagccaacggctttgtggagtgcttccagaaccctggcagcttcccctggaacaccacctgcacctttgactgtgaggagggctttgagctgatgggcgcccagagcctgcagtgcaccagcagcggcaactgggacaatgagaagcccacctgcaaggctgtgacctgcagagctgtgcggcagccccagaatggatctgtgcgctgcagccacagccctgctggggagttcaccttcaagagcagctgcaacttcacctgtgaggagggcttcatgctgcagggccctgcccaggtggagtgcaccacccagggccagtggacccagcagatccctgtgtgtgaggccttccagtgcacagccctgagcaaccctgagcggggctacatgaactgcctgcccagcgccagcggcagcttccgctatggcagcagctgtgagttcagctgtgagcagggctttgtgctgaagggcagcaagaggctgcagtgtggccccactggagagtgggacaatgagaagcccacctgtgaggtggtgaagtgcagcagcctggccgtgcctgggaagatcaacatgagctgcagcggggagcctgtgtttggaacagtgtgcaagtttgcctgcccagagggctggaccctgaatggcagcgctgcccggacctgtggggccaccggccactggagcggcctgctgcccacctgtgaggcccccacagagagcaacatccccctggtggccggcctgtctgctgctggcctgagcctgctgaccctggcccccttcctgctgtggctgaggaagtgcctgaggaaggccaagaagtttgtgcctgccagcagctgccagagcctggagagtgatggcagctaccagaagcccagctacatcctgtag

SEQ ID NO: 9007 - DNA, 1833 bp, Artificial Sequence
  derived and/or modified sequence
atgatcgccagccagttcctgagcgccctgaccctggtgctgctgatcaaggaatcgggtgcatggagttacaatacctcgactgaagccatgacgtatgatgaggcatcagcatattgccaacagcgatacacacacctcgttgcaatccagaacaaggaagagattgagtatctgaattctattctgagttactcccccagctattactggatcggcattcggaaagtcaacaacgtgtgggtgtgggtaggcacccagaaacccctgactgaggaagcaaaaaattgggccccaggagaaccaaacaaccggcaaaaagacgaagattgcgttgaaatctacatcaaacgggagaaggacgtgggcatgtggaacgacgaaaggtgctccaagaaaaagctggctctgtgctacactgccgcgtgtaccaatactagttgttctggccatggggagtgcgtggagactataaacaattacacttgtaagtgtgatcccggcttttccgggcttaaatgtgagcagattgtgaattgcaccgccctggagtcgcccgagcatggctcccttgtttgctctcacccattaggcaatttctcttacaactctagttgcagcattagctgcgaccgtggctacttgccaagctccatggaaactatgcagtgtatgagctctggagagtggtcggcccctattccagcgtgtaacgtggtggagtgtgacgccgtgaccaaccctgcaaatgggtttgtcgagtgctttcagaatccaggtagcttcccttggaacactacctgcacatttgattgtgaggaaggtttcgaactcatgggggcccaaagtctccagtgcacaagctcagggaactgggacaatgagaaaccaacctgcaaggctgtcacttgcagggcagtgagacagccacaaaacggcagcgtgaggtgtagccatagtcctgcgggcgaatttactttcaaaagttcatgcaactttacctgtgaggaggggtttatgttacaggggcccgcccaggtcgagtgtaccactcaaggacagtggacccagcaaatccccgtttgtgaagcttttcaatgcactgcgttatcgaaccccgagcgggggtacatgaattgtctcccttctgctagcggcagcttcagatacgggtccagctgcgagttctcctgcgagcaggggttcgtcctcaaggggtccaagcgactccaatgtggacctacaggcgaatgggataacgaaaaaccaacttgtgaggcggtgaggtgcgacgccgtacaccagccccccaaggggctagtgaggtgcgcccattctcctattggggagtttacatacaagtccagttgtgctttctcttgtgaggaggggtttgaactgcacgggagtactcagctggagtgcaccagccagggccagtggactgaggaagtgccatcatgtcaagtcgtgaagtgctcctcattggcagttccaggaaagatcaacatgagctgcagtggagagccagtgtttggaacagtgtgtaaatttgcttgtcccgaaggttggacattgaatgggtccgccgctcgaacatgtggagctacagggcactggtcaggccttctgcccacttgcgaggcgcccacagagtctaatattccacttgtagccggcctgtcagcggccggactctctctgctgactctcgcaccttttcttctgtggctacggaaatgcctcagaaaagcgaagaaattcgtgccagccagctcctgccaatctttggagagcgacgggagctaccagaagccctcttacattctttag

SEQ ID NO: 9008 - DNA, 1455 bp, Artificial Sequence
  derived and/or modified sequence
atgatcgccagccagttcctgagcgccctgaccctggtgctgctgataaaagagtccggggcctggtcatataatacatcaaccgaggctatgacatatgacgaggcctcagcctattgccagcagaggtacactcacttagtcgccatccagaacaaggaggaaattgaatatctcaattctatcttgagctacagcccgtcttactattggattggcatcaggaaagtaaataatgtgtgggtgtgggtcggtacccagaagcccctgaccgaagaagctaaaaactgggccccaggggagcctaacaaccgccagaaagatgaggattgtgttgagatctacatcaaaagggaaaaggatgttggtatgtggaatgacgaaaggtgctcaaagaaaaagctggctctttgctacaccgctgcttgcactaatacaagctgttctggccacggagaatgcgtggagaccatcaataattacacttgtaagtgcgaccccgggtttagtggtctgaaatgcgaacaaatcgtcaactgtaccgccctcgaatccccagaacatggctcactcgtgtgcagccatcctcttggaaacttcagctacaattcttcctgctctatatcttgtgacaggggatacctgcccagcagtatggagactatgcagtgcatgtcatccggggagtggtcggcgcccatccccgcttgcaacgtggtggagtgcgatgctgttactaatccggccaatggctttgtggaatgcttccagaaccccggttcattcccatggaatactacatgtacctttgactgcgaggagggtttcgaactcatgggtgctcagagcttgcagtgcacatcgtccgggaactgggacaacgaaaaaccaacatgcaaggctgtaacctgccgggccgttaggcagccccagaatggatcagtgcggtgctcccacagccctgcaggcgaatttacgtttaaatccagctgcaattttacctgcgaagaggggttcatgttgcaagggcccgcacaggttgagtgtacaacgcaggggcagtggacccagcagataccagtttgcgaagtagtcaagtgttccagcttagcagttccgggcaaaattaacatgtcttgctcaggggaacccgtgttcggcacagtttgtaagtttgcttgcccagagggctggaccctcaatgggagtgcggcccgcacctgtggcgctacgggccactggtcgggcctgctgcccacctgtgaagcccctaccgaaagtaacatccccctggtggccgggctgtctgcagccggactgagtttgcttacgctggcaccctttctgctctggctccgcaagtgcctgaggaaagccaagaaatttgtacctgcctcatcctgccagagcttagagagtgatgggtcctaccagaaaccttcctatattctgtag

SEQ ID NO: 9009 - DNA, 1458 bp, Artificial Sequence
  derived and/or modified sequence
atgatcgccagccagttcctgagcgccctgaccctggtgctgctgataaaggaaagtggagcgtggagttacaacacttctactgaggccatgacctacgacgaagcttctgcgtattgccagcaacgctacacacacctcgtcgcgatccagaacaaggaggaaattgagtatctgaatagcattctctcgtacagtccatcttattactggattgggatcaggaaggtgaataacgtctgggtttgggtaggaacccagaagcccctgacagaggaggctaagaactgggcccccggtgaacctaataaccgccagaaggacgaagactgtgtggagatatatatcaaaagagaaaaagacgtggggatgtggaacgatgagcgctgttcgaaaaagaagctggctttatgttacactgctgcttgcaccaacacctcgtgttccggccacggggaatgtgtggagaccattaataactacacgtgtaaatgcgaccctggtttctccggcctcaaatgtgagcaaatggtggagtgcgacgccgtgactaacccagccaacggcttcgtggagtgttttcaaaaccccgggtctttcccttggaatacaacttgcacttttgattgcgaggaagggtttgagctgatgggcgcacaaagcctgcagtgcacctcatctggtaactgggacaacgaaaaacccacctgcaaggcagttacctgtcgggccgtgcgacaaccccaaaatggcagtgtacggtgttcacattctcccgccggcgagttcactttcaagtcctcgtgtaactttacttgcgaggagggctttatgctgcaaggacccgcccaagtggagtgtaccacgcagggacagtggacccaacagatacctgtatgcgaggccgtacgttgcgatgctgtacaccagccacctaaaggtctagtgcggtgcgcccattccccaatcggcgagttcacttacaaatcatcttgtgcctttagctgcgaggaagggttcgagcttcacggctccactcagttggagtgtacgtcacagggacagtggaccgaggaggtcccatcctgccaagttgtgaaatgttcttccctggccgtgcctggaaagatcaacatgtcctgctctggggagccagtgtttggcactgtctgcaaattcgcttgccccgaggggtggacattaaacggcagcgcggccagaacatgcggggccacgggccactggtctggattgttgcctacatgtgaggcccccaccgagtcaaacatccccctagtggctggactctccgcagccgggctgtctctgcttacactggccccttttctactctggcttcgaaagtgtctgcggaaggctaagaagtttgtgccagcctccagttgccaaagtctggagtccgatgggtcctatcagaagccttcttatatcctatag

SEQ ID NO: 9010 - DNA, 1644 bp, Artificial Sequence
  derived and/or modified sequence
atgatcgccagccagttcctgagcgccctgaccctggtgctgctgatcaaggaatccggtgcgtggtcctacaacaccagcactgaggccatgacgtacgacgaagccagcgcgtattgccagcagcgatacacccacctggtagccattcaaaacaaggaggaaatcgaatatttaaacagtatcctatcttattcaccaagttactattggattggtattcgcaaagttaataacgtgtgggtatgggtagggacacaaaagccactgaccgaagaggctaagaactgggcacctggggagccgaataaccggcagaaagacgaggattgtgtggagatctatattaagagagagaaagacgttggcatgtggaatgacgagaggtgttcgaaaaagaaactggcattgtgttacactgccgcatgcactaacacaagctgcagtggtcacggcgaatgcgtagaaacgattaataactacacctgtaaatgcgatcccggcttctcaggattgaaatgcgaacagatcgtaaattgcacagccttggaaagtcctgaacatggctctctagtttgctcccatccgctgggcaacttctcatacaactcaagctgttcaatcagttgtgacagaggctacttgcctagtagtatggaaactatgcagtgcatgagctcaggggagtggtctgcacccatcccggcgtgcaacgtggtcgagtgcgacgcggtgaccaaccccgctaacggattcgtcgagtgtttccagaatcccggtagctttccttggaacacgacttgcacctttgattgcgaggaaggctttgaattaatgggtgctcaatccttgcaatgtacaagctctggcaactgggataatgagaagcctacctgtaaagcggtaacatgccgggccgttaggcagccacagaatggctccgtgcggtgctctcacagcccagccggtgagtttaccttcaagtcgagttgcaacttcacttgtgaggagggcttcatgctccaaggacctgcacaggtagaatgcaccacccaaggacagtggacgcagcagattccagtgtgtgaggccgtcagatgcgacgcagtgcatcagccaccgaaggggctcgttcggtgtgctcatagcccaatcggtgagtttacttataagtcttcctgtgcgttctcctgtgaggaaggcttcgaactgcatgggtcgacccagctcgaatgtacgtcccagggccagtggactgaagaagtgccatcatgccaagttgtcaaatgttcctcactggcagttccaggaaaaatcaacatgtcatgctcaggagagcccgtgtttggtactgtttgcaagttcgcttgtccagagggctggacacttaatggtagcgctgccaggacctgtggagctacagggcactggtccgggttactgcctacttgcgaagcacccaccgagagcaacatacccctggtggcaggtctcagcgctgctgggctgagccttttaaccctcgcgcccttcctcctgtggctacggaaatgcctgcggaaggcaaagaagtttgttcccgcaagctcctgccaaagccttgagagcgatgggagttatcaaaagccttcttacattctgtag

SEQ ID NO: 9011 - DNA, 1644 bp, Artificial Sequence
  derived and/or modified sequence
atgatcgccagccagttcctgagcgccctgaccctggtgctgctgatcaaggaatccggagcctggtcctataatacaagtacagaagccatgacttatgacgaggcctccgcctattgccaacagcggtacacacatctggtggccatccaaaacaaggaggagatcgaatatttgaacagcatcctgagctactccccatcttattattggataggtatcagaaaggtgaataacgtgtgggtgtgggtcggcacccagaaaccattgacagaagaggccaaaaattgggctcctggagagccgaataatcgacagaaggatgaggattgcgtggaaatttacatcaaaagagagaaggacgtaggcatgtggaacgacgagcggtgttcgaagaaaaaactggctctctgctacaccgccgcctgcaccaacacgagttgctcaggacatggggaatgcgtggagacaattaacaactatacctgcaagtgtgacccaggcttctctggtctcaaatgtgagcaaatagtcaactgtacagcgcttgagagtcccgagcatggctcactggtctgttcccacccactgggtaacttcagttacaactcaagttgctccatctcctgtgaccgcggctacctgccgtcaagcatggagaccatgcaatgcatgagcagcggggaatggtctgctccaatccctgcctgtaacgtggtagagtgtgatgccgtgacgaatccggctaatggatttgttgagtgcttccagaaccctggtagcttcccttggaacactacctgtaccttcgactgtgaagaggggtttgaactcatgggcgcccaaagcttgcagtgcaccagtagcggcaactgggacaacgaaaagccgacctgtaaagccgtcacatgtcgagccgtaaggcagcctcaaaacggtagtgtcagatgtagccactcacccgccggagaattcacctttaagtccagctgcaattttacctgcgaagagggatttatgctgcaggggcctgcacaggtggaatgtactacccagggtcagtggacgcaacagatccccgtgtgcgaggcttttcaatgtacagcactctctaaccctgagcgggggtatatgaattgcctgccatctgcgtccgggagttttcggtacggcagcagttgcgaattttcttgcgaacaagggttcgtgttgaaggggtctaagagattacagtgtggacccacaggcgaatgggataatgagaaaccaacatgcgaagtcgttaagtgttcctctttggctgtaccaggcaagatcaacatgtcatgctcaggtgagccagtttttggaaccgtgtgtaaattcgcgtgtcctgaggggtggacccttaacggcagtgcagcccggacctgcggagcgaccggccactggagtgggctccttcctacctgtgaggcccccaccgaaagcaatatacctcttgttgcagggctcagcgcagccggcctgagcctacttaccctggcccctttcctgctgtggctacgcaagtgcctgagaaaggccaagaaattcgttcccgcgtcatcttgtcaatcactggagtcggatggttcatatcagaagccatcgtacatactctag

SEQ ID NO: 9012 - DNA, 1455 bp, Artificial Sequence
  derived and/or modified sequence
atgatcgccagccagttcctgagcgccctgaccctggtgctgctgattaaggagtccggcgcctggtcctacaacactagcacagaagctatgacctatgacgaagcctccgcttactgtcagcagagatatacacacctggttgccattcaaaacaaagaagagatagagtacctgaacagcattctcagctactctccaagctattactggattggtatccggaaggtgaacaacgtctgggtctgggtcgggacacagaagcccctgacggaggaggccaagaactgggcccccggagagcctaataacaggcagaaggatgaagattgcgtcgagatctacatcaaacgcgagaaagacgtgggaatgtggaacgatgagcggtgctcaaaaaagaagcttgcattgtgctacacagcggcatgtacaaatacatcatgcagtggacacggggagtgcgtcgagaccatcaataactacacatgtaagtgtgaccccggcttttccggactcaaatgcgaacagatagttaattgtactgcccttgaatcacctgagcatgggagcttagtgtgcagccatccactcggaaatttcagttataattcatcttgcagcatctcatgtgatcgtggttaccttccatcgagcatggagactatgcagtgcatgagcagcggcgaatggagcgccccgatccctgcatgtaatgtggttgagtgcgacgcagtgacaaaccccgcgaacgggttcgtcgagtgttttcagaacccaggttcatttccatggaacacaacctgtacttttgattgcgaggagggtttcgaacttatgggcgcgcagtcgctgcagtgtacttcctccggtaactgggacaatgaaaagccgacatgtaaagctgtgacctgccgcgctgtcagacagccccagaatggcagcgtgagatgtagccattcacccgccggggaatttaccttcaagagttcatgtaacttcacttgtgaagagggctttatgctgcaggggcccgcacaggtggaatgtactacccaagggcagtggactcagcagataccagtctgcgaagtagttaaatgctcgtccctggctgtcccaggcaagatcaacatgagttgttcgggagagccagtgttcgggaccgtatgtaaattcgcttgtcctgaaggctggactctgaatggctcagctgcccgcacgtgcggggctactggccattggagtggactgcttcccacttgcgaggctcccaccgagtctaatattcccctggtcgctggactaagtgccgctggtctcagtttgctgacgctggccccctttctgctgtggcttcgtaagtgtctccggaaggctaaaaaattcgttcccgcttcaagctgtcagtcccttgagtctgacggaagctaccaaaagccctcttacatcctgtag

SEQ ID NO: 9013 - DNA, 1458 bp, Artificial Sequence
  derived and/or modified sequence
atgatcgccagccagttcctgagcgccctgaccctggtgctgctgatcaaggaaagtggagcatggtcatataacacttccaccgaagccatgacttacgatgaggccagcgcatactgccagcagcgctatacccatctggttgctattcaaaataaggaggagatcgagtacctcaacagtatcctcagctacagcccctcttattactggatcgggattcgtaaggtgaataacgtttgggtgtgggtgggcacacagaagcccctgacagaagaggccaaaaattgggcccctggagaaccaaacaacagacagaaggacgaagattgtgtggagatctacatcaagagggagaaggatgtagggatgtggaacgacgagaggtgtagcaagaaaaagctggccttgtgctacacggccgcttgtactaacacctcttgcagcggtcatggggaatgtgtcgagaccattaacaattacacctgcaaatgtgacccagggttctccggtcttaaatgcgaacagatggtcgaatgcgacgccgtgacaaaccccgccaatggtttcgtggagtgtttccagaaccccggttcattcccatggaacactacgtgtacttttgattgcgaggaggggttcgaacttatgggggctcagtccctccagtgtacttcgagtggaaattgggacaacgaaaaacctacatgcaaagccgtgacctgtcgagcggtacgccagcctcaaaacggatccgtcagatgctcacattctcccgccggagaatttacatttaaatcctcctgcaatttcacctgtgaagagggcttcatgcttcaggggcctgcccaggtggaatgtactacccaaggacaatggactcaacagatcccagtttgcgaagccgttcgctgcgacgcagtgcaccaacctcccaagggtttagtgcgctgtgcgcacagcccaataggagaatttacctacaaaagcagctgcgcattttcttgtgaagaggggttcgaactgcacggatctacccagctggaatgcacttcccagggccagtggactgaagaagtgccatcctgccaggtagtcaagtgctcctccctggccgttcccggcaaaattaatatgtcctgttctggtgagcctgtgttcgggaccgtgtgtaagttcgcctgtcccgaaggctggactctgaatgggtcagctgccaggacttgcggggcgaccggtcattggtccgggctcctgcccacctgtgaggcgcccaccgaatccaatatccccttggtggccgggttaagtgccgcaggcctctccctcctgacgctcgctccgtttctcctatggctgagaaaatgtctgagaaaggcaaagaaatttgtgcctgcctcttcttgccagagtttagagtctgatggctcctaccagaagcccagttatatcttgtag

SEQ ID NO: 9014 - DNA, 1644 bp, Artificial Sequence
  derived and/or modified sequence
atgatcgccagccagttcctgagcgccctgaccctggtgctgctgattaaggagagtggcgcatggtcctacaacacttctactgaagccatgacatacgatgaggcatcggcctactgccaacagaggtacacacacctggttgctattcagaataaggaggagattgagtacctgaactctattttgtcttactccccctcctactattggataggcataagaaaggtgaataatgtctgggtgtgggtgggaacacagaagcccctgacggaagaagcgaaaaactgggcccccggggagccaaataacagacagaaagacgaggattgcgttgagatttatatcaagagggagaaagatgtggggatgtggaatgatgagcggtgcagcaagaagaagcttgctctctgctacactgcagcatgtactaacacaagctgttctggtcacggagaatgcgttgagacaattaacaattatacttgcaaatgcgatccaggattcagtgggctcaagtgcgaacaaatagtgaactgtactgccctcgaatcccccgaacacggaagtttagtttgcagtcaccccttgggtaacttcagctacaattcttcttgctctataagctgcgaccgaggttatctcccgagctctatggagaccatgcagtgtatgagctccggggagtggagcgccccaataccagcatgcaacgtcgtcgaatgcgacgcggtgacaaacccggcgaacggatttgtggagtgcttccaaaatcctggcagcttcccctggaatactacctgcacatttgattgcgaggaagggtttgaacttatgggcgcacaatcactgcagtgcacgtcttctgggaactgggacaatgagaagccaacatgtaaagccgttacctgtagggctgttcggcaacctcagaatggatcagttagatgctctcatagtcccgccggcgagttcacgtttaagtcaagctgtaacttcacatgcgaagaggggtttatgttgcagggccccgcccaggttgaatgcacaacccaaggtcagtggacgcagcaaatccctgtgtgtgaggccgttcgttgcgatgccgttcatcaacctccaaaagggctcgtaaggtgcgctcatagcccaatcggggagttcacatacaagagctcctgtgccttctcatgtgaggagggatttgagctgcatggctcaacgcagcttgaatgtacgtcccaaggccagtggacagaggaggttccatcttgccaggtggtgaaatgttcatccttggctgtccctggaaagatcaacatgagttgcagcggcgagccagtgttcggcaccgtctgcaagttcgcttgcccagagggatggacattaaacggaagcgctgctaggacatgcggagcaactggtcattggagtgggcttttacctacttgcgaggctcccacggaaagtaacatccccctggtggcaggtttgtcagccgcggggctgtccctgttaaccctagcgccctttctcttgtggctgagaaagtgtctgaggaaagctaaaaagttcgtacccgctagctcttgtcaatcactcgagtctgatgggagctaccagaaacccagctacatcctgtag

SEQ ID NO: 9015 - DNA, 1644 bp, Artificial Sequence
  derived and/or modified sequence
atgatcgccagccagttcctgagcgccctgaccctggtgctgctgattaaagagtctggcgcttggagctacaatacgtctacagaagcaatgacatacgacgaggcgtctgcctactgtcagcagcggtacacacaccttgtggccatccaaaataaggaagagattgagtatctcaactctatcctaagttactcccctagctactattggatcgggatccgcaaggtgaataatgtctgggtgtgggtggggacccagaagcccctcactgaagaggctaagaattgggcgccgggggagcccaataatcggcagaaagatgaggactgcgtggaaatctacatcaaacgagagaaggatgtgggcatgtggaatgacgaaaggtgttctaagaaaaaactggctttgtgctataccgcggcctgcaccaacacttcttgctcaggacatggcgagtgtgtggagactatcaataactacacatgcaaatgcgatccaggattctctggcctgaaatgtgagcaaatcgtcaactgcaccgccctggagagcccagagcacggctctctcgtgtgctctcatccactcgggaatttcagttacaactcaagttgttcaatttcttgcgatcgagggtatctcccatcttctatggagacaatgcagtgcatgtctagtggagagtggtcagctcctattccagcttgtaacgtggtggaatgcgatgccgtcacaaatccagcgaatggttttgttgagtgcttccagaatcccggttccttcccatggaacaccacttgtacattcgactgcgaagaaggttttgaactcatgggagcacagtcactgcagtgcacctccagtggaaactgggacaacgagaagccaacttgcaaagctgttacatgccgcgcagtgcgacagccccagaacggcagcgtccgttgttcacactccccagctggggaatttacctttaaatcgtcctgcaactttacttgtgaggaaggcttcatgcttcagggtcccgctcaagtggagtgcactacccaagggcagtggacccaacagatcccagtttgcgaggcatttcagtgtacagcactgagcaaccccgagaggggctacatgaactgtttaccatccgcttccggatctttcaggtacgggtcctcctgtgaattttcctgtgagcaagggtttgtcctgaaaggctccaagcgactgcaatgcgggccaaccggcgagtgggacaacgaaaagcctacttgtgaagttgttaagtgctcatccctcgccgttcccggaaaaatcaacatgtcatgttcgggggagcccgtgtttggcactgtttgtaagttcgcgtgtccagaaggatggaccttaaacggctcggccgccaggacgtgtggcgcgacaggacattggagtggacttctgcctacatgtgaagctccgaccgaaagcaatatccctctggtggcggggcttagcgcagcaggcctgtcgctcctaacgctggcgccatttttgttgtggttacgaaagtgccttagaaaggctaaaaaattcgtcccagcatcaagctgtcagtccctggaatccgatggctcctatcaaaaaccttcatacatcctgtag

SEQ ID NO: 9016 - DNA, 1833 bp, Artificial Sequence
  derived and/or modified sequence
atgattgcttcacagtttctttctgcactgacactggtgctcttgattaaggagtcaggtgcctggtcctacaatacatccacggaggcgatgacatatgatgaagcaagtgcgtattgtcaacagcgttacacgcatctggtggccattcagaataaagaagagatagagtacctgaattccatactgtcctactctccatcttactattggataggaatcagaaaggtgaataacgtctgggtatgggtgggcactcagaagcctctgacagaggaggccaagaattgggctccaggtgaacctaacaaccgacagaaggacgaggattgtgtcgaaatatacatcaaaagggaaaaggatgtgggaatgtggaatgacgagcgatgctcaaagaagaagttggcactgtgttataccgccgcatgcaccaacacttcctgctcaggccacggagagtgcgtggaaacaattaacaattatacttgcaagtgtgacccgggattttctgggctaaagtgtgaacagattgtcaattgcaccgccctcgagtccccagagcatgggtccctggtgtgctcgcatccacttggtaactttagctacaactctagttgctctattagttgcgacagaggatatctccctagctctatggaaaccatgcaatgcatgtcatcaggggagtggtctgccccaatccccgcttgcaatgtagtcgaatgcgacgctgtgactaaccctgccaatggctttgtcgagtgctttcagaatcctggctcatttccctggaatacgacctgcaccttcgactgcgaggaagggtttgaattgatgggtgcccagtctctccagtgtacctccagtgggaactgggacaatgaaaaacctacctgcaaggcagtgacatgccgggcagtgcgacaacctcagaatggcagcgtgaggtgctcacactctccggcaggagagtttacgtttaagtctagctgcaatttcacttgtgaagaggggttcatgctgcagggccctgcgcaggtagaatgtaccacccagggccagtggacacagcagattcccgtgtgcgaagcctttcagtgtacagccttgtctaacccggagagggggtacatgaactgtcttcccagtgcctccgggtcattcagatatggctcttcctgtgagttcagctgcgagcagggctttgtgttgaagggaagtaaaagactacagtgcgggcctaccggagaatgggataatgaaaagcccacctgcgaagccgtgaggtgcgacgccgtgcaccagcccccaaagggcctggtgagatgtgctcatagtcctatcggcgagtttacttacaagtcttcctgcgcctttagttgcgaggagggctttgagctccacgggtctacacaactagaatgcacctcccagggtcagtggaccgaggaagtcccttcttgtcaggttgttaaatgctcgtccctggccgttcccggtaagattaatatgagctgctctggggaaccggtatttggaacagtctgtaagtttgcctgccccgaaggctggactctgaacggtagtgccgctcgaacctgcggagcaacaggacattggtccggattactgcctacctgcgaagccccaacagagtcaaacattcccctcgtggctggtttgtccgctgcgggtctgtcactcctgacactcgcaccctttctcctctggctacgcaaatgcctaagaaaagccaaaaagttcgtgcccgcttcctcatgccagagtctggaaagtgacggatcctaccagaaaccatcgtatattctttag

SEQ ID NO: 9017 - DNA, 1455 bp, Artificial Sequence
  derived and/or modified sequence
atgatcgcaagtcagttcctgagcgcacttacactagtcctcctgattaaggaatcgggcgcttggtcttataacaccagtactgaagccatgacttacgacgaagcgagcgcctactgtcaacagcgctacacacacctggtcgctatccagaacaaagaggaaatagagtatttgaatagtattctcagttattcgcccagctactactggatcggaattagaaaggtaaataatgtgtgggtctgggtgggtacacaaaagccgttgaccgaggaggccaaaaattgggccccaggggagccaaataaccgccagaaggatgaagactgtgtagaaatatacataaagagggaaaaagatgtgggcatgtggaacgacgaaagatgttctaagaaaaagttggctctgtgttatactgcagcctgtacaaacaccagctgttccgggcatggcgagtgtgtggagacaattaacaactacacctgtaaatgcgaccctggattttctggtctgaagtgcgagcaaatcgttaattgtacagctttagagagccctgagcacggaagcttggtttgctcccacccattgggcaatttttcctacaattctagctgttcaatcagctgcgaccgtggctacctaccctcatccatggagacaatgcagtgcatgagctccggcgagtggtctgccccaattccagcctgtaatgtggtggagtgtgatgccgtcactaatccggctaatgggtttgtcgaatgtttccaaaatcccggaagtttcccctggaacactacttgtacttttgactgcgaagaaggtttcgagctgatgggcgctcaatccctgcagtgcactagctcaggcaactgggacaatgaaaaaccaacatgcaaggcagtgacctgtagagcagtgcgccaacctcagaatggctccgtgagatgttcccatagccccgcaggagagttcacatttaaaagctcctgcaacttcacttgtgaggagggcttcatgctgcaaggacctgcgcaggttgagtgtacaactcagggccagtggacccagcaaataccggtctgtgaggtcgtgaagtgctcttcactggcggtacctggaaagattaacatgagctgcagcggtgagccagtctttggcacagtatgtaagttcgcttgcccagagggatggacactgaatggcagtgctgcacgcacatgtggggctacaggtcattggtcaggccttttaccaacctgtgaggccccaactgaaagtaacatccctctcgtcgccggtcttagcgcagctgggctgtcactgctgacactggcgccattcttgctttggttgcggaagtgtttgcgcaaagccaaaaagttcgtgcctgcctcctcttgtcagtcactagagtccgatggatcgtaccagaagccgagctatattctatag

SEQ ID NO: 9018 - DNA, 1458 bp, Artificial Sequence
  derived and/or modified sequence
atgatagctagccaattcttatctgctctaacccttgttctccttataaaggagtctggcgcttggtcctacaatacgagcaccgaggctatgacgtacgatgaggccagcgcctattgccagcagcggtacacccatctggttgcgatacaaaacaaggaggagatcgagtacctcaactctatcctgtcatattctccctcttactactggatcgggatcaggaaagtcaataacgtatgggtatgggtgggaacgcagaagcccctgacggaggaagccaagaactgggcaccaggcgagccaaataatcggcagaaagacgaggattgcgtcgaaatatatattaagagggagaaagatgtgggcatgtggaacgacgagcggtgctcgaaaaagaaacttgcgctctgttatactgctgcctgcacaaatactagctgctcagggcacggggagtgcgtggaaacgattaataactatacctgcaagtgtgatcccggtttctctgggctaaagtgtgaacagatggtcgagtgcgacgcagtcaccaatcccgctaatggctttgtagagtgcttccagaaccctgggagctttccctggaacacaacctgtacgttcgattgcgaagaggggttcgaactcatgggggcacagagtctgcagtgcaccagttctggcaactgggataatgagaaacccacctgtaaggctgtgacctgccgggcagtccggcagccgcagaatggtagcgtgaggtgttctcactcccctgccggtgaattcacattcaaatcatcttgtaacttcacgtgcgaggaaggctttatgttacaagggcctgctcaggtggaatgtactactcaaggccaatggactcagcaaattcctgtatgtgaagcagtgcgctgcgatgcagtacaccagccccctaaagggctggtccgatgcgcacacagcccaatcggtgaatttacgtacaagtcctcttgcgccttcagctgcgaggaggggttcgaattgcatggctctactcaactggaatgcactagtcaggggcagtggacagaggaggttccaagctgtcaagtggtgaaatgcagcagcctcgccgtccctggtaagattaacatgtcttgctctggcgaaccagttttcggaaccgtgtgtaagttcgcttgtcccgaaggctggaccctcaatggttccgctgccagaacctgtggcgctacaggccactggtcaggcttgcttcccacatgcgaggcaccaacagaatcaaacattccccttgtggccggattatccgccgcaggactcagtctgcttacactcgccccatttttactatggctaagaaaatgcctgagaaaggccaagaagtttgtgccagcctcttcctgtcagtctctagagtcggatggctcctatcagaagccttcttatattctatag

SEQ ID NO: 9019 - DNA, 1644 bp, Artificial Sequence
  derived and/or modified sequence
atgattgcatcccagttcttatctgcactgacactggtgctgctcataaaagagagcggcgcttggagctataatacctcaacagaagccatgacgtacgatgaagcctcagcttactgccaacaacgttacacacacctggtagccatccagaacaaagaagaaatcgaatatttaaattcgatcctttcctatagcccaagttattactggatcggaatccgcaaggtcaacaacgtgtgggtgtgggtcgggactcagaagccgcttaccgaggaagcaaaaaactgggccccaggagaacctaataatagacagaaggatgaggattgtgtggagatatacatcaaacgcgagaaggatgtaggcatgtggaacgacgagcgctgtagcaaaaagaagctagccttatgctacaccgctgcttgtaccaacaccagttgttcgggacacggcgagtgcgttgagacaataaataactacacttgtaaatgcgatccagggtttagtggcttgaagtgtgaacagattgtgaactgcactgcactggaaagccctgagcacggctccctggtctgtagtcaccctctcggaaactttagctacaatagcagctgcagcatctcctgtgaccgtgggtacttgccttcttccatggaaactatgcaatgtatgagtagtggagaatggtccgcccctatccccgcatgtaatgtagttgaatgtgatgctgtaaccaaccccgctaatggttttgtcgaatgttttcagaatccaggaagcttcccctggaacactacctgtacattcgattgcgaagagggctttgagctgatgggggcacaatctctccagtgcacctccagtggtaactgggataacgaaaaacctacatgtaaagccgtgacttgcagagcagttagacagcctcaaaatggatcggtgcggtgttcccatagtcccgctggagagtttacctttaaaagctcctgtaatttcacatgcgaagaaggatttatgctgcaggggcctgctcaggtagagtgcacaacacaaggccagtggactcagcagatccctgtttgcgaggctgtgagatgcgacgccgttcaccaacctcctaaaggtctggttagatgtgctcacagccctatcggcgagtttacttataaatcatcctgtgccttttcttgtgaagagggatttgagctccacggttctacccagcttgagtgcacatcccaagggcaatggactgaggaagttccaagctgccaggtcgtcaaatgctcaagtctcgccgtgcctggaaaaattaacatgtcctgcagcggggaacctgttttcggcaccgtctgtaaatttgcgtgcccagaaggctggacactgaacgggtccgccgctaggacgtgtggtgctacgggccactggtctgggctgctgcctacgtgcgaagctccaaccgagtccaacattccgctcgtggccggtttgagcgcggctggattgtccctgttaacactggcgcctttcctgctgtggttaaggaaatgcttgaggaaggccaaaaagtttgtccccgcatcttcctgtcagtctttggagtctgacggcagctaccagaaaccttcctacattctatag

SEQ ID NO: 9020 - DNA, 1644 bp, Artificial Sequence
  derived and/or modified sequence
atgatcgccagtcagtttttatcagccttgacccttgtgctcctgattaaagaaagtggggcttggagctataatacttcaaccgaggctatgacctatgatgaagccagcgcatattgccagcaacggtatactcaccttgtcgcgatccagaataaggaagagattgaatatctgaacagcatcctgtcatatagtccaagttactactggattggtatacggaaggtcaataacgtctgggtctgggtcggaactcagaagcccctcaccgaagaagccaagaactgggctcccggagagccaaacaaccgccagaaggacgaggactgcgtggaaatatatattaaacgcgagaaggatgtggggatgtggaatgacgaacggtgcagcaaaaaaaagttggcactgtgctacaccgccgcttgtactaatacttcgtgtagcggacacggagagtgtgtagaaactataaataactatacctgcaagtgtgatccaggcttcagcggcctcaagtgtgagcagatcgtgaactgcacagcccttgaatcaccggagcacggatcactcgtgtgctcgcatcccctcggcaatttcagctacaactctagttgcagcatcagttgcgataggggatacctgccaagcagcatggagactatgcagtgcatgtcctcaggagaatggtcagcaccgatacctgcttgcaacgtggtcgagtgtgacgccgtgaccaaccccgctaacggcttcgttgaatgtttccagaacccagggagcttcccttggaatacgacatgcaccttcgattgcgaagagggctttgaattaatgggggctcaatctttgcagtgtaccagtagcggcaactgggacaacgaaaaacccacctgtaaagccgtgacatgccgcgcagtgcggcagccccagaatgggtctgtgcgctgctcacatagcccggctggtgaatttaccttcaagtcttcctgcaactttacctgcgaagagggtttcatgttgcagggcccagcacaggtagagtgtactacgcagggccagtggactcaacaaatacctgtgtgtgaagcatttcagtgcactgcattatctaatccagagcgaggatatatgaattgtctgccttccgctagtggatctttcaggtatggaagttcgtgtgagtttagctgtgaacagggctttgtattgaaaggctcaaagcgactccaatgtgggcctactggagaatgggataatgaaaaaccaacatgcgaagtggtgaagtgcagcagtcttgcagtcccaggaaagattaacatgtcatgctctggggagccggtgtttggtactgtttgtaaatttgcttgtccggaggggtggactctcaatgggtctgccgcaagaacctgcggagccacagggcactggtctgggttgctgcctacttgcgaagcacctactgaatccaatatccccctggtggccggtctctccgccgcagggttatcccttttgacactggctccctttctgttgtggctgcggaaatgcctgcggaaggcgaagaagttcgtgcccgcatctagctgtcagtccctggagtctgatggaagttatcagaagccctcctatatactgtag

SEQ ID NO: 9021 - DNA, 1455 bp, Artificial Sequence
  derived and/or modified sequence
atgattgcatctcagtttttgtccgccctcacattagtgctgttgatcaaagagagcggtgcatggagttataatacgtctacggaagctatgacttacgacgaagcttccgcctattgccaacagcggtacacgcacctagttgccattcagaacaaagaggagatcgagtacctcaatagtattctctcctactcaccgtcctactactggattggcatacggaaggttaataatgtctgggtttgggtcggaacacagaagccgcttactgaagaggctaagaattgggcccctggcgagcccaataatcgacaaaaggacgaggactgcgttgagatttacatcaagcgcgagaaggatgtcgggatgtggaacgacgaacgatgctccaaaaagaagctggcactttgttacacggcagcctgtacaaacactagctgttcaggccatggcgagtgcgttgaaacaattaataactatacttgcaagtgcgaccctgggttctcaggcctgaagtgcgaacagattgttaattgcactgcactagaatctccagagcacgggtctcttgtttgcagtcaccccctgggcaacttttcttacaattcaagttgttcaatttcatgcgacaggggctatctgccctcctccatggagaccatgcagtgcatgagcagcggcgagtggtctgccccaattccggcatgtaacgttgttgagtgcgacgccgtgaccaatcctgctaacggattcgtggagtgctttcagaacccgggatctttcccatggaatactacatgcaccttcgactgtgaggaggggttcgaactcatgggcgctcagtctctccagtgcaccagctcaggaaactgggacaatgagaagcccacctgtaaggccgtgacctgcagagccgtccgacagccacaaaatgggtccgttaggtgctctcactcccctgccggtgaattcacgtttaagtcctcttgtaacttcacctgcgaagaaggtttcatgcttcaaggcccagctcaggtcgagtgcactactcagggccagtggacccagcaaatcccggtctgtgaggtcgtgaaatgctcttcactggctgtgcccggtaagatcaatatgagctgctctggagagccggtttttggaactgtgtgtaagtttgcttgtcctgagggatggaccctgaacggcagcgccgcacggacctgtggagccactgggcactggtcaggtttgttgccaacctgcgaagcgccaactgagtctaatattccgctcgtggctggcctgagcgcagctgggctgtccctcctgacactggcaccctttctactgtggctgcgaaaatgcctgagaaaagccaagaaattcgtgccagcttcatcatgtcagagcttagagtcagatggctcgtatcagaagcccagctacattctttag

SEQ ID NO: 9022 - DNA, 1458 bp, Artificial Sequence
  derived and/or modified sequence
atgattgcctcccaattcctttcagctttgactctcgtacttcttataaaagagagtggagcatggtcctacaatacgtcaactgaagctatgacctacgacgaagcctcagcatattgtcagcaaagatacactcacttagtagccatacagaataaagaggaaatagaatacttaaattcgatactttcttacagcccaagttactactggattggcatccggaaggttaacaatgtttgggtgtgggtcggcacacagaagccactcacagaagaggcaaaaaattgggctcctggggaacccaataaccgccagaaggatgaagactgtgtggagatctatattaaacgggagaaggacgttggtatgtggaatgatgaacgttgcagcaaaaagaagctggccctttgttatactgcggcttgcaccaatacaagttgcagcgggcacggagagtgtgttgagaccatcaacaactatacttgcaagtgcgacccaggatttagtggacttaagtgtgaacagatggtggagtgtgatgccgtcacaaatcccgcaaacggatttgtggagtgtttccagaaccccggatcatttccctggaataccacttgtaccttcgattgcgaagaagggtttgaactcatgggtgcacagtccctgcagtgtacctcttccgggaattgggacaacgagaaacccacatgtaaggccgtgacctgtcgcgctgttaggcagccccaaaatgggagtgtgcgttgctcgcattcccccgcaggggagttcacttttaaaagctcatgcaattttacatgcgaagaaggcttcatgttgcagggaccagcacaggttgagtgtactacccagggtcagtggacccagcaaattccagtttgtgaggccgtgcgatgcgacgccgtgcaccagccacctaaaggattggttcgctgtgctcattctcccatcggggagttcacttacaagtcatcctgtgctttttcgtgtgaagaggggttcgaactacacggctccacccagctggagtgtacctcccagggtcagtggacagaggaggtcccctcttgccaagtagtcaagtgtagctcccttgccgtccccggaaaaatcaacatgtcatgttcaggcgaacccgtctttggtacggtgtgtaagtttgcatgtccagagggttggacattaaatggttccgcggcaaggacatgtggggctacaggccactggtcgggtcttctgccaacatgcgaggcccctacagagagtaacattccgttggtggctggcctctcggctgccggtctctccctgctgactcttgcccctttcctcttatggttacgaaagtgcctgcgcaaggccaaaaagtttgtgccagcatctagctgccagagcctagaaagcgatggttcctaccagaaacctagctatattttatag

SEQ ID NO: 9023 - DNA, 1644 bp, Artificial Sequence
  derived and/or modified sequence
atgatcgcgtcacagtttttaagtgccttgaccctggttttattaattaaggaatctggcgcttggtcctataacacatccaccgaagctatgacttacgatgaagcatcggcctattgccaacagagatatacacatctcgtggccattcagaataaagaggaaattgaatatctcaacagtattctttcctactcacccagttactattggatagggatccggaaggttaacaacgtctgggtctgggttggtacacagaagccacttacggaagaggccaaaaactgggcccctggcgaaccaaataaccgacaaaaagatgaggactgtgtggagatatatattaagagggagaaggacgttggcatgtggaacgacgaacgttgtagcaagaagaagttggctctctgctatacagctgcttgtacaaacacaagctgttcaggccatggcgagtgcgtggagaccattaataactacacttgtaaatgtgaccctggattctccggccttaagtgtgagcagatcgtgaattgcacggccttagagagtccagagcacggatcgctcgtgtgttcccatcctctcgggaatttttcatataattcttcatgttctattagctgtgatcgtgggtatctaccgtcctccatggaaacaatgcagtgtatgtcatccggagaatggagcgctcctatcccagcctgtaatgttgtggaatgtgatgctgtgacaaatccggcaaacgggttcgtggaatgcttccagaaccccggaagctttccttggaacacaacttgtactttcgattgcgaggaaggatttgaactcatgggggcacagagtctgcagtgcacatccagcggtaactgggataatgaaaaacctacctgcaaggccgtcacctgccgagccgtgcgccagccacagaatggcagcgtgcggtgtagtcacagccctgccggagaattcacatttaagtcgtcctgtaacttcacttgtgaggagggctttatgcttcaaggacctgctcaggtagagtgcaccactcagggacagtggacccagcagatccctgtctgtgaggctgttcggtgcgatgcggtacaccagccacccaagggtctcgtgcgatgtgctcacagccccatcggagagttcacctacaaatccagctgcgccttctcttgtgaggaaggatttgaactgcacggctcgacccagctggagtgcaccagtcagggacagtggacagaggaggttcccagctgccaggtggtgaagtgctccagcttggccgttccgggtaagattaatatgagttgctccggtgagcccgtttttggcaccgtttgtaaattcgcttgtcccgaaggctggacacttaacggcagcgcagcccgaacgtgcggcgctaccgggcactggtccggactgctacccacatgcgaggctcctacagaatccaacattcccctcgttgccggactttccgcagctgggctgtccctcttgacactggctccttttcttctctggctgcggaagtgtttgcggaaggctaagaagtttgtcccggcatccagttgtcaatcacttgagtcggatggatcatatcaaaagccttcctatatcctatag

SEQ ID NO: 9024 - DNA, 1644 bp, Artificial Sequence
  derived and/or modified sequence
atgatcgcttcacagtttcttagcgccttaaccttggttcttctgattaaggagagtggagcctggagttacaatactagcaccgaggccatgacctatgacgaggcctccgcgtattgccagcagcgctacacccaccttgtcgccatccagaataaagaggaaatcgagtatctcaattctatcttatcctactctccttcatattactggatcggaattaggaaggtcaacaatgtatgggtgtgggtgggcacccaaaaaccgcttactgaggaagccaagaactgggctcccggtgaacccaataacagacagaaagatgaggactgcgtcgagatctatatcaaaagggaaaaggacgttgggatgtggaacgacgagagatgctccaagaaaaagttagctctgtgctacacggccgcatgcaccaatacgagctgctctggccatggtgagtgtgtagagacgataaataactatacgtgtaaatgtgatccagggttctcgggtcttaagtgtgaacagattgttaattgcactgccctggagtcacccgaacatgggtctcttgtctgttctcaccctctcggtaacttctcgtataactctagttgctctatttcctgtgacagggggtatctgccctcctccatggagactatgcagtgcatgagttccggggagtggtcagccccaatccccgcttgtaacgtcgtagagtgcgacgccgtgactaaccccgcaaatgggtttgtggaatgttttcaaaatccaggatccttcccgtggaacactacatgcacctttgactgcgaggagggttttgagctcatgggggctcagtccttacaatgtacctctagcgggaattgggataatgaaaagccaacctgcaaagccgttacatgccgagctgtccggcaaccccagaacggctctgtgcggtgctcacacagccctgcaggtgaatttacctttaagtccagttgtaatttcacgtgcgaagaaggctttatgctacagggcccagcccaggtggagtgtacaactcagggacagtggacacagcagatcccagtctgcgaagcgtttcaatgtacagcgctctccaatccggagcggggatatatgaactgcctgccatcggctagtggatctttcaggtacgggagcagctgtgagttctcatgtgaacagggattcgtgctcaaagggtccaagcgactgcaatgcggtcctacgggagagtgggacaacgaaaagcctacatgcgaagttgtgaaatgcagctcactggctgtacctggaaaaatcaacatgtcgtgttccggagagccagtgttcggcactgtttgtaagtttgcctgtccagagggatggacgcttaatggctcggctgcgaggacgtgtggagcgactggtcactggagtggcctgctgccaacatgcgaggccccaacagagtccaacatccctctggtggctggtctgtcagcggcaggcctctccctcctcaccctcgcacccttcctgttatggcttagaaagtgcttgagaaaggctaagaagtttgtgcctgcctcttcttgccagtccctggagtccgacggctcttaccagaagccgagctacattttgtag

SEQ ID NO: 9025 - DNA, 3857 bp, Artificial Sequence
  derived and/or modified sequence
ttcacatcaaaactcctatactgacctgagacagaggcagcagtgatacccacctgagagatcctgtgtttgaacaactgcttcccaaaacggaaagtatttcaagcctaaacctttgggtgaaaagaactcttgaagtcatgattgcttcacagtttctctcagctctcactttggtgcttctcattaaagagagtggagcctggtcttacaacacctccacggaagctatgacttatgatgaggccagtgcttattgtcagcaaaggtacacacacctggttgcaattcaaaacaaagaagagattgagtacctaaactccatattgagctattcaccaagttattactggattggaatcagaaaagtcaacaatgtgtgggtctgggtaggaacccagaaacctctgacagaagaagccaagaactgggctccaggtgaacccaacaataggcaaaaagatgaggactgcgtggagatctacatcaagagagaaaaagatgtgggcatgtggaatgatgagaggtgcagcaagaagaagcttgccctatgctacacagctgcctgtaccaatacatcctgcagtggccacggtgaatgtgtagagaccatcaataattacacttgcaagtgtgaccctggcttcagtggactcaagtgtgagcaaattgtgaactgtacagccctggaatcccctgagcatggaagcctggtttgcagtcacccactgggaaacttcagctacaattcttcctgctctatcagctgtgataggggttacctgccaagcagcatggagaccatgcagtgtatgtcctctggagaatggagtgctcctattccagcctgcaatgtggttgagtgtgatgctgtgacaaatccagccaatgggttcgtggaatgtttccaaaaccctggaagcttcccatggaacacaacctgtacatttgactgtgaagaaggatttgaactaatgggagcccagagccttcagtgtacctcatctgggaattgggacaacgagaagccaacgtgtaaagctgtgacatgcagggccgtccgccagcctcagaatggctctgtgaggtgcagccattcccctgctggagagttcaccttcaaatcatcctgcaacttcacctgtgaggaaggcttcatgttgcagggaccagcccaggttgaatgcaccactcaagggcagtggacacagcaaatcccagtttgtgaagctttccagtgcacagccttgtccaaccccgagcgaggctacatgaattgtcttcctagtgcttctggcagtttccgttatgggtccagctgtgagttctcctgtgagcagggttttgtgttgaagggatccaaaaggctccaatgtggccccacaggggagtgggacaacgagaagcccacatgtgaagctgtgagatgcgatgctgtccaccagcccccgaagggtttggtgaggtgtgctcattcccctattggagaattcacctacaagtcctcttgtgccttcagctgtgaggagggatttgaattacatggatcaactcaacttgagtgcacatctcagggacaatggacagaagaggttccttcctgccaagtggtaaaatgttcaagcctggcagttccgggaaagatcaacatgagctgcagtggggagcccgtgtttggcactgtgtgcaagttcgcctgtcctgaaggatggacgctcaatggctctgcagctcggacatgtggagccacaggacactggtctggcctgctacctacctgtgaagctcccactgagtccaacattcccttggtagctggactttctgctgctggactctccctcctgacattagcaccatttctcctctggcttcggaaatgcttacggaaagcaaagaaatttgttcctgccagcagctgccaaagccttgaatcagatggaagctaccaaaagccttcttacatcctttaagttcaaaagaatcagaaacaggtgcatctggggaactagagggatacactgaagttaacagagacagataactctcctcgggtctctggcccttcttgcctactatgccagatgcctttatggctgaaaccgcaacacccatcaccacttcaatagatcaaagtccagcaggcaaggacggccttcaactgaaaagactcagtgttccctttcctactctcaggatcaagaaagtgttggctaatgaagggaaaggatattttcttccaagcaaaggtgaagagaccaagactctgaaatctcagaattccttttctaactctcccttgctcgctgtaaaatcttggcacagaaacacaatattttgtggctttctttcttttgcccttcacagtgtttcgacagctgattacacagttgctgtcataagaatgaataataattatccagagtttagaggaaaaaaatgactaaaaatattataacttaaaaaaatgacagatgttgaatgcccacaggcaaatgcatggagggttgttaatggtgcaaatcctactgaatgctctgtgcgagggttactatgcacaatttaatcactttcatccctatgggattcagtgcttcttaaagagttcttaaggattgtgatatttttacttgcattgaatatattataatcttccatacttcttcattcaatacaagtgtggtagggacttaaaaaacttgtaaatgctgtcaactatgatatggtaaaagttacttattctagattaccccctcattgtttattaacaaattatgttacatctgttttaaatttatttcaaaaagggaaactattgtcccctagcaaggcatgatgttaaccagaataaagttctgagtgtttttactacagttgttttttgaaaacatggtagaattggagagtaaaaactgaatggaaggtttgtatattgtcagatattttttcagaaatatgtggtttccacgatgaaaaacttccatgaggccaaacgttttgaactaataaaagcataaatgcaaacacacaaaggtataattttatgaatgtctttgttggaaaagaatacagaaagatggatgtgctttgcattcctacaaagatgtttgtcagatatgatatgtaaacataattcttgtatattatggaagattttaaattcacaatagaaactcaccatgtaaaagagtcatctggtagatttttaacgaatgaagatgtctaatagttattccctatttgttttcttctgtatgttagggtgctctggaagagaggaatgcctgtgtgagcaagcatttatgtttatttataagcagatttaacaattccaaaggaatctccagttttcagttgatcactggcaatgaaaaattctcagtcagtaattgccaaagctgctctagccttgaggagtgtgagaatcaaaactctcctacacttccattaacttagcatgtgttgaaaaaaaagtttcagagaagttctggctgaacactggcaacaacaaagccaacagtcaaaacagagatgtgataaggatcagaacagcagaggttcttttaaaggggcagaaaaactctgggaaataagagagaacaactactgtgatcaggctatgtatggaatacagtgttattttctttgaaattgtttaagtgttgtaaatatttatgtaaactgcattagaaattagctgtgtgaaataccagtgtggtttgtgtttgagttttattgagaattttaaattataacttaaaatattttataatttttaaagtatatatttatttaagcttatgtcagacctatttgacataacactataaaggttgacaataaatgtgcttatgttt

SEQ ID NO: 9026 - DNA, 1518 bp, Artificial Sequence
  derived and/or modified sequence
gaaagtatttcaagcctaaacctttgggtgaaaagaactcttgaagtcatgattgcttcacagtttctctcagctctcactttggtgcttctcattaaagagagtggagcctggtcttacaacacctccacggaagctatgacttatgatgaggccagtgcttattgtcagcaaaggtacacacacctggttgcaattcaaaacaaagaagagattgagtacctaaactccatattgagctattcaccaagttattactggattggaatcagaaaagtcaacaatgtgtgggtctgggtaggaacccagaaacctctgacagaagaagccaagaactgggctccaggtgaacccaacaataggcaaaaagatgaggactgcgtggagatctacatcaagagagaaaaagatgtgggcatgtggaatgatgagaggtgcagcaagaagaagcttgccctatgctacacagctgcctgtaccaatacatcctgcagtggccacggtgaatgtgtagagaccatcaataattacacttgcaagtgtgaccctggcttcagtggactcaagtgtgagcaaattgtgaactgtacagccctggaatcccctgagcatggaagcctggtttgcagtcacccactgggaaacttcagctacaattcttcctgctctatcagctgtgataggggttacctgccaagcagcatggagaccatgcagtgtatgtcctctggagaatggagtgctcctattccagcctgcaatgtggttgagtgtgatgctgtgacaaatccagccaatgggttcgtggaatgtttccaaaaccctggaagcttcccatggaacacaacctgtacatttgactgtgaagaaggatttgaactaatgggagcccagagccttcagtgtacctcatctgggaattgggacaacgagaagccaacgtgtaaagctgtgacatgcagggccgtccgccagcctcagaatggctctgtgaggtgcagccattcccctgctggagagttcaccttcaaatcatcctgcaacttcacctgtgaggaaggcttcatgttgcagggaccagcccaggttgaatgcaccactcaagggcagtggacacagcaaatcccagtttgtgaagtggtaaaatgttcaagcctggcagttccgggaaagatcaacatgagctgcagtggggagcccgtgtttggcactgtgtgcaagttcgcctgtcctgaaggatggacgctcaatggctctgcagctcggacatgtggagccacaggacactggtctggcctgctacctacctgtgaagctcccactgagtccaacattcccttggtagctggactttctgctgctggactctccctcctgacattagcaccatttctcctctggcttcggaaatgcttacggaaagcaaagaaatttgttcctgccagcagctgccaaagccttgaatcagatggaagctaccaaaagccttcttacatcctttaagttcaaaagaatcag

SEQ ID NO: 9027 - DNA, 3389 bp, Artificial Sequence
  derived and/or modified sequence
aaagtatttcaagcctaaacctttgggtgaaaagaactcttgaagtcatgattgcttcacagtttctctcagctctcactttggtgcttctcattaaagagagtggagcctggtcttacaacacctccacggaagctatgacttatgatgaggccagtgcttattgtcagcaaaggtacacacacctggttgcaattcaaaacaaagaagagattgagtacctaaactccatattgagctattcaccaagttattactggattggaatcagaaaagtcaacaatgtgtgggtctgggtaggaacccagaaacctctgacagaagaagccaagaactgggctccaggtgaacccaacaataggcaaaaagatgaggactgcgtggagatctacatcaagagagaaaaagatgtgggcatgtggaatgatgagaggtgcagcaagaagaagcttgccctatgctacacagctgcctgtaccaatacatcctgcagtggccacggtgaatgtgtagagaccatcaataattacacttgcaagtgtgaccctggcttcagtggactcaagtgtgagcaaatggttgagtgtgatgctgtgacaaatccagccaatgggttcgtggaatgtttccaaaaccctggaagcttcccatggaacacaacctgtacatttgactgtgaagaaggatttgaactaatgggagcccagagccttcagtgtacctcatctgggaattgggacaacgagaagccaacgtgtaaagctgtgacatgcagggccgtccgccagcctcagaatggctctgtgaggtgcagccattcccctgctggagagttcaccttcaaatcatcctgcaacttcacctgtgaggaaggcttcatgttgcagggaccagcccaggttgaatgcaccactcaagggcagtggacacagcaaatcccagtttgtgaagctgtgagatgcgatgctgtccaccagcccccgaagggtttggtgaggtgtgctcattcccctattggagaattcacctacaagtcctcttgtgccttcagctgtgaggagggatttgaattacatggatcaactcaacttgagtgcacatctcagggacaatggacagaagaggttccttcctgccaagtggtaaaatgttcaagcctggcagttccgggaaagatcaacatgagctgcagtggggagcccgtgtttggcactgtgtgcaagttcgcctgtcctgaaggatggacgctcaatggctctgcagctcggacatgtggagccacaggacactggtctggcctgctacctacctgtgaagctcccactgagtccaacattcccttggtagctggactttctgctgctggactctccctcctgacattagcaccatttctcctctggcttcggaaatgcttacggaaagcaaagaaatttgttcctgccagcagctgccaaagccttgaatcagatggaagctaccaaaagccttcttacatcctttaagttcaaaagaatcagaaacaggtgcatctggggaactagagggatacactgaagttaacagagacagataactctcctcgggtctctggcccttcttgcctactatgccagatgcctttatggctgaaaccgcaacacccatcaccacttcaatagatcaaagtccagcaggcaaggacggccttcaactgaaaagactcagtgttccctttcctactctcaggatcaagaaagtgttggctaatgaagggaaaggatattttcttccaagcaaaggtgaagagaccaagactctgaaatctcagaattccttttctaactctcccttgctcgctgtaaaatcttggcacagaaacacaatattttgtggctttctttcttttgcccttcacagtgtttcgacagctgattacacagttgctgtcataagaatgaataataattatccagagtttagaggaaaaaaatgactaaaaatattataacttaaaaaaatgacagatgttgaatgcccacaggcaaatgcatggagggttgttaatggtgcaaatcctactgaatgctctgtgcgagggttactatgcacaatttaatcactttcatccctatgggattcagtgcttcttaaagagttcttaaggattgtgatatttttacttgcattgaatatattataatcttccatacttcttcattcaatacaagtgtggtagggacttaaaaaacttgtaaatgctgtcaactatgatatggtaaaagttacttattctagattaccccctcattgtttattaacaaattatgttacatctgttttaaatttatttcaaaaagggaaactattgtcccctagcaaggcatgatgttaaccagaataaagttctgagtgtttttactacagttgttttttgaaaacatggtagaattggagagtaaaaactgaatggaaggtttgtatattgtcagatattttttcagaaatatgtggtttccacgatgaaaaacttccatgaggccaaacgttttgaactaataaaagcataaatgcaaacacacaaaggtataattttatgaatgtctttgttggaaaagaatacagaaagatggatgtgctttgcattcctacaaagatgtttgtcagatatgatatgtaaacataattcttgtatattatggaagattttaaattcacaatagaaactcaccatgtaaaagagtcatctggtagatttttaacgaatgaagatgtctaatagttattccctatttgttttcttctgtatgttagggtgctctggaagagaggaatgcctgtgtgagcaagcatttatgtttatttataagcagatttaacaattccaaaggaatctccagttttcagttgatcactggcaatgaaaaattctcagtcagtaattgccaaagctgctctagccttgaggagtgtgagaatcaaaactctcctacacttccattaacttagcatgtgttgaaaaaaaagtttcagagaagttctggctgaacactggcaacaacaaagccaacagtcaaaacagagatgtgataaggatcagaacagcagaggttcttttaaaggggcagaaaaactctgggaaataagagagaacaactactgtgatcaggctatgtatggaatacagtgttattttctttgaaattgtttaagtgttgtaaatatttatgtaaactgcattagaaattagctgtgtgaaataccagtgtggtttgtgtttgagttttattgagaattttaaattataacttaaaatattttataatttttaaagtatatatttatttaagcttatgtcagacctatttgacataacactataaaggttgacaataaatgtgcttatgttt

SEQ ID NO: 9028 - DNA, 3576 bp, Artificial Sequence
  derived and/or modified sequence
gaaagtatttcaagcctaaacctttgggtgaaaagaactcttgaagtcatgattgcttcacagtttctctcagctctcactttggtgcttctcattaaagagagtggagcctggtcttacaacacctccacggaagctatgacttatgatgaggccagtgcttattgtcagcaaaggtacacacacctggttgcaattcaaaacaaagaagagattgagtacctaaactccatattgagctattcaccaagttattactggattggaatcagaaaagtcaacaatgtgtgggtctgggtaggaacccagaaacctctgacagaagaagccaagaactgggctccaggtgaacccaacaataggcaaaaagatgaggactgcgtggagatctacatcaagagagaaaaagatgtgggcatgtggaatgatgagaggtgcagcaagaagaagcttgccctatgctacacagctgcctgtaccaatacatcctgcagtggccacggtgaatgtgtagagaccatcaataattacacttgcaagtgtgaccctggcttcagtggactcaagtgtgagcaaattgtgaactgtacagccctggaatcccctgagcatggaagcctggtttgcagtcacccactgggaaacttcagctacaattcttcctgctctatcagctgtgataggggttacctgccaagcagcatggagaccatgcagtgtatgtcctctggagaatggagtgctcctattccagcctgcaatgtggttgagtgtgatgctgtgacaaatccagccaatgggttcgtggaatgtttccaaaaccctggaagcttcccatggaacacaacctgtacatttgactgtgaagaaggatttgaactaatgggagcccagagccttcagtgtacctcatctgggaattgggacaacgagaagccaacgtgtaaagctgtgacatgcagggccgtccgccagcctcagaatggctctgtgaggtgcagccattcccctgctggagagttcaccttcaaatcatcctgcaacttcacctgtgaggaaggcttcatgttgcagggaccagcccaggttgaatgcaccactcaagggcagtggacacagcaaatcccagtttgtgaagctgtgagatgcgatgctgtccaccagcccccgaagggtttggtgaggtgtgctcattcccctattggagaattcacctacaagtcctcttgtgccttcagctgtgaggagggatttgaattacatggatcaactcaacttgagtgcacatctcagggacaatggacagaagaggttccttcctgccaagtggtaaaatgttcaagcctggcagttccgggaaagatcaacatgagctgcagtggggagcccgtgtttggcactgtgtgcaagttcgcctgtcctgaaggatggacgctcaatggctctgcagctcggacatgtggagccacaggacactggtctggcctgctacctacctgtgaagctcccactgagtccaacattcccttggtagctggactttctgctgctggactctccctcctgacattagcaccatttctcctctggcttcggaaatgcttacggaaagcaaagaaatttgttcctgccagcagctgccaaagccttgaatcagatggaagctaccaaaagccttcttacatcctttaagttcaaaagaatcagaaacaggtgcatctggggaactagagggatacactgaagttaacagagacagataactctcctcgggtctctggcccttcttgcctactatgccagatgcctttatggctgaaaccgcaacacccatcaccacttcaatagatcaaagtccagcaggcaaggacggccttcaactgaaaagactcagtgttccctttcctactctcaggatcaagaaagtgttggctaatgaagggaaaggatattttcttccaagcaaaggtgaagagaccaagactctgaaatctcagaattccttttctaactctcccttgctcgctgtaaaatcttggcacagaaacacaatattttgtggctttctttcttttgcccttcacagtgtttcgacagctgattacacagttgctgtcataagaatgaataataattatccagagtttagaggaaaaaaatgactaaaaatattataacttaaaaaaatgacagatgttgaatgcccacaggcaaatgcatggagggttgttaatggtgcaaatcctactgaatgctctgtgcgagggttactatgcacaatttaatcactttcatccctatgggattcagtgcttcttaaagagttcttaaggattgtgatatttttacttgcattgaatatattataatcttccatacttcttcattcaatacaagtgtggtagggacttaaaaaacttgtaaatgctgtcaactatgatatggtaaaagttacttattctagattaccccctcattgtttattaacaaattatgttacatctgttttaaatttatttcaaaaagggaaactattgtcccctagcaaggcatgatgttaaccagaataaagttctgagtgtttttactacagttgttttttgaaaacatggtagaattggagagtaaaaactgaatggaaggtttgtatattgtcagatattttttcagaaatatgtggtttccacgatgaaaaacttccatgaggccaaacgttttgaactaataaaagcataaatgcaaacacacaaaggtataattttatgaatgtctttgttggaaaagaatacagaaagatggatgtgctttgcattcctacaaagatgtttgtcagatatgatatgtaaacataattcttgtatattatggaagattttaaattcacaatagaaactcaccatgtaaaagagtcatctggtagatttttaacgaatgaagatgtctaatagttattccctatttgttttcttctgtatgttagggtgctctggaagagaggaatgcctgtgtgagcaagcatttatgtttatttataagcagatttaacaattccaaaggaatctccagttttcagttgatcactggcaatgaaaaattctcagtcagtaattgccaaagctgctctagccttgaggagtgtgagaatcaaaactctcctacacttccattaacttagcatgtgttgaaaaaaaagtttcagagaagttctggctgaacactggcaacaacaaagccaacagtcaaaacagagatgtgataaggatcagaacagcagaggttcttttaaaggggcagaaaaactctgggaaataagagagaacaactactgtgatcaggctatgtatggaatacagtgttattttctttgaaattgtttaagtgttgtaaatatttatgtaaactgcattagaaattagctgtgtgaaataccagtgtggtttgtgtttgagttttattgagaattttaaattataacttaaaatattttataatttttaaagtatatatttatttaagcttatgtcagacctatttgacataacactataaaggttgacaataaatgtgcttatgttt

SEQ ID NO: 9029 - DNA, 3576 bp, Artificial Sequence
  derived and/or modified sequence
gaaagtatttcaagcctaaacctttgggtgaaaagaactcttgaagtcatgattgcttcacagtttctctcagctctcactttggtgcttctcattaaagagagtggagcctggtcttacaacacctccacggaagctatgacttatgatgaggccagtgcttattgtcagcaaaggtacacacacctggttgcaattcaaaacaaagaagagattgagtacctaaactccatattgagctattcaccaagttattactggattggaatcagaaaagtcaacaatgtgtgggtctgggtaggaacccagaaacctctgacagaagaagccaagaactgggctccaggtgaacccaacaataggcaaaaagatgaggactgcgtggagatctacatcaagagagaaaaagatgtgggcatgtggaatgatgagaggtgcagcaagaagaagcttgccctatgctacacagctgcctgtaccaatacatcctgcagtggccacggtgaatgtgtagagaccatcaataattacacttgcaagtgtgaccctggcttcagtggactcaagtgtgagcaaattgtgaactgtacagccctggaatcccctgagcatggaagcctggtttgcagtcacccactgggaaacttcagctacaattcttcctgctctatcagctgtgataggggttacctgccaagcagcatggagaccatgcagtgtatgtcctctggagaatggagtgctcctattccagcctgcaatgtggttgagtgtgatgctgtgacaaatccagccaatgggttcgtggaatgtttccaaaaccctggaagcttcccatggaacacaacctgtacatttgactgtgaagaaggatttgaactaatgggagcccagagccttcagtgtacctcatctgggaattgggacaacgagaagccaacgtgtaaagctgtgacatgcagggccgtccgccagcctcagaatggctctgtgaggtgcagccattcccctgctggagagttcaccttcaaatcatcctgcaacttcacctgtgaggaaggcttcatgttgcagggaccagcccaggttgaatgcaccactcaagggcagtggacacagcaaatcccagtttgtgaagctttccagtgcacagccttgtccaaccccgagcgaggctacatgaattgtcttcctagtgcttctggcagtttccgttatgggtccagctgtgagttctcctgtgagcagggttttgtgttgaagggatccaaaaggctccaatgtggccccacaggggagtgggacaacgagaagcccacatgtgaagtggtaaaatgttcaagcctggcagttccgggaaagatcaacatgagctgcagtggggagcccgtgtttggcactgtgtgcaagttcgcctgtcctgaaggatggacgctcaatggctctgcagctcggacatgtggagccacaggacactggtctggcctgctacctacctgtgaagctcccactgagtccaacattcccttggtagctggactttctgctgctggactctccctcctgacattagcaccatttctcctctggcttcggaaatgcttacggaaagcaaagaaatttgttcctgccagcagctgccaaagccttgaatcagatggaagctaccaaaagccttcttacatcctttaagttcaaaagaatcagaaacaggtgcatctggggaactagagggatacactgaagttaacagagacagataactctcctcgggtctctggcccttcttgcctactatgccagatgcctttatggctgaaaccgcaacacccatcaccacttcaatagatcaaagtccagcaggcaaggacggccttcaactgaaaagactcagtgttccctttcctactctcaggatcaagaaagtgttggctaatgaagggaaaggatattttcttccaagcaaaggtgaagagaccaagactctgaaatctcagaattccttttctaactctcccttgctcgctgtaaaatcttggcacagaaacacaatattttgtggctttctttcttttgcccttcacagtgtttcgacagctgattacacagttgctgtcataagaatgaataataattatccagagtttagaggaaaaaaatgactaaaaatattataacttaaaaaaatgacagatgttgaatgcccacaggcaaatgcatggagggttgttaatggtgcaaatcctactgaatgctctgtgcgagggttactatgcacaatttaatcactttcatccctatgggattcagtgcttcttaaagagttcttaaggattgtgatatttttacttgcattgaatatattataatcttccatacttcttcattcaatacaagtgtggtagggacttaaaaaacttgtaaatgctgtcaactatgatatggtaaaagttacttattctagattaccccctcattgtttattaacaaattatgttacatctgttttaaatttatttcaaaaagggaaactattgtcccctagcaaggcatgatgttaaccagaataaagttctgagtgtttttactacagttgttttttgaaaacatggtagaattggagagtaaaaactgaatggaaggtttgtatattgtcagatattttttcagaaatatgtggtttccacgatgaaaaacttccatgaggccaaacgttttgaactaataaaagcataaatgcaaacacacaaaggtataattttatgaatgtctttgttggaaaagaatacagaaagatggatgtgctttgcattcctacaaagatgtttgtcagatatgatatgtaaacataattcttgtatattatggaagattttaaattcacaatagaaactcaccatgtaaaagagtcatctggtagatttttaacgaatgaagatgtctaatagttattccctatttgttttcttctgtatgttagggtgctctggaagagaggaatgcctgtgtgagcaagcatttatgtttatttataagcagatttaacaattccaaaggaatctccagttttcagttgatcactggcaatgaaaaattctcagtcagtaattgccaaagctgctctagccttgaggagtgtgagaatcaaaactctcctacacttccattaacttagcatgtgttgaaaaaaaagtttcagagaagttctggctgaacactggcaacaacaaagccaacagtcaaaacagagatgtgataaggatcagaacagcagaggttcttttaaaggggcagaaaaactctgggaaataagagagaacaactactgtgatcaggctatgtatggaatacagtgttattttctttgaaattgtttaagtgttgtaaatatttatgtaaactgcattagaaattagctgtgtgaaataccagtgtggtttgtgtttgagttttattgagaattttaaattataacttaaaatattttataatttttaaagtatatatttatttaagcttatgtcagacctatttgacataacactataaaggttgacaataaatgtgcttatgttt

SEQ ID NO: 9030 - DNA, 3497 bp, Artificial Sequence
  derived and/or modified sequence
agctgttcttggctgacttcacatcaaaactcctatactgacctgagacagaggcagcagtgatacccacctgagagatcctgtgtttgaacaactgcttcccaaaacggaaagtatttcaagcctaaacctttgggtgaaaagaactcttgaagtcatgattgcttcacagtttctctcagctctcactttggtgcttctcattaaagagagtggagcctggtcttacaacacctccacggaagctatgacttatgatgaggccagtgcttattgtcagcaaaggtacacacacctggttgcaattcaaaacaaagaagagattgagtacctaaactccatattgagctattcaccaagttattactggattggaatcagaaaagtcaacaatgtgtgggtctgggtaggaacccagaaacctctgacagaagaagccaagaactgggctccaggtgaacccaacaataggcaaaaagatgaggactgcgtggagatctacatcaagagagaaaaagatgtgggcatgtggaatgatgagaggtgcagcaagaagaagcttgccctatgctacacagctgcctgtaccaatacatcctgcagtggccacggtgaatgtgtagagaccatcaataattacacttgcaagtgtgaccctggcttcagtggactcaagtgtgagcaaattgtgaactgtacagccctggaatcccctgagcatggaagcctggtttgcagtcacccactgggaaacttcagctacaattcttcctgctctatcagctgtgataggggttacctgccaagcagcatggagaccatgcagtgtatgtcctctggagaatggagtgctcctattccagcctgcaatgtggttgagtgtgatgctgtgacaaatccagccaatgggttcgtggaatgtttccaaaaccctggaagcttcccatggaacacaacctgtacatttgactgtgaagaaggatttgaactaatgggagcccagagccttcagtgtacctcatctgggaattgggacaacgagaagccaacgtgtaaagctgtgacatgcagggccgtccgccagcctcagaatggctctgtgaggtgcagccattcccctgctggagagttcaccttcaaatcatcctgcaacttcacctgtgaggaaggcttcatgttgcagggaccagcccaggttgaatgcaccactcaagggcagtggacacagcaaatcccagtttgtgaagtggtaaaatgttcaagcctggcagttccgggaaagatcaacatgagctgcagtggggagcccgtgtttggcactgtgtgcaagttcgcctgtcctgaaggatggacgctcaatggctctgcagctcggacatgtggagccacaggacactggtctggcctgctacctacctgtgaagctcccactgagtccaacattcccttggtagctggactttctgctgctggactctccctcctgacattagcaccatttctcctctggcttcggaaatgcttacggaaagcaaagaaatttgttcctgccagcagctgccaaagccttgaatcagatggaagctaccaaaagccttcttacatcctttaagttcaaaagaatcagaaacaggtgcatctggggaactagagggatacactgaagttaacagagacagataactctcctcgggtctctggcccttcttgcctactatgccagatgcctttatggctgaaaccgcaacacccatcaccacttcaatagatcaaagtccagcaggcaaggacggccttcaactgaaaagactcagtgttccctttcctactctcaggatcaagaaagtgttggctaatgaagggaaaggatattttcttccaagcaaaggtgaagagaccaagactctgaaatctcagaattccttttctaactctcccttgctcgctgtaaaatcttggcacagaaacacaatattttgtggctttctttcttttgcccttcacagtgtttcgacagctgattacacagttgctgtcataagaatgaataataattatccagagtttagaggaaaaaaatgactaaaaatattataacttaaaaaaatgacagatgttgaatgcccacaggcaaatgcatggagggttgttaatggtgcaaatcctactgaatgctctgtgcgagggttactatgcacaatttaatcactttcatccctatgggattcagtgcttcttaaagagttcttaaggattgtgatatttttacttgcattgaatatattataatcttccatacttcttcattcaatacaagtgtggtagggacttaaaaaacttgtaaatgctgtcaactatgatatggtaaaagttacttattctagattaccccctcattgtttattaacaaattatgttacatctgttttaaatttatttcaaaaagggaaactattgtcccctagcaaggcatgatgttaaccagaataaagttctgagtgtttttactacagttgttttttgaaaacatggtagaattggagagtaaaaactgaatggaaggtttgtatattgtcagatattttttcagaaatatgtggtttccacgatgaaaaacttccatgaggccaaacgttttgaactaataaaagcataaatgcaaacacacaaaggtataattttatgaatgtctttgttggaaaagaatacagaaagatggatgtgctttgcattcctacaaagatgtttgtcagatatgatatgtaaacataattcttgtatattatggaagattttaaattcacaatagaaactcaccatgtaaaagagtcatctggtagatttttaacgaatgaagatgtctaatagttattccctatttgttttcttctgtatgttagggtgctctggaagagaggaatgcctgtgtgagcaagcatttatgtttatttataagcagatttaacaattccaaaggaatctccagttttcagttgatcactggcaatgaaaaattctcagtcagtaattgccaaagctgctctagccttgaggagtgtgagaatcaaaactctcctacacttccattaacttagcatgtgttgaaaaaaaagtttcagagaagttctggctgaacactggcaacaacaaagccaacagtcaaaacagagatgtgataaggatcagaacagcagaggttcttttaaaggggcagaaaaactctgggaaataagagagaacaactactgtgatcaggctatgtatggaatacagtgttattttctttgaaattgtttaagtgttgtaaatatttatgtaaactgcattagaaattagctgtgtgaaataccagtgtggtttgtgtttgagttttattgagaattttaaattataacttaaaatattttataatttttaaagtatatatttatttaagcttatgtcagacctatttgacataacactataaaggttgacaataaatgtgcttatgttta

SEQ ID NO: 9031 - DNA, 3500 bp, Artificial Sequence
  derived and/or modified sequence
agctgttcttggctgacttcacatcaaaactcctatactgacctgagacagaggcagcagtgatacccacctgagagatcctgtgtttgaacaactgcttcccaaaacggaaagtatttcaagcctaaacctttgggtgaaaagaactcttgaagtcatgattgcttcacagtttctctcagctctcactttggtgcttctcattaaagagagtggagcctggtcttacaacacctccacggaagctatgacttatgatgaggccagtgcttattgtcagcaaaggtacacacacctggttgcaattcaaaacaaagaagagattgagtacctaaactccatattgagctattcaccaagttattactggattggaatcagaaaagtcaacaatgtgtgggtctgggtaggaacccagaaacctctgacagaagaagccaagaactgggctccaggtgaacccaacaataggcaaaaagatgaggactgcgtggagatctacatcaagagagaaaaagatgtgggcatgtggaatgatgagaggtgcagcaagaagaagcttgccctatgctacacagctgcctgtaccaatacatcctgcagtggccacggtgaatgtgtagagaccatcaataattacacttgcaagtgtgaccctggcttcagtggactcaagtgtgagcaaatggttgagtgtgatgctgtgacaaatccagccaatgggttcgtggaatgtttccaaaaccctggaagcttcccatggaacacaacctgtacatttgactgtgaagaaggatttgaactaatgggagcccagagccttcagtgtacctcatctgggaattgggacaacgagaagccaacgtgtaaagctgtgacatgcagggccgtccgccagcctcagaatggctctgtgaggtgcagccattcccctgctggagagttcaccttcaaatcatcctgcaacttcacctgtgaggaaggcttcatgttgcagggaccagcccaggttgaatgcaccactcaagggcagtggacacagcaaatcccagtttgtgaagctgtgagatgcgatgctgtccaccagcccccgaagggtttggtgaggtgtgctcattcccctattggagaattcacctacaagtcctcttgtgccttcagctgtgaggagggatttgaattacatggatcaactcaacttgagtgcacatctcagggacaatggacagaagaggttccttcctgccaagtggtaaaatgttcaagcctggcagttccgggaaagatcaacatgagctgcagtggggagcccgtgtttggcactgtgtgcaagttcgcctgtcctgaaggatggacgctcaatggctctgcagctcggacatgtggagccacaggacactggtctggcctgctacctacctgtgaagctcccactgagtccaacattcccttggtagctggactttctgctgctggactctccctcctgacattagcaccatttctcctctggcttcggaaatgcttacggaaagcaaagaaatttgttcctgccagcagctgccaaagccttgaatcagatggaagctaccaaaagccttcttacatcctttaagttcaaaagaatcagaaacaggtgcatctggggaactagagggatacactgaagttaacagagacagataactctcctcgggtctctggcccttcttgcctactatgccagatgcctttatggctgaaaccgcaacacccatcaccacttcaatagatcaaagtccagcaggcaaggacggccttcaactgaaaagactcagtgttccctttcctactctcaggatcaagaaagtgttggctaatgaagggaaaggatattttcttccaagcaaaggtgaagagaccaagactctgaaatctcagaattccttttctaactctcccttgctcgctgtaaaatcttggcacagaaacacaatattttgtggctttctttcttttgcccttcacagtgtttcgacagctgattacacagttgctgtcataagaatgaataataattatccagagtttagaggaaaaaaatgactaaaaatattataacttaaaaaaatgacagatgttgaatgcccacaggcaaatgcatggagggttgttaatggtgcaaatcctactgaatgctctgtgcgagggttactatgcacaatttaatcactttcatccctatgggattcagtgcttcttaaagagttcttaaggattgtgatatttttacttgcattgaatatattataatcttccatacttcttcattcaatacaagtgtggtagggacttaaaaaacttgtaaatgctgtcaactatgatatggtaaaagttacttattctagattaccccctcattgtttattaacaaattatgttacatctgttttaaatttatttcaaaaagggaaactattgtcccctagcaaggcatgatgttaaccagaataaagttctgagtgtttttactacagttgttttttgaaaacatggtagaattggagagtaaaaactgaatggaaggtttgtatattgtcagatattttttcagaaatatgtggtttccacgatgaaaaacttccatgaggccaaacgttttgaactaataaaagcataaatgcaaacacacaaaggtataattttatgaatgtctttgttggaaaagaatacagaaagatggatgtgctttgcattcctacaaagatgtttgtcagatatgatatgtaaacataattcttgtatattatggaagattttaaattcacaatagaaactcaccatgtaaaagagtcatctggtagatttttaacgaatgaagatgtctaatagttattccctatttgttttcttctgtatgttagggtgctctggaagagaggaatgcctgtgtgagcaagcatttatgtttatttataagcagatttaacaattccaaaggaatctccagttttcagttgatcactggcaatgaaaaattctcagtcagtaattgccaaagctgctctagccttgaggagtgtgagaatcaaaactctcctacacttccattaacttagcatgtgttgaaaaaaaagtttcagagaagttctggctgaacactggcaacaacaaagccaacagtcaaaacagagatgtgataaggatcagaacagcagaggttcttttaaaggggcagaaaaactctgggaaataagagagaacaactactgtgatcaggctatgtatggaatacagtgttattttctttgaaattgtttaagtgttgtaaatatttatgtaaactgcattagaaattagctgtgtgaaataccagtgtggtttgtgtttgagttttattgagaattttaaattataacttaaaatattttataatttttaaagtatatatttatttaagcttatgtcagacctatttgacataacactataaaggttgacaataaatgtgcttatgttta

SEQ ID NO: 9032 - DNA, 3686 bp, Artificial Sequence
  derived and/or modified sequence
agctgttcttggctgacttcacatcaaaactcctatactgacctgagacagaggcagcagtgatacccacctgagagatcctgtgtttgaacaactgcttcccaaaacggaaagtatttcaagcctaaacctttgggtgaaaagaactcttgaagtcatgattgcttcacagtttctctcagctctcactttggtgcttctcattaaagagagtggagcctggtcttacaacacctccacggaagctatgacttatgatgaggccagtgcttattgtcagcaaaggtacacacacctggttgcaattcaaaacaaagaagagattgagtacctaaactccatattgagctattcaccaagttattactggattggaatcagaaaagtcaacaatgtgtgggtctgggtaggaacccagaaacctctgacagaagaagccaagaactgggctccaggtgaacccaacaataggcaaaaagatgaggactgcgtggagatctacatcaagagagaaaaagatgtgggcatgtggaatgatgagaggtgcagcaagaagaagcttgccctatgctacacagctgcctgtaccaatacatcctgcagtggccacggtgaatgtgtagagaccatcaataattacacttgcaagtgtgaccctggcttcagtggactcaagtgtgagcaaattgtgaactgtacagccctggaatcccctgagcatggaagcctggtttgcagtcacccactgggaaacttcagctacaattcttcctgctctatcagctgtgataggggttacctgccaagcagcatggagaccatgcagtgtatgtcctctggagaatggagtgctcctattccagcctgcaatgtggttgagtgtgatgctgtgacaaatccagccaatgggttcgtggaatgtttccaaaaccctggaagcttcccatggaacacaacctgtacatttgactgtgaagaaggatttgaactaatgggagcccagagccttcagtgtacctcatctgggaattgggacaacgagaagccaacgtgtaaagctgtgacatgcagggccgtccgccagcctcagaatggctctgtgaggtgcagccattcccctgctggagagttcaccttcaaatcatcctgcaacttcacctgtgaggaaggcttcatgttgcagggaccagcccaggttgaatgcaccactcaagggcagtggacacagcaaatcccagtttgtgaagctgtgagatgcgatgctgtccaccagcccccgaagggtttggtgaggtgtgctcattcccctattggagaattcacctacaagtcctcttgtgccttcagctgtgaggagggatttgaattacatggatcaactcaacttgagtgcacatctcagggacaatggacagaagaggttccttcctgccaagtggtaaaatgttcaagcctggcagttccgggaaagatcaacatgagctgcagtggggagcccgtgtttggcactgtgtgcaagttcgcctgtcctgaaggatggacgctcaatggctctgcagctcggacatgtggagccacaggacactggtctggcctgctacctacctgtgaagctcccactgagtccaacattcccttggtagctggactttctgctgctggactctccctcctgacattagcaccatttctcctctggcttcggaaatgcttacggaaagcaaagaaatttgttcctgccagcagctgccaaagccttgaatcagatggaagctaccaaaagccttcttacatcctttaagttcaaaagaatcagaaacaggtgcatctggggaactagagggatacactgaagttaacagagacagataactctcctcgggtctctggcccttcttgcctactatgccagatgcctttatggctgaaaccgcaacacccatcaccacttcaatagatcaaagtccagcaggcaaggacggccttcaactgaaaagactcagtgttccctttcctactctcaggatcaagaaagtgttggctaatgaagggaaaggatattttcttccaagcaaaggtgaagagaccaagactctgaaatctcagaattccttttctaactctcccttgctcgctgtaaaatcttggcacagaaacacaatattttgtggctttctttcttttgcccttcacagtgtttcgacagctgattacacagttgctgtcataagaatgaataataattatccagagtttagaggaaaaaaatgactaaaaatattataacttaaaaaaatgacagatgttgaatgcccacaggcaaatgcatggagggttgttaatggtgcaaatcctactgaatgctctgtgcgagggttactatgcacaatttaatcactttcatccctatgggattcagtgcttcttaaagagttcttaaggattgtgatatttttacttgcattgaatatattataatcttccatacttcttcattcaatacaagtgtggtagggacttaaaaaacttgtaaatgctgtcaactatgatatggtaaaagttacttattctagattaccccctcattgtttattaacaaattatgttacatctgttttaaatttatttcaaaaagggaaactattgtcccctagcaaggcatgatgttaaccagaataaagttctgagtgtttttactacagttgttttttgaaaacatggtagaattggagagtaaaaactgaatggaaggtttgtatattgtcagatattttttcagaaatatgtggtttccacgatgaaaaacttccatgaggccaaacgttttgaactaataaaagcataaatgcaaacacacaaaggtataattttatgaatgtctttgttggaaaagaatacagaaagatggatgtgctttgcattcctacaaagatgtttgtcagatatgatatgtaaacataattcttgtatattatggaagattttaaattcacaatagaaactcaccatgtaaaagagtcatctggtagatttttaacgaatgaagatgtctaatagttattccctatttgttttcttctgtatgttagggtgctctggaagagaggaatgcctgtgtgagcaagcatttatgtttatttataagcagatttaacaattccaaaggaatctccagttttcagttgatcactggcaatgaaaaattctcagtcagtaattgccaaagctgctctagccttgaggagtgtgagaatcaaaactctcctacacttccattaacttagcatgtgttgaaaaaaaagtttcagagaagttctggctgaacactggcaacaacaaagccaacagtcaaaacagagatgtgataaggatcagaacagcagaggttcttttaaaggggcagaaaaactctgggaaataagagagaacaactactgtgatcaggctatgtatggaatacagtgttattttctttgaaattgtttaagtgttgtaaatatttatgtaaactgcattagaaattagctgtgtgaaataccagtgtggtttgtgtttgagttttattgagaattttaaattataacttaaaatattttataatttttaaagtatatatttatttaagcttatgtcagacctatttgacataacactataaaggttgacaataaatgtgcttatgttta

SEQ ID NO: 9033 - DNA, 3686 bp, Artificial Sequence
  derived and/or modified sequence
agctgttcttggctgacttcacatcaaaactcctatactgacctgagacagaggcagcagtgatacccacctgagagatcctgtgtttgaacaactgcttcccaaaacggaaagtatttcaagcctaaacctttgggtgaaaagaactcttgaagtcatgattgcttcacagtttctctcagctctcactttggtgcttctcattaaagagagtggagcctggtcttacaacacctccacggaagctatgacttatgatgaggccagtgcttattgtcagcaaaggtacacacacctggttgcaattcaaaacaaagaagagattgagtacctaaactccatattgagctattcaccaagttattactggattggaatcagaaaagtcaacaatgtgtgggtctgggtaggaacccagaaacctctgacagaagaagccaagaactgggctccaggtgaacccaacaataggcaaaaagatgaggactgcgtggagatctacatcaagagagaaaaagatgtgggcatgtggaatgatgagaggtgcagcaagaagaagcttgccctatgctacacagctgcctgtaccaatacatcctgcagtggccacggtgaatgtgtagagaccatcaataattacacttgcaagtgtgaccctggcttcagtggactcaagtgtgagcaaattgtgaactgtacagccctggaatcccctgagcatggaagcctggtttgcagtcacccactgggaaacttcagctacaattcttcctgctctatcagctgtgataggggttacctgccaagcagcatggagaccatgcagtgtatgtcctctggagaatggagtgctcctattccagcctgcaatgtggttgagtgtgatgctgtgacaaatccagccaatgggttcgtggaatgtttccaaaaccctggaagcttcccatggaacacaacctgtacatttgactgtgaagaaggatttgaactaatgggagcccagagccttcagtgtacctcatctgggaattgggacaacgagaagccaacgtgtaaagctgtgacatgcagggccgtccgccagcctcagaatggctctgtgaggtgcagccattcccctgctggagagttcaccttcaaatcatcctgcaacttcacctgtgaggaaggcttcatgttgcagggaccagcccaggttgaatgcaccactcaagggcagtggacacagcaaatcccagtttgtgaagctttccagtgcacagccttgtccaaccccgagcgaggctacatgaattgtcttcctagtgcttctggcagtttccgttatgggtccagctgtgagttctcctgtgagcagggttttgtgttgaagggatccaaaaggctccaatgtggccccacaggggagtgggacaacgagaagcccacatgtgaagtggtaaaatgttcaagcctggcagttccgggaaagatcaacatgagctgcagtggggagcccgtgtttggcactgtgtgcaagttcgcctgtcctgaaggatggacgctcaatggctctgcagctcggacatgtggagccacaggacactggtctggcctgctacctacctgtgaagctcccactgagtccaacattcccttggtagctggactttctgctgctggactctccctcctgacattagcaccatttctcctctggcttcggaaatgcttacggaaagcaaagaaatttgttcctgccagcagctgccaaagccttgaatcagatggaagctaccaaaagccttcttacatcctttaagttcaaaagaatcagaaacaggtgcatctggggaactagagggatacactgaagttaacagagacagataactctcctcgggtctctggcccttcttgcctactatgccagatgcctttatggctgaaaccgcaacacccatcaccacttcaatagatcaaagtccagcaggcaaggacggccttcaactgaaaagactcagtgttccctttcctactctcaggatcaagaaagtgttggctaatgaagggaaaggatattttcttccaagcaaaggtgaagagaccaagactctgaaatctcagaattccttttctaactctcccttgctcgctgtaaaatcttggcacagaaacacaatattttgtggctttctttcttttgcccttcacagtgtttcgacagctgattacacagttgctgtcataagaatgaataataattatccagagtttagaggaaaaaaatgactaaaaatattataacttaaaaaaatgacagatgttgaatgcccacaggcaaatgcatggagggttgttaatggtgcaaatcctactgaatgctctgtgcgagggttactatgcacaatttaatcactttcatccctatgggattcagtgcttcttaaagagttcttaaggattgtgatatttttacttgcattgaatatattataatcttccatacttcttcattcaatacaagtgtggtagggacttaaaaaacttgtaaatgctgtcaactatgatatggtaaaagttacttattctagattaccccctcattgtttattaacaaattatgttacatctgttttaaatttatttcaaaaagggaaactattgtcccctagcaaggcatgatgttaaccagaataaagttctgagtgtttttactacagttgttttttgaaaacatggtagaattggagagtaaaaactgaatggaaggtttgtatattgtcagatattttttcagaaatatgtggtttccacgatgaaaaacttccatgaggccaaacgttttgaactaataaaagcataaatgcaaacacacaaaggtataattttatgaatgtctttgttggaaaagaatacagaaagatggatgtgctttgcattcctacaaagatgtttgtcagatatgatatgtaaacataattcttgtatattatggaagattttaaattcacaatagaaactcaccatgtaaaagagtcatctggtagatttttaacgaatgaagatgtctaatagttattccctatttgttttcttctgtatgttagggtgctctggaagagaggaatgcctgtgtgagcaagcatttatgtttatttataagcagatttaacaattccaaaggaatctccagttttcagttgatcactggcaatgaaaaattctcagtcagtaattgccaaagctgctctagccttgaggagtgtgagaatcaaaactctcctacacttccattaacttagcatgtgttgaaaaaaaagtttcagagaagttctggctgaacactggcaacaacaaagccaacagtcaaaacagagatgtgataaggatcagaacagcagaggttcttttaaaggggcagaaaaactctgggaaataagagagaacaactactgtgatcaggctatgtatggaatacagtgttattttctttgaaattgtttaagtgttgtaaatatttatgtaaactgcattagaaattagctgtgtgaaataccagtgtggtttgtgtttgagttttattgagaattttaaattataacttaaaatattttataatttttaaagtatatatttatttaagcttatgtcagacctatttgacataacactataaaggttgacaataaatgtgcttatgttta

SEQ ID NO: 9034 - DNA, 1833 bp, Artificial Sequence
  derived and/or modified sequence
atgatcgccagccagttcctgagcgccctgaccctggtgctgctgatcaaggagagcggcgcctggagctacaacaccagcaccgaggccatgacctacgacgaggccagcgcctactgccagcagagatacacccacctggtggccatccagaacaaggaggagatcgagtacctgaacagcatcctgagctacagccccagctactactggatcggcatcagaaaggtgaacaacgtgtgggtgtgggtgggcacccagaagcccctgaccgaggaggccaagaactgggcccccggcgagcccaacaacagacagaaggacgaggactgcgtggagatctacatcaagagagagaaggacgtgggcatgtggaacgacgagagatgcagcaagaagaagctggccctgtgctacaccgccgcctgcaccaacaccagctgcagcggccacggcgagtgcgtggagaccatcaacaactacacctgcaagtgcgaccccggcttcagcggcctgaagtgcgagcagatcgtgaactgcaccgccctggagagccccgagcacggcagcctggtgtgcagccaccccctgggcaacttcagctacaacagcagctgcagcatcagctgcgacagaggctacctgcccagcagcatggagaccatgcagtgcatgagcagcggcgagtggagcgcccccatccccgcctgcaacgtggtggagtgcgacgccgtgaccaaccccgccaacggcttcgtggagtgcttccagaaccccggcagcttcccctggaacaccacctgcaccttcgactgcgaggagggcttcgagctgatgggcgcccagagcctgcagtgcaccagcagcggcaactgggacaacgagaagcccacctgcaaggccgtgacctgcagagccgtgagacagccccagaacggcagcgtgagatgcagccacagccccgccggcgagttcaccttcaagagcagctgcaacttcacctgcgaggagggcttcatgctgcagggccccgcccaggtggagtgcaccacccagggccagtggacccagcagatccccgtgtgcgaggccttccagtgcaccgccctgagcaaccccgagagaggctacatgaactgcctgcccagcgccagcggcagcttcagatacggcagcagctgcgagttcagctgcgagcagggcttcgtgctgaagggcagcaagagactgcagtgcggccccaccggcgagtgggacaacgagaagcccacctgcgaggccgtgagatgcgacgccgtgcaccagccccccaagggcctggtgagatgcgcccacagccccatcggcgagttcacctacaagagcagctgcgccttcagctgcgaggagggcttcgagctgcacggcagcacccagctggagtgcaccagccagggccagtggaccgaggaggtgcccagctgccaggtggtgaagtgcagcagcctggccgtgcccggcaagatcaacatgagctgcagcggcgagcccgtgttcggcaccgtgtgcaagttcgcctgccccgagggctggaccctgaacggcagcgccgccagaacctgcggcgccaccggccactggagcggcctgctgcccacctgcgaggcccccaccgagagcaacatccccctggtggccggcctgagcgccgccggcctgagcctgctgaccctggcccccttcctgctgtggctgagaaagtgcctgagaaaggccaagaagttcgtgcccgccagcagctgccagagcctggagagcgacggcagctaccagaagcccagctacatcctgtag

SEQ ID NO: 9035 - DNA, 1455 bp, Artificial Sequence
  derived and/or modified sequence
atgatcgccagccagttcctgagcgccctgaccctggtgctgctgatcaaggagagcggcgcctggagctacaacaccagcaccgaggccatgacctacgacgaggccagcgcctactgccagcagagatacacccacctggtggccatccagaacaaggaggagatcgagtacctgaacagcatcctgagctacagccccagctactactggatcggcatcagaaaggtgaacaacgtgtgggtgtgggtgggcacccagaagcccctgaccgaggaggccaagaactgggcccccggcgagcccaacaacagacagaaggacgaggactgcgtggagatctacatcaagagagagaaggacgtgggcatgtggaacgacgagagatgcagcaagaagaagctggccctgtgctacaccgccgcctgcaccaacaccagctgcagcggccacggcgagtgcgtggagaccatcaacaactacacctgcaagtgcgaccccggcttcagcggcctgaagtgcgagcagatcgtgaactgcaccgccctggagagccccgagcacggcagcctggtgtgcagccaccccctgggcaacttcagctacaacagcagctgcagcatcagctgcgacagaggctacctgcccagcagcatggagaccatgcagtgcatgagcagcggcgagtggagcgcccccatccccgcctgcaacgtggtggagtgcgacgccgtgaccaaccccgccaacggcttcgtggagtgcttccagaaccccggcagcttcccctggaacaccacctgcaccttcgactgcgaggagggcttcgagctgatgggcgcccagagcctgcagtgcaccagcagcggcaactgggacaacgagaagcccacctgcaaggccgtgacctgcagagccgtgagacagccccagaacggcagcgtgagatgcagccacagccccgccggcgagttcaccttcaagagcagctgcaacttcacctgcgaggagggcttcatgctgcagggccccgcccaggtggagtgcaccacccagggccagtggacccagcagatccccgtgtgcgaggtggtgaagtgcagcagcctggccgtgcccggcaagatcaacatgagctgcagcggcgagcccgtgttcggcaccgtgtgcaagttcgcctgccccgagggctggaccctgaacggcagcgccgccagaacctgcggcgccaccggccactggagcggcctgctgcccacctgcgaggcccccaccgagagcaacatccccctggtggccggcctgagcgccgccggcctgagcctgctgaccctggcccccttcctgctgtggctgagaaagtgcctgagaaaggccaagaagttcgtgcccgccagcagctgccagagcctggagagcgacggcagctaccagaagcccagctacatcctgtag

SEQ ID NO: 9036 - DNA, 1458 bp, Artificial Sequence
  derived and/or modified sequence
atgatcgccagccagttcctgagcgccctgaccctggtgctgctgatcaaggagagcggcgcctggagctacaacaccagcaccgaggccatgacctacgacgaggccagcgcctactgccagcagagatacacccacctggtggccatccagaacaaggaggagatcgagtacctgaacagcatcctgagctacagccccagctactactggatcggcatcagaaaggtgaacaacgtgtgggtgtgggtgggcacccagaagcccctgaccgaggaggccaagaactgggcccccggcgagcccaacaacagacagaaggacgaggactgcgtggagatctacatcaagagagagaaggacgtgggcatgtggaacgacgagagatgcagcaagaagaagctggccctgtgctacaccgccgcctgcaccaacaccagctgcagcggccacggcgagtgcgtggagaccatcaacaactacacctgcaagtgcgaccccggcttcagcggcctgaagtgcgagcagatggtggagtgcgacgccgtgaccaaccccgccaacggcttcgtggagtgcttccagaaccccggcagcttcccctggaacaccacctgcaccttcgactgcgaggagggcttcgagctgatgggcgcccagagcctgcagtgcaccagcagcggcaactgggacaacgagaagcccacctgcaaggccgtgacctgcagagccgtgagacagccccagaacggcagcgtgagatgcagccacagccccgccggcgagttcaccttcaagagcagctgcaacttcacctgcgaggagggcttcatgctgcagggccccgcccaggtggagtgcaccacccagggccagtggacccagcagatccccgtgtgcgaggccgtgagatgcgacgccgtgcaccagccccccaagggcctggtgagatgcgcccacagccccatcggcgagttcacctacaagagcagctgcgccttcagctgcgaggagggcttcgagctgcacggcagcacccagctggagtgcaccagccagggccagtggaccgaggaggtgcccagctgccaggtggtgaagtgcagcagcctggccgtgcccggcaagatcaacatgagctgcagcggcgagcccgtgttcggcaccgtgtgcaagttcgcctgccccgagggctggaccctgaacggcagcgccgccagaacctgcggcgccaccggccactggagcggcctgctgcccacctgcgaggcccccaccgagagcaacatccccctggtggccggcctgagcgccgccggcctgagcctgctgaccctggcccccttcctgctgtggctgagaaagtgcctgagaaaggccaagaagttcgtgcccgccagcagctgccagagcctggagagcgacggcagctaccagaagcccagctacatcctgtag

SEQ ID NO: 9037 - DNA, 1644 bp, Artificial Sequence
  derived and/or modified sequence
atgatcgccagccagttcctgagcgccctgaccctggtgctgctgatcaaggagagcggcgcctggagctacaacaccagcaccgaggccatgacctacgacgaggccagcgcctactgccagcagagatacacccacctggtggccatccagaacaaggaggagatcgagtacctgaacagcatcctgagctacagccccagctactactggatcggcatcagaaaggtgaacaacgtgtgggtgtgggtgggcacccagaagcccctgaccgaggaggccaagaactgggcccccggcgagcccaacaacagacagaaggacgaggactgcgtggagatctacatcaagagagagaaggacgtgggcatgtggaacgacgagagatgcagcaagaagaagctggccctgtgctacaccgccgcctgcaccaacaccagctgcagcggccacggcgagtgcgtggagaccatcaacaactacacctgcaagtgcgaccccggcttcagcggcctgaagtgcgagcagatcgtgaactgcaccgccctggagagccccgagcacggcagcctggtgtgcagccaccccctgggcaacttcagctacaacagcagctgcagcatcagctgcgacagaggctacctgcccagcagcatggagaccatgcagtgcatgagcagcggcgagtggagcgcccccatccccgcctgcaacgtggtggagtgcgacgccgtgaccaaccccgccaacggcttcgtggagtgcttccagaaccccggcagcttcccctggaacaccacctgcaccttcgactgcgaggagggcttcgagctgatgggcgcccagagcctgcagtgcaccagcagcggcaactgggacaacgagaagcccacctgcaaggccgtgacctgcagagccgtgagacagccccagaacggcagcgtgagatgcagccacagccccgccggcgagttcaccttcaagagcagctgcaacttcacctgcgaggagggcttcatgctgcagggccccgcccaggtggagtgcaccacccagggccagtggacccagcagatccccgtgtgcgaggccgtgagatgcgacgccgtgcaccagccccccaagggcctggtgagatgcgcccacagccccatcggcgagttcacctacaagagcagctgcgccttcagctgcgaggagggcttcgagctgcacggcagcacccagctggagtgcaccagccagggccagtggaccgaggaggtgcccagctgccaggtggtgaagtgcagcagcctggccgtgcccggcaagatcaacatgagctgcagcggcgagcccgtgttcggcaccgtgtgcaagttcgcctgccccgagggctggaccctgaacggcagcgccgccagaacctgcggcgccaccggccactggagcggcctgctgcccacctgcgaggcccccaccgagagcaacatccccctggtggccggcctgagcgccgccggcctgagcctgctgaccctggcccccttcctgctgtggctgagaaagtgcctgagaaaggccaagaagttcgtgcccgccagcagctgccagagcctggagagcgacggcagctaccagaagcccagctacatcctgtag

SEQ ID NO: 9038 - DNA, 1644 bp, Artificial Sequence
  derived and/or modified sequence
atgatcgccagccagttcctgagcgccctgaccctggtgctgctgatcaaggagagcggcgcctggagctacaacaccagcaccgaggccatgacctacgacgaggccagcgcctactgccagcagagatacacccacctggtggccatccagaacaaggaggagatcgagtacctgaacagcatcctgagctacagccccagctactactggatcggcatcagaaaggtgaacaacgtgtgggtgtgggtgggcacccagaagcccctgaccgaggaggccaagaactgggcccccggcgagcccaacaacagacagaaggacgaggactgcgtggagatctacatcaagagagagaaggacgtgggcatgtggaacgacgagagatgcagcaagaagaagctggccctgtgctacaccgccgcctgcaccaacaccagctgcagcggccacggcgagtgcgtggagaccatcaacaactacacctgcaagtgcgaccccggcttcagcggcctgaagtgcgagcagatcgtgaactgcaccgccctggagagccccgagcacggcagcctggtgtgcagccaccccctgggcaacttcagctacaacagcagctgcagcatcagctgcgacagaggctacctgcccagcagcatggagaccatgcagtgcatgagcagcggcgagtggagcgcccccatccccgcctgcaacgtggtggagtgcgacgccgtgaccaaccccgccaacggcttcgtggagtgcttccagaaccccggcagcttcccctggaacaccacctgcaccttcgactgcgaggagggcttcgagctgatgggcgcccagagcctgcagtgcaccagcagcggcaactgggacaacgagaagcccacctgcaaggccgtgacctgcagagccgtgagacagccccagaacggcagcgtgagatgcagccacagccccgccggcgagttcaccttcaagagcagctgcaacttcacctgcgaggagggcttcatgctgcagggccccgcccaggtggagtgcaccacccagggccagtggacccagcagatccccgtgtgcgaggccttccagtgcaccgccctgagcaaccccgagagaggctacatgaactgcctgcccagcgccagcggcagcttcagatacggcagcagctgcgagttcagctgcgagcagggcttcgtgctgaagggcagcaagagactgcagtgcggccccaccggcgagtgggacaacgagaagcccacctgcgaggtggtgaagtgcagcagcctggccgtgcccggcaagatcaacatgagctgcagcggcgagcccgtgttcggcaccgtgtgcaagttcgcctgccccgagggctggaccctgaacggcagcgccgccagaacctgcggcgccaccggccactggagcggcctgctgcccacctgcgaggcccccaccgagagcaacatccccctggtggccggcctgagcgccgccggcctgagcctgctgaccctggcccccttcctgctgtggctgagaaagtgcctgagaaaggccaagaagttcgtgcccgccagcagctgccagagcctggagagcgacggcagctaccagaagcccagctacatcctgtag

SEQ ID NO: 9039 - protein, 292 aa, Artificial Sequence
  derived and/or modified sequence
MEELTAFVSKSFDQKSKDGNGGGGGGGGKKDSITYREVLESGLARSRELGTSDSSLQDITEGGGHCPVHLFKDHVDNDKEKLKEFGTARVAEGIYECKEKREDVKSEDEDGQTKLKQRRSRTNFTLEQLNELERLFDETHYPDAFMREELSQRLGLSEARVQVWFQNRRAKCRKQENQMHKGVILGTANHLDACRVAPYVNMGALRMPFQQVQAQLQLEGVAHAHPHLHPHLAAHAPYLMFPPPPFGLPIASLAESASAAAVVAAAAKSNSKNSSIADLRLKARKHAEALGL

SEQ ID NO: 9040 - DNA, 3757 bp, Artificial Sequence
  derived and/or modified sequence
cgcctgcttttgcccgggtcctgagaacaggggctccccacactttttttttttttggttttgttttatttcgtttccgcgcgtctctttctactgcaaacagaaatgggagggtggacaggcgggtaggagcggatcagacgcccaggacgcagcagcccgagtccgcacagggtttgcgggaggtggtgaccgcgctggggacgccaggacgcgaatgaacctccggggcgcgctcggggcctgcgctcagagcttggaaaactggagtttgcttttcctccggccacggagagaacgcgggtaacctgtgtggggggctcgggcgcctgcgcccccctcctgcgcgcgcgctctcccttccaaaaatgggatctttcccccttcgcaccaaggtgtacggacgccaaacagtgatgaaatgagaagaaagccaattgccggcctggggggtgggggagacacagcgtctctgcgtgcgtccgccgcggagcccggagaccagtaattgcaccagacaggcagcgcatggggggctgggcgaggtcgccgcgtataaatagtgagatttccaatggaaaggcgtaaataacagcgctggtgatccacccgcgcgcacgggccgtcctctccgcgcggggagacgcgcgcatccaccagccccggctgctcgccagccccggccccagccatggaagagctcacggcttttgtatccaagtcttttgaccagaaaagcaaggacggtaacggcggaggcggaggcggcggaggtaagaaggattccattacgtaccgggaagttttggagagcggactggcgcgctcccgggagctggggacgtcggattccagcctccaggacatcacggagggcggcggccactgcccggtgcatttgttcaaggaccacgtagacaatgacaaggagaaactgaaagaattcggcaccgcgagagtggcagaagggatttatgaatgcaaagagaagcgcgaggacgtgaagtcggaggacgaggacgggcagaccaagctgaaacagaggcgcagccgcaccaacttcacgctggagcagctgaacgagctcgagcgactcttcgacgagacccattaccccgacgccttcatgcgcgaggagctcagccagcgcctggggctctccgaggcgcgcgtgcaggtttggttccagaaccggagagccaagtgccgcaaacaagagaatcagatgcataaaggcgtcatcttgggcacagccaaccacctagacgcctgccgagtggcaccctacgtcaacatgggagccttacggatgcctttccaacaggtccaggctcagctgcagctggaaggcgtggcccacgcgcacccgcacctgcacccgcacctggcggcgcacgcgccctacctgatgttccccccgccgcccttcgggctgcccatcgcgtcgctggccgagtccgcctcggccgccgccgtggtcgccgccgccgccaaaagcaacagcaagaattccagcatcgccgacctgcggctcaaggcgcggaagcacgcggaggccctggggctctgacccgccgcgcagccccccgcgcgcccggactcccgggctccgcgcaccccgcctgcaccgcgcgtcctgcactcaaccccgcctggagctccttccgcggccaccgtgctccgggcaccccgggagctcctgcaagaggcctgaggagggaggctcccgggaccgtccacgcacgacccagccagaccctcgcggagatggtgcagaaggcggagcgggtgagcggccgtgcgtccagcccgggcctctccaaggctgcccgtgcgtcctgggaccctggagaagggtaaacccccgcctggctgcgtcttcctctgctataccctatgcatgcggttaactacacacgtttggaagatccttagagtctattgaaactgcaaagatcccggagctggtctccgatgaaaatgccatttcttcgttgccaacgattttctttactaccatgctccttccttcatcccgagaggctgcggaacgggtgtggatttgaatgtggacttcggaatcccaggaggcaggggccgggctctcctccaccgctcccccggagcctcccaggcagcaataaggaaatagttctctggctgaggctgaggacgtgaaccgcgggctttggaaagggaggggagggagacccgaacctcccacgttgggactcccacgttccggggacctgaatgaggaccgactttataacttttccagtgtttgattcccaaattgggtctggttttgttttggattggtatttttttttttttttttttttttttttttttttgctgtgttacaggattcagacgcaaaagacttgcataagagacggacgcgtggttgcaaggtgtcatactgatatgcagcattaactttactgacatggagtgaagtgcaatattataaatattatagattaaaaaaaaaatagccgtgcactcttgaccccgtcagcgtccaacgtggaaaaggcgttacctcttctcccagcgctggccgcctggccactgagggccctttgcaaaaatcacgggtgtagagatggccctgggcgcgctgggagtgtggttgtgtttctgaaggggataaaagagggcacggtggtgccaagatatcagtttggtacctgagctgtttctggttgggaagcgtaaaagccagggagagatccagagagttttcaagtttttgcagatgtaggtggttccagcttttctttctcccctactccatcttctgcgttcccccagttcttttatttctttgttttttatttttgagacagagacttgctttgtcgcccaggctggagtgcagtggcgcaatgtcagctcactgccacctccgcctcccgggttcaagcgatgctcctgcctcagcctcccgagtagctgggactacaggcacctgccaccacccccggctaattttttgtatttatagtagagacggggtttcaccgtgttggccaggctcgtctcgaactcctgacctcaggtgatctgcccgcctcggcctcccaacgtgcccccagttttataaacagcagatagcaacttgtcgtcacagctggcatgggctggacagttgcttgaaatgacctaaccaaaaacattcaagggttctgcccccagatttcgggagatccacgttccatgttctgattggttttctgggaacacagcaaggggtttggtgacctccgagaagatccatctgcatgattggcattagttaccacagcctgcccagagagaaactatcttctcccaacatttactaacatccactggtcaactctcttatttccataacacatttgcatctttctggattcaagcttggtggttttctttcctaacttctgatttagatacttctccctgaggtggggataaaagaaaaaaaaaaacaacttctttttttcttccgcataacactttctatcttgtcactgagctgaactgtagatccatttggacccgtctcatttgtatcttctgatattctttatacaaaccaaaagtccccttcaacattttttatgtcaaaatgttacaaccgctgtaaaatgacggagagagagagaaagaatcccagacattaacggtattagagagtttgcctcattcatccatttttcttaaaagctggaaattaaaaaaaaaaaagagagagagaggcttt

SEQ ID NO: 9041 - DNA, 879 bp, Artificial Sequence
  derived and/or modified sequence
atggaggagttaacagcattcgtgtcaaagtcctttgaccagaaatccaaggatggcaacgggggcggcgggggcgggggaggcaagaaagattccatcacatatcgcgaagttctggagtcaggcctggccaggagccgcgagcttggcacctctgacagttccctgcaggatataacggaggggggcggccattgtccagtgcacctcttcaaggaccacgtggacaatgacaaggagaaactgaaggagtttggaactgcccgcgtggctgagggcatttatgaatgtaaagagaaaagagaggatgtaaagtcagaggacgaagacggccaaactaagctgaagcagaggcgctcccggacaaatttcaccttagagcagcttaacgagctagagcgactttttgatgaaactcattatcctgatgcctttatgcgagaagagctctcacagaggctcggcctgtccgaagctcgtgtccaggtgtggttccagaacagacgcgcgaagtgtcgtaaacaggaaaaccagatgcacaaaggagtgatattagggaccgctaatcacctggacgcctgtagagtggccccttacgtgaatatgggcgctctccggatgccgttccaacaggtacaggcgcaactccagcttgagggagttgctcacgcacaccctcaccttcacccccacctggccgctcacgctccatacctgatgttcccaccgccgccctttggcctacctatagcctccctagctgagtcagccagtgccgccgccgtcgtagccgcagcggcaaagagcaattccaagaactcttctattgcagacctgcgcctcaaggcccggaagcacgcggaggccttaggattatag

SEQ ID NO: 9042 - DNA, 879 bp, Artificial Sequence
  derived and/or modified sequence
atggaagagctaacagctttcgttagtaagtcgttcgaccagaaaagtaaggacggtaatggaggtgggggcggtggtggagggaaaaaggactcaataacatatcgcgaggtgctggaatccggcctcgcgcgaagcagggagctgggaacatccgattcctcactgcaagatatcactgaaggaggcgggcactgtcctgtccacttgttcaaagaccacgtggataatgataaggagaagctcaaagagtttggcactgcacgtgtagcggagggcatttacgaatgtaaagaaaagcgggaagacgtcaagtctgaggatgaggacgggcagactaagttgaagcaacggcgttcccgaaccaacttcactttggagcaactgaatgagttagagagactgttcgacgagacccactatcctgacgcctttatgcgggaggagcttagtcagaggctgggactgagcgaggctagagtgcaggtttggttccagaatcggcgggcaaaatgcagaaaacaggaaaatcaaatgcacaagggggtaatactcgggacagctaatcacctcgacgcttgtcgcgtggcaccttacgtgaacatgggtgcattgagaatgccgttccagcaggtgcaggctcagttacaactggaaggtgtggctcacgcccacccccacctgcacccacacctggccgctcatgcaccttatctgatgtttcctccgcctccctttggacttcctatcgcatccttggccgaatccgcctccgccgcagccgtggtggccgccgcagccaagtcaaactcaaagaactcttctatcgctgacctgaggctgaaggctcggaagcatgcagaggcactaggtctttag

SEQ ID NO: 9043 - DNA, 879 bp, Artificial Sequence
  derived and/or modified sequence
atggaggagctgacagcctttgtgtccaagagctttgaccagaagagcaaggatggaaatggaggcggcggcggcggcggcggcaagaaggacagcatcacctaccgggaggtgctggagagcggcctggcccggagccgggagctgggcaccagtgacagcagcctgcaggacatcacagagggcggcggccactgccctgtgcacctgttcaaggaccacgtggacaatgacaaggagaagctgaaggagtttggaacagcccgggtggccgagggcatctatgagtgcaaggagaagcgggaggatgtgaagtcagaagatgaagatggccagaccaagctgaagcagaggaggagcaggaccaacttcaccctggagcagctgaatgagctggagcggctgtttgatgagacccactacccagatgccttcatgagggaggagctgagccagaggctgggcctgtctgaggcccgggtgcaggtgtggttccagaacagaagagccaagtgcaggaagcaggagaaccagatgcacaagggcgtcatcctgggcacagccaaccacctggatgcctgccgggtggccccctacgtgaacatgggcgccctgaggatgcccttccagcaggtgcaggcccagctgcagctggagggcgtggcccacgcccacccccacctgcacccccacctggccgcccacgccccctacctgatgttccccccaccacccttcggcctgcccatcgccagcctggccgagagcgccagcgctgctgctgtggtggccgccgccgccaagagcaacagcaagaacagcagcattgctgacctgcggctgaaggccaggaagcatgctgaggccctgggcctgtag

SEQ ID NO: 9044 - DNA, 879 bp, Artificial Sequence
  derived and/or modified sequence
atggaggagctgaccgccttcgtgagcaagagcttcgaccagaagtccaaagacggaaatggcggaggcggcggcggcggtggcaaaaaagactcaattacctatcgagaggtcctggagtccggcctggccaggtccagggagctggggacgtccgactctagcctccaagacattaccgagggggggggtcattgtccagttcatctgtttaaggaccatgtcgataacgataaggaaaaactgaaggaattcggcacggctagagtggccgaagggatttatgaatgcaaagaaaaacgggaagatgtgaagtcggaggacgaggatggacagacaaagctcaaacagagaagatctcgtacaaatttcacactagaacagctgaacgagctggaacggctatttgacgaaacccattatcctgacgcattcatgagggaggaactgagccaacgcttggggctctctgaggctcgggtgcaggtctggtttcagaacagaagagccaagtgcaggaaacaggaaaaccagatgcataagggggtaattctcgggaccgccaaccacttagacgcctgcagagtggctccctacgtgaatatgggcgccctgcggatgcccttccaacaggtgcaggcccagttgcagttggagggggttgcgcacgcacatccccatctccatccccacttagctgcccacgccccatacctcatgtttccccctcccccattcgggctgcccatcgcatcgcttgctgagagtgcctccgctgcggctgtggtcgcagccgccgcgaagagtaactcaaagaacagctcgatcgccgatcttcgccttaaagcccgaaagcatgccgaggccctcggactctag

SEQ ID NO: 9045 - DNA, 879 bp, Artificial Sequence
  derived and/or modified sequence
atggaggagctgaccgccttcgtgagcaagagcttcgaccagaagtctaaggatggtaacgggggcggaggcggtggtgggggtaagaaggatagcataacgtatagggaagtcctcgaatccggcctggccaggagccgcgagctgggtacatccgattcttccctgcaggacattacagagggagggggacactgccccgtgcacttattcaaggaccatgtagacaacgataaggagaaactgaaagagtttggcacagcacgagtagcagaaggcatttacgaatgcaaagagaaacgagaagacgtcaaaagcgaggacgaggacgggcagactaagctgaaacaacgccggtctagaaccaattttactctggagcagttaaacgagctcgaaaggctgttcgacgaaacccactatcctgacgccttcatgcgggaggagctgtctcaacggctcggattgtccgaagccagggttcaggtgtggttccagaaccgccgcgccaaatgtagaaagcaggagaaccagatgcataaaggggtcatcctgggcacggcgaaccacttggatgcctgcagagtcgccccttacgtgaatatgggggcactgcgcatgcctttccaacaggtccaagcccagttacagcttgagggagtagcgcacgctcacccccatctgcaccctcatctggctgctcatgcaccatatctcatgttccctcctcccccctttggacttccaatagcctcactggcagaatctgcttccgccgctgctgtggtggccgcggccgccaagtccaacagcaaaaactccagcatcgccgacctgaggctgaaggctcggaaacacgccgaagcacttgggctctag

SEQ ID NO: 9046 - DNA, 879 bp, Artificial Sequence
  derived and/or modified sequence
atggaggagctgacagcctttgtctctaagagcttcgaccagaagagcaaggacggcaatgggggaggcggaggtggcggaggaaagaaagatagtattacttaccgggaggtgctagaaagcgggctcgcccgatcacgagaacttggtactagcgatagcagcttacaggatattacagagggcggagggcactgcccggtacacctgtttaaggatcacgttgataatgataaagagaagctgaaagagtttggaacagccagagttgcagaaggcatctatgaatgcaaagaaaaaagagaggacgttaagtccgaagatgaggacggccagacaaaacttaaacaacggcgtagcaggacgaatttcacgctggagcaactgaatgaattagaacggcttttcgatgaaacccattaccctgacgcgtttatgcgcgaggaactttcccagcgtctgggactcagcgaggctagagtgcaagtatggttccagaaccgcagggccaagtgtcgcaagcaagagaatcagatgcataagggcgtgattcttggcacggccaaccatctggatgcatgccgcgtggctccctatgtgaacatgggagctctgcgcatgccattccaacaagtgcaggcgcagctacagctggagggggtggcccatgctcatcctcatcttcacccgcacctggcagcccacgccccatacctcatgttcccgccacccccttttggactgcccatcgcatcactggccgagtccgcctcagctgccgctgtggttgcagccgctgctaagtcaaattcaaaaaactcatcgattgcagatctcagactgaaagccagaaaacatgcagaggcccttggtctttag

SEQ ID NO: 9047 - DNA, 879 bp, Artificial Sequence
  derived and/or modified sequence
atggaagagttgaccgcctttgtgtcgaagtcttttgatcagaagtctaaggacggcaatggaggagggggaggtggtggtggaaagaaggatagcatcacttacagagaggtactggagtccgggcttgctcgatctagggaactgggaacctcggacagttcactccaggatataactgagggcggtggccattgcccggtgcacctctttaaagaccatgtggacaatgacaaggaaaaattgaaagagtttggcactgccagggtggccgaaggaatctatgagtgtaaggagaagagggaggatgtgaagtctgaggacgaggatggtcagactaaactgaagcagcgccgttcgcgcacaaattttacactggaacagcttaacgagctcgagcgcctgttcgatgagacccattaccccgacgcttttatgcgcgaagaactcagtcaaaggctgggtctaagtgaggcacgcgtgcaggtgtggttccagaatcgcagggccaaatgtaggaaacaggagaaccagatgcacaaaggtgtgatattgggcacagccaaccacctggacgcctgccgcgtcgcaccttatgtgaacatgggagcgcttcgaatgccctttcagcaggtccaagcacagctgcagttggaaggggtggctcatgcccaccctcaccttcacccacatctggctgctcatgccccttacctcatgttcccccctccaccttttggcctccctattgcatctctggccgaaagcgcctcagcggcagccgtagtggccgctgctgccaagagtaattccaaaaactctagtatagcagacctgagacttaaagccaggaaacacgcagaagccctgggcctttag

SEQ ID NO: 9048 - DNA, 1902 bp, Artificial Sequence
  derived and/or modified sequence
gtgatccacccgcgcgcacgggccgtcctctccgcgcggggagacgcgcgcatccaccagccccggctgctcgccagccccggccccagccatggaagagctcacggcttttgtatccaagtcttttgaccagaaaagcaaggacggtaacggcggaggcggaggcggcggaggtaagaaggattccattacgtaccgggaagttttggagagcggactggcgcgctcccgggagctggggacgtcggattccagcctccaggacatcacggagggcggcggccactgcccggtgcatttgttcaaggaccacgtagacaatgacaaggagaaactgaaagaattcggcaccgcgagagtggcagaagggatttatgaatgcaaagagaagcgcgaggacgtgaagtcggaggacgaggacgggcagaccaagctgaaacagaggcgcagccgcaccaacttcacgctggagcagctgaacgagctcgagcgactcttcgacgagacccattaccccgacgccttcatgcgcgaggagctcagccagcgcctggggctctccgaggcgcgcgtgcaggtttggttccagaaccggagagccaagtgccgcaaacaagagaatcagatgcataaaggcgtcatcttgggcacagccaaccacctagacgcctgccgagtggcaccctacgtcaacatgggagccttacggatgcctttccaacaggtccaggctcagctgcagctggaaggcgtggcccacgcgcacccgcacctgcacccgcacctggcggcgcacgcgccctacctgatgttccccccgccgcccttcgggctgcccatcgcgtcgctggccgagtccgcctcggccgccgccgtggtcgccgccgccgccaaaagcaacagcaagaattccagcatcgccgacctgcggctcaaggcgcggaagcacgcggaggccctggggctctgacccgccgcgcagccccccgcgcgcccggactcccgggctccgcgcaccccgcctgcaccgcgcgtcctgcactcaaccccgcctggagctccttccgcggccaccgtgctccgggcaccccgggagctcctgcaagaggcctgaggagggaggctcccgggaccgtccacgcacgacccagccagaccctcgcggagatggtgcagaaggcggagcgggtgagcggccgtgcgtccagcccgggcctctccaaggctgcccgtgcgtcctgggaccctggagaagggtaaacccccgcctggctgcgtcttcctctgctataccctatgcatgcggttaactacacacgtttggaagatccttagagtctattgaaactgcaaagatcccggagctggtctccgatgaaaatgccatttcttcgttgccaacgattttctttactaccatgctccttccttcatcccgagaggctgcggaacgggtgtggatttgaatgtggacttcggaatcccaggaggcaggggccgggctctcctccaccgctcccccggagcctcccaggcagcaataaggaaatagttctctggctgaggctgaggacgtgaaccgcgggctttggaaagggaggggagggagacccgaacctcccacgttgggactcccacgttccggggacctgaatgaggaccgactttataacttttccagtgtttgattcccaaattgggtctggttttgttttggattggtatttttttttttttttttttttttttttttttttgctgtgttacaggattcagacgcaaaagacttgcataagagacggacgcgtggttgcaaggtgtcatactgatatgcagcattaactttactgacatggagtgaagtgcaatattataaatattatagattaaaaaaaaaatagc

SEQ ID NO: 9049 - DNA, 879 bp, Artificial Sequence
  derived and/or modified sequence
atggaggagctgaccgccttcgtgagcaagagcttcgaccagaagagcaaggacggcaacggcggcggcggcggcggcggcggcaagaaggacagcatcacctacagagaggtgctggagagcggcctggccagaagcagagagctgggcaccagcgacagcagcctgcaggacatcaccgagggcggcggccactgccccgtgcacctgttcaaggaccacgtggacaacgacaaggagaagctgaaggagttcggcaccgccagagtggccgagggcatctacgagtgcaaggagaagagagaggacgtgaagagcgaggacgaggacggccagaccaagctgaagcagagaagaagcagaaccaacttcaccctggagcagctgaacgagctggagagactgttcgacgagacccactaccccgacgccttcatgagagaggagctgagccagagactgggcctgagcgaggccagagtgcaggtgtggttccagaacagaagagccaagtgcagaaagcaggagaaccagatgcacaagggcgtgatcctgggcaccgccaaccacctggacgcctgcagagtggccccctacgtgaacatgggcgccctgagaatgcccttccagcaggtgcaggcccagctgcagctggagggcgtggcccacgcccacccccacctgcacccccacctggccgcccacgccccctacctgatgttcccccccccccccttcggcctgcccatcgccagcctggccgagagcgccagcgccgccgccgtggtggccgccgccgccaagagcaacagcaagaacagcagcatcgccgacctgagactgaaggccagaaagcacgccgaggccctgggcctgtag

SEQ ID NO: 9050 - protein, 348 aa, Artificial Sequence
  derived and/or modified sequence
MNDPNSCVDNATVCSGASCVVPESNFNNILSVVLSTVLTILLALVMFSMGCNVEIKKFLGHIKRPWGICVGFLCQFGIMPLTGFILSVAFDILPLQAVVVLIIGCCPGGTASNILAYWVDGDMDLSVSMTTCSTLLALGMMPLCLLIYTKMWVDSGSIVIPYDNIGTSLVSLVVPVSIGMFVNHKWPQKAKIILKIGSIAGAILIVLIAVVGGILYQSAWIIAPKLWIIGTIFPVAGYSLGFLLARIAGLPWYRCRTVAFETGMQNTQLCSTIVQLSFTPEELNVVFTFPLIYSIFQLAFAAIFLGFYVAYKKCHGKNKAEIPESKENGTEPESSFYKANGGFQPDEK

SEQ ID NO: 9051 - DNA, 1047 bp, Artificial Sequence
  derived and/or modified sequence
atgaatgaccccaattcttgcgttgacaatgccactgtgtgctccggagcttcatgtgtggtgcctgaatccaattttaataacattttaagtgtggtcctcagtactgtgctaaccatactcctagcactcgtgatgttttccatgggatgcaatgttgagattaagaagttcctcggtcacatcaaacgaccatgggggatctgtgtggggtttctgtgtcagttcggcattatgcccctaactgggttcatccttagtgtcgcctttgatatcttgcctctccaggctgtagtcgtgctaattatcggctgctgccctggggggacagcctctaacattctggcttactgggtcgacggagatatggatctgagcgtgtctatgacaacctgtagcaccctgctggctctgggaatgatgccgctctgtctgttgatatacaccaagatgtgggtggactcgggaagcatagtgatcccatacgataatattggaactagcctggttagccttgtggtccccgtcagtattggcatgttcgtcaatcacaaatggcctcagaaagccaagataatcctgaaaataggttctatcgccggtgccatcttgatcgttcttatagctgttgtgggcggaatactgtatcaaagcgcctggattatcgcacctaagttatggatcatcggtaccatcttccccgtcgcggggtactcactagggttcttactcgcacggattgcaggactgccatggtaccgctgtcggacagtggccttcgagactggtatgcaaaacactcagctgtgctccacaatcgtgcagctgtcattcactcctgaagagctgaatgttgtcttcacctttcccttgatttacagtatcttccagcttgccttcgccgcaatctttctcggtttttatgtcgcttacaagaagtgccacggtaagaataaggctgaaatccccgagtcaaaggaaaatgggaccgagcccgagagttccttctacaaagccaatggcggattccagcctgatgaaaagtag

SEQ ID NO: 9052 - DNA, 1047 bp, Artificial Sequence
  derived and/or modified sequence
atgaatgaccccaacagctgtgtggacaatgccaccgtgtgcagcggggccagctgtgtggtgcctgagagcaacttcaacaacatcctgtctgtggtgctgagcacagtgctgaccatcctgctggccctggtgatgttctccatgggctgcaatgtggagatcaagaagttcctgggccacatcaagaggccctggggcatctgtgtgggcttcctgtgccagtttggcatcatgcccctgaccggcttcatcctgtctgtggcctttgacatcctgcccctgcaggccgtggtggtgctgatcatcggctgctgccctgggggcacagccagcaacatcctggcctactgggtggatggagacatggacctgtctgtgtccatgaccacctgcagcaccctgctggccctgggcatgatgcccctgtgcctgctgatctacaccaagatgtgggtggacagcggcagcatcgtcatcccctatgacaacatcggcaccagcctggtgtccctggtggtgcctgtgtccatcggcatgtttgtgaaccacaagtggccccagaaggccaagatcatcctgaagattggcagcattgctggggccatcctgattgtgctgattgctgtggtgggcggcatcctgtaccagagcgcctggatcatcgcccccaagctgtggatcatcggcaccatcttccctgtggccggctacagcctgggcttcctgctggccagaattgctggcctgccctggtaccgctgcaggacagtggcctttgagaccggcatgcagaacacccagctgtgcagcaccatcgtgcagctgtccttcaccccagaggagctgaatgtggtgttcaccttccccctcatctacagcatcttccagctggcctttgctgccatcttcctgggcttctacgtggcctacaagaagtgccacggcaagaacaaggccgagatccctgagagcaaagaaaatggaacagagcctgagagcagcttctacaaggccaacggcggcttccagccagatgagaagtag

SEQ ID NO: 9053 - DNA, 1047 bp, Artificial Sequence
  derived and/or modified sequence
atgaacgaccccaacagctgcgtggacaacgccaccgtgtgcagcggcgcctcctgcgtggttcccgaaagcaatttcaataatattctgtctgtagtgttgtctaccgtcctgactatattgctggctctggtgatgttttccatgggctgcaatgtggagataaagaaattcttgggacacattaagaggccatgggggatctgcgtggggttcctttgccagttcggcattatgcccctgacgggcttcatcctctccgtcgccttcgatattctcccactgcaggcagtggttgttcttattatcggatgctgccccggcggcacagcatccaatatcctggcttactgggtggatggagacatggacttgtccgtgagcatgaccacctgctccacactccttgccttgggcatgatgcctctttgcctgttgatctacaccaaaatgtgggtggattccggttcaatcgtgattccctatgacaacattgggacttctcttgtgtctcttgtggttcccgtctccataggtatgttcgtgaatcacaagtggcctcagaaagcaaaaataattctgaagattggatccatcgccggtgcaatattgatcgttctaattgccgttgtgggagggattctctaccagtccgcctggattattgcccccaagctttggatcattgggaccatcttcccggtcgcgggctactcactgggttttctcctggcgaggattgccggtctcccctggtatcggtgtagaacggtagcttttgaaacaggaatgcagaatacccagctgtgctccaccatagtgcagctgtcctttacaccggaagaactgaacgtggtgttcacattcccccttatctactcaatttttcagttagccttcgctgcaatttttttgggcttctatgtcgcttataagaaatgccatggcaagaataaggcagagattcccgagagtaaggagaacggtactgagcctgagtccagtttttacaaagccaacggaggctttcagcccgatgagaaatag

SEQ ID NO: 9054 - DNA, 1047 bp, Artificial Sequence
  derived and/or modified sequence
atgaatgatcccaattcctgtgtggataatgccacagtgtgttccggcgcaagttgtgtagtccccgagtcaaatttcaataatatcctgtccgtcgtcctgtctacagttctgactattctgcttgccctggtcatgtttagtatggggtgcaacgtggaaattaagaagttcctgggccacattaagagaccctggggaatttgcgtaggattcctgtgccagttcggcatcatgcctctgacggggttcattttgagcgtggcctttgacatcctgccattgcaggccgttgtggtcctgattatcggatgttgtcccggaggcactgcatcgaacattctggcctattgggttgacggggacatggacctgagtgtaagtatgaccacatgctcaacgctcctcgccttaggaatgatgcctctctgtctcctgatttacactaagatgtgggttgacagtggatctattgtcatcccgtatgacaacatcggtacctccctggtgagtcttgtggtcccggtgtctatagggatgttcgtgaaccacaaatggcctcagaaggcaaagatcattctgaagattggctcaattgccggagctattctaatcgtccttattgcagtggtagggggaatcttgtaccagtcagcatggataatcgccccaaaactctggatcattggtacaatcttccctgtggctgggtattcgttgggatttctcctggccagaatcgccggactgccctggtatcggtgcaggaccgtagccttcgaaacaggcatgcagaatacccaactttgctccactatcgtacagctcagctttactcctgaagagctgaatgttgtttttactttcccactcatctattccatcttccaactggcctttgccgctatatttctaggcttttacgtcgcatataaaaagtgccacggaaagaataaagcagagatacctgagagtaaagagaacggcacggaaccagagtcttctttctataaagctaatggtgggttccagccagacgagaaatag

SEQ ID NO: 9055 - DNA, 3777 bp, Artificial Sequence
  derived and/or modified sequence
ttctattgaaagggaaatgggagaacaatatgtgttcctatggctcagtccctataagattctgtactattcagagttgattttaagtgtcacttaactgaaattatccaacaaaccttcatggcatgaaacattaacacagctctttttatatggcatggttcctatggctcaatccctataagattctgtactattcagagttgattttaaaagtcacttaactgaaattatccaacaaaccctcgaggacattaaacattaacgtggctctttttatatggcatggttcattatcatgccaataaatgattaatcgtaactctctgtcttgaccaataattttgctggacttttgtgattcacaacgtgctctgtgttgtaatgctacctcttgaaactgacatcctagctttattgttttttattacttccctaaggtggctttcaaaagagacaccaagtgacatatttttaggaggggtttaaaagtttgatggggtagaagtaaacgttgcttaactcaaccagcagcagagccagggcccagggaccagcgcttctgtggacttggcctttccagcagcagacccagcaatgaatgatccgaacagctgtgtggacaatgcaacagtttgctctggtgcatcctgtgtggtacctgagagcaatttcaataacatcctaagtgtggtcctaagtacggtgctgaccatcctgttggccttggtgatgttctccatgggatgcaacgtggaaatcaagaaatttctagggcacataaagcggccgtggggcatttgtgttggcttcctctgtcagtttggaatcatgcccctcacaggattcatcctgtcggtggcctttgacatcctcccgctccaggccgtagtggtgctcattataggatgctgccctggaggaactgcctccaatatcttggcctattgggtcgatggcgacatggacctgagcgtcagcatgaccacatgctccacactgcttgccctcggaatgatgccgctgtgcctccttatctataccaaaatgtgggtcgactctgggagcatcgtaattccctatgataacataggtacatctctggtttctctcgttgttcctgtttccattggaatgtttgttaatcacaaatggccccaaaaagcaaagatcatacttaaaattgggtccatcgcgggcgccatcctcattgtgctcatagctgtggttggaggaatattgtaccaaagcgcctggatcattgctcccaaactgtggattataggaacaatatttcctgtggcgggttactccctggggtttcttctggctagaattgctggtctaccctggtacaggtgccgaacggttgcttttgaaacggggatgcagaacacgcagctatgttccaccatcgttcagctctccttcactcctgaggagctcaatgtcgtattcaccttcccgctcatctacagcattttccagctcgcctttgccgcaatattcttaggattttatgtggcatacaagaaatgtcatggaaaaaacaaggcagaaattccagagagcaaagaaaatggaacggagccagagtcatcgttttataaggcaaatggaggatttcaacctgacgaaaagtagacatcaagtggacaaaacagacgagttccaaattacgttcttaaaccgtaactatatttaattatttgttttggtaggacagttggcagaaaagagttaaagtgaaaattggaatttcattggaattcatgtattggtttcagtaccaagtgactggtggcccaattctttaatgggacaaatattgtttcctatatatatgtatatgttttatatatgtatgtatactcatatagatatattgtcattgaaatattcccccaaaatattctcagactaaacctgacatagggaacaccgagaatgaaaacatctttaacaccaaaactgaattcttatgcagaatttcctagcccatagatgacaacctgactttctgtatgttaaagtagatgtaatgaattattattattacagtggtcacgattttcttcagtgtttatgattataaaaattgacatgaacatctttcactgacattttaatcattattttaaaagctttgcaacctatatatttatataactttgtaatataacatgggcaaatatctgacttctgtatttttaaaaagttgccttctccagtggcagtccaaaagcagaaatgagaggaaattattacaaaatagaattcaataaccatattggatgcaggctcttaactcagcagggatatcgtacatctattgctctacctcaggggtccagtgatacccactagatcttccaaggaaaaacataattctttcaaacggtgtgtatttggcaaagagctcttcaaatctgggagagggacttcctcaaggttttcctgtgtgcagtggatccacatagctaatatgacagctagtcagttgacagggaccacccacagtaagcaccatggtcagggaggtggcaggaggtgcaaagacagaagtattgagagaaacaccaagactctagtggaggaattaattcaatgggagatagtataaaatacatagaaaacacaagtaacagaaacctggttgaaatgcttaactagagtcaattagatgtgcaggagtaagtagtataagaagaatcaagtccgagagtgatcaggaaatgagtattaaacagtatttgaaacagagaacgtgtcccagggcccaaaagtcagaagggccccaccagccaggaaagttgtttcaatgctgtaagtaggtgtagccaagggaagccaggactatctgatatacggtagcaggggtttacggctgccaggggaaaataactcatcaagtgttggactttcaattataagatcgaatttaatttcctttccctcattctgcagcaatcagaatacacaatcttaaccactcggtccttagtggttttgttccattttgcattgggtattttcactgcctcatagagtctatttcaagtgttttggctgaaagggctttttgcatttgcatgttctgagttcagattctgctggtgcacccaagcattatgggaacaggaactcaacttagctcttccagtagaggggtgagggattctgcttttcaaattcataacattgatctttttatgcaagatttccatttacagttgaataagtacttcatatttttccatcattagacaaatacaaaatggactaaataattttaagagatagtggaggagagggggtacagacttccttcttagagagtgtcagagaatatgctcccaatggtggaaaggaagatttacagtctagcggctaagtacctcctacacatttcccatcaatcagaaaatagacaggtacactaaagggaccctgagaactcctcttgtaatttcaacacacccaaaatcaagggcctggatgccagcagctgcagcaagcaggtttttcctccctgttgagcaagacaggtgagcaagataggacttggctttcttacatgatgcggtaacttgtgacttgagtctttttccctaatttgctagtgggaagaaaaatagctgagctttctaaaatgatagctctctatttttaaatgaatttgaaaagtcgattaaattatgtattttattgcctctgagtatcatattaaatgaatattttattttaaaggcttaaataaatgaaaatgatttttgt

SEQ ID NO: 9056 - DNA, 1047 bp, Artificial Sequence
  derived and/or modified sequence
atgaacgaccccaacagctgcgtggacaacgccaccgtgtgcagcggcgccagctgcgtggtgcccgagagcaacttcaacaacatcctgagcgtggtgctgagcaccgtgctgaccatcctgctggccctggtgatgttcagcatgggctgcaacgtggagatcaagaagttcctgggccacatcaagagaccctggggcatctgcgtgggcttcctgtgccagttcggcatcatgcccctgaccggcttcatcctgagcgtggccttcgacatcctgcccctgcaggccgtggtggtgctgatcatcggctgctgccccggcggcaccgccagcaacatcctggcctactgggtggacggcgacatggacctgagcgtgagcatgaccacctgcagcaccctgctggccctgggcatgatgcccctgtgcctgctgatctacaccaagatgtgggtggacagcggcagcatcgtgatcccctacgacaacatcggcaccagcctggtgagcctggtggtgcccgtgagcatcggcatgttcgtgaaccacaagtggccccagaaggccaagatcatcctgaagatcggcagcatcgccggcgccatcctgatcgtgctgatcgccgtggtgggcggcatcctgtaccagagcgcctggatcatcgcccccaagctgtggatcatcggcaccatcttccccgtggccggctacagcctgggcttcctgctggccagaatcgccggcctgccctggtacagatgcagaaccgtggccttcgagaccggcatgcagaacacccagctgtgcagcaccatcgtgcagctgagcttcacccccgaggagctgaacgtggtgttcaccttccccctgatctacagcatcttccagctggccttcgccgccatcttcctgggcttctacgtggcctacaagaagtgccacggcaagaacaaggccgagatccccgagagcaaggagaacggcaccgagcccgagagcagcttctacaaggccaacggcggcttccagcccgacgagaagtag

SEQ ID NO: 9057 - protein, 643 aa, Artificial Sequence
  derived and/or modified sequence
MEAVETGERPTFGAWDYGVFALMLLVSTGIGLWVGLARGGQRSAEDFFTGGRRLAALPVGLSLSASFMSAVQVLGVPSEAYRYGLKFLWMCLGQLLNSVLTALLFMPVFYRLGLTSTYEYLEMRFSRAVRLCGTLQYIVATMLYTGIVIYAPALILNQVTGLDIWASLLSTGIICTFYTAVGGMKAVVWTDVFQVVVMLSGFWVVLARGVMLVGGPRQVLTLAQNHSRINLMDFNPDPRSRYTFWTFVVGGTLVWLSMYGVNQAQVQRYVACRTEKQAKLALLINQVGLFLIVSSAACCGIVMFVFYTDCDPLLLGRISAPDQYMPLLVLDIFEDLPGVPGLFLACAYSGTLSTASTSINAMAAVTVEDLIKPRLRSLAPRKLVIISKGLSLIYGSACLTVAALSSLLGGGVLQGSFTVMGVISGPLLGAFILGMFLPACNTPGVLAGLGAGLALSLWVALGATLYPPSEQTMRVLPSSAARCVALSVNASGLLDPALLPANDSSRAPSSGMDASRPALADSFYAISYLYYGALGTLTTVLCGALISCLTGPTKRSTLAPGLLWWDLARQTASVAPKEEVAILDDNLVKGPEELPTGNKKPPGFLPTNEDRLFFLGQKELEGAGSWTPCVGHDGGRDQQETNL

SEQ ID NO: 9058 - DNA, 1932 bp, Artificial Sequence
  derived and/or modified sequence
atggaggccgtggagaccggcgagagacccaccttcggcgcctgggactacggcgtgttcgccctgatgctgctggtgagcaccggcatcggcctgtgggtgggcctggccagaggcggccagagaagcgccgaggacttcttcaccggcggcagaagactggccgccctgcccgtgggcctgagcctgagcgccagcttcatgagcgccgtgcaggtgctgggcgtgcccagcgaggcctacagatacggcctgaagttcctgtggatgtgcctgggccagctgctgaacagcgtgctgaccgccctgctgttcatgcccgtgttctacagactgggcctgaccagcacctacgagtacctggagatgagattcagcagagccgtgagactgtgcggcaccctgcagtacatcgtggccaccatgctgtacaccggcatcgtgatctacgcccccgccctgatcctgaaccaggtgaccggcctggacatctgggccagcctgctgagcaccggcatcatctgcaccttctacaccgccgtgggcggcatgaaggccgtggtgtggaccgacgtgttccaggtggtggtgatgctgagcggcttctgggtggtgctggccagaggcgtgatgctggtgggcggccccagacaggtgctgaccctggcccagaaccacagcagaatcaacctgatggacttcaaccccgaccccagaagcagatacaccttctggaccttcgtggtgggcggcaccctggtgtggctgagcatgtacggcgtgaaccaggcccaggtgcagagatacgtggcctgcagaaccgagaagcaggccaagctggccctgctgatcaaccaggtgggcctgttcctgatcgtgagcagcgccgcctgctgcggcatcgtgatgttcgtgttctacaccgactgcgaccccctgctgctgggcagaatcagcgcccccgaccagtacatgcccctgctggtgctggacatcttcgaggacctgcccggcgtgcccggcctgttcctggcctgcgcctacagcggcaccctgagcaccgccagcaccagcatcaacgccatggccgccgtgaccgtggaggacctgatcaagcccagactgagaagcctggcccccagaaagctggtgatcatcagcaagggcctgagcctgatctacggcagcgcctgcctgaccgtggccgccctgagcagcctgctgggcggcggcgtgctgcagggcagcttcaccgtgatgggcgtgatcagcggccccctgctgggcgccttcatcctgggcatgttcctgcccgcctgcaacacccccggcgtgctggccggcctgggcgccggcctggccctgagcctgtgggtggccctgggcgccaccctgtacccccccagcgagcagaccatgagagtgctgcccagcagcgccgccagatgcgtggccctgagcgtgaacgccagcggcctgctggaccccgccctgctgcccgccaacgacagcagcagagcccccagcagcggcatggacgccagcagacccgccctggccgacagcttctacgccatcagctacctgtactacggcgccctgggcaccctgaccaccgtgctgtgcggcgccctgatcagctgcctgaccggccccaccaagagaagcaccctggcccccggcctgctgtggtgggacctggccagacagaccgccagcgtggcccccaaggaggaggtggccatcctggacgacaacctggtgaagggccccgaggagctgcccaccggcaacaagaagccccccggcttcctgcccaccaacgaggacagactgttcttcctgggccagaaggagctggagggcgccggcagctggaccccctgcgtgggccacgacggcggcagagaccagcaggagaccaacctgtag

SEQ ID NO: 9059 - DNA, 1932 bp, Artificial Sequence
  derived and/or modified sequence
atggaggctgtcgagaccggcgaacgccctacgtttggagcctgggattacggagtattcgccctgatgttacttgtgagcaccggaatcggcctctgggtgggattggctcgcggtggccagagatcggctgaggatttcttcacgggaggccgtaggctcgctgctctacccgtcggcttgtctcttagtgctagcttcatgtctgcagtgcaagttctgggggtcccttccgaggcataccgatacggcctgaaattcctgtggatgtgtctgggccaattattaaactctgtgttgactgcactactctttatgccagttttctaccgcctgggtcttacatctacctacgaatacctcgaaatgcgttttagtcgggcggtgcggttatgtggaacattgcagtatattgtcgccaccatgctttacacaggaatcgtcatatacgccccggccttaattttaaatcaggtcacaggtctggacatctgggcaagcctattatctacaggaatcatttgcacattctatacagcggtcggtggcatgaaggccgtggtgtggacagacgtattccaggttgttgtgatgctgtccggattttgggtcgtgttggcccggggcgtgatgctcgtcggcggcccacgccaggtgctgaccctggcccaaaatcattctaggattaatcttatggattttaatccagacccaaggagtagatatacattttggacctttgtcgtgggcggcaccctggtgtggctgtccatgtacggggtgaatcaggcccaggtccagcgatacgtggcttgccggacggagaaacaggccaagctcgcacttctgatcaaccaagtgggcctgttccttatcgtgagctctgctgcctgctgtggcattgtcatgtttgtattctatacagattgtgaccctcttcttctcggtagaatctccgctccagatcagtacatgcctctcttggtgctcgacattttcgaagatcttccgggtgtcccagggctgtttctcgcttgcgcctatagtgggaccctgagtactgcatcaacgagtataaacgcaatggccgctgttaccgtggaggatctgattaagccccggttacgatctctcgctccaagaaagctggtgattatcagtaaggggttgtctctgatctatggaagtgcttgcctgaccgtcgccgctcttagctcacttttgggtggaggcgtgctccaggggtcattcaccgtgatgggtgtcataagcgggccgttgttgggtgcctttatattaggaatgtttctgccggcttgcaacacgcccggggtactagcaggtctgggcgccggacttgctcttagtctgtgggtggcgctcggggctacattgtatccccccagcgagcagactatgcgagtattgccaagtagcgctgcaagatgtgttgccctcagtgtgaacgcctcagggctgcttgacccagccttgctgcccgcgaatgatagcagccgggccccaagctcagggatggatgcgtctcgacccgcactcgcagatagtttttacgcgatctcttatctctactatggcgcacttggaacgctcaccactgtcctgtgcggtgcactgatcagttgcctaacaggccccacaaaacgctcaacactcgcgccaggactcctttggtgggatctggccagacagactgcatcagtggccccaaaggaggaagtggcaatattggatgacaacctcgtaaaaggacccgaagagctgccgacaggcaataaaaagcctcctgggtttttacccaccaacgaggaccgtctttttttcctcggccagaaggaactggagggggcgggatcctggacaccgtgcgtgggacatgatggtggcagagatcagcaggaaacaaatctgtag

SEQ ID NO: 9060 - DNA, 1932 bp, Artificial Sequence
  derived and/or modified sequence
atggaggccgtggagaccggggagcggcccaccttcggggcctgggactatggagtgtttgccctgatgctgctggtgtccacaggcatcggcctgtgggtgggcctggcccggggcggccagaggtctgctgaggacttcttcaccggcggccggcggctggccgccctgcctgtgggcctgagcctgagcgccagcttcatgtctgctgtgcaggtgctgggcgtgcccagcgaggcctaccgctatggcctgaagttcctgtggatgtgcctgggccagctgctgaacagcgtgctgacagccctgctcttcatgcctgtgttctaccgcctgggcctgaccagcacctatgagtacctggagatgaggttcagcagagctgtgcggctgtgtggcaccctgcagtacatcgtggccaccatgctgtacacaggaattgtcatctatgccccagccctgatcctgaaccaggtgacaggcctggacatctgggccagcctgctgagcacaggcatcatctgcaccttctacacagctgtgggcggcatgaaggctgtggtgtggacagatgtgttccaggtggtggtgatgctgagcggcttctgggtggtgctggcccggggcgtgatgctggtgggcggcccccggcaggtgctgaccctggcccagaaccacagccgcatcaacctgatggacttcaacccagaccccaggagccgctacaccttctggacctttgtggtgggcggcaccctggtgtggctgtccatgtatggagtgaaccaggcccaggtgcagagatatgtggcctgcaggacagagaagcaggccaagctggccctgctgatcaaccaggtgggcctcttcctgattgtgtcctctgctgcctgctgcggcatcgtgatgtttgtgttctacacagactgtgaccccctgctgctgggccgcatcagcgccccagaccagtacatgcccctgctggtgctggacatctttgaggacctgcccggggtgcccggcctcttcctggcctgtgcctacagcggcaccctgagcacagccagcaccagcatcaatgccatggctgctgtgacagtggaggacctgatcaagccccggctgcggagcctggcccccaggaagctggtgatcatcagcaagggcctgagcctcatctacggcagcgcctgcctgactgtggccgccctgagcagcctgctgggcggcggcgtgctgcagggcagcttcaccgtgatgggcgtcatcagcggccccctgctgggcgccttcatcctgggcatgttcctgcctgcctgcaacaccccaggagtgctggccggcctgggcgccggcctggccctgagcctgtgggtggccctgggcgccaccctgtacccaccttctgagcagaccatgagggtgctgcccagcagcgctgcccgctgtgtggccctgtctgtgaatgccagcggcctgctggaccctgccctgctgcctgccaatgacagcagccgggcccccagcagcggcatggatgccagcaggcctgccctggccgacagcttctacgccatctcctacctgtactatggagccctgggcaccctgaccaccgtgctgtgtggggccctgatcagctgcctgaccggccccaccaagaggagcaccctggcccctggcctgctgtggtgggacctggcccggcagacagcctctgtggcccccaaggaggaggtggccatcctggatgacaacctggtgaagggccctgaggagctgcccaccggcaacaagaagcccccaggcttcctgcccaccaatgaagatagactcttcttcctgggccagaaggagctggagggcgccggctcctggaccccctgtgtgggccatgatggcggccgggaccagcaggagaccaacctgtag

SEQ ID NO: 9061 - DNA, 1932 bp, Artificial Sequence
  derived and/or modified sequence
atggaggccgtggagaccggcgagcggcccaccttcggcgcctgggattatggcgtgttcgcccttatgcttctcgtctcaacaggcattgggctgtgggtgggacttgcgcgtggagggcagagatccgctgaggatttcttcaccggcggacggcgtcttgccgcactgcctgttggcctgagcctcagcgccagttttatgtctgctgttcaggtgctgggagtgccatctgaagcatacagatatggcttgaaatttctgtggatgtgtctggggcagttgctgaatagcgtgctgacagcactgctgtttatgcccgtcttttataggctgggcctaaccagcacatatgaatacctagaaatgagattctctagggctgtcaggctgtgcggaaccctgcaatacatcgtcgccacgatgctatacacaggcattgtcatatacgccccggccctgatcctcaatcaggtgacaggactggatatctgggcctccctcttgagtaccggcattatctgtaccttttatacagctgtcggaggaatgaaagctgtcgtttggacagatgtgtttcaagtggtggtgatgttgagtggtttctgggtcgtcttagcacgtggcgtcatgctagtaggtgggcccaggcaggtattgactctggcacagaaccattccagaatcaacctcatggacttcaacccggaccccagaagcaggtacacattctggacgttcgtggtgggcggaacgctggtttggctgtcaatgtacggcgtgaaccaggcccaagtgcaacgctacgttgcctgtagaaccgagaaacaggcaaagctggcactgctaatcaatcaagttggcctctttttaatcgtgtcatcagctgcctgttgtggcatcgtgatgttcgttttctatactgattgcgatccattgctgctgggcagaattagcgcacccgaccagtatatgcccctccttgtgctggacatattcgaagatcttcctggtgtgccgggcttattcctggcctgcgcttacagtggaactctcagcacagcatcaacttctattaacgccatggccgccgtgactgtggaggacctgatcaagccgcgcctcaggtcccttgccccacggaaactggtgattatatccaaaggtcttagccttatctacggctctgcctgtctgacggtggctgccctgtcatccctgttgggagggggagtgttgcagggttcattcactgtcatgggcgtgatctcaggcccacttctgggagcttttatactgggcatgtttctgccagcctgcaacacaccaggcgtgttagcaggcttgggcgccggcctggctctcagtctttgggtggccctgggggccacgttgtacccgccgtccgagcaaacaatgcgtgtcctgccttccagcgctgccagatgcgtcgccctcagtgtgaacgctagcggtctgctggaccctgccctcctgccagccaacgattcctcaagagcacctagctccggaatggacgcaagccggcccgctctcgcagactcgttctacgctatctcctacttatactatggggcattgggcactttgacgaccgtcctgtgtggagcattaatctcttgcctcactggacccactaagaggtccacattggctccaggactgttatggtgggatctggctaggcagacggccagcgtcgctcctaaggaggaggtggcaatccttgacgacaacctggtaaagggcccggaagagctgcctaccggtaacaaaaagccccctggctttctcccaaccaacgaggatagactgttcttcctcggtcagaaagagctagagggggccggctcttggacaccttgtgtggggcacgacggcgggagagaccagcaggaaacgaacctgtag

SEQ ID NO: 9062 - DNA, 1932 bp, Artificial Sequence
  derived and/or modified sequence
atggaagccgtcgagacaggggaaagaccaactttcggagcttgggattacggggtcttcgcattgatgcttttggtgtccacgggaatcggattgtgggtggggctcgctagaggcggacagaggagtgccgaggacttcttcacagggggtagacgactagccgctctcccagtgggcttgtcactatccgcctctttcatgagtgctgttcaggtgctgggtgtgccttccgaagcctatcggtacggacttaagtttctttggatgtgcctcgggcagctcttgaacagcgtgctcaccgctctgttgttcatgcctgtgttttaccggctgggacttacatccacctacgaatatctcgaaatgagattttcaagggcagtacgtctttgtggtacactgcagtacatcgtggccactatgctgtacactggaatcgtgatttacgctcccgcattgattctcaatcaggtgacgggcctcgacatctgggcctctttgctttccactgggatcatttgcaccttttacaccgccgtggggggtatgaaggccgtcgtatggacagatgtgtttcaggtggttgtcatgctttcaggtttctgggtagttctggccagaggcgtgatgctagttgggggaccgagacaggtactcactctcgcgcagaaccacagccggattaatctgatggattttaaccccgatccacggtcccggtacacattctggacttttgtggtggggggtactttagtatggctctcgatgtatggcgtgaaccaggcacaggtgcaaaggtacgtggcctgtaggaccgagaagcaagctaagctcgctctcctgatcaatcaagtggggctcttccttattgtctcgtcagccgcttgttgtgggatcgtcatgtttgtcttctacactgactgtgaccctctgcttttaggccgaattagtgcacctgatcagtatatgcctctcctcgtgctcgatatctttgaggacctgccgggagtccccggtctgttcctcgcttgcgcgtattctgggaccctgagcaccgcgagcacctccatcaacgccatggccgctgtgacagttgaagatttgatcaaacccagacttagaagcttagcgccaagaaaactggttatcattagcaagggcttgtctctgatttacggctcagcctgtctcaccgtcgcagcgctctcctcactgcttggaggcggagtcctgcaaggttcatttacggtgatgggcgttatttccgggcctcttctcggcgctttcattctcggtatgttcctgccagcatgtaatacacccggtgtgttagcagggctgggagccggactcgctctttcactctgggtagcactgggtgctaccctctaccctccgtcagagcaaaccatgagggtcttaccatcttcagccgctcgttgtgtcgcgcttagtgtgaatgccagcggattgctggatcctgcactgcttcccgctaacgattctagccgcgcaccctccagtgggatggacgccagcagaccggcactagccgattcattttatgctattagttatctctactacggggcactcggtaccctcacaacagtattatgtggtgcccttatctcatgccttaccggcccaacgaaacgatccacattggcacccggacttctgtggtgggacctcgccaggcagacagccagcgtagcgccaaaagaggaagtcgctattcttgacgataacctggtcaagggacccgaggagctcccaacaggcaacaagaaaccccctggatttttgcctactaatgaggacagactctttttcctaggtcagaaggagctagaaggtgccggatcctggacaccatgcgtgggtcacgacggcggacgggatcagcaggaaacaaacttgtag

SEQ ID NO: 9063 - DNA, 3575 bp, Artificial Sequence
  derived and/or modified sequence
gctgtcagcgctgagcacagcgcccagggagagggacagacagccggctgcatgggacagcggaacccagagtgagaggggaggtggcaggacagacagacagcaggggcggacgcagagacagacagcggggacagggaggccgacacggacatcgacagcccatagattcctaacccagggagccccggcccctctcgccgcttcccaccccagacggagcggggacaggctgccgagcatcctcccacccgccctccccgtcctgcctcctcggcccctgccagcttcccccgcttgagcacgcagggcgtccgaggacgcgctgggcctccgcacccgccctcatggaggccgtggagaccggggaacggcccaccttcggagcctgggactacggggtctttgccctcatgctcctggtgtccactggcatcgggctgtgggtcgggctggctcggggcgggcagcgcagcgctgaggacttcttcaccgggggccggcgcctggcggccctgcccgtgggcctgtcgctgtctgccagcttcatgtcggccgtgcaggtgctgggcgtgccgtcggaggcctatcgctatggcctcaagttcctctggatgtgcctgggccagcttctgaactcggtcctcaccgccctgctcttcatgcccgtcttctaccgcctgggcctcaccagcacctacgagtacctggagatgcgcttcagccgcgcagtgcggctctgcgggactttgcagtacattgtagccacgatgctgtacaccggcatcgtaatctacgcaccggccctcatcctgaaccaagtgaccgggctggacatctgggcgtcgctcctgtccaccggaattatctgcaccttctacacggctgtgggcggcatgaaggctgtggtctggactgatgtgttccaggtcgtggtgatgctaagtggcttctgggttgtcctggcacgcggtgtcatgcttgtgggcgggccccgccaggtgctcacgctggcccagaaccactcccggatcaacctcatggactttaaccctgacccgaggagccgctatacattctggacttttgtggtgggtggcacgttggtgtggctctccatgtatggcgtgaaccaggcgcaggtgcagcgctacgtggcttgccgcacagagaagcaggccaagctggccctgctcatcaaccaggtcggcctgttcctgatcgtgtccagcgctgcctgctgtggcatcgtcatgtttgtgttctacactgactgcgaccctctcctcctggggcgcatctctgccccagaccagtacatgcctctgctggtgctggacatcttcgaagatctgcctggagtccccgggcttttcctggcctgtgcttacagtggcaccctcagcacagcatccaccagcatcaatgctatggctgcagtcactgtagaagacctcatcaaacctcggctgcggagcctggcacccaggaaactcgtgattatctccaaggggctctcactcatctacggatcggcctgtctcaccgtggcagccctgtcctcactgctcggaggaggtgtccttcagggctccttcaccgtcatgggagtcatcagcggccccctgctgggagccttcatcttgggaatgttcctgccggcctgcaacacaccgggcgtcctcgcgggactaggcgcgggcttggcgctgtcgctgtgggtggccttgggcgccacgctgtacccacccagcgagcagaccatgagggtcctgccatcgtcggctgcccgctgcgtggctctctcagtcaacgcctctggcctcctggacccggctctcctccctgctaacgactccagcagggcccccagctcaggaatggacgccagccgacccgccttagctgacagcttctatgccatctcctatctctattacggtgccctgggcacgctgaccactgtgctgtgcggagccctcatcagctgcctgacaggccccaccaagcgcagcaccctggccccgggattgttgtggtgggacctcgcacggcagacagcatcagtggcccccaaggaagaagtggccatcctggatgacaacttggtcaagggtcctgaagaactccccactggaaacaagaagccccctggcttcctgcccaccaatgaggatcgtctgtttttcttggggcagaaggagctggagggggctggctcttggaccccctgtgttggacatgatggtggtcgagaccagcaggagacaaacctctgaggacagggccagccgcgggactgacaccctgggatggaacctcaggatgggccaaacccagacaacgggcccatggccttgggctctgattggctggattgccttgtatgcaaatgagttcaggactacaataccctaccctatggggaggccctgcctccgggaggtcattttttaaatccagccccttgcttcaaccgtccccagtattagacgctgcagccctgacggctccccccaaataaggctgggtttttctctctctcttttttttttttttttttttttgagacagggtcatgctctgtcacccaggctggagtgcagtggtgtgatctcggctcactgcaacctctgcctcccaggctcaagtgattctcctgcctcagcctcttgagtagctgggattgtaggtgcccaccaccatgcccagccaactttttgtatttttagtagagacagggtttcaccatgttggtcaggctggtctcgaactcctgacctcaagtgatccacctgcctcggcctcccaaagtgctgggttacaggcgtaagctaccatgcccagcctaccgtttttctcaatctataatagaaagccaccacgcccaggtaatttttgtaattttgtatttttgtagagacggggttttgccatgttggccaggctggtctcaaactcctgatctcaggtgatcctcctgccttggcctcccaaagggctgggattacaggggtgagccaccgcgccccacctctttcttattttcttcctgggattggggaggggatgattcagaccccacatggcctccaaccttggcccacacacctgccatggctcccatcatcctgagcatgctagcgtcccctcctcacctgacaatggaggctctcgaattgggttgtgtccccccaaaatttatgtctacccagaacctcagaacatgagcttacttggaaatagggtctttgcaggtgtaactggttaaattaaaagaggtattactggaggaggatggatgaatccagtgactggttcctcatatgaagtagagaagagatgcagagaaacacatggggaagatgccacgtgaagacagaggcagtggttggatcaatgcatctacgagtcggagaacccaaggattgccagcaacaaccagaaatcaggaggggggcatgagatgcattatttcttagagcctttagagggaacatggccctactgacaccttgatgtcagacttctggctgctagaactgtcagagaataaatttctgttgtttgatgcc

SEQ ID NO: 9064 - protein, 154 aa, Artificial Sequence [sequence omitted]

SEQ ID NO: 9065 - protein, 35 aa, Artificial Sequence
  derived and/or modified sequence
MATKAVCVLKGDGPVQGIINFEQKESNGPEGVGKH

SEQ ID NO: 9066 - DNA, 465 bp, Artificial Sequence
  derived and/or modified sequence
atggccaccaaggccgtgtgcgtgctgaagggcgacggccccgtgcagggcatcatcaacttcgagcagaaggagagcaacggccccgtgaaggtgtggggcagcatcaagggcctgaccgagggcctgcacggcttccacgtgcacgagttcggcgacaacaccgccggctgcaccagcgccggcccccacttcaaccccctgagcagaaagcacggcggccccaaggacgaggagagacacgtgggcgacctgggcaacgtgaccgccgacaaggacggcgtggccgacgtgagcatcgaggacagcgtgatcagcctgagcggcgaccactgcatcatcggcagaaccctggtggtgcacgagaaggccgacgacctgggcaagggcggcaacgaggagagcaccaagaccggcaacgccggcagcagactggcctgcggcgtgatcggcatcgcccagtag

SEQ ID NO: 9067 - DNA, 108 bp, Artificial Sequence
  derived and/or modified sequence
atggccaccaaggccgtgtgcgtgctgaagggcgacggccccgtgcagggcatcatcaacttcgagcagaaggagagcaacggccccgagggcgtgggcaagcactag

SEQ ID NO: 9068 - DNA, 465 bp, Artificial Sequence
  derived and/or modified sequence
atggccacaaaggcagtgtgtgtcctgaagggggacggacccgtacagggtattattaacttcgagcagaaagaatccaatgggcctgtgaaagtatggggcagtatcaagggcctgaccgaaggcctgcacggcttccatgtgcacgagtttggcgacaacacagctgggtgcactagcgcaggtcctcatttcaaccctctgtcaaggaagcacggtgggcccaaggatgaggagcgccacgtgggagacctggggaatgtgactgctgataaagacggggtagcagatgtgtctatcgaggattcagtgatctcgctgagcggcgaccactgtattatcggtcgtaccttggtcgtgcacgagaaggccgacgatctcgggaagggcggcaatgaggagtccacaaagacgggcaatgctgggtctcgcttagcctgtggagtaatcgggatcgctcaatag

SEQ ID NO: 9069 - DNA, 108 bp, Artificial Sequence
  derived and/or modified sequence
atggcaacgaaagcggtgtgtgtactcaaaggagatggccctgtgcaaggaattatcaatttcgaacagaaagaaagcaacgggcctgagggtgtgggtaagcactag

SEQ ID NO: 9070 - DNA, 465 bp, Artificial Sequence
  derived and/or modified sequence
atggccaccaaggctgtgtgtgtgctgaagggagatggccctgtgcagggcatcatcaactttgagcagaaggagagcaatggacctgtgaaggtgtggggcagcatcaagggcctgacagagggcctgcacggcttccacgtgcatgaatttggagacaacacagctggctgcaccagcgctggcccccacttcaaccccctgagcaggaagcacggcggccccaaggatgaggagagacatgtgggggacctgggcaatgtgacagctgacaaggatggagtggctgatgtgtccattgaagattctgtcatcagcctgagcggggaccactgcatcatcggccgcaccctggtggtgcatgagaaggcagatgacctgggcaaaggaggaaatgaggagagcaccaagacaggaaatgccggcagccggctggcctgtggggtcatcggcatcgcccagtag

SEQ ID NO: 9071 - DNA, 108 bp, Artificial Sequence
  derived and/or modified sequence
atggccaccaaggctgtgtgtgtgctgaagggagatggccctgtgcagggcatcatcaactttgagcagaaggagagcaatggacctgagggcgtgggcaagcactag

SEQ ID NO: 9072 - DNA, 465 bp, Artificial Sequence
  derived and/or modified sequence
atggccaccaaggccgtgtgcgtgctgaagggcgacggccccgtgcaaggcatcattaattttgagcagaaggaaagtaatgggcctgtgaaagtctggggatccatcaagggactcactgaggggttgcacggtttccacgtccacgagtttggagacaataccgcaggctgtacctcggctggaccacactttaatcctctcagtcgtaaacacggaggacccaaagatgaagagcggcacgttggcgatctgggcaatgtgacagcagacaaggatggcgtcgctgatgtctcaatcgaggacagtgtgatctctctgtctggggatcactgcatcatcgggagaactctggtcgtgcacgaaaaagcagacgaccttggcaaaggtggcaacgaagagagcaccaaaaccgggaacgccggctcccggcttgcctgtggcgtgattggcatcgcccagtag

SEQ ID NO: 9073 - DNA, 108 bp, Artificial Sequence
  derived and/or modified sequence
atggccaccaaggccgtgtgcgtgctgaagggcgacggccccgtgcaggggattattaatttcgagcagaaagaaagtaacggtccagagggcgtaggtaagcactag

SEQ ID NO: 9074 - DNA, 465 bp, Artificial Sequence
  derived and/or modified sequence
atggcaaccaaggcagtgtgtgttttgaagggcgatggtccagtccaaggcatcattaacttcgaacaaaaagaatcaaatggcccagttaaagtctgggggagcattaagggcttaacggaggggcttcacgggttccacgtacatgagttcggagataacacagcagggtgtacatccgcgggtccccatttcaaccctctgagtcgtaaacacggaggcccaaaagacgaggagaggcatgttggtgacttagggaatgttacagcagataaggacggtgtggccgatgtcagtatcgaggattcggtgatttctctttctggtgaccactgcatcatcggcagaactctagttgtgcacgagaaagctgacgacctcggcaaaggagggaatgaggaatctactaagactgggaacgcgggttcccgtctggcctgtggcgttatcggcattgctcaatag

SEQ ID NO: 9075 - DNA, 108 bp, Artificial Sequence
  derived and/or modified sequence
atggctacaaaggctgtatgtgtcctcaaaggagacggccctgtccagggcatcattaactttgaacagaaagagagtaacggacccgaaggggtaggtaaacactag

SEQ ID NO: 9076 - DNA, 966 bp, Artificial Sequence
  derived and/or modified sequence
gtttggggccagagtgggcgaggcgcggaggtctggcctataaagtagtcgcggagacggggtgctggtttgcgtcgtagtctcctgcagcgtctggggtttccgttgcagtcctcggaaccaggacctcggcgtggcctagcgagttatggcgacgaaggccgtgtgcgtgctgaagggcgacggcccagtgcagggcatcatcaatttcgagcagaaggaaagtaatggaccagtgaaggtgtggggaagcattaaaggactgactgaaggcctgcatggattccatgttcatgagtttggagataatacagcaggctgtaccagtgcaggtcctcactttaatcctctatccagaaaacacggtgggccaaaggatgaagagaggcatgttggagacttgggcaatgtgactgctgacaaagatggtgtggccgatgtgtctattgaagattctgtgatctcactctcaggagaccattgcatcattggccgcacactggtggtccatgaaaaagcagatgacttgggcaaaggtggaaatgaagaaagtacaaagacaggaaacgctggaagtcgtttggcttgtggtgtaattgggatcgcccaataaacattcccttggatgtagtctgaggccccttaactcatctgttatcctgctagctgtagaaatgtatcctgataaacattaaacactgtaatcttaaaagtgtaattgtgtgactttttcagagttgctttaaagtacctgtagtgagaaactgatttatgatcacttggaagatttgtatagttttataaaactcagttaaaatgtctgtttcaatgacctgtattttgccagacttaaatcacagatgggtattaaacttgtcagaatttctttgtcattcaagcctgtgaataaaaaccctgtatggcacttattatgaggctattaaaagaatccaaattcaaactaaa

SEQ ID NO: 9077 - DNA, 625 bp, Artificial Sequence
  derived and/or modified sequence
ctcctgcagcgtctggggtttccgttgcagtcctcggaaccaggacctcggcgtggcctagcgagttatggcgacgaaggccgtgtgcgtgctgaagggcgacggcccagtgcagggcatcatcaatttcgagcagaaggaaagtaatggaccagaaggtgtggggaagcattaaaggactgactgaaggcctgcatggattccatgttcatgagtttggagataatacagcaggctgtaccagtgcaggtcctcactttaatcctctatccagaaaacacggtgggccaaaggatgaagagaggcatgttggagacttgggcaatgtgactgctgacaaagatggtgtggccgatgtgtctattgaagattctgtgatctcactctcaggagaccattgcatcattggccgcacactggtggtccatgaaaaagcagatgacttgggcaaaggtggaaatgaagaaagtacaaagacaggaaacgctggaagtcgtttggcttgtggtgtaattgggatcgcccaataaacattcccttggatgtagtctgaggccccttaactcatctgttatcctgctagctgtagaaatgtatcctgataaacattaaacactgtaatctt

SEQ ID NO: 9078 - protein, 433 aa, Artificial Sequence
  derived and/or modified sequence
MEVVDPQQLGMFTEGELMSVGMDTFIHRIDSTEVIYQPRRKRAKLIGKYLMGDLLGEGSYGKVKEVLDSETLCRRAVKILKKKKLRRIPNGEANVKKEIQLLRRLRHKNVIQLVDVLYNEEKQKMYMVMEYCVCGMQEMLDSVPEKRFPVCQAHGYFCQLIDGLEYLHSQGIVHKDIKPGNLLLTTGGTLKISDLGVAEALHPFAADDTCRTSQGSPAFQPPEIANGLDTFSGFKVDIWSAGVTLYNITTGLYPFEGDNIYKLFENIGKGSYAIPGDCGPPLSDLLKGMLEYEPAKRFSIRQIRQHSWFRKKHPPAEAPVPIPPSPDTKDRWRSMTVVPYLEDLHGADEDEDLFDIEDDIIYTQDFTVPGQVPEEEASHNGQRRGLPKAVCMNGTEAAQLSTKSRAEGRAPNPARKACSASSKIRRLSACKQQ

SEQ ID NO: 9079 - protein, 432 aa, Artificial Sequence
  derived and/or modified sequence
MEVVDPQQLGMFTEGELMSVGMDTFIHRIDSTEVIYQPRRKRAKLIGKYLMGDLLGEGSYGKVKEVLDSETLCRRAVKILKKKKLRRIPNGEANVKKEIQLLRRLRHKNVIQLVDVLYNEEKQKMYMVMEYCVCGMQEMLDSVPEKRFPVCQAHGYFCQLIDGLEYLHSQGIVHKDIKPGNLLLTTGGTLKISDLGVAEALHPFAADDTCRTSQGSPAFQPPEIANGLDTFSGFKVDIWSAGVTLYNITTGLYPFEGDNIYKLFENIGKGSYAIPGDCGPPLSDLLKGMLEYEPAKRFSIRQIRQHSWFRKKHPPAEAPVPIPPSPDTKDRWRSMTVVPYLEDLHGADEDEDLFDIEDDIIYTQDFTVPGQVPEEEASHNGQRRGLPKAVCMNGTEAAQLSTKSRAEAGPPTLPARPAASSKIRRLSACKQQ

SEQ ID NO: 9080 - DNA, 1302 bp, Artificial Sequence
  derived and/or modified sequence
atggaggtggtggacccccagcagctgggcatgttcaccgagggcgagctgatgagcgtgggcatggacaccttcatccacagaatcgacagcaccgaggtgatctaccagcccagaagaaagagagccaagctgatcggcaagtacctgatgggcgacctgctgggcgagggcagctacggcaaggtgaaggaggtgctggacagcgagaccctgtgcagaagagccgtgaagatcctgaagaagaagaagctgagaagaatccccaacggcgaggccaacgtgaagaaggagatccagctgctgagaagactgagacacaagaacgtgatccagctggtggacgtgctgtacaacgaggagaagcagaagatgtacatggtgatggagtactgcgtgtgcggcatgcaggagatgctggacagcgtgcccgagaagagattccccgtgtgccaggcccacggctacttctgccagctgatcgacggcctggagtacctgcacagccagggcatcgtgcacaaggacatcaagcccggcaacctgctgctgaccaccggcggcaccctgaagatcagcgacctgggcgtggccgaggccctgcaccccttcgccgccgacgacacctgcagaaccagccagggcagccccgccttccagccccccgagatcgccaacggcctggacaccttcagcggcttcaaggtggacatctggagcgccggcgtgaccctgtacaacatcaccaccggcctgtaccccttcgagggcgacaacatctacaagctgttcgagaacatcggcaagggcagctacgccatccccggcgactgcggcccccccctgagcgacctgctgaagggcatgctggagtacgagcccgccaagagattcagcatcagacagatcagacagcacagctggttcagaaagaagcacccccccgccgaggcccccgtgcccatcccccccagccccgacaccaaggacagatggagaagcatgaccgtggtgccctacctggaggacctgcacggcgccgacgaggacgaggacctgttcgacatcgaggacgacatcatctacacccaggacttcaccgtgcccggccaggtgcccgaggaggaggccagccacaacggccagagaagaggcctgcccaaggccgtgtgcatgaacggcaccgaggccgcccagctgagcaccaagagcagagccgagggcagagcccccaaccccgccagaaaggcctgcagcgccagcagcaagatcagaagactgagcgcctgcaagcagcagtag

SEQ ID NO: 9081 - DNA, 1299 bp, Artificial Sequence
  derived and/or modified sequence
atggaggtggtggacccccagcagctgggcatgttcaccgagggcgagctgatgagcgtgggcatggacaccttcatccacagaatcgacagcaccgaggtgatctaccagcccagaagaaagagagccaagctgatcggcaagtacctgatgggcgacctgctgggcgagggcagctacggcaaggtgaaggaggtgctggacagcgagaccctgtgcagaagagccgtgaagatcctgaagaagaagaagctgagaagaatccccaacggcgaggccaacgtgaagaaggagatccagctgctgagaagactgagacacaagaacgtgatccagctggtggacgtgctgtacaacgaggagaagcagaagatgtacatggtgatggagtactgcgtgtgcggcatgcaggagatgctggacagcgtgcccgagaagagattccccgtgtgccaggcccacggctacttctgccagctgatcgacggcctggagtacctgcacagccagggcatcgtgcacaaggacatcaagcccggcaacctgctgctgaccaccggcggcaccctgaagatcagcgacctgggcgtggccgaggccctgcaccccttcgccgccgacgacacctgcagaaccagccagggcagccccgccttccagccccccgagatcgccaacggcctggacaccttcagcggcttcaaggtggacatctggagcgccggcgtgaccctgtacaacatcaccaccggcctgtaccccttcgagggcgacaacatctacaagctgttcgagaacatcggcaagggcagctacgccatccccggcgactgcggcccccccctgagcgacctgctgaagggcatgctggagtacgagcccgccaagagattcagcatcagacagatcagacagcacagctggttcagaaagaagcacccccccgccgaggcccccgtgcccatcccccccagccccgacaccaaggacagatggagaagcatgaccgtggtgccctacctggaggacctgcacggcgccgacgaggacgaggacctgttcgacatcgaggacgacatcatctacacccaggacttcaccgtgcccggccaggtgcccgaggaggaggccagccacaacggccagagaagaggcctgcccaaggccgtgtgcatgaacggcaccgaggccgcccagctgagcaccaagagcagagccgaggccggcccccccaccctgcccgccagacccgccgccagcagcaagatcagaagactgagcgcctgcaagcagcagtag

SEQ ID NO: 9082 - DNA, 1302 bp, Artificial Sequence
  derived and/or modified sequence
atggaggtagtcgacccacagcagcttggaatgtttaccgagggtgaactaatgtctgtgggaatggatacgttcattcacagaatcgattctaccgaagtcatttaccagccccgaaggaagagagcaaagttaattgggaaatacctgatgggggacttgctaggagagggctcgtacggcaaggtcaaggaagtactcgacagcgagacgttgtgcagacgagctgtgaagatcctcaagaaaaagaagctgaggcggatccccaatggagaagccaatgttaaaaaggagatacagctgctgcggcgcctgagacacaagaacgtgatccagctggtcgatgttctgtataatgaagagaaacagaagatgtatatggtcatggaatactgcgtctgcggcatgcaggaaatgttggatagcgtgccggagaagcggtttcctgtttgtcaggcacacggctatttttgccagctgatcgatggcttggaatatttacactcccagggcatcgtccacaaggacatcaaacccgggaatttactgctcaccacgggcggcacactcaaaatttctgatctgggagtcgccgaagccctgcatccattcgctgccgacgacacttgtagaacctctcagggatcccctgcattccagccacctgagatcgccaacggactggacacattttctgggtttaaggttgacatttggagcgcaggagtgactctgtacaacatcactacgggactctacccctttgagggagacaatatctataagctcttcgagaatattggaaagggcagctacgccattcccggagactgtggacctccactctccgacctgcttaaaggcatgctggaatacgagccggctaagcgcttctctataagacagattagacagcactcgtggttcaggaagaaacaccctcccgcggaggccccagtaccaattccaccatctcccgataccaaagaccgttggcgttcaatgaccgtggtgccctacttagaggatttacacggggccgacgaagatgaggacttgtttgatattgaagatgatattatttatacgcaggattttactgtgcccggacaagtcccggaggaagaggcaagccacaatggccagcgccgtggcttgcccaaggctgtgtgtatgaacggaaccgaggccgcgcagctgtctactaaatcaagagcggagggcagggctcccaatccggccagaaaagcctgtagcgcctcatcaaaaattaggagactgagcgcttgcaaacagcaatag

SEQ ID NO: 9083 - DNA, 1299 bp, Artificial Sequence
  derived and/or modified sequence
atggaagtcgtagacccccaacagctaggtatgtttacagaaggcgagctgatgtccgtggggatggacacattcatacataggatcgacagcacagaagtaatatatcagcccaggcggaagagggcgaaactcattggcaagtacctgatgggcgatctcctcggagaaggctcctacgggaaagtgaaagaggtcctggattcagagaccctgtgcaggagggcggtgaaaatcttgaagaagaagaagctgaggcgcatacccaatggtgaagccaacgttaaaaaagagatccagctactgcgaagacttaggcataagaacgtgatacaacttgtcgacgtgctctacaatgaggaaaagcagaagatgtacatggttatggagtactgtgtgtgtgggatgcaggaaatgctcgattcggtgcccgagaagagattccctgtgtgtcaagcgcatgggtacttttgtcagctgatcgatggtcttgaatacctgcactcccagggaattgttcataaggatattaaacctggcaacctcctcttgactactggcggaacactgaaaatctcagacctgggggtcgctgaggccttacacccctttgcagccgacgacacctgtcgcacctcccaaggatctcctgccttccagcctccagaaatagccaacgggctcgatacattttcaggattcaaggtggacatttggagtgccggggtgactctgtacaatattaccacgggtctctatccatttgagggggacaacatatacaagctatttgagaacatcggcaaagggtcttatgcaatcccaggcgattgtggccctcccctgagtgatctgctgaagggcatgctagagtatgaaccggctaagcgctttagcattcgacagattagacagcattcatggttcagaaaaaagcatccgcccgctgaagcccctgtccctattccacccagtccagatactaaggacagatggagaagtatgaccgtcgtgccctacttggaggatctgcatggcgccgatgaagacgaagacttatttgacatcgaagacgacatcatctatacacaagactttaccgtgcccggtcaggtgccagaagaagaagcaagtcataatggccagaggcgcgggcttccaaaagcagtctgcatgaatggcaccgaagccgcgcagttatctactaagtcacgggccgaggccggacccccaactctgcctgcccggcctgcagcctctagtaaaattcgaaggcttagtgcttgtaagcagcaatag

SEQ ID NO: 9084 - DNA, 1302 bp, Artificial Sequence
  derived and/or modified sequence
atggaggtggtggacccccagcagctgggcatgttcacagaaggagagctgatgtctgtgggcatggacaccttcatccacagaattgacagcacagaggtgatctaccagcccaggaggaagagggccaagctgattggcaagtacctgatgggagacctgctgggggagggcagctatggcaaggtgaaggaggtgctggacagcgagaccctgtgccggcgggctgtgaagatcctgaagaagaagaagctgcggcgcatccccaacggggaggccaacgtgaagaaggagatccagctgctgcggcggctgcggcacaagaatgtcatccagctggtggatgtgctgtacaatgaggagaagcagaagatgtacatggtgatggagtactgtgtgtgtggcatgcaggagatgctggacagcgtgcctgagaagcgcttccctgtgtgccaggcccacggctacttctgccagctgattgatggcctggagtacctgcacagccagggcatcgtgcacaaggacatcaagccaggcaacctgctgctgaccaccggcggcaccctgaagatcagtgacctgggcgtggccgaggccctgcacccctttgctgctgatgacacctgcaggaccagccagggcagccctgccttccagcccccagagatcgccaacggcctggacaccttcagcggcttcaaggtggacatctggagcgctggggtgaccctgtacaacatcaccaccggcctgtacccctttgaaggagacaacatctacaagctgtttgaaaatattggcaagggcagctatgccatccctggggactgtggcccccccctgagtgacctgctgaagggcatgctggagtatgagcccgccaagcgcttcagcatccggcagatccggcagcacagctggttcaggaagaagcaccccccagctgaggcccctgtgcccatcccccccagcccagacaccaaggaccgctggaggtccatgacagtggtgccctacctggaggacctgcatggagcagatgaagatgaggacctgtttgatattgaagatgacatcatctacacccaggacttcaccgtgcccggccaggtgcctgaggaggaggccagccacaacggccagaggcggggcctgcccaaggctgtgtgcatgaatggaacagaagctgcccagctgagcaccaagagcagagctgagggccgggcccccaacccagccaggaaggcctgcagcgccagcagcaagatccggcggctgagcgcctgcaagcagcagtag

SEQ ID NO: 9085 - DNA, 1299 bp, Artificial Sequence
  derived and/or modified sequence
atggaggtggtggacccccagcagctgggcatgttcacagaaggagagctgatgtctgtgggcatggacaccttcatccacagaattgacagcacagaggtgatctaccagcccaggaggaagagggccaagctgattggcaagtacctgatgggagacctgctgggggagggcagctatggcaaggtgaaggaggtgctggacagcgagaccctgtgccggcgggctgtgaagatcctgaagaagaagaagctgcggcgcatccccaacggggaggccaacgtgaagaaggagatccagctgctgcggcggctgcggcacaagaatgtcatccagctggtggatgtgctgtacaatgaggagaagcagaagatgtacatggtgatggagtactgtgtgtgtggcatgcaggagatgctggacagcgtgcctgagaagcgcttccctgtgtgccaggcccacggctacttctgccagctgattgatggcctggagtacctgcacagccagggcatcgtgcacaaggacatcaagccaggcaacctgctgctgaccaccggcggcaccctgaagatcagtgacctgggcgtggccgaggccctgcacccctttgctgctgatgacacctgcaggaccagccagggcagccctgccttccagcccccagagatcgccaacggcctggacaccttcagcggcttcaaggtggacatctggagcgctggggtgaccctgtacaacatcaccaccggcctgtacccctttgaaggagacaacatctacaagctgtttgaaaatattggcaagggcagctatgccatccctggggactgtggcccccccctgagtgacctgctgaagggcatgctggagtatgagcccgccaagcgcttcagcatccggcagatccggcagcacagctggttcaggaagaagcaccccccagctgaggcccctgtgcccatcccccccagcccagacaccaaggaccgctggaggtccatgacagtggtgccctacctggaggacctgcatggagcagatgaagatgaggacctgtttgatattgaagatgacatcatctacacccaggacttcaccgtgcccggccaggtgcctgaggaggaggccagccacaacggccagaggcggggcctgcccaaggctgtgtgcatgaatggaacagaagctgcccagctgagcaccaagagcagagctgaggccggcccccccaccctgcctgcccggcctgctgccagcagcaagatccggcggctgagcgcctgcaagcagcagtag

SEQ ID NO: 9086 - DNA, 1302 bp, Artificial Sequence
  derived and/or modified sequence
atggaggtggtggacccccagcagctgggcatgttcaccgagggcgagttgatgagcgttggtatggacacattcatccaccgtatagatagcactgaggttatctaccaacctcgcagaaaacgcgctaaactgatcggcaaatatctcatgggcgaccttctgggggaggggagttatggcaaggtgaaagaagttctggactctgaaacactctgtaggcgtgcagtgaagattcttaaaaagaagaagctgagacgcattccgaacggcgaggccaacgtgaagaaggaaatccaattactgcgcagactgcgtcacaaaaatgttattcagttggtggatgtgctgtacaatgaggagaaacagaagatgtacatggtcatggagtattgcgtgtgcggaatgcaagagatgttggattcggttccagagaaaaggttccccgtttgccaggcccatggatacttttgtcaactgatagatggtctcgagtatctccacagccaggggattgtccacaaggatatcaagcctgggaatctgttactcacgacaggaggaacactgaagatatctgacctgggggtggccgaagctttgcatccattcgccgccgacgatacctgtcggacctcacagggcagcccggcatttcagcctcctgaaattgctaacggactagacaccttttctggcttcaaggtcgacatatggtcagccggggtcacactgtacaatattactactgggctgtatcccttcgagggcgacaacatctacaaactcttcgagaacataggaaagggtagttatgccatacccggagattgcggtccacccctgtccgatttgttgaaaggtatgcttgaatatgagcctgcaaaaaggttttccattcggcagatccggcaacacagctggttccgaaaaaagcacccaccagctgaggccccggttcctatacccccgagtcccgacactaaggataggtggagatctatgacggtggtcccatatctcgaggacctacatggagcagacgaggatgaagacctcttcgatatcgaagacgacatcatctacacacaagactttacggtgcctggacaagtgcctgaggaggaagcatctcataatggccagcggcgcgggcttccaaaggccgtgtgtatgaacggaacagaagctgctcagctgagtaccaagagccgggccgagggtcgagctcctaatcctgctagaaaagcatgctctgcttccagcaaaattcgcaggctgtcagcctgtaagcagcagtag

SEQ ID NO: 9087 - DNA, 1299 bp, Artificial Sequence
  derived and/or modified sequence
atggaggtggtggacccccagcagctgggcatgttcaccgagggcgaattgatgtccgtggggatggacacattcattcaccgcatcgactcaacggaagtgatctaccaaccccgacggaagcgcgctaagctgataggaaaatatcttatgggcgatctgctcggtgaaggcagttatggaaaagtgaaggaggtcctcgatagcgaaacactctgccgccgggcagtgaaaatactaaagaaaaaaaaattgagaagaatccctaacggagaggccaatgtgaagaaggagattcaacttctgcgcagactcaggcataaaaacgtcattcaactagtcgacgttctgtataatgaagaaaaacagaaaatgtatatggtgatggagtattgcgtgtgcggtatgcaggagatgctcgattcagtgcctgagaaacgtttccctgtgtgtcaagcacatggttacttctgtcagctcatcgacgggctggagtacctccactcacaggggatcgttcacaaagacataaaaccgggaaacctgctccttaccacaggagggactttgaaaattagtgatctaggagtggccgaggcacttcacccattcgcggccgacgatacgtgtcgcaccagccagggtagccctgcttttcaaccccctgagatcgctaacgggttagatacctttagcggctttaaggttgacatctggagcgccggtgtgacactatacaatataactaccggtctgtatcccttcgaaggggacaacatttacaagctgttcgagaacattgggaaagggagctatgccattccaggcgattgcgggccccctctgtctgatctactaaaggggatgttggagtacgagcccgctaagagattctccattcgacagatacggcagcacagctggtttcggaagaaacacccccctgcagaggcgccagtcccaattccccccagcccggacactaaagatagatggcgcagcatgactgtcgttccttacttggaagatttgcatggagcagatgaggacgaagacctctttgacattgaggatgacattatctacacacaggactttacagtgcctggtcaggtccccgaagaggaggcatcgcacaacggccagcggcgagggctcccaaaggctgtctgcatgaacggcacagaggccgctcaacttagcactaaaagccgtgccgaggccggacctcccactctgcctgcacggcccgccgcgagttctaaaatccggcggctgagtgcctgcaaacagcagtag

SEQ ID NO: 9088 - DNA, 1302 bp, Artificial Sequence
  derived and/or modified sequence
atggaagtcgtggaccctcaacagctgggaatgtttactgagggagaactaatgtccgtgggcatggatacctttatccatcgcattgactctaccgaggtcatctaccagccaaggcgtaaacgggcaaagcttatcgggaagtatcttatgggagacctgctgggagagggctcatatgggaaagtgaaggaggttctggattcagagactctttgtaggagggccgtgaaaatccttaaaaagaagaaactacggcgtatcccaaacggcgaggcaaatgtcaaaaaggaaattcagcttctgcgacgccttcggcataagaacgtcatacagcttgtggacgtcttatacaatgaggagaagcaaaagatgtatatggtgatggaatactgcgtgtgtggcatgcaggaaatgttagacagcgtgccagaaaagagatttccggtgtgccaggcccatggctatttttgtcagctgatcgacggactggaatatctgcatagccaggggatagtgcataaggatatcaagcctggaaacctgctgctcactaccggcggaaccttgaagattagtgatctgggagtggccgaagctcttcaccccttcgctgcagatgatacgtgtcggacatctcaggggtcccctgcattccagcctccagagatcgcgaacggtctcgacacattcagcggttttaaggtggacatctggtcggccggtgttaccctttataatattactacaggattatacccgtttgaaggggacaatatctacaaacttttcgaaaacataggtaaaggatcttatgccattccaggcgactgtggccctccactgagcgacttgctaaagggcatgttagagtatgaacccgcaaaacggttcagcatacgccagatcagacagcacagctggtttcgaaagaaacaccctccagccgaggctcccgtccctattccaccctctccagatacaaaggacagatggagatcaatgactgtggtcccttatctggaggatctgcatggagctgacgaggatgaggacctgttcgacattgaagatgatatcatttacacgcaggacttcaccgttccaggccaagtgcctgaggaagaggcaagccataatggccagaggcgaggcctaccaaaagcggtctgcatgaatggcactgaggccgcacagctctctaccaagtctcgcgcagagggtagggcccctaaccctgcccgtaaagcctgcagcgcaagcagcaaaattcgacggttaagcgcatgtaagcaacagtag

SEQ ID NO: 9089 - DNA, 1299 bp, Artificial Sequence
  derived and/or modified sequence
atggaggtggttgacccccaacagttggggatgtttaccgagggagaactcatgtcagtaggcatggataccttcatacataggatcgacagtactgaggtaatctatcagcccagaaggaaaagagccaagctgatcggtaagtacttgatgggagatctccttggcgagggctcatatggcaaagtcaaggaagtgctggattccgaaaccctctgccgcagagctgtaaaaattctgaagaagaagaaactgagacgaattccgaatggcgaggctaacgtgaaaaaagaaatacagttacttaggaggttaaggcacaaaaacgttatccagttggtcgacgttctgtacaatgaggagaagcaaaagatgtacatggtcatggagtattgtgtgtgtggtatgcaggagatgttggattccgtccctgaaaagcggtttccagtgtgtcaggcccatggctacttttgccagttaattgatggactggagtatctgcacagtcagggtattgtgcacaaggatatcaagcccggaaatttactgctgaccactggcggtacccttaaaatttccgacctgggagtcgcagaggccctccatccattcgcagccgacgacacgtgccggaccagccaaggctcccccgcattccagcccccagaaatcgccaatggacttgataccttttcagggttcaaggtcgacatctggtcggccggagtgactctttataatatcaccaccgggctctatccgttcgagggcgacaacatatacaagctatttgaaaatatcggcaagggatcctacgccatcccaggcgattgcggccctccattgagtgacctactgaaaggcatgcttgagtatgagccagccaagagattcagcatacggcaaatccgccagcattcttggttccgcaaaaaacatccaccagcagaagcgcctgtgccaattcctccttctcctgacaccaaagaccggtggagatcaatgaccgtcgtgccctacctggaagatctccacggcgctgatgaggatgaagacctcttcgatatcgaggacgatataatttatacgcaggacttcactgtgcccggacaggttccggaggaggaagcatcacacaacggccagcggcgaggcctgcctaaggcagtatgcatgaacggtaccgaggcagcacaactgtctaccaaatctcgggcagaagctggccctccaacactgccagccagaccagccgctagcagtaagataaggcggctcagtgcctgtaaacaacagtag

SEQ ID NO: 9090 - DNA, 3276 bp, Artificial Sequence
  derived and/or modified sequence
gcgtgtcgggcgcggaagggggaggcggcccggggcgcccgcgagtgaggcgcggggcggcgaagggagcgcgggtggcggcacttgctgccgcggccttggatgggctgggcccccctcgccgctccgcctcctccacacgcgcggcggccgcggcgagggggacgcgccgcccggggcccggcaccttcgggaaccccccggcccggagcctgcggcctgcgccgcctcggccgccgggagccccgtggagcccccgccgccgcgccgccccgcggaccggacgctgagggcactcggggcggggcgcgcgctcgggcagacgtttgcggggaggggggcgcctgccgggccccggcgaccaccttgggggtcgcgggccggctcggggggcgcccagtgcgggccctcgcgggcgccgggcagcgaccagccctgagcggagctgttggccgcggcgggaggcctcccggacgcccccagccccccgaacgctcgcccgggccggcgggagtcggcgccccccgggaggtccgctcggtcgtccgcggcggagcgtttgctcctgggacaggcggtgggaccggggcgtcgccggagacgcccccagcgaagttgggctctccaggtgtgggggtcccggggggtagcgacgtcgcggacccggcctgtgggatgggcggcccggagaagactgcgctcggccgtgttcatacttgtccgtgggcctgaggtccccggaggatgacctagcactgaaaagccccggccggcctccccagggtccccgaggacgaagttgaccctgaccgggccgtctcccagttctgaggcccgggtcccactggaactcgcgtctgagccgccgtcccggacccccggtgcccgccggtccgcagaccctgcaccgggcttggactcgcagccgggactgacgtgtagaacaatcgtttctgttggaagaagggtttttcccttccttttggggtttttgttgccttttttttttcttttttctttgtaaaattttggagaagggaagtcggaacacaaggaaggaccgctcacccgcggactcagggctggcggcgggactccaggaccctgggtccagcatggaggtggtggacccgcagcagctgggcatgttcacggagggcgagctgatgtcggtgggtatggacacgttcatccaccgcatcgactccaccgaggtcatctaccagccgcgccgcaagcgggccaagctcatcggcaagtacctgatgggggacctgctgggggaaggctcttacggcaaggtgaaggaggtgctggactcggagacgctgtgcaggagggccgtcaagatcctcaagaagaagaagttgcgaaggatccccaacggggaggccaacgtgaagaaggaaattcaactactgaggaggttacggcacaaaaatgtcatccagctggtggatgtgttatacaacgaagagaagcagaaaatgtatatggtgatggagtactgcgtgtgtggcatgcaggaaatgctggacagcgtgccggagaagcgtttcccagtgtgccaggcccacgggtacttctgtcagctgattgacggcctggagtacctgcatagccagggcattgtgcacaaggacatcaagccggggaacctgctgctcaccaccggtggcaccctcaaaatctccgacctgggcgtggccgaggcactgcacccgttcgcggcggacgacacctgccggaccagccagggctccccggctttccagccgcccgagattgccaacggcctggacaccttctccggcttcaaggtggacatctggtcggctggggtcaccctctacaacatcaccacgggtctgtaccccttcgaaggggacaacatctacaagttgtttgagaacatcgggaaggggagctacgccatcccgggcgactgtggccccccgctctctgacctgctgaaagggatgcttgagtacgaaccggccaagaggttctccatccggcagatccggcagcacagctggttccggaagaaacatcctccggctgaagcaccagtgcccatcccaccgagcccagacaccaaggaccggtggcgcagcatgactgtggtgccgtacttggaggacctgcacggcgcggacgaggacgaggacctcttcgacatcgaggatgacatcatctacactcaggacttcacggtgcccggacaggtcccagaagaggaggccagtcacaatggacagcgccggggcctccccaaggccgtgtgtatgaacggcacagaggcggcgcagctgagcaccaaatccagggcggagggccgggcccccaaccctgcccgcaaggcctgctccgccagcagcaagatccgccggctgtcggcctgcaagcagcagtgaggctggccgcctgcagcccgtgtccaggagccccgccaggtgcccgcgccaggccctcagtcttcctgccggttccgcccgccctcccggagaggtggccgccatgcttctgtgccgaccacgccccaggacctccggagcgccctgcagggccgggcagggggacagcagggaccgggcgcagccctcccccctcggccgcccggcagtgcacgcggcttgttgacttcgcagccccgggcggagccttcccgggcgggcgtgggaggagggaggcggcctccatgcactttatgtggagactactggccccgcccgtggcctcgtgctccgcagggcgcccagcgccgtccggcggccccgccgcagaccagctggcgggtgtggagaccaggctcctgaccccgccatgcatgcagcgccacctggaagccgcgcggccgctttggttttttgtttggttggttccattttctttttttctttttttttttaagaaaaaataaaaggtggatttgagctgtggctgtgaggggtgtttgggagctgctgggtggcaggggggctgtggggtcgggctcacgtcgcggccgcctttgcgctctcgggtcaccctgctttggcggcccggccggagggcaggaccctcacctctcccccaaggccactgcgctcttgggaccccagagaaaacccggagcaagcaggagtgtgcggtcaatatttatatcatccagaaaagaaaaacacgagaaacgccatcgcgggatggtgcagacgcggcggggactcggagggtgccgtgcgggcgaggccgcccaaatttggcaataaataaagcttgggaagcttggacctg

SEQ ID NO: 9091 - DNA, 2777 bp, Artificial Sequence
  derived and/or modified sequence
cgggcgcggaagggggaggcggcccggggcgcccgcgagtgaggcgcggggcggcgaagggagcgcgggtggcggcacttgctgccgcggccttggatgggctgggcccccctcgccgctccgcctcctccacacgcgcggcggccgcggcgagggggacgcgccgcccggggcccggcaccttcgggaaccccccggcccggagcctgcggcctgcgccgcctcggccgccgggagccccgtggagcccccgccgccgcgccgccccgcggaccggacgctgagcggagctgttggccgcggcgggaggcctcccggacgcccccagccccccgaacgctcgcccgggccggcgggagtcggcgccccccgggaggtccgctcggtcgtccgcggcggagcgtttgctcctgggacaggcggtgggaccggggcgtcgccggagacgcccccagcgaagttgggctctccaggtgtgggggtcccggggggtagcgacgtcgcggacccggcctgtgggatgggcggcccggagaagactgcgctcggccgtgttcatacttgtccgtgggcctgaggtccccggaggatgacctagcactgaaaagccccggccggcctccccagggtccccgaggacgaagttgaccctgaccgggccgtctcccagttctgaggcccgggtcccactggaactcgcgtctgagccgccgtcccggacccccggtgcccgccggtccgcagaccctgcaccgggcttggactcgcagccgggactgacgtgtagaacaatcgtttctgttggaagaagggtttttcccttccttttggggtttttgttgccttttttttttcttttttctttgtaaaattttggagaagggaagtcggaacacaaggaaggaccgctcacccgcggactcagggctggcggcgggactccaggaccctgggtccagcatggaggtggtggacccgcagcagctgggcatgttcacggagggcgagctgatgtcggtgggtatggacacgttcatccaccgcatcgactccaccgaggtcatctaccagccgcgccgcaagcgggccaagctcatcggcaagtacctgatgggggacctgctgggggaaggctcttacggcaaggtgaaggaggtgctggactcggagacgctgtgcaggagggccgtcaagatcctcaagaagaagaagttgcgaaggatccccaacggggaggccaacgtgaagaaggaaattcaactactgaggaggttacggcacaaaaatgtcatccagctggtggatgtgttatacaacgaagagaagcagaaaatgtatatggtgatggagtactgcgtgtgtggcatgcaggaaatgctggacagcgtgccggagaagcgtttcccagtgtgccaggcccacgggtacttctgtcagctgattgacggcctggagtacctgcatagccagggcattgtgcacaaggacatcaagccggggaacctgctgctcaccaccggtggcaccctcaaaatctccgacctgggcgtggccgaggcactgcacccgttcgcggcggacgacacctgccggaccagccagggctccccggctttccagccgcccgagattgccaacggcctggacaccttctccggcttcaaggtggacatctggtcggctggggtcaccctctacaacatcaccacgggtctgtaccccttcgaaggggacaacatctacaagttgtttgagaacatcgggaaggggagctacgccatcccgggcgactgtggccccccgctctctgacctgctgaaagggatgcttgagtacgaaccggccaagaggttctccatccggcagatccggcagcacagctggttccggaagaaacatcctccggctgaagcaccagtgcccatcccaccgagcccagacaccaaggaccggtggcgcagcatgactgtggtgccgtacttggaggacctgcacggcgcggacgaggacgaggacctcttcgacatcgaggatgacatcatctacactcaggacttcacggtgcccggacaggtcccagaagaggaggccagtcacaatggacagcgccggggcctccccaaggccgtgtgtatgaacggcacagaggcggcgcagctgagcaccaaatccagggcggaggccgggcccccaaccctgcccgcaaggcctgctgccagcagcaagatccgccggctgtcggcctgcaagcagcagtgaggctggccgcctgcagcccgtgtccaggagccccgccaggtgcccgcgccaggccctcagtcttcctgccggttccgcccgccctcccggagaggtggccgccatgcttctgtgccgaccacgccccaggacctccggagcgccctgcagggccgggcagggggacagcagggaccgggcgcagccctcccccctcggccgcccggcagtgcacgcggcttgttgacttcgcagccccgggcggagccttcccgggcgggcgtgggaggagggaggcggcctccatgcactttatgtggagactactggccccgcccgtggcctcgtgctccgcagggcgcccagcgccgtccggcggccccgccgcagaccagctggcgggtgtggagaccaggctcctgaccccgccatgcatgcagcgccacctggaagccgcgcggccgctttggttttttgtttggttggttccattttctttttttctttttttttttaagaaaaaataaaaggtggatttg

SEQ ID NO: 9092 - protein, 162 aa, Artificial Sequence
  derived and/or modified sequence
MLLLHRAVVLRLQQACRLKSIPSRICIQACSTNDSFQPQRPSLTFSGDNSSTQGWRVMGTLLGLGAVLAYQDHRCRAAQESTHIYTKEEVSSHTSPETGIWVTLGSEVFDVTEFVDLHPGGPSKLMLAAGGPLEPFWALYAVHNQSHVRELLAQYKIGELNP

SEQ ID NO: 9093 - protein, 121 aa, Artificial Sequence
  derived and/or modified sequence
MLLLHRAVVLRLQQACRLKSIPSRICIQACSTNDSFQPQRPSLTFSGDNSSTQGWRVMGTLLGLGAVLAYQDHRCRAAQESTHIYTKEEVSSHTSPETGIWVTLGSEVFDVTEFVDLHPGG

SEQ ID NO: 9094 - DNA, 489 bp, Artificial Sequence
  derived and/or modified sequence
atgctgctgctgcacagagccgtggtgctgagactgcagcaggcctgcagactgaagagcatccccagcagaatctgcatccaggcctgcagcaccaacgacagcttccagccccagagacccagcctgaccttcagcggcgacaacagcagcacccagggctggagagtgatgggcaccctgctgggcctgggcgccgtgctggcctaccaggaccacagatgcagagccgcccaggagagcacccacatctacaccaaggaggaggtgagcagccacaccagccccgagaccggcatctgggtgaccctgggcagcgaggtgttcgacgtgaccgagttcgtggacctgcaccccggcggccccagcaagctgatgctggccgccggcggccccctggagcccttctgggccctgtacgccgtgcacaaccagagccacgtgagagagctgctggcccagtacaagatcggcgagctgaacccctag

SEQ ID NO: 9095 - DNA, 132 bp, Artificial Sequence
  derived and/or modified sequence
atgctgctgctgcacagagccgtggtgctgagactgcagcaggcctgcagactgaagagcatccccagcagaatctgcatccaggcctgcagcaccaacgacagcttccagccccagagacccagcctgtag

SEQ ID NO: 9096 - DNA, 366 bp, Artificial Sequence
  derived and/or modified sequence
atgctgctgctgcacagagccgtggtgctgagactgcagcaggcctgcagactgaagagcatccccagcagaatctgcatccaggcctgcagcaccaacgacagcttccagccccagagacccagcctgaccttcagcggcgacaacagcagcacccagggctggagagtgatgggcaccctgctgggcctgggcgccgtgctggcctaccaggaccacagatgcagagccgcccaggagagcacccacatctacaccaaggaggaggtgagcagccacaccagccccgagaccggcatctgggtgaccctgggcagcgaggtgttcgacgtgaccgagttcgtggacctgcaccccggcggctag

SEQ ID NO: 9097 - DNA, 489 bp, Artificial Sequence
  derived and/or modified sequence
atgctccttctccaccgcgcagtcgtgctgaggctgcagcaggcatgccgtctgaagtcaattcctagcaggatctgtatacaggcttgttcaaccaacgactcctttcagccacagagacccagcctgaccttcagcggagacaatagctcgactcaaggatggagggtgatggggactctgttaggcttgggggcagtgctagcataccaggatcacaggtgtagggccgcccaggaaagcactcacatctacacaaaagaagaggtatcttcacatacatctcctgaaacaggtatttgggttacgctgggctctgaggtgttcgatgttacagagttcgtggacttgcaccccggtggcccctcaaaacttatgctggcggctggtgggcctctggaaccgttctgggcactgtacgctgtgcataatcaatcccacgttcgcgaactgctcgcccagtacaagattggggagcttaatccatag

SEQ ID NO: 9098 - DNA, 132 bp, Artificial Sequence
  derived and/or modified sequence
atgcttcttctccacagggcggtagttctaaggcttcagcaggcctgtcgccttaagagcatcccttctaggatttgcatccaggcatgttctactaatgatagtttccagccacagaggccctcactttag

SEQ ID NO: 9099 - DNA, 366 bp, Artificial Sequence
  derived and/or modified sequence
atgctcctgctgcaccgagcagttgtgctcaggctgcaacaagcctgcaggctgaaatcaatcccctcgagaatctgtattcaggcctgctctacaaacgacagcttccagccacaacggccaagcctgacattctccggcgacaattcctcaacacagggatggcgggttatggggaccctgctgggactgggcgctgtgctcgcctaccaagaccaccgttgtagggcagcccaagagagtacccacatttatacaaaggaagaggtatcctcccacactagccccgaaactgggatatgggtgaccttgggctccgaagtattcgacgtgaccgagttcgtcgacctgcaccctggtggttag

SEQ ID NO: 9100 - DNA, 489 bp, Artificial Sequence
  derived and/or modified sequence
atgctgctgctgcacagagctgtggtgctgcggctgcagcaggcctgccgcctgaagagcatccccagccgcatctgcatccaggcctgcagcaccaatgacagcttccagccccagaggcccagcctgaccttcagcggggacaacagcagcacccagggctggagggtgatgggcaccctgctgggcctgggcgctgtgctggcctaccaggaccaccgctgcagagctgcccaggagagcacccacatctacaccaaggaggaggtgagcagccacaccagccctgagaccggcatctgggtgaccctgggcagcgaggtgtttgatgtgacagaatttgtggacctgcaccctgggggccccagcaagctgatgctggccgccggcggccccctggagcccttctgggccctgtatgctgtgcacaaccagagccacgtgcgggagctgctggcccagtacaagattggagagctgaacccctag

SEQ ID NO: 9101 - DNA, 132 bp, Artificial Sequence
  derived and/or modified sequence
atgctgctgctgcacagagctgtggtgctgcggctgcagcaggcctgccgcctgaagagcatccccagccgcatctgcatccaggcctgcagcaccaatgacagcttccagccccagaggcccagcctgtag

SEQ ID NO: 9102 - DNA, 366 bp, Artificial Sequence
  derived and/or modified sequence
atgctgctgctgcacagagctgtggtgctgcggctgcagcaggcctgccgcctgaagagcatccccagccgcatctgcatccaggcctgcagcaccaatgacagcttccagccccagaggcccagcctgaccttcagcggggacaacagcagcacccagggctggagggtgatgggcaccctgctgggcctgggcgctgtgctggcctaccaggaccaccgctgcagagctgcccaggagagcacccacatctacaccaaggaggaggtgagcagccacaccagccctgagaccggcatctgggtgaccctgggcagcgaggtgtttgatgtgacagaatttgtggacctgcaccctgggggctag

SEQ ID NO: 9103 - DNA, 489 bp, Artificial Sequence
  derived and/or modified sequence
atgctgctgctgcaccgggccgtggtgctgcggctgcagcaggcctgcagacttaagtccattccctcccggatttgtatccaagcatgctctactaacgattcatttcagccacagagaccgagcctgactttctctggtgacaatagtagcacccaaggctggcgtgtgatggggaccttactgggcttaggagccgtcttagcctaccaagatcaccggtgtcgtgctgcacaagagtctacacacatttacaccaaggaggaggtgagctctcacacttcccccgagaccggcatatgggttaccctcggcagtgaagtctttgatgtaactgagtttgtcgatctgcacccaggaggcccctctaaacttatgctggctgcaggtggaccattagagccattctgggcactctacgcggttcataaccagagccacgtgagagagctgctggcccagtacaagattggagaactgaatccgtag

SEQ ID NO: 9104 - DNA, 132 bp, Artificial Sequence
  derived and/or modified sequence
atgctgctgctgcaccgggccgtggtgctgcggctgcagcaggcctgtcgactgaagtcaatcccctcccgaatttgtatccaggcttgcagcactaacgatagtttccagccgcaaagacctagtctttag

SEQ ID NO: 9105 - DNA, 366 bp, Artificial Sequence
  derived and/or modified sequence
atgctgctgctgcaccgggccgtggtgctgcggctgcagcaggcctgccggctgaaatctatcccctccagaatatgtattcaggcctgcagcaccaacgactcctttcagccacagagaccgtctctgactttttctggtgacaactcatcaacacaaggctggcgtgtcatgggcacgctgctggggctgggagcagtgcttgcctatcaagatcaccgatgtagagctgcacaggaaagtacgcatatctataccaaggaggaagttagttctcatacatcaccagagactggaatctgggtgactctgggctctgaggtgttcgacgtgactgaattcgtggacctacacccaggaggatag

SEQ ID NO: 9106 - DNA, 489 bp, Artificial Sequence
  derived and/or modified sequence
atgcttctgctccacagagccgtggtgctgcggttgcaacaggcgtgcaggctcaaatccattccaagccgaatttgcatccaagcctgctcgacaaatgacagtttccagccccagcggccaagcctcactttttccggggacaactcctccacacaagggtggcgcgtaatgggaacactgttaggactgggtgctgtgctggcctaccaggaccacagatgcagggctgctcaggaaagcactcatatctatactaaggaggaggtcagtagccacacgtctcctgagactggcatttgggtcacactgggtagcgaagttttcgatgttacggaattcgtcgacctccatcctgggggtccgagcaaacttatgctggcagccggtggacccctggaacctttttgggccctgtacgctgtccataaccagtcccacgtgagagagctgctagcccagtacaagataggcgaactaaacccctag

SEQ ID NO: 9107 - DNA, 132 bp, Artificial Sequence
  derived and/or modified sequence
atgctgcttctccacagagcagtcgttctgaggctacagcaggcctgtagactcaaaagcattccctctagaatctgcatccaggcctgttctaccaatgactcgtttcagccgcagagaccatctctttag

SEQ ID NO: 9108 - DNA, 366 bp, Artificial Sequence
  derived and/or modified sequence
atgctgcttctccaccgggctgtcgttctgcgacttcaacaggcctgccggcttaagtcaataccatctagaatctgcatccaggcctgcagcaccaacgattcattccagccacagcgccctagcctgacttttagcggtgacaattcttcaacccaaggatggagggttatgggtaccctcctcgggctgggcgctgtgctagcttatcaagaccatagatgccgcgctgcacaagagtcaactcatatatacacaaaggaagaggtctccagccatacctcaccggaaacaggcatttgggtaaccctgggctccgaagtgtttgatgtcactgagttcgttgatctgcacccaggaggttag

SEQ ID NO: 9109 - protein, 474 aa, Artificial Sequence
  derived and/or modified sequence
MRLSKTLVDMDMADYSAALDPAYTTLEFENVQVLTMGNDTSPSEGTNLNAPNSLGVSALCAICGDRATGKHYGASSCDGCKGFFRRSVRKNHMYSCRFSRQCVVDKDKRNQCRYCRLKKCFRAGMKKEAVQNERDRISTRRSSYEDSSLPSINALLQAEVLSRQITSPVSGINGDIRAKKIASIADVCESMKEQLLVLVEWAKYIPAFCELPLDDQVALLRAHAGEHLLLGATKRSMVFKDVLLLGNDYIVPRHCPELAEMSRVSIRILDELVLPFQELQIDDNEYAYLKAIIFFDPDAKGLSDPGKIKRLRSQVQVSLEDYINDRQYDSRGRFGELLLLLPTLQSITWQMIEQIQFIKLFGMAKIDNLLQEMLLGGSPSDAPHAHHPLHPHLMQEHMGTNVIVANTMPTHLSNGQMCEWPRPRGQAATPETPQPSPPGGSGSEPYKLLPGAVATIVKPLSAIPQPTITKQEVI

SEQ ID NO: 9110 - DNA, 3239 bp, Artificial Sequence
  derived and/or modified sequence
gggaggaggcagtgggagggcggagggcgggggccttcggggtgggcgcccagggtagggcaggtggccgcggcgtggaggcagggagaatgcgactctccaaaaccctcgtcgacatggacatggccgactacagtgctgcactggacccagcctacaccaccctggaatttgagaatgtgcaggtgttgacgatgggcaatgacacgtccccatcagaaggcaccaacctcaacgcgcccaacagcctgggtgtcagcgccctgtgtgccatctgcggggaccgggccacgggcaaacactacggtgcctcgagctgtgacggctgcaagggcttcttccggaggagcgtgcggaagaaccacatgtactcctgcagatttagccggcagtgcgtggtggacaaagacaagaggaaccagtgccgctactgcaggctcaagaaatgcttccgggctggcatgaagaaggaagccgtccagaatgagcgggaccggatcagcactcgaaggtcaagctatgaggacagcagcctgccctccatcaatgcgctcctgcaggcggaggtcctgtcccgacagatcacctcccccgtctccgggatcaacggcgacattcgggcgaagaagattgccagcatcgcagatgtgtgtgagtccatgaaggagcagctgctggttctcgttgagtgggccaagtacatcccagctttctgcgagctccccctggacgaccaggtggccctgctcagagcccatgctggcgagcacctgctgctcggagccaccaagagatccatggtgttcaaggacgtgctgctcctaggcaatgactacattgtccctcggcactgcccggagctggcggagatgagccgggtgtccatacgcatccttgacgagctggtgctgcccttccaggagctgcagatcgatgacaatgagtatgcctacctcaaagccatcatcttctttgacccagatgccaaggggctgagcgatccagggaagatcaagcggctgcgttcccaggtgcaggtgagcttggaggactacatcaacgaccgccagtatgactcgcgtggccgctttggagagctgctgctgctgctgcccaccttgcagagcatcacctggcagatgatcgagcagatccagttcatcaagctcttcggcatggccaagattgacaacctgttgcaggagatgctgctgggagggtcccccagcgatgcaccccatgcccaccaccccctgcaccctcacctgatgcaggaacatatgggaaccaacgtcatcgttgccaacacaatgcccactcacctcagcaacggacagatgtgtgagtggccccgacccaggggacaggcagccacccctgagaccccacagccctcaccgccaggtggctcagggtctgagccctataagctcctgccgggagccgtcgccacaatcgtcaagcccctctctgccatcccccagccgaccatcaccaagcaggaagttatctagcaagccgctggggcttgggggctccactggctccccccagccccctaagagagcacctggtgatcacgtggtcacggcaaaggaagacgtgatgccaggaccagtcccagagcaggaatgggaaggatgaagggcccgagaacatggcctaagggccacatcccactgccacccttgacgccctgctctggataacaagactttgacttggggagacctctactgccttggacaacttttctcatgttgaagccactgccttcaccttcaccttcatccatgtccaacccccgacttcatcccaaaggacagccgcctggagatgacttgaggccttacttaaacccagctcccttcttccctagcctggtgcttctcctctcctagcccctgtcatggtgtccagacagagccctgtgaggctgggtccaattgtggcacttggggcaccttgctcctccttctgctgctgcccccacctctgctgcctccctctgctgtcaccttgctcagccatcccgtcttctccaacaccacctctccagaggccaaggaggccttggaaacgattcccccagtcattctgggaacatgttgtaagcactgactgggaccaggcaccaggcagggtctagaaggctgtggtgagggaagacgcctttctcctccaacccaacctcatcctccttcttcagggacttgggtgggtacttgggtgaggatccctgaaggccttcaacccgagaaaacaaacccaggttggcgactgcaacaggaacttggagtggagaggaaaagcatcagaaagaggcagaccatccaccaggcctttgagaaagggtagaattctggctggtagagcaggtgagatgggacattccaaagaacagcctgagccaaggcctagtggtagtaagaatctagcaagaattgaggaagaatggtgtgggagagggatgatgaagagagagagggcctgctggagagcatagggtctggaacaccaggctgaggtcctgatcagcttcaaggagtatgcagggagctgggcttccagaaaatgaacacagcagttctgcagaggacgggaggctggaagctgggaggtcaggtggggtggatgatataatgcgggtgagagtaatgaggcttggggctggagaggacaagatgggtaaaccctcacatcagagtgacatccaggaggaataagctcccagggcctgtctcaagctcttccttactcccaggcactgtcttaaggcatctgacatgcatcatctcatttaatcctcccttcctccctattaacctagagattgtttttgttttttattctcctcctccctccccgccctcacccgccccactccctcctaacctagagattgttacagaagctgaaattgcgttctaagaggtgaagtgattttttttctgaaactcacacaactaggaagtggctgagtcaggacttgaacccaggtctccctggatcagaacaggagctcttaactacagtggctgaatagcttctccaaaggctccctgtgttctcaccgtgatcaagttgaggggcttccggctcccttctacagcctcagaaaccagactcgttcttctgggaaccctgcccactcccaggaccaagattggcctgaggctgcactaaaattcacttagggtcgagcatcctgtttgctgataaatattaaggagaattca

SEQ ID NO: 9111 - DNA, 1425 bp, Artificial Sequence
  derived and/or modified sequence
atgagactgtccaaaaccctggtggacatggacatggctgactattcggccgctttggatccagcctatactacactggagttcgagaatgtgcaggtactaacaatgggcaacgatacttccccctctgaaggcaccaatctcaacgcacctaatagcctgggcgtcagcgccctgtgcgccatatgtggagaccgagccactggtaagcattacggcgcctcatcctgcgacgggtgtaagggatttttcaggaggtcagttcggaaaaaccacatgtattcctgcaggttctcacggcaatgtgtggttgacaaagacaaacgcaaccagtgtcggtactgcagactgaagaagtgctttcgggccgggatgaagaaggaggctgtacagaatgaaagggaccgtataagcacccgtcggtcgtcctacgaggactcctcactaccttcaatcaacgcgcttctccaggctgaggtgcttagccgtcaaatcacgtccccagtgtctggcatcaatggcgatatccgggccaagaaaattgcctcaatagcagacgtctgtgaatctatgaaagaacagttgctggtcttggtggagtgggccaagtatattccagctttctgcgaacttcctctggatgaccaggtagcgctgctgcgtgcgcacgccggggagcacttattactgggtgcaacaaaacggtcgatggtgttcaaagacgtactgctgttagggaacgattacatagtgcccaggcattgccctgagctggccgaaatgagccgcgtatctattcgaattctggacgagcttgtgctgccctttcaagaacttcagatagacgacaacgagtacgcttacctgaaagcaattattttttttgatccagatgcaaaggggctttctgatccaggaaagataaaacgtctcaggtctcaggtacaggtatctttggaagactacattaacgataggcagtatgactccaggggcaggttcggggaactgctcttgttgctgcccacattgcagtccattacgtggcagatgattgagcaaattcagtttattaagcttttcggcatggctaaaatcgataatctcctgcaagaaatgctgctgggtggaagcccttccgatgcccctcatgctcatcatcctctgcacccccatctaatgcaggaacatatgggtacgaatgtaatagtcgccaacactatgcccacccacctgagtaatgggcaaatgtgcgagtggccccgacctagaggacaggctgcgactccagaaacaccacaaccttctcctcccggcggcagcggatccgaaccatataaactcctgcctggcgccgtggcgaccattgtcaaacccctgtccgccatcccccaaccgactatcacaaaacaagaggtcatctag

SEQ ID NO: 9112 - DNA, 3235 bp, Artificial Sequence
  derived and/or modified sequence
gggaggaggcagtgggagggcggagggcgggggccttcggggtgggcgcccagggtagggcaggtggccgcggcgtggaggcagggagaatgcgactctccaaaaccctcgtcgacatggacatggccgactacagtgctgcactggacccagcctacaccaccctggaatttgagaatgtgcaggtgttgacgatgggcaatgacacgtccccatcagaaggcaccaacctcaacgcgcccaacagcctgggtgtcagcgccctgtgtgccatctgcggggaccgggccacgggcaaacactacggtgcctcgagctgtgacggctgcaagggcttcttccggaggagcgtgcggaagaaccacatgtactcctgcagatttagccggcagtgcgtggtggacaaagacaagaggaaccagtgccgctactgcaggctcaagaaatgcttccgggctggcatgaagaaggaagccgtccagaatgagcgggaccggatcagcactcgaaggtcaagctatgaggacagcagcctgccctccatcaatgcgctcctgcaggcggaggtcctgtcccgacagatcacctcccccgtctccgggatcaacggcgacattcgggcgaagaagattgccagcatcgcagatgtgtgtgagtccatgaaggagcagctgctggttctcgttgagtgggccaagtacatcccagctttctgcgagctccccctggacgaccaggtggccctgctcagagcccatgctggcgagcacctgctgctcggagccaccaagagatccatggtgttcaaggacgtgctgctcctaggcaatgactacattgtccctcggcactgcccggagctggcggagatgagccgggtgtccatacgcatccttgacgagctggtgctgcccttccaggagctgcagatcgatgacaatgagtatgcctacctcaaagccatcatcttctttgacccagatgccaaggggctgagcgatccagggaagatcaagcggctgcgttcccaggtgcaggtgagcttggaggactacatcaacgaccgccagtatgactcgcgtggccgctttggagagctgctgctgctgctgcccaccttgcagagcatcacctggcagatgatcgagcagatccagttcatcaagctcttcggcatggccaagattgacaacctgttgcaggagatgctgctgggagggtcccccagcgatgcaccccatgcccaccaccccctgcaccctcacctgatgcaggaacatatgggaaccaacgtcatcgttgccaacacaatgcccactcacctcagcaacggacagatgtgtgagtggccccgacccaggggacaggcagccacccctgagaccccacagccctcaccgccaggtggctcagggtctgagccctataagctcctgccgggagccgtcgccacaatcgtcaagcccctctctgccatcccccagccgaccatcaccaagcaggaagttatctagcaagccgctggggcttgggggctccactggctccccccagccccctaagagagcacctggtgatcacgtggtcacggcaaaggaagacgtgatgccaggaccagtcccagagcaggaatgggaaggatgaagggcccgagaacatggcctaagggccacatcccactgccacccttgacgccctgctctggataacaagactttgacttggggagacctctactgccttggacaacttttctcatgttgaagccactgccttcaccttcaccttcatccatgtccaacccccgacttcatcccaaaggacagccgcctggagatgacttgaggccttacttaaacccagctcccttcttccctagcctggtgcttctcctctcctagcccctgtcatggtgtccagacagagccctgtgaggctgggtccaattgtggcacttggggcaccttgctcctccttctgctgctgcccccacctctgctgcctccctctgctgtcaccttgctcagccatcccgtcttctccaacaccacctctccagaggccaaggaggccttggaaacgattcccccagtcattctgggaacatgttgtaagcactgactgggaccaggcaccaggcagggtctagaaggctgtggtgagggaagacgcctttctcctccaacccaacctcatcctccttcttcagggacttgggtgggtacttgggtgaggatccctgaaggccttcaacccgagaaaacaaacccaggttggcgactgcaacaggaacttggagtggagaggaaaagcatcagaaagaggcagaccatccaccaggcctttgagaaagggtagaattctggctggtagagcaggtgagatgggacattccaaagaacagcctgagccaaggcctagtggtagtaagaatctagcaagaattgaggaagaatggtgtgggagagggatgatgaagagagagagggcctgctggagagcatagggtctggaacaccaggctgaggtcctgatcagcttcaaggagtatgcagggagctgggcttccagaaaatgaacacagcagttctgcagaggacgggaggctggaagctgggaggtcaggtggggtggatgatataatgcgggtgagagtaatgaggcttggggctggagaggacaagatgggtaaaccctcacatcagagtgacatccaggaggaataagctcccagggcctgtctcaagctcttccttactcccaggcactgtcttaaggcatctgacatgcatcatctcatttaatcctcccttcctccctattaacctagagattgtttttgttttttattctcctcctccctccccgccctcacccgccccactccctcctaacctagagattgttacagaagctgaaattgcgttctaagaggtgaagtgattttttttctgaaactcacacaactaggaagtggctgagtcaggacttgaacccaggtctccctggatcagaacaggagctcttaactacagtggctgaatagcttctccaaaggctccctgtgttctcaccgtgatcaagttgaggggcttccggctcccttctacagcctcagaaaccagactcgttcttctgggaaccctgcccactcccaggaccaagattggcctgaggctgcactaaaattcacttagggtcgagcatcctgtttgctgataaatattaaggagaa

SEQ ID NO: 9113 - DNA, 1425 bp, Artificial Sequence
  derived and/or modified sequence
atgaggctgagcaagaccctggtggacatggacatggctgactacagcgctgccctggaccctgcctacaccaccctggagtttgaaaatgtgcaggtgctgaccatgggaaatgacaccagccccagcgagggcaccaacctgaatgcccccaacagcctgggcgtgtctgccctgtgtgccatctgtggggaccgggccaccgggaagcactacggggccagcagctgtgatggctgcaagggcttcttcagaagatctgtgaggaagaaccacatgtacagctgccgcttcagccggcagtgtgtggtggacaaggacaagaggaaccagtgccgctactgccgcctgaagaagtgcttccgggccggcatgaagaaggaggccgtgcagaatgaaagagaccgcatcagcacccggcgcagcagctatgaggacagcagcctgcccagcatcaatgccctgctgcaggccgaggtgctgagccggcagatcaccagccctgtgtctggcatcaatggagacatccgggccaagaagatcgccagcattgctgatgtgtgtgagagcatgaaggagcagctgctggtgctggtggagtgggccaagtacatcccagccttctgtgagctgcccctggatgaccaggtggccctgctgcgggcccacgccggggagcacctgctgctgggcgccaccaagaggtccatggtgttcaaggatgtgctgctgctgggcaatgactacatcgtgcccaggcactgcccagagctggccgagatgagccgggtgtccatccgcatcctggatgagctggtgctgcccttccaggagctgcagattgatgacaatgaatatgcctacctgaaggccatcatcttctttgatcctgatgccaagggcctgagtgaccccgggaagatcaagaggctgcggagccaggtgcaggtgtccctggaggactacatcaatgaccggcagtatgacagccggggccgctttggagagctgctgctgctgctgcccaccctgcagagcatcacctggcagatgattgagcagatccagttcatcaagctgtttggcatggccaagattgacaacctgctgcaggagatgctgctgggcggcagccccagtgatgccccccacgcccaccaccccctgcacccccacctgatgcaggagcacatgggcaccaacgtgattgtggccaacaccatgcccacccacctgagcaatggccagatgtgtgagtggccccggccccggggccaggccgccaccccagagaccccccagcccagccccccaggcggcagcggcagcgagccctacaagctgctgcccggggctgtggccaccatcgtgaagcccctgagcgccatcccccagcccaccatcaccaagcaggaggtgatctag

SEQ ID NO: 9114 - DNA, 1425 bp, Artificial Sequence
  derived and/or modified sequence
atgcggctgagcaagaccctggtggacatggacatggccgactacagtgccgcacttgaccctgcatacaccactctcgaatttgagaacgtccaggtgctgaccatgggtaatgacacgtctcccagcgagggcacaaatctcaatgcacctaattctctgggcgtgagcgctctgtgtgctatatgcggagatagggccaccggtaaacattacggcgcctccagttgtgatggttgtaaggggttcttcagaagaagtgtgcgcaagaatcacatgtacagctgccgattcagccggcagtgcgttgtggacaaggacaaacggaaccaatgtcgctattgtcggctcaaaaaatgttttcgggcaggcatgaaaaaagaggctgtgcagaacgaaagggaccggatctccacaaggcgcagctcatatgaagacagctcactgccatcaatcaacgcattactccaggccgaggtgttgtccaggcagataactagtcctgtttctggaataaacggtgatatccgggccaagaaaattgcttctattgccgatgtgtgtgaaagcatgaaagaacaacttctagttctggttgagtgggcaaagtacattcccgcattttgcgagctcccgctagatgaccaggtagcgttgttacgcgcgcatgcgggggagcacttactgctcggcgctacaaagcgctccatggtgtttaaggatgtgctactgttgggtaacgactacatagtccctcggcattgcccagagctggcagaaatgtcgcgggtcagcattcgcattctggacgagctggtgctcccttttcaggagttacaaattgacgataatgagtacgcctatctgaaggcaataatcttcttcgaccctgatgcaaagggattatccgaccctggtaaaatcaaacgtctacggagccaggtgcaagtgtcgcttgaggattacatcaatgacagacaatatgacagcaggggccggtttggcgaactactactgctgctccccactcttcagagcattacatggcagatgatcgagcaaatccagtttataaagcttttcggcatggctaaaattgacaacttgctgcaggaaatgctcctgggtgggtctccatccgatgcccctcacgctcaccatccactgcacccccaccttatgcaggagcacatgggtaccaatgtcatagtggccaacactatgcctacccatctgtcgaacggccagatgtgtgaatggccccgcccgagagggcaggctgccacacccgaaactccgcagccttctcccccgggaggaagtgggagcgaaccatataaactcctgcctggggcggtagcgacaatcgtcaagccgctcagcgcgatcccacagccaaccataacaaagcaggaagtcatctag

SEQ ID NO: 9115 - DNA, 1425 bp, Artificial Sequence
  derived and/or modified sequence
atgcgcttaagtaaaaccttagttgatatggacatggccgactattctgctgctctggatcccgcatacacaaccctggaatttgaaaatgttcaagtgctcactatggggaacgataccagtcctagcgaagggaccaacttaaacgccccaaacagtctaggtgtgtccgccttatgcgcaatctgcggcgatagagctactggcaagcattacggagcatcttcctgcgatggctgtaaaggttttttcaggagatctgttcgaaaaaaccacatgtactcatgtcggttttcacgccagtgcgtggtggacaaagataaaagaaaccagtgcaggtactgtagactgaagaaatgtttccgggcaggcatgaaaaaggaggccgtgcagaatgagagagatcgtatcagtacacgccgatcatcatacgaagattcaagcctaccgagcataaacgccctgctgcaagctgaagtgctgtctaggcagatcaccagccctgtgagtggcattaatggcgatatccgcgctaaaaagattgcctcaattgccgacgtttgcgaaagtatgaaggagcagctgcttgtactggtggaatgggcaaaatacatccccgcattttgcgaactcccactcgatgatcaggtggccttgctgagggctcacgcgggagagcacctcttactgggagccacgaagagatccatggtgttcaaggacgtgctgctgctgggaaacgactatatcgtccccagacactgtcctgagctagctgagatgtcccgagtgagtatacgcatactggacgagcttgtacttccttttcaagagctgcaaattgacgacaatgagtatgcgtacttgaaggctatcattttcttcgaccccgacgctaagggcctatcagaccccggtaagattaagaggctccggtctcaggtgcaagtgtcactggaagactacattaacgacaggcagtacgactctcgtggaagattcggtgaactgttgctgttgctgccaacactgcagagcatcacttggcagatgattgagcagattcagttcattaagctgtttggaatggcaaaaattgacaacttactccaggaaatgctgctgggtggttctccctctgacgcgccacacgctcatcatcctctgcacccacacttgatgcaggagcacatggggaccaacgtaatcgttgctaacactatgcctacacatctaagcaacgggcagatgtgcgaatggccacgcccacgcggtcaggcggctacccccgagaccccacagccatcccctcccggagggtctggttccgaaccttacaaactgctgcccggtgcggttgccacgatcgtaaagccactttccgcaataccccagcctaccatcacgaagcaggaagttatctag

SEQ ID NO: 9116 - DNA, 1425 bp, Artificial Sequence
  derived and/or modified sequence
atgagactgagcaagaccctggtggacatggacatggccgactacagcgccgccctggaccccgcctacaccaccctggagttcgagaacgtgcaggtgctgaccatgggcaacgacaccagccccagcgagggcaccaacctgaacgcccccaacagcctgggcgtgagcgccctgtgcgccatctgcggcgacagagccaccggcaagcactacggcgccagcagctgcgacggctgcaagggcttcttcagaagaagcgtgagaaagaaccacatgtacagctgcagattcagcagacagtgcgtggtggacaaggacaagagaaaccagtgcagatactgcagactgaagaagtgcttcagagccggcatgaagaaggaggccgtgcagaacgagagagacagaatcagcaccagaagaagcagctacgaggacagcagcctgcccagcatcaacgccctgctgcaggccgaggtgctgagcagacagatcaccagccccgtgagcggcatcaacggcgacatcagagccaagaagatcgccagcatcgccgacgtgtgcgagagcatgaaggagcagctgctggtgctggtggagtgggccaagtacatccccgccttctgcgagctgcccctggacgaccaggtggccctgctgagagcccacgccggcgagcacctgctgctgggcgccaccaagagaagcatggtgttcaaggacgtgctgctgctgggcaacgactacatcgtgcccagacactgccccgagctggccgagatgagcagagtgagcatcagaatcctggacgagctggtgctgcccttccaggagctgcagatcgacgacaacgagtacgcctacctgaaggccatcatcttcttcgaccccgacgccaagggcctgagcgaccccggcaagatcaagagactgagaagccaggtgcaggtgagcctggaggactacatcaacgacagacagtacgacagcagaggcagattcggcgagctgctgctgctgctgcccaccctgcagagcatcacctggcagatgatcgagcagatccagttcatcaagctgttcggcatggccaagatcgacaacctgctgcaggagatgctgctgggcggcagccccagcgacgccccccacgcccaccaccccctgcacccccacctgatgcaggagcacatgggcaccaacgtgatcgtggccaacaccatgcccacccacctgagcaacggccagatgtgcgagtggcccagacccagaggccaggccgccacccccgagaccccccagcccagcccccccggcggcagcggcagcgagccctacaagctgctgcccggcgccgtggccaccatcgtgaagcccctgagcgccatcccccagcccaccatcaccaagcaggaggtgatctag

SEQ ID NO: 9117 - DNA, 4737 bp, Artificial Sequence
  derived and/or modified sequence
ggtttgaaaggaaggcagagagggcactgggaggaggcagtgggagggcggagggcgggggccttcggggtgggcgcccagggtagggcaggtggccgcggcgtggaggcagggagaatgcgactctccaaaaccctcgtcgacatggacatggccgactacagtgctgcactggacccagcctacaccaccctggaatttgagaatgtgcaggtgttgacgatgggcaatgacacgtccccatcagaaggcaccaacctcaacgcgcccaacagcctgggtgtcagcgccctgtgtgccatctgcggggaccgggccacgggcaaacactacggtgcctcgagctgtgacggctgcaagggcttcttccggaggagcgtgcggaagaaccacatgtactcctgcagatttagccggcagtgcgtggtggacaaagacaagaggaaccagtgccgctactgcaggctcaagaaatgcttccgggctggcatgaagaaggaagccgtccagaatgagcgggaccggatcagcactcgaaggtcaagctatgaggacagcagcctgccctccatcaatgcgctcctgcaggcggaggtcctgtcccgacagatcacctcccccgtctccgggatcaacggcgacattcgggcgaagaagattgccagcatcgcagatgtgtgtgagtccatgaaggagcagctgctggttctcgttgagtgggccaagtacatcccagctttctgcgagctccccctggacgaccaggtggccctgctcagagcccatgctggcgagcacctgctgctcggagccaccaagagatccatggtgttcaaggacgtgctgctcctaggcaatgactacattgtccctcggcactgcccggagctggcggagatgagccgggtgtccatacgcatccttgacgagctggtgctgcccttccaggagctgcagatcgatgacaatgagtatgcctacctcaaagccatcatcttctttgacccagatgccaaggggctgagcgatccagggaagatcaagcggctgcgttcccaggtgcaggtgagcttggaggactacatcaacgaccgccagtatgactcgcgtggccgctttggagagctgctgctgctgctgcccaccttgcagagcatcacctggcagatgatcgagcagatccagttcatcaagctcttcggcatggccaagattgacaacctgttgcaggagatgctgctgggagggtcccccagcgatgcaccccatgcccaccaccccctgcaccctcacctgatgcaggaacatatgggaaccaacgtcatcgttgccaacacaatgcccactcacctcagcaacggacagatgtgtgagtggccccgacccaggggacaggcagccacccctgagaccccacagccctcaccgccaggtggctcagggtctgagccctataagctcctgccgggagccgtcgccacaatcgtcaagcccctctctgccatcccccagccgaccatcaccaagcaggaagttatctagcaagccgctggggcttgggggctccactggctccccccagccccctaagagagcacctggtgatcacgtggtcacggcaaaggaagacgtgatgccaggaccagtcccagagcaggaatgggaaggatgaagggcccgagaacatggcctaagggccacatcccactgccacccttgacgccctgctctggataacaagactttgacttggggagacctctactgccttggacaacttttctcatgttgaagccactgccttcaccttcaccttcatccatgtccaacccccgacttcatcccaaaggacagccgcctggagatgacttgaggccttacttaaacccagctcccttcttccctagcctggtgcttctcctctcctagcccctgtcatggtgtccagacagagccctgtgaggctgggtccaattgtggcacttggggcaccttgctcctccttctgctgctgcccccacctctgctgcctccctctgctgtcaccttgctcagccatcccgtcttctccaacaccacctctccagaggccaaggaggccttggaaacgattcccccagtcattctgggaacatgttgtaagcactgactgggaccaggcaccaggcagggtctagaaggctgtggtgagggaagacgcctttctcctccaacccaacctcatcctccttcttcagggacttgggtgggtacttgggtgaggatccctgaaggccttcaacccgagaaaacaaacccaggttggcgactgcaacaggaacttggagtggagaggaaaagcatcagaaagaggcagaccatccaccaggcctttgagaaagggtagaattctggctggtagagcaggtgagatgggacattccaaagaacagcctgagccaaggcctagtggtagtaagaatctagcaagaattgaggaagaatggtgtgggagagggatgatgaagagagagagggcctgctggagagcatagggtctggaacaccaggctgaggtcctgatcagcttcaaggagtatgcagggagctgggcttccagaaaatgaacacagcagttctgcagaggacgggaggctggaagctgggaggtcaggtggggtggatgatataatgcgggtgagagtaatgaggcttggggctggagaggacaagatgggtaaaccctcacatcagagtgacatccaggaggaataagctcccagggcctgtctcaagctcttccttactcccaggcactgtcttaaggcatctgacatgcatcatctcatttaatcctcccttcctccctattaacctagagattgtttttgttttttattctcctcctccctccccgccctcacccgccccactccctcctaacctagagattgttacagaagctgaaattgcgttctaagaggtgaagtgattttttttctgaaactcacacaactaggaagtggctgagtcaggacttgaacccaggtctccctggatcagaacaggagctcttaactacagtggctgaatagcttctccaaaggctccctgtgttctcaccgtgatcaagttgaggggcttccggctcccttctacagcctcagaaaccagactcgttcttctgggaaccctgcccactcccaggaccaagattggcctgaggctgcactaaaattcacttagggtcgagcatcctgtttgctgataaatattaaggagaattcatgactcttgacagcttttctctcttcactccccaagtcaaggggaggggtggcaggggtctgtttcctggaagtcaggctcatctggcctgttggcatgggggtgggacagtgtgcacagtgtgggggcaggggagggctaagcaggcctgggtttgagggctgctccggagaccgtcactccaggtgcattctggaagcattagaccccaggatggagcgaccagcatgtcatccatgtggaatcttggtggctttgaggacattctggaaaatgccactgaccagtgtgaacaaaagggatgtgttatggggctggaggtgtgattaggtaggagggaaactgttggaccgactcctgccccctgctcaacactgacccctctgagtggttggaggcagtgccccagtgcccagaaatcccaccattagtgattgttttttatgagaaagaggcgtggagaagtattggggcaatgtgtcagggaggaatcaccacatccctacggcagtcccagccaagcccccaatcccagcggagactgtgccctgctcagagctcccaagccttcccccaccacctcactcaagtgcccctgaaatccctgccagacggctcagcctggtctgcggtaaggcagggaggctggaaccatttctgggcattgtggtcattcccactgtgttcctccacctcctccctccagcgttgctcagacctctgtcttgggagaaaggttgagataagaatgtcccatggagtgccgtgggcaacagtggcccttcatgggaacaatctgttggagcagggggtcagttctctgctgggaatctacccctttctggaggagaaacccattccaccttaataactttattgtaatgtgagaaacacaaaacaaagtttacttttttgactctaagctgacatgatattagaaaatctctcgctctcttttttttttttttttttttttttggctacttgagttgtggtcctaaaacataaaatctgatggacaaacagagggttgctggggggacaagcgtgggcacaatttccccaccaagacaccctgatcttcaggcgggtctcaggagcttctaaaaatccgcatggctctcctgagagtggacagaggagaggagagggtcagaaatgaacgctcttctatttcttgtcattaccaagccaattacttttgccaaatttttctgtgatctgccctgattaagatgaattgtgaaatttacatcaagcaattatcaaagcgggctgggtcccatcagaacgacccacatctttctgtgggtgtgaatgtcattaggtcttgcgctgacccctgagcccccatcactgccgcctgatggggcaaagaaacaaaaaacatttcttactcttctgtgttttaacaaaagtttataaaacaaaataaatggcgcatatgttttctaaaaaaaaaaaaaaaaa

SEQ ID NO: 9118 - protein, 557 aa, Artificial Sequence
  derived and/or modified sequence
MVSKLTSLQQELLSALLSSGVTKEVLVQALEELLPSPNFGVKLETLPLSPGSGAEPDTKPVFHTLTNGHAKGRLSGDEGSEDGDDYDTPPILKELQALNTEEAAEQRAEVDRMLSEDPWRAAKMIKGYMQQHNIPQREVVDVTGLNQSHLSQHLNKGTPMKTQKRAALYTWYVRKQREILRQFNQTVQSSGNMTDKSSQDQLLFLFPEFSQQSHGPGQSDDACSEPTNKKMRRNRFKWGPASQQILYQAYDRQKNPSKEEREALVEECNRAECLQRGVSPSKAHGLGSNLVTEVRVYNWFANRRKEEAFRQKLAMDAYSSNQTHSLNPLLSHGSPHHQPSSSPPNKLSGVRYSQQGNNEITSSSTISHHGNSAMVTSQSVLQQVSPASLDPGHNLLSPDGKMISVSGGGLPPVSTLTNIHSLSHHNPQQSQNLIMTPLSGVMAIAQSLNTSQAQSVPVINSVAGSLAALQPVQFSQQLHSPHQQPLMQQSPGSHMAQQPFMAAVTQLQNSHMYAHKQEPPQYSHTSRFPSAMVVTDTSSISTLTNMSSSKQCPLQAW

SEQ ID NO: 9119 - protein, 445 aa, Artificial Sequence [sequence omitted]

SEQ ID NO: 9120 - protein, 425 aa, Artificial Sequence
  derived and/or modified sequence
MVSKLTSLQQELLSALLSSGVTKEVLVQALEELLPSPNFGVKLETLPLSPGSGAEPDTKPVFHTLTNGHAKGRLSGDEGSEDGDDYDTPPILKELQALNTEEAAEQRAEVDRMLSEDPWRAAKMIKGYMQQHNIPQREVVDVTGLNQSHLSQHLNKGTPMKTQKRAALYTWYVRKQREILRQFNQTVQSSGNMTDKSSQDQLLFLFPEFSQQSHGPGQSDDACSEPTNKKMRRNRFKWGPASQQILYQAYDRQKNPSKEEREALVEECNRAECLQRGVSPSKAHGLGSNLVTEVRVYNWFANRRKEEAFRQKLAMDAYSSNQTHSLNPLLSHGSPHHQPSSSPPNKLSGVRYSQQGNNEITSSSTISHHGNSAMVTSQSVLQQVSPASLDPGHNLLSPDGKMDLSLRRRFAPSQHLDEYPQPLPP

SEQ ID NO: 9121 - DNA, 1338 bp, Artificial Sequence
  derived and/or modified sequence
atgctgagcgaggacccctggagagccgccaagatgatcaagggctacatgcagcagcacaacatcccccagagagaggtggtggacgtgaccggcctgaaccagagccacctgagccagcacctgaacaagggcacccccatgaagacccagaagagagccgccctgtacacctggtacgtgagaaagcagagagagatcctgagacagttcaaccagaccgtgcagagcagcggcaacatgaccgacaagagcagccaggaccagctgctgttcctgttccccgagttcagccagcagagccacggccccggccagagcgacgacgcctgcagcgagcccaccaacaagaagatgagaagaaacagattcaagtggggccccgccagccagcagatcctgtaccaggcctacgacagacagaagaaccccagcaaggaggagagagaggccctggtggaggagtgcaacagagccgagtgcctgcagagaggcgtgagccccagcaaggcccacggcctgggcagcaacctggtgaccgaggtgagagtgtacaactggttcgccaacagaagaaaggaggaggccttcagacagaagctggccatggacgcctacagcagcaaccagacccacagcctgaaccccctgctgagccacggcagcccccaccaccagcccagcagcagcccccccaacaagctgagcggcgtgagatacagccagcagggcaacaacgagatcaccagcagcagcaccatcagccaccacggcaacagcgccatggtgaccagccagagcgtgctgcagcaggtgagccccgccagcctggaccccggccacaacctgctgagccccgacggcaagatgatcagcgtgagcggcggcggcctgccccccgtgagcaccctgaccaacatccacagcctgagccaccacaacccccagcagagccagaacctgatcatgacccccctgagcggcgtgatggccatcgcccagagcctgaacaccagccaggcccagagcgtgcccgtgatcaacagcgtggccggcagcctggccgccctgcagcccgtgcagttcagccagcagctgcacagcccccaccagcagcccctgatgcagcagagccccggcagccacatggcccagcagcccttcatggccgccgtgacccagctgcagaacagccacatgtacgcccacaagcaggagcccccccagtacagccacaccagcagattccccagcgccatggtggtgaccgacaccagcagcatcagcaccctgaccaacatgagcagcagcaagcagtgccccctgcaggcctggtag

SEQ ID NO: 9122 - DNA, 1338 bp, Artificial Sequence
  derived and/or modified sequence
atgctgagcgaggacccctggcgggctgccaagatgatcaagggatacatgcaacagcacaacattcctcaaagagaagtggtggacgtgacaggactcaatcagagccaccttagccaacacttaaacaaaggaacaccaatgaagacacagaagcgcgccgctctatatacctggtacgtcagaaaacaacgggagatcctgcgccaattcaatcagaccgtccagtccagtggtaatatgactgacaagagtagtcaggatcagctactcttcctgttcccggagttttcccagcagtcccacggaccgggccaatccgatgatgcatgttccgaacccacgaacaagaaaatgcgtcggaacaggtttaagtggggcccagcctcccagcagatactgtatcaggcatacgatagacagaaaaaccccagtaaagaggaacgggaggcgctagtggaagaatgtaatagggccgaatgcttgcagcggggagtgtcaccaagcaaggcccacgggctgggctccaatttggtgacagaagttagagtctacaactggttcgcgaacaggcgtaaggaagaagcattccggcagaagctggctatggacgcgtattcgagcaatcaaactcacagcctaaatccactcttaagtcacggatccccacaccatcagcccagtagttccccaccgaacaagcttagcggagtgagatactctcagcaggggaacaacgaaataactagtagcagtacgataagccatcatggaaattccgcaatggtcacttcgcagtctgtgttacagcaagtttcgcctgcatccctagatccgggccacaacctgctctcacccgacgggaaaatgataagcgtctccggaggcgggctgccccctgtctccacactaactaacatccactccttgagccatcataacccccaacagtcacagaatctgataatgacacccctctccggagtcatggctattgctcagtccctcaacacatcccaagctcagagcgtacccgtgattaatagtgtggccgggtcactcgcggccctccagccggtgcagttttcccaacaattacatagtcctcatcagcagcctctgatgcaacagagccctggcagccacatggcccagcagcctttcatggccgccgtcacccagctgcaaaactcacacatgtatgctcacaagcaggagccaccacaatattctcacaccagcagattccccagtgccatggtggtgactgacacatcttcaatttccaccctgacaaatatgtcctccagcaagcagtgccccctgcaggcatggtag

SEQ ID NO: 9123 - DNA, 2977 bp, Artificial Sequence
  derived and/or modified sequence
gagtacaatggaccctggcaaagccccgctcccggcccaggtcttctgctctccaggtctgcccctccggctctccctctctccgggtttccccctccccaccatcatttgcatccagccgaaagctgggcccttcccactaatttgcatatcttatatggcctaatggtggcgatcatggcaagttagaagttttctgactcctttcggaggagcctccgggaccccggggagtaacaggtgtctggaggctgaagggtggaggggttcctggatttggggtttgcttgtgaaactcccctccaccctcctctctcgcacccacccaccccctcacccccttctttttccgtccttggaaaatggtgtccaagctcacgtcgctccagcaagaactcctgagcgccctgctgagctccggggtcaccaaggaggtgctggttcaggccttggaggagttgctgccatccccgaacttcggggtgaagctggagacgctgcccctgtcccctggcagcggggccgagcccgacaccaagccggtcttccatactctcaccaacggccacgccaagggccgcttgtccggcgacgagggctccgaggacggcgacgactatgacacacctcccatcctcaaggagctgcaggcgctcaacaccgaggaggcggcggagcagcgggcggaggtggaccggatgctcagtgaggacccttggagggctgctaaaatgatcaagggttacatgcagcaacacaacatcccccagagggaggtggtcgatgtcaccggcctgaaccagtcgcacctctcccagcatctcaacaagggcacccctatgaagacccagaagcgtgccgctctgtacacctggtacgtcagaaagcaacgagagatcctccgacaattcaaccagacagtccagagttctggaaatatgacagacaaaagcagtcaggatcagctgctgtttctctttccagagttcagtcaacagagccatgggcctgggcagtccgatgatgcctgctctgagcccaccaacaagaagatgcgccgcaaccggttcaaatgggggcccgcgtcccagcaaatcttgtaccaggcctacgatcggcaaaagaaccccagcaaggaagagagagaggccttagtggaggaatgcaacagggcagaatgtttgcagcgaggggtgtccccctccaaagcccacggcctgggctccaacttggtcactgaggtccgtgtctacaactggtttgcaaaccgcaggaaggaggaggcattccggcaaaagctggccatggacgcctatagctccaaccagactcacagcctgaaccctctgctctcccacggctccccccaccaccagcccagctcctctcctccaaacaagctgtcaggagtgcgctacagccagcagggaaacaatgagatcacttcctcctcaacaatcagtcaccatggcaacagcgccatggtgaccagccagtcggttttacagcaagtctccccagccagcctggacccaggccacaatctcctctcacctgatggtaaaatgatctcagtctcaggaggaggtttgcccccagtcagcaccttgacgaatatccacagcctctcccaccataatccccagcaatctcaaaacctcatcatgacacccctctctggagtcatggcaattgcacaaagcctcaacacctcccaagcacagagtgtccctgtcatcaacagtgtggccggcagcctggcagccctgcagcccgtccagttctcccagcagctgcacagccctcaccagcagcccctcatgcagcagagcccaggcagccacatggcccagcagcccttcatggcagctgtgactcagctgcagaactcacacatgtacgcacacaagcaggaacccccccagtattcccacacctcccggtttccatctgcaatggtggtcacagataccagcagcatcagtacactcaccaacatgtcttcaagtaaacagtgtcctctacaagcctggtgatgcccacacaccacttacttcgtgcgcaacaacaaggaccctgttttccacaccatcaccctctgggcagctgtcatggaaaagcccagtgacctgaccggcacctgcgagaggtccctgcttacctgacggacgtcctgctggcacctcagacaatccactctcaggaggcgcagcccgaagcccagtttcccttctatgcagtattgccacaatgcctctcccacgatgtcaaggactcctgtctgtcctggaggtgggagacaaggaaccaccgaagaggaagcaagaaagccgtactgtctatgttgtgatccttcatcgaacaaactgatgcgaaaacttgaatctgttactgaaatgaggagagaaggacatgtgctattgaactgagccaaacacactgtaaatatccacagactccctcccctgcccccatcccacatgatcttgagatttcttttaaagaagtaaatttgtccaatggctgtaaactataaactactgtaattaagtgcaatttcccctctgtgtcctctcccctctgccctgtatataatactaaagtgtctattagttttctttgtaaaggtcagagtcaaaatttcaaaagtgatctgtcccctctcccctcatggagaaacatcctaagtgggaagtgaagccccttgtcctctcccgcgggcctggacacttatggggacagcataccttggactgactaccagctaactccagtctcctgacattaagacacacctctggatccctggaggggctgaatgtagtgtgtcagagtaacatgccagcttcctgtgggccaggagctcagccgtgcactccctaagaaaccccagggcagggaaactggctgtttgatagcagaagaaaaagttgcagtctcagaaagccttccattaaaacaatttattttatcacta

SEQ ID NO: 9124 - DNA, 1794 bp, Artificial Sequence
  derived and/or modified sequence
agaagttttctgactcctttcggaggagcctccgggaccccggggagtaacaggtgtctggaggctgaagggtggaggggttcctggatttggggtttgcttgtgaaactcccctccaccctcctctctcgcacccacccaccccctcacccccgaacttcggggtgaagctggagacgctgcccctgtcccctggcagcggggccgagcccgacaccaagccggtcttccatactctcaccaacggccacgccaagggccgcttgtccggcgacgagggctccgaggacggcgacgactatgacacacctcccatcctcaaggagctgcaggcgctcaacaccgaggaggcggcggagcagcgggcggaggtggaccggatgctcagtgaggacccttggagggctgctaaaatgatcaagggttacatgcagcaacacaacatcccccagagggaggtggtcgatgtcaccggcctgaaccagtcgcacctctcccagcatctcaacaagggcacccctatgaagacccagaagcgtgccgctctgtacacctggtacgtcagaaagcaacgagagatcctccgacaattcaaccagacagtccagagttctggaaatatgacagacaaaagcagtcaggatcagctgctgtttctctttccagagttcagtcaacagagccatgggcctgggcagtccgatgatgcctgctctgagcccaccaacaagaagatgcgccgcaaccggttcaaatgggggcccgcgtcccagcaaatcttgtaccaggcctacgatcggcaaaagaaccccagcaaggaagagagagaggccttagtggaggaatgcaacagggcagaatgtttgcagcgaggggtgtccccctccaaagcccacggcctgggctccaacttggtcactgaggtccgtgtctacaactggtttgcaaaccgcaggaaggaggaggcattccggcaaaagctggccatggacgcctatagctccaaccagactcacagcctgaaccctctgctctcccacggctccccccaccaccagcccagctcctctcctccaaacaagctgtcaggagtgcgctacagccagcagggaaacaatgagatcacttcctcctcaacaatcagtcaccatggcaacagcgccatggtgaccagccagtcggttttacagcaagtctccccagccagcctggacccaggccacaatctcctctcacctgatggtaaaatgatctcagtctcaggaggaggtttgcccccagtcagcaccttgacgaatatccacagcctctcccaccataatccccagcaatctcaaaacctcatcatgacacccctctctggagtcatggcaattgcacaaagcctcaacacctcccaagcacagagtgtccctgtcatcaacagtgtggccggcagcctggcagccctgcagcccgtccagttctcccagcagctgcacagccctcaccagcagcccctcatgcagcagagcccaggcagccacatggcccagcagcccttcatggcagctgtgactcagctgcagaactcacacatgtacgcacacaagcaggaacccccccagtattcccacacctcccggtttccatctgcaatggtggtcacagataccagcagcatcagtacactcaccaacatgtcttcaagtaaacagtgtcctctacaagcctggtgatgcccacacaccacttacttcgtgcgcaacaacaaggaccctgttttccacaccatcaccctctgggcagctgtca

SEQ ID NO: 9125 - DNA, 1338 bp, Artificial Sequence
  derived and/or modified sequence
atgctgtctgaggacccctggagggctgccaagatgatcaagggctacatgcagcagcacaacatcccccagcgggaggtggtggatgtgacaggcctgaaccagagccacctgagccagcacctgaacaagggcacccccatgaagacccagaagagagctgccctgtacacctggtacgtgaggaagcagcgggagatcctgcggcagttcaaccagacagtgcagagcagcggcaacatgacagacaagagcagccaggaccagctgctcttcctgtttcctgagttcagccagcagagccacggccctggccagagtgatgatgcctgcagcgagcccaccaacaagaagatgagaagaaaccgcttcaagtggggccctgccagccagcagatcctgtaccaggcctatgaccggcagaagaaccccagcaaggaggagcgggaggccctggtggaggagtgcaacagagctgagtgcctgcagaggggcgtgagccccagcaaggcccacggcctgggcagcaacctggtgacagaggtgcgggtgtacaactggtttgccaacagaaggaaggaggaggccttccggcagaagctggccatggatgcctacagcagcaaccagacccacagcctgaaccccctgctgagccacggcagcccccaccaccagcccagcagcagcccccccaacaagctgagcggcgtgcgctacagccagcagggcaacaatgagatcaccagcagcagcaccatcagccaccacggcaacagcgccatggtgaccagccagagcgtgctgcagcaggtgtccccagccagcctggaccccggccacaacctgctgagcccagatggcaagatgatctctgtgtctgggggcggcctgccccctgtgtccaccctgaccaacatccacagcctgagccaccacaacccccagcagagccagaacctgatcatgacccccctgtctggagtgatggccatcgcccagagcctgaacaccagccaggcccagagcgtgcctgtgatcaacagcgtggccggcagcctggccgccctgcagcctgtgcagttcagccagcagctgcacagcccccaccagcagcccctgatgcagcagagccctggcagccacatggcccagcagcccttcatggctgctgtgacccagctgcagaacagccacatgtatgcccacaagcaggagcccccccagtacagccacaccagccgcttccccagcgccatggtggtgacagacaccagcagcatcagcaccctgaccaacatgagcagcagcaagcagtgccccctgcaggcctggtag

SEQ ID NO: 9126 - DNA, 1338 bp, Artificial Sequence
  derived and/or modified sequence
atgctgagcgaggacccctggcgggccgccaagatgatcaagggctacatgcagcagcataacattccccagcgggaagtggtagacgttacagggcttaaccagtcccatctctctcagcacttgaacaaaggaacccccatgaaaacgcaaaaacgggctgcgctgtacacatggtacgtgcggaaacaaagagaaatcctgcgacaatttaatcagacggtgcagagttccggaaacatgaccgataaatcttcccaggatcagcttttgtttttattccctgagttttcacagcagtcacacggccctggacagtccgatgatgcctgtagcgaaccgacaaacaaaaagatgcgtagaaacaggtttaaatggggtcctgcgtcgcagcagatcctctaccaggcgtacgatcgacagaagaatccgagtaaggaagagagagaggctcttgtggaagagtgcaatagggccgagtgtctccagagaggtgtatccccttcgaaggctcatggtctcggatccaacctagtcacagaagtgcgggtgtacaactggtttgccaaccggcggaaggaagaagccttccggcagaaactagccatggacgcctattccagtaatcagacccattcgctaaaccccctcttaagccacggcagccctcatcaccagccttccagcagtccacctaataagctctcaggtgtcagatattcgcaacaaggcaacaacgagatcacttctagttctacgatctctcatcacggaaattctgccatggtgacctcacagagcgtgctccaacaagtgagccccgcatccctggacccgggtcataatctcctgagccctgatgggaagatgatcagtgtgtccggtgggggcttacctccagtgagcacccttactaacatccacagtctgtcacatcacaaccctcagcaatctcaaaatctgattatgacacctctcagcggagtgatggccattgcgcagtccctgaatacgtcacaggcccagagcgtgccagtgatcaattctgtcgcggggtccctggcagctctacagcccgtccagtttagccagcagctgcactcaccgcaccagcagcccttgatgcagcagtcacctggaagtcatatggcccagcaaccgtttatggctgctgtcacacaacttcaaaactcacatatgtacgcacacaagcaggagcctccccagtatagtcatacaagcagattcccttcggctatggtcgtaactgacactagtagtatctcaactctcaccaacatgagctcgtctaagcagtgtcctttgcaggcctggtag

SEQ ID NO: 9127 - DNA, 1338 bp, Artificial Sequence
  derived and/or modified sequence
atgctctccgaggacccctggcgcgctgcaaagatgattaagggctacatgcagcagcataacattccgcagagggaagtcgtggacgtgacgggcctgaaccagtcccacctgtcccagcacttaaataagggaacacccatgaaaactcaaaaacgcgctgccctgtatacatggtacgtacgaaagcagcgcgagattcttcggcagtttaaccagaccgtgcaatcctccggcaacatgactgataagtcgagtcaggaccaactgttgtttttgtttcctgaattctctcagcagagccacggaccaggccagtcggatgatgcttgttcagagccgaccaacaagaaaatgcgcaggaatagatttaagtggggacctgcttcccagcagattctgtaccaagcctatgatcggcagaaaaacccgtccaaagaggagagggaagccctcgtggaagaatgtaatagggcagaatgtctccagcggggtgtctcaccctctaaggctcacggtctgggtagtaatctagtgactgaagtccgcgtctataactggttcgctaatcgcagaaaggaagaggccttccgccaaaagctggccatggacgcatacagctcgaatcaaactcatagtctcaatccgctgttaagtcacggtagcccacatcatcagccctcatcgtcccccccaaataaactgagtggggtgcgttactcccaacaggggaacaacgaaattactagttcttctaccatctctcaccacggcaatagtgccatggtgacgagtcagagcgtcctgcagcaggtgtctcctgcctcactggatcctggccataacctgctgtctcctgatggtaagatgattagcgtctctggaggaggtttaccaccagtatctactctcactaacatccatagtctgagtcaccacaacccacagcaaagccagaatttgataatgaccccactgtcaggagttatggcaatcgcccaaagtctcaacacctcccaagcccagtccgtgcctgtgattaactccgtggccggatccctcgcggctctccagcccgtgcaattttctcagcagctgcacagtccacaccagcaaccactgatgcagcagagccctggctcacatatggctcagcaaccttttatggcagcagttacgcagctccagaactcccatatgtacgcccataaacaggaacctccccagtatagtcatacctcaagattcccctccgccatggtagtaaccgacacctccagcatttctacattaaccaatatgtcgagcagcaaacagtgccctctgcaggcctggtag

SEQ ID NO: 9128 - DNA, 1674 bp, Artificial Sequence
  derived and/or modified sequence
atggtgagcaagctgactagtttgcagcaggaattgctgtctgctctgctctctagtggggtgaccaaggaagttcttgtgcaagctttggaggaattgttgccaagccctaatttcggggtcaagctggagacactgccgctctcaccaggctccggcgctgagccagatactaagcccgtgttccacaccctgacgaacggtcatgccaaggggcggctctcgggagatgaagggtcggaggacggcgatgattatgatacaccaccgatcctgaaggagctgcaggcactgaatacagaggaagccgctgaacagagggccgaggtagacaggatgcttagtgaggacccctggagagccgcgaaaatgatcaagggctatatgcagcagcacaacatacctcagcgcgaggtcgtggacgttactggactcaaccaatcccacctgtctcagcatttgaacaagggcactcccatgaagacccagaagcgcgcggctttatatacgtggtatgtgcggaaacagcgcgagattctgcggcaattcaatcagaccgttcagtcttcaggcaacatgacggataagtcttctcaagaccaactcctcttcctgtttccagagttctctcagcaatcccacggtcctgggcagagcgacgacgcgtgcagtgagcctaccaacaagaagatgcgtaggaatcgcttcaagtggggacccgcttcacaacagatcctttatcaggcctacgatcgccagaaaaaccccagtaaagaagagagagaggctctcgtggaagaatgcaaccgggccgagtgtcttcagaggggtgttagcccatccaaagcgcacggactgggctcaaacctggttactgaggtcagggtttataactggtttgcaaatcgtagaaaggaggaggctttccgtcagaaactcgcaatggacgcatattccagcaaccagacccactcattgaaccctctcctgtcccatgggagtccgcaccaccagccgtcttcctcccccccgaacaagttgagcggcgttagatattcccaacaggggaataatgaaatcaccagctctagtaccatcagccaccacggaaactcggcaatggtgaccagtcagagcgtgctacaacaggtgtcacctgctagtttagacccaggccacaaccttctgagccccgatggaaaaatgatcagtgtgagcggagggggattgcctccagtgagcacactgacgaacattcactcgttgagtcatcacaatcctcagcaatcccaaaacctcattatgactcccttaagcggggtaatggcgatcgcccaaagcctaaacacgtctcaggcccagtctgtgcctgtcatcaactccgttgcgggcagcctcgccgccctccagccggtgcaattcagtcagcaactgcacagcccccatcagcagccattaatgcagcagtcaccaggatcacacatggctcagcagccattcatggccgccgtgactcaacttcagaatagtcacatgtacgcccacaagcaggaacctccccagtacagtcacacgagcaggttccctagcgcgatggtggtgacagacacaagcagtatctccactcttacaaatatgtcctcaagtaagcagtgccccctgcaggcatggtag

SEQ ID NO: 9129 - DNA, 1674 bp, Artificial Sequence
  derived and/or modified sequence
atggtgtccaagctgaccagcctgcagcaggagctgctgagcgccctgctgagcagtggagtgaccaaggaggtgctggtgcaggccctggaggagctgctgcccagccccaactttggagtgaagctggagaccctgcccctgagccctggcagcggggctgagccagacaccaagcctgtgttccacaccctgaccaatggacatgccaagggccgcctgtctggagatgagggctctgaagatggagatgattatgacaccccacccatcctgaaggagctgcaggccctgaacacagaggaggccgctgagcagagagctgaggtggacaggatgctgtctgaggacccctggagggctgccaagatgatcaagggctacatgcagcagcacaacatcccccagcgggaggtggtggatgtgacaggcctgaaccagagccacctgagccagcacctgaacaagggcacccccatgaagacccagaagagagctgccctgtacacctggtacgtgaggaagcagcgggagatcctgcggcagttcaaccagacagtgcagagcagcggcaacatgacagacaagagcagccaggaccagctgctcttcctgtttcctgagttcagccagcagagccacggccctggccagagtgatgatgcctgcagcgagcccaccaacaagaagatgagaagaaaccgcttcaagtggggccctgccagccagcagatcctgtaccaggcctatgaccggcagaagaaccccagcaaggaggagcgggaggccctggtggaggagtgcaacagagctgagtgcctgcagaggggcgtgagccccagcaaggcccacggcctgggcagcaacctggtgacagaggtgcgggtgtacaactggtttgccaacagaaggaaggaggaggccttccggcagaagctggccatggatgcctacagcagcaaccagacccacagcctgaaccccctgctgagccacggcagcccccaccaccagcccagcagcagcccccccaacaagctgagcggcgtgcgctacagccagcagggcaacaatgagatcaccagcagcagcaccatcagccaccacggcaacagcgccatggtgaccagccagagcgtgctgcagcaggtgtccccagccagcctggaccccggccacaacctgctgagcccagatggcaagatgatctctgtgtctgggggcggcctgccccctgtgtccaccctgaccaacatccacagcctgagccaccacaacccccagcagagccagaacctgatcatgacccccctgtctggagtgatggccatcgcccagagcctgaacaccagccaggcccagagcgtgcctgtgatcaacagcgtggccggcagcctggccgccctgcagcctgtgcagttcagccagcagctgcacagcccccaccagcagcccctgatgcagcagagccctggcagccacatggcccagcagcccttcatggctgctgtgacccagctgcagaacagccacatgtatgcccacaagcaggagcccccccagtacagccacaccagccgcttccccagcgccatggtggtgacagacaccagcagcatcagcaccctgaccaacatgagcagcagcaagcagtgccccctgcaggcctggtag

SEQ ID NO: 9130 - DNA, 1674 bp, Artificial Sequence
  derived and/or modified sequence
atggtgagcaagctgaccagcctgcagcaggagctgctgagcgccctcctgtcatcgggggtcactaaggaagtgctggtccaggctctcgaggaacttctaccctcgcccaatttcggagtgaagctggagactttgccattgtccccagggtctggggcagagcccgacaccaaacccgtctttcataccctgactaatggacatgccaaagggcggctttcaggagatgagggaagcgaagatggagatgattacgacacgcccccaatcctgaaggagctccaggccctgaatactgaagaggccgccgagcaaagggccgaagtggatagaatgttaagtgaagacccttggagagctgcaaaaatgattaagggatacatgcagcagcataatatacctcagcgggaagtcgtcgatgttaccggcctgaaccagtctcatctgtcacagcatctcaacaaggggactccaatgaagacacagaagcgcgctgctctctatacctggtacgttaggaaacagcgcgagatccttcgacagtttaatcaaacagtccaatcatccggtaacatgaccgataagagcagccaggatcagctactgtttctgttcccggagttctcacagcagagccatggaccaggtcagagcgatgacgcttgttctgaaccgaccaataagaagatgcggcggaatcgcttcaaatgggggcccgccagtcaacaaattctttaccaggcttatgaccggcagaaaaatccaagcaaagaggagcgcgaagctctggtggaagaatgtaacagggctgaatgcctgcagcgcggcgtttcaccaagcaaggcccacggattaggttctaatttagtaacggaggttcgggtttataactggttcgccaaccgcaggaaggaggaggcgtttcggcagaaacttgctatggatgcctactcctccaaccagacacactctttgaatcctttattgtcccatggatcacctcatcatcagcctagtagtagtcctccaaacaagctttcgggggttagatattctcagcagggaaataacgagatcacatctagcagtaccattagtcaccacggcaattccgctatggttacctcacagtcggtgttgcagcaggtgagtccagcaagcttagacccaggtcacaatcttcttagccccgacggcaagatgatctctgtcagcggaggtggcctaccaccagtgtctacgctgaccaatatccatagcctgagtcatcacaacccgcagcaatcccaaaacttgatcatgacacccctgtctggtgtgatggcaattgcccagtcgctgaacacatctcaggcacagtcggtccccgtgatcaattcggtcgccggttctctggccgcactacagcccgttcaatttagccagcagttgcacagtccacaccagcaaccactcatgcagcagtctcccgggagccatatggcccagcagccgttcatggccgccgtaacacagctccagaacagccacatgtatgctcataaacaggagccaccccaatattctcatacctcacgtttccctagtgcgatggtcgtcaccgacacctcgagcatttccaccctaacaaatatgagcagctccaaacagtgcccattacaggcctggtag

SEQ ID NO: 9131 - DNA, 1674 bp, Artificial Sequence
  derived and/or modified sequence
atggtgtccaaactgacatctctgcagcaggaattactctctgcgctcctgagttccggtgtgaccaaagaagtgctcgtgcaagcacttgaagaactgctgccgtcgccaaatttcggagtcaaattagaaaccctgcctctgtctccgggaagcggtgctgagccagatacaaagcctgtcttccacacactcacaaatggccatgccaagggacggctgtcaggagatgaaggctcagaggacggagacgattacgacacacctcctattttaaaggagctgcaggccctgaatacagaggaagcagcagagcagagagccgaggtggatcggatgctgtccgaagatccctggcgagcagcgaaaatgattaaaggctatatgcaacaacataatatcccccagcgggaggtggtcgacgtgacaggacttaaccagtcccacctcagccagcacctgaataaagggactccaatgaagacacagaagcgcgctgctttgtacacctggtatgtccgcaagcagcgggagatcctaagacaattcaaccagactgtgcagagctccggtaacatgaccgacaagagcagccaggaccaactcctgtttctattccccgagttctcccagcagtcccacggaccaggacagagcgacgacgcctgttcagaacccaccaacaagaagatgcgtagaaaccggttcaagtgggggcctgccagccaacagattttgtaccaggcctacgatcggcagaaaaacccgagcaaggaggaacgggaagcactcgtggaagaatgcaatcgggcagagtgtcttcagagaggcgtgtcaccttcaaaggcacacgggctcgggagcaatttggtcaccgaggttagagtctacaactggtttgcaaaccggcgaaaagaggaagcctttcgccaaaagctcgcaatggacgcgtactccagtaatcaaactcacagtctcaatccattattgagccatgggagcccccaccatcagccttcctcttcaccccctaataagctgtctggggtgcgctactcacaacagggtaacaatgagatcacgagttcctcaactatctctcaccacgggaactctgcaatggtcacttcacaatccgtcctgcaacaggtgtctcccgctagtctggatcctggccataacctgctgtctccagatggaaaaatgatatcagtcagcggaggcggtctccctcccgtttccacactcactaatattcacagcctcagccaccacaacccgcagcagtcccagaacctcataatgactcctctgagcggcgttatggcaattgcacagtctctgaacacgagccaggcacaatctgtacctgtgattaacagcgttgcgggaagcctggccgcactccagcccgtgcagttctcacaacagctccacagcccgcaccaacagccattaatgcagcagtctccagggtcacatatggcccagcagcctttcatggcagccgtgactcaactgcagaactcccatatgtacgcccacaagcaggagccccctcaatacagtcacacatcccgcttcccctctgccatggtagtcaccgacacgagctccatttcaacacttactaacatgtcttcaagcaagcagtgccctttgcaagcatggtag

SEQ ID NO: 9132 - DNA, 1674 bp, Artificial Sequence
  derived and/or modified sequence
atggtgagcaagctgaccagcctgcagcaggagctgctgagcgccctgctgagcagcggcgtgaccaaggaggtgctggtgcaggccctggaggagctgctgcccagccccaacttcggcgtgaagctggagaccctgcccctgagccccggcagcggcgccgagcccgacaccaagcccgtgttccacaccctgaccaacggccacgccaagggcagactgagcggcgacgagggcagcgaggacggcgacgactacgacaccccccccatcctgaaggagctgcaggccctgaacaccgaggaggccgccgagcagagagccgaggtggacagaatgctgagcgaggacccctggagagccgccaagatgatcaagggctacatgcagcagcacaacatcccccagagagaggtggtggacgtgaccggcctgaaccagagccacctgagccagcacctgaacaagggcacccccatgaagacccagaagagagccgccctgtacacctggtacgtgagaaagcagagagagatcctgagacagttcaaccagaccgtgcagagcagcggcaacatgaccgacaagagcagccaggaccagctgctgttcctgttccccgagttcagccagcagagccacggccccggccagagcgacgacgcctgcagcgagcccaccaacaagaagatgagaagaaacagattcaagtggggccccgccagccagcagatcctgtaccaggcctacgacagacagaagaaccccagcaaggaggagagagaggccctggtggaggagtgcaacagagccgagtgcctgcagagaggcgtgagccccagcaaggcccacggcctgggcagcaacctggtgaccgaggtgagagtgtacaactggttcgccaacagaagaaaggaggaggccttcagacagaagctggccatggacgcctacagcagcaaccagacccacagcctgaaccccctgctgagccacggcagcccccaccaccagcccagcagcagcccccccaacaagctgagcggcgtgagatacagccagcagggcaacaacgagatcaccagcagcagcaccatcagccaccacggcaacagcgccatggtgaccagccagagcgtgctgcagcaggtgagccccgccagcctggaccccggccacaacctgctgagccccgacggcaagatgatcagcgtgagcggcggcggcctgccccccgtgagcaccctgaccaacatccacagcctgagccaccacaacccccagcagagccagaacctgatcatgacccccctgagcggcgtgatggccatcgcccagagcctgaacaccagccaggcccagagcgtgcccgtgatcaacagcgtggccggcagcctggccgccctgcagcccgtgcagttcagccagcagctgcacagcccccaccagcagcccctgatgcagcagagccccggcagccacatggcccagcagcccttcatggccgccgtgacccagctgcagaacagccacatgtacgcccacaagcaggagcccccccagtacagccacaccagcagattccccagcgccatggtggtgaccgacaccagcagcatcagcaccctgaccaacatgagcagcagcaagcagtgccccctgcaggcctggtag

SEQ ID NO: 9133 - protein, 1124 aa, Artificial Sequence
  derived and/or modified sequence
MDSLASLVLCGVSLLLSGTVEGAMDLILINSLPLVSDAETSLTCIASGWRPHEPITIGRDFEALMNQHQDPLEVTQDVTREWAKKVVWKREKASKINGAYFCEGRVRGEAIRIRTMKMRQQASFLPATLTMTVDKGDNVNISFKKVLIKEEDAVIYKNGSFIHSVPRHEVPDILEVHLPHAQPQDAGVYSARYIGGNLFTSAFTRLIVRRCEAQKWGPECNHLCTACMNNGVCHEDTGECICPPGFMGRTCEKACELHTFGRTCKERCSGQEGCKSYVFCLPDPYGCSCATGWKGLQCNEACHPGFYGPDCKLRCSCNNGEMCDRFQGCLCSPGWQGLQCEREGIQRMTPKIVDLPDHIEVNSGKFNPICKASGWPLPTNEEMTLVKPDGTVLHPKDFNHTDHFSVAIFTIHRILPPDSGVWVCSVNTVAGMVEKPFNISVKVLPKPLNAPNVIDTGHNFAVINISSEPYFGDGPIKSKKLLYKPVNHYEAWQHIQVTNEIVTLNYLEPRTEYELCVQLVRRGEGGEGHPGPVRRFTTASIGLPPPRGLNLLPKSQTTLNLTWQPIFPSSEDDFYVEVERRSVQKSDQQNIKVPGNLTSVLLNNLHPREQYVVRARVNTKAQGEWSEDLTAWTLSDILPPQPENIKISNITHSSAVISWTILDGYSISSITIRYKVQGKNEDQHVDVKIKNATITQYQLKGLEPETAYQVDIFAENNIGSSNPAFSHELVTLPESQAPADLGGGKMLLIAILGSAGMTCLTVLLAFLIILQLKRANVQRRMAQAFQNVREEPAVQFNSGTLALNRKVKNNPDPTIYPVLDWNDIKFQDVIGEGNFGQVLKARIKKDGLRMDAAIKRMKEYASKDDHRDFAGELEVLCKLGHHPNIINLLGACEHRGYLYLAIEYAPHGNLLDFLRKSRVLETDPAFAIANSTASTLSSQQLLHFAADVARGMDYLSQKQFIHRDLAARNILVGENYVAKIADFGLSRGQEVYVKKTMGRLPVRWMAIESLNYSVYTTNSDVWSYGVLLWEIVSLGGTPYCGMTCAELYEKLPQGYRLEKPLNCDDEVYDLMRQCWREKPYERPSFAQILVSLNRMLEERKTYVNTTLYEKFTYAGIDCSAEEAA

SEQ ID NO: 9134 - DNA, 3375 bp, Artificial Sequence
  derived and/or modified sequence
atggacagcctggccagcctggtgctgtgcggcgtgagcctgctgctgagcggcaccgtggagggcgccatggacctgatcctgatcaacagcctgcccctggtgagcgacgccgagaccagcctgacctgcatcgccagcggctggagaccccacgagcccatcaccatcggcagagacttcgaggccctgatgaaccagcaccaggaccccctggaggtgacccaggacgtgaccagagagtgggccaagaaggtggtgtggaagagagagaaggccagcaagatcaacggcgcctacttctgcgagggcagagtgagaggcgaggccatcagaatcagaaccatgaagatgagacagcaggccagcttcctgcccgccaccctgaccatgaccgtggacaagggcgacaacgtgaacatcagcttcaagaaggtgctgatcaaggaggaggacgccgtgatctacaagaacggcagcttcatccacagcgtgcccagacacgaggtgcccgacatcctggaggtgcacctgccccacgcccagccccaggacgccggcgtgtacagcgccagatacatcggcggcaacctgttcaccagcgccttcaccagactgatcgtgagaagatgcgaggcccagaagtggggccccgagtgcaaccacctgtgcaccgcctgcatgaacaacggcgtgtgccacgaggacaccggcgagtgcatctgcccccccggcttcatgggcagaacctgcgagaaggcctgcgagctgcacaccttcggcagaacctgcaaggagagatgcagcggccaggagggctgcaagagctacgtgttctgcctgcccgacccctacggctgcagctgcgccaccggctggaagggcctgcagtgcaacgaggcctgccaccccggcttctacggccccgactgcaagctgagatgcagctgcaacaacggcgagatgtgcgacagattccagggctgcctgtgcagccccggctggcagggcctgcagtgcgagagagagggcatccagagaatgacccccaagatcgtggacctgcccgaccacatcgaggtgaacagcggcaagttcaaccccatctgcaaggccagcggctggcccctgcccaccaacgaggagatgaccctggtgaagcccgacggcaccgtgctgcaccccaaggacttcaaccacaccgaccacttcagcgtggccatcttcaccatccacagaatcctgccccccgacagcggcgtgtgggtgtgcagcgtgaacaccgtggccggcatggtggagaagcccttcaacatcagcgtgaaggtgctgcccaagcccctgaacgcccccaacgtgatcgacaccggccacaacttcgccgtgatcaacatcagcagcgagccctacttcggcgacggccccatcaagagcaagaagctgctgtacaagcccgtgaaccactacgaggcctggcagcacatccaggtgaccaacgagatcgtgaccctgaactacctggagcccagaaccgagtacgagctgtgcgtgcagctggtgagaagaggcgagggcggcgagggccaccccggccccgtgagaagattcaccaccgccagcatcggcctgcccccccccagaggcctgaacctgctgcccaagagccagaccaccctgaacctgacctggcagcccatcttccccagcagcgaggacgacttctacgtggaggtggagagaagaagcgtgcagaagagcgaccagcagaacatcaaggtgcccggcaacctgaccagcgtgctgctgaacaacctgcaccccagagagcagtacgtggtgagagccagagtgaacaccaaggcccagggcgagtggagcgaggacctgaccgcctggaccctgagcgacatcctgcccccccagcccgagaacatcaagatcagcaacatcacccacagcagcgccgtgatcagctggaccatcctggacggctacagcatcagcagcatcaccatcagatacaaggtgcagggcaagaacgaggaccagcacgtggacgtgaagatcaagaacgccaccatcacccagtaccagctgaagggcctggagcccgagaccgcctaccaggtggacatcttcgccgagaacaacatcggcagcagcaaccccgccttcagccacgagctggtgaccctgcccgagagccaggcccccgccgacctgggcggcggcaagatgctgctgatcgccatcctgggcagcgccggcatgacctgcctgaccgtgctgctggccttcctgatcatcctgcagctgaagagagccaacgtgcagagaagaatggcccaggccttccagaacgtgagagaggagcccgccgtgcagttcaacagcggcaccctggccctgaacagaaaggtgaagaacaaccccgaccccaccatctaccccgtgctggactggaacgacatcaagttccaggacgtgatcggcgagggcaacttcggccaggtgctgaaggccagaatcaagaaggacggcctgagaatggacgccgccatcaagagaatgaaggagtacgccagcaaggacgaccacagagacttcgccggcgagctggaggtgctgtgcaagctgggccaccaccccaacatcatcaacctgctgggcgcctgcgagcacagaggctacctgtacctggccatcgagtacgccccccacggcaacctgctggacttcctgagaaagagcagagtgctggagaccgaccccgccttcgccatcgccaacagcaccgccagcaccctgagcagccagcagctgctgcacttcgccgccgacgtggccagaggcatggactacctgagccagaagcagttcatccacagagacctggccgccagaaacatcctggtgggcgagaactacgtggccaagatcgccgacttcggcctgagcagaggccaggaggtgtacgtgaagaagaccatgggcagactgcccgtgagatggatggccatcgagagcctgaactacagcgtgtacaccaccaacagcgacgtgtggagctacggcgtgctgctgtgggagatcgtgagcctgggcggcaccccctactgcggcatgacctgcgccgagctgtacgagaagctgccccagggctacagactggagaagcccctgaactgcgacgacgaggtgtacgacctgatgagacagtgctggagagagaagccctacgagagacccagcttcgcccagatcctggtgagcctgaacagaatgctggaggagagaaagacctacgtgaacaccaccctgtacgagaagttcacctacgccggcatcgactgcagcgccgaggaggccgcctag

SEQ ID NO: 9135 - DNA, 3375 bp, Artificial Sequence
  derived and/or modified sequence
atggactcactcgcctccctcgtgctgtgcggcgtttctctcctcctgtctggtacggtcgaaggggcaatggaccttattcttatcaactccttgccgctcgtgagtgatgccgaaaccagcctcacctgtatcgcatcagggtggagaccccatgaacctatcactataggcagggattttgaggccttgatgaatcagcaccaggaccctttggaggtgactcaggacgtcactcgagaatgggcgaagaaagtcgtgtggaaacgcgagaaagccagtaaaatcaacggggcatatttctgcgagggtagagtgcgtggcgaggcaatccggatacggacgatgaaaatgcggcaacaagcatcttttctccccgctacgttgacaatgacagttgataagggcgataacgtaaacatttccttcaaaaaggtgttgattaaagaagaggacgcggtgatttataagaatgggtcattcattcactctgtacctagacatgaggtccctgacatcctggaagtgcacttaccccatgcacaacctcaggacgcaggggtgtattccgcaaggtatataggagggaatctgttcacgtctgcgttcaccagacttatcgtgcgcagatgcgaagcccagaaatggggcccggaatgcaaccacctgtgtaccgcttgtatgaacaacggtgtgtgccacgaagatactggcgagtgtatctgcccccccggctttatggggcgtacatgcgagaaggcctgtgaattgcacacctttggtcggacttgtaaggaacgatgctcaggtcaggaggggtgcaaatcgtatgttttttgcttacctgatccatacggttgctcatgcgcgacaggctggaaaggcctgcaatgcaacgaggcctgccatcccggtttttatggccctgattgcaaactgagatgttcttgtaacaatggagagatgtgtgaccgctttcaggggtgcctgtgcagccccggatggcagggattgcagtgtgagcgggaaggcattcagagaatgacaccaaaaattgtggacctgccagatcacatcgaggtaaattctggcaaatttaatcctatatgcaaagctagtggttggccgctacccacaaacgaggagatgacactggtgaaacccgacggaaccgtgctgcatcccaaggactttaaccacaccgaccacttctccgttgctattttcacaatccaccgtattctgcctcctgatagtggagtttgggtatgctccgtcaacacagtcgctggaatggtggagaagccattcaacatcagtgtgaaggtactccctaaacctctgaatgccccaaacgtgattgacacagggcacaacttcgcagtaataaacatatccagcgagccctactttggggacggcccgattaagagcaagaaactactttacaagcctgtgaaccactacgaggcctggcaacacatccaggtgacaaacgagatcgtgaccctgaattacctagagccgagaacggaatatgagctgtgcgtgcagctcgtccgcaggggggagggtggtgagggacacccagggccagtgagaagatttacgactgcctctattggacttccccctccgagaggccttaacttgctcccaaaaagtcagacgaccttaaatctgacatggcagcctattttccccagttctgaagacgatttttatgtggaggtggaacgccgcagcgtgcagaaatccgatcaacaaaacatcaaagtgccaggcaacctgacgtcggtgctgctgaacaatctccacccgcgggagcaatatgttgtcagagcgagagtcaatacaaaggcgcaaggcgaatggtccgaggatcttactgcgtggacgctgtccgatatcttgccgccccaaccagagaatattaagatctccaacataacccattcaagcgctgtcatctcttggacaattttggatgggtatagcatatcttctattacaatacgatacaaagtacagggcaagaatgaagatcagcacgtagatgtgaagatcaaaaacgcgacaattactcagtatcagctcaaaggactggagccggagacagcctaccaggtcgacattttcgcggagaataatatcgggtcctctaacccggcattcagtcacgagctcgtgacgctgcctgaatctcaagcaccagctgacttgggcgggggcaaaatgctgcttatagcgatcttgggtagcgctggtatgacttgtctgaccgtcctcctagcctttctaattatcctacaactaaaaagggctaacgtgcaaagacgtatggcgcaggccttccagaatgttagagaggaaccggccgtgcaatttaactcggggaccctggctctgaatcgaaaggtcaagaataatccagaccctacaatctatccagttctggactggaatgatatcaagtttcaagacgtgatcggagaaggaaacttcggccaggtgctcaaagccagaatcaagaaagacgggctgcggatggatgctgccattaaacgaatgaaagaatacgccagtaaagatgatcatagagacttcgcaggagagctcgaagtcctgtgcaagctagggcatcaccccaacattataaacctgctgggcgcctgcgagcataggggctatctatatctcgccatcgagtatgccccacacggcaaccttctggatttcttgcggaaaagtagggttctggaaactgatcctgcttttgccattgctaatagtactgcatcgaccctgagctctcaacaattattacactttgccgccgacgttgctagaggtatggactacctaagtcaaaagcagttcattcaccgtgacctcgctgcccggaacatacttgtaggagagaactacgtggccaagatagctgactttggcctgtcacgtggacaggaggtgtatgtcaagaagaccatggggcgtctgccagtacgatggatggcaatcgagtctctgaactattctgtctatactacgaacagcgatgtttggtcgtacggggtgttgctatgggagatcgttagtctggggggtactccctactgcggtatgacatgcgcggaactgtacgagaaacttccgcagggctacagattggagaagccccttaactgtgacgacgaggtgtacgatcttatgcgccaatgttggcgcgaaaaaccatacgagcggccctcatttgcccagatactcgtcagtcttaaccgcatgctcgaggaacgaaagacctatgttaatacaaccctgtacgaaaagtttacatatgccggcatcgactgctctgccgaagaagcagcctag

SEQ ID NO: 9136 - DNA, 3375 bp, Artificial Sequence
  derived and/or modified sequence
atggattcacttgctagcttagtactgtgtggtgtgagtctgctgctttctgggaccgtggagggggctatggacttgatccttattaactcactgcctcttgtgtcagacgcagagacctccttgacttgcattgcttccggctggcgccctcatgagcctataactatcgggcgggacttcgaggcattaatgaaccagcaccaggatcctctggaggttacacaggacgtcacacgcgaatgggccaaaaaggtggtttggaaacgcgaaaaggcaagtaaaatcaatggtgcctatttttgtgaaggacgggttagaggagaggccatcagaattcgcacgatgaaaatgcggcagcaggcctcattcctgccggccacactcacaatgacagtggataaaggggacaacgtaaacatttcattcaaaaaggtgctgattaaggaagaggatgcagtgatctataagaacggctccttcatacacagcgtgcctcggcacgaggtgcctgacatcctggaggtccacttgcctcatgcgcaaccccaggatgcaggcgtatactctgctagatacattggcggcaacctgtttacatctgctttcactaggttgattgtgaggagatgtgaagcccagaagtggggccccgaatgcaatcacctgtgtaccgcttgtatgaacaacggcgtgtgccatgaagacacgggcgaatgcatatgtcctcccggcttcatggggcggacgtgcgaaaaagcatgtgagctgcacaccttcgggcgcacttgcaaggaacggtgcagcgggcaggaagggtgcaagagttacgtgttttgcctgcctgatccgtatggatgttcatgcgctacaggatggaaaggcctgcaatgtaacgaggcctgtcaccctgggttttacggtcccgattgcaaactgagatgctcctgtaacaacggggaaatgtgtgatagattccagggttgtctttgctctcccggatggcaggggctgcagtgtgagcgtgagggcatacagcgaatgacgccaaagatcgtcgatttgcctgaccacattgaagtaaactccggaaaatttaatccaatttgtaaggcctcagggtggcccctgcccaccaacgaagaaatgactctggtcaaaccggatggcactgtgctgcaccctaaggactttaatcacactgaccatttttccgtcgctatatttacgatccaccgaattttacctcccgacagcggcgtgtgggtgtgctctgttaacaccgtcgccggaatggtggaaaagccctttaacatttccgtgaaagtgttacccaagcctctcaacgcacctaacgtgattgacaccggccataactttgccgtgatcaacattagtagcgaaccttacttcggagacggtccaattaagtcgaagaagttgctttacaagcctgttaaccattacgaagcttggcaacacatacaggtgactaatgagatcgtcacccttaactacttagagccgagaactgagtatgagctgtgcgtgcaactggttcgacggggtgaaggtggcgaagggcatccaggccctgtccgaaggtttacaacagcctcaattgggcttcccccccctaggggcctgaacctacttccaaaaagccaaaccactctgaacttgacttggcaacccattttcccaagtagtgaagacgatttctacgtcgaggtcgagagacgcagcgtgcaaaaatccgaccaacagaatattaaggtgcccggcaacctcacttctgtactcttgaacaacctgcaccccagagaacagtacgtggtgcgggccagggttaacactaaggcacagggggaatggtctgaggacttgaccgcctggactctgtccgatattctgcccccgcagcctgagaatattaagatttccaatattacacactcttcagcggtgatcagctggaccatactggacggctatagcatctcgtcaataaccatccggtataaggtccaggggaaaaacgaggaccagcacgtcgacgtcaagatcaagaacgcaactattactcagtaccaactgaaagggttggagcccgagacagcgtatcaggtcgatatcttcgctgagaacaacattggctcctcgaaccccgctttttcccatgaactagtcacacttcctgagtctcaggctccagccgatcttggaggcggcaagatgctgctgatagccattctgggttccgcagggatgacttgtctgactgtccttttagcattcttgataatcctgcagctgaagagagctaatgtgcagagacgaatggcacaggcattccaaaacgtcagagaagaacctgccgttcagttcaattccggtaccttggcgcttaaccggaaggtcaaaaataacccagatcctactatctacccggtgttggattggaatgatatcaagttccaggacgtgattggggagggaaatttcggacaagtactcaaagctcgcattaagaaggacgggttgaggatggacgccgctattaaacgaatgaaagaatatgcatctaaggacgaccatcgagatttcgccggagagttggaagtgttgtgcaagctcggtcatcatcctaacatcatcaacctgctgggggcatgtgaacaccggggttacctgtatttggcgattgagtacgcaccacacggaaatctcttggactttttgagaaagtcacgcgtgctcgagacagatccagcctttgctatcgccaacagtaccgcgagcaccttgtcctcgcaacaactgctgcatttcgcagcggatgtcgctcggggtatggattacctatctcaaaaacaatttattcacagagatctggccgctaggaatatcctcgttggggagaattacgttgcaaagattgcggattttggactcagtcgaggtcaggaggtgtatgtgaaaaagaccatgggacgcctgccggtgcgctggatggcaatagagtctctgaactactcggtttacaccacaaactcagatgtgtggagttatggcgttctgctgtgggaaatcgttagcttgggtggaaccccttattgcgggatgacttgcgccgagctctacgaaaaactgccgcaggggtacaggctcgagaaaccactgaactgcgacgatgaggtgtacgatctgatgcgccaatgctggcgcgaaaagccgtatgagcggccctcttttgctcagatactggtgtctcttaacaggatgttagaggagaggaagacctacgttaacacaaccctatatgaaaaattcacatacgcaggaatcgactgctccgctgaggaagccgcttag

SEQ ID NO: 9137 - DNA, 3375 bp, Artificial Sequence
  derived and/or modified sequence
atggacagcctggccagcctggtgctgtgtggggtgtccctgctgctgtctggaacagtggagggcgccatggacctgatcctgatcaacagcctgcccctggtgtctgatgctgagaccagcctgacctgcatcgccagcggctggaggcctcatgagcccatcaccatcggccgggactttgaggccctgatgaaccagcaccaggaccccctggaggtgacccaggatgtgacccgggagtgggccaagaaggtggtgtggaagcgggagaaggccagcaagatcaatggagcctacttctgtgagggccgggtgcggggggaggccatccgcatccgcaccatgaagatgaggcagcaggccagcttcctgcctgccaccctgaccatgacagtggacaagggggacaacgtgaacatctccttcaagaaggtgctgatcaaggaggaggatgctgtgatctacaagaatggcagcttcatccacagcgtgcccaggcatgaggtgcctgacatcctggaggtgcacctgccccacgcccagccccaggatgctggggtgtacagcgcccgctacatcggcggcaacctcttcaccagcgccttcacccggctgattgtgagaagatgtgaggcccagaagtggggccctgagtgcaaccacctgtgcacagcctgcatgaacaacggggtgtgccatgaagatactggagagtgcatctgccccccaggcttcatgggccgcacctgtgagaaggcctgtgagctgcacaccttcggccgcacctgcaaggagcgctgcagcggccaggagggctgcaagagctatgtgttctgcctgcctgacccctacggctgcagctgtgccaccggctggaagggcctgcagtgcaatgaggcctgccaccctggcttctacggccctgactgcaagctgcgctgcagctgcaacaatggagagatgtgtgaccgcttccagggctgcctgtgcagccctggctggcagggcctgcagtgtgagcgggagggcatccagaggatgacccccaagatcgtggacctgcctgaccacatcgaggtgaacagcggcaagttcaaccccatctgcaaggccagcggctggcccctgcccaccaatgaggagatgaccctggtgaagccagatggcaccgtgctgcaccccaaggacttcaaccacacagaccacttctctgtggccatcttcaccatccaccgcatcctgcccccagattctggagtgtgggtgtgcagcgtgaacacagtggccggcatggtggagaagcccttcaacatctctgtgaaggtgctgcccaagcccctgaatgcccccaacgtcatcgacaccggccacaactttgctgtgatcaacatcagcagcgagccctactttggagatggccccatcaagagcaagaagctgctgtacaagcctgtgaaccactatgaggcctggcagcacatccaggtgaccaatgaaattgtgaccctgaactacctggagcccaggacagaatatgagctgtgtgtgcagctggtgagaagaggagagggcggggagggccaccctggccctgtgcggcgcttcaccacagccagcatcggcctgcccccaccccggggcctgaacctgctgcccaagagccagaccaccctgaacctgacctggcagcccatcttccccagcagtgaagatgacttctacgtggaggtggagcggcgctctgtgcagaagagtgaccagcagaacatcaaggtgcccggcaacctgacctctgtgctgctgaacaacctgcacccccgggagcagtatgtggtgcgggcccgggtgaacaccaaggcccagggcgagtggagcgaggacctgacagcctggaccctgagtgacatcctgcccccccagcctgagaacatcaagatcagcaacatcacccacagcagcgctgtgatctcctggaccatcctggatggctacagcatcagcagcatcaccatccgctacaaggtgcagggcaagaatgaagaccagcacgtggatgtgaagatcaagaatgccaccatcacccagtaccagctgaagggcctggagcctgagacagcctaccaggtggacatctttgctgagaacaacatcggcagcagcaacccagccttcagccatgagctggtgaccctgcctgagagccaggccccagctgacctgggcggcggcaagatgctgctgattgccatcctgggcagcgctggcatgacctgcctgactgtgctgctggccttcctgatcatcctgcagctgaagagggccaacgtgcagaggaggatggcccaggccttccagaatgtgcgggaggagcctgctgtgcagttcaacagcggcaccctggccctgaacaggaaggtgaagaacaacccagaccccaccatctaccctgtgctggactggaatgacatcaagttccaggacgtcatcggggagggcaactttggccaggtgctgaaggcccgcatcaagaaggatggcctgaggatggatgctgccatcaagaggatgaaggagtatgccagcaaggatgaccaccgggactttgctggggagctggaggtgctgtgcaagctgggccaccaccccaacatcatcaacctgctgggcgcctgtgagcaccggggctacctgtacctggccatcgagtatgcccctcatggcaacctgctggacttcctgaggaagagccgggtgctggagacagatcctgcctttgccatcgccaacagcacagccagcaccctgagcagccagcagctgctgcactttgctgctgatgtggcccggggcatggactacctgagccagaagcagttcatccaccgggacctggccgccaggaacatcctggtgggggagaactacgtggccaagattgctgactttggcctgagccggggccaggaggtgtatgtgaagaagaccatgggccgcctgcctgtgcgctggatggccatcgagagcctgaactacagcgtgtacaccaccaacagtgatgtgtggagctatggagtgctgctgtgggagatcgtgtccctgggcggcaccccctactgcggcatgacctgtgccgagctgtatgagaagctgccccagggctaccgcctggagaagcccctgaactgtgatgatgaggtgtatgacctgatgaggcagtgctggagggagaagccctatgaaagacccagctttgcccagatcctggtgtccctgaacaggatgctggaggagaggaagacctacgtgaacaccaccctgtatgagaagttcacctacgccggcatcgactgcagcgctgaggaggccgcctag

SEQ ID NO: 9138 - DNA, 3375 bp, Artificial Sequence
  derived and/or modified sequence
atggacagcctggccagcctggtgctgtgcggcgtgagcctgctgcttagcggaactgtcgaaggcgccatggacctgatcctgataaactctctcccattagtatccgacgcagagacctcacttacatgtatcgccagcgggtggaggccccatgaacctatcaccattggtagagatttcgaggccctgatgaatcagcatcaggaccctcttgaggtaacgcaggatgtgactagggagtgggctaagaaagtcgtgtggaaaagagaaaaagcttcaaagatcaatggagcttacttctgtgaggggcgagtgcggggtgaagctatccgaattaggaccatgaagatgaggcagcaggcaagttttttaccagccactctgaccatgactgtggacaaaggggacaatgtaaacatatctttcaaaaaggtgctaataaaagaggaggacgctgtgatctataagaacggatcttttattcactccgtgccacggcacgaggtccccgacattctggaggtccatctcccccatgcacaaccccaggacgccggcgtgtatagcgcgagatacatcggtggcaatctctttacatcagcgtttaccaggctgatcgttcgccgatgcgaggcacagaaatggggccccgaatgcaatcatctgtgtacagcgtgcatgaataacggcgtttgccacgaagacacaggggagtgcatatgtcccccaggtttcatgggccgaacctgcgaaaaggcttgtgagctacacacgttcggaagaacatgcaaagaacgttgctccgggcaggaaggctgtaagagctacgtgttttgtcttcctgatccctacggttgcagttgcgcaacaggctggaaggggctgcagtgtaatgaggcctgccaccccgggttctacgggccagattgcaaattgagatgttcctgtaacaacggtgagatgtgcgaccggttccagggctgcctttgcagtccaggttggcaaggcctgcagtgcgagagagagggtattcaacgaatgacaccgaagatcgtcgatttgcccgaccacatcgaggtgaatagcggtaaattcaacccgatttgcaaagcctcaggctggccactgccaaccaatgaagagatgacgctggtgaaaccggatggtactgttctgcatccaaaagactttaatcatactgatcactttagcgtcgccatttttaccatacacagaatactaccacctgattctggggtgtgggtctgctccgtcaacacagtggccgggatggtggagaagccttttaatatttccgttaaagtgctaccaaaacccctcaatgcccccaacgtgatagacaccgggcataatttcgcggtcattaacattagctcagaaccctactttggggatggccctatcaagtcaaagaaactgttatataaacccgtgaaccattatgaagcttggcagcacatccaggtgacgaatgaaattgtaaccctaaactacctggaacccaggacagaatatgagctgtgtgttcaactagtgagacgcggtgaagggggggaggggcacccaggaccggtccgcagattcacaaccgcctctattgggttaccccctcctcgagggctgaatctgttacctaagtcacagaccactctcaatctgacatggcagcccattttcccgtcctcagaggacgatttttatgtggaggtcgaaagacgatctgtacaaaagagtgaccaacagaacatcaaggtgcccggtaatttgaccagcgtcctacttaataacttacaccctcgggagcagtatgtcgtgagagcgagagtgaataccaaagcccagggcgagtggtcggaggatctgacagcttggacgttaagcgacattctgccccctcagccagagaatattaagatttccaacatcactcactcttctgcagtgatcagttggaccattttagacggctattccatctcatccatcacaataaggtataaggtacaggggaaaaatgaggatcagcatgtcgatgtcaagattaagaatgccactattacccagtaccagctcaaaggactggaacccgagaccgcataccaagttgacatattcgccgaaaataacatcggctctagtaacccagcgttctcgcatgaactcgtcaccttaccggaaagccaagcaccggccgatttgggaggtggcaagatgctgcttattgctatcctgggctcagcaggcatgacctgcttgaccgtactgctggcttttttgataattctgcagttaaaacgtgccaacgtccagcgaaggatggcacaggcttttcaaaatgtgcgggaagaacccgccgtacagtttaattccggtactctggcactcaacaggaaagttaagaataatccagatccaactatatatccagtattggactggaatgatatcaagtttcaagacgtgataggggagggaaattttggccaggtgctcaaggcccgcatcaaaaaggatgggcttaggatggacgccgcgatcaaacggatgaaggaatacgcctccaaggatgatcaccgcgattttgccggtgagctggaagtgctttgcaaactggggcaccatcctaacattattaacctgctgggcgcctgtgaacaccgagggtatctatatcttgctatcgaatatgcaccacatgggaatctgctcgattttctccgaaaatcaagggtcctggagactgatccggccttcgcaatagccaatagcactgcctcaaccttgtcttctcaacagttgctccacttcgccgccgacgttgcaaggggcatggactatctgtcgcagaagcaatttattcatagagacctggccgcgcgcaatatccttgttggcgaaaactacgtggccaaaatcgcagattttgggttatcccgtggacaagaggtgtacgtgaaaaagacgatggggcgacttcctgtcaggtggatggctatagaatcactgaattactccgtatataccacaaattcagacgtgtggtcctacggcgtgctcctttgggagatcgtttcactgggcgggactccttattgtgggatgacttgtgccgaactctacgagaagctccctcaaggctaccgattggaaaagccactgaactgtgatgatgaagtctatgaccttatgcgacagtgctggagggaaaagccctacgagagaccttcctttgcccagatactcgtcagcctgaataggatgctggaggaacggaaaacctatgttaatacaacactctacgagaaattcacttacgcaggaatcgattgttctgccgaagaagccgcctag

SEQ ID NO: 9139 - DNA, 3375 bp, Artificial Sequence
  derived and/or modified sequence
atggacagcctggccagcctggtgctgtgcggcgtgagcctgctgctgtctggaaccgtagagggcgctatggacctcatcttgattaacagcctcccactggtgtccgatgctgagacatcccttacctgcatcgctagtgggtggagaccacacgagcctatcacgatcgggcgtgacttcgaagctttgatgaatcagcatcaagatccgctggaagtgacacaggacgtgaccagggaatgggccaagaaagtggtgtggaaaagggagaaagcaagtaaaatcaatggtgcttatttctgcgaaggccgggtacgtggcgaggccatcaggattaggaccatgaaaatgcgccagcaagcgagttttctcccagccaccttaaccatgacagtcgacaaaggcgataacgtcaacatctcttttaagaaagtccttattaaagaagaggatgccgtgatttacaagaacgggagtttcatccactccgtgcctcgacacgaggttcctgatatcttggaggtccacttgccccacgcacaaccccaggatgccggggtgtattctgccaggtacatcgggggcaatctcttcaccagcgccttcacaagattaattgtccggcgatgcgaagcccaaaaatggggcccggaatgcaaccacctctgtaccgcctgtatgaacaatggcgtttgccacgaggacaccggcgagtgtatttgtccacctggtttcatgggccgaacttgtgaaaaggcctgcgaattacacactttcggacgaacttgcaaagagcggtgcagcggccaggaagggtgtaagtcatacgtgttttgtcttccggatccgtacggttgtagctgcgccactggatggaagggcctgcagtgcaacgaggcttgccacccaggcttctatggacctgactgtaaactgcggtgttcatgtaataatggagagatgtgcgatcgcttccagggttgtctgtgttcaccaggatggcagggcctccaatgtgaacgtgaagggatccagcgcatgacgccaaaaatagtggatctgcctgatcatatcgaggtgaacagcggaaaatttaatccaatctgcaaggcaagcggctggccattgcccacaaacgaagagatgacactggtgaagccagatggaacagtgctccacccgaaggatttcaaccataccgaccattttagtgttgctatcttcaccattcatcgcatcctgcctccagatagtggtgtgtgggtctgcagcgtgaataccgtggctggcatggtggagaaacccttcaatatttccgtaaaagtgctcccgaagccactaaacgcgcctaacgtgatcgacaccggacacaattttgccgtcattaatataagcagcgaaccttactttggagacgggccaattaagagtaaaaaactcctttacaagcccgttaaccattacgaagcttggcaacacattcaggtgactaatgagattgtgaccttgaattatctggagcccaggactgagtatgagctctgcgtgcagttggtgagacgcggtgaagggggcgagggtcatccaggacccgtgcggcgcttcactacagcgtctatcgggctgcccccaccccgaggactgaacctgctgcccaaatcccagaccacgctcaatctcacctggcaacccatctttcctagttctgaggacgatttctacgtagaagtcgaacgcagaagcgtgcaaaagtccgatcagcagaacatcaaggtgcctggaaacctgacttctgtgctgttgaacaaccttcatccccgtgagcagtacgtggtgagggctcgtgttaacactaaggcgcagggtgaatggagtgaggatcttaccgcttggaccctctcggatatcttacccccacagcctgagaacatcaaaatcagtaacataactcatagtagcgcagtaatttcctggacgattctggacggttattcaatcagcagcatcacaatccggtataaagtgcagggtaaaaacgaggaccagcacgttgacgtcaagatcaaaaacgccaccattacgcaataccagctgaaggggctcgaaccagagaccgcctatcaggtcgatattttcgcggaaaataatatcggatcttcaaatccggccttttcccacgaactcgtgaccctgcccgagtcccaggcaccagccgacctggggggcgggaaaatgttgttaatcgcaattttgggatccgcgggaatgacctgtctaaccgtgctgctggctttcctcattatactgcaactaaagcgggccaatgtacaacggcggatggcgcaggccttccaaaacgtgcgagaagaacccgcagtgcagtttaattccgggaccctcgcactcaaccggaaagtgaaaaacaatcctgacccaacaatttacccagtgctcgactggaatgatattaaattccaggatgtgatcggcgaaggcaatttcggacaagttctgaaagccaggatcaagaaagacggcttgaggatggatgccgcgattaaacgaatgaaggagtatgcgagcaaagatgaccatagggactttgccggagagctcgaagtgctgtgcaagctgggccaccatccaaacattatcaatctgttgggcgcatgcgagcatcggggatatttatatctagccatcgaatatgcacctcatgggaatctcttggatttccttcgaaaaagcagggtgctcgagacggaccctgccttcgcaattgccaactcaacggcctcaactctttcttctcagcagctgttacactttgccgccgacgtggctaggggaatggactacctctctcagaagcagttcattcatagggatttggccgcccgtaatatactcgtcggagaaaactatgtggccaagatcgcagactttggactgagtcgaggtcaggaggtgtatgtcaaaaagaccatgggccgccttcctgttcggtggatggctatcgagagtctcaattactccgtgtacacgaccaactcggacgtttggtcatatggggtgcttttatgggagatcgtgtcactcggggggacaccttattgtggcatgacttgcgccgaactgtacgagaaactgccacaagggtataggctcgaaaagccactgaactgcgatgacgaggtgtacgaccttatgcgacagtgctggcgagaaaagccatatgaaagaccctccttcgcgcagatcttggtttctttgaatcgcatgctggaggagcgcaagacatatgtcaacaccacattatacgagaaatttacttacgctggaatcgactgttccgctgaggaagccgcttag

SEQ ID NO: 9140 - DNA, 3375 bp, Artificial Sequence
  derived and/or modified sequence
atggacagtttggcaagtctggtgttgtgtggcgtaagtctcttattgtctgggacagtggaaggcgctatggatctcatcctgatcaactctctgccactggttagcgacgctgagaccagcctgacctgcattgctagtgggtggcgacctcacgagcccattacaatcggacgggattttgaggctctaatgaatcagcaccaggaccctctggaagtgactcaagacgtgacacgcgagtgggctaagaaggtggtgtggaaacgggagaaagctagtaagatcaatggcgcatatttttgcgaaggacgagtccgcggagaggccatcagaatccgcaccatgaagatgcgccagcaagccagctttctgccagctacactgaccatgactgtggataagggcgataatgtgaacatttccttcaagaaggtactgatcaaggaagaggacgcggtgatttataagaatggtagctttatacacagtgttcctcggcacgaggtgcccgatattctggaggtccacttaccgcatgcccagccacaggacgcaggcgtctactccgctcggtatattggtggaaacctgttcaccagcgctttcaccaggttgatagtcaggcggtgcgaggcacaaaaatgggggcctgagtgcaatcacctgtgtaccgcatgcatgaataatggggtttgccacgaggatacaggcgagtgcatctgcccacctggctttatggggaggacctgcgaaaaagcctgcgagctgcatactttcgggaggacttgcaaggaacgatgctccggacaagaaggctgcaaatcgtatgtcttttgtctccccgacccgtatggatgtagctgtgcaaccggatggaaggggttgcaatgcaacgaggcctgtcacccaggtttttatggacctgattgtaaactgcgatgctcctgtaacaacggtgagatgtgcgaccggttccaaggctgtctctgttccccaggctggcagggcctgcaatgtgaacgagagggcatccagagaatgacccctaagattgttgatttgcctgatcatatcgaagtcaattcaggcaagtttaatcccatctgcaaagctagtggatggcctttgccgactaatgaggagatgactttagtcaagcccgatggcacggtcttgcaccccaaggattttaaccacacggatcacttctctgtggccatctttacaattcaccggattttacccccagactcaggagtatgggtgtgtagcgtaaataccgtcgccggtatggtggaaaaaccttttaacatatctgtgaaagttctgcctaaacctttgaacgctcccaacgttatcgacaccggccataacttcgccgtgatcaacatctctagcgagccttatttcggcgacgggccaattaagagtaagaagctcttatataagcctgtgaaccattatgaggcctggcaacatattcaggtgactaacgaaattgtaaccttaaactatctggaacctcggaccgagtacgagctttgcgttcaactggtgaggcgcggagaaggcggagagggtcatccagggcctgtgcgtcggtttacgactgcctccatcgggctgcctccgcctcgcggtttaaatcttctcccaaagtctcagactactctcaatctgacgtggcagcctatttttcccagctccgaagacgacttctacgttgaagtcgagaggcggagcgtgcagaagtccgatcagcagaacataaaagtcccagggaacctgacgtccgtgctactgaataatctccatccgcgagaacagtacgtggtgagagcacgggtgaataccaaggctcagggagagtggagcgaggatctaacagcctggactttgtcagatatcctcccaccgcaaccagagaacattaagatctccaacattactcacagcagtgccgtaatttcttggacaatcttagacgggtatagcatcagttccataaccattcgctacaaggtacagggtaagaatgaagaccagcatgtggatgtcaaaataaaaaatgcaacaataacccagtaccagttgaagggtttggagccagaaacagcctaccaagtggacatcttcgcagagaataatatcggctcgagtaatccagctttcagtcacgagctggtgactctccctgagtcccaggctcctgctgaccttggtggagggaaaatgctgctcattgcaatcctgggcagcgccggaatgacatgcctgacagtcctcctggctttcctgattatcctgcagcttaagcgggcaaatgtgcagcgtcgcatggcccaggctttccagaacgtccgggaagagcccgcagtccagttcaactctggaacactcgccctcaataggaaagttaagaacaatcccgatcccacaatatatcccgttcttgactggaacgacattaagtttcaagatgtgatcggggaaggcaattttggacaggttcttaaagccagaatcaaaaaggatggactgcgcatggacgcagctatcaagagaatgaaagagtacgcttctaaagatgaccaccgggatttcgcgggagaactggaagtgctctgcaaactgggccatcatccgaatattattaacctgctcggcgcatgcgagcaccgtggttacctatacttggcgatcgaatacgctccacacgggaacctcctggacttcctgaggaagagtcgcgtgctggagaccgaccctgccttcgccatagcaaactcaactgcctccaccctctccagccagcaactacttcacttcgctgcagatgtagcaagaggaatggactacctgagccagaaacaattcatccatagggaccttgccgctcgtaacattctggtcggagagaattacgttgccaagatcgccgatttcggcctcagtcggggacaggaggtgtacgtgaagaaaacaatgggcagactgcctgtgcggtggatggcaatagaatccctaaattacagtgtttacactacaaacagtgatgtgtggtcctatggcgtgttgctctgggagattgtgtcactaggcggaactccttactgtggaatgacatgcgccgagctgtacgagaagctccctcagggctacagattggagaagccgcttaactgcgatgatgaagtctacgacttaatgagacagtgctggagggagaaaccgtatgaaagacctagctttgcgcagatcctcgtaagcctgaaccgaatgctggaagaaagaaaaacgtatgtcaatactacactgtatgaaaaatttacttacgcaggtattgattgcagcgccgaagaggccgcttag

SEQ ID NO: 9141 - DNA, 3375 bp, Artificial Sequence
  derived and/or modified sequence
atggattccctcgctagtcttgttctctgtggcgtgagtctcctgctgtccgggactgtggagggcgcaatggatctcatccttatcaacagtctacctttagtctcagacgctgaaacaagcctgacctgcatcgctagtgggtggcgtccccacgaaccaatcactatcggaagagacttcgaagctctgatgaatcagcaccaggatcccctggaggtgactcaggatgtcacccgggagtgggccaagaaggtggtgtggaaaagggagaaagcatccaagattaacggcgcatacttttgcgaaggccgagtccgcggagaagctatccggatccggacgatgaagatgagacagcaagcctccttcctcccggctacactgactatgaccgtagacaagggggacaacgtcaacatctcttttaaaaaagtcctgatcaaagaggaggatgctgttatatataagaacggcagtttcattcactcagtgcccagacacgaagtaccggatattctggaggtccacctgccccacgcccagccacaagacgcgggagtttactctgctcgttatatcggaggtaacctattcactagcgcattcacccgcctcattgtcagaaggtgcgaggcacagaaatgggggcctgagtgcaaccacctctgtaccgcttgtatgaataacggcgtgtgccatgaggatacgggtgagtgcatttgcccaccaggattcatgggtcgcacctgtgagaaggcttgcgaactacatacgtttgggaggacatgtaaagagaggtgttctggtcaggagggttgcaaaagctatgtgttctgtcttcccgacccgtacggatgtagttgtgccacgggctggaaggggctgcagtgtaacgaagcttgccaccccggtttctatgggcctgactgtaaactgcgctgctcatgcaacaacggcgaaatgtgcgatcgattccagggttgtctctgctcacctggctggcaagggttgcaatgtgagagggagggcatacagcggatgacacccaagatcgtagatctgcccgatcatatcgaggtcaatagcggaaagttcaatcctatctgtaaggcctccggctggccattgccaacaaatgaagagatgacattagtgaaaccagacggcaccgttctacatccgaaggattttaatcacactgatcatttttccgtggccatattcactatccatcggatcctgcctccagactcaggcgtgtgggtatgctcagtcaatacagtcgcgggtatggtggagaagccattcaacatttctgtgaaggtgctgcctaagcctctgaacgcccctaatgtaatcgacactggacacaactttgccgtaattaatatcagtagcgagccgtattttggcgatgggcctatcaagtctaagaagttgttatataagcctgtcaaccactacgaggcctggcaacacatccaggtcactaacgaaattgtgaccttgaactacttggaacccaggaccgagtatgaattatgcgtccagctcgttcggagaggcgagggtggggagggacatcctggacccgttaggcgttttaccaccgcctcaatcggactgccccctcccagagggttaaacctgttgcccaaaagtcagaccacactaaacctcacttggcaacccatctttcctagctccgaagatgatttttatgttgaagtcgaaaggaggtctgtccaaaagtctgatcagcagaacattaaggtgccgggaaatcttaccagtgtgcttctgaacaacttgcatccacgcgagcagtatgtagtccgcgctcgagtgaatactaaagcccagggtgagtggtccgaagacctgacagcctggacactgtccgacatcctacctccacagcccgaaaatattaaaatcagcaacattacgcactcaagcgctgtgatctcttggactatcctcgatggatattccatcagctcaatcactattcgatacaaggtgcaaggcaagaatgaggaccagcacgtcgacgtcaagatcaaaaatgcaaccataacacagtatcagttaaagggactggagccagagacagcataccaggtagacatctttgctgagaataacatcgggtctagcaatcccgctttcagccacgaactggttacactgccagagtcccaggcaccagcggacctcgggggtggaaaaatgctcctcattgcgatactcgggtccgccggtatgacctgcctgaccgtgctgttggcatttctcatcatcttacagttaaaacgggctaacgtgcagcgtcggatggcccaggcttttcagaatgtaagagaggagcccgctgtgcagttcaatagcggtacactggccctgaatcggaaagtcaagaataaccccgatccaaccatctaccccgtgctagattggaacgacatcaaatttcaagatgtgatcggcgaaggcaacttcggccaagtgctcaaagctcgcattaaaaaggacggcctcaggatggacgctgccatcaagcgcatgaaggagtacgcatcaaaggacgatcatcgggacttcgccggagagctggaggtcctctgtaaactggggcaccacccaaatattattaacttactcggagcatgtgagcatcgtggctacctttacctggcaattgaatatgctccccatgggaacttgctcgattttcttcgcaaaagtcgcgtgctcgagaccgaccccgctttcgcaattgcgaactctactgcatcaactctttcctcacaacagcttctccacttcgcggcagacgtcgcaaggggtatggattacctgtcgcagaaacaatttatacacagagatctcgccgcacgcaatatcctggtcggtgagaattatgtggccaaaatcgctgattttggactgtcccggggtcaagaggtgtatgttaagaaaaccatggggcgactgcccgtccgctggatggccatcgagtcccttaactatagcgtttatactaccaactctgacgtgtggtcctatggggtcctgctgtgggaaattgtatcactggggggaactccctattgtggcatgacttgcgccgagctgtatgagaagctacctcagggatacaggctcgagaagcctctgaactgcgatgacgaagtgtacgatctgatgcggcaatgctggcgcgaaaagccatacgaacgacccagctttgcacaaatcctggtgtccttaaacagaatgttagaggaacggaagacctacgtgaacacgaccctgtatgaaaaatttacctatgctggaatcgactgcagcgcagaggaagccgcttag

SEQ ID NO: 9142 - DNA, 4760 bp, Artificial Sequence
  derived and/or modified sequence
agtttcccgcctatgagaggatacccctattgtttctgaaaatgctgaccgggacccacacttccaacaaaaattcctctgcccctacagcagcagcaaaagcagcagcagaagcaacagcaacagataagtgttttgatgaattgcgagatggatagggcttgagtgcccccagccctgctgataccaaatgcctttaagatacagcctttcccatcctaatctacaaaggaaacaggaaaaaggaacttaaaactccctgtgctcagacagaaatgagactgttacagcctgcttctgtgctgttccttcttgcctctaacttgtaaacaagacgtagtaggacgatgctaatggaaagtcacaaaccgctgggtttttgaaaggatccttgggacctcatgcacatttgtggaaactggatggagagatttggggaagcatggactctttagccagcttagttctctgtggagtcagcttgctcctttctggaactgtggaaggtgccatggacttgatcttgatcaattccctacctcttgtatctgatgctgaaacatctctcacctgcattgcctctgggtggcgcccccatgagcccatcaccataggaagggactttgaagccttaatgaaccagcaccaggatccgctggaagttactcaagatgtgaccagagaatgggctaaaaaagttgtttggaagagagaaaaggctagtaagatcaatggtgcttatttctgtgaagggcgagttcgaggagaggcaatcaggatacgaaccatgaagatgcgtcaacaagcttccttcctaccagctactttaactatgactgtggacaagggagataacgtgaacatatctttcaaaaaggtattgattaaagaagaagatgcagtgatttacaaaaatggttccttcatccattcagtgccccggcatgaagtacctgatattctagaagtacacctgcctcatgctcagccccaggatgctggagtgtactcggccaggtatataggaggaaacctcttcacctcggccttcaccaggctgatagtccggagatgtgaagcccagaagtggggacctgaatgcaaccatctctgtactgcttgtatgaacaatggtgtctgccatgaagatactggagaatgcatttgccctcctgggtttatgggaaggacgtgtgagaaggcttgtgaactgcacacgtttggcagaacttgtaaagaaaggtgcagtggacaagagggatgcaagtcttatgtgttctgtctccctgacccctatgggtgttcctgtgccacaggctggaagggtctgcagtgcaatgaagcatgccaccctggtttttacgggccagattgtaagcttaggtgcagctgcaacaatggggagatgtgtgatcgcttccaaggatgtctctgctctccaggatggcaggggctccagtgtgagagagaaggcatacagaggatgaccccaaagatagtggatttgccagatcatatagaagtaaacagtggtaaatttaatcccatttgcaaagcttctggctggccgctacctactaatgaagaaatgaccctggtgaagccggatgggacagtgctccatccaaaagactttaaccatacggatcatttctcagtagccatattcaccatccaccggatcctcccccctgactcaggagtttgggtctgcagtgtgaacacagtggctgggatggtggaaaagcccttcaacatttctgttaaagttcttccaaagcccctgaatgccccaaacgtgattgacactggacataactttgctgtcatcaacatcagctctgagccttactttggggatggaccaatcaaatccaagaagcttctatacaaacccgttaatcactatgaggcttggcaacatattcaagtgacaaatgagattgttacactcaactatttggaacctcggacagaatatgaactctgtgtgcaactggtccgtcgtggagagggtggggaagggcatcctggacctgtgagacgcttcacaacagcttctatcggactccctcctccaagaggtctaaatctcctgcctaaaagtcagaccactctaaatttgacctggcaaccaatatttccaagctcggaagatgacttttatgttgaagtggagagaaggtctgtgcaaaaaagtgatcagcagaatattaaagttccaggcaacttgacttcggtgctacttaacaacttacatcccagggagcagtacgtggtccgagctagagtcaacaccaaggcccagggggaatggagtgaagatctcactgcttggacccttagtgacattcttcctcctcaaccagaaaacatcaagatttccaacattacacactcctcagctgtgatttcttggacaatattggatggctattctatttcttctattactatccgttacaaggttcaaggcaagaatgaagaccagcacgttgatgtgaagataaagaatgccaccatcactcagtatcagctcaagggcctagagcctgaaacagcataccaggtggacatttttgcagagaacaacatagggtcaagcaacccagccttttctcatgaactggtgaccctcccagaatctcaagcaccagcggacctcggaggggggaagatgctgcttatagccatccttggctctgctggaatgacctgcctgactgtgctgttggcctttctgatcatattgcaattgaagagggcaaatgtgcaaaggagaatggcccaagccttccaaaacgtgagggaagaaccagctgtgcagttcaactcagggactctggccctaaacaggaaggtcaaaaacaacccagatcctacaatttatccagtgcttgactggaatgacatcaaatttcaagatgtgattggggagggcaattttggccaagttcttaaggcgcgcatcaagaaggatgggttacggatggatgctgccatcaaaagaatgaaagaatatgcctccaaagatgatcacagggactttgcaggagaactggaagttctttgtaaacttggacaccatccaaacatcatcaatctcttaggagcatgtgaacatcgaggctacttgtacctggccattgagtacgcgccccatggaaaccttctggacttccttcgcaagagccgtgtgctggagacggacccagcatttgccattgccaatagcaccgcgtccacactgtcctcccagcagctccttcacttcgctgccgacgtggcccggggcatggactacttgagccaaaaacagtttatccacagggatctggctgccagaaacattttagttggtgaaaactatgtggcaaaaatagcagattttggattgtcccgaggtcaagaggtgtatgtgaaaaagacaatgggaaggctcccagtgcgctggatggccatcgagtcactgaattacagtgtgtacacaaccaacagtgatgtatggtcctatggtgtgttactatgggagattgttagcttaggaggcacaccctactgcgggatgacttgtgcagaactctacgagaagctgccccagggctacagactggagaagcccctgaactgtgatgatgaggtgtatgatctaatgagacaatgctggcgggagaagccttatgagaggccatcatttgcccagatattggtgtccttaaacagaatgttagaggagcgaaagacctacgtgaataccacgctttatgagaagtttacttatgcaggaattgactgttctgctgaagaagcggcctaggacagaacatctgtataccctctgtttccctttcactggcatgggagacccttgacacctgctgagaaaacatgcctctgccaaaggatgtgatatataagtgtacatatgtgctgtacacctgggaccttcaccactgtagatcccatgcatggatctatgtagtatgctctgactctaataggactgtatatactgttttaagaatgggctgaaatcagaatgcctgtttgtggtttcatatgcaataatatatttttttaaaaatgtggacttcataggaaggcgtgagtacaattagtataatgcataactcattgttgtcctagatattttgatatttacctttatgttgaatgctattaaatgttttcctgtgtcaaagtaaaatattgttaataaacctaacaatgaccctgatagtacaggttaagtgagagaactatatgaattctaacaagtcataggttaatatttaagacactgaaaaatctaagtgatataaatcagattcttctctctcaattttatccctcacctgtagcagccagtcccgtttcatttagtcatgtgaccactctgtcttgtgtttccacagcctgcaagtcagtccaggatgctaacatctaaaaatagacttaaatctcattgcttacaagcctaagaatctttagagaagtatacataagtttaggataaaataatgggattttcttttcttttctctggtaatattgacttgtatattttaagaaataacagaaagcctgggtgacatttgggagacatgtgacatttatatattgaattaatatccctacatgtattgcacattgtaaaaagttttagttttgatgagttgtgagtttaccttgtatactgtaggcacactttgcactgatatatcatgagtgaataaatgtcttgcctactcacgtctcat

SEQ ID NO: 9143 - DNA, 4333 bp, Artificial Sequence
  derived and/or modified sequence
gcagcagcaaaagcagcagcagaagcaacagcaacagataagtgttttgatgaattgcgagatggatagggcttgagtgcccccagccctgctgataccaaatgcctttaagatacagcctttcccatcctaatctacaaaggaaacaggaaaaaggaacttaaaactccctgtgctcagacagaaatgagactgttacagcctgcttctgtgctgttccttcttgcctctaacttgtaaacaagacgtagtaggacgatgctaatggaaagtcacaaaccgctgggtttttgaaaggatccttgggacctcatgcacatttgtggaaactggatggagagatttggggaagcatggactctttagccagcttagttctctgtggagtcagcttgctcctttctggaactgtggaaggtgccatggacttgatcttgatcaattccctacctcttgtatctgatgctgaaacatctctcacctgcattgcctctgggtggcgcccccatgagcccatcaccataggaagggactttgaagccttaatgaaccagcaccaggatccgctggaagttactcaagatgtgaccagagaatgggctaaaaaagttgtttggaagagagaaaaggctagtaagatcaatggtgcttatttctgtgaagggcgagttcgaggagaggcaatcaggatacgaaccatgaagatgcgtcaacaagcttccttcctaccagctactttaactatgactgtggacaagggagataacgtgaacatatctttcaaaaaggtattgattaaagaagaagatgcagtgatttacaaaaatggttccttcatccattcagtgccccggcatgaagtacctgatattctagaagtacacctgcctcatgctcagccccaggatgctggagtgtactcggccaggtatataggaggaaacctcttcacctcggccttcaccaggctgatagtccggagatgtgaagcccagaagtggggacctgaatgcaaccatctctgtactgcttgtatgaacaatggtgtctgccatgaagatactggagaatgcatttgccctcctgggtttatgggaaggacgtgtgagaaggcttgtgaactgcacacgtttggcagaacttgtaaagaaaggtgcagtggacaagagggatgcaagtcttatgtgttctgtctccctgacccctatgggtgttcctgtgccacaggctggaagggtctgcagtgcaatgaagcatgccaccctggtttttacgggccagattgtaagcttaggtgcagctgcaacaatggggagatgtgtgatcgcttccaaggatgtctctgctctccaggatggcaggggctccagtgtgagagagaaggcatacagaggatgaccccaaagatagtggatttgccagatcatatagaagtaaacagtggtaaatttaatcccatttgcaaagcttctggctggccgctacctactaatgaagaaatgaccctggtgaagccggatgggacagtgctccatccaaaagactttaaccatacggatcatttctcagtagccatattcaccatccaccggatcctcccccctgactcaggagtttgggtctgcagtgtgaacacagtggctgggatggtggaaaagcccttcaacatttctgttaaagttcttccaaagcccctgaatgccccaaacgtgattgacactggacataactttgctgtcatcaacatcagctctgagccttactttggggatggaccaatcaaatccaagaagcttctatacaaacccgttaatcactatgaggcttggcaacatattcaagtgacaaatgagattgttacactcaactatttggaacctcggacagaatatgaactctgtgtgcaactggtccgtcgtggagagggtggggaagggcatcctggacctgtgagacgcttcacaacagcttctatcggactccctcctccaagaggtctaaatctcctgcctaaaagtcagaccactctaaatttgacctggcaaccaatatttccaagctcggaagatgacttttatgttgaagtggagagaaggtctgtgcaaaaaagtgatcagcagaatattaaagttccaggcaacttgacttcggtgctacttaacaacttacatcccagggagcagtacgtggtccgagctagagtcaacaccaaggcccagggggaatggagtgaagatctcactgcttggacccttagtgacattcttcctcctcaaccagaaaacatcaagatttccaacattacacactcctcagctgtgatttcttggacaatattggatggctattctatttcttctattactatccgttacaaggttcaaggcaagaatgaagaccagcacgttgatgtgaagataaagaatgccaccatcactcagtatcagctcaagggcctagagcctgaaacagcataccaggtggacatttttgcagagaacaacatagggtcaagcaacccagccttttctcatgaactggtgaccctcccagaatctcaagcaccagcggacctcggaggggggaagatgctgcttatagccatccttggctctgctggaatgacctgcctgactgtgctgttggcctttctgatcatattgcaattgaagagggcaaatgtgcaaaggagaatggcccaagccttccaaaacgtgagggaagaaccagctgtgcagttcaactcagggactctggccctaaacaggaaggtcaaaaacaacccagatcctacaatttatccagtgcttgactggaatgacatcaaatttcaagatgtgattggggagggcaattttggccaagttcttaaggcgcgcatcaagaaggatgggttacggatggatgctgccatcaaaagaatgaaagaatatgcctccaaagatgatcacagggactttgcaggagaactggaagttctttgtaaacttggacaccatccaaacatcatcaatctcttaggagcatgtgaacatcgaggctacttgtacctggccattgagtacgcgccccatggaaaccttctggacttccttcgcaagagccgtgtgctggagacggacccagcatttgccattgccaatagcaccgcgtccacactgtcctcccagcagctccttcacttcgctgccgacgtggcccggggcatggactacttgagccaaaaacagtttatccacagggatctggctgccagaaacattttagttggtgaaaactatgtggcaaaaatagcagattttggattgtcccgaggtcaagaggtgtatgtgaaaaagacaatgggaaggctcccagtgcgctggatggccatcgagtcactgaattacagtgtgtacacaaccaacagtgatgtatggtcctatggtgtgttactatgggagattgttagcttaggaggcacaccctactgcgggatgacttgtgcagaactctacgagaagctgccccagggctacagactggagaagcccctgaactgtgatgatgaggtgtatgatctaatgagacaatgctggcgggagaagccttatgagaggccatcatttgcccagatattggtgtccttaaacagaatgttagaggagcgaaagacctacgtgaataccacgctttatgagaagtttacttatgcaggaattgactgttctgctgaagaagcggcctaggacagaacatctgtataccctctgtttccctttcactggcatgggagacccttgacacctgctgagaaaacatgcctctgccaaaggatgtgatatataagtgtacatataactatatgaattctaacaagtcataggttaatatttaagacactgaaaaatctaagtgatataaatcagattcttctctctcaattttatccctcacctgtagcagccagtcccgtttcatttagtcatgtgaccactctgtcttgtgtttccacagcctgcaagtcagtccaggatgctaacatctaaaaatagacttaaatctcattgcttacaagcctaagaatctttagagaagtatacataagtttaggataaaataatgggattttcttttcttttctctggtaatattgacttgtatattttaagaaataacagaaagcctgggtgacatttgggagacatgtgacatttatatattgaattaatatccctacatgtattgcacattgtaaaaagttttagttttgatgagttgtgagtttaccttgtatactgtaggcacactttgcactgatatatcatgagtgaataaatgtcttgcctactca

SEQ ID NO: 9144 - protein, 533 aa, Artificial Sequence
  derived and/or modified sequence
MAVESQGGRPLVLGLLLCVLGPVVSHAGKILLIPVDGSHWLSMLGAIQQLQQRGHEIVVLAPDASLYIRDGAFYTLKTYPVPFQREDVKESFVSLGHNVFENDSFLQRVIKTYKKIKKDSAMLLSGCSHLLHNKELMASLAESSFDVMLTDPFLPCSPIVAQYLSLPTVFFLHALPCSLEFEATQCPNPFSYVPRPLSSHSDHMTFLQRVKNMLIAFSQNFLCDVVYSPYATLASEFLQREVTVQDLLSSASVWLFRSDFVKDYPRPIMPNMVFVGGINCLHQNPLSQEFEAYINASGEHGIVVFSLGSMVSEIPEKKAMAIADALGKIPQTVLWRYTGTRPSNLANNTILVKWLPQNDLLGHPMTRAFITHAGSHGVYESICNGVPMVMMPLFGDQMDNAKRMETKGAGVTLNVLEMTSEDLENALKAVINDKSYKENIMRLSSLHKDRPVEPLDLAVFWVEFVMRHKGAPHLRPAAHDLTWYQYHSLDVIGFLLAVVLTVAFITFKCCAYGYRKCLGKKGRVKKAHKSKTH

SEQ ID NO: 9145 - protein, 444 aa, Artificial Sequence
  derived and/or modified sequence
MAVESQGGRPLVLGLLLCVLGPVVSHAGKILLIPVDGSHWLSMLGAIQQLQQRGHEIVVLAPDASLYIRDGAFYTLKTYPVPFQREDVKESFVSLGHNVFENDSFLQRVIKTYKKIKKDSAMLLSGCSHLLHNKELMASLAESSFDVMLTDPFLPCSPIVAQYLSLPTVFFLHALPCSLEFEATQCPNPFSYVPRPLSSHSDHMTFLQRVKNMLIAFSQNFLCDVVYSPYATLASEFLQREVTVQDLLSSASVWLFRSDFVKDYPRPIMPNMVFVGGINCLHQNPLSQEFEAYINASGEHGIVVFSLGSMVSEIPEKKAMAIADALGKIPQTVLWRYTGTRPSNLANNTILVKWLPQNDLLGHPMTRAFITHAGSHGVYESICNGVPMVMMPLFGDQMDNAKRMETKGAGVTLNVLEMTSEDLENALKAVINDKRKKQQSGRQM

SEQ ID NO: 9146 - DNA, 86 bp, Artificial Sequence
  derived and/or modified sequence
acaaaatcaaactaacctcgataagaatgcaagtgaatcaaaatgagtttcaaggggttgtggctagtacacgctttctacagctg

SEQ ID NO: 9147 - DNA, 1599 bp, Artificial Sequence
  derived and/or modified sequence
atggccgtggagagccagggcggccgccccctggtgctgggcctgctgctgtgcgtgctgggccccgtggtgagccacgccggcaagatcctgctgatccccgtggacggcagccactggctgagcatgctgggcgccatccagcagctgcagcagcgcggccacgagatcgtggtgctggcccccgacgccagcctgtacatccgcgacggcgccttctacaccctgaagacctaccccgtgcccttccagcgcgaggacgtgaaggagagcttcgtgagcctgggccacaacgtgttcgagaacgacagcttcctgcagcgcgtgatcaagacctacaagaagatcaagaaggacagcgccatgctgctgagcggctgcagccacctgctgcacaacaaggagctgatggccagcctggccgagagcagcttcgacgtgatgctgaccgaccccttcctgccctgcagccccatcgtggcccagtacctgagcctgcccaccgtgttcttcctgcacgccctgccctgcagcctggagttcgaggccacccagtgccccaaccccttcagctacgtgccccgccccctgagcagccacagcgaccacatgaccttcctgcagcgcgtgaagaacatgctgatcgccttcagccagaacttcctgtgcgacgtggtgtacagcccctacgccaccctggccagcgagttcctgcagcgcgaggtgaccgtgcaggacctgctgagcagcgccagcgtgtggctgttccgcagcgacttcgtgaaggactacccccgccccatcatgcccaacatggtgttcgtgggcggcatcaactgcctgcaccagaaccccctgagccaggagttcgaggcctacatcaacgccagcggcgagcacggcatcgtggtgttcagcctgggcagcatggtgagcgagatccccgagaagaaggccatggccatcgccgacgccctgggcaagatcccccagaccgtgctgtggcgctacaccggcacccgccccagcaacctggccaacaacaccatcctggtgaagtggctgccccagaacgacctgctgggccaccccatgacccgcgccttcatcacccacgccggcagccacggcgtgtacgagagcatctgcaacggcgtgcccatggtgatgatgcccctgttcggcgaccagatggacaacgccaagcgcatggagaccaagggcgccggcgtgaccctgaacgtgctggagatgaccagcgaggacctggagaacgccctgaaggccgtgatcaacgacaagagctacaaggagaacatcatgcgcctgagcagcctgcacaaggaccgccccgtggagcccctggacctggccgtgttctgggtggagttcgtgatgcgccacaagggcgccccccacctgcgccccgccgcccacgacctgacctggtaccagtaccacagcctggacgtgatcggcttcctgctggccgtggtgctgaccgtggccttcatcaccttcaagtgctgcgcctacggctaccgcaagtgcctgggcaagaagggccgcgtgaagaaggcccacaagagcaagacccac

SEQ ID NO: 9148 - DNA, 1332 bp, Artificial Sequence
  derived and/or modified sequence
atggccgtggagagccagggcggccgccccctggtgctgggcctgctgctgtgcgtgctgggccccgtggtgagccacgccggcaagatcctgctgatccccgtggacggcagccactggctgagcatgctgggcgccatccagcagctgcagcagcgcggccacgagatcgtggtgctggcccccgacgccagcctgtacatccgcgacggcgccttctacaccctgaagacctaccccgtgcccttccagcgcgaggacgtgaaggagagcttcgtgagcctgggccacaacgtgttcgagaacgacagcttcctgcagcgcgtgatcaagacctacaagaagatcaagaaggacagcgccatgctgctgagcggctgcagccacctgctgcacaacaaggagctgatggccagcctggccgagagcagcttcgacgtgatgctgaccgaccccttcctgccctgcagccccatcgtggcccagtacctgagcctgcccaccgtgttcttcctgcacgccctgccctgcagcctggagttcgaggccacccagtgccccaaccccttcagctacgtgccccgccccctgagcagccacagcgaccacatgaccttcctgcagcgcgtgaagaacatgctgatcgccttcagccagaacttcctgtgcgacgtggtgtacagcccctacgccaccctggccagcgagttcctgcagcgcgaggtgaccgtgcaggacctgctgagcagcgccagcgtgtggctgttccgcagcgacttcgtgaaggactacccccgccccatcatgcccaacatggtgttcgtgggcggcatcaactgcctgcaccagaaccccctgagccaggagttcgaggcctacatcaacgccagcggcgagcacggcatcgtggtgttcagcctgggcagcatggtgagcgagatccccgagaagaaggccatggccatcgccgacgccctgggcaagatcccccagaccgtgctgtggcgctacaccggcacccgccccagcaacctggccaacaacaccatcctggtgaagtggctgccccagaacgacctgctgggccaccccatgacccgcgccttcatcacccacgccggcagccacggcgtgtacgagagcatctgcaacggcgtgcccatggtgatgatgcccctgttcggcgaccagatggacaacgccaagcgcatggagaccaagggcgccggcgtgaccctgaacgtgctggagatgaccagcgaggacctggagaacgccctgaaggccgtgatcaacgacaagcgcaagaagcagcagagcggccgccagatg

SEQ ID NO: 9149 - DNA, 1599 bp, Artificial Sequence
  derived and/or modified sequence
atggccgtcgaaagccagggaggccgaccgcttgtcctcggcctcctgctctgcgtgcttggaccagtggtgtcgcacgccggcaagatcctcctcatccctgtggatggctctcattggctctccatgttgggcgcaatacaacagctccagcaacgtggccatgaaatcgtggtcctcgcaccggatgcgtccctctatatacgtgacggcgctttttacacccttaaaacctaccccgtgccttttcagcgcgaggacgtgaaggagtcgttcgtcagccttgggcataatgtttttgaaaacgactcatttctgcaacgagtgattaagacttacaagaagataaagaaggactctgcaatgctgctttccggatgtagccatcttcttcacaataaggaactgatggcatcgctggctgagtccagctttgacgtgatgctcactgatccgttccttccttgttcccctattgtggcccaatacctcagcctgcctactgtgttcttcctgcatgcactgccgtgctcactggagttcgaggcaacccagtgtccgaacccattttcgtatgtgccacgcccacttagttcgcatagcgaccacatgacgttccttcaaagagtgaagaacatgctgatcgccttttcgcaaaactttctgtgtgacgtggtttattcgccttacgcgactctcgcctcagaattccttcaacgggaagtcactgtgcaggatctgttgtcgtcagcctcggtgtggctttttcgttcggattttgtgaaggactacccaagaccaatcatgccaaatatggtctttgtcggaggcattaactgtctgcaccagaatccactgtcgcaggaattcgaagcctacattaatgcatctggagagcatggtattgttgtcttttcccttggttccatggtttcggaaattcctgaaaagaaagcaatggcgattgcagatgcactgggcaagatacctcagacggtgctttggagatacaccggcactcgccccagcaaccttgctaacaacaccattcttgtcaagtggctcccccaaaacgatctcctcggacaccccatgacgagggcttttatcactcatgcgggctcgcatggtgtgtacgagtccatttgtaatggagtgcctatggtgatgatgccacttttcggggatcagatggataacgcaaaacgaatggaaactaagggggccggggtgaccctgaacgtcctggagatgaccagtgaggatttggaaaacgcattgaaggccgtgattaatgataagagttacaaggagaacattatgcggctcagctccctgcataaggatcgccctgtggagcctcttgacctggctgtgttttgggttgaatttgtgatgagacataaaggagctcctcatcttcggcccgcggcacacgatctgacctggtaccaataccactccctcgatgtcattggatttctgctggcagtggtcctgactgtcgcattcatcacttttaagtgttgcgcatacggataccgtaagtgcctggggaaaaaaggaagagtgaaaaaggcgcataagtccaagacccac

SEQ ID NO: 9150 - DNA, 1599 bp, Artificial Sequence
  derived and/or modified sequence
atggccgtggaatctcaagggggccgtcccttggtgcttggactactgctgtgcgtgctggggcctgttgtaagtcatgctggcaagattctgttgatcccagtcgatggcagccattggcttagcatgcttggcgctatacagcagcttcagcaaagggggcacgaaatcgtggtgctagcaccagacgctagcctctatatcagggatggcgcattctatactttgaagacataccctgtcccgttccaaagggaggatgtgaaagagtcatttgtgtcactcggccataatgtcttcgaaaacgacagttttctgcagagggtgatcaagacctacaaaaagattaagaaggattctgcaatgctgctctccggctgttctcatctgctccacaacaaggaattaatggcatcgctggccgagtcgagtttcgacgtaatgttaacagacccgttcctgccgtgctcgccaatagtcgcacagtacctctcattgcccaccgtgttcttcctgcacgctttaccttgttcactcgaatttgaggcgacgcaatgtccaaatccattctcctatgtaccaaggcctctgtcctcgcatagcgaccacatgacatttttgcagagagtgaagaatatgttgatcgccttctcccagaatttcctgtgcgatgtagtgtacagcccttacgcaactctggcgtctgaatttctgcagagggaagtgacagtgcaggacctgttaagctcagctagtgtgtggctctttcgatccgacttcgtgaaagactatcctagacctatcatgcccaatatggtcttcgtgggtgggatcaactgcctgcatcagaaccctttatctcaagagtttgaagcatacatcaacgcatctggtgaacacggaatcgtcgtgttctcccttggctccatggtcagtgagattcccgaaaagaaagccatggctatagcagatgcgctgggcaagattccccagactgtgttatggagatatacaggcacaaggccaagtaaccttgcaaacaacaccatattggtaaaatggctgccccagaacgaccttctcggacacccgatgacgagagcattcattactcacgctggcagtcacggagtctacgaatccatctgcaacggagtccctatggtgatgatgcctctgtttggggaccagatggacaacgctaaacgaatggagacaaagggtgccggcgttacactcaacgtcctggaaatgactagcgaggatctcgagaatgccttgaaggccgtcataaatgataaaagctacaaggaaaatatcatgcgtctgtcgtcattacacaaggatcggcccgtggaacccctggacctagccgtattctgggtcgagtttgtgatgagacataaaggcgctccgcacctgcgaccagccgctcacgatctgacctggtaccaataccacagcctcgatgtgattgggttcctgctcgccgtcgttctgaccgttgcattcattactttcaaatgttgcgcctacggatatagaaaatgtctggggaagaagggtcgagtgaagaaggctcataagagtaaaacccat

SEQ ID NO: 9151 - DNA, 1599 bp, Artificial Sequence
  derived and/or modified sequence
atggcagtggaatcacaggggggcagacctctggtgcttgggctgctgctgtgcgttttgggtccagtggtcagccatgctggaaagatcttgttgatcccagtcgatggctcgcattggctgagcatgctcggggccatccaacagctgcagcaacgcgggcatgaaattgtggtgctggcacccgacgcttcgctgtacattagagacggtgcgttttacaccctgaaaacgtaccctgtcccgttccagagagaggacgtcaaagagtcatttgtgtccctcggccataatgtgtttgagaacgattccttcctgcagcgggtgatcaagacttacaagaagatcaaaaaggattcagctatgctcctgtccggctgctcgcatctgttgcacaacaaggagttgatggccagcctggcggagtccagcttcgacgtgatgctgaccgatccgttcctgccatgctctcccatcgtcgcacagtacctgtcactgccaacggtgttctttctccacgcgctcccgtgctctctcgaatttgaagcaactcaatgcccgaacccgttctcctacgtcccgcgcccattgtcgagccacagcgaccacatgaccttccttcagagagtgaagaatatgctgattgcattttcgcagaacttcctctgcgatgtggtctactcaccctacgccaccctggcgtcagaattcctgcaacgggaagtcaccgtccaggacctcctctcctcggccagcgtgtggctcttccgctccgatttcgtgaaggactacccgcgcccaattatgcctaacatggtgtttgtgggaggcatcaactgcctgcaccagaatccactgtcccaggaattcgaagcctacatcaacgcctccggcgagcacggcattgtggttttctccctgggttccatggtgagcgaaatccctgagaaaaaagccatggccattgctgacgccctggggaaaatccctcagaccgtgctgtggaggtacactggaacgcgccctagcaacctggcgaacaatacgatcttggtcaagtggctgcctcagaatgacctgctggggcatccgatgacgcgcgcattcatcactcatgcgggctcgcacggagtgtacgaatcgatctgcaatggtgtcccgatggtcatgatgccattgtttggagatcagatggacaacgcaaagcggatggaaactaagggggccggagtgacgctcaatgtactggagatgacttccgaggacctcgagaatgcactgaaggccgtgatcaatgacaaaagttacaaggaaaacattatgcggctgagctccctccataaggatagaccagtggagccactggacctggccgtgttctgggtggaattcgtcatgcgccacaagggagcccctcatcttcggccggctgcccatgatctgacttggtaccagtaccactcccttgatgttatcggattcctgctggccgtggtgttgactgtcgcgttcataaccttcaaatgctgtgcttacggataccggaagtgcctcggaaaaaagggaagggtcaaaaaggctcacaaaagcaagacgcac

SEQ ID NO: 9152 - DNA, 1599 bp, Artificial Sequence
  derived and/or modified sequence
atggccgtcgagtcgcaaggaggtcgcccactggtgctgggacttctgctctgcgtgctcggccctgtcgtgtctcacgcagggaagatcctgcttatcccagttgatggatcgcattggctctccatgctgggagccattcagcaactgcagcaaagagggcatgagattgtagtcctggccccggatgcatcactttacatccgtgacggagcgttctataccctcaagacctaccccgtgccattccagcgggaagatgtcaaggaatcctttgtgtccctgggacacaacgtctttgaaaacgattcctttcttcaacgcgtgatcaagacctacaagaagattaagaaggattcggcaatgcttctgtcggggtgtagccaccttctccacaataaggaacttatggcttccctggcagaatccagcttcgatgtgatgctcactgatccattcctcccttgctcccctatcgtggcgcaatacctgagccttcctaccgtgttcttcctgcacgcgctcccttgcagccttgagtttgaagcaacccaatgccctaacccattttcgtacgtccccagacccttgagctcacattccgatcatatgacgtttctgcagcgggtcaagaatatgcttatcgcattttcccaaaactttctttgtgatgtggtctactccccttacgccacgctggcttcggaattcttgcagagagaggtgaccgtccaggatctgttgtccagcgccagtgtctggctgtttagatccgattttgtcaaagattatcctcgtccaattatgcctaatatggtctttgtgggtgggattaactgtctgcatcagaatccgctttcccaagaattcgaagcatacattaacgccagcggagaacatggaattgtggtgttcagcttgggatcaatggtgtccgagatccctgagaagaaagcgatggctatcgcagacgcactgggtaagattccgcagactgtcctgtggaggtacaccggtacgcggccgtccaatctggcaaacaatactatactggtgaagtggctgccccagaacgatctcctgggtcaccctatgactcgcgctttcataactcatgcagggtcgcatggagtctatgaatcgatttgcaacggagtgcctatggtcatgatgcctctctttggcgaccaaatggataatgcaaagcggatggaaactaagggagccggggtcacccttaatgtgctggagatgacttcagaggaccttgaaaatgcgcttaaagccgtcatcaacgacaaatcgtacaaggagaatatcatgcgcctttcctcgctgcataaggaccgtcctgtggagcctctggatctcgcagtgttctgggtggaatttgtgatgagacataaaggagcccctcatctgcgcccagcagcccatgatcttacctggtaccagtaccacagccttgatgtgatcggttttcttctggcggtggtgcttaccgtggcatttatcacctttaagtgttgtgcgtacggatacagaaagtgccttggtaagaagggtcgcgtgaagaaggctcataagagcaaaacccac

SEQ ID NO: 9153 - DNA, 1599 bp, Artificial Sequence
  derived and/or modified sequence
atggccgtggaaagtcagggcggaagacccttagtgttgggcctgctgttatgcgtactcggtcccgtcgtttctcacgcaggcaagatcctgctgataccggtggacggctctcattggctttcgatgcttggcgctattcaacagctgcaacagagaggacacgaaatcgtcgtgttagccccagacgcctctctgtatatcagggacggagctttttacacacttaagacctatcctgtgccttttcagcgcgaggacgtgaaggagtctttcgtgtctttgggtcacaatgtattcgaaaacgattcttttcttcaacgcgtcattaagacctacaaaaaaatcaagaaagattcagccatgctactgtctggatgcagccacctcctccataataaggagctgatggcaagcctggctgagtcgagttttgacgttatgttgacagatccttttctgccctgcagccccatcgtggcgcagtacctctctctgcctactgtcttcttcttgcacgcgctaccttgtagtcttgaattcgaggctacccaatgtccaaacccgtttagttacgtgccacggcctctttccagccacagcgaccacatgaccttcctgcagagggtcaagaatatgttgatcgccttcagccagaatttcctgtgtgacgtagtctatagcccttacgccaccctggcaagcgagttccttcaaagggaagttacagtacaggatctattatctagcgccagcgtatggctcttccggagcgatttcgtgaaagactatcccaggcctatcatgccgaacatggttttcgtgggcggcatcaattgtctgcatcagaaccctcttagccaggaatttgaggcctacatcaatgcaagcggtgagcatggcatcgtggtattttcccttggctcaatggtgagcgagatacccgagaagaaggcaatggcaatagcagatgcgttggggaagatcccccagacagtactgtggaggtatacaggaactcggcctagcaaccttgccaacaacaccatactcgtgaagtggctgccacaaaacgatctgctaggccatcctatgactagggctttcatcactcacgctggttctcatggagtgtacgaatctatctgcaacggcgtacccatggtgatgatgccacttttcggtgatcaaatggataacgctaaacgtatggagacaaagggagctggcgtgacgctcaatgtcttagagatgacttcagaagacctggagaacgctcttaaggccgtgatcaatgataaaagctacaaagagaacattatgcggctttctagcctacacaaggataggccagtggagccccttgatctggcagtgttttgggtggagttcgtgatgagacacaagggcgctccacacctgcgcccggcggctcacgatctgacttggtatcaataccacagcctggatgttatcggcttcctgctggccgtggtgctgacagttgcatttatcaccttcaagtgctgtgcgtatggctacagaaagtgcctgggaaagaaaggcagggtaaaaaaagcccataaatccaagacccat

SEQ ID NO: 9154 - DNA, 1599 bp, Artificial Sequence
  derived and/or modified sequence
atggcagtggagagccagggcgggcgcccactcgtccttggcctgctgctctgtgtgttgggtcctgtggtcagtcatgcaggcaagatactgctgattcctgtggatggatcacattggctgtcaatgctgggggccattcagcaacttcaacagcgcgggcatgaaattgtcgtccttgccccagatgcatccctttacattcgtgacggagcattttacaccctgaaaacttaccctgtgccatttcaacgagaggatgtcaaagaatcctttgtctccctgggacacaacgtgttcgaaaacgattctttcctgcaacgcgtgattaagacctacaagaaaatcaagaaagattctgcgatgcttttgtcgggatgttcccatctgcttcacaataaagaacttatggcctcactggcagagtcctccttcgatgtcatgctcactgatccattcctgccatgttcacccattgtcgcgcagtacctgtcacttccgaccgtcttttttctccacgcccttccgtgttcgctggagtttgaggctacccagtgccccaacccgttctcatacgtcccccgccctctgagcagccatagcgaccatatgacctttctccaacgcgtgaagaacatgctgattgcattttcgcaaaactttctgtgtgacgtggtgtacagcccttacgccactctcgcatccgaatttctgcaaagagaggtgaccgtgcaagatcttcttagctcggcatcagtttggctctttcggtccgactttgtgaaagattaccctaggccaattatgccgaacatggtgttcgtgggaggaattaactgtctgcatcagaatcccttgtcgcaagaatttgaagcatacattaacgcctcgggcgaacatggtattgtggtcttttcgctgggttccatggtgtcagaaattcctgaaaagaaggcaatggcgattgccgatgcacttgggaaaataccacagaccgtgctttggagatacaccggaaccagaccttcgaatttggcaaataacaccatccttgtcaaatggctgccacaaaatgaccttcttggccatcccatgacccgagcattcatcactcacgccggttcccatggcgtttacgaatcgatttgtaatggagtgcctatggtgatgatgcctctgtttggggatcagatggataatgcaaaacgcatggagacgaaaggagcaggggtcactctgaatgtcctggaaatgacctccgaggacctggaaaacgccctgaaggcagtcatcaacgataaatcgtataaggaaaacatcatgaggctttcgtcactccataaagacagacctgtcgaacctctcgacttggccgtgttttgggtggaatttgtcatgcggcacaaaggagcaccacatctgcgacccgcagctcatgaccttacttggtaccagtaccactccttggacgtcattggatttctgcttgcggtcgttcttaccgtcgcgtttatcaccttcaaatgttgtgcttatggctaccgcaaatgcctgggaaagaagggacgcgtgaaaaaggcgcacaagagcaagactcac

SEQ ID NO: 9155 - DNA, 1599 bp, Artificial Sequence
  derived and/or modified sequence
atggcagttgagtcacagggagggagaccattggttctgggccttctgttatgcgtgctggggccagtggtctcccatgccggcaagattctactgataccggtcgacggctcgcactggttaagcatgttaggcgccatacagcagctccagcagaggggacatgagatcgtcgttcttgctccagatgccagcttgtacataagagatggcgctttttacacactgaagacatatccagtgccgtttcagcgagaagatgtcaaagagagtttcgtcagccttggccacaacgtgtttgagaacgattccttcctgcagagggtcattaagacttacaaaaaaattaagaaggactcagcaatgttactgtccggttgctctcacctcttgcataataaagagttgatggcttctctggccgagagttcttttgatgtaatgttgacagatccattcctgccatgctctcctatcgtggctcaatatctatcattacccactgtgttctttctccacgcccttccttgctccttagagttcgaggccacacagtgtccaaaccccttttcctatgtgcctcggccattgagcagccactcagaccacatgacttttctccagagggtaaaaaatatgctcatcgcttttagccagaatttcctgtgtgacgtggtctatagcccctatgccaccctggccagtgagttcttacaaagggaggtcacggtgcaagacttattaagtagcgcatctgtgtggctgtttaggtcagactttgtcaaagattaccctcgaccaatcatgcctaatatggtttttgtcggagggattaactgcctacatcagaatcccttgagccaggagtttgaggcctatatcaatgcctctggcgaacacggaatcgttgtgttttcgctcggttccatggtgagtgaaatccctgagaagaaggctatggcgatcgctgatgccctgggaaaaataccacagacggtgctctggcgctacaccggcactcgcccatctaacctagcaaataataccatcctggttaagtggcttccgcagaacgacttgctagggcatccgatgactagggcctttattacccatgccggctctcacggcgtctacgagtcaatctgtaatggggtgccaatggtaatgatgcccctgttcggagatcagatggataatgcaaaaagaatggagacaaagggagcaggggttacattgaacgtgcttgagatgacctcagaggatttagagaacgcactgaaagctgtgatcaatgacaagtcgtataaagagaatatcatgcgcttgtcttctttgcataaagatcgcccggtggagcccctagatctggcggtcttttgggtggagttcgtaatgcggcacaagggggcgcctcacctgcgcccagcagctcatgacttaacctggtatcagtaccacagtctagatgtcatcggttttctgctggcggtcgtcttaaccgtcgcattcatcactttcaaatgctgcgcctacggctaccgcaagtgtcttgggaaaaaagggcgtgtgaaaaaagcgcacaaatcgaaaactcac

SEQ ID NO: 9156 - DNA, 1599 bp, Artificial Sequence
  derived and/or modified sequence
atggctgtcgagtcacagggaggtaggccactggttttagggttattgctgtgcgtcttgggcccggtcgtctcacacgccgggaagatcctgcttatacccgttgacggtagccactggctctctatgttaggcgctattcagcaacttcagcagcggggtcatgagattgtggtgctcgctcccgacgctagtctgtacatccgcgatggggctttctatactttaaaaacatatcccgttcccttccagcgggaagacgtgaaggaatcttttgtgagcctagggcataacgtctttgagaacgactcttttctccagagagtgattaaaacatataagaagatcaagaaagattcagccatgcttctttccggctgcagccacctgctgcataacaaggagctgatggcctcactggctgagagctcttttgatgtgatgctgactgatccatttttaccctgttctccaatcgtcgctcagtacctcagtcttcccacagtattcttcctacacgcgctcccttgtagcttagaattcgaggccacacagtgtcctaatccctttagctacgttcccagaccgctctcctctcattctgaccatatgacattcctgcaacgggtcaagaatatgctcatcgctttctcacagaattttctgtgcgacgtggtgtacagtccctatgcaacactggccagcgaatttctgcagagagaggtcacagtgcaggacctgctgagctcggcttccgtgtggctctttagatctgatttcgtcaaagactaccctcggcccattatgcctaacatggtcttcgttggcggcatcaactgcctccaccagaaccctctctcccaggaattcgaagcttacataaacgcctcaggcgaacatggcattgtagttttcagcttgggcagtatggtgtccgaaatccctgagaagaaggctatggccattgccgatgcgctaggtaagattcctcagacagtgctgtggcgctacaccgggactcgaccttccaacttagccaacaatactatcctggttaagtggttgccacagaacgacctcctcggtcacccgatgaccagggcattcatcacccacgcggggagtcatggcgtctacgaaagcatttgtaatggggtgcccatggtcatgatgcctctgttcggcgatcagatggacaacgccaaacggatggagaccaagggcgcaggtgtaactctaaacgtgctggagatgaccagtgaggacctggagaacgcgcttaaggctgtcattaatgataaatcttataaagaaaacattatgcgtttgtctagcttgcacaaggaccgccctgtggagcccctagatctcgcggtgttttgggtagaattcgtcatgcgccacaaaggagccccccatttgcggcccgctgcgcatgacttaacgtggtatcaatatcattccttggacgtaatcggattcctgctggccgtagtgctcaccgtggcttttataacgttcaagtgttgtgcttacgggtaccggaaatgcctgggaaagaagggaagggttaagaaggcccataagtccaaaactcac

SEQ ID NO: 9157 - DNA, 1599 bp, Artificial Sequence
  derived and/or modified sequence
atggcagtggagtcccagggcggtcgtcccctggtgctcggtttgctgctctgcgtcttgggccctgtggttagccacgctggcaaaattctgttgattcctgtggatgggagtcactggttatcaatgctaggcgcaatacagcagctacagcaacgtgggcatgaaatcgttgtcctggcaccagacgcgtcactctatattagggacggcgccttttacactttgaaaacataccccgtgccgttccagagggaggatgtgaaagaatccttcgtttcgctgggtcacaatgtttttgagaatgactcattcctccaacgcgtgataaaaacgtataagaaaattaaaaaggattcagcgatgcttctaagtgggtgctctcacctgctccacaataaggagttgatggcgagtctggccgagagcagcttcgatgtaatgctgactgaccctttccttccgtgctccccgattgttgcacagtatctctccctgccgaccgttttcttcctacacgctctgccatgctctttagaatttgaggcaacccagtgcccaaacccattttcttacgtccctcgccccctctccagtcattccgatcacatgactttcctccagagagtaaagaacatgctcatcgccttttcgcaaaatttcctgtgtgatgttgtttattcgccctacgccactcttgcaagtgaatttttgcagcgagaggttaccgtacaagatttgcttagttctgcatcagtttggctgttcaggtcggatttcgtcaaagattacccacgccccattatgcctaatatggtgtttgtgggggggatcaattgtctccaccagaacccactgagtcaagagtttgaggcttatattaacgcaagcggcgagcacggaattgtcgtgttcagcctagggtccatggtttcagagattccagaaaagaaagccatggcgatcgcagatgccctaggtaaaataccccagacagttttatggagatatacaggaacccggccatctaacctcgctaacaataccatccttgttaagtggcttccacagaatgatctgctaggccaccctatgacacgcgcgttcatcactcatgcagggtcgcatggggtttatgaatctatctgtaacggggtgcccatggttatgatgccactcttcggagaccaaatggacaacgctaagagaatggaaacgaagggcgcgggcgttactctgaatgtcttggagatgacatcggaggatttggagaacgctcttaaggccgttatcaacgataagagctataaggagaacattatgcgattgtcatcactacacaaggacagacctgtggaacctttagaccttgctgtgttttgggtcgaattcgtgatgaggcacaagggggcaccacacctgagacctgctgcacatgacctaacatggtaccagtatcacagtctggacgtcattggattcctgctcgccgttgtgctgaccgtcgcgtttattacttttaagtgctgtgcgtacggatatagaaagtgtctgggcaagaagggacgcgttaaaaaggcgcacaagtctaaaacacat

SEQ ID NO: 9158 - DNA, 1599 bp, Artificial Sequence
  derived and/or modified sequence
atggcagtggaaagccaaggaggacgacctctggtgctcggtctgctcctgtgtgtgctgggccctgtcgtgtcccacgcgggcaagatattgctgatcccagtggatggatcccattggctttcgatgctgggtgcaattcagcagctgcagcagaggggacatgagatcgtggtcttggcccccgacgccagcctttacatcagggacggggctttttacactctgaaaacttaccctgtcccttttcaaagggaggacgtcaaggagagctttgtgtcgctgggacataacgtgttcgaaaacgattcattcctgcaacgggtcatcaaaacctacaagaaaatcaaaaaggactccgcgatgctgcttagcggatgctcccatcttctgcacaataaagagcttatggcgtcccttgcagaatcctcgttcgacgtgatgctgacggatccgttcctgccttgcagccctattgtcgcgcaatacctgagcctccctaccgtgttctttctgcatgctctgccttgttcgctggagtttgaggccacccaatgcccaaacccattttcatacgttccacgcccactctcgtcgcattccgatcacatgactttcctgcagcgggtgaaaaacatgctcattgccttctcgcagaatttcctttgtgatgtggtttattctccctacgctacgctggcatccgaatttctgcagcgcgaggtgaccgtgcaggatctgctttccagcgcttcggtctggcttttcagaagcgattttgtgaaggattacccccggcctattatgcccaacatggtctttgtgggaggtattaactgtctgcatcaaaatccgttgtcccaagaatttgaggcttacatcaacgcatccggagagcatgggattgtggtgttttcgctcggatcgatggtgtcagaaattcctgagaaaaaggcgatggcaatcgctgatgcactcggcaaaattcctcaaactgtactttggcggtacactggaacccgcccttcaaatcttgccaataacactatactggtgaagtggctcccccagaacgatcttctggggcatccaatgactcgggcgttcataacccatgcaggatcgcatggcgtgtacgaatccatctgtaatggtgtgcctatggtcatgatgccactgtttggagatcaaatggataacgccaaacgtatggaaaccaagggggcgggtgtcacccttaatgtgttggaaatgacctccgaagatttggagaacgcgcttaaggcagtcattaacgacaagagctacaaggaaaacattatgcgactgtctagcctgcataaagacagaccagtggaaccacttgaccttgcggtgttctgggtggaattcgtgatgagacataagggagcccctcatctgcggccagcagcccatgacctgacttggtaccagtaccattccctggatgtgattgggttccttctggccgtggtgcttactgtggcattcattacgtttaagtgttgcgcatacggatacagaaaatgtcttgggaagaaggggcgggtcaaaaaggcacataagtctaagacgcat

SEQ ID NO: 9159 - DNA, 1599 bp, Artificial Sequence
  derived and/or modified sequence
atggccgtggagagtcaggggggcagacccttggtgctgggtctgctcttgtgcgtgttgggccctgttgtatctcacgccggcaagattctcctcatacctgtggacgggtcacattggctttcaatgctgggggccattcagcagctgcaacagagagggcatgaaatcgtggtcctggctccggatgcttctctttacatacgagatggagctttctacactctgaaaacatatccggtcccctttcagagggaggacgtaaaggagtccttcgtgagcctgggacacaacgtctttgaaaatgatagtttcctgcagcgcgtgattaaaacgtacaagaagatcaaaaaggatagtgccatgctcctctccggttgcagccaccttctgcacaataaggaactcatggcctcattggccgagtccagcttcgacgtgatgctgactgacccctttctgccatgctctcccattgttgcacaatatctttctctgccgacagtgttcttcctgcacgcgctcccctgcagcctcgaatttgaggccacccaatgtccgaatccgttttcatacgtcccacgaccactgagcagccacagtgaccacatgacttttctgcagagggtcaaaaacatgttgatcgcgttctctcaaaattttctctgtgacgtggtctacagcccctatgccaccctcgctagtgaatttctgcagagagaggttacagttcaggatctgcttagctcagcctcagtttggttgttcaggtctgattttgttaaggactatcccaggcccatcatgccaaacatggtgtttgtgggcggtattaattgcctgcaccagaacccgctctcacaagagtttgaggcatatatcaatgcaagtggcgagcacggcatcgtggtcttcagcctcgggtctatggtcagcgaaatccctgagaagaaggcaatggcaattgccgatgccctgggcaagattccgcagacagtgctgtggcgatacactggaacaaggccctctaatctggcaaataacactatcctcgttaaatggctgccacagaatgacctgcttggccatcccatgacacgggcctttattacccacgcaggcagtcatggcgtgtatgagagtatttgcaacggggtccccatggtgatgatgccccttttcggcgaccaaatggataacgcaaagagaatggaaaccaaaggcgctggtgttacccttaatgtgctggagatgacaagtgaggacctggagaatgctctcaaggctgttataaatgataagtcttacaaggaaaatatcatgagactgtcctctctgcacaaggatagacctgtcgagccgttggacctggcagttttctgggtcgaattcgtcatgaggcataaaggcgctccgcatctgcggccagcggctcacgacctgacatggtaccagtaccacagcctcgacgttataggcttcctgctcgccgtggtgttgaccgtggcattcatcaccttcaagtgttgcgcttatggctatcgaaaatgcctgggcaagaaagggagggtcaagaaggcgcacaaatccaagactcac

SEQ ID NO: 9160 - DNA, 1599 bp, Artificial Sequence
  derived and/or modified sequence
atggcggttgaatcacagggcgggcgacccttggtcctcggactccttctctgcgtgctggggcctgtagtcagccatgcaggaaaaatattattaatcccggttgatgggtcccactggttgtctatgctcggcgcaatccagcaactacagcagcgcggccacgaaattgtcgtccttgctcccgatgcatcgctatatatccgggatggcgctttctacaccttaaagacatatccggtgcccttccaacgcgaagacgtaaaagaatccttcgtgtcgctaggtcacaacgtgttcgagaatgatagctttctgcagcgggtcatcaaaacgtataaaaagattaagaaagatagtgccatgctcttgtcaggatgttctcacctgctgcataataaggagctcatggcttcactcgctgagtcctctttcgatgtgatgctgacggaccctttcttaccctgctcacctattgtggcgcagtatctctcgctgccaacagtgttctttttacacgcactgccttgtagcctcgaatttgaggccactcaatgcccgaaccctttctcgtatgtgcccagaccactttcatcacactctgaccacatgacgtttctgcagcgcgtgaaaaacatgctcatcgctttcagccaaaacttcttgtgcgacgttgtgtattccccatatgctacactcgcttccgagttcttgcagcgcgaggtcactgtgcaggatctgctcagttccgcctcagtgtggctgtttcgatctgacttcgttaaagactaccctcgacctatcatgccaaacatggttttcgttgggggcatcaactgtctgcaccagaaccctcttagtcaggagttcgaagcgtatattaacgcctccggagaacatggtatcgtggttttttccctgggcagcatggtcagcgagattccagagaagaaagccatggccatagcagatgccttaggaaagataccccagaccgtgctgtggcggtacaccggcactaggccaagcaatctcgccaacaatactatcctggtgaagtggctgccacagaatgacctgctcggccatcctatgactagggcctttataacccatgccgggtcccacggagtctatgagtcaatctgcaacggagtgccgatggtgatgatgccgctatttggcgatcagatggataatgccaaacgcatggaaacaaagggggccggcgtaacgttaaacgtactggagatgacatccgaagacttggaaaatgctttaaaagcagtgattaatgacaaaagctacaaagagaatatcatgagactgtccagtctgcataaggaccgtcctgttgagccgctcgatttggcggtcttttgggttgagtttgttatgaggcacaaaggggcccctcacttacgaccggccgctcacgatctgacatggtatcagtatcattctctcgacgtgattggtttcctacttgctgtggtactgacggtcgcattcattacgttcaaatgctgtgcgtacggataccgaaaatgtcttggtaagaagggcagagtcaagaaagcccacaagtcgaagacccat

SEQ ID NO: 9161 - DNA, 1599 bp, Artificial Sequence
  derived and/or modified sequence
atggccgtcgaatctcaaggagggagaccattagtcctaggattgcttctttgtgtgctggggcctgtggtctcacacgccggaaagatcctcctcatcccagtcgatggttcccactggttgtctatgctcggcgctattcagcaactgcagcagcgggggcacgaaatcgtggtcctggctccggatgcatcactctacatcagggatggtgctttctacacactcaaaacctaccctgttccttttcagagggaggatgtcaaggaaagtttcgtctctcttgggcacaatgtttttgagaacgactctttcctgcaacgagttattaaaacttacaaaaaaatcaaaaaggactcagccatgttgttgagcggatgttcacacttgctccacaacaaagagctcatggccagtctggccgagagctcctttgacgtgatgctgaccgacccttttcttccttgttcccccatagtagcccagtatctgtctcttcccacggttttctttcttcacgccctgccatgctccctggagtttgaagccacacaatgtcccaaccctttttcctatgtgccacgccccctgtcttcacacagcgatcacatgactttcctgcagcgggtgaaaaacatgctgatagctttcagccagaattttctgtgtgatgtcgtatacagcccatacgcaacactggcatctgaattcttgcagcgggaggtgacagttcaagacctcctgtcctctgccagtgtttggttgttcaggtccgactttgttaaggactatcccagacctattatgccaaacatggtttttgtgggcgggataaattgcctgcatcagaaccccctgagccaggaattcgaagcgtatatcaacgcatccggagagcacggcatagtagtgttctccctcggctcaatggtctccgagattcctgagaagaaggctatggccatcgctgatgccctgggcaaaataccacagaccgttctgtggcgctataccgggacacggccaagtaatctggcaaacaataccatcctggtgaagtggctcccacagaacgatttactgggacatcccatgacaagggctttcatcactcatgcgggtagccacggagtgtacgagtccatctgcaacggggtccccatggtgatgatgccactgttcggcgatcagatggacaacgcgaagcgcatggaaacgaagggagccggggtgacccttaacgtgcttgagatgactagcgaggatctcgaaaatgctttaaaagccgttataaatgacaaaagttacaaggagaacataatgcgtctgtctagtcttcataaggaccgccctgttgaacctctagatctggctgtgttttgggttgagttcgtgatgcgccacaagggggccccacacttgagaccagcagcgcatgacttgacatggtaccagtatcatagccttgacgtgattgggttcctactagctgtagtgctgactgttgccttcataacgttcaaatgttgcgcctacggatatcgaaagtgcctgggcaagaaaggaagagttaagaaggcccataaaagtaagactcac

SEQ ID NO: 9162 - DNA, 1599 bp, Artificial Sequence
  derived and/or modified sequence
atggcagtcgaatcgcaaggtggacgccccctcgtgcttggtttgctgctttgtgtgctcggaccagtcgtgtcgcacgccggtaagatccttcttattcctgtggatggttcgcattggctgtcaatgcttggtgcaatacagcagttgcagcagcgcggccacgaaattgttgtcctggcaccagatgcgtcgctctacattcgagacggagcgttttacacccttaaaacctacccagtgccattccagcgagaggatgtgaaagagtcattcgtgtcgcttggtcacaacgtctttgaaaacgattcgtttctccaaagagtgattaagacttacaaaaagatcaagaaagattcagcgatgctcctgtcgggttgtagccacctcctgcacaataaggagctgatggcttcactcgccgaatcctcatttgatgtgatgcttactgacccgtttctgccttgctcgccaattgtggcacaatacttgtcactccctaccgtgttttttcttcacgcattgccatgttccctggaattcgaagcaactcagtgccccaacccattttcttacgtccctagacctctgagctcacatagcgatcatatgacctttctgcagagagttaagaacatgctgatcgcctttagccaaaactttctgtgcgacgtggtgtacagcccgtacgccactttggcgtcagagtttctgcagcgggaagtgacggtccaagatctcctctcgagcgcatccgtgtggctttttcgatccgattttgtgaaggactaccccaggcccattatgcccaatatggttttcgttggcggaattaactgcctgcaccagaatccgctttcacaggaatttgaagcatacattaatgcatcgggcgaacacggcattgttgtgttctcactgggctcaatggtatccgagattcccgagaagaaggcgatggcaattgcagatgcattgggaaagattcctcaaactgtgctgtggcgctacaccggtactcggcctagtaatcttgccaataacaccatccttgtcaagtggctccctcaaaacgatctgctggggcatcctatgactcgggcgtttatcacccacgccggtagccatggagtgtacgaaagcatttgtaatggtgtcccgatggtgatgatgccactttttggcgaccagatggataatgcaaaaaggatggaaactaagggtgcaggagtcaccctcaacgtgcttgagatgacgtcagaagatttggaaaacgctcttaaggccgtgattaatgacaagtcgtacaaggaaaacatcatgaggcttagctcactccataaggatcggcccgtggaacctttggatctggccgtcttttgggtcgagtttgtgatgcgccataaaggagcgcctcacctcagaccagccgctcatgatctgacgtggtatcagtaccatagccttgatgtgattggattcttgcttgcggtggtgctgaccgtggcattcataactttcaaatgttgtgcatacggctacaggaagtgtctgggtaagaaggggagagtgaagaaggcacataagtcgaaaacccac

SEQ ID NO: 9163 - DNA, 1599 bp, Artificial Sequence
  derived and/or modified sequence
atggctgtcgagtcccaaggaggtcgaccacttgtcctaggtttgcttctgtgcgtgcttgggcctgtcgtgtcccatgcgggaaagattctactgatccccgttgatggatcacactggctctcaatgcttggggccattcaacagcttcagcaacgcggccacgaaatcgtcgtcttggcccccgacgcctctctttatatcagagacggggcattttataccctgaagacatatcccgtccccttccagcgcgaagatgtcaaggagtcattcgttagtctaggacacaacgtgtttgaaaatgatagctttttgcagcgcgtcatcaagacctacaaaaagattaagaaggattcagcaatgttactgtctggttgttcccatcttctgcacaacaaagaattgatggcgtccctagcggagtcgtccttcgacgttatgctgaccgacccttttttgccatgtagtcctatcgttgcacagtacttatccctgccgacagtgttcttcctccacgcacttccatgcagtctcgagttcgaggcgacgcagtgcccaaatccgttctcatacgttccgagaccattgagctcgcattctgatcatatgacgttcctgcaaagagtgaagaatatgctaatagcattctctcagaatttcttatgcgatgttgtttattctccgtacgccaccttggcatccgagtttcttcaacgagaagttacggttcaggatctactctcaagtgcttcggtctggctcttccggtcagacttcgtcaaggactatccacgacctattatgcctaatatggtatttgttggcgggattaattgcctccaccagaacccactttctcaagagttcgaggcatatattaacgcgagcggtgagcatggcattgttgtgttctcgctgggaagtatggtgagtgaaatccctgaaaaaaaggctatggccatcgctgacgctttaggtaagatcccacagacggtcctgtggcggtatactggaactagaccttcgaacttggcaaacaacacgattcttgttaagtggctaccgcagaatgacctgttgggtcatcccatgacccgggcgttcataacgcatgccggctcgcatggcgtttacgaaagtatctgcaacggcgtgcctatggtgatgatgccgctttttggagatcaaatggacaacgcaaagcgaatggagacgaagggcgccggcgtaacccttaacgtcctagagatgaccagcgaggacctggagaatgccctaaaagcggtaataaacgataagtcgtataaggagaatattatgcgtctctcatccttgcacaaggaccgcccagttgagccactcgatttggccgttttctgggtcgaatttgttatgcggcacaagggggcgccacacctcagacccgctgcccacgacctcacttggtatcagtaccattccctggatgtcatcggattcctgctggcagtggtgctaaccgtggcattcatcacattcaaatgctgcgcctatggatataggaagtgcctcggaaagaagggtcgcgtaaagaaagcgcataagagtaaaacccat

SEQ ID NO: 9164 - DNA, 1599 bp, Artificial Sequence
  derived and/or modified sequence
atggccgtggagagccaaggtgggcgccctcttgtgctgggactgctgctctgcgtgctgggtcctgtcgtgtcccacgctggaaagatcctccttatcccggtcgacggatcccactggctgtcgatgctgggagctattcaacaactgcagcaaagaggacatgaaatcgttgtgttggcccctgacgcgtcattgtacatccgggatggggccttttacactcttaagacttatccagtgccgttccagagagaagatgtgaaggaatcattcgtgtcattgggtcacaatgtctttgagaacgattcattccttcagcgggttatcaagacgtacaagaaaatcaagaaagattcggccatgctcctctccggctgctcccacctgctgcacaacaaggagctgatggccagcctggcggaatccagctttgacgtcatgctgaccgacccttttctgccttgctcaccgatcgtcgcccagtacctctccctgccgactgtgttcttcctccacgcactgccatgcagcttggagttcgaagcgacgcagtgtccgaaccctttctcgtacgtgcctagaccactgtccagccattcagaccacatgaccttcctccaaagagtgaagaatatgctgatcgctttctcgcagaatttcttgtgcgacgttgtgtacagcccgtacgcgaccctggcctcggagttcctccagcgcgaggtgaccgtccaggacctcctgtcgtctgcgtcagtctggctcttcaggagcgacttcgtgaaggactaccctcgcccaatcatgccgaatatggtgttcgtgggaggtatcaactgtctgcatcaaaacccgctgtcccaggagtttgaagcctacatcaatgcaagcggagagcacggcatcgtcgtattcagccttggatccatggtttccgaaataccggaaaagaaggcaatggctatcgctgacgccctgggtaagatcccgcagaccgtgctgtggaggtacactggaacccgcccctccaacctggctaacaacactatcctcgtgaagtggctgccacaaaacgacctcttgggacacccaatgactcgcgccttcattactcacgcaggttcgcacggggtgtacgaatcaatctgcaacggcgtgcccatggtcatgatgcctctgttcggtgatcagatggacaatgccaagcgcatggaaaccaagggtgccggtgtgaccctgaacgtgctggaaatgacttccgaagatttggagaacgcactgaaggctgtcatcaatgataagtcgtacaaagagaacatcatgagactcagctccttgcataaggaccggcccgtggaaccgctcgacctggccgtgttctgggtggagttcgtgatgcggcacaagggagcgccacacctccgccctgccgcccacgatttgacctggtaccaataccactcgctcgacgttatcggattcctgctcgcagtggtgctgactgtggctttcatcaccttcaagtgctgcgcctacggataccgcaagtgcctgggaaagaaaggaagggtcaagaaggcgcacaagagcaaaacccac

SEQ ID NO: 9165 - DNA, 1599 bp, Artificial Sequence
  derived and/or modified sequence
atggccgtagagtcacagggaggacggcccctggtattgggactgttactctgtgttcttgggccagtggtctcccatgccggaaaaattttactcatccctgtcgatgggtctcactggctctctatgctcggagcaatccagcagttgcagcagaggggacatgaaatcgtggttctggcccccgatgcgagtctctatatccgggatggagcattttatactctcaagacatatcctgtcccctttcagcgcgaagatgtcaaagagtcttttgtctccctaggacataatgtgttcgaaaacgatagtttcctgcagcgcgtcatcaaaacttataaaaaaataaaaaaagactctgctatgctcttatctggatgctcacatctgcttcacaacaaagagctcatggcctctctcgcagaaagtagttttgatgtcatgttgactgacccctttctcccctgttcacccatcgtagcccagtatctctctttaccaacggtctttttcttacacgctctaccctgctccctcgaatttgaggctacacagtgtccaaaccccttttcatacgtccccagacccctctcttctcatagtgaccacatgacattcctccagagagtgaaaaacatgctcatcgctttttcacagaatttcctctgtgatgtggtgtatagtccctacgctactctcgcttccgaattcctgcagagggaagtgactgtgcaggatcttttgtcctccgcatctgtgtggctctttcggtctgatttcgttaaagactacccaagacccattatgcccaacatggtgttcgttggagggatcaattgcctacaccagaatccattgtcccaggagttcgaagcttatataaatgcaagtggagaacatggaatcgtcgtgttttcactcgggagtatggtttccgaaatccctgaaaaaaaagccatggctattgctgacgctcttgggaaaataccccagactgtactttggcggtacactggaactaggccctccaacctagccaacaatactatcctagtaaagtggttgccccagaatgatctgctcgggcatccaatgacacgcgcattcatcactcacgccggatctcacggggtttatgaaagtatctgtaacggagttccaatggtcatgatgccactcttcggggatcagatggataatgccaaacgcatggaaacaaagggagcaggagtaacactcaacgtcttagaaatgacttcagaagatcttgaaaatgctctgaaggcagtcatcaacgataaatcttataaagagaacatcatgcgtctgtcttccctgcacaaagatcggccagtggaaccacttgatttggctgtgttttgggtggaatttgtcatgcgccataaaggagccccacacctaaggcccgccgcccacgatctgacttggtatcagtatcactctttagatgtgatagggttcctgcttgctgtcgttctgactgtggcttttattacattcaaatgttgtgcttatgggtacaggaaatgtcttgggaaaaaagggagagtcaaaaaagcccataaatccaagacacac

SEQ ID NO: 9166 - DNA, 1599 bp, Artificial Sequence
  derived and/or modified sequence
atggccgtggaatcccagggtggacggccgctcgtgttgggactgctgctgtgcgtcctgggaccggttgtttcccatgctggaaagatcctcctcatcccggttgatggctcacactggctctccatgctgggagctatacagcagctgcagcaacgcggacacgaaattgtggtgttggcgccagacgctagcttgtacattagggacggcgccttctacaccctgaaaacttatccggtgcctttccaaagagaggatgtgaaagagtcattcgtgagcctgggacataacgtctttgaaaacgattcgttccttcagcgggtgatcaagacctacaagaagatcaagaaggattccgccatgcttctttcgggatgtagccatctgctccacaacaaggagttgatggcgagcctcgccgagtcatctttcgatgtcatgctcaccgaccctttcctgccgtgctcccccatcgtggcccagtatctgtcccttccaaccgtgttcttcctgcacgcactcccttgcagcctggaattcgaggccacccagtgccctaaccccttttcatacgtcccccggccattgtcgtcccactccgaccacatgaccttccttcagagagtgaagaatatgctgatcgcgttctcgcaaaactttctctgcgacgtggtctactcaccgtacgccaccctggctagcgagttcctgcagagagaagtcactgtgcaagacctcctgtcatcggccagtgtgtggttgttccggtcagatttcgtgaaagattatccacgccctataatgccaaacatggtgtttgtgggtggcatcaattgcctccatcagaatccactgtcacaagaattcgaagcatacatcaacgcctccggtgagcacggaatcgtggttttctcgctggggagtatggtgtcggaaatcccggagaagaaggcaatggctattgcggatgccctgggcaagattccacaaactgtgctgtggcgctacactggaaccagaccttccaatcttgccaacaacactatcctcgtgaagtggctgcctcagaatgaccttctcgggcacccgatgactagggcttttatcactcatgctggtagccacggtgtgtacgagagcatctgtaatggcgtgccgatggtgatgatgccgttgtttggggaccagatggataatgcgaagaggatggaaacgaaaggcgcgggggtcaccctgaacgtgctggagatgacgtcggaggatctggaaaacgcacttaaggcggtgattaacgacaagagttacaaggaaaacattatgagattgtcatcattgcacaaagaccgccctgtcgaacctctcgacctggctgtgttttgggtcgagttcgtcatgcggcataagggtgcgcctcatctgcgcccggccgctcatgaccttacctggtaccaataccactcgctcgacgtgatcggattcctgctggcggtggtactgaccgtagcattcattaccttcaagtgctgtgcctacggatacagaaagtgcctcggaaagaaaggacgagtcaaaaaagcccataagtcgaaaactcac

SEQ ID NO: 9167 - DNA, 1599 bp, Artificial Sequence
  derived and/or modified sequence
atggctgttgaatcacaggggggcagaccgttggtcctcggcttgctcctttgcgttctgggacctgtggtgtcacacgcgggtaagattttgttgattccagtcgacgggtctcactggctttccatgcttggggctatccaacagctccagcagagaggtcacgaaatcgttgtgcttgccccagacgcctcattgtacatccgggacggagcgttttacacactgaagacgtaccctgttccatttcagagggaagacgtcaaggagagcttcgtatccttgggccataacgtgtttgagaacgactccttcctgcagagggtgatcaagacatataagaagatcaagaaggactccgcgatgttactctctgggtgttcccatctactgcataacaaggaacttatggctagcctggctgaatcaagttttgatgtgatgctgaccgacccgtttttaccctgctcccccatcgtagctcaatatcttagcctgcctactgtcttcttcctgcatgcactaccctgttccctggaatttgaggcaacacagtgtcccaatcccttttcttacgtgccaaggccactaagcagtcactccgaccacatgactttcttgcagagggtaaagaacatgctgattgctttctcacaaaacttcctttgtgatgtcgtgtacagcccttatgcaacactagcctccgaatttttgcaaagagaggtgactgtgcaggatttgctgtcaagcgcctctgtgtggctattccggtctgattttgtgaaggattaccccagaccaatcatgcccaatatggtgttcgtgggcgggattaattgtcttcaccagaatcccttgtcccaggaatttgaggcatatattaatgcctctggggaacacggcatagtcgtcttcagcctgggttccatggtgtcagaaatacccgagaaaaaggcaatggccatcgcggacgcactgggaaagattccccaaaccgtgctttggcggtacacaggcacacgcccatccaacctggccaacaatactatccttgtgaagtggctgccccagaatgatctacttgggcatccaatgacacgggccttcataacgcacgcgggttcccatggggtgtacgagtctatttgtaacggagtgccaatggttatgatgcccctctttggcgatcagatggataatgcaaagaggatggagacaaaaggcgcaggcgtgactctcaacgtcctagagatgacaagcgaagatctagagaatgccctgaaggccgtgatcaatgataagagctacaaagagaacatcatgagactctcttctctgcataaggatcgtcctgttgagcccctcgatctggcggtgttttgggtggagttcgtaatgagacacaagggggcccctcacctccgcccagcagcacatgatctcacctggtatcagtaccacagtctggacgtcatcggatttctgctcgcagtggtgcttaccgtcgcttttatcacttttaagtgttgcgcgtatggctacaggaaatgcttggggaagaagggaagagtcaagaaagcccacaaatcaaaaacgcac

SEQ ID NO: 9168 - DNA, 1599 bp, Artificial Sequence
  derived and/or modified sequence
atggccgtggaatcgcagggcggtagaccgctggtgttgggactcctcctctgcgtgctcggaccagtggtcagccacgccggaaagatcttgctcattccagtggatgggagccactggctgtcgatgctcggtgctatccagcaattgcaacaaaggggacacgaaatcgtcgtgctggccccggacgcaagcctgtacatccgggacggggcattctacaccctcaaaacttacccagtccctttccagcgggaggacgttaaggagagctttgtgagcctgggacataacgtgtttgaaaatgattcattcctgcagcgcgtgatcaagacttacaaaaagatcaagaaagatagcgcaatgctgctgtccggctgttcccacctgttgcataacaaagaactgatggcctccctcgccgaaagttcattcgacgtgatgctcactgacccgttcctgccttgctcgcctatcgtcgcccagtacctctccctgcctactgtgtttttcctgcacgcgctgccatgcagtctggaatttgaagccactcagtgtcctaatcctttctcatacgtcccgcggccactgtcctcacattcagatcacatgactttcctccagcgcgttaagaacatgctgatcgcatttagccagaacttcctgtgcgacgtggtgtactcgccgtacgcaactttggcgtccgaattcctccagagagaagtgacggtccaggatctcttgagctccgcctcggtgtggctctttcgcagcgatttcgtgaaagactacccgcgtccgatcatgccaaacatggttttcgtcggtgggatcaattgcctgcaccagaacccgctgtcacaggaattcgaagcctacataaacgcgtccggggaacacggcatcgtcgtgttttccctgggctccatggtgtccgagatcccagaaaagaaggccatggcgatcgcggacgctctcgggaagatcccgcagaccgtcctgtggagatacactggcacccggccgtcgaacctcgcgaacaatactatcctggtcaagtggctgccgcaaaatgacctgctcggacaccccatgaccagagcgttcatcacgcacgcaggatcacacggagtgtatgagtcgatctgcaacggtgtgcctatggtgatgatgccgttgttcggcgaccagatggataatgccaagcgcatggaaaccaaaggagcaggggtgaccctcaatgtgctcgagatgacgtcagaggatctggagaacgccctgaaggctgtgatcaacgacaaatcgtacaaggaaaatatcatgcggctctcgtccctgcataaggatagacccgtggaaccgctggatttggcagtgttctgggtcgaattcgttatgcggcacaagggagccccacacctgcgcccggctgcgcatgatttgacctggtatcagtaccattcgctggacgtcatcggattcttgctcgccgtcgtcctgaccgtggcttttatcactttcaagtgttgcgcgtacggatacaggaagtgcctgggaaagaaaggaagagtgaaaaaggcccataagtcaaagacgcac

SEQ ID NO: 9169 - DNA, 1599 bp, Artificial Sequence
  derived and/or modified sequence
atggcggtggaatcacaaggtggtcggccgcttgtgctgggcttgctgctgtgcgtgctgggaccggtcgtttcccacgcaggaaagatactcctgatccccgtggacgggtcccattggttgtccatgctgggcgcgatccagcaattgcaacagagggggcatgagatcgtcgtcctcgccccagacgcctccctgtacattcgagacggagccttctacacgctgaaaacctaccctgtgccatttcaacgcgaggacgtgaaggagtcttttgtgtccttgggccacaacgttttcgaaaatgactcctttctgcagagagtgatcaagacttacaagaaaatcaaaaaggattcggccatgctgttgtccggatgtagccacctcctgcacaacaaagaactgatggcttccctggcagaatcctccttcgacgtcatgctgaccgatccgttcctgccatgctcgccgatcgtggcccagtacttgtcactgccgaccgtgttcttcctgcacgctctcccatgctcgctggaatttgaggccacccagtgcccaaacccgttcagctatgtgccccgccctctctcttcacactcggaccacatgaccttcctgcagcgggttaagaacatgttgatcgctttcagccagaattttctgtgcgacgtcgtctactcgccctacgctactcttgcatccgaattcctccagcgggaagtgactgtgcaggacctcttgtcctctgcatccgtgtggctgtttcgctcggattttgtgaaggattaccctcggccgatcatgccgaatatggttttcgtcggtggaatcaattgcctgcaccagaatccactgtcccaggaatttgaagcgtacattaacgcctcaggggaacatggaatcgtggttttcagcctgggctcgatggtgtcagagatccccgaaaagaaggcgatggccatagcagacgcactcggaaagattccgcagactgtgctgtggcgctacactggaactagaccgtccaatctggccaataacacgatcctcgtgaaatggctcccacaaaacgatctgctgggacaccctatgacccgggcattcatcacccacgctggatcccacggagtgtatgagtctatctgcaacggagtgccaatggtcatgatgcccctgttcggggatcaaatggacaacgcgaaaagaatggagactaagggagcgggggtgaccctcaatgtgctggagatgacttcagaggaccttgaaaacgcgctcaaagccgtgatcaacgacaaatcatacaaggaaaacatcatgaggctctccagcttgcataaagaccgccctgttgagccgttggatctcgcagtgttctgggtggagttcgtgatgcgtcacaagggagcaccacatctgcgaccagctgcacatgacctgacttggtaccaataccatagccttgatgtcatcggcttcctgctggcggtggtcctgaccgtggccttcatcaccttcaagtgttgcgcctatggctaccgcaaatgtctgggcaagaagggaagggtgaagaaggcgcataaaagcaagacccat

SEQ ID NO: 9170 - DNA, 1599 bp, Artificial Sequence
  derived and/or modified sequence
atggccgtggaatcgcaaggtggacgacccctggtgctgggactgcttttgtgcgtccttggacccgtggtgtcgcacgctggcaaaattcttctgatccctgtggatggatcccattggctctccatgctcggagccattcagcagcttcagcaacgcggacatgaaattgtcgtcctggctccagacgcatctctgtacatacgagacggagccttctatactctcaagacctacccagtgccgtttcaaagagaagatgtgaaggagagcttcgtgtcgttgggccacaatgtgttcgaaaacgattcctttctgcaaagggtgatcaagacctacaagaagattaagaaggatagcgcaatgctgctgagcggatgctcgcatcttctgcacaataaggaactgatggcatcgctcgcagagtcgtcatttgacgtgatgctcactgacccttttcttccttgttcccctatcgtggcccagtacctgagccttccaactgtgtttttcctgcacgcacttccatgtagcctcgaatttgaggcaactcaatgcccgaaccctttttcctacgtccctaggccactctcatcgcattctgaccacatgacgtttcttcagcgagtgaagaatatgctgatcgcattctcccagaactttctctgtgatgtggtgtactccccatacgcaacgctcgcatcagagttcctgcaacgggaagttaccgtgcaggatctcttgtccagcgcgagcgtgtggctctttagatctgattttgtgaaggattaccccagacctattatgccgaatatggttttcgtgggcggtataaactgtttgcatcaaaatccattgtcgcaagagttcgaggcttacatcaatgcgtcaggagagcacgggatcgttgtgttttcgttgggttccatggttagcgaaattccagaaaagaaagccatggctatcgcagatgcacttggcaagattccgcaaacggttctttggagatacactggtaccagaccttctaatcttgcaaataacactatccttgtgaagtggcttccacagaacgatctcctgggtcatccaatgactagggcatttatcacccatgcaggatcccacggcgtctacgagtcaatctgtaatggcgtgcctatggtgatgatgcctctctttggtgatcagatggacaacgctaagcgtatggaaaccaaaggggcgggtgtgaccctcaatgtgctcgaaatgaccagtgaggaccttgaaaacgcactgaaagccgtgataaacgataagtcatacaaagagaacataatgcgtttgagctccctgcataaggatagacctgtcgaacctctggacctcgcggtcttttgggtggaattcgtcatgagacataagggagctccacaccttcggccggcggcccacgatttgacgtggtaccagtaccattcccttgatgtgattggttttcttttggcagtggtgcttacggtcgcgttcataacttttaagtgttgtgcatacggatatagaaagtgcctggggaagaagggtcgtgtgaaaaaggcgcataagtctaagactcat

SEQ ID NO: 9171 - DNA, 1599 bp, Artificial Sequence
  derived and/or modified sequence
atggcagtggagtcgcaaggcgggcgccctctggtcctcgggctgctgctgtgcgttctggggccagtggtgtcccatgctggcaagattcttcttataccagttgatgggagccactggctgtccatgctgggcgctatccaacagctgcagcagcgtggacatgagatcgtcgttctggccccggatgcatctctatacattagggatggtgcattttataccctgaaaacctatcccgtcccattccaaagagaggacgtgaaggagtcattcgtgtccttagggcataatgtgttcgagaacgatagtttcttacagagagtgataaagacatacaaaaagattaaaaaggactcggctatgctgttgtccggatgcagtcatctcttgcacaacaaagaactgatggctagcctcgcagaatcttctttcgatgtgatgctcacagacccattcctcccatgttcccctattgtcgctcagtacctgtccctccccacagtgtttttcctccatgcattaccatgttccctggaatttgaagccacacagtgcccaaatccattctcgtatgtcccaaggcccttatctagccatagtgatcacatgaccttcctccaacgggtgaaaaacatgcttatcgcttttagtcagaatttcttatgcgatgtcgtttactccccttatgctaccctggcatctgagttcctgcaaagggaagtgacggtgcaggatctactgtcctccgcatccgtttggttattcaggtcagattttgtgaaagactatccacgcccgatcatgccgaacatggttttcgtggggggcattaattgcctccatcaaaacccactgtcacaggagtttgaagcgtacattaatgcgtccggcgaacacgggatcgtggtgttcagtctgggctctatggttagcgagattcccgaaaaaaaggccatggctatcgctgacgctctgggaaaaatcccccagactgttctctggagatacacaggcacccggccttccaatttggcgaacaacacaattctcgtcaagtggctcccacagaacgatctgctggggcacccaatgacacgcgcctttatcacccatgcaggctctcacggcgtctatgaaagtatttgtaacggcgtccctatggttatgatgcccttattcggggatcaaatggacaacgcgaagcggatggagacaaagggtgcgggggtcaccctgaatgtgctggaaatgacctccgaggatctagaaaacgcgctcaaagccgttattaacgacaaaagctataaagagaatatcatgaggctgtcctctctgcacaaagatagacccgtggagcccctggacttagcggttttttgggtcgagtttgtgatgcggcacaaaggcgcgcctcatctgaggccagccgcccatgacctgacatggtaccagtatcacagccttgacgtgatcggcttcctcctcgctgtcgtcctgaccgtggcttttatcacgtttaaatgctgtgcttatggctaccggaaatgcctgggcaagaagggtcgagtgaagaaggcgcacaaatccaaaactcat

SEQ ID NO: 9172 - DNA, 1599 bp, Artificial Sequence
  derived and/or modified sequence
atggctgtagagtcgcagggcggcagaccactggtgctggggctgttgctctgcgtgctaggcccagtggttagtcacgccggcaagattttactgatcccagttgacggctctcactggctgagcatgctaggagcgattcagcaactgcagcagcgggggcacgaaatagttgttctcgcccccgacgcgagcctctatatcagggacggggccttttacacactaaagacctatcccgtgccattccaacgggaagacgtgaaagagtcatttgtctcactcgggcacaacgtttttgaaaatgactccttcctgcaacgggtgatcaagacctacaaaaagattaagaaggattcagccatgttgcttagcggatgctctcacctgttacataataaggagttgatggcatccttggctgaatcgtcatttgacgtcatgctgacagaccctttccttccatgttcgcctatagtggctcagtacctgtccctgccgacagtgttcttcctgcatgccctgccttgctcgttagaattcgaagccacgcagtgcccaaatccttttagctatgtgccgcgtcccctgagttcgcattccgatcacatgacatttctgcaacgagttaaaaatatgctgattgccttttctcagaacttcctctgtgatgtggtgtattcaccttacgcaacgctggccagcgaatttctgcagcgcgaggtcaccgttcaggatctgcttagctctgcttctgtctggctttttagaagtgactttgtgaaggattatccccgccctatcatgcctaatatggtgttcgtggggggcattaactgtctgcaccagaacccactcagccaggaattcgaagcctacattaatgccagtggcgagcacgggatcgtggttttctcgttgggatccatggtttctgaaatacccgagaagaaggctatggccatcgctgatgctctggggaaaataccacagaccgtactgtggcgttataccggaacaagaccctccaacctcgcaaataacactatcctggttaagtggttgccccaaaacgacctgctgggacatcccatgacgagggctttcatcacacatgccggctctcacggcgtgtatgaaagcatctgcaatggcgtccccatggtgatgatgcccctgtttggcgaccagatggacaatgccaagcgaatggagacaaagggcgccggcgttacattgaatgttttggagatgacctccgaagacctggagaatgccctgaaggcagtgatcaacgataaaagctataaggaaaatatcatgaggctgagtagtcttcataaagataggccagttgagccactggatctagcagtcttctgggtggagtttgtgatgcggcacaaaggcgctcctcatctgcggcccgcagcccacgaccttacctggtaccagtatcacagcctagacgttattgggtttctgcttgctgtggtattgacagtggctttcattactttcaagtgctgcgcctacggttatagaaagtgtctaggcaagaaaggacgcgtgaaaaaggcccacaagagcaaaacccac

SEQ ID NO: 9173 - DNA, 1599 bp, Artificial Sequence
  derived and/or modified sequence
atggcagtggagtcacagggtggacggccgcttgttctgggccttcttctctgcgtgctgggcccggtcgtgtcacacgccgggaagattctgctgattcctgttgatggttcgcactggctgtccatgttgggggccattcagcaactccaacagaggggtcacgagatcgtggtcctggcccctgatgcatccctgtacatccgagatggagcgttctataccctgaaaacttacccggttccattccagcgagaggacgtgaaggaatcctttgtgagcctcggacataacgtgttcgagaacgactcgttcctgcagcgtgtgatcaaaacttacaagaagatcaagaaagatagtgcgatgctcctgagtggatgctcccatctcctccacaacaaggagcttatggcctccctcgctgagtcgtcattcgacgtgatgctgaccgatcctttcctgccgtgttcacctatagtcgcacagtacctgagcctgccaaccgtgttctttctccacgcgctcccttgctctctggaattcgaggctacccagtgtcccaatccgttttcctacgtcccacggcccctctcctcccattcagatcacatgaccttcctccagagagtcaagaacatgcttatcgccttctcccagaacttcctgtgtgacgtggtctacagcccctacgcaaccctggctagcgaattccttcaacgcgaggtgactgtgcaagacctgttgtcgtcggctagcgtctggctgtttcgttctgatttcgtgaaggactatccccggccgatcatgcccaacatggtgttcgtcggcggaatcaattgcctgcatcagaatcctttgtcgcaagaattcgaagcctacatcaatgcgtccggggaacatggaatcgtggtgttcagcctggggagcatggtgtccgaaattccagaaaagaaggctatggccatcgcggatgccctggggaaaatcccgcaaaccgtgctctggcgttataccggaactagaccatcgaatctggcgaacaataccatcttggtgaagtggctgccccaaaatgacttgctgggacatccaatgacgcgcgcctttatcactcatgcaggatcgcacggagtctacgagtccatttgcaatggagtgccaatggtcatgatgccactgtttggggatcagatggacaacgcaaaacgcatggaaactaagggagccggagtcacgctgaacgtactcgagatgacttcagaggacctcgaaaatgccctgaaggctgtcatcaacgataagtcgtacaaggagaacatcatgcggctctcatcactgcacaaagacagacctgtcgaaccgttggacctcgctgtgttctgggtggagttcgtcatgcggcacaagggcgccccgcacctgcgcccggcggcacacgatctcacttggtaccagtaccatagcctcgacgtgatcggattcctgcttgccgtcgtgctcacggtcgcgtttatcacttttaagtgctgcgcgtacggctatagaaagtgcctcggcaagaagggacgcgtcaagaaagctcataaatcaaagactcac

SEQ ID NO: 9174 - DNA, 1599 bp, Artificial Sequence
  derived and/or modified sequence
atggccgtggaatcgcagggaggtagacccctggtgctgggcctgctgctttgcgtgctcggaccagtggtttctcacgcagggaagattctgctcatcccggtcgatggaagccactggctgtctatgctgggggctatccagcagctccaacagagaggacacgaaatcgtcgtcctcgctccggacgcatcactctacatccgggatggggctttctacacgctgaaaacctaccctgtgcctttccaacgcgaagatgtgaaagagtcattcgtgtccctcggtcataatgtgttcgaaaacgactcattcctgcagcgcgtcatcaaaacctacaagaagatcaagaaagattcggccatgcttctgagcggatgctcgcacctgctgcacaataaggagcttatggcctccctcgcggagagctcattcgacgtgatgctcaccgatccttttttgccttgttccccaatcgtcgctcaatacttgtctctgccgaccgtgttctttctccacgccctgccctgctcactggaatttgaggcgacccagtgccccaacccgtttagctatgttccgcggccgttgtcatcccattccgatcacatgacgtttctccaacgggtcaagaacatgctgattgcattctcccagaacttcctctgcgacgtcgtgtacagcccgtatgcaactttggcctcagaattcttgcaaagggaagtgactgtgcaggacctgctgagctctgcctcggtgtggctgttcaggtcggattttgtcaaagactacccacgaccgatcatgccaaatatggttttcgtcggaggaattaactgtctccaccagaacccgctttcccaagagttcgaggcctacatcaacgcatcaggagaacacggaatcgtggtgttctcgcttggatcgatggtttccgaaatcccggagaagaaggcgatggctatcgccgacgccctgggtaaaatcccacaaaccgtgttgtggagatacactggaacgcgcccatcaaatctggcgaacaatactatccttgtcaaatggctgccccagaacgatttgcttgggcacccgatgaccagggcgttcatcacccacgcgggatctcatggcgtgtatgaatctatctgcaacggcgtgccaatggtcatgatgcccctgttcggcgaccagatggacaatgccaagcgcatggagactaaaggtgcaggagtgaccctgaatgtgctggagatgacctctgaagatctggaaaacgccttgaaggcggtcattaatgataagtcgtacaaagagaacatcatgcgactgtcctcgctgcataaagacagacctgttgaaccccttgacctcgctgtgttttgggtggagttcgtcatgcggcataagggtgcaccgcatcttcggccagctgcccatgacctgacttggtaccagtaccatagccttgacgtgatcggctttctgctggcagtggtgctcacggtggccttcataaccttcaagtgttgcgcctacggctaccggaagtgcctcggtaagaagggacgcgtgaaaaaggcgcataagtccaaaactcac

SEQ ID NO: 9175 - DNA, 1599 bp, Artificial Sequence
  derived and/or modified sequence
atggccgtggaatcccagggggggaggccgctcgttcttggactgctcttgtgcgtacttggaccagtggtctctcacgccgggaagattttgcttatcccagttgatggcagtcactggctgagtatgctcggagccattcagcagctccagcagcgaggccacgaaatcgtggttctggctcctgatgctagcttgtacataagggatggagcattttacactctgaagacatacccagtgccttttcagcgggaggacgtcaaagagtcctttgtcagcctaggacacaatgtattcgagaatgactccttcttgcaacgcgttatcaagacctataaaaagatcaagaaggattccgctatgctccttagcgggtgctcgcaccttctccacaacaaggaactgatggcctctctggcggagagctccttcgacgttatgcttacagatccatttctcccgtgctccccaatcgtggcgcaatacctgtccttacccacagtattttttctgcacgccctcccatgcagtcttgaatttgaagctacccagtgccctaatcccttcagttacgttccaaggccgctgtcatcgcactcagatcacatgaccttcctccagcgcgttaaaaacatgctgatcgctttttcccagaattttctgtgcgacgtagtttactcaccttatgccactctcgctagtgaatttctccaacgagaagtgacggtgcaggacctgctatcgtccgcgtcagtctggctgttcaggtccgatttcgttaaagattatcccagacccatcatgccaaacatggtgtttgtcgggggtatcaactgcttacaccagaacccactctcccaagaatttgaagcgtacatcaacgccagcggtgagcacggaattgttgttttttccctcggctccatggtcagtgagatccctgagaagaaggcgatggctatcgccgacgccctggggaagatcccccaaacagtcttatggcgctacactggtaccagaccctctaaccttgctaacaacactatccttgtgaaatggctgcctcaaaatgaccttctggggcacccaatgaccagagcttttatcacccacgctggaagccatggtgtctacgaaagcatttgtaacggggttcccatggttatgatgccgctcttcggcgaccagatggacaacgcaaaacgaatggaaactaaaggggctggagtgaccctaaacgttcttgaaatgacatccgaggaccttgagaacgcattaaaggctgtgattaacgataaatcttataaggagaatataatgaggttgagttcactgcataaggatcggccagtcgagcccctcgaccttgcggtgttttgggttgagtttgtcatgcgtcacaagggcgcccctcacttgagacctgcagcccacgacctgacatggtatcagtaccattctttggatgtcatcgggtttctgttggccgtggttcttaccgtggcctttatcacattcaagtgctgtgcttacggatatagaaaatgcctgggaaaaaagggcagagtgaaaaaagcccacaagagtaagacccat

SEQ ID NO: 9176 - DNA, 1599 bp, Artificial Sequence
  derived and/or modified sequence
atggccgtggagtctcagggtggaagacccctggtactcggcctgctcctatgtgtgctcggacctgtcgtgagtcatgcagggaaaatcctgcttatccccgtagatggatctcattggctgtccatgttaggcgcgatccaacagttgcaacagcgaggacacgagatcgtggtgctcgcccccgacgcctcattgtatatccgtgatggtgccttctataccctgaaaacctacccagttcctttccaacgagaggacgtcaaagagagcttcgtatccctagggcataacgtgtttgagaacgattcttttctgcagcgtgtcatcaagacctacaagaaaataaaaaaagattcggcaatgctgctgagcggttgttcccacctattgcacaataaggaactcatggcatctctagccgaatcctcattcgatgttatgctgactgacccgttcttgccctgctcgcccattgtggcccagtatttgtccttaccaaccgttttctttcttcacgccctaccatgttcattggagttcgaagcgacccagtgtccaaatccatttagttacgtccctcggcctctgagctcccattcagaccatatgacttttctgcagcgggtgaagaacatgctgattgcttttagtcaaaattttctgtgtgatgtcgtatactctccttatgctaccctggccagtgagtttctgcagagagaagttacggtgcaggatctcctcagctctgcatccgtttggttatttagatcagattttgtaaaagactatccacgccccattatgccaaacatggtgttcgtggggggtattaattgcctgcaccagaaccctctgagccaggaattcgaggcatacattaacgctagcggggagcacgggatcgtcgtctttagcctggggtctatggtctccgaaattcctgagaagaaggctatggcaatagctgacgcactcggcaaaattccgcaaactgtgctttggcggtataccggcacaaggccatccaatctggccaacaacactatcctggtgaaatggttgccacagaatgacctgctgggccatcccatgactcgagctttcatcactcacgccggcagccatggcgtctatgaatctatatgcaacggtgtccccatggtcatgatgcccctgtttggcgaccagatggataacgctaagaggatggagacaaaaggagccggcgtgactctgaacgtcctcgagatgactagtgaagatctggagaacgcactgaaggcagtgataaatgataaatcctacaaagagaacataatgcgtctctctagcctgcacaaggataggccagttgagcccctcgatttggctgtcttctgggtagagttcgtgatgcgccataaaggtgctccacacctccgtccggctgcgcatgacctgacttggtatcagtatcacagcctagatgtgattggctttctgcttgctgtcgtgctgacagtagctttcatcaccttcaagtgctgtgcatacgggtacagaaagtgtttgggcaaaaagggccgggtgaagaaggcccacaagtccaaaacccac

SEQ ID NO: 9177 - DNA, 1599 bp, Artificial Sequence
  derived and/or modified sequence
atggcggtcgaatcccagggtggacggccgctagttctgggactattgctctgcgtgcttggccctgtggtgagccacgcgggcaagattctcctgatcccggtcgacggctcccattggctgtcaatgctcggcgctattcagcagctccagcagcgtggccacgagattgtcgtgttggctccggatgcaagtttgtatattcgtgacggcgcgttttacactctcaagacataccccgttccgtttcaacgcgaagacgtcaaggagagtttcgtttcgttggggcataacgtctttgagaacgactccttcctgcagcgggtgattaagacgtacaagaagattaaaaaggacagcgcaatgctcctgtccggatgcagccatcttttgcataacaaggagctcatggcttctctggccgagtcctctttcgatgtcatgctgacggatcccttccttccgtgttccccgatcgtggcccagtacctcagcctgccgactgtattctttctccatgcattgccctgcagcctcgaattcgaagcaacccaatgcccaaaccctttcagttacgttcctcgccccctttcgtcccattctgaccatatgacgttcttgcaaagggtcaagaacatgctcatcgcgttttcccaaaacttcctctgtgacgtcgtatatagcccgtacgctaccctggcttccgagtttctacaacgcgaagtcacagtgcaagatctgctgtcgtcggcctcggtgtggctcttccgtagtgacttcgtcaaggattacccgcgacccatcatgcctaacatggtcttcgttggcggcattaattgccttcaccagaaccctctgtcccaagagttcgaggcatacattaacgctagcggtgagcacggaattgtagtcttctctctgggttccatggtctctgaaattccagagaagaaggctatggccatcgctgacgctttgggtaagattccccaaacagtcttgtggcgttatactggaactcggccctctaacctggcaaataacactattttggttaagtggctcccccagaatgatctcctgggccacccgatgactcgcgcatttattacacatgctgggtcgcacggtgtgtacgagagtatctgtaacggagtgccgatggtcatgatgccgttgtttggtgaccaaatggataatgccaaacgaatggaaaccaaaggagcgggtgtcaccctgaacgttttggagatgacatctgaagatttggagaacgctttgaaagcagtcatcaatgacaaatcttacaaggagaacatcatgcggctgtccagcctgcacaaggatcgtccagttgagcccctggacttggccgtcttttgggtcgagttcgtcatgcggcacaagggggctccccacctgcgacccgcagcccacgacctcacctggtaccagtatcattccttggacgttatcggttttctgttggccgtggtgctgaccgtcgcgtttataaccttcaagtgctgcgcctacggctatcgtaagtgcctcggtaagaagggacgtgtcaagaaagcgcataaatccaagactcat

SEQ ID NO: 9178 - DNA, 1599 bp, Artificial Sequence
  derived and/or modified sequence
atggcagtggagtcacagggggggaggcctctggtacttggactgctgctgtgtgtgttgggtcctgtcgttagccatgcagggaagattctgcttatccccgtagacggcagccactggctgagtatgctgggcgcaattcagcagcttcagcagagaggtcatgaaatcgtggtgctggctccagacgcaagcttgtatatccgggatggcgcgttttacaccctgaaaacatacccagtaccctttcagcgagaggacgtgaaggaaagcttcgtgtccctgggccacaacgtgtttgagaacgactcatttctgcagcgagttattaagacatacaaaaagatcaagaaggatagcgctatgctgctgtccgggtgctctcacctgcttcataacaaggaactgatggcttccctggcggagtcctccttcgatgtgatgcttacagatccgttcctcccatgttcccccatagtggcccaatatctctcactccctaccgtgttctttttgcatgctctgccgtgctcacttgagttcgaagcgacacaatgcccaaacccgttcagctacgtaccacgacccttgagcagtcacagtgaccacatgacatttctgcagagggtgaaaaatatgctcatcgcctttagccagaacttcctgtgtgacgtggtgtactccccatacgcaaccctggctagcgaatttttgcagagggaggtgaccgtgcaggatcttctgagcagtgctagcgtgtggctttttaggtcagattttgtgaaagactatccgagaccaatcatgccaaatatggtgtttgtcggtggaatcaactgcttgcaccagaatccgttgagccaggaattcgaggcctatatcaacgcaagcggagaacacggcatagtagtgttcagcctgggaagcatggtcagcgagattcctgaaaaaaaggcaatggctatagcggacgctctgggtaaaatacctcaaactgtactgtggcgatacactggaacacggccttctaacctcgccaacaatacaatcttggtgaagtggctgcctcagaacgacctcctgggccacccaatgacacgggcctttatcacccacgcaggttcacatggcgtctacgaaagcatttgcaatggggtgccaatggtgatgatgccactcttcggtgatcagatggacaacgctaaacggatggaaaccaagggcgcaggagtcaccctgaacgtgctggaaatgacttcagaggacctggaaaacgctttgaaagctgtgattaacgacaaaagttacaaggagaacatcatgcggttgagtagtttgcacaaggaccgccctgttgaacccctcgacctcgccgtcttctgggtcgaattcgtgatgagacataagggggccccccacctccgcccggccgcacatgatctgacatggtaccaatatcatagccttgatgtgatcggatttctgctcgcagttgtgctgaccgtggctttcataacgtttaaatgttgcgcctatggctatagaaaatgcttggggaaaaaaggtagggtgaagaaagcgcacaagtcaaaaacccac

SEQ ID NO: 9179 - DNA, 1599 bp, Artificial Sequence
  derived and/or modified sequence
atggcagtcgagtcccagggtgggcggcccctggtgcttggactgctgctctgtgtgttgggtccagtggtgtctcacgcaggaaagattctgctcataccagtcgatggttcccattggctttccatgttgggtgccattcagcagctccaacagaggggacatgagattgtggtcctggcccctgatgcaagtttgtatatccgtgacggagcattttacactctgaaaacttaccctgtcccattccagcgcgaggatgtcaaggaatcctttgtgtctttgggacataacgtgtttgaaaatgatagcttcctgcaacgagtgattaagacgtacaaaaagataaagaaggattctgcaatgcttctctccggatgcagccatcttctgcataacaaagaacttatggcaagcctggcggaatcatcgtttgacgtgatgctcaccgacccttttttgccatgttcaccaatcgttgcccaatatctgagcctccctactgttttctttcttcatgcactgccctgctccctcgagtttgaggcaactcaatgtccgaatccgttctcatacgtgcctaggcctctgtcatcgcatagcgatcatatgacttttcttcaacgcgtgaagaatatgttgatcgcttttagccagaacttcctttgtgatgtggtgtacagtccatacgccactcttgcaagcgagttcctgcagagagaggtgaccgtgcaggatcttctgtcatcagcctccgtgtggctttttcggtcggacttcgtcaaggactacccccggcctattatgccaaacatggtctttgttggtggtattaactgtctccatcagaacccactgtcacaagaatttgaagcctacatcaatgcatcaggagaacacggtatagtggtcttttctctcggatctatggtgtccgaaatcccagagaagaaggcaatggccatagcagatgcccttggcaaaatccctcaaacggtcctttggagatacactgggacccggccttccaaccttgcgaacaacaccatcctggtcaagtggctccctcaaaatgacctcttgggacaccctatgacgcgggcattcattacccacgcaggctcacacggtgtctatgaatcgatttgtaacggtgtgcccatggtgatgatgccgttgttcggagatcaaatggataatgcgaaacgaatggaaactaagggagccggcgtaaccctgaacgtgctcgaaatgactagcgaggatctcgaaaacgcccttaaggccgtgattaacgacaagagctacaaggagaatatcatgcgcctctcctcacttcataaagacaggcctgtggaacccctggatctggcagtgttttgggtggaattcgtcatgcggcacaaaggcgcaccgcatctccggcccgcggctcatgatctgacctggtaccaataccactccctggatgtgatcggctttctgcttgcagtggtacttacggtggcatttatcactttcaagtgttgtgcatacgggtacaggaagtgtctcggaaagaaaggacgcgtcaagaaggctcataaaagcaaaactcac

SEQ ID NO: 9180 - DNA, 1599 bp, Artificial Sequence
  derived and/or modified sequence
atggctgtggagtctcagggcggtcgcccccttgttctaggcctcttactctgtgtgctcggacccgtggtgtcgcacgccgggaaaattctgctcatccctgtggatggcagccactggctcagcatgctgggcgccattcaacagcttcagcagaggggacatgaaatcgtcgtcctggcaccagacgctagtctttacatccgcgacggcgctttctacactctgaaaacctacccggtgcccttccagcgcgaagatgttaaagagtcctttgtgtcactgggccacaatgtgtttgaaaacgactctttcctgcagcgcgtgatcaagacatacaagaagatcaagaaagactcggcgatgcttctgagcgggtgctcccatcttctgcataacaaggagctgatggctagtctcgctgagagctccttcgatgttatgctgacggatccattcctgccatgtagtccgatcgtggctcagtacctgtccctgcctacggtattttttcttcacgccctcccctgctcgctggagttcgaggccacccagtgtcctaaccccttcagctacgtcccacgcccattgtcttctcactctgaccacatgacattcttgcagagagtgaaaaacatgctgatcgccttttctcagaactttctttgtgatgtggtgtatagcccctatgctactctcgcctctgagtttctacagcgtgaagtgaccgtgcaagaccttctatctagcgcttcagtgtggctgtttaggagcgactttgtcaaggactacccccggccaataatgcccaacatggtcttcgtgggcggtattaactgtcttcaccagaacccattgtcacaggagtttgaggcatatattaatgcatcgggggagcatggcattgttgtattctcactcggatccatggtgtctgaaattcctgagaagaaggctatggctatagctgatgcactcggcaagatcccccagactgtgctgtggcggtatactggcacccgcccatccaatctggctaataacacaatcctggtgaagtggcttcctcagaacgaccttctgggccatcccatgacccgagcttttatcacacacgccggatcacatggagtttatgaatccatctgcaacggggtgccgatggttatgatgcctctttttggcgaccagatggataatgccaagcgtatggagacgaagggagctggcgtgactctgaacgtgctggagatgacatcagaagacctggaaaatgcgctgaaggccgtcatcaacgacaaaagttacaaggagaacataatgagactctccagcctgcataaggataggccagtagagccactggaccttgcagtattttgggttgaatttgtaatgaggcataaaggggcaccccatctgaggccagccgcgcatgatctgacctggtatcagtaccatagcctggatgtgattggcttcttgcttgccgtcgtgctgacggtagccttcattacattcaagtgttgcgcgtatggctatagaaagtgcctgggaaagaaagggagagtcaagaaggcacataagtctaagacgcac

SEQ ID NO: 9181 - DNA, 1599 bp, Artificial Sequence
  derived and/or modified sequence
atggctgtggaaagccagggaggccgcccgttggtgctcgggctgctgctgtgcgttttgggaccagtggtgtctcatgcgggaaagatactgttgatccccgttgacggctctcactggctcagcatgctgggggcgattcaacagctgcaacagagaggtcatgagattgtggtgcttgcgcctgacgcctctctctacatccgcgacggagcattctacactcttaagacttatccagtgccattccaacgggaggacgtgaaggagtccttcgtctcccttggacacaatgtctttgagaacgactcctttcttcagcgcgtgatcaaaacttacaaaaagatcaagaaagacagcgccatgctgctctcagggtgttcgcacctcttgcacaataaagaactcatggccagcctggcggaaagctcctttgacgttatgctcaccgatccgtttctgccctgttccccgatcgtcgcacaatacctgtctcttccgactgtgttcttcctgcacgccctgccgtgctcactcgaattcgaagccactcagtgcccgaacccattctcctacgtgccacggccactgtcgtcccattcggatcacatgactttccttcaacgtgtgaaaaacatgctgattgccttctcacagaatttcctttgcgatgttgtgtacagtccgtacgctactctggcatcggaattcctgcaacgcgaagtgacggttcaggatctcctgtcctccgcttcggtctggctctttaggtccgacttcgtcaaggactaccccagacctatcatgcctaacatggtgttcgtgggcggcatcaattgcctccatcagaatccattgtcccaagagttcgaagcgtacatcaacgcgtcgggggaacacggaatcgtcgtcttttcactgggatcaatggtttcggagatcccggagaaaaaagcaatggccatcgccgacgccctgggtaagatccctcagaccgtgctgtggagatacacgggaactcggccgtccaacttggccaacaacaccatcctggtgaagtggctcccgcagaatgacctgctcggtcaccctatgaccagagctttcatcacgcacgctgggagccacggagtctatgagtcgatctgcaacggcgtacctatggtgatgatgccactgtttggagatcaaatggataacgcaaagcgcatggaaactaagggagcaggagtgaccctcaacgtgctggaaatgacgtcggaggacctggagaatgccctcaaggcggtcattaacgacaaatcctacaaggagaacataatgagactctcgtcgctgcataaggaccggccggtggaaccgctggatcttgcagtcttttgggtggaatttgttatgcgccataagggtgctccgcatctgaggcccgcagcccacgatctgacctggtaccagtaccactctctggatgtgatcggatttcttctggcggtcgtgctgactgtcgctttcataaccttcaagtgttgcgcgtacggctacaggaaatgccttggcaaaaagggccgcgtgaagaaggcccataagtccaagacccac

SEQ ID NO: 9182 - DNA, 1599 bp, Artificial Sequence
  derived and/or modified sequence
atggcggttgaatctcagggaggccggcccttggtactcgggctccttttgtgcgtgttgggaccagtggtgtcacacgccgggaagatcttgttgatccccgtcgacggatcacactggttgtcgatgctgggtgcgatccagcagcttcagcagcgcggacatgaaatcgttgtgctcgcaccggacgcctctctttatatacgagatggggccttctacaccctgaaaacttatccagtgcccttccagagggaagatgtgaaggagtcctttgtgtcacttggacacaacgtattcgagaacgatagttttctacagcgcgttatcaaaacatataagaagatcaagaaggattccgctatgctgctgtcgggctgctcacatctgttacacaacaaagagcttatggcgagtttagccgaaagctctttcgatgtgatgctgaccgaccccttccttccgtgttctcccatcgtcgcgcagtacctgtcgttgcccacagtcttctttctgcacgctctcccttgcagcctcgaattcgaagcgacacagtgtccaaatccattctcttacgtgccacgtcccttatctagtcactctgatcacatgacgtttctccagcgggtgaagaacatgctgattgcctttagccagaatttcctctgtgacgtggtctactctccctatgcaacccttgcctcggaatttctgcagagagaagttaccgtgcaagatcttctgagcagcgcctccgtctggctttttcgctctgatttcgtgaaggactatccgcgccctattatgccgaacatggtgttcgtgggtggaatcaattgtctgcatcagaacccactttcccaggagttcgaggcttatatcaacgcctccggggaacatggcattgtcgtgttctcattgggcagcatggtgtccgagatccctgaaaaaaaggctatggctatagccgatgcgctcggaaaaattccccagacagtgctgtggagatatacgggcacccgcccaagcaatctggccaataatacgattttggtgaagtggcttccacagaatgacctgctaggacatcccatgacacgcgcctttataacccatgccggctcacatggcgtttacgaatcgatatgtaacggcgtgcccatggtaatgatgccattgttcggcgaccagatggataacgcaaagcgcatggagaccaaaggggcgggggtgaccctgaatgtgttggagatgaccagcgaggatcttgagaatgcactaaaagcagtcataaatgacaaatcatacaaggaaaacattatgcgtttgtcgtccttgcacaaagaccgcccggtggagccattggacctcgccgtgttttgggtggaattcgtgatgcgacataagggcgcccctcacctgcgacccgcggcccatgacctcacgtggtatcagtaccatagcttagatgtcatcgggttcctcttggcagtggtgttgaccgtagcattcataacttttaagtgttgcgcttatggatatcggaagtgcctaggtaagaagggacgtgtgaagaaggcacacaagtcaaagactcat

SEQ ID NO: 9183 - DNA, 1599 bp, Artificial Sequence
  derived and/or modified sequence
atggctgtggagagccagggagggaggcccctggtgttgggactgctcttgtgtgtgttaggacctgtggtaagccacgccggaaagatcttgctgattccagtggatggcagccattggctgagcatgctgggtgctatccagcagctgcaacagagaggccatgagatcgtcgtgcttgcacccgatgccagtctgtatatcagggacggtgctttctacactcttaagacctaccccgtaccgtttcagagggaggacgtgaaagagtcgtttgtcagtctcgggcataatgtgttcgaaaacgacagtttccttcagcgcgtcatcaaaacctataagaagattaaaaaggactcagccatgttgctttctggctgcagccacttgcttcacaacaaggaactaatggcgtctttggcagagagcagtttcgatgttatgctgacggatcccttcctgccttgctccccaatagttgctcagtatctctcactgccgacggtgttcttcctgcacgctctcccctgttcattagagtttgaggccacacagtgcccgaatcccttcagctacgttcctcggcctctttctagtcactccgaccatatgacattcctccagcgcgtcaaaaatatgctcatcgcgttctctcaaaatttcctgtgtgatgtggtctattcaccgtacgccacactcgccagcgagttcctgcagcgggaagtcacggttcaagacctcctcagttccgcgtcagtctggctattcaggtctgatttcgtgaaggactacccacggccaatcatgccgaatatggtctttgtgggaggcatcaattgtctgcaccagaatccgttatctcaggaatttgaggcctacataaacgcctctggggagcacggcattgtggtgttctcccttggctctatggtctctgagattcctgagaagaaggctatggctatcgccgacgcacttggaaagatcccacaaactgtgctgtggcggtacaccggcacaagaccctcaaacttggccaataataccattctggttaagtggttgcctcagaatgatctgctggggcacccaatgactcgagcttttatcacgcatgcaggtagtcacggagtgtatgagtcaatctgcaatggcgtacccatggtcatgatgccactattcggggaccaaatggacaacgccaaaagaatggagaccaagggtgctggtgtgactctgaatgtgctggaaatgacctcagaagacctcgagaacgctctgaaggcggtgattaacgacaaatcctacaaagagaacattatgagattaagttccctgcacaaagaccgccccgtcgaacctcttgacctggctgttttctgggtggagttcgtgatgagacataaaggcgccccacatttgagacccgctgcccatgacctgacctggtaccagtatcacagcctcgatgtgataggcttcttactcgccgtggtacttactgtcgcctttattacttttaaatgttgcgcttacggctaccggaaatgtctagggaagaaaggtagagtgaagaaggctcataagagcaagacacac

SEQ ID NO: 9184 - DNA, 1599 bp, Artificial Sequence
  derived and/or modified sequence
atggccgtagagagccagggcggccgaccattagtgctgggccttctcctctgtgtcctgggaccagtcgtgtcccatgccggaaaaattctgctcatcccagtcgatgggagccactggctatcgatgctgggcgccattcagcagctacagcagagaggccacgaaatcgttgtattggcccccgatgctagcctgtatattagagacggtgccttctacaccctcaagacctatcccgtacctttccagcgtgaggacgtcaaagaatcattcgtgagtctaggacacaacgtcttcgaaaatgactcctttctccagcgcgtgatcaaaacatacaagaagatcaagaaggacagcgcaatgttgctctccggatgctcgcatcttcttcataacaaggagcttatggcttccttagccgaaagtagcttcgatgtgatgttgacagaccccttcttaccttgttctcccatcgtggcgcagtatctaagcctccctacagtttttttccttcatgctctgccgtgttcactggaatttgaggctacacagtgccccaacccattctcatacgtgcctaggcccctctcaagccactcagaccacatgacctttctacaacgagttaaaaacatgctcatcgcctttagtcagaacttcctgtgtgacgttgtatacagcccgtacgctaccctggccagcgagtttctgcagcgggaggtcactgtccaggatttactgtctagcgctagtgtgtggctcttccgcagcgatttcgttaaggactatcccaggccgatcatgccaaatatggtgtttgtgggcggcatcaattgtctccaccaaaatccactttcgcaggagtttgaggcgtacataaatgcatctggtgagcacggaatcgttgttttctcactggggagtatggtatccgaaattcccgaaaaaaaagctatggccatcgcagatgctctggggaagatccctcaaacagtgctctggcgctacacaggaacacggccttcgaacttggccaataacaccatcctggtgaagtggttgccccagaatgacctgctgggacatccaatgacacgggctttcattactcatgctgggagccacggagtgtatgagtccatctgcaatggcgtccccatggtgatgatgcctttgtttggggatcaaatggataacgctaaacgaatggaaacaaaaggagcaggcgtgactttaaatgtgctcgagatgaccagcgaagacttggaaaacgccttaaaggccgttattaacgataaaagctataaagagaatataatgcgtctcagctcacttcacaaggatcgcccggttgaaccgttggatctcgcggtattctgggtcgaattcgtcatgcggcataaaggagctccccatctgaggcccgcggcacacgacctgacttggtatcagtatcactctctagacgtgattggattcttgctcgccgtggtcttaacagtcgcttttataacctttaaatgctgtgcctatggctatcgcaagtgcctcggaaagaagggcagagtgaagaaagcccataagtccaagacccat

SEQ ID NO: 9185 - DNA, 1599 bp, Artificial Sequence
  derived and/or modified sequence
atggcggtggagagccagggtggcagaccattggtgcttggactcctgctctgtgtcctcggccccgtggtttcacacgcgggtaaaatcctgctcatacccgttgatggctcgcactggctgtcgatgcttggtgccatccagcaactgcaacagcgaggacatgaaattgtggtgttggccccagatgcaagcctgtacattcgcgatggagccttttacacccttaagacctacccagtgccttttcagagagaggacgtgaaagaatcgttcgtgtcactgggtcacaatgttttcgagaacgactcatttctgcaaagggtcattaagacctacaagaagataaagaaggactctgcaatgctgctttccggttgttcccacttgctccataacaaggagttgatggcgtcactggcagagagcagctttgatgtcatgctgactgaccccttccttccttgtagcccgattgtggcacaatatctttcgttgccaaccgtctttttcctgcatgcactgccgtgttcgctcgaattcgaagcaactcaatgtcctaacccttttagctacgtcccacggcctctttcctcgcattcggatcacatgaccttccttcaacgtgtgaagaacatgctgattgcgttttcacaaaacttcctttgtgatgtggtgtattcaccttacgcaaccttggcctcagaattccttcagcgcgaagtgactgtgcaggaccttctgtcgtccgccagcgtttggctctttcggtctgattttgtgaaagattacccccgacctattatgccaaatatggtgtttgtgggcgggatcaattgcctccaccaaaatcccctgtcccaggaatttgaggcatacattaacgcatccggagaacacggtatcgttgttttttcgctcggctcgatggtcagcgagatcccagaaaagaaagctatggcaatcgctgatgccctcgggaagattccccaaaccgtcctttggcgatacacggggactcgcccaagcaacctcgcaaataacactatactggtcaaatggcttcctcagaatgatctcctgggccatcctatgacccgggcatttatcacgcatgcaggttcacatggggtgtacgaatcaatatgcaatggagtgcctatggtgatgatgcctcttttcggagatcagatggacaacgcaaagcgtatggagacgaaaggtgcaggcgtgactctgaacgtccttgaaatgaccagcgaagatcttgaaaacgctttgaaggcggttatcaatgacaaatcctacaaggaaaacatcatgagactctcctcactgcataaggaccgtccggtggaacccttggatctggccgtgttctgggtggagtttgtcatgcgccataagggagcgccgcatctgaggccagccgcacatgatctcacctggtaccaataccactcccttgacgtgattggtttcttgcttgccgtggtgcttactgttgcttttatcacgtttaagtgttgcgcatacggataccgcaaatgcctcggaaaaaagggacgcgtgaaaaaggcgcacaagtccaagacgcac

SEQ ID NO: 9186 - DNA, 1599 bp, Artificial Sequence
  derived and/or modified sequence
atggcagttgagtcccagggagggcgtcccctggtgctcggacttcttctttgtgtgctgggccctgtggtgagccatgcggggaagatcctgttgatccctgtggacggctcgcactggctgagcatgttgggggccattcaacaacttcaacagcgcgggcatgaaattgtggtcctggcaccggatgcgtctctgtacatacgggatggggcattctatactcttaagacctaccctgtgccattccaacgtgaggatgtcaaggagtcgtttgtctccctcggacataacgtgtttgaaaatgactcgtttctccagagagtgataaagacttacaagaaaatcaagaaggacagcgcaatgcttctgagcgggtgttcacacctccttcacaataaggagcttatggcctcgctggccgaatcttcgttcgatgtaatgcttaccgatcccttccttccatgttcgccaatagtggcacagtacctttcgctccccaccgttttctttcttcatgctttgccctgttcgctggagttcgaagccactcagtgcccaaaccctttttcgtacgtgcctcgccctctgtcctctcattccgatcatatgacgtttcttcagcgggtgaagaacatgctgattgcgttctcccagaattttctgtgcgacgtggtctactccccgtacgctactctcgcatcagaatttcttcaacgcgaggtgaccgtccaagatctgctcagcagtgcctcagtgtggctgtttcgcagcgactttgtaaaagattacccccgtccaattatgcctaatatggtctttgtgggtgggataaactgtctccatcaaaaccctcttagccaggaattcgaggcttacatcaacgcttcaggtgagcatggtatcgtggtgttctcccttggctcgatggtgtcggaaatccccgagaagaaggccatggctattgccgatgcccttggaaagattccacaaactgtcctttggagatacacgggtactagaccgtccaatctggccaacaacacgattctcgttaagtggctgccacagaatgacttgctgggccaccctatgacgagagcgtttatcactcacgccggttcacatggtgtgtacgagtcgatttgcaacggtgtccccatggtgatgatgcctctttttggcgaccaaatggataacgcaaaaagaatggaaactaagggagcaggagtgaccctcaatgtcttggaaatgacgtcagaagatctggagaacgctctgaaagcagtgattaacgataaatcctataaagaaaacattatgagactgtcatcgctccacaaggataggccagtggaacctctcgatctggcggtcttttgggtggaattcgtcatgcggcataagggagctcctcacctcagacctgcagcccatgatctgacttggtaccagtaccatagcctggacgtcattggatttcttcttgcggtagtgttgactgtcgcattcattactttcaaatgctgtgcatacggataccgaaagtgtctcggaaaaaagggtagggtcaagaaggcccacaagagcaaaactcat

SEQ ID NO: 9187 - DNA, 1599 bp, Artificial Sequence
  derived and/or modified sequence
atggcagtggaatctcaaggtggccggcctctggtgctgggccttctgttgtgtgtccttggaccagtggtttcccatgctggaaagattctgctgattccggtcgacggatcccactggctctccatgcttggagcaattcagcaactgcagcagagagggcatgaaatcgtcgtgctggcgcccgatgcatcactctacattagggacggggcattctacactctgaaaacctaccccgtgcctttccaacgcgaagatgtgaaggaatcattcgtctctctgggtcacaatgtctttgaaaacgactcatttctccaaagagtgatcaaaacttacaagaaaatcaaaaaggactcagccatgctgctgtctggttgctcccacctgctgcacaataaggagctgatggcttcacttgctgagtcgtcttttgacgtgatgctgaccgaccctttccttccatgcagcccaattgtggcacaatatctgtccttgcccaccgtctttttcctgcacgctctcccatgttcactggagttcgaagcaacccagtgcccgaacccattttcgtacgtcccgcgccccctgtcgtcacacagcgatcatatgacctttctccaacgagtgaagaacatgcttattgccttcagccagaattttctctgtgatgtggtgtactcgccttacgcaaccctggcaagcgagtttttgcaaagagaggttaccgtgcaggatctgctttcatccgccagcgtgtggttgtttcgctcggattttgtcaaagattacccgcggccaattatgccgaacatggtgttcgtcggagggatcaattgtctccatcaaaaccctttgtcgcaagagtttgaagcatacattaatgccagcggtgagcacggaattgtggtgttttcgctgggatccatggtttccgaaatccccgagaagaaggcaatggcaattgcggatgcactcgggaaaatcccacagacggttctttggcggtacactgggaccagaccctcgaatctggcaaacaataccatcctggttaaatggctgccacagaatgacctgctgggccatccaatgactagagcattcatcacccatgcaggcagccatggagtgtacgagagcatatgtaacggagtgccaatggtcatgatgccactttttggtgatcaaatggacaacgcaaagagaatggagactaagggagctggagtgactcttaacgtgttggagatgacttcggaagatcttgagaacgctctgaaggcagtgattaatgataagtcgtacaaggaaaacatcatgcgtctgtcgtccctgcataaagatcgccctgtcgagcctctcgacctggcggtgttttgggtggaatttgtcatgcggcataagggcgcacctcatttgcgacccgcggcacatgatctcacttggtaccagtaccattcgcttgacgtcatcggatttctgcttgcagtcgtgcttaccgtcgcctttatcacttttaagtgttgcgcatacggataccggaaatgcctgggaaagaagggacgggtcaagaaagcacataagtccaagacccat

SEQ ID NO: 9188 - DNA, 1599 bp, Artificial Sequence
  derived and/or modified sequence
atggctgttgaatcacaaggaggaagaccacttgttcttggtttgttactatgtgttttaggaccagttgtttcacatgcaggtaaaattcttttgattccagtagatggatcacattggttgtcaatgttaggagcaattcaacagttacaacaaagaggtcacgaaattgtagttttagctcctgatgcaagtttatatattagagatggagcattttatacattaaagacatatccagttccatttcagagagaagatgtaaaggaatcttttgtttcattgggacataatgtttttgaaaatgactcatttttacaacgtgttattaaaacctataaaaaaatcaaaaaagattcagctatgttactttctggatgtagtcatttacttcataataaagaacttatggcatcattagctgaaagttcatttgatgttatgcttactgatccattcttgccatgttcaccaattgttgcacaatatcttagtttgccaactgttttttttttacatgcattaccatgtagcttagagtttgaagctactcaatgtccaaatccattcagttacgttccaagacctctttctagtcattctgatcacatgacatttttacaaagagttaaaaatatgttaattgcattttctcaaaactttttatgtgatgttgtgtactcaccttatgcaactttggcaagtgaatttttgcaaagggaagttactgtacaagatttattgtcaagtgcttcagtgtggctttttagatctgattttgtgaaggactaccctagaccaattatgccaaacatggtttttgttggtggaataaattgtttacatcaaaatccattatctcaagaatttgaagcatatataaatgcatcaggagaacatggtatagttgttttctctcttggatctatggtttcagaaattccagaaaaaaaagcaatggctattgctgatgcattaggaaaaattcctcaaacagtattatggagatatactggaacaagaccatcaaatcttgccaataatactattttagtaaagtggttacctcaaaatgaccttttaggacatcctatgacaagagcttttataactcatgctggtagtcatggagtttatgaatcaatttgtaatggagttccaatggttatgatgccattatttggagatcaaatggataatgcaaaaagaatggaaacaaagggagctggagtaacattaaatgttttagaaatgacttctgaagatttagaaaatgcattaaaagcagttataaatgataaatcgtataaagaaaatatcatgagattatcatcacttcataaggacagaccagttgaacctttagacttggcagttttctgggtcgaatttgtaatgagacataaaggagctccacatttacgaccagctgctcatgatttaacatggtatcaatatcattctttagatgttattggatttcttttagcagttgttcttacagtagcatttattacatttaaatgctgtgcatatggatatagaaaatgtttaggtaaaaaaggaagagttaaaaaggcacataaatcaaaaacacat

SEQ ID NO: 9189 - DNA, 1599 bp, Artificial Sequence
  derived and/or modified sequence
atggctgtggagtcgcagggcggaaggccactggtgctcggcctgcttctgtgtgtgcttggtcctgtcgtgagccacgccggtaagatactgcttatcccagtagacggatcgcattggctgtctatgctcggagctattcaacaacttcaacagagagggcacgaaatcgtcgtcctggcgcccgatgcctcattgtacatacgagacggagcattctacacgttgaaaacctaccctgtccctttccaaagagaggatgtgaaggagtccttcgtgtccctcgggcataacgtgtttgaaaacgacagctttctccaaagagttatcaagacctacaagaagataaagaaggatagcgcaatgctgctcagcggatgctcccatcttctgcacaacaaggaactgatggcatcgctcgcagaaagctcctttgacgtgatgctgacggatccctttctgccttgttcaccaattgtcgcacagtacctgtcactgccgactgtcttttttctgcatgcactgccatgtagcctggagtttgaagccacgcagtgtccaaatcccttttcctacgtccctagacctctttccagccacagcgatcatatgaccttccttcaacgggtgaagaacatgcttatcgcattttcccaaaactttctgtgtgatgtcgtctattcgccttatgcaactctcgcttcagaatttcttcagagagaagtgactgtgcaagatctcctgtcatcggcgagcgtgtggctctttcgatcagattttgtcaaggattacccaagaccgatcatgcccaacatggtttttgtgggtggcattaactgtctccatcagaaccctctttcacaggagtttgaggcatatatcaacgcaagcggagaacacggaatagtggtgttttcgcttggatcgatggttagcgaaatcccagagaaaaaagcgatggcaatcgctgatgcccttggtaagataccacaaacggtgctgtggagatacaccggtactcgcccatcgaatcttgccaataacactatacttgtgaagtggctgcctcaaaatgacctgctgggtcatcctatgaccagagctttcattacccatgcaggtagccatggagtgtacgaatcgatttgtaacggggtccctatggtcatgatgccccttttcggtgaccaaatggacaacgcaaagagaatggaaactaaaggcgccggcgtgactctgaatgtgcttgagatgacttctgaggatcttgaaaatgcgcttaaggccgtcattaatgataaatcatacaaggagaacatcatgcgcctcagctcgcttcataaggatcgccctgtggaacccctggatctcgccgtgttttgggtcgaattcgtcatgcgacataagggggcaccccatcttagacccgcagcacatgatttgacctggtaccagtaccactcgctggatgtgatcggattcctgctggccgtggtcttgaccgtcgctttcattactttcaagtgctgtgcatacggatacagaaaatgtctgggaaagaaaggtagagtgaaaaaagcccataagtccaaaacgcac

SEQ ID NO: 9190 - DNA, 1599 bp, Artificial Sequence
  derived and/or modified sequence
atggcagtcgaatcgcagggagggcggcccctggtcctgggactgctgctttgcgtgctgggaccggtggtgtcacacgctggcaagatccttctcatcccagttgacggatcccattggctctccatgttgggtgcgatccaacagctgcagcaacgcggacatgaaatcgtggtcctcgcgccagatgcatcgctttacatccgcgacggggcattctacacccttaagacttacccggtaccctttcaacgcgaagatgtgaaggagtccttcgtgtcgcttggacacaatgtgtttgaaaacgacagcttccttcagagagtgatcaagacctacaaaaagatcaagaaagattcagccatgcttctctcaggatgcagccacctgctgcataacaaggagctgatggcctcactggccgaatcatccttcgatgttatgctcactgatcctttcctcccgtgctcaccgattgtggcccaatacctttcgctccctaccgtgtttttccttcacgcactcccatgctccctggagtttgaagcaacccagtgcccaaacccgttctcctacgtgccgcgccccctgtcatcacactcagaccacatgacgtttctccagagggtcaagaatatgctgattgcattttcgcaaaacttcctctgcgacgtcgtgtactctccgtacgccactctggcgtcggagttcctgcaacgcgaagtcaccgtgcaggaccttctctcgtccgcctccgtttggctgttccggtctgatttcgtcaaagattacccacgaccgatcatgcctaacatggtgttcgtgggaggtatcaactgtctgcatcagaatccgctttcgcaagaattcgaagcctacattaatgcatcgggagagcatggaatcgtggttttctccctcggtagcatggttagcgaaattcctgagaaaaaggcaatggccatcgccgatgccctggggaaaataccgcagactgtgctctggcggtatacgggtacccggccgtccaacctcgcgaataacactattctggtgaagtggctgcctcagaatgatttgctgggccatccaatgacccgggcctttatcactcacgcaggatcgcatggagtgtacgagtccatctgtaacggcgttccgatggtgatgatgccgctctttggggaccagatggacaacgccaagcggatggaaaccaagggagcgggagtgactctgaacgtcttggaaatgacttccgaggatctggaaaatgccctgaaagcggtgatcaacgacaagagctacaaggagaacattatgagactttcgtcactgcacaaggatcgaccagtggagccgctcgatctggctgtcttttgggtggagttcgtgatgcgccacaagggagccccccacctgcggcctgcggcgcatgaccttacctggtaccagtatcactcgctggatgtgattggctttctgctggccgtcgtactgaccgtcgccttcatcactttcaagtgctgcgcatacggctacagaaagtgtctcggcaagaagggacgggtgaagaaggcacacaagtcgaaaacccac

SEQ ID NO: 9191 - DNA, 1599 bp, Artificial Sequence
  derived and/or modified sequence
atggctgtcgagtcacaaggtggaaggcccctggtgctggggctcctgctgtgtgtccttggcccggtggtcagtcatgcgggtaaaatcctcttaatacctgtcgatgggtctcattggttgagtatgttgggagccatccagcagctgcagcagaggggacacgaaatagtggtcctcgcccctgatgcaagtctgtatattagggacggcgccttctacactttaaagacctatcctgtgccgttccaaagagaggacgtgaaggagagtttcgtgtccctgggacataacgtgttcgagaacgactctttcctgcagagagtgatcaaaacttataaaaaaataaagaaagattccgccatgttactgagtggatgttctcatctccttcataacaaggaactgatggcaagccttgccgaatcttcttttgatgtgatgctgaccgatccatttttaccctgtagccctattgtggcccagtacctgagccttcctacagtctttttcttacacgccctaccgtgttctttggaatttgaggctacgcagtgcccaaatcccttctcttatgtgccccggccgctcagctctcactcagatcatatgacgtttctccagcgcgtaaaaaacatgttgatcgcgttctctcagaacttcctgtgcgacgtggtctacagtccatacgccactcttgccagcgagttcttacagagagaagtgacggtgcaggacctgctatcttctgcctccgtgtggctgttccggagcgactttgtaaaggattatcctaggcctatcatgcctaatatggtgtttgtcggcgggatcaactgtctccaccagaatcccctatcacaggaattcgaagcttatataaacgctagcggagagcatggcatcgtagttttcagccttggctccatggtttccgagatacctgaaaagaaagcgatggccatagcggacgccttagggaagattccacagactgtactttggcggtacactggaactcgtccaagcaaccttgcaaataataccatcctggtgaaatggcttccacagaacgacttgctgggtcatcccatgactagggcattcatcacccacgccggtagccacggcgtttacgagtccatatgtaacggagtacctatggtcatgatgccactctttggcgaccaaatggacaatgccaagcggatggagacgaagggtgcaggcgtaacactgaacgtactcgaaatgacctccgaggacctggagaatgccctgaaggctgttatcaatgataaatcttataaagaaaacatcatgcgcctttctagcctccacaaggacagacctgtggagccactggatcttgcagtcttctgggtcgaatttgtgatgcgccataaaggagctccacacttaagaccggccgcacacgacctcacatggtatcaataccactctctggatgtaataggattcctgctggccgttgtacttaccgtggcttttatcaccttcaaatgttgcgcctatggctaccgaaagtgtctcggaaagaaaggccgggttaagaaagcacacaaatccaagacccac

SEQ ID NO: 9192 - DNA, 1599 bp, Artificial Sequence
  derived and/or modified sequence
atggcagtggagagccaaggaggacgacctctcgtcctgggtctcctgctgtgcgtgctggggcccgtggtgtcccatgcgggaaagatcctgttgatccctgtagatggctcccactggttgagtatgcttggagctatacaacagctccaacagagggggcacgagatcgtggtcctggcgcctgacgcctctctatacattagggatggcgcattctatactctgaagacctacccagtgccctttcagagagaagacgtgaaagagtctttcgtttccctcgggcacaatgtgtttgaaaatgactcctttctgcagagagtaatcaaaacatataagaagattaaaaaagattccgccatgctgttgtccggctgttctcatcttcttcacaataaggagctgatggcctctctcgctgaatctagctttgatgttatgctaaccgacccattcctcccctgcagtccaattgtagctcaatacctgtcactgccaacagtgttcttcttgcacgcactgccatgtagcttggaatttgaggcaacacagtgtcccaatccattttcatacgtaccacgtcctctttcctcacactccgaccacatgaccttccttcaaagggtgaagaacatgctcattgcattctcacaaaattttttgtgcgacgtggtgtattctccatatgcaactttggcctctgagtttcttcagcgggaagttacggttcaggatctgttatcaagtgccagtgtttggctgttccggagcgattttgtaaaggattatccgcgcccaatcatgcctaatatggtttttgttggcggaataaattgtttgcaccagaaccctctgtcgcaggagttcgaggcttatatcaatgcttctggagagcatggcattgtcgtgttctcacttggcagcatggtgtctgagatcccagaaaaaaaagccatggccattgccgacgccttgggaaaaatcccacagacagtattatggcggtacacaggtacaagaccgtctaacctggccaataatactatcctggtcaagtggcttccccaaaacgatctgctgggccatcctatgacacgtgcattcataacgcacgccggctcacacggagtttacgagtccatatgcaacggtgtgccgatggtcatgatgcccctctttggcgatcagatggataatgccaagaggatggagaccaagggggctggggtcactctgaacgttctggagatgaccagcgaggacttggagaacgccctgaaggccgtgatcaacgataagtcctacaaggaaaatattatgagactgagcagcctgcataaagatcgaccagtggagcctctagatctagccgtcttttgggtggagttcgtaatgaggcacaagggggctccccacttgcggccagcagcacacgatcttacatggtatcagtatcactcactggacgtcatcgggtttctcttggccgttgtgctgaccgtggccttcattacttttaaatgctgtgcctatggctatagaaaatgtctgggaaaaaagggaagagtcaagaaggctcacaagtccaagacacat

SEQ ID NO: 9193 - DNA, 1599 bp, Artificial Sequence
  derived and/or modified sequence
atggccgttgaaagtcagggaggccgtcccctagtgctaggcctcctgctctgcgtgcttggcccagttgtgtctcacgccggaaaaatcctcctgattcccgtggacggatcccattggctgagcatgctgggggccatccagcagctacaacagcgtggacatgagattgtggtcctcgctcccgacgcaagcctgtacatacgagatggcgccttttacaccctgaagacctaccccgtcccttttcagagggaagatgtcaaggaatcattcgtgtcactcgggcataatgtgtttgaaaacgactcctttctccagagggtgatcaagacctataaaaagattaaaaaggattctgctatgctgttaagcggatgttcccatttgctccacaacaaggaactaatggctagtctggctgagagtagctttgatgttatgctcacagacccattcctgccttgtagtccaatagtcgcacagtacctgagtctgccaaccgtgttcttcttgcatgctttaccatgcagcctggagtttgaggccacccagtgccccaatcctttctcctacgtgccaaggcctctgagctcccattctgatcacatgaccttcctgcagagagtaaaaaatatgctcatcgcattcagtcagaattttttgtgcgacgtggtttatagcccatacgcaacactagccagcgagttcttacagagggaggttactgtgcaagatctcctgagtagcgcctctgtgtggctgtttcgcagcgacttcgtgaaggactatcctcgccctatcatgccaaacatggttttcgtgggcggtataaattgcctgcaccagaaccccctaagccaggaattcgaagcctacataaacgcctctggagagcatggcatcgtggttttcagtctcggaagtatggtctctgaaataccggaaaagaaagccatggcaattgcagatgccttaggcaagatcccccagactgtcctgtggcggtacaccggaacccgaccatcaaatctagccaataatacaatactggtgaagtggttaccacagaacgacttactcggccacccaatgacaagggcctttattactcacgctggctctcatggcgtctacgagtccatctgcaacggggttcctatggtcatgatgcccctatttggggatcagatggacaatgcaaagcgcatggagacaaagggtgccggggtgactctaaatgtgctggagatgaccagtgaagatttagaaaatgccctgaaggccgtgataaatgataagagctacaaagagaacatcatgcgtctcagcagcctgcacaaggaccggcctgtggagcccctggacctggctgtgttttgggttgagttcgttatgaggcacaaaggcgctcctcacctgaggcccgctgcccacgacctcacctggtaccaatatcacagcctggatgtgatcgggttcctactcgctgttgtgctcactgtggcctttattaccttcaagtgttgcgcctacggctatagaaagtgcctggggaagaagggacgggtaaaaaaagcacacaagagtaagacccac

SEQ ID NO: 9194 - DNA, 1599 bp, Artificial Sequence
  derived and/or modified sequence
atggcagtagaatcacagggaggaagacccctggtcttagggctcctcctatgtgttttaggtcccgtcgtctctcacgctggaaagatcttgcttattccagttgatggctcccactggctgagtatgctgggcgccatccagcaactgcagcagagaggacatgagatcgtggttcttgcaccggatgccagcctctacatccgcgacggagcattctacacccttaaaacgtatcccgtccccttccagagagaggatgtaaaagagagtttcgtttctctgggccacaacgtcttcgagaacgactcgttcctgcaaagagtcattaagacatataaaaagatcaaaaaggactcggcaatgctgctttcaggctgttctcatctgctgcataacaaagagctgatggcatctctagcggagtcctctttcgatgtaatgctaacagatcctttccttccatgttccccaattgttgctcaatacctcagtttgcccaccgtattcttccttcacgctctaccctgcagcttggaattcgaagccacccagtgtccaaatcctttctcctatgtgccgcgaccgctctcatctcatagcgaccatatgacatttctgcaacgcgtcaaaaatatgctaattgcattcagtcagaactttttgtgtgacgtggtttattcgccctatgctaccctagcctccgaattcctgcaaagggaagtcacagtgcaagacctccttagtagcgcctccgtgtggctgtttaggtcagactttgtgaaggattatcctcgcccaattatgccaaatatggtttttgtgggcggaatcaactgccttcaccagaatccattaagtcaggagttcgaggcctatatcaatgcttcaggggaacacggcatcgttgtgtttagcctaggctccatggtttcggagattcctgagaagaaagcaatggccatcgctgacgccctgggaaaaattccgcagaccgttctttggaggtataccggcacccggccctccaatttggcaaataatactattctcgttaagtggctcccccagaacgatctcctgggtcacccaatgaccagagcctttataacccacgcgggttcccacggagtgtacgaaagtatctgcaatggtgtaccaatggttatgatgccattgtttggagaccaaatggacaatgcaaaaagaatggagaccaagggtgctggcgtaaccctcaacgtcctggaaatgacatcagaggacctggaaaacgccctcaaagccgttattaatgacaaaagctacaaggagaacataatgcggctgtcctcgttacataaggatcgaccagtagaacctctcgacctggctgtcttttgggtagagttcgttatgcgacataaaggcgcccctcacttgagacctgcagcacacgacctgacttggtatcaatatcattcgctcgatgtcataggcttcctcttggcggtcgtgctgacggtggcgtttattacgttcaagtgttgcgcttacggataccgaaaatgtctcggaaaaaaaggccgggttaaaaaagcccataagtcaaagactcac

SEQ ID NO: 9195 - DNA, 1599 bp, Artificial Sequence
  derived and/or modified sequence
atggccgtggaatcccagggagggcgaccattggtcttgggtttgctgctgtgtgtcctgggaccagttgtctctcatgcgggtaaaatacttctgattcctgtggacgggagccactggctcagtatgctgggagctatccagcagctgcagcagcgagggcacgagatcgttgtcctcgcacccgacgctagcctttatatccgggatggcgccttttacactctgaaaacctatcctgtgcccttccagcgagaggatgtgaaagaatcgtttgtatctttgggtcacaatgtgttcgagaacgacagctttctgcaaagggttataaagacttataagaaaatcaagaaagactcagccatgctactgtccgggtgtagccacctgctgcacaataaggagctcatggcaagtctggcagagagtagctttgatgttatgttaacggaccctttcctcccatgttcccccattgtggcccagtacctgtctttgcccacggtcttctttttgcacgctcttccttgttcacttgaattcgaggccactcagtgccccaatccattctcctatgtcccccggcctttgtccagccattctgatcacatgaccttcctgcagagagtgaaaaatatgctgattgcgtttagtcagaactttctatgtgatgttgtgtactccccatatgctacactggccagcgagttcctgcagagggaggtgactgtgcaggacctcctgtcaagtgcatccgtctggctgtttagatccgacttcgtgaaggattatcctcgaccaatcatgcccaacatggtttttgtcgggggcatcaactgcttgcaccagaatcccctgtctcaggagttcgaggcctatataaatgcaagcggggagcacgggattgtggttttctcgcttggaagtatggtgtccgagattcccgaaaaaaaggcaatggctattgccgatgctctagggaaaataccccagactgtactctggcgatacacaggcactcgtccctctaacctagctaacaacacgatcttggtcaaatggctgccccaaaacgatcttctagggcacccgatgaccagagcattcatcacccatgccggttctcatggcgtgtatgagtccatctgcaacggagtcccaatggtgatgatgcctctgtttggggatcagatggacaatgccaaacgtatggagacaaaaggtgcgggggtgactctgaacgtgctggagatgacgtccgaagatctggaaaacgccctgaaggccgttataaatgacaagagttataaagaaaacattatgagactctccagcctgcataaagatagacccgtcgaacctttggacctagccgtcttctgggtggagtttgtgatgaggcacaagggcgctccacacctccgccctgccgcgcacgatttgacatggtatcaatatcatagtctagacgttatcggctttttactggccgtggtcctaaccgtagcgtttattacatttaagtgctgtgcctacggctatagaaaatgtttgggaaagaaaggtagggtgaagaaggctcacaagtctaagacccac

SEQ ID NO: 9196 - DNA, 1599 bp, Artificial Sequence
  derived and/or modified sequence
atggccgtggagtcccagggcggcagacctttagtgttgggcctgctgttatgcgtcctgggtccggtcgtttcccacgctggaaaaatcctgcttattccagtggatggctcacactggctgagcatgctgggcgcaatccagcaacttcagcagcgcgggcacgaaattgtagtactcgctccggatgcttccttgtacatccgcgacggggccttctatacactgaaaacttatccagtccccttccaacgcgaggacgtgaaggaatcttttgtcagccttggacacaatgtctttgagaatgattccttcctacagcgggttatcaaaacctataagaagataaaaaaggactcggccatgctgctctcagggtgttcacacctcctccacaacaaggagttgatggcgtctctcgcggagtcatcctttgacgtaatgttgacagaccctttcctaccctgctctcctatcgttgcgcagtacctgagtctgccaacggtcttcttcttgcatgccctgccatgcagcctggagtttgaggcaactcagtgccccaatccattttcatatgtcccaagacccctgagctcacatagtgaccacatgacgttcttacagcgagtgaaaaacatgctgatcgccttctcccagaattttctgtgcgacgtcgtctactctccctacgcaaccttggcgagtgagtttctgcaaagggaagtgacagttcaggatctgttgtccagcgcatccgtgtggttgtttcgctcagatttcgtgaaggactacccgcgtccgatcatgcccaacatggttttcgtgggcggcattaactgccttcaccaaaatcccctgagccaggaattcgaggcctatattaacgcaagcggggagcacggcattgtagtgttctcattgggatcgatggtgagcgaaatcccagaaaaaaaggctatggcaatcgcggacgcgttgggcaagatcccccaaactgtgctgtggcgttataccggtacccgaccctccaaccttgccaacaataccatcctggtgaagtggttgcctcagaacgatctgttggggcatccaatgacccgcgctttcatcacccacgccggatcacacggtgtatacgaaagcatctgtaacggtgtgcctatggtaatgatgcctctattcggcgaccagatggacaatgccaagcgtatggagacaaaaggagctggtgtgaccttaaacgtcttggagatgaccagtgaagacctggaaaatgcgttaaaggccgtgattaatgataagtcgtacaaagaaaacatcatgcgccttagcagcctgcacaaagaccggccagtagaaccactagacctcgccgttttttgggtggagtttgtgatgagacacaaaggtgcccctcacctgcgcccagccgcacacgatctgacttggtaccaataccactcgctagacgttattgggtttctcttagctgtcgtgctcacggtcgctttcatcacgtttaagtgctgcgcctacggttacagaaagtgtctgggcaagaagggtagagtgaagaaagcccacaagtcaaaaactcac

SEQ ID NO: 9197 - DNA, 1599 bp, Artificial Sequence
  derived and/or modified sequence
atggcagtcgaatcacaggggggtagaccccttgtgctcggcctgttgctttgtgtccttggaccagtggtgtcacatgcgggaaaaatccttcttattccggtggacggttcacattggctgtcgatgctgggcgccattcaacaactgcaacaaaggggccatgaaatagtcgtgctggcaccagatgcttccctgtacatcagagatggtgcgttttacacgctcaagacttatcctgtcccattccagagagaggacgtgaaggaatctttcgtctcgctcggtcataacgtgttcgagaacgatagctttcttcaaagagtgattaagacctacaagaaaatcaagaaggattccgcaatgctgctgtcaggatgttcacatctgctgcacaacaaagaactcatggcatctctggcagagagctcgtttgatgtgatgcttaccgaccctttcctgccgtgttcgcctatcgtcgcacagtacttgtcgctgcccactgtgtttttccttcatgcactgccatgctcgttggaattcgaggcgacccagtgcccaaacccttttagctacgtgccccgacccttgtcatcccattcggaccacatgaccttcctgcaacgggtgaagaatatgttgatcgcgttctcgcagaatttcctctgtgacgttgtctattcaccttacgcgacccttgcctccgagtttctccaaagagaggtgaccgtgcaagatctcctttcaagcgcctctgtctggctgttcagaagtgattttgtcaaagattaccccaggcccatcatgcctaatatggtattcgtcggaggcattaactgtctccaccagaatcccctttcacaagaattcgaagcgtacatcaatgccagcggcgagcatgggatcgtcgtctttagcctggggagcatggtgtcggagattccggagaagaaggcgatggcaatcgcagacgcactgggcaagatcccccaaaccgtgctctggaggtacactggaaccagaccttcaaaccttgcaaacaatacgatcctggtcaagtggcttccacagaacgatctccttggacatccgatgactcgcgccttcattactcatgcaggatcccatggagtctacgagtccatttgtaacggggtgccaatggttatgatgccgcttttcggagatcagatggacaatgcaaagcgaatggaaactaaaggtgccggggtgaccctgaacgtgcttgagatgacgagcgaggatcttgagaatgccctgaaggctgtcattaatgataagtcgtacaaggaaaacataatgcgactgagctccctgcacaaggatcgccccgtggaaccccttgacctggcagtgttttgggtcgaatttgtcatgcggcataagggggcgcctcatcttcggccagccgcacatgatcttacttggtaccagtaccattcgcttgacgtgattggctttctgttggcagtggtcctgaccgtggccttcatcacttttaagtgctgtgcatacggatatcgcaagtgtctgggaaaaaagggtcgggtcaaaaaggcacataagtccaagacccat

SEQ ID NO: 9198 - DNA, 1599 bp, Artificial Sequence
  derived and/or modified sequence
atggctgtggaatcgcaaggaggacgcccgctggtgcttggcctcctgctttgtgtcctgggaccagtggtgtcccatgcaggaaagatccttctgatcccagtcgacggatctcactggttgtcaatgctgggcgccatccagcaacttcaacagcgcggacatgaaatcgtggtgctggcgccggacgcttccctgtacatccgcgatggagcgttctacactcttaagacctatccagtcccgttccagagggaagatgtgaaggagtcgtttgtgtcattgggccacaacgtgttcgagaatgacagcttcctccaacgcgtgattaagacttacaaaaagatcaaaaaagattcggcaatgctgctctctggatgcagccaccttctgcataacaaggaattgatggcgtctcttgcggaatcgtcgtttgacgtgatgctgaccgatccttttctgccgtgcagcccgatcgtcgcccaatacttgtccctcccgaccgtgttcttcctgcatgcactcccatgcagcctggaattcgaggcaactcagtgcccgaatccgttttcctacgtgcctcggcctctttcgtcgcactcagatcacatgacctttctgcaacgcgtgaagaatatgctcatcgccttctcacagaacttcctgtgcgacgtggtgtactcaccctacgctactctggcctcagaattcctgcaaagagaagtcaccgttcaggacctgctgtcgtcggcgtccgtgtggctcttccgctcggatttcgtgaaggattaccctcgcccaatcatgccaaacatggtgttcgtcggaggaattaactgtttgcaccagaacccactgtcacaagaatttgaagcctacatcaacgcctccggcgaacacggcatcgtggtgttctccctcggctccatggtgtccgaaatcccggaaaagaaggcaatggcgatagcggacgccctgggaaagattccccagaccgtgctgtggcgatacaccggtactcggcccagcaacctggccaacaacactatcttggtgaagtggctgccacagaacgatctcctcggacacccgatgacgcgggccttcatcactcacgctggatcgcacggagtgtacgaaagcatctgcaatggagtgccgatggtgatgatgcccctctttggcgaccaaatggacaatgcgaaacggatggaaaccaaaggcgctggtgtcactctgaacgtgctggaaatgacttcggaagatctggaaaatgccctcaaggctgtgattaatgacaagtcttacaaggagaacatcatgcgcctcagctccctgcataaagatagaccggtcgagcccttggatctggcagtgttctgggtggagttcgtgatgcgccataagggagccccccacctcaggccggccgcacacgatctcacctggtaccagtaccatagcttggacgtgatcggcttccttcttgccgtggtgctgaccgtggctttcatcacctttaagtgttgtgcctacgggtaccgcaaatgcttgggaaagaagggaagagtgaagaaggcccacaagtcaaagacgcac

SEQ ID NO: 9199 - DNA, 1599 bp, Artificial Sequence
  derived and/or modified sequence
atggccgtggaatcccagggagggcgtcctctcgtgctcggactccttctgtgtgtcctgggcccggtggtgtcacacgcaggtaaaatcctgctgatcccagttgatgggtcccattggctgtcgatgctcggagccatccagcagctccaacaaagaggacatgaaatcgtggtgctggcccccgacgcctctctctacattagggacggcgccttctacactctgaaaacctacccggtgccgtttcagcgcgaagatgtgaaggagagctttgtgtccctcgggcacaacgtgttcgagaacgactcgttcctccaacgggtcatcaaaacctacaagaagatcaagaaggacagtgccatgctccttagcggctgcagccacctcttgcacaataaggagctcatggcctctctggccgagtcatcctttgatgtgatgttgaccgacccttttctgccgtgctccccgatcgtggcgcagtacctgtccctcccaactgtgttcttcttgcatgccctgccgtgtagcctcgaattcgaagccacccagtgcccgaaccctttctcgtacgtgcctcgtccgctgtcctcccacagtgatcacatgactttcctgcagcgcgtgaagaatatgctgatcgcgttctcacaaaacttcctgtgcgatgtggtgtattcaccatacgcaactctcgcatcggagtttctgcaaagggaggtgaccgttcaggatctgctctcatccgcgtcagtttggctcttcagatctgatttcgtgaaagactatccgcgcccgatcatgccgaacatggttttcgtcggaggtatcaactgcctgcatcaaaaccccctgagccaggagtttgaggcatacatcaatgcctcaggcgagcacggaatcgtcgtattctccctcggatccatggtgtccgaaatccctgagaagaaggccatggcaatcgccgacgctctcggaaaaatcccgcaaaccgtcctgtggagatacaccggaacgaggccttccaacttggccaataacactattctggtcaaatggctgccccagaacgacctgttggggcaccccatgactcgggcgttcatcactcacgcgggatcccacggtgtctacgagtcaatctgtaatggagtcccgatggtgatgatgccgcttttcggtgaccagatggataacgcaaagcgcatggaaacgaaaggagccggcgtgactttgaacgtgctcgagatgacgtcggaagatttggaaaatgccctgaaggctgtgatcaatgacaagtcctacaaggaaaacataatgaggctgtcgagcctgcacaaggatcggcctgtggaaccgctggacctcgcggtgttttgggttgaattcgtcatgcgccataagggcgctccacacctgaggcctgcggcacatgacttgacgtggtaccagtaccatagcctcgacgtcattgggtttctgcttgctgtggtgctgaccgtggcattcattacttttaagtgctgcgcctacggatacaggaaatgcctcgggaagaagggacgcgtgaagaaggcgcacaagtcaaagacccat

SEQ ID NO: 9200 - DNA, 1599 bp, Artificial Sequence
  derived and/or modified sequence
atggctgtcgaatcgcaggggggtcgtcctctggtgcttggccttctgctgtgtgtgctcggcccggtggtcagccacgccgggaagatccttcttatccctgtggatggaagccattggcttagcatgcttggagccattcaacagctccaacagcgggggcacgagatagtcgtgctggctcctgatgcctcattgtacattcgcgacggcgccttttacacccttaagacgtacccagtgccgttccaaagagaggacgtgaaagaatcatttgttagcctcgggcacaacgtgtttgaaaatgattcctttttgcagcgcgtgataaagacctacaagaagattaagaaagattccgcgatgctgctgtccggatgttcacacctgcttcataacaaggagttgatggcaagcctcgcagagagctcgtttgacgtgatgctcactgatccctttcttccatgttcccctattgtggcacagtacctttcgcttccaactgtctttttcttgcacgcactcccctgttcactcgaatttgaagcaacgcagtgcccaaaccccttctcatatgtccctcgacccctgagcagccattccgaccatatgactttccttcaaagagtgaagaacatgcttatagcatttagccaaaacttcctttgtgatgtcgtgtactcaccatacgcaactcttgcatcggaatttctccagagagaagtcactgtgcaagatctcttgtctagcgcaagtgtgtggcttttcagatccgacttcgtcaaagattacccgcgtcccattatgccgaacatggtgttcgtgggtggtatcaactgccttcaccaaaaccccctgtcgcaagaattcgaagcatacattaacgctagtggagaacatggtatcgtggtgttttccctggggtcgatggtcagcgaaattcctgagaagaaagcaatggcaatagcggacgcacttgggaaaattccacagaccgttctgtggagatacaccggcacccggccctctaatctcgcgaacaataccattctcgtcaaatggcttccacaaaatgacctgctcggtcatcctatgacccgggcatttatcactcatgcaggttcgcatggagtgtacgagagcatatgcaacggagtgcctatggtgatgatgcctctgttcggcgatcagatggataatgcgaagcgcatggagactaagggggcaggggtcacccttaacgtgctcgaaatgacctccgaggatctcgaaaatgcactgaaagcagtcataaacgacaagagctacaaggagaacataatgaggctttcgtcactgcataaggaccgcccagtggagcctttggacctcgccgtgttctgggttgaatttgtaatgagacacaagggagcccctcacctgaggccagccgctcatgatcttacttggtaccagtatcactcgcttgacgtgattgggtttcttctcgcagtcgtgctgacggtggctttcattacctttaagtgctgtgcctatggttaccgtaaatgcttgggtaaaaagggtagagtcaagaaagcacacaaatctaagacgcac

SEQ ID NO: 9201 - DNA, 1599 bp, Artificial Sequence
  derived and/or modified sequence
atggctgtggaatcccagggaggacggcccctggtgctcgggctcctgctttgcgtcctcgggcctgttgtaagtcatgctgggaaaatactcctgatccctgtcgatgggtctcactggctctccatgctgggggcaatacagcagcttcaacagaggggacatgaaatcgtggtgctggcacctgatgcctcactctatatcagggatggagctttctacacgttgaagacatatccagtacccttccagcgcgaagatgtgaaagaatcatttgtctccctaggacacaatgttttcgagaatgattcattcttgcagagagtgatcaaaacatacaaaaaaattaagaaagattctgctatgctactctctggatgtagtcatctgctccacaacaaagaactcatggcctcccttgccgaaagtagtttcgatgtgatgttaacagatccatttctaccctgttccccaatagtggcccagtatctgtcactaccaactgtcttctttcttcatgcactcccatgtagtttggagttcgaagccacacagtgtcccaacccattttcctatgttccccgaccactttcctctcattctgatcatatgactttcctccagagggttaaaaatatgcttatcgctttttcccagaacttcctgtgtgatgtcgtttactcaccctatgctactctcgcttcagaattcctccagcgggaagtgacagtgcaggatctgctgtcaagtgcttctgtatggctgtttaggtctgatttcgtgaaagattatccccgccctataatgccaaacatggtgtttgtgggaggaattaactgccttcatcagaaccctctttctcaggaattcgaagcctacatcaatgcctctggggaacacggaatagtcgttttcagtctcggatctatggtaagtgaaatacccgaaaaaaaagcgatggctatagccgatgctctcgggaaaatccctcagacagttctgtggcgatatacagggactagaccatccaatttagcaaacaatacaatccttgtgaagtggctccctcagaatgatctgctaggacatcctatgactcgcgcttttatcacacatgccggatcacatggggtatatgagagtatctgtaatggggttcccatggttatgatgcccctgttcggagatcagatggataatgctaaacggatggagacaaaaggggcaggggttactcttaatgttctcgaaatgacatcagaagatctagaaaatgcgctgaaagccgtcatcaatgataaatcatataaagaaaatataatgcggctatcatctctccataaagatcggcctgtggaaccattagatctcgctgtattttgggtggaattcgttatgcgacataaaggggcacctcacctacggcctgcggctcacgatctcacatggtatcaatatcattccttagacgttatcggatttctgctggccgtcgttctaacagtcgctttcatcactttcaaatgttgcgcttatgggtaccggaaatgcctggggaaaaaagggagggtaaaaaaagcccacaagtctaaaactcac

SEQ ID NO: 9202 - DNA, 1599 bp, Artificial Sequence
  derived and/or modified sequence
atggcagtggagtcgcaaggtggacgacctctggtcctggggttgctgctgtgtgtccttggtcctgtcgtgagtcatgccggaaagattctgctgattcctgtggatggtagccattggctttccatgctgggagcaatccagcaattgcaacaaagaggtcatgaaatagtggtgctggcccccgacgcatccctctacatccgcgatggtgcattctacactcttaagacctaccccgtgccgtttcagagggaagatgtcaaagagtcgtttgtgagccttggtcataatgtctttgagaacgatagtttcctccagagagtcattaagacctacaagaagattaagaaggactccgcaatgctgctgagcggatgttcccatctgctgcataacaaagaacttatggccagcctggccgagtcgtcctttgatgtgatgctgaccgatccatttcttccgtgctcacctattgtggctcaatatctctcccttcctactgtcttttttctccacgccctgccatgctccctcgaatttgaagcaacgcaatgtcctaaccccttttcatacgtgccacggccactgagctcgcatagcgaccatatgacttttcttcaacgggtcaagaatatgctgattgcattttcgcagaactttctctgtgacgtggtctactcgccatacgcaactctggcatccgaattcttgcaaagagaggtgaccgtgcaagacctgctcagctcggcctcggtgtggttgtttcgctcagactttgtgaaagattaccccagaccaattatgcctaacatggtctttgtcggagggatcaattgtctgcaccagaatccactctcgcaggaatttgaagcctacatcaacgcctccggggaacacggaatcgtggtgttttccctcggtagcatggtgtctgagataccggagaagaaggccatggccattgccgacgcactgggaaagattcctcaaactgtgctctggcgatatactggtactagacctagcaatcttgcaaacaacaccatcttggtcaagtggctcccacagaatgatcttctcggacatcctatgaccagggcattcattacccacgccggctcccatggcgtgtatgagagcatttgcaacggtgtgccaatggtgatgatgcctctgttcggtgatcaaatggataacgcaaagaggatggagactaaaggagcaggggttactcttaatgtccttgaaatgacctcagaggaccttgagaatgcgcttaaggcagtcatcaacgataaatcatacaaggaaaacattatgcggctctcgtcgcttcataaagaccgcccagtggaaccacttgatctcgctgtgttttgggtggaatttgtgatgagacataagggggcaccgcacctgcgccccgcggcacatgatctgacttggtatcagtatcatagccttgatgtgattggctttcttcttgccgtggtcctgaccgtggctttcataaccttcaagtgttgcgcatacggataccggaaatgtctgggcaagaagggtagagtgaagaaggcacataaaagcaagacccat

SEQ ID NO: 9203 - DNA, 1599 bp, Artificial Sequence
  derived and/or modified sequence
atggctgtggaatctcagggaggaaggccattggtgctggggctgctcttgtgcgtgttggggcccgtggtatctcacgcgggaaaaatactgctaattcccgtcgatggaagccactggttgtctatgctgggcgctatccagcagcttcagcagagagggcacgaaattgtggtactggcacccgacgccagcttatatattcgagacggggcgttttacaccctgaagacttatcctgttcctttccagcgtgaggacgtgaaggagtctttcgtttccttgggccataacgtgttcgagaacgacagctttctgcagagggtgattaagacttacaaaaaaattaaaaaagatagcgctatgcttctgtctggatgcagtcacctgctgcacaacaaagaactgatggccagccttgccgaaagctcttttgatgttatgctgacagacccatttttaccatgtagtccaatcgtggcacaatatctctcattgcctactgtgtttttcctgcacgctctgccatgttccctggagttcgaggcaacgcagtgcccaaacccattctcgtacgtccctcggcccttgtcatcccattcagatcatatgactttcctacagcgcgtcaaaaacatgctcattgccttttcgcagaatttcttgtgtgatgtggtgtactcaccgtatgcgactcttgcaagcgagttcctacagcgggaggtaaccgtgcaggacttgcttagctctgcttccgtatggctgtttaggtcagacttcgtgaaagattatccccggccaataatgccaaatatggtgttcgtgggcggtatcaactgcctccaccaaaacccgctgtctcaggaattcgaagcgtacatcaatgcatcaggggagcacgggatcgtggtgttcagcctaggttcaatggttagcgaaatccccgaaaaaaaagctatggcgatagctgacgcactgggaaagatacctcagacagtgctctggaggtataccggcactcgcccgtctaatctggccaacaacacaatcctggtcaagtggctccctcaaaatgatctactgggccaccccatgacgcgcgccttcatcacccatgctggctcccatggcgtatacgagtccatctgtaatggagttcctatggtcatgatgccactgtttggagaccagatggataatgctaagaggatggagactaaaggagccggagttaccctgaacgtgctggaaatgacaagtgaggacctggaaaatgcactcaaagccgtgatcaatgataagtcctacaaagagaacatcatgcgcttgtcatccctgcacaaagacagacctgtggagcccctcgacctcgcggtgttctgggtagagttcgttatgcggcataagggggcccctcatctccggccagccgcccacgatctgacatggtaccagtaccattctctggatgtaatcggctttctcctggctgtcgttttgacagtggcattcatcacgttcaagtgctgcgcctatggctaccggaagtgcttagggaagaaaggacgggtgaagaaggcacacaaatccaaaacacac

SEQ ID NO: 9204 - DNA, 1599 bp, Artificial Sequence
  derived and/or modified sequence
atggccgtcgaatcccaaggggggaggccgcttgtcctgggtttgctcctctgcgtgctgggaccagtggtgtcccacgccggtaagattctgcttattccagttgatggctcacattggctttctatgctgggagcaattcagcaacttcagcagagaggacatgagattgtcgtgcttgcacctgacgcctctctgtacatcagagatggggcattttacactctgaaaacctaccctgtgccttttcaaagagaggatgtcaaagaatcatttgtgtcactgggtcacaatgtctttgaaaacgattcgtttcttcaacgggtgattaagacctacaagaagataaagaaggactcggcaatgctcctctccggttgttcgcatctgcttcacaacaaagaactgatggcgtcccttgccgaatcatcctttgatgtgatgcttaccgatcctttcctgccttgttcaccaatcgtcgcccaatacctttcccttccaactgtgttttttctgcatgctctcccatgctctttggaattcgaggccactcagtgcccaaacccattcagctacgtcccaaggcctctgtcatcgcatagcgatcacatgaccttcctgcaacgcgtgaaaaacatgcttattgcattttcacaaaactttctgtgtgacgtggtctactcgccttacgcaacgcttgcttcggagtttctgcaacgagaagtgactgtgcaagatttgctgagctccgcctccgtctggctgtttcgatccgattttgtgaaggactacccccggccaatcatgcctaacatggtgttcgtggggggcattaactgtctccatcagaatccattgtcccaggaattcgaagcgtacatcaatgcaagcggggagcatggtattgtggtgttttcacttggaagcatggtgtccgaaatccccgaaaagaaagcgatggcaattgcggacgcacttgggaaaattccccagactgtgctttggcggtacaccggaacgcgaccaagcaacttggccaacaataccattctggtgaagtggttgcctcagaacgacctccttggccacccgatgactagggcgttcataactcatgcagggtcgcatggcgtttacgaaagcatctgtaatggagtccctatggtgatgatgccactcttcggtgatcaaatggacaacgcaaaacgtatggaaaccaagggagccggcgtgaccctgaacgtccttgaaatgacttcggaggaccttgagaacgctcttaaggccgttatcaacgacaagtcctacaaggaaaacattatgagactgtcctccctgcacaaggaccggcctgtcgagccacttgatctggccgtgttttgggtggaatttgtgatgcgtcacaaaggtgcaccgcaccttcgtccagcagcgcatgaccttacctggtaccaataccatagcctcgatgtgattggcttcctgctcgctgtggtccttaccgtcgctttcatcacctttaagtgttgtgcttatggttaccgcaaatgtctgggaaagaaaggacgtgtgaaaaaggcacataagtccaagacccat

SEQ ID NO: 9205 - DNA, 1599 bp, Artificial Sequence
  derived and/or modified sequence
atggctgtggaaagccaaggtggtaggcccctggtgctaggcctgctcttatgcgtcctagggcccgttgtgtctcacgccggcaagattctgctgattccagtagacggctcacactggctatcaatgctgggggccattcagcagctgcagcaaagagggcacgagatcgtggttttggccccggatgcatcattatacattcgcgacggcgctttttacaccctgaagacatacccggtgccgttccagagagaagatgttaaagagtcttttgtgtcactggggcataacgtcttcgaaaacgatagttttctgcagcgggtcatcaagacgtataagaagataaagaaggatagcgccatgctcctatctgggtgtagccacctgttgcataacaaggagctgatggcttcccttgccgagagcagcttcgacgtgatgctgacagatccattcctcccatgcagtcctatcgttgcccagtatttatcgttgccgactgtttttttcctccatgctctgccttgttctctggagtttgaagccacccagtgtcctaacccattttcctacgtgccccgtccccttagctctcacagcgaccatatgactttcctgcagcgggtgaagaacatgctcatagccttttctcagaatttcttgtgtgatgtcgtgtattctccctatgctaccttggctagcgagtttctccagagggaggtgaccgtacaggatctgttgagtagcgctagcgtttggttattcagatccgacttcgttaaggattatccaagacctatcatgcctaacatggtctttgtcgggggcattaactgcctgcatcaaaatccgctgagccaggagttcgaggcttatattaacgcctctggagaacacggcatcgtggttttctcacttgggtctatggtttcagagatcccggagaaaaaggctatggcaatcgcggatgctttgggcaagatcccccagactgtcctgtggcggtataccgggacgcgaccctctaacctggctaataataccatattagtgaaatggctcccccagaatgatctgctgggtcacccaatgactcgcgcctttatcacccacgccgggtcccacggagtttacgaatcaatttgcaacggggtgcccatggttatgatgcccctattcggtgatcagatggataatgctaagaggatggagactaaaggagctggtgtcacgctgaatgtcctcgagatgaccagcgaggatctggaaaacgccctgaaggcagtcatcaatgacaaatcctacaaggaaaatatcatgagacttagttcattacacaaagatcggccagttgagccactggatctggcagttttctgggtggaattcgtcatgagacacaaaggagcaccacacttaagacccgcagcccatgacttgacctggtaccagtatcatagcctggacgtcatagggtttctgctagccgtggttctcactgtggcattcattacctttaagtgttgcgcttatggctatcgcaagtgcttgggaaaaaagggtcgggtcaagaaagcccataagtctaagacgcat

SEQ ID NO: 9206 - DNA, 1599 bp, Artificial Sequence
  derived and/or modified sequence
atggccgtggagagccaaggcggaagacctctcgttcttgggcttctgttgtgtgtgctgggacccgtggtatctcacgccggcaaaatcctgctaatccctgtggacggctctcactggctgagtatgctgggcgcaatacagcagttacagcagcgcggccatgaaattgtggtactagctccggatgcgtccttatacataagggatggcgctttttacacgctcaaaacatatcccgtgccttttcaaagagaggacgtgaaagagtcatttgtgagcttgggtcataatgtgttcgagaatgattcttttcttcaacgagtgatcaaaacctacaaaaaaatcaagaaggacagcgctatgctcctctccggttgctcgcaccttctacacaataaggaacttatggccagtctcgctgaatctagcttcgatgtcatgctcaccgaccccttccttccctgtagccccattgtcgcccagtacctgagcctccccacagtatttttcctgcacgctctgccctgttcgcttgagttcgaagccacccagtgtccaaacccctttagttacgttccacgacctctttcatcccactccgaccacatgacctttctacagcgtgtcaaaaacatgctcatagccttttcccaaaatttcttgtgtgacgtggtgtactctccttatgcgaccctggcttctgaattcctccaaagggaagttaccgttcaggacctgctatcatccgccagcgtgtggttgttcaggtctgacttcgttaaagactatccaaggcctattatgcccaacatggtctttgtgggcggaatcaactgtctccatcagaacccactgtctcaggaatttgaggcttatatcaacgctagcggtgagcacggtattgtggttttttccctgggcagcatggtgtccgagatcccggaaaaaaaagcaatggccatcgccgatgctctcgggaaaatcccccagaccgtcctttggcggtacacgggtactcggccctccaatctggcaaacaataccattctggtcaagtggctcccgcaaaatgatctcctcggtcaccccatgacgcgcgccttcattacacacgctggctctcatggcgtgtatgaatcaatctgtaacggcgtcccaatggtgatgatgccactttttggcgaccagatggacaatgcaaagcgtatggagacgaagggtgcaggggtgacgctcaatgtgctggagatgacctctgaggatctagagaatgccttaaaggccgtaattaacgataagagctacaaggaaaatatcatgcgccttagctctctgcacaaggatcgaccagtggagcccctggacctcgccgtgttttgggtggagttcgtgatgcggcacaagggagccccacacctgaggcctgccgcccatgacctgacgtggtatcagtaccatagcctcgatgtcattggtttccttttggccgtggtgctgaccgtcgcattcatcacgttcaaatgctgtgcatacggctataggaagtgccttggaaagaaaggcagggtcaaaaaagctcataagagtaaaacacac

SEQ ID NO: 9207 - DNA, 1599 bp, Artificial Sequence
  derived and/or modified sequence
atggctgtggagtcgcaaggtggacggccgctggtgttgggactcctcctctgcgttctgggaccggtggtgtctcacgctggtaagatccttttgattccggtggacgggagccactggctgtcgatgttgggagcgatccagcagcttcaacagagaggacacgagattgtggtgctggcgcccgacgcgtcactgtacatccgggacggagctttctacactctcaagacctaccctgtgcctttccagagagaagatgtgaaggaaagtttcgtgtccctggggcacaacgtgtttgagaacgatagttttctgcagcgcgtcatcaaaacctataagaagatcaagaaggattcggcaatgctgttgagcggatgcagccatctgctgcacaataaggagctcatggctagcctggctgaatcgtccttcgacgtcatgctcaccgaccccttcctgccgtgctccccgatcgtggcccaatacctgagtctcccgactgtgttcttcctgcacgccttgccgtgctcgctggagttcgaggccacgcagtgcccaaatccgttttcctacgtgccccgcccgctgtcgtcccattccgaccatatgacgtttctccaacgcgtcaaaaacatgcttatcgccttctcacagaatttcctctgcgatgttgtctactcgccgtacgcgaccttggcctcagaattcctccagcgggaagtgacggtgcaagacctgctgagctccgccagcgtctggctttttaggtccgacttcgtgaaggactatccgaggccaatcatgccaaacatggtgttcgtgggcggcatcaactgcctccatcagaacccgttgtcgcaggaatttgaggcgtatatcaatgctagcggagaacacggcatcgtggtgttctccctgggctccatggtgtcagagattcccgagaagaaagccatggcaatcgcggacgcattgggaaagattccgcaaacggtgctttggcgatacaccggaactcggcctagcaacctcgcaaataacaccatcctcgtcaagtggctgccgcaaaatgatctgctggggcatcctatgacccgcgcttttatcactcacgccggatcccacggagtgtacgagtcgatttgcaatggagtgcccatggttatgatgccgctgttcggcgaccaaatggataacgccaagcggatggagactaaaggagcaggagtcaccctgaatgtgttggaaatgacttccgaagatctggagaatgctctgaaggcagtgatcaacgacaagtcctacaaagaaaacatcatgcgcctctccagcctgcacaaggatcgcccggtggaaccgctggacctcgccgtcttttgggtcgaattcgtgatgagacacaagggtgccccacatctgcgaccggcggcgcatgacctgacctggtaccaataccacagcctcgacgtgatcggattcctgctcgccgtggtgctcactgtggcgttcatcactttcaaatgctgcgcctacggatatcggaagtgcctggggaagaagggtcgcgtcaagaaagcccacaaatcgaaaacccat

SEQ ID NO: 9208 - DNA, 1599 bp, Artificial Sequence
  derived and/or modified sequence
atggctgtggagtcccagggaggtcgaccgctggtcttaggtctcttgctttgcgttttgggtccagtagtctcccatgctggaaagattttgttaatacctgttgatggatctcactggttatctatgctaggagctattcaacaactgcaacagcgaggacatgaaattgtagttttagctccagatgcttccttatatattagagacggagctttttacacccttaagacttaccccgttccgtttcagcgtgaagacgttaaggagtcattcgtttcattgggccataatgtttttgaaaatgattcgttcctgcaacgcgttatcaaaacatacaaaaagattaaaaaagattcagccatgctactgtcgggatgctctcatctcttgcataataaggaattgatggcgagtctagcagaaagttcctttgatgtcatgcttacagatccattccttccatgctcgcccatcgtagctcaatatctttcactcccaactgtttttttcttgcacgcattaccatgttctcttgagttcgaggccacacagtgcccgaatccttttagctatgtgccccgaccgttgtcatcacactccgaccatatgacctttcttcagcgtgttaaaaacatgcttattgccttcagtcagaatttcctttgtgacgtggtatattcgccctacgcaactcttgcttcagagtttctacaaagagaagtcactgttcaggatttacttagttcggcttccgtttggctcttccgctctgatttcgtgaaagattatcctcgacccattatgcctaatatggtttttgtcggaggcataaactgtcttcaccaaaatccgctatcgcaagagtttgaagcatatattaatgcttcaggagaacatggcatagtggttttctccctcggatcaatggtatcagaaattcccgaaaaaaaagcaatggcgattgcagatgcccttggaaaaatcccccagactgttctttggcgatacacagggactagaccgagtaatctcgccaacaacacaattctcgttaaatggctgccacagaatgatttgctaggtcatccgatgaccagggcattcattacgcacgctggatcgcatggagtgtacgagagtatctgcaatggtgttccaatggtaatgatgccactttttggcgatcaaatggataatgccaagcgtatggaaacgaagggagctggggttactttgaacgtgctggaaatgacatccgaagaccttgagaacgctctcaaggcagttatcaatgataaaagctataaagaaaatatcatgcgcttgtcttcacttcacaaagatagacctgttgagccgctcgaccttgctgtattctgggttgaatttgtgatgcgacacaaaggcgcaccacatttacgtccagcagctcacgatcttacgtggtaccaatatcacagtcttgatgtcatcggattccttttggcggtagttttgacagttgctttcattacgtttaagtgttgtgcgtacggatacagaaaatgtttgggaaagaagggtagagttaaaaaagctcataagtcaaaaacccac

SEQ ID NO: 9209 - DNA, 1599 bp, Artificial Sequence
  derived and/or modified sequence
atggccgtggaatctcagggaggacgcccactggtcctgggcctgttgttgtgcgtgctcggccctgtggtgtcccacgcgggcaaaattctcctgatcccggtggacggctcccactggctcagcatgctgggggcgatccagcaactgcagcagcgcggacacgagatcgtcgtgctcgctcctgacgcgtcgctgtacatacgtgacggggcgttttacactctgaaaacttacccggtcccgttccagcgggaggacgtcaaggaatcattcgtctcactcggacacaacgtgttcgagaatgactcgttcctccaacgggtcatcaagacctataagaagattaagaaagacagcgccatgctcctgtctggttgttcccacctgctccacaacaaagaactgatggcctccctggccgagagctcatttgacgtgatgctcaccgacccattcctgccttgttccccgatcgttgctcagtacctgtcgcttcccactgtgttcttcctccatgccctcccgtgcagcctcgagttcgaagctactcaatgcccgaacccattcagctacgtgccaagaccgctttcatcgcattcagatcacatgacgttcttgcagcgggtgaagaatatgttgatcgctttctcacaaaactttttgtgtgacgtggtgtactccccgtacgcaactctggccagtgagtttctgcagcgtgaagtgacggtgcaggacctgctttcgtcagcttcggtgtggctgttccgctcagacttcgtgaaagattaccctagaccgatcatgccgaatatggtctttgtcggtgggatcaactgcttgcatcaaaatcctctgtcacaggagttcgaggcctacatcaacgcgtccggagaacatgggatcgtggtgttttcactgggaagcatggtgagcgagatcccagaaaagaaggctatggcgatcgcggacgcgctgggaaagatcccgcaaaccgtgctgtggaggtacaccggaactaggccgtcgaaccttgcaaataacacgatcctggtcaagtggctgccgcaaaatgatctcctgggccaccctatgactcgggccttcattacccatgccggtagccacggagtctatgagtccatctgcaacggagtgccaatggtgatgatgccgctgttcggagatcagatggacaatgccaaaagaatggaaaccaagggggcaggtgtgacgctgaacgtcctcgaaatgacctccgaggacctcgagaacgctctgaaggctgtgatcaatgacaaatcgtacaaggaaaacattatgcgactgtcctccctccacaaggatcgccctgtggaaccactcgatcttgcagtattctgggtggaattcgtgatgcgccataagggggcgccgcacctgcggcccgctgcacatgatctgacttggtaccagtaccatagcctggatgtgatcggattcctcctcgcggtggttctgactgtggcgttcatcacttttaagtgctgcgcctacggataccgcaagtgcctggggaagaaagggcgtgtgaaaaaggctcataagtcgaaaacgcat

SEQ ID NO: 9210 - DNA, 1599 bp, Artificial Sequence
  derived and/or modified sequence
atggcagtcgaatcacaaggagggcggcctttggtgctgggtctgctgctgtgtgtcctcggcccagtcgtgtcacatgcaggcaagatacttcttatccctgtggatgggtcccattggctgtcgatgcttggagcaattcaacaacttcagcagcgggggcatgagatcgtggtgctggcccctgacgcatccctgtacatcagggatggagcgttctacaccctgaaaacgtaccctgtgcccttccagagggaggacgtgaaggagtcattcgtgtccctgggacataacgtgtttgagaacgactcctttcttcagagagtgataaagacttacaagaagatcaagaaggattcggcaatgctgctctcgggatgcagccatcttctgcataacaaagaattgatggcctcactggcagagtccagctttgatgtgatgcttaccgatccattcctgccctgtagccctattgtggcacaataccttagtctgcccactgtgttctttttgcatgcacttccttgttctctcgagttcgaggcaactcaatgcccgaacccattcagctacgtgccacggccacttagctcccattcagatcatatgacttttctgcagcgggttaagaatatgctcattgcattttcgcaaaactttctctgtgatgtggtgtactccccatacgccacccttgcatccgaatttctccagagggaagtgaccgtgcaggacctcctgagcagcgcatccgtgtggctttttagatcagatttcgtcaaagactaccctaggcctattatgcctaatatggtgtttgtgggtggtatcaactgcttgcaccaaaatccactctcccaagaattcgaagcatacattaatgcatcgggtgaacatggaatcgtggtgttcagcttgggaagcatggtgtcagaaattcccgagaagaaagcaatggcaatagcggacgcacttggcaagattccccagactgtcctgtggcgttacactgggaccaggccaagcaacctcgccaacaacaccattcttgtgaagtggctgccgcagaacgacctcctcggtcatcctatgactcgagcattcataacgcatgccggctctcatggcgtgtatgaatcgatttgcaacggtgtcccaatggtcatgatgcccttgttcggcgatcaaatggacaatgcgaaacggatggaaactaagggagccggggtgacccttaatgtgctcgaaatgacttcggaagatcttgagaacgcacttaaggccgtcattaatgataagagctataaagaaaacattatgaggctgagctcactccacaaggatcgtccagtcgaaccactggacctggcagtgttctgggtcgaatttgtcatgcgtcataagggcgcacctcatttgaggccagcggctcatgaccttacctggtatcaataccattccttggatgtgattggctttctccttgccgtcgtgctcaccgtggcgtttatcacctttaagtgctgtgcctacggttacagaaaatgtctgggaaagaaaggccgcgtgaagaaggcgcacaaaagcaagacccat

SEQ ID NO: 9211 - DNA, 1599 bp, Artificial Sequence
  derived and/or modified sequence
atggccgttgagtcccagggaggtcgtccactggttctgggactgctcttatgcgttttgggacctgtggtgtcacacgccggtaagatcctgcttattcctgtcgatggttcccattggctcagcatgctgggagccattcagcagctgcaacagcgggggcatgagatcgtagtccttgcgccagatgcctctctctacatcagagacggagccttctatactctaaaaacctaccccgtcccctttcagagagaggatgtgaaggaatctttcgtgtccctggggcataacgtcttcgagaacgactcctttctccagcgtgtgatcaagacctacaaaaagatcaaaaaagacagcgccatgctgctgtccggatgctcgcatttgctgcataacaaggagctgatggctagcctggctgagtcctcctttgacgttatgttgacagatcccttcctcccatgtagtccaatcgtcgctcagtatctgagcctgcctacggtgtttttcttgcatgctctgccatgctcattagagttcgaagcaacccagtgccctaatccttttagctatgtgccaagacctctttcgtctcactcagatcacatgacgtttttgcagagagtgaagaacatgctgatcgcctttagtcagaacttcctctgtgatgtggtgtactccccctatgcaaccctggctagcgaattcctccagcgcgaggtgaccgtgcaggatctcttaagtagcgcatcggtctggctgttcaggtctgacttcgttaaggactaccctcgccccatcatgcccaatatggtgttcgtgggtggaatcaactgtctgcaccagaatcctttgtctcaagaattcgaagcttacatcaacgcgagtggcgagcacggaatcgtggtcttctcactgggtagcatggtaagtgaaatccctgagaagaaggcgatggccatcgctgatgcactaggaaagatcccccagacagtcctgtggaggtacacggggacacgcccctctaatctggctaacaacaccatattggtgaagtggctcccccagaacgacctgctgggtcaccctatgacccgtgctttcatcacccacgccgggtcccatggggtgtatgagagcatctgtaacggtgtgccaatggtgatgatgcccctgtttggggatcaaatggataatgccaaaaggatggagactaagggcgctggcgtaacactgaacgtgctggagatgactagcgaggatttagagaacgcactaaaggccgtcattaatgacaagtcttataaagaaaacataatgaggctatcaagccttcacaaggatcgtccggtagaacccctggaccttgccgtcttctgggtagaattcgtgatgagacataaaggcgcacctcatctccggcccgccgctcatgacctgacttggtatcaatatcatagtttggatgttataggctttctgttggcagtggtcctgacggttgcctttatcacttttaagtgttgcgcatatggttatcgtaagtgcctcgggaaaaagggcagggtgaagaaggcccataagagcaagacacac

SEQ ID NO: 9212 - DNA, 1599 bp, Artificial Sequence
  derived and/or modified sequence
atggctgttgagtcccaaggcggccggccccttgtcctgggacttctgttgtgtgtgctgggacctgtggtaagccatgccgggaaaatcctcctgataccggtggacggctcccattggctgagcatgctgggtgcaatccagcaactccagcaaagggggcacgaaatcgtggtcctggcaccagacgcatccctatacatcagagatggggcattttatacactgaaaacgtatcccgttccctttcaacgggaagatgtcaaggagtccttcgtcagcctcgggcacaatgtatttgaaaacgactctttcctccagcgagtaataaaaacctataaaaagattaagaaagattccgcgatgctgctgagcggctgctctcacctgttgcacaacaaagagctgatggcatcattggccgagtcctcctttgacgtgatgctgactgatccatttctcccatgcagtccaattgtggcacagtacctgtccctgcccactgtgttcttcttacatgcgctgccttgcagcctcgagtttgaggccacacagtgccccaaccccttctcctacgtccctcgccctctttctagccattccgaccatatgacgttcttgcagcgtgtgaaaaatatgctcattgccttctctcagaatttcctttgtgacgtggtctatagcccttatgctactctggccagcgagttcttgcagcgcgaggtgacagtgcaggatctcttgtcatccgcatcagtgtggctgttcaggagcgacttcgtgaaggattatcctaggccaatcatgccaaacatggtgtttgtgggaggaatcaattgtttgcaccagaaccccttgtcacaggaattcgaagcttacataaacgcctccggagaacacggcatcgtcgtgttttcgctcggatcaatggtgagtgagattcccgagaaaaaggcaatggctatcgcggatgccctaggcaagattccccagactgtactgtggcggtacacaggaacaagaccctcaaacctagcaaacaacacgatcctggtcaaatggctcccacagaatgatctgctgggccaccctatgactcgagcgtttatcacccacgccggcagccatggggtttacgaatccatctgcaatggagtgcctatggttatgatgccgctatttggagaccaaatggacaacgccaagagaatggagacaaagggcgccggagtgaccttaaacgtgctcgagatgacgagtgaagacctcgaaaacgcattgaaggcagtgattaacgataagtcttacaaagaaaacattatgcgtctatcaagtctgcataaggatcgtcctgttgaacctttggaccttgcagtgttttgggttgaatttgttatgcggcacaaaggcgcgccccacctaagaccagccgctcatgatctgacgtggtatcagtatcactcgttggacgttattgggttcctcctcgcagttgtgctgactgtagcgttcattacattcaaatgctgtgcttacggctaccggaagtgtctgggaaaaaagggacgagtgaaaaaggctcacaaatcaaagacgcac

SEQ ID NO: 9213 - DNA, 1599 bp, Artificial Sequence
  derived and/or modified sequence
atggctgttgaatctcaaggaggcaggccactggtcctgggtctgctcctttgcgtactgggccctgtcgtgtctcatgccggcaagatcttgctcattcctgtggacggctcccactggctgtcaatgttgggtgctattcaacagctgcagcagcgcggacatgagattgttgtgctggctccagacgcttcactttacattagggacggcgcattttataccctcaaaacctatcctgtacccttccagagggaagacgtcaaagaatccttcgtgtctttgggccataacgttttcgagaatgatagttttctgcagcgtgttataaagacctacaagaagattaagaaggatagtgccatgctcctttctggttgcagccatctgctccacaacaaggagctgatggcctcactggccgaatcttcttttgatgtcatgctgactgatccttttcttccatgttctcccatcgttgcccagtatctgagcttgcccactgttttctttctgcacgcattgccctgttcattggagttcgaggcaactcagtgtcccaacccattttcatacgtgccacgtcccctgtccagccatagcgatcacatgacattccttcaaagagtgaaaaacatgctcattgctttctctcagaatttcctctgtgacgtggtctatagcccatatgctacacttgcttctgaattcttgcaacgtgaagtcacagttcaagatctgctgtcttccgctagtgtatggctcttccgctctgactttgtgaaggactatcccagacccatcatgcccaacatggtcttcgtgggtggcatcaattgtctgcaccaaaacccactcagccaagagtttgaagcatatatcaatgcttccggagagcatggtatcgtagtgttctctctgggctctatggtatccgagattccagagaagaaggccatggccatcgccgacgctctgggtaagattccacaaactgtgctgtggaggtacaccggtacacgtcctagcaacctggccaacaacaccattctggtaaagtggttgcctcaaaacgatctgctcggacaccccatgaccagggcctttattactcacgccggatcacatggtgtatacgaaagcatatgcaacggtgtccccatggttatgatgccactgtttggcgatcagatggacaacgccaagcgcatggagacaaagggagccggtgtaacactcaacgtgctggagatgacaagcgaggatttggaaaatgccctgaaggctgtcattaatgataagagttacaaagaaaacatcatgaggttgagctctctccacaaggatagacctgtggaacctttggatctggctgtgttctgggtggagttcgttatgagacataagggcgctccccatcttcgccctgccgctcatgatttgacctggtatcaatatcacagtctcgatgttattggattcctgctggctgttgtgttgaccgtcgcattcatcactttcaaatgttgcgcctatggctacaggaagtgcctgggaaagaagggcagagtaaagaaagctcacaaatccaaaacacac

SEQ ID NO: 9214 - DNA, 1599 bp, Artificial Sequence
  derived and/or modified sequence
atggccgtggagtcacagggcggacggccgctcgtgctcgggttgctgctgtgcgtcctgggaccggtggtgtcccacgccggcaaaattctgctgattccggtcgacggttcgcactggctctcaatgcttggggccatccagcagctgcaacagcgcggacacgagattgtggtcctggccccagatgcgtccctctacatccgcgacggtgctttctacactctgaaaacttacccggttccgttccagcgggaggacgtcaaggagagtttcgtgtccctgggacacaacgtgtttgagaatgattccttccttcagcgcgtaatcaagacttacaagaagattaagaaagactcggctatgctgctgtcggggtgctcgcatctcctgcacaataaagagctcatggcctcgctcgctgaatcgtcatttgacgtgatgctgaccgacccattcctcccatgttcgccaatcgttgctcagtacctctcgctcccgactgtctttttcctgcacgccctgccgtgttcgctggaattcgaggccactcaatgcccaaaccctttttcctacgtccctaggccgctcagctcacattcggatcatatgacctttcttcagcgggtgaagaacatgctgatcgccttctcccagaatttcctctgcgatgtcgtgtacagcccgtacgcgaccctggccagcgaattccttcaacgggaggtgacggttcaggacctgctctcttcagcaagcgtgtggctgttccggagcgacttcgtgaaggactacccccgccctattatgccgaatatggtctttgttggaggaatcaactgcctccaccagaacccgctctcacaggagttcgaggcatacatcaacgcctcaggagaacacggaatcgtcgtcttttctctgggctcgatggtgtcggagatcccagaaaagaaagctatggccatcgcagacgcgctgggaaagatcccgcaaaccgtgctgtggcgctacactggcaccagaccatccaatctcgcgaacaacactattctcgtgaagtggctgccacagaacgacctgctgggacacccgatgactagagcgttcataactcacgctggaagccatggggtgtacgaatccatctgtaacggtgtgccaatggtaatgatgcccctgttcggggatcagatggataatgccaagagaatggaaactaagggtgccggtgtgactctgaacgtgttggaaatgacgagcgaggacctggaaaacgcgctcaaggccgtcatcaatgacaaaagttacaaggaaaacatcatgagactctcttccctgcacaaagaccgcccagtggagccccttgaccttgccgtgttttgggtcgagttcgtgatgaggcataagggcgccccacacttgcgcccggcggcgcatgacctgacttggtaccagtaccacagcctggatgtgatcggcttcctcctggctgtggtcctgaccgtggcattcatcaccttcaagtgctgcgcctatggttacaggaagtgcctgggaaagaaagggagggtgaaaaaggcccataagtccaagacccat

SEQ ID NO: 9215 - DNA, 1599 bp, Artificial Sequence
  derived and/or modified sequence
atggccgtggagagtcaggggggtcgacccttggttctgggcttgctgttgtgcgttctagggcccgtggtgagccacgcaggtaaaatacttctcatcccagttgacggcagccactggctctcaatgctgggagccattcaacagttgcagcagcggggtcatgagattgtcgtgttagcccccgatgcttccttgtacattagagatggcgccttttacactctcaaaacctatccagtacctttccagcgcgaggacgtcaaagaaagcttcgtgagtctagggcataacgtttttgagaatgattcctttttgcagagagtcataaaaacctacaaaaagattaagaaggattccgccatgttgctttccggctgctcccacctgcttcataataaggagctgatggctagcctcgccgagtctagttttgatgtcatgttaactgacccttttctgccttgtagccccatagtggcgcaatatctgtcgctaccaacagtcttttttctccatgcccttccgtgctccctggagtttgaggcaactcagtgccctaaccccttttcgtatgtcccgagaccattgtcctcccactccgatcacatgacttttctacaaagagtcaaaaatatgttgatcgccttcagccagaacttcctgtgcgacgtggtgtatagtccatacgcaaccctggccagtgagtttctgcaacgcgaggtaaccgtgcaagatctactgtcttctgcaagcgtgtggcttttcagatccgattttgtaaaagattaccctcggcccataatgcccaatatggtctttgtgggcggtattaactgcctccatcagaatcctctgagtcaggaatttgaagcctatattaatgcaagcggcgagcatggtatcgtagtgtttagcctcggttctatggtgtccgaaatccccgagaagaaggctatggctatagctgacgcattaggcaagatccctcagacagtgctgtggcgatacaccgggactcgaccatctaatctggctaacaacacgattcttgtcaaatggctgccgcagaacgatttactggggcatcctatgacccgggcattcattactcatgccggcagccacggcgtttatgagtctatatgtaacggcgtgcctatggttatgatgcccctgtttggagaccagatggacaatgcgaaaaggatggaaactaaaggcgctggggtgacactgaacgtgctcgagatgacctctgaggatctggaaaacgctctgaaagctgtgattaatgacaagagctacaaagaaaacatcatgagactgtcctctcttcacaaggatcgcccagtcgagcccctggatctcgcagtcttttgggtggagtttgtgatgagacataaaggagccccacatctgagacctgccgcgcacgatctgacctggtatcagtaccattctctcgatgtcatcggatttttgttggcagtcgtgcttacggtcgccttcattacttttaagtgctgcgcctacgggtaccgcaaatgcctggggaagaaaggcagagtaaaaaaagcccacaagtccaaaactcac

SEQ ID NO: 9216 - DNA, 1599 bp, Artificial Sequence
  derived and/or modified sequence
atggcagttgagagccagggaggtaggcctctcgtgctagggctcctgttgtgcgtcctgggaccagtcgtgagccacgccgggaaaattttgcttattcccgtagacgggtctcactggctctccatgctaggagccatccagcagctgcaacagagagggcacgagatcgtggtgctcgcccctgatgcctcactgtacataagagatggggctttttatacccttaaaacatatccggtcccctttcaaagagaagatgttaaggagtcgttcgtaagtctgggccataatgtcttcgaaaacgactctttccttcagagagttatcaagacatataaaaagataaagaaagattccgctatgctgctgagcggatgtagccatctgctgcataacaaggagctcatggcgtcattggcggaatcttcctttgacgtaatgttgacagatccattcctaccatgttcgccgattgtggcccagtatctgtctctgccaactgtcttctttttacatgccttaccctgcagtctcgaattcgaggcgacacagtgccctaatcctttctcctatgtgcctcggccactcagttctcattccgatcatatgacctttttacaacgtgttaagaatatgttgattgctttctcgcagaattttctgtgcgatgtagtgtactctccatacgcgaccctggcaagcgagttcctgcagagagaggttacagtgcaggatctgctcagcagcgccagcgtctggctgttcaggagtgattttgttaaggactaccccagaccaatcatgcccaatatggtgttcgtgggcggcattaactgtctacaccagaatcccctttcccaggaattcgaggcttacataaacgcctctggagagcatgggattgtggtcttctccctgggcagtatggtatctgaaatacctgagaagaaggccatggccatcgctgacgcacttggaaagatcccgcagactgtcctatggaggtatactgggactcggcctagtaacctcgcaaataacacaatacttgtgaagtggctgccccaaaatgatctcctggggcacccaatgaccagggcctttattacccacgccgggagccatggggtctacgaatcgatttgcaacggcgtccctatggtaatgatgccgctgttcggtgatcagatggacaacgctaagaggatggagactaagggcgctggcgtgactcttaatgtgctggagatgacgagcgaagacctcgaaaatgcattgaaggccgtgattaacgataaatcctataaagagaacatcatgagactttcttctcttcataaagaccggcccgtggaaccattggatctggctgtattttgggtcgaattcgtcatgcggcacaagggcgctcctcatctccgacccgcggcccatgacttgacgtggtatcagtaccacagtcttgacgtgatcgggttcttgctggcagtggtcctgaccgtggcgtttatcacctttaagtgctgtgcatatgggtaccgaaagtgtctcggcaagaaagggcgtgtgaagaaggcccacaaaagtaagacccac

SEQ ID NO: 9217 - DNA, 1599 bp, Artificial Sequence
  derived and/or modified sequence
atggccgtggaaagtcagggcggcaggccacttgtcctcgggctgttgctgtgcgtgctcggccccgtggtgtcacatgcgggaaagattcttttaatccccgtggatggaagccactggctgagcatgctgggcgcgattcagcagctccagcaaaggggtcacgagatagttgtgctggcccctgacgccagcctatacatcagggatggagccttctataccttgaagacctaccctgttccctttcagagggaagatgtgaaggagagcttcgtaagtctcggacacaatgtgttcgaaaacgactcttttctgcagagggtcattaagacctataagaagattaaaaaggactccgccatgctgctgtctggttgctcccacctgctgcataacaaggaactcatggcctcattggccgagagttccttcgacgttatgctcacagatccattccttccatgctcacccatcgtggcccagtacctgtcattaccgacagtgtttttcctgcacgccttgccgtgtagtctggaattcgaggcgacacagtgtcccaatccgttttcctatgtgcctagacccctttcaagtcatagtgaccatatgaccttcctgcagcgggtcaagaatatgttgatcgcattttcgcagaacttcttgtgtgacgtggtgtattccccatacgcaacactagccagtgagttcctgcaacgtgaagtgactgtccaagacctcctgtcttccgcttcggtttggttattccgctctgactttgttaaggactatcctcgtccaatcatgcctaacatggttttcgtcggagggatcaattgtctccaccaaaaccctctttctcaggaatttgaggcctacatcaatgctagcggtgaacatgggatcgtggtcttttcactagggagcatggtcagtgagatcccagagaaaaaggcaatggccattgccgatgcgctaggaaagatcccacaaaccgtcctatggcggtacaccggcactaggccctccaacctagctaacaatactattctggtaaagtggctcccgcaaaatgatctcctgggccaccctatgactagggcttttatcacacacgccggctcacatggagtctatgaatctatctgtaatggggtgccaatggtaatgatgcccctgtttggggatcagatggataatgctaaaaggatggaaacgaagggggccggcgtgaccttgaatgtgctggagatgactagtgaggacctcgaaaatgctttgaaggctgtgatcaatgacaaatcttacaaagaaaacataatgcgactgtcctccctgcataaagataggcccgttgaacctttagatttggccgtcttttgggtggaattcgtgatgcgccataagggtgctccgcacttgcgccccgcggctcatgacttaacttggtatcagtaccactccctcgacgttattggctttttgctagccgtggtactcacggtggccttcatcacattcaagtgttgcgcatatggttatcggaaatgcctcggtaaaaaggggagggtcaagaaagcccacaaatctaaaacccac

SEQ ID NO: 9218 - DNA, 1599 bp, Artificial Sequence
  derived and/or modified sequence
atggcggtcgaaagccaggggggacggcctctggtgctgggcttgcttctttgtgtgctggggcccgttgtgtcacacgctggaaagatcctcctcattcctgtggatgggtcacattggctgtcgatgctgggcgcgatccaacagctgcagcagaggggccatgaaattgtggtccttgcacccgatgcctcgttgtacattagagatggtgccttttacactcttaagacgtaccccgtgccttttcaaagagaagatgtcaaggagtcctttgtgagccttggacataacgtctttgaaaatgattccttccttcaaagggtgataaagacttacaaaaagattaagaaggattccgccatgttgcttagcggctgctcacacctgctgcataacaaagagctgatggcatcgctggcagaatcttcttttgacgtgatgctgaccgacccattcctgccttgttcacctatcgtcgcacagtacctgtcgcttccaactgtgttctttttgcatgcactgccctgttctctggagtttgaggcaacccagtgtcctaatccattcagctacgtcccacggccactttcgtcgcacagcgaccatatgacgtttctccagagagtcaagaacatgctgattgcattctcccagaactttctttgcgatgtggtgtactccccctacgccaccctggcgtcggaattcctgcaacgcgaagtgacggtccaggatttgctctcgtcagcaagcgtgtggctgtttcgatcagattttgtcaaagattacccaaggccgattatgcccaacatggtgtttgtgggtgggattaactgcctgcatcaaaacccactctcacaagaattcgaagcatacatcaatgcatcaggtgagcacgggattgtcgtgttttccctgggttcgatggtgtcggagattcctgaaaagaaagcaatggcaatcgcagacgcacttggtaagattccccagactgtgttgtggagatacacggggactagaccaagtaatctcgctaataacactattctggtgaagtggctgccgcaaaacgatctgcttggacatccaatgacccgggcttttatcacccacgcgggatcccatggcgtgtacgaaagcatttgtaatggtgtgccaatggtcatgatgcctctttttggagatcagatggataacgcaaagagaatggagactaagggtgcaggtgtgactcttaacgtcctggagatgacctcagaggaccttgagaatgcattgaaggcggtgattaacgataaaagctacaaggaaaacattatgaggctctctagccttcacaaggatcggcctgtggaacccctggatttggccgtgttttgggtggaatttgtcatgaggcataaaggcgcaccccacctccgccctgcggcgcatgatctgacttggtaccaataccactcgctggacgtcatcggatttctgttggcagtggtcctgaccgtcgctttcattactttcaaatgttgcgcttacggatatcgcaaatgtctgggaaaaaagggtagagtcaaaaaggcacacaaatccaagactcat

SEQ ID NO: 9219 - DNA, 1599 bp, Artificial Sequence
  derived and/or modified sequence
atggccgtcgagagccagggggggcggcccctagtcctgggccttctcctgtgcgtgctgggcccagtggtttcacacgcagggaaaatcctacttattcctgtggacggctcacactggctctcaatgctgggggcaatccagcagctgcagcagcgaggacatgagatcgtcgttctagctccagatgcgtccctgtatattagggacggagccttctacacgctgaagacgtatcccgtgcccttccagagagaggacgtgaaagaatcatttgtatccttagggcacaacgttttcgaaaacgattctttcctccagcgtgtcattaaaacctataaaaaaatcaaaaaggactcggcgatgttattgtctggatgcagccatctactgcacaataaggaactgatggcctccctcgccgagagctcatttgacgtcatgctaacagaccctttcctaccgtgttcaccaatcgtcgctcaatatctttccttgccaacagtgttctttttgcacgccctcccttgttctctggagttcgaggctacccagtgcccaaatccattctcctacgttcctcggcctttgagctcccattccgatcacatgaccttcctgcagagagttaaaaacatgttgatcgcgttctcacagaacttcctctgtgatgtagtatacagcccatatgcgacgctggctagtgagttcttacagagggaagtgacagtccaggaccttctaagctctgccagtgtgtggctgtttcgctcagactttgttaaggattacccaaggccgattatgcccaacatggtgttcgtgggcggtatcaattgcctccatcagaaccctctctcacaggagtttgaggcatacataaacgcctccggcgagcacgggatcgtggtgttcagcctcggaagcatggtctccgagattcctgagaaaaaggcgatggcgattgctgacgctctgggcaagatcccacagactgtgctgtggaggtacacaggtacacggccctccaatcttgctaataacaccatcctggtgaaatggctcccccagaacgaccttctcggccaccccatgactcgggcattcatcacacacgccggttctcacggcgtgtacgagagcatatgtaatggcgttccgatggtcatgatgccgctctttggcgaccagatggacaatgctaagcggatggagacaaagggcgccggcgtaacactcaatgtgcttgaaatgacctccgaggacctagaaaacgctctgaaggcagttatcaacgacaagagttataaggaaaacattatgcggctgtcaagtttgcataaagaccgtccagtcgagcccctggatcttgcagtgttctgggtggagttcgtcatgaggcataaaggtgcccctcatctgcggcctgctgcccatgatctgacctggtatcaatatcattccctggacgtgattggttttcttctggcagtcgtcctgacagtggcttttatcaccttcaagtgttgcgcttatggttataggaagtgtctgggaaagaaaggacgtgtgaagaaagcccacaagtctaagacacac

SEQ ID NO: 9220 - DNA, 1599 bp, Artificial Sequence
  derived and/or modified sequence
atggcagtggagtctcagggtggaaggccgctagtccttggtctcctgctctgcgttcttggtcctgttgttagtcacgctggaaaaatattgctaatcccagttgatggatctcattggctgagcatgcttggagcaattcaacaactgcagcaaaggggacatgagatagttgttctggctcctgacgcttctttgtatattcgagatggagctttctatacgcttaaaacttatcctgtcccgtttcaacgtgaagacgttaaggagagctttgtgagcttgggacataatgtatttgagaatgactcttttttacaaagagtgattaaaacttataaaaagataaagaaggattctgccatgttgcttagcggttgttctcatctactgcataataaggaactcatggcaagccttgcagagtcttcattcgacgtaatgctaaccgatccctttttgccatgctcaccaatagttgcacaatacctgtccttacctaccgtcttcttcttacatgctttgccttgctcactcgagttcgaagctacccaatgtcccaacccatttagctatgtaccgagacccttgtcgtcgcattctgaccacatgacatttctgcagagagttaaaaacatgcttatcgctttttcccagaattttttgtgcgacgtagtgtactctccgtacgctactttagctagcgagtttctgcaaagagaagttacagtacaagatttactatcctcagcatcggtatggctattcagaagtgattttgttaaagattatcccagacctatcatgcctaatatggtgttcgttggagggattaattgcctccatcagaaccctcttagtcaggagtttgaggcctatatcaatgcaagcggcgaacatggcatcgttgtcttctctctaggcagtatggtctccgagatacctgagaaaaaagctatggccatcgctgatgcactcggaaaaatcccacaaactgttttgtggcgctacaccggaacccgcccatcgaacttggctaataacacaattctggtgaaatggcttcctcagaacgatcttctcggacatccaatgactcgagccttcataacccatgccggaagtcatggggtgtatgagtctatttgcaatggggtaccaatggttatgatgcctctctttggtgaccaaatggacaacgctaagagaatggaaactaaaggagcgggtgttactcttaatgtgttggagatgaccagcgaagacttggaaaacgcattgaaggctgtaatcaatgataaatcatacaaagagaatattatgaggcttagtagtcttcataaggatagacccgtcgaaccgttggacctcgccgtattttgggtggaattcgtgatgaggcacaagggggctccccatttgcgtccagccgcccatgatcttacttggtatcaatatcatagtcttgatgtcataggctttttactggcagttgtgttgactgtggcttttatcacttttaaatgttgtgcgtacggatatcgtaagtgtctgggaaagaaaggcagagttaaaaaagcacataagagcaagacacac

SEQ ID NO: 9221 - DNA, 1599 bp, Artificial Sequence
  derived and/or modified sequence
atggcggtcgaatcgcaaggaggacggcccctcgtgttgggactgctgctctgcgtgcttggaccagtggtgtcccacgcggggaagatcctcctgatccccgtcgatggatcccactggctctcaatgcttggagcgatccagcaactgcagcagcgcggacacgagatcgtggtccttgcccctgacgcctccttgtacatccgcgatggcgctttctacaccctgaaaacctacccggtgccgttccagcgcgaagatgtcaaggaatcatttgtgtcgctcggtcataacgtctttgagaatgattcattcctccagcgcgtgatcaaaacttacaagaaaattaagaaggacagcgccatgctcctgtcgggctgctcccatctgctgcacaacaaggagctcatggcctcgcttgccgagagcagctttgatgtgatgctgactgacccattcctgccgtgctccccgatcgtggcgcaatacctgtccctcccaactgtgttctttctccatgcactgccttgcagccttgaattcgaagctacccagtgccctaacccattctcgtacgttcctcggccgctcagctcgcactcggaccatatgactttcctgcagagggtgaagaacatgctgattgcattcagccagaatttcttgtgtgatgtcgtctactcgccctacgcaactctggcttccgaatttctgcagagagaggtgactgtacaagacttgctgtcgagcgcctcagtctggctgttcagaagtgacttcgtgaaagactacccgcggccgatcatgccaaacatggtgttcgtcgggggcatcaactgtctgcaccaaaacccgttgtcccaggagttcgaagcgtacatcaacgcatccggagaacatggcatcgtggtctttagcctcggctctatggtgtcagagattccagaaaagaaagcaatggccatcgccgacgccctgggaaagatccctcagacggtgctgtggcgctacactgggacccggccgtccaatctcgccaataataccatcctcgtgaaatggctgccgcagaatgacctgctgggacatccgatgacccgggctttcatcacccacgctggctcccacggagtctatgagtcgatttgcaacggcgtgccaatggttatgatgcctctgttcggagatcaaatggacaacgcaaagcggatggaaaccaagggagccggggtgaccctgaacgtcctggagatgactagcgaagatctggagaacgccttgaaggcggtgatcaacgataaatcatacaaggaaaatatcatgcgcctttcgtcactccataaagacaggccggttgaacccctcgacctggccgtgttctgggtcgagtttgtgatgcgtcacaagggggccccacacctcagaccggcggcgcacgacctgacgtggtaccaataccactctctcgacgtgatcggttttctgttggcagtggtcctgaccgtggcgttcattactttcaaatgctgcgcctatggttaccgaaagtgtcttggaaagaagggtagagtgaagaaggctcacaagtcaaagacgcat

SEQ ID NO: 9222 - DNA, 1599 bp, Artificial Sequence
  derived and/or modified sequence
atggcggtcgaaagccagggaggacgccctctggtgctcgggttgctcctctgcgtgctgggaccggtggtcagtcatgcgggaaaaatcctgctgattccagtggacggatcgcactggctgtccatgctgggcgcaatccaacagttgcagcaaagaggacatgaaatcgtggtcctggcaccggatgcaagcctttacatccgggacggcgcgttttacaccctgaaaacctatcctgtgcccttccagcgcgaggacgtgaaggagagcttcgtgtcgctgggacacaatgtctttgagaacgactcgtttttgcagcgcgtgatcaagacctataagaagatcaagaaggactcggccatgctgctgtctggctgctcacatctcctgcacaacaaggaacttatggcgtccttggctgagtcgtcctttgacgtcatgctgactgacccgttcctgccgtgctcccctatcgtcgcccagtacctctcacttcctactgtgttctttctccacgcgctgccttgttcgctggaatttgaagcaacccaatgtccgaatcccttttcgtacgtgccgcggcccctgagctcgcactcagaccatatgaccttcctgcagagggtcaagaacatgctgatcgccttttcgcagaatttcctgtgtgatgtggtgtactcgccatacgccactctggcctcggagttcctccaacgggaggtgactgtgcaagatctgctgtcgtctgccagcgtgtggctgttccgcagcgatttcgtgaaggattacccgcgccctatcatgcctaatatggtgttcgtcggaggcatcaactgcctgcatcagaatcccctgagtcaagaattcgaagcctacatcaacgcctcaggggaacatggtattgtggtctttagcctcggcagcatggtatccgagatacccgagaagaaggcaatggcgatcgccgacgcactgggaaagatcccacaaaccgtgctttggagatacactggcacgaggccatcaaacttggcgaacaacactattctggtgaagtggcttccacaaaacgacttgctgggccacccgatgacccgggctttcattacccacgcaggaagccacggcgtgtacgaatcaatctgcaatggagtgccgatggtgatgatgcctctgttcggagatcagatggataacgcaaaacggatggaaaccaagggagcgggagtgactctgaacgtgctcgagatgacttcggaagatctggaaaatgccctgaaagccgtgatcaacgacaagtcctacaaggagaatatcatgcgcctctcatctctccataaagaccgccctgtcgaacctcttgacctcgcggtgttctgggtggaattcgtgatgagacacaagggagcaccacacctccggccagccgcgcacgatctgacttggtaccaataccattccctggacgtcattgggtttctgctcgcagtggtgctgactgtcgccttcatcacctttaagtgctgcgcctacggctatagaaagtgtctcggcaagaaggggcgcgtgaagaaagcccataagtctaagactcac

SEQ ID NO: 9223 - DNA, 1599 bp, Artificial Sequence
  derived and/or modified sequence
atggcggtggaaagccagggaggtaggccactggtccttggtttgttgctgtgcgtactgggacctgtggtcagccacgcagggaagatcctcctgattcctgtcgatggctcacattggttgtcaatgctcggcgcaatccaacagcttcaacagcgaggtcacgaaatagttgtactggcaccagacgcgagcctgtacatccgggacggcgccttttatactttgaagacctatcccgttcccttccaacgggaggacgtgaaggagtcttttgtcagccttggccataacgtgttcgagaacgatagcttcctgcagagggtcataaaaacctacaagaagataaagaaagacagcgctatgctcttgagtgggtgctcccacctcctgcataacaaggaactgatggcatccctggcagaaagttcttttgatgtgatgctgactgacccgtttctgccctgttcccctatagtagcccagtaccttagcctgcctaccgtattttttctccatgccctcccttgctccctcgaatttgaagccacccagtgccctaatcccttcagttacgttccacgacctctgtcatctcatagtgaccatatgacgtttctccagagggtgaagaacatgctgattgccttcagtcaaaatttcttgtgtgacgtggtgtatagcccgtacgcaacccttgcctccgagttccttcagagagaggttaccgtgcaagacttgctgtcctcagcgtccgtgtggctcttccggtctgattttgtcaaggattacccacggcctatcatgccaaacatggtgtttgtaggaggcattaactgcctgcatcaaaaccctctgagccaggaattcgaagcatatattaatgctagtggagaacatggtatcgttgtgtttagcctggggtccatggttagtgaaatccccgaaaagaaggcaatggcaatagccgacgcactcggtaagattccacagaccgtcttgtggaggtacacaggtacaagaccatccaacttggccaacaataccatccttgtgaagtggctcccacagaatgacttgctgggacaccccatgaccagagcctttatcacccacgcagggtcacacggagtttatgagtctatttgcaacggcgtgcctatggtcatgatgcccctgtttggggatcaaatggacaatgccaaaaggatggagactaagggcgccggtgtgaccctcaacgtgttggagatgacgtccgaagatctggaaaacgcgcttaaggcggtgataaacgataagtcctacaaagagaatatcatgcggctgagtagtctccacaaggaccgaccagttgagcctcttgatttggccgttttttgggtggaattcgtcatgcggcacaagggtgcgcctcatcttcggcctgccgcacacgaccttacttggtatcagtatcattctctggacgtgatcggtttcctgcttgccgttgtcctgaccgttgctttcatcactttcaagtgttgcgcatatgggtaccgaaaatgcctcggtaagaaggggagagtgaaaaaggctcataaatcaaagacgcac

SEQ ID NO: 9224 - DNA, 1599 bp, Artificial Sequence
  derived and/or modified sequence
atggccgtcgaatcgcagggaggccggccgctcgtcctcggactcctgctgtgtgtgctgggcccggtggtgtcccacgccggaaagatcctcctcatcccggtggacggttcacactggttgtcaatgctgggcgcgattcagcagcttcagcagcgcgggcacgaaatcgtggtgctcgcgccggacgcatccctctacatccgggatggagctttttacactctcaagacttacccggtcccgttccagagggaagatgtgaaggaatcatttgtgtccctcggccataacgtgttcgagaacgatagctttctgcagcgagtcatcaagacttacaagaagatcaaaaaggatagcgccatgctgctgtcgggttgctcccacctgttgcacaacaaagaacttatggcttcccttgccgaatcgtcgttcgatgtcatgctgactgatccttttctgccgtgcagcccgatcgtggcgcagtacttgtcgcttccgaccgtgtttttccttcacgcgctcccttgttcgctcgagttcgaagcgacccaatgccctaaccccttttcgtacgttccgcggccgctgtcgtcgcactcggatcacatgacgtttctccaacgcgtgaagaacatgctgatcgcgttctcacagaactttctctgcgatgtagtctactccccatacgcaaccttggcctcagaattcctccaaagagaggtcaccgtgcaagacctcctgtcaagcgcctcggtctggctgttccgcagcgacttcgttaaggattacccaagaccgattatgccaaatatggtgttcgtggggggtatcaattgcctgcaccagaatcctctttcccaagaatttgaggcatacataaacgcctctggagaacatggaatcgtggtgttctcactgggatccatggtgtccgagatccctgagaagaaggctatggcaatcgccgacgcactggggaagatcccccagactgtgctctggcgctacaccggaacccggccgtccaacctcgccaacaatacgatcctcgtgaagtggttgccccagaacgacctgctgggccacccgatgaccagggcgttcatcacgcacgctggatcacacggtgtgtacgaatccatctgcaacggggtcccgatggtcatgatgcctctgtttggcgaccagatggacaatgccaaacggatggagactaaaggcgccggcgtgaccctcaacgtgctggaaatgacttcggaagatctggagaatgcgctgaaagctgtgatcaatgataagtcctacaaggaaaacatcatgcggctgtcgtccctgcataaggatcgcccagtcgagccgctggacctggccgtgttctgggtggaatttgtgatgcggcataagggagcaccgcatctccgcccagcggctcacgacctcacctggtaccagtaccacagcttggatgtgattggattcctgcttgcggtggtcttgaccgttgcctttatcactttcaaatgctgtgcttacggttaccgaaaatgcctgggaaagaagggccgggtgaagaaagcgcataagtcaaagacgcac

SEQ ID NO: 9225 - DNA, 1599 bp, Artificial Sequence
  derived and/or modified sequence
atggcagtggaatcccagggcggtcgcccgcttgtactgggtcttttgctgtgtgtgttaggacccgtggtctctcacgccggcaagatacttttgattccggtagacggctctcactggctgtcgatgctgggagcgattcagcaacttcagcagcggggccacgagatcgtggtgctggctcctgacgcgtcactgtacatccgggatggagcgttctacaccctgaaaacataccccgtgcctttccagcgtgaagatgtgaaggaatcgtttgtttctttgggccataatgtcttcgagaacgattcgttcttgcagagggttattaagacatataaaaagatcaagaaggatagtgccatgctgttatctggatgctcccacctgctacataataaggaactcatggcttcgctagcagagtctagctttgacgtgatgctcaccgatccgtttctcccctgtagcccaattgttgcccagtacctctcgctgcctaccgtattctttctccatgccttgccttgcagtctggagtttgaggccacgcagtgtcctaatcccttcagttacgttccccgcccgctgtccagtcattccgaccatatgacattcttgcaacgagtcaaaaacatgctgattgccttcagtcagaacttcttgtgcgatgtggtgtattcgccatatgccacgctggcaagtgagttcttacagcgagaagtaaccgtgcaagatctgcttagttccgcaagtgtttggctgttccgtagtgactttgtgaaggattacccacggccgattatgcctaacatggtgttcgtcggtggtatcaactgtttacatcaaaaccccctgtcccaggagtttgaggcctacataaacgcctccggcgagcacggaatcgtggtgttctctctcgggtcgatggtgtccgagattcccgaaaagaaggccatggcgattgccgacgccctggggaagatcccacagacggtgctgtggcggtacacgggcacacggccgtccaacttggccaataataccatcttagtgaagtggctaccccagaacgacttactaggacacccgatgacacgagccttcatcacgcacgccggtagccatggcgtttacgagtccatctgcaatggagttccaatggtaatgatgccgttattcggagatcaaatggacaacgccaagcggatggaaactaagggtgcaggcgtaacactaaatgtcttggagatgacgtctgaggatctggagaacgctctgaaggccgtgatcaacgataagtcctataaagagaatattatgaggttaagctcgctgcacaaagatcgtccggtcgaacccctagacttggcggtgttctgggtggagttcgtgatgaggcataagggtgctcctcacctacgccccgccgcccacgatctgacgtggtatcagtatcactccctggatgtgatcggattcctgctggccgtcgtgctgacggttgcgtttatcacttttaaatgttgtgcctatggctaccgaaagtgtctgggtaagaaaggccgcgtaaagaaggcccacaagagcaagacccat

SEQ ID NO: 9226 - DNA, 1599 bp, Artificial Sequence
  derived and/or modified sequence
atggccgttgagtcccagggggggcgtcctttggtgctgggtctcctcctgtgtgttttgggccctgttgtctcccacgctggcaagatcctgctcatcccagttgacgggagtcactggctctctatgctgggagccattcagcagctgcagcagcgcggccacgaaattgttgtgttggctccagatgcctcactgtacatccgtgacggcgccttctatacactaaagacttatccagtcccttttcaaagggaagacgttaaagaatcattcgtgtccctaggacacaatgtgttcgagaatgacagtttcttgcaacgcgtgattaagacctacaagaaaatcaaaaaagactccgctatgctgctaagcggatgtagtcatttactccacaataaggaactaatggcaagcctggctgaaagcagtttcgacgttatgctgaccgacccttttttaccttgttcccccatcgtcgcccagtatctgtcactgccgaccgtgtttttcctgcatgctttaccgtgcagcctggagtttgaggcaacccagtgtccaaatcctttttcctatgtaccccggcccctatcctcccattctgatcacatgaccttcttacagagggtgaagaatatgctgatcgcctttagccagaattttctttgcgacgtggtgtattcaccctacgctaccctggcttcagagtttctccagagagaggtgactgttcaggacttactgagttccgcctccgtgtggttgttccggtcagactttgtcaaggactaccccagacccatcatgccaaatatggtgtttgtgggaggaattaactgccttcaccaaaatccactcagtcaggaattcgaggcctatataaacgcatccggcgaacatggcatcgtggtattttccttgggctccatggtgagcgagattcccgagaagaaggccatggcaatcgccgacgcccttggcaagatcccccagacggtgctgtggcgttatacagggacccgcccgtccaatctggcgaataatacaatccttgtgaagtggctgccacagaatgacctgctggggcaccctatgacccgagccttcatcacgcacgcaggatcccacggggtctacgaatcaatctgcaatggagtaccaatggtaatgatgcccctgtttggcgatcagatggataacgccaagaggatggagacaaagggagcaggagtcacgctcaacgttcttgagatgacaagtgaggacctggaaaatgccctgaaggccgtcataaatgacaagtcctataaggagaatatcatgagactgagtagcctccacaaggaccgtccggttgagccgcttgaccttgcagtcttctgggtggaattcgtcatgcggcataagggagccccacatctgaggcctgctgctcatgaccttacgtggtaccagtatcattcacttgatgtgattggctttctgttagcagttgtcctgacagtggccttcattaccttcaagtgttgcgcatacgggtatcggaagtgccttgggaagaagggccgggttaaaaaggcacataagtcaaaaacacac

SEQ ID NO: 9227 - DNA, 1599 bp, Artificial Sequence
  derived and/or modified sequence
atggccgttgagtcacaaggcggtaggcctctggtgcttgggcttctactctgcgtcctcgggccagtggtgagtcacgccgggaaaatcttgcttataccggtagacggtagccactggctgtctatgttaggcgcgatccagcagctgcaacagcgggggcatgagatcgtggtgctggcgcccgacgcctccctatatataagggacggagcattctacacacttaaaacgtaccccgtcccatttcagagagaggacgtcaaggaatccttcgtaagcctgggtcacaacgtcttcgaaaatgacagctttcttcaacgtgttattaaaacatacaaaaagattaagaaggattctgccatgttgctgagcgggtgttcccacttgctgcacaataaagaattgatggcgagcctcgcagagtcctccttcgatgtgatgttgaccgacccttttttgccatgctcgcccattgtggcccagtatctttccctccccaccgttttttttctgcacgccctaccctgttccctggaattcgaggcaactcagtgccccaatccctttagttacgtgccacggcctctgtcaagccactccgaccacatgactttcctgcagcgggtgaagaacatgctgatcgcatttagtcaaaatttcttgtgtgacgtcgtttactcaccctatgccacgctcgcctccgaattcctccagagggaggtcacggtccaggatctcctgtcttcagcttccgtgtggttgtttcgttcagacttcgtcaaggattacccccgccctatcatgccaaatatggtgttcgtgggcgggattaactgtctgcaccagaatccgttaagccaggagtttgaggcttacattaatgcgagcggagaacacgggattgtcgtgttctcactgggttctatggtgtcagaaattccggagaagaaggctatggcaattgccgatgcactgggcaagattccccagactgtgttgtggcggtacacgggcactaggcccagcaatctggctaataataccatcctagttaagtggctgcctcagaacgacctgctgggccacccaatgaccagggcattcatcacccatgctgggtcccatggggtgtacgaaagtatatgtaacggggtgcctatggtgatgatgccactcttcggagatcagatggataacgctaaacgtatggaaacaaagggagccggggtgacactcaacgtgttggaaatgacctccgaggacctggaaaacgctctgaaagcagtgattaacgacaaaagctataaggaaaatatcatgagactgagcagtcttcataaagacagaccagtggagcccctagacctggcagttttttgggtggaattcgtaatgcgacacaaaggagcccctcatctaaggcccgcagcccacgatctcacttggtaccagtatcactcactggatgttattgggttcctcctggccgtggtgttgaccgtggctttcattacattcaaatgctgtgcctacggctacagaaaatgtctgggcaaaaagggacgggtgaaaaaagcacataaatctaaaactcat

SEQ ID NO: 9228 - DNA, 1599 bp, Artificial Sequence
  derived and/or modified sequence
atggcagtggagagccaagggggacgcccacttgtcttgggcctcctgctgtgtgtgctgggcccggtggtaagccacgccggaaagatcctgcttatccctgtggacgggagtcactggctgagcatgttgggggctattcagcagcttcagcagcgcggtcacgagattgttgtattggctcctgatgctagcctgtacataagagacggtgccttttacacgttgaaaacttacccggtcccattccagcgcgaggacgtgaaggagagcttcgtctccttgggccataatgttttcgaaaatgattcttttctgcaaagggtcatcaagacgtataagaaaatcaagaaggacagcgctatgcttctatccggctgtagccatctgctgcataacaaggagcttatggcgagcttggctgagagcagcttcgacgtgatgcttaccgaccctttcctgccgtgcagcccgatcgtcgcgcaatacctgagcctcccaaccgtgttctttcttcatgcactcccgtgttccctcgaatttgaggcaacacagtgcccaaaccctttttcctacgttccgcgccctttgagctcccatagcgaccacatgactttcctgcagagagttaagaacatgctgatcgccttcagccagaactttctgtgcgacgtcgtgtactcaccatacgcaaccttggcgagcgaattcttgcagcgcgaggttactgtgcaagatctgttgagctccgcgagcgtgtggctttttcgctccgacttcgtaaaggactatccaagaccgattatgccgaacatggtcttcgtcggaggtattaactgtcttcaccagaaccctttgtcccaggaatttgaggcttacatcaatgcttccggcgagcacggtatagtcgtgtttagcctgggcagtatggtcagcgaaatccctgagaaaaaggctatggccattgcagatgcattgggtaagatcccgcagaccgtgctgtggcgatatactggcacccgtccgagcaacctggcaaataataccatactggtgaaatggcttccgcaaaatgatctccttggccacccaatgactcgtgcatttatcacgcacgccgggagccacggcgtctacgagtccatatgtaacggcgtccctatggtgatgatgccattatttggcgaccagatggacaacgccaaacggatggagacgaagggtgccggagtcacgctcaatgtcctggaaatgacttctgaggatctggagaacgcactgaaggccgtcattaatgataagtcctataaggagaacataatgcgcctgagtagccttcacaaagaccgccctgtggagccgctcgatctggccgtcttttgggtggagtttgtgatgcgtcacaagggagcaccacatttgcggccagcggctcatgacttgacgtggtatcagtaccattcattggatgttatcggttttcttctggcagtcgtcctgaccgtggcttttatcactttcaagtgctgcgcctatggatatcgtaaatgtctgggcaagaagggtcgtgttaagaaagcgcacaagtccaagacccat

SEQ ID NO: 9229 - DNA, 1599 bp, Artificial Sequence
  derived and/or modified sequence
atggcagtcgaatcgcagggaggtcggccgctggtcctgggcctccttctctgtgtcctcggaccggtggtgtcgcatgcgggcaaaattctgttgatcccggtcgatggctcgcattggctctccatgcttggagcaatccagcaactgcaacagcgcggccatgagatcgtggtgctcgctcccgatgcctcgctttacatccgcgacggtgcgttttacaccctgaaaacctaccctgtcccgttccagcgcgaagatgtaaaggagtcgttcgtgtcgctcgggcacaatgtgttcgagaacgactcattcctgcaaagagtgattaagacctacaagaaaatcaaaaaagactccgcaatgctgctgtcgggatgctcccatctgctccataacaaggaactcatggcctcactcgccgaatccagcttcgacgtgatgctgacggatccattcctgccttgttcaccgatcgtggcgcagtacttgtcgctgccgacggtcttttttctgcacgctctgccctgtagtcttgagttcgaagcaactcagtgcccaaatccgttttcttacgtgccgcggcctctgtcctcacacagcgaccatatgacgttcctgcaacgggtgaagaacatgttgatcgctttttcgcagaacttcctgtgcgacgtggtctattcgccatacgcaaccctggcatcggaattccttcaacgcgaagtgactgtccaggacctgctgtcctcggcatccgtgtggctgttccgctccgacttcgtgaaggactatccgcgaccgatcatgccaaacatggtgttcgtaggaggcattaactgcttgcaccaaaatcctctttcccaagagttcgaggcgtacatcaacgccagcggagaacacggcatcgtggtcttttcccttggcagcatggtttcggaaattccggagaagaaggcgatggcgatcgctgatgcactcgggaagatcccacagaccgttctgtggcggtacactggaaccaggccctcaaacttggcgaataacaccatcctggttaagtggcttccacagaacgatctgctggggcatccaatgaccagggcattcatcacccacgcgggatcacacggcgtgtacgagtcgatatgtaatggtgtgccgatggtgatgatgccactgttcggggatcaaatggacaatgctaagagaatggagacgaagggcgccggcgtcaccctgaacgtcctggagatgaccagcgaagatctggaaaacgccttgaaagcagtgatcaacgataagtcctacaaggagaacatcatgagactgtcctcgttgcacaaggaccgccccgtggaaccgctggatttggcagtgttctgggtggaatttgtgatgcgccacaagggcgcccctcaccttcggccggcggcgcatgatcttacgtggtaccagtaccattcactggacgtcatcggattccttctggcggtcgtgctgaccgtcgcgttcatcaccttcaagtgctgcgcctacgggtatcggaagtgtctcggaaaaaagggaagagtgaaaaaggcccataagtcaaagacccat

SEQ ID NO: 9230 - DNA, 1599 bp, Artificial Sequence
  derived and/or modified sequence
atggccgtagagtcacaaggagggaggcctttggtgctaggtcttttgttatgcgtcttagggccggtggtgtctcatgcaggaaaaattcttctcattccggttgacggcagccattggctttcaatgttaggcgctatccaacaacttcaacaaaggggccatgaaattgtcgtcttagcaccggatgcaagtctctacattcgcgatggagcgttttatactttgaaaacatacccagtgccgtttcaaagagaggacgttaaagaatcctttgtctcattagggcataatgttttcgaaaacgatagctttcttcaaagggtaatcaaaacgtataagaaaatcaagaaagactcagcgatgctgctctctggatgtagccatttactgcataacaaagaactgatggcaagtttagcagaatcctcgtttgatgtcatgctgacagaccctttcctcccttgctcccctattgtcgcacagtatctcagccttccgacagtgttctttttgcatgctctcccttgctccctggaatttgaagctacgcagtgccctaatcccttcagctatgtgccgcgtccactgtcaagtcacagcgatcacatgactttcttgcagcgcgtcaaaaacatgctgattgctttctctcaaaattttttatgcgatgtcgtatattcaccctacgcgacgcttgcatctgaattccttcagcgcgaggtgaccgtccaggatttgctttcctccgcgtcagtctggttatttagaagtgatttcgttaaagattatccgcggccgattatgcccaatatggtctttgtgggcggaattaattgtttacatcaaaacccattaagccaggaatttgaagcgtatattaacgcctcgggcgaacatggtatagtagttttttcactgggatccatggtgagcgaaattccggagaaaaaggctatggccattgccgatgctttaggaaaaatcccgcagacagtattatggcgctacacgggaacgcgaccgtctaatttagcaaacaatacaatcttggtcaaatggttacctcagaatgaccttttgggacatccaatgactcgtgcctttattacccacgccgggtcccatggcgtttatgagtctatttgcaatggagtgccgatggtaatgatgccgttgtttggggaccaaatggataacgcaaagcgtatggaaacgaaaggcgcaggggtcacattaaatgtccttgaaatgacaagcgaggatcttgaaaatgcccttaaagcagttattaacgacaaatcctataaagaaaatattatgagactttcttcattgcataaggaccggcctgtcgaaccactcgatctcgctgtgttttgggtcgaatttgtaatgcgccataaaggtgcgccgcatctcagaccggctgcacatgatcttacttggtaccagtatcactctctcgatgttattggctttttattagctgtggtacttacagttgcttttatcacgttcaaatgctgcgcgtatgggtatagaaaatgcttaggcaaaaaaggacgagtcaagaaagcccataagtccaagacgcat

SEQ ID NO: 9231 - DNA, 1599 bp, Artificial Sequence
  derived and/or modified sequence
atggcggtagaatctcagggaggccgccccctggttctcggactcttgttgtgtgtactcggtccggttgtgtcccatgccggaaagatattgcttattcccgtggacggctcccattggttgagcatgttgggagccatacaacaattgcagcagcgcggccacgagatcgtggtcttggcacccgacgcctcactctacataagagacggtgccttctatacactgaagacctaccccgttccgttccagagggaggacgtcaaagagtcttttgtgtcactgggacacaatgtattcgagaatgattcctttcttcagcgcgtaatcaagacatataaaaagattaagaaggacagcgctatgctgttgtccggatgctcccatcttctgcacaataaggagctgatggcgtctctcgctgagagctctttcgacgtgatgctgactgaccctttcttgccgtgctctcccatcgtggctcaatacctcagtctccccaccgtcttcttcctgcacgccctgccatgctctctggagttcgaggccacacagtgccccaaccctttctcctacgtgccgcgccctctctcctctcattcagaccatatgacattcctgcaaagagtgaagaatatgctcatcgctttcagccaaaacttcttgtgcgacgtcgtgtattccccttacgctactttggcgtcagagtttctgcaaagggaagtaacagtgcaggatcttttgtcctctgcgagtgtatggctgttcaggtccgattttgtgaaggactatccacgcccgattatgcccaatatggtattcgtcggcggaataaactgtctccaccaaaacccactcagccaagaatttgaggcctacatcaacgcttccggagagcacggaattgtggtcttctccttgggaagcatggtctccgaaattccagaaaaaaaagcaatggcaatagccgatgcgcttggtaagatcccacagacagttctttggcgctatacaggcacccgccccagcaacttggccaacaatacgatcctcgtcaagtggttgccccagaacgaccttttgggacatcctatgaccagagcctttatcactcatgctggtagccacggagtatatgagtccatctgcaatggtgtcccaatggtcatgatgccgctcttcggtgatcaaatggataatgcgaaacgcatggaaacaaagggagccggcgttacactcaacgtcctggaaatgacttctgaggatcttgaaaacgccctgaaggccgtgatcaacgataagagttacaaagaaaacataatgagattgagttccttgcacaaagataggcccgtcgagccactggatctcgccgtcttctgggttgaattcgtgatgcgccacaaaggagcccctcatctccgccctgccgcacacgacctgacatggtaccaatatcactcacttgacgtgatcggtttcctgcttgccgtggtcctcaccgtggccttcattacgtttaagtgctgtgcttacggctataggaagtgtttgggaaagaaaggtagggtcaagaaagcacacaagagtaagacccat

SEQ ID NO: 9232 - DNA, 1599 bp, Artificial Sequence
  derived and/or modified sequence
atggcagtggaatctcagggtggaaggccgctggtccttggcctcctgttgtgtgtgctgggccccgtggtgtcccacgcagggaaaatcctcctgatccccgtagacggaagccactggctgtccatgctgggagctatccagcaattgcagcagagaggccatgagatcgtcgtcttggcacctgatgcgagtttgtacatccgcgatggggccttctatacactgaagacatatccagtaccctttcagcgagaggacgtcaaggagagctttgtgagtctagggcacaatgtgtttgaaaacgattccttcctccagcgagtgataaagacgtataagaaaatcaaaaaggactctgccatgctactctctgggtgctcccacctcttacacaataaggaactaatggcttccttagctgagagcagcttcgacgttatgctcacggatccttttttgccgtgttcccccatcgtggcccagtatttgagtctgcctactgtgtttttcctccatgctcttccttgctccctggaatttgaggcaacccagtgccctaaccccttttcatatgtgcctagaccactatcatctcacagcgatcatatgacctttctgcagagggtcaagaatatgcttatcgccttttctcagaacttcctctgcgatgtggtgtattccccatacgcaaccctggcctcagaattcttacagcgggaagtgactgtccaggatctgttgagctccgcctccgtctggctcttccgttctgattttgtcaaagactatccacggccgattatgcccaacatggtgttcgtaggcggtatcaactgccttcaccagaatccactgtcacaggagttcgaggcctacatcaatgcgagcggcgaacacggtatcgtcgtattttctttgggatctatggtctctgaaataccagaaaagaaggccatggctattgctgatgcccttggaaagattccgcagacggtgctatggcgatacactggtacgcgcccttcaaacctcgctaacaatactatcctcgttaaatggctaccgcaaaacgacttgctcggtcaccctatgaccagagctttcattacgcacgcaggaagtcacggcgtttatgagtctatctgtaacggggtacccatggtcatgatgcctctttttggtgaccagatggacaatgcaaagagaatggagaccaagggggcaggcgtgacgctaaatgttctggagatgaccagcgaagacctggaaaacgcactgaaagctgttatcaacgataaaagttacaaagagaatatcatgcgcttgagcagtctgcacaaggatcgacccgtggaaccgcttgatctcgctgtattctgggtggagtttgtcatgaggcataaaggagcccctcacctgcgaccagcagcacacgatctgacttggtatcagtatcactctttagatgtgatcggttttctgctggccgtagtgctgaccgtcgcttttataaccttcaagtgttgcgcatacggatatcgaaaatgtttgggtaaaaagggacgggtgaagaaggctcataaatctaagacgcac

SEQ ID NO: 9233 - DNA, 1599 bp, Artificial Sequence
  derived and/or modified sequence
atggccgtggagtcacagggaggacggccgctcgtgctgggcctgctgctctgtgtgctggggccagtagtctcccacgctggaaaaatcctgcttatcccggtggacggcagccactggctgtcgatgctgggcgcgattcagcaactgcaacaacgtgggcacgagatcgtggtactcgccccagatgcctcactctacatccgcgatggtgccttttacacgctgaaaacttacccggtgcccttccagcgggaagatgtcaaagaatcgttcgtgtccctgggacacaacgtttttgaaaatgactcattccttcagcgggttatcaagacctataagaagataaagaaggactcggcaatgctcctgtctggatgctcgcacctgcttcacaacaaggaactcatggcctcgctggcagaaagcagctttgacgtgatgctgactgacccgttcctcccgtgctcgccgatcgtggcccagtacctctcgcttccgactgtgttcttcttgcatgccctcccttgctcactggagttcgaggccacccaatgcccgaaccccttctcctacgttccccgccccctttcctcgcattcggatcatatgaccttcctgcaacgtgtgaagaatatgctgattgcgttttcccagaatttcctgtgcgacgtggtctacagtccgtacgcgaccttggcgtccgaatttctgcagcgcgaggtgacggtgcaagatcttttgagctcagcttcagtctggttgttcaggtctgactttgtgaaggactacccgaggccgatcatgccaaacatggtgtttgtcgggggcatcaattgtctccaccaaaacccgctgtcccaggaattcgaggcttacatcaacgcctcgggcgagcatggaatcgtggtcttttcattggggagcatggtttccgaaatccccgaaaagaaagcgatggcgatcgctgacgcgctgggaaagattcctcagaccgtgctttggcgctacactgggactagaccttcgaatctggctaacaacacgattcttgtgaagtggctgcctcagaacgatctgctgggccatccaatgaccagagctttcatcacccatgcgggttcacatggagtgtacgaatcgatctgcaacggggtcccaatggtcatgatgccattgttcggcgaccagatggataacgcaaaacggatggagactaaaggagcaggagtgaccttgaacgtcctggaaatgactagcgaagatttggagaatgccctgaaagcagtcatcaatgataagagctacaaggagaatatcatgcgcctctcatccctgcacaaggaccgtcctgtcgagcccctggatctcgcagtgttctgggtcgaattcgtgatgcggcacaaaggcgccccacacctgcggcctgccgcacacgacctgacttggtaccagtaccactcactcgacgtaatcggattcctgctcgccgtcgtgttgaccgtggccttcatcaccttcaaatgttgcgcttatggatacagaaaatgcttgggaaaaaagggtcgagtgaagaaggcacataagagcaagacccac

SEQ ID NO: 9234 - DNA, 1599 bp, Artificial Sequence
  derived and/or modified sequence
atggcggtagaatcgcaaggtggtcgtccgctagttctaggtctattattatgtgtattaggtccggtagtatcgcatgcgggtaaaatattactaataccggtagatggttcgcattggctatcgatgctaggtgcgatacaacaattacaacaacgtggtcatgaaatagtagtattagcgccggatgcgtcgttatatatacgagatggtgcgttttatacgctaaaaacgtatccggttccgtttcaacgtgaagatgtaaaagaatcgtttgtttcgctaggtcataatgtatttgaaaatgattcgtttttacaacgtgtaataaaaacgtataaaaaaataaaaaaagattcggcgatgttattatcgggttgttcgcatttactacataataaagaactaatggcgtcgttagcggaatcgtcgtttgatgtaatgttaacggatccgtttttaccgtgttcgccgatagttgcgcaatatctatcgttaccgacggtattttttctacatgcgttaccgtgttcgctagaatttgaagcgacgcaatgtccgaatccgttttcgtatgtaccgcgtccgttatcgtcgcattcggatcatatgacgtttttacaacgtgtaaaaaatatgctaatagcgttttcgcaaaattttctatgtgatgtagtttattcgccgtatgcgacgttagcgtcggaatttttacaacgagaagtaacggtacaagatctactatcgtcggcgtcggtatggttatttcgatcggattttgtaaaagattatccgcgtccgataatgccgaatatggtttttgtaggtggtataaattgtttacatcaaaatccgttatcgcaagaatttgaagcgtatataaatgcgtcgggtgaacatggtatagtagtattttcgctaggttcgatggtttcggaaataccggaaaaaaaagcgatggcgatagcggatgcgttaggtaaaataccgcaaacggttttatggcgatatacgggtacgcgtccgtcgaatttagcgaataatacgatattagtaaaatggttaccgcaaaatgatctactaggtcatccgatgacgcgtgcgtttataacgcatgcgggttcgcatggtgtttatgaatcgatatgtaatggtgttccgatggtaatgatgccgctatttggtgatcaaatggataatgcgaaacgtatggaaacgaaaggtgcgggtgtaacgttaaatgtattagaaatgacgtcggaagatttagaaaatgcgctaaaagcggttataaatgataaatcgtataaagaaaatataatgcgtttatcgtcgttacataaagatcgtccggtagaaccgttagatttagcggttttttgggtagaatttgttatgcgacataaaggtgcgccgcatctacgtccggcggcgcatgatctaacgtggtatcaatatcattcgttagatgtaataggttttttattagcggttgttctaacggtagcgtttataacgtttaaatgttgtgcgtatggttatcgaaaatgtttaggtaaaaaaggtcgtgtaaaaaaagcgcataaatcgaaaacgcat

SEQ ID NO: 9235 - DNA, 1805 bp, Artificial Sequence
  derived and/or modified sequence
gggaaataagagagaaaagaagagtaagaagaaatataagagccaccatggcggtcgagtcgcaaggtggacggcctcttgtgcttggtttgctcctttgtgtactcggccctgtcgtgtcacacgccgggaagattttgttgatccccgtggacggatcacattggctttcgatgctcggagccatccagcagttgcagcaaagggggcatgagattgtggtcctggctccggacgcgtcgctctacattcgcgatggtgcattctatactcttaagacatatccagtgcccttccagcgcgaagatgtcaaagagtcatttgtctcactgggacacaacgtattcgagaacgactccttcttgcagagagtcatcaagacgtacaagaaaatcaaaaaggatagcgccatgctgttgtcagggtgctcgcacttgcttcacaacaaggagctgatggcgtcactggcggagtcgagctttgatgtcatgttgacggacccgtttttgccgtgtagcccgatcgtggcgcaatacttgtcccttcccaccgtattcttcctccacgcgcttccctgtagcctggagtttgaggcgacccagtgtcccaatcccttttcatacgtgcctcgaccgttgtcatcacattcggaccacatgacgttcctccagcgggtgaagaatatgctcatcgccttttcccaaaacttcctctgcgacgtcgtctactccccttacgccacgctggcatccgagtttctgcagcgagaggtgactgtgcaagaccttctctcgtcggcatcagtatggttgttccgatcagatttcgtaaaggactacccaagacccatcatgcccaacatggtgttcgtagggggaatcaattgcctccaccagaatccgctgagccaggagtttgaagcgtatatcaacgcgtcgggggaacacggaattgtcgtgtttagcctggggtcgatggtatcggagattcccgaaaagaaggcgatggcaatcgcagacgcactcggaaagatcccccagacagtcctttggcggtatacagggacgaggccgagcaatttggcaaacaatacgatccttgtgaaatggttgccgcagaatgatcttctcggtcatcccatgacaagagccttcatcacgcacgccggttcgcatggggtatatgaatcgatttgcaatggcgtgcctatggtgatgatgccgctctttggtgaccagatggacaatgcgaaaaggatggaaaccaagggagcaggagtcaccctgaatgtgctggaaatgacatccgaggatctcgaaaacgcgcttaaagcggtcattaacgacaaatcgtataaggaaaacatcatgaggttgagctcccttcacaaagatagacctgtcgagccattggacctggccgtgttttgggtcgagttcgtgatgcggcacaagggagcgccacacttgaggccagctgcgcatgatctgacgtggtatcagtaccactccctcgatgtgattggcttcctgctggcagtcgtgttgactgtggcgtttatcacattcaaatgttgcgcttacggctaccggaagtgcttgggaaagaaaggacgcgtgaaaaaggcccataagtcgaaaacacattgataagctgccttctgcggggcttgccttctggccatgcccttcttctctcccttgcacctgtacctctcaaacaccattgtcacaaacaccattgtcacaaacaccattgtcacaaacaccattgtcatggtctttgaataaagcctgagtaggaag

SEQ ID NO: 9236 - DNA, 1602 bp, Artificial Sequence
  derived and/or modified sequence
atggccgtggagagccagggcggcagacccctggtgctgggcctgctgctgtgcgtgctgggccccgtggtgagccacgccggcaagatcctgctgatccccgtggacggcagccactggctgagcatgctgggcgccatccagcagctgcagcagagaggccacgagatcgtggtgctggcccccgacgccagcctgtacatcagagacggcgccttctacaccctgaagacctaccccgtgcccttccagagagaggacgtgaaggagagcttcgtgagcctgggccacaacgtgttcgagaacgacagcttcctgcagagagtgatcaagacctacaagaagatcaagaaggacagcgccatgctgctgagcggctgcagccacctgctgcacaacaaggagctgatggccagcctggccgagagcagcttcgacgtgatgctgaccgaccccttcctgccctgcagccccatcgtggcccagtacctgagcctgcccaccgtgttcttcctgcacgccctgccctgcagcctggagttcgaggccacccagtgccccaaccccttcagctacgtgcccagacccctgagcagccacagcgaccacatgaccttcctgcagagagtgaagaacatgctgatcgccttcagccagaacttcctgtgcgacgtggtgtacagcccctacgccaccctggccagcgagttcctgcagagagaggtgaccgtgcaggacctgctgagcagcgccagcgtgtggctgttcagaagcgacttcgtgaaggactaccccagacccatcatgcccaacatggtgttcgtgggcggcatcaactgcctgcaccagaaccccctgagccaggagttcgaggcctacatcaacgccagcggcgagcacggcatcgtggtgttcagcctgggcagcatggtgagcgagatccccgagaagaaggccatggccatcgccgacgccctgggcaagatcccccagaccgtgctgtggagatacaccggcaccagacccagcaacctggccaacaacaccatcctggtgaagtggctgccccagaacgacctgctgggccaccccatgaccagagccttcatcacccacgccggcagccacggcgtgtacgagagcatctgcaacggcgtgcccatggtgatgatgcccctgttcggcgaccagatggacaacgccaagagaatggagaccaagggcgccggcgtgaccctgaacgtgctggagatgaccagcgaggacctggagaacgccctgaaggccgtgatcaacgacaagagctacaaggagaacatcatgagactgagcagcctgcacaaggacagacccgtggagcccctggacctggccgtgttctgggtggagttcgtgatgagacacaagggcgccccccacctgagacccgccgcccacgacctgacctggtaccagtaccacagcctggacgtgatcggcttcctgctggccgtggtgctgaccgtggccttcatcaccttcaagtgctgcgcctacggctacagaaagtgcctgggcaagaagggcagagtgaagaaggcccacaagagcaagacccactag

SEQ ID NO: 9237 - DNA, 1335 bp, Artificial Sequence
  derived and/or modified sequence
atggccgtggagagccagggcggcagacccctggtgctgggcctgctgctgtgcgtgctgggccccgtggtgagccacgccggcaagatcctgctgatccccgtggacggcagccactggctgagcatgctgggcgccatccagcagctgcagcagagaggccacgagatcgtggtgctggcccccgacgccagcctgtacatcagagacggcgccttctacaccctgaagacctaccccgtgcccttccagagagaggacgtgaaggagagcttcgtgagcctgggccacaacgtgttcgagaacgacagcttcctgcagagagtgatcaagacctacaagaagatcaagaaggacagcgccatgctgctgagcggctgcagccacctgctgcacaacaaggagctgatggccagcctggccgagagcagcttcgacgtgatgctgaccgaccccttcctgccctgcagccccatcgtggcccagtacctgagcctgcccaccgtgttcttcctgcacgccctgccctgcagcctggagttcgaggccacccagtgccccaaccccttcagctacgtgcccagacccctgagcagccacagcgaccacatgaccttcctgcagagagtgaagaacatgctgatcgccttcagccagaacttcctgtgcgacgtggtgtacagcccctacgccaccctggccagcgagttcctgcagagagaggtgaccgtgcaggacctgctgagcagcgccagcgtgtggctgttcagaagcgacttcgtgaaggactaccccagacccatcatgcccaacatggtgttcgtgggcggcatcaactgcctgcaccagaaccccctgagccaggagttcgaggcctacatcaacgccagcggcgagcacggcatcgtggtgttcagcctgggcagcatggtgagcgagatccccgagaagaaggccatggccatcgccgacgccctgggcaagatcccccagaccgtgctgtggagatacaccggcaccagacccagcaacctggccaacaacaccatcctggtgaagtggctgccccagaacgacctgctgggccaccccatgaccagagccttcatcacccacgccggcagccacggcgtgtacgagagcatctgcaacggcgtgcccatggtgatgatgcccctgttcggcgaccagatggacaacgccaagagaatggagaccaagggcgccggcgtgaccctgaacgtgctggagatgaccagcgaggacctggagaacgccctgaaggccgtgatcaacgacaagagaaagaagcagcagagcggcagacagatgtag

SEQ ID NO: 9238 - DNA, 1602 bp, Artificial Sequence
  derived and/or modified sequence
atggctgttgagtcgcaaggtgggagacctctcgttctgggactccttctctgtgtgctcggtccagtggtgtcccatgcaggcaagatcctcctgataccagtggacggatcacattggctaagcatgcttggagcgatccagcagctccaacagcgcgggcatgagattgtagttttagctcctgacgctagcttgtatatccgcgatggggccttttacaccttaaagacttatcccgtgccgtttcagagggaggacgttaaggagagcttcgtgtccttaggccacaatgtcttcgagaatgacagtttcctccaacgcgttatcaagacatacaagaaaattaagaaggatagtgccatgctgctctcagggtgttcccatctgttacacaacaaggagcttatggcatccctggcagaaagctcattcgatgtgatgctcaccgatcccttcttaccctgctcaccaatagttgcccagtatctttcattacctacagtattttttctccacgcccttccatgttcactagaatttgaggctactcaatgcccgaaccccttctcctatgtcccccggccgctgtcatctcacagtgaccacatgaccttcttacagcgggtgaagaacatgcttattgcgtttagtcagaattttctctgcgacgtggtctactccccctatgccacgctggcaagcgaattcctccaaagggaagtgaccgtccaggatctgctgagtagcgctagtgtatggctgtttagatctgattttgtgaaggactacccccgtcccatcatgcccaacatggttttcgttggcggaatcaactgcctgcaccagaacccactgagccaggaatttgaagcatatatcaacgccagcggggaacacggcattgtggtgtttagtctaggcagcatggtttcagagattcccgagaaaaaggccatggcgatcgccgatgctctgggtaaaatccctcagaccgtcctctggagatacaccggcacacggcccagcaatctcgccaataacacaatccttgttaaatggcttccacaaaacgatctgctggggcatcctatgacacgcgcttttatcactcacgcgggctcccatggagtgtacgaaagcatctgtaatggagtgccaatggtgatgatgccgctctttggcgaccagatggacaatgcaaagcgcatggagaccaaaggggctggagttaccttaaacgtgctagagatgacttccgaggatctagagaatgcccttaaggcggtgatcaatgacaagtcatacaaggaaaatattatgaggctgagctccctgcacaaggaccgccctgtggagccactcgacctggccgtgttttgggtcgaattcgttatgaggcacaaaggggccccccaccttagacctgccgctcatgatctgacttggtaccagtaccatagtctggatgtgatagggttccttctggctgttgttctgacagtcgcgtttattacatttaagtgctgtgcctatggctatcggaagtgtttgggcaaaaaaggcagagttaaaaaagctcataagtctaagacgcattag

SEQ ID NO: 9239 - DNA, 1335 bp, Artificial Sequence
  derived and/or modified sequence
atggccgtagagagccagggcggtaggcccctcgtgctggggcttctgctctgcgtgctggggccggttgtatcacacgccggcaagattttgctcatccctgttgacggtagccactggctctctatgctcggcgccatccagcaattgcagcaaagagggcacgagattgttgtcctagccccggatgccagcctgtacattcgagacggggccttttatacgctcaaaacctaccccgtaccgttccagcgcgaagatgtaaaggagagctttgttagtctggggcacaatgttttcgagaacgactcctttttgcagagggttattaagacttataaaaagattaagaaggactcagctatgctcctctcaggctgcagccacctgctgcacaacaaagaactgatggccagcctggctgaaagtagcttcgacgttatgcttaccgatccattcttgccttgttccccaattgtagcccagtacctgtccctccctaccgtgtttttcttgcacgctctcccttgctcgctagagttcgaggcaacccagtgtcctaaccctttcagctacgttccgagaccattgagctcacatagtgatcacatgacatttctgcaacgcgtcaagaacatgttgattgcctttagccagaattttctgtgtgacgtagtgtattccccttatgccaccctggccagcgagtttctccagcgggaagtcaccgtgcaggatcttctgagtagtgccagcgtctggctttttagaagcgatttcgtcaaggactaccccaggccaataatgcccaacatggtcttcgtgggcggaattaactgtctccatcagaaccccctgagccaggaatttgaagcctacatcaacgcaagcggagaacacggcattgtagtatttagcctcgggagtatggtgagcgagattcctgagaagaaggctatggccatcgccgatgccctgggcaagattccccagacagtgctctggagatacacaggcactcgtccgtcaaaccttgcaaataataccattctggtgaaatggctgccccagaatgatcttctaggtcatccgatgacaagggcattcatcactcacgctggatcccatggggtctacgaaagtatttgcaacggtgtgccaatggttatgatgcccctgttcggcgaccagatggacaatgcaaaaaggatggagactaagggagccggggtgacgctcaatgtattggagatgactagcgaagatctggagaacgctcttaaggccgtaataaacgataaaaggaagaagcagcagagcgggagacagatgtag

SEQ ID NO: 9240 - DNA, 1602 bp, Artificial Sequence
  derived and/or modified sequence
atggctgtggagagccagggcggccggcccctggtgctgggcctgctgctgtgtgtgctgggccctgtggtgtcccatgctgggaagatcctgctgatccctgtggatggcagccactggctgtccatgctgggcgccatccagcagctgcagcagaggggccatgaaattgtggtgctggccccagatgccagcctgtacatcagagatggagccttctacaccctgaagacctaccctgtgcccttccagcgggaggatgtgaaggagagctttgtgtccctgggccacaacgtgtttgaaaatgacagcttcctgcagagggtcatcaagacctacaagaagatcaagaaggacagcgccatgctgctgagcggctgcagccacctgctgcacaacaaggagctgatggccagcctggccgagagcagctttgatgtgatgctgacagaccccttcctgccctgcagccccatcgtggcccagtacctgagcctgcccaccgtcttcttcctgcacgccctgccctgcagcctggagtttgaggccacccagtgccccaaccccttctcctatgtgccccggcccctgagcagccacagcgaccacatgaccttcctgcagagggtgaagaacatgctgattgccttcagccagaacttcctgtgtgatgtggtgtacagcccctatgccaccctggccagcgagttcctgcagcgggaggtgacagtgcaggacctgctgagcagcgcctctgtgtggctgttcagaagtgactttgtgaaggactacccccggcccatcatgcccaacatggtgtttgtgggcggcatcaactgcctgcaccagaaccccctgagccaggagtttgaggcctacatcaatgccagcggggagcacggcatcgtggtgttcagcctgggctccatggtgtctgagatccctgagaagaaggccatggccatcgcagatgccctgggcaagatcccccagacagtgctgtggagatacacaggcacccggcccagcaacctggccaacaacaccatcctggtgaagtggctgccccagaatgacctgctgggccaccccatgacccgggccttcatcacccatgctggcagccacggcgtgtatgagagcatctgcaatggagtgcccatggtgatgatgcccctgtttggagaccagatggacaatgccaagaggatggagaccaagggagctggggtgaccctgaatgtgctggagatgaccagcgaggacctggagaatgccctgaaggctgtgatcaatgacaagagctacaaggagaacatcatgaggctgagcagcctgcacaaggacaggcctgtggagcccctggacctggccgtgttctgggtggagtttgtgatgaggcacaagggggccccccacctgcggcctgctgcccatgacctgacctggtaccagtaccacagcctggatgtgattggcttcctgctggccgtggtgctgactgtggccttcatcaccttcaagtgctgtgcctacggctacaggaagtgcctgggcaagaagggccgggtgaagaaggcccacaagagcaagacccactag

SEQ ID NO: 9241 - DNA, 1335 bp, Artificial Sequence
  derived and/or modified sequence
atggctgtggagagccagggcggccggcccctggtgctgggcctgctgctgtgtgtgctgggccctgtggtgtcccatgctgggaagatcctgctgatccctgtggatggcagccactggctgtccatgctgggcgccatccagcagctgcagcagaggggccatgaaattgtggtgctggccccagatgccagcctgtacatcagagatggagccttctacaccctgaagacctaccctgtgcccttccagcgggaggatgtgaaggagagctttgtgtccctgggccacaacgtgtttgaaaatgacagcttcctgcagagggtcatcaagacctacaagaagatcaagaaggacagcgccatgctgctgagcggctgcagccacctgctgcacaacaaggagctgatggccagcctggccgagagcagctttgatgtgatgctgacagaccccttcctgccctgcagccccatcgtggcccagtacctgagcctgcccaccgtcttcttcctgcacgccctgccctgcagcctggagtttgaggccacccagtgccccaaccccttctcctatgtgccccggcccctgagcagccacagcgaccacatgaccttcctgcagagggtgaagaacatgctgattgccttcagccagaacttcctgtgtgatgtggtgtacagcccctatgccaccctggccagcgagttcctgcagcgggaggtgacagtgcaggacctgctgagcagcgcctctgtgtggctgttcagaagtgactttgtgaaggactacccccggcccatcatgcccaacatggtgtttgtgggcggcatcaactgcctgcaccagaaccccctgagccaggagtttgaggcctacatcaatgccagcggggagcacggcatcgtggtgttcagcctgggctccatggtgtctgagatccctgagaagaaggccatggccatcgcagatgccctgggcaagatcccccagacagtgctgtggagatacacaggcacccggcccagcaacctggccaacaacaccatcctggtgaagtggctgccccagaatgacctgctgggccaccccatgacccgggccttcatcacccatgctggcagccacggcgtgtatgagagcatctgcaatggagtgcccatggtgatgatgcccctgtttggagaccagatggacaatgccaagaggatggagaccaagggagctggggtgaccctgaatgtgctggagatgaccagcgaggacctggagaatgccctgaaggctgtgatcaatgacaagaggaagaagcagcagagcggccggcagatgtag

SEQ ID NO: 9242 - DNA, 1602 bp, Artificial Sequence
  derived and/or modified sequence
atggccgtggagagccagggcggccggcccctggtgctgggcctgctcctgtgcgtgctaggaccggtcgtgtcacatgctggaaagatcctcttgattcctgttgacggatcgcactggttaagcatgctgggcgccattcagcagctgcagcagcgaggccacgaaatcgtcgtgttggctccggacgcctccctttatatccgagacggcgcattttacaccctgaagacttacccagtacccttccagagagaagacgtcaaggaatcttttgtcagtctcggacataatgtgttcgaaaacgactcatttcttcagagggtgatcaagacatataaaaagatcaagaaagactccgccatgctcctgtccggctgttcacacctgctgcataacaaggagctgatggcctcccttgccgagagcagtttcgacgtgatgctgacagacccctttctcccctgttccccaatagtggcccagtacctaagccttccaacagttttttttctccatgcgctgccttgctctctggaatttgaggcaacccagtgtcctaaccccttttcgtacgtacctcggcctctctctagccacagtgaccacatgacctttttgcagcgagtgaaaaatatgttgatcgctttttcacagaacttcctgtgcgacgtcgtttatagcccttatgcgactctggcatctgagttcctgcagcgcgaggtgaccgtccaggacttactgagttcggcctccgtttggctattcaggagcgacttcgtgaaagattacccacggccaataatgccaaacatggtattcgttggcgggatcaactgtttgcaccagaacccactctctcaggagttcgaggcttatataaacgcctccggagagcacgggatcgtcgtattctccctgggatccatggtgtccgagatcccagaaaagaaagcaatggcgatcgcagacgctctgggcaagatcccacagactgtcctgtggcgctataccggtacccgccccagtaatctcgctaataacaccatacttgtgaagtggttgccccagaacgacctgttaggccaccccatgactagagcttttattactcacgctggctcgcacggagtgtacgaaagcatatgtaatggcgtccccatggtgatgatgcctttattcggagatcagatggacaacgctaaacgtatggaaacaaagggcgctggagtgactctgaacgtcttggaaatgacaagcgaagatctagagaatgcccttaaagctgtcataaacgacaagtcttacaaggaaaatattatgcgcctcagctctctccacaaggaccggcccgtagagccgctggaccttgccgtgttttgggtcgaattcgtgatgagacataagggtgctccacaccttcgccctgctgcccacgacctgacttggtaccagtaccactctctcgacgttatcggtttcttactggctgtcgtcttgaccgtggccttcatcacgttcaagtgttgcgcctatggctaccgaaaatgtctggggaagaaagggagagtgaagaaggcacataagagcaagacacactag

SEQ ID NO: 9243 - DNA, 1335 bp, Artificial Sequence
  derived and/or modified sequence
atggccgtggagagccagggcggccggcccctggtgctgggcctgctcctgtgtgtgctcggccctgtggtgtcacacgccggcaagatcttgctgattccggtggatgggtcccactggctgagcatgttgggcgccatacagcagctgcagcagagagggcatgaaatcgtggtgcttgccccggacgcaagtctgtacatccgagatggagctttctacacgctaaagacataccccgtcccctttcagcgagaagatgtgaaagagtcattcgtcagtcttggtcacaacgtgttcgagaacgactctttcctgcagagggtgataaagacgtataaaaagataaaaaaagacagtgcaatgctgctgtccggatgcagtcacttgttacataataaggaactgatggcaagcttagccgaatcttcgtttgatgtgatgcttaccgatcctttcctcccatgttcacctattgtggcccagtatctcagtttgccgaccgtgttcttcctccatgcccttccttgtagcttggaattcgaagcaactcagtgccctaaccctttttcttatgtaccccgcccattgtcttcccacagtgatcacatgaccttcttgcagcgagtaaagaatatgttaatcgcatttagccaaaactttctttgtgatgtggtctattccccctacgcgaccctggccagcgagtttttacagcgtgaagtcacggtgcaggacctccttagttccgctagcgtttggctgtttcgttctgacttcgtaaaggattacccacggccgatcatgccaaatatggtattcgtgggagggatcaattgtctgcatcaaaatcctctctcacaggaattcgaagcctatattaatgctagcggcgagcatgggattgtcgtgttctctctgggaagtatggtgagtgagattcccgaaaagaaggccatggccatcgcagacgctctcggcaaaatcccacagaccgtactttggcggtacaccggtacccggccttcaaatcttgcgaacaatacaattcttgtcaaatggttgccccagaatgatttgctcggtcatccgatgacgcgtgccttcattacccacgccggctcacatggcgtgtacgaaagtatctgtaatggtgtacccatggtaatgatgccattgttcggtgaccagatggataacgcgaaacggatggagaccaaaggtgcaggtgtgacattgaatgtgctggagatgacaagcgaggatttagagaacgccttgaaggcagtgattaatgacaagcggaagaaacagcagtcaggaagacagatgtag

SEQ ID NO: 9244 - DNA, 1602 bp, Artificial Sequence
  derived and/or modified sequence
atggctgttgagagccagggcggaaggccactcgttctaggtctcctgctttgcgtgttaggacccgtggtaagtcacgccggaaagattttgctgattccggtggacggatcccactggctcagcatgttgggagccattcaacaattacagcagagaggccatgagattgtggtcctggcaccggacgccagtttgtatatacgagatggcgctttttatacgctgaagacgtatcctgtgccctttcaaagagaagacgtgaaagaatcttttgtcagcctgggccacaatgttttcgagaatgactcttttctacagagagtcataaagacgtacaaaaagattaagaaagacagtgcgatgctcctgtccggctgcagccacctacttcacaataaagagttaatggcctccctggcggaatcttccttcgatgttatgttaacagatccatttctgccatgcagcccgatcgtggctcaatatctgagcctgccaacagttttcttcctccatgctctaccctgtagcttggagtttgaagcaacacagtgcccaaacccgttctcttacgtgccccgtcccctatcttcccatagcgaccacatgacctttctgcagcgtgtcaaaaacatgctaatcgcattcagccagaattttctgtgtgacgtcgtgtactccccctacgccactctagcttctgagtttctccagcgtgaagtgactgtgcaggacttgctatcaagtgccagcgtttggctgttcagatccgactttgtgaaagactatcctaggcctattatgcccaacatggttttcgtgggcggaatcaactgcctccaccaaaatcccttatcccaggagttcgaggcatacattaatgcttcgggtgagcacgggatcgtggtgttctcgctgggtagcatggtctctgaaattccggaaaaaaaggcgatggctatcgccgatgctttgggaaaaatcccccaaacagtgctgtggaggtatacgggcacaagaccctctaaccttgccaataacaccattctggtgaagtggcttccccagaacgatctcctgggccatccgatgactagagcttttatcacgcacgccggatcacatggagtttacgaatcaatctgtaacggggtgcctatggtgatgatgccactgtttggcgaccagatggacaatgcaaagcgtatggagaccaagggcgctggcgtgaccctgaacgtgctcgagatgactagcgaggacctggagaatgctctaaaggccgtaattaacgataagagctacaaggagaatataatgcgcctctcctcattacacaaagatcggccagtcgagcctctggatctcgccgtgttctgggtggagttcgttatgcgacacaagggggctcctcacctgcggcctgccgctcacgacctgacttggtaccaataccacagtctggacgtcattggttttctacttgctgtggtcctgactgtagcctttatcaccttcaagtgttgtgcatacgggtaccggaagtgtctgggtaaaaagggacgggtgaagaaagcccataagagcaagactcactag

SEQ ID NO: 9245 - DNA, 1335 bp, Artificial Sequence
  derived and/or modified sequence
atggccgttgagtctcagggaggcaggcccctagttctcggactccttctgtgcgtcctgggccctgtcgtgagccacgccggtaagatcctcttgatccccgtagatggttcccattggctgagtatgcttggcgctattcaacagctccaacagcgcggacatgagattgtcgttctcgcaccagacgctagtttatacattcgcgatggcgcattttacaccctgaaaacttaccccgtccccttccagcgggaggacgtgaaagaaagctttgtcagtctcgggcataacgttttcgagaacgatagctttctccaacgggttatcaagacctataagaaaattaaaaaggattcagccatgctgttatcggggtgcagccatctgctgcacaacaaggaactgatggcatctctcgctgaaagctctttcgacgtgatgctgaccgatcctttcctcccctgttcccccatagtggcccagtacctttccctccccactgtgttttttttgcacgccttaccttgttcgctagaatttgaagccacccagtgcccaaaccccttctcatacgtacccaggcccctaagttcccactccgaccacatgacctttctgcagcgtgtgaaaaatatgctcattgcattttcccagaacttcctgtgcgatgttgtatattcaccatacgctacactcgcatccgagtttttgcaaagagaggtgacagtacaagatctgttatcctccgcttcggtgtggctgttcagaagtgacttcgtgaaagactatcctcgtcccatcatgcccaacatggtgttcgtagggggaataaattgtttgcaccagaatcccctttcccaagagttcgaagcttatatcaatgcctccggagaacacgggatcgtggtgttttctttgggatccatggtgagcgaaatcccagagaagaaggctatggccatagccgacgccttggggaagatcccacagactgtcctttggcggtacaccggtacgcgaccgagtaatctggccaacaacacaatactagttaagtggctgccacagaatgatctgcttggtcacccaatgacaagggctttcatcacgcacgcaggctctcatggcgtctatgaatctatctgcaatggtgtaccaatggtgatgatgcctctgttcggcgatcagatggacaacgccaaaagaatggaaactaagggagctggggtaaccctgaacgtcctggaaatgacctccgaggatttggagaacgctctcaaagcggtaataaacgacaagaggaagaaacagcagtccggtcgacagatgtag

SEQ ID NO: 9246 - DNA, 2382 bp, Artificial Sequence
  derived and/or modified sequence
aagtaggagagggcgaacctctggcaggagcaaaggcgccatggctgtggagtcccagggcggacgcccacttgtcctgggcctgctgctgtgtgtgctgggcccagtggtgtcccatgctgggaagatactgttgatcccagtggatggcagccactggctgagcatgcttggggccatccagcagctgcagcagaggggacatgaaatagttgtcctagcacctgacgcctcgttgtacatcagagacggagcattttacaccttgaagacgtaccctgtgccattccaaagggaggatgtgaaagagtcttttgttagtctcgggcataatgtttttgagaatgattctttcctgcagcgtgtgatcaaaacatacaagaaaataaaaaaggactctgctatgcttttgtctggctgttcccacttactgcacaacaaggagctcatggcctccctggcagaaagcagctttgatgtcatgctgacggaccctttccttccttgcagccccatcgtggcccagtacctgtctctgcccactgtattcttcttgcatgcactgccatgcagcctggaatttgaggctacccagtgccccaacccattctcctacgtgcccaggcctctctcctctcattcagatcacatgaccttcctgcagcgggtgaagaacatgctcattgccttttcacagaactttctgtgcgacgtggtttattccccgtatgcaacccttgcctcagaattccttcagagagaggtgactgtccaggacctattgagctctgcatctgtctggctgtttagaagtgactttgtgaaggattaccctaggcccatcatgcccaatatggtttttgttggtggaatcaactgccttcaccaaaatccactatcccaggaatttgaagcctacattaatgcttctggagaacatggaattgtggttttctctttgggatcaatggtctcagaaattccagagaagaaagctatggcaattgctgatgctttgggcaaaatccctcagacagtcctgtggcggtacactggaacccgaccatcgaatcttgcgaacaacacgatacttgttaagtggctaccccaaaacgatctgcttggtcacccgatgacccgtgcctttatcacccatgctggttcccatggtgtttatgaaagcatatgcaatggcgttcccatggtgatgatgcccttgtttggtgatcagatggacaatgcaaagcgcatggagactaagggagctggagtgaccctgaatgttctggaaatgacttctgaagatttagaaaatgctctaaaagcagtcatcaatgacaaaagttacaaggagaacatcatgcgcctctccagccttcacaaggaccgcccggtggagccgctggacctggccgtgttctgggtggagtttgtgatgaggcacaagggcgcgccacacctgcgccccgcagcccacgacctcacctggtaccagtaccattccttggacgtgattggtttcctcttggccgtcgtgctgacagtggccttcatcacctttaaatgttgtgcttatggctaccggaaatgcttggggaaaaaagggcgagttaagaaagcccacaaatccaagacccattgagaagtgggtgggaaataaggtaaaattttgaaccattccctagtcatttccaaacttgaaaacagaatcagtgttaaattcattttattcttattaaggaaatactttgcataaattaatcagccccagagtgctttaaaaaattctcttaaataaaaataatagactcgctagtcagtaaagatatttgaatatgtatcgtgccccctctggtgtctttgatcaggatgacatgtgccatttttcagaggacgtgcagacaggctggcattctagattacttttcttactctgaaacatggcctgtttgggagtgcgggattcaaaggtggtcccacggctgcccctactgcaaatggcagttttaatcttatcttttggcttctgcagatggttgcaattgatccttaaccaataatggtcagtcctcatctctgtcgtgcttcataggtgccaccttgtgtgtttaaagaagggaagctttgtacctttagagtgtaggtgaaatgaatgaatggcttggagtgcactgagaacagcatatgatttcttgctttggggaaaaagaatgatgctatgaaattggtgggtggtgtatttgagaagataatcattgcttatgtcaaatggagctgaatttgataaaaacccaaaatacagctatgaagtgctgggcaagtttactttttttctgatgtttcctacaactaaaaataaattaataaatttatataaattct

SEQ ID NO: 9247 - DNA, 3389 bp, Artificial Sequence
  derived and/or modified sequence
atggctgtggagtcccagggcggacgcccacttgtcctgggcctgctgctgtgtgtgctgggcccagtggtgtcccatgctgggaagatactgttgatcccagtggatggcagccactggctgagcatgcttggggccatccagcagctgcagcagaggggacatgaaatagttgtcctagcacctgacgcctcgttgtacatcagagacggagcattttacaccttgaagacgtaccctgtgccattccaaagggaggatgtgaaagagtcttttgttagtctcgggcataatgtttttgagaatgattctttcctgcagcgtgtgatcaaaacatacaagaaaataaaaaaggactctgctatgcttttgtctggctgttcccacttactgcacaacaaggagctcatggcctccctggcagaaagcagctttgatgtcatgctgacggaccctttccttccttgcagccccatcgtggcccagtacctgtctctgcccactgtattcttcttgcatgcactgccatgcagcctggaatttgaggctacccagtgccccaacccattctcctacgtgcccaggcctctctcctctcattcagatcacatgaccttcctgcagcgggtgaagaacatgctcattgccttttcacagaactttctgtgcgacgtggtttattccccgtatgcaacccttgcctcagaattccttcagagagaggtgactgtccaggacctattgagctctgcatctgtctggctgtttagaagtgactttgtgaaggattaccctaggcccatcatgcccaatatggtttttgttggtggaatcaactgccttcaccaaaatccactatcccaggaatttgaagcctacattaatgcttctggagaacatggaattgtggttttctctttgggatcaatggtctcagaaattccagagaagaaagctatggcaattgctgatgctttgggcaaaatccctcagacagtcctgtggcggtacactggaacccgaccatcgaatcttgcgaacaacacgatacttgttaagtggctaccccaaaacgatctgcttggtcacccgatgacccgtgcctttatcacccatgctggttcccatggtgtttatgaaagcatatgcaatggcgttcccatggtgatgatgcccttgtttggtgatcagatggacaatgcaaagcgcatggagactaagggagctggagtgaccctgaatgttctggaaatgacttctgaagatttagaaaatgctctaaaagcagtcatcaatgacaaaagaaagaagcagcagtcaggaagacagatgtgaagagctggagcatgttcagatgagaggagacggaacacggggacacaccagcttgagcaagggacaacaggggaggactgatgactgacttcccacctttgaggtgctaatgtgtgtgtggtggcactggataaaagatcaatgttggctaggcaccatggcacacgcctgtagtcccagccactctggaggctaaggcgggaggattgcttgagcccagaagttggaggctgctatgagccgtgatcatgccactgcactccagcaacctgggcaacagagtgagaccctgtctcaaaaaaaaaaaaaaaaatgaaaagtccacataacctgagcatcatgtgcccagagcgttgggtggtgtggtcccattccttccttccagcggcttcttctggccacctcaatgtcaggatgtcctgctcacatatcaataccattaaaacctgacttctttccctgcactgttgaagctccttcttgaggctcacattatggatataattttgattctttcttcagtggtatagataactacttgtaacctaagaacaacttggtgaaagtcctctaatacattattttttaaaaaaacacaaatcaatgagctcaacttattaactaactttcatctattcatttttgagccatccctgtctgattgtgaatctccatgattccaacactctgagctggggatagtgcctacacaaaataaaaagaagtggaaaattttcaaacatcagtttatgctgacaaccaggccataataggtgctcaattactattgaatgaatgaatgaaagttctggccaggtacggtggctcatgcctgtagtcccaacactttgggaggccgaggcaggtggatcacttgaggttaggagttcgaaaccaacctgaccaacatgaagaaaccttatctctaccaaaaaaatataaaaaaattacccaggcatggtggtgtatgcctgtaatcccagctatttgggaggctgaggcaggaaaatcacttgaacctgagaggcggaggttgcagtgagctgagattgtgccactccactccagcctgggcgacagagtgagactccgtcttacttaaaaaaaaaaaaaagaaggttccaagaaaattcatcttaaggtttatgtaaaaggaagatgatatttaacatgattcatggccaagtactaatattacattataataatgtttccaaataacattatagatatgtttaaagacagtgtattaggctgttcttgcattgctgtaaagaaatacccaagactgggtaatttataaagaaaagaggtttcattggctcgtgtttctgcaggctgtacaggaagcttagtgctgacatcacttggctgccgggggaacctcagggagcttttactcatggcagaaggcaatgcgggagcttgcatgtcacatggcaaaagcaggagcgagagagagttgggggggaaggtgccacacactttttaatgaccggctctcacaataactcatgaaaactcactatcaggaagacagcactaaagcacaagggatccgaccccatgatccaaacacctcccaccaggccccatctccagcactggggattacaattcaacatgagatctgagtgtggacaaatatccaaactgtatcagtcaacagcgatcataattagtcctgaataggagtgcctttttttttctttcttctcccttttcttttctacttcctcctccttttccctctcctcttcaatctcctcttcattcctgtagcaccaagggttgaagcacctaacccgttttggattgagatgttctgattgggcaatgaacactgtccagaataaacagaaatccattttgcactaagtggctgcacagaccctgcctcatgctaaatctagcacccagatagtttaatgtttcaatgactgaattacaaatatatcatcaccttggatttggcacttacaaatggctgttaatttggccagaggtggttgtttacaacttcaaataggagactattcataatttctgacgtg

SEQ ID NO: 9248 - RNA, 1805 nt, Artificial Sequence
  derived and/or modified sequence
gggaaauaagagagaaaagaagaguaagaagaaauauaagagccaccauggcggucgagucgcaagguggacggccucuugugcuugguuugcuccuuuguguacucggcccugucgugucacacgccgggaagauuuuguugauccccguggacggaucacauuggcuuucgaugcucggagccauccagcaguugcagcaaagggggcaugagauugugguccuggcuccggacgcgucgcucuacauucgcgauggugcauucuauacucuuaagacauauccagugcccuuccagcgcgaagaugucaaagagucauuugucucacugggacacaacguauucgagaacgacuccuucuugcagagagucaucaagacguacaagaaaaucaaaaaggauagcgccaugcuguugucagggugcucgcacuugcuucacaacaaggagcugauggcgucacuggcggagucgagcuuugaugucauguugacggacccguuuuugccguguagcccgaucguggcgcaauacuugucccuucccaccguauucuuccuccacgcgcuucccuguagccuggaguuugaggcgacccagugucccaaucccuuuucauacgugccucgaccguugucaucacauucggaccacaugacguuccuccagcgggugaagaauaugcucaucgccuuuucccaaaacuuccucugcgacgucgucuacuccccuuacgccacgcuggcauccgaguuucugcagcgagaggugacugugcaagaccuucucucgucggcaucaguaugguuguuccgaucagauuucguaaaggacuacccaagacccaucaugcccaacaugguguucguagggggaaucaauugccuccaccagaauccgcugagccaggaguuugaagcguauaucaacgcgucgggggaacacggaauugucguguuuagccuggggucgaugguaucggagauucccgaaaagaaggcgauggcaaucgcagacgcacucggaaagaucccccagacaguccuuuggcgguauacagggacgaggccgagcaauuuggcaaacaauacgauccuugugaaaugguugccgcagaaugaucuucucggucaucccaugacaagagccuucaucacgcacgccgguucgcaugggguauaugaaucgauuugcaauggcgugccuauggugaugaugccgcucuuuggugaccagauggacaaugcgaaaaggauggaaaccaagggagcaggagucacccugaaugugcuggaaaugacauccgaggaucucgaaaacgcgcuuaaagcggucauuaacgacaaaucguauaaggaaaacaucaugagguugagcucccuucacaaagauagaccugucgagccauuggaccuggccguguuuugggucgaguucgugaugcggcacaagggagcgccacacuugaggccagcugcgcaugaucugacgugguaucaguaccacucccucgaugugauuggcuuccugcuggcagucguguugacuguggcguuuaucacauucaaauguugcgcuuacggcuaccggaagugcuugggaaagaaaggacgcgugaaaaaggcccauaagucgaaaacacauugauaagcugccuucugcggggcuugccuucuggccaugcccuucuucucucccuugcaccuguaccucucaaacaccauugucacaaacaccauugucacaaacaccauugucacaaacaccauugucauggucuuugaauaaagccugaguaggaag

SEQ ID NO: 9249 - protein, 777 aa, Artificial Sequence
  derived and/or modified sequence
MPDNRQPRNRQPRIRSGNEPRSAPAMEPDGRGAWAHSRAALDRLEKLLRCSRCTNILREPVCLGGCEHIFCSNCVSDCIGTGCPVCYTPAWIQDLKINRQLDSMIQLCSKLRNLLHDNELSDLKEDKPRKSLFNDAGNKKNSIKMWFSPRSKKVRYVVSKASVQTQPAIKKDASAQQDSYEFVSPSPPADVSERAKKASARSGKKQKKKTLAEINQKWNLEAEKEDGEFDSKEESKQKLVSFCSQPSVISSPQINGEIDLLASGSLTESECFGSLTEVSLPLAEQIESPDTKSRNEVVTPEKVCKNYLTSKKSLPLENNGKRGHHNRLSSPISKRCRTSILSTSGDFVKQTVPSENIPLPECSSPPSCKRKVGGTSGRKNSNMSDEFISLSPGTPPSTLSSSSYRRVMSSPSAMKLLPNMAVKRNHRGETLLHIASIKGDIPSVEYLLQNGSDPNVKDHAGWTPLHEACNHGHLKVVELLLQHKALVNTTGYQNDSPLHDAAKNGHVDIVKLLLSYGASRNAVNIFGLRPVDYTDDESMKSLLLLPEKNESSSASHCSVMNTGQRRDGPLVLIGSGLSSEQQKMLSELAVILKAKKYTEFDSTVTHVVVPGDAVQSTLKCMLGILNGCWILKFEWVKACLRRKVCEQEEKYEIPEGPRRSRLNREQLLPKLFDGCYFYLWGTFKHHPKDNLIKLVTAGGGQILSRKPKPDSDVTQTINTVAYHARPDSDQRFCTQYIIYEDLCNYHPERVRQGKVWKAPSSWFIDCVMSFELLPLDS

SEQ ID NO: 9250 - DNA, 2334 bp, Artificial Sequence
  derived and/or modified sequence
atgcccgataatcgtcagccccggaatcgacaaccgagaatccgctccggaaacgaaccacgttcagcacctgctatggaacccgacggtcgtggcgcgtgggcacattcaagagcagcattagatcggctagagaaactccttagatgcagccgatgtacgaatatccttcgtgagccagtttgtctcgggggatgcgagcacattttctgctccaattgcgtgagcgattgcatcggtaccggctgtcctgtgtgctacacccctgcctggatccaggacctcaagattaacagacagctcgacagtatgattcaactgtgttctaagctccgtaatcttctccatgacaacgagctcagcgacttgaaggaagataagccaagaaagagtctgttcaatgatgcgggcaataaaaaaaattcgatcaagatgtggtttagcccacgcagcaagaaggttaggtatgtcgtgtccaaagcctcagtccagacccagcctgccattaagaaggatgcttccgctcagcaggactcttatgagttcgtctccccctcacccccggccgacgtttcagagagggctaagaaggcctctgctagatccgggaaaaaacagaagaaaaagaccctggcggaaataaaccagaaatggaatttagaggctgaaaaagaagatggagaattcgactctaaagaagaaagcaagcagaaacttgtgtccttctgttcccaacctagtgtaatcagcagcccacaaattaacggtgaaattgacctgctcgccagcggcagcctgacagaatctgagtgttttgggtctctcaccgaagtttcattgcccctggctgaacagatcgagtctcccgacacaaagagtcgaaatgaagttgtcacaccggaaaaggtgtgcaaaaactacttaacgtccaaaaagtcactccctctcgagaacaacggcaaacgaggacaccacaacaggttaagctcgccgatatcaaagcggtgcagaacatctattctgtctacaagtggcgacttcgtcaagcagacagtgcccagtgaaaacattccactccctgagtgctcgagtcccccttcttgtaaacggaaagtgggcggaacgagtggtcggaagaatagtaatatgtctgacgagttcatcagtctatcacccggaacgcccccctctaccctttctagctctagttatcgtagagtcatgtcatctccatctgccatgaagctcctgcccaatatggctgtgaaacgtaatcacaggggagaaaccctcctccacatagcttctattaaaggggacattccctctgtggagtacctgctacagaacgggtctgatccaaacgtgaaggaccacgctggttggacgccactgcacgaagcctgcaaccacggtcacctaaaggtggtcgaactgctgctacaacacaaagcgcttgtgaatacgaccggctaccaaaatgattccccactgcatgatgccgcgaagaacggccacgtagatatcgtcaagctgcttctgtcctacggggccagtagaaatgcggtaaatatattcgggcttcgtcccgtcgactatactgatgatgagtcaatgaagagtcttttattgttaccagagaagaatgagtcctcctccgctagtcattgtagtgtcatgaacactggacaacggagggacgggccgctggtcctcattggttccgggctgtcttccgagcagcagaaaatgctgtctgagctcgccgtgatcctcaaggcaaagaaatacaccgagtttgattccactgtgacccacgtggtggtgcccggtgatgccgtacagtcgaccctgaaatgtatgctggggatattgaatggctgctggatccttaagtttgagtgggtgaaggcctgcttgcgtaggaaggtctgcgagcaggaggagaaatacgaaattccagaaggtccacgccgttcccgcctcaatcgggaacagctgctaccaaagctatttgatggctgctacttctacttgtggggaacctttaagcaccaccccaaagataacctcattaagcttgttactgctggcggtggccagatcctctcccggaaaccaaaacccgattccgacgttacacagaccatcaataccgtagcgtaccacgcacggcctgattcagatcagcgcttttgcacacagtatattatttacgaggacttgtgtaattatcaccccgagagagtgcgccaaggaaaggtctggaaggccccctcaagttggttcatcgactgtgtcatgagttttgaactacttccccttgattcctag

SEQ ID NO: 9251 - DNA, 2334 bp, Artificial Sequence
  derived and/or modified sequence
atgccagacaaccggcagcccaggaaccggcagccccgcatccgctctggaaatgagcccaggtctgccccagccatggagccagatggccgcggggcctgggcccacagcagagctgccctggaccggctggagaagctgctgcgctgcagccgctgcaccaacatcctgcgggagcctgtgtgcctgggcggctgtgagcacatcttctgcagcaactgtgtgtctgactgcattggaacaggctgccctgtgtgctacaccccagcctggatccaggacctgaagatcaaccggcagctggacagcatgatccagctgtgcagcaagctgaggaacctgctgcatgacaatgagctgagtgacctgaaggaggacaagcccaggaagagcctcttcaatgatgctggcaacaagaagaacagcatcaagatgtggttcagccccaggagcaagaaggtgcgctacgtggtgtccaaggcctctgtgcagacccagcctgccatcaagaaggatgccagcgcccagcaggacagctatgaatttgtgagccccagccccccagcagatgtgtctgagcgggccaagaaggccagcgcccggagcggcaagaagcagaagaagaagaccctggccgagatcaaccagaagtggaacctggaggccgagaaggaggatggagaatttgacagcaaggaggagagcaagcagaagctggtgtccttctgcagccagcccagcgtcatcagcagcccccagatcaatggagaaattgacctgctggccagcggcagcctgacagaaagtgagtgcttcggcagcctgacagaggtgtccctgcccctggccgagcagatcgagagcccagacaccaagagcagaaatgaggtggtgaccccagagaaggtgtgcaagaactacctgaccagcaagaagagcctgcccctggagaacaacgggaagaggggccaccacaaccggctgagcagccccatcagcaagcgctgcaggaccagcatcctgagcaccagcggggactttgtgaagcagacagtgcccagcgagaacatccccctgcctgaatgtagcagcccccccagctgcaagaggaaggtgggcggcaccagcggcaggaagaacagcaacatgtctgatgagttcatcagcctgagccctggcaccccacccagcaccctgagcagcagcagctacagaagagtgatgagcagccccagcgccatgaagctgctgcccaacatggctgtgaagaggaaccacagaggagagaccctgctgcacatcgccagcatcaagggggacatccccagcgtggagtacctgctgcagaatggaagtgaccccaacgtgaaggaccacgccggctggacccccctgcacgaggcctgcaaccacggccacctgaaggtggtggagctgctgctgcagcacaaggccctggtgaacaccaccggctaccagaatgacagccccctgcatgatgctgccaagaatggccacgtggacatcgtgaagctgctgctgtcctatggagccagcagaaatgctgtgaacatcttcggcctgcggcctgtggactacacagatgatgagagcatgaagagcctgctgctgctgcctgagaagaatgaaagcagcagcgccagccactgcagcgtgatgaacacaggccagaggagagatggccccctggtgctgattggcagcggcctgagcagcgagcagcagaagatgctgtctgagctggccgtcatcctgaaggccaagaagtacacagaatttgacagcacagtgacccacgtggtggtgcctggagatgctgtgcagagcaccctgaagtgcatgctgggcatcctgaatggctgctggatcctgaagtttgagtgggtgaaggcctgcctgcggaggaaggtgtgtgagcaggaggagaagtatgagatccctgagggcccccggcgcagccggctgaaccgggagcagctgctgcccaagctgtttgatggctgctacttctacctgtggggcaccttcaagcaccaccccaaggacaacctgatcaagctggtgacagctgggggcggccagatcctgagcaggaagcccaagccagacagtgatgtgacccagaccatcaacacagtggcctaccacgcccggccagacagcgaccagcgcttctgcacccagtacatcatctatgaggacctgtgcaactaccaccctgagcgggtgcggcagggcaaggtgtggaaggcccccagctcctggttcatcgactgtgtgatgagctttgagctgctgcccctggacagctag

SEQ ID NO: 9252 - DNA, 2334 bp, Artificial Sequence
  derived and/or modified sequence
atgcccgacaaccggcagccccggaaccggcagccccggatccggtccggtaatgaacctcgatccgcccctgcgatggagcctgacgggcgcggagcttgggcacatagcagagctgcattggacagattagagaagctgcttaggtgttctcgctgtacgaatattctaagagaacctgtctgcctcggcggatgcgaacacattttctgcagcaattgtgtgtcagactgcatcggaacaggatgcccagtatgctatactcctgcgtggattcaggatctcaaaattaaccggcagctggacagtatgattcagttatgttccaagttaagaaatctgctacacgacaacgagttaagtgatttaaaagaggacaagccacgtaagagtctgtttaatgatgctggtaataagaagaactcaatcaagatgtggttttcaccacgctctaagaaggtcaggtacgtggtgtccaaagcttctgtgcaaactcagcccgctataaagaaagatgcctcagcgcagcaagacagctatgagttcgtgtctccatctcctcccgctgacgtttcggagcgagccaaaaaagcatctgcacggagcggaaagaagcagaagaagaagacccttgccgaaatcaatcagaaatggaacttagaggccgagaaggaagatggcgaatttgatagcaaggaggagtccaagcagaaactggtcagtttctgttcccaaccaagtgtcatcagctcgccccagatcaacggagagatcgatctcttagctagcggcagcttgacggagagcgagtgttttggctcacttaccgaagtgagccttccactggccgagcagatcgagagccctgatactaagtctagaaatgaagtcgtaacccccgagaaggtttgtaagaattatctgaccagcaagaaatctctcccgctggaaaataacggaaaacgcggacaccacaatcgcctctctagccctatatctaagagatgccgcacatcaatcctcagcacatccggagacttcgttaagcaaaccgtgccctctgagaatatccctctcccggagtgctcatcccccccatcatgtaagcgcaaggtgggaggaacttctgggcgtaaaaactcgaacatgtccgatgagttcatttctctgtcccctgggacccccccatctacgctgtcatcaagtagctaccgccgggttatgtccagtcccagcgctatgaagctgcttccaaacatggctgtaaaaagaaatcatagaggcgaaacacttctgcacattgcctctattaagggagacattccttccgtagagtaccttctgcagaatggcagcgatccaaacgtgaaagatcacgctggatggacgcctcttcatgaggcttgcaatcacggtcacttgaaggtagttgagctgctcctccagcataaagccctggtgaatacaacgggctatcagaacgatagcccactccatgatgccgcaaaaaacgggcacgtagacattgtcaagctcttgctcagctacggcgccagcagaaacgctgttaacattttcggactccgcccagtggactataccgatgacgagagtatgaaaagccttttactgctgcccgagaagaacgaaagttccagcgcatcacactgcagcgtgatgaacaccggacagcgaagggatggacccctcgtgctgattggtagtggactgtctagcgaacaacagaagatgctgtctgaactcgctgtcattctcaaggccaagaagtataccgagtttgactccaccgtcacccacgtcgtggtccccggtgacgctgtccaaagcacattaaagtgtatgcttggcattctcaatggctgttggatcctgaaatttgaatgggtcaaagcctgcctcaggaggaaagtctgtgagcaagaggaaaagtatgagatcccagagggtccaagacgttccagactaaaccgggaacagctcttgcccaaactgttcgatggttgttacttctacctgtggggtacattcaaacaccaccccaaggacaatctcattaaactcgtcaccgcgggaggcggccaaattctttcgcgaaagcccaaacccgatagtgacgttacgcagacgataaatacggtcgcctatcacgcaaggcctgattcagaccagcgcttttgcacacaatatatcatttatgaagacctgtgtaactaccaccccgagcgtgtgcggcagggcaaagtgtggaaggcaccttcctcttggtttatagactgtgtcatgtccttcgaactactgcccctggacagctag

SEQ ID NO: 9253 - DNA, 2334 bp, Artificial Sequence
  derived and/or modified sequence
atgcccgataatcgtcagcctaggaacaggcagcctcggattcgaagcgggaacgaaccaagaagtgctcctgctatggagcccgacggaagaggcgcatgggcccattctagagccgctctggacaggttggagaagctgctccgctgctctcggtgtactaatattttgagagagcccgtgtgtcttggaggttgcgagcatatcttttgctctaattgcgtgtctgattgtattggcaccggctgccctgtgtgttatacaccagcctggatccaggacctgaagattaaccggcagctcgacagcatgatccagctgtgctccaaactgcgcaacctgctacacgacaatgagctgtccgaccttaaagaagacaaacccaggaagtccctgttcaatgacgcaggaaataaaaaaaattctatcaaaatgtggttctcccctcgctccaaaaaagtaagatacgtggttagcaaggcctctgtccaaacccagccagccattaaaaaggatgccagtgcccagcaagacagttacgaattcgtgtccccaagcccaccagctgacgtgagcgaacgcgctaaaaaggcctctgcacgcagcggtaagaagcagaaaaagaaaaccctcgccgagatcaatcagaaatggaatcttgaagccgaaaaggaggatggtgaatttgacagcaaggaggaatcgaagcagaagctcgtgagtttctgctcccaaccctcagtgatctcgtctccccaaattaatggggaaattgacttactggccagcggctccctgactgagtctgaatgcttcggtagtttaactgaagtctcattaccattggcggagcagatcgaaagcccggatacaaagagccggaatgaggtagtgacacctgagaaggtgtgcaaaaattacctgacctccaaaaaaagcctgcctctggagaacaacggtaagcggggacaccacaacaggctgtcttcaccgatctctaagcggtgtagaacctcgattttgagtacctccggagattttgtgaaacaaacagtcccgagtgaaaatattccgctacccgaatgcagttcacccccaagctgcaaacgtaaggtgggcggaacaagtgggcgaaagaactcaaatatgagtgacgaatttatctcgttgtcccctggtacgcccccttccactctgagctcgagcagctaccgccgtgttatgagcagtccgagcgcaatgaagcttttaccaaacatggccgtgaaacggaaccaccgaggagagaccctcttgcacatcgcttcaatcaagggggatatcccttccgttgagtacttactccagaacggaagtgacccgaatgtcaaagatcatgccggatggactccacttcacgaggcatgtaatcacggtcatctcaaggttgtggagctgttgctgcagcacaaagcgctggtaaacacaaccggctaccaaaacgactcacccctgcacgacgcagccaagaatgggcatgtggacattgtcaagctgctgttgagctacggcgcaagtcgtaatgccgtgaatatcttcggcctgcgtccagtagattacaccgacgatgaatccatgaagtcccttctgttgctccccgaaaagaacgaatccagctccgcatctcactgctccgtaatgaataccggccaaaggagggacggcccactcgttctgataggcagcggactgagctcagaacagcagaaaatgctgagtgaacttgcagtgatactcaaagccaagaagtatacagagtttgactctacggtgacacatgtggtggtaccaggcgatgccgtgcagagtacccttaagtgcatgttaggtattctcaacggctgctggatcctcaagttcgaatgggtaaaggcttgcctgcggcgaaaagtatgcgagcaagaggagaagtacgagattcccgagggtccaagaagaagcagattgaatcgggagcagctgcttcctaagctatttgacggttgctacttctacctgtggggcacattcaaacaccacccaaaagacaacctgatcaaactggtgactgccggaggaggccaaatactctctcgtaaacctaagccagactcagacgtaacacagaccatcaacacggtagcttaccacgctagacctgattctgaccagcgcttctgcacacagtacataatctatgaagatctgtgcaattatcatcctgaaagagtgagacaaggaaaggtctggaaggctccttcatcatggtttattgattgtgttatgagctttgaattactaccgttagactcctag

SEQ ID NO: 9254 - DNA, 5499 bp, Artificial Sequence
  derived and/or modified sequence
cctctggcggcccgccgtcccagacgcgggaagagcttggccggtttcgagtcgctggcctgcagcttccctgtggtttcccgaggcttccttgcttcccgctctgcgaggagcctttcatccgaaggcgggacgatgccggataatcggcagccgaggaaccggcagccgaggatccgctccgggaacgagcctcgttccgcgcccgccatggaaccggatggtcgcggtgcctgggcccacagtcgcgccgcgctcgaccgcctggagaagctgctgcgctgctcgcgttgtactaacattctgagagagcctgtgtgtttaggaggatgtgagcacatcttctgtagtaattgtgtaagtgactgcattggaactggatgtccagtgtgttacaccccggcctggatacaagacttgaagataaatagacaactggacagcatgattcaactttgtagtaagcttcgaaatttgctacatgacaatgagctgtcagatttgaaagaagataaacctaggaaaagtttgtttaatgatgcaggaaacaagaagaattcaattaaaatgtggtttagccctcgaagtaagaaagtcagatatgttgtgagtaaagcttcagtgcaaacccagcctgcaataaaaaaagatgcaagtgctcagcaagactcatatgaatttgtttccccaagtcctcctgcagatgtttctgagagggctaaaaaggcttctgcaagatctggaaaaaagcaaaaaaagaaaactttagctgaaatcaaccaaaaatggaatttagaggcagaaaaagaagatggtgaatttgactccaaagaggaatctaagcaaaagctggtatccttctgtagccaaccatctgttatctccagtcctcagataaatggtgaaatagacttactagcaagtggctccttgacagaatctgaatgttttggaagtttaactgaagtctctttaccattggctgagcaaatagagtctccagacactaagagcaggaatgaagtagtgactcctgagaaggtctgcaaaaattatcttacatctaagaaatctttgccattagaaaataatggaaaacgtggccatcacaatagactttccagtcccatttctaagagatgtagaaccagcattctgagcaccagtggagattttgttaagcaaacggtgccctcagaaaatataccattgcctgaatgttcttcaccaccttcatgcaaacgtaaagttggtggtacatcagggaggaaaaacagtaacatgtccgatgaattcattagtctttcaccaggtacaccaccttctacattaagtagttcaagttacaggcgagtgatgtctagtccctcagcaatgaagctgttgcccaatatggctgtgaaaagaaatcatagaggagagactttgctccatattgcttctattaagggcgacataccttctgttgaataccttttacaaaatggaagtgatccaaatgttaaagaccatgctggatggacaccattgcatgaagcttgcaatcatgggcacctgaaggtagtggaattattgctccagcataaggcattggtgaacaccaccgggtatcaaaatgactcaccacttcacgatgcagccaagaatgggcatgtggatatagtcaagctgttactttcctatggagcctccagaaatgctgttaatatatttggtctgcggcctgtcgattatacagatgatgaaagtatgaaatcgctattgctgctaccagagaagaatgaatcatcctcagctagccactgctcagtaatgaacactgggcagcgtagggatggacctcttgtacttataggcagtgggctgtcttcagaacaacagaaaatgctcagtgagcttgcagtaattcttaaggctaaaaaatatactgagtttgacagtacagtaactcatgttgttgttcctggtgatgcagttcaaagtaccttgaagtgtatgcttgggattctcaatggatgctggattctaaaatttgaatgggtaaaagcatgtctacgaagaaaagtatgtgaacaggaagaaaagtatgaaattcctgaaggtccacgcagaagcaggctcaacagagaacagctgttgccaaagctgtttgatggatgctacttctatttgtggggaaccttcaaacaccatccaaaggacaaccttattaagctcgtcactgcaggtgggggccagatcctcagtagaaagcccaagccagacagtgacgtgactcagaccatcaatacagtcgcataccatgcgagacccgattctgatcagcgcttctgcacacagtatatcatctatgaagatttgtgtaattatcacccagagagggttcggcagggcaaagtctggaaggctccttcgagctggtttatagactgtgtgatgtcctttgagttgcttcctcttgacagctgaatattataccagatgaacatttcaaattgaatttgcacggtttgtgagagcccagtcattgtactgtttttaatgttcacatttttacaaataggtagagtcattcatatttgtctttgaatcaaaaaaaaaaaaaaagtctaatgccagattaggaattcatgttatgtttaccatttagaagctgggattgcttttaaaggtttttctttttaaaattggcatgtttttgatttatcatgtctttctattcagattattgggtatcaaagattaatgaggacaccagaatcttggttaaatagacaagtggtatcattactgtttgagtcttttaatattctccatacctgccaccagtgaaaaaacttgccttttttttttttttttttttagtaaacagaatattatcaaacaatttattttggctttattgaaaaaagagtatttggtctaaatgtgccaccataggtgttaaattctcctatctgcaattgtctttatcctatattgtgttcatttcttttcttaataatttactttgttgtgtgtttctacactttcatccctgttttttatcttgtatatcatcaggaaattgtgatttaatcattaacattggtttttttgtgtgtgtggtaaaaatcaacactaggctcatggtacatatttttattctgtacatttgcttgtaactatcaatttgtaactctgtttatctactacatgtgtatatatacttagagcattttctctaacacattttaatgttagtattttttaaaaggtctgaccagtctagcaaattgtcagtccaacgtcattactttaaattaagaagcagtcttcttctggtaaaccttgttggtatttgtaaaataattttgaaggtcttaatttcttcctttgtaaaaggaaaaggttttttttaaagtttttaggttggcatggaggcagaagttggtgattacttgatttacaacagattttttccagatcatacaaaaggccatacagtaagtatagaagtaggtatggggagggcttactaatatcaaataggcaaggccttagtgagtgggcaggataccacctgagagtggccagatgtggggaggttactctgctctgggtgctctcattcatgaatcgacaaggatacattagattattttgaaacatttttttaagaagcagaattctttaataattccttcctagacattgaatatacttataaaattaaagacttggggaaggagacactgagagacttgccagtttggttcctcatgaacaaaagaggacagtttgataactaccagaatagaatatccctagttttaaaatagtgagaatctctgaagttcatcaacatcttaagatgcacttacttgaaagtttgagattctgtttatcatttgaaaacacattttgctttaattctttctttgacatgttgttttttcatatcaagaaatatatgaacaaaataataaccttttgaccctgaccttgctgggtgaattagctctgaaacactctctacaaccagtaatgcatttgtcccacatttcattctgatagaaaatgaacaccatagcaccaaacaaaaatccgaggcgttagataatgtctggattaaataatttaagactctctaggattttggttgtcattttttatttataacagactttaagtcactttctgttgcctcataggtcacattttagacaggtttgtgtctgttccttgcatctgaattcctgattgtaaagacacctatgaggtctcttagtttttgtcattcattttcttggtttatcacccctcccttctttttgttgtttttccctgactgttaagcagtttcatctttgcttttgttaaatatttgacagcagttagtttgtgttaagctcttgaaacttgtgattgtactttctgtgtagatatacatgtaattattttttatttttcaatcatagattcaagcttccttcttttttaccacaaatcattaaagttatttgtgtttccatatacctgtgtcttgtataaaattggcttattctgtgctgttgaatgaggctcaacatgacttggtgaggaagtctattaactaacaaaagcttatcttttttaacataatgctttttaattaattttgaataaaaatatttctaaagtgtactagatactttattaccttagattattccgaatacagtataactttgatagtttggaatagtcattaagaaacaattacacactgattgctttgtgtctctaaaagtgagaggctggtagcttttccacattctcatggctattttctagttctacttgaatttataactgtttccctttttccttgacagctgccactttgtagctatttttctgtctctgctaatactttaccatatctatctcaattgttttttcttttgacttgctgaaaaatagaaaccagatgggaagtatattagcattatgattgaaataagggtaaatgagcaatgtgtgaaggttttcactgacttcacctaaaagatagtttagctacttgaattttagtaaatagaatttttcctttatttcatcggtccccccacctttttttttttttgcacctgccttgtaaatttaatagttaagtgacctctgcctagaggatgatatttggggaggtttgatgtttcctgtgggaataagacgattcacaggtgagagtggggccacattagctgttattgtttccatgggtcagtgtggaaaatgcattaatcatattctaaacgttcatgggcctcattacagtcacaattgtctattctgtttcctaccctgaacacattaaaatggtaggaactaatgcttgtcttatttaattactaaaagccaccattttctttgatagattgagctacagattgtaaacttcatgtatttctttataagtcaacccttttcaaagatacgcacatcaaactgaatgaataaataaatattgagaagttg

SEQ ID NO: 9255 - DNA, 2334 bp, Artificial Sequence
  derived and/or modified sequence
atgcccgacaacagacagcccagaaacagacagcccagaatcagaagcggcaacgagcccagaagcgcccccgccatggagcccgacggcagaggcgcctgggcccacagcagagccgccctggacagactggagaagctgctgagatgcagcagatgcaccaacatcctgagagagcccgtgtgcctgggcggctgcgagcacatcttctgcagcaactgcgtgagcgactgcatcggcaccggctgccccgtgtgctacacccccgcctggatccaggacctgaagatcaacagacagctggacagcatgatccagctgtgcagcaagctgagaaacctgctgcacgacaacgagctgagcgacctgaaggaggacaagcccagaaagagcctgttcaacgacgccggcaacaagaagaacagcatcaagatgtggttcagccccagaagcaagaaggtgagatacgtggtgagcaaggccagcgtgcagacccagcccgccatcaagaaggacgccagcgcccagcaggacagctacgagttcgtgagccccagcccccccgccgacgtgagcgagagagccaagaaggccagcgccagaagcggcaagaagcagaagaagaagaccctggccgagatcaaccagaagtggaacctggaggccgagaaggaggacggcgagttcgacagcaaggaggagagcaagcagaagctggtgagcttctgcagccagcccagcgtgatcagcagcccccagatcaacggcgagatcgacctgctggccagcggcagcctgaccgagagcgagtgcttcggcagcctgaccgaggtgagcctgcccctggccgagcagatcgagagccccgacaccaagagcagaaacgaggtggtgacccccgagaaggtgtgcaagaactacctgaccagcaagaagagcctgcccctggagaacaacggcaagagaggccaccacaacagactgagcagccccatcagcaagagatgcagaaccagcatcctgagcaccagcggcgacttcgtgaagcagaccgtgcccagcgagaacatccccctgcccgagtgcagcagcccccccagctgcaagagaaaggtgggcggcaccagcggcagaaagaacagcaacatgagcgacgagttcatcagcctgagccccggcaccccccccagcaccctgagcagcagcagctacagaagagtgatgagcagccccagcgccatgaagctgctgcccaacatggccgtgaagagaaaccacagaggcgagaccctgctgcacatcgccagcatcaagggcgacatccccagcgtggagtacctgctgcagaacggcagcgaccccaacgtgaaggaccacgccggctggacccccctgcacgaggcctgcaaccacggccacctgaaggtggtggagctgctgctgcagcacaaggccctggtgaacaccaccggctaccagaacgacagccccctgcacgacgccgccaagaacggccacgtggacatcgtgaagctgctgctgagctacggcgccagcagaaacgccgtgaacatcttcggcctgagacccgtggactacaccgacgacgagagcatgaagagcctgctgctgctgcccgagaagaacgagagcagcagcgccagccactgcagcgtgatgaacaccggccagagaagagacggccccctggtgctgatcggcagcggcctgagcagcgagcagcagaagatgctgagcgagctggccgtgatcctgaaggccaagaagtacaccgagttcgacagcaccgtgacccacgtggtggtgcccggcgacgccgtgcagagcaccctgaagtgcatgctgggcatcctgaacggctgctggatcctgaagttcgagtgggtgaaggcctgcctgagaagaaaggtgtgcgagcaggaggagaagtacgagatccccgagggccccagaagaagcagactgaacagagagcagctgctgcccaagctgttcgacggctgctacttctacctgtggggcaccttcaagcaccaccccaaggacaacctgatcaagctggtgaccgccggcggcggccagatcctgagcagaaagcccaagcccgacagcgacgtgacccagaccatcaacaccgtggcctaccacgccagacccgacagcgaccagagattctgcacccagtacatcatctacgaggacctgtgcaactaccaccccgagagagtgagacagggcaaggtgtggaaggcccccagcagctggttcatcgactgcgtgatgagcttcgagctgctgcccctggacagctag

SEQ ID NO: 9256 - protein, 1283 aa, Artificial Sequence
  derived and/or modified sequence
MWGSDRLAGAGGGGAAVTVAFTNARDCFLHLPRRLVAQLHLLQNQAIEVVWSHQPAFLSWVEGRHFSDQGENVAEINRQVGQKLGLSNGGQVFLKPCSHVVSCQQVEVEPLSADDWEILELHAVSLEQHLLDQIRIVFPKAIFPVWVDQQTYIFIQIVALIPAASYGRLETDTKLLIQPKTRRAKENTFSKADAEYKKLHSYGRDQKGMMKELQTKQLQSNTVGITESNENESEIPVDSSSVASLWTMIGSIFSFQSEKKQETSWGLTEINAFKNMQSKVVPLDNIFRVCKSQPPSIYNASATSVFHKHCAIHVFPWDQEYFDVEPSFTVTYGKLVKLLSPKQQQSKTKQNVLSPEKEKQMSEPLDQKKIRSDHNEEDEKACVLQVVWNGLEELNNAIKYTKNVEVLHLGKVWIPDDLRKRLNIEMHAVVRITPVEVTPKIPRSLKLQPRENLPKDISEEDIKTVFYSWLQQSTTTMLPLVISEEEFIKLETKDGLKEFSLSIVHSWEKEKDKNIFLLSPNLLQKTTIQVLLDPMVKEENSEEIDFILPFLKLSSLGGVNSLGVSSLEHITHSLLGRPLSRQLMSLVAGLRNGALLLTGGKGSGKSTLAKAICKEAFDKLDAHVERVDCKALRGKRLENIQKTLEVAFSEAVWMQPSVVLLDDLDLIAGLPAVPEHEHSPDAVQSQRLAHALNDMIKEFISMGSLVALIATSQSQQSLHPLLVSAQGVHIFQCVQHIQPPNQEQRCEILCNVIKNKLDCDINKFTDLDLQHVAKETGGFVARDFTVLVDRAIHSRLSRQSISTREKLVLTTLDFQKALRGFLPASLRSVNLHKPRDLGWDKIGGLHEVRQILMDTIQLPAKYPELFANLPIRQRTGILLYGPPGTGKTLLAGVIARESRMNFISVKGPELLSKYIGASEQAVRDIFIRAQAAKPCILFFDEFESIAPRRGHDNTGVTDRVVNQLLTQLDGVEGLQGVYVLAATSRPDLIDPALLRPGRLDKCVYCPPPDQVSRLEILNVLSDSLPLADDVDLQHVASVTDSFTGADLKALLYNAQLEALHGMLLSSGLQDGSSSSDSDLSLSSMVFLNHSSGSDDSAGDGECGLDQSLVSLEMSEILPDESKFNMYRLYFGSSYESELGNGTSSDLSSQCLSAPSSMTQDLPGVPGKDQLFSQPPVLRTASQEGCQELTQEQRDQLRADISIIKGRYRSQSGEDESMNQPGPIKTRLAISQSHLMTALGHTRPSISEDDWKNFAELYESFQNPKRRKNQSGTMFRPGQKVTLA

SEQ ID NO: 9257 - DNA, 3852 bp, Artificial Sequence
  derived and/or modified sequence
atgtggggctctgatcggttagcaggagccggaggggggggcgctgcggtaactgtcgcattcacgaatgcaagggattgctttctacacttgccaaggagacttgtggcccaacttcatctgctacagaatcaggctattgaggtcgtatggtcccaccagcctgcattcctcagctgggtggaaggccggcacttttccgaccagggagagaacgtggccgagatcaacaggcaggtaggccagaagcttgggctcagcaacggcgggcaggtcttcctcaagccctgcagccatgttgtttcttgccaacaggtggaagtggagcccctgagtgcagacgactgggaaatcttggaactgcacgcagtatctctcgagcaacacttgctggatcagatcaggatagtctttcccaaagctatttttcctgtgtgggtggaccaacagacgtacatcttcatacaaatcgttgccctaattcccgcagcctcttatggacggctggagaccgacactaagcttttgatccaaccgaaaacccggcgggcaaaggaaaatactttttccaaggcagatgcggaatacaagaagctgcattcctacggacgcgatcagaagggaatgatgaaagagctgcagaccaaacaacttcagtccaataccgtcgggattaccgaatccaatgaaaatgagtccgagatccccgtggattcttccagcgtagcatccttatggacaatgatcggcagcatctttagctttcagtccgaaaagaagcaagaaacgtcgtgggggttgaccgagattaatgcctttaagaatatgcaatctaaggtcgtgccactggataatatctttagagtttgcaaatctcaacctccatcgatttacaatgcgtcagctaccagcgtgtttcacaagcactgtgcgatccatgtcttcccttgggatcaagagtattttgatgtggagccatcattcactgtgacatacggcaagctcgtgaagctgctaagccccaagcagcagcagtcgaaaaccaaacagaacgtgttaagtccagaaaaggaaaaacaaatgtccgagccgctggatcagaagaagattcgtagcgatcataatgaggaggacgagaaggcttgtgtgttgcaggtggtgtggaacggcttggaggagctgaacaatgccatcaagtacactaagaatgtggaggtgctgcatctgggcaaggtttggatccccgatgaccttcggaaaagactgaatatagaaatgcacgccgtggtcaggattaccccagtggaggtgactcccaagatcccacgaagcttgaagcttcagcctcgcgagaacctgccgaaagatatctcggaggaggatatcaagacagttttttacagctggcttcaacaatccacaacgacaatgctgcctctggtgatttccgaggaggaattcattaagctcgagacgaaagatggcctgaaagagttctcactgagcatagtgcactcctgggaaaaggagaaagacaaaaatatctttctgctgagtccaaacctcctgcagaaaactaccatccaagtgctgctggatcccatggtcaaggaagagaatagtgaagagattgatttcatcctcccattcctaaaactgtccagcctgggaggcgtcaattccctgggtgtaagttccctagaacatatcacacacagtctcttaggtcggcccctgagcagacagctgatgtccttggtggccgggctccgcaacggcgccctgttacttactgggggtaagggatctggcaagagtacgctcgcgaaggccatttgcaaagaggcatttgacaagctcgatgcccacgtggaacgggtcgattgcaaggctcttagaggaaaaagacttgagaatatccagaaaacactggaggtggctttctctgaggcagtgtggatgcaaccctctgtcgtcctcttggatgacctagacttaattgctggcttgcccgctgtacccgagcacgagcacagcccggatgcggtgcagagtcagcgcctggcgcatgcattgaatgacatgattaaagaattcatctccatggggagtctcgtcgctctgatcgccacatcgcagtcccagcagagcctccatccccttctggtctcggcccagggtgtgcacatattccaatgtgtccagcacatccagcctcctaaccaagagcagcgctgtgagattctttgcaatgtgattaaaaacaaacttgattgcgacatcaacaaatttacagatttggacctgcagcacgttgccaaggaaacggggggctttgtggctcgcgactttacggtacttgttgaccgcgcaatccacagccggcttagtagacaatctatttcaactagagagaagcttgtgctgactaccctggacttccagaaagctctgcgcggatttctgccggcaagcctacgatctgtcaacctgcataaaccaagggacctgggctgggataagatcggcgggctgcacgaagtgaggcagatcttgatggacactatccaattacccgccaagtaccccgagctgtttgccaatttacccatccgccagcggaccggaatcctgctctatggccctcccggcacaggtaagaccctgctcgccggagtgatcgctcgtgaatctcgcatgaatttcatctctgtcaaaggaccggagctgctcagcaaatacatcggtgctagcgaacaagccgtgagagacattttcatacgggcacaggcagccaaaccatgtatcctctttttcgatgaattcgagtccattgccccaagaaggggtcatgataataccggggtcaccgacagggtggtgaaccagctgctcactcagctggacggcgtggagggattacaaggggtctatgtccttgcggccacttcacggcccgaccttatcgatcccgccttgctccgaccagggcggctggataagtgtgtttattgtccacccccggaccaggtgagccggctggagatattgaatgttctgtccgatagcctccctctggccgacgacgtcgacctccagcacgtggcctctgtgaccgatagcttcacaggagcagacctcaaggcactgctgtacaatgcccagctggaagctctgcatggcatgctcttgagctccggactacaggatgggtcttccagctcggatagtgatctttctttgagtagtatggtgtttctgaaccactcctcaggctctgacgacagcgctggggacggcgagtgcggcctggaccagtccctcgtgtccctggaaatgtccgaaattcttcccgacgagtcgaaattcaacatgtatcgattgtacttcggaagttcatacgaatctgagctggggaacggcacatcaagtgatctgagctcccaatgtctgtccgctcctagttctatgacccaggacttgccaggtgtcccgggcaaagaccaattatttagtcagcctcccgtactgcgcacagcaagccaggaggggtgtcaagagctgacgcaagaacagcgagaccagctccgggcggacattagcattatcaaaggtcgctaccggagccagtctggcgaagatgagtctatgaatcaacccggcccaattaagactcgtctcgcgatcagtcagtctcatcttatgacagctttgggccacacccgcccttccatttctgaagacgattggaaaaatttcgcagaactgtacgagtcgttccaaaaccccaaacggagaaaaaaccagtccggtactatgtttcgaccggggcagaaagtcacattagcttag

SEQ ID NO: 9258 - DNA, 3852 bp, Artificial Sequence
  derived and/or modified sequence
atgtggggcagtgaccggctggccggggccggcggcggcggcgctgctgtgacagtggccttcaccaatgcccgggactgcttcctgcacctgccccggcggctggtggcccagctgcacctgctgcagaaccaggccatcgaggtggtgtggagccaccagcctgccttcctgtcctgggtggagggccgccacttcagtgaccagggagaaaatgtggccgagatcaaccggcaggtgggccagaagctgggcctgagcaatggaggccaggtgttcctgaagccctgcagccacgtggtgtcctgccagcaggtggaggtggagcccctgtctgcagatgactgggagatcctggagctgcatgctgtgtccctggagcagcacctgctggaccagatccgcatcgtgttccccaaggccatcttccctgtgtgggtggaccagcagacctacatcttcatccagatcgtggccctgatcccagctgccagctatggccgcctggagacagacaccaagctgctgatccagcccaagacccggcgggccaaggagaacaccttcagcaaggcagatgctgagtacaagaagctgcacagctatggccgggaccagaagggcatgatgaaggagctgcagaccaagcagctgcagagcaacacagtgggcatcacagagagcaatgaaaatgaaagtgagatccctgtggacagcagctctgtggccagcctgtggaccatgattggcagcatcttctccttccagagcgagaagaagcaggagacctcctggggcctgacagagatcaatgccttcaagaacatgcagagcaaggtggtgcccctggacaacatcttccgggtgtgcaagagccagccccccagcatctacaatgccagcgccaccagcgtcttccacaagcactgtgccatccacgtgttcccctgggaccaggagtactttgatgtggagcccagcttcaccgtgacctacggcaagctggtgaagctgctgagccccaagcagcagcagagcaagaccaagcagaatgtgctgagccctgagaaggagaagcagatgtctgagcccctggaccagaagaagatccgcagtgaccacaatgaagaagatgagaaggcctgtgtgctgcaggtggtgtggaatggcctggaggagctgaacaatgccatcaagtacaccaagaatgtggaggtgctgcacctgggcaaggtgtggatcccagatgacctgaggaagaggctgaacatcgagatgcatgctgtggtgcgcatcacccctgtggaggtgacccccaagatccccaggagcctgaagctgcagccccgggagaacctgcccaaggacatcagcgaggaggacatcaagacagtgttctacagctggctgcagcagagcaccaccaccatgctgcccctggtgatcagcgaggaggagttcatcaagctggagaccaaggatggcctgaaggagttcagcctgagcatcgtgcacagctgggagaaggagaaggacaagaacatcttcctgctgagccccaacctgctgcagaagaccaccatccaggtgctgctggaccccatggtgaaggaggagaacagcgaggagattgacttcatcctgcccttcctgaagctgagcagcctgggcggcgtgaacagcctgggcgtgagcagcctggagcacatcacccacagcctgctgggccggcccctgagccggcagctgatgagcctggtggccggcctgagaaatggagccctgctgctgaccggcggcaaaggaagtggcaagagcaccctggccaaggccatctgcaaggaggcctttgacaagctggatgcccacgtggagcgggtggactgcaaggccctgcggggcaagaggctggagaacatccagaagaccctggaggtggccttcagcgaggccgtgtggatgcagcccagcgtggtgctgctggatgacctggacctgattgctggcctgcctgctgtgcctgagcacgagcacagcccagatgctgtgcagagccagaggctggcccacgccctgaatgacatgatcaaggagttcatctccatgggcagcctggtggccctgattgccaccagccagagccagcagagcctgcaccccctgctggtgtctgcccagggcgtgcacatcttccagtgtgtgcagcacatccagccccccaaccaggagcagagatgtgagatcctgtgcaacgtcatcaagaacaagctggactgtgacatcaacaagttcacagacctggacctgcagcacgtggccaaggagaccggcggctttgtggcccgggacttcaccgtgctggtggaccgggccatccacagccggctgagccggcagagcatcagcacccgggagaagctggtgctgaccaccctggacttccagaaggccctgcggggcttcctgcctgccagcctgcggtctgtgaacctgcacaagccccgggacctgggctgggacaagattggaggcctgcacgaggtgcggcagatcctgatggacaccatccagctgcctgccaagtacccagagctgtttgccaacctgcccatccggcagaggacaggcatcctgctgtatggccccccaggcaccgggaagaccctgctggccggggtcatcgcccgggagagcaggatgaacttcatctctgtgaagggccctgagctgctgagcaagtacatcggggccagcgagcaggccgtgcgggacatcttcatccgggcccaggccgccaagccctgcatcctcttctttgatgaatttgagagcatcgccccccggcggggccatgacaacacaggagtgacagacagagtggtgaaccagctgctgacccagctggatggagtggagggcctgcagggcgtgtatgtgctggccgccaccagcaggccagacctgattgatcctgccctgctgcggcccggccgcctggacaagtgtgtgtactgccccccaccagaccaggtgtcccggctggagatcctgaatgtgctgagtgacagcctgcccctggctgatgatgtggacctgcagcacgtggcctctgtgacagacagcttcaccggggctgacctgaaggccctgctgtacaatgcccagctggaggccctgcacggcatgctgctgagcagcggcctgcaggacggcagcagcagcagtgacagcgacctgagcctgagctccatggtgttcctgaaccacagcagcggcagtgatgacagcgctggagatggagaatgtggcctggaccagagcctggtgtccctggagatgtctgagatcctgcctgatgagagcaagttcaacatgtaccgcctgtacttcggcagcagctatgagagcgagctgggcaatggcaccagcagtgacctgagcagccagtgcctgagcgcccccagctccatgacccaggacctgcccggggtgcctgggaaggaccagctgttcagccagccccctgtgctgaggacagccagccaggagggctgccaggagctgacccaggagcagagggaccagctgcgggctgacatcagcatcatcaagggccgctaccgcagccagagcggagaagatgagagcatgaaccagcccggccccatcaagacccggctggccatcagccagagccacctgatgacagccctgggccacacccggcccagcatcagtgaagatgactggaagaactttgctgagctgtatgagagcttccagaaccccaagaggaggaagaaccagagcggcaccatgttccggcccggccagaaggtgaccctggcctag

SEQ ID NO: 9259 - DNA, 3852 bp, Artificial Sequence
  derived and/or modified sequence
atgtggggcagcgaccggctggccggcgccggcggcggcggcgccgcagtgaccgtcgcctttactaacgccagggattgttttctccacctgccacggcggctcgtggcccagctgcatctgctccagaaccaggctattgaggttgtctggagccatcagcctgccttcctctcttgggtggaaggaagacacttctctgaccagggagagaatgtagccgaaatcaaccgacaagttggccagaaacttgggttatcaaacggcggccaggtgttcctgaagccttgcagccatgtcgtcagttgtcagcaggtggaggtggaacccctgtctgccgatgactgggaaattctcgaactgcacgcagtttcactcgaacagcatttgctggaccaaatcagaatcgtatttcctaaagctattttcccagtgtgggtcgaccaacagacgtatatatttatccagattgtcgcccttattccagccgcttcctatgggcgactggaaacagacaccaaactgctgatacagcccaagactcgcagagctaaggagaataccttctctaaggctgatgcagaatacaaaaagttacattcttacggccgtgatcagaaaggaatgatgaaggagctgcaaacaaaacagcttcaaagtaataccgtcggaataacagagtcaaatgagaatgagtccgagatcccggttgactcatcctccgtggctagtttatggacaatgataggctccatcttctcatttcagtctgagaagaaacaggagacgagctgggggcttaccgaaatcaacgctttcaagaatatgcaatctaaagtagtcccactcgacaatattttcagagtgtgcaagagtcagcctccgagcatctacaacgccagcgccacctcagttttccacaagcattgtgcgatacacgtgttcccttgggatcaggaatacttcgacgtcgagcctagctttactgtgacctatggcaagctggttaaactcctgtcccccaagcagcagcagtctaaaactaagcagaatgtgctgtcccctgagaaggagaaacaaatgtcagagccactagatcaaaagaaaatcaggtccgaccataatgaagaggatgaaaaagcatgcgtgttacaggtggtgtggaatgggcttgaggaactgaacaacgcgatcaagtatactaagaatgtcgaggtactgcatctcggcaaggtctggatccctgatgatcttaggaagaggctcaatattgaaatgcacgccgttgtgaggattacaccggtcgaggttacaccgaagatcccccgttctctcaaactgcagcctcgggagaatttacctaaagatatctccgaagaagatattaaaacagtcttctatagctggttgcagcagagtacaaccacgatgctgcctctggtgattagtgaggaggagttcatcaaactggaaacaaaggacgggctgaaggaattcagtcttagcattgtgcactcatgggagaaggagaaggacaagaacatttttttgttatctccaaatctcctgcagaagacgacaatccaggtgctcctggacccaatggtgaaggaagagaacagcgaggaaatcgatttcattctgcctttcctcaaactgtcctccctcggaggagtgaacagcctgggagtgagcagcctggaacacatcacccactccttgctcggtagacctctcagccgccaacttatgtccctcgttgctggactgagaaatggagccctccttctgacaggcggcaaaggctccgggaagtcaacactcgctaaggccatttgtaaagaggctttcgacaagctggacgcccatgtggagagggtggattgtaaggctctgaggggcaagagacttgaaaatatccagaagacacttgaggtagccttttcagaggccgtttggatgcagccaagcgtcgtactcctggacgacctcgacttaattgctggtctgccagccgtgcccgaacacgaacactcgcccgacgctgtgcaatcccagcggctggcacacgccttgaacgatatgatcaaagaatttatcagtatgggaagtcttgtcgccttgattgccacgtctcagtcccagcaatccctgcaccctctgctcgtgtctgcccagggggtccacattttccagtgtgtgcaacatatccagccaccaaaccaagagcagcggtgtgagattttgtgcaacgttatcaagaacaagctggactgcgatattaataagttcaccgatttggacttgcagcacgtagcaaaagagaccgggggttttgtggcacgggactttaccgtgttagtcgatagggccatccactcccgcctatctcggcaaagcatctcaacaagggagaagttagtactcactacactcgacttccaaaaagcgctaagagggttcctgcctgccagcctgcgctctgtcaatctccacaagccaagagatctgggatgggataagattgggggattgcacgaagtcagacagatcctgatggacacaattcaactcccagctaagtatccagagctgtttgcaaacctgcccatccgacagcgcaccgggattctgctctacggaccccccggaactgggaaaactctcctcgctggcgtgatcgctcgcgagtcccgcatgaacttcatctcagtgaaggggcctgagctgctctccaagtacattggagcaagcgagcaagctgtgagagacatcttcattagggctcaggccgctaagccctgcatacttttcttcgacgaatttgaaagtatcgcaccacgacggggccatgacaacaccggcgttacagatagggtagtaaatcagttactaactcagctggatggtgtcgagggcctgcagggcgtgtatgtgctggccgcaaccagcaggccagacctgatcgacccagctctgcttcgaccgggtaggttagataagtgtgtctattgcccacccccagaccaagtgagtcgcctggagatactgaacgtgttgtccgactccttgcccctagccgatgacgtggatctgcagcacgtcgcttctgttaccgactcattcacaggcgccgatcttaaggccctcctttacaacgcacagctggaggctttacatggcatgttacttagcagcgggctacaggacggctccagttcctccgatagcgatctgagcctgagctccatggtgtttctcaatcactccagcggcagcgacgactccgctggggacggagagtgtggactagaccagagtctggtgtccctggagatgagcgaaatccttcctgacgaatccaaatttaatatgtaccggctttactttgggtcatcttatgagtcagaactcggaaacggtacaagctccgacctgagttcccagtgtctgtctgccccaagctctatgacccaggaccttcccggagtccccggcaaagaccaactcttctcccaaccacctgtactacggacagcgagtcaggaggggtgccaggaactcacccaggaacaaagagaccaactcagagccgatatcagcattataaaagggcgatacagaagtcagagcggcgaggatgaaagtatgaaccagcccggccccattaaaactagactcgcaatatctcaatcccatttgatgaccgcactcgggcacactcgccccagtataagcgaggacgactggaaaaactttgctgaattgtacgaatctttccagaatccaaaaaggaggaagaatcagtctggcaccatgttccggccagggcaaaaggtcacactagcatag

SEQ ID NO: 9260 - DNA, 4385 bp, Artificial Sequence
  derived and/or modified sequence
cgatcgatctcctccggctccgacgtcctcggcctgccgggtcccgggtcctttgcggcgctagggtgggcgaacccagagcgacgctccgggacgatgtggggcagcgatcgcctggcgggtgctgggggaggcggggcggcagtgactgtggccttcaccaacgctcgcgactgcttcctccacctgccgcggcgtctcgtggcccagctgcatctgctgcagaatcaagctatagaagtggtctggagtcaccagcctgcattcttgagctgggtggaaggcaggcattttagtgatcaaggtgaaaatgtggctgaaattaacagacaagttggtcaaaaacttggactctcaaatgggggacaggtatttctcaagccatgttcccatgtggtatcttgtcaacaagttgaggtggaacccctctcagcagatgattgggagatactggagctgcatgctgtttcccttgaacaacatcttctagatcaaattcgaatagtttttccaaaagccatttttcctgtttgggttgatcaacaaacgtacatatttatccaaattgttgcactaataccagctgcctcttatggaaggctggaaactgacaccaaactccttattcagccaaagacacgccgagccaaagagaatacattttcaaaagctgatgctgaatataaaaaacttcatagttatggaagagaccagaaaggaatgatgaaagaacttcaaaccaagcaacttcagtcaaatactgtgggaatcactgaatctaatgaaaacgagtcagagattccagttgactcatcatcagtagcaagtttatggactatgataggaagcattttttcctttcaatctgagaagaaacaagagacatcttggggtttaactgaaatcaatgcattcaaaaatatgcagtcaaaggttgttcctctagacaatattttcagagtatgcaaatctcaacctcctagtatatataacgcgtcagcaacctctgtttttcataaacactgtgccattcatgtatttccatgggaccaggaatattttgatgtagagcccagctttactgtgacatatggaaagctagttaagctactttctccaaagcaacagcaaagtaaaacaaaacaaaatgtgttatcacctgaaaaagagaagcagatgtcagagccactagatcaaaaaaaaattaggtcagatcataatgaagaagatgagaaggcctgtgtgctacaagtagtctggaatggacttgaagaattgaacaatgccatcaaatataccaaaaatgtagaagttctccatcttgggaaagtctggattccagatgacctgaggaagagactaaatatagaaatgcatgccgtagtcaggataactccagtggaagttacccctaaaattccaagatctctaaagttacaacctagagagaatttacctaaagacataagtgaagaagacataaaaactgtattttattcatggctacagcagtctactaccaccatgcttcctttggtaatatcagaggaagaatttattaagctggaaactaaagatggactgaaggaattttctctgagtatagttcattcttgggaaaaagaaaaagataaaaatatttttctgttgagtcccaatttgctgcagaagactacaatacaagtccttctagatcctatggtaaaagaagaaaacagtgaggaaattgactttattcttccttttttaaagctgagctctttgggaggagtgaattccttaggcgtatcctccttggagcacatcactcacagcctcctgggacgccctttgtctcggcagctgatgtctcttgttgcaggacttaggaatggagctcttttactcacaggaggaaagggaagtggaaaatcaactttagccaaagcaatctgtaaagaagcatttgacaaactggatgcccatgtggagagagttgactgtaaagctttacgaggaaaaaggcttgaaaacatacaaaaaaccctagaggtggctttctcagaggcagtgtggatgcagccatctgttgtcctgctggatgaccttgacctcattgctggactgcctgctgtcccggaacatgagcacagtcctgatgcggtgcagagccagcggcttgctcatgctttgaatgatatgataaaagagtttatctccatgggaagtttggttgcactgattgccacaagtcagtctcagcaatctctacatcctttacttgtttctgctcaaggagttcacatatttcagtgcgtccaacacattcagcctcctaatcaggaacaaagatgtgaaattctgtgtaatgtaataaaaaataaattggactgtgatataaacaagttcaccgatcttgacctgcagcatgtagctaaagaaactggcgggtttgtggctagagattttacagtacttgtggatcgagccatacattctcgactctctcgtcagagtatatccaccagagaaaaattagttttaacaacattggacttccaaaaggctctccgcggatttcttcctgcgtctttgcgaagtgtcaacctgcataaacctagagacctgggttgggacaagattggtgggttacatgaagttaggcagatactcatggatactatccagttacctgccaagtatccagaattatttgcaaacttgcccatacgacaaagaacaggaatactgttgtatggtccgcctggaacaggaaaaaccttactagctggggtaattgcacgagagagtagaatgaattttataagtgtcaaggggccagagttactcagcaaatacattggagcaagtgaacaagctgttcgggatatttttattagagcacaggctgcaaagccctgcattcttttctttgatgaatttgaatccattgctcctcggcggggtcatgataatacaggagttacagaccgagtagttaaccagttgctgactcagttggatggagtagaaggcttacagggtgtttatgtattggctgctactagtcgccctgacttgattgaccctgccctgcttaggcctggtcgactagataaatgtgtatactgtcctcctcctgatcaggtgtcacgtcttgaaattttaaatgtcctcagtgactctctacctctggcagatgatgttgaccttcagcatgtagcatcagtaactgactcctttactggagctgatctgaaagctttactttacaatgcccaattggaggccttacatggaatgctgctctcgagtggactccaggatggaagttccagctctgatagtgacctaagtctgtcttcaatggtctttcttaaccatagcagtggctctgacgattcagctggagatggagaatgtggcttagatcagtcccttgtttctttagagatgtccgagatccttccagatgaatcaaaattcaatatgtaccggctctactttggaagctcttatgaatcagaacttggaaatggaacctcttctgatttgagctcacaatgtctctctgcaccaagctccatgactcaggatttgcctggagttcctgggaaagaccagttgttttcacagcctccagtgttaaggacagcttcacaagagggttgccaagaacttacacaagaacaaagagatcaactgagggcagatatcagtattatcaaaggcagataccggagccaaagtggagaggacgaatccatgaaccaaccaggaccaatcaaaaccagactggctattagtcagtcacatttaatgactgcacttggtcacacaagaccatccattagtgaagatgactggaagaattttgctgagctatatgaaagctttcaaaatccaaagaggagaaaaaatcaaagtggaacaatgtttcgacctggacagaaagtaactttagcataaaatatacttctttttgatttggttctgttaagttttttgatggcttttccatatgttgtaacaggaaaaaaatggtgtctatgaatttcttcttaatttaacaaatttggttaatttataaaatcacagattggtaaatgctataattatgtaatgatcaggattgagattaatactgtagtataaattgggacattataacagattccatattttatttcctaaaatctaaattcagtctttaatgaaataatattagccaaatggtggaactaatttatttcttttgaggaaaagataataaagaatgtaattaaatttaaatttcttggaattcccagttgtatattcatcacctttgtagcatttgacaaattttatgcttagcagcttcttcactgttttgaaataaaatatcctattacctactgatacaa

SEQ ID NO: 9261 - DNA, 1411 bp, Artificial Sequence
  derived and/or modified sequence
aaaaaaaaattaggtcagatcataatgaagaagatgagaaggcctgtgtgctacaagtagtctggaatggacttgaagaattgaacaatgccatcaaatataccaaaaatgtagaagttctccatcttgggaaagtctggattccagatgacctgaggaagagactaaatatagaaatgcatgccgtagtcaggataactccagtggaagttacccctaaaattccaagatctctaaagttacaacctagagagaatttacctaaagacataagtgaagaagacataaaaactgtattttattcatggctacagcagtctactaccaccatgcttcctttggtaatatcagaggaagaatttattaagctggaaactaaagatggactgaaggaattttctctgagtatagttcattcttgggaaaaagaaaaagataaaaatatttttctgttgagtcccaatttgctgcagaagactacaatacaaaggagtgaattccttaggcgtatcctccttggagcacatcactcacagcctcctgggacgccctttgtctcggcagctgatgtctcttgttgcaggacttaggaatggagctcttttactcacaggaggaaagggaagtggaaaatcaactttagccaaagcaatctgtaaagaagcatttgacaaactggatgcccatgtggagagagttgactgtaaagctttacgaggaaaaaggcttgaaaacatacaaaaaaccctagaggtggctttctcagaggcagtgtggatgcagccatctgttgtcctgctggatgaccttgacctcattgctggactgcctgctgtcccggaacatgagcacagtcctgatgcggtgcagagccagcggcttgctcatgctttgaatgatatgataaaagagtttatctccatgggaagtttggttgcactgattgccacaagtcagtctcagcaatctctacatcctttacttgtttctgctcaaggagttcacatatttcagtgcgtccaacacattcagcctcctaatcagaattagttttaacaacattggacttccaaaaggctctccgcggatttcttcctgcgtctttgcgaagtgtcaacctgcataaacctagagacctgggttgggacaagattggtgggttacatgaagttaggcagatactcatggatactatccagttacctgccaagtatccagaattatttgcaaacttgcccatacgacaaagaacaggaatactgttgtatggtccgcctggaacaggaaaaaccttactagctggggtaattgcacgagagagtagaatgaattttataagtgtcaaggggccagagttactcagcaaatacattggagcaagtgaacaagctgttcgggatatttttattag

SEQ ID NO: 9262 - DNA, 2593 bp, Artificial Sequence
  derived and/or modified sequence
atgtggggcagcgatcgcctggcgggtgctgggggaggcggggcggcagtgactgtggccttcaccaacgctcgcgactgcttcctccacctgccgcggcgtctcgtggcccagctgcatctgctgcagaatcaagctatagaagtggtctggagtcaccagcctgcattcttgagctgggtggaaggcaggcattttagtgatcaaggtgaaaatgtggctgaaattaacagacaagttggtcaaaaacttggactctcaaatgggggacaggtatttctcaagccatgttcccatgtggtatcttgtcaacaagttgaggtggaacccctctcagcagatgattgggagatactggagctgcatgctgtttcccttgaacaacatcttctagatcaaattcgaatagtttttccaaaagccatttttcctgtttgggttgatcaacaaacgtacatatttatccaaattgttgcactaataccagctgcctcttatggaaggctggaaactgacaccaaactccttattcagccaaagacacgccgagccaaagagaatacattttcaaaagctgatgctgaatataaaaaacttcatagttatggaagagaccagaaaggaatgatgaaagaacttcaaaccaagcaacttcagtcaaatactgtgggaatcactgaatctaatgaaaacgagtcagagattccagttgactcatcatcagtagcaagtttatggactatgataggaagcattttttcctttcaatctgagaagaaacaagagacatcttggggtttaactgaaatcaatgcattcaaaaatatgcagtcaaaggttgttcctctagacaatattttcagagtatgcaaatctcaacctcctagtatatataacgcgtcagcaacctctgtttttcataaacactgtgccattcatgtatttccatgggaccaggaatattttgatgtagagcccagctttactgtgacatatggaaagctagttaagctactttctccaaagcaacagcaaagtaaaacaaaacaaaatgtgttatcacctgaaaaagagaagcagatgtcagagccactagatcaaaaaaaaattaggtcagatcataatgaagaagatgagaaggcctgtgtgctacaagtagtctggaatggacttgaagaattgaacaatgccatcaaatataccaaaaatgtagaagttctccatcttgggaaagtctggattccagatgacctgaggaagagactaaatatagaaatgcatgccgtagtcaggataactccagtggaagttacccctaaaattccaagatctctaaagttacaacctagagagaatttacctaaagacataagtgaagaagacataaaaactgtattttattcatggctacagcagtctactaccaccatgcttcctttggtaatatcagaggaagaatttattaagctggaaactaaagatggactgaaggaattttctctgagtatagttcattcttgggaaaaagaaaaagataaaaatatttttctgttgagtcccaatttgctgcagaagactacaatacaagtccttctagatcctatggtaaaagaagaaaacagtgaggaaattgactttattcttccttttttaaagctgagctctttgggaggagtgaattccttaggcgtatcctccttggagcacatcactcacagcctcctgggacgccctttgtctcggcagctgatgtctcttgttgcaggacttaggaatggagctcttttactcacaggaggaaagggaagtggaaaatcaactttagccaaagcaatctgtaaagaagcatttgacaaactggatgcccatgtggagagagttgactgtaaagctttacgaggaaaaaggcttgaaaacatacaaaaaaccctagaggtggctttctcagaggcagtgtggatgcagccatctgttgtcctgctggatgaccttgacctcattgctggactgcctgctgtcccggaacatgagcacagtcctgatgcggtgcagagccagcggcttgctcatgctttgaatgatatgataaaagagtttatctccatgggaagtttggttgcactgattgccacaagtcagtctcagcaatctctacatcctttacttgtttctgctcaaggagttcacatatttcagtgcgtccaacacattcagcctcctaatcagaattagttttaacaacattggacttccaaaaggctctccgcggatttcttcctgcgtctttgcgaagtgtcaacctgcataaacctagagacctgggttgggacaagattggtgggttacatgaagttaggcagatactcatggatactatccagttacctgccaagtatccagaattatttgcaaacttgcccatacgacaaagaacaggaatactgttgtatggtccgcctggaacaggaaaaaccttactagctggggtaattgcacgagagagtagaatgaattttataagtgtcaaggggccagagttactcagcaaatacattggagcaagtgaacaagctgttcgggatatttttattag

SEQ ID NO: 9263 - DNA, 3852 bp, Artificial Sequence
  derived and/or modified sequence
atgtggggctctgacaggctggctggagcgggaggtggcggtgcagctgtgaccgtggcctttacaaacgccagggattgctttttgcacctgccccgtaggctggtcgcgcaactgcatctcctgcagaatcaagccattgaagtcgtctggtctcaccagccagccttcctctcctgggtggagggtcggcacttctctgaccagggtgagaacgtcgccgagattaacaggcaagtgggccaaaagctgggcctgagcaacggcggacaagtatttctgaagccctgcagtcacgttgtgtcttgccagcaggtggaggtggaacctttgagcgccgacgattgggagatcttggaattgcatgccgtttcattagaacaacatttactcgatcagatacgaattgtgtttcctaaagcaatctttcccgtctgggtggaccagcagacatacatcttcattcagattgtggccctgatccccgctgctagctacggtcgccttgagactgacaccaaactgctgatacaaccaaaaactcggagggccaaggagaacaccttttcaaaggcagatgctgagtacaaaaaactccactcatacggacgtgaccaaaagggtatgatgaaggaactccagactaaacagctgcagtctaacacagtagggatcaccgagtccaacgaaaacgagagtgaaatccccgtcgactcttcttctgtggctagcctgtggaccatgattggaagcatcttcagcttccagagtgagaagaagcaagagacgagttggggcttgaccgaaattaacgccttcaaaaacatgcagtccaaggtggttccactggacaatatcttcagagtgtgtaagtcccaaccaccgagcatttacaacgcttcagcaaccagcgtattccacaagcactgtgctatacatgtgtttccttgggatcaggaatactttgacgtcgagccctccttcacagtcacatacggcaaactcgtgaagcttctgagcccaaagcaacagcagagtaaaacgaaacagaacgtcctgtcacccgagaaagagaagcagatgtccgaaccgctggaccagaagaagatacgatcagaccacaacgaggaggacgaaaaggcttgtgtcctgcaggtggtgtggaacgggctggaggagctcaacaacgccattaaatacaccaagaatgtggaggtgttgcatctgggtaaggtatggatccccgacgatctcaggaaacgcttgaacatcgaaatgcacgccgtcgttagaatcacacctgtagaggttacccccaaaattcccagatctctgaagctgcagcctcgcgagaacttaccgaaggatatcagcgaggaagatattaaaactgtcttctattcctggctgcaacagtctacaacaacaatgctaccactggtgatcagcgaggaggaattcattaaactggagaccaaagacgggcttaaagaattcagcttgtccatcgtccacagctgggaaaaagagaaagacaagaatatcttcctcctgagccccaacctcctccagaaaactaccattcaagttctccttgatcctatggtgaaagaggagaatagcgaagagattgatttcatcttacctttcctgaagctctcttctttggggggtgttaactcgctcggggtctccagccttgagcacattactcacagtctcctaggcagacctcttagccggcagctgatgtcactggtggccggtcttcggaacggtgccttacttctgaccggcggaaaagggtctggtaagtccacgcttgccaaggctatatgtaaggaggccttcgacaaattagacgctcacgtggaacgggtggactgtaaggccttgcggggaaaacgcctcgaaaacatccagaaaactctggaggtggccttttccgaggctgtgtggatgcaaccaagtgtcgtgctgttggatgatctcgatctcatcgctggcctgcccgcagtgccagagcacgagcacagtccagacgctgtgcagagtcaacggctggctcatgccctgaatgacatgatcaaagagttcatctccatggggtccctcgtcgcactgattgccacgtcccagtcccagcagtccctccacccactccttgtatcagctcaaggcgtgcatatatttcagtgcgtgcagcacattcagcctccgaaccaagagcagcgttgcgaaatcctttgcaacgtcataaagaacaaactggattgcgatattaataaattcacagacctcgatttgcagcacgttgctaaagaaacaggcggtttcgtcgcaagagacttcaccgtgctggtggaccgtgctattcatagcagactgtcccgccagtccatcagtacaagggagaagctcgtcctgaccacactggatttccagaaggccctgagaggctttctcccagcatctttgcgctctgtgaacctgcacaaacctcgggacctgggatgggacaaaatcgggggtttgcatgaagtgagacagattctaatggacacaatccagctgcctgctaaataccccgagctattcgccaatctgccaataaggcagcgcactggcattcttctttatggtccaccaggcacagggaaaaccctgctcgcaggggtgatcgcaagagagagtcgaatgaacttcataagtgtaaaaggtcctgagctcctgagcaagtacataggagcttctgaacaggcagtccgcgatatttttataagggcccaagccgctaaaccttgtattctgttcttcgacgagttcgagtctatagcgccaaggcggggtcacgataatacgggagtgactgatagggttgtgaatcaacttctaacccaactcgacggcgtggagggcctccaaggggtttacgtgctcgctgccacttcaagacccgatctgatcgatccagccctcctcaggcctggaagactcgacaagtgtgtttactgccctcctcccgatcaggtgagccgactggaaattctgaacgtgctcagtgattcactgcctcttgcagacgacgtggatctccaacacgtcgcctcagtcacagactcattcaccggagctgacctaaaggccctgttatacaatgcacagctcgaagctctgcatggcatgcttctgtctagcggcctgcaggatggatcctcatcctctgacagcgatctgagcctctctagcatggtgtttctcaatcattcttccggtagtgatgattcagcgggagatggtgagtgcgggttggaccagtcgctggtctccctggaaatgagcgaaatcttaccagacgaatcaaagttcaacatgtacaggctgtatttcggatccagctacgaatcggagctcgggaacggaaccagctcagatttgtcaagtcagtgtctatctgccccttcatccatgacccaggatttacctggggtccctggcaaagaccagttgtttagccagcctcctgtcctgagaacagcgtcccaagagggctgccaagaactcacccaggaacaaagagatcagctcagagccgacatttccatcattaaggggaggtatagatcccaatctggagaggacgagagtatgaatcagccagggccaattaagaccagactggcaattagtcaaagccatctgatgactgcactgggtcacactcggccatccattagtgaggatgactggaaaaactttgccgagctatatgagagcttccaaaatcctaaacgccgaaaaaaccaatccgggaccatgtttcgccctgggcaaaaggttactctggcatag

SEQ ID NO: 9264 - DNA, 3852 bp, Artificial Sequence
  derived and/or modified sequence
atgtggggcagcgacagactggccggcgccggcggcggcggcgccgccgtgaccgtggccttcaccaacgccagagactgcttcctgcacctgcccagaagactggtggcccagctgcacctgctgcagaaccaggccatcgaggtggtgtggagccaccagcccgccttcctgagctgggtggagggcagacacttcagcgaccagggcgagaacgtggccgagatcaacagacaggtgggccagaagctgggcctgagcaacggcggccaggtgttcctgaagccctgcagccacgtggtgagctgccagcaggtggaggtggagcccctgagcgccgacgactgggagatcctggagctgcacgccgtgagcctggagcagcacctgctggaccagatcagaatcgtgttccccaaggccatcttccccgtgtgggtggaccagcagacctacatcttcatccagatcgtggccctgatccccgccgccagctacggcagactggagaccgacaccaagctgctgatccagcccaagaccagaagagccaaggagaacaccttcagcaaggccgacgccgagtacaagaagctgcacagctacggcagagaccagaagggcatgatgaaggagctgcagaccaagcagctgcagagcaacaccgtgggcatcaccgagagcaacgagaacgagagcgagatccccgtggacagcagcagcgtggccagcctgtggaccatgatcggcagcatcttcagcttccagagcgagaagaagcaggagaccagctggggcctgaccgagatcaacgccttcaagaacatgcagagcaaggtggtgcccctggacaacatcttcagagtgtgcaagagccagccccccagcatctacaacgccagcgccaccagcgtgttccacaagcactgcgccatccacgtgttcccctgggaccaggagtacttcgacgtggagcccagcttcaccgtgacctacggcaagctggtgaagctgctgagccccaagcagcagcagagcaagaccaagcagaacgtgctgagccccgagaaggagaagcagatgagcgagcccctggaccagaagaagatcagaagcgaccacaacgaggaggacgagaaggcctgcgtgctgcaggtggtgtggaacggcctggaggagctgaacaacgccatcaagtacaccaagaacgtggaggtgctgcacctgggcaaggtgtggatccccgacgacctgagaaagagactgaacatcgagatgcacgccgtggtgagaatcacccccgtggaggtgacccccaagatccccagaagcctgaagctgcagcccagagagaacctgcccaaggacatcagcgaggaggacatcaagaccgtgttctacagctggctgcagcagagcaccaccaccatgctgcccctggtgatcagcgaggaggagttcatcaagctggagaccaaggacggcctgaaggagttcagcctgagcatcgtgcacagctgggagaaggagaaggacaagaacatcttcctgctgagccccaacctgctgcagaagaccaccatccaggtgctgctggaccccatggtgaaggaggagaacagcgaggagatcgacttcatcctgcccttcctgaagctgagcagcctgggcggcgtgaacagcctgggcgtgagcagcctggagcacatcacccacagcctgctgggcagacccctgagcagacagctgatgagcctggtggccggcctgagaaacggcgccctgctgctgaccggcggcaagggcagcggcaagagcaccctggccaaggccatctgcaaggaggccttcgacaagctggacgcccacgtggagagagtggactgcaaggccctgagaggcaagagactggagaacatccagaagaccctggaggtggccttcagcgaggccgtgtggatgcagcccagcgtggtgctgctggacgacctggacctgatcgccggcctgcccgccgtgcccgagcacgagcacagccccgacgccgtgcagagccagagactggcccacgccctgaacgacatgatcaaggagttcatcagcatgggcagcctggtggccctgatcgccaccagccagagccagcagagcctgcaccccctgctggtgagcgcccagggcgtgcacatcttccagtgcgtgcagcacatccagccccccaaccaggagcagagatgcgagatcctgtgcaacgtgatcaagaacaagctggactgcgacatcaacaagttcaccgacctggacctgcagcacgtggccaaggagaccggcggcttcgtggccagagacttcaccgtgctggtggacagagccatccacagcagactgagcagacagagcatcagcaccagagagaagctggtgctgaccaccctggacttccagaaggccctgagaggcttcctgcccgccagcctgagaagcgtgaacctgcacaagcccagagacctgggctgggacaagatcggcggcctgcacgaggtgagacagatcctgatggacaccatccagctgcccgccaagtaccccgagctgttcgccaacctgcccatcagacagagaaccggcatcctgctgtacggcccccccggcaccggcaagaccctgctggccggcgtgatcgccagagagagcagaatgaacttcatcagcgtgaagggccccgagctgctgagcaagtacatcggcgccagcgagcaggccgtgagagacatcttcatcagagcccaggccgccaagccctgcatcctgttcttcgacgagttcgagagcatcgcccccagaagaggccacgacaacaccggcgtgaccgacagagtggtgaaccagctgctgacccagctggacggcgtggagggcctgcagggcgtgtacgtgctggccgccaccagcagacccgacctgatcgaccccgccctgctgagacccggcagactggacaagtgcgtgtactgccccccccccgaccaggtgagcagactggagatcctgaacgtgctgagcgacagcctgcccctggccgacgacgtggacctgcagcacgtggccagcgtgaccgacagcttcaccggcgccgacctgaaggccctgctgtacaacgcccagctggaggccctgcacggcatgctgctgagcagcggcctgcaggacggcagcagcagcagcgacagcgacctgagcctgagcagcatggtgttcctgaaccacagcagcggcagcgacgacagcgccggcgacggcgagtgcggcctggaccagagcctggtgagcctggagatgagcgagatcctgcccgacgagagcaagttcaacatgtacagactgtacttcggcagcagctacgagagcgagctgggcaacggcaccagcagcgacctgagcagccagtgcctgagcgcccccagcagcatgacccaggacctgcccggcgtgcccggcaaggaccagctgttcagccagccccccgtgctgagaaccgccagccaggagggctgccaggagctgacccaggagcagagagaccagctgagagccgacatcagcatcatcaagggcagatacagaagccagagcggcgaggacgagagcatgaaccagcccggccccatcaagaccagactggccatcagccagagccacctgatgaccgccctgggccacaccagacccagcatcagcgaggacgactggaagaacttcgccgagctgtacgagagcttccagaaccccaagagaagaaagaaccagagcggcaccatgttcagacccggccagaaggtgaccctggcctag

SEQ ID NO: 9265 - protein, 105 aa, Artificial Sequence
  derived and/or modified sequence
MLELAQDRLQFETVEVSEPSMLQKILTTRRRETGGNEPLPVPTLQHHLAPPAEARKVPSASQVQAIKCFLSKCWSLNISTKEYAYLKGTVLFNPGKGKENDCNHH

SEQ ID NO: 9266 - protein, 470 aa, Artificial Sequence
  derived and/or modified sequence
MAGENHQWQGSILYNMLMSAKQTRAAPEAPETRLVDQCWGCSCGDEPGVGREGLLGGRNVALLYRCCFCGKDHPRQGSILYSMLTSAKQTYAAPKAPEATLGPCWGCSCGSDPGVGRAGLPGGRPVALLYRCCFCGEDHPRQGSILYSLLTSSKQTHVAPAAPEARPGGAWWDRSYFAQRPGGKEALPGGRATALLYRCCFCGEDHPQQGSTLYCVPTSTNQAQAAPEERPRAPWWDTSSGALRPVALKSPQVVCEAASAGLLKTLRFVKYLPCFQVLPLDQQLVLVRNCWASLLMLELAQDRLQFETVEVSEPSMLQKILTTRRRETGGNEPLPVPTLQHHLAPPAEARKVPSASQVQAIKCFLSKCWSLNISTKEYAYLKGTVLFNPDVPGLQCVKYIQGLQWGTQQILSEHTRMTHQGPHDRFIELNSTLFLLRFINANVIAELFFRPIIGTVSMDDMMLEMLCTKI

SEQ ID NO: 9267 - protein, 400 aa, Artificial Sequence
  derived and/or modified sequence
MAGENHQWQGSILYNMLMSAKQTRAAPEAPETRLVDQCWGCSCGDEPGVGREGLLGGRNVALLYRCCFCGKDHPRQGSILYSMLTSAKQTYAAPKAPEATLGPCWGCSCGSDPGVGRAGLPGGRPVALLYRCCFCGEDHPRQGSILYSLLTSSKQTHVAPAAPEARPGGAWWDRSYFAQRPGGKEALPGGRATALLYRCCFCGEDHPQQGSTLYCVPTSTNQAQAAPEERPRAPWWDTSSGALRPVALKSPQVVCEAASAGLLKTLRFVKYLPCFQVLPLDQQLVLVRNCWASLLMLELAQDRLQFETVEVSEPSMLQKILTTRRRETGGNEPLPVPTLQHHLAPPAEARKVPSASQVQAIKCFLSKCWSLNISTKEYAYLKGTVLFNPGKGKENDCNHH

SEQ ID NO: 9268 - DNA, 318 bp, Artificial Sequence
  derived and/or modified sequence
atgctggagctggcccaggacagactgcagttcgagaccgtggaggtgagcgagcccagcatgctgcagaagatcctgaccaccagaagaagagagaccggcggcaacgagcccctgcccgtgcccaccctgcagcaccacctggccccccccgccgaggccagaaaggtgcccagcgccagccaggtgcaggccatcaagtgcttcctgagcaagtgctggagcctgaacatcagcaccaaggagtacgcctacctgaagggcaccgtgctgttcaaccccggcaagggcaaggagaacgactgcaaccaccactag

SEQ ID NO: 9269 - DNA, 1413 bp, Artificial Sequence
  derived and/or modified sequence
atggccggcgagaaccaccagtggcagggcagcatcctgtacaacatgctgatgagcgccaagcagaccagagccgcccccgaggcccccgagaccagactggtggaccagtgctggggctgcagctgcggcgacgagcccggcgtgggcagagagggcctgctgggcggcagaaacgtggccctgctgtacagatgctgcttctgcggcaaggaccaccccagacagggcagcatcctgtacagcatgctgaccagcgccaagcagacctacgccgcccccaaggcccccgaggccaccctgggcccctgctggggctgcagctgcggcagcgaccccggcgtgggcagagccggcctgcccggcggcagacccgtggccctgctgtacagatgctgcttctgcggcgaggaccaccccagacagggcagcatcctgtacagcctgctgaccagcagcaagcagacccacgtggcccccgccgcccccgaggccagacccggcggcgcctggtgggacagaagctacttcgcccagagacccggcggcaaggaggccctgcccggcggcagagccaccgccctgctgtacagatgctgcttctgcggcgaggaccacccccagcagggcagcaccctgtactgcgtgcccaccagcaccaaccaggcccaggccgcccccgaggagagacccagagccccctggtgggacaccagcagcggcgccctgagacccgtggccctgaagagcccccaggtggtgtgcgaggccgccagcgccggcctgctgaagaccctgagattcgtgaagtacctgccctgcttccaggtgctgcccctggaccagcagctggtgctggtgagaaactgctgggccagcctgctgatgctggagctggcccaggacagactgcagttcgagaccgtggaggtgagcgagcccagcatgctgcagaagatcctgaccaccagaagaagagagaccggcggcaacgagcccctgcccgtgcccaccctgcagcaccacctggccccccccgccgaggccagaaaggtgcccagcgccagccaggtgcaggccatcaagtgcttcctgagcaagtgctggagcctgaacatcagcaccaaggagtacgcctacctgaagggcaccgtgctgttcaaccccgacgtgcccggcctgcagtgcgtgaagtacatccagggcctgcagtggggcacccagcagatcctgagcgagcacaccagaatgacccaccagggcccccacgacagattcatcgagctgaacagcaccctgttcctgctgagattcatcaacgccaacgtgatcgccgagctgttcttcagacccatcatcggcaccgtgagcatggacgacatgatgctggagatgctgtgcaccaagatctag

SEQ ID NO: 9270 - DNA, 1203 bp, Artificial Sequence
  derived and/or modified sequence
atggccggcgagaaccaccagtggcagggcagcatcctgtacaacatgctgatgagcgccaagcagaccagagccgcccccgaggcccccgagaccagactggtggaccagtgctggggctgcagctgcggcgacgagcccggcgtgggcagagagggcctgctgggcggcagaaacgtggccctgctgtacagatgctgcttctgcggcaaggaccaccccagacagggcagcatcctgtacagcatgctgaccagcgccaagcagacctacgccgcccccaaggcccccgaggccaccctgggcccctgctggggctgcagctgcggcagcgaccccggcgtgggcagagccggcctgcccggcggcagacccgtggccctgctgtacagatgctgcttctgcggcgaggaccaccccagacagggcagcatcctgtacagcctgctgaccagcagcaagcagacccacgtggcccccgccgcccccgaggccagacccggcggcgcctggtgggacagaagctacttcgcccagagacccggcggcaaggaggccctgcccggcggcagagccaccgccctgctgtacagatgctgcttctgcggcgaggaccacccccagcagggcagcaccctgtactgcgtgcccaccagcaccaaccaggcccaggccgcccccgaggagagacccagagccccctggtgggacaccagcagcggcgccctgagacccgtggccctgaagagcccccaggtggtgtgcgaggccgccagcgccggcctgctgaagaccctgagattcgtgaagtacctgccctgcttccaggtgctgcccctggaccagcagctggtgctggtgagaaactgctgggccagcctgctgatgctggagctggcccaggacagactgcagttcgagaccgtggaggtgagcgagcccagcatgctgcagaagatcctgaccaccagaagaagagagaccggcggcaacgagcccctgcccgtgcccaccctgcagcaccacctggccccccccgccgaggccagaaaggtgcccagcgccagccaggtgcaggccatcaagtgcttcctgagcaagtgctggagcctgaacatcagcaccaaggagtacgcctacctgaagggcaccgtgctgttcaaccccggcaagggcaaggagaacgactgcaaccaccactag

SEQ ID NO: 9271 - DNA, 318 bp, Artificial Sequence
  derived and/or modified sequence
atgctggagctggcccaagaccgtttgcagtttgagaccgtggaggtgtccgagccatccatgctgcagaaaatcctcaccacccggcggcgcgagactggcggcaacgagcccttacctgtgcctacactgcagcatcatctggccccgcctgccgaggcaaggaaggttccgtctgcctcacaggtacaagctatcaagtgtttcttgtctaaatgttggagcctgaacatcagtaccaaggaatatgcttacttgaaaggtactgtcctcttcaacccgggaaagggaaaagagaacgactgtaaccaccactag

SEQ ID NO: 9272 - DNA, 1413 bp, Artificial Sequence
  derived and/or modified sequence
atggccggtgagaaccatcagtggcagggctctattctgtacaatatgctgatgtctgcgaaacagacgagggctgcccctgaggcccccgaaacccgtctcgtggaccagtgttggggatgtagctgtggagatgagccgggagtcggacgcgagggcttactgggtggacggaacgtggctctcctgtatcgatgttgcttctgtggcaaagaccacccgagacaagggtctatactgtatagcatgctcacttccgctaagcagacttacgctgctcccaaagcaccggaggccaccttgggaccttgctggggctgctcctgtgggtctgaccctggcgtcggaagagccggattacccgggggcagaccggttgcactactgtaccgctgctgtttttgcggcgaggaccacccaagacaggggagcatcctgtactctctccttacatcttcaaagcagactcatgtggctccagccgcccccgaagcaagacctggcggcgcctggtgggatagatcatatttcgctcagcgccctggtggaaaagaagctctcccaggcggccgggctactgcattattgtatagatgttgtttctgcggtgaggatcaccctcagcaaggttccactctgtattgcgttccaaccagcacaaatcaggcgcaggccgcacctgaggagagacctagggcgccctggtgggacacaagttccggggccctcagacctgtagccttaaaatcaccacaggtcgtctgtgaggcagcttcagccggactgctcaaaacccttagatttgtaaagtacctgccttgctttcaggtattaccgctggaccagcagctcgtattggtgcgcaattgctgggcttccttattgatgctggaattggctcaggatagactgcaatttgagacggttgaagtcagcgagccctccatgctgcagaagatcctcacaaccagacgtcgggagacaggcggaaacgagcccctccccgtccccaccttgcagcatcatctcgcccccccagccgaagctcgtaaggtccctagtgccagccaggttcaggcgattaagtgcttcctgagtaagtgttggagtctgaatatttctactaaagagtacgcttacctcaagggcacagtacttttcaatccagatgtccccggactgcaatgcgtgaagtacatccagggtcttcaatggggcacacaacaaattttgtctgaacataccaggatgactcaccagggcccccacgatcgcttcatcgagctgaactctacattatttttgcttcggtttattaatgctaacgtaatcgcggaattgttcttcagaccaattattggcacagtgtcaatggatgacatgatgctcgagatgctgtgcactaagatctag

SEQ ID NO: 9273 - DNA, 1203 bp, Artificial Sequence
  derived and/or modified sequence
atggctggggagaaccaccagtggcagggctccattctatacaatatgttgatgtccgccaagcagactcgagctgcacctgaggctccagagacgaggctggtcgaccaatgttggggatgcagttgcggcgacgagcctggcgtgggtcgggaaggactactgggaggtaggaatgtagcactgctctatcgctgttgtttctgcgggaaggatcatcctcggcaaggctcaattctttactccatgctcacctctgcgaaacagacttacgctgcccctaaagcaccggaggccacacttggcccctgctggggctgttcctgcggatcagatccaggcgtcggcagggcaggtcttcctggtgggcgacccgtggctctcttgtacaggtgctgcttctgcggagaagatcaccctcgacaaggatccatactgtacagtctgttgacttcgagcaaacagactcatgttgcccccgcagcgcccgaggccaggccaggaggagcctggtgggatcgaagttacttcgctcaacggccaggcggcaaggaagcccttcccggcggacgcgccacggcactgctgtaccgctgctgcttctgcggagaagatcatccccagcagggcagcacgctgtattgcgtgcccacatccaccaatcaagcccaggccgctcccgaggaaagacccagggccccctggtgggatacttcatctggtgcactgcggcctgtggccctgaagagcccccaagtggtctgcgaggctgctagtgcaggcttgctgaagacactgcgatttgtgaaatacctgccctgtttccaggtgttgccattggatcagcaattggtattggtacgcaactgttgggcatcactcctgatgctggaactggctcaggaccgactgcagtttgaaaccgtggaagtgagcgagccctcgatgctccagaagattctgaccacacgccgtcgcgaaactggcgggaatgagcctttgcctgtgcccaccttgcaacaccacttagctccgcctgcagaggcacgtaaggtgccatctgcttcccaagttcaagcgatcaaatgctttctgtccaagtgttggtccctaaacatctcaactaaggagtatgcttatctcaagggcactgtgttgtttaaccccgggaagggtaaagagaacgactgtaaccatcactag

SEQ ID NO: 9274 - DNA, 318 bp, Artificial Sequence
  derived and/or modified sequence
atgctggagctggcccaggaccggctgcagtttgaaacagtggaggtgtctgagcccagcatgctgcagaagatcctgaccacccggcggcgggagactggaggaaatgagcccctgcctgtgcccaccctgcagcaccacctggcccccccagctgaggccaggaaggtgcccagcgccagccaggtgcaggccatcaagtgcttcctgagcaagtgctggagcctgaacatcagcaccaaggagtatgcctacctgaagggcaccgtgctcttcaaccctgggaagggcaaggaaaatgactgcaaccaccactag

SEQ ID NO: 9275 - DNA, 1413 bp, Artificial Sequence
  derived and/or modified sequence
atggccggggagaaccaccagtggcagggcagcatcctgtacaacatgctgatgtctgccaagcagaccagggctgcccctgaggcccctgagacccggctggtggaccagtgctggggctgcagctgtggagatgagcccggggtgggccgggagggcctgctgggcggcagaaatgtggccctgctgtaccgctgctgcttctgtgggaaggaccacccccggcagggcagcatcctgtacagcatgctgaccagcgccaagcagacctacgccgcccccaaggcccctgaggccaccctgggcccctgctggggctgcagctgtggcagtgaccccggggtgggccgggccggcctgcccggcggccggcctgtggccctgctgtaccgctgctgcttctgtggggaggaccacccccggcagggcagcatcctgtacagcctgctgaccagcagcaagcagacccacgtggccccagctgcccctgaggcccggcctggaggagcctggtgggacaggagctactttgcccagaggcctgggggcaaggaggccctgcccggcggccgggccacagccctgctgtaccgctgctgcttctgtggggaggaccacccccagcagggcagcaccctgtactgtgtgcccaccagcaccaaccaggcccaggccgcccctgaggagcggccccgggccccctggtgggacaccagcagcggggccctgcggcctgtggccctgaagagcccccaggtggtgtgtgaggccgccagcgctggcctgctgaagaccctgcgctttgtgaagtacctgccctgcttccaggtgctgcccctggaccagcagctggtgctggtgaggaactgctgggccagcctgctgatgctggagctggcccaggaccggctgcagtttgagaccgtggaggtgtctgagcccagcatgctgcagaagatcctgaccaccaggagaagagagaccggcggcaatgagcccctgcctgtgcccaccctgcagcaccacctggcccctcctgctgaggccaggaaggtgcccagcgccagccaggtgcaggccatcaagtgcttcctgagcaagtgctggagcctgaacatcagcaccaaggagtatgcctacctgaagggcaccgtgctcttcaacccagatgtgcccggcctgcagtgtgtgaagtacatccagggcctgcagtggggcacccagcagatcctgtctgagcacaccaggatgacccaccagggcccccatgaccgcttcatcgagctgaacagcaccctcttcctgctgcgcttcatcaatgccaacgtgattgctgagctgttcttccggcccatcattggaacagtgtccatggatgacatgatgctggagatgctgtgcaccaagatctag

SEQ ID NO: 9276 - DNA, 475 bp, Artificial Sequence
  derived and/or modified sequence
gtccctgctcatgcttgagctggcccaggaccgcttgcagttcgagactgtggaagtctcggagcccagcatgctgcagaagatcctcaccaccaggcggcgggagaccgggggcaacgagccactgcccgtgcccacgctgcagcaccatttggcaccgccggcggaggccaggaaggtgccctccgcctcccaggtccaagccatcaagtgctttctttccaaatgctggagtctgaacatcagtaccaaggagtacgcctacctcaaggggaccgtgctctttaacccgggaaaagggaaggaaaatgattgcaatcatcattaacatcatttaaaccaagtggtcaactgctaattacttgaatacaagttaaagaactttgcaacgatattatcatcatggaagatcaaaggaccttcaaaagcagcctcctcttattactttccttataaaaacttacatccacttaaa

SEQ ID NO: 9277 - DNA, 2021 bp, Artificial Sequence
  derived and/or modified sequence
gagctcccacgctgctgttcttccatttccagcttttaaagagcacccgccccttcgaaccaccgaggtcatgggcgaacacaccggagcgcagcaccgcgcccccccgcacacaccgcccgcctccgcgcccttgcccagaccgaggcggccgacgcgcctgcgtgcgcgctaggtataaataggtcccaggaggcagccactgggcagaactgggctacgggcgccgcgggccatggcgggcgagaaccaccagtggcagggcagcatcctctacaacatgcttatgagcgcgaagcaaacgcgcgcggctcctgaggctccagagacgcggctggtggatcagtgctggggctgttcgtgcggcgatgagcccggggtgggcagagaggggctgctgggcgggcggaacgtggcgctcctgtaccgctgctgcttttgcggtaaagaccacccacggcagggcagcatcctctacagcatgctgacgagcgcaaagcaaacgtacgcggcaccgaaggcgcccgaggcgacgctgggtccgtgctggggctgttcgtgcggctctgatcccggggtgggcagagcggggcttccgggtgggcggcccgtggcactcctgtaccgctgctgcttttgtggtgaagaccacccgcggcagggcagcatcctctacagcttgctcactagctcaaagcaaacgcacgtggctccggcagcgcccgaggcacggccagggggcgcgtggtgggaccgctcctacttcgcgcagaggccagggggtaaagaggcgctaccaggcgggcgggccacggcgcttctgtaccgctgctgcttttgcggtgaagaccacccgcagcagggcagcaccctctactgcgtgcccacgagcacaaatcaagcgcaggcggctccggaggagcggccgagggccccctggtgggacacctcctctggtgcgctgcggccggtggcgctcaagagtccacaggtggtctgcgaggcagcctcagcgggcctgttgaagacgctgcgcttcgtcaagtacttgccctgcttccaggtgctgcccctggaccagcagctggtgctggtgcgcaactgctgggcgtccctgctcatgcttgagctggcccaggaccgcttgcagttcgagactgtggaagtctcggagcccagcatgctgcagaagatcctcaccaccaggcggcgggagaccgggggcaacgagccactgcccgtgcccacgctgcagcaccatttggcaccgccggcggaggccaggaaggtgccctccgcctcccaggtccaagccatcaagtgctttctttccaaatgctggagtctgaacatcagtaccaaggagtacgcctacctcaaggggaccgtgctctttaacccggacgtgccgggcctgcagtgcgtgaagtacattcagggactccagtggggaactcagcaaatactcagtgaacacaccaggatgacgcaccaagggccccatgacagattcatcgaacttaatagtacccttttcctgctgagattcatcaatgccaatgtcattgctgaactgttcttcaggcccatcatcggcacagtcagcatggatgatatgatgctggaaatgctctgtacaaagatataaagtcatgtgggccacacaagtgcagtagtgcagttcaccatgagggaagaataaagagctgtgggcaaaagagtgtaaaatattttaaaataaactttcttaatatttttacatgcagagtatttttgtattcaattaaagaaataattttattccagacagtcacaaatttctctgttccatagttaaagaagacatttgccaacaggtagcatagctctgtacatcttttaaaaaaaaaatagcagggtactagtataataagctattttcacaagtgtagcaatttcatggaacctgctcaaatcaaatttgtacatattgttataataaattttaaggtcttaactattaacttgattgaaaaaagctt

SEQ ID NO: 9278 - DNA, 1203 bp, Artificial Sequence
  derived and/or modified sequence
atggccggggagaaccaccagtggcagggcagcatcctgtacaacatgctgatgtctgccaagcagaccagggctgcccctgaggcccctgagacccggctggtggaccagtgctggggctgcagctgtggagatgagcccggggtgggccgggagggcctgctgggcggcagaaatgtggccctgctgtaccgctgctgcttctgtgggaaggaccacccccggcagggcagcatcctgtacagcatgctgaccagcgccaagcagacctacgccgcccccaaggcccctgaggccaccctgggcccctgctggggctgcagctgtggcagtgaccccggggtgggccgggccggcctgcccggcggccggcctgtggccctgctgtaccgctgctgcttctgtggggaggaccacccccggcagggcagcatcctgtacagcctgctgaccagcagcaagcagacccacgtggccccagctgcccctgaggcccggcctggaggagcctggtgggacaggagctactttgcccagaggcctgggggcaaggaggccctgcccggcggccgggccacagccctgctgtaccgctgctgcttctgtggggaggaccacccccagcagggcagcaccctgtactgtgtgcccaccagcaccaaccaggcccaggccgcccctgaggagcggccccgggccccctggtgggacaccagcagcggggccctgcggcctgtggccctgaagagcccccaggtggtgtgtgaggccgccagcgctggcctgctgaagaccctgcgctttgtgaagtacctgccctgcttccaggtgctgcccctggaccagcagctggtgctggtgaggaactgctgggccagcctgctgatgctggagctggcccaggaccggctgcagtttgagaccgtggaggtgtctgagcccagcatgctgcagaagatcctgaccaccaggagaagagagaccggcggcaatgagcccctgcctgtgcccaccctgcagcaccacctggcccctcctgctgaggccaggaaggtgcccagcgccagccaggtgcaggccatcaagtgcttcctgagcaagtgctggagcctgaacatcagcaccaaggagtatgcctacctgaagggcaccgtgctcttcaaccctgggaagggcaaggaaaatgactgcaaccaccactag

SEQ ID NO: 9279 - DNA, 318 bp, Artificial Sequence
  derived and/or modified sequence
atgctggagctggcccaggaccggctgcagttcgagaccgtggaggtaagcgagccctctatgctgcagaagatcttgaccacccggcgccgggaaactggaggtaacgaacctctgccagtgccaacacttcagcaccaccttgcgcctcctgccgaagcccgtaaggtccccagtgctagccaggtccaggcaatcaagtgcttcctcagtaaatgctggtctttaaacattagtaccaaggaatatgcatatcttaaaggcactgtgttattcaatcccggcaaagggaaggagaacgattgtaaccatcattag

SEQ ID NO: 9280 - DNA, 1413 bp, Artificial Sequence
  derived and/or modified sequence
atggccggcgagaaccaccagtggcagggcagcatcctgtacaacatgctgatgtcagccaagcagaccagagctgcaccagaggccccagagactcggctagtggaccagtgctggggatgtagttgcggcgacgagccaggagtgggcagggagggcttactgggcggcagaaatgttgccctgctgtatcggtgttgtttctgcgggaaagatcaccctagacagggtagtatactgtatagtatgcttacatcagccaagcagacatacgctgcacctaaagctcccgaagctaccttgggcccatgttggggctgttcatgtggaagcgaccccggtgtggggcgtgctggcctacccggggggcggcccgtggctctactgtatcgatgctgcttttgcggcgaggatcacccccgccaaggctccatcctttacagcctcttgacttctagcaagcagacccacgtagctccagcagcaccagaagcacgtccagggggcgcctggtgggataggtcttacttcgcccagcggcctggcggtaaggaggccctacccggtggacgcgccactgcccttctgtacagatgctgtttttgcggggaagatcaccctcagcagggctccactttgtactgtgtgcctacgtccaccaaccaagctcaggcggcaccagaagaaaggcctagagctccgtggtgggatacatccagcggcgccctaaggcctgtagctctgaagagcccacaggtggtgtgcgaggcggccagcgctggcctcctcaaaacacttcgcttcgtcaagtatcttccctgctttcaggttttgccactcgatcagcagttggttctcgtgcggaattgctgggcttctctgctgatgctggaacttgcccaggatagactacaattcgaaactgtagaggtgagtgagccgtccatgctccagaagatactcacaacccggcggagagaaacgggaggaaatgaaccacttccagtgcccaccttgcagcaccaccttgccccaccagcggaggcccgaaaggtcccatcagcatcccaggtccaagccattaaatgttttctttctaaatgctggtcactgaacatctccactaaagaatacgcatacctgaagggtactgttctgttcaatcccgatgtcccagggcttcagtgtgtcaagtacatacaggggctgcagtggggaactcagcagattctgagcgagcacaccaggatgactcaccagggaccacacgatcggtttatagaactgaactcaacactgtttctccttcgctttatcaacgctaacgtgattgctgagttgttctttcggccaattatcggaaccgtgtctatggatgatatgatgctggaaatgctttgtacaaaaatctag

SEQ ID NO: 9281 - DNA, 1203 bp, Artificial Sequence
  derived and/or modified sequence
atggccggcgagaaccaccagtggcagggcagcatcctgtacaacatgttaatgtcagcaaagcaaactcgggctgcacccgaagcgcccgagacccgattggtggaccagtgctggggctgcagttgtggcgacgaacctggtgtaggtagagaagggcttctcggcggtcggaatgtggctctgctgtaccgctgttgtttttgtggaaaggaccatccaagacaaggatctattctctactcaatgctaacatctgcgaaacagacctacgcggccccaaaggctccggaggccactctgggcccttgctggggttgcagttgcggctcagaccctggcgtggggagggccgggttgcctggtggtcggccagtagcgcttctgtatcggtgctgtttctgcggtgaggaccacccaaggcagggttctatcctctattcactcttgacatcttccaaacagacacatgtcgctccagccgcacctgaagccagaccaggcggggcttggtgggaccgcagctatttcgcacagaggccgggcggtaaggaagcccttcccggagggcgggctacggcactgctgtaccgctgttgtttttgcggggaggatcatcctcagcagggtagcactctatactgcgtcccaacctcgaccaaccaggcacaggcagcccctgaggaacgtcccagggcgccttggtgggatacatcatcaggagcattgcgccccgtcgccttgaagagccctcaggtagtgtgcgaggccgcctcagccgggttactgaagacattgcgttttgttaagtacctgccttgctttcaggtcttaccactagaccagcagctagttctggtaaggaattgttgggcttctctgctgatgctggaacttgcgcaagatcgcctgcaatttgaaacggtggaggtaagcgagccttccatgttacaaaaaattctgacgaccagacgccgagaaactggcggaaacgagccattgccggttcctacgctacagcaccatttggcaccgcccgccgaagccaggaaagtcccttccgcgtcacaggtccaagcgatcaaatgctttttgtccaagtgctggagcctgaatatcagtaccaaggagtatgcatatctgaagggaacagttctttttaatcccggcaaaggtaaagaaaacgactgcaaccatcattag

SEQ ID NO: 9282 - DNA, 318 bp, Artificial Sequence
  derived and/or modified sequence
atgcttgagctcgcgcaggataggctgcagttcgagacggtagaagttagcgagccttctatgctgcaaaaaatcttaaccacgagaaggcgcgagacagggggaaatgaaccactgcctgtgccaactctgcaacaccatctcgctcctcctgccgaagcaaggaaggtccccagtgccagtcaggtgcaggcgatcaagtgttttctatctaagtgttggagtctgaacataagtacaaaggagtacgcatatcttaaaggaactgtgctatttaaccctgggaagggcaaggagaatgactgtaatcatcattag

SEQ ID NO: 9283 - DNA, 1413 bp, Artificial Sequence
  derived and/or modified sequence
atggctggcgagaatcaccagtggcaggggtccatcctgtacaatatgttaatgagcgctaagcagacgcgcgctgccccagaagcccctgaaacccgactcgttgatcagtgttggggctgtagctgcggtgacgagcccggtgtaggccgtgagggcctgctggggggtcggaatgtggccctcctgtaccgttgctgtttctgcggtaaggaccacccacgccaggggtccatactgtacagcatgctgaccagtgccaagcagacttacgccgcaccaaaggcccctgaagccaccctgggcccttgttggggctgctcatgtgggtctgaccccggagtggggagagccggtcttccaggcggacgccctgtggccctactttatagatgttgcttttgcggggaagaccaccctcgacagggttcaatcctctactctcttctcacatccagtaagcagacgcacgtggcacccgcagctcctgaggcaagacctggcggtgcctggtgggatcgatcctacttcgctcagcggccaggtggaaaggaagctctgccgggaggacgcgcaaccgcattgctgtatcgctgctgcttctgcggagaagatcatccacagcaggggagcactctctactgcgttcccaccagcactaaccaagctcaggcagccccagaggaaagaccacgcgctccatggtgggacacctcctccggcgctttgaggccagtggctctgaagtctccccaggttgtatgtgaggccgcttctgctggattactcaagaccctgcgttttgtgaagtaccttccctgctttcaggtactgccgctagatcaacaacttgtgcttgtgcgcaactgctgggcaagccttctgatgttggagttggcccaggatagactgcagtttgaaacagtggaagtctctgagccgagcatgctgcagaaaatccttaccacaaggcgcagagagacagggggtaacgagcccttgccagtcccaacacttcagcatcatctggctcctccagccgaggcacgtaaggtgccgagcgcatcccaggtccaggccattaaatgcttcctgtccaagtgctggtcgctgaacataagcacaaaggaatacgcatacctgaagggaacagtccttttcaatccagatgttccaggtttgcaatgtgtgaaatacatccagggcctgcagtgggggacacagcagatcttgtctgaacatacaaggatgacacaccaggggccacacgatagattcattgagctgaacagtaccctattcttgctccgtttcataaacgctaatgtgattgccgaactgttcttcaggcctattataggcacagtgagtatggacgacatgatgttggagatgttgtgcaccaagatatag

SEQ ID NO: 9284 - DNA, 1203 bp, Artificial Sequence
  derived and/or modified sequence
atggcaggcgagaatcatcagtggcaagggtccatcctttataatatgctgatgagcgctaagcaaaccagagctgctccagaggctccagaaacaagactggtcgaccaatgctgggggtgctcttgtggggacgagccgggtgttggtcgggaaggcttacttggtggacggaatgtggccctcctgtataggtgctgtttttgcgggaaggatcacccacgccaggggtccatcctttactctatgttaactagcgcaaaacaaacctatgccgcacctaaggcgccagaggccactttaggcccttgctgggggtgcagttgcggatcagaccctggggtgggtcgggcaggcttacctggtggccgtcccgtggcgcttctgtatcgatgttgcttctgtggcgaggatcaccccagacaaggatccattctgtacagccttcttacttcttcaaagcaaacccatgtagccccagctgcacctgaggcccgaccaggaggggcatggtgggaccgcagttactttgcccagaggcctggaggcaaggaggccctgcctgggggaagagctactgccctgctttaccgatgttgcttctgcggggaagaccacccgcagcaaggttctaccctatattgcgtaccgactagcaccaatcaggctcaggctgctcccgaggagagacctagagccccttggtgggataccagcagcggagcccttcgcccagtggctctgaaatctcctcaggtagtgtgtgaagctgctagcgcaggactcctgaaaaccctaaggtttgtcaagtacttgccctgcttccaagtcctgccactcgatcagcagctagtgctagtgaggaactgttgggctagtttgttgatgctggagcttgctcaggataggctgcagttcgaaacagtggaagtgagcgagccatcgatgttacagaagatcctgactaccagaaggagagagacgggcggaaatgagccgctcccggtccccaccttacaacatcacctggctccgcctgcggaggctagaaaggtccctagcgcctctcaggttcaagcaattaagtgcttcctgagtaagtgttggtcactgaatatctctactaaagagtatgcttaccttaagggcaccgtactcttcaacccgggtaaaggtaaagagaacgactgtaatcatcattag

SEQ ID NO: 9285 - DNA, 1218 bp, Artificial Sequence
  derived and/or modified sequence
cgggcgccgcgggccatggcgggcgagaaccaccagtggcagggcagcatcctctacaacatgcttatgagcgcgaagcaaacgcgcgcggctcctgaggctccagagacgcggctggtggatcagtgctggggctgttcgtgcggcgatgagcccggggtgggcagagaggggctgctgggcgggcggaacgtggcgctcctgtaccgctgctgcttttgcggtaaagaccacccacggcagggcagcatcctctacagcatgctgacgagcgcaaagcaaacgtacgcggcaccgaaggcgcccgaggcgacgctgggtccgtgctggggctgttcgtgcggctctgatcccggggtgggcagagcggggcttccgggtgggcggcccgtggcactcctgtaccgctgctgcttttgtggtgaagaccacccgcggcagggcagcatcctctacagcttgctcactagctcaaagcaaacgcacgtggctccggcagcgcccgaggcacggccagggggcgcgtggtgggaccgctcctacttcgcgcagaggccagggggtaaagaggcgctaccaggcgggcgggccacggcgcttctgtaccgctgctgcttttgcggtgaagaccacccgcagcagggcagcaccctctactgcgtgcccacgagcacaaatcaagcgcaggcggctccggaggagcggccgagggccccctggtgggacacctcctctggtgcgctgcggccggtggcgctcaagagtccacaggtggtctgcgaggcagcctcagcgggcctgttgaagacgctgcgcttcgtcaagtacttgccctgcttccaggtgctgcccctggaccagcagctggtgctggtgcgcaactgctgggcgtccctgctcatgcttgagctggcccaggaccgcttgcagttcgagactgtggaagtctcggagcccagcatgctgcagaagatcctcaccaccaggcggcgggagaccgggggcaacgagccactgcccgtgcccacgctgcagcaccatttggcaccgccggcggaggccaggaaggtgccctccgcctcccaggtccaagccatcaagtgctttctttccaaatgctggagtctgaacatcagtaccaaggagtacgcctacctcaaggggaccgtgctctttaacccgggaaaagggaaggaaaatgattgcaatcatcattaa

SEQ ID NO: 9286 - protein, 194 aa, Artificial Sequence
  derived and/or modified sequence
MEEKLKKTKIIFVVGGPGSGKGTQCEKIVQKYGYTHLSTGDLLRSEVSSGSARGKKLSEIMEKGQLVPLETVLDMLRDAMVAKVNTSKGFLIDGYPREVQQGEEFERRIGQPTLLLYVDAGPETMTQRLLKRGETSGRVDDNEETIKKRLETYYKATEPVIAFYEKRGIVRKVNAEGSVDSVFSQVCTHLDALK

SEQ ID NO: 9287 - DNA, 585 bp, Artificial Sequence
  derived and/or modified sequence
atggaagagaaactgaaaaagactaagataattttcgtggtcggtggccccggatcaggcaagggcactcagtgcgaaaaaatcgtccagaagtacgggtacacgcatctttccacaggggatctgctgaggtccgaggtcagctccggctctgcccgcggaaaaaagctgagtgagattatggaaaagggccagcttgtgccgctggaaaccgtgctggacatgctgcgtgatgccatggtggctaaggtgaatactagcaaggggttcttgattgacgggtacccccgagaggtccaacagggtgaagaatttgagaggcgtatcgggcagcccacgttgctgctctacgttgatgcagggcccgagacaatgacccagaggctactcaaaagaggggaaaccagcggaagagtcgacgataatgaggagaccatcaaaaaaaggctagaaacttattataaggccaccgagccagtcatcgctttttacgaaaagcgcggcattgtccgcaaggttaacgccgagggaagtgtggattccgtattttcacaagtttgtacgcacttagacgcactcaagtag

SEQ ID NO: 9288 - DNA, 585 bp, Artificial Sequence
  derived and/or modified sequence
atggaagaaaagctgaaaaagaccaagatcatatttgtggtcggcgggcctgggtccggcaaaggcacacaatgtgagaagatcgtgcaaaagtatggctacacccacctcagcacaggcgacctgctgagaagtgaggttagcagcggatccgcacgagggaaaaagttgagcgagatcatggagaaaggccagcttgtacccctcgaaacggtgctggatatgctgcgcgatgccatggtggcaaaagtgaatacttctaaagggtttcttattgatggttaccccagggaggttcaacagggggaggaatttgaacggagaatcgggcagcccacgctgctcctatatgtggatgccgggccagagaccatgacccagaggctacttaaacggggcgaaacttctggaagggttgacgacaacgaggagacaatcaagaagcggttggaaacctactataaggcaactgaacccgtgatagcattctacgagaagcgcgggatagttcggaaggtgaacgctgaaggcagcgtggactctgtctttagtcaggtgtgtactcaccttgatgcattgaaatag

SEQ ID NO: 9289 - DNA, 757 bp, Artificial Sequence
  derived and/or modified sequence
gggagtttcgaggggagcagctctgcagttgtgtggccgctgtttatgtccctcggtgccatcctcactgtcccagcccctccagcgggaacccaggtggatgggagggggctactgcccttctgtgacagagcactgacacggctcccgggacctcggcaggatggaagagaagctgaagaaaaccaagatcatctttgtggtgggtgggcctggctcagggaagggcacccagtgtgagaagatcgtgcagaagtatggctacacccacctctccaccggggacctcctgcggtccgaggtcagctcaggctcggccaggggcaagaagctgtcggaaatcatggagaaggggcagctggttccactggagacagtgttggacatgctccgggatgccatggtggccaaagtcaatacttccaaaggcttcctgattgatggctacccgcgggaggtgcagcaaggagaagagtttgagcgacggattggacagcccacactgctgctgtatgtggacgcaggccctgagaccatgacccagcggctcttgaaacgtggagagaccagcgggcgtgtggacgacaatgaggagaccatcaaaaagcggctggagacctattacaaggccacagaacctgtcatcgccttctatgagaaacgtggcattgtgcgcaaggtcaacgctgagggctccgtggacagtgtcttctcccaggtctgcacccacctggacgccctaaagtagcaacgctgg

SEQ ID NO: 9290 - DNA, 2266 bp, Artificial Sequence
  derived and/or modified sequence
gggaacgccggctcccggcatgccgcgcgctgacagccttataaatagtcgcctttgccggccgccgcgaggacgggcagggcacgcactggccccggcgcccacccgcacccctccccagagcactgacacggctcccgggacctcggcaggatggaagagaagctgaagaaaaccaagatcatctttgtggtgggtgggcctggctcagggaagggcacccagtgtgagaagatcgtgcagaagtatggctacacccacctctccaccggggacctcctgcggtccgaggtcagctcaggctcggccaggggcaagaagctgtcggaaatcatggagaaggggcagctggttccactggagacagtgttggacatgctccgggatgccatggtggccaaagtcaatacttccaaaggcttcctgattgatggctacccgcgggaggtgcagcaaggagaagagtttgagcgacggattggacagcccacactgctgctgtatgtggacgcaggccctgagaccatgacccagcggctcttgaaacgtggagagaccagcgggcgtgtggacgacaatgaggagaccatcaaaaagcggctggagacctattacaaggccacagaacctgtcatcgccttctatgagaaacgtggcattgtgcgcaaggtcaacgctgagggctccgtggacagtgtcttctcccaggtctgcacccacctggacgccctaaagtagcaacgctggagccgcttccccagctcagagccccgccccaccccgtcctgattcgaggtcctcctggcctgagcgcagcgcctccaccctgccctgctgagcacagacggaggaagccgcttatcctgttttcatggacagctgagcactaaaggaatttctaaggacatttggttttactgctttttctctgcttccagttggagttgattcatgtgcttgtgcctacctggccgcaagtccccagcccctcaaccctccgttcctcctcagcctccctttgccagccacccctcctctagctctggtgggaggcccggggcccttcctcgcacagggcatgcctggcctgaggacccggcgctgagtggcggggcccctgctccgaggggctcatgttcaggcagaaccggtcccagcctgggctcctctgcatcttgctctgtggccttggccctgacccccatcgctctgagcatatgttccatgcctggcccttgccggggcctggactgcacaggcagcaaggtcatggtctgagtggggcttcctgggcagttggggcggcccacgccagctggcccagtgggtagtgaattggcttccttgacgcgagaggctctgagggtctgaaaagggcatctcaatggcatgggtgggtggggagtcagtcatgtcactgaaattgaatgggggaggcccaatgaggtggctcatgcctgtaatcccagcactttgggaagctgaggcaggaggatcccctgaggtcaggagttcgagagcagcctggccaacatggcaaaaccccttatttactaaaaatacaaaaattagccgggcatggtggcatgtgcctgtattcccagctactcatgaggctgaggcaggagaatggcgtgaacccgggaggtggagcttgcaatgagccaagattgcgccactgcactccagcctgggtgacagagcaagactccgtctcaaaaaaaaaaaaaaaaaaaaagaaattgaattgggggagtcatggtcaggggtgagacctgaaggacctccccctgtgtggccctggacacagcccaccctctgtgagccgtttccaattctaaaacagactcaatgtccccctcacccccacctcaaggtcaggatgagaacacactgagtgaggagtggacgctgtccattgccacggccatgagggctggagaccagaacagcatggcccgaagcgtgcggggccccggatgacttggggacaccccagaatcccctggggagaacccttcctgcgcgctttcattttttgacctcatcactgagaaaggctcaatttggtgctcacgtgtccttaacacctgatctggcccaagctgggctccctttaagccaagagagcctcttgtggaccccgcctgcccgaatgaaatccgaacagttggggctgttcatggcaagtggggctggtttttcatttccattggttatttaaagtttcctttaaaataaacgattttaagttataaaaggtgaa

SEQ ID NO: 9291 - DNA, 585 bp, Artificial Sequence
  derived and/or modified sequence
atggaggagaagctgaagaagaccaagatcatctttgtggtgggcggccctggcagcggcaagggcacccagtgtgagaagatcgtgcagaagtatggctacacccacctgagcactggagacctgctgcggtctgaggtgagcagcggcagcgcccggggcaagaagctgtctgagatcatggagaagggccagctggtgcccctggagaccgtgctggacatgctgagagatgccatggtggccaaggtgaacaccagcaagggcttcctgattgatggctacccccgggaggtgcagcagggcgaggagtttgaaagaagaattggccagcccaccctgctgctgtatgtggatgctggccctgagaccatgacccagaggctgctgaagagaggagagaccagcggccgggtggatgacaatgaggagaccatcaagaagaggctggagacctactacaaggccacagagcctgtgattgccttctatgagaagaggggcatcgtgaggaaggtgaatgctgagggctctgtggacagcgtcttcagccaggtgtgcacccacctggatgccctgaagtag

SEQ ID NO: 9292 - DNA, 585 bp, Artificial Sequence
  derived and/or modified sequence
atggaggagaagctgaagaagaccaagatcatcttcgtggtgggcggcccaggcagcggtaaaggcacgcaatgcgaaaagatagttcagaagtatggctacacccacctctccacgggagacctgcttagaagtgaagtgtcatcgggatccgccagggggaagaaactgagtgagatcatggaaaagggtcaactagtgccactagaaactgtcctcgatatgttgagagacgccatggtggccaaggtgaacacgtcgaagggattcctgattgatgggtacccccgtgaggtccaacagggagaagagtttgaacggcggatcgggcagcccactctgctgctctatgtggacgctggtcctgaaaccatgacccagcggctgctcaagagaggagagacttccggtagggtggatgataacgaggaaactattaagaagaggctggaaacatattataaagcaacagagccagtgattgccttctatgaaaagcggggcattgtgagaaaggtaaatgccgaaggatctgtcgacagcgtcttctcccaggtgtgtacccacttggacgcgctcaaatag

SEQ ID NO: 9293 - DNA, 585 bp, Artificial Sequence
  derived and/or modified sequence
atggaggagaagctgaagaagaccaagatcatcttcgtggtgggcggtcctggatccggtaagggcacccagtgcgagaaaatcgtccagaaatatggatacactcacttaagcaccggtgacctgctgagatccgaagtatccagcgggtcagctaggggcaaaaagttgtcagagataatggagaagggccaacttgtgcccctggagacagttctggacatgctgcgggacgccatggtggcaaaagtgaatactagcaaaggcttcctgatcgacggttatccaagagaggtgcagcagggagaggaattcgaaagaagaatcgggcagcctacgctccttctgtacgtggatgccggcccggagactatgacccaaagactgctgaaacggggtgaaacgtccggacgggtcgacgataacgaagaaaccattaagaagcgcttagagacatactacaaggccacggaacccgttatcgccttttatgaaaagcgcggcatagttaggaaggtaaatgccgaagggtcagtcgatagtgtcttcagccaagtgtgcactcacctggacgccctcaagtag

SEQ ID NO: 9294 - DNA, 585 bp, Artificial Sequence
  derived and/or modified sequence
atggaggaaaagctgaaaaagacaaaaatcatttttgtggtgggcggaccagggtctggcaagggtacccagtgtgaaaaaattgtccagaagtatgggtacacccacttaagcaccggcgatctgctgcggagtgaggtcagttcagggagcgcccgtggcaaaaagctgagtgagataatggagaaaggacaactggtgccgctagaaactgttctcgatatgcttagagatgccatggtggcaaaagttaatacctctaagggcttcctcatcgacgggtatcctcgtgaggtccagcagggggaggaattcgagcgacgaataggccaaccaacgctcctgctctatgttgacgcaggccctgaaactatgactcagcggctccttaaacgaggggagacttctggtagggtcgatgacaatgaggagacgattaaaaagaggctggagacatactacaaggccactgagccagtgatcgctttttatgaaaagagggggatcgttagaaaggtcaatgctgaagggagtgtagattcagtattcagccaggtgtgcactcacctcgacgcactgaagtag

SEQ ID NO: 9295 - DNA, 585 bp, Artificial Sequence
  derived and/or modified sequence
atggaggagaaacttaaaaaaacgaagatcatctttgttgtgggcggacccggtagtggtaagggcacacagtgtgaaaaaattgtccaaaaatacggatacacacatctctccacaggcgacctcctacgatcagaggtgagctcaggctccgccagaggaaagaaactgagcgagatcatggagaagggccagttagtacctctggagaccgtattggacatgttgagggacgctatggttgccaaagtgaacacttcaaaaggcttcttgattgatgggtaccccagggaggtgcagcaaggcgaagaatttgaacggcgtattgggcagcccactcttctgctctacgttgatgcagggccagaaacgatgacgcaaagactcctgaagaggggagaaacgagtgggagagtggatgacaatgaagagaccattaagaagagactggagacctactacaaggctacagagcccgtgattgctttttatgaaaagcgtggcatagttcgcaaggtgaacgccgagggcagcgtcgactcagtcttttcccaggtctgtacacatctagatgcacttaagtag

SEQ ID NO: 9296 - DNA, 585 bp, Artificial Sequence
  derived and/or modified sequence
atggaggagaagctgaagaagaccaagatcatcttcgtggtgggcggccccggcagcggcaagggcacccagtgcgagaagatcgtgcagaagtacggctacacccacctgagcaccggcgacctgctgagaagcgaggtgagcagcggcagcgccagaggcaagaagctgagcgagatcatggagaagggccagctggtgcccctggagaccgtgctggacatgctgagagacgccatggtggccaaggtgaacaccagcaagggcttcctgatcgacggctaccccagagaggtgcagcagggcgaggagttcgagagaagaatcggccagcccaccctgctgctgtacgtggacgccggccccgagaccatgacccagagactgctgaagagaggcgagaccagcggcagagtggacgacaacgaggagaccatcaagaagagactggagacctactacaaggccaccgagcccgtgatcgccttctacgagaagagaggcatcgtgagaaaggtgaacgccgagggcagcgtggacagcgtgttcagccaggtgtgcacccacctggacgccctgaagtag

SEQ ID NO: 9297 - protein, 24 aa, Artificial Sequence
  derived and/or modified sequence
MKWVTFISLLFLFSSAYSRGVFRR

SEQ ID NO: 9298 - protein, 609 aa, Artificial Sequence [sequence omitted]

SEQ ID NO: 9299 - protein, 396 aa, Artificial Sequence
  derived and/or modified sequence
MKWVTFISLLFLFSSAYSRGVFRRDAHKSEVAHRFKDLGEENFKALVLIAFAQYLQQCPFEDHVKLVNEVTEFAKTCVADESAENCDKSLHTLFGDKLCTVATLRETYGEMADCCAKQEPERNECFLQHKDDNPNLPRLVRPEVDVMCTAFHDNEETFLKKYLYETTLEKCCAAADPHECYAKVFDEFKPLVEEPQNLIKQNCELFEQLGEYKFQNALLVRYTKKVPQVSTPTLVEVSRNLGKVGSKCCKHPEAKRMPCAEDYLSVVLNQLCVLHEKTPVSDRVTKCCTESLVNRRPCFSALEVDETYVPKEFNAETFTFHADICTLSEKERQIKKQTALVELVKHKPKATKEQLKAVMDDFAAFVEKCCKADDKETCFAEEGKKLVAASQAALGL

SEQ ID NO: 9300 - protein, 417 aa, Artificial Sequence
  derived and/or modified sequence
MKWVTFISLLFLFSSAYSRGVFRRDAHKSEVAHRFKDLGEENFKALAVARLSQRFPKAEFAEVSKLVTDLTKVHTECCHGDLLECADDRADLAKYICENQDSISSKLKECCEKPLLEKSHCIAEVENDEMPADLPSLAADFVESKDVCKNYAEAKDVFLGMFLYEYARRHPDYSVVLLLRLAKTYETTLEKCCAAADPHECYAKVFDEFKPLVEEPQNLIKQNCELFEQLGEYKFQNALLVRYTKKVPQVSTPTLVEVSRNLGKVGSKCCKHPEAKRMPCAEDYLSVVLNQLCVLHEKTPVSDRVTKCCTESLVNRRPCFSALEVDETYVPKEFNAETFTFHADICTLSEKERQIKKQTALVELVKHKPKATKEQLKAVMDDFAAFVEKCCKADDKETCFAEEGKKLVAASQAALGL

SEQ ID NO: 9301 - protein, 618 aa, Artificial Sequence
  derived and/or modified sequence
MKWVTFISLLFLFSSAYSRGVFRRDALFLFFFPCPDKSEVAHRFKDLGEENFKALVLIAFAQYLQQCPFEDHVKLVNEVTEFAKTCVADESAENCDKSLHTLFGDKLCTVATLRETYGEMADCCAKQEPERNECFLQHKDDNPNLPRLVRPEVDVMCTAFHDNEETFLKKYLYEIARRHPYFYAPELLFFAKRYKAAFTECCQAADKAACLLPKLDELRDEGKASSAKQRLKCASLQKFGERAFKAWAVARLSQRFPKAEFAEVSKLVTDLTKVHTECCHGDLLECADDRADLAKYICENQDSISSKLKECCEKPLLEKSHCIAEVENDEMPADLPSLAADFVESKDVCKNYAEAKDVFLGMFLYEYARRHPDYSVVLLLRLAKTYETTLEKCCAAADPHECYAKVFDEFKPLVEEPQNLIKQNCELFEQLGEYKFQNALLVRYTKKVPQVSTPTLVEVSRNLGKVGSKCCKHPEAKRMPCAEDYLSVVLNQLCVLHEKTPVSDRVTKCCTESLVNRRPCFSALEVDETYVPKEFNAETFTFHADICTLSEKERQIKKQTALVELVKHKPKATKEQLKAVMDDFAAFVEKCCKADDKETCFAEEGKKLVAASQAALGL

SEQ ID NO: 9302 - protein, 24 aa, Artificial Sequence
  derived and/or modified sequence
MKWVSFISLLFLFSSAYSGSLDKR

SEQ ID NO: 9303 - protein, 15 aa, Artificial Sequence
  derived and/or modified sequence
HPDYSVYLLLRLAKT

SEQ ID NO: 9304 - protein, 25 aa, Artificial Sequence
  derived and/or modified sequence
LGEYKFQNALLVRYTKKVPQVSTPT

SEQ ID NO: 9305 - DNA, 72 bp, Artificial Sequence
  derived and/or modified sequence
atgaaatgggtgacgttcatctcactgttgtttttgttctcgtccgcctactccaggggagtattccgccga

SEQ ID NO: 9306 - DNA, 1830 bp, Artificial Sequence
  derived and/or modified sequence
atgaagtgggtgacattcatctccttgttgttcttattttcctctgcatattccaggggcgtcttcagacgggacgctcataagtccgaggtggcccatcggttcaaagatttgggcgaagagaactttaaagctctggtactgatcgctttcgcacagtatctacaacagtgcccctttgaagatcacgtgaaactggtaaatgaggtcacagaattcgccaagacgtgtgttgcagacgagtccgcagaaaactgtgacaaaagcctccacaccttattcggagacaagctctgtaccgtggcaacacttagagaaacgtatggagagatggccgactgctgtgcaaagcaggaaccagagagaaatgagtgcttcttacagcacaaggatgacaaccccaacctgccccgcctcgtcaggccagaagtggacgtcatgtgcactgcgttccacgataacgaggaaacctttctcaagaaatatttgtatgaaatagcccggcgccatccctatttttacgcccctgaattgctgttttttgccaaacgctataaagccgcttttacagagtgttgccaagcagctgacaaagccgcttgtctcttaccgaagcttgatgagctgcgggatgagggtaaggcgtcgagcgcaaaacaacgtctcaagtgtgcctctctccagaaatttggtgaacgggccttcaaggcatgggccgtcgcacggttatcccaaagatttcccaaggctgaattcgccgaagtttccaaattggttaccgatttgacgaaagtgcacactgagtgctgccatggcgacctgctggaatgcgcggacgaccgggcagatttggccaaatacatctgcgagaaccaagactctatcagtagcaaactaaaagagtgctgcgaaaaacccttgctggagaagagtcactgtatcgctgaagtggagaatgacgagatgcccgctgatttgccgtctctggccgctgacttcgtggagtcaaaagacgtgtgtaaaaattatgccgaagcaaaggacgtttttctgggcatgtttctgtacgaatatgcccggagacatcccgactattccgttgtcctcctcctgcggctagcaaaaacatatgagactacgctagaaaagtgctgcgctgctgccgatcctcacgagtgttacgctaaggtgtttgatgaatttaagcctctggtggaagagcctcagaatttaattaagcagaactgcgaattgttcgagcaattaggggagtataaatttcagaatgcgttgctggtgaggtataccaagaaggttccacaagtctcgactcccacccttgtcgaggtgagcagaaacctgggcaaagtggggagtaaatgctgcaagcatccagaagcgaaacgaatgccttgtgcagaggactatttaagtgtggtgctaaaccaactttgcgtgctgcacgagaagacccccgtcagcgatcgggtcaccaaatgttgcaccgaatcccttgtcaacaggagaccctgtttcagtgccctggaagtggatgagacttacgttcctaaggagttcaatgcggagacattcacctttcacgcagacatctgcacattgagcgaaaaagagcgccaaattaaaaagcagactgctttggtggagcttgtgaaacacaaacctaaagccactaaagaacagctgaaggccgtgatggacgatttcgccgcctttgtcgaaaaatgctgcaaggccgacgataaagagacgtgtttcgccgaggagggtaaaaaactggtcgcagcatcccaggccgccttgggactctag

SEQ ID NO: 9307 - DNA, 1191 bp, Artificial Sequence
  derived and/or modified sequence
atgaagtgggtgacattcatttccctgctattcctattttcttctgcctactctcggggggtttttcgcagggacgctcataagtccgaagttgcacaccggttcaaggatctgggggaagaaaacttcaaggccctagtactgattgcttttgctcagtatctgcagcaatgccctttcgaagaccacgttaaactggtaaatgaagttaccgagttcgccaagacttgcgtggcagacgagagcgcagagaactgtgacaaatctctgcataccttatttggtgacaagctgtgcaccgttgccacgcttagggaaacgtacggagaaatggcggattgctgcgccaagcaggagcctgagcgaaatgaatgcttcctgcaacacaaagatgacaacccgaatcttcctagactagtgagacccgaagtcgacgttatgtgtaccgccttccatgataatgaagaaactttcttaaagaagtacctgtacgagaccactctggagaagtgctgcgctgccgctgacccccatgagtgctatgccaaagtattcgacgaattcaagcctctggtagaggagccccaaaatcttattaaacaaaattgtgaactgttcgaacaacttggggaatataaatttcagaacgccctcctggtgcggtataccaagaaggtgcctcaggttagcacgcccacattggtcgaagtctctaggaatttaggcaaggtgggtagcaaatgctgcaagcatccagaggccaagcggatgccgtgtgccgaagattacttatctgtggttcttaatcagctgtgtgtcctccacgagaagacccccgtgtctgacagggtcacaaaatgttgcaccgagtctcttgtgaataggaggccatgttttagcgcgctggaggttgacgaaacctatgttcctaaagagttcaacgctgagacgttcacgtttcacgcggacatttgcactctttccgaaaaggaacgccagatcaagaagcagactgcactggtcgagctcgtgaagcacaaaccaaaggctactaaggagcagctgaaagcagtaatggatgacttcgctgcctttgttgaaaagtgctgcaaggctgatgataaagagacttgcttcgcagaggagggaaagaaactcgtggccgcatctcaggccgcgctgggtttgtag

SEQ ID NO: 9308 - DNA, 1254 bp, Artificial Sequence
  derived and/or modified sequence
atgaaatgggtcacgttcatttctctactctttctattttcaagcgcttactcaaggggcgtatttcgtcgcgacgcgcataagagcgaggtggcccaccggtttaaagatctaggagaggagaactttaaagctctcgcggtggcacgcctgtctcagcggttcccaaaggccgagttcgccgaggtctccaagctggtgactgacttaactaaggtgcacactgagtgctgccacggggacttactcgaatgcgccgacgaccgggccgatttggcaaaatatatctgcgagaatcaggacagtatctcttcgaagcttaaagaatgctgcgagaagcctctgcttgagaaaagccactgtatcgccgaagtcgaaaatgacgaaatgccggccgatctgccttccctggcggctgatttcgtcgagtcaaaagatgtatgcaagaattacgccgaagctaaggacgtgtttctgggcatgttcctttacgagtacgcccgtagacatcccgactattctgtggtacttctcttgcggcttgccaagacctacgaaactacacttgagaagtgctgcgccgccgcggatccccacgaatgctacgctaaagtatttgacgaattcaaaccactcgtggaggagccacagaacctgatcaaacaaaattgtgagctattcgagcagcttggggagtacaagttccaaaacgccttactcgtacggtataccaagaaggttccgcaagtgtcgacacccacgctggtggaagtttccagaaatctgggcaaagttggatccaaatgctgtaaacaccctgaagcaaagcgaatgccctgcgccgaggattacctctctgtggtgttgaaccagctgtgcgtgcttcacgaaaagacacctgtgtccgacagggtgacaaagtgctgcactgagtctttggtgaaccgacgcccgtgtttctccgctttagaagtcgatgaaacctatgtcccgaaagaattcaatgctgagacatttacctttcacgccgacatatgcactctgtcagagaaagagagacaaattaagaagcagaccgccctggtggagcttgtgaaacacaagcctaaggccactaaggagcagttgaaggcagtcatggatgactttgcggctttcgtagagaagtgctgcaaggccgatgacaaagaaacatgctttgccgaagagggcaagaagttggtggccgccagccaagccgcactgggcctgtag

SEQ ID NO: 9309 - DNA, 1857 bp, Artificial Sequence
  derived and/or modified sequence
atgaaatgggtgacattcataagtctgctgttcctgttctccagcgcctactcccggggcgtctttagacgcgacgcgcttttcctcttcttcttcccttgtccagataagtctgaggtggcccacaggttcaaggatttgggagaggagaatttcaaggcacttgtgctgatcgcctttgcacagtatctccagcagtgtcctttcgaagaccacgtgaaacttgtcaacgaggtgacagagtttgcgaagacatgcgtagctgacgaaagtgctgagaattgcgataaatccctgcacactttgtttggcgacaagctatgtaccgtagctacgctccgcgagacgtacggagagatggcagactgttgcgcgaaacaggaacccgagagaaatgaatgtttcctgcaacacaaggacgataacccaaatttaccccgtctagtgcgcccagaagttgatgtgatgtgcactgccttccacgacaatgaagaaacatttctgaagaagtacctctatgaaatagcgcgaagacatccctacttctatgcgcctgagctgctgttcttcgctaaacgatacaaagcggcctttacagaatgttgtcaggccgccgataaagccgcctgtctgctgcccaaacttgacgagttgagagatgagggcaaagccagctctgccaagcagcggctgaaatgtgcttcactgcagaaattcggagagcgggctttcaaggcctgggccgttgccagactttctcagagatttcccaaagctgagtttgcggaggtctctaaactggtgacagatctgacgaaggtgcacaccgagtgttgccatggtgacctgttagagtgcgctgacgatagggccgacctggccaaatatatctgtgagaaccaggattcgatatcatccaaacttaaggaatgctgtgagaagcccctgctggagaaaagtcactgtattgctgaagtagaaaacgatgaaatgcccgcggacctcccgtctctcgctgctgattttgtagagagtaaagacgtttgtaagaactacgccgaggccaaagacgtattcctgggtatgtttttgtacgagtacgcacggagacaccccgactactccgtggtcctcctactgcgcctagcaaagacatatgaaacaaccctggaaaaatgctgtgccgccgcagaccctcatgagtgttacgccaaagtgtttgatgagtttaaacccctggtcgaggagccacagaacttaattaaacagaactgcgagctatttgagcaactgggtgagtataaatttcaaaatgctcttctggttagatatacaaagaaggtgccccaggtgagtaccccaactctggtagaggtgagccggaacctaggaaaggtcggctctaagtgctgcaagcaccctgaggcaaagagaatgccatgtgccgaagactacctctctgtggtgctgaaccagctttgtgtcctgcacgagaaaacccccgtgtcagatcgtgtaactaagtgctgtaccgaatcattggtgaatagacggccctgcttttcagccttggaagtcgacgagacctacgtccccaaggagtttaatgctgaaacatttacgttccacgccgacatctgcacattgtctgagaaagagagacagattaaaaaacagaccgcactggtggagctcgtgaaacacaaacctaaggcaactaaagaacagctgaaggccgttatggacgactttgccgcgttcgtagaaaaatgctgcaaagcagacgataaggaaacctgctttgccgaagagggtaagaagttggtggccgcgagccaggccgccctgggcctctag

SEQ ID NO: 9310 - DNA, 1830 bp, Artificial Sequence
  derived and/or modified sequence
atgaagtgggtgaccttcatcagcctgctcttcctgttcagcagcgcctacagccggggcgtcttcagaagagatgcccacaagtctgaggtggcccaccgcttcaaggacctgggggaggagaacttcaaggccctggtgctgattgcctttgcccagtacctgcagcagtgcccctttgaagatcatgtgaagctggtgaatgaggtgacagaatttgccaagacctgtgtggctgatgagagcgctgagaactgtgacaagagcctgcacaccctgtttggagacaagctgtgcaccgtggccaccctgcgggagacctacggggagatggctgactgctgtgccaagcaggagcctgagagaaatgaatgcttcctgcagcacaaggatgacaaccccaacctgccccggctggtgcggcctgaggtggatgtgatgtgcacagccttccatgacaatgaggagaccttcctgaagaagtacctgtatgagatcgcccggcggcacccctacttctacgcccctgagctgctcttctttgccaagcgctacaaggccgccttcacagagtgctgccaggccgctgacaaggccgcctgcctgctgcccaagctggatgagctgagagatgagggcaaggccagcagcgccaagcagaggctgaagtgtgccagcctgcagaagtttggagagcgggccttcaaggcctgggccgtggcccggctgagccagcgcttccccaaggccgagtttgctgaggtgtccaagctggtgacagacctgaccaaggtgcacacagagtgctgccacggggacctgctggagtgtgctgatgacagagctgacctggccaagtacatctgtgagaaccaggacagcatcagcagcaagctgaaggagtgctgtgagaagcccctgctggagaagagccactgcatcgccgaggtggagaatgatgagatgcctgctgacctgcccagcctggccgctgactttgtggagagcaaggatgtgtgcaagaactatgcagaggccaaggatgtgttcctgggcatgttcctgtatgaatatgcccggcggcacccagactacagcgtggtgctgctgctgcggctggccaagacctatgagaccaccctggagaagtgctgtgccgctgctgacccccatgagtgctacgccaaggtgtttgatgagttcaagcccctggtggaggagccccagaacctgatcaagcagaactgtgagctgtttgagcagctgggggagtacaagttccagaatgccctgctggtgcgctacaccaagaaggtgccccaggtgtccacccccaccctggtggaggtgtccaggaacctgggcaaggtgggcagcaagtgctgcaagcaccctgaggccaagaggatgccctgtgccgaggactacctgtctgtggtgctgaaccagctgtgtgtgctgcacgagaagacccctgtgtctgacagagtgaccaagtgctgcacagagagcctggtgaacagaagaccctgcttcagcgccctggaggtggatgagacctacgtgcccaaggagttcaatgctgagaccttcaccttccacgccgacatctgcaccctgtctgagaaggagcggcagatcaagaagcagacagccctggtggagctggtgaagcacaagcccaaggccaccaaggagcagctgaaggctgtgatggatgactttgctgcctttgtggagaagtgctgcaaggcagatgacaaggagacctgctttgctgaggagggcaagaagctggtggccgccagccaggccgccctgggcctgtag

SEQ ID NO: 9311 - DNA, 1191 bp, Artificial Sequence
  derived and/or modified sequence
atgaagtgggtgaccttcatcagcctgctcttcctgttcagcagcgcctacagccggggcgtcttcagaagagatgcccacaagtctgaggtggcccaccgcttcaaggacctgggggaggagaacttcaaggccctggtgctgattgcctttgcccagtacctgcagcagtgcccctttgaagatcatgtgaagctggtgaatgaggtgacagaatttgccaagacctgtgtggctgatgagagcgctgagaactgtgacaagagcctgcacaccctgtttggagacaagctgtgcaccgtggccaccctgcgggagacctacggggagatggctgactgctgtgccaagcaggagcctgagagaaatgaatgcttcctgcagcacaaggatgacaaccccaacctgccccggctggtgcggcctgaggtggatgtgatgtgcacagccttccatgacaatgaggagaccttcctgaagaagtacctgtatgagaccaccctggagaagtgctgtgccgctgctgacccccatgaatgttatgccaaggtgtttgatgagttcaagcccctggtggaggagccccagaacctgatcaagcagaactgtgagctgtttgagcagctgggggagtacaagttccagaatgccctgctggtgcgctacaccaagaaggtgccccaggtgtccacccccaccctggtggaggtgtccaggaacctgggcaaggtgggcagcaagtgctgcaagcaccctgaggccaagaggatgccctgtgccgaggactacctgtctgtggtgctgaaccagctgtgtgtgctgcacgagaagacccctgtgtctgacagagtgaccaagtgctgcacagagagcctggtgaacagaagaccctgcttcagcgccctggaggtggatgagacctacgtgcccaaggagttcaatgctgagaccttcaccttccacgccgacatctgcaccctgtctgagaaggagcggcagatcaagaagcagacagccctggtggagctggtgaagcacaagcccaaggccaccaaggagcagctgaaggctgtgatggatgactttgctgcctttgtggagaagtgctgcaaggcagatgacaaggagacctgctttgctgaggagggcaagaagctggtggccgccagccaggccgccctgggcctgtag

SEQ ID NO: 9312 - DNA, 1254 bp, Artificial Sequence
  derived and/or modified sequence
atgaagtgggtgaccttcatcagcctgctcttcctgttcagcagcgcctacagccggggcgtcttcagaagagatgcccacaagtctgaggtggcccaccgcttcaaggacctgggggaggagaacttcaaggccctggccgtggcccggctgagccagcgcttccccaaggccgagtttgctgaggtgtccaagctggtgacagacctgaccaaggtgcacacagagtgctgccacggggacctgctggagtgtgctgatgacagagctgacctggccaagtacatctgtgagaaccaggacagcatcagcagcaagctgaaggagtgctgtgagaagcccctgctggagaagagccactgcatcgccgaggtggagaatgatgagatgcctgctgacctgcccagcctggccgctgactttgtggagagcaaggatgtgtgcaagaactatgcagaggccaaggatgtgttcctgggcatgttcctgtatgaatatgcccggcggcacccagactacagcgtggtgctgctgctgcggctggccaagacctatgagaccaccctggagaagtgctgtgccgctgctgacccccatgagtgctacgccaaggtgtttgatgagttcaagcccctggtggaggagccccagaacctgatcaagcagaactgtgagctgtttgagcagctgggggagtacaagttccagaatgccctgctggtgcgctacaccaagaaggtgccccaggtgtccacccccaccctggtggaggtgtccaggaacctgggcaaggtgggcagcaagtgctgcaagcaccctgaggccaagaggatgccctgtgccgaggactacctgtctgtggtgctgaaccagctgtgtgtgctgcacgagaagacccctgtgtctgacagagtgaccaagtgctgcacagagagcctggtgaacagaagaccctgcttcagcgccctggaggtggatgagacctacgtgcccaaggagttcaatgctgagaccttcaccttccacgccgacatctgcaccctgtctgagaaggagcggcagatcaagaagcagacagccctggtggagctggtgaagcacaagcccaaggccaccaaggagcagctgaaggctgtgatggatgactttgctgcctttgtggagaagtgctgcaaggcagatgacaaggagacctgctttgctgaggagggcaagaagctggtggccgccagccaggccgccctgggcctgtag

SEQ ID NO: 9313 - DNA, 1857 bp, Artificial Sequence
  derived and/or modified sequence
atgaagtgggtgaccttcatcagcctgctcttcctgttcagcagcgcctacagccggggcgtcttcagaagagatgccctcttcctgttcttcttcccctgcccagacaagtctgaggtggcccaccgcttcaaggacctgggggaggagaacttcaaggccctggtgctgattgcctttgcccagtacctgcagcagtgcccctttgaggaccacgtgaagctggtgaatgaggtgacagaatttgccaagacctgtgtggctgatgaatctgctgagaactgtgacaagagcctgcacaccctgtttggagacaagctgtgcaccgtggccaccctgcgggagacctatggagagatggctgactgctgtgccaagcaggagcctgagagaaatgaatgcttcctgcagcacaaggatgacaaccccaacctgccccggctggtgcggcctgaggtggatgtgatgtgcacagccttccatgacaatgaggagaccttcctgaagaagtacctgtatgaaattgcccggcggcacccctacttctacgcccctgagctgctcttctttgccaagcgctacaaggccgccttcacagagtgctgccaggccgctgacaaggccgcctgcctgctgcccaagctggatgagctgagagatgagggcaaggccagcagcgccaagcagaggctgaagtgtgccagcctgcagaagtttggagagcgggccttcaaggcctgggccgtggcccggctgagccagcgcttccccaaggccgagtttgctgaggtgtccaagctggtgacagacctgaccaaggtgcacacagagtgctgccacggggacctgctggagtgtgctgatgacagagctgacctggccaagtacatctgtgagaaccaggacagcatcagcagcaagctgaaggagtgctgtgagaagcccctgctggagaagagccactgcatcgccgaggtggagaatgatgagatgcctgctgacctgcccagcctggccgctgactttgtggagagcaaggatgtgtgcaagaactatgcagaggccaaggatgtgttcctgggcatgttcctgtatgaatatgcccggcggcacccagactacagcgtggtgctgctgctgcggctggccaagacctatgagaccaccctggagaagtgctgtgccgctgctgacccccatgaatgttatgccaaggtgtttgatgagttcaagcccctggtggaggagccccagaacctgatcaagcagaactgtgagctgtttgagcagctgggggagtacaagttccagaatgccctgctggtgcgctacaccaagaaggtgccccaggtgtccacccccaccctggtggaggtgtccaggaacctgggcaaggtgggcagcaagtgctgcaagcaccctgaggccaagaggatgccctgtgccgaggactacctgtctgtggtgctgaaccagctgtgtgtgctgcacgagaagacccctgtgtctgacagagtgaccaagtgctgcacagagagcctggtgaacagaagaccctgcttcagcgccctggaggtggatgagacctacgtgcccaaggagttcaatgctgagaccttcaccttccacgccgacatctgcaccctgtctgagaaggagcggcagatcaagaagcagacagccctggtggagctggtgaagcacaagcccaaggccaccaaggagcagctgaaggctgtgatggatgactttgctgcctttgtggagaagtgctgcaaggcagatgacaaggagacctgctttgctgaggagggcaagaagctggtggccgccagccaggccgccctgggcctgtag

SEQ ID NO: 9314 - DNA, 2263 bp, Artificial Sequence
  derived and/or modified sequence
aattattggttaaagaagtatattagtgctaatttccctccgtttgtcctagcttttctcttctgtcaaccccacacgcctttggcacaatgaagtgggtaacctttatttcccttctttttctctttagctcggcttattccaggggtgtgtttcgtcgagatgcacacaagagtgaggttgctcatcggtttaaagatttgggagaagaaaatttcaaagccttggtgttgattgcctttgctcagtatcttcagcagtgtccatttgaagatcatgtaaaattagtgaatgaagtaactgaatttgcaaaaacatgtgttgctgatgagtcagctgaaaattgtgacaaatcacttcataccctttttggagacaaattatgcacagttgcaactcttcgtgaaacctatggtgaaatggctgactgctgtgcaaaacaagaacctgagagaaatgaatgcttcttgcaacacaaagatgacaacccaaacctcccccgattggtgagaccagaggttgatgtgatgtgcactgcttttcatgacaatgaagagacatttttgaaaaaatacttatatgaaattgccagaagacatccttacttttatgccccggaactccttttctttgctaaaaggtataaagctgcttttacagaatgttgccaagctgctgataaagctgcctgcctgttgccaaagctcgatgaacttcgggatgaagggaaggcttcgtctgccaaacagagactcaagtgtgccagtctccaaaaatttggagaaagagctttcaaagcatgggcagtagctcgcctgagccagagatttcccaaagctgagtttgcagaagtttccaagttagtgacagatcttaccaaagtccacacggaatgctgccatggagatctgcttgaatgtgctgatgacagggcggaccttgccaagtatatctgtgaaaatcaagattcgatctccagtaaactgaaggaatgctgtgaaaaacctctgttggaaaaatcccactgcattgccgaagtggaaaatgatgagatgcctgctgacttgccttcattagctgctgattttgttgaaagtaaggatgtttgcaaaaactatgctgaggcaaaggatgtcttcctgggcatgtttttgtatgaatatgcaagaaggcatcctgattactctgtcgtgctgctgctgagacttgccaagacatatgaaaccactctagagaagtgctgtgccgctgcagatcctcatgaatgctatgccaaagtgttcgatgaatttaaacctcttgtggaagagcctcagaatttaatcaaacaaaattgtgagctttttgagcagcttggagagtacaaattccagaatgcgctattagttcgttacaccaagaaagtaccccaagtgtcaactccaactcttgtagaggtctcaagaaacctaggaaaagtgggcagcaaatgttgtaaacatcctgaagcaaaaagaatgccctgtgcagaagactatctatccgtggtcctgaaccagttatgtgtgttgcatgagaaaacgccagtaagtgacagagtcaccaaatgctgcacagaatccttggtgaacaggcgaccatgcttttcagctctggaagtcgatgaaacatacgttcccaaagagtttaatgctgaaacattcaccttccatgcagatatatgcacactttctgagaaggagagacaaatcaagaaacaaactgcacttgttgagctcgtgaaacacaagcccaaggcaacaaaagagcaactgaaagctgttatggatgatttcgcagcttttgtagagaagtgctgcaaggctgacgataaggagacctgctttgccgaggagggtaaaaaacttgttgctgcaagtcaagctgccttaggcttataacatcacatttaaaagcatctcagcctaccatgagaataagagaaagaaaatgaagatcaaaagcttattcatctgtttttctttttcgttggtgtaaagccaacaccctgtctaaaaaacataaatttctttaatcattttgcctcttttctctgtgcttcaattaataaaaaatggaaagaatctaatagagtggtacagcactgttatttttcaaagatgtgttgctatcctgaaaattctgtaggttctgtggaagttccagtgttctctcttattccacttcggtagaggatttctagtttcttgtgggctaattaaataaatcattaatactcttctaa

SEQ ID NO: 9315 - DNA, 1418 bp, Artificial Sequence
  derived and/or modified sequence
ctagcttttctcttctgtcaaccccacacgcctttggcacaatgaagtgggtaacctttatttcccttctttttctctttagctcggcttattccaggggtgtgtttcgtcgagatgcacacaagagtgaggttgctcatcggtttaaagatttgggagaagaaaatttcaaagccttggtgttgattgcctttgctcagtatcttcagcagtgtccatttgaagatcatgtaaaattagtgaatgaagtaactgaatttgcaaaaacatgtgttgctgatgagtcagctgaaaattgtgacaaatcacttcataccctttttggagacaaattatgcacagttgcaactcttcgtgaaacctatggtgaaatggctgactgctgtgcaaaacaagaacctgagagaaatgaatgcttcttgcaacacaaagatgacaacccaaacctcccccgattggtgagaccagaggttgatgtgatgtgcactgcttttcatgacaatgaagagacatttttgaaaaaatacttatatgaaaccactctagagaagtgctgtgccgctgcagatcctcatgaatgctatgccaaagtgttcgatgaatttaaacctcttgtggaagagcctcagaatttaatcaaacaaaattgtgagctttttgagcagcttggagagtacaaattccagaatgcgctattagttcgttacaccaagaaagtaccccaagtgtcaactccaactcttgtagaggtctcaagaaacctaggaaaagtgggcagcaaatgttgtaaacatcctgaagcaaaaagaatgccctgtgcagaagactatctatccgtggtcctgaaccagttatgtgtgttgcatgagaaaacgccagtaagtgacagagtcaccaaatgctgcacagaatccttggtgaacaggcgaccatgcttttcagctctggaagtcgatgaaacatacgttcccaaagagtttaatgctgaaacattcaccttccatgcagatatatgcacactttctgagaaggagagacaaatcaagaaacaaactgcacttgttgagctcgtgaaacacaagcccaaggcaacaaaagagcaactgaaagctgttatggatgatttcgcagcttttgtagagaagtgctgcaaggctgacgataaggagacctgctttgccgaggagggtaaaaaacttgttgctgcaagtcaagctgccttaggcttataacatcacatttaaaagcatctcagcctaccatgagaataagagaaagaaaatgaagatcaaaagcttattcatctgtttttctttttcgttggtgtaaagccaacaccctgtctaaaaaacataaatttctttaatcattttgcctcttttctctgtgcttcaattaataaaaaatggaaagaatct

SEQ ID NO: 9316 - DNA, 1483 bp, Artificial Sequence
  derived and/or modified sequence
ctagcttttctcttctgtcaaccccacacgcctttggcacaatgaagtgggtaacctttatttcccttctttttctctttagctcggcttattccaggggtgtgtttcgtcgagatgcacacaagagtgaggttgctcatcggtttaaagatttgggagaagaaaatttcaaagccttggcagtagctcgcctgagccagagatttcccaaagctgagtttgcagaagtttccaagttagtgacagatcttaccaaagtccacacggaatgctgccatggagatctgcttgaatgtgctgatgacagggcggaccttgccaagtatatctgtgaaaatcaagattcgatctccagtaaactgaaggaatgctgtgaaaaacctctgttggaaaaatcccactgcattgccgaagtggaaaatgatgagatgcctgctgacttgccttcattagctgctgattttgttgaaagtaaggatgtttgcaaaaactatgctgaggcaaaggatgtcttcctgggcatgtttttgtatgaatatgcaagaaggcatcctgattactctgtcgtgctgctgctgagacttgccaagacatatgaaaccactctagagaagtgctgtgccgctgcagatcctcatgaatgctatgccaaagtgttcgatgaatttaaacctcttgtggaagagcctcagaatttaatcaaacaaaattgtgagctttttgagcagcttggagagtacaaattccagaatgcgctattagttcgttacaccaagaaagtaccccaagtgtcaactccaactcttgtagaggtctcaagaaacctaggaaaagtgggcagcaaatgttgtaaacatcctgaagcaaaaagaatgccctgtgcagaagactatctatccgtggtcctgaaccagttatgtgtgttgcatgagaaaacgccagtaagtgacagagtcaccaaatgctgcacagaatccttggtgaacaggcgaccatgcttttcagctctggaagtcgatgaaacatacgttcccaaagagtttaatgctgaaacattcaccttccatgcagatatatgcacactttctgagaaggagagacaaatcaagaaacaaactgcacttgttgagctcgtgaaacacaagcccaaggcaacaaaagagcaactgaaagctgttatggatgatttcgcagcttttgtagagaagtgctgcaaggctgacgataaggagacctgctttgccgaggagggtaaaaaacttgttgctgcaagtcaagctgccttaggcttataacatcacatttaaaagcatctcagcctaccatgagaataagagaaagaaaatgaagatcaaaagcttattcatctgtttttctttttcgttggtgtaaagccaacaccctgtctaaaaaacataaatttctttaatcattttgcctcttttctctgtgcttcaattaataaaaaatggaaagaatctaa

SEQ ID NO: 9317 - DNA, 1911 bp, Artificial Sequence
  derived and/or modified sequence
cctttggcacaatgaagtgggtaacctttatttcccttctttttctctttagctcggcttattccaggggtgtgtttcgtcgagatgcactattcttgtttttcttcccttgcccagacaagagtgaggttgctcatcggtttaaagatttgggagaagaaaatttcaaagccttggtgttgattgcctttgctcagtatcttcagcagtgtccatttgaagatcatgtaaaattagtgaatgaagtaactgaatttgcaaaaacatgtgttgctgatgagtcagctgaaaattgtgacaaatcacttcataccctttttggagacaaattatgcacagttgcaactcttcgtgaaacctatggtgaaatggctgactgctgtgcaaaacaagaacctgagagaaatgaatgcttcttgcaacacaaagatgacaacccaaacctcccccgattggtgagaccagaggttgatgtgatgtgcactgcttttcatgacaatgaagagacatttttgaaaaaatacttatatgaaattgccagaagacatccttacttttatgccccggaactccttttctttgctaaaaggtataaagctgcttttacagaatgttgccaagctgctgataaagctgcctgcctgttgccaaagctcgatgaacttcgggatgaagggaaggcttcgtctgccaaacagagactcaagtgtgccagtctccaaaaatttggagaaagagctttcaaagcatgggcagtagctcgcctgagccagagatttcccaaagctgagtttgcagaagtttccaagttagtgacagatcttaccaaagtccacacggaatgctgccatggagatctgcttgaatgtgctgatgacagggcggaccttgccaagtatatctgtgaaaatcaagattcgatctccagtaaactgaaggaatgctgtgaaaaacctctgttggaaaaatcccactgcattgccgaagtggaaaatgatgagatgcctgctgacttgccttcattagctgctgattttgttgaaagtaaggatgtttgcaaaaactatgctgaggcaaaggatgtcttcctgggcatgtttttgtatgaatatgcaagaaggcatcctgattactctgtcgtgctgctgctgagacttgccaagacatatgaaaccactctagagaagtgctgtgccgctgcagatcctcatgaatgctatgccaaagtgttcgatgaatttaaacctcttgtggaagagcctcagaatttaatcaaacaaaattgtgagctttttgagcagcttggagagtacaaattccagaatgcgctattagttcgttacaccaagaaagtaccccaagtgtcaactccaactcttgtagaggtctcaagaaacctaggaaaagtgggcagcaaatgttgtaaacatcctgaagcaaaaagaatgccctgtgcagaagactatctatccgtggtcctgaaccagttatgtgtgttgcatgagaaaacgccagtaagtgacagagtcaccaaatgctgcacagaatccttggtgaacaggcgaccatgcttttcagctctggaagtcgatgaaacatacgttcccaaagagtttaatgctgaaacattcaccttccatgcagatatatgcacactttctgagaaggagagacaaatcaagaaacaaactgcacttgttgagctcgtgaaacacaagcccaaggcaacaaaagagcaactgaaagctgttatggatgatttcgcagcttttgtagagaagtgctgcaaggctgacgataaggagacctgctttgccgaggagggtaaaaaacttgttgctgcaagtcaagctgccttaggcttataacatcacatttaaaagcatctcagcctaccatgagaataagaga

SEQ ID NO: 9318 - DNA, 1830 bp, Artificial Sequence
  derived and/or modified sequence
atgaagtgggtgaccttcatcagcctgctgttcctgttcagcagcgcctacagccgcggagtcttccgtagggatgcccataaatctgaagtcgcgcataggtttaaggatctgggagaagagaattttaaagccctggtgttgattgctttcgctcagtacctgcaacaatgcccctttgaggaccatgtgaaattggttaatgaagtcaccgagtttgcgaagacttgcgtggccgacgagtctgctgagaattgcgacaagagcttgcatacgttgtttggcgataagctgtgcaccgtggcgacactccgtgagacctacggagagatggccgactgctgtgctaagcaggagcctgaacgtaacgagtgcttccttcagcacaaagatgacaacccgaatttaccgagattggtcaggcctgaagtggatgtaatgtgtacagccttccatgataatgaggaaacctttctgaaaaaatacctatacgaaatcgctcggcgacacccatatttctacgcacccgagctgcttttctttgccaagcgatataaagcagccttcacagaatgctgtcaagctgccgacaaagctgcctgtttgctgccaaaactggacgaactgcgtgatgaaggcaaggcctcttcggccaaacagcggctcaagtgtgcttctctgcagaagttcggggagcgggcgtttaaggcatgggcagtggctagattaagccaacgttttcccaaggctgagttcgctgaagtgtccaagctggttaccgatctgacaaaagttcatactgagtgttgccatggagatctccttgagtgtgctgacgatagagccgacctcgctaagtatatttgcgagaatcaagattccattagtagtaaattaaaggagtgttgcgaaaaacctctgctcgagaagagccactgcatagcggaggtcgaaaacgatgagatgccagctgacttgcccagtctagcggcagatttcgttgagtctaaagacgtgtgtaagaattacgcagaagctaaagacgtctttcttgggatgttcctatacgagtacgctaggaggcaccccgactatagtgtcgtgctgctcctgcggttagcgaagacttacgaaaccacactagagaagtgctgtgccgccgcagacccccacgagtgctatgctaaagtgttcgacgaatttaaacctctggttgaagagccccagaacctaatcaagcaaaactgcgagctattcgaacagctgggcgaatataagttccaaaacgctctgttggtaagatacacgaaaaaggttcctcaggtgtccacccccacccttgtcgaagtctctagaaatcttggaaaggtggggtctaagtgttgtaagcatcctgaagccaagagaatgccgtgtgctgaagactatctgtctgtcgtgctcaaccagctgtgcgtgctacatgagaagacacctgtcagtgatcgcgtgacaaaatgttgcaccgaaagtctcgtcaacagacgcccctgcttctctgccctggaggtcgatgaaacttacgtcccaaaggagttcaacgctgagacctttaccttccacgccgacatttgcacgctgagcgaaaaagagagacaaatcaaaaagcagacagctctcgtggagttggtgaagcataaaccaaaagccacgaaggagcagctgaaagccgtgatggacgactttgcggcgttcgttgagaagtgttgtaaagctgacgataaagagacatgcttcgcagaagaggggaagaagctcgtggcagcgagtcaggctgctttgggtctgtag

SEQ ID NO: 9319 - DNA, 1191 bp, Artificial Sequence
  derived and/or modified sequence
atgaagtgggtgaccttcatcagcctgctgttcctgttcagcagcgcctacagtagaggagtttttagacgcgacgcccataagtctgaagtcgcacatcgctttaaggatctaggcgaggaaaacttcaaagccctggtgcttatcgcttttgcccaatacctccagcagtgcccattcgaggaccacgtgaaactggtcaacgaggtcacagaattcgctaagacatgcgtcgccgatgagagtgccgaaaattgcgacaagtcactccatacgctattcggcgataaactctgcacggtagccactttgcgggagacttacggagagatggccgactgttgcgcgaagcaagaaccagaaaggaacgagtgctttctgcaacacaaagacgataatccaaatctgcctcggttagtgagacctgaagtggacgtcatgtgcacagccttccacgacaatgaggagacatttttaaagaaatacttgtacgagaccacgttggagaaatgctgcgcagcagccgatccccacgagtgctatgccaaagtgtttgatgaatttaagccgcttgtcgaggaaccccagaaccttatcaaacagaactgtgaactgttcgagcaacttggcgagtacaagtttcagaatgcattgctcgttcgatacactaaaaaggtaccgcaggtgtccacccccacattggtcgaggtctctcgaaatctagggaaagtgggttctaaatgctgcaagcaccctgaggccaaacggatgccctgtgccgaggactatctcagcgttgtgctaaaccagctgtgtgttcttcacgagaagactcctgtgtccgatagagtgaccaaatgctgcaccgaatcactcgttaatcgcagaccctgtttctctgcccttgaggttgacgagacctatgtgcccaaagaattcaatgccgagacctttacatttcacgcagatatttgtaccctctccgagaaggaaagacagataaagaaacagaccgctcttgtggaacttgttaagcataagcctaaagcaactaaagagcaactcaaggctgttatggatgattttgcagctttcgttgaaaaatgttgcaaagccgacgataaggagacgtgctttgcggaagagggcaagaaactggtggccgcttcgcaggctgcgctcggactgtag

SEQ ID NO: 9320 - DNA, 1254 bp, Artificial Sequence
  derived and/or modified sequence
atgaagtgggtgaccttcatcagcctgctgttcctgttcagcagcgcatattctcggggtgttttccggcgggatgctcacaagagcgaagtggcacaccgctttaaggatctgggtgaagagaacttcaaagccctcgccgtggcacgtttgtcccagaggtttcctaaagcagagttcgccgaggtatcgaagctagtcacggacctcacgaaagtccataccgagtgctgccacggggatctgcttgagtgcgcagatgaccgtgccgacctagcaaaatatatctgtgagaaccaagactcgatctccagcaagttaaaagaatgttgtgaaaagcccttgctggaaaagtcccactgcatcgcagaagttgaaaatgatgagatgcctgctgatctcccctccttagcagcggattttgtggaaagcaaagacgtttgtaagaattatgccgaggcaaaggatgtctttttagggatgttcctttatgaatacgcccgccgccaccccgattatagtgtcgtgctcctgcttcggttagccaagacctacgagaccaccctagagaagtgttgcgctgctgcggatcctcatgagtgctacgccaaagtgttcgatgaatttaaaccactcgtggaggagccccagaatctcattaaacagaattgcgagctgttcgaacagctgggtgaatacaaattccagaacgctctgttggtgcgatatacaaagaaggtgccacaggtcagtacccctacactggtcgaagtttccaggaatctcggcaaggttggatctaagtgctgcaaacaccccgaagcaaaaagaatgccatgcgcagaagattacctgtctgtagttctgaatcagctgtgcgtgctacacgagaagacaccagttagtgatagggtcactaaatgctgcaccgagagcctggtgaatcggcggccttgcttttctgcattggaggtggatgagacttacgtgcccaaggagtttaacgccgagacattcacttttcacgctgatatttgtacactgtccgagaaagagcgacaaatcaagaaacagactgccctcgtggagctggttaagcataaacctaaggcaacaaaggaacagcttaaggccgtcatggacgacttcgccgcttttgtggagaagtgttgcaaagcggatgacaaggaaacttgtttcgccgaggaagggaaaaagctggtggccgcatctcaggcggccctcggtctgtag

SEQ ID NO: 9321 - DNA, 1857 bp, Artificial Sequence
  derived and/or modified sequence
atgaagtgggtgaccttcatcagcctgctgttcctgttcagcagcgcgtactcccgaggagtgtttagacgagacgccttatttttgttttttttcccttgccctgacaagagcgaggtcgcacatcgatttaaggacctgggggaagaaaactttaaagcacttgtcctgatcgcattcgctcaatatctgcagcagtgtccatttgaagaccacgtgaaactcgtcaacgaggtgaccgagtttgccaagacttgcgtggccgatgagagtgctgagaactgtgataagagcctgcacacactgttcggagataagctgtgtacagtggctaccttgagggagacatacggagagatggccgattgctgtgccaaacaggagccggaacgtaacgaatgcttcctgcagcacaaggacgacaaccctaacttacctcggctggttcgcccggaggtggatgtgatgtgcaccgctttccatgataacgaggagacatttctcaagaagtatctgtacgagatcgcccgcagacacccatacttctacgctcccgaattactcttttttgctaaaaggtataaggccgcctttaccgagtgttgtcaggcagctgataaggctgcttgcctcttaccaaagctcgacgagttgagagacgaaggcaaagccagctctgcaaagcaaaggttgaagtgtgcatcattgcagaaatttggcgaaagggcattcaaggcttgggccgttgcaagactctcacaacggttccccaaagctgagttcgcagaggtgagcaaattagtgactgacttgaccaaagtgcataccgaatgttgccatggagatctcttggaatgcgctgatgacagggctgatttagccaaatacatctgcgaaaaccaggatagcatttctagtaaactgaaagagtgctgcgagaagccactgttagaaaaaagtcattgcatagcagaggtcgagaatgatgagatgcccgctgatttgcccagtctagcagccgattttgtagaaagtaaagacgtgtgtaaaaattacgccgaggccaaggatgtgtttcttggcatgttcctctacgagtacgccaggcgacacccagactactcagtcgtgctcctgctccgcctggctaagacctatgagacaactttggaaaagtgctgcgcagccgctgacccacatgagtgttacgccaaggtgtttgacgagttcaaacccctggtggaggagccacagaatctgatcaagcaaaactgtgaactgtttgaacagctgggcgagtataaattccagaatgccctgctggttcggtataccaagaaagtgcctcaagtgagtacacctacactagttgaagttagccggaacctagggaaagtcggtagcaaatgttgtaagcatcccgaggccaagcgtatgccctgcgcagaagattatctgtccgtggttttaaatcaactgtgcgttcttcacgagaagactcctgtaagcgaccgagtgacgaagtgttgtactgaaagccttgtcaatcgaagaccatgcttctcggctcttgaggtggacgaaacatatgttcctaaggagtttaatgcagagacattcacgttccatgctgatatctgcaccctgtccgagaaggaacgccagattaagaaacagactgcactggtcgagctggtcaaacacaaacctaaagccactaaggagcaactcaaagctgtgatggatgactttgccgcgtttgtggagaaatgttgtaaggccgatgacaaggaaacttgttttgccgaggaggggaagaagctggtcgccgcctcccaagccgcgttgggactctag

SEQ ID NO: 9322 - DNA, 1830 bp, Artificial Sequence
  derived and/or modified sequence
atgaaatgggtcaccttcataagcctgctttttctcttcagcagtgcctatagcaggggagtatttaggcgtgatgcgcacaagtcggaagtggctcatcgattcaaggacctaggcgaagagaatttcaaggcactggttttgattgctttcgctcagtacctgcagcagtgcccttttgaagaccatgtcaaacttgtcaatgaggtcacggagtttgctaaaacctgtgtcgctgatgagtccgcggaaaattgtgacaaatcccttcatacactcttcggagataagctttgcacagtcgccacgctccgggaaacatacggtgaaatggcggattgttgtgccaaacaggagccagagcggaacgaatgtttcctgcagcacaaggacgataaccccaacttgccccgattggttcggccagaggtggacgtaatgtgtacagccttccacgataacgaggaaacattccttaagaagtacctttacgagatcgccagacggcatccctacttctatgccccagaactgctgttttttgctaagaggtataaagctgctttcactgagtgttgccaggcggcagacaaggcggcatgccttttacccaaactcgacgaactgcgcgacgaaggcaaagcgagctctgcaaaacaacgcctgaagtgtgcatctctgcaaaaattcggggaaagggcgttcaaggcttgggccgtggcccgtctgtcccagagattccctaaggctgagtttgccgaagtttccaagctcgtcacggacttgacgaaggtgcacacagagtgctgccacggcgatctactagagtgtgccgacgatcgcgctgaccttgccaagtatatatgcgaaaaccaagattctatctcttcgaaacttaaggagtgttgtgaaaaacccctgctagagaagtcacattgtattgcggaggtcgagaacgacgagatgcccgcagacctgccatctctggctgccgactttgtcgaatctaaagacgtgtgcaagaattacgctgaagcaaaggacgtgtttctggggatgtttctgtacgagtacgcacgccgtcaccctgattactccgtggtgctattgttgcgcttagccaagacatacgagactactctcgagaagtgctgcgccgctgccgaccctcatgagtgttatgccaaggtatttgatgaattcaagcccctggtggaagaaccccagaaccttatcaagcagaattgtgaactgttcgagcagttgggagagtataaatttcagaacgctctccttgtacggtacacaaagaaagtaccacaggtgagcacgccaactcttgtcgaggtgtcacgaaatctggggaaagttggtagcaagtgctgcaagcaccccgaggccaagaggatgccttgcgccgaagactacctatctgtggtgttgaaccagctctgtgttctacatgagaaaactcccgtgtcagaccgggtcactaagtgctgtacagagtccctggtcaacaggaggccttgtttctcagccctggaagtggacgagacgtacgtgccgaaggagttcaacgccgagacctttacttttcacgccgacatttgtacgttgtcagaaaaagagcgccagatcaagaagcagactgccctcgtggagttggttaaacacaagcctaaagctaccaaagaacaactgaaagcagtgatggacgattttgcggcttttgttgagaagtgttgcaaggccgatgataaagagacctgtttcgctgaagagggcaagaaattggttgctgccagccaagcagccctggggctttag

SEQ ID NO: 9323 - DNA, 1191 bp, Artificial Sequence
  derived and/or modified sequence
atgaagtgggtgacattcatctccctgctttttctattttctagcgcttactcaaggggggtcttccgacgagacgcccacaaatctgaagtggctcaccgatttaaggacttaggggaagaaaactttaaagccctggtgctcattgccttcgcccaatatcttcagcagtgccccttcgaggaccatgtaaagttagtgaacgaggtgaccgagttcgcaaaaacctgcgttgctgacgaatccgccgagaactgcgataagtctttgcatacactgtttggagataagctgtgcactgtggctacacttagggaaacttacggagaaatggcagactgctgcgcgaagcaggagcccgaacgcaatgagtgctttctgcaacacaaggacgataatcctaatctgccaagactggtgcggcctgaggtggatgttatgtgcacagcttttcacgataacgaggagacgttccttaagaaatacctttacgaaacgaccttagaaaaatgttgtgctgcagcagaccctcatgagtgctacgccaaggttttcgatgaatttaaacctctagtcgaggagccccagaacctaataaaacagaattgtgagttgttcgagcagttaggcgaatacaaattccaaaacgccttgctcgtgcggtacactaaaaaagtgccccaggtcagcaccccaacgctcgttgaggtttcaagaaatttaggcaaggttgggagcaagtgctgcaagcacccggaggcgaagcggatgccgtgtgccgaagactatctcagcgtggtcctcaatcaactctgcgtgttgcacgagaaaacccctgtgtctgaccgcgtgacaaagtgctgtacggagagtttggtgaatagaagaccctgcttttccgccctggaggttgatgagacctatgtgccaaaggaatttaacgccgagactttcacttttcacgccgacatctgcaccctgagtgaaaaggagcgacagataaagaagcagaccgcactggttgaactcgtgaagcacaaacccaaagctaccaaggagcagctgaaggctgttatggacgacttcgcagctttcgtggagaaatgctgcaaggctgatgacaaggagacttgtttcgccgaggagggaaaaaagttagtggctgcatctcaggcggctttagggctgtag

SEQ ID NO: 9324 - DNA, 1254 bp, Artificial Sequence
  derived and/or modified sequence
atgaagtgggtgacatttatctcactgttattcctgtttagttccgcctactcacgtggcgtgtttaggagggatgcacacaagtccgaggtggcgcatcgcttcaaagacttaggggaggaaaattttaaggccttggctgttgcgcgactctcgcagcggttcccaaaagccgaattcgccgaggtgagtaaattggtgactgaccttactaaggtccatactgaatgttgccatggagatctcctcgagtgcgctgacgacagggcagacctggccaagtatatctgcgagaatcaggacagcataagcagcaaacttaaggagtgttgcgagaagcctcttcttgagaagtctcattgcatcgctgaagtggagaatgacgagatgcccgcagacctgccctccctcgccgctgacttcgttgagtccaaggacgtctgtaaaaattacgccgaggcaaaggacgtttttctcggcatgttcttgtatgagtacgcccgacgccacccggattactctgtggtgctgttgctgaggctagcaaaaacttacgaaacgaccttggaaaaatgctgcgccgcagccgatcctcacgaatgctatgccaaagtttttgacgagttcaaacctctggtagaggagccccaaaacctgatcaaacagaactgcgagctttttgagcagctgggcgagtataagttccaaaacgcactgctggttcgctataccaaaaaggtgccgcaggtaagcactcccactctggtagaagtttccaggaacctaggtaaggtgggatccaaatgctgtaagcatcctgaggctaagcgaatgccatgtgcggaggactatctgtccgtagtgcttaaccaactctgcgttctccacgagaagaccccagtctctgaccgtgtcacaaaatgttgtacagagagcttggtaaaccggagaccctgtttttcggcgctggaggttgatgaaacctatgtgcccaaagagtttaatgccgaaacctttacgtttcacgcggatatctgcacgctgtctgaaaaagagaggcaaatcaagaagcagacagctttggtcgagctggtcaagcacaaacctaaagcaaccaaagaacagttgaaagctgtcatggatgatttcgcagcattcgtggaaaagtgctgtaaggccgatgacaaagagacctgcttcgcagaagaaggtaaaaagctggtggctgcctcccaggctgctcttggactatag

SEQ ID NO: 9325 - DNA, 1857 bp, Artificial Sequence
  derived and/or modified sequence
atgaagtgggttacttttatatcactgctatttctgttttcaagtgcctactcaaggggtgtgttccgcagggacgccctgtttctcttttttttcccctgcccagataagtccgaagtggcccatagattcaaggacctaggtgaagaaaacttcaaggccctcgtgctaatcgccttcgcacaatacctgcaacagtgcccattcgaggatcatgtgaaacttgttaacgaagtcaccgaatttgccaagacttgtgtggctgacgagagcgccgagaactgcgataaatccctgcacacactgttcggagacaaattatgtaccgtggccacactgcgagagacttacggtgagatggcagactgttgcgcaaagcaggagccagaacgtaacgaatgctttctgcaacacaaagatgacaatcctaacctaccgcgactggtccggccagaagtcgacgtaatgtgcactgcgtttcacgataacgaggaaacttttctgaaaaagtacttatatgaaattgctagacgccatccatatttttatgccccagaactgctgttttttgccaagaggtacaaggcggcattcaccgaatgttgtcaagcagcagacaaagcagcttgtctgctccctaaactggatgaactcagagatgagggcaaagcctcttctgccaagcagcgcttgaagtgcgcgtccctgcaaaaattcggcgaaagagcttttaaagcatgggctgtggctcggctttctcagagattccccaaagccgaatttgcagaagtgtctaagctcgtgaccgacctgaccaaagtgcacacagaatgctgccatggtgacctactggagtgcgccgatgatcgcgctgacctggcaaaatacatctgcgaaaaccaggactccattagctccaagctgaaagagtgctgtgagaaaccccttctagagaaaagtcattgtatcgcggaagtcgagaacgacgaaatgccagccgatctacccagtctggctgccgactttgtcgaatctaaagacgtctgcaaaaactacgcggaggccaaggacgtcttcttgggaatgttcctatacgagtatgccagaaggcacccagactactctgtggtgttgttactgagactcgcaaaaacctatgaaacgaccctagaaaaatgctgtgctgcggcagacccacacgagtgttacgcaaaagtatttgatgaatttaagcctcttgtcgaggagcctcaaaatctgatcaagcagaactgcgaattatttgaacaactgggcgagtataaattccagaacgcgcttcttgttaggtatacgaagaaagtgccccaggtgtcaactccgacactggtggaggttagcaggaacttgggcaaagttgggtccaagtgctgcaagcatccagaagctaagagaatgccctgcgcagaagattatctgagcgttgtgcttaatcagttgtgcgtcctgcatgaaaaaactcccgtgagtgacagagtgaccaagtgttgcactgagtccctggtgaataggaggccctgcttctctgcacttgaagttgatgagacttacgtgccaaaggagttcaatgcggagaccttcacttttcacgcagatatatgcaccttatccgagaaggagcggcaaataaagaaacagactgcattagtggagctcgtgaagcacaaacccaaagcaaccaaagaacaactcaaagccgttatggacgatttcgccgcatttgtagaaaagtgctgtaaggccgatgacaaggagacgtgctttgctgaggagggtaagaaactggtggcagcctcccaggccgctctgggcctttag

SEQ ID NO: 9326 - DNA, 2007 bp, Artificial Sequence
  derived and/or modified sequence
atgaaatgggtgtcatttatctcacttctgtttcttttctcgtcggcatactccgggtcgttggacaagcggcacggcgaagggacctttacgtccgatgtctccagctacctcgaaggacaggccgctaaagagtttatcgcctggcttgtcaagggacggcacggggagggcaccttcacctccgacgtgagctcctaccttgagggacaagccgccaaggaattcatcgcttggctcgtgaagggacgagatgctcacaagtcagaagtcgcccaccggtttaaagatctcggcgaagagaactttaaggcactggtcctcattgccttcgcacaatatcttcagcagtgcccctttgaggaccatgtgaaactggtgaacgaagtgacggaattcgccaagacctgtgtggcagacgaaagcgccgaaaattgtgacaagtcgctccataccctgtttggtgataagctgtgtaccgtggcaacgctgcgagaaacttatggtgaaatggccgattgttgcgctaagcaggaacccgaacgtaacgagtgttttttgcagcataaggacgacaacccgaatcttcctcgcctggtgcggccggaagtcgatgtgatgtgcactgcgtttcatgataatgaggaaacttttctcaagaaatacctctacgagattgcgcgtagacatccttatttctacgcgcctgaactgcttttctttgcaaaaagatacaaggcagcatttaccgagtgctgccaagccgcagataaagccgcttgtctgttgccgaaacttgatgagctgcgcgacgaaggtaaagcatccagcgcaaagcaaaggcttaagtgtgcaagccttcagaaatttggcgaacgggcattcaaagcctgggcggtcgcacgcctgtcccaacgcttccccaaggcagaatttgcagaagtgagcaagctcgtcaccgatctgaccaaggtccataccgagtgttgtcacggagacttgcttgagtgcgcagatgacagagcagatctggcgaagtacatatgcgaaaatcaagacagcatttcatccaagttgaaagagtgttgcgaaaaaccattgctggagaaatcccactgtatcgccgaagtggaaaatgacgaaatgccggcagatctcccttcgcttgcagctgatttcgtggagtccaaagatgtgtgcaagaactacgccgaagctaaggatgtgttccttgggatgtttctttatgaatacgcaagaaggcatccagattacagcgtcgtgcttcttctgaggctcgccaagacttatgaaaccactctggagaagtgctgtgcagcagcagatccacatgagtgttacgccaaggtctttgacgagtttaaacctcttgtcgaggagccacagaatctcattaagcagaactgtgaactttttgagcaactgggagaatacaagtttcaaaacgccctgctcgttcggtacaccaagaaggtgcctcaagtgtcgactcctactctggtggaagtgtcccgcaacttgggaaaggtcggctcaaagtgctgcaaacacccagaagcaaagagaatgccatgcgctgaggattacctgtcggtcgtgttgaaccaactttgtgtgttgcatgaaaagacccccgtttcggacagagtgacgaaatgttgtaccgagagcctcgtgaacaggaggccatgtttctcggcgcttgaagtcgatgaaacctacgttcctaaggagttcaacgctgagactttcacctttcatgctgatatttgcactctgtcggaaaaggagagacagattaagaaacaaacggcactcgttgaactcgttaaacataagccaaaagccactaaagaacagctgaaggcagtgatggatgacttcgctgcatttgtcgagaagtgttgtaaggctgatgataaggaaacgtgttttgcagaagaagggaagaagctggttgcagcgtcacaagcggcgctgggcttg

SEQ ID NO: 9327 - DNA, 2007 bp, Artificial Sequence
  derived and/or modified sequence
atgaagtgggtgtcttttatcagcttgctcttcctcttctcgtcagcatatagcggttcgctggataagcgccatggagaagggaccttcactagcgatgtgtcatcgtacctggaaggacaagccgccaaagagttcatcgcgtggctcgtgaaaggacgccacggcgaaggcaccttcacctccgacgtgtcctcgtacttggaggggcaggccgcgaaagaattcattgcttggctggtgaagggacgcgatgcgcacaagtctgaggtggcgcataggtttaaggacctgggtgaagaaaacttcaaggcgttggttctcatcgcatttgcccagtacctgcagcaatgccctttcgaggaccacgtcaaactggtgaacgaggtgactgaattcgccaagacttgcgtcgcggacgaatccgcagaaaactgcgacaagtcgctgcacactctcttcggcgacaagctctgcactgttgcgacgctgagagaaacttacggcgagatggccgactgttgcgcgaagcaggaaccggaacggaacgagtgtttcctgcagcacaaggatgataacccgaacctgccgcggctggtgcggccggaagtcgacgtgatgtgcaccgctttccacgacaacgaggagactttcttgaagaagtacttgtacgagattgcgagacggcacccctacttttacgcccctgaactgctgttcttcgccaaaaggtataaggctgcttttactgaatgctgtcaggcagccgacaaagcggcctgcctgcttcctaagctcgacgaactccgggacgaaggcaaggcgtcgagcgccaaacagcgcctcaagtgtgcgtccttgcagaagttcggggaacgggctttcaaggcctgggccgtggcgcgcctctcgcaacgctttccaaaggccgaatttgccgaggtgtccaagctggtgaccgatctgacgaaggtgcacaccgaatgttgtcacggagatctcctggaatgtgctgatgatcgggccgatcttgcaaagtacatttgcgaaaaccaggactcgatctcttccaagctcaaagagtgctgtgagaagcctctcttggaaaagtcgcactgcatcgcagaggtggagaacgatgaaatgccggcggacctcccgagcctggccgctgatttcgtggagtcgaaggacgtctgtaagaattatgcagaagcgaaggacgtgttcctcggcatgtttctgtacgagtacgcaagaaggcatcccgactactcggtggtcctgctgctgcgcctcgccaaaacttacgagactaccctggaaaagtgctgcgcagcggccgatccgcatgaatgctatgcgaaggtgtttgatgaattcaagcctctggtggaagaacctcagaacctcatcaaacagaactgcgaacttttcgaacaattgggagagtacaagtttcaaaatgcgctcctggtccggtacaccaagaaggtcccccaagtgtccaccccaaccctggtggaggtttcccggaacctgggaaaggtgggatcgaaatgttgcaagcacccggaggccaagagaatgccatgcgctgaggactacctgagcgtggtgttgaaccagctgtgtgtgctgcatgaaaagaccccggtgtctgacagggtgacgaagtgctgcactgagtcactggtgaaccgccgaccatgtttttccgcgctggaggttgacgaaacctacgtgcctaaggaattcaatgccgaaacgttcacctttcacgcggatatctgcacgttgtcagaaaaggagaggcagatcaagaaacagaccgccttggtggagctcgtgaagcataagccaaaagctaccaaggaacaactgaaagcggtcatggatgactttgccgcatttgtggagaagtgctgcaaagctgatgacaaggaaacctgtttcgcggaggaggggaagaagttggtggccgcctcacaggcggccctcggactt

SEQ ID NO: 9328 - DNA, 2007 bp, Artificial Sequence
  derived and/or modified sequence
atgaagtgggtatcatttatctctctgttattcctattcagcagcgcttacagcggcagtttggataagaggcacggcgagggtactttcacatctgacgtcagctcatacctggaagggcaggccgcgaaagagttcattgcttggctggtgaaagggaggcacggagagggtacctttacctccgatgtgtcgagttaccttgaaggtcaggctgccaaagagttcatcgcctggctggtaaagggtcgggacgcccacaaatctgaggtagcccaccgttttaaggacctgggcgaggagaatttcaaggctctggtcctgatagcattcgcccagtacctgcagcaatgccccttcgaagatcacgtgaaattggtgaacgaggtcaccgaatttgccaaaacatgcgttgcggacgaatctgcagaaaactgtgataaaagtctgcatacgctgttcggtgacaagctatgcaccgttgccactctccgggagacctacggcgagatggcagactgttgcgcaaagcaagagccggaaaggaacgagtgctttttgcagcataaggacgataaccccaatctgccgagactggtgcgcccagaagttgacgtgatgtgtacagcgtttcacgacaacgaggagactttccttaagaagtacctgtacgagatagcccggcgccacccttacttttatgccccggaacttctgttcttcgcaaagaggtacaaagctgcctttacagagtgctgtcaggctgcagataaggcggcctgtttgctcccgaagctcgacgagttacgggacgagggcaaagcctcgagtgccaaacagaggctgaaatgtgccagcctacagaagttcggcgagcgagccttcaaggcctgggccgtcgcacggttaagtcagaggtttcccaaggcggaatttgccgaagtttcgaagctggtcacagacttaaccaaagtgcatacggaatgctgccacggagacctgctggagtgtgctgacgatcgcgccgatctggctaaatatatctgcgagaaccaggattccattagctcgaaactgaaagagtgttgtgagaaacctttactcgagaagagtcattgcatcgcggaagtagagaacgatgagatgccggccgatctcccaagcctggctgccgattttgtcgagtctaaagacgtctgcaagaattacgcagaagccaaggacgtcttcttggggatgtttctttatgagtatgccaggcgtcatccggactactctgtggtgctgctcttgcggctggccaagacatatgagacaacactggaaaagtgctgcgccgctgccgacccacacgagtgctacgcaaaggtctttgatgagttcaagccgcttgtagaagaaccacagaatcttatcaagcagaactgcgagttattcgagcaactcggtgaatacaagttccagaacgccctcctcgtgaggtacacaaaaaaggtgccacaggtgagcacacctacactggtagaggtgtcaaggaatctcggaaaagtgggatctaagtgttgtaagcacccagaggcgaaacggatgccttgcgcagaagactacctttccgtcgtgcttaaccagctctgcgtgctgcacgaaaaaacacccgtatctgatcgtgtcacaaagtgctgcaccgagtccctagttaatcgacgtccgtgcttctctgctttagaagtcgacgagacttacgtgcccaaggagttcaatgccgaaacgttcacatttcatgctgacatctgcacccttagcgaaaaggaacggcagataaagaagcagaccgccctggtggagctcgtcaaacacaagcctaaagccaccaaagagcagttaaaggcagtgatggacgatttcgctgcgttcgttgaaaagtgttgtaaagcagacgacaaagagacatgtttcgccgaggagggcaaaaagctcgtggcagcttcccaggcagcccttggcttg

SEQ ID NO: 9329 - DNA, 2007 bp, Artificial Sequence
  derived and/or modified sequence
atgaaatgggtttcttttatttccctgttgtttctgttctcatccgcatatagtggctctctggacaagagacatggcgaaggcacgttcactagcgacgtgtccagctacctggagggacaggcggccaaagagttcatcgcttggcttgtgaaggggcgccatggagaggggaccttcactagcgatgtgtcctcctaccttgaggggcaggcagccaaagaatttatcgcctggcttgtgaaaggtcgagacgctcacaaatcagaagtggctcacaggttcaaggacctgggcgaggagaacttcaaggcgctcgtgttgatcgcttttgcacagtacctgcaacagtgtccgtttgaggatcacgtgaagctagtgaatgaagtaactgagttcgcgaagacctgcgttgctgacgagagcgcagaaaactgtgataagtccctgcacacactgttcggcgacaaactgtgcaccgtcgcaacgctgcgcgaaacttacggggagatggcagattgctgcgctaagcaggaacccgagaggaatgagtgctttttgcagcacaaagacgataaccctaacctcccccggctggttcggcctgaagtagacgtgatgtgtactgcatttcacgataatgaagagactttcctgaagaagtatctgtatgaaattgcacggcgtcacccatacttctatgcacccgaacttctgttcttcgctaagaggtacaaggcggcatttacagagtgttgccaagctgcagacaaagccgcctgcctattacctaaattggacgaactgcgcgacgaaggcaaagcttcaagtgcgaaacagaggttgaaatgtgcctctctgcaaaaatttggagagcgagcattcaaggcatgggctgtcgcccgcctgagtcagaggtttcccaaagcagagtttgctgaggttagcaagttggtgaccgatctcaccaaggtacatacagagtgttgtcatggggacctgctggagtgtgccgatgacagagccgatttggccaagtatatttgcgaaaaccaggactcgatttccagcaagctgaaagagtgctgtgaaaagccattgctcgagaaatcccattgcattgccgaagtagagaatgacgagatgcccgcggatctgccatctctagctgccgacttcgtcgagtctaaagacgtctgtaaaaattatgcagaggctaaggatgtatttttgggcatgtttctgtacgagtacgcccggagacacccggattatagtgtggtgcttcttctgaggttagccaagacttatgagaccaccctggaaaagtgttgtgctgcagcggacccgcacgaatgctacgccaaggtgtttgacgagtttaagcccctggtcgaagagccacagaacctgataaagcagaactgtgagctcttcgagcaacttggagaatataaatttcaaaacgctctgttggtgaggtatactaagaaggtcccccaagtctcaacacccacactggtggaagtgtcccggaacctgggaaaggttggaagtaagtgttgtaagcatcccgaggccaagcgcatgccgtgtgccgaagattacctgagtgtggtcctgaatcaactttgtgtgctgcacgaaaagacacccgtgtccgatagagtcactaaatgctgcaccgagagtctggtgaacaggagaccttgctttagcgcacttgaagtggacgaaacctacgtaccgaaggaatttaatgctgagactttcacctttcatgccgatatatgtactcttagtgaaaaagagcggcagattaagaagcaaaccgccctggttgaattggtcaagcataagcctaaggccactaaagaacagctcaaggctgttatggacgacttcgctgccttcgtggagaagtgctgcaaggccgatgacaaggaaacctgcttcgccgaggagggcaagaagctcgtcgcagcttcacaggccgccctggggttg

SEQ ID NO: 9330 - DNA, 2007 bp, Artificial Sequence
  derived and/or modified sequence
atgaagtgggtcagcttcatctccctgctctttctcttctcatccgcctactcaggatctctcgataaacggcacggagagggaaccttcacctcggacgtgtcatcatacctggagggacaagcagctaaagagttcatcgcctggttggtcaaagggcggcacggggaaggtactttcacctccgacgtatcctcgtacctcgaggggcaggctgcaaaggaattcatcgcttggctggtgaagggacgggacgcccataaaagcgaagtcgcgcatcgcttcaaagatctgggagaagagaatttcaaggcccttgtgcttatcgcctttgctcaatacctccagcaatgtcctttcgaggaccatgttaagctcgtgaacgaagtgaccgagtttgcgaagacttgcgtcgcggacgaatcggccgagaactgtgacaaatcacttcatacgttgttcggcgataaactgtgcactgtggccaccctccgagaaacctacggggagatggccgactgctgcgcgaaacaggaacctgaacgcaacgagtgttttctgcagcacaaggatgataacccgaatctgcctcgcctcgtgcggccggaggtggatgttatgtgtactgcgtttcacgacaatgaagaaacgttcctgaagaagtatttgtacgagatagctcgcagacatccgtacttctacgccccagaactgttgttcttcgccaaacggtacaaagcagcgtttactgaatgctgtcaggcggcagacaaggcggcctgcttgcttccaaagctcgatgaattgcgcgacgaaggaaaagcctcgtcagccaagcagagactcaaatgcgcctcgctgcagaagttcggagagcgcgcattcaaggcatgggcggtggcccgcctgtcgcagagattcccgaaggccgagttcgccgaggtgtccaaattggtcactgacctgaccaaggtgcatacggaatgctgtcacggcgaccttttggaatgtgcggatgacagagctgaccttgccaagtacatatgtgaaaaccaagattccattagctccaagctgaaagagtgctgcgagaagccactgctggaaaaatctcattgtattgcggaggtcgagaatgacgaaatgccggcagatctcccgtcgctcgcggcagactttgtggaaagcaaggacgtgtgcaagaactacgccgaggcgaaggatgttttccttggcatgttcctctacgagtacgcgcgccggcacccagattactccgtcgtgctgctgctgcggctggcaaagacctatgaaactaccctggagaagtgttgcgcggcggcggatccgcacgagtgctatgccaaggtcttcgacgagttcaagcctcttgtggaagagccgcaaaacctgatcaaacagaattgcgagctgttcgagcaactgggcgaatacaagttccagaacgccctgcttgtgcgctacaccaagaaggtgccacaagtgtcgactcccactttggtagaggtatctcgcaacctcggtaaggtgggatcgaaatgctgtaagcacccggaggcaaagaggatgccctgcgctgaagattaccttagcgtggtcctcaatcagctctgtgtcctgcacgaaaagacgccggtgtccgacagagttactaagtgctgcaccgaatcgctggtgaacaggcggccgtgcttcagcgccctggaagtggacgaaacgtacgtgccaaaggagttcaacgcagaaaccttcaccttccacgccgatatctgcaccctcagcgagaaggagagacagatcaagaaacagactgcgctcgtcgaacttgtcaaacacaaaccaaaagccactaaggaacaactgaaggctgtcatggacgattttgctgcgttcgtggaaaagtgctgcaaggcagacgacaaagaaacctgctttgcggaagagggtaagaaacttgtggctgcctcccaggccgccctgggtttg

SEQ ID NO: 9331 - DNA, 2007 bp, Artificial Sequence
  derived and/or modified sequence
atgaagtgggtgagcttcatttcactgctttttctgttctcgtctgcctactccggttccctcgacaaaaggcatggcgaggggacgtttaccagcgatgtgtcatcctacctcgaaggacaagcagcaaaggagtttatagcatggctcgtcaagggtcgtcacggtgagggaacttttacctcagatgtcagctcctacctggaaggtcaggcagcaaaagagtttattgcctggttggtgaaagggagagacgcccacaaatcagaagtggcccatagattcaaggatttgggtgaggagaatttcaaggctcttgtgctcatcgcttttgcccaataccttcaacaatgtccctttgaggaccacgttaagctggtgaacgaagtgaccgaatttgctaagacttgtgtggccgacgaatcggcggaaaattgcgataagtccttgcatactctgtttggagacaagctctgtactgtcgcaacgctgagagaaacctacggagagatggcagactgttgtgccaaacaggaaccggaaagaaatgaatgctttctgcagcataaggacgacaatccaaacctgcctcgtctggtgaggcctgaggtggacgtgatgtgcaccgcgtttcacgacaacgaagagacttttctcaagaaatacctgtacgagattgcccgacggcacccatacttttacgcccccgagcttctgttctttgcaaagcggtataaggctgcttttaccgaatgttgtcaagcagcagacaaggcggcatgtttgcttcctaaacttgatgaactcagagacgagggaaaggcatcgtccgcaaagcagagattgaagtgtgcttcgttgcagaaattcggagagcgcgcatttaaggcatgggcagtcgcacgactttcccagagattccctaaggcagagtttgcagaggtgtcgaaactcgtgactgaccttactaaagtgcatactgaatgctgtcacggtgatcttctggagtgtgcagatgatagagcagatctggcaaagtacatatgcgaaaaccaggattccatcagcagcaaactcaaggagtgttgcgagaagcctcttctggagaaaagccactgtattgcggaagtcgaaaatgatgaaatgcccgccgacctcccatcgttggctgcagatttcgtggaatctaaggatgtgtgcaagaattacgcagaagcgaaagacgtgtttcttggaatgtttctctacgaatatgcgcgccggcatcctgattactcggtggtgcttttgctgcgacttgcaaagacttacgagacgactctggaaaagtgttgtgcagccgcagatcctcacgaatgctacgccaaggtctttgatgagttcaagccccttgtcgaagaacctcaaaacttgattaagcaaaactgtgaactgttcgaacaactcggggagtacaaattccagaacgcacttctggttcgatacactaagaaggtgcctcaggtgtccacgcctacgcttgtggaggtcagcagaaacctgggtaaggttggatcgaagtgctgcaagcatcctgaggcaaagagaatgccgtgtgctgaggattacctgagcgtggtgctgaaccaactttgtgtgttgcacgaaaagactcctgtgtccgatcgagtgactaagtgttgcactgagtctcttgtcaaccgcagaccttgcttttcagcacttgaagtggacgaaacctacgtgccaaaagaattcaacgcggagactttcacctttcatgcagatatttgtaccctttcagaaaaggaaagacagattaagaaacaaactgcactggtggaactggtgaaacacaaacctaaggcaactaaggaacagcttaaggcagtgatggacgactttgccgctttcgtcgaaaagtgctgtaaagccgatgataaggagacttgttttgcagaagaaggcaagaaactcgtggcagcgtcgcaggccgccttgggcctc

SEQ ID NO: 9332 - DNA, 2007 bp, Artificial Sequence
  derived and/or modified sequence
atgaagtgggtgtcattcatttcactgctgtttctcttctcctcggcgtactctggatcccttgacaagcgccatggagaaggaacgttcacttctgacgtgtcgagctatctcgaaggccaggcggcgaaggagtttatcgcttggctcgtgaaggggcggcacggggagggaaccttcacttcggatgtgtcctcgtacttggagggtcaggcggccaaggagttcattgcctggctggtgaagggtcgcgatgctcataagtccgaggtggcacatcggtttaaggatctgggagaagagaactttaaggctctcgtgctgatcgcgtttgcccagtacctgcaacaatgtccgttcgaggaccacgtgaagctggtgaacgaagtcaccgaattcgccaagacttgcgtggcagacgaatccgcggaaaattgtgacaagagcctgcacactctctttggcgataagttgtgtaccgtggcgactctcagagagacgtacggcgaaatggctgattgttgtgccaagcaggagcctgagcgcaacgagtgctttctgcagcataaggacgacaatccaaacctgcctagacttgttcgcccggaggtggatgtcatgtgtaccgcattccacgataacgaagaaactttcctcaagaaatacctgtacgaaatcgctcgccggcatccatacttctacgccccggaacttctgttcttcgccaagagatataaggccgccttcaccgaatgctgccaggcggcggacaaagccgcctgtctcttgccgaagttggacgagctgcgcgatgaaggaaaggcgtcaagcgcgaaacaacggctgaagtgcgcctcgctgcagaagttcggagaacgggctttcaaggcctgggccgtggctagactctcccagcgtttccctaaggccgaattcgcagaggtgagcaaactggtcaccgacctgactaaggtccatactgaatgctgccacggagacttgttggagtgcgcggacgacagggcagatttggcgaagtatatctgcgaaaaccaggactcaatctcaagcaaacttaaagaatgttgcgaaaagccactcctcgaaaagagccactgtatcgccgaggttgagaacgacgaaatgccagccgaccttccgtcgctggccgcagactttgtcgagtctaaggacgtgtgtaagaattacgcagaggccaaagatgtgtttctgggaatgttcctgtacgaatacgccaggcgacacccggattactccgtggtcctccttctgcgcctggcaaagacctacgaaaccaccttggagaaatgttgcgccgcggcggacccacatgagtgctacgccaaggtgttcgatgaattcaagccactggtggaggaaccacaaaatctgatcaaacaaaattgcgaactgttcgagcagctgggcgagtacaaattccaaaacgccctcctggttaggtacaccaaaaaagttcctcaagtctccactccgactctggtggaggtgagccggaacctcggcaaggtggggtcaaagtgctgtaaacacccggaggcgaagagaatgccgtgcgcagaggactacctctcggtggtgctgaatcagctgtgcgttcttcacgaaaaaactccagtctcggaccgcgttaccaaatgttgtacggagtctctggtgaaccggcgtccatgtttctccgcgctggaagtggacgaaacctacgtgccaaaggaattcaatgcagaaacttttacctttcacgcagatatatgcacgttgtctgaaaaggaacggcaaatcaaaaagcagaccgccttggtcgaactcgtaaagcacaagccaaaggccactaaggagcagcttaaggcggtgatggatgacttcgcagcattcgtggaaaagtgctgcaaagcagatgacaaggagacttgcttcgctgaggaagggaagaagctcgtcgcagcgagccaggccgccctgggactc

SEQ ID NO: 9333 - DNA, 2007 bp, Artificial Sequence
  derived and/or modified sequence
atgaaatgggttagcttcatctccttgctgtttctttttagcagcgcctactcaggatctctggacaagaggcatggcgagggcaccttcaccagcgacgtgagcagctacctggagggccaggctgcaaaagagtttatcgcttggctggtgaaaggaaggcacggagagggtaccttcacctcagatgtctccagttatctggaaggccaagcggccaaagaatttattgcctggttggttaagggcagagatgcccacaagagcgaggtagcccaccgattcaaagacctcggcgaagagaactttaaggctttggtgctcatcgcctttgcccagtacctgcaacagtgccccttcgaggaccacgtcaagctcgtcaacgaggtgaccgaattcgccaaaacctgcgtggcagacgagagcgctgagaattgtgacaagtctctgcatactctgtttggcgacaagttatgcactgttgctacacttagagaaacctatggagaaatggcagactgctgtgctaaacaggaacccgagcgaaacgagtgctttctgcagcacaaagacgacaacccaaacctgccccgcttggtccgccccgaagtcgatgtcatgtgtacagcctttcacgacaatgaggagacttttttgaaaaaatacctgtatgagattgctagacgtcatccttacttttatgctcctgagctcctgttttttgctaagaggtataaagccgcatttactgagtgttgccaagccgcggacaaagccgcctgtctattgcccaagctggatgaactgcgcgatgagggaaaggcttcatctgctaaacagcgcctcaaatgtgcttctcttcagaaattcggggaacgcgctttcaaggcgtgggccgtggccagactgtcacagagattcccaaaagccgagttcgcagaggtgagcaagttggttactgatctcacgaaggttcacaccgaatgttgtcacggtgatcttcttgagtgcgccgacgatcgtgccgatctggctaaatacatctgcgaaaaccaagacagcatcagctcaaagcttaaggagtgctgcgagaaacctctgctagaaaagtctcactgtatcgctgaagtggaaaacgacgagatgcccgcagacctgccgagtttagctgcagactttgtggaaagcaaggacgtgtgcaagaactatgcagaggctaaagacgtcttcctgggcatgtttctctatgagtacgcgcgtaggcacccggactacagcgtagttcttttgctacgcctcgcaaaaacctacgagaccacattagagaaatgttgcgctgcagcagatccccatgagtgttatgcaaaggtgtttgatgaatttaaacctcttgttgaagaacctcaaaacctgattaaacagaattgcgaactgttcgaacagctgggtgaatacaaattccagaatgccctgttggtgcgatataccaaaaaagtgcctcaggtctctactccaactctggtcgaggtgagtagaaaccttggcaaagtgggcagcaagtgctgcaaacacccagaagcaaagagaatgccgtgtgctgaagactaccttagtgtcgtcctgaatcagctgtgtgttctccacgagaaaacacctgtcagtgatagggtgacgaaatgctgcaccgaaagccttgtcaaccgccgcccatgcttctcggctctcgaggttgacgaaacctacgtgcccaaggaatttaacgctgagacctttaccttccacgcagacatttgcaccctcagcgagaaagagcgccagatcaagaaacagactgctttggtggagctggtgaagcacaagcctaaggcaacaaaggaacagcttaaggcagtcatggacgatttcgctgcctttgtagagaagtgctgtaaagccgatgataaggagacctgctttgccgaagaaggcaaaaagcttgtggctgcgagccaggccgccctggggctc

SEQ ID NO: 9334 - DNA, 2007 bp, Artificial Sequence
  derived and/or modified sequence
atgaaatgggtgtcattcatatccctcttgtttctcttttctagcgcctactcaggcagcctcgacaaaagacatggagagggcacatttacaagcgatgtgagttcttatctggagggtcaggctgcaaaagaatttatcgcttggctcgttaagggcagacacggagaaggcacttttactagcgacgtgagctcgtacctagaggggcaagcagctaaggaatttatcgcttggctcgtgaaaggacgcgacgcgcacaagagtgaggtggcacaccggttcaaagatctgggcgaagagaatttcaaggccctcgttctgatagcatttgcccagtacctccagcagtgcccgttcgaggaccacgtcaagctggtcaatgaagtgactgagtttgccaagacgtgcgtggcagatgaatccgctgaaaattgtgacaagagtttacacaccctgttcggtgataagctgtgcacagtggcaactctcagagagacttacggagagatggctgattgttgtgctaagcaggaaccagagcgtaatgagtgcttccttcagcacaaggatgacaatcccaacttgccgaggctcgttcgacccgaggtcgacgttatgtgcaccgcatttcacgataacgaggagacattccttaaaaagtatctgtatgaaatcgcccggagacatccctacttttacgctcctgaactcctgttttttgccaaacgttataaagctgcttttacagagtgctgtcaagccgccgataaggctgcatgcctattgcctaaactggatgagctccgagatgaggggaaggcaagtagtgcgaagcagaggttgaagtgtgccagcttgcagaaatttggtgaaagggctttcaaagcctgggccgttgcacgtctcagccagagatttcccaaagctgaattcgccgaagtgagtaagttggtcacagacttgactaaggtgcacacggagtgttgtcatggagatctgttagagtgcgccgatgacagagctgatctggccaagtacatctgcgaaaatcaggatagtattagcagcaagctgaaggagtgctgcgaaaaacccttactggagaaatcccattgtatcgccgaagtggaaaacgacgagatgcctgctgatttgccgagcctggccgctgatttcgtggagtccaaagacgtctgtaaaaactacgcagaggcaaaggacgtattcctcggaatgttcctgtatgagtacgcccgaaggcatccagactactcggtagtcctgttgctgcggctggcgaaaacttatgagaccaccctggagaagtgctgtgccgcagcagaccctcacgaatgctacgccaaggtttttgacgagttcaagcccctggtcgaagaacctcagaatctcatcaagcaaaactgtgagttgttcgagcagctgggtgaatacaaatttcagaacgctctcctagtaaggtatacaaagaaggttccccaggtatccacgccgaccctcgtggaggttagtcgcaatcttggcaaagtaggatctaagtgttgcaagcaccccgaggcaaagcgcatgccttgtgccgaagactatctgagcgtggtgctgaatcaactgtgcgtgctgcacgaaaagacgcccgtgtccgatagggtgaccaaatgctgtactgaaagcctggtgaatcggcgcccctgctttagtgcgctggaagtcgacgagacctatgtgccgaaagagttcaatgcagagacttttactttccatgcggacatttgcactctcagcgagaaggaacgacaaatcaaaaagcagactgccctggtagagctggtgaaacataaaccaaaggcaacaaaggagcagttaaaagccgttatggacgatttcgctgcatttgtggagaagtgctgcaaggcagacgataaagaaacctgctttgccgaagaaggtaaaaaactagtggcagcctcacaagctgccttgggcctg

SEQ ID NO: 9335 - DNA, 2007 bp, Artificial Sequence
  derived and/or modified sequence
atgaagtgggtgagctttattagcctcctgttcttgttctccagtgcttacagtgggtctctagacaaacgtcatggagagggcacattcacaagcgatgtcagcagctacctagaagggcaggctgccaaggagtttatcgcgtggctcgtcaagggtagacatggagagggaacttttacctctgacgtcagttcatatctggagggtcaggcggccaaggagttcatagcatggttagtgaaggggagagacgcgcacaagtctgaagtggcccaccgcttcaaggatctcggagaggaaaattttaaggctctcgtactgatcgcctttgcccagtatcttcagcagtgccccttcgaagatcacgttaagctggtgaacgaggtgactgaatttgccaagacatgcgtggcggatgagtcagcagaaaattgcgacaagtccctgcacacactgttcggggacaaactctgcaccgtcgcaaccctccgtgagacctacggcgaaatggctgattgctgtgctaaacaggaaccagagaggaacgaatgttttctccaacacaaagacgataaccctaacctcccccgccttgtcagacctgaggttgatgtgatgtgcactgcctttcacgataacgaggagacatttttgaaaaaatacctgtacgaaatcgctcgaagacacccttatttctacgcgcctgaactgctgttcttcgcaaaacgatataaagcagccttcacggagtgctgtcaagccgctgacaaggctgcttgtttactacctaagctggatgaactgagagatgagggaaaggcgagctctgccaaacaacggctcaaatgtgcttctctgcaaaaattcggggagcgggccttcaaagcatgggcagtcgctcggctgtcccagagattccctaaggctgagttcgctgaagtgagcaaacttgtcaccgatttgactaaagtgcacaccgagtgctgccacggggatctgctcgaatgcgccgatgacagggccgacctggcgaagtacatctgcgaaaatcaggatagcatttcatccaagttaaaggaatgctgcgagaagccgttactggaaaaaagtcactgtatcgctgaagttgaaaatgacgaaatgcccgccgacctcccctcgctcgcggcggacttcgtagagagtaaagatgtctgtaaaaattacgcagaggccaaagatgtgtttctgggtatgtttctctacgaatatgcccgacgacaccccgattacagtgtggtgctgctactcaggctggctaaaacatacgaaactacactggaaaagtgctgcgccgctgccgacccccatgagtgttatgcaaaagtctttgacgaatttaagcccctggttgaagagccccagaacctgatcaagcagaattgcgaactgtttgagcagttgggggagtacaagttccagaacgctctgctggttcgttacacgaaaaaggttcctcaagtatcaaccccgacactggtggaagtgtcccggaatctggggaaggtagggtctaagtgctgcaaacaccctgaagccaagcggatgccttgtgcagaagattatctgtctgttgtgttaaaccagctttgcgtgctgcacgaaaaaactcctgtctccgatagagtgaccaagtgctgtactgagtccttggtaaatagacgaccctgcttctctgctctggaggtcgacgagacatatgttccgaaggagttcaacgcagagactttcaccttccatgcagacatatgcacgctttctgaaaaggagcgacagataaagaaacaaaccgccctagtggaattagtgaagcacaagcccaaggccaccaaggagcaactgaaggccgtaatggacgatttcgcggctttcgtggagaaatgttgtaaggccgacgataaagagacatgctttgctgaagaaggtaaaaaattggtcgcagctagccaagcggccctgggactt

SEQ ID NO: 9336 - DNA, 2007 bp, Artificial Sequence
  derived and/or modified sequence
atgaagtgggtctccttcatcagtctgctcttcctattttcatctgcatatagtggatctctggataaaaggcatggagagggcacttttacctcggatgtgagctcctatctggaggggcaggcggcaaaggagttcatcgcctggctggtaaagggccgacatggagagggtacttttacaagtgatgttagttcgtacctggagggccaggccgccaaggagttcatcgcctggctcgtcaaaggaagggatgctcataagagcgaggtggcccataggtttaaagacctgggggaagaaaacttcaaggccttggtgctgatcgcttttgcccaatacctgcagcagtgtccctttgaggaccacgtgaagctggtaaacgaggtgacagaattcgcaaaaacgtgcgtcgccgatgagtcagcagaaaattgcgacaagtcactacacaccctgttcggagataagttatgtacagtagccaccttaagagaaacatacggagaaatggcagattgttgcgctaaacaggaaccagaaagaaatgaatgtttcctgcaacacaaggatgacaacccaaatttacccagacttgtacgacccgaagtcgacgtcatgtgtaccgccttccacgacaacgaggagacatttttaaaaaagtacctctacgaaattgctcggaggcatccttacttctacgcgccagagctactattttttgcaaagcgctacaaggcggctttcacggagtgttgccaggctgctgataaggctgcttgtctcctgcccaaactggacgagctgcgggacgagggcaaagcatcaagtgccaaacagagattgaagtgtgcttccttgcagaagtttggggagcgcgcctttaaagcttgggcagtcgcccgtctctcccagcggtttcccaaggccgagttcgcggaggtgtcaaaactcgtcaccgacctaacgaaggttcatacggagtgttgtcacggggacctgctggagtgtgcggacgatcgcgccgacctggccaaatacatatgtgaaaatcaggactccatttccagcaaactcaaggagtgttgtgagaagcccctcctggagaaatcgcactgtattgcggaggtggaaaacgatgaaatgcccgctgatcttccttccttagccgctgatttcgtcgagtccaaggatgtctgtaaaaattacgccgaagctaaggacgtattcctggggatgttcctttacgagtacgccaggagacatcctgactacagcgttgttctactcctgaggctggctaagacctatgaaacaacccttgaaaagtgttgtgctgcggcagatccccacgaatgttatgctaaggtgttcgacgaattcaagcctctggttgaggaacctcagaacttgatcaagcagaattgcgagctcttcgagcagctcggcgaatacaagttccagaacgctttgctggtgcggtacacaaaaaaggtgccccaggtcagtaccccaaccctggtggaagtgtcacgcaacctcggtaaggtggggagcaagtgctgtaaacatcccgaagcaaaacggatgccctgcgctgaagactacttatccgtggtcctgaatcagctgtgtgtcttacatgagaaaaccccagtcagcgatagggtgacgaagtgttgcacagagtcactcgtcaacaggcgtccttgctttagcgcccttgaagtggatgagacatatgtgcctaaagaatttaacgccgagacatttacctttcacgccgacatctgtacgctgagcgagaaggaaaggcagattaaaaagcagaccgcgctggtagagctcgtcaagcacaagcccaaggcaacgaaggaacaactcaaagctgtgatggatgatttcgcggccttcgttgagaaatgctgtaaggccgacgacaaggagacatgtttcgccgaggagggaaaaaagctggtggccgcaagccaggccgcacttggactt

SEQ ID NO: 9337 - DNA, 2007 bp, Artificial Sequence
  derived and/or modified sequence
atgaagtgggtgagcttcatcagtctgcttttcctttttagcagcgcctactctggatctctggacaagaggcacggcgagggcacattcacctcggacgtgagcagctacctggaaggacaggccgccaaggagttcatcgcatggctggttaaaggccgccatggtgaaggtacttttacctccgacgtttcatcgtatctagaaggccaggccgcgaaggaatttatcgcatggctggtgaaaggccgagatgctcacaagagtgaagtggcacaccggttcaaggacttgggagaggagaactttaaggctctcgtcctgatcgcgtttgcacagtacctacagcagtgtccattcgaggaccacgtaaaactggtaaatgaggtcacagagttcgcaaaaacctgcgtcgctgatgaaagcgcagagaactgcgacaagtctctgcatacattatttggtgataaattgtgcactgtcgcaacgctgcgcgagacgtacggcgaaatggctgattgttgtgcaaaacaggagccagaaaggaatgagtgcttcttacagcacaaggatgataatccaaacctgccccgactggtccgccccgaggtggacgtgatgtgcacagcctttcacgacaacgaggaaacgttcctaaaaaaatacctgtacgaaattgcccgacgccatccttacttttatgcccccgagcttctgttcttcgcgaaacgttacaaggccgcttttacggaatgttgtcaggccgcggacaaggctgcgtgcctccttccgaagcttgatgagctccgcgatgaaggtaaggcatcttctgctaagcagcggctgaagtgtgcctccctgcagaagtttggcgagagggccttcaaagcttgggccgtagcacgattgtcgcagagattccctaaggcggagttcgcagaagtgtcaaaactagtcaccgatttgaccaaggttcacacggagtgctgtcacggtgatcttctcgagtgtgccgatgaccgcgccgacctcgccaaatacatctgtgagaatcaggactcaataagctccaagcttaaggaatgctgcgaaaaacctctgctcgaaaagtcgcactgtattgccgaggtagagaatgatgagatgccggcagacctgccttcactcgcagcagatttcgtggagagcaaagatgtgtgcaaaaattacgcagaggctaaagatgtctttcttggaatgttcctatatgaatatgctaggcgccacccagactactcagtggtgctccttcttaggctcgccaaaacgtacgagactaccctggagaaatgctgcgctgccgccgacccccacgagtgctatgcaaaagtgtttgatgaattcaagcccctagtggaggaacctcagaacttgataaaacagaactgcgaactcttcgagcaactgggcgagtataagtttcagaacgcccttttggtacggtacactaaaaaagtcccgcaggtgtccacccctaccttggtcgaggtatctcgcaatctcgggaaggtcggatctaagtgctgtaaacaccccgaggccaagcgcatgccgtgcgcagaagactatctgtctgtggttctgaaccagctgtgtgttctgcatgaaaaaactcccgtaagcgatagagtgacaaagtgctgtaccgaatctctagtaaaccgcagaccctgcttttcggccttggaagtggacgagacgtatgttccgaaagaattcaatgctgaaacattcactttccacgcagatatctgtacactttctgagaaggaacgccagattaagaaacaaacggccttagttgagcttgtcaaacacaagcccaaagcaaccaaagagcagcttaaggccgtgatggatgacttcgccgcctttgttgagaagtgctgtaaagcggacgacaaggaaacctgtttcgcggaagagggcaaaaagctcgtggcagcttcccaggcagcactgggcttg

SEQ ID NO: 9338 - DNA, 2007 bp, Artificial Sequence
  derived and/or modified sequence
atgaagtgggtgtcgtttattagtctgctttttttatttagttcggcctacagtggttcattggataaaaggcacggcgagggcacatttaccagtgacgtgtcgtcctaccttgaaggccaagccgcaaaagagtttatcgcgtggttggtgaaaggccgacacggagaggggacatttacttccgacgtcagttcatacctggagggccaggcagccaaagaattcatcgcatggcttgtaaagggacgcgacgcccacaaatcagaagtggcccaccgatttaaggacctgggagaggaaaatttcaaggccctggtgctcatcgccttcgctcagtacctgcagcaatgtcctttcgaggaccatgtcaaacttgtgaatgaggtaacggaattcgccaagacttgcgtggccgacgagtcagctgagaactgcgacaagagtctacataccttgtttggggacaaactctgtaccgtcgcaacgctgcgggagacatacggagaaatggctgactgttgtgctaagcaggaacccgagcgaaacgagtgttttctgcagcataaggacgacaaccccaatctcccacgtctggtgaggccagaagttgatgtaatgtgcacggcatttcacgataatgaggaaacgttcctgaaaaagtacttgtatgaaatcgccaggcgccacccttacttctatgctccggagctgctgttttttgctaagaggtacaaggctgccttcaccgagtgttgccaggcagccgacaaggccgcctgcctgctacccaaactcgatgaactcagggatgagggcaaagcctcgtctgcaaaacaacgcctcaaatgcgcctctctgcagaagttcggcgagagagccttcaaggcctgggccgtggctaggttatcccagcgatttcctaaggccgagtttgctgaagtttccaagcttgtgactgacctgacaaaggtgcacaccgagtgctgtcatggcgaccttctggaatgtgcggatgacagggcagacctggcaaaatacatctgtgagaaccaggattctatctcatccaaactgaaagagtgctgcgagaaacccctattggagaagagccattgcatcgctgaggtagaaaatgatgagatgcccgccgatcttcccagcctggctgcggacttcgtcgagtcaaaagacgtctgtaaaaactacgctgaagctaaggacgtgttcctgggaatgtttctctatgaatacgccagacgtcacccagattactccgtcgtgctgctgcttagactggccaagacttacgagacaaccctggagaagtgttgcgccgctgctgatccgcacgagtgctacgcaaaggtcttcgacgagttcaagcccctggtcgaggaaccgcaaaaccttatcaagcagaactgtgagctctttgagcagttgggggagtataaattccagaacgctctgcttgtccgctacacgaagaaagtccctcaggtgtcaacgcccaccttagtagaggtcagtcggaacctgggaaaagtagggtccaagtgctgcaagcaccctgaagctaaacgcatgccatgtgcagaggactatttaagcgtcgtactgaatcagttatgtgtattgcatgagaaaacacctgtctccgacagagttactaaatgttgtacggaatcacttgtgaaccgcagaccatgtttcagcgccctcgaagtggatgagacatatgttccgaaggagtttaacgcagaaaccttcacgttccatgccgacatatgcacactcagcgaaaaggagcggcagatcaagaagcagacagccctagttgagcttgtgaagcacaagcctaaagccaccaaggagcaattgaaagccgtaatggacgactttgccgctttcgtcgaaaagtgctgtaaggcagacgacaaagaaacttgcttcgctgaagaagggaaaaagctggtggcggctagtcaggcagccctaggactc

SEQ ID NO: 9339 - DNA, 2007 bp, Artificial Sequence
  derived and/or modified sequence
atgaaatgggtctcttttatctcactactgtttctgtttagctcggcatacagcggctcccttgacaagcgacacggggagggtacgtttacaagtgacgtgtccagttatctagaaggccaggctgcgaaagaatttatcgcatggttagtaaagggccgccatggggaaggcacatttactagcgatgtaagctcataccttgaaggacaggccgcgaaggaatttatcgcgtggctcgtgaaggggcgggacgctcataaatccgaggtcgcccacagattcaaggatctcggggaagaaaacttcaaagccttggttctgatcgccttcgcccaatatctgcagcagtgccctttcgaggaccatgttaaactggtcaacgaagtgacagagtttgctaaaacctgcgtggctgacgagagcgctgagaactgcgacaagtcgttacatactctgttcggggacaagctttgcaccgtggctaccctaagggagacatacggcgagatggcagattgctgcgccaaacaagaaccagagcggaacgaatgtttcctgcagcacaaagatgacaatccaaatttgcctcgactggtccggccagaggttgatgttatgtgtacagcctttcacgacaacgaagaaacattcctgaagaaatacctatacgagatcgcaaggaggcacccatacttttacgcgcccgaactcctgttctttgctaagaggtacaaggccgcattcacagaatgctgccaggcggctgataaggcagcttgtttgttacctaagctcgacgagctgagggatgaggggaaggctagttccgccaagcagcggttaaaatgtgcctcgctccagaaatttggtgagcgggctttcaaggcttgggccgtggctaggctctctcaacgcttccctaaggccgagtttgcagaggtgagtaagctggtgactgacctcacaaaagttcacacggaatgctgccacggtgatctcctggagtgcgctgatgaccgcgcagatttagctaagtacatctgcgagaatcaggacagcattagctcaaagctgaaggagtgttgcgagaagcctctgttggagaagtctcattgcatcgccgaggtggagaatgacgaaatgcctgctgacctcccgagcctggcagccgacttcgtggagtctaaggacgtttgcaagaactatgcagaggcgaaagacgtgtttctggggatgttcctgtacgaatacgccaggcggcacccggactattcggtcgttctattgttgcggcttgcaaaaacttacgagacaactttagagaagtgctgcgccgctgccgatcctcacgaatgctatgcgaaggtgttcgacgaattcaagcctctagtcgaagagccccagaacttaatcaagcagaattgcgagctgtttgagcaactcggcgagtataagttccagaatgccctactcgttaggtacacaaagaaggtcccccaagtgtcgacccccactctggttgaggtgagccgcaacctagggaaggttggaagcaaatgctgtaagcaccccgaagccaagcgcatgccttgcgcggaagattacctctcagttgtgctgaatcagctctgcgtgctccacgagaaaactcctgtttcagatagagtcaccaaatgttgcacagaatcccttgtcaatcgaaggccgtgtttcagtgctttggaggtggatgagacctatgtgccgaaagagtttaacgcagaaactttcacatttcacgccgacatttgcaccttatctgagaaggagcgtcaaatcaagaagcagactgcattggtggaactggtgaaacacaaacccaaggctacaaaagagcagctgaaggctgtcatggacgattttgctgcattcgtcgaaaaatgttgtaaggctgatgataaagagacctgcttcgctgaggaaggaaagaagctggtggctgccagtcaggccgcgctgggcttg

SEQ ID NO: 9340 - DNA, 2007 bp, Artificial Sequence
  derived and/or modified sequence
atgaagtgggtttcctttatatcactactctttctcttcagtagtgcatactctggctccctcgacaaacgacacggcgagggtacttttacttcagacgtgtcttcctacctggagggacaggccgcgaaggaatttattgcatggctggtgaaaggccgacacggagaaggcaccttcacgtccgatgtcagcagctacctagagggccaggcggcgaaggagtttatcgcctggctggtcaaagggcgggatgcccacaaatcggaggtagcgcatcgatttaaggacctgggtgaggagaatttcaaggctctcgtactcattgcgttcgcacaataccttcagcagtgccccttcgaggatcacgtcaaattagtcaacgaggtgaccgagtttgccaaaacatgcgttgcggatgaatcagcagaaaactgtgataagtcactgcatacattgttcggagataaactgtgtacagtcgccacgctcagggaaacttacggagagatggcggactgttgcgccaagcaagagcccgagcggaatgaatgtttcctgcagcacaaggacgacaatccgaatttaccacgcttggtgagaccagaggttgacgtgatgtgtacggcttttcacgataatgaggagacgttcttaaagaaatacctgtatgaaatagcaaggaggcatccatacttctacgccccggagttgcttttcttcgcgaagcgatataaggccgcttttacggagtgttgccaggccgccgacaaggccgcctgtctcttgccaaaactggacgagttgcgcgacgagggaaaagcaagtagtgccaaacagcgcttgaagtgtgcatccctgcaaaagtttggagaaagggccttcaaagcctgggccgtcgctaggttaagccagcgcttccctaaagccgagtttgccgaggtgtctaaactggtgaccgatctaactaaggtgcacactgagtgctgccatggcgatctcttggaatgtgctgatgatagagcagatctcgctaaatatatctgtgagaatcaagattccatttcctctaaactcaaagaatgttgcgaaaaaccactattagagaagagccactgtatagctgaggtggagaatgacgagatgccagccgatctcccatctctggctgcagacttcgtagaatcaaaagatgtgtgtaagaattacgctgaggccaaagatgtattcctgggcatgtttctgtatgaatacgcccggaggcaccccgattacagtgtggtactgctactaaggttagccaagacatatgaaacgaccctggagaaatgctgtgctgcagcagacccacacgagtgctatgctaaggtatttgacgaattcaaacctctggtggaagaaccgcagaacctgatcaaacaaaactgcgaactatttgaacagcttggtgagtacaagtttcagaatgctctgctagtgcggtacacgaaaaaagtgcctcaggtgagtacacccaccctggtggaagtgtcccgcaacctcggtaaggtggggtctaagtgttgtaaacatcccgaggcaaaacgtatgccgtgcgcggaagattacctgtcagtagttctcaatcagctgtgcgtgctgcatgagaagacaccagtgagcgacagggtgacgaaatgctgcaccgaatccctcgtgaatagaagaccctgtttctccgccctcgaagtagacgagacatacgtgccaaaagagttcaatgccgagacttttacttttcatgccgatatttgtacattgagcgaaaaggagaggcaaataaagaaacaaactgccctggtggagctggtcaaacataaacctaaggccaccaaagagcagctgaaagccgtaatggatgactttgctgcttttgtggaaaaatgctgcaaggctgacgacaaggaaacctgttttgcagaggagggcaagaagcttgtcgctgcttcccaagctgccttgggtctg

SEQ ID NO: 9341 - DNA, 2007 bp, Artificial Sequence
  derived and/or modified sequence
atgaagtgggtgtcattcatttccctcttgtttctcttttcaagcgcctattcgggatcacttgataagagacacggagagggaacgtttacgtcggatgtgtcctcatacctggaaggacaagctgccaaggaattcatcgcctggcttgttaagggacgacatggtgaagggacctttacttcggacgtgtcaagctacctggaaggccaggcagcgaaggagttcattgcctggcttgtgaagggcagggatgcacataagtcagaagtcgcccatcgctttaaagaccttggcgaagaaaacttcaaggccctggtcctgatcgcatttgcacagtacctccagcaatgtccatttgaagatcatgtgaaacttgtgaatgaggttaccgaatttgcgaaaacttgtgtcgcagacgagagcgcagagaactgtgataagtcacttcatactctgttcggagataaactttgtaccgtggcaaccctgcgcgaaacttacggtgaaatggctgattgttgcgcaaaacaagagccagagaggaacgaatgttttctgcagcataaggacgataatcctaacctgccacgtctcgtccgtccagaagtggatgtgatgtgtaccgcctttcacgacaatgaagaaacctttcttaagaagtacctgtatgaaatcgcccggcggcacccatacttctacgcaccggaactgctcttttttgccaaaagatacaaggccgcgttcactgagtgttgtcaagcggccgataaggcagcatgcctgctgcctaaactggacgaactgagagatgagggaaaagcctcatccgcaaaacaaagactgaagtgcgcatccctgcagaagttcggagaacgtgcatttaaggcatgggcagtggctcgcctttcccaacgcttccccaaggcagagtttgcagaagttagcaagctcgtgaccgatctcaccaaagtgcacactgagtgctgtcatggcgacctgctcgaatgtgcagacgaccgagcagatcttgcaaaatacatatgcgaaaaccaggactcgatttcctcgaagctcaaagagtgctgtgagaagccccttctggagaaatcgcattgtatcgcggaggtcgaaaatgacgaaatgcctgccgacctgccaagcctcgcggcagactttgtcgagtcgaaggatgtgtgtaagaattacgctgaagcaaaggacgtgttccttggcatgtttctttacgagtacgctaggaggcacccagattactcagtggtacttctgctccgcttggcaaaaacctacgagactaccctggagaagtgttgtgcggcagctgacccacacgaatgctacgccaaagtgtttgatgaattcaaaccactcgtcgaggagcctcaaaacctcattaagcaaaactgcgagctgtttgaacagctgggagaatacaagttccaaaacgccctgctggtgcgctacactaagaaagtgcctcaagtctccactcccactctcgtggaggtgtctcggaacctggggaaagtggggagcaagtgctgtaagcatccagaagcaaaaaggatgccctgtgccgaggattacctgtctgtcgtcctgaaccagctctgcgtgcttcatgaaaaaacgccagtctccgacagggtgaccaagtgttgtaccgaatcgctcgtgaatcgtaggccatgtttctcggccctggaagtggatgagacttacgtgcctaaggaattcaacgccgagacttttactttccacgccgatatatgtaccctctcagagaaggaaaggcagattaagaaacaaactgccctggtcgagctggtcaagcataagccaaaggcaaccaaagagcaacttaaggcagtgatggacgatttcgcggcatttgtggagaaatgttgcaaagccgatgacaaggaaacctgcttcgcagaagaggggaagaagctggtcgcagcctcgcaagcggcgctggggctt

SEQ ID NO: 9342 - DNA, 2007 bp, Artificial Sequence
  derived and/or modified sequence
atgaagtgggtttcgttcatttcgcttttgtttctgtttagcagcgcatactcaggttcattggataagcggcacggcgaaggtacgttcacctcagatgtctcctcctaccttgagggacaggcagccaaagaattcatcgcatggcttgtcaaaggtcggcacggagaaggtactttcacgtcggatgtcagctcgtaccttgagggccaagcagcaaaggaattcatcgcctggctcgtgaagggcagagatgcacacaagtctgaagtcgcccatcgattcaaagacctgggagaggagaatttcaaggcactggtccttatagcatttgctcaataccttcagcagtgtccatttgaggaccatgtcaaattggtcaacgaggtgactgagttcgcgaaaacttgcgtggctgatgaaagcgcggaaaactgcgataaaagcctgcatactctgtttggggataagctgtgcaccgtggcaactctccgtgagacttacggggaaatggcagactgttgtgccaagcaggagcctgaaaggaatgagtgctttctccagcataaggatgacaaccctaacctgccgcggcttgtgaggccggaggtggatgtcatgtgcaccgcgttccatgataacgaagagacgttcctgaagaagtacctctacgagatcgcccgtcggcatccttacttttatgctccagaattgctgttttttgctaaaaggtataaagccgcgtttacggaatgttgtcaagccgcagataaagccgcttgcctccttccgaaactggatgaacttcgggatgagggaaaggcaagttcggccaagcaaagactgaaatgcgcatccctgcaaaagtttggagagagagcctttaaggcgtgggcagtggccagactgtcccaacgttttcctaaagcagaattcgcagaggtcagcaagctggtgaccgacctgactaaggtgcataccgagtgttgtcacggagatctgcttgagtgtgccgatgacagagccgatctggcaaagtacatttgtgaaaaccaagattctattagctcaaaacttaaggagtgttgtgaaaaacccctgctcgagaagtcacattgtatcgccgaagtggaaaacgatgagatgccagcagatctcccctcgcttgcagcagacttcgtggagtctaaagatgtttgcaaaaactacgcggaagcaaaggacgtctttctgggtatgttcttgtacgaatacgcgagacgccacccggactactccgtcgttctcctcttgagactggcaaagacctacgagactacccttgaaaaatgttgtgcagcggcggacccccacgaatgttacgcgaaggtgtttgacgaattcaagcctctggtggaggagcctcagaatctcattaagcaaaattgcgagctgtttgaacaactgggcgagtataagtttcaaaacgcgctgttggtgaggtacactaagaaggtgccgcaagtctccacccccacgctcgtggaagtgtccagaaacctcggcaaggtgggatcgaagtgctgcaagcatcccgaagcaaagcggatgccgtgtgcagaggactacctctctgtggtgcttaatcagctgtgcgtgctgcacgaaaagactcctgtgagcgacagggtcaccaagtgttgtaccgaaagcctcgtcaatagacgtccgtgcttttctgccctggaagtggatgaaacctacgtgcccaaggagtttaacgcagaaacttttacttttcatgcagatatttgtacgctgagcgaaaaggaacgccagattaagaagcaaactgctcttgtggagctggtaaagcataaacctaaggcaaccaaggaacagcttaaggcagtgatggatgatttcgcagcattcgtcgaaaagtgctgtaaagcggacgacaaggaaacctgttttgccgaggaagggaaaaaacttgtggcggcatcgcaggcagcccttggtctg

SEQ ID NO: 9343 - DNA, 2007 bp, Artificial Sequence
  derived and/or modified sequence
atgaagtgggtaagtttcatctcactgctcttcttgttcagttccgcttattcaggatctctggataagcgccacggtgagggcaccttcactagcgacgtcagcagctatctggagggtcaagctgctaaagagtttattgcctggctggtgaaaggcaggcatggagaaggaactttcacatctgatgtgtcatcatatcttgaaggtcaggcagccaaggaatttattgcatggctggtgaagggacgcgacgcgcataaatccgaagtcgctcaccgcttcaaggatcttggagaggagaacttcaaggccctggtccttatcgccttcgcgcagtacctccaacaatgcccctttgaggaccacgtcaaactcgtcaacgaggtaactgaatttgccaagacttgtgttgccgatgaatctgccgagaactgcgataaatctctgcacaccctgtttggagataaactctgtacagtagcaactcttcgcgagacatacggcgagatggctgactgttgtgccaagcaggaacccgaaaggaatgagtgcttccttcagcataaggatgataacccaaacctgcctagattggtccgccctgaggtggacgtaatgtgtaccgctttccacgataatgaagaaacattcctgaaaaagtatctgtacgagatcgctagaaggcacccatacttctatgctccagaactgctgttttttgcaaagagatataaagctgccttcacagagtgctgccaagccgctgacaaggctgcctgcttgctgcctaaactcgacgagctgagagatgaaggaaaagcttctagcgctaagcaacgccttaagtgcgcttcacttcagaaattcggcgagagagccttcaaggcgtgggctgtggcaaggctttcacagcgcttccccaaggcggagttcgctgaggtaagtaagctggtgacggatcttactaaggtacatacagagtgttgccacggagatctgctggaatgtgctgacgatagggctgacctggccaagtacatctgtgagaaccaggactccatctcctccaagttgaaggaatgctgtgaaaagcctctgctcgagaagagccattgtatcgctgaagtggagaacgatgaaatgccggctgacctcccttcactcgctgccgactttgttgagagtaaagacgtgtgtaagaattacgcggaagccaaagatgtgtttctgggaatgttcctttatgaatacgccagaaggcacccggattatagtgtggtgcttttgcttagactggctaagacctacgagactaccttggagaagtgctgcgctgctgccgacccacatgagtgctacgcgaaagttttcgacgaattcaaaccccttgtcgaagagcctcaaaatctcatcaagcagaactgcgaattgtttgagcaacttggagaatataagttccaaaacgcactgctcgttaggtatacaaagaaggttcctcaggtgtcaacacccactttggtcgaggtaagcaggaatctgggtaaagttggttctaagtgctgtaaacacccagaggcgaaacgcatgccctgcgctgaagattacctctcagtagtgctcaatcagctctgtgtgctccacgagaagacccccgtgtccgacagggtcacaaagtgttgcaccgagagtctggtgaatcgccgcccttgcttcagcgctttggaggtggatgaaacctacgtccccaaagagttcaatgccgaaacctttacatttcacgcagatatatgtaccttgagtgaaaaagagaggcaaatcaagaagcagactgctttggtggagctggtgaaacataaacctaaggccaccaaggaacaactgaaggcagttatggacgactttgcagccttcgtcgagaaatgctgtaaagctgatgataaggagacttgttttgccgaagagggaaagaagctggttgccgcttcccaggctgccttgggtctg

SEQ ID NO: 9344 - DNA, 2007 bp, Artificial Sequence
  derived and/or modified sequence
atgaagtgggtgtcattcatctcactgctcttcctcttttcgagcgcctactcaggatctctcgacaaacggcacggagagggcactttcacgtcggatgtgtccagctacttggagggccaagccgccaaggaattcatcgcttggctggtgaagggtagacacggcgagggtactttcacctccgacgtgtcgtcatacctcgagggacaagcggctaaggagttcatcgcctggttggtcaagggacgggatgcccacaaatccgaagtggcacatcgcttcaaggaccttggagaggaaaacttcaaggctctggtcctcatcgcgttcgcccagtacttgcagcaatgcccattcgaggaccatgtgaagctggtcaacgaggtgaccgagtttgccaaaacttgcgtggccgacgagtcagccgaaaattgcgataaatctttgcatacgctctttggagataagctctgcactgtggcaactttgagagaaacctacggtgaaatggccgattgttgtgccaaacaggagccagagcggaacgagtgtttcctccagcacaaggatgataacccgaacctgccgcgcttggtcagaccggaggtcgatgtcatgtgcaccgctttccacgataacgaggaaactttcctcaagaaatacctgtacgagatcgcccgccggcacccttacttctacgctccagagctgctgttctttgcaaagcgctacaaggcagctttcactgaatgctgccaagcagctgacaaggcagcctgcttgctgccgaagctggatgagcttcgcgacgagggcaaagcatcctcagccaagcagcggctgaaatgcgcctcactgcagaagttcggtgaacgggcatttaaggcttgggccgttgcgaggctcagccagcgctttccgaaagcggaattcgccgaagtctcgaagctcgtcaccgacctgactaaagtgcacaccgaatgctgtcacggcgatctgctcgaatgcgccgacgacagagctgacctggcgaaatacatctgcgagaaccaagattcgatttcgagcaaactgaaagaatgttgcgagaagccactgctcgagaagtcgcactgtatcgctgaggtggagaatgacgaaatgcctgccgatttgccatccctggcagccgactttgtggaatctaaggacgtgtgcaaaaactacgcggaggccaaggacgtgtttctcggaatgttcctgtacgaatatgcacgccgacacccggattactcggtggtcctgcttcttcgcctggctaagacgtatgaaacgactctggaaaagtgctgcgcggctgcggacccgcatgaatgctacgcgaaggtgttcgatgaattcaaaccgctcgtggaagagccgcaaaatctgataaagcagaactgtgagctgttcgagcagctgggcgaatacaagtttcagaatgcgctgcttgtcagatacactaagaaagtgccgcaggtgtctaccccgactctggttgaagtgagccgtaatctgggaaaggtgggatccaagtgctgtaaacatccggaggcgaagcgcatgccttgtgcggaagattacctctcggtggtgctgaaccagttgtgcgtgctgcatgaaaagacccctgtgtcggaccgcgtcaccaagtgctgcaccgaatcgctcgtgaatcggcgcccctgcttctcagcactggaagtcgatgaaacctacgtcccgaaggaattcaacgccgagactttcaccttccacgcagacatttgtaccttgtcggagaaggaacggcagatcaagaagcaaactgcactggtcgagcttgtgaagcacaagccaaaagccactaaagaacagctcaaggcggtgatggacgactttgcagccttcgtggagaaatgctgcaaagccgacgacaaagaaacttgtttcgcagaggaagggaaaaagttggtggcggcgtcccaagccgccttgggactg

SEQ ID NO: 9345 - DNA, 2007 bp, Artificial Sequence
  derived and/or modified sequence
atgaaatgggtttcgtttataagcttattatttttattcagtagcgcctattccggttctttagataagcgccacggcgaaggtacttttacctcagacgtttcctcatatctcgaaggacaggctgcaaaggagtttattgcatggctggtgaaggggcgacacggagaaggaacatttacatctgatgtttcttcttatctggagggacaagctgcaaaagagttcattgcctggcttgtcaaaggacgtgacgcacataaatcagaagttgcgcatagattcaaggatttgggcgaagagaactttaaggctttagttctgattgcttttgcgcaatatttgcaacagtgcccgtttgaagatcatgtcaaattggttaatgaggttacagaatttgcgaaaacctgcgttgccgatgaaagtgccgaaaactgcgacaaatctctgcatacgttattcggagacaaactgtgcactgttgctaccttaagagaaacatatggggaaatggcggattgttgtgcaaagcaggaacctgaaaggaacgagtgtttccttcaacataaggacgataatccaaatttaccgcgcctagtacgacctgaagtagatgttatgtgtacagcattccacgataatgaagaaacatttctgaaaaaatatctgtacgaaatcgcacggcgccacccatatttttatgctcctgaactcctttttttcgccaaacggtacaaagcagcatttaccgaatgctgtcaagcagcagataaagctgcgtgcctactgccgaaactggatgagttaagagatgaaggtaaggcatcctccgcaaaacaacgtttaaaatgtgcgtctttgcagaaatttggcgaacgtgcatttaaagcttgggctgttgcccgtttgtcccaacgatttccgaaagccgagtttgctgaagtctcgaaattggttactgacttaactaaagttcatacagaatgctgccatggggatctgctggagtgtgcagatgatagagcggacctggctaaatatatttgtgagaatcaggactctatctcaagcaaattgaaagaatgttgcgaaaaacccctgctggaaaaatcccattgcatagcagaagtagaaaacgatgaaatgccagcggacttaccgagtctagcggcggattttgtggaaagtaaggatgtctgcaagaattatgcggaggccaaagatgtctttttaggaatgtttttgtatgagtatgcgagaagacatccggattactctgtggtattacttctccgcctcgcgaaaacatatgaaactacactcgagaaatgctgcgcagcggcagacccgcatgaatgttacgcgaaggtctttgatgaattcaaaccccttgttgaagaaccgcaaaatcttatcaaacaaaactgcgagttgtttgaacaattgggggagtataagtttcaaaatgcactccttgttcggtatactaaaaaagtgcctcaagtatcgacgccgacacttgtcgaggttagtcgtaatctcgggaaagttgggagtaaatgctgtaaacatcctgaagcaaaacgaatgccgtgtgcggaagactatctgagtgtcgtgcttaatcagctctgcgtacttcacgagaagacgcctgtctctgatcgcgttactaagtgttgcaccgaatcccttgtcaatcggagaccgtgcttcagcgcacttgaagtagatgaaacatacgtgccgaaggagttcaatgcggagacatttacattccatgccgatatctgcacattgtcagaaaaagaaagacaaatcaagaaacaaacagccttagtagaactggtaaaacataaacccaaagctacaaaggaacagctgaaggccgttatggatgatttcgctgcattcgtcgaaaaatgctgcaaagcagacgataaagaaacgtgttttgccgaagagggaaaaaaattggtagcagcgagccaagccgcacttggactt

SEQ ID NO: 9346 - DNA, 2007 bp, Artificial Sequence
  derived and/or modified sequence
atgaagtgggtgtcctttatctccttgctgtttctgttctcatccgcctactcaggatcgcttgataagagacatggtgagggaacttttactagtgacgtttcatcctacctcgaaggccaggcagcaaaggagttcatagcgtggcttgtcaaggggaggcatggtgaaggtacttttactagcgacgtgtcgagctacttggagggccaagcagcaaaagaattcatcgcctggctggtgaaaggtcgagatgcacacaaaagcgaagtcgcacaccgtttcaaagatcttggagaggaaaacttcaaggcgcttgtgcttattgcttttgcacagtaccttcaacaatgccctttcgaggatcatgtgaagttggtgaatgaggtgaccgagtttgcaaaaacttgtgtcgctgacgagtcggcagaaaactgcgacaagtcacttcacacgctgtttggcgacaaactgtgtactgtggcgaccctcagggaaacttacggcgaaatggcagattgttgtgcaaagcaggagcctgaacgaaatgaatgctttttgcaacataaggacgacaacccgaacctgccaagacttgtacgtccagaagtcgacgtcatgtgtaccgcgttccatgataacgaagaaacttttcttaagaagtacttgtacgaaatagcgcggcgccatccctatttctacgcacctgaacttctgtttttcgcgaagaggtacaaagcagcgttcactgaatgttgccaagctgcagataaggccgcttgtctgctgcccaagctggacgaactgcgggacgaaggtaaggcaagctccgcaaaacaaagacttaagtgtgcctcgctccagaagtttggggagagagcatttaaggcctgggccgtcgcacgtctctcacagcgatttcctaaagccgaattcgccgaagtgtcaaaacttgttactgatcttactaaagtacacaccgaatgctgccatggcgatctcctggagtgtgcagatgatcgcgccgatctggcaaagtacatttgtgaaaatcaagactccatctcctcgaagttgaaagaatgctgcgagaaaccgctgctcgaaaagtcacattgtatagccgaagtcgaaaacgatgaaatgcctgcggatctcccttcacttgccgcagactttgtggaaagcaaggatgtctgtaagaactacgcagaagcaaaggacgtctttctgggaatgttcttgtatgaatatgccagacgacatcccgattacagtgtggtgcttctgctgcgcctggcaaagacttatgaaactacccttgaaaagtgttgtgctgccgcagacccccacgagtgttacgccaaggtctttgatgagtttaagcctctggtcgaggaaccacagaacctgattaagcagaactgcgaacttttcgaacaactgggagagtacaagtttcagaatgcactgttggtgagatacaccaaaaaggtgccgcaagtgagcactcctacccttgtggaggtcagccgcaatctgggtaaggtgggaagcaaatgttgtaaacatccagaagcaaagaggatgccttgcgccgaagattatctttcggtggtgttgaaccaactttgtgtgctccacgagaaaactcctgtgagcgatcgggttaccaaatgctgtaccgaatcgcttgtcaatcggcgaccatgcttttcggcgctggaagtggatgagacttacgtcccaaaagagtttaacgcagaaacctttactttccacgcagatatttgcacgctttccgagaaggaacgccagataaagaagcagactgcactggtggagctggtgaagcataagccaaaagccaccaaggaacaactgaaggcagtcatggacgactttgcagcctttgtcgagaaatgttgcaaggccgatgacaaagaaacctgtttcgccgaagagggaaaaaagctcgtggcagcttcacaggcagcgctgggcctg

SEQ ID NO: 9347 - DNA, 2007 bp, Artificial Sequence
  derived and/or modified sequence
atgaagtgggtgtcttttatatcccttctgtttctattttccagtgcctattccggctccctcgataaacggcacggggaaggaactttcactagcgatgtgtcttcttatctggaaggccaggcggctaaggaatttatagcttggctggtcaagggaaggcacggcgagggaactttcaccagcgacgtgagttcttatcttgaaggccaggcagctaaggaatttatcgcctggcttgttaagggccgggacgctcacaaatccgaggtggctcatcgctttaaggacttgggagaggagaactttaaagccctagtgctaattgctttcgctcagtatctccaacagtgtccctttgaggatcacgttaagctggtcaatgaagtgacagaatttgcaaagacgtgtgtcgcggatgaaagtgccgagaactgtgataagagtctgcataccctattcggagacaaactgtgcactgtcgccaccctacgtgaaacctatggcgaaatggcggactgctgtgctaagcaggaaccagaaagaaacgagtgttttctgcagcacaaggatgacaatcctaatctgccaaggttggtgcggcccgaagttgatgtgatgtgcactgcctttcacgataacgaggagaccttcttaaaaaagtatttatacgagatcgcccgccgtcacccatatttttacgcccctgaactgctgttcttcgcgaagcggtataaggccgcattcacagagtgctgccaggccgccgacaaagctgcctgccttcttccgaaacttgacgagcttcgggatgagggcaaggcatcatctgcaaaacagaggctcaaatgcgcaagtctgcagaaatttggcgaaagggcattcaaggcatgggccgtggcccgactctcccagagattccctaaagcggaatttgccgaggtgtctaaactcgtcacggacctgacaaaagtgcataccgaatgttgtcatggcgatctgctcgaatgtgcagacgaccgcgctgacctggccaaatacatctgcgaaaaccaagactctatctcaagcaagctgaaagaatgttgcgagaaacccctgcttgagaaatcacattgtatagccgaggtggagaatgatgaaatgccagcagacctcccgtcactggctgcagacttcgtggaatccaaagatgtgtgcaaaaactatgctgaggctaaggatgtgttccttggtatgttcctctatgagtacgcgcgcagacatcccgactactctgttgttctattgctgcggctcgccaagacatacgaaacaactttagaaaagtgctgtgccgcggcggaccctcacgagtgctatgccaaggtcttcgatgagttcaaacccctggttgaagaaccgcagaatctgatcaagcagaattgtgaactgttcgagcagctcggggagtacaaattccaaaacgccctgctggtgcggtacacaaagaaagttccacaggtctctacccccactctcgtcgaagtatcaaggaacttgggtaaggtggggtcaaagtgttgtaaacatccagaagctaagcgaatgccttgtgcggaggattacctaagtgtcgtactgaatcagttatgtgtccttcatgagaagactcccgtatcagatcgggtaacaaaatgctgtaccgagtctttggtcaaccggcgaccatgcttcagcgccctagaagtggacgagacatacgtcccaaaagaatttaacgccgagaccttcaccttccatgctgacatatgtaccctctctgagaaggagcggcagatcaagaagcagacagccctggtggaactggtgaagcacaagccaaaagccacaaaggaacagttaaaggccgtgatggatgactttgcagccttcgtggagaaatgctgcaaggccgatgacaaagaaacatgttttgccgaggagggaaagaaattggtggctgcgagccaggcagccctaggactc

SEQ ID NO: 9348 - DNA, 2007 bp, Artificial Sequence
  derived and/or modified sequence
atgaaatgggtgtctttcatctcactgctatttctgtttagtagcgcctacagtgggtcactagacaagagacacggagagggcactttcaccagcgacgtatcaagttatctcgaagggcaggcagcgaaggagttcatagcctggcttgtgaagggcagacatggagagggcacgtttacatctgatgtatccagctatcttgagggccaggctgcaaaagagtttattgcttggctggtgaagggccgggacgcccacaagagtgaggttgcacatagattcaaagacctgggggaagagaacttcaaagccttagtcctcattgccttcgcacagtatctgcagcagtgcccctttgaggaccacgtgaagttagtgaacgaggtcaccgagtttgccaaaacttgtgtagccgatgagagtgcagagaactgcgataaaagcctgcacaccctgttcggagacaagttgtgcacggtggcaactttgcgggagacttatggcgaaatggccgactgctgcgccaagcaggaacccgaaaggaacgagtgctttctccagcataaagacgataatcccaacctgccacgtctggtcaggcccgaggtagatgtgatgtgcaccgcgttccacgacaacgaggagacgtttctcaaaaaatatttgtacgagatcgcaagacgacacccgtatttttacgctccagagcttctcttcttcgccaaaaggtataaagcagccttcacggagtgctgtcaggctgcagacaaggctgcatgtcttctgcccaagttggatgagctgagagatgaggggaaggcatcgtcagccaagcagagactgaaatgtgcaagtctacaaaaatttggagaaagagcattcaaggcatgggcagttgctcgactgtcacagcgatttccaaaggctgaatttgccgaggtcagtaagctggtgaccgatctgactaaagttcataccgagtgttgtcatggggatctgctggaatgcgccgatgatcgagccgacctagcaaaatatatctgtgagaatcaagactccatctcttctaaattgaaggaatgctgcgaaaaacccttactggaaaagtctcactgcatagccgaggtagagaatgacgaaatgccagccgacctcccttcccttgctgccgacttcgtggagtctaaggatgtgtgcaagaattacgccgaagccaaagacgttttcctaggaatgtttttatacgaatacgctcggcgacaccccgactatagcgtcgtcctgctgctgcggctggcaaaaacttacgaaaccacactcgaaaagtgttgtgccgcagccgatccccacgaatgctatgctaaggtcttcgatgagtttaagcccctcgttgaagaacctcagaatctgatcaaacagaactgcgaactgttcgagcagttaggcgagtacaagtttcagaatgcactcctggtgcgatacaccaagaaggtaccccaggtgagcactccaactctcgtcgaagtcagccggaacctaggcaaagtcggcagcaagtgctgtaaacaccctgaagcaaaaagaatgccgtgcgccgaagactacttgagtgtagtcctaaaccagttatgtgtcctgcacgagaagacgccagttagtgaccgcgtgaccaaatgttgcactgagtcactggtcaaccgaaggccctgcttttccgcacttgaggtggatgaaacttacgtacccaaggaattcaatgctgaaacgtttacttttcacgccgatatctgtacactctcagaaaaagaacgacagattaagaagcagactgcgttggtcgaactggtcaaacacaagcccaaagctaccaaggagcagttgaaggccgttatggatgactttgcagcattcgtggagaagtgttgcaaagcagacgataaggaaacttgtttcgcagaggagggaaagaagctggtcgctgcctctcaagctgcactgggtctc

SEQ ID NO: 9349 - DNA, 2007 bp, Artificial Sequence
  derived and/or modified sequence
atgaaatgggtttcttttatttcattattattcttattttcatcagcttattcaggatctttagacaagagacatggagaaggtacatttacatcagatgttagtagttatcttgaaggacaagctgcaaaagaattcattgcttggttagtcaaaggaagacatggagaaggtacatttacaagtgatgtttcatcttatttggaaggacaagctgctaaagaatttattgcttggcttgtaaaaggtagagatgcacataagtcagaagttgcacacagatttaaggatttaggagaggaaaatttcaaagcattagtacttatagcttttgcacaatatcttcaacaatgtccatttgaagatcatgttaaattagtaaatgaagttacagaatttgcaaaaacatgtgttgcagatgaaagtgcagaaaattgtgataaaagtttacatacacttttcggagataagttatgtacagttgctaccttaagagaaacttatggagaaatggcagattgttgtgctaaacaagaacctgaaagaaatgaatgttttttacaacataaagatgataatccaaatttaccacgtttagtaagaccagaagttgatgttatgtgtactgcttttcatgataatgaagaaacttttcttaaaaagtatttatatgaaattgctagaagacatccatatttctatgcaccagaattattattttttgctaaacgatataaagctgctttcactgaatgctgtcaagcagctgataaagcagcttgtcttttgccaaaacttgatgaacttagagatgaaggtaaagcatcttctgctaaacaaagacttaaatgtgcatcattacaaaaatttggagaaagagcatttaaagcatgggctgttgcaagactttcacaaagatttccaaaggcagaattcgcagaagtttcaaagttagttactgatttaaccaaggttcatactgaatgttgccatggagatttattagagtgtgccgatgacagagctgatcttgcaaagtatatttgtgaaaatcaagattcaatctcttctaaattgaaggaatgttgtgaaaaaccacttttagaaaaatcacattgtatagctgaagtagaaaatgatgaaatgcctgcagatttaccatcactcgctgcagacttcgtagaatctaaagatgtttgtaagaattatgcagaagcaaaagatgtatttcttggaatgttcctttatgaatatgcaagaagacatcctgactacagtgttgttttattattacgacttgcaaagacatatgagacaactcttgaaaaatgttgtgcagctgcagatccacatgaatgttatgccaaggtttttgatgaatttaagccacttgttgaagaaccacaaaatttaattaaacaaaattgtgaattattcgaacaattaggagaatataaatttcaaaatgctcttttagtaagatatactaaaaaagtaccacaagtttcaacaccaacattggttgaagtttctagaaatcttggaaaagtaggatcaaaatgttgtaaacatccagaggctaagcgaatgccatgtgcagaagattatttatctgttgttttaaatcagttgtgtgttcttcatgagaaaacacctgtttctgatagagttacaaagtgttgtacagaatcattagttaatagacgaccatgcttctcagcactagaagttgacgaaacttatgttccaaaagaatttaatgcagagacatttacatttcatgctgacatttgtacactttccgaaaaagaacgacaaattaaaaagcaaacagctttagtagaacttgttaaacataaacctaaagctactaaggaacaattgaaagctgttatggatgattttgctgctttcgttgagaaatgttgtaaagctgacgataaagaaacatgttttgcagaagaaggaaaaaagttagtagcagcatcacaagcagcattaggttta

SEQ ID NO: 9350 - DNA, 2007 bp, Artificial Sequence
  derived and/or modified sequence
atgaagtgggtgtccttcatctccctcctgttcctcttctcgtcagcgtactccggatcgctggacaaacgccatggagaaggaaccttcacctccgacgtgtcctcgtacctggaagggcaggccgccaaagaattcatcgcatggctcgtgaaggggcgccatggagagggtacttttactagcgacgtcagctcttacctcgaggggcaggcggcgaaggagttcatcgcctggctggtgaaggggcgggatgcacacaagagcgaagtggcccaccgctttaaggatctgggtgaggaaaacttcaaagccctcgtccttatcgcctttgcacagtacctgcaacagtgtccgttcgaggaccacgtgaagctggtgaacgaagtgacggagtttgcaaagacttgcgtggccgacgagtctgcagaaaattgcgacaagtcactgcacactctgttcggagacaagctctgcaccgtggcgaccctccgggaaacctacggagagatggctgactgttgtgccaagcaggagccagaacgcaatgagtgcttcctgcagcacaaggatgataatcctaacctgccgcggctggtgcggccggaagtcgacgtgatgtgcactgcatttcacgacaatgaggaaactttcctcaagaaatacttgtacgaaatcgcccgccggcatccttatttctacgcgccggagctgctgttcttcgccaagcggtacaaggccgctttcaccgaatgctgtcaagccgccgacaaggcagcgtgcctgttgcccaagctcgacgaactgcgggacgaggggaaggcttcgtctgcgaagcaaaggttgaagtgcgcctccctccaaaagttcggagagcgcgcgttcaaggcgtgggccgtggccaggctcagccagcggtttcctaaggctgagtttgccgaggtttcgaaacttgtcaccgacttgacgaaggtccacaccgagtgttgccacggggatctgctggaatgcgcagacgaccgcgccgatcttgctaagtacatttgcgagaaccaggattcaatctcgagcaagttgaaagagtgctgcgaaaagccactgctggaaaagagccactgcatcgcggaggtggagaatgacgaaatgccggcagacctcccaagcctcgctgcagacttcgtggaatccaaagacgtctgcaagaactacgcagaagccaaggacgtgtttctgggaatgtttttgtacgagtacgcccgccgacacccggactacagcgtggtcctcctgctccggttggccaagacttacgagactactctggaaaaatgttgtgcggccgcggacccgcacgaatgctacgcgaaggtctttgacgagttcaaaccccttgtggaggagccgcagaacttgatcaaacaaaattgtgaattgtttgagcaactgggagaatacaagtttcagaacgccctgttggtgagatacaccaaaaaggtgccacaggtgtcgactccgactctggtcgaggtgtcgcggaacctggggaaggtgggctccaagtgttgtaagcaccctgaagccaaacggatgccgtgcgccgaggactacctgtccgtggtgctcaaccagctctgcgttttgcacgagaaaacccctgtgagcgatcgggtgaccaaatgctgcactgagagcctggttaacagaaggccgtgtttctcggcacttgaagtggacgaaacttatgtgcccaaggaattcaacgcagaaactttcacgtttcacgcggacatctgtaccctctcagagaaggagagacaaatcaaaaaacagactgctctggtggagctggtgaagcataagccaaaggccaccaaggagcaactcaaggctgtgatggacgacttcgccgccttcgtggagaagtgctgcaaggccgatgataaagaaacttgcttcgctgaggaaggcaaaaaactggtcgcggcttcgcaggcggcgctggggctg

SEQ ID NO: 9351 - DNA, 2007 bp, Artificial Sequence
  derived and/or modified sequence
atgaaatgggtaagctttatctcattgttgttcttgttctcgtcggcatattcgggtagcttggataaaagacatggtgaaggaacatttacgtctgatgtatcctcctatctcgaaggacaagcggcaaaggagttcatagcgtggctcgttaaaggaagacacggagaagggacctttacgtcagacgtttcttcatatctcgaaggacaagcagctaaggagttcattgcatggttggttaaaggacgtgatgcccataagtccgaagttgcccatcgatttaaggatctgggagaagaaaacttcaaggcattggttcttatcgctttcgctcaatatctccaacaatgtccgtttgaagatcatgtgaagcttgttaatgaagttaccgaatttgcaaagacttgtgttgccgatgagtctgctgagaactgtgataaatctctgcatactctttttggagataaactttgcacagtcgctaccctgcgcgaaacttatggagagatggcggactgttgtgcaaaacaagaaccagagaggaatgagtgcttcctccaacataaagatgataatccaaatcttccgagactggttaggccggaggtcgacgtaatgtgtacggcattccacgataatgaagaaacttttttaaaaaagtatctatatgagatcgcacggcgacatccatacttctacgctccagaactgctgttctttgccaagcgctacaaagcggcttttaccgagtgttgccaagctgctgataaagcagcttgtttgctcccaaagctggatgaattgagagatgaagggaaagcaagttctgccaagcaaagacttaagtgcgcaagtttgcaaaaattcggcgaaagagccttcaaggcatgggctgtagcccgtctttcacaacgattccctaaagctgagtttgcagaggtttcgaagctggttacagacctaacgaaagttcatacggaatgttgccacggtgatcttctggagtgtgctgatgatagagcggacctagcgaaatatatttgtgaaaaccaagactctatctcaagtaagctcaaggaatgctgtgagaagccattgttggagaaatctcattgcatcgccgaagtagagaacgacgagatgcctgccgatctaccatcattggcggcagatttcgttgagagcaaagatgtatgtaaaaattatgccgaagctaaagatgtgtttctcggaatgttcctgtacgaatatgctcgccgtcatccagattacagtgtcgttcttctattacgacttgctaaaacatatgagaccacactagaaaaatgttgcgccgctgcagatcctcacgaatgctatgctaaagtctttgatgaattcaaacctttggttgaagaaccccagaatttgatcaagcaaaactgcgaactttttgagcagttgggtgaatataaatttcagaacgctctgttggttcgctatacaaaaaaagtaccgcaggtttctactcccacactcgtcgaagtttcacggaatctcggaaaggttggaagtaaatgttgcaagcacccagaagcaaaaagaatgccatgcgccgaagactatttgtctgtggtattaaatcaattgtgtgtgcttcacgaaaaaacaccagtttctgaccgggtaacaaaatgctgcacagagtctcttgtgaatagacgcccttgcttctcagcgttggaggttgatgaaacctacgtgcctaaagagttcaatgcagaaacattcacttttcacgccgacatctgcacactttctgaaaaagagagacagattaaaaaacaaaccgctcttgtagagttggtaaaacataaaccaaaagccacaaaggagcaactgaaagctgtcatggatgatttcgctgccttcgtagagaagtgctgcaaggcagacgataaagaaacttgtttcgccgaagagggtaagaaactagttgccgcatcacaggcagcgcttggactt

SEQ ID NO: 9352 - DNA, 2007 bp, Artificial Sequence
  derived and/or modified sequence
atgaaatgggtgtcgtttatctcgctgttgttccttttctcatcggcgtactccggatcgctcgataagagacacggtgaaggaactttcacttcagacgtgtcctcctaccttgaaggacaggcagcaaaagaattcattgcatggcttgtgaagggaaggcatggggaaggcacctttacctcagatgtttcttcctacctggaaggccaggccgcgaaggaattcatcgcatggctcgtgaaagggcgcgatgcacacaaatccgaggttgctcatcgtttcaaagatctgggcgaggaaaactttaaagcactggtgcttattgcgtttgctcagtaccttcaacaatgcccattcgaggatcatgtgaagttggtcaacgaagtcaccgaattcgccaagacgtgcgtggcagatgaaagcgcggagaactgtgacaagagccttcatactctgtttggtgataagctctgtaccgtggcaaccctgcgcgaaacttacggagagatggcagattgctgtgcaaagcaagagccggaaaggaacgaatgttttctccaacataaggacgacaaccctaatcttcctcgtctggtgcgtcctgaagtcgatgtgatgtgtactgcctttcacgataacgaagagacttttctgaagaaatacctctacgaaatagcgcgcaggcacccatacttttacgcacctgaacttctcttttttgcaaagcgatacaaagcagctttcaccgaatgttgccaggccgcagacaaggcagcctgtctcttgcctaagctcgacgaacttagagatgagggtaaggcatcatcggcaaagcagcggttgaagtgcgcgagcctgcaaaagttcggagaaagagcatttaaggcgtgggcagtcgccagattgagccagaggtttccaaaggccgaatttgcagaagtctcgaagttggtgacggacctgaccaaggttcatactgagtgttgtcacggcgatctgctggaatgcgcagatgaccgggcagatctggcaaagtatatctgcgagaaccaagattcaatatcatcgaaattgaaagaatgctgtgagaaaccactgctggagaagagccactgcatagccgaggtggaaaacgacgaaatgcctgcagatttgccatcgctggcagccgatttcgtggagagcaaggatgtgtgcaagaattacgctgaggccaaagacgtgtttctggggatgtttctttacgagtacgcacgacgtcacccagattattccgtcgtgttgcttcttaggctcgccaagacctatgaaactacccttgaaaagtgctgtgcagcagcagacccacatgaatgctacgcaaaagtgtttgatgaattcaaaccactcgtggaagagccacagaatctgataaagcaaaactgtgaactgtttgagcaactcggcgaatacaaattccagaatgccctccttgtgcgctacaccaagaaggtgccccaagtctcgactccaacccttgtggaagtgtcgagaaacttgggtaaggtgggttcaaagtgctgcaaacatcctgaagcgaagcgtatgccctgtgccgaggactacctttccgtggtgctcaaccaactgtgtgtgctccatgaaaagacccctgtgtcagacagagtgaccaagtgctgcactgagtcccttgtcaaccgacggccctgtttttcggccctcgaggtggatgagacttacgtgcctaaagagtttaacgccgaaacgttcacttttcatgccgacatctgtacccttagcgagaaagaacggcaaatcaagaagcaaaccgccctggtcgagctcgtgaaacacaagcctaaggcaactaaggagcagctgaaagcagtgatggatgattttgcagcgtttgtggagaaatgttgtaaggcagatgataaggaaacgtgctttgcggaagagggcaaaaaacttgtcgcggcgtcccaagctgctctgggtctt

SEQ ID NO: 9353 - DNA, 2007 bp, Artificial Sequence
  derived and/or modified sequence
atgaaatgggtgagcttcatcagtctgctctttctgttctcgagcgcctactcaggatcgctggacaagcggcacggcgaaggtactttcacttccgacgtgtcgtcgtatctcgagggacaagcggccaaggagttcatcgcttggctcgtgaaaggacggcatggagaaggcacttttacgtcggatgtgtcctcatacttggagggccaggctgccaaggaattcatcgcgtggctggtcaaggggagagatgcccataagagcgaggtcgcccaccggttcaaggatctgggggaggaaaacttcaaagccctggtgctgatcgcattcgcacagtacctccagcaatgccccttcgaagatcatgtgaagctggtgaacgaagtcaccgagtttgcgaaaacttgtgtggccgatgaatccgcggaaaattgcgataagtcactgcacactctgtttggagacaaactttgtaccgtggcaacccttagagaaacctacggagaaatggccgactgctgcgcaaagcaggaacctgagcggaacgagtgctttctccaacataaggatgataatccgaacctcccgcggcttgtgcggcctgaggtggacgtgatgtgcacggcgtttcacgacaatgaggagactttcctgaagaagtacctgtacgaaatcgctcgtcgccacccatacttttacgccccggagttgctcttcttcgcgaaacgctacaaagcagcgttcactgaatgttgccaggccgcggataaggctgcgtgtctgctcccgaaactggatgaattgagagacgaagggaaagcatcatcagccaagcaaagactgaaatgcgcgtcgctccaaaagttcggggaacgcgccttcaaagcgtgggctgtcgcgagattgtcgcagcggtttcctaaggccgagtttgccgaagtgtcgaagctggtcaccgacctgaccaaagtgcatactgaatgctgccacggcgacctcctggagtgtgccgacgatcgcgcagacctggcaaagtacatctgcgagaatcaggattctatttccagcaaacttaaagagtgctgcgagaagccgctgctggaaaagtcgcactgcatcgcagaagtggagaacgacgagatgccggcggacctgccgtcattggcagcagactttgtggaaagcaaggatgtgtgtaagaattacgcagaagctaaagatgtgttcttgggaatgttcctgtatgaatacgcgcggcggcacccggattactccgtcgtgctcctgctgagacttgcaaagacttacgaaactactcttgagaagtgctgcgcagctgcggacccgcacgaatgttacgccaaagtctttgacgagttcaaaccactggtcgaggagccgcaaaacctgattaagcaaaactgcgagttgttcgaacagctgggcgaatacaagttccagaacgcgttgctggtgcgctacactaagaaggtgccgcaagtctccactccgactctggtggaggtcagccgcaacctcggaaaagtgggatcgaagtgctgcaaacacccagaagcgaagcggatgccatgcgcggaggactacctgtccgtcgtattgaaccagctctgcgtcctccacgaaaaaactccagtgtcggaccgcgtgactaaatgttgcactgaaagcctcgtcaaccggcgcccatgcttctcggccttggaggtggatgaaacttacgtgccgaaggaattcaatgccgaaactttcaccttccacgcagacatctgcaccctgtccgaaaaggaacggcagatcaagaagcagactgctcttgtcgagttggttaaacacaagccgaaggcgactaaggaacaactgaaggctgtgatggacgactttgccgctttcgtggagaagtgttgtaaggccgatgacaaggaaacttgtttcgctgaagaaggaaagaagctcgtcgcggcctcgcaggcggcgctgggactg

SEQ ID NO: 9354 - DNA, 2007 bp, Artificial Sequence
  derived and/or modified sequence
atgaagtgggtatcattcatttccctgctgttcctgttctcgtctgcgtactcgggctcgcttgacaaacggcatggcgagggaacgtttaccagcgatgtgtcctcctacctggaaggtcaggcagcaaaggagttcattgcgtggctggtgaaaggtcgtcatggggaaggaacctttacttcggatgtctcctcatacctggaaggacaggcagctaaggaattcatagcctggcttgtcaaaggaagagacgcccataagtcggaagtggcccatagattcaaagacctgggagaagaaaacttcaaggcgcttgtgcttattgcctttgcacagtaccttcagcaatgccccttcgaagatcacgtgaagctcgtcaatgaggtgaccgagtttgcaaaaacgtgcgtggctgatgaatccgcagaaaactgtgataagagcctccataccctttttggagacaagttgtgtactgtggccactctgagagagacttacggggagatggctgattgttgtgcaaagcaagagcctgaacgcaatgaatgttttctccaacacaaggatgataacccgaatctccctcgcttggttcgcccagaagttgatgtcatgtgtacggcgtttcatgacaacgaagaaaccttcctcaagaaatacctgtacgagattgccagaaggcatccgtacttttatgcaccagaactgctgttttttgcaaagagatacaaggccgcttttaccgaatgctgtcaggccgcagataaggcagcctgcctgctgcctaaacttgacgagctgagggatgaaggaaaggcatcgtcagccaagcagcgcctgaagtgtgcctcccttcaaaagtttggcgagcgtgcatttaaggcctgggccgtcgccagactgtctcaacgatttccaaaagcagaatttgctgaagtgtctaaacttgtgactgatcttactaaggtgcataccgaatgttgtcatggagatcttctggaatgtgcagatgatcgggccgatctggcaaaatacatatgtgaaaatcaagattcaatttcgtcgaagctgaaagagtgttgcgagaaacctttgctggaaaagtcccactgcattgctgaggtcgagaatgacgagatgcctgctgatttgccatcgctcgctgcagatttcgtggaaagcaaggatgtctgtaagaactacgcagaggcaaaggacgtgtttcttgggatgttcctttacgaatacgcacggagacatcctgattactcagtcgtgcttcttcttagactggcaaagacttatgaaactacccttgagaagtgttgcgcagcagcggatcctcacgaatgttacgcaaaggtgttcgacgaattcaagccccttgtggaggagccgcagaacctgatcaagcaaaactgcgagctgtttgagcaactgggtgagtacaaattccagaatgcactcttggtgcgctataccaagaaagtccctcaagtgagcactcctactctggtggaagtgtcgcggaatcttggaaaggtgggctcaaagtgttgcaagcatcctgaggcgaagcgcatgccctgtgctgaggactacctgagcgtcgtgcttaatcaactttgcgtcctgcacgaaaagacgccagtgtcggaccgggttaccaaatgttgtacggaaagcctcgtgaaccgacgcccttgcttttcggccctggaagtggatgaaacttatgtgcccaaggaattcaatgcagaaacctttaccttccacgcagatatttgtactctcagcgagaaagaaaggcaaatcaagaaacagaccgcgctggtggagctggtcaagcataagcccaaggccacgaaggagcagttgaaagcggtgatggacgactttgccgcattcgtggaaaagtgttgtaaggcagacgataaagagacttgttttgccgaagaggggaagaaacttgttgcagcaagccaagcggcgctgggtttg

SEQ ID NO: 9355 - DNA, 2007 bp, Artificial Sequence
  derived and/or modified sequence
atgaagtgggtctcatttatctccctgcttttcctgttttcctccgcctactctggcagcctcgacaaaagacatggggagggaacattcacttcagacgttagctcgtacttggagggtcaagccgccaaagagttcattgcttggctggtgaaagggagacacggcgagggcacctttacgtctgacgtttcctcgtatttggaaggtcaagccgccaaagaattcatcgcttggctggtaaaaggaagagatgcccataagagcgaggtggcgcaccgcttcaaggatttgggagaagagaatttcaaagccctggtcctgatcgcatttgcgcagtatctccagcagtgccctttcgaggaccacgtgaagctagttaacgaggttacagaatttgcaaaaacctgtgtagcagatgaaagcgctgagaattgtgacaagagccttcacactctctttggagataagctatgcacagtagccaccttgcgggagacctacggggaaatggctgactgttgcgccaaacaagaacctgaaagaaatgagtgcttccttcagcacaaggatgataatcctaatctgccgaggttagtgcgtccagaggtagacgttatgtgcacggcttttcacgataacgaggagaccttcctgaagaaatatttgtacgaaatagcccgaagacatccgtacttctatgcccccgagcttttgtttttcgcgaagcgctacaaggccgctttcaccgagtgctgccaggccgccgacaaagccgcttgccttctacccaaacttgatgaactcagggatgagggcaaagcatcttctgcgaaacagagactcaagtgcgctagccttcagaagtttggagaaagagcttttaaggcatgggccgtggccagacttagtcagagattcccaaaggcggagttcgccgaagttagcaaactggtcaccgatctgacgaaagtgcataccgaatgctgtcacggggacctgttggagtgtgcagatgaccgtgccgatctcgcaaagtacatttgtgaaaatcaggatagcattagttcaaagttgaaagaatgctgcgaaaaacccctcctcgagaagtctcactgcatcgcggaggtggagaatgatgaaatgcctgcagatctccctagtttagcggcggattttgtggagtccaaggatgtgtgcaaaaattacgcggaagcaaaagacgtgttccttgggatgtttttgtatgaatacgcgaggaggcatcccgattactcagtggtgctgctactgcgacttgcaaaaacatatgagaccaccctggagaagtgctgtgccgctgccgacccccacgaatgctacgccaaggtgtttgatgaatttaagccactggtagaagagcctcaaaacttgattaaacaaaattgcgaactgttcgagcagctaggagagtataaatttcagaatgccctgttagtgaggtacaccaaaaaagttccccaggtgtccacccctaccctagttgaagtctctcggaacttggggaaagtcggctcaaaatgctgcaaacaccccgaagccaagcgtatgccatgtgccgaagactacctttccgtggttctgaaccagctctgtgtgctgcacgagaagactccagtttccgatagagtgactaaatgctgtaccgagtcactggtaaataggaggccatgtttcagcgctcttgaagtagacgaaacatatgtaccgaaggagtttaatgcagaaacctttactttccatgccgatatttgtacactgtccgaaaaagaaaggcagataaagaaacaaaccgccctggtggagttggtgaagcacaagcctaaagcaactaaagagcagctaaaggcagtgatggacgattttgccgcattcgtagagaaatgctgcaaagccgacgacaaggagacctgtttcgcggaagagggcaaaaagctcgtggccgcctcacaagccgccttgggtctg

SEQ ID NO: 9356 - DNA, 2007 bp, Artificial Sequence
  derived and/or modified sequence
atgaaatgggtttcctttatcagcctcctgttcctattctcgtccgcctattcaggcagcctggacaaacggcacggagaagggacttttactagcgatgtgtccagttacctagagggccaggctgcaaaagaattcatcgcctggttggttaaaggacgccatggcgaaggtacattcacatctgacgtgtcttcttatttggagggccaagccgccaaggaattcatcgcctggttagtcaaaggtagagatgcccataagtccgaagtggcacaccgcttcaaggatctcggtgaggagaattttaaggcgttggtacttatcgcatttgcccagtacttacagcagtgcccgtttgaggaccatgtcaaactcgtgaatgaggttaccgagttcgcaaagacatgcgtggctgatgaatccgcagagaactgtgacaagtccctgcataccttgtttggagacaagctctgcacagtggccaccctgcgagagacatatggggagatggccgattgttgtgctaaacaggagcctgaacgcaacgaatgtttcctgcagcataaagatgataatccaaatctgccccggctggtacggccggaggtagacgtgatgtgcactgcgttccatgacaatgaagagaccttcctgaagaagtacctttatgagatcgcgcgaagacacccctacttttatgcccccgagctgctgtttttcgccaagcggtacaaggcagccttcacggagtgctgtcaggcggccgataaggccgcatgtctcctcccgaagctcgacgagctccgcgacgaggggaaggcgtcctctgcgaagcagaggttaaagtgcgcctctctccagaagtttggcgagcgcgcttttaaagcgtgggcagttgctaggctgagccagaggtttcccaaagcagagttcgcagaggtcagcaagctggttacagacttgacaaaagtgcacacagaatgttgtcatggtgacttgctggaatgtgccgatgatcgtgccgacctcgctaagtacatctgcgagaatcaagactcaatctcgagtaagttgaaggagtgttgtgagaaacccctgctcgagaagagtcactgcattgccgaggtggagaacgacgagatgcccgcagatctccccagtctcgccgcagattttgtggagagtaaagacgtctgcaaaaattatgctgaggctaaggacgtctttctgggaatgtttctctatgaatatgcacgtcggcacccagactactccgtcgtcttgttattgaggttggctaagacgtatgagactacactcgagaagtgctgcgctgctgccgacccacacgagtgctacgccaaagtgttcgacgaatttaaacctcttgtggaagaaccgcagaatctgatcaagcaaaactgtgagttattcgaacagctaggggagtacaaattccaaaacgccctgctcgtaaggtacacaaagaaagttccccaggtatcaactcctactctagtcgaagtgtctaggaatttaggcaaggtggggtccaagtgttgcaaacatccagaggctaaaagaatgccttgcgccgaggactatttgtcagtcgtgctgaaccagttatgcgtgctgcatgagaagacacccgtgtcagatagggtgactaaatgctgcacggaatctctggtgaacagaagaccttgcttttccgctctggaggtagatgaaacctacgtgccaaaagagtttaatgctgagacgtttacatttcacgcagacatttgtacactctcagagaaagagcgccagataaagaagcagaccgccttggtagaactggtgaagcataagcctaaggcaacaaaagagcagctcaaagccgttatggacgacttcgcggctttcgtcgagaaatgctgcaaagctgacgataaagaaacatgctttgccgaagagggcaagaaattggtggccgcttcgcaggctgctctcgggctg

SEQ ID NO: 9357 - DNA, 2007 bp, Artificial Sequence
  derived and/or modified sequence
atgaagtgggtctcattcattagcctgctgttcttgttcagttcagcttactcaggatccctcgataaacgccatggcgaagggactttcactagcgacgtctcctcttatttggaagggcaagccgccaaggagttcatcgcttggttggtgaagggacgccacggagaaggcacattcacatccgatgtaagcagttacctcgaggggcaggcagctaaggagtttatagcctggttggtgaagggccgggatgcccacaagtctgaggttgctcatcgttttaaagatctcggcgaggagaactttaaagccctggttttgatcgcctttgcgcaatatctccaacagtgcccattcgaggatcacgtgaaactagtgaatgaagtcaccgagttcgctaagacatgtgttgcggacgagtctgcggaaaattgcgataaaagcttgcatactttatttggcgacaagctttgcactgtggcaactctccgagagacttacggcgagatggcagattgctgtgccaagcaggagccggagcgaaatgagtgttttctacagcataaggatgacaaccctaacctgccgcgtctcgtgaggccagaggttgatgtcatgtgtaccgcgttccatgataatgaggagaccttcctgaaaaagtatctctacgagattgcaagaaggcatccgtatttctatgcacctgaacttctgttctttgcaaagagatacaaggccgcttttaccgaatgttgtcaagccgcagataaagcagcttgcctgctgcctaagcttgacgaacttcgagatgagggaaaggcttccagcgcaaagcagcggttgaagtgtgccagtctgcagaagtttggggaacgtgcttttaaagcttgggcggtggctcggctgtctcaaagatttcctaaagccgagttcgcggaggtgagcaaattagtgactgatctcaccaaagtgcatacagagtgctgccatggcgatctgttagagtgcgctgacgacagagctgatctggccaaatatatatgcgagaaccaggactccatctcctctaaacttaaggaatgttgcgaaaaaccccttctggaaaagtcccattgtattgccgaagttgaaaatgatgagatgccagcggatcttccttctctggctgctgacttcgtggagagtaaggatgtttgtaagaattacgccgaagccaaggatgtgttcctgggcatgttcctatacgaatacgctcggcggcatcctgattactctgtcgttcttttgctcagattagctaaaacttacgagacgacgttagagaagtgctgtgccgcagcagatccccacgagtgttacgccaaggtttttgacgagtttaaaccattggtcgaagagccacagaatctcataaagcagaactgcgaattgtttgaacagttaggagaatataaatttcagaacgccctgctggtgcgttacacaaagaaagttcctcaggtgtccacccccaccctcgtcgaagtttcgagaaaccttggaaaagtgggatccaagtgttgtaaacatcccgaggcaaaacgaatgccatgcgctgaagactacctaagtgtggtgctgaatcagctctgtgtgcttcatgagaagactcccgtgagtgatcgggtgactaagtgctgtactgaatcgcttgttaatcgcagaccctgtttctccgccctggaggtggatgagacatacgttcccaaggaatttaatgcagagacatttacatttcatgccgacatctgcactctctcagagaaggaaagacagatcaaaaagcagaccgcactcgtggaattagtcaaacacaaaccgaaggccactaaagagcaactgaaggcagtgatggacgacttcgctgcattcgtggaaaaatgttgcaaagctgacgacaaagagacatgctttgcagaggaggggaagaagctggttgccgcgtctcaggctgccctcggtctg

SEQ ID NO: 9358 - DNA, 2007 bp, Artificial Sequence
  derived and/or modified sequence
atgaagtgggtcagcttcatttcccttctgtttctgttctcctctgcctattccggctctcttgacaagaggcatggagagggcacctttaccagcgacgtaagttcctacctggagggccaggccgctaaagaatttatcgcatggttagtgaagggacgacatggcgagggcaccttcacatctgatgtgagtagttacttagaggggcaagccgctaaagagtttatcgcctggctggtcaaaggccgggacgcccataagtctgaggttgcccaccgatttaaggacttgggcgaggagaatttcaaggccctcgtgctgatagctttcgcccagtacctccagcagtgcccattcgaagaccatgttaaactggtgaacgaggtgactgaatttgctaagacttgtgtggcagatgagtccgctgagaactgtgacaaatctctacatactctgttcggagataaactctgcaccgtggctactttaagggaaacctacggcgaaatggctgactgctgcgccaagcaggaacccgaacgcaatgagtgttttttacaacataaggacgacaacccaaacctgccaaggttagtcagacctgaggtagatgtgatgtgtaccgcttttcatgataacgaggaaacctttttaaaaaagtatttatacgaaattgctcggcgccatccttatttctacgctcccgaactgctgttttttgctaaacgctataaggctgctttcacagaatgctgccaggcagctgataaggctgcctgcctgctgcctaaactcgatgaactgagggacgagggaaaggcctcctcagctaagcagagactgaaatgtgccagccttcagaaatttggcgagagagcctttaaagcttgggccgtcgccaggctgtcacaacgctttccaaaagccgagttcgccgaagtgtccaaactcgtgacagacttgacaaaggtgcacactgagtgctgtcacggtgacttattggagtgcgccgacgatagagctgacctggctaagtacatatgcgaaaatcaggatagcattagctccaaattaaaagagtgctgtgagaagcccctcctggagaaatctcattgcattgccgaagtggaaaacgacgagatgcctgccgacctgccttcactagccgcagattttgtcgagagtaaagacgtgtgtaagaactatgctgaggcaaaggatgtttttcttggcatgtttctatacgaatatgcccggcgccaccccgattattccgtggttttgcttctcaggctggctaagacctatgaaaccaccctggagaagtgctgcgccgctgctgacccccatgagtgctatgccaaggtgtttgacgagttcaagcctctagtggaagaaccacagaacctgataaagcagaattgcgagctctttgagcagttaggggagtataaattccagaatgcactgcttgtgcgctacaccaagaaggtgcctcaggtgtccacaccaacactagtcgaagtgagccgcaatctgggtaaggttggctccaaatgctgtaagcacccagaggccaagcgaatgccatgcgcagaagattacctaagtgttgttctcaatcaactgtgtgtgctgcacgaaaaaactcctgtgtctgatcgagtgacaaagtgctgtaccgagagcctggtgaatcgacgaccatgtttttctgcactggaggtggacgagacttacgtgccaaaggagttcaatgccgagacattcacattccacgcagacatttgtacactgtctgagaaggagcgccagataaagaagcaaacagccctagtggaactcgtcaaacataaacccaaggccacaaaagagcagctgaaagcagttatggacgacttcgctgccttcgtggaaaagtgttgcaaggccgatgataaagaaacttgttttgcagaagaaggcaaaaaactggtcgctgcatctcaggccgccttaggtctg

SEQ ID NO: 9359 - DNA, 2007 bp, Artificial Sequence
  derived and/or modified sequence
atgaagtgggtatccttcatttccctcctgtttctgttttcttccgcctactctgggtcactggacaagagacatggagagggaacattcacaagtgatgtttcttcatacttggaaggacaggccgcgaaggaatttattgcgtggttggttaagggacgacacggagaagggacgtttacatctgacgtgagctcgtatctcgagggccaggcagcgaaggaattcatcgcctggcttgtaaagggccgtgacgcccataagtctgaggtggcacatcgttttaaggatctcggcgaagagaatttcaaagctcttgtgctcatagcctttgcgcaatacttgcaacagtgcccgtttgaggaccatgtgaaacttgtgaacgaggtgacggagttcgcaaagacctgcgtcgcggacgagagcgccgaaaactgtgacaagtctcttcacacgctgtttggcgataagttatgcacggtggcaaccctacgcgaaacttatggggaaatggctgactgctgcgccaaacaggagcccgaaagaaacgagtgcttcctacagcacaaagacgataatcccaacctgccccggctggttaggcctgaggtcgacgtgatgtgcacagccttccatgataacgaagaaacgttcctcaagaagtacctctacgagatagcacggcggcatccctacttctacgctcccgaacttctattcttcgcgaagaggtacaaggctgcgttcaccgagtgttgccaggccgctgacaaggctgcctgcctgcttcccaagctcgacgagctccgggacgaaggaaaggccagcagtgcgaagcagaggctgaaatgtgcctctcttcagaaattcggggagcgcgcctttaaagcatgggctgtggcacgtctgtctcagcgtttccctaaggccgaattcgcagaagtcagcaaactggttaccgacctgactaaagtacataccgagtgctgccacggggatctgctggaatgcgcagacgacagagccgatctagccaagtatatctgcgagaatcaggactccatatccagcaagctgaaagaatgctgcgagaagccgcttctcgaaaagtcgcactgtattgccgaggtggaaaatgatgaaatgccagccgacctgccttccttggctgcagacttcgttgagtcaaaggacgtctgcaagaactacgccgaggctaaggacgtgtttctcgggatgttcctgtatgaatacgcacgccgacatcccgactatagtgtagtccttctgctgcgtctcgccaaaacatacgagacaaccctggaaaaatgttgtgcggctgccgatccccatgagtgctacgcgaaagtgttcgacgagtttaagccccttgttgaggaaccacagaacttgataaagcagaactgcgaattgttcgagcagctgggcgaatataagttccaaaatgccctgctcgtgcggtataccaaaaaggtacctcaggtttctactccaacactagtagaagtgtctcggaatctcgggaaggtggggtccaagtgctgtaagcatccagaggcaaagcggatgccatgcgctgaggactacctctccgttgtgctgaatcagttgtgcgtgttgcacgagaagacacccgtgtccgacagggtcacgaagtgctgtaccgagtctctggtgaatagacgcccttgttttagcgcccttgaggtcgacgaaacctatgttccgaaagagttcaacgcggaaacgttcacctttcacgcagacatttgtacgctgagtgaaaaagaacgccaaatcaagaagcagaccgcactcgtcgagctggtcaagcataagcctaaggccaccaaagaacagttaaaagctgtgatggacgatttcgccgccttcgtggagaaatgttgcaaagcggatgacaaggagacctgtttcgcggaggagggaaaaaaacttgtggccgccagccaggccgcattgggactg

SEQ ID NO: 9360 - DNA, 2007 bp, Artificial Sequence
  derived and/or modified sequence
atgaaatgggtcagcttcatcagcttgctgtttcttttttctagcgcctacagcggcagcctcgataaaagacacggcgagggcactttcacgagcgatgtgtcatcttatctggaaggccaggctgctaaagaattcatcgcctggctggtcaagggccgccatggagaaggcaccttcacgtctgatgtgagctcctaccttgagggtcaggccgcaaaggaatttatcgcatggttggtgaaaggccgagacgctcacaagtcagaagtcgctcatcgctttaaggatctcggagaggagaactttaaagctctggtgctcattgctttcgctcagtatctccagcagtgcccttttgaagatcatgtgaaactggtgaatgaggtgaccgagtttgccaagacatgcgtcgccgacgagtccgcagaaaattgtgacaaatctctgcacacgctgtttggcgataaactatgcacagtggccaccctcagagagacctacggggaaatggccgattgctgcgcaaagcaggagcctgaacgaaacgagtgtttcttgcagcataaggacgataaccccaacctgccacgcctggtcagaccagaagtggacgtaatgtgtaccgcgttccatgacaacgaggaaacatttctgaagaagtatctgtatgaaatcgctaggagacacccctacttctacgccccagagttgcttttctttgccaagaggtataaggcagctttcaccgagtgttgccaggccgctgacaaagcagcctgcctcctccccaaactggatgaacttagggacgaagggaaagccagcagtgccaagcagagactgaagtgcgcatctcttcagaaattcggggaacgagcctttaaggcttgggcagtagcacgacttagtcagcgatttcctaaggcagagttcgctgaggtgagcaagcttgtgaccgacctgacaaaggtgcatacggaatgctgccacggggacctccttgagtgtgccgacgaccgggcagacctcgctaaatatatctgcgagaatcaagacagcataagctctaaactcaaggaatgctgtgagaagccattgctggagaagtcccactgcatagccgaagtggagaacgacgagatgcccgccgacctcccaagtttggcagctgactttgtcgagtccaaagatgtctgtaaaaactatgcggaagcgaaagacgtgttcctgggcatgttcctgtatgaatacgccagaagacatcctgattattccgtggtcctgctgctcaggctcgccaagacgtacgagacaacgctggagaagtgttgcgccgccgcagaccctcacgagtgctacgcaaaggttttcgacgagtttaaacctctcgttgaggaacctcagaacctgataaaacagaattgcgaactctttgagcagcttggagagtataagttccagaatgccctgctggtccgctacaccaaaaaggtgccacaggtgtcaacccccaccctggttgaagtcagcaggaatctcgggaaggtcggctctaagtgctgcaaacatcccgaggccaaacgtatgccctgcgccgaagactacctgagtgtggtgttgaaccagctgtgtgtgctgcatgagaaaactcccgtctctgatcgcgtgacgaagtgctgtacagagtcccttgtgaacaggaggccctgtttttcagctctagaggtagatgagacttacgtgccaaaagaatttaatgcagaaacctttactttccacgccgatatctgtacgctcagcgaaaaggagcgtcagattaaaaaacaaaccgccctggtcgagctggttaaacataagcccaaagcgaccaaggaacagcttaaggcggtgatggatgactttgccgcattcgtcgaaaaatgttgtaaggcggatgataaagaaacatgctttgcggaggaggggaagaaactggtggctgcgtctcaggccgcactcgggctc

SEQ ID NO: 9361 - DNA, 2007 bp, Artificial Sequence
  derived and/or modified sequence
atgaagtgggtttcgtttatcagcctcttgtttctgttttccagcgcatacagcggctcgctggataagcgccatggcgagggaactttcacctccgatgtgagcagctaccttgaaggtcaggcagccaaggaattcattgcatggcttgtgaaaggcaggcacggcgaaggcacctttacctcagatgtgagctcttacctggagggacaagccgcaaaggagtttattgcctggcttgtcaaagggagggatgcacacaaatcagaggtcgcacatcgatttaaggacctgggagaagaaaactttaaggccctggtcctgatcgcctttgctcaatacctgcagcagtgcccattcgaagatcatgtcaaactcgtgaacgaggtgaccgaattcgcaaagacttgtgtggcagatgaaagcgcagaaaactgtgataagtcgcttcatactttgtttggagataaactttgtactgtggccaccctccgagaaacctatggtgaaatggcggactgttgtgcaaagcaggaaccagagcgcaatgagtgttttctgcagcacaaggacgataacccaaatctccccagactggttagaccagaagtggacgtgatgtgtactgctttccacgacaacgaagaaacttttcttaagaagtatctctacgagattgccagacgtcatccttacttttacgcaccagaattgctgtttttcgcaaaacgctacaaggcggcatttaccgagtgttgtcaagcagcagacaaggcagcatgtctgctgcccaaactggatgagctccgcgatgaaggaaaggcttccagcgctaaacagagactgaagtgtgcatcgcttcaaaagtttggggaacgggcatttaaggcatgggcagtggcgcgactgtcgcagcgttttcctaaggcagaattcgcagaagtgtcaaaacttgtgactgatcttaccaaggtgcatactgaatgctgccatggcgatcttctggagtgtgctgatgaccgggcagatctggcaaaatacatttgcgagaatcaggactccatttcgagcaaactgaaggagtgttgcgaaaagccacttctcgaaaagagccattgcatcgcagaagtggaaaacgacgagatgcctgcagatctgccatcgcttgcagcggacttcgtggaatccaaggacgtgtgtaagaactacgctgaagcgaaagacgtgttcctgggaatgtttctgtacgagtacgcacgtcggcatcctgactactcagtcgtgctccttcttaggttggcaaagacctacgaaaccacccttgagaagtgttgtgctgcagcagatccccatgaatgttacgccaaggtgtttgatgagtttaaacccctcgtggaagaacctcagaacttgattaagcaaaactgcgagcttttcgaacagcttggagaatacaagtttcagaacgctctccttgtgcgttacactaagaaggtgccgcaagtgagcactccaactctcgtggaagtgtcgcgaaacctggggaaggtgggaagcaagtgttgtaagcatccagaagctaagagaatgccctgtgcggaggactacctctccgtggtgttgaatcaactttgtgtcctgcatgagaaaactcctgtctcagatcgtgtcactaagtgctgtaccgaatcacttgtgaacaggaggccttgtttttccgcactcgaagtcgatgagacttatgtgcctaaggaattcaatgcagaaactttcacttttcatgccgatatttgcaccctgtcagaaaaggaacggcaaatcaagaagcaaaccgcacttgtcgagctcgtgaagcacaagcctaaggccaccaaggagcagcttaaagcggtgatggacgactttgcagcttttgtggagaaatgctgcaaggcggacgataaggaaacttgtttcgcagaagagggtaagaaactggtggcagcaagccaagcagcactgggtctg

SEQ ID NO: 9362 - DNA, 2007 bp, Artificial Sequence
  derived and/or modified sequence
atgaaatgggtcagcttcatttcccttctttttctgttcagctctgcttactccggcagccttgataaaaggcatggcgagggcaccttcacctccgacgtgtcaagctacttggagggacaggcggccaaggagttcatagcatggctcgtgaaaggcaggcatggcgaaggaacgttcacttccgatgtgagtagctacttggagggacaggccgcaaaggagtttattgcctggctggtaaaaggaagggatgcgcacaagagcgaggttgcccaccgcttcaaggatctgggggaggaaaacttcaaagccctcgtcctcatcgccttcgcccagtatctgcagcagtgcccgtttgaggaccacgtaaagcttgtgaatgaggtaaccgagtttgccaagacctgcgttgccgacgagtcagcggaaaactgtgacaagagccttcatactctcttcggggacaaactctgtacagtggctaccctcagggaaacctacggggaaatggctgattgttgcgctaaacaggagcccgagcgcaatgaatgcttcctccaacataaagatgacaaccctaatctgccacggctcgtgcggcccgaggtggacgtaatgtgtactgctttccacgacaatgaagagacgtttctgaaaaaatatctgtacgagatagctagaagacacccatacttttacgccccagaactgctgtttttcgccaaacggtacaaggccgccttcaccgagtgttgtcaggctgccgataaggctgcgtgtttgttgcccaaacttgatgaactgcgcgatgagggtaaggcatcctctgctaaacagagactgaaatgtgccagtctgcagaaattcggcgaaagagccttcaaggcctgggccgtggctagactctcccaaaggttcccaaaggcagaattcgctgaggtgtcaaaactggtgacggacctgactaaggtgcataccgagtgctgccacggggacttgctcgaatgcgcagacgatcgcgccgacctggccaagtatatatgcgaaaatcaggactctatttcaagcaagctgaaggagtgttgtgaaaagcccctgttggagaagtcccactgcattgcggaagtggagaatgacgaaatgccagcggatctcccctcactggccgccgacttcgtggagtcaaaagacgtatgcaagaattacgctgaggcaaaggacgtgttcctgggtatgtttctgtatgagtacgcccgccggcaccctgactattctgtcgttctgctgctccgcctggcgaagacttacgagacaacattggagaaatgctgcgcagctgccgaccctcatgagtgctacgccaaggtcttcgacgaattcaaacctctggtcgaagagccgcaaaatttgattaagcagaattgcgagctgttcgagcagcttggcgagtacaaattccagaacgctctgctcgtgcgctacacgaaaaaggtgccgcaagtgtccactcccaccctggtagaagtgtcaaggaatttgggcaaggtagggtctaagtgctgtaagcatccggaggctaagcggatgccatgcgcggaggactacctgtccgttgtgctgaaccagttgtgtgtgcttcacgagaaaacccccgtaagtgaccgagtcactaaatgctgtaccgagtccctggtcaacaggcgcccatgcttttccgcgctggaggtggatgaaacatacgttcctaaagaatttaacgcggagactttcacctttcacgccgacatttgcacattgtcagaaaaggagagacaaattaaaaaacagaccgccttggttgagctggttaagcacaagccaaaagcaactaaggaacagctcaaggctgttatggatgacttcgccgccttcgtggagaaatgctgcaaggccgatgacaaggagacttgctttgctgaggaaggtaaaaaacttgtagccgcctcccaggcagcactggggctg

SEQ ID NO: 9363 - DNA, 2007 bp, Artificial Sequence
  derived and/or modified sequence
atgaaatgggtttctttcatctccctgctcttcttgttctcatctgcctactctggctcactggacaagagacacggcgaaggcacctttacttccgatgtcagctcttatctcgagggacaggctgcaaaggagttcatcgcctggcttgtgaagggccgtcacggagaaggcacttttacctccgacgtaagcagttatctcgagggacaggcagccaaggagttcatcgcctggctcgttaagggccgcgatgcccacaagagtgaggtcgcccatcgctttaaggacctcggtgaagagaattttaaagcacttgtactgatcgcatttgcccaatacctgcagcagtgcccatttgaggatcacgtgaagctggtcaacgaagtgactgaattcgccaagacatgcgtggctgatgaaagtgccgaaaattgcgataagagcctccataccctgtttggtgataagctgtgcacagtcgccacccttcgtgagacctatggcgaaatggccgattgctgtgccaagcaggagcccgagagaaacgagtgtttcttgcagcataaggacgacaaccccaatctgccccgccttgtccgccccgaggtggatgtgatgtgcaccgcttttcacgataacgaagagacctttctcaagaagtacctctatgagatcgcccgcaggcacccatacttttacgctcccgagttgctgtttttcgctaagcgctataaggccgctttcaccgagtgttgtcaagctgctgacaaggccgcatgcctcctgcctaagcttgacgagctgagggacgagggaaaggcttcatcagcaaagcagcgcctgaagtgtgcatctctgcaaaagttcggagagagggcattcaaggcatgggctgtggctcgcctttctcaaaggttcccaaaagctgagttcgccgaggtgtctaagctggttaccgatctcactaaagtgcacacagagtgctgccatggagatctgctcgagtgtgccgacgacagggcagatcttgctaagtatatatgtgagaatcaagattctatatcctccaaactcaaggagtgctgcgaaaaacccctgttggagaagtctcactgtatagccgaggttgagaacgacgagatgccagctgacctgccaagcctggctgctgactttgtggagtccaaggatgtctgtaagaactacgcagaagccaaggatgttttcctgggtatgttcctgtacgagtatgctaggaggcaccccgattattccgtggtgctcttgctgaggctggcaaaaacatatgagaccaccctcgagaagtgttgcgctgcagcagatccacatgaatgctatgccaaggtattcgatgagttcaaacctctggtcgaagagccacagaacctcatcaagcagaactgcgaactcttcgaacagcttggtgagtacaagttccagaatgctttgttggtcaggtatactaaaaaggtgccccaggtgagtactcctaccttggtggaggtgtcaagaaaccttggaaaggtgggcagtaaatgttgcaagcatccagaagctaagcgcatgccttgtgcagaggattatctcagcgtcgtgttgaaccagttgtgcgtgcttcatgagaagacaccagtaagtgatagggtgaccaagtgctgcaccgagtcattggttaacagacgcccttgtttctccgctttggaagtagacgaaacctacgtccctaaagaattcaacgctgagaccttcactttccacgccgatatttgcactctgtctgagaaggagaggcagattaaaaagcaaacagcactggtcgagcttgtcaaacataaacccaaggctaccaaagaacagctcaaggcagttatggatgacttcgctgccttcgtggagaagtgctgcaaagctgacgacaaagagacatgcttcgccgaggaaggcaagaagctggtggccgcaagccaggctgctctgggtttg

SEQ ID NO: 9364 - DNA, 2007 bp, Artificial Sequence
  derived and/or modified sequence
atgaaatgggtatcgtttatcagccttctttttctgtttagctccgcatattcgggctcgctggacaagcgtcatggagaagggacctttacctcggatgtgtcgtcgtacctcgaaggccaagcagctaaggagtttattgcttggcttgtgaaaggccgccatggggagggaacttttacgtcagatgtctcgtcttaccttgagggacaagctgcaaaggagttcatcgcatggctggtgaagggtagagatgcacataagagcgaggtggcgcaccggtttaaggaccttggagaggaaaacttcaaggcccttgttctgatcgcattcgcccagtacctgcagcagtgtcctttcgaagatcatgtcaagctggtgaatgaagtgacggagttcgcgaaaacctgcgtcgccgacgaaagcgcggaaaactgtgataagtcccttcatactctttttggtgataaactttgtactgtggcgaccctgcgcgagacttacggtgaaatggcagactgctgcgctaaacaagaacctgaaaggaatgaatgtttccttcagcataaggacgacaatcctaaccttccccgactggtgcggcctgaagtggacgtgatgtgtactgcgttccacgataacgaggagactttccttaagaagtacctgtacgagatcgcacgtaggcatccctacttttacgctccggagctcctgtttttcgccaaaagatacaaggcagcattcactgagtgttgtcaggccgcagacaaagcagcatgtctgctgccaaagctggatgagctccgggatgaagggaaggcctccagcgcaaaacaacgccttaagtgtgcaagcctgcaaaagtttggtgagagagcatttaaggcatgggccgtcgcgcgtctgtcccagcgattccccaaagcagaattcgcagaggtgtcaaaactggtgactgatctcaccaaagtccataccgaatgttgccatggtgacctgcttgaatgtgcagatgaccgagccgaccttgcaaagtacatctgcgaaaaccaagattcgatttcgagcaaacttaaggagtgctgtgaaaaaccgctgttggaaaagtcccactgtattgccgaggtggaaaacgacgaaatgcctgcagatctcccgtcacttgcagctgattttgtggaatcgaaagatgtgtgtaagaattacgcagaggccaaggacgtgttcctcggcatgttcctgtacgaatatgcgaggcgccatccagattactcagtggtgcttctcctcagacttgcaaaaacctacgaaaccacccttgaaaagtgctgcgccgcagccgatcctcacgaatgttacgcaaaggtgtttgacgagtttaagccgcttgtggaggaaccccaaaacctcatcaaacagaattgtgagctttttgaacagctgggagaatacaagtttcagaacgccctccttgtcagatacactaaaaaggtgccacaggtgtcaaccccaactctggtagaggtgagtaggaatcttggaaaggtgggatccaagtgttgtaaacaccctgaagccaaaaggatgccatgtgcagaagattacctttccgtcgtcctgaaccaactctgtgtgctgcatgaaaagacgccagtcagcgatagagttaccaaatgttgcactgagagcttggtgaaccgacggccttgtttttccgcacttgaggtggatgagacgtacgtgcccaaagaattcaatgcagagactttcacttttcacgccgacatctgtaccctctccgagaaggagcgacagatcaaaaaacagactgcgctggtggagctggtgaagcataagcccaaggcaaccaaagagcagcttaaagcagttatggatgattttgcggcattcgtggagaaatgctgtaaggcagatgataaggaaacgtgttttgcagaggaagggaaaaaactggtcgctgcctcccaggctgcactgggactc

SEQ ID NO: 9365 - DNA, 2007 bp, Artificial Sequence
  derived and/or modified sequence
atgaagtgggtgtccttcataagtctcctcttccttttctccagcgcgtatagtgggtcactcgataagcgccacggcgaaggcacattcacctccgatgtgtcaagttacctggaaggtcaggccgctaaggaattcatcgcttggctagtgaaggggcgacacggggaagggacatttacctcagatgtgtcatcctatctggaaggccaggctgctaaggaattcatagcgtggttagtcaaaggtcgggatgcccataagagcgaagtggcacataggttcaaggacctcggcgaggagaatttcaaggctctagttcttatagccttcgctcagtacttgcagcagtgtccatttgaggatcacgtcaagctggtgaacgaagtaaccgaatttgctaaaacctgcgtggccgacgagagtgccgagaactgcgataaatcccttcacaccttgtttggagataaattgtgcaccgtggccacactccgcgaaacctacggagaaatggccgactgctgcgcaaaacaggaaccagaaagaaatgagtgcttcctccaacacaaagatgataatccaaacctgccacgtctggtcaggcccgaggttgacgttatgtgcacagctttccatgataatgaggagacttttctaaagaagtatctctacgagatcgcaaggcgccacccctatttctatgcccccgagcttctcttctttgcaaagaggtataaggccgccttcaccgagtgctgccaagccgccgataaggccgcttgcctgctcccgaaactagacgaattacgcgatgagggtaaagcatcgtctgccaagcaacggctgaaatgtgcctcactccagaaattcggggagcgcgcgttcaaagcatgggccgtcgcgcggctgagtcagcgattcccaaaagcagagttcgcggaggtaagcaagctggtaaccgatttgactaaggttcacacggagtgttgccatggggatctactggaatgtgctgacgatagggccgacttggccaagtacatctgcgaaaatcaggacagtatctcctctaaactcaaagagtgttgtgaaaagcctctgcttgagaagtcccactgcatagccgaagtcgagaatgatgaaatgcctgcagatctgcctagtctggctgcggactttgtcgagtctaaggatgtctgtaaaaactacgccgaggcaaaggacgtgttcctgggaatgttcctttatgagtacgctcggcgacaccccgattactccgtcgtcctccttctgaggcttgccaagacttatgaaactaccctggaaaagtgttgcgccgcggctgatcctcacgaatgttacgccaaggtgtttgacgagttcaagcctctcgtggaggaaccccaaaatctgattaagcaaaactgtgaattgttcgagcaactgggggaatataagtttcaaaatgctttgctggttagatataccaagaaggtgccccaggtcagtacccctaccctggttgaagtctctaggaatctgggaaaggtgggatctaagtgttgcaagcaccccgaggcgaagaggatgccatgcgcggaggattacctctctgtggttctcaaccagttgtgcgttctgcacgagaagaccccggtctccgatcgggtgacaaaatgttgtaccgagagcttggtcaaccgcaggccctgcttctccgcgctggaggtggacgagacttatgtgcctaaggagttcaatgcggaaacattcacatttcatgctgacatttgcactctgtctgaaaaagaacgccagatcaaaaagcagacagcactcgtggagcttgtcaagcacaagcctaaggcgacgaaggagcaactaaaagcggtgatggacgactttgcagcctttgttgagaagtgctgtaaagctgacgacaaggagacctgcttcgccgaggaaggtaaaaaactagtagcggccagccaggccgccctcggccta

SEQ ID NO: 9366 - DNA, 2007 bp, Artificial Sequence
  derived and/or modified sequence
atgaagtgggtttccttcatatctctgctcttcctgttctcgagcgcctactccgggtccctggacaagaggcacggagaaggcacctttacctccgatgtgtccagctaccttgaaggacaggcggcgaaggaattcattgcgtggttggtcaagggtagacatggtgagggcacgtttacttcggacgtctcaagctacctggaggggcaggccgcaaaagagttcatcgcttggctcgtgaaaggacgcgacgcacataagtcagaggtggcgcacaggttcaaggacctgggtgaagaaaactttaaggctctcgtgctcatcgccttcgcgcaatacttgcagcaatgcccattcgaagatcatgtgaagctggtcaatgaagtcaccgagtttgccaagacttgcgtcgccgatgaatcagccgagaactgtgataagtccctgcacaccctgttcggcgataagctgtgcactgtggcaacgctgcgggagacttacggagagatggcggactgctgtgctaagcaggaaccagagcggaacgagtgctttctccagcacaaggatgataatccgaacctcccccggttggtgcggccagaggttgacgtcatgtgcacggccttccacgacaacgaggaaactttcctgaagaagtacctctacgaaatcgcgagacgccacccttacttttacgctccggaacttctcttcttcgcgaaacgctacaaggccgcgttcactgaatgctgtcaggccgcagataaagccgcatgcctgttgcctaagctcgatgaactgcgggatgaaggaaaggcttcctcggcgaagcaaaggcttaagtgcgcgagcctgcagaagttcggagaaagggcgttcaaggcctgggcagtggccagactgagccagcggttccccaaagcggaattcgccgaagtctctaagctcgtcactgatctgaccaaggtccatactgaatgttgccacggggacctcctggagtgtgccgacgacagagccgatctggccaagtacatctgcgaaaatcaagactctatcagttcaaagctgaaagagtgctgcgagaagcctctgctcgagaaaagccactgcatcgcggaagtcgagaatgatgagatgcctgctgatcttccgtcgctcgccgccgattttgtggaatcgaaagacgtgtgcaagaactacgcggaggccaaggatgtctttctgggcatgttcctgtacgagtacgccagaaggcatccagattactcggtggtgctcctcctgcgcctggcgaaaacctatgagactaccctggagaagtgctgtgccgccgcagatccgcatgagtgctatgcgaaggtgtttgacgagtttaagccgcttgtcgaagaaccgcagaacctcattaaacaaaattgcgaactcttcgaacagctgggcgaatacaagttccagaacgccctgctggtgcgatatactaagaaggtacctcaggtgtcgaccccgaccctcgtcgaagtgtcccggaacctgggaaaagtgggctccaagtgctgcaagcatccagaggcgaaacgcatgccgtgcgccgaggactacctgagcgtggtgctgaaccagctctgtgtgctccacgaaaaaactccggtgagcgaccgcgtgacgaaatgctgcactgagtcgctcgtaaacagacgtccctgtttctccgcccttgaagttgacgagacttacgtgccgaaggagttcaatgccgagactttcacctttcatgccgatatctgcactctgagcgaaaaggaaaggcagattaagaaacagactgcgctggtcgaactggtgaagcacaaaccgaaagccactaaggagcaactcaaagccgtgatggacgacttcgccgccttcgttgagaagtgttgcaaggctgacgataaagagacgtgctttgcggaagaaggcaaaaagctggtggctgcctctcaagccgcacttgggctt

SEQ ID NO: 9367 - DNA, 2007 bp, Artificial Sequence
  derived and/or modified sequence
atgaagtgggtttcattcatctcactcctcttcctcttctcttcggcgtacagcgggagcttggacaagagacacggagaaggaactttcacttcagatgtgtcctcgtacctggagggccaagcggctaaagaattcatcgcatggttggttaagggtcgccatggtgagggaactttcacgtccgacgtctcctcgtacctcgaaggccaagccgcgaaggaattcatcgcctggttggtgaagggccgggacgcccataagagcgaggtcgcgcaccggttcaaagatttgggagaagagaacttcaaagccctggtcctcatcgcattcgcccagtacctgcaacagtgcccctttgaagatcatgtaaaactggtgaacgaggtgaccgaatttgctaagacctgcgtggccgatgaatccgctgagaactgtgataagtcgctccacacccttttcggcgacaagctgtgcaccgtggcgaccctccgtgaaacctatggagagatggctgactgctgcgcaaagcaggagcccgaacgcaacgagtgttttctccagcacaaggacgacaatccgaatctccctcgactggtccgccctgaagtcgacgtgatgtgtaccgcgttccatgataacgaagaaacctttctgaagaaatacctctacgaaatcgcccggaggcacccgtacttttacgcgccggaacttctgttctttgctaagcgatataaggcggccttcaccgaatgctgccaagccgccgataaggccgcatgtctcctcccgaagttggacgagttgcgggacgaggggaaggcctcgtcagcgaagcagcggctgaagtgcgcctcgctccagaaatttggagagcgcgcgttcaaggcctgggccgtcgcccgcctctcccaaagattcccaaaggccgaattcgccgaagtttcgaagttggtcacggacctcactaaagtgcacaccgagtgctgtcacggtgatctgctggaatgcgcggatgaccgcgctgacctcgccaagtacatctgcgaaaaccaagactctatctcgtcaaagctcaaggaatgttgcgaaaagccactcctggagaaatcgcactgcatcgcagaggtggaaaacgatgaaatgcccgccgatctcccatccctggcagcggatttcgtggaaagcaaggacgtgtgcaagaattacgcagaggcaaaggacgtgttcctcggaatgttcctgtacgaatacgctcggcgccacccagactactcagtagtcctgctgctgcggctggctaaaacctacgaaactacccttgagaagtgttgcgcggcagctgacccacacgaatgctacgctaaggtgtttgatgagtttaagccactcgtcgaggagccccaaaatctgatcaagcaaaattgcgagctgtttgaacagctgggggaatacaagtttcagaatgcgctgctggtgaggtacaccaagaaggtgccgcaggtgtcaaccccaaccctggtggaagtgtctcggaacctgggaaaggtgggaagcaaatgctgtaaacacccagaagccaagcgcatgccctgcgccgaagattatctgtccgtggtcttgaaccagctgtgcgtgcttcacgagaaaactccggtgtccgaccgggtcaccaagtgttgcactgagagtctggtgaaccgccgcccttgcttctcagcgctggaagtcgatgaaacctacgtccccaaggagttcaacgcagagactttcaccttccatgccgatatatgcaccctgtcggagaaagagcggcagatcaaaaagcagactgcactggtcgaactggtcaagcataagcccaaggccacgaaggaacaactgaaggccgtgatggatgactttgcagctttcgtcgagaaatgctgtaaggcggatgacaaagaaacctgttttgcggaggaaggtaagaagctcgtggcggcctcacaagcagcactgggactt

SEQ ID NO: 9368 - DNA, 2007 bp, Artificial Sequence
  derived and/or modified sequence
atgaaatgggtctcctttataagtctgcttttcctgttttcgagtgcttattccggaagtctggataagaggcatggcgaggggactttcactagtgacgttagttcctatctggaggggcaagccgcgaaagaattcatcgcttggctcgttaaaggcaggcacggcgagggcacgtttacctccgacgtttcttcatacctggaggggcaagccgcaaaagaatttattgcctggttggtcaagggacgcgacgctcataagagcgaggttgcccacaggtttaaggatctgggtgaggagaacttcaaggccctcgtgcttatcgcatttgcgcagtacctgcagcagtgcccctttgaggatcacgttaaacttgtgaacgaggtcaccgaatttgctaagacgtgcgttgccgatgagagtgcggagaattgcgataaatccctgcacaccctgtttggtgacaagctatgcaccgtagccacgctgcgcgaaacctacggcgaaatggccgactgttgtgctaaacaggaacctgagaggaacgaatgctttctgcagcacaaggacgataatcctaatctccccagactggtgaggccagaagtggacgtaatgtgtaccgccttccacgacaacgaagaaactttcctgaagaaatacttgtacgagattgcgagacgccacccgtacttttacgcccctgaacttctattctttgcaaaaaggtacaaggcagccttcaccgaatgctgtcaggcagccgacaaagccgcttgcctgctgccaaagctggatgagttgcgagacgaagggaaggcaagcagtgccaagcagaggttaaagtgcgcctcattgcagaagttcggggagcgggctttcaaagcttgggccgtggctcggctgagccagcggtttccaaaggccgagttcgccgaggtgtcgaagttggtcactgacttgactaaagtgcacaccgaatgctgccatggggaccttcttgagtgtgctgacgaccgagctgatcttgccaagtacatctgtgagaaccaagattccatatccagcaagttgaaggaatgttgtgaaaagcccctgctggagaagtctcactgcattgcggaggtggagaatgatgaaatgccggcagatctaccatctctggccgcagacttcgttgaaagtaaggacgtttgcaagaattatgcagaggccaaagacgtcttcctgggtatgtttctgtacgaatatgcccgtaggcatccagattattcagtcgtgctgctattgagactggcaaagacctatgagaccaccctcgagaaatgctgtgcagcagctgatccgcacgaatgctacgcaaaagtctttgatgagtttaaaccactggtagaggagcctcagaatctcattaagcaaaactgcgagctgttcgagcagctcggcgagtacaagttccagaacgccttgttagtgagatacaccaagaaagtcccacaggtgtctacccccactttggttgaggtatctagaaatctaggaaaggtggggtctaagtgttgcaagcatccagaagcaaagagaatgccctgcgccgaggactatctgtctgtggtgctgaatcaactttgcgtgcttcacgagaaaacgcccgttagcgatcgtgtgactaagtgctgcacggagtctctcgtgaatagacggccttgtttcagtgcactcgaagtcgatgaaacatatgtgcctaaggaattcaatgcagaaacctttaccttccacgcggacatctgcaccttgagtgaaaaagagcggcaaattaagaagcagacagccctggtggaactggtgaagcacaagcccaaggcaacaaaggagcagcttaaagccgttatggatgatttcgccgcattcgtggagaaatgctgtaaagccgatgacaaggagacttgttttgccgaggaggggaagaagctcgtcgcagcgtcacaggcggcactggggctc

SEQ ID NO: 9369 - DNA, 2007 bp, Artificial Sequence
  derived and/or modified sequence
atgaagtgggtgagctttatatctctattgtttctgttcagtagtgcctacagcggttcattggataaacggcatggcgagggaacatttacttcggatgtctcctcctaccttgagggccaggcggctaaggaatttattgcttggcttgttaaaggtcggcacggagagggcacctttacatctgatgtttcatcatatctggaaggccaggcggccaaggagtttatcgcatggttggtaaagggacgggatgcgcataaatctgaagttgctcataggtttaaagatctcggtgaggagaatttcaaagccctggttctcatcgccttcgcccagtacctacagcagtgtcccttcgaagaccacgtcaagttggtcaacgaagtgactgagtttgctaaaacctgcgtcgcggacgagagcgctgagaactgcgataaaagtctgcacactctgtttggagacaaactgtgtaccgtagccacactgagagagacctatggagagatggccgattgttgtgctaagcaagagcccgaaaggaacgaatgcttccttcagcacaaagacgacaacccaaacctgcctaggcttgttcgcccagaggtggacgttatgtgtacagccttccacgataatgaagagaccttcctcaaaaagtacctttacgaaatagcacgacggcacccgtacttttacgctcccgagctgctgttctttgctaagaggtacaaggccgcatttaccgagtgttgccaggccgctgataaagctgcctgcttactgccaaaactcgacgagttgcgggacgagggcaaggctagcagtgcaaagcagcgcctgaagtgcgcttccctccagaagttcggggagagagcctttaaggcctgggcagtggctcggctcagtcagaggtttccaaaagcagaattcgctgaagtaagtaaactagtaacagacctcaccaaagttcatacagagtgttgtcacggcgatttgctggaatgtgcagatgacagagccgacttggctaagtatatctgtgagaatcaagattccattagtagcaagttgaaagagtgttgcgaaaaacctctgttggaaaagagccactgcatagccgaggtggagaacgatgaaatgcctgcggatctacccagcctagccgccgattttgtggaatccaaagacgtttgtaagaattacgccgaagccaaggacgttttcctgggtatgttcctctatgaatatgccagaaggcatccggattatagcgtggtgctgcttctccgccttgcgaaaacgtacgagacgacccttgaaaaatgctgtgctgctgctgatccacacgaatgttacgccaaagtcttcgacgagtttaagcctctcgtggaagagccccagaaccttatcaaacagaactgcgaactattcgaacaactgggagagtataaattccaaaatgccctcctggtccgatacactaagaaggtaccacaagtaagcactcctacgctggtggaagtctcccgcaacctgggcaaggttggctctaagtgctgcaagcatccagaagcaaagcgaatgccctgtgccgaggactacctgagtgtggtgctgaaccagttatgcgtgctccacgaaaagacgccagtttcagacagagtgactaaatgctgtactgagtcacttgtaaatcggcggccctgtttttcagccctggaggtcgacgaaacatacgtaccgaaggagtttaatgctgagacgttcacctttcacgcggatatctgcactctcagcgaaaaggagcggcagatcaaaaagcaaactgccctggtggaacttgtcaaacataagcccaaggctaccaaagagcagctgaaagccgtaatggatgactttgcagcctttgtggagaaatgctgcaaggcagacgacaaggagacctgtttcgccgaggaagggaaaaagcttgtcgctgcctcacaagccgctcttggatta

SEQ ID NO: 9370 - DNA, 2007 bp, Artificial Sequence
  derived and/or modified sequence
atgaagtgggtcagcttcatttctttgcttttccttttcagctctgcatatagtggaagcttggacaaaaggcacggagagggaacatttacctcagatgtttcttcttacctagaagggcaagcggccaaggaattcatcgcctggcttgtaaaaggaaggcacggggagggtacgttcacttccgacgtttcctcctatttggagggtcaggccgctaaagaatttatagcgtggctggtaaaaggaagagacgcgcacaagtcagaagtggcccacagatttaaagatttgggtgaggaaaattttaaggcactggtgctcatcgcctttgctcagtacctccagcaatgtcctttcgaagaccacgtgaaacttgtcaatgaggtgaccgaatttgcaaaaacgtgcgtcgctgacgagagcgcggagaactgcgacaagagcctgcatacactgttcggagataaattatgcaccgttgcgacacttcgcgaaacgtacggggaaatggctgactgttgcgccaagcaggaacctgagcgtaatgaatgctttttgcagcataaggacgacaaccccaacctgcctaggctagtacggcccgaggtggatgtgatgtgtactgcattccacgacaacgaggagacattcctgaaaaaatacctctatgagatcgcaagacgtcatccttacttctacgcccctgaacttctgtttttcgccaaaagatacaaagcggccttcacagagtgttgtcaggctgccgacaaggcagcctgcctccttcccaagcttgacgagctgcgagacgaagggaaagctagctctgccaagcagcgtctgaagtgcgcttcactccagaagtttggagaacgcgcttttaaagcgtgggcagtcgcaagactgtcccagcggtttcccaaagcagaatttgccgaagtgagtaaactggttactgacctcaccaaggttcatacggagtgttgtcacggtgacctcctcgaatgtgcggacgatagggcagatttggcgaagtacatctgcgagaaccaggactcgatttcaagcaaattgaaagagtgctgcgagaaaccacttctcgagaaatcacactgcatcgctgaagtggagaatgacgagatgcccgccgatctgcccagcttggccgccgacttcgtagaatccaaagacgtctgtaaaaactatgccgaggctaaagacgtgtttttagggatgtttctgtatgagtacgcccgcagacacccagattactcagtggttttgttgctgagactcgcaaaaacctacgagactaccctcgaaaagtgctgtgccgccgctgatcctcatgaatgttatgctaaggtcttcgacgagtttaagccgcttgtcgaagaaccccagaatttgatcaagcagaactgcgagctatttgaacagctgggcgagtataagttccagaacgcccttctcgtgcggtatacgaaaaaagtcccacaggtgtcaacgccgactctagtcgaagtgtcacggaacctggggaaggtgggtagtaaatgctgcaagcaccccgaagccaagaggatgccttgtgcagaggactacctgtccgtggtacttaaccagttgtgcgtgctccacgagaaaactcccgtctcagatcgggtgaccaagtgttgtacggaatctttagtcaaccgccgcccctgtttttccgctctggaagtagacgaaacctatgttccaaaagaatttaacgcagagacctttacctttcacgctgacatatgtacccttagcgagaaagaacgtcagattaagaagcagaccgctctggtggaactggtcaaacacaaacctaaggctacaaaggagcaactgaaagcggttatggatgattttgccgctttcgtggagaagtgttgtaaagctgacgataaggaaacgtgctttgccgaagagggcaagaaactagtggccgcgagccaagcagccctcgggtta

SEQ ID NO: 9371 - DNA, 2007 bp, Artificial Sequence
  derived and/or modified sequence
atgaaatgggtgtcttttatttcactattatttctgttttcatccgcctatagtggcagtctcgacaaaagacacggagagggaacgttcacttctgacgtgtcttcatacctggagggtcaagcggccaaggaattcatagcttggctggttaagggtcggcacggcgaagggacatttaccagtgacgtcagcagctatttggaaggccaggcagccaaggagtttatcgcctggctggtgaagggccgggacgcccacaagagtgaagtggcccaccggtttaaagacctcggtgaggagaactttaaagccctggtccttatagcgttcgctcagtacttgcaacagtgcccatttgaggaccacgtcaagctggttaatgaggtgacagaatttgctaaaacctgtgtggctgatgagagcgcagagaactgtgataagtcattgcatacgctttttggcgacaagctgtgtacagtggccacattaagggagacgtacggggagatggcggattgctgtgctaaacaggagcctgaacgtaacgagtgctttctccagcataaagatgacaatccaaatctgccccgcttggttaggccagaagtagacgtaatgtgtacagcttttcatgataacgaggagacctttttaaagaagtatctgtacgagattgcgcgtcggcatccgtacttctacgcccctgaactgttatttttcgcaaagagatacaaggctgcctttactgaatgctgccaggccgcagacaaggccgcctgcctgttacccaaattagatgaacttagggatgagggcaaagcctcctcagccaagcagcgcttaaaatgcgcatcattgcagaagtttggcgaaagagcctttaaagcttgggcagtcgctagactaagccagaggtttcccaaagcagaattcgccgaggtgagcaaactcgtcaccgacctgacaaaagtccatacggagtgctgccacggcgatctgctggaatgcgccgacgaccgcgcagacttagcaaaatatatatgtgaaaaccaggactccatctcaagtaaacttaaggagtgctgtgagaaaccactgctcgagaaatcccattgtatcgcagaagtcgagaatgatgaaatgcccgcagacttgccttctctcgccgccgacttcgtagaatcaaaagacgtgtgcaagaattatgctgaagccaaagacgtgtttttaggaatgttcctctatgaatatgcacgccgccatccagactattcagtggtattgctgctgaggctcgccaagacctacgaaaccacactggaaaagtgttgcgccgcagctgacccccacgagtgctacgcaaaagtgttcgacgaatttaagccactggtggaagagccccagaatctcataaaacagaattgcgagctgtttgaacagctgggggagtacaagtttcagaatgctttgctggtacgctacactaaaaaggttccacaggtttctacgccaaccctggttgaggtcagccgtaatctgggaaaagtggggagcaaatgctgcaagcacccagaggcaaagaggatgccctgcgcagaggattatctgtctgtagttctgaaccagctgtgcgtgttgcacgaaaagacacccgtttccgaccgcgtcaccaagtgttgtacggaaagcctggttaatcggcggccatgctttagcgcccttgaagtagatgagacctacgtgcccaaggaattcaacgcagagacatttacattccatgcggatatatgcaccctatccgagaaagaaaggcaaatcaagaagcagacagctttggtcgagttggtgaagcacaagcccaaggccacgaaggagcagttaaaagccgtgatggacgatttcgccgccttcgttgagaagtgttgtaaggctgacgacaaggaaacatgtttcgctgaggaagggaagaagctcgtggcggcttcccaggctgctttgggcctg

SEQ ID NO: 9372 - DNA, 2007 bp, Artificial Sequence
  derived and/or modified sequence
atgaagtgggtgagcttcatttcactgctgttcctcttttcctccgcctactcaggatcactggacaagcgccacggagagggtacctttacgtcggatgtctcgagctacctcgagggacaagccgccaaggaatttatcgcctggctggtgaagggccgacatggagagggaaccttcacctccgatgtttcgtcgtatctggaaggtcaagcagctaaggaattcatcgcgtggcttgtcaagggacgggatgctcataaatccgaagtcgcccatagattcaaagacctcggagaggaaaatttcaaggcacttgtgctgatcgccttcgcgcagtacttgcagcagtgtccgttcgaggaccacgtgaaactcgtcaatgaagtgaccgaattcgcgaaaacttgcgtcgccgatgaatcagccgagaattgcgacaagtccctccacaccctgttcggcgacaagctctgtactgtcgcgacccttcgcgaaacttatggtgagatggccgattgctgcgccaaacaagaaccggagcgcaacgagtgcttcctgcagcataaggacgacaaccctaacttgcctagactggtgcggcccgaggtcgatgtcatgtgtaccgcctttcatgataacgaagaaacgttcctgaagaagtacctgtacgaaatcgccagacgccacccgtacttctacgcgcctgaattgctgtttttcgccaagaggtacaaggctgcattcaccgagtgctgccaagcggcggataaggcggcatgtctcctgccgaagttggacgagttgcgggacgaggggaaggccagctcggctaagcagaggctgaagtgcgcatccctccagaaattcggggagagggcatttaaggcttgggcggtggcgcggctctcgcaacgcttcccaaaggcagaatttgcggaagtgtccaagctggtgaccgacctgacgaaggtgcacacggaatgctgccacggggacctcttggaatgcgcagacgaccgggctgatcttgcaaagtacatctgcgagaaccaggatagtatttcatcaaaactgaaagagtgctgcgagaagcccctgctggaaaaatcccactgcatcgccgaagtcgaaaacgatgaaatgccagcagacctcccatcgctcgccgccgactttgtcgaaagcaaggacgtgtgtaagaactacgcggaggccaaggatgtgttcctgggcatgttcctttacgagtacgcgcggagacacccggactacagcgtggtgctcctgctgagactggctaaaacttacgaaaccactctggagaagtgctgcgccgctgcggacccgcatgagtgctacgccaaggtgttcgatgagttcaagccgctggtggaggaaccgcaaaacctgatcaaacaaaactgcgagctgtttgaacagctcggagaatacaagtttcaaaacgcactcctggtccgctataccaagaaagtccctcaggtgagcaccccgaccttggtggaggttagccgcaatctcggaaaagttggcagcaagtgttgtaaacacccagaagcgaagcggatgccatgcgccgaggattacctgtctgtggtgctgaatcagctttgcgtgctccacgaaaaaactcccgtctccgatcgcgtcactaagtgttgcactgaatcgctggtgaatcgccgtccatgcttctcggccctggaggtggacgagacttacgtgccgaaagaatttaacgcagaaactttcaccttccacgcggacatctgtactttgtcagagaaagagcggcagatcaagaagcagactgccctcgtggaactggtgaaacataagcctaaggctaccaaggagcagctgaaggctgtgatggacgacttcgccgccttcgtggaaaaatgctgcaaggccgatgacaaggaaacttgtttcgccgaagaaggcaaaaagctcgtagcagcttcgcaggcagctctgggactt

SEQ ID NO: 9373 - DNA, 2007 bp, Artificial Sequence
  derived and/or modified sequence
atgaaatgggtgagctttatctcgctccttttcctgttttccagcgcatatagtggctctctggataagcgtcacggggagggcactttcactagtgacgtgtctagttacctagaaggacaagcagctaaggaatttattgcatggctggtgaagggtagacatggtgagggcactttcacctccgacgtgtcaagctacctcgaggggcaagcagccaaggagttcatagcttggttggtaaaaggaagggacgcacataaatcagaagtggcccatagattcaaagacctgggagaggagaattttaaggccttagtgctgatcgcttttgctcagtacctgcaacagtgtccgtttgaggaccacgtaaaactcgtgaacgaagttaccgagttcgcaaagacatgtgtggctgacgagagcgccgagaattgtgataaatcgttacacacactgttcggtgacaagctgtgtacggttgccacactccgggagacttatggcgagatggccgactgctgcgcaaaacaggagcccgagcggaacgagtgctttctccagcataaggacgacaaccctaacctgcctcggctagttaggcctgaggtggatgtcatgtgtacagccttccacgataatgaggaaacattcctcaagaagtacctgtacgagatcgcgcggcggcatccctacttttatgccccagagctgctgttcttcgctaaacggtataaagccgcattcacagagtgttgtcaagccgctgataaagccgcttgcctcctgccaaagctggatgaactgcgggatgaaggaaaggcctccagcgctaagcagcgactgaagtgcgctagtctgcaaaagtttggggaaagagcgttcaaggcctgggccgtggctagactgtcccagcgtttcccgaaagccgagtttgcagaggtctcaaagctggtaactgacctgactaaagtccacacagagtgttgtcacggggatctgttggaatgtgccgatgatcgcgcagacctcgccaagtacatttgcgagaaccaggattcaattagttccaaactcaaagaatgctgcgagaagccacttctcgagaagagccattgtatcgccgaggtggagaatgacgagatgcccgccgatctgccttcattggctgctgacttcgttgagtcaaaggacgtctgcaagaactatgcagaggccaaagatgtgtttctgggcatgtttctgtatgaatacgcccgccgccacccagactactccgtcgtcctgttgctgcggcttgccaagacttatgaaaccaccttggagaagtgctgcgccgccgctgatccccacgagtgttacgcaaaagtgttcgacgaattcaagcctctggtggaagagcctcagaacctaattaagcagaactgtgaactgtttgaacagcttggcgaatacaaatttcagaacgccctgcttgttaggtacactaaaaaagtgccccaggtgtccacccccaccctggtcgaggtgtcacggaacctgggaaaggtggggtccaagtgctgtaagcaccctgaggctaagaggatgccgtgtgcagaggattacttgtcagtggtgctgaaccagctgtgcgtgctgcatgaaaagacaccagtgtccgatcgcgtcactaaatgttgcactgaatccctggtcaaccgacggccttgcttcagtgccctggaagtggatgagacctatgtgcccaaggagtttaatgccgaaacatttacctttcacgcagacatttgcaccttgagtgaaaaggagaggcagatcaaaaagcaaacagctctcgttgagcttgtgaagcacaagcctaaagccactaaggaacaattgaaggccgtcatggatgattttgccgctttcgtggagaagtgctgcaaggcagacgacaaagaaacgtgttttgccgaagaggggaagaaactcgtcgcggcctcccaggccgcgttggggctt

SEQ ID NO: 9374 - DNA, 2007 bp, Artificial Sequence
  derived and/or modified sequence
atgaaatgggtctctttcatttcgcttctatttctcttttcatctgcatatagtggatccctcgataagaggcatggggaaggaacatttactagtgacgtcagttcctatctggaaggacaggctgctaaagagttcatcgcatggctcgtaaagggacgccatggagaagggactttcacaagtgatgtgtcctcatacctggaaggacaggcagccaaagaatttatagcctggcttgtgaaaggaagagatgcacataaatccgaagttgctcacagatttaaagatttaggagaagaaaattttaaagcccttgttctcattgcctttgctcagtatctccagcagtgcccctttgaagaccatgtcaagcttgtgaacgaagtgactgaattcgcaaaaacttgtgtggccgatgaatcagcagaaaattgcgacaaatccctccatacactattcggggataaactgtgtactgtggcaactcttagggaaacatatggggaaatggccgattgctgtgccaagcaggaaccagaacgcaatgaatgttttttacagcataaagatgataatcctaacctaccgaggctggttcgacccgaagttgacgtcatgtgcacagctttccacgataacgaagagactttccttaaaaaatacttgtatgagattgccaggagacatccttatttctacgcccctgaactcctctttttcgctaaacgctataaagctgctttcactgaatgttgtcaggcagccgataaagctgcgtgtctcttgcctaaactcgatgaactacgggatgaaggaaaagcctcctcagcaaagcagcggctcaaatgcgcatctctgcagaaatttggggaacgcgcctttaaggcttgggctgtcgctagactctctcagcggttcccaaaagcagaatttgctgaagtgtcaaaactagtgacagatctaactaaggtgcacactgaatgttgtcacggagatctgctggaatgcgcagatgatagagcagatcttgctaaatacatatgtgagaatcaggactccatatcatctaaactgaaagaatgttgtgaaaaaccattattggaaaaaagtcactgcatagccgaagtggagaatgatgaaatgcctgctgatctcccttcgctcgccgccgatttcgtggaatccaaagatgtttgtaaaaattatgccgaggccaaagatgtgttcctaggaatgtttttgtacgaatatgctaggcggcatcccgattattcagtggtactgctactacggctcgcaaaaacttatgaaactactctggaaaagtgttgtgccgccgccgacccgcatgagtgttacgctaaagtattcgacgaattcaaacccctcgtcgaagaaccacagaacctcatcaaacaaaactgcgagctgtttgagcagttaggggaatacaagtttcagaacgcactgctggttcgatacacaaagaaagtaccacaggtaagtacgcccacactggtggaggtgtctcggaacttagggaaagttggatctaagtgctgtaaacaccccgaggcgaaacgaatgccatgcgcagaagactatctctcagtagtgctcaaccagctttgtgtgttacatgaaaaaactcccgtatcagatagagttacaaagtgttgcacagaaagtctcgtgaaccgccgcccctgcttctccgcgctggaagtggatgaaacttatgtgcccaaagagttcaacgctgaaacatttacttttcatgctgatatctgtacactttctgaaaaagaacgacagataaaaaaacaaacagccctagtggagttagttaaacataaaccgaaggcaactaaagaacagcttaaagcagtgatggatgattttgctgcctttgtggaaaagtgctgcaaagccgacgataaggaaacatgtttcgccgaagaagggaagaaactcgtggccgccagtcaggcagcccttggactc

SEQ ID NO: 9375 - DNA, 2007 bp, Artificial Sequence
  derived and/or modified sequence
atgaagtgggtgtccttcatcagcctcctcttcctgttctcatcggcttactcaggatccctggacaagagacacggagaaggaaccttcacctcggatgtgtcctcctacctcgaaggacaagccgccaaagagttcatagcctggctcgtcaaaggacggcacggtgagggtacctttacgagcgacgtgtcctcttacctggagggacaagcagccaaggaattcatcgcatggttggtgaaggggcgcgacgcacataaaagcgaagttgcccaccggttcaaggatctgggcgaagaaaacttcaaggccctggtcttgatcgctttcgcgcaatacctccagcagtgtccgtttgaggaccacgttaagctggtcaatgaagtgactgagttcgcaaagacctgtgtggcggacgagtcggccgagaattgcgataagtcattgcataccctcttcggggacaagctgtgcaccgtggcaacgctgagagagacttatggagaaatggcggactgctgcgctaaacaggaacctgaaagaaacgagtgcttcctgcaacataaagacgacaatccgaatctgccacggctggtgaggccagaagtggatgtgatgtgcactgccttccatgacaacgaggaaaccttcctcaagaagtacctctacgagatcgcgaggcgccatccatacttctatgcgccggagttgctgttcttcgctaagcggtacaaggcagccttcactgagtgctgccaggccgctgacaaagcggcctgcctgcttcccaagctcgacgaactgcgagatgagggaaaggccagcagcgcgaaacagaggttgaaatgtgccagcctccaaaagtttggcgaacgcgctttcaaagcgtgggcggtggcccgcctctcccaacggttcccgaaggcggaattcgccgaagtgtcgaaacttgtgactgatcttacgaaagtccacaccgaatgctgtcatggtgatctgctggagtgcgccgacgacagggcagatctggcaaagtacatctgcgagaaccaagactccatctcaagcaaactgaaagaatgctgcgaaaaacctctcctcgaaaaatcccattgtatcgccgaggtggagaatgacgaaatgccggctgacctgccgagcctggcagcagattttgtggagagcaaggatgtttgcaagaattacgcagaagcgaaagacgttttcctcggtatgttcctgtacgagtacgcacggcgccatccagattactcagtggttctgctgctgcgcttggccaaaacctacgaaaccaccttggaaaagtgctgtgcagcggccgatccacacgagtgctacgctaaggtgtttgacgagttcaagccgctcgtggaggaaccccagaacctgattaagcagaactgcgaattgtttgagcaactgggagaatacaagttccagaacgcattgcttgtccgctacactaagaaggtaccgcaggtgtcgactcctaccctggtggaagtgtccaggaacctgggaaaggtgggctccaagtgctgcaaacacccggaggccaagcggatgccgtgcgccgaagattacctgtcggtggtactgaaccagctgtgtgtcctgcacgagaaaactcctgtgagcgatcgcgtcaccaagtgttgcactgagtccctggtgaacagacggccgtgttttagcgccctcgaggtggacgaaacctacgtcccgaaggagttcaacgccgagactttcactttccacgccgatatctgcaccctgagcgaaaaggaacgccagatcaagaaacagacggccctggtggaactggtcaagcacaagcccaaggcgactaaggagcagttgaaggcggtcatggacgattttgcagccttcgtcgagaagtgctgtaaagctgacgacaaggaaacctgcttcgccgaggaaggaaagaagctcgtagccgcctcgcaggccgccctcggattg

SEQ ID NO: 9376 - DNA, 2007 bp, Artificial Sequence
  derived and/or modified sequence
atgaagtgggtgagttttattagtctgctcttccttttctcctccgcatactctggctcgctcgacaagaggcatggtgaagggacttttacttctgatgtctcttcctacctcgaaggccaggcggccaaggagtttattgcctggctagtaaaggggagacacggggaaggaacatttacaagcgacgtgagcagctaccttgagggtcaggcagccaaagagtttatagcttggttggtcaagggaagggatgcccacaagagcgaagtggcacaccgatttaaagatctgggagaggaaaactttaaggccctcgtcctgatagcttttgcgcagtacctgcagcagtgcccctttgaggatcacgttaaactggttaacgaggttacagagtttgctaagacctgcgtggctgatgagtccgcagaaaactgtgataagtctttgcatacccttttcggcgacaaactgtgtacagttgccactctcagggagacttacggggaaatggctgattgttgtgccaaacaagaaccagagcggaatgagtgttttctgcaacacaaggatgataatcccaatcttcctcggcttgttcgacctgaggtcgacgtaatgtgcacggctttccacgacaacgaggagactttccttaagaaatacctgtacgagattgcacggaggcatccctatttctacgcacccgagctgttattttttgccaaacgctacaaggctgcattcacagaatgctgtcaggcagccgataaagcggcctgcttgttgccaaaactggatgagctgcgtgacgaaggaaaggcgtcttctgccaagcagagactgaagtgcgcgagcttacagaaatttggggaaagagcgtttaaagcgtgggccgtggcccgtcttagtcagcgatttcccaaggcagagttcgccgaggtgagcaagttagttacagatcttaccaaagttcacaccgagtgttgccacggcgatcttttggaatgcgccgacgacagggccgatctggccaagtatatttgcgaaaaccaggattccatttcatctaagttaaaggagtgttgcgaaaagccactgttagagaagtcacactgcatcgccgaagtcgagaacgatgaaatgcccgcggatctgccgagcctggccgcagatttcgtcgaatctaaggacgtctgcaagaattacgcagaagcgaaagatgtgttcctgggaatgtttctctacgagtacgcccggcgccacccagattatagcgtggtgttgctccttcggctggcaaaaacctatgagacaacattggagaaatgctgtgctgccgcagacccacatgaatgctacgccaaagtgtttgacgagtttaagccgttggtagaagagccccagaacctcattaagcaaaactgtgagctgttcgagcagttgggagaatacaagttccagaacgcactgttagttcgctacacaaaaaaagtccctcaggtgtccaccccaacgctcgtcgaggtttcacggaacctcggtaaggttggcagcaagtgttgtaaacaccctgaggcaaaaaggatgccttgtgcagaggattatttgtcagtggtgctgaaccagttgtgcgtcctgcacgaaaagacgcctgtgtccgacagagttaccaagtgctgtacagagtctctggtcaaccgtagaccctgtttctctgcgttggaggttgatgagacatacgtgcccaaggaattcaacgctgagacattcacgtttcatgccgacatttgcaccctgagcgagaaggagcgacagatcaagaagcagacagcattggtagaactcgttaagcataagcccaaggctacaaaggaacagctgaaggcggtaatggacgacttcgccgcattcgtggaaaagtgttgcaaagccgatgataaggaaacttgcttcgccgaggagggaaaaaagcttgttgcagcatcacaggcagcactggggctc

SEQ ID NO: 9377 - DNA, 2007 bp, Artificial Sequence
  derived and/or modified sequence
atgaagtgggtctcttttattagtctcctgttcctgttctcttccgcctatagcgggtcattagataaaagacacggggagggcacatttacgtcagacgtgagctcatacctcgaaggccaggccgcgaaagagttcatagcttggcttgtgaagggccggcacggggaaggaacgtttaccagcgacgtgtcttcttacctagaagggcaagccgcaaaagagtttatcgcctggcttgttaagggaagggacgcacataaatcagaggtggcgcatagatttaaggatttgggcgaagaaaacttcaaagctcttgttctcattgcctttgcacagtaccttcagcagtgtcccttcgaagatcacgtcaagctggttaacgaagtgaccgaattcgccaaaacttgtgtggctgatgagtcagccgagaattgtgacaaatccctgcacactttgttcggagataagttgtgtacagtagccactttgcgagagacatacggtgaaatggcggactgctgcgccaaacaagaacctgagagaaacgaatgcttccttcaacacaaagatgacaaccctaacctgccaagactggtgcggcccgaagttgatgtaatgtgtaccgctttccacgataatgaggagactttcctaaagaagtatctgtatgaaatcgccagaaggcacccctacttctatgcgccagaactgctgtttttcgccaagcggtataaagcagcgttcacagaatgctgtcaagccgccgacaaagcggcctgcctcttgcctaagttggacgaactgagagatgaaggtaaggcctcaagcgctaagcaaaggctaaaatgtgccagcctacaaaagtttggcgaaagagcctttaaggcatgggctgtcgctcgcttgtcccagcgattcccaaaggcagaatttgccgaggtatctaaactggtcactgaccttacgaaggtgcatacggagtgctgccatggagatcttctagaatgtgccgacgaccgcgcagatttggctaagtatatctgtgaaaaccaggacagcatctcctcaaagcttaaagagtgctgcgagaaaccactgctggagaagtctcactgcatcgctgaagtggaaaatgacgagatgcctgctgacctgcccagccttgccgctgattttgtagaatccaaagacgtgtgcaaaaattacgctgaagccaaggacgtgttcttgggaatgttcctctacgagtacgcccggcggcatcctgattactctgtggtccttcttctgcgccttgcgaaaacatacgaaacgacattagaaaaatgctgcgcggctgctgacccccacgaatgctacgccaaggtgttcgatgagttcaagccgttggtggaggaaccacaaaacctcataaaacagaattgcgagctctttgaacagttgggcgagtacaaattccagaacgcgttgctggtcaggtacaccaaaaaagtcccccaggtgtccactcccacactggtggaagttagtcgaaacctgggcaaagtcggatccaagtgttgcaaacatcccgaggccaaacgtatgccttgtgctgaagattacttgagtgtcgttctgaaccaactttgcgtcctgcacgagaagaccccggtttcggacagagtgaccaagtgttgcactgaaagcctggtcaaccgccgtccttgtttctctgcattagaggtggacgagacttatgttccaaaggaattcaacgcggagacgtttaccttccatgcagacatttgtactcttagcgagaaagagcgtcaaatcaagaagcagacagctttagtggagctcgtgaaacacaaaccaaaggccacaaaggagcagcttaaggctgtgatggacgacttcgccgccttcgttgaaaaatgctgcaaagcagacgataaagagacctgtttcgcagaagaaggaaagaaactcgtcgccgcttcacaggcagccctgggattg

SEQ ID NO: 9378 - DNA, 2007 bp, Artificial Sequence
  derived and/or modified sequence
atgaaatgggtgtcatttatctcactgttgttcctgttcagctctgcgtattcaggttctctcgacaaacgccacggtgagggcaccttcacgtcagatgttagttcttacttggaggggcaggccgctaaagagtttatagcgtggctggtcaaagggagacacggggaggggactttcacttctgacgtgtccagttatttggaagggcaagcagcgaaggagtttatcgcttggctggtgaagggcagagacgcacataaatctgaggtcgcacacaggttcaaggacctgggagaggagaatttcaaggccctggtactgatagccttcgcccagtatcttcagcagtgtccctttgaggaccatgttaaactggtgaacgaggtgaccgagttcgcaaaaacgtgcgtggcagacgagtctgccgaaaattgtgataagtctctgcacaccttgtttggcgacaagctctgtaccgtggccacattgagagaaacttacggtgagatggctgactgttgtgccaagcaggaaccagaaaggaatgaatgctttctccagcataaggatgataaccctaatttgcctagactggtgcggccggaggttgatgtcatgtgcacagcatttcacgacaatgaagagactttcctgaaaaaatatctgtacgaaattgcaagacggcatccctatttctatgctcccgagctgctctttttcgctaaacggtacaaagccgccttcacagaatgctgccaggctgcggataaggccgcatgcctcttgccgaagctcgatgagttgagggacgaagggaaagctagttcagccaaacagcgactgaagtgtgctagcctccaaaaatttggcgagagagcttttaaggcttgggcggttgctcgactgagccaaaggtttccgaaggcggagtttgcagaggtgtccaagctcgtgactgaccttaccaaagtgcacacagaatgctgccatggcgatttgctcgagtgtgccgacgacagggccgacctggctaagtacatctgtgagaatcaggactctattagctcaaagctcaaggaatgctgtgagaaaccactgctcgagaagagccattgcatcgcagaggtggagaatgatgagatgcccgccgatctccccagtcttgcggccgattttgtggagtccaaggacgtgtgcaagaactacgcagaggccaaggatgtgttcctgggaatgttcctctacgagtatgccagacggcatccagattacagcgtagtcttgcttcttcggctcgcgaagacatatgagaccaccctcgaaaagtgttgcgccgctgcagaccctcatgagtgttatgctaaggtcttcgatgaattcaagccactggtggaagagcctcagaacctgatcaaacagaattgcgagctgttcgaacagctgggggagtataaatttcagaacgccctgctggtccgatataccaaaaaggtgccgcaggtttccactccaactttggtcgaagtttcacggaaccttggaaaggtgggtagcaaatgctgtaagcatcccgaggcgaagagaatgccctgcgctgaggactatctgtctgttgttctcaaccaactttgcgtactgcatgagaagacccctgtctctgatagggtcacaaagtgttgcaccgagtctctcgtcaatcgaaggccatgtttcagcgcactggaggttgacgaaacctacgtcccgaaggaatttaatgcggagaccttcacatttcatgcagacatttgcaccttgtcagagaaggagcggcagattaagaaacagaccgctctggttgaactcgtgaaacacaaacctaaggccactaaagagcagctcaaagccgtcatggacgatttcgctgcttttgttgaaaagtgctgtaaggccgatgacaaggaaacatgcttcgctgaggaagggaagaaattggtggccgcctctcaggccgcactgggactg

SEQ ID NO: 9379 - DNA, 2007 bp, Artificial Sequence
  derived and/or modified sequence
atgaaatgggtaagcttcatctctcttctgtttctgttcagctctgcgtattccggttctctcgataagagacacggcgaggggactttcacttctgatgtgtcttcctatctcgagggccaagctgccaaggagtttatcgcttggctggtgaaaggccgccacggagaaggtacctttacctccgacgtgtcatcttacttggaaggacaagctgcgaaggagttcatcgcatggctggtgaaaggaagggacgcacacaagtcggaggtggcccaccggttcaaagaccttggagaggaaaacttcaaggccctagtcctgatcgcgttcgcccagtatctgcagcagtgtcccttcgaagaccacgtgaagttggtcaacgaggtgacagagtttgccaagacttgcgtggcggatgagtccgccgaaaactgtgacaaatctttgcacacactgttcggagataagttgtgtaccgtggcaacactacgggaaacatatggtgagatggcggactgctgcgcaaagcaggaacctgagagaaacgagtgttttctgcagcataaggatgataaccctaatctgcccaggcttgtcagacctgaagtggacgtaatgtgtaccgcttttcacgacaacgaggagacattcctgaaaaagtacttgtacgaaatcgccagacgccatccctacttttacgcccctgagcttctctttttcgccaagcggtataaggccgcctttaccgagtgttgtcaggcagcggataaggcagcttgcctcttgcctaagttggacgaactccgagacgaaggcaaagccagctcagctaaacagagactcaagtgcgcctcattgcagaagtttggagagcgagctttcaaagcttgggcagtcgcacgcttgagccagcgctttcccaaggctgagtttgccgaagtgagcaagctggttacagatcttactaaggtgcacactgagtgctgccacggagatctcctagaatgcgctgacgaccgggctgatctggccaagtacatttgcgagaaccaagactctattagctcgaagctaaaggaatgctgtgaaaagcctctcttggagaaaagccactgtattgcagaagtggaaaacgatgagatgccggctgacctgccctccctcgcagccgactttgttgagagtaaggatgtctgtaagaattacgcagaggcaaaagacgtgttcctcgggatgttcctttatgagtacgcgcggaggcaccctgactattccgtggtcctcctgctgcgactggctaagacttacgaaacaactctcgagaagtgctgcgcagccgctgacccacacgaatgctacgctaaggtcttcgatgagtttaagcctctcgtggaggagccacagaatcttatcaaacaaaactgtgaactgtttgagcagctgggagaatacaaattccaaaacgcacttctagttagatatacaaaaaaagtgccccaggtgtcaacccccacgctcgtggaggtcagcaggaacctaggcaaggtcggaagcaagtgttgcaagcatcctgaagccaagcgaatgccctgtgcggaggactatttaagtgtggtgctgaaccagctgtgtgttctccatgagaaaacacctgtgagcgatagggtcacaaaatgctgcaccgagtctttagttaaccggcggccttgcttttccgcgttagaggtcgatgagacatacgtccccaaagaattcaacgcagaaacttttacatttcacgccgatatatgtactctttctgagaaggaacggcaaatcaaaaagcaaacggctttggtcgagttggttaagcacaagccaaaggccacaaaggaacaactgaaggccgttatggacgattttgccgctttcgtggagaagtgctgtaaggctgatgataaggagacgtgcttcgccgaagaaggaaagaaattggtggctgcttctcaggctgctctggggctg

SEQ ID NO: 9380 - DNA, 2007 bp, Artificial Sequence
  derived and/or modified sequence
atgaagtgggtgtcctttattagcctgctgtttttattcagctccgcctattccggtagtttggacaagcgacatggagaggggactttcacttcggatgtgtccagttacctagagggacaagccgcaaaggagtttatcgcttggcttgtcaagggacgtcatggcgaaggcacgttcacctccgatgtctcttcgtacctggaaggtcaggcggccaaagagtttattgcttggctcgtgaagggacgtgatgcgcataagagtgaagtcgcgcataggttcaaggatttgggagaggaaaactttaaagcactggtcctcatcgcgttcgcccagtacttgcagcaatgtcccttcgaagatcatgtcaaactcgtgaatgaggtcacggaatttgctaaaacttgtgtggccgacgagagcgccgagaattgcgacaaaagcttgcacaccttgtttggagacaaactttgtaccgtggctaccttacgcgagacttacggggaaatggcggactgctgcgcgaagcaagagcctgagcgaaatgagtgcttcctgcagcacaaggatgataaccccaacttgccccgtctagtccgccccgaggtcgatgtcatgtgcacggcttttcacgacaacgaagagaccttcctgaagaagtacctgtatgaaatcgcccggcgccacccctatttctacgctcctgaactgctctttttcgccaagcgatacaaggcggcattcaccgagtgctgtcaggcagctgacaaagcggcatgccttctacccaaactcgacgagctccgtgatgaggggaaggcatcctcagccaagcagcggttaaagtgcgcgagcctgcagaaattcggagagagggcatttaaggcctgggctgtcgcgcgcctctcacagcgctttcccaaggccgagtttgccgaggtatcaaagctcgttacagacctcaccaaggtacataccgagtgctgccacggagacttgctggagtgtgcggacgatcgcgcagacctggccaagtatatctgcgagaatcaggatagtatttcttcgaagcttaaggagtgctgcgagaaaccccttctcgagaaatcgcactgcatcgccgaagttgagaacgacgaaatgcctgccgatcttccaagcctggccgccgacttcgtcgagtcgaaggatgtgtgtaaaaactacgcagaagctaaggatgtctttctcgggatgttcctgtacgaatacgcccgtcgacaccccgattactcggttgtgttgctactccgtctcgccaagacgtatgagacaacgctggagaaatgctgcgcagccgcagacccacacgagtgctacgcgaaagtcttcgatgaatttaagcctctggtcgaggagccacaaaatttgataaagcaaaactgtgaactgttcgaacagttaggcgagtataagtttcagaacgcactcctggtccggtacacaaaaaaggtcccacaagtgtccaccccaactctagtggaggtgtcacgtaaccttggcaaggtgggaagcaagtgttgcaaacatccggaggcgaagcgtatgccgtgcgccgaggattacttgtccgtcgttctgaatcagctatgtgtgctgcatgaaaagactccggtttctgatcgggttacgaagtgttgtactgagagcctggtcaatcggcgcccgtgtttcagcgcactggaggttgatgagacttacgtacccaaggagttcaacgcagagacattcaccttccacgcggatatctgtaccttgtccgagaaggagaggcaaatcaagaagcagactgccctcgttgagcttgtgaagcataagcctaaggcaactaaagagcagctgaaggcagtgatggatgattttgctgctttcgtcgagaagtgctgcaaggccgacgacaaggaaacctgtttcgctgaggagggaaagaaactcgtggccgccagccaggccgcgctgggccta

SEQ ID NO: 9381 - DNA, 2007 bp, Artificial Sequence
  derived and/or modified sequence
atgaaatgggtgtcgtttatctcgctcctctttctgtttagcagcgcatactcgggaagcctggataagagacacggtgagggaactttcaccagcgacgtgtcctcatatctggaaggacaggctgccaaggagttcatcgcctggctggtcaagggccggcatggtgaaggaacttttacctcagatgtctcctcttacctggaaggccaggccgcgaaggagtttatcgcgtggctcgtgaagggacgcgatgcccacaaatccgaggtggcccaccggtttaaggacctgggagaagaaaacttcaaggcgctcgtgctcatcgcattcgcacagtacctgcaacagtgcccattcgaggaccacgtgaagttggtgaacgaagtcaccgaatttgctaagacgtgcgtcgccgatgagtcagccgaaaactgcgacaagtcactgcataccctgttcggagacaagctgtgcactgtggcgactcttagggaaacgtacggagagatggcggactgctgtgccaagcaagaaccggagagaaacgagtgctttctgcaacacaaggatgacaaccctaaccttccgagactggtaagaccggaagtcgatgtgatgtgcaccgcgttccacgacaacgaggaaaccttcctgaagaagtacctctacgaaatcgcgcgcagacacccgtatttctacgcacctgaactgctgttcttcgcaaagcggtacaaagctgcatttaccgaatgctgccaggccgccgacaaagccgcatgcctgttgccgaagctggatgaactcagagacgaaggcaaggcgtcctccgctaagcagcgcctgaaatgcgcgtcacttcaaaagttcggcgagcgcgcctttaaagcgtgggcagtggcccgcctgtcacagagattcccgaaggcagaattcgcggaggtgagcaaactcgtgaccgacctgactaaggtgcatacggagtgctgccacggcgatcttctggagtgtgctgacgaccgcgcggatctcgcaaagtacatctgcgagaaccaggattcgatctcgagcaaactgaaggaatgctgtgagaagccgctgctggaaaagtctcactgcatcgctgaagtggagaacgacgaaatgccggcagacctgccatcccttgctgctgacttcgtggagtcaaaggacgtctgtaagaattatgcagaggcaaaggacgttttcctgggaatgtttctctacgaatacgcacggcggcatccggactacagcgtggtgctgctgttgcgcctggctaagacttacgaaacgacccttgagaagtgttgtgcggcagcggacccgcatgaatgctacgcgaaagtgttcgacgaattcaaaccgttggtggaagagccacaaaatctgatcaagcaaaactgtgagctttttgaacagctcggggagtacaagttccagaacgccctcctcgtcagatacactaagaaagtgccccaggtgtccactccaaccctggttgaggtgtccaggaaccttggaaaagtgggatcaaagtgctgtaaacaccctgaagcaaaacgcatgccgtgcgccgaagattacctgtccgtggtgcttaaccagctgtgcgtgctccatgagaaaacccccgtgtccgatagggtcaccaagtgctgcactgaatcgctcgtgaacaggcgcccttgcttcagcgcgctggaagtcgatgaaacctatgtgcctaaggaattcaacgctgaaacctttactttccacgcagacatctgtaccctgagcgaaaaggagagacaaatcaagaagcaaaccgctttggtggagctcgtgaagcacaagccgaaggccacgaaggaacaactgaaggccgtgatggacgacttcgccgccttcgtggagaaatgttgtaaagcggacgataaggagacttgcttcgccgaggaaggcaaaaaactcgtggcggcgtcccaagccgcgcttggtttg

SEQ ID NO: 9382 - DNA, 2007 bp, Artificial Sequence
  derived and/or modified sequence
atgaagtgggtgtcgttcatatctctcctttttcttttttcgtcagcctactcgggaagccttgataagcgccacggagagggtacctttactagcgatgtgtcctcctatctcgaaggtcaagcagcaaaggaattcattgcatggctggtcaagggacgccatggtgaaggtactttcacttcggacgtctcctcctaccttgaaggacaggccgcaaaggagttcatcgcctggcttgtcaaaggaagagacgcgcataagagcgaagtcgcacatcgctttaaggatctgggcgaagaaaactttaaggcacttgtgcttattgcatttgctcagtacctccagcagtgtccatttgaggaccacgtgaagctggtgaacgaggtgaccgaatttgcaaagacttgtgtggcagatgaatcagcagaaaattgtgacaagtcactccatactctgtttggagacaagctgtgcaccgtggctactctgcgggagacttacggagagatggcagattgctgcgcaaagcaggaacccgaacgcaacgaatgtttcctgcaacataaagacgataatccgaatctgccccggcttgtgcggcctgaagtcgatgtcatgtgcactgctttccacgataacgaggaaacctttttgaagaagtatctttacgagatagccagaaggcacccttacttttacgctcctgaattgctcttctttgccaagaggtacaaggcagcattcacggagtgctgtcaagcagcagataaagcagcttgtctgctccctaaacttgacgaactgcgtgacgaaggtaaagcctcctccgcaaagcaaaggcttaagtgcgcaagcctgcagaaatttggagagcgggcatttaaggcatgggcagtggcaagactttcgcaaagattccctaaggccgaatttgctgaagtgtcaaagctggtgaccgatctcaccaaggtccacaccgaatgttgccacggcgaccttctggaatgtgcagatgatcgggcagaccttgccaaatacatttgtgaaaatcaggatagcattagctccaagctcaaagaatgctgtgaaaagcctcttctggaaaagtcgcattgtatcgcagaagtggaaaatgatgagatgcctgcagatctgccttccttggcggcagattttgtggagagcaaggatgtgtgtaagaattacgcggaggcaaaggatgtgttcctgggtatgtttctctatgagtacgcaaggagacacccagattactccgtcgtcctgctgcttagactggctaagacttatgaaacgaccctggaaaaatgttgtgcagcagcagatccacatgagtgctacgccaaggtgtttgacgaattcaagccgctggtggaggaaccacagaatttgattaagcaaaactgcgaactgtttgaacagctgggagaatacaaattccaaaatgctcttcttgtgcggtatacgaagaaagtgccgcaagtgtcgactccgactctcgtcgaggtgagcaggaatcttggaaaggtggggagcaagtgctgtaagcaccccgaagcaaagagaatgccatgtgcggaggactatctctcggtggtgcttaaccagctgtgtgtcctgcatgagaaaaccccagtgtcagatcgggtcaccaagtgttgtactgagagccttgtgaatcgacgtccttgcttttcagcattggaggtcgatgagacttacgtgccaaaagaattcaacgcagaaacctttacgttccatgcagacatctgtactctgagcgagaaggaacgccaaatcaaaaagcaaaccgccctggtcgagctcgtgaaacacaagcctaaggcaactaaggagcagcttaaggccgtgatggatgattttgcagcattcgtggaaaagtgttgtaaggcagatgacaaggaaacttgttttgcagaggagggcaaaaagctggttgcagcaagccaggccgcactggggctg

SEQ ID NO: 9383 - DNA, 2007 bp, Artificial Sequence
  derived and/or modified sequence
atgaagtgggttagctttattagcctgctttttctgttttcatctgcttactccgggagtctagacaaacggcacggagaaggaacatttacaagtgacgtttcaagctatctcgagggacaggccgccaaggagttcatcgcatggcttgtgaagggacgtcacggagaaggtaccttcacttctgatgtgagctcctacctggagggccaggcggcaaaagagtttatcgcatggttggttaaagggagggacgcacataaatctgaagtggctcaccgctttaaggatttgggggaagagaatttcaaggcactggtgctgattgcattcgctcagtacctgcaacagtgcccttttgaggatcatgtgaaactcgtgaacgaagtcaccgaatttgccaagacgtgtgtggctgacgagagcgctgaaaattgtgataagagcttgcacaccctgttcggggataagctgtgcactgtggctacacttcgtgaaacctatggcgagatggcagattgctgtgcaaaacaagagcccgagcggaacgaatgttttctgcaacataaggatgataatcccaacttgcctcggttggtgagacctgaggtcgacgtgatgtgtacagcatttcacgacaacgaggagaccttcctgaaaaagtacttatacgaaatcgctagaagacatccatacttttatgcccccgagctgctcttttttgctaagaggtacaaggccgcttttaccgaatgctgccaggcagcagacaaagcggcctgcctgttgccaaagctcgatgagctaagagatgaaggaaaggcatcatccgctaagcagcgcctcaagtgcgcctcgctgcagaagttcggagagcgggcattcaaggcctgggcagttgcccgtttatcccagaggtttcccaaagctgagttcgccgaggtttccaaattggtaactgatttgaccaaggtccacacggagtgctgccatggggatctgttggaatgcgctgatgaccgcgctgacctggctaaatacatttgtgagaaccaagattctatttcttccaagttgaaagaatgttgcgaaaaacccctgctcgagaaaagtcattgcattgccgaggtggagaacgacgaaatgccagccgacctgccatccctcgcggcagatttcgtcgagtcaaaagatgtctgcaaaaactacgccgaagccaaggatgtgttcctcggaatgttcctgtacgaatacgcacgaagacaccccgactacagcgtagtgttgctactcagactggcaaagacctacgaaacaacacttgagaagtgctgtgcagcagcagacccccatgagtgctacgcgaaagttttcgacgagttcaaacccttggttgaggaaccacagaacctgatcaagcagaattgcgagctttttgaacagctgggtgaatacaaattccagaacgcgctgttggtaagatatacaaagaaggtacctcaagttagtactccaacactggtcgaggtgtctaggaacctcggaaaagtaggatccaagtgctgcaagcaccctgaagccaagcgcatgccttgcgctgaggactacctgagtgtagtgctcaatcagctgtgcgtgctgcatgagaagacccccgtgtcagacagggttacaaagtgctgcaccgagagtctggtgaatcgcagaccttgtttctcagcccttgaagttgatgaaacatatgtgccgaaagagttcaacgccgagacgtttacatttcatgcggatatttgcaccttgtccgagaaagaacggcagatcaaaaagcagaccgctctcgtggagctggtcaagcacaaacctaaggctacaaaagagcagctgaaggctgtgatggatgacttcgccgctttcgtggaaaaatgttgcaaagcggacgataaggaaacctgctttgcggaagaaggcaaaaagcttgttgctgccagccaggcggccctgggcctc

SEQ ID NO: 9384 - DNA, 2007 bp, Artificial Sequence
  derived and/or modified sequence
atgaaatgggtcagcttcatttccctgttgtttctgttcagctctgcgtactcggggtccctcgataagcggcacggagagggtacgttcacctccgatgtctcgagctaccttgaagggcaggccgctaaggaattcattgcatggcttgtgaagggccgtcacggtgaaggtacgtttacgtccgatgtgagctcgtacctcgagggacaggcagcgaaggaattcatcgcgtggctggtgaaggggcgggacgcgcataagtcggaagttgcacacaggttcaaggacctgggggaggaaaactttaaggcgcttgtgctcattgcgtttgcacagtatcttcagcaatgtccatttgaggatcacgtgaagttggtgaacgaggtgacggagtttgccaagacctgcgtggctgatgaatccgccgaaaactgcgataagtcactccacaccctcttcggagataagctctgtaccgtggcaaccctgagggaaacttacggcgaaatggccgactgttgtgcaaagcaagaacccgagagaaacgaatgcttcctccaacataaggacgataaccctaatctcccccggctggttcgcccggaggtcgatgtcatgtgtaccgcatttcatgacaacgaggagactttccttaagaagtacctgtacgaaattgcgcgcaggcatccttacttttacgcaccagagctgcttttcttcgcaaagcgctacaaggccgcttttactgagtgctgccaagccgcagataaagccgcgtgtctgctgcctaagctggacgaacttcgggatgaaggtaaggctagctcagcaaagcaaaggcttaagtgcgcatcgctgcaaaagtttggtgaacgcgcattcaaagcgtgggccgttgcacgcctgtcgcaacgattcccgaaagcagagtttgcagaagtctccaagctggtgactgatctgactaaagtccacactgaatgttgtcatggggacttgctggaatgtgcagatgatcgagcagacctcgccaagtacatttgcgagaatcaagattccatctcctcaaagttgaaggaatgttgtgagaaaccactgttggagaaatcacattgtatcgccgaggtcgagaacgatgaaatgcccgcagatctgccatccctggccgccgactttgtcgaatccaaggatgtgtgtaagaattacgcagaggcaaaggacgtgtttctgggcatgtttttgtacgagtacgcaaggcgtcacccagattatagtgtcgtcctgctgctcagattggctaaaacctacgaaaccactctggagaagtgctgtgcagcagccgacccacacgaatgttacgcgaaggtgttcgacgagtttaagccattggtggaagaaccccaaaacttgataaagcagaactgtgaactgtttgaacagctgggagagtacaaattccagaacgcacttctcgtcagatacaccaagaaagtcccacaagtgtccactcctacgctcgtcgaagtgtcgcgaaaccttgggaaagttggttcgaagtgctgcaagcaccccgaggcaaagagaatgccttgcgctgaagattaccttagcgttgtgctgaatcagctttgcgtgctccatgaaaagactcccgtgagcgacagagtgactaaatgctgtacggaatcgctggtgaaccgcaggccatgttttagcgcacttgaagtggacgagacttacgtcccgaaggagtttaacgcggaaacttttaccttccacgcagatatttgcacgctttcggaaaaggaaagacagatcaagaagcaaaccgcacttgtcgaacttgtgaagcacaagcccaaagccacgaaggaacaacttaaggcggtcatggacgattttgcagcttttgtggaaaaatgttgtaaagcagacgacaaggaaacctgttttgccgaagaggggaagaaacttgttgcagcaagccaggcagcgctgggactg

SEQ ID NO: 9385 - DNA, 2007 bp, Artificial Sequence
  derived and/or modified sequence
atgaaatgggtatcgtttatatcgttattatttttattttcgtcggcgtattcgggttcgttagataaacgacatggtgaaggtacgtttacgtcggatgtttcgtcgtatttagaaggtcaagcggcgaaagaatttatagcgtggctagtaaaaggtcgtcatggtgaaggtacgtttacgtcggatgtatcgtcgtatttagaaggtcaagcggcgaaagaatttatagcgtggttagtaaaaggtcgtgatgcgcataaatcggaagttgcgcatcgatttaaagatttaggtgaagaaaattttaaagcgctagttttaatagcgtttgcgcaatatttacaacaatgtccgtttgaagatcatgtaaaattagtaaatgaagtaacggaatttgcgaaaacgtgtgtagcggatgaatcggcggaaaattgtgataaatcgttacatacgctatttggtgataaattatgtacggttgcgacgctacgtgaaacgtatggtgaaatggcggattgttgtgcgaaacaagaaccggaacgtaatgaatgttttctacaacataaagatgataatccgaatctaccgcgtttagtacgaccggaagtagatgttatgtgtacggcgtttcatgataatgaagaaacgtttctaaaaaaatatttatatgaaatagcgcgtcgacatccgtatttttatgcgccggaattattattttttgcgaaacgatataaagcggcgtttacggaatgttgtcaagcggcggataaagcggcgtgtttattaccgaaactagatgaactacgtgatgaaggtaaagcgtcgtcggcgaaacaacgtttaaaatgtgcgtcgttacaaaaatttggtgaacgtgcgtttaaagcgtgggcggtagcgcgactatcgcaacgttttccgaaagcggaatttgcggaagtatcgaaactagttacggatttaacgaaagtacatacggaatgttgtcatggtgatctattagaatgtgcggatgatcgtgcggatctagcgaaatatatatgtgaaaatcaagattcgatatcgtcgaaattaaaagaatgttgtgaaaaaccgctattagaaaaatcgcattgtatagcggaagttgaaaatgatgaaatgccggcggatttaccgtcgttagcggcggattttgtagaatcgaaagatgtatgtaaaaattatgcggaagcgaaagatgtatttttaggtatgtttctatatgaatatgcgcgacgtcatccggattattcggtagtattactactacgtttagcgaaaacgtatgaaacgacgttagaaaaatgttgtgcggcggcggatccgcatgaatgttatgcgaaagtatttgatgaatttaaaccgctagtagaagaaccgcaaaatttaataaaacaaaattgtgaactatttgaacaactaggtgaatataaatttcaaaatgcgttactagtacgatatacgaaaaaagtaccgcaagtatcgacgccgacgctagtagaagtatcgcgtaatctaggtaaagttggttcgaaatgttgtaaacatccggaagcgaaacgaatgccgtgtgcggaagattatctatcggtagttttaaatcaattatgtgttttacatgaaaaaacgccggtatcggatcgagtaacgaaatgttgtacggaatcgctagtaaatcgtcgtccgtgtttttcggcgctagaagtagatgaaacgtatgttccgaaagaatttaatgcggaaacgtttacgtttcatgcggatatatgtacgctatcggaaaaagaacgtcaaataaaaaaacaaacggcgctagtagaactagtaaaacataaaccgaaagcgacgaaagaacaattaaaagcggtaatggatgattttgcggcgtttgtagaaaaatgttgtaaagcggatgataaagaaacgtgttttgcggaagaaggtaaaaaactagtagcggcgtcgcaagcggcgctaggttta

SEQ ID NO: 9386 - DNA, 2007 bp, Artificial Sequence
  derived and/or modified sequence
atgaaatgggtgtcttttatttcactcctattcctgttctcctccgcctactctggaagtttagataaaaggcatggagaagggacattcacttcagacgtgtccagttatctggaagggcaggcagccaaagagttcatcgcctggcttgtcaaggggcggcatggagaaggaacatttactagtgatgtatcgtcctacctggaagggcaggccgccaaagagttcattgcgtggctggtcaaaggaagagacgcacataaatcagaagtcgcccaccgattcaaagaccttggagaggaaaactttaaagctctcgttctcattgccttcgcacagtatctccagcagtgccccttcgaggatcacgtgaaactggtaaacgaagtaactgaattcgccaaaacttgcgtagctgatgagtcagctgagaattgtgataaaagtctccatactctcttcggggataagctctgcacagtagctactctgcgagaaacttacggagaaatggcggattgttgcgccaaacaggaacctgagagaaacgaatgcttcctgcagcacaaggatgataatcccaatctacctcgcctggtgagacccgaggtggacgtgatgtgtactgccttccacgataatgaagaaacatttttaaaaaaatatctatatgagatcgcccgacggcatccatacttctacgctcccgaacttcttttttttgccaaacggtacaaggctgccttcacagaatgctgccaggctgccgataaagcagcctgccttcttcctaagttagatgaactgagggacgaagggaaagcctcatcggcgaaacagcgcctaaaatgcgcctcactgcagaaatttggggaaagggccttcaaggcctgggctgtggctaggttatctcaaaggtttccaaaagccgaattcgctgaagtctccaagctagtgacagatctcacaaaagtgcacacggaatgctgccacggggacttgttggaatgtgctgatgatagggctgatctcgcaaaatatatatgcgaaaatcaggatagtatatctagtaaactaaaggagtgttgtgaaaagccattgcttgaaaaatcacattgcatcgcagaagtggaaaatgatgaaatgccagccgatctaccatctctggcggcggattttgtcgaaagtaaagatgtgtgtaagaattacgcagaagccaaagatgtattcttaggaatgtttctctacgaatacgccagacgacatcctgattactctgttgtgctactcctaaggctggcgaaaacatatgaaacaactcttgaaaagtgttgcgcggcagctgatccacacgaatgctatgccaaagtgtttgatgagttcaaaccccttgttgaagaacctcagaatcttattaaacagaattgcgaactttttgaacagctaggggaatataaattccagaatgcactcctggtgcggtatactaaaaaagtaccccaggtgagtacacctacactggtggaggtcagtagaaatctggggaaggtagggtccaaatgttgtaaacaccctgaagcgaagaggatgccatgcgccgaagattatttatctgtggtgctgaaccagttgtgtgtccttcatgaaaagactcctgtatcagacagagtaactaaatgctgcacagaatcccttgtaaaccgacgcccatgcttttcagccctcgaggtggatgaaacatatgtgcccaaagaattcaatgctgaaacatttacattccacgctgatatttgcacactatcagagaaggaaaggcagataaagaaacagactgctttggtggaactcgtgaaacataaacccaaagctacaaaagaacagctgaaagccgtaatggatgacttcgccgccttcgtggaaaaatgttgtaaagccgatgataaagaaacatgttttgccgaagaaggaaaaaagctcgtggcagcttctcaggccgcgctggggcta

SEQ ID NO: 9387 - DNA, 2007 bp, Artificial Sequence
  derived and/or modified sequence
atgaagtgggtgtcgttcatttcgctcttgtttctgttctcgtcagcttactctggatcacttgataagcggcacggggaagggacttttacctcggatgtgtcctcctaccttgagggacaagcagcgaaggagtttatcgcctggctcgtgaagggcagacatggggaaggcactttcacgagcgatgtgtcgtcctacctggaaggacaagcagccaaggagttcatcgcttggctggtgaagggtcgggatgcgcataagtccgaagtcgcgcaccggttcaaggaccttggcgaagaaaacttcaaggcactggtgctgatcgcatttgcacaatacctgcagcagtgtccttttgaggatcatgtcaagctcgtcaacgaggtcactgaatttgctaagacctgtgtcgcagacgaatcagccgagaactgtgacaaatccttgcacactttgtttggagacaaactgtgcacggtcgccacgcttcgcgaaacctacggtgagatggccgattgctgcgcaaagcaggagccagagcgcaatgagtgctttctgcagcataaagatgacaaccctaacctccctagactcgtgcggccagaagtcgatgtgatgtgtactgcatttcatgataacgaagaaacttttctgaagaaatacctctacgaaatagcacggcggcatccttacttttacgccccagagcttctgttttttgcaaagagatacaaggcagcttttacggagtgctgccaagcagcggataaggcggcatgtctcctgccaaagctggatgagctgagagatgaaggaaaggcttcgagcgcaaaacagagacttaagtgtgcgagcttgcagaaattcggagaacgagcatttaaggcctgggccgtggcgagactgtcgcagcgcttccccaaggccgaattcgcagaagtgtccaagctggtgaccgatcttaccaaagtgcatactgaatgttgccatggagacttgctggagtgcgcggatgatagagctgatctggcaaagtacatatgtgaaaatcaggatagcattagctccaagctgaaggagtgttgcgaaaagccactcctggaaaaatcacattgtattgccgaagtggaaaacgacgagatgcccgcagaccttccttcgctggcggcagatttcgtggaatccaaggatgtgtgcaagaattatgcggaggcaaaggacgtctttctcggtatgtttctgtacgaatacgcaaggagacacccggactactccgtcgtgcttctcctccgccttgcaaaaacttacgaaactactctcgagaagtgttgcgccgcagcagacccccatgagtgttacgcaaaagtgttcgatgagtttaagccacttgtggaagaaccccagaacttgataaagcagaattgtgaactttttgaacaactcggcgaatacaagtttcagaacgcgttgcttgtgcggtacactaaaaaggtgccacaagtctcgacgcctactttggtggaggtgagccgcaacctgggcaaggtcggttcaaagtgttgtaagcatcccgaggccaagagaatgccctgtgcagaagattacctgtcggtggttcttaaccaactttgtgtgctgcacgaaaagacgccggtgtcagatcgggtgaccaaatgctgcacggaatccctggtgaataggcggccatgtttttctgcactggaagttgacgagacttacgtcccaaaagaattcaatgcagaaacctttaccttccatgctgatatttgtactctctcggaaaaagagcgacagatcaaaaagcaaactgcacttgtggagcttgtcaagcataagccaaaggcaaccaaagaacagctcaaagcagtgatggacgattttgccgccttcgtggaaaagtgctgtaaggcagacgataaagaaacttgttttgccgaagagggaaaaaagttggtcgcagcaagccaagcagcacttggactt

SEQ ID NO: 9388 - DNA, 2007 bp, Artificial Sequence
  derived and/or modified sequence
atgaaatgggtcagtttcatctccctgctctttttgttcagcagcgcatactccggctcgctggacaagcgccatggtgaaggaactttcacctccgacgtgtcctcatatcttgaaggacaggccgcaaaggaattcattgcctggctggtgaaagggagacatggagaaggaacttttacttccgatgtgtcgtcgtacttggaaggccaagcagctaaggagttcatcgcatggctggtcaagggacgcgacgcccataagtcagaagtggctcatcggtttaaggacctcggagaagagaactttaaagccctggtgctgatcgccttcgcacaatatctgcagcaatgcccattcgaagatcacgtgaagctggtgaacgaagtgactgagtttgcaaaaacctgcgtggcagacgagtccgcggaaaactgtgacaagtcactgcataccctctttggagacaagctgtgcactgtcgcaaccctccgcgagacttacggagagatggcagactgttgcgccaaacaggagccagagagaaatgagtgcttcttgcaacataaggacgataatcccaacctcccgcgactcgtccggccggaagtggacgtgatgtgcacggccttccatgataatgaggaaactttcttgaagaaatacctctacgaaatcgcccgccggcacccttacttttacgcaccagagctgctgttcttcgccaagcggtacaaggctgcctttacggaatgctgccaggcagccgataaggctgcgtgcctgctcccgaagctggatgagttgagagatgaaggaaaagcgagctccgccaagcaaagattgaagtgcgccagcctgcaaaagtttggagaacgggcctttaaggcctgggcggtggcgagactctcgcagcggtttccgaaggccgagtttgctgaagtgagcaagttggtgactgacctgactaaggtgcacaccgagtgttgtcacggagacttgctcgaatgcgccgacgatcgggctgacctcgcaaagtatatctgcgaaaatcaagatagcatttcgtccaagctgaaggagtgctgcgaaaagccgcttcttgaaaaatcccattgcattgcggaagtggaaaacgatgaaatgccggctgacctgccatcgcttgcggcggacttcgtcgagtcaaaagatgtgtgcaagaattacgctgaggctaaggacgtctttctgggaatgtttctgtacgaatacgcgaggcgccatccggattactcagtcgttttgcttctcagactcgccaagacctacgaaaccactttggagaagtgttgcgccgccgccgaccctcacgaatgctacgcgaaggtgttcgacgagtttaagcctctggtggaggagccacagaacctgataaaacagaactgcgaacttttcgaacagctgggggaatacaagttccagaacgcgctcctcgtgcgctacactaagaaggtcccacaagtgagcactccaacgctggtcgaggtcagccgcaacctgggaaaggtggggtcaaagtgttgcaagcatccggaagccaagcggatgccttgcgcagaagattacctctccgtggtcctgaatcaactctgtgttctccacgaaaaaactccagtgtcggatcgggtcaccaaatgctgtaccgagtccctggtgaatcgcagaccgtgcttctccgctctggaagtggatgaaacctacgtcccgaaagaattcaacgcggaaacttttaccttccatgcggacatctgcaccctgtcggagaaggaacgtcagattaagaaacagactgcgctggtggagctggtgaagcacaagcctaaggcgactaaggagcagctgaaggccgtgatggacgacttcgcagcctttgtcgaaaagtgttgtaaggccgacgacaaggagacttgcttcgccgaagaaggcaaaaaactggtcgcggcttcgcaagccgccctcggtctg

SEQ ID NO: 9389 - DNA, 2007 bp, Artificial Sequence
  derived and/or modified sequence
atgaagtgggtgtcgtttatctcgctgctgtttctgttctcctccgcatactcaggaagccttgataagcgtcatggtgaaggaaccttcacttcggatgtttcatcctacctggaaggtcaagcagccaaagaattcattgcatggctggtcaaggggagacatggggaaggaacttttacttccgatgtttcctcttaccttgaaggacaagccgccaaagagtttatagcctggctcgttaagggaagagatgctcataagtccgaggtggcacacaggtttaaagacctgggcgaagagaatttcaaggcgcttgttctcattgcattcgcacagtatctccaacaatgtccctttgaggaccatgtcaagctggtgaacgaagttaccgaatttgcaaagacctgtgtcgcagacgaatcagccgagaactgcgataagagcctccatactctttttggagataaactgtgcactgtcgcaaccctgcgtgaaacttacggagaaatggctgactgctgcgcgaagcaggaaccagaaagaaatgaatgcttcctgcagcataaggatgacaaccctaacctgccacgtctggtgcgtcccgaggtggacgtgatgtgcactgcatttcatgataacgaagaaacttttctgaagaagtacctttacgaaattgcgcgcagacacccgtacttttatgctcccgagcttttgttttttgcaaagcgatataaggctgcattcacggaatgttgccaagccgccgataaggccgcatgccttctccccaaactcgatgaactgagagatgagggaaaggcatcctcggcaaaacaacggcttaagtgtgccagcctgcaaaagtttggggaaagagccttcaaggcatgggccgtggcccggctttcgcaacgctttccaaaggctgagtttgcagaagtgagcaagttggtcaccgatctgaccaaggtgcataccgaatgttgtcacggtgatttgcttgagtgtgcggatgatcgagcagatcttgcgaagtatatctgcgagaaccaagattccatcagctcaaagctgaaagagtgttgcgaaaaacccctcctcgagaaatcccattgtattgctgaggttgagaacgacgagatgccagccgatcttccatccctggcagcagacttcgtggagtccaaagacgtctgtaagaattacgccgaagctaaggatgtgtttctcggtatgttcctctacgaatacgcgcggagacatcctgattactccgtggtgctgctgctccggcttgcgaaaacgtacgagacgactctcgagaagtgttgcgccgctgctgatcctcacgaatgttacgcgaaggtgtttgacgaattcaaacccctcgtggaagaaccacagaatcttatcaagcagaattgtgagctctttgagcaacttggagaatacaagttccagaacgccctcctcgttagatacactaagaaggtcccacaagtctccactcccactcttgtggaagtgagcagaaacttgggcaaggtcggttcgaaatgttgtaagcatccagaagcaaagagaatgccatgtgcagaggactaccttagcgtcgtactgaatcaactttgtgtgctgcatgaaaagaccccagtgtccgacagagtcaccaagtgttgcaccgagagtctggtcaacagaaggccttgtttttcggcgctggaagtcgatgaaacctatgtgcctaaagagtttaacgctgaaactttcactttccacgccgatatttgcactctgtcagaaaaggagagacaaatcaagaagcagactgcccttgtggaactggtcaaacataagcctaaagccacgaaggagcagctcaaggccgtcatggatgactttgccgcatttgtcgaaaaatgctgtaaagcagatgataaggaaacctgctttgcagaagaagggaagaaactggtggcagccagccaggcagcacttggtctg

SEQ ID NO: 9390 - DNA, 2007 bp, Artificial Sequence
  derived and/or modified sequence
atgaagtgggtctctttcatcagcctcttattcctgttttccagcgcttactctgggagcctggataaaagacacggagagggtacattcactagcgatgtatcctcgtatttggaaggacaagctgccaaggaattcatagcctggctggttaagggcagacatggagagggtacattcacctccgatgtctcttcttatttagagggtcaggctgccaaagaatttattgcatggctggttaagggacgggacgcacacaagtctgaggtggcccacaggtttaaagaccttggcgaagaaaacttcaaggcactggtgctcatagccttcgctcaatacttgcagcagtgcccattcgaggaccacgtgaagctcgtgaacgaagttacagaattcgctaagacttgcgtggcagacgagagtgccgagaattgtgacaagtccctacacactctctttggagataagctgtgtaccgtagctacgctcagggagacctacggagagatggccgattgttgcgcaaagcaggaacccgagaggaacgaatgctttttgcagcacaaggacgacaatcccaatttgcccagactcgtccgccctgaagtcgatgtcatgtgcactgcatttcatgataatgaggaaacattcctgaaaaagtacctgtacgagattgcacgacggcacccttatttttatgcaccagagctgctcttttttgcaaagcggtataaggccgcatttacagagtgctgccaggcggctgataaggcggcctgtttgctccctaaactggacgagttgagagatgaggggaaggcttcgagcgccaagcagagattgaagtgcgcttccttacaaaagtttggtgagagggcgtttaaagcttgggcagtggctagacttagccaaaggtttcccaaggcggaattcgcagaggtctccaaactggtgactgaccttaccaaagttcacaccgaatgttgtcatggggatctgctcgaatgtgcagacgaccgcgccgatctggcgaagtatatttgtgagaatcaggatagtatcagctctaaactcaaagagtgctgtgaaaaaccactattggagaagtcacattgtattgcggaagtggaaaacgatgaaatgcccgccgatcttcctagcctagcagctgattttgtggagagtaaagacgtgtgtaaaaattacgcggaagccaaagatgtgtttctcggtatgtttctctatgagtatgctcgccgtcaccctgactatagtgtggtgctgcttcttagactcgcaaagacctacgaaaccacgttagaaaaatgttgcgcagccgccgatccccatgaatgttacgccaaggtgttcgatgaattcaaacccctggtggaggagcctcaaaaccttataaagcagaattgcgagctcttcgagcagctcggggagtacaagtttcagaacgcgttgctcgtgaggtacaccaaaaaggttccccaggtgagcacaccaactctggtggaagtctctcggaacctggggaaggtcggcagcaaatgttgcaagcacccagaggcaaagaggatgccgtgcgctgaagactacttatctgtggtccttaatcagttgtgtgtcctccacgaaaagacacctgtctccgatcgcgtaacgaagtgttgcactgagagtttagtcaacaggcggccctgtttctcagcactggaggtcgatgagacatatgtgcctaaggagtttaatgcagagactttcacctttcacgcagacatctgtacgcttagtgaaaaagagcgacaaatcaagaagcagactgcattagtggagctggttaagcacaagcctaaagcaaccaaagagcagctcaaggctgtgatggacgactttgccgcgttcgtcgaaaagtgctgcaaagcagatgacaaggaaacctgctttgccgaggaaggtaaaaagctagtcgccgcctcgcaggccgctctgggactc

SEQ ID NO: 9391 - DNA, 2007 bp, Artificial Sequence
  derived and/or modified sequence
atgaagtgggtgtctttcatctctctcctgtttttgttttcctccgcctattccggtagcttggataagaggcacggagagggcacttttacttccgacgtgagcagctacctggagggccaagctgccaaggagttcattgcctggctcgtcaagggtcggcacggcgaaggtacgttcacgtcagacgtctcgtcttacctggagggtcaggcagccaaggaattcatcgcttggttggtcaagggcagagatgctcataagtccgaggtggctcacagattcaaagatctgggggaggaaaacttcaaagctctcgtgctcatagccttcgcacagtacctgcagcagtgtccgtttgaggaccacgtgaaactcgtgaatgaggtgaccgaattcgcaaagacttgcgtcgccgacgagtccgcagagaactgcgacaagtcattgcacactctgttcggagataagttgtgcaccgtggccaccctgcgggaaacctacggagagatggccgactgctgtgccaagcaggaaccggagcgcaacgaatgctttctgcaacataaagacgataaccctaacttgcctcgcctggtccgtcccgaggtggatgtgatgtgtacggcgtttcacgacaacgaggaaactttcctgaagaaatacctctacgaaatcgctagacgccacccatatttctacgcgccagaactcctcttcttcgcaaagcgctacaaagcagcgttcaccgagtgttgccaggccgccgacaaggctgcatgccttctgccaaagctggacgaactgcgtgacgaagggaaagcaagcagcgcaaaacagcggctcaagtgcgcctccctgcagaagtttggcgaaagggctttcaaagcctgggccgtggccaggctgtcgcagagattcccgaaggcagaattcgcggaggtgagcaaattggtgactgacctgaccaaagtgcataccgagtgctgccacggcgatcttctggagtgtgccgatgatcgcgcagaccttgcgaagtacatctgcgaaaaccaggactctatctcctcgaagctcaaggagtgctgcgaaaaacctctcctggaaaaatcccactgcattgcagaagtggagaacgatgaaatgcctgcggacctgccgtcgctggcggcggattttgtcgaatcgaaggatgtgtgtaagaattatgcagaggcaaaggatgttttcctggggatgttcctgtacgaatacgctagaaggcacccggactactcggtagtccttttgctgagacttgccaagacctacgaaaccactctggagaaatgttgcgccgcggcggatccgcacgaatgctacgcgaaagtgttcgacgagttcaagccgctcgtcgaggaaccacagaatctgatcaagcagaattgtgaactgtttgaacaactgggcgagtacaaattccaaaatgcgctgctggtgcgctacacgaagaaggttccgcaagtgtcgactccgactctggtcgaggtcagccgcaatctgggaaaggtcggatcgaagtgttgcaaacacccggaagcgaagcgcatgccgtgcgccgaagattacctgtccgtcgtgttgaaccaactctgcgtgcttcatgaaaagacgccagtgtccgatcgcgtgaccaagtgctgcaccgagagcctcgttaaccgccggccctgcttttccgccctcgaagtggacgagacttacgtccccaaagagttcaacgcggaaactttcacctttcacgccgatatctgcaccttgtccgaaaaagaacggcaaatcaagaagcagacggcactggtggaattggtcaagcataagcctaaagcgactaaagaacagctgaaagcagtcatggacgacttcgccgcgttcgtagaaaagtgctgtaaggccgacgacaaggagacttgtttcgcagaagaagggaagaagctcgtggcggcctcgcaagcggctctgggcctg

SEQ ID NO: 9392 - DNA, 2007 bp, Artificial Sequence
  derived and/or modified sequence
atgaagtgggtgtcattcatctcactgttgtttctgttttcctccgcctacagcggaagcctggacaaacgacacggtgaaggcacgttcacctcggatgtgtctagctacctcgagggtcaagctgcaaaggagtttattgcctggctggtgaagggcagacatggcgagggtacttttacgtccgatgtgtccagctatctggaaggacaggccgcaaaagagtttatagcatggcttgtgaagggacgggatgcacataagtccgaggtggcacacagattcaaggacctcggtgaggaaaacttcaaagccctggtgctgattgcatttgcccaataccttcagcaatgtccctttgaagatcacgtcaagctggtgaatgaagtcacggaattcgcaaaaacttgtgtggcagacgagtcagcagaaaattgcgataagtcacttcatacgctgtttggagacaaactgtgtaccgttgccactcttcgagaaacttatggcgaaatggcagactgttgcgccaagcaagaaccagaacgtaacgaatgctttctgcaacataaggatgacaatcctaatctgcctaggctggtccgtcctgaagtcgatgtgatgtgcactgcattccatgataatgaagaaacctttctgaagaaatacctttacgaaattgcgagaaggcacccatacttctacgcacctgaactcctgttttttgccaagagatataaggcagcatttactgaatgctgccaggccgcagacaaggcagcttgtctgcttcccaagctcgatgagcttagagatgagggaaaggcatcctcggccaaacaacgcctcaagtgtgcaagtctccagaaattcggagaacgcgcattcaaggcctgggcagtggcgcgcctctcgcagaggttccccaaggctgaatttgccgaagtctcaaagttggtgactgacctgaccaaggtccacactgaatgttgtcacggtgacctgctggaatgcgccgacgatcgcgctgatctcgcaaagtacatttgtgaaaatcaagactcgatatcatccaaacttaaggagtgttgtgagaaaccactgcttgaaaagtcgcactgcatcgcagaggtggagaacgatgaaatgcccgcagaccttccctcgctggcggcggactttgtggaaagcaaggacgtctgtaagaattacgctgaagcgaaggatgtctttcttggaatgtttctttacgaatacgcacggcgccacccggactactcggtggtgctcctcctgaggcttgccaagacttacgaaaccactctggagaagtgctgcgccgctgcagatcctcatgagtgctacgcaaaggttttcgatgagtttaagccacttgtggaagagcctcaaaatctgatcaagcagaactgtgaactgttcgagcaactcggagaatacaagttccaaaatgcattgcttgtccgatatacgaaaaaggtgccacaagtgtccacgccgacgcttgtggaggtgtcacgcaaccttgggaaagtgggatcgaagtgttgtaagcacccggaggccaaaagaatgccgtgtgcggaagattacctgtccgtcgtgcttaatcaactctgcgtgctgcacgaaaaaactcccgtctcggatagagtgaccaagtgctgtaccgagagcctggtcaaccgcagaccctgtttctcggcattggaagtcgatgaaacttacgtgcctaaggaattcaatgcagaaacttttaccttccatgccgatatctgcaccctgtcagaaaaggagagacagattaagaagcaaactgcgcttgtggaactggtcaagcacaaacccaaggcaaccaaagaacaactgaaggccgtgatggatgactttgcagcctttgtggaaaaatgctgtaaggccgatgacaaggaaacgtgttttgccgaagagggcaagaaacttgtggcagcatcccaggctgcgctgggtctt

SEQ ID NO: 9393 - DNA, 2007 bp, Artificial Sequence
  derived and/or modified sequence
atgaagtgggtgagcttcatatcactcttgtttctgttcagctcggcctacagcggcagcctcgacaagagacacggggagggaaccttcacaagtgacgtgagctcgtacttagaaggccaggccgcgaaggagtttatcgcgtggctagttaagggtcgacacggcgagggtacatttacaagtgatgtatcgtcatatctggaggggcaggcggccaaagaatttattgcatggctggtcaagggccgcgatgcccacaagtcggaggtcgctcaccgattcaaggacttgggtgaggaaaattttaaggcgctcgtgttgattgcatttgctcaatacctccagcagtgcccctttgaagaccacgtcaagttagtcaatgaggtgaccgagttcgcaaagacctgcgtcgccgacgagagcgccgagaattgtgacaaaagtttgcatactctattcggagataagctctgtaccgtggctacacttagagaaacttatggtgagatggcagattgctgcgccaaacaggaacccgagcggaacgagtgcttcttacagcacaaagacgacaatccaaatctccctaggctggtgcgtccagaggtcgacgtcatgtgtacggcattccacgacaatgaagagaccttcctcaaaaagtatctgtatgagattgctcgtaggcacccctacttctatgcccctgaactcctcttttttgctaaacgatacaaagccgccttcactgaatgctgtcaagctgctgataaagccgcctgtttgctccctaagctggacgagttgcgagacgaagggaaggcctcatccgcgaaacagcgactcaagtgcgccagtctacagaaatttggagagcgggcgttcaaggcctgggcagtggcacggctgtcgcagcgatttcctaaagctgagtttgctgaggtgagtaagttggtcactgatttgactaaggttcatacagaatgctgtcacggtgacctgttggaatgcgcagacgatagggctgacttggctaaatacatatgtgagaatcaggattctatcagcagtaaactaaaagagtgttgtgagaagcctctcttggagaaatcccactgcatcgccgaagtcgagaacgatgaaatgcctgcagacctgcccagtctggctgccgatttcgttgagagcaaggacgtttgcaagaattatgcagaggcaaaagatgtctttttggggatgtttctatacgaatacgctaggagacacccagactatagcgtggttttgctgctgcgactggccaagacttatgagacgacccttgaaaaatgctgcgcagctgctgacccccacgagtgttacgcgaaggtctttgacgagttcaagcctctggtggaagagccccagaacctcataaagcagaattgcgagttgttcgagcaattgggcgagtacaaattccagaatgcattgttggtgcgctatactaaaaaggtgccacaggtttcaactccaactctggtggaggtcagtcgcaatctgggtaaagtgggatcaaagtgttgcaagcacccggaggcaaagcgaatgccatgcgctgaggactatctctcggttgtgctgaatcagctatgcgtactacacgaaaaaactcccgtgtcagaccgggtcacgaaatgttgcaccgaaagtttggttaatagaaggccgtgtttttctgccctcgaggtagatgaaacttatgtcccaaaagagtttaacgctgagacctttacctttcatgccgatatatgcacgctttccgagaaggagaggcaaattaaaaaacagactgctctggtagaactggtgaagcataaacctaaggcaaccaaagagcaactgaaggctgttatggacgatttcgccgccttcgtggagaagtgctgtaaggccgacgataaagaaacatgctttgcggaggaagggaagaagctggtggctgcttcacaagcggccctcggcctg

SEQ ID NO: 9394 - DNA, 2007 bp, Artificial Sequence
  derived and/or modified sequence
atgaaatgggtgtcgtttatcagcctgcttttcttgttctcaagcgcatactcaggatctctcgataagagacatggtgaaggaacgtttacttcagatgtgtcgagctatctggagggtcaggctgcaaaggagtttatagcctggctcgtcaaagggagacatggcgagggtactttcacgtctgacgtgtcgtcgtaccttgaaggacaggcggcaaaggaattcatagcttggcttgtgaagggtcgcgacgcacacaaatccgaggtggcacatagatttaaggatttgggagaagagaacttcaaggcattggtgctgattgccttcgcacagtaccttcagcaatgcccttttgaagatcatgtgaagctggtgaacgaagtgaccgaatttgccaagacctgtgtcgccgacgagtcagccgaaaattgcgataagtcccttcacaccctttttggagacaagctctgtaccgtggcgacgcttcgggaaacctacggcgagatggcagattgttgcgcgaaacaagaacccgaacgtaacgaatgttttttgcaacataaggatgataaccctaatctgccaaggctggtgcgccccgaagtggatgtgatgtgcaccgcatttcatgataacgaggaaacctttcttaagaagtacctgtacgaaatcgcaaggcggcatccatacttttatgcacctgaactgcttttcttcgcaaaacggtacaaagcagcctttactgagtgttgtcaggcagcagataaggcagcttgtctccttcccaaacttgacgagctccgggatgaaggaaaggcatcgtcggcaaagcaaagacttaagtgtgcttcactgcagaagtttggagaaagagctttcaaagcatgggccgtggcaaggctttcccaaagatttcctaaagcagaattcgcagaggtcagcaagctcgtcactgacttgactaaggtgcacactgaatgttgtcatggggacctccttgagtgtgcggatgacagagcagatcttgcaaagtacatttgcgaaaaccaagattccatctcatccaagttgaaggagtgctgtgagaagccactgctcgagaagtcccattgcattgcagaagtcgagaacgacgaaatgcctgccgacctgccctcactggcagcagacttcgtggaatccaaggatgtgtgtaagaattacgcggaagccaaggacgtctttcttggtatgtttctctacgagtatgccaggcgacatcctgactactcggtggttcttctgctgcggttggcaaagacctatgagacgacgctggagaagtgctgtgccgcagcagatcctcacgaatgctacgccaaggtctttgatgagttcaagccgctggttgaagaaccacaaaacctgattaaacaaaactgtgagctttttgaacagctcggcgaatacaaatttcaaaatgcacttctcgtgcgctacactaagaaagtgccccaggtgtcaaccccaacccttgtggaggtgtcacgaaatttggggaaggtgggatccaaatgttgcaaacacccagaggcgaagaggatgccatgtgctgaagattacctttcggtggttctcaaccaactgtgtgttcttcacgagaaaacgcccgtgagcgatagagtgaccaagtgctgcaccgaaagcctcgtcaatcggcgcccgtgtttctcagcactggaggtcgacgaaacctatgtgccgaaggagttcaacgcggaaacctttactttccatgcggacatttgtacgctttctgagaaagaacgacaaatcaagaagcagactgcacttgtggaacttgtgaaacacaagcctaaggcaactaaagagcaactgaaggcagtgatggatgactttgctgcattcgttgaaaagtgctgtaaagcggatgataaggagacttgtttcgcagaagaagggaagaagctggtcgcagcaagccaggctgccctcgggttg

SEQ ID NO: 9395 - DNA, 2007 bp, Artificial Sequence
  derived and/or modified sequence
atgaaatgggtcagctttatttccctgctgtttctgttctcaagcgcctattccggatcactcgataagagacatggcgaaggaacctttactagcgacgtgtcttcctatctggaaggtcaggcagccaaggaattcatagcctggctggtcaaaggccgacacggcgaaggcacattcacctccgacgtgagctcttacctggaggggcaggcggcaaaagagttcattgcatggctggtcaagggccgcgatgctcataagagcgaggtggcccatagatttaaggacctcggcgaagagaacttcaaagcattggtcttgatcgcttttgcccaatacctgcagcagtgtcccttcgaggaccacgtaaaactcgttaacgaggtgacggagttcgcaaaaacatgcgtcgccgatgaatcagcggagaattgcgacaagagcctccacacactgttcggtgataaactttgtactgttgcaaccctgagggagacttacggtgaaatggcggattgctgtgcaaaacaagaacccgagcgcaacgaatgtttcttgcagcacaaagatgataatcctaatttgcccagactcgtgagaccggaggtcgatgtcatgtgtactgcctttcacgacaatgaagagacctttctcaaaaagtatctctatgaaattgctagacgccacccgtacttttacgcgccagagctgctcttttttgccaagcggtacaaagctgctttcaccgagtgctgtcaggccgcagataaggctgcctgtctgttgcctaagcttgacgagcttagagacgaaggtaaggcctcaagcgctaagcagcggctgaagtgtgctagtctgcagaaatttggcgagcgggcattcaaggcatgggccgtagccagactgtcccagaggtttccaaaggccgagttcgcagaagtgagcaagcttgttacagacctcaccaaagttcacactgaatgctgccacggggacctgttggaatgcgccgatgacagagcagatctggctaagtacatctgcgagaatcaggacagcataagcagcaaactcaaagaatgttgtgaaaagccactccttgaaaagtctcactgtattgctgaggtcgagaacgatgaaatgccagccgacctccctagcctggcagctgatttcgtggagtccaaggacgtgtgcaaaaactacgccgaggccaaagatgtctttctgggaatgttcctctacgagtatgctagacggcaccccgactattctgtggttctgctgctcagactggcaaagacttatgaaacgacactcgagaaatgttgcgccgccgcagacccacatgaatgctacgctaaggtgttcgacgagttcaaacccttggtcgaggaacctcaaaacttgattaagcagaactgcgaactgtttgagcagctcggtgagtataagtttcagaatgccctgctggtccggtatacaaagaaggtcccccaggtatccaccccaacactcgttgaggtgtcaagaaatctgggaaaagttgggagcaagtgctgtaagcatcctgaggcaaagcggatgccttgcgccgaggactacctcagcgttgttctcaatcagctgtgtgtactgcatgaaaaaactccggtcagtgatcgggttaccaaatgttgcacagaatcactggtgaatagacgcccatgtttctctgctctggaagtagatgaaacttatgttcctaaagagtttaacgctgaaactttcacattccatgcagacatatgcaccctcagcgagaaggagcggcagataaaaaagcaaacagccctggtggaactcgtgaagcacaagcctaaggccaccaaggaacagttgaaggctgtgatggacgatttcgccgctttcgtagagaaatgttgtaaagctgacgacaaagaaacttgtttcgcagaggaaggcaagaaattggttgccgcttcacaggcggcactgggcctt

SEQ ID NO: 9396 - DNA, 2007 bp, Artificial Sequence
  derived and/or modified sequence
atgaagtgggtatccttcatctcactcctgttcctcttctccagcgcttacagcggctccctcgataaaagacatggtgagggcaccttcacctccgacgtgtccagctacctggaaggtcaagcggcaaaggagtttattgcatggctggtcaagggaaggcacggagagggaaccttcacctctgatgtatcatcctacctggagggtcaagcggcgaaggagttcatcgcttggcttgtgaaggggcgcgacgcgcacaaatccgaggtggcgcaccgctttaaggacctgggagaggagaacttcaaagctctggttctgatcgcattcgcccagtacctccagcagtgcccattcgaggatcacgttaagctcgtgaacgaagtgaccgaattcgcaaagacctgtgtggccgacgagagtgctgaaaactgcgacaagtcgctgcacacccttttcggcgataaactttgtactgtggcgactctccgcgaaacttacggagaaatggccgattgttgtgcgaaacaggagcccgagcggaacgagtgcttcctgcaacacaaggacgacaacccaaatctccctcgattggtccgccctgaagtcgacgtcatgtgcactgcgtttcacgacaacgaggagactttcctgaagaagtacctgtacgagatcgctcggcggcacccttacttctacgcaccagagctgcttttcttcgccaagagatataaggcggcattcaccgaatgctgtcaagctgcggacaaagccgcgtgcttgctccctaaactcgatgaactgagggacgaagggaaggcttcctccgcaaagcaaaggttgaagtgcgcgtcattgcagaaattcggagaacgcgcctttaaagcatgggccgtggcgagactgagccagcggttcccaaaggccgagttcgccgaagtttctaagctcgtcaccgatctgacgaaggtgcatacggaatgctgccatggcgatctcttggaatgtgctgatgaccgcgcggacctcgccaagtacatctgtgagaatcaggattcgatttcgagcaagttgaaagagtgttgcgaaaagccgttgctggaaaaaagccactgcatcgctgaagtggagaacgacgagatgcccgccgacttgccgagcctggccgcggacttcgtcgaatccaaagatgtgtgtaaaaactacgccgaagcaaaagacgtttttcttggcatgttcctgtacgaatacgctagacgccacccggattactcggtcgttctcctcctccgactcgccaagacttacgaaactactcttgaaaagtgctgcgccgccgcagatccgcacgaatgctatgccaaggtgttcgacgagtttaagccactcgtcgaggagccgcaaaatctgatcaaacaaaattgcgagctcttcgaacagctgggggaatacaagttccagaacgctctgctcgtcagatataccaagaaggtgccacaagtctccactccgaccctggtcgaagtgtcccggaacctcggaaaggtcggatcgaagtgctgtaaacacccggaggccaagaggatgccgtgcgccgaagattacctttccgtggtgctcaaccagctgtgcgtgcttcacgaaaaaaccccggtgagcgaccgggtgaccaagtgctgtacggaaagcctggtgaatcggcggccgtgcttttcagctctggaggtcgatgaaacctacgtgccgaaggaattcaacgcagagacgttcaccttccacgcagacatctgtactttgtcagagaaggagcgtcagataaagaagcaaactgctcttgtcgaactcgtcaagcataaaccgaaggccaccaaggaacagctcaaggcggtgatggacgacttcgcggccttcgttgagaaatgctgcaaggccgacgataaagaaacttgcttcgctgaagagggcaagaagctcgtggcggcgagccaagcagccctcggactc

SEQ ID NO: 9397 - DNA, 2007 bp, Artificial Sequence
  derived and/or modified sequence
atgaaatgggtgtccttcatttccctcctgttcctgtttagctcggcctactcgggcagcctagataagcggcacggagagggaaccttcacctcagatgtgtccagttatctggagggtcaggcagcaaaggagttcatcgcctggcttgtgaagggcaggcatggcgagggcacctttacctcggacgtctccagctacctcgagggtcaggccgccaaggagttcatcgcttggctggtgaagggtcgcgatgcacataagagcgaagttgcccaccgattcaaagaccttggcgaggagaacttcaaagcgctggtcctgattgcatttgcgcagtacttgcagcagtgtccattcgaggaccacgttaagttggttaacgaggtgaccgagtttgccaagacctgcgttgctgacgaatccgccgagaactgtgacaagagcctccacaccttgttcggtgacaagctctgcaccgtggcgaccctacgcgagacctacggtgagatggccgattgctgcgcgaagcaggaacccgaaaggaatgaatgcttcctgcagcacaaggatgacaacccgaatctccctcgtctggtcaggccagaggtggacgtgatgtgcactgcttttcacgacaacgaagagaccttcctcaagaaatacctgtacgagatcgcacgtcgccatccgtacttctacgctccggagcttctgttcttcgcgaagcgttacaaagccgcgttcactgagtgctgccaggctgctgataaggctgcttgcctccttcccaagctggatgagctgcgtgacgaggggaaagcgtcctccgctaagcaaaggctgaagtgtgcgtcgttgcagaaattcggagaacgtgccttcaaggcctgggccgtcgcccggctgtcccagcgcttccccaaggcggagttcgccgaagtttcgaagctcgtgacagatctaaccaaggtccataccgagtgctgccacggcgacctgctggagtgcgccgacgatcgcgccgacctggccaagtacatctgcgagaaccaggattccatcagctccaagctcaaagagtgctgcgaaaagccccttcttgaaaaaagccactgcatcgctgaggtggagaatgacgagatgcccgctgacctcccctcgttggccgccgattttgtcgaatccaaagatgtctgcaagaactacgccgaggccaaggatgttttcctcggaatgttcctctacgagtacgcccgacggcatccggattactccgtggtcctgttgttgcgtctcgccaagacctatgagaccaccctcgagaaatgctgcgcggctgccgatccacacgagtgctatgcgaaagttttcgacgagttcaagccgctcgtggaggagccacagaatctgatcaagcagaactgtgagctgttcgagcagttgggggagtacaagtttcagaacgccctcctcgtaagatatactaagaaggtcccacaggtctccacgcctacactcgtcgaggtttcccgcaatttaggtaaggtcggttccaagtgctgtaagcacccggaggccaagcgaatgccctgcgcggaggattacctaagcgtggtgctcaatcagttgtgcgttttgcacgaaaagacccccgtcagcgatcgcgtgaccaagtgttgcaccgagtccctcgtgaataggcgtccttgcttctccgcgcttgaagtagacgaaacatatgtccccaaggaattcaacgctgagactttcaccttccacgcagatatttgcaccctcagtgagaaggaacgccagattaaaaagcagacggccctggtggaactggtcaagcacaaaccaaaagcaaccaaagaacagctcaaggctgtgatggatgatttcgccgcctttgtggagaagtgctgcaaggctgacgacaaagagacctgcttcgccgaggagggcaagaagctggtcgctgcttctcaggccgccctgggcctg

SEQ ID NO: 9398 - DNA, 2007 bp, Artificial Sequence
  derived and/or modified sequence
atgaagtgggtatctttcatctcgctgctcttcctgtttagctcggcctactcgggatcgctcgacaagcgccatggcgaaggcaccttcacctcagacgtgtcgagctacttggagggtcaggcggctaaagaattcatcgcgtggctcgtcaagggcagacatggcgaaggaacctttacgtccgacgtgagcagctatttggaaggtcaggccgcgaaggagtttatcgcctggctcgtgaaaggaagggatgcacacaaatccgaagtggctcatcggttcaaggacctgggagaggagaacttcaaagcgctggtgctgatcgcgttcgctcagtacctgcagcagtgcccattcgaggatcatgtgaagctcgtgaatgaagtgactgagttcgccaagacttgcgtagcggacgaatccgcagaaaattgcgacaagagcttgcacactctgttcggagataagctctgcaccgtggcaaccctgagagaaacctacggcgaaatggccgattgctgtgcaaagcaagaaccggagaggaatgagtgtttcctgcagcacaaagacgacaatccgaacttgccgagattggtgcgcccggaagtcgacgtgatgtgtaccgcattccacgataacgaggaaaccttcctcaagaagtacctgtacgagattgccaggaggcacccatacttctacgcccccgagctgctgttcttcgcgaaacgctacaaggccgcgtttactgaatgttgtcaggctgcggataaggcggcttgcttgctcccaaaactggatgaactgcgggacgaagggaaggcctccagcgccaaacagcggctgaaatgcgcatcgctgcaaaagttcggcgaacgcgcattcaaggcatgggccgtggcacgcctcagtcagcggtttccgaaggcggaattcgcggaagtgagcaaactcgttaccgatctgaccaaggtccataccgaatgctgtcacggcgacctgttggagtgcgcagatgaccgggcggaccttgcgaaatacatctgcgagaatcaagactcgatttccagcaagctgaaggagtgctgcgaaaagccactgctcgagaagagccactgtatcgccgaagtcgaaaatgacgaaatgccagccgacttgccgtccctcgctgccgacttcgtggagtcaaaggatgtctgcaagaactatgcggaggcgaaggacgtctttctgggtatgtttctttacgaatacgcgcgcagacaccccgactactcagtggtcctgctgctgagactggcaaagacctacgagacgactctggaaaagtgttgcgccgccgccgatccacacgaatgttacgcaaaggtgttcgacgagttcaagcctctggtggaggagccccaaaatctgatcaagcaaaattgcgaactgttcgaacaacttggagaatacaaattccagaacgccctgctggtgcggtacaccaagaaagtcccacaggtgtcaaccccgaccctcgtggaagtcagccgcaacctgggaaaagtcggcagcaaatgctgcaagcatcctgaggctaagcggatgccttgcgcggaggactacctgagcgtggtgctgaaccaactttgtgtcctgcacgaaaagacgccagtgtccgatcgcgtgaccaaatgctgcaccgagagcctggtgaaccggcggccatgtttttcggccctggaagtggacgagacttacgtgccgaaagagttcaacgccgaaaccttcacgttccatgcagacatttgcactctgtctgagaaggagcggcagatcaagaaacagaccgcgctggtggaactcgtcaagcacaagcctaaggcaactaaggaacagctgaaagccgtgatggatgactttgcggccttcgtggaaaaatgctgtaaggctgacgacaaggaaacctgttttgccgaggaaggtaagaagctcgtggcagcctcacaggcggctctcggattg

SEQ ID NO: 9399 - DNA, 2007 bp, Artificial Sequence
  derived and/or modified sequence
atgaagtgggtttctttcatctcactcctgttcctgttctcctcggcctactccgggagcctggacaagagacacggcgaaggcactttcacgtccgacgttagctcctacctcgagggccaagccgccaaggagttcatagcgtggttggtgaaaggcagacatggagaaggcaccttcacctctgatgtctcgtcatacctcgagggacaagcggcgaaggagtttatcgcctggctggtgaagggacgcgacgcccacaaatcagaggtggcacataggttcaaggatctgggagaggagaatttcaaggccctcgtgctgatcgcgttcgcccagtacttgcagcagtgtccttttgaagatcatgtgaaactggtgaacgaagtgactgaatttgcaaagacctgcgtggcggatgagtccgcggagaactgcgacaaatcgcttcacaccctcttcggtgataagctctgtaccgtggccaccctccgagaaacttatggggagatggccgactgctgtgccaagcaggagccggaacggaacgaatgcttcctgcaacataaggacgataatccgaacctgccgagactggtccggccggaggtggacgtgatgtgcactgcattccatgacaacgaagagacttttctgaagaaatacttgtacgaaatcgcacgccggcacccgtacttttacgctccggaacttctgttcttcgccaagcgatacaaggcggccttcactgaatgctgtcaggctgccgacaaagccgcctgtctgctcccaaagctggacgagctgcgcgatgaaggaaaggctagctcagcaaagcagagattgaagtgcgcaagccttcagaagtttggggagagagcattcaaagcctgggctgtggctcgcctgtcccaaaggtttccaaaagctgagttcgccgaggtcagcaaacttgtgaccgacctgacgaaagtgcacaccgagtgctgtcacggcgatctgctggaatgcgctgatgatcgcgcagacttggccaaatacatttgtgagaatcaggactcgatctcctcgaaactcaaggagtgctgcgaaaagccgctccttgagaagtcgcactgcatcgccgaggtggagaacgacgaaatgccggccgaccttcctagcctggccgctgacttcgtcgaatctaaggacgtgtgcaagaattacgcggaggctaaggacgtttttctgggcatgttcctgtacgagtacgccaggcggcatcccgattacagcgtggtgctcctgttgaggctcgcaaaaacttatgaaactactttggaaaagtgctgtgccgccgccgatccgcacgaatgctatgcaaaagtctttgatgagtttaaaccgcttgtggaagagccccaaaacctcatcaagcagaattgcgaattgttcgagcagctgggagaatacaagttccaaaacgcgttgctcgtgcgctacactaagaaggtgcctcaggtttccactccaactctggtggaggtttcgcggaatctgggtaaggtgggatccaagtgctgcaagcacccagaagcgaaacgcatgccatgtgcggaagattaccttagcgtggttctcaaccagctgtgcgtcctgcatgaaaagaccccagtctcggacagagtgaccaagtgctgtacggaatccctggtgaaccgccggccgtgtttttctgccctcgaagtcgacgaaacctacgttccaaaggaattcaacgccgaaaccttcaccttccatgccgacatctgcaccctgagcgagaaggagcggcagattaagaaacagaccgcgttggtggagcttgtgaagcacaagccgaaagcaaccaaggaacagctgaaagcagtcatggacgattttgcagcttttgtggagaagtgttgcaaagccgatgacaaggaaacttgtttcgcggaggaaggaaagaaactcgtcgcggcgtcgcaagcggctctgggtctt

SEQ ID NO: 9400 - DNA, 2007 bp, Artificial Sequence
  derived and/or modified sequence
atgaaatgggtaagcttcatctctctgctgttcctgttctccagtgcatatagcggatccctggataaacgtcatggtgaaggtacctttacgagcgatgtatcttcctatctggagggacaagctgcaaaagagtttatcgcttggttggtgaaagggcggcatggcgaaggcacattcacatctgatgttagctcttatctcgaaggccaggcagccaaggaatttatcgcgtggcttgtgaagggtcgcgatgctcacaagagcgaggtcgcccatcggtttaaagatctgggagaggaaaactttaaggctttggtccttatagctttcgcacagtacctgcaacaatgtccgtttgaggatcacgttaaactggtgaacgaagtgactgagtttgctaagacttgtgttgccgatgaaagcgcagaaaactgcgataaatcactgcacaccctttttggggataaactatgcacagtggccactctgcgggagacttacggagagatggctgactgttgcgcaaaacaagaaccagagagaaacgaatgctttttgcagcataaagatgataacccaaacttgccgcgactcgtccgtcctgaggtcgacgtcatgtgcaccgcgttccacgacaacgaagagacttttctgaaaaagtacttgtatgagattgctagaaggcacccttatttttatgcgcccgaattgttattctttgcaaaaagatataaagccgcctttaccgagtgttgtcaggccgcagacaaggctgcatgcttactccctaagcttgatgaacttcgggacgagggcaaggcctcgagcgccaaacagcggctcaagtgcgctagcctgcaaaagttcggcgagcgagcctttaaggcctgggcagtggccagattaagccaaagatttccaaaggccgaatttgcagaagtgtcaaaactggtcaccgacctcacgaaagtgcacactgaatgctgtcacggtgacctgctggagtgcgccgacgacagggcagacctggctaaatacatctgtgaaaaccaggatagtatctcgtctaaattaaaagagtgctgcgaaaaacctctcctggaaaagtctcattgtattgccgaagttgaaaacgatgagatgcccgccgatctgccatctcttgcagctgattttgttgagagtaaggacgtatgtaaaaattatgcagaagccaaagacgtgttcttgggaatgtttctctacgaatacgctcggcggcacccagattatagtgtagtgctcttgcttagactcgcgaagacgtacgaaaccactctggagaaatgctgtgcagcggctgatccccacgagtgttacgccaaagtttttgatgagttcaagccactggtagaggagcctcagaacttgatcaaacagaattgcgaactcttcgaacaactcggcgaatacaagtttcagaatgcactgctggtccgatacaccaaaaaagttcctcaggtgtctactccaactctggtcgaagtgagtcgtaaccttgggaaggtgggcagtaagtgttgcaaacatcctgaggctaagaggatgccatgcgccgaagactacctgtccgtcgtcctgaatcagctttgtgtgctacacgaaaagacaccagtctccgatcgggttacaaagtgctgtacagaaagcctcgtcaacagaagaccgtgctttagcgccctggaggtcgacgaaacatacgtccctaaagagtttaacgcggagacgtttacatttcacgccgacatttgcactctgagtgagaaagagaggcagataaagaaacaaaccgcacttgtcgaactggtgaaacacaaacctaaggctacaaaagagcagctgaaggctgtgatggatgacttcgccgcttttgtagaaaaatgctgtaaggcagacgataaagagacctgcttcgctgaagagggaaaaaaactggttgcagcaagccaggccgccctaggcctg

SEQ ID NO: 9401 - DNA, 2007 bp, Artificial Sequence
  derived and/or modified sequence
atgaaatgggtttcattcattagcctgctgttcctgtttagcagcgcatactccgggtcgctcgataagcgccatggtgaaggtaccttcacaagcgatgtttcgtcatatttggagggacaagcagcaaaggagtttattgcttggctagtcaagggcagacatggcgaggggacgttcactagtgatgtgagttcctatctcgaaggacaggcggccaaggaattcatcgcttggttggtcaaggggcgagacgcgcacaaatccgaggtggctcatagatttaaggaccttggtgaggagaattttaaagcgctggtcttgattgcttttgcgcagtacttgcagcagtgccctttcgaggatcacgtgaagttagttaacgaagttacggagtttgcgaaaacttgcgtggccgacgaaagtgccgagaattgcgacaaatcccttcatactttgttcggcgataagctgtgcaccgttgcgaccctccgggagacatacggagagatggctgactgctgtgcgaagcaggaaccagagcgaaacgagtgctttcttcagcacaaggatgataatccgaatctcccacgactagtcaggcccgaggtcgacgtcatgtgtacagcttttcatgacaacgaggaaacattcctcaagaaatatttgtacgaaattgcccgccgtcatccttacttctatgcccctgagctgctgttcttcgcaaagcgatataaggctgcatttaccgaatgttgtcaagctgccgataaggccgcttgtctcctgcctaagctggatgagcttcgggatgagggtaaagcgtcatctgctaaacaacgtctgaagtgtgctagtctccagaagttcggtgagagggcattcaaggcctgggccgtggcgcgtttgagtcagcgcttcccaaaagctgagttcgcggaggtcagcaagttggttactgatcttacaaaggtccacacagagtgttgccacggcgatcttctcgagtgtgctgatgaccgcgcagacctcgcaaagtacatatgcgagaatcaggactctatcagcagcaaattgaaggaatgttgtgagaaacctcttctggagaagtcgcattgcattgcggaagtggaaaacgatgagatgcctgcagaccttccttccctggcggcggacttcgttgagagcaaagacgtctgtaagaattacgcagaagcgaaagacgtttttctgggcatgttcctgtatgagtacgcaaggcgtcacccagattactcggtggtcctactcctaagactcgcgaagacatatgaaacgacactcgaaaagtgttgtgccgctgcagatccacatgaatgttacgcaaaggtcttcgatgaatttaaaccactcgtggaggagccacagaacctcattaagcagaattgcgagcttttcgagcaacttggagagtacaagtttcagaacgcgctattggttagatacactaagaaggtgcctcaggtgtcaacccctacactggtcgaagtatcacgaaacctcggaaaagtaggttcgaagtgctgtaagcaccccgaggctaagcgtatgccctgcgctgaagattatcttagcgtcgtcctcaatcagctgtgtgtcctccatgagaaaacgcccgtctctgatcgtgtcacaaagtgctgtacggagtccttggtgaacagacgcccttgcttcagtgcgctggaggtggacgaaacttatgtaccgaaagaattcaacgccgaaaccttcacatttcacgccgatatatgcactctgagtgagaaagagcgacaaatcaagaagcagacagctctcgtagaacttgttaaacataaaccaaaggccacaaaggaacagcttaaggctgttatggacgacttcgccgcattcgtggaaaagtgttgcaaggccgatgataaggagacgtgtttcgccgaggagggaaagaaactcgtagcggcttcacaagccgccctcggtctt

SEQ ID NO: 9402 - DNA, 2007 bp, Artificial Sequence
  derived and/or modified sequence
atgaaatgggtgtcctttatctcgctgctttttctgttttcatcggcatacagcggatccctggataagcgacacggagagggtactttcaccagcgacgtcagttcttacctcgaaggccaagcagcaaaggaattcatcgcatggcttgttaagggtagacatggcgagggtacctttaccagcgatgtgtcgtcatacctggaagggcaggccgcgaaagagtttatcgcatggctggtcaagggacgtgacgctcataagtccgaagtcgcacataggtttaaagatcttggtgaagaaaactttaaggcgcttgttcttatcgcgtttgcacaatatctccagcaatgccctttcgaagatcatgtgaagttggtcaacgaagttaccgaatttgcgaaaacctgtgtggctgacgaatcagcagaaaactgcgacaagtcgctccacaccctgttcggggataagctgtgtactgtggcaactcttcgtgaaacctacggagagatggctgattgttgcgcaaaacaggaacccgagcggaatgagtgtttcctgcagcataaggacgataatcctaacctcccgcgcctcgtgcgcccggaagttgatgtcatgtgcactgcatttcatgacaatgaagagacgttcctcaaaaagtacctgtacgaaatagcaagacgccacccatacttctacgccccagaactgctgttctttgccaagcgctacaaggcagcgtttaccgaatgttgtcaggcagccgacaaggcagcttgtctcctgcctaagctggatgagctgcgggatgaagggaaagcaagctccgctaaacaacgcctgaagtgcgcatcgcttcaaaagtttggagaaagagcctttaaagcgtgggccgtggcgaggctgtcccagcgatttcctaaggcagaatttgcagaagtgagcaaactcgtgacggatctgaccaaggtgcacaccgaatgttgccatggtgacctgctggaatgtgcggatgatcgagctgatcttgcaaagtacatatgcgaaaaccaagacagtatttcgtcgaaattgaaagagtgttgcgaaaagcctctgctcgaaaagtcgcactgtattgcagaagtggagaatgatgaaatgcccgcagaccttccatcacttgccgcagactttgtggaatcgaaggacgtctgcaagaactacgcagaagccaaggatgtgtttctgggtatgttcttgtacgagtacgcccgtagacacccggactactccgtggtgctgcttctgagactcgcaaagacgtacgaaactactcttgagaaatgttgtgcggcagcagatcctcatgaatgctacgcaaaggtgtttgacgagtttaaacctctcgtcgaagaaccacagaacctcataaagcaaaattgtgagttgttcgagcaactgggagagtacaagttccaaaatgcactgcttgtcagatataccaagaaggtgccacaggtgagcactccaaccctcgtggaggtgtcgcgcaacttgggaaaggtgggctcaaagtgttgcaagcatccagaagcgaagcgcatgccttgtgccgaggattacctttctgtggtgctgaatcagctttgcgtcttgcacgaaaagacccctgtatctgatcgggtgactaaatgttgtaccgagtctcttgtgaacagacgaccatgcttttcggcattggaggtcgatgaaacttatgtgcccaaggaattcaacgcggaaacgttcacttttcatgcagatatatgtaccctctcggagaaagagaggcaaatcaagaagcaaactgctctggtggagctcgtgaagcataaaccgaaagctactaaggaacaacttaaggcagttatggacgacttcgccgcattcgtagagaagtgttgtaaagcggatgacaaggagacgtgtttcgcagaggaaggaaagaagctcgtcgctgcatcacaggcagcactcggtctt

SEQ ID NO: 9403 - DNA, 2007 bp, Artificial Sequence
  derived and/or modified sequence
atgaaatgggtaagctttatctctctgctgtttttgttcagttccgcttattctggctcactggacaagcggcacggcgaggggacgttcacttcagatgtgagtagctatctggagggtcaggcggccaaggagtttatagcgtggttggtgaagggccgccacggcgaaggaacctttaccagtgatgtgtcgtcctacctcgagggtcaggccgcgaaggaattcattgcgtggctggtcaaggggcgggacgcccacaagtcagaagttgcgcaccgctttaaagatctcggcgaggagaatttcaaggctctggtacttattgccttcgctcagtatttgcagcagtgtccattcgaggaccacgttaaactggtgaatgaggtgacagaattcgcaaagacatgcgttgccgacgaatcggctgagaactgcgacaaatcccttcatactctgttcggtgacaagctttgcacagttgccaccttacgagagacttacggcgagatggctgactgttgtgcgaagcaggagcccgaaagaaatgaatgttttctccagcacaaggacgataaccccaacctgcccagactggttcgtccggaggtcgacgtcatgtgtaccgcctttcatgataacgaggagacatttctcaaaaagtatctttacgagattgcacggcgtcacccctacttttatgctcccgaactgttgttctttgccaagaggtataaagctgccttcactgagtgttgccaggcggccgataaggccgcctgtctcctgccgaagcttgatgaactgcgcgacgagggaaaggctagttcagctaaacagaggctgaaatgcgcaagtttacaaaagttcggtgaaagagcttttaaggcttgggccgtggcgagattgtcccagcggtttcccaaggctgagttcgccgaggtttctaaactagtgaccgatctcaccaaagtccacactgagtgctgccatggcgacttattggagtgcgccgacgaccgagctgacttagccaaatatatttgcgaaaaccaggactcaatttcaagcaagctaaaagagtgctgtgaaaaaccgttactagaaaagtcccactgtatagcagaggtggagaatgacgaaatgcctgctgatctgccgtccctcgccgccgacttcgtggagagtaaggatgtttgcaagaactatgcggaagctaaggacgtgttcctgggcatgttcctgtatgagtacgcgcgccgacaccctgactacagcgttgttttactgctgaggctggccaagacctatgagaccactctcgagaaatgttgcgcagccgccgacccacacgagtgttatgccaaagtattcgatgagtttaaacctctagtggaggagccacagaatctcatcaaacagaattgcgagctgttcgagcagctcggagaatataagttccaaaacgcgctcctggtccgctataccaagaaagtgccccaggtttccacgccaaccctggtggaggttagccgcaaccttgggaaagtgggctccaaatgctgtaagcatcctgaggctaaacgtatgccatgtgccgaggactacctgagcgtagtcttaaaccaactctgtgtcctccatgagaaaactccagtgtccgacagagtcaccaagtgctgtacagagagcctggttaataggaggccctgcttttcagctctggaagtggacgaaacctacgtgccgaaagagttcaacgctgagaccttcacttttcatgccgacatatgtaccctcagcgagaaggagcggcagattaagaaacagacagctctggtggaattggtgaaacacaagcctaaggcaactaaggaacagttaaaggccgtcatggacgacttcgcagcattcgtggagaaatgctgtaaagctgatgataaagagacgtgcttcgctgaggaagggaaaaagctggtagcagcatcacaggctgctctgggactt

SEQ ID NO: 9404 - DNA, 2007 bp, Artificial Sequence
  derived and/or modified sequence
atgaagtgggtgtcattcatcagtctgttgtttctcttctcttcagcctattcaggttcacttgacaaaagacatggagaaggtacttttacgtccgacgtttctagttatcttgagggtcaggcggctaaggaatttattgcctggctggttaagggtaggcacggggagggtacattcacttcggacgtttcttcctatcttgagggccaagctgctaaagaattcatcgcttggctggtaaaaggaagggacgcgcataagagtgaagtcgcacataggtttaaagatctcggtgaagaaaacttcaaagctctcgtgcttattgccttcgcacaatacctgcagcagtgcccattcgaggatcatgttaaattggttaatgaagtgacagagtttgctaagacttgtgtggcagacgagtcggccgagaattgcgataagtcgctccatacactctttggtgataaactatgcactgtcgcgacgctcagagaaacatatggtgagatggcagactgctgcgctaaacaggaaccggagaggaatgagtgctttcttcaacataaggatgataatccaaatttgccacggctcgtcaggcctgaagtcgacgttatgtgcactgcctttcatgataatgaggagacctttttgaagaaatatctatatgaaattgcgcggcgacatccctacttctacgctcccgaactcctgttctttgcgaaaagatataaagcagcttttacggaatgctgtcaggctgcagataaggctgcttgccttcttccaaagctggatgagttaagggatgaaggcaaggcgtcttcggccaagcagcgcttgaaatgtgcttcactgcagaagttcggtgagagggcatttaaagcttgggctgtggcacgcttgtcccaacgtttccccaaggctgaatttgctgaggttagcaaattagttacggacttaactaaagtccacactgaatgctgccatggagatcttctcgaatgcgctgacgacagagccgacctggctaaatacatatgcgagaatcaggattctatcagcagcaaattgaaggaatgttgtgaaaagccacttctcgaaaaaagtcattgcatcgctgaagttgaaaacgacgaaatgccggcagatcttccttcgttggctgcagacttcgtagagtccaaggacgtttgtaagaattatgccgaagccaaggatgtatttttgggcatgtttctatatgaatatgcacgccgccatccagattactctgttgtcctcttgctgaggctggccaaaacatatgaaacgactctagagaagtgttgtgctgccgccgatccgcatgagtgctacgctaaagtctttgacgaatttaagccactcgtcgaggaaccacaaaaccttatcaagcaaaattgtgagctattcgaacagcttggggaatataagttccaaaatgcgttacttgttcgttataccaagaaggttcctcaagtttccactcccactcttgttgaagttagcagaaatctaggtaaggtagggtctaagtgttgtaagcaccctgaggcaaagcgtatgccctgcgctgaagattacctttcagtggtgctcaaccagttatgtgttctccatgaaaagacacctgtttccgaccgagttacaaaatgctgcactgagtctcttgttaacaggaggccttgcttcagcgcattagaggtggacgagacctacgtgccaaaagagtttaacgcagagacatttaccttccatgccgacatctgtactctgtccgaaaaagaaagacaaataaaaaaacaaacggctttggtcgaattggtgaaacataagccgaaggctaccaaggaacaattgaaggctgtgatggatgatttcgcggctttcgttgaaaagtgctgtaaagcggatgacaaagagacatgcttcgcggaagagggaaagaagttagtggcggcctcacaggcagcactcggactt

SEQ ID NO: 9405 - DNA, 2007 bp, Artificial Sequence
  derived and/or modified sequence
atgaagtgggtatcctttatcagcctgttgtttctgttcagctccgcatactctggtagtctggataagaggcacggagagggcacgttcactagcgacgtttcttcctatctggaagggcaagccgccaaggaatttatcgcttggcttgttaaaggtagacacggtgaaggcacgttcacgtcagacgtctcatcatatctggaagggcaggcagcaaaagagttcatcgcctggctggttaagggtcgcgatgcccacaaaagcgaggttgcacatcgattcaaagacctgggtgaagagaattttaaagcactggtgctgattgccttcgcacagtacctgcaacaatgtccgttcgaggaccatgttaagctcgtgaatgaagtcactgaatttgcgaagacttgtgttgccgatgaatccgctgagaattgcgacaagtctctgcacactctgttcggggataagttgtgcaccgtcgccacgctgcgcgaaacttatggggaaatggctgactgctgcgcgaagcaagaacctgagagaaacgaatgttttctgcagcataaggacgacaaccctaacctgccgcgactggtacgtccagaggtggatgtcatgtgtaccgccttccacgataatgaggaaacgtttctgaaaaaatacctctatgagattgctaggcgacacccatacttttacgcccccgagctgctgtttttcgctaaacgctacaaagcagcatttacggaatgctgccaggctgcagataaggctgcatgcttattgccaaaactagatgagctgcgggatgaaggcaaagctagctccgcaaagcagcgtctgaagtgtgccagcctgcagaaattcggcgagcgcgccttcaaggcatgggccgtggcacgcctgagccagcggtttcctaaggcggagttcgccgaagtttcgaagctggttaccgatctgaccaaggtccataccgaatgctgccacggcgatttgctggaatgtgccgacgaccgcgctgatctggccaaatatatctgcgaaaatcaggatagcatttcgtctaagctgaaagaatgttgcgaaaaaccgctgctggaaaaatcccactgtattgcagaagtggagaacgatgaaatgccggcggatctgccgtcactggcggccgattttgtcgagagcaaagatgtctgcaaaaactatgctgaggcgaaagacgtctttctcggtatgtttctgtacgaatacgcccgccgccatcctgactattctgtggtgctgctactgcggctggcgaagacctacgaaacaactttagagaaatgttgcgcggcggcagacccgcacgaatgttatgctaaagtgttcgatgagtttaaaccactagttgaggaaccgcaaaacctcatcaaacaaaattgcgaattgttcgaacagctgggcgaatataaatttcagaacgcattgctggtccgatacaccaaaaaggtcccacaggtgtccacccctactctggttgaagtcagccgcaatttaggtaaagtcggctccaaatgctgcaagcaccctgaggcaaagcgtatgccgtgtgcagaagactatctgagcgtggtgctgaaccagctgtgtgtgctgcatgagaaaacccctgtttccgatcgcgtgaccaaatgttgtactgagtcactggttaaccgacgcccttgcttttccgcgctggaagtggacgaaacctatgttcccaaggagttcaatgcagaaacgttcacctttcacgcggatatatgtacgctctccgagaaggaacgccaaattaagaaacagactgccttggtggagctggttaagcacaaacctaaggctactaaagaacaactgaaggcggtgatggacgatttcgcggcttttgtcgagaagtgctgcaaggcggatgataaagagacgtgttttgcggaagaggggaaaaaactcgtcgccgcctctcaagcggcactgggactg

SEQ ID NO: 9406 - DNA, 2007 bp, Artificial Sequence
  derived and/or modified sequence
atgaagtgggtttcctttatctcactgctgttcctgttctcctcggcatactcgggatcgctggacaaacgccatggtgagggaaccttcaccagcgatgtctcttcgtacctggaaggacaggccgccaaagagtttatcgcgtggctggtgaagggacgccacggcgaggggacctttacttcggacgtgagctcgtacctggaggggcaggctgccaaggagtttattgcatggctggtcaagggccgcgatgcccataagtcagaagtggcccacagattcaaggatctgggagaggagaactttaaagctctcgtcctgattgccttcgcccagtacctgcagcagtgcccattcgaggaccacgtgaagctggtgaatgaggtgactgaatttgccaagacctgtgtggccgacgaaagcgccgaaaattgcgacaagtcactccacacgctctttggagataagctctgcaccgtcgctactctgagagaaacgtacggagaaatggccgattgctgcgcaaagcaggaaccggaaaggaacgagtgtttcctgcaacataaggacgacaatccgaatcttcccaggctggtgcggcctgaggtggatgtcatgtgtacggctttccacgataacgaagaaactttcctcaagaaatacctgtatgaaatcgccaggcgacatccatacttttacgcgccagaattgctgttcttcgcgaagcggtacaaggctgcgttcaccgaatgctgccaagccgccgataaggccgcctgccttctgcctaagctggacgaactgcgcgatgaaggtaaagcgagcagcgcaaagcagagactcaagtgcgcttccctgcagaagtttggagaacgcgccttcaaggcctgggcggtcgcccggctgtcccagagattcccgaaggcggagtttgccgaagtctccaagctggtgaccgacctgactaaggtgcacacggaatgctgtcatggagatctcctggaatgcgcggacgatcgggcggatctggcaaaatacatatgcgagaaccaagattccatcagctcgaagctgaaggagtgttgtgaaaagccactgctcgaaaagagccattgcattgccgaggtggagaacgacgagatgccggcggatctgccatcgctcgcagcggattttgtggagtcgaaggacgtgtgtaagaactacgcggaggcaaaagatgtgttcctggggatgttcctctacgagtacgcgcgccggcatccagactactccgtcgtcctgctcctgagactggccaagacgtatgagactacgcttgaaaagtgctgcgcagcggccgacccacatgaatgttacgcgaaagtgttcgatgaattcaaaccgctcgttgaggagccacaaaacctcatcaagcaaaactgcgagctgttcgagcaactcggagagtataagttccaaaacgccctgctggtccggtacaccaagaaggtcccacaggtgtccactccaaccctggtcgaggtcagcagaaatctgggaaaggtgggaagcaagtgctgtaagcaccctgaagcaaaaagaatgccttgcgccgaagattatcttagcgtggtgctcaaccagctgtgcgtcctgcacgaaaagactccggtgtcggaccgcgtgaccaagtgctgtaccgagtcactggtgaatcggcggccatgcttctcggctttggaggtggacgaaacctacgtgccgaaggaattcaacgcggagactttcactttccatgccgatatttgcaccctgtccgaaaaggaaaggcagatcaaaaaacaaaccgcacttgtggaattggtcaaacacaagccgaaggctacgaaggaacagcttaaagctgtgatggatgacttcgccgctttcgtggaaaaatgctgtaaggcggacgacaaggagacttgctttgcggaagagggcaagaaactcgtggccgcatcacaagcggccctgggactg

SEQ ID NO: 9407 - DNA, 2007 bp, Artificial Sequence
  derived and/or modified sequence
atgaagtgggtcagctttatctctcttcttttcctgttctcctcagcatactcgggctcactcgataagagacacggtgaaggtacgtttacgtcggatgtgtcgtcgtaccttgagggacaagcggcgaaggagtttattgcatggcttgttaaaggtagacacggagaggggacttttaccagcgacgtgtcctcatacctggagggacaggccgccaaggaattcatcgcctggttggtgaagggaagagatgcccataaatcggaagtggcacatagattcaaggacttgggggaagagaatttcaaggcgctcgtgctgatagcatttgcacaataccttcagcaatgcccatttgaagatcatgtgaaacttgtgaatgaagtgacggagtttgctaagacctgtgttgcagacgaatccgcagaaaattgcgataaaagcctgcacacgctgtttggtgataaactctgtaccgtggccaccctgcgggaaacgtatggagaaatggcggattgttgcgcgaaacaagaacctgaacggaatgaatgtttccttcaacataaggatgataaccccaacctcccaagactcgtgaggccagaagttgatgtcatgtgcactgccttccacgataacgaggaaacttttcttaagaagtacctctacgaaattgcaagaaggcatccatacttttacgcaccggaactgctcttttttgccaagagatacaaggcagcatttactgaatgttgccaagcagcggataaggcagcctgtctgcttcccaagctggacgaactgcgcgacgagggcaaagcatcaagcgcaaagcaacgtcttaagtgtgcgtctcttcagaagttcggagaaagggcgtttaaagcatgggcggtggcacggctctcacagcggtttcctaaggcagaatttgctgaagtgtccaagctcgtcactgatttgaccaaggtgcacaccgagtgttgccacggcgacctcctggaatgtgcagatgacagggcagaccttgcgaagtacatttgcgagaaccaagattcgatttcatcgaagctgaaagaatgttgcgagaagccacttctggaaaagagccactgtattgccgaggtggaaaatgacgagatgccagcagatctcccttctctggcggccgatttcgtcgagtcgaaggacgtttgtaagaattacgcagaggctaaggacgtgttcctgggcatgtttctctatgaatacgctcgaaggcaccctgattacagcgtggtgttgcttcttaggctggcaaagacttatgaaactacgctggagaagtgctgcgcagccgccgaccctcacgagtgttacgcaaaagtgtttgacgaattcaagcctctcgtggaagaacctcagaaccttatcaaacaaaattgtgagttgttcgagcaactgggagaatacaagttccagaacgcactgctggtgcggtacaccaagaaggtccctcaggtgtcgacccccactctggtcgaagtctcgcggaacttgggaaaggtcggaagcaagtgttgtaaacatccagaggcgaagcgaatgccttgtgctgaggattacctgagtgttgttttgaatcagctgtgtgtgctgcacgaaaagacccccgtgtcagacagagtcaccaagtgctgtactgagagccttgttaaccggcgcccctgcttctcagcccttgaagtcgacgaaacttacgtgcccaaagagtttaacgcggaaacttttacgttccatgccgacatttgtaccctgagcgaaaaggaacgccaaatcaagaagcaaaccgcgcttgtggagctggtgaagcacaaacctaaggctactaaagagcagcttaaagcggtgatggacgacttcgcagcattcgtggaaaaatgctgcaaagctgatgataaggaaacttgcttcgcagaggaggggaaaaagttggtggctgccagccaggcagcgctcggcctc

SEQ ID NO: 9408 - DNA, 2007 bp, Artificial Sequence
  derived and/or modified sequence
atgaagtgggtatcgttcatttctttgctcttcctattctcgagcgcttattccgggtctctagacaagaggcacggagagggcacatttacctctgatgtgtcgtcatacctggagggtcaggctgccaaggagtttatcgcctggctcgtaaagggtcgacatggcgagggcacgttcacaagtgatgtctcttcctacctcgaaggccaagccgcgaaagagtttatcgcttggttggtcaaagggcgcgacgcccacaagtccgaggtagctcaccggtttaaggacctcggtgaggaaaattttaaggccctggtgctgatcgcgtttgcgcagtatctgcagcagtgcccctttgaagatcatgtaaagctagtcaatgaagtgactgagtttgccaaaacttgcgtcgccgatgaatcagcggagaactgtgacaagagcctgcatactttgttcggcgacaagctgtgtaccgtggcgacactccgagagacttacggtgaaatggccgactgttgtgccaagcaggagcccgagcggaacgaatgcttccttcagcacaaggacgataacccgaacctgccgaggctggttcggcccgaggttgacgtcatgtgtacagctttccatgataacgaagaaacctttctcaagaagtatctctacgagattgctcgtaggcacccttacttctatgctcccgaactgctctttttcgcaaagcgatacaaggccgccttcactgaatgttgccaggcggcagacaaggcagcgtgtcttctgcccaagttggacgaactacgcgacgagggtaaagcctcttctgcgaaacagagattgaagtgtgcttcactccagaaatttggtgagcgagctttcaaagcgtgggctgtagcacgcctatctcagcggttcccaaaagctgaattcgccgaagtctcgaagctcgtgacagatctaactaaggtgcacactgagtgctgccatggagacctcctagagtgcgctgatgatcgggctgatctggcaaagtatatctgcgagaaccaggacagtattagctcaaagcttaaagaatgctgtgaaaagcctcttttggagaaaagtcactgtatcgccgaggtggagaacgatgagatgcccgctgacctgccaagcctcgctgcggacttcgtagaaagcaaggatgtgtgcaaaaactacgctgaggctaaagacgtgtttctcggaatgttcctctatgaatacgcaagaaggcaccctgactattccgtcgtgctcctcttgaggttagcaaagacctatgagaccactttggaaaaatgctgcgccgccgcagatccccacgagtgctacgcaaaggtgtttgacgagttcaaacccctcgtcgaagagccacagaacctgatcaaacagaactgtgagctcttcgagcagttgggcgagtacaagttccagaacgctctccttgtgcgctataccaaaaaagtgccacaggtgagcacacctacactggttgaggtgtctagaaacctcggaaaggttggatccaaatgctgcaagcacccggaggccaaacggatgccatgcgccgaagactatctcagcgtcgtcctcaaccagctgtgcgtcctgcatgagaaaacacctgtgtccgatcgtgtgactaaatgttgcactgaatctctcgttaaccgccgcccctgcttcagcgctctggaggtcgatgaaacctatgtaccaaaagagttcaacgctgagacatttacgtttcatgctgatatttgtactttatctgagaaggaacggcagattaagaagcagacagccctcgtcgaattggttaaacacaagcctaaagctactaaggaacaattaaaagccgttatggacgactttgccgcgttcgtggaaaagtgttgtaaagcggatgacaaggagacatgcttcgctgaggaaggcaagaaactcgttgccgcctcccaggcagcccttggcctg

SEQ ID NO: 9409 - DNA, 2007 bp, Artificial Sequence
  derived and/or modified sequence
atgaagtgggtcagctttatctctctcctcttcctcttctcgtcagcttactccggatcactggacaagagacacggtgagggaaccttcacttccgacgtgagtagctacctcgagggtcaggccgccaaggaattcatcgcctggctggtgaaaggccgtcatggagaaggaaccttcacctccgatgtgtccagctatctcgaaggccaggccgctaaggagttcattgcgtggctggtgaagggacgggacgcacataagtccgaggtggctcatcggttcaaggacctcggagaggagaactttaaggcactggtgctgatcgctttcgctcaatacctgcaacaatgcccgtttgaagatcatgtgaagttggtgaatgaagtaactgagttcgctaaaacttgcgtcgcagacgagtcagccgaaaactgcgacaagtctcttcataccctcttcggcgacaaactgtgcactgtcgccaccctgagagaaacctacggggaaatggccgactgttgtgccaagcaggaaccggaacgcaatgagtgtttcctccagcacaaggatgataatccgaacctgccacgactggtgcgccctgaggtggacgtcatgtgcacggccttccatgacaacgaagaaaccttcctgaagaagtacttgtacgaaatcgcccgccgccacccttacttctacgccccggaactcctgtttttcgccaagcgttacaaggccgcgttcactgagtgttgtcaggccgcggacaaagccgcctgtctgctgcccaagctggatgaacttagagacgaaggaaaggcatcctcggccaaacagcggctgaagtgcgcgtccctccagaaattcggagagagagcttttaaggcctgggcagtggccaggctctcccaacgcttcccgaaagccgagtttgctgaagtcagcaagctggtgactgaccttaccaaggtgcacacggagtgttgtcacggagacttgcttgaatgcgcggatgaccgcgcagacctcgctaagtacatttgcgagaatcaagactcgatctcgagcaaattgaaggagtgttgcgagaaaccgcttctggaaaagtcccactgtattgccgaagtcgagaacgacgagatgcctgcagacctgccgagcctggctgcagacttcgtggaatccaaagacgtttgcaagaattacgcggaagccaaggatgtgtttctgggaatgtttttgtacgagtacgcaaggcggcatccagactactcggttgtgctgttgttgagactggccaagacctacgaaactacgctggagaagtgttgcgccgccgctgacccacacgaatgctacgcgaaagtgttcgacgagttcaagccgctggtggaggagccgcaaaacctcatcaagcaaaactgcgaacttttcgagcagctcggagaatacaagttccagaacgcactcctggtgcggtacactaaaaaggtgccacaggtttcgactcctaccctggtcgaggtgtcgaggaacctcgggaaggtgggcagcaagtgctgcaagcatccagaggcaaagaggatgccatgcgccgaagattacctctccgtcgtgctgaaccaactttgcgtcctccatgaaaagacgcctgtgagcgatagagtgactaagtgttgcactgaatcccttgtgaatcgcaggccgtgtttctcagccctcgaggtggacgagacttacgttcctaaggagtttaatgcggaaactttcacgttccatgccgatatctgcactctcagcgaaaaagaacgccaaatcaaaaagcaaaccgctctcgtggaactggtgaagcacaagccgaaggcgacgaaggagcagctcaaagccgtgatggatgactttgccgcgttcgtggagaagtgctgtaaggctgacgacaaggaaacctgctttgctgaagagggtaagaaactggtggccgcctcccaagccgcactcggattg

SEQ ID NO: 9410 - DNA, 2007 bp, Artificial Sequence
  derived and/or modified sequence
atgaagtgggttagctttataagccttctttttcttttctctagcgcttactcaggctctcttgataagaggcacggagaggggaccttcacaagcgacgtgagtagctaccttgagggacaggccgcaaaagaattcattgcctggctggtaaaagggagacatggggaggggaccttcaccagtgatgtatcatcctacctggaaggccaggcagctaaggaatttattgcctggctggtgaagggcagggatgcccataagagcgaagtggcccacagatttaaagatctcggagaggaaaacttcaaggccctggtgctgattgcctttgctcaatacctacagcagtgcccttttgaggatcacgtcaagctggttaacgaggtgactgagttcgccaaaacctgtgtggctgacgaaagtgctgaaaactgcgataaatcactgcatacactgttcggcgacaagctgtgtacagtggctactttgagggagacttacggcgagatggccgattgttgcgctaaacaggagccggagagaaacgaatgcttcctgcagcacaaagatgacaatccgaatttgccccggctggtgcgcccggaggtcgatgttatgtgcactgcttttcacgataatgaagagactttcctgaaaaagtacttgtacgagatcgcaagacggcacccatatttttacgctccagagctcctgttttttgctaagagatataaggctgctttcacagagtgctgtcaggcagctgataaagcagcgtgcctgttgcccaaactggatgagctccgtgacgagggtaaggcatcctcagccaagcagcggcttaaatgcgcctcacttcagaaattcggggagcgcgcctttaaggcctgggccgtcgcacggcttagccagcgtttccctaaggcggagttcgctgaggtgagcaaactagtaacagacctcacaaaagtgcacacagaatgttgtcacggcgatctgttggaatgtgccgatgatcgcgcagacctagctaagtacatttgtgaaaatcaggacagcatatcttccaaactgaaggagtgttgcgaaaagcccttgcttgagaagagccattgtatagctgaagtggaaaacgacgagatgcccgccgatttgcctagcctcgcagccgattttgttgagtcaaaggacgtgtgcaagaactatgcggaggccaaagacgtctttcttgggatgttcctgtacgagtacgcaagacgtcatccggattatagtgtggtactgttgctaaggctcgccaaaacatatgaaactaccctggagaaatgttgcgctgccgctgatccccacgagtgttacgccaaagtttttgacgagttcaagccgctggtggaggaaccgcaaaacctgatcaaacaaaactgcgaactatttgagcagctgggagagtacaagtttcagaacgcgctactggtgcgctacactaagaaagtgccacaggtctccacccccacgctggttgaggtgtctcgaaatctgggaaaagtaggcagcaaatgctgtaagcaccctgaagccaagcgcatgccatgcgccgaagactatctgagtgtagtgctgaaccagctttgcgtcctgcacgaaaaaaccccagtctccgatcgagtcaccaagtgttgtaccgagtccctggtcaatagacgtccctgctttagtgctctcgaagttgacgagacttacgtccccaaagagttcaatgcagagacatttacatttcatgccgatatctgcaccctaagcgaaaaggagaggcagattaagaaacagacagccctggttgagcttgtcaaacacaagcctaaagctaccaaggagcagttaaaggcggtgatggatgattttgccgcttttgtggagaaatgttgcaaggcggacgacaaggagacatgcttcgctgaagaaggtaaaaaattagtcgcagcctcacaagccgctttgggtctg

SEQ ID NO: 9411 - DNA, 2007 bp, Artificial Sequence
  derived and/or modified sequence
atgaagtgggtcagcttcatctccttgctgtttctctttagctccgcttactcgggatcgttggacaagcgccacggggagggcaccttcacttcggatgtgtcgtcgtacctcgaaggacaagccgccaaggaattcatcgcgtggctggtgaagggacgccacggcgaagggacgttcacgtccgacgtgtcatcgtacctggaaggacaagcggccaaagaattcatcgcctggctggtcaagggaagggatgctcacaagagcgaagttgcgcaccgattcaaggaccttggagaagaaaacttcaaggcactggtgctcatcgctttcgcacagtatctccaacaatgcccattcgaggaccatgtcaagctcgtcaatgaggtcactgaattcgccaagacgtgcgttgccgacgaatccgcagaaaattgcgacaagtccctccacaccctgttcggagataagctgtgcactgtcgcgaccctcagagaaacttacggagagatggcggattgctgcgcaaagcaggagcctgagagaaatgaatgcttcctgcagcacaaggacgacaaccccaatctgccacgcctggtccgcccggaagtggacgtcatgtgcactgcctttcatgataacgaggaaaccttcctgaaaaagtacctgtacgaaattgcccggaggcatccgtacttctacgcccctgagcttctcttcttcgcaaaacggtacaaagcggcttttaccgagtgctgccaggccgcagataaggctgcatgcctcctcccgaaactcgatgagctgcgcgacgaaggaaaagcctcctcagctaaacaacggctgaaatgcgcctcgctgcagaagtttggggagagagcgttcaaggcttgggcagtggcgcggctgtcccaacggtttcccaaggccgagttcgcggaggtgtctaagctggtgaccgacctgaccaaggtccacaccgaatgctgccacggtgatctcctggagtgcgccgatgacagagccgaccttgcaaagtatatctgcgagaaccaggactccatcagctccaagctcaaggagtgctgcgagaagcccctgttggagaagtcacactgcatcgctgaggtggagaacgacgaaatgccagctgatctgccatcgctggcggccgacttcgtggaatcgaaggatgtgtgcaagaactacgcagaagcgaaggacgtgttcctgggcatgtttttgtacgaatacgcgcgccggcacccggattactccgtcgtgctcctgcttcggctggccaagacttacgaaaccaccctggagaaatgttgcgcggcagcggacccacatgaatgttacgcaaaggtctttgacgagttcaagcctctggtggaggagccgcaaaatctgatcaaacagaactgcgaactttttgaacaactcggagaatacaagttccagaatgcgttgttggtgcggtacaccaagaaggttccgcaggtcagcaccccaactctggtggaagtgtcgagaaacctgggcaaggtcggtagcaagtgctgcaaacacccggaggcaaagagaatgccttgtgcagaggactacctcagcgtcgtgctgaaccaactctgtgtgctccatgaaaagactccggtttccgaccgggtgaccaaatgctgcaccgaatccttggtcaaccgcagaccgtgcttttcagcactggaagtggacgaaacgtacgttccgaaagagttcaatgccgaaactttcacgttccatgcggacatctgcaccctctccgagaaggagcgccagatcaagaagcagaccgctctggtggagctggttaagcacaaacccaaggctaccaaggaacagctcaaggccgtgatggatgatttcgccgcattcgtggagaagtgctgtaaagcagacgataaggaaacgtgtttcgcagaggaggggaagaagctggtggctgcctcacaggccgccctgggactg

SEQ ID NO: 9412 - DNA, 1830 bp, Artificial Sequence
  derived and/or modified sequence
atgaagtgggtgaccttcatcagcctgctgttcctgttcagcagcgcctacagcagaggcgtgttcagaagagacgcccacaagagcgaggtggcccacagattcaaggacctgggcgaggagaacttcaaggccctggtgctgatcgccttcgcccagtacctgcagcagtgccccttcgaggaccacgtgaagctggtgaacgaggtgaccgagttcgccaagacctgcgtggccgacgagagcgccgagaactgcgacaagagcctgcacaccctgttcggcgacaagctgtgcaccgtggccaccctgagagagacctacggcgagatggccgactgctgcgccaagcaggagcccgagagaaacgagtgcttcctgcagcacaaggacgacaaccccaacctgcccagactggtgagacccgaggtggacgtgatgtgcaccgccttccacgacaacgaggagaccttcctgaagaagtacctgtacgagatcgccagaagacacccctacttctacgcccccgagctgctgttcttcgccaagagatacaaggccgccttcaccgagtgctgccaggccgccgacaaggccgcctgcctgctgcccaagctggacgagctgagagacgagggcaaggccagcagcgccaagcagagactgaagtgcgccagcctgcagaagttcggcgagagagccttcaaggcctgggccgtggccagactgagccagagattccccaaggccgagttcgccgaggtgagcaagctggtgaccgacctgaccaaggtgcacaccgagtgctgccacggcgacctgctggagtgcgccgacgacagagccgacctggccaagtacatctgcgagaaccaggacagcatcagcagcaagctgaaggagtgctgcgagaagcccctgctggagaagagccactgcatcgccgaggtggagaacgacgagatgcccgccgacctgcccagcctggccgccgacttcgtggagagcaaggacgtgtgcaagaactacgccgaggccaaggacgtgttcctgggcatgttcctgtacgagtacgccagaagacaccccgactacagcgtggtgctgctgctgagactggccaagacctacgagaccaccctggagaagtgctgcgccgccgccgacccccacgagtgctacgccaaggtgttcgacgagttcaagcccctggtggaggagccccagaacctgatcaagcagaactgcgagctgttcgagcagctgggcgagtacaagttccagaacgccctgctggtgagatacaccaagaaggtgccccaggtgagcacccccaccctggtggaggtgagcagaaacctgggcaaggtgggcagcaagtgctgcaagcaccccgaggccaagagaatgccctgcgccgaggactacctgagcgtggtgctgaaccagctgtgcgtgctgcacgagaagacccccgtgagcgacagagtgaccaagtgctgcaccgagagcctggtgaacagaagaccctgcttcagcgccctggaggtggacgagacctacgtgcccaaggagttcaacgccgagaccttcaccttccacgccgacatctgcaccctgagcgagaaggagagacagatcaagaagcagaccgccctggtggagctggtgaagcacaagcccaaggccaccaaggagcagctgaaggccgtgatggacgacttcgccgccttcgtggagaagtgctgcaaggccgacgacaaggagacctgcttcgccgaggagggcaagaagctggtggccgccagccaggccgccctgggcctgtag

SEQ ID NO: 9413 - DNA, 1191 bp, Artificial Sequence
  derived and/or modified sequence
atgaagtgggtgaccttcatcagcctgctgttcctgttcagcagcgcctacagcagaggcgtgttcagaagagacgcccacaagagcgaggtggcccacagattcaaggacctgggcgaggagaacttcaaggccctggtgctgatcgccttcgcccagtacctgcagcagtgccccttcgaggaccacgtgaagctggtgaacgaggtgaccgagttcgccaagacctgcgtggccgacgagagcgccgagaactgcgacaagagcctgcacaccctgttcggcgacaagctgtgcaccgtggccaccctgagagagacctacggcgagatggccgactgctgcgccaagcaggagcccgagagaaacgagtgcttcctgcagcacaaggacgacaaccccaacctgcccagactggtgagacccgaggtggacgtgatgtgcaccgccttccacgacaacgaggagaccttcctgaagaagtacctgtacgagaccaccctggagaagtgctgcgccgccgccgacccccacgagtgctacgccaaggtgttcgacgagttcaagcccctggtggaggagccccagaacctgatcaagcagaactgcgagctgttcgagcagctgggcgagtacaagttccagaacgccctgctggtgagatacaccaagaaggtgccccaggtgagcacccccaccctggtggaggtgagcagaaacctgggcaaggtgggcagcaagtgctgcaagcaccccgaggccaagagaatgccctgcgccgaggactacctgagcgtggtgctgaaccagctgtgcgtgctgcacgagaagacccccgtgagcgacagagtgaccaagtgctgcaccgagagcctggtgaacagaagaccctgcttcagcgccctggaggtggacgagacctacgtgcccaaggagttcaacgccgagaccttcaccttccacgccgacatctgcaccctgagcgagaaggagagacagatcaagaagcagaccgccctggtggagctggtgaagcacaagcccaaggccaccaaggagcagctgaaggccgtgatggacgacttcgccgccttcgtggagaagtgctgcaaggccgacgacaaggagacctgcttcgccgaggagggcaagaagctggtggccgccagccaggccgccctgggcctgtag

SEQ ID NO: 9414 - DNA, 1254 bp, Artificial Sequence
  derived and/or modified sequence
atgaagtgggtgaccttcatcagcctgctgttcctgttcagcagcgcctacagcagaggcgtgttcagaagagacgcccacaagagcgaggtggcccacagattcaaggacctgggcgaggagaacttcaaggccctggccgtggccagactgagccagagattccccaaggccgagttcgccgaggtgagcaagctggtgaccgacctgaccaaggtgcacaccgagtgctgccacggcgacctgctggagtgcgccgacgacagagccgacctggccaagtacatctgcgagaaccaggacagcatcagcagcaagctgaaggagtgctgcgagaagcccctgctggagaagagccactgcatcgccgaggtggagaacgacgagatgcccgccgacctgcccagcctggccgccgacttcgtggagagcaaggacgtgtgcaagaactacgccgaggccaaggacgtgttcctgggcatgttcctgtacgagtacgccagaagacaccccgactacagcgtggtgctgctgctgagactggccaagacctacgagaccaccctggagaagtgctgcgccgccgccgacccccacgagtgctacgccaaggtgttcgacgagttcaagcccctggtggaggagccccagaacctgatcaagcagaactgcgagctgttcgagcagctgggcgagtacaagttccagaacgccctgctggtgagatacaccaagaaggtgccccaggtgagcacccccaccctggtggaggtgagcagaaacctgggcaaggtgggcagcaagtgctgcaagcaccccgaggccaagagaatgccctgcgccgaggactacctgagcgtggtgctgaaccagctgtgcgtgctgcacgagaagacccccgtgagcgacagagtgaccaagtgctgcaccgagagcctggtgaacagaagaccctgcttcagcgccctggaggtggacgagacctacgtgcccaaggagttcaacgccgagaccttcaccttccacgccgacatctgcaccctgagcgagaaggagagacagatcaagaagcagaccgccctggtggagctggtgaagcacaagcccaaggccaccaaggagcagctgaaggccgtgatggacgacttcgccgccttcgtggagaagtgctgcaaggccgacgacaaggagacctgcttcgccgaggagggcaagaagctggtggccgccagccaggccgccctgggcctgtag

SEQ ID NO: 9415 - DNA, 1857 bp, Artificial Sequence
  derived and/or modified sequence
atgaagtgggtgaccttcatcagcctgctgttcctgttcagcagcgcctacagcagaggcgtgttcagaagagacgccctgttcctgttcttcttcccctgccccgacaagagcgaggtggcccacagattcaaggacctgggcgaggagaacttcaaggccctggtgctgatcgccttcgcccagtacctgcagcagtgccccttcgaggaccacgtgaagctggtgaacgaggtgaccgagttcgccaagacctgcgtggccgacgagagcgccgagaactgcgacaagagcctgcacaccctgttcggcgacaagctgtgcaccgtggccaccctgagagagacctacggcgagatggccgactgctgcgccaagcaggagcccgagagaaacgagtgcttcctgcagcacaaggacgacaaccccaacctgcccagactggtgagacccgaggtggacgtgatgtgcaccgccttccacgacaacgaggagaccttcctgaagaagtacctgtacgagatcgccagaagacacccctacttctacgcccccgagctgctgttcttcgccaagagatacaaggccgccttcaccgagtgctgccaggccgccgacaaggccgcctgcctgctgcccaagctggacgagctgagagacgagggcaaggccagcagcgccaagcagagactgaagtgcgccagcctgcagaagttcggcgagagagccttcaaggcctgggccgtggccagactgagccagagattccccaaggccgagttcgccgaggtgagcaagctggtgaccgacctgaccaaggtgcacaccgagtgctgccacggcgacctgctggagtgcgccgacgacagagccgacctggccaagtacatctgcgagaaccaggacagcatcagcagcaagctgaaggagtgctgcgagaagcccctgctggagaagagccactgcatcgccgaggtggagaacgacgagatgcccgccgacctgcccagcctggccgccgacttcgtggagagcaaggacgtgtgcaagaactacgccgaggccaaggacgtgttcctgggcatgttcctgtacgagtacgccagaagacaccccgactacagcgtggtgctgctgctgagactggccaagacctacgagaccaccctggagaagtgctgcgccgccgccgacccccacgagtgctacgccaaggtgttcgacgagttcaagcccctggtggaggagccccagaacctgatcaagcagaactgcgagctgttcgagcagctgggcgagtacaagttccagaacgccctgctggtgagatacaccaagaaggtgccccaggtgagcacccccaccctggtggaggtgagcagaaacctgggcaaggtgggcagcaagtgctgcaagcaccccgaggccaagagaatgccctgcgccgaggactacctgagcgtggtgctgaaccagctgtgcgtgctgcacgagaagacccccgtgagcgacagagtgaccaagtgctgcaccgagagcctggtgaacagaagaccctgcttcagcgccctggaggtggacgagacctacgtgcccaaggagttcaacgccgagaccttcaccttccacgccgacatctgcaccctgagcgagaaggagagacagatcaagaagcagaccgccctggtggagctggtgaagcacaagcccaaggccaccaaggagcagctgaaggccgtgatggacgacttcgccgccttcgtggagaagtgctgcaaggccgacgacaaggagacctgcttcgccgaggagggcaagaagctggtggccgccagccaggccgccctgggcctgtag

SEQ ID NO: 9416 - DNA, 2175 bp, Artificial Sequence
  derived and/or modified sequence
gggaaataagagagaaaagaagagtaagaagaaatataagagccaccatgaagtgggtgtccttcatctcacttcttttcctcttttcttctgcatacagcggatcactcgataagcgccacggtgaggggactttcacctcagatgtgtccagctatctcgaagggcaggccgctaaagagttcatcgcctggctggtcaagggtagacacggagagggaaccttcactagcgacgtgagctcatacctcgaaggccaagcagccaaggaattcatcgcttggctcgtgaaaggaagggacgcccataagtctgaggtcgcccatcggtttaaggacctcggagaagaaaacttcaaagccctggtcctcattgcctttgcccagtatctgcagcagtgccccttcgaggaccacgtgaagctggtcaacgaagtgaccgagttcgcaaagacttgcgtggccgatgaatcagccgagaattgcgataagtcacttcataccctgtttggagacaagctgtgtaccgtcgccaccctgcgcgaaacttacggagagatggctgactgctgtgccaagcaggagcctgagcgcaacgagtgttttctccagcacaaagatgacaacccaaacctgcctcggctggtgcgccctgaagtcgacgtgatgtgcactgccttccatgacaatgaggagactttccttaagaagtacctctacgagatcgctagacggcacccatatttctacgcccctgagcttctgttctttgctaaacggtataaagccgctttcactgagtgctgccaagccgccgacaaggccgcctgtctgctgcccaagctcgacgaactgcgcgacgaagggaaagcttcttcagccaaacagagactgaagtgcgcctcacttcagaagtttggggaaagagcattcaaagcatgggcagtggctagacttagccaacggtttccaaaggcagaattcgccgaagtgtctaagctggtgaccgacctgaccaaggtgcataccgaatgctgccatggggacctgcttgagtgtgctgacgatcgggccgacctcgccaaatacatttgtgaaaaccaagactccatttctagcaagctgaaggagtgctgtgaaaagcctctccttgagaagagccactgcattgctgaggtcgagaatgacgagatgcctgctgatcttccatctctggcagctgacttcgtggagtccaaggatgtctgtaagaattacgccgaagccaaagacgtgttcctcggaatgttcctttacgaatacgcaagaaggcatccggactactccgtggtgctgcttcttcgcctggcaaagacttatgagactaccctcgaaaagtgctgtgctgctgctgacccccacgagtgctacgccaaggtgtttgacgagtttaagcctctcgtcgaggagccgcaaaacctgatcaagcagaattgtgagcttttcgaacagctgggcgagtacaagttccaaaacgcactgctggtgagatacaccaagaaggtcccccaagtgtcaaccccgacccttgtggaagtctctcgcaatcttggtaaagtgggaagcaagtgctgcaaacatcccgaagcaaagagaatgccatgtgccgaggactatcttagcgtcgtgctcaatcagctctgcgtgcttcacgaaaagacccctgtgtcagatcgggtcaccaagtgttgcaccgagtcactggtgaaccgcaggccctgcttcagcgcactcgaggtggacgaaacctacgtgccaaaggagttcaacgctgagacttttaccttccatgctgatatctgcactctgagcgagaaggaacgccagatcaagaagcagaccgccctggtcgaactggtcaagcataagccgaaagccaccaaggagcagctgaaggctgtgatggatgacttcgcagccttcgtggaaaagtgttgtaaagccgatgacaaagaaacctgcttcgctgaggaagggaagaagctcgtcgctgcctctcaagccgccctgggtctgtgataataggctgccttctgcggggcttgccttctggccatgcccttcttctctcccttgcacctgtacctcttggtctttgaataaagcctgagtaggaaggcggccgctcgagcatgca

SEQ ID NO: 9417 - protein, 560 aa, Artificial Sequence
  derived and/or modified sequence
MRDLPLTSLALVLSALGALLGTEALRAEEPAVGTSGLIFREDLDWPPGSPQEPLCLVALGGDSNGSSSPLRVVGALSAYEQAFLGAVQRARWGPRDLATFGVCNTGDRQAALPSLRRLGAWLRDPGGQRLVVLHLEEVTWEPTPSLRFQEPPPGGAGPPELALLVLYPGPGPEVTVTRAGLPGAQSLCPSRDTRYLVLAVDRPAGAWRGSGLALTLQPRGEDSRLSTARLQALLFGDDHRCFTRMTPALLLLPRSEPAPLPAHGQLDTVPFPPPRPSAELEESPPSADPFLETLTRLVRALRVPPARASAPRLALDPDALAGFPQGLVNLSDPAALERLLDGEEPLLLLLRPTAATTGDPAPLHDPTSAPWATALARRVAAELQAAAAELRSLPGLPPATAPLLARLLALCPGGPGGLGDPLRALLLLKALQGLRVEWRGRDPRGPGRAQRSAGATAADGPCALRELSVDLRAERSVLIPETYQANNCQGVCGWPQSDRNPRYGNHVVLLLKMQVRGAALARPPCCVPTAYAGKLLISLSEERISAHHVPNMVATECGCR

SEQ ID NO: 9418 - DNA, 1683 bp, Artificial Sequence
  derived and/or modified sequence
atgcgcgacctgcccttaacctctcttgctcttgtgctgtcagccctcggggccttactgggtaccgaagccctcagagcggaggagcctgcagtgggaacctctgggctgatcttccgggaagacctcgactggccacctgggtctcctcaggagcccctgtgccttgtggctctgggtggggattctaacggtagctcatctcccctgagggtggtgggggcccttagcgcttatgagcaagcttttcttggcgcagtacagagagcccggtggggacctcgcgacttagctacatttggagtctgcaacactggggatagacaggcagcactgccgtctctgagacgcttgggagcttggctcagagacccaggcggacagcgactcgtggtcttgcatctggaagaggtgacctgggagcccacaccatctctgcgatttcaggagccacccccaggcggcgccggccctccggaactcgccctactagtgctctatccaggcccaggccccgaggtgacagtgacgagggcaggcctccccggggcccagtccctgtgcccatctagggacacacggtacctcgtcctagcggtggatcgtccagccggagcctggcgcggttctggcctggccctgaccctgcaaccacgtggggaagattccagactatcaacagccagattgcaggcgttgttgttcggtgatgaccacaggtgttttacccggatgacacccgctttgctgctgctgccccgctccgagcccgcaccgctgccagcccacggccagctggacaccgttccattcccaccacctagaccgagcgcagaactcgaagaaagccccccatccgcggatccctttttggaaacccttacaagattagtgagagcacttcgagtgccacccgcaagagcaagtgctccccgactggccctcgatcccgatgccctcgctggtttcccccaggggctggtgaacctaagtgatcctgctgcattagaaaggcttcttgatggcgaggaacctcttctcctcctgcttcggccaactgccgctaccacgggtgatccagctccactgcatgaccccacttccgctccatgggcgacggcactggccagacgagtggccgccgagcttcaggctgcagcggcagagttaaggtcacttccgggtctgccacccgcaaccgccccactcctggccaggctgttagccctgtgtccgggcggccccggggggctcggcgacccactgagagcactactgctgttaaaggccttacagggtctgagggttgagtggagaggaagagatccccggggtcccggccgggcacaaaggtcggctggagcgacggcagcagacggtccttgcgccctgagggagctgtccgtggatcttagagctgagagaagcgtccttatccccgagacatatcaagcaaacaactgtcagggggtttgtggctggccccaatccgatcgcaatcctaggtatggcaaccacgtggttcttctgctgaagatgcaggtccgaggcgcagccctcgcccggccgccttgctgtgtccccaccgcttacgctggtaagcttctgatcagcctgtcggaagaacgaatatctgcccatcatgtgcctaacatggtggcgacagagtgtggttgtagatag

SEQ ID NO: 9419 - DNA, 1683 bp, Artificial Sequence
  derived and/or modified sequence
atgagggacctgcccctgaccagcctggccctggtgctgagcgccctgggcgccctgctgggcacagaggccctgcgggcagaggagcctgctgtgggcaccagcggcctcatcttccgggaggacctggactggcccccaggcagcccccaggagcccctgtgcctggtggccctgggcggggacagcaatggcagcagcagccccctgcgggtggtgggcgccctgagcgcctatgagcaggccttcctgggcgctgtgcagagggcccgctggggcccccgggacctggccaccttcggcgtgtgcaacacaggagaccggcaggccgccctgcccagcctgcggcggctgggcgcctggctgcgggaccccggcggccagaggctggtggtgctgcacctggaggaggtgacctgggagcccacccccagcctgcgcttccaggagcccccacctggaggagctggccccccagagctggccctgctggtgctgtacccaggccctggccctgaggtgacagtgaccagggctggcctgcccggggcccagagcctgtgccccagccgggacacccgctacctggtgctggccgtggacaggcctgctggggcctggaggggcagcggcctggccctgaccctgcagcccagaggagaggacagccggctgagcacagcccggctgcaggccctgctgtttggagatgaccaccgctgcttcaccaggatgaccccagccctgctgctgctgcccaggtctgagcccgcccccctgcctgcccacggccagctggacacagtgcccttccccccaccccggcccagcgctgagctggaggagagcccccccagcgctgaccccttcctggagaccctgacccggctggtgcgggccctgcgggtgcccccagcccgggccagcgccccccggctggccctggaccctgatgccctggccggcttcccccagggcctggtgaacctgagtgaccctgctgccctggagcggctgctggatggagaggagcccctgctgctgctgctgcggcccacagctgccaccactggagaccctgcccccctgcatgaccccaccagcgccccctgggccacagccctggccaggagagtggccgctgagctgcaggccgctgctgctgagctgcggagcctgcccggcctgcccccagccacagcccccctgctggcccggctgctggccctgtgccctgggggccctgggggcctgggggaccccctgcgggccctgctgctgctgaaggccctgcagggcctgcgggtggagtggaggggccgggacccccggggccctggccgggcccagaggtctgctggggccacagctgctgatggcccctgtgccctgcgggagctgtctgtggacctgcgggcagagaggtctgtgctgatccctgagacctaccaggccaacaactgccagggcgtgtgtggctggccccagagcgacaggaaccccaggtatggcaaccacgtggtgctgctgctgaagatgcaggtgcggggggccgccctggcccggcccccctgctgcgtgcccacagcctatgctgggaagctgctgatcagcctgtctgaggagcgcatcagcgcccaccacgtgcccaacatggtggccacagaatgtggctgcaggtag

SEQ ID NO: 9420 - DNA, 1683 bp, Artificial Sequence
  derived and/or modified sequence
atgcgggacctgcccctgaccagcctggccctggtgctgagcgccctgggggccctgttgggaaccgaagctctcagggccgaggagcctgcagtgggcacatcgggcctcatctttcgggaagacttagactggcctcctggaagcccacaggagcccctctgcttggtggcgctaggcggcgatagcaatggcagcagctcacccctgcgggtggtgggggccctctctgcttatgaacaagctttcctgggtgccgtgcagcgggcaagatggggtcctcgcgacctcgccacatttggcgtctgcaacaccggtgaccgacaggccgccctcccctccctgagaagactgggggcctggttgcgcgatcctggaggacaacgactcgtggtcctgcacctcgaggaggtgacctgggaaccaacaccttcccttcggtttcaggagcccccgcccggcggggccggcccacctgagctggctctgttagtcctgtaccctggcccaggtcccgaggttacagtgactagagctggactccctggggcgcaatccctctgtccatcacgggacacaagatacttggtgctggcggtggatagacctgccggagcgtggcgtggatctggcctagcacttactctgcaaccacgtggtgaggactcccggctgtctaccgctaggcttcaggccctcctgttcggcgatgatcatcggtgcttcacccggatgactcctgccctgctgcttctgcctagatctgagcctgcccccctacccgcccacggccagctggacaccgtcccctttccccccccgagacccagcgccgagctggaggaatctcccccatccgcagatccctttcttgaaacactgacccggttagtgagggcactgcgggtgccgcccgctagagcttcagcaccgcgccttgctctggaccctgatgcattggccgggtttccacagggcctggtgaacctcagcgaccctgccgctctcgagagacttctagacggcgaggagccgctgctgctactgctgcggcccacagcggcaactacaggcgatccagccccactccacgatcccaccagtgcgccctgggccacagctctggctaggagggttgctgctgaactgcaagccgctgcagctgagctgagatctcttcccggtctgccaccggctacggccccactgctggcccgactgttggccttatgtccgggcggccctggtggtttgggtgatccgcttagagctttgctgcttctcaaggctttacagggacttcgcgtagaatggcgagggcgcgatcccagaggccctggtcgtgctcagagatcggcaggcgccacagcggctgatggcccatgcgccctgagggagctgtctgtggatctgcgagctgagcgttccgtgctgatcccggagacgtaccaggcaaacaactgccagggcgtgtgcggatggccacagtctgataggaatccccgttacggaaaccacgtggtgctccttttaaagatgcaggtgcggggcgctgcactcgctaggcctccttgctgcgtgccaaccgcttatgcagggaaactactgatcagtctctctgaagagagaatatccgctcatcacgtgcccaacatggtcgccactgaatgcggctgtcggtag

SEQ ID NO: 9421 - DNA, 2018 bp, Artificial Sequence
  derived and/or modified sequence
gcatgttgacacatcaggcccagctctatcactggggagggagataggctgccagggacagaaagggctctttgagaaggccactctgcctggagtgggggcgccgggcactgtcccccaaggtcgcggcagaggagataggggtctgtcctgcacaaacaccccaccttccactcggctcacttaaggcaggcagcccagcccctggcagcacccacgatgcgggacctgcctctcaccagcctggccctagtgctgtctgccctgggggctctgctggggactgaggccctcagagcagaggagccagctgtgggcaccagtggcctcatcttccgagaagacttggactggcctccaggcagcccacaagagcctctgtgcctggtggcactgggcggggacagcaatggcagcagctcccccctgcgggtggtgggggctctaagcgcctatgagcaggccttcctgggggccgtgcagagggcccgctggggcccccgagacctggccaccttcggggtctgcaacaccggtgacaggcaggctgccttgccctctctacggcggctgggggcctggctgcgggaccctggggggcagcgcctggtggtcctacacctggaggaagtgacctgggagccaacaccctcgctgaggttccaggagcccccgcctggaggagctggccccccagagctggcgctgctggtgctgtaccctgggcctggccctgaggtcactgtgacgagggctgggctgccgggtgcccagagcctctgcccctcccgagacacccgctacctggtgttagcggtggaccgccctgcgggggcctggcgcggctccgggctggccttgaccctgcagccccgcggagaggactcccggctgagtaccgcccggctgcaggcactgctgttcggcgacgaccaccgctgcttcacacggatgaccccggccctgctcctgctgccgcggtccgagcccgcgccgctgcctgcgcacggccagctggacaccgtgcccttcccgccgcccaggccatccgcggaactcgaggagtcgccacccagcgcagaccccttcctggagacgctcacgcgcctggtgcgggcgctgcgggtccccccggcccgggcctccgcgccgcgcctggccctggatccggacgcgctggccggcttcccgcagggcctagtcaacctgtcggaccccgcggcgctggagcgcctactcgacggcgaggagccgctgctgctgctgctgaggcccactgcggccaccaccggggatcctgcgcccctgcacgaccccacgtcggcgccgtgggccacggccctggcgcgccgcgtggctgctgaactgcaagcggcggctgccgagctgcgaagcctcccgggtctgcctccggccacagccccgctgctggcgcgcctgctcgcgctctgcccaggtggccccggcggcctcggcgatcccctgcgagcgctgctgctcctgaaggcgctgcagggcctgcgcgtggagtggcgcgggcgggatccgcgcgggccgggtcgggcacagcgcagcgcgggggccaccgccgccgacgggccgtgcgcgctgcgcgagctcagcgtagacctccgcgccgagcgctccgtactcatccccgagacctaccaggccaacaattgccagggcgtgtgcggctggcctcagtccgaccgcaacccgcgctacggcaaccacgtggtgctgctgctgaagatgcaggtccgtggggccgccctggcgcgcccaccctgctgcgtgcccaccgcctacgcgggcaagctgctcatcagcctgtcggaggagcgcatcagcgcgcaccacgtgcccaacatggtggccaccgagtgtggctgccggtgacccctgcgccgcgcggactcctgccccgagggtccggacgcgccccagctcgcgccccttcccatatttattcggaccccaagcatcgccccaataaagaccagcaagcaaccggc

SEQ ID NO: 9422 - DNA, 1683 bp, Artificial Sequence
  derived and/or modified sequence
atgcgggacctccctctgacatccttagcccttgtcttatcagctcttggggcactattgggaaccgaggctctgcgggcagaagagccagcggtcggtactagcggtcttattttccgggaagacctcgactggccgccaggcagtcctcaggaaccactgtgcctggtcgctctcggcggtgatagcaacggaagtagttcaccattgcgggtggtgggtgcactctccgcttacgaacaggcttttctgggggctgtgcagagggccaggtggggaccgagggatttagccacttttggggtctgtaacactggtgaccgccaggctgctctgccttcgttgcggaggctgggcgcttggctgagggacccaggcggacaaagactcgtcgtactgcacttggaggaggtgacgtgggagcccacaccgagcttgcggtttcaggagcctcctcccggtggcgcaggacctcccgaacttgcactccttgtgctttacccgggtcccggaccagaggtcacggtcacaagagctggcctgccaggggcacagtcgctctgcccttcccgtgacaccagatacctcgtgctggccgtggaccgtcccgcaggggcttggcgtgggtcaggcctagcgctgactctgcagccgaggggggaagattcccgactctcaactgcaagactgcaggccttgctctttggcgatgaccacagatgctttaccagaatgacaccagccctgttacttctgcccagaagcgaacctgcacccctgccagcccacggtcaactggatactgtaccttttcctcccccacgcccatccgccgagctcgaagagtctcctccatctgccgatccatttctggagactttgacgagacttgttagggccttgcgggtgccgcctgctagggcttccgcccctcggctcgccctcgatccagatgccctggccggttttcctcagggtctcgtaaacttatctgatccagcggcactcgagagattgcttgatggggaagaaccattgctgctcttactgaggccaactgccgctaccactggcgatcctgcaccactgcacgacccaacaagcgcgccttgggctactgctctggcaaggagggtagccgcagaattacaagccgcagccgcagaactgaggtctctgccgggtttacctccagctaccgctccgctgctggccaggctgttagcattgtgtcctggcggacccggaggtttgggggacccgctcagagctctgctgctgcttaaggccctgcagggtctccgggttgaatggaggggtagggaccctagaggccctggcagggcccagcgctccgccggagcaacagctgcagacggcccatgcgctctccgcgaactgtcagtggacttacgggcagagcgatctgttctaatccccgagacatatcaggccaacaattgccagggagtctgcggatggcctcaatccgacaggaatccacgttatgggaaccacgtggtgctgttgctcaaaatgcaggtgcggggagccgcactggcaagacctccctgctgcgttcccaccgcttacgcaggcaaactacttatctcactcagcgaggagagaattagtgctcaccatgtcccaaacatggtggcgacagagtgtggttgcaggtag

SEQ ID NO: 9423 - DNA, 1683 bp, Artificial Sequence
  derived and/or modified sequence
atgagagacctgcccctgaccagcctggccctggtgctgagcgccctgggcgccctgctgggcaccgaggccctgagagccgaggagcccgccgtgggcaccagcggcctgatcttcagagaggacctggactggccccccggcagcccccaggagcccctgtgcctggtggccctgggcggcgacagcaacggcagcagcagccccctgagagtggtgggcgccctgagcgcctacgagcaggccttcctgggcgccgtgcagagagccagatggggccccagagacctggccaccttcggcgtgtgcaacaccggcgacagacaggccgccctgcccagcctgagaagactgggcgcctggctgagagaccccggcggccagagactggtggtgctgcacctggaggaggtgacctgggagcccacccccagcctgagattccaggagcccccccccggcggcgccggcccccccgagctggccctgctggtgctgtaccccggccccggccccgaggtgaccgtgaccagagccggcctgcccggcgcccagagcctgtgccccagcagagacaccagatacctggtgctggccgtggacagacccgccggcgcctggagaggcagcggcctggccctgaccctgcagcccagaggcgaggacagcagactgagcaccgccagactgcaggccctgctgttcggcgacgaccacagatgcttcaccagaatgacccccgccctgctgctgctgcccagaagcgagcccgcccccctgcccgcccacggccagctggacaccgtgcccttccccccccccagacccagcgccgagctggaggagagcccccccagcgccgaccccttcctggagaccctgaccagactggtgagagccctgagagtgccccccgccagagccagcgcccccagactggccctggaccccgacgccctggccggcttcccccagggcctggtgaacctgagcgaccccgccgccctggagagactgctggacggcgaggagcccctgctgctgctgctgagacccaccgccgccaccaccggcgaccccgcccccctgcacgaccccaccagcgccccctgggccaccgccctggccagaagagtggccgccgagctgcaggccgccgccgccgagctgagaagcctgcccggcctgccccccgccaccgcccccctgctggccagactgctggccctgtgccccggcggccccggcggcctgggcgaccccctgagagccctgctgctgctgaaggccctgcagggcctgagagtggagtggagaggcagagaccccagaggccccggcagagcccagagaagcgccggcgccaccgccgccgacggcccctgcgccctgagagagctgagcgtggacctgagagccgagagaagcgtgctgatccccgagacctaccaggccaacaactgccagggcgtgtgcggctggccccagagcgacagaaaccccagatacggcaaccacgtggtgctgctgctgaagatgcaggtgagaggcgccgccctggccagacccccctgctgcgtgcccaccgcctacgccggcaagctgctgatcagcctgagcgaggagagaatcagcgcccaccacgtgcccaacatggtggccaccgagtgcggctgcagatag

SEQ ID NO: 9424 - protein, 767 aa, Artificial Sequence
  derived and/or modified sequence
MPRQFPKLNISEVDEQVRLLAEKVFAKVLREEDSKDALSLFTVPEDCPIGQKEAKERELQKELAEQKSVETAKRKKSFKMIRSQSLSLQMPPQQDWKGPPAASPAMSPTTPVVTGATSLPTPAPYAMPEFQRVTISGDYCAGITLEDYEQAAKSLAKALMIREKYARLAYHRFPRITSQYLGHPRADTAPPEEGLPDFHPPPLPQEDPYCLDDAPPNLDYLVHMQGGILFVYDNKKMLEHQEPHSLPYPDLETYTVDMSHILALITDGPTKTYCHRRLNFLESKFSLHEMLNEMSEFKELKSNPHRDFYNVRKVDTHIHAAACMNQKHLLRFIKHTYQTEPDRTVAEKRGRKITLRQVFDGLHMDPYDLTVDSLDVHAGRQTFHRFDKFNSKYNPVGASELRDLYLKTENYLGGEYFARMVKEVARELEESKYQYSEPRLSIYGRSPEEWPNLAYWFIQHKVYSPNMRWIIQVPRIYDIFRSKKLLPNFGKMLENIFLPLFKATINPQDHRELHLFLKYVTGFDSVDDESKHSDHMFSDKSPNPDVWTSEQNPPYSYYLYYMYANIMVLNNLRRERGLSTFLFRPHCGEAGSITHLVSAFLTADNISHGLLLKKSPVLQYLYYLAQIPIAMSPLSNNSLFLEYSKNPLREFLHKGLHVSLSTDDPMQFHYTKEALMEEYAIAAQVWKLSTCDLCEIARNSVLQSGLSHQEKQKFLGQNYYKEGPEGNDIRKTNVAQIRMAFRYETLCNELSFLSDAMKSEEITALTN

SEQ ID NO: 9425 - protein, 776 aa, Artificial Sequence
  derived and/or modified sequence
MALSSEPAEMPRQFPKLNISEVDEQVRLLAEKVFAKVLREEDSKDALSLFTVPEDCPIGQKEAKERELQKELAEQKSVETAKRKKSFKMIRSQSLSLQMPPQQDWKGPPAASPAMSPTTPVVTGATSLPTPAPYAMPEFQRVTISGDYCAGITLEDYEQAAKSLAKALMIREKYARLAYHRFPRITSQYLGHPRADTAPPEEGLPDFHPPPLPQEDPYCLDDAPPNLDYLVHMQGGILFVYDNKKMLEHQEPHSLPYPDLETYTVDMSHILALITDGPTKTYCHRRLNFLESKFSLHEMLNEMSEFKELKSNPHRDFYNVRKVDTHIHAAACMNQKHLLRFIKHTYQTEPDRTVAEKRGRKITLRQVFDGLHMDPYDLTVDSLDVHAGRQTFHRFDKFNSKYNPVGASELRDLYLKTENYLGGEYFARMVKEVARELEESKYQYSEPRLSIYGRSPEEWPNLAYWFIQHKVYSPNMRWIIQVPRIYDIFRSKKLLPNFGKMLENIFLPLFKATINPQDHRELHLFLKYVTGFDSVDDESKHSDHMFSDKSPNPDVWTSEQNPPYSYYLYYMYANIMVLNNLRRERGLSTFLFRPHCGEAGSITHLVSAFLTADNISHGLLLKKSPVLQYLYYLAQIPIAMSPLSNNSLFLEYSKNPLREFLHKGLHVSLSTDDPMQFHYTKEALMEEYAIAAQVWKLSTCDLCEIARNSVLQSGLSHQEKQKFLGQNYYKEGPEGNDIRKTNVAQIRMAFRYETLCNELSFLSDAMKSEEITALTN

SEQ ID NO: 9426 - protein, 608 aa, Artificial Sequence
  derived and/or modified sequence
MIREKYARLAYHRFPRITSQYLGHPRADTAPPEEGLPDFHPPPLPQEDPYCLDDAPPNLDYLVHMQGGILFVYDNKKMLEHQEPHSLPYPDLETYTVDMSHILALITDGPTKTYCHRRLNFLESKFSLHEMLNEMSEFKELKSNPHRDFYNVRKVDTHIHAAACMNQKHLLRFIKHTYQTEPDRTVAEKRGRKITLRQVFDGLHMDPYDLTVDSLDVHAGRQTFHRFDKFNSKYNPVGASELRDLYLKTENYLGGEYFARMVKEVARELEESKYQYSEPRLSIYGRSPEEWPNLAYWFIQHKVYSPNMRWIIQVPRIYDIFRSKKLLPNFGKMLENIFLPLFKATINPQDHRELHLFLKYVTGFDSVDDESKHSDHMFSDKSPNPDVWTSEQNPPYSYYLYYMYANIMVLNNLRRERGLSTFLFRPHCGEAGSITHLVSAFLTADNISHGLLLKKSPVLQYLYYLAQIPIAMSPLSNNSLFLEYSKNPLREFLHKGLHVSLSTDDPMQFHYTKEALMEEYAIAAQVWKLSTCDLCEIARNSVLQSGLSHQEKQKFLGQNYYKEGPEGNDIRKTNVAQIRMAFRYETLCNELSFLSDAMKSEEITALTN

SEQ ID NO: 9427 - protein, 267 aa, Artificial Sequence
  derived and/or modified sequence
MPRQFPKLNISEVDEQVRLLAEKVFAKVLREEDSKDALSLFTVPEDCPIGQKEAKERELQKELAEQKSVETAKRKKSFKMIRSQSLSLQMPPQQDWKGPPAASPAMSPTTPVVTGATSLPTPAPYAMPEFQRVTISGDYCAGITLEDYEQAAKSLAKALMIREKYARLAYHRFPRITSQYLGHPRADTAPPEEGLPDFHPPPLPQEDPYCLDDAPPNLDYLVHMQGGILFVYDNKKMLEHQEPHSLPYPDLETYTVDMSHILALITD

SEQ ID NO: 9428 - DNA, 2331 bp, Artificial Sequence
  derived and/or modified sequence
atggctttgtcttcagaacccgccgagatgccacgccagttccccaagctcaacatctccgaagtggatgaacaggtacggctgctggctgaaaaagtctttgccaaagtcctgagagaggaggactctaaagatgctctctccttatttacagtgcccgaggactgcccaattggacagaaagaggccaaagagcgggagttgcaaaaagagctggcagaacagaagtccgtggaaaccgctaagagaaaaaagtctttcaagatgatcaggagtcagtcgctgagtctacagatgcctcctcagcaagactggaagggtcccccagccgccagcccagcgatgtctcccacaactcctgtggttactggcgccactagccttcccacccctgccccttacgccatgccagaatttcagagagtcaccatctctggggactactgcgccggcataaccttggaggattatgaacaagccgccaaaagtctggccaaagcactcatgatcagagagaaatacgctaggctggcttaccacaggttccctcggattactagccagtatctgggtcatccccgcgcagataccgctccaccagaagaaggcctgcctgacttccatcctccaccgcttccacaagaggatccctattgcctagatgacgctccccccaatctggattacctggtgcacatgcagggcgggattctgttcgtgtacgataataaaaagatgctcgagcatcaagagccacattcgctcccctatccggacctcgagacttatactgtggatatgtcccatatcctcgcactgattaccgacggtcccaccaaaacgtattgtcacagaagacttaactttttggagtcaaagttttcactgcacgaaatgctgaacgagatgtctgaatttaaggagctcaaaagtaacccccacagggatttctataatgtccgtaaagtggacacccatatacacgctgccgcctgcatgaatcagaaacacttacttaggttcatcaaacatacttaccaaaccgagccagatagaacagtcgcggaaaaaaggggaaggaaaatcactctccggcaggtatttgacgggctgcacatggatccctacgacctgaccgttgattcccttgatgtccatgcgggacgtcagacgttccacagattcgacaagtttaacagtaagtataatccagtaggtgcctctgaattacgcgacctatacctgaaaactgaaaactatctcggaggcgagtatttcgcccgcatggtgaaagaggtggcccgcgagctggaggaatctaaataccagtacagcgagcctaggctgtcaatttacggccgatcacccgaagaatggcctaacttggcttactggttcatccaacataaggtgtacagccccaacatgaggtggataattcaggtaccgagaatttatgatattttcaggtccaagaaactgttacccaacttcgggaaaatgttggaaaatattttcctccccttgtttaaggccacgataaatccgcaggaccaccgcgaattgcatctgttccttaagtatgtcaccggttttgattctgtggatgatgaatccaaacattcagatcatatgttctcagataagagtcccaaccccgatgtatggacttccgaacagaatccaccttactcctattacctttactacatgtacgctaacattatggtactgaacaacctccgccgtgaaagagggctttcaacttttctgtttcgaccgcattgtggcgaggcaggctctataacacacctggtgagcgcgttcctcacagccgacaacatctcccatggtctgcttctgaagaagagtcccgtgctgcagtatttgtattacctggcccagatacctatcgctatgtccccactgtccaataatagcctgttcctagaatacagcaagaaccctctaagagaatttttgcacaaaggcctgcacgttagcctgagcaccgatgatcccatgcagtttcattatacaaaggaagccctgatggaggagtatgccatcgccgcccaggtgtggaaactgtcaacctgcgacctctgcgagatcgcaagaaattctgtgctgcagtccggcctctcacatcaggagaaacagaagttcctaggacagaattactacaaagagggcccagagggcaacgacattcgcaaaacaaatgtagcccaaattagaatggccttccggtacgagactttgtgcaacgaactgagcttcctctctgacgctatgaagagcgaggaaataacagcccttacaaactag

SEQ ID NO: 9429 - DNA, 3806 bp, Artificial Sequence
  derived and/or modified sequence
tgctgctctcaagtttcccgttggcggcgcggcccgggcgcttcaggtagcctctcggctctctctgctccgctccgcgcccaggtagggcaccgacgggggctgcacgcggctggccggcttcctccctgctgaggcggccctccctcctcccgcggggccctcctggccggggatccgcagcgctgcgccctctgaacgcccggcccccgcgcctgctgcggggcgcggcctggccgggccctggccccggctggcctcagtgcccagcagccccgctccgctctgcccagcgcgtcccctttgctccagccctgcggccgtccctttcggccggcggcatggccctgtcgtccgaacccgctgagatgccgcggcagtttcccaagctgaacatctctgaagtggatgagcaagtccggctcctggcggagaaggtgtttgctaaagtgctccgagaagaggacagcaaagatgccctgtccctgttcactgtcccagaggactgccccatcgggcaaaaggaagccaaggagagggagctgcagaaggagctggcagagcagaagtctgtggagaccgcaaaaagaaagaaaagtttcaagatgattcggtcccagtccctgtctctgcaaatgccgccacagcaagattggaagggccccccggcagccagtccggccatgtctcccacaacccctgtggtcactggagccacttccctgcccacgccagcaccctatgccatgcctgagttccagcgggtcaccatcagcggagattactgtgccgggatcactttggaggactatgagcaggcagccaagagtctggccaaggccctaatgatccgggagaagtatgcgcggctcgcctaccaccgcttcccgcggatcacatcccagtacctgggtcatccgcgggcggatactgcacctccggaagagggccttccagacttccaccctcctccactgccccaggaagacccctactgcctggatgatgcaccccccaacctggattacttggtccacatgcaggggggcatcctctttgtgtatgataacaagaagatgctggagcaccaggagccgcacagcctaccctaccccgacctggagacctacacggtggacatgagccacatcctggctctcatcaccgatggccccacgaaaacctattgtcaccggcgactgaactttctggaatccaagttcagccttcatgagatgttaaacgaaatgtccgagttcaaagagttgaagagtaacccccaccgggacttctataacgtgagaaaggtggacacacacatccatgcggccgcctgcatgaaccaaaagcatctgctgcgcttcatcaagcacacataccagacggagcctgacaggactgtggcagagaagcggggccggaagatcaccctgcggcaggtgtttgacggcctgcacatggacccctacgacctcactgtggactcactggatgtccacgcgggccggcagacattccaccgctttgacaagttcaactccaaatacaaccctgtgggggccagtgagctgcgtgacctgtatttgaaaactgaaaactatctgggaggagagtactttgctcggatggtcaaggaggttgcccgggagctggaggagagcaagtaccagtactcagagccacggctctccatctacggccgcagtcctgaggagtggcccaacctggcctactggttcatccagcacaaggtctactctcccaacatgcgctggatcatccaggtgccccggatttatgacatatttaggtcaaagaagctgctgccaaactttgggaagatgctggagaacatcttcctgccccttttcaaggccactatcaacccccaagatcatcgagagcttcacctcttccttaaatatgtgacggggtttgacagcgtggatgatgagtccaagcacagcgaccacatgttttccgacaagagcccaaacccggacgtctggaccagtgagcagaacccaccctacagctactacctgtactacatgtatgccaacatcatggtgctcaacaacctccgcagggagcgcggcctgagcacgttcctgttccggccgcactgtggggaagccggctccatcacccacctggtgtctgccttcctcactgctgacaacatttcccacgggctgctcctcaagaagagtccggtattgcagtatctctactaccttgctcagatccccattgccatgtctcctcttagcaacaacagtttgttcctcgaatattccaagaaccctctgagggaattcctacacaagggactgcatgtttctctttccaccgatgaccccatgcagttccactacacgaaggaagcacttatggaagaatatgccattgcagctcaagtgtggaagctgagcacctgcgacctgtgtgagatcgccaggaacagcgtgctgcagagcggcctctcgcatcaggaaaagcaaaagtttctgggacaaaattattataaagaaggacctgaaggaaatgatattcgaaagacaaatgtggctcagatccggatggcattccgatatgagaccttatgcaatgagctcagcttcctgtctgatgctatgaaatcagaagagatcaccgccttgaccaactaggtccagcatttgacatgcattttaactttttggttcaatttcaagtctgctgtggctaatagtggtcaagattccgaactaggactttcctctgtgaagaggatgcctctgaagaaattttaaactggtgattttggttgcactgctcactttaagagttaacatgctcacttgttagtatttctgagtaacaagatggtgacttctccttggggatctgggagctgagcacttgtctatacttgttcctaattttccaagtatttctcttgaaactgccagtgcctgaactgttggggccaggattttccctggtcagatgccaagtaacatgtggttttctgccatacttttctccattggcccaggtaggctaattggtagttgttcatttcagcctctggatggctggctgccttaaacacaatcaatttcaaagctccatttcataaaggggctactttgaaggagttaagatggaagacttccttcttgacaaattgtgtttttagtgaatttcttaaaccgttttatttagccctccttccctctttctagttggaagccaaatgtactcatgaaaacagccactcctattctgagtcttggtttcttcacctagaaagtgagggtttggactagatgagtggctttcagggtgttctgtgaatctcctcatgaatactttagggtaggggagggaagggagtgagtgatgctcaggggctgtcaaagtgactgcgttcatcagttttacactggggctgctacataatattttcatttgaacgaagaacttcaaaaagcacaggactagatgatctctgttccttttggctctaatatgctacaactgtaggccaattatcactttaccaattaagagttaggccagataagtgaaatttaacttaagggcacacagctaataagtaataggcctaaactggatttccttattccaaatcctgtcttttccccactattccattagaccccacaaatgttagttgtgtgtgtgtgtgtgtgtgtttttaatcactgtaaccggatgcatttttttaaggcaaaatttctcccttatctactatgatgacttcagaagatacaatggtcccaggggccaagtagaaa

SEQ ID NO: 9430 - DNA, 3156 bp, Artificial Sequence
  derived and/or modified sequence
atagtctggaggagggagagctgaactctctcttgtcccttctcaaacatgggaacaaagtcaggagggcagggctgccaggtgctgcagattccctgagtttgggaaaatggaagcccacctagttgaacagttcattctttgaattttgaacacttgctttctcctgacacctaagtggccctacatgcttcacatccagttacttattgagctaattttgaaattggcatgctgggtttggtctggggcattcctaagtagacagctgaccccaagtaccagctgagatgccgcggcagtttcccaagctgaacatctctgaagtggatgagcaagtccggctcctggcggagaaggtgtttgctaaagtgctccgagaagaggacagcaaagatgccctgtccctgttcactgtcccagaggactgccccatcgggcaaaaggaagccaaggagagggagctgcagaaggagctggcagagcagaagtctgtggagaccgcaaaaagaaagaaaagtttcaagatgattcggtcccagtccctgtctctgcaaatgccgccacagcaagattggaagggccccccggcagccagtccggccatgtctcccacaacccctgtggtcactggagccacttccctgcccacgccagcaccctatgccatgcctgagttccagcgggtcaccatcagcggagattactgtgccgggatcactttggaggactatgagcaggcagccaagagtctggccaaggccctaatgatccgggagaagtatgcgcggctcgcctaccaccgcttcccgcggatcacatcccagtacctgggtcatccgcgggcggatactgcacctccggaagagggccttccagacttccaccctcctccactgccccaggaagacccctactgcctggatgatgcaccccccaacctggattacttggtccacatgcaggggggcatcctctttgtgtatgataacaagaagatgctggagcaccaggagccgcacagcctaccctaccccgacctggagacctacacggtggacatgagccacatcctggctctcatcaccgatggccccacgaaaacctattgtcaccggcgactgaactttctggaatccaagttcagccttcatgagatgttaaacgaaatgtccgagttcaaagagttgaagagtaacccccaccgggacttctataacgtgagaaaggtggacacacacatccatgcggccgcctgcatgaaccaaaagcatctgctgcgcttcatcaagcacacataccagacggagcctgacaggactgtggcagagaagcggggccggaagatcaccctgcggcaggtgtttgacggcctgcacatggacccctacgacctcactgtggactcactggatgtccacgcgggccggcagacattccaccgctttgacaagttcaactccaaatacaaccctgtgggggccagtgagctgcgtgacctgtatttgaaaactgaaaactatctgggaggagagtactttgctcggatggtcaaggaggttgcccgggagctggaggagagcaagtaccagtactcagagccacggctctccatctacggccgcagtcctgaggagtggcccaacctggcctactggttcatccagcacaaggtctactctcccaacatgcgctggatcatccaggtgccccggatttatgacatatttaggtcaaagaagctgctgccaaactttgggaagatgctggagaacatcttcctgccccttttcaaggccactatcaacccccaagatcatcgagagcttcacctcttccttaaatatgtgacggggtttgacagcgtggatgatgagtccaagcacagcgaccacatgttttccgacaagagcccaaacccggacgtctggaccagtgagcagaacccaccctacagctactacctgtactacatgtatgccaacatcatggtgctcaacaacctccgcagggagcgcggcctgagcacgttcctgttccggccgcactgtggggaagccggctccatcacccacctggtgtctgccttcctcactgctgacaacatttcccacgggctgctcctcaagaagagtccggtattgcagtatctctactaccttgctcagatccccattgccatgtctcctcttagcaacaacagtttgttcctcgaatattccaagaaccctctgagggaattcctacacaagggactgcatgtttctctttccaccgatgaccccatgcagttccactacacgaaggaagcacttatggaagaatatgccattgcagctcaagtgtggaagctgagcacctgcgacctgtgtgagatcgccaggaacagcgtgctgcagagcggcctctcgcatcaggaaaagcaaaagtttctgggacaaaattattataaagaaggacctgaaggaaatgatattcgaaagacaaatgtggctcagatccggatggcattccgatatgagaccttatgcaatgagctcagcttcctgtctgatgctatgaaatcagaagagatcaccgccttgaccaactaggtccagcatttgacatgcattttaactttttggttcaatttcaagtctgctgtggctaatagtggtcaagattccgaactaggactttcctctgtgaagaggatgcctctgaagaaattttaaactggtgattttggttgcactgctcactttaagagttaacatgctcacttgttagtatttctgagtaacaagatggtgacttctccttggggatctgggagctgagcacttgtctatacttgttcctaattttccaagtatttctcttgaaactgccagtgcctgaactgttggggccaggattttccctggtcagatgccaagtaacatgtggttttctgccatacttttctccattggcccaggtaggctaattggtagttgttcatttcagcctctggatggctggctgccttaaacacaatcaatttcaaagctccatttcataaaggggctactttgaaggagttaagatggaagacttccttcttgacaaattgtgtttttagtgaatttcttaaaccgttttatttagccctccttccctctttctagttgg

SEQ ID NO: 9431 - DNA, 2331 bp, Artificial Sequence
  derived and/or modified sequence
atggccctgagcagcgagcctgctgagatgccccggcagttccccaagctgaacatcagcgaggtggatgagcaggtgcggctgctggccgagaaggtgtttgccaaggtgctgcgggaggaggacagcaaggatgccctgagcctcttcaccgtgcctgaggactgccccatcggccagaaggaggccaaggagcgggagctgcagaaggagctggccgagcagaagtctgtggagacagccaagaggaagaagagcttcaagatgatccgcagccagagcctgagcctgcagatgccaccccagcaggactggaagggccccccagctgccagccctgccatgagccccaccacccctgtggtgactggagccaccagcctgcccaccccagccccctatgccatgcctgagttccagagggtgaccatcagcggggactactgtgccggcatcaccctggaggactatgagcaggccgccaagagcctggccaaggccctgatgatccgggagaagtatgcccggctggcctaccaccgcttcccccgcatcaccagccagtacctgggccaccccagggctgacacagcccctcctgaggagggcctgcctgacttccaccccccacccctgccccaggaggacccctactgcctggatgatgccccacccaacctggactacctggtgcacatgcagggcggcatcctgtttgtgtatgacaacaagaagatgctggagcaccaggagccccacagcctgccctacccagacctggagacctacacagtggacatgagccacatcctggccctgatcacagatggccccaccaagacctactgccaccggcggctgaacttcctggagagcaagttcagcctgcacgagatgctgaatgagatgtctgagttcaaggagctgaagagcaacccccaccgggacttctacaacgtgaggaaggtggacacccacatccatgctgctgcctgcatgaaccagaagcacctgctgcgcttcatcaagcacacctaccagacagagccagacagaacagtggccgagaagaggggcaggaagatcaccctgcggcaggtgtttgatggcctgcacatggacccctatgacctgactgtggacagcctggatgtgcatgctggccggcagaccttccacagatttgacaagttcaacagcaagtacaaccctgtgggcgccagcgagctgcgggacctgtacctgaagacagagaactacctgggcggggagtactttgccaggatggtgaaggaggtggcccgggagctggaggagagcaagtaccagtacagcgagccccggctgagcatctacggccgcagccctgaggagtggcccaacctggcctactggttcatccagcacaaggtgtacagccccaacatgcgctggatcatccaggtgccccgcatctatgacatcttccgcagcaagaagctgctgcccaactttgggaagatgctggagaacatcttcctgcccctcttcaaggccaccatcaacccccaggaccaccgggagctgcacctgttcctgaagtatgtgacaggctttgacagcgtggatgatgagagcaagcacagcgaccacatgttcagtgacaagagccccaacccagatgtgtggaccagcgagcagaaccccccctacagctactacctgtactacatgtatgccaacatcatggtgctgaacaacctgcggcgggagcggggcctgagcaccttcctgttccggccccactgtggggaggccggcagcatcacccacctggtgtctgccttcctgacagctgacaacatcagccacggcctgctgctgaagaagagccctgtgctgcagtacctgtactacctggcccagatccccatcgccatgagccccctgagcaacaacagcctcttcctggagtacagcaagaaccccctgcgggagttcctgcacaagggcctgcacgtgtccctgagcacagatgaccccatgcagttccactacaccaaggaggccctgatggaggagtatgccatcgccgcccaggtgtggaagctgagcacctgtgacctgtgtgaaattgccagaaattctgtgctgcagagcggcctgagccaccaggagaagcagaagttcctgggccagaactactacaaggagggccctgagggcaatgacatcaggaagaccaacgtggcccagatccgcatggccttccgctatgagaccctgtgcaatgagctgtccttcctgagtgatgccatgaagtctgaggagatcacagccctgaccaactag

SEQ ID NO: 9432 - DNA, 2331 bp, Artificial Sequence
  derived and/or modified sequence
atggccctgagcagcgagcccgccgagatgccccggcagttccccaagctcaatatcagcgaagtggatgagcaggtgcgtctcctcgccgaaaaagtgttcgccaaggtcctgcgggaggaagactctaaggacgccctgagtcttttcacagttcccgaagactgtccaatagggcagaaagaagctaaggagcgcgagttacagaaagaactggccgagcagaagagcgtggagaccgcgaaacgaaagaagagctttaagatgattcggtctcagagcttgtccctgcaaatgcccccacagcaggactggaaaggtcctccagccgcgagtccagccatgagtccaacgacaccagtagtcactggggcgaccagtctgccgactcccgctccatatgcaatgccagaatttcagagagttacaatttccggcgattactgcgctggaataacgctggaagactacgagcaggctgccaagtctttggccaaagcattgatgatccgtgagaaatacgccagacttgcctaccatcgattccctaggatcacaagtcagtacctaggccatccccgggcagatactgcacctcctgaggagggcttgcccgacttccatccacctcccctccctcaggaggatccctactgtcttgatgatgctcccccaaatctggactacctggtacacatgcaaggcgggatcttgttcgtatacgataataaaaaaatgcttgaacatcaggagccccactccctgccctatcctgatctggagacgtacaccgtggatatgagccatatcctggcactgatcacagacggcccaacaaaaacctattgtcaccgcaggctgaatttcctggagtctaaattcagcctacatgagatgctcaatgagatgagtgaattcaaggaattaaagagtaatcctcaccgggatttttacaacgtcaggaaagtggacacacacatccatgctgccgcctgcatgaaccagaaacatcttttgagatttatcaagcatacttatcagaccgagccagatcgcactgtcgctgagaaaagggggcgaaaaatcacgttgaggcaggtgtttgatggactgcacatggacccttacgatctgacagtggactcgttggacgttcatgctggccgacagacctttcaccggtttgacaaattcaactctaaatataaccctgttggagccagcgagttgcgtgatctgtacttgaaaaccgagaattatctaggaggtgaatatttcgctcgcatggtgaaggaagtggcacgggaactggaggagtcaaagtatcagtattctgagcccaggctttcaatttacggccgttccccagaagaatggcccaacctcgcgtactggttcatccagcacaaggtgtacagccccaatatgaggtggattatccaggtacccagaatctatgacatattccgttcaaaaaagctactgcctaacttcggaaagatgctggaaaacatcttcttaccattgttcaaggctaccatcaatccccaggaccacagggagctgcacctgtttctgaagtacgttaccgggttcgacagcgtggatgacgagagcaagcacagtgaccacatgttttctgataaaagccccaacccagatgtctggactagtgagcaaaaccccccttactcgtattacctgtactacatgtatgctaacatcatggtgctaaataacttacgccgcgagagagggttgagtacctttttattccggcctcactgtggcgaagcgggctccatcacccacttagtgagtgcctttttaaccgccgacaatatctctcacggcctgttactcaagaagagccccgtcttacagtacttgtactatttggctcagattcccattgccatgtctccactcagtaataattcgctgttcctggagtattccaaaaatcccctgagggaattcttgcataaaggtctccacgttagccttagcaccgatgatcctatgcagttccactacactaaggaagctctgatggaagagtacgcgattgcggcccaagtgtggaagcttagcacttgcgatctctgtgaaatagctaggaacagcgttctgcagagtggtctgtcgcatcaggagaagcaaaaatttctcggtcagaattattataaggaaggtcctgaggggaacgacatcaggaaaaccaacgtggcccagatcaggatggccttccgctacgagaccctgtgtaatgaacttagctttttgtccgacgccatgaagtctgaggaaataaccgctcttaccaactag

SEQ ID NO: 9433 - DNA, 2331 bp, Artificial Sequence
  derived and/or modified sequence
atggcgttgtctagcgaacccgctgagatgcccaggcaattcccaaaactgaacatcagtgaggtggacgagcaggtcagactgctggctgaaaaggttttcgccaaagtgttgagggaggaagacagcaaggatgccctaagcctgttcaccgtgcctgaagattgcccaatcggacagaaggaagcaaaagagagagaattgcagaaagagttggccgaacagaagtccgtcgaaactgcaaagcgtaaaaagagtttcaagatgatcagatcacagtctctgtcccttcagatgccaccccaacaggattggaaagggcctcccgcagcctctcccgcaatgtcccccaccactccagtggtcaccggggcaacatcactccctaccccagccccatacgccatgcccgagtttcagagagtcactatcagcggagactactgcgccggaattaccctagaggactatgagcaggctgccaaaagccttgcaaaagcactcatgattagagagaaatatgccaggctcgcgtaccacagattcccccgtattacatcccagtacttgggacatcccagggccgacaccgcgccacctgaggaggggctgcctgactttcacccccctcccctgcctcaggaagacccttattgcctggacgatgcgccacctaacctcgactatctggtgcatatgcagggtggcattcttttcgtgtatgacaacaaaaaaatgctcgaacaccaggagccacattcattgccctacccagatctcgagacatacactgtagacatgagccatatcctggcgctgatcacggatgggccaactaaaacttactgccaccgcagactcaattttctagagagcaagttctctctgcacgagatgctgaatgaaatgtccgagttcaaggagcttaaatccaacccacacagagacttctataacgtaagaaaagtggacacccacatacacgccgcagcctgtatgaaccaaaagcacctcttaagattcatcaaacatacgtatcagacggagcccgacaggaccgtggccgagaagcggggaagaaaaatcactcttcgtcaagtgtttgacggcctgcacatggacccctacgacctgacggtggattccctcgacgtgcacgccggtcggcagacgttccaccggttcgataaattcaacagtaagtacaatcccgtcggagcatcagagctgagggatctctatttaaagaccgagaattacttaggcggagagtattttgccaggatggtgaaagaggtggctagagagctggaggagtccaaataccagtatagcgagcccaggctgagtatttatggtcgctctccggaagagtggcccaatcttgcgtattggttcatccagcataaagtatattctcccaatatgaggtggatcattcaggtccctcgcatctatgatatatttcggtccaaaaaacttctgccaaactttggaaagatgctggagaacatattcctgcctctcttcaaggcaacaatcaatccacaggatcaccgcgagctgcacctttttctgaaatacgtgacaggattcgatagcgtcgatgacgagtccaaacacagtgatcacatgttctccgataaatcaccaaatcccgatgtctggacctctgagcagaacccgccatacagctactatctgtactatatgtacgccaacatcatggtgctaaataatctgagaagagagagaggactgtcaaccttcttgtttcggcctcactgcggcgaagccggtagtattactcatctcgtaagtgcatttctgaccgcagacaacatctctcacggcctgctcctgaaaaagtcgcctgtgctccagtacttgtattatttagcacagatccccatcgccatgagcccactttctaacaacagtctattcttagaatatagtaagaatcccctgcgcgagtttcttcacaaaggactgcacgtgtccttaagcaccgatgaccccatgcagttccattacactaaagaggcactgatggaggaatatgctatagctgctcaagtctggaagctctctacttgtgatctgtgcgaaatagccagaaatagcgtcttacagagcggcctgagccaccaagagaaacaaaagttcctcggccagaattattacaaagaaggaccagagggcaacgatataagaaaaaccaacgtagcccagatccgaatggcttttcgctacgagaccctgtgtaacgagctgagtttcctgtctgatgctatgaagtcagaggagattacagccctgaccaactag

SEQ ID NO: 9434 - DNA, 2331 bp, Artificial Sequence
  derived and/or modified sequence
atggccctgagcagcgagcccgccgagatgcccagacagttccccaagctgaacatcagcgaggtggacgagcaggtgagactgctggccgagaaggtgttcgccaaggtgctgagagaggaggacagcaaggacgccctgagcctgttcaccgtgcccgaggactgccccatcggccagaaggaggccaaggagagagagctgcagaaggagctggccgagcagaagagcgtggagaccgccaagagaaagaagagcttcaagatgatcagaagccagagcctgagcctgcagatgcccccccagcaggactggaagggcccccccgccgccagccccgccatgagccccaccacccccgtggtgaccggcgccaccagcctgcccacccccgccccctacgccatgcccgagttccagagagtgaccatcagcggcgactactgcgccggcatcaccctggaggactacgagcaggccgccaagagcctggccaaggccctgatgatcagagagaagtacgccagactggcctaccacagattccccagaatcaccagccagtacctgggccaccccagagccgacaccgccccccccgaggagggcctgcccgacttccaccccccccccctgccccaggaggacccctactgcctggacgacgccccccccaacctggactacctggtgcacatgcagggcggcatcctgttcgtgtacgacaacaagaagatgctggagcaccaggagccccacagcctgccctaccccgacctggagacctacaccgtggacatgagccacatcctggccctgatcaccgacggccccaccaagacctactgccacagaagactgaacttcctggagagcaagttcagcctgcacgagatgctgaacgagatgagcgagttcaaggagctgaagagcaacccccacagagacttctacaacgtgagaaaggtggacacccacatccacgccgccgcctgcatgaaccagaagcacctgctgagattcatcaagcacacctaccagaccgagcccgacagaaccgtggccgagaagagaggcagaaagatcaccctgagacaggtgttcgacggcctgcacatggacccctacgacctgaccgtggacagcctggacgtgcacgccggcagacagaccttccacagattcgacaagttcaacagcaagtacaaccccgtgggcgccagcgagctgagagacctgtacctgaagaccgagaactacctgggcggcgagtacttcgccagaatggtgaaggaggtggccagagagctggaggagagcaagtaccagtacagcgagcccagactgagcatctacggcagaagccccgaggagtggcccaacctggcctactggttcatccagcacaaggtgtacagccccaacatgagatggatcatccaggtgcccagaatctacgacatcttcagaagcaagaagctgctgcccaacttcggcaagatgctggagaacatcttcctgcccctgttcaaggccaccatcaacccccaggaccacagagagctgcacctgttcctgaagtacgtgaccggcttcgacagcgtggacgacgagagcaagcacagcgaccacatgttcagcgacaagagccccaaccccgacgtgtggaccagcgagcagaaccccccctacagctactacctgtactacatgtacgccaacatcatggtgctgaacaacctgagaagagagagaggcctgagcaccttcctgttcagaccccactgcggcgaggccggcagcatcacccacctggtgagcgccttcctgaccgccgacaacatcagccacggcctgctgctgaagaagagccccgtgctgcagtacctgtactacctggcccagatccccatcgccatgagccccctgagcaacaacagcctgttcctggagtacagcaagaaccccctgagagagttcctgcacaagggcctgcacgtgagcctgagcaccgacgaccccatgcagttccactacaccaaggaggccctgatggaggagtacgccatcgccgcccaggtgtggaagctgagcacctgcgacctgtgcgagatcgccagaaacagcgtgctgcagagcggcctgagccaccaggagaagcagaagttcctgggccagaactactacaaggagggccccgagggcaacgacatcagaaagaccaacgtggcccagatcagaatggccttcagatacgagaccctgtgcaacgagctgagcttcctgagcgacgccatgaagagcgaggagatcaccgccctgaccaactag

SEQ ID NO: 9435 - protein, 403 aa, Artificial Sequence
  derived and/or modified sequence
MQRAVSVVARLGFRLQAFPPALCRPLSCAQEVLRRTPLYDFHLAHGGKMVAFAGWSLPVQYRDSHTDSHLHTRQHCSLFDVSHMLQTKILGSDRVKLMESLVVGDIAELRPNQGTLSLFTNEAGGILDDLIVTNTSEGHLYVVSNAGCWEKDLALMQDKVRELQNQGRDVGLEVLDNALLALQGPTAAQVLQAGVADDLRKLPFMTSAVMEVFGVSGCRVTRCGYTGEDGVEISVPVAGAVHLATAILKNPEVKLAGLAARDSLRLEAGLCLYGNDIDEHTTPVEGSLSWTLGKRRRAAMDFPGAKVIVPQLKGRVQRRRVGLMCEGAPMRAHSPILNMEGTKIGTVTSGCPSPSLKKNVAMGYVPCEYSRPGTMLLVEVRRKQQMAVVSKMPFVPTNYYTLK

SEQ ID NO: 9436 - DNA, 1212 bp, Artificial Sequence
  derived and/or modified sequence
atgcagagagcagtatccgtggttgctcgcttgggctttcggctccaggcctttcccccggcattatgcaggcccctgtcctgtgcacaggaagttctccgtcgcactcctctttacgacttccacttggcccatggagggaagatggtcgctttcgctggttggtctctgccggtgcagtacagggacagccatactgattcccatctacacacaaggcagcactgctcacttttcgacgtcagccatatgctgcagactaagatactgggctccgacagagtgaagctcatggagtcactcgtggtcggagatatcgctgaactgcggccaaatcagggcactttgtcactgttcactaacgaggctggtggtatcctggacgacctcatcgtgacgaatacctcagaagggcacctgtacgttgtgagtaatgcaggctgctgggaaaaggaccttgctctgatgcaggacaaagtgcgcgaactgcagaaccagggccgggacgtggggcttgaagtcctggataatgcgctcttagctttgcagggcccaacagccgcccaggtgcttcaggccggggtggctgatgatcttcggaagctccccttcatgacatccgccgtgatggaagtctttggcgtctccggttgtcgtgtaacgagatgcggctatacgggggaagacggagtggagatttctgttccggttgctggtgcagttcacctcgcaacagcaattttgaaaaaccctgaggtcaaattagccggactggcagcacgggatagcctacggctggaggcaggactgtgcttatatggtaatgacatagacgagcataccacaccagtggagggctcgctgtcttggaccctgggtaaaagacggagggccgcgatggattttcctggggccaaagtgatcgtgccgcagctcaaagggagggtgcagcgcaggcgcgttgggctgatgtgcgagggagcccccatgagggctcactcccccatcctcaatatggagggtaccaagatcggaacagtcacatcagggtgcccctctccttctctcaagaagaacgtcgccatggggtatgttccttgtgagtatagccggccggggaccatgctcctggtcgaggtgcgccgcaagcaacagatggcagtcgtgagcaaaatgccctttgtgcctaccaattactacacgctgaagtag

SEQ ID NO: 9437 - DNA, 1212 bp, Artificial Sequence
  derived and/or modified sequence
atgcagagagctgtgtctgtggtggcccggctgggcttccggctgcaggccttccccccagccctgtgccggcccctgagctgtgcccaggaggtgctgcggaggacccccctgtatgacttccacctggcccatggaggcaagatggtggcctttgctggctggagcctgcctgtgcagtacagagacagccacacagacagccacctgcacacccggcagcactgcagcctgtttgatgtgagccacatgctgcagaccaagatcctgggcagtgacagagtgaagctgatggagagcctggtggtgggggacattgctgagctgcggcccaaccagggcaccctgagcctcttcaccaatgaagctgggggcatcctggatgacctgattgtgaccaacaccagcgagggccacctgtatgtggtgtccaatgccggctgctgggagaaggacctggccctgatgcaggacaaggtgcgggagctgcagaaccagggcagagatgtgggcctggaggtgctggacaatgccctgctggccctgcagggccccacagctgcccaggtgctgcaggccggcgtggctgatgacctgaggaagctgcccttcatgaccagcgctgtgatggaggtgtttggagtgtctggctgccgggtgacccgctgtggctacaccggggaggatggagtggagatctctgtgcctgtggccggggctgtgcacctggccacagccatcctgaagaaccctgaggtgaagctggccggcctggccgcccgggacagcctgcggctggaggccggcctgtgcctgtatggaaatgacattgatgagcacaccacccctgtggagggcagcctgtcctggaccctgggcaagagaagaagagctgccatggacttccctggggccaaggtgattgtgccccagctgaagggccgggtgcagaggagaagagtgggcctgatgtgtgagggcgcccccatgagggcccacagccccatcctgaacatggagggcaccaagattggcaccgtgaccagcggctgccccagccccagcctgaagaagaatgtggccatgggctacgtgccctgtgagtacagccggcccggcaccatgctgctggtggaggtgcggaggaagcagcagatggctgtggtgtccaagatgccctttgtgcccaccaactactacaccctgaagtag

SEQ ID NO: 9438 - DNA, 1212 bp, Artificial Sequence
  derived and/or modified sequence
atgcagcgggccgtgagcgtggtggcccggctgggcttccggctgcaggcctttcctcccgcactatgccgtcccttgagttgcgcgcaggaggtgctccgcaggacacctctgtacgactttcatctcgctcatggcgggaagatggtagccttcgctggatggagtctgcccgtgcagtatcgcgatagccatactgatagccatctgcacacacggcaacactgtagcctttttgatgtgtcacatatgctacaaacaaagatcctaggcagtgacagagtgaagctgatggaatccctggtcgtcggcgatatcgcagaactgaggccaaatcaggggactttaagtctgtttactaatgaggctggtggaattctggatgaccttatagtgacaaatacctctgagggacacctctacgtggtctcaaatgctggttgttgggagaaagatctggctctaatgcaggataaagtgcgggagctccagaatcagggacgggacgtcgggctcgaagtgctagacaatgcattgctggccctgcaggggcccactgctgcccaggtgctccaagctggcgtcgccgacgatctcaggaaactgccttttatgacttctgctgtcatggaggtctttggagtgtctgggtgtcgagttacccgttgcggctataccggcgaggatggcgtggagatctctgtgccagtcgcgggggcagttcatctggcaaccgccattctgaagaatcctgaggtcaagctcgctggcctggccgcccgggactccttgcgcttagaagctggtctgtgcctgtacgggaatgatatagacgaacacactacgccagtcgagggcagcttgtcttggaccctggggaagaggagacgtgccgcgatggacttcccgggagccaaggtgatcgtcccacaactaaagggacgggtgcagcggcgccgggtggggctcatgtgcgaaggagctcctatgagagcacatagcccgatcctgaacatggaggggaccaaaatcgggacagtgacttccggatgtccaagcccctccctgaagaagaatgtggccatgggttatgtaccatgtgagtattctagaccaggcaccatgctgctggtggaagttaggcgcaaacagcagatggccgttgtgtcaaaaatgccgtttgtgcctacaaactattacacactgaagtag

SEQ ID NO: 9439 - DNA, 2276 bp, Artificial Sequence
  derived and/or modified sequence
agacagggcggttctgcagggggcggtctagcccctagctttgttctgggcagcccaatcagctctggattgcccgagctgccctgaagagtcagccgaaagagctggaggcttcttccctgtggttgcgggttcctgcattctctgctctaaatcccagcctgcccttggggctgcccacgcccccttcagatcctttgctccggagagagacctgtccgagcagaggcctggactacatctcccggcgtgcctggcagtgtggtggcctctgtgcgccgtctgcactcgttgcaggcgacgatgcagagggctgtaagtgtggtggcccgtctgggctttcgcctgcaggcattccccccggccttgtgtcgtccacttagttgcgcacaggaggtgctccgcaggacaccgctctatgacttccacctggcccacggcgggaaaatggtggcgtttgcgggttggagtctgccagtgcagtaccgggacagtcacactgactcgcacctgcacacacgccagcactgctcgctctttgacgtgtctcatatgctgcagaccaagatacttggtagtgaccgggtgaagctgatggagagtctagtggttggagacattgcagagctaagaccaaaccaggggacactgtcgctgtttaccaacgaggctggaggcatcttagatgacttgattgtaaccaatacttctgagggccacctgtatgtggtgtccaacgctggctgctgggagaaagatttggccctcatgcaggacaaggtcagggagcttcagaaccagggcagagatgtgggcctggaggtgttggataatgccctgctagctctgcaaggccccactgcagcccaggtactacaggccggcgtggcagatgacctgaggaaactgcccttcatgaccagtgctgtgatggaggtgtttggcgtgtctggctgccgcgtgacccgctgtggctacacaggagaggatggtgtggagatctcggtgccggtagcgggggcagttcacctggcaacagctattctgaaaaacccagaggtgaagctggcagggctggcagccagggacagcctgcgcctggaggcaggcctctgcctgtatgggaatgacattgatgaacacactacacctgtggagggcagcctcagttggacactggggaagcgccgccgagctgctatggacttccctggagccaaggtcattgttccccagctgaagggcagggtgcagcggaggcgtgtggggttgatgtgtgagggggcccccatgcgggcacacagtcccatcctgaacatggagggtaccaagattggtactgtgactagtggctgcccctccccctctctgaagaagaatgtggcgatgggttatgtgccctgcgagtacagtcgtccagggacaatgctgctggtagaggtgcggcggaagcagcagatggctgtagtcagcaagatgccctttgtgcccacaaactactataccctcaagtgaagctggctcagggtggggctgtcccttccaggagttttgcccctacaaggggttagtcaagaagctgaggcagaactcactgggggtgggcagttaaggtggaggctgattctaattgtctggttgaggggccacaccacctattccccccacctaactcatgccattccagcttccttcaggaccctgcttctgagtgacggaccagctcacacaatgtcttgtttcagtccatgatcccactgacctactcttgcctgctggagggtaatgagaagctttggttctgccatctctcccactctgccaggtgctggctgtggagcaaaggctcacctttgtggagaggataaaacctgcccaacctacctcaccatggtttttcacattgcaaagggtaataacatgggcagtgcggacttaggctaccccctccagtttgctttccgtaaatgcaaattgtccttactgcaagtcaggaatgattgctgactcacagtagggctgctatgcctgtgtgtaaacttggggatggctgagggaacatagactcactcttccacattcccaagttggtctagtgtgctgcccagtagcaaaccatggcagactcaccacctattctgagttccagggctgctgtagggcagggtgggcttcctcccagacttgccttaccctgggctgatctttgcccctggtatgcattaatggactccactgaatcctgaaaaaaaaattaaacttccttcttacttgcc

SEQ ID NO: 9440 - DNA, 1123 bp, Artificial Sequence
  derived and/or modified sequence
gatgcagagggctgtaagtgtggtggcccgtctgggctttcgcctgcaggcattccccccggccttgtgtcgtccacttagttgcgcacagtggtccactccttggctttgtttgctgtgaactggattccaaggacagccttctcagaagagctagagaccaagatacttggtagtgaccgggtgaagctgatggagagtctagtggttggagacattgcagagctaagaccaaaccaggggacactgtcgctgtttaccaacgaggctggaggcatcttagatgacttgattgtaaccaatacttctgagggccacctgtatgtggtgtccaacgctggctgctgggagaaagatttggccctcatgcaggacaaggtcagggagcttcagaaccagggcagagatgtgggcctggaggtgttggataatgccctgctagctctgcaaggccccactgcagcccaggtactacaggccggcgtggcagatgacctgaggaaactgcccttcatgaccagtgctgtgatggaggtgtttggcgtgtctggctgccgcgtgacccgctgtggctacacaggagaggatggtgtggagatctcggtgccggtagcgggggcagttcacctggcaacagctattctgaaaaacccagaggtgaagctggcagggctggcagccagggacagcctgcgcctggaggcaggcctctgcctgtatgggaatgacattgatgaacacactacacctgtggagggcagcctcagttggacactggggaagcgccgccgagctgctatggacttccctggagccaaggtcattgttccccagctgaagggcagggtgcagcggaggcgtgtggggttgatgtgtgagggggcccccatgcgggcacacagtcccatcctgaacatggagggtaccaagattggtactgtgactagtggctgcccctccccctctctgaagaagaatgtggcgatgggttatgtgccctgcgagtacagtcgtccagggacaatgctgctggtagaggtgcggcggaagcagcagatggctgtagtcagcaagatgccctttgtgcccacaaactactataccctcaagtgaagctggctca

SEQ ID NO: 9441 - DNA, 1212 bp, Artificial Sequence
  derived and/or modified sequence
atgcagcgggcagtgtctgtggtggctcgcctggggttccggctgcaggccttcccccctgcgctttgcagaccactatcgtgtgcccaagaagttcttagaaggacacccctatatgacttccatctggcccacggcggaaagatggtggcatttgcaggatggagcctccccgtgcagtatcgggactcacacactgactcccacctccacactcgccagcattgctctttattcgatgtgagccacatgctccagaccaagatacttggtagtgacagggtgaagcttatggagtcccttgtagtgggagatattgcagagctgcggccaaatcaggggacgctctctttattcactaacgaagccggagggatcctggatgatctcattgtgacaaacacatctgagggtcatttatacgttgtttcgaacgctgggtgttgggagaaagacctagcgcttatgcaggacaaggttcgggaacttcagaaccaggggagggacgtaggcctggaggtgttggataacgctttgcttgccttgcaggggcctacggctgctcaagtactacaggcgggtgtggccgatgatctccgtaaacttcccttcatgaccagcgcagttatggaagtgtttggcgtctctggatgccgggttacccgctgcggctatactggtgaggacggcgtggaaatctcagttcccgtagctggggcagtgcacctggctaccgcaattctaaagaatcctgaagtcaaactggctggattggccgcacgggattccttacgattggaggcgggtttgtgtttatatggaaacgacatcgatgagcataccacccccgtggaagggtccttgtcatggaccttggggaaaaggaggagagccgctatggattttccaggggctaaggttattgttccacagctgaagggacgggttcaacgtaggcgggtgggccttatgtgtgagggtgcgccaatgagggcgcatagccccatcctcaatatggaagggaccaagatcgggaccgtcacgagcggctgcccctcccccagccttaagaagaacgttgccatggggtacgttccttgcgagtactcccgtcctggaactatgcttctggtcgaggtcagacgtaagcagcagatggccgttgtgtcaaagatgcccttcgttcctactaattactacactcttaagtag

SEQ ID NO: 9442 - DNA, 1212 bp, Artificial Sequence
  derived and/or modified sequence
atgcagagagccgtgagcgtggtggccagactgggcttcagactgcaggccttcccccccgccctgtgcagacccctgagctgcgcccaggaggtgctgagaagaacccccctgtacgacttccacctggcccacggcggcaagatggtggccttcgccggctggagcctgcccgtgcagtacagagacagccacaccgacagccacctgcacaccagacagcactgcagcctgttcgacgtgagccacatgctgcagaccaagatcctgggcagcgacagagtgaagctgatggagagcctggtggtgggcgacatcgccgagctgagacccaaccagggcaccctgagcctgttcaccaacgaggccggcggcatcctggacgacctgatcgtgaccaacaccagcgagggccacctgtacgtggtgagcaacgccggctgctgggagaaggacctggccctgatgcaggacaaggtgagagagctgcagaaccagggcagagacgtgggcctggaggtgctggacaacgccctgctggccctgcagggccccaccgccgcccaggtgctgcaggccggcgtggccgacgacctgagaaagctgcccttcatgaccagcgccgtgatggaggtgttcggcgtgagcggctgcagagtgaccagatgcggctacaccggcgaggacggcgtggagatcagcgtgcccgtggccggcgccgtgcacctggccaccgccatcctgaagaaccccgaggtgaagctggccggcctggccgccagagacagcctgagactggaggccggcctgtgcctgtacggcaacgacatcgacgagcacaccacccccgtggagggcagcctgagctggaccctgggcaagagaagaagagccgccatggacttccccggcgccaaggtgatcgtgccccagctgaagggcagagtgcagagaagaagagtgggcctgatgtgcgagggcgcccccatgagagcccacagccccatcctgaacatggagggcaccaagatcggcaccgtgaccagcggctgccccagccccagcctgaagaagaacgtggccatgggctacgtgccctgcgagtacagcagacccggcaccatgctgctggtggaggtgagaagaaagcagcagatggccgtggtgagcaagatgcccttcgtgcccaccaactactacaccctgaagtag

SEQ ID NO: 9443 - protein, 396 aa, Artificial Sequence
  derived and/or modified sequence
MFLKAVVLTLALVAVAGARAEVSADQVATVMWDYFSQLSNNAKEAVEHLQKSELTQQLNALFQDKLGEVNTYAGDLQKKLVPFATELHERLAKDSEKLKEEIGKELEELRARLLPHANEVSQKIGDNLRELQQRLEPYADQLRTQVSTQAEQLRRQLTPYAQRMERVLRENADSLQASLRPHADELKAKIDQNVEELKGRLTPYADEFKVKIDQTVEELRRSLAPYAQDTQEKLNHQLEGLTFQMKKNAEELKARISASAEELRQRLAPLAEDVRGNLRGNTEGLQKSLAELGGHLDQQVEEFRRRVEPYGENFNKALVQQMEQLRQKLGPHAGDVEGHLSFLEKDLRDKVNSFFSTFKEKESQDKTLSLPELEQQQEQQQEQQQEQVQMLAPLES

SEQ ID NO: 9444 - DNA, 1191 bp, Artificial Sequence
  derived and/or modified sequence
atgttcctgaaggccgtcgtgttgactctggcactggtagccgtcgcgggagcacgggctgaagtgtccgccgaccaggtggctaccgttatgtgggattacttttcccagttatctaacaatgctaaagaggccgtggagcacctgcaaaaaagcgagctgacccagcagttaaacgctctattccaggacaagctgggtgaagtcaacacatatgcaggtgaccttcagaagaagctagttcccttcgctactgaactgcacgaacgacttgcaaaggatagtgagaaacttaaagaggagatcggaaaggaactcgaggaactgagggcgaggcttcttccccacgccaacgaagtgagtcaaaagattggggacaatttgcgggaactccagcagagactcgaaccatacgccgaccagctccgcacacaggtgtctacacaggcggaacagctgcgacggcagctgactccctacgcccaacgaatggagcgagtcctgcgcgaaaacgccgattccctccaggccagtttgcgtcctcacgcagatgaacttaaggctaagattgaccaaaacgtcgaggagctgaagggtcgactgaccccctacgcagacgaatttaaagtcaaaattgaccagacggtcgaagagttgaggcgttccttggctccctatgcccaagacacccaggagaagctgaaccaccagcttgagggcctgacattccaaatgaaaaagaatgcagaggagctgaaggctcgcatttcagcatccgcagaggagcttagacagaggcttgcaccgctggccgaagacgtccgagggaacctgagaggcaacacggaggggctacaaaaaagcctggcagaactgggcggacacctagaccagcaggtagaggaattcaggaggagggttgagccctatggcgagaattttaacaaagctctggtgcagcagatggagcaactccgacagaagctgggccctcatgccggcgatgtggaaggacatctgtcctttctggagaaagatcttcgtgataaggtcaattcttttttcagcacattcaaagaaaaggagagtcaggataagactctgtccctgccagagttagaacagcagcaggaacagcaacaggaacagcagcaggagcaggttcagatgctcgcaccattggagagttag

SEQ ID NO: 9445 - DNA, 1191 bp, Artificial Sequence
  derived and/or modified sequence
atgttcctgaaggctgtggtgctgaccctggccctggtggccgtggccggggcccgggcagaggtgtctgctgaccaggtggccaccgtgatgtgggactacttcagccagctgagcaacaatgccaaggaggccgtggagcacctgcagaagtctgagctgacccagcagctgaatgccctcttccaggacaagctgggggaggtgaacacctacgccggggacctgcagaagaagctggtgccctttgccacagagctgcacgagcggctggccaaggacagcgagaagctgaaggaggagatcggcaaggagctggaggagctgcgggcccggctgctgccccacgccaatgaggtgtcccagaagatcggggacaacctgcgggagctgcagcagaggctggagccctatgctgaccagctgcggacccaggtgtccacccaggccgagcagctgcggcggcagctgaccccctatgcccagaggatggagcgggtgctgcgggagaatgctgacagcctgcaggccagcctgcggccccatgctgatgagctgaaggccaagattgaccagaatgtggaggagctgaagggccgcctgaccccctatgcagatgagttcaaggtgaagattgaccagacagtggaggagctgcggcgcagcctggccccctatgcccaggacacccaggagaagctgaaccaccagctggagggcctgaccttccagatgaagaagaatgctgaggagctgaaggcccgcatcagcgccagcgctgaggagctgcggcagaggctggcccccctggccgaggatgtgcggggcaacctgcggggcaacacagagggcctgcagaagagcctggccgagctgggcggccacctggaccagcaggtggaggagttcagaagaagagtggagccctacggggagaacttcaacaaggccctggtgcagcagatggagcagctgcggcagaagctgggcccccatgctggagatgtggagggccacctgtccttcctggagaaggacctgcgggacaaggtgaacagcttcttcagcaccttcaaggagaaggagagccaggacaagaccctgagcctgcctgagctggagcagcagcaggagcagcagcaggagcagcagcaggagcaggtgcagatgctggcccccctggagagctag

SEQ ID NO: 9446 - DNA, 1191 bp, Artificial Sequence
  derived and/or modified sequence
atgttcctgaaggccgtggtgctgaccctggccctggtggccgtggcgggagctcgagcggaggtgtccgccgaccaggtggctaccgtaatgtgggactactttagccagctcagcaacaacgctaaggaggctgtggaacacctgcaaaagtccgaactgacacagcagcttaacgcactattccaggacaagcttggggaagtcaatacatatgcaggagatctgcagaagaagctggtccccttcgcaacagaactacacgaaagactggcgaaggacagcgaaaagctcaaagaggagattggcaaagaactggaggaactgcgggcgcgcttgttaccacacgcaaatgaagtatcacaaaaaatcggtgacaacttaagagagctgcaacagagactggaaccatatgctgaccagctgcgaactcaagtgtctacccaggccgagcagctccggcgccaacttacgccttatgcccagcggatggaacgtgtactgcgagaaaatgccgattccctgcaggcaagcctgagaccgcatgcggacgagctgaaagccaaaatcgaccaaaacgtggaggagctgaaaggtagactgaccccgtacgctgatgagttcaaagttaagatagatcaaacagtcgaagaattgcgccggagtctcgctccatatgctcaggatactcaggagaaactgaaccaccagctagagggccttacatttcagatgaagaagaacgctgaggaactgaaagcgagaatctctgctagtgctgaggagttgcgccagaggcttgcaccactagcagaagacgtgcggggcaatctgcggggtaacactgaagggttacagaagtccttagctgagttaggaggtcatcttgatcagcaggttgaagaattcagacgtagagtcgaaccctacggcgagaattttaataaggcgctggtacagcaaatggagcagctgcgacaaaagctcggaccccacgccggcgatgttgaagggcatttgagcttcctcgagaaagatctgagagataaggtcaacagcttcttctctaccttcaaggagaaggaatctcaggataaaaccctgtctctgcctgagctggagcagcagcaagaacaacagcaggaacaacagcaagaacaggttcagatgctagcccccttggagtcttag

SEQ ID NO: 9447 - DNA, 1191 bp, Artificial Sequence
  derived and/or modified sequence
atgttcctgaaagccgtggtgctcacactcgcactggtggctgtggctggggctcgcgcagaagtgagcgcagatcaggtggccacggtcatgtgggattacttctctcagctctcaaataatgcgaaggaagctgtggaacacctccagaagtcagaattgactcagcagttgaacgccctatttcaggataagttgggtgaggtcaatacatacgcaggcgaccttcagaagaaattggtgcccttcgccacagagttgcatgaaagactggctaaagattccgagaagttgaaggaagagattggtaaagagctggaggagctccgggcaaggctcctgccccacgccaacgaagtttcacagaagatcggcgataacctccgcgagctccagcaaaggttagaaccctacgccgaccaattgcgaacccaagtaagtacccaggccgaacagctgagacgccagctgactccgtatgcacagcgcatggagagagtcttacgggagaacgctgatagcttgcaagcgagtttgagaccccacgccgatgagctgaaagccaagatcgatcagaacgttgaggaattaaagggaaggcttaccccttacgctgacgaattcaaagtgaagattgaccaaactgtggaggagttaaggaggagcctcgctccctacgctcaggacacccaggaaaaactcaaccatcagctggagggccttacgttccagatgaaaaagaacgccgaagaactaaaggcgaggatttctgcctcagcagaggaacttcggcagcgcctagcacccttggctgaagatgtcagggggaacctccggggaaacactgaggggttgcagaagtcactcgctgaattggggggacaccttgatcagcaggtagaagaattccggaggagggtggagccatatggcgaaaatttcaataaagcccttgtccaacaaatggagcaactgcgtcaaaaactgggcccacatgccggtgacgtggagggccacctctcctttcttgagaaggaccttagggacaaggttaatagttttttctcaacattcaaagagaaagaaagccaggataagacactgtctctgcctgagctggaacagcagcaggagcagcaacaggaacagcagcaagagcaggttcagatgctggctccactcgagagctag

SEQ ID NO: 9448 - DNA, 1470 bp, Artificial Sequence
  derived and/or modified sequence
tcagttcccactgcagcgcaggtgagctctcctgaggacctctctgtcagctcccctgattgtagggaggatccagtgtggcaagaaactcctccagcccagcaagcagctcaggatgttcctgaaggccgtggtcctgaccctggccctggtggctgtcgccggagccagggctgaggtcagtgctgaccaggtggccacggtgatgtgggactacttcagccagctgagcaacaatgccaaggaggccgtggaacatctccagaaatctgaactcacccagcaactcaatgccctcttccaggacaaacttggagaagtgaacacttacgcaggtgacctgcagaagaagctggtgccctttgccaccgagctgcatgaacgcctggccaaggactcggagaaactgaaggaggagattgggaaggagctggaggagctgagggcccggctgctgccccatgccaatgaggtgagccagaagatcggggacaacctgcgagagcttcagcagcgcctggagccctacgcggaccagctgcgcacccaggtcagcacgcaggccgagcagctgcggcgccagctgaccccctacgcacagcgcatggagagagtgctgcgggagaacgccgacagcctgcaggcctcgctgaggccccacgccgacgagctcaaggccaagatcgaccagaacgtggaggagctcaagggacgccttacgccctacgctgacgaattcaaagtcaagattgaccagaccgtggaggagctgcgccgcagcctggctccctatgctcaggacacgcaggagaagctcaaccaccagcttgagggcctgaccttccagatgaagaagaacgccgaggagctcaaggccaggatctcggccagtgccgaggagctgcggcagaggctggcgcccttggccgaggacgtgcgtggcaacctgaggggcaacaccgaggggctgcagaagtcactggcagagctgggtgggcacctggaccagcaggtggaggagttccgacgccgggtggagccctacggggaaaacttcaacaaagccctggtgcagcagatggaacagctcaggcagaaactgggcccccatgcgggggacgtggaaggccacttgagcttcctggagaaggacctgagggacaaggtcaactccttcttcagcaccttcaaggagaaagagagccaggacaagactctctccctccctgagctggagcaacagcaggaacagcagcaggagcagcagcaggagcaggtgcagatgctggcccctttggagagctgagctgcccctggtgcactggccccaccctcgtggacacctgccctgccctgccacctgtctgtctgtctgtcccaaagaagttctggtatgaacttgaggacacatgtccagtgggaggtgagaccacctctcaatattcaataaagctgctgagaatctagcct

SEQ ID NO: 9449 - DNA, 1191 bp, Artificial Sequence
  derived and/or modified sequence
atgttcctgaaggccgtggtgctgaccctggccctggtggccgtggccggcgccagagccgaggtgagcgccgaccaggtggccaccgtgatgtgggactacttcagccagctgagcaacaacgccaaggaggccgtggagcacctgcagaagagcgagctgacccagcagctgaacgccctgttccaggacaagctgggcgaggtgaacacctacgccggcgacctgcagaagaagctggtgcccttcgccaccgagctgcacgagagactggccaaggacagcgagaagctgaaggaggagatcggcaaggagctggaggagctgagagccagactgctgccccacgccaacgaggtgagccagaagatcggcgacaacctgagagagctgcagcagagactggagccctacgccgaccagctgagaacccaggtgagcacccaggccgagcagctgagaagacagctgaccccctacgcccagagaatggagagagtgctgagagagaacgccgacagcctgcaggccagcctgagaccccacgccgacgagctgaaggccaagatcgaccagaacgtggaggagctgaagggcagactgaccccctacgccgacgagttcaaggtgaagatcgaccagaccgtggaggagctgagaagaagcctggccccctacgcccaggacacccaggagaagctgaaccaccagctggagggcctgaccttccagatgaagaagaacgccgaggagctgaaggccagaatcagcgccagcgccgaggagctgagacagagactggcccccctggccgaggacgtgagaggcaacctgagaggcaacaccgagggcctgcagaagagcctggccgagctgggcggccacctggaccagcaggtggaggagttcagaagaagagtggagccctacggcgagaacttcaacaaggccctggtgcagcagatggagcagctgagacagaagctgggcccccacgccggcgacgtggagggccacctgagcttcctggagaaggacctgagagacaaggtgaacagcttcttcagcaccttcaaggagaaggagagccaggacaagaccctgagcctgcccgagctggagcagcagcaggagcagcagcaggagcagcagcaggagcaggtgcagatgctggcccccctggagagctag

SEQ ID NO: 9450 - protein, 101 aa, Artificial Sequence
  derived and/or modified sequence
MGTRLLPALFLVLLVLGFEVQGTQQPQQDEMPSPTFLTQVKESLSSYWESAKTAAQNLYEKTYLPAVDEKLRDLYSKSTAAMSTYTGIFTDQVLSVLKGEE

SEQ ID NO: 9451 - DNA, 306 bp, Artificial Sequence
  derived and/or modified sequence
atgggtacacgcctattacctgccctatttctagtattactcgtcctcggctttgaggtgcaaggaacacagcagcctcagcaggacgaaatgcctagcccaactttcctcacacaggtgaaggaatcactgtcttcttattgggaaagtgcaaaaacagccgcccaaaacttgtacgaaaagacatatcttccagccgtggatgagaagcttcgggatttgtactcaaagtcgacagcagccatgtcaacttacacaggcattttcaccgaccaggtgctttccgtgctgaaaggggaggaatag

SEQ ID NO: 9452 - DNA, 306 bp, Artificial Sequence
  derived and/or modified sequence
atgggcacccggctgctgcctgccctcttcctggtgctgctggtgctgggctttgaggtgcagggcacccagcagccccagcaggatgagatgcccagccccaccttcctgacccaggtgaaggagagcctgagcagctactgggagagcgccaagacagctgcccagaacctgtatgagaagacctacctgcctgctgtggatgagaagctgcgggacctgtacagcaagagcacagctgccatgagcacctacacaggcatcttcacagaccaggtgctgtctgtgctgaagggggaggagtag

SEQ ID NO: 9453 - DNA, 306 bp, Artificial Sequence
  derived and/or modified sequence
atgggcacccggctgctgcccgccctgttcctggtgctgctggtgcttggcttcgaagtacagggaacacagcaacctcaacaggatgagatgccttctcccacatttttaacacaggtgaaggagagtctctcttcatactgggagagcgctaagactgccgcacagaacctgtacgaaaagacatacttacccgccgtcgatgagaaacttagagatctctacagtaaaagcacagccgccatgtccacctacacagggattttcaccgatcaggtactctctgtcctgaagggtgaggaatag

SEQ ID NO: 9454 - DNA, 306 bp, Artificial Sequence
  derived and/or modified sequence
atgggaactcgtctcctcccggctttgtttctggtgctcctcgttttggggttcgaagtccaaggcacacagcaacctcagcaggacgagatgccatccccaactttcctgacgcaagtgaaggagtctcttagctcttactgggagagcgccaagactgccgctcagaacttatacgagaagacttatctaccagcggtggatgagaagctcagagacctgtactccaaaagtacagccgcaatgtctacatatacaggcatattcacagatcaggtccttagcgtgttgaagggtgaggaatag

SEQ ID NO: 9455 - DNA, 717 bp, Artificial Sequence
  derived and/or modified sequence
gttgtggctgtggagcggaagtgggtctcaaccactataaatcctctctgtgcccgtccggagctggtgaggacagcctgccagagtctggtctctggacactatgggcacacgactcctcccagctctgtttcttgtcctcctggtattgggatttgaggtccaggggacccaacagccccagcaagatgagatgcctagcccgaccttcctcacccaggtgaaggaatctctctccagttactgggagtcagcaaagacagccgcccagaacctgtacgagaagacatacctgcccgctgtagatgagaaactcagggacttgtacagcaaaagcacagcagccatgagcacttacacaggcatttttactgaccaagttctttctgtgctgaagggagaggagtaacagccagaccccccatcagtggacaaggggagagtcccctactcccctgatcccccaggttcagactgagctcccccttcccagtagctcttgcatcctcctcccaactctagcctgaattcttttcaataaaaaatacaattcaagttgcttctcatggatggcactgcttttctgaggactcaagggccaagatggaggggctgactcagtccagccaacatttaatgagcacctactttatgtatggagctctaacccatgggtccatgggaataaagcagtgaatagtaacaataaataatcgt

SEQ ID NO: 9456 - DNA, 306 bp, Artificial Sequence
  derived and/or modified sequence
atgggcaccagactgctgcccgccctgttcctggtgctgctggtgctgggcttcgaggtgcagggcacccagcagccccagcaggacgagatgcccagccccaccttcctgacccaggtgaaggagagcctgagcagctactgggagagcgccaagaccgccgcccagaacctgtacgagaagacctacctgcccgccgtggacgagaagctgagagacctgtacagcaagagcaccgccgccatgagcacctacaccggcatcttcaccgaccaggtgctgagcgtgctgaagggcgaggagtag

SEQ ID NO: 9457 - protein, 770 aa, Artificial Sequence
  derived and/or modified sequence
MLPGLALLLLAAWTARALEVPTDGNAGLLAEPQIAMFCGRLNMHMNVQNGKWDSDPSGTKTCIDTKEGILQYCQEVYPELQITNVVEANQPVTIQNWCKRGRKQCKTHPHFVIPYRCLVGEFVSDALLVPDKCKFLHQERMDVCETHLHWHTVAKETCSEKSTNLHDYGMLLPCGIDKFRGVEFVCCPLAEESDNVDSADAEEDDSDVWWGGADTDYADGSEDKVVEVAEEEEVAEVEEEEADDDEDDEDGDEVEEEAEEPYEEATERTTSIATTTTTTTESVEEVVREVCSEQAETGPCRAMISRWYFDVTEGKCAPFFYGGCGGNRNNFDTEEYCMAVCGSAMSQSLLKTTQEPLARDPVKLPTTAASTPDAVDKYLETPGDENEHAHFQKAKERLEAKHRERMSQVMREWEEAERQAKNLPKADKKAVIQHFQEKVESLEQEAANERQQLVETHMARVEAMLNDRRRLALENYITALQAVPPRPRHVFNMLKKYVRAEQKDRQHTLKHFEHVRMVDPKKAAQIRSQVMTHLRVIYERMNQSLSLLYNVPAVAEEIQDEVDELLQKEQNYSDDVLANMISEPRISYGNDALMPSLTETKTTVELLPVNGEFSLDDLQPWHSFGADSVPANTENEVEPVDARPAADRGLTTRPGSGLTNIKTEEISEVKMDAEFRHDSGYEVHHQKLVFFAEDVGSNKGAIIGLMVGGVVIATVIVITLVMLKKKQYTSIHHGVVEVDAAVTPEERHLSKMQQNGYENPTYKFFEQMQN

SEQ ID NO: 9458 - DNA, 2313 bp, Artificial Sequence
  derived and/or modified sequence
atgcttccaggtcttgccctgctcttgctggcggcctggactgccagagccctggaagtcccaacagacggtaatgctgggctcctcgcagagcctcagatagccatgttttgcggacgactcaacatgcatatgaatgttcagaatggcaaatgggactccgacccaagtggaaccaagacatgtatcgatacaaaggagggaatactccagtattgccaggaagtctatcctgagctgcagatcacaaatgtagttgaggcgaatcagccagtcacgattcagaactggtgcaagcggggaagaaagcagtgcaagactcatccccattttgttattccatatcgctgccttgtcggtgagtttgtgagcgatgccttgttagtgcctgacaagtgtaagttcctgcaccaagagaggatggacgtttgtgaaacacatctgcattggcacaccgttgctaaggaaacctgtagtgagaagtcaacaaaccttcatgactacggtatgctcctcccatgtgggatcgacaaatttaggggagttgagtttgtgtgctgtccgctggccgaggagtctgataacgtcgattcagcagatgcagaagaggacgactctgacgtgtggtggggtggcgccgatactgattacgccgacggatctgaggataaggtggttgaggttgccgaagaagaagaggtagccgaagttgaagaagaggaggccgacgacgacgaggacgacgaagacggggacgaggtggaagaggaggcagaagagccttacgaggaagcgaccgagcgaaccacatctatcgcaacaaccacgaccaccaccacagaatcggtagaggaagtcgttagagaagtgtgttctgaacaggcagaaacggggccttgtcgcgccatgatctcccgttggtatttcgacgttactgagggtaagtgcgctccatttttttacgggggctgcggggggaatcggaacaatttcgataccgaggaatactgtatggctgtgtgcggctctgcaatgtcacaaagccttctgaaaacaacccaagaaccactggctcgcgatcctgtgaaattgccaaccaccgctgcaagcactcccgatgccgtggacaagtacctggaaactcccggggatgagaacgagcacgcccactttcagaaggctaaggaacgcctggaagcgaagcatagggaacggatgtctcaggtcatgagagagtgggaggaagctgaaaggcaggcaaagaacctgccaaaagctgacaagaaagctgtaatccagcactttcaggaaaaggtggagagcctggagcaggaggccgctaacgaacgtcaacagttggtggagacacacatggccagggtcgaagctatgttgaacgatcggcgacggttagcgcttgaaaactatatcactgccctacaggcggtgcccccacggcctagacacgtgtttaacatgctgaagaaatacgtacgggccgagcagaaagacaggcagcatacgctcaaacacttcgaacatgtgcggatggttgacccgaaaaaagccgcacaaatccggagccaagttatgacccacctacgcgttatctacgaaaggatgaaccaatcactttccctactgtataatgtacctgccgttgccgaggaaattcaggatgaggtcgacgaactgctacagaaggaacagaattactccgacgatgtattggctaatatgattagtgagccgcggatatcttatggtaatgacgcactgatgccatcccttacagagaccaaaacgaccgtggaactgctgcctgttaatggcgaattctccctggacgatctccagccttggcatagctttggggcggactcagtacccgcgaacactgagaatgaagtcgagcccgtagacgcccgcccagctgcagaccggggcctcacaacaagaccaggatccgggctcactaatatcaaaactgaagagatctccgaagtgaagatggacgccgaattccggcatgacagtgggtatgaggtgcaccaccaaaagcttgtgttcttcgcggaagacgtagggtctaataagggagcgataatagggctgatggttgggggagtggtgatcgcaaccgtgatcgtaatcacgctggtcatgctcaaaaagaaacagtacacttccattcaccacggcgtggtcgaggttgacgccgctgtgactccggaggagcgacacctttcaaagatgcaacagaacgggtacgagaaccccacctacaagttcttcgagcaaatgcaaaactag

SEQ ID NO: 9459 - DNA, 2145 bp, Artificial Sequence
  derived and/or modified sequence
atgttacccggcttggcgcttctgctgctggctgcctggactgcccgggcacttgaggtgtatccagaacttcagattaccaatgtggtagaggctaatcaacctgtcaccatccaaaattggtgtaagcggggccgaaaacaatgtaaaacacatccacacttcgtcattccataccgttgtttggtcggggaatttgtgagcgatgctctattggtgccggataaatgtaaatttctgcaccaggagcgcatggacgtctgtgagacccatctacattggcatactgtggcgaaagagacctgtagcgagaaaagcaccaaccttcatgactatgggatgcttttaccctgtggaattgataaattccgaggagtagaattcgtgtgttgccccttagcagaagagtctgacaacgtggactctgccgatgcggaagaggacgactctgatgtctggtggggaggcgcagatacagattatgctgacgggtcagaggataaagtcgtagaggtggccgaagaggaggaagtcgctgaggtcgaggaagaagaggcggacgacgatgaggatgacgaagatggagacgaagtggaggaagaggctgaggaaccatatgaagaggcaactgaaagaacaacatcaatagcaacaaccacgaccactactaccgaaagcgtggaagaagtggtccgagaggtctgctccgaacaggccgaaacaggaccctgtagggccatgatatcacgctggtacttcgacgtgaccgagggtaaatgtgcaccatttttctatggtgggtgtggtggcaatcgcaacaacttcgatactgaggagtactgtatggcggtctgcggaagcgctatgtcccaatcgctgctgaaaacgactcaagagcccctggcgcgggaccccgtcaagctgcctactactgccgcgtcgacgccggatgccgtggataaatacttggagaccccgggagacgaaaacgaacatgcacactttcagaaggccaaggagagactagaggccaagcaccgggaacgcatgagtcaggttatgcgggagtgggaagaagcggaacgacaagccaagaacctgcctaaggccgacaagaaagcagtgatacagcatttccaggagaaagtcgagagccttgagcaggaggccgcaaacgaacgccagcagttggtcgaaactcatatggcgcgagtggaagcaatgttgaacgacaggcgcaggctggcactcgaaaattacattaccgcactgcaggctgtgccaccccggccacgacacgtcttcaacatgctgaagaaatatgtcagggctgagcagaaggatcgccagcacacattgaagcatttcgagcatgtcaggatggtagaccctaaaaaggcagcgcaaatcaggagccaagttatgacacatctgagagtgatctatgagaggatgaatcagagcctgagtctgctgtataacgtaccagcagtggcagaggaaattcaggacgaggttgacgagctgctacagaaagaacagaactatagcgatgatgttctagcaaatatgattagcgaacccagaatatcgtacgggaacgatgctttgatgccttccctgaccgaaacgaaaacgaccgttgaactcctgcctgttaacggagagttctcgcttgacgacttacagccctggcattccttcggggccgactccgtgcctgcaaatactgaaaacgaagtcgaacccgtcgatgcgaggccagcagctgacagggggctgacgacgcgccccgggtccggcctgactaacataaagactgaggagatctcagaggtaaaaatggacgctgaattccgacacgattcaggctacgaagttcaccatcagaagctagttttctttgccgaagatgtgggatctaacaagggtgcaataataggactcatggtcggaggtgtggtcatcgccaccgtgatcgtaattacacttgtgatgcttaagaaaaagcaatacactagcatccatcatggggtggtggaggtcgacgcggccgtgaccccggaggagcgccatctttcaaagatgcaacagaacggctatgaaaaccccacttacaaatttttcgaacagatgcagaactag

SEQ ID NO: 9460 - DNA, 2313 bp, Artificial Sequence
  derived and/or modified sequence
atgctgcccggcctggccctgctgctgctggccgcctggacagcccgggccctggaggtgcccacagatggaaatgccggcctgctggccgagccccagatcgccatgttctgtggccgcctgaacatgcacatgaatgtgcagaatggcaagtgggacagcgaccccagcggcaccaagacctgcatcgacaccaaggagggcatcctgcagtactgccaggaggtgtacccagagctgcagatcaccaacgtggtggaggccaaccagcctgtgaccatccagaactggtgcaagaggggcaggaagcagtgcaagacccacccccactttgtgatcccctaccgctgcctggtgggggagtttgtgtctgatgccctgctggtgcctgacaagtgcaagttcctgcaccaggagaggatggatgtgtgtgagacccacctgcactggcacacagtggccaaggagacctgcagcgagaagagcaccaacctgcatgactatggcatgctgctgccctgtggcatcgacaagttccggggcgtggagtttgtgtgctgccccctggccgaggagagtgacaacgtggacagcgcagatgctgaagaagatgacagtgatgtgtggtggggcggcgctgacacagattatgcagatggcagcgaggacaaggtggtggaggtggccgaggaggaggaggtggccgaggtggaggaggaggaggctgatgatgatgaagatgatgaagatggagatgaggtggaggaggaggccgaggagccctatgaggaggccacagagaggaccaccagcatcgccaccaccaccaccaccaccacagagagcgtggaggaggtggtgcgggaggtgtgcagcgagcaggccgagaccggcccctgccgggccatgatcagccgctggtactttgatgtgacagagggcaaatgtgcccccttcttctatggaggctgcggcggcaacagaaacaactttgacacagaggagtactgcatggctgtgtgtggcagcgccatgagccagagcctgctgaagaccacccaggagcccctggcccgggaccctgtgaagctgcccaccacagctgccagcaccccagatgctgtggacaagtacctggagaccccaggagatgaaaatgagcacgcccacttccagaaggccaaggagcggctggaggccaagcaccgggagaggatgagccaggtgatgagggagtgggaggaggccgagcggcaggccaagaacctgcccaaggctgacaagaaggccgtcatccagcacttccaggagaaggtggagagcctggagcaggaggccgccaatgaaaggcagcagctggtggagacccacatggcccgggtggaggccatgctgaatgacagaagaaggctggccctggagaactacatcacagccctgcaggccgtgcccccccggcccaggcatgtgttcaacatgctgaagaagtatgtgcgggcagagcagaaggaccggcagcacaccctgaagcactttgagcacgtgaggatggtggaccccaagaaggccgcccagatccgcagccaggtgatgacccacctgcgggtcatctatgaaagaatgaaccagagcctgagcctgctgtacaacgtgcctgctgtggccgaggagatccaggatgaggtggatgagctgctgcagaaggagcagaactacagtgatgatgtgctggccaacatgatcagcgagccccgcatctcctatggaaatgatgccctgatgcccagcctgacagagaccaagaccaccgtggagctgctgcctgtgaatggagagttcagcctggatgacctgcagccctggcacagctttggagctgacagcgtgcctgccaacacagaaaatgaggtggagcctgtggatgcccggcctgctgctgaccggggcctgaccacccggcccggcagcggcctgaccaacatcaagacagaggagatcagcgaggtgaagatggatgctgagttcagacatgattctggctatgaggtgcaccaccagaagctggtgttctttgctgaagatgtgggcagcaacaagggggccatcatcggcctgatggtgggcggcgtggtgattgccaccgtcatcgtcatcaccctggtgatgctgaagaagaagcagtacaccagcatccaccacggcgtggtggaggtggatgctgctgtgaccccagaggagcggcacctgagcaagatgcagcagaatggctatgagaaccccacctacaagttctttgagcagatgcagaactag

SEQ ID NO: 9461 - DNA, 2145 bp, Artificial Sequence
  derived and/or modified sequence
atgctgcccggcctggccctgctgctgctggccgcctggacagcccgggccctggaggtgtacccagagctgcagatcaccaacgtggtggaggccaaccagcctgtgaccatccagaactggtgcaagaggggcaggaagcagtgcaagacccacccccactttgtgatcccctaccgctgcctggtgggggagtttgtgtctgatgccctgctggtgcctgacaagtgcaagttcctgcaccaggagaggatggatgtgtgtgagacccacctgcactggcacacagtggccaaggagacctgcagcgagaagagcaccaacctgcatgactatggcatgctgctgccctgtggcatcgacaagttccggggcgtggagtttgtgtgctgccccctggccgaggagagtgacaacgtggacagcgcagatgctgaagaagatgacagtgatgtgtggtggggcggcgctgacacagattatgcagatggcagcgaggacaaggtggtggaggtggccgaggaggaggaggtggccgaggtggaggaggaggaggctgatgatgatgaagatgatgaagatggagatgaggtggaggaggaggccgaggagccctatgaggaggccacagagaggaccaccagcatcgccaccaccaccaccaccaccacagagagcgtggaggaggtggtgcgggaggtgtgcagcgagcaggccgagaccggcccctgccgggccatgatcagccgctggtactttgatgtgacagagggcaaatgtgcccccttcttctatggaggctgcggcggcaacagaaacaactttgacacagaggagtactgcatggctgtgtgtggcagcgccatgagccagagcctgctgaagaccacccaggagcccctggcccgggaccctgtgaagctgcccaccacagctgccagcaccccagatgctgtggacaagtacctggagaccccaggagatgaaaatgagcacgcccacttccagaaggccaaggagcggctggaggccaagcaccgggagaggatgagccaggtgatgagggagtgggaggaggccgagcggcaggccaagaacctgcccaaggctgacaagaaggccgtcatccagcacttccaggagaaggtggagagcctggagcaggaggccgccaatgaaaggcagcagctggtggagacccacatggcccgggtggaggccatgctgaatgacagaagaaggctggccctggagaactacatcacagccctgcaggccgtgcccccccggcccaggcatgtgttcaacatgctgaagaagtatgtgcgggcagagcagaaggaccggcagcacaccctgaagcactttgagcacgtgaggatggtggaccccaagaaggccgcccagatccgcagccaggtgatgacccacctgcgggtcatctatgaaagaatgaaccagagcctgagcctgctgtacaacgtgcctgctgtggccgaggagatccaggatgaggtggatgagctgctgcagaaggagcagaactacagtgatgatgtgctggccaacatgatcagcgagccccgcatctcctatggaaatgatgccctgatgcccagcctgacagagaccaagaccaccgtggagctgctgcctgtgaatggagagttcagcctggatgacctgcagccctggcacagctttggagctgacagcgtgcctgccaacacagaaaatgaggtggagcctgtggatgcccggcctgctgctgaccggggcctgaccacccggcccggcagcggcctgaccaacatcaagacagaggagatcagcgaggtgaagatggatgctgagttcagacatgattctggctatgaggtgcaccaccagaagctggtgttctttgctgaagatgtgggcagcaacaagggggccatcatcggcctgatggtgggcggcgtggtgattgccaccgtcatcgtcatcaccctggtgatgctgaagaagaagcagtacaccagcatccaccacggcgtggtggaggtggatgctgctgtgaccccagaggagcggcacctgagcaagatgcagcagaatggctatgagaaccccacctacaagttctttgagcagatgcagaactag

SEQ ID NO: 9462 - DNA, 2313 bp, Artificial Sequence
  derived and/or modified sequence
atgctgcccggcctggccctgctgctgctggccgcctggaccgcccgtgcgcttgaagttcctacagacggtaatgctggtttgctggccgagccccagatagcgatgttctgtggcagactgaatatgcacatgaacgttcaaaacggcaaatgggattccgacccctccgggactaagacgtgcattgatacgaaagaaggcatcctgcagtattgtcaggaggtgtatccagaactacagattacgaatgttgtggaggccaaccagcctgtaactatccaaaactggtgcaagcgaggacgtaagcagtgcaagactcatccacacttcgttattccttaccggtgcctggtgggcgagttcgtgagtgatgcccttttggtacctgacaaatgcaaattcctccatcaggagcgtatggacgtctgtgaaacccacctgcattggcatacagtcgcaaaggaaacctgttccgagaaaagcacgaacttgcatgactatggtatgctactgccctgtggtattgataagttcaggggtgtcgagttcgtgtgttgtcctttggccgaggaatccgataatgtcgattctgctgatgcagaagaggacgacagcgacgtctggtggggtggcgccgatacggactatgcagacgggagtgaggataaggtagtggaggtggcggaggaagaggaagtcgctgaagtggaggaggaagaggcggacgatgatgaagatgatgaagacggtgacgaggtggaagaggaggccgaggagccctacgaggaggcaaccgaaaggactacatccattgccacgactaccacgactacaactgagtctgtggaagaggtggttagagaagtttgctccgagcaggctgaaacgggcccttgcagagccatgattagtcgctggtatttcgatgtaaccgaaggcaaatgcgcacccttcttttacggcggttgcgggggaaatcggaataacttcgatactgaggagtactgcatggctgtgtgtggttctgctatgagccagtccctgcttaagactacacaagagccactggcacgcgaccccgtaaaactacctaccactgcagctagcacacccgatgccgttgacaagtacctcgagacccccggcgacgaaaatgagcacgcgcattttcagaaagccaaagagagacttgaggccaagcatagggagcgcatgtctcaggtgatgcgagaatgggaggaggctgaaagacaggccaaaaatctgcccaaagcagataaaaaagctgtcatacagcactttcaggagaaggtggagtcactggagcaggaggccgcaaatgagcgccagcagttggttgagactcatatggcaagggtggaggccatgctgaacgatcgccgcaggctggctctggaaaattacattactgcgctgcaggcagtgccccctcggccccgacacgtcttcaatatgctgaagaagtatgtaagggcagaacagaaagataggcagcatactttgaagcactttgaacacgtgagaatggtggaccccaaaaaggctgcccaaattaggagccaggtcatgacacacctgcgggtgatttacgagcgaatgaatcagtcgctgagtctgctttataacgtccctgccgtggctgaggaaattcaggacgaagtagacgagctcttgcagaaagagcagaactacagcgacgatgtcttggcaaacatgattagcgagccgcgaatcagctacgggaacgatgcgttgatgccttctctgacagaaacaaagacaaccgtggaacttctgccagtgaatggagagttctctcttgatgatcttcaaccttggcacagttttggagctgacagtgtgccagccaacaccgaaaatgaagtagaacccgttgacgctagacccgccgccgataggggactcaccacaagaccaggcagcggcttgaccaatatcaagacagaagagatttctgaagttaagatggatgctgaattccggcacgacagtgggtacgaggttcaccatcagaagttggtgttctttgcggaggacgtgggcagtaacaaaggcgccatcatcggcctgatggttgggggcgtggtcatagccacagtcatagtcattacccttgtgatgcttaagaaaaagcaatacacgtctatacaccacggagtcgtcgaagtggacgccgcagttactcctgaggagagacatctgagtaaaatgcagcagaatggatatgaaaaccccacttacaaatttttcgaacagatgcagaactag

SEQ ID NO: 9463 - DNA, 2145 bp, Artificial Sequence
  derived and/or modified sequence
atgctgcccggcctggccctgctgctgctggccgcctggaccgcccgggcactcgaggtataccctgagctacaaattacaaatgtcgtggaggctaatcagcccgtcaccatccaaaactggtgtaagcggggacggaagcagtgcaagactcatccacactttgtgataccataccgatgcctcgtgggcgaatttgtcagcgatgccctgctggtgcctgacaagtgcaagtttctgcatcaggagcgcatggatgtgtgtgaaacgcatttacactggcatactgttgccaaggagacgtgtagcgagaaaagtactaacttacatgattacggtatgctgctgccctgcggcatagacaaatttcggggtgtcgaatttgtgtgttgcccactggcggaggagagcgataacgttgattctgcggacgctgaggaagacgacagcgacgtctggtggggaggagcagacactgactacgccgacggaagcgaagacaaagtggtggaagtagcggaggaggaagaggtggctgaagtggaagaggaagaggctgacgatgacgaagacgatgaggacggagacgaggtggaggaggaagccgaggaaccatatgaggaagcaacggaacgcaccacatcaatcgccaccacaacgacaaccaccacagagagcgtagaggaggtagtccgggaggtctgttctgagcaggcagaaacagggccctgtagggccatgattagtaggtggtactttgacgtcacggaaggcaaatgcgcaccattcttttacggcggctgtggcgggaaccgtaacaattttgataccgaggagtactgtatggctgtctgtggctccgccatgagccagtctctgctgaagaccacacaggagccactggcccgtgaccctgttaaattgcccaccacagccgcaagtacgcccgatgcagtcgacaaataccttgagactccaggggacgaaaatgagcatgcccatttccaaaaggccaaagagcgcctggaagcaaaacaccgggagaggatgagtcaggtgatgagggaatgggaggaagcagagcggcaggccaagaatcttccgaaggctgacaaaaaagctgtgattcaacactttcaagagaaagtagaatctctggaacaagaggctgcaaacgagcgacagcaacttgtagaaacccacatggctagggtcgaggctatgctgaacgacagacggcgcctcgcccttgagaattacatcacagcattgcaggccgttcccccccggcccagacacgtgttcaacatgctcaaaaagtacgtcagggcggagcagaaagatcgccaacacaccttgaaacattttgagcatgtgaggatggtggaccctaagaaagccgcccagatccgttcccaggtcatgactcatctgcgagttatctatgaaaggatgaatcaatctctctctctgctctacaacgtgccagccgtcgctgaggaaatccaggacgaggtggacgagctgcttcaaaaggaacaaaactacagcgatgatgtcctagctaacatgatctcagaaccgagaataagctatggtaatgatgccctcatgcccagccttacagagaccaaaactaccgtcgaactcctgccagtgaacggggagttctcactagatgacctccagccgtggcacagtttcggcgccgactccgtgccggccaataccgaaaatgaagttgaaccggtggacgctagacctgcggcggatcgcggacttacaacgaggccaggatctggcctgacaaatatcaagacggaggagatcagcgaggtgaagatggatgcggaattccgtcatgactcgggctacgaggtgcatcaccaaaaattagtgttctttgctgaggatgtcggttcaaacaaaggagctattatcggactaatggtagggggagtggtcatcgctacagtcatcgttattacccttgtgatgctgaaaaaaaaacaatatactagtatccaccacggtgtcgtggaagtggacgccgccgtgacgcctgaggaacgccacctgagtaaaatgcagcaaaacggatatgagaacccaacatataaattcttcgagcagatgcagaactag

SEQ ID NO: 9464 - DNA, 3467 bp, Artificial Sequence
  derived and/or modified sequence
cagcagcgcactcggtgccccgcgcagggtcgcgatgctgcccggtttggcactgctcctgctggccgcctggacggctcgggcgctggaggtacccactgatggtaatgctggcctgctggctgaaccccagattgccatgttctgtggcagactgaacatgcacatgaatgtccagaatgggaagtgggattcagatccatcagggaccaaaacctgcattgataccaaggaaggcatcctgcagtattgccaagaagtctaccctgaactgcagatcaccaatgtggtagaagccaaccaaccagtgaccatccagaactggtgcaagcggggccgcaagcagtgcaagacccatccccactttgtgattccctaccgctgcttagttggtgagtttgtaagtgatgcccttctcgttcctgacaagtgcaaattcttacaccaggagaggatggatgtttgcgaaactcatcttcactggcacaccgtcgccaaagagacatgcagtgagaagagtaccaacttgcatgactacggcatgttgctgccctgcggaattgacaagttccgaggggtagagtttgtgtgttgcccactggctgaagaaagtgacaatgtggattctgctgatgcggaggaggatgactcggatgtctggtggggcggagcagacacagactatgcagatgggagtgaagacaaagtagtagaagtagcagaggaggaagaagtggctgaggtggaagaagaagaagccgatgatgacgaggacgatgaggatggtgatgaggtagaggaagaggctgaggaaccctacgaagaagccacagagagaaccaccagcattgccaccaccaccaccaccaccacagagtctgtggaagaggtggttcgagaggtgtgctctgaacaagccgagacggggccgtgccgagcaatgatctcccgctggtactttgatgtgactgaagggaagtgtgccccattcttttacggcggatgtggcggcaaccggaacaactttgacacagaagagtactgcatggccgtgtgtggcagcgccatgtcccaaagtttactcaagactacccaggaacctcttgcccgagatcctgttaaacttcctacaacagcagccagtacccctgatgccgttgacaagtatctcgagacacctggggatgagaatgaacatgcccatttccagaaagccaaagagaggcttgaggccaagcaccgagagagaatgtcccaggtcatgagagaatgggaagaggcagaacgtcaagcaaagaacttgcctaaagctgataagaaggcagttatccagcatttccaggagaaagtggaatctttggaacaggaagcagccaacgagagacagcagctggtggagacacacatggccagagtggaagccatgctcaatgaccgccgccgcctggccctggagaactacatcaccgctctgcaggctgttcctcctcggcctcgtcacgtgttcaatatgctaaagaagtatgtccgcgcagaacagaaggacagacagcacaccctaaagcatttcgagcatgtgcgcatggtggatcccaagaaagccgctcagatccggtcccaggttatgacacacctccgtgtgatttatgagcgcatgaatcagtctctctccctgctctacaacgtgcctgcagtggccgaggagattcaggatgaagttgatgagctgcttcagaaagagcaaaactattcagatgacgtcttggccaacatgattagtgaaccaaggatcagttacggaaacgatgctctcatgccatctttgaccgaaacgaaaaccaccgtggagctccttcccgtgaatggagagttcagcctggacgatctccagccgtggcattcttttggggctgactctgtgccagccaacacagaaaacgaagttgagcctgttgatgcccgccctgctgccgaccgaggactgaccactcgaccaggttctgggttgacaaatatcaagacggaggagatctctgaagtgaagatggatgcagaattccgacatgactcaggatatgaagttcatcatcaaaaattggtgttctttgcagaagatgtgggttcaaacaaaggtgcaatcattggactcatggtgggcggtgttgtcatagcgacagtgatcgtcatcaccttggtgatgctgaagaagaaacagtacacatccattcatcatggtgtggtggaggttgacgccgctgtcaccccagaggagcgccacctgtccaagatgcagcagaacggctacgaaaatccaacctacaagttctttgagcagatgcagaactagacccccgccacagcagcctctgaagttggacagcaaaaccattgcttcactacccatcggtgtccatttatagaataatgtgggaagaaacaaacccgttttatgatttactcattatcgccttttgacagctgtgctgtaacacaagtagatgcctgaacttgaattaatccacacatcagtaatgtattctatctctctttacattttggtctctatactacattattaatgggttttgtgtactgtaaagaatttagctgtatcaaactagtgcatgaatagattctctcctgattatttatcacatagccccttagccagttgtatattattcttgtggtttgtgacccaattaagtcctactttacatatgctttaagaatcgatgggggatgcttcatgtgaacgtgggagttcagctgcttctcttgcctaagtattcctttcctgatcactatgcattttaaagttaaacatttttaagtatttcagatgctttagagagattttttttccatgactgcattttactgtacagattgctgcttctgctatatttgtgatataggaattaagaggatacacacgtttgtttcttcgtgcctgttttatgtgcacacattaggcattgagacttcaagcttttctttttttgtccacgtatctttgggtctttgataaagaaaagaatccctgttcattgtaagcacttttacggggcgggtggggaggggtgctctgctggtcttcaattaccaagaattctccaaaacaattttctgcaggatgattgtacagaatcattgcttatgacatgatcgctttctacactgtattacataaataaattaaataaaataaccccgggcaagacttttctttgaaggatgactacagacattaaataatcgaagtaattttgggtggggagaagaggcagattcaattttctttaaccagtctgaagtttcatttatgatacaaaagaagatgaaaatggaagtggcaatataaggggatgaggaaggcatgcctggacaaacccttcttttaagatgtgtcttcaatttgtataaaatggtgttttcatgtaaataaatacattcttggaggagca

SEQ ID NO: 9465 - DNA, 2517 bp, Artificial Sequence
  derived and/or modified sequence
cagcagcgcactcggtgccccgcgcagggtcgcgatgctgcccggtttggcactgctcctgctggccgcctggacggctcgggcgctggaggtctaccctgaactgcagatcaccaatgtggtagaagccaaccaaccagtgaccatccagaactggtgcaagcggggccgcaagcagtgcaagacccatccccactttgtgattccctaccgctgcttagttggtgagtttgtaagtgatgcccttctcgttcctgacaagtgcaaattcttacaccaggagaggatggatgtttgcgaaactcatcttcactggcacaccgtcgccaaagagacatgcagtgagaagagtaccaacttgcatgactacggcatgttgctgccctgcggaattgacaagttccgaggggtagagtttgtgtgttgcccactggctgaagaaagtgacaatgtggattctgctgatgcggaggaggatgactcggatgtctggtggggcggagcagacacagactatgcagatgggagtgaagacaaagtagtagaagtagcagaggaggaagaagtggctgaggtggaagaagaagaagccgatgatgacgaggacgatgaggatggtgatgaggtagaggaagaggctgaggaaccctacgaagaagccacagagagaaccaccagcattgccaccaccaccaccaccaccacagagtctgtggaagaggtggttcgagaggtgtgctctgaacaagccgagacggggccgtgccgagcaatgatctcccgctggtactttgatgtgactgaagggaagtgtgccccattcttttacggcggatgtggcggcaaccggaacaactttgacacagaagagtactgcatggccgtgtgtggcagcgccatgtcccaaagtttactcaagactacccaggaacctcttgcccgagatcctgttaaacttcctacaacagcagccagtacccctgatgccgttgacaagtatctcgagacacctggggatgagaatgaacatgcccatttccagaaagccaaagagaggcttgaggccaagcaccgagagagaatgtcccaggtcatgagagaatgggaagaggcagaacgtcaagcaaagaacttgcctaaagctgataagaaggcagttatccagcatttccaggagaaagtggaatctttggaacaggaagcagccaacgagagacagcagctggtggagacacacatggccagagtggaagccatgctcaatgaccgccgccgcctggccctggagaactacatcaccgctctgcaggctgttcctcctcggcctcgtcacgtgttcaatatgctaaagaagtatgtccgcgcagaacagaaggacagacagcacaccctaaagcatttcgagcatgtgcgcatggtggatcccaagaaagccgctcagatccggtcccaggttatgacacacctccgtgtgatttatgagcgcatgaatcagtctctctccctgctctacaacgtgcctgcagtggccgaggagattcaggatgaagttgatgagctgcttcagaaagagcaaaactattcagatgacgtcttggccaacatgattagtgaaccaaggatcagttacggaaacgatgctctcatgccatctttgaccgaaacgaaaaccaccgtggagctccttcccgtgaatggagagttcagcctggacgatctccagccgtggcattcttttggggctgactctgtgccagccaacacagaaaacgaagttgagcctgttgatgcccgccctgctgccgaccgaggactgaccactcgaccaggttctgggttgacaaatatcaagacggaggagatctctgaagtgaagatggatgcagaattccgacatgactcaggatatgaagttcatcatcaaaaattggtgttctttgcagaagatgtgggttcaaacaaaggtgcaatcattggactcatggtgggcggtgttgtcatagcgacagtgatcgtcatcaccttggtgatgctgaagaagaaacagtacacatccattcatcatggtgtggtggaggttgacgccgctgtcaccccagaggagcgccacctgtccaagatgcagcagaacggctacgaaaatccaacctacaagttctttgagcagatgcagaactagacccccgccacagcagcctctgaagttggacagcaaaaccattgcttcactacccatcggtgtccatttatagaataatgtgggaagaaacaaacccgttttatgatttactcattatcgccttttgacagctgtgctgtaacacaagtagatgcctgaacttgaattaatccacacatcagtaatgtattctatctctctttacattttggtctctatactacattattaatgggttttgtgtactgtaaagaatttagctgtatcaaactagtgcatgaatagattctctcctgattatttatcacatagccccttagccagttgtatattattct

SEQ ID NO: 9466 - DNA, 2313 bp, Artificial Sequence
  derived and/or modified sequence
atgctacccggtctagcccttctgcttctggccgcttggactgcacgtgccctcgaggttccaacagacggtaatgctggactgttggccgagcctcagattgctatgttctgcgggcgtctgaacatgcatatgaatgtacaaaacggaaagtgggacagcgatcctagcggcaccaaaacttgtattgataccaaggagggtattctccagtactgccaggaagtctaccccgagctccagatcacaaatgtcgtagaagcaaaccagcccgtaaccatacagaactggtgtaagcgaggcagaaaacagtgcaagactcacccacattttgtgatcccctaccggtgcctcgtgggagagttcgtgtccgatgccctgttggtgcccgacaagtgtaagtttttgcatcaggagcgcatggacgtctgtgaaacccacctgcattggcatactgtggccaaggagacttgtagtgagaaatcaacaaacttacacgactatggtatgctgcttccctgtggcatcgataaatttcgaggggttgagttcgtctgttgcccgctcgctgaggagtctgacaacgtggactcagcagacgctgaagaagatgactctgacgtgtggtggggtggcgctgataccgactatgcggatggatccgaggacaaggtggttgaggtcgccgaagaggaggaagtagccgaagtggaggaggaggaggccgatgatgatgaagatgatgaggatggagacgaggtggaggaagaggccgaagaaccttatgaggaagctactgaacggacgacatcgattgctactaccacaacaactaccaccgagtctgtcgaagaggtggtgagggaggtgtgctccgagcaagcagagactggtccatgcagagccatgatctcacgatggtacttcgacgttacagagggtaagtgcgccccattcttttacggagggtgcggagggaataggaacaacttcgacacagaggaatattgtatggctgtgtgcggaagcgcaatgagccagagcttgctcaaaactacccaggagccactcgcacgcgacccggtgaagctgcctaccacagcagcctcaacacccgatgcagttgacaaatatctcgaaacccccggtgacgagaatgagcacgctcatttccagaaggcaaaggagcgcttggaggcaaagcacagagaacgcatgagccaggtgatgcgggagtgggaggaggccgagagacaagcaaagaacttgcctaaggccgacaaaaaagccgtgatccagcactttcaggaaaaagtggagtcccttgagcaggaggccgctaatgagcgccagcagctggtggagacacacatggcccgtgtggaggcaatgctgaacgatcgcagacgtctcgccctggaaaattatattaccgccctccaggcagtgcctcctcggccaaggcatgttttcaatatgctgaagaaatatgtgagggcagagcagaaggatcggcagcacaccctgaagcacttcgaacacgtgcgcatggttgaccctaaaaaggccgctcaaattaggtcccaggtgatgacacacttacgcgtgatttatgagcgaatgaatcagagcctatccctcttatacaatgtccctgccgtagctgaagagatccaagatgaggtagacgagctcctgcaaaaagagcagaattattccgacgatgttctggctaacatgataagtgaaccaagaatttcctatgggaacgacgccttgatgccctccctgacagaaacgaaaacaacggtagaattgctgccggtgaatggagagttttctctggatgacctgcaaccttggcatagcttcggagctgattcagttcccgcaaacaccgagaacgaggtcgagcccgtagacgcccgtccagctgccgacagagggctaaccacaaggcccggatccggtctgaccaatatcaaaaccgaggagatctccgaggtcaagatggatgctgaattcaggcatgactctggatacgaagtccaccaccaaaaactggtgttcttcgccgaagacgtgggttcaaataagggcgcaatcatcggcctaatggtcggaggggtcgtaattgccacagtgatcgtaatcacattagtaatgctcaaaaaaaagcagtacacctcaatccatcatggggtggtggaagtggacgccgcagtgacccctgaggaacgccacctctccaaaatgcaacagaacgggtacgagaacccgacttataaattttttgaacagatgcagaattag

SEQ ID NO: 9467 - DNA, 2145 bp, Artificial Sequence
  derived and/or modified sequence
atgctgccagggctggccttactcttgttggcagcttggacagccagggctttggaggtgtatcccgagctgcagattactaacgtggtcgaagcgaatcaacccgtcacaatccagaattggtgtaaacgaggcaggaagcagtgtaaaacccatccccatttcgtcataccatatagatgtctggtcggcgagtttgtctccgatgcgctgttggtgcccgataagtgtaagtttcttcatcaggaaagaatggacgtgtgcgagacccacctgcactggcacacagttgctaaggagacctgttctgaaaaaagcacaaacttgcacgactatggtatgctcttgccctgcggcatcgataaatttagaggggtggaatttgtgtgttgcccactagcggaggaatccgacaatgtcgatagcgccgatgccgaagaagatgatagcgacgtctggtgggggggagccgacactgattatgcggacggaagcgaggataaagtcgtggaggtggctgaagaggaggaggttgcggaggtcgaggaggaagaggccgacgatgacgaggacgatgaggatggtgacgaggtggaagaagaggccgaggagccttacgaagaggcgacagaacgcaccaccagcatcgctaccacaacaaccaccacaacagagtcagtcgaagaagtcgtgcgggaggtgtgcagcgagcaggccgagaccgggccatgtcgggcaatgataagtcggtggtatttcgatgtcaccgaaggcaaatgcgcaccatttttctatggaggctgtggcggaaacaggaataatttcgacaccgaggagtattgcatggcggtgtgcggctccgccatgagccagtctctccttaaaaccactcaggagccacttgccagagatccagtgaaactgccgactaccgcggcatcaacgccagatgccgtggataagtatctggaaacgcccggtgacgaaaatgagcacgcccacttccaaaaggccaaagaacgactggaggcaaaacatagggagaggatgagccaagtgatgagagagtgggaagaggcagaaagacaagcaaagaatctgcccaaagccgacaaaaaggccgtgatccagcattttcaagaaaaggtggagtccctggagcaggaagcagctaacgagaggcagcaactcgttgagacccacatggcccgtgtggaggccatgttaaatgacaggcgcagactggccttggaaaactatattaccgcattgcaagcagtgccgccaaggccgcgacatgtctttaacatgctgaaaaagtacgtccgcgctgaacaaaaggataggcagcacacactaaagcatttcgaacacgtccgcatggtggatccaaagaaggctgcccagattaggagccaggtcatgacccacctcagagtgatctacgagcgcatgaatcagagtttatccctactgtacaatgttccggctgtggctgaggagatccaggacgaggttgatgaactgctgcagaaagagcagaattactccgatgatgtgttggccaatatgatatcagagccgagaataagctatgggaacgacgctctaatgccctccctgacagaaaccaaaaccacagtggaactgcttcctgtgaacggggaattttcacttgatgatcttcaaccttggcatagcttcggtgcagatagcgttcccgcaaacactgagaacgaggtagaaccagtggacgcccgacctgccgcagatcgcggactcactacacgcccaggatccggactcaccaatatcaagaccgaggaaatcagcgaggtgaagatggacgctgaatttcggcatgactccggatatgaggttcaccaccagaagcttgtattcttcgcagaggacgtggggtcaaataagggagctattataggcctcatggtgggtggagtggtgattgcaacggtaattgtgatcactctcgtgatgctcaagaaaaagcaatacacctccatccaccatggcgttgtcgaagtcgatgccgcagtaacaccagaagagcggcacctctccaagatgcaacagaacggctatgagaatccaacatacaaattttttgagcaaatgcagaactag

SEQ ID NO: 9468 - DNA, 2313 bp, Artificial Sequence
  derived and/or modified sequence
atgctgcccggcctggccctgctgctgctggccgcctggaccgccagagccctggaggtgcccaccgacggcaacgccggcctgctggccgagccccagatcgccatgttctgcggcagactgaacatgcacatgaacgtgcagaacggcaagtgggacagcgaccccagcggcaccaagacctgcatcgacaccaaggagggcatcctgcagtactgccaggaggtgtaccccgagctgcagatcaccaacgtggtggaggccaaccagcccgtgaccatccagaactggtgcaagagaggcagaaagcagtgcaagacccacccccacttcgtgatcccctacagatgcctggtgggcgagttcgtgagcgacgccctgctggtgcccgacaagtgcaagttcctgcaccaggagagaatggacgtgtgcgagacccacctgcactggcacaccgtggccaaggagacctgcagcgagaagagcaccaacctgcacgactacggcatgctgctgccctgcggcatcgacaagttcagaggcgtggagttcgtgtgctgccccctggccgaggagagcgacaacgtggacagcgccgacgccgaggaggacgacagcgacgtgtggtggggcggcgccgacaccgactacgccgacggcagcgaggacaaggtggtggaggtggccgaggaggaggaggtggccgaggtggaggaggaggaggccgacgacgacgaggacgacgaggacggcgacgaggtggaggaggaggccgaggagccctacgaggaggccaccgagagaaccaccagcatcgccaccaccaccaccaccaccaccgagagcgtggaggaggtggtgagagaggtgtgcagcgagcaggccgagaccggcccctgcagagccatgatcagcagatggtacttcgacgtgaccgagggcaagtgcgcccccttcttctacggcggctgcggcggcaacagaaacaacttcgacaccgaggagtactgcatggccgtgtgcggcagcgccatgagccagagcctgctgaagaccacccaggagcccctggccagagaccccgtgaagctgcccaccaccgccgccagcacccccgacgccgtggacaagtacctggagacccccggcgacgagaacgagcacgcccacttccagaaggccaaggagagactggaggccaagcacagagagagaatgagccaggtgatgagagagtgggaggaggccgagagacaggccaagaacctgcccaaggccgacaagaaggccgtgatccagcacttccaggagaaggtggagagcctggagcaggaggccgccaacgagagacagcagctggtggagacccacatggccagagtggaggccatgctgaacgacagaagaagactggccctggagaactacatcaccgccctgcaggccgtgccccccagacccagacacgtgttcaacatgctgaagaagtacgtgagagccgagcagaaggacagacagcacaccctgaagcacttcgagcacgtgagaatggtggaccccaagaaggccgcccagatcagaagccaggtgatgacccacctgagagtgatctacgagagaatgaaccagagcctgagcctgctgtacaacgtgcccgccgtggccgaggagatccaggacgaggtggacgagctgctgcagaaggagcagaactacagcgacgacgtgctggccaacatgatcagcgagcccagaatcagctacggcaacgacgccctgatgcccagcctgaccgagaccaagaccaccgtggagctgctgcccgtgaacggcgagttcagcctggacgacctgcagccctggcacagcttcggcgccgacagcgtgcccgccaacaccgagaacgaggtggagcccgtggacgccagacccgccgccgacagaggcctgaccaccagacccggcagcggcctgaccaacatcaagaccgaggagatcagcgaggtgaagatggacgccgagttcagacacgacagcggctacgaggtgcaccaccagaagctggtgttcttcgccgaggacgtgggcagcaacaagggcgccatcatcggcctgatggtgggcggcgtggtgatcgccaccgtgatcgtgatcaccctggtgatgctgaagaagaagcagtacaccagcatccaccacggcgtggtggaggtggacgccgccgtgacccccgaggagagacacctgagcaagatgcagcagaacggctacgagaaccccacctacaagttcttcgagcagatgcagaactag

SEQ ID NO: 9469 - DNA, 2145 bp, Artificial Sequence
  derived and/or modified sequence
atgctgcccggcctggccctgctgctgctggccgcctggaccgccagagccctggaggtgtaccccgagctgcagatcaccaacgtggtggaggccaaccagcccgtgaccatccagaactggtgcaagagaggcagaaagcagtgcaagacccacccccacttcgtgatcccctacagatgcctggtgggcgagttcgtgagcgacgccctgctggtgcccgacaagtgcaagttcctgcaccaggagagaatggacgtgtgcgagacccacctgcactggcacaccgtggccaaggagacctgcagcgagaagagcaccaacctgcacgactacggcatgctgctgccctgcggcatcgacaagttcagaggcgtggagttcgtgtgctgccccctggccgaggagagcgacaacgtggacagcgccgacgccgaggaggacgacagcgacgtgtggtggggcggcgccgacaccgactacgccgacggcagcgaggacaaggtggtggaggtggccgaggaggaggaggtggccgaggtggaggaggaggaggccgacgacgacgaggacgacgaggacggcgacgaggtggaggaggaggccgaggagccctacgaggaggccaccgagagaaccaccagcatcgccaccaccaccaccaccaccaccgagagcgtggaggaggtggtgagagaggtgtgcagcgagcaggccgagaccggcccctgcagagccatgatcagcagatggtacttcgacgtgaccgagggcaagtgcgcccccttcttctacggcggctgcggcggcaacagaaacaacttcgacaccgaggagtactgcatggccgtgtgcggcagcgccatgagccagagcctgctgaagaccacccaggagcccctggccagagaccccgtgaagctgcccaccaccgccgccagcacccccgacgccgtggacaagtacctggagacccccggcgacgagaacgagcacgcccacttccagaaggccaaggagagactggaggccaagcacagagagagaatgagccaggtgatgagagagtgggaggaggccgagagacaggccaagaacctgcccaaggccgacaagaaggccgtgatccagcacttccaggagaaggtggagagcctggagcaggaggccgccaacgagagacagcagctggtggagacccacatggccagagtggaggccatgctgaacgacagaagaagactggccctggagaactacatcaccgccctgcaggccgtgccccccagacccagacacgtgttcaacatgctgaagaagtacgtgagagccgagcagaaggacagacagcacaccctgaagcacttcgagcacgtgagaatggtggaccccaagaaggccgcccagatcagaagccaggtgatgacccacctgagagtgatctacgagagaatgaaccagagcctgagcctgctgtacaacgtgcccgccgtggccgaggagatccaggacgaggtggacgagctgctgcagaaggagcagaactacagcgacgacgtgctggccaacatgatcagcgagcccagaatcagctacggcaacgacgccctgatgcccagcctgaccgagaccaagaccaccgtggagctgctgcccgtgaacggcgagttcagcctggacgacctgcagccctggcacagcttcggcgccgacagcgtgcccgccaacaccgagaacgaggtggagcccgtggacgccagacccgccgccgacagaggcctgaccaccagacccggcagcggcctgaccaacatcaagaccgaggagatcagcgaggtgaagatggacgccgagttcagacacgacagcggctacgaggtgcaccaccagaagctggtgttcttcgccgaggacgtgggcagcaacaagggcgccatcatcggcctgatggtgggcggcgtggtgatcgccaccgtgatcgtgatcaccctggtgatgctgaagaagaagcagtacaccagcatccaccacggcgtggtggaggtggacgccgccgtgacccccgaggagagacacctgagcaagatgcagcagaacggctacgagaaccccacctacaagttcttcgagcagatgcagaactag

SEQ ID NO: 9470 - protein, 180 aa, Artificial Sequence
  derived and/or modified sequence
MADSELQLVEQRIRSFPDFPTPGVVFRDISPVLKDPASFRAAIGLLARHLKATHGGRIDYIAGLDSRGFLFGPSLAQELGLGCVLIRKRGKLPGPTLWASYSLEYGKAELEIQKDALEPGQRVVVVDDLLATGGTMNAACELLGRLQAEVLECVSLVELTSLKGREKLAPVPFFSLLQYE

SEQ ID NO: 9471 - protein, 134 aa, Artificial Sequence
  derived and/or modified sequence
MADSELQLVEQRIRSFPDFPTPGVVFRDISPVLKDPASFRAAIGLLARHLKATHGGRIDYIAGLDSRGFLFGPSLAQELGLGCVLIRKRGKLPGPTLWASYSLEYGKAELEIQKDALEPGQRVVVVDDLLATGV

SEQ ID NO: 9472 - DNA, 543 bp, Artificial Sequence
  derived and/or modified sequence
atggccgatagtgagttgcaactcgtcgaacagcggatcagaagcttccctgacttccctacaccaggtgttgtattcagggatatcagccccgtcctgaaagatccagcgtccttccgggccgccatcgggctgcttgcccgccaccttaaggccactcacggggggagaatagactacatagccggactggatagcaggggatttctatttggccctagcttggctcaagagctggggttgggttgtgtgctgattcggaagaggggcaagctgcctggacccaccttgtgggccagctacagtcttgaatacgggaaggctgagttggaaatccagaaagatgcactggagccaggacaaagagtggtcgtggtggacgatttattagctaccggggggacaatgaacgcggcctgcgagctcctgggacgactgcaagcagaggtgctggagtgtgtctcactggtcgagctgacctctctgaagggacgggagaaactggctccagtccccttcttctccctactccagtacgaatag

SEQ ID NO: 9473 - DNA, 807 bp, Artificial Sequence
  derived and/or modified sequence
gcgctcgggctgccgctggctcttcgcacgcggccatggccgactccgagctgcagctggttgagcagcggatccgcagcttccccgacttccccaccccaggcgtggtattcagggacatctcgcccgtcctgaaggaccccgcctccttccgcgccgccatcggcctcctggcgcgacacctgaaggcgacccacgggggccgcatcgactacatcgcaggcctagactcccgaggcttcctctttggcccctccctggcccaggagcttggactgggctgcgtgctcatccgaaagcgggggaagctgccaggccccactctgtgggcctcctattccctggagtacgggaaggctgagctggagattcagaaagacgccctggagccaggacagagggtggtcgtcgtggatgatctgctggccactggtggaaccatgaacgctgcctgtgagctgctgggccgcctgcaggctgaggtcctggagtgcgtgagcctggtggagctgacctcgcttaagggcagggagaagctggcacctgtacccttcttctctctcctgcagtatgagtgaccacagggcctcccagcccaacatctccagctggatcccagggaaatatcagccttgggcaactgcagtgaccaggggcaccggctgcccacagggaacacattcctttgctggggttcagcgcctctcctggggctggaagtgccaaagcctggggcaaagctgtgtttcagccacactgaacccaattacacacagcgggagaacgcagtaaacagctttcccacaa

SEQ ID NO: 9474 - DNA, 543 bp, Artificial Sequence
  derived and/or modified sequence
atggctgacagcgagctgcagctggtggagcagaggatccgctccttcccagacttccccaccccaggagtggtgttccgggacatcagccctgtgctgaaggaccctgccagcttccgggccgccatcggcctgctggcccggcacctgaaggccacccacggcggcagaattgactacatcgccggcctggacagccggggcttcctgtttggccccagcctggcccaggagctgggcctgggctgtgtgctgatcaggaagaggggcaagctgcccggccccaccctgtgggccagctacagcctggagtatggcaaggccgagctggagatccagaaggatgccctggagcccggccagagggtggtggtggtggatgacctgctggccaccggcggcaccatgaatgctgcctgtgagctgctgggccgcctgcaggccgaggtgctggagtgtgtgtccctggtggagctgaccagcctgaagggccgggagaagctggcccctgtgcccttcttcagcctgctgcagtatgaatag

SEQ ID NO: 9475 - DNA, 543 bp, Artificial Sequence
  derived and/or modified sequence
atggccgacagcgagctgcagctggtggagcagcggatccggagcttccctgactttccaacccctggggtggtctttagagacatctcaccggtcctcaaagatcccgctagctttagagcggccatagggctgttggcaagacatctcaaggctacgcacggtggacggatcgactacatcgccggtcttgactctcggggctttctattcggaccctcgttagcccaagagctggggctaggctgcgttctgatcaggaagcgcggcaaactgccagggcctactctttgggcaagttactccctcgagtacggaaaagccgaattggaaattcagaaggatgcgctagaacctgggcagagggtggtggtcgtggatgatcttctcgcaaccggcggcacaatgaatgcagcatgtgagctgctgggtagactgcaggcagaagtgcttgagtgcgtgtcattggtggaactgacatccctcaaagggagagagaagcttgctcctgttcctttcttttcactgctccagtacgagtag

SEQ ID NO: 9476 - DNA, 543 bp, Artificial Sequence
  derived and/or modified sequence
atggctgacagcgagctgcagttagtggaacaaagaatcagaagcttcccggacttccctacgcccggtgtcgtgttcagggacatatcccctgtcttaaaggatcccgcatcatttcgcgcagcgatcgggctgctggccaggcatcttaaggcgacacatggcggtaggatcgactacattgctggcctggacagtcgcggttttctttttggcccaagtttagctcaggagctgggcctcggctgtgtcctcattcggaaacgcggtaagttaccagggccaaccctgtgggcgtcttatagcctggaatacgggaaagccgagctcgaaatacagaaagatgccctcgagcctggacaacgggtcgtagtcgtggatgacctgctggcaaccgggggtacaatgaacgccgcatgtgagttgctgggtcgcctgcaagcagaggtgctggaatgcgtgagtctggttgaactgactagtctgaaggggagggagaaacttgcgcctgtgccgttttttagcctgctgcagtatgaatag

SEQ ID NO: 9477 - DNA, 543 bp, Artificial Sequence
  derived and/or modified sequence
atggccgacagcgagctgcagctggtggagcagagaatcagaagcttccccgacttccccacccccggcgtggtgttcagagacatcagccccgtgctgaaggaccccgccagcttcagagccgccatcggcctgctggccagacacctgaaggccacccacggcggcagaatcgactacatcgccggcctggacagcagaggcttcctgttcggccccagcctggcccaggagctgggcctgggctgcgtgctgatcagaaagagaggcaagctgcccggccccaccctgtgggccagctacagcctggagtacggcaaggccgagctggagatccagaaggacgccctggagcccggccagagagtggtggtggtggacgacctgctggccaccggcggcaccatgaacgccgcctgcgagctgctgggcagactgcaggccgaggtgctggagtgcgtgagcctggtggagctgaccagcctgaagggcagagagaagctggcccccgtgcccttcttcagcctgctgcagtacgagtag

SEQ ID NO: 9478 - protein, 271 aa, Artificial Sequence
  derived and/or modified sequence
MWELRSIAFSRAVFAEFLATLLFVFFGLGSALNWPQALPSVLQIAMAFGLGIGTLVQALGHISGAHINPAVTVACLVGCHVSVLRAAFYVAAQLLGAVAGAALLHEITPADIRGDLAVNALSNSTTAGQAVTVELFLTLQLVLCIFASTDERRGENPGTPALSIGFSVALGHLLGIHYTGCSMNPARSLAPAVVTGKFDDHWVFWIGPLVGAILGSLLYNYVLFPPAKSLSERLAVLKGLEPDTDWEEREVRRRQSVELHSPQSLPRGTKA

SEQ ID NO: 9479 - DNA, 816 bp, Artificial Sequence
  derived and/or modified sequence
atgtgggagttgcgctccatagccttcagtcgggccgtcttcgccgagttcctggctaccttactgttcgtctttttcggtctgggttcggcactcaactggccccaggctctgccttctgtgttacagattgccatggcctttggactgggaattggcacgctcgtgcaggctctggggcacatctcgggcgcccacatcaaccctgcagtcacagtggcatgtctggtcgggtgtcatgtgtccgttctgcgggccgccttttacgtggccgctcaactgctgggagctgtcgccggagcggccctgcttcatgagatcacccccgctgacattcgcggcgacttggctgtgaatgcacttagcaactcaacaacagcaggccaggccgtgacagtagaactgtttcttacactgcagctggttctgtgtatcttcgcgagcactgacgagagacggggcgagaacccagggacacctgcactgagcattgggtttagcgtggcactgggtcaccttctggggatccattacaccgggtgcagtatgaacccagcgagaagcttagcacctgcggttgttaccggtaagttcgatgaccactgggtcttctggattggtccgctggtgggagcaatcctgggatctctgctatacaattatgtcctcttccctcccgccaaaagtctttccgagcggctggccgtcctgaaaggactcgaacccgatactgattgggaggagcgagaggtgagacggcgtcaaagcgtggagctgcactcacctcagtctttgcctaggggtacaaaggcatag

SEQ ID NO: 9480 - DNA, 816 bp, Artificial Sequence
  derived and/or modified sequence
atgtgggagctgcggagcatcgccttcagcagagctgtgtttgctgagttcctggccaccctgctgtttgtgttcttcggcctgggcagcgccctgaactggccccaggccctgcccagcgtgctgcagatcgccatggccttcggcctgggcatcggcaccctggtgcaggccctgggccacatcagcggggcccacatcaacccagctgtgacagtggcctgcctggtgggctgccacgtgtctgtgctgcgggccgccttctacgtggccgcccagctgctgggcgctgtggccggggccgccctgctgcacgagatcaccccagctgacatccggggggacctggccgtgaatgccctgagcaacagcaccacagctggccaggccgtgacagtggagctgttcctgaccctgcagctggtgctgtgcatctttgccagcacagatgagaggagaggagaaaatcctggcaccccagccctgagcatcggcttctctgtggccctgggccacctgctgggcatccactacacaggctgcagcatgaacccagcccggagcctggccccagctgtggtgacaggcaagtttgatgaccactgggtgttctggattggccccctggtgggcgccatcctgggcagcctgctgtacaactacgtgctcttccccccagccaagagcctgtctgagcggctggccgtgctgaagggcctggagccagacacagactgggaggagcgggaggtgagaagacggcagagcgtggagctgcacagcccccagagcctgccccggggcaccaaggcctag

SEQ ID NO: 9481 - DNA, 816 bp, Artificial Sequence
  derived and/or modified sequence
atgtgggagctgcggagcatcgccttcagccgggccgtgttcgccgaattcctagccaccttgctattcgtcttttttggactcggttccgcacttaattggccccaagcactgccttcagtgcttcagattgcgatggcctttgggcttggaataggaacgttggttcaggctctggggcatatatcaggagctcacatcaaccctgccgtcaccgttgcctgccttgtgggctgccacgtgagtgttctaagggcagctttttacgtggctgcccagctgttgggggccgtggccggtgctgctcttctgcacgagattacccccgccgatatccgcggcgatctcgccgtgaacgctctctccaactccacaacggctgggcaagccgtgaccgttgagttgttcctaaccctgcagttggtgctgtgcatctttgcatcaaccgacgagcgaaggggagagaaccccgggacccccgctttaagcataggttttagtgtggccctcggccaccttctgggaatccactataccggttgcagcatgaatcctgccagatcactggccccagcagtggtgactggtaagttcgatgatcactgggtgttttggatcggccctttggtgggagcaattctggggtcactactgtataattatgtgctgtttcctcccgcaaagtctctatctgaaagattagcagttcttaaagggctggagcctgatactgactgggaagagagagaagtacgccggagacagtcagttgaattacacagcccccagtctctgccccgaggtactaaagcatag

SEQ ID NO: 9482 - DNA, 816 bp, Artificial Sequence
  derived and/or modified sequence
atgtgggagctgagaagtatcgcgttcagcagagcggtgttcgctgagttcctcgccaccctgctttttgtcttcttcgggctgggctcagcactgaattggcctcaggctctgccctcagttctgcagatcgctatggcctttggcttgggtataggtaccctagtgcaggcacttggccacatcagcggcgcacacatcaacccagctgtgactgtggcatgtctggtaggatgccatgtttcagttttgagggctgcattttacgtagccgctcagctgttgggggcagttgcaggggctgccttactccatgagattaccccagctgacatcagaggtgatttagctgtcaatgcattgtctaacagcacaaccgcaggccaggctgttaccgtggaactattcctcaccctgcagctggtcctctgcattttcgcgtccacagacgagcggagaggtgagaaccccggtactcctgccctttcgattggcttctccgtggcactcggtcaccttctgggaatccattataccggatgctccatgaatcccgcacgctccctggcaccagccgtggtgactgggaagttcgacgaccattgggtcttctggatcgggcctctggtgggggctatcttggggagtctgctgtacaactatgtcctgtttccccctgccaagagcctgtcagagcggctcgccgtgctgaagggactcgagccagataccgactgggaggagagggaagtgagaaggcgacagtccgtggagctgcatagtccccagagccttcccagggggactaaggcttag

SEQ ID NO: 9483 - DNA, 4174 bp, Artificial Sequence
  derived and/or modified sequence
gaaagagagcgatagagtgcgagagcgagtgcccggagcatcctggccctgagacagctgggccagccccgcagggctctgcagcatgtgggagctccgctccatagccttctccagggctgtgttcgcagagttcctggccacactcctcttcgtcttctttggcctcggctctgccctcaactggccacaggccctgccctctgtgctacagattgccatggcgtttggcttgggtattggcaccctggtacaggctctgggccacataagcggggcccacatcaaccctgccgtgactgtggcctgcctggtgggctgccacgtctccgttctccgagccgccttctacgtggctgcccagctgctgggggctgtggccggagccgctctgctccatgagatcacgccagcagacatccgcggggacctggctgtcaatgctctcagcaacagcacgacggctggccaggcggtgactgtggagctcttcctgacactgcagctggtgctctgcatcttcgcctccaccgatgagcgccgcggagagaacccgggcacccctgctctctccataggcttctctgtggccctgggccacctccttgggatccattacaccggctgctctatgaatcctgcccgctccctggctccagctgtcgtcactggcaaatttgatgaccactgggtcttctggatcggacccctggtgggcgccatcctgggctccctcctctacaactacgtgctgtttccgccagccaagagcctgtcggagcgcctggcagtgctgaagggcctggagccggacaccgattgggaggagcgcgaggtgcgacggcggcagtcggtggagctgcactcgccgcagagcctgccacggggtaccaaggcctgagggccgccagcggcctctacggccccgacggacgcttgtgaggcccgaggcagaagggcccaccccgtccctcctctcccgcaggtctgaagttggccccccagcgcagagtagctgcttcctggacgtgcgcgcccaggccagtgctgtgagcaggcggggaggaggctgccggagggagccctgagcctggcaggtcccctgccctgaggctgtgagcagctagtggtggcttctccagcctttttcagggaactgggaacttaggggactgagctggggagggaggcaggtgggtggtaagagggaaactctggagagcctgcacccaggtactgagtggggagtgtacagacccctgccttgggggttccgggaatgatgcaactggttttactagtgtgcaagtgtgttcatccccaagttctcttttgtcctcacatgcagagttgtgcatgcccctgagtgtgaacaggtttgcctacgttggtgcaagtgtgcatggctggggacttctcacttccccttgcaccccttcctccccaacctgcaataaatccgcttctcctgcagtggatgagtgtgggtgccagtcctcctcaggagaaggggaagggaaggaggccactttgagagggctgaagggagggccttgatttccagccgcaatctggctcctcctggaaaatttcccccacctgcagcgctgggccccaaggcttgccaagactcattgctggaggtagagaggtgtcaaccagagaacagctcccctagacatggcctctggaaaaaggaaatctttggtggccaaagatttcctttctgtggtgagggagaacctctccaaagaggaagcaggcatatgagtgcgcacgccttcacgtgtgtgtatgctgtgtgtgcccgggacccccgtctccaggggtgccccagacccagagattagcctcccacttcggcgcagaaaacaaaagccctttgtgggacccgggcctttgtcttgggtgaggggagatttgcacctagacacttcttgaaaggagacactcagtttcacaagtgagccctcttgcccagcacacacctatggctggctgggcaaggcgctcaggcatgcaaccatgggcaccaggcaatacccatccatcacccatctcactctccccagtcctcaggcagcagcttttccaccccaggaatctctgttccttctctgtctgcctctccacagcccgtgatcccctgcttctggctcctaccactggacagtcattgtggatagagcagcctgctgctctcaggaccagagaagggaaatgacttctccaggcagaggcagatctgagtctagaacccaggcttctaaatttctaggccagtactactgctctcaaaagagattaactgggattaagtgagatgacgcatgtaaagatgctgtgtaaactgtaattcttaataccattatcacgcattactagaatcatttcattatttctgcttcctgggggaaggatgcagaaggagtctgatgctcaacatcccttacctcctttcgttgatggccaaagcaaaggagagtcctgggagcccacaagatccaggcagaaggagatgggtttggggctggccccatcctggcccagcctcttaacctcttcttaccctgaatgtgtgccctatcttttctcccacctccttcctcctaccacccagccctatccattctctccttccctctccagcctgctgtataagtaacatgtgggtcataccttgaacccccctccgcccccatgctctctgtggcctccatgccttcaagacttctgtctgtatctatctcacactgcaccaagcacccactgtgcaccaggcactaagtctctagcctctttctcccttctgctcccatccaagaaagacagtgtataaggaacatctctgtaattgtgtcccctctcatctatgctctttcctgtcttccttgaccaaagctctctttgaggtccaaaaaaggctgccctgggccatatgtgctatggagaggactctcccaaacccccaatagctagtgacagccacttggcctcactaccagaagaagggtggagtcagaaaccaaagtgacctccagagctgtcctcctggcacctgagtgtccttgctctagaggttcaaaggcagcaaggcagtgagctatgagcccagcatggatgtgtctcaggcacctcatccccaccccacctcaccccaacaaactcctctagaagaagccaagaatttctctctatgtctgtttcactttttggattgcatctccccaaaaactaaatgtgaaatccctaccatttctagcctctattgcccagattggagtcagaggtcaaaaaaggattccaagtgatggaactccaggggtggagggaaattggcagttcctggcatctcttgtgtaccagctgctgtgctgggtgccttgcatgcacggacttatctgatcttcctcaaacttcagataggttagggaaggacaaaggcccccagccatgaagggttttgctatttccaaagcttccccttatcgtcccctgtgattatctcccaaccccgtgacaaaggtagagcaaatattgttcttcccattttacagattcagaaaccaaggctaagggactggtctaaagtctcacaggtagtatatggtggagccaacacttgaactcagacctttttacacaaaatcccatgatttttccactgagacaaatcctaggctcctgggaggccctggcagaagccagaacacatggctgggcctttccagcccaacccactgtcttgcagtggacggagagccttggcgagggcagcagggtagagaggacaaagaatgtggggctggtttctgccctttaagagcacccggtcagtcagagaacagagatcacacacaccaaaccagacagaggcagggcagcatggagacaggtagacagacctccaggtccctaagctggggacagagaaggttctgagctgtcccatactcccactttgtgccaaatgactttgcacctgcaaatggtgcttcaatgtcgttttgtatctttaagctgtgatgttgtatatatacaatgcctcccagctagactgtaagccctttggggacaagggctgcttccagttcttggatggcgttctcctatctaccttccttcaactgctctgcatataataagcactcaataaatgctcatttgccaataa

SEQ ID NO: 9484 - DNA, 816 bp, Artificial Sequence
  derived and/or modified sequence
atgtgggagctgagaagcatcgccttcagcagagccgtgttcgccgagttcctggccaccctgctgttcgtgttcttcggcctgggcagcgccctgaactggccccaggccctgcccagcgtgctgcagatcgccatggccttcggcctgggcatcggcaccctggtgcaggccctgggccacatcagcggcgcccacatcaaccccgccgtgaccgtggcctgcctggtgggctgccacgtgagcgtgctgagagccgccttctacgtggccgcccagctgctgggcgccgtggccggcgccgccctgctgcacgagatcacccccgccgacatcagaggcgacctggccgtgaacgccctgagcaacagcaccaccgccggccaggccgtgaccgtggagctgttcctgaccctgcagctggtgctgtgcatcttcgccagcaccgacgagagaagaggcgagaaccccggcacccccgccctgagcatcggcttcagcgtggccctgggccacctgctgggcatccactacaccggctgcagcatgaaccccgccagaagcctggcccccgccgtggtgaccggcaagttcgacgaccactgggtgttctggatcggccccctggtgggcgccatcctgggcagcctgctgtacaactacgtgctgttcccccccgccaagagcctgagcgagagactggccgtgctgaagggcctggagcccgacaccgactgggaggagagagaggtgagaagaagacagagcgtggagctgcacagcccccagagcctgcccagaggcaccaaggcctag

SEQ ID NO: 9485 - protein, 259 aa, Artificial Sequence
  derived and/or modified sequence
MYSNVIGTVTSGKRKVYLLSLLLIGFWDCVTCHGSPVDICTAKPRDIPMNPMCIYRSPEKKATEDEGSEQKIPEATNRRVWELSKANSRFATTFYQHLADSKNDNDNIFLSPLSISTAFAMTKLGACNDTLQQLMEVFKFDTISEKTSDQIHFFFAKLNCRLYRKANKSSKLVSANRLFGDKSLTFNDLYVSDAFHKAFLEVNEEGSEAAASTAVVIAGRSLNPNRVTFKANRPFLVFIREVPLNTIIFMGRVANPCVK

SEQ ID NO: 9486 - protein, 464 aa, Artificial Sequence
  derived and/or modified sequence
MYSNVIGTVTSGKRKVYLLSLLLIGFWDCVTCHGSPVDICTAKPRDIPMNPMCIYRSPEKKATEDEGSEQKIPEATNRRVWELSKANSRFATTFYQHLADSKNDNDNIFLSPLSISTAFAMTKLGACNDTLQQLMEVFKFDTISEKTSDQIHFFFAKLNCRLYRKANKSSKLVSANRLFGDKSLTFNETYQDISELVYGAKLQPLDFKENAEQSRAAINKWVSNKTEGRITDVIPSEAINELTVLVLVNTIYFKGLWKSKFSPENTRKELFYKADGESCSASMMYQEGKFRYRRVAEGTQVLELPFKGDDITMVLILPKPEKSLAKVEKELTPEVLQEWLDELEEMMLVVHMPRFRIEDGFSLKEQLQDMGLVDLFSPEKSKLPGIVAEGRDDLYVSDAFHKAFLEVNEEGSEAAASTAVVIAGRSLNPNRVTFKANRPFLVFIREVPLNTIIFMGRVANPCVK

SEQ ID NO: 9487 - DNA, 1392 bp, Artificial Sequence
  derived and/or modified sequence
atgtacagcaacgtgatcggcaccgtgaccagcggcaagcgcaaggtgtacctgctgagcctgctgctgatcggcttctgggactgcgtgacctgccacggcagccccgtggacatctgcaccgccaagccccgcgacatccccatgaaccccatgtgcatctaccgcagccccgagaagaaggccaccgaggacgagggcagcgagcagaagatccccgaggccaccaaccgccgcgtgtgggagctgagcaaggccaacagccgcttcgccaccaccttctaccagcacctggccgacagcaagaacgacaacgacaacatcttcctgagccccctgagcatcagcaccgccttcgccatgaccaagctgggcgcctgcaacgacaccctgcagcagctgatggaggtgttcaagttcgacaccatcagcgagaagaccagcgaccagatccacttcttcttcgccaagctgaactgccgcctgtaccgcaaggccaacaagagcagcaagctggtgagcgccaaccgcctgttcggcgacaagagcctgaccttcaacgagacctaccaggacatcagcgagctggtgtacggcgccaagctgcagcccctggacttcaaggagaacgccgagcagagccgcgccgccatcaacaagtgggtgagcaacaagaccgagggccgcatcaccgacgtgatccccagcgaggccatcaacgagctgaccgtgctggtgctggtgaacaccatctacttcaagggcctgtggaagagcaagttcagccccgagaacacccgcaaggagctgttctacaaggccgacggcgagagctgcagcgccagcatgatgtaccaggagggcaagttccgctaccgccgcgtggccgagggcacccaggtgctggagctgcccttcaagggcgacgacatcaccatggtgctgatcctgcccaagcccgagaagagcctggccaaggtggagaaggagctgacccccgaggtgctgcaggagtggctggacgagctggaggagatgatgctggtggtgcacatgccccgcttccgcatcgaggacggcttcagcctgaaggagcagctgcaggacatgggcctggtggacctgttcagccccgagaagagcaagctgcccggcatcgtggccgagggccgcgacgacctgtacgtgagcgacgccttccacaaggccttcctggaggtgaacgaggagggcagcgaggccgccgccagcaccgccgtggtgatcgccggccgcagcctgaaccccaaccgcgtgaccttcaaggccaaccgccccttcctggtgttcatccgcgaggtgcccctgaacaccatcatcttcatgggccgcgtggccaacccctgcgtgaag

SEQ ID NO: 9488 - DNA, 1392 bp, Artificial Sequence
  derived and/or modified sequence
atgtattccaacgtgattggtaccgtcacgtccgggaagaggaaggtgtacctgctgtccctgttgctcatcggcttttgggactgcgttacctgtcacggcagcccagtcgacatttgcacagccaagccgcgcgacatccctatgaaccctatgtgcatctaccggagcccagaaaaaaaagctactgaagacgaggggtctgagcagaagatccccgaagccaccaatcgcagagtctgggaactgagtaaggccaactcccgcttcgccaccacattttaccagcaccttgccgactccaagaatgacaatgacaatatctttctgtctcccctgtcaatttccaccgcgtttgcaatgaccaagctgggcgcctgcaacgataccttgcagcaactcatggaggtttttaagttcgacaccataagcgaaaagacatccgatcagatccacttcttctttgcaaaattgaactgccggctttatcggaaggccaacaagagctccaaattggtctctgctaatagattgttcggggacaaaagcctgacgttcaatgaaacgtatcaggatatctccgagcttgtgtatggcgccaaattgcaaccgcttgatttcaaggaaaacgccgagcaatccagagctgccataaacaagtgggtttccaacaaaacagaagggaggatcactgacgtgattccaagcgaggcaatcaatgagctgaccgtgcttgtgttggttaatacaatctatttcaaaggcctctggaagtcaaaatttagtcccgagaatacccgcaaggagcttttctataaggctgacggtgaaagttgttcagccagtatgatgtatcaggaggggaaatttcggtaccgccgggtggcagaaggaacccaggtccttgagctgccatttaaaggtgacgatatcactatggtgctcatcttgccaaagccagagaagtccctggccaaagttgaaaaggaactgacacccgaggtattgcaggaatggctcgatgaactggaagagatgatgctcgttgtgcacatgccaaggttcagaattgaggacgggttcagccttaaggagcagctgcaggacatgggtcttgtcgacttgtttagtcccgaaaaaagcaaacttccagggattgtggccgaaggtagggatgacctgtacgtgtccgacgcgtttcacaaggcctttttggaggtgaatgaggaaggcagtgaggccgcagcaagcactgctgtggtgattgcaggacgatcactgaacccaaacagagtgacctttaaggctaacaggccctttctcgtgttcatacgagaagtgcccctgaataccattatttttatgggcagagtggccaacccctgcgtgaag

SEQ ID NO: 9489 - DNA, 1392 bp, Artificial Sequence
  derived and/or modified sequence
atgtactcgaacgtgatcggaacggtgacaagcggcaagcgcaaggtgtacttgctgtctctacttctgattggattttgggactgtgtaacgtgtcacgggagtcctgtggatatatgtaccgctaaacctcgcgatatccccatgaatccaatgtgcatctatcgttccccggaaaagaaggcaaccgaggatgaaggatctgagcagaagatcccagaggccactaatagacgagtgtgggaactttctaaggctaattccagattcgcaactacattttatcagcatttggccgatagcaagaacgacaatgataacattttcctgtcccccctttcaatcagtacagcctttgcgatgaccaaactcggtgcatgtaacgacactctgcagcagcttatggaggtgtttaaattcgacacaatatctgaaaaaacctcagatcagatccatttcttttttgctaagcttaattgtcgattataccgtaaagccaataagtcatcaaaactcgtgagcgcaaataggctattcggcgacaagtcattgaccttcaatgagacctaccaggatattagcgaactggtttatggggccaagttgcagccactggatttcaaggaaaacgctgagcagagccgtgccgcaattaacaagtgggtgtcgaataagaccgagggcagaattacagatgttatcccaagtgaagctatcaacgagctgactgtgctcgtgctcgttaataccatctattttaagggtctgtggaagagcaaatttagccctgaaaatacccgcaaagagttgttctacaaggccgacggggagtcttgctctgcatccatgatgtaccaggaggggaaattcaggtacaggagggttgctgaaggcactcaggtcctggagctccctttcaagggagacgatatcaccatggtgctgattctacccaagcctgagaaaagcctcgccaaggtggagaaggagctcactccagaggttctgcaggagtggttagatgaactggaagagatgatgctcgtcgtccatatgcctaggttcaggatcgaagatggttttagcctaaaagagcagttgcaggatatgggactggtcgacctgttcagtccagaaaagagtaaattaccagggatcgtggctgaggggcgtgacgatctgtatgtgagtgacgcctttcacaaggcattcctggaggtgaacgaagaaggctctgaagcagccgccagtactgctgtggtgattgctggacggtctctgaatcctaatcgggttactttcaaggccaacagacctttcctggtgttcatcagggaggtgcccctgaatactatcatctttatggggcgggtcgcaaacccctgcgtcaaa

SEQ ID NO: 9490 - DNA, 1392 bp, Artificial Sequence
  derived and/or modified sequence
atgtactcgaacgttattggtacggtcacatcgggtaaacgtaaagtgtatctcttaagtcttcttttgatcggtttctgggattgtgtgacgtgtcacgggtctcctgttgacatttgcactgcgaaacctcgtgatattccaatgaacccaatgtgtatctatcgaagcccagaaaagaaagctactgaagatgaaggaagtgaacagaaaatcccagaagcaacaaacaggcgtgtttgggagttgagtaaagccaatagtcgatttgcgacaacgttttaccagcaccttgccgattctaagaatgataatgataatatttttctgagtcccttgagcatttcaactgcgttcgctatgacaaagcttggtgcttgtaatgatacacttcaacagctcatggaagtgttcaaattcgatactatttctgaaaaaacaagcgatcaaattcacttttttttcgcgaagcttaattgcagactttacagaaaagcaaacaagtcatcaaaactagtctcggcaaaccggcttttcggagataagagcctgaccttcaacgagacatatcaagatatttctgagctcgtgtatggggccaagttacaacctctcgatttcaaagaaaatgctgagcaatctagagccgcaataaataagtgggttagtaataagacggaaggaagaattactgatgtaattccatcggaggcaatcaatgaactgacggtgctcgtgctggtgaatactatttactttaaaggtttgtggaagagtaaattcagcccggagaacactagaaaggaattgttctataaagctgatggagaatcatgttctgccagtatgatgtatcaggaaggcaagtttaggtatcgacgggtcgcagaaggtacccaagtgttggagctcccgttcaagggtgatgacattacaatggttctgattctcccgaaaccagagaaatctctagcaaaagtggagaaagaactcactccggaagttttgcaggagtggctcgatgagctagaggaaatgatgcttgtggtacacatgccaagatttcgtattgaagatggatttagcttgaaagaacaattacaagacatgggacttgttgacctgttttcaccagaaaagagtaaattaccaggtatagttgcagaaggtcgtgacgatctatacgtctctgatgcctttcacaaagcattcttagaggtgaatgaagaaggatctgaagcggcagcttccacagcggttgttattgccgggagatcgcttaatccaaatcgtgttactttcaaagcaaatagaccatttctagtttttattcgagaagtgccgttaaataccattattttcatgggacgagttgccaatccatgtgtcaag

SEQ ID NO: 9491 - DNA, 1392 bp, Artificial Sequence
  derived and/or modified sequence
atgtactcaaatgtcattgggactgtgacctccgggaagcggaaagtctacctgctgtcgctgctgctcattggattttgggattgcgttacctgtcatgggtccccagtcgatatctgtacggcaaagcctcgggatattccaatgaacccaatgtgtatttaccgtagcccggagaaaaaggcaaccgaagatgaaggatcagaacaaaagattcccgaagcgaccaatcggcgtgtgtgggagctgtccaaggcaaacagcaggttcgcgactaccttttaccaacatttggccgatagcaagaacgataacgacaatatctttctgtcgccgctgtctatttcgactgcatttgcaatgactaagctcggagcatgcaacgatactcttcagcagctgatggaagtgtttaagtttgacaccatctcagaaaagacctccgatcaaattcactttttctttgcaaaactcaactgtcgcctgtaccgcaaggcaaacaaatcgagcaagctcgtctcagcgaatcggctgtttggtgacaagtccctgacttttaacgaaacctaccaagacatttccgagctcgtctacggagctaaacttcagcctctggactttaaggagaacgcagagcagtccagagcagccattaacaaatgggtgtcgaacaagactgaaggaagaattacggatgtgataccttccgaagctattaacgagcttaccgtgctggtcctcgtcaacaccatctacttcaaagggttgtggaaatcaaagttctcccctgaaaacacccgaaaggagcttttctacaaggccgacggggaaagctgctcggcctcgatgatgtaccaggaaggcaagttccgatatagacgcgtcgccgaaggaacccaggtgctggaacttccctttaaaggagatgatattactatggtcctgatactgccaaagcctgagaaaagcctcgcgaaggtagaaaaagaattgacgccagaagtcctgcaagaatggcttgatgagctggaggagatgatgttggttgtccacatgcccagattcagaattgaggatggattttcacttaaggagcaacttcaggatatgggtttggtcgatcttttttcgcccgagaagtcaaagctcccagggattgtcgccgaaggccgggacgatctgtacgtgtccgacgcttttcacaaagcattcctcgaggtcaatgaggaggggtccgaggcagcagcatccaccgcagtggtgatcgcagggagatcactgaaccctaacagggtgacgtttaaagcgaacagacctttcctggtgtttattcgggaagtgcctctgaacacgataatctttatgggacgagtggcaaacccatgtgtgaag

SEQ ID NO: 9492 - DNA, 1392 bp, Artificial Sequence
  derived and/or modified sequence
atgtactcaaacgttatcggaactgtgacctcaggaaagcgtaaggtctacctcctctcgcttcttctgattggattttgggattgtgtgacctgccatgggagcccagtcgatatctgtactgcgaagccccgagatattcctatgaaccctatgtgcatctaccgctccccagaaaagaaggcaactgaggatgaaggatctgaacagaagatacccgaggcaacgaacaggagggtgtgggagctttccaaagcgaactcccggtttgcgaccaccttctaccagcacctggcagactctaagaatgacaacgacaacatctttctgagccctctttccatctcgaccgcctttgctatgaccaagctgggtgcatgcaacgacaccctgcagcagctcatggaagtgttcaagtttgatacgatttcggaaaagacgagcgatcaaattcacttctttttcgcaaagctgaattgtcgactgtataggaaggcgaacaagtcatcgaagctggtcagcgctaaccgcctcttcggcgacaaaagcctgacttttaacgaaacctaccaggatatctccgaactggtgtacggggcgaagttgcaacccctggactttaaagaaaacgccgaacagagccgagcagcaatcaacaaatgggtgagcaacaagaccgaaggaaggatcaccgatgtcattcctagcgaggcaattaacgaacttactgtgctggtccttgtcaacaccatttacttcaagggcctctggaagtccaaattctcgcctgaaaatactaggaaggaacttttctataaagccgacggcgagtcctgttcagcatccatgatgtaccaggagggtaagttccgctaccgtcgggttgcagaaggtacccaggtgcttgaacttcctttcaagggagacgatatcactatggtgcttattctccctaagccggagaagagcctggcaaaggtcgaaaaggaacttactcctgaggttctgcaggaatggcttgatgaacttgaagagatgatgcttgtcgttcacatgcccagatttcggatcgaggacggtttctcgctgaaggaacaactccaggatatgggtcttgtggaccttttctcaccagaaaaatccaaactgccggggatcgtggcagagggacgtgatgacctctacgtctcggatgctttccataaggctttcctggaggtgaacgaggagggaagcgaagccgcagcctccactgccgttgtgatcgcaggtagatcgttgaatcctaaccgagtcacctttaaggcaaatcgccccttccttgtgtttatcagagaagtgccattgaacaccataatctttatgggaagagtcgcgaatccctgtgtgaag

SEQ ID NO: 9493 - DNA, 1392 bp, Artificial Sequence
  derived and/or modified sequence
atgtactcaaacgtgatcgggaccgtgactagcggaaagagaaaggtgtacctcttgtcgctgctgctgattggcttttgggactgcgtcacttgccacgggtcaccagtggacatctgcactgccaagccacgggatattccgatgaaccccatgtgcatctaccgcagcccagaaaagaaggcaactgaagatgaaggcagcgagcagaagatcccagaagctaccaatcggcgggtctgggagctgtcgaaagcgaattccaggttcgcgaccaccttctaccagcatctggccgactcgaagaacgacaatgacaacatctttctgtcccctctgagcatttcgaccgcattcgccatgaccaagctgggggcatgcaacgacactctgcagcagcttatggaagtgttcaagtttgatactatctccgagaaaaccagcgaccaaatccacttcttttttgccaagctgaactgtcgcctgtaccgcaaggctaacaagtcctccaagctggtgtcggccaacagattgttcggcgataagtcccttacttttaacgaaacctaccaggacatctccgaactggtgtatggggccaaactccagccgctggatttcaaggagaatgctgaacaaagccgcgcagccatcaacaagtgggtgtcaaataagaccgaaggtagaatcactgacgtgattccaagcgaggccatcaacgaactgaccgtcctggtgctggtcaacaccatctacttcaagggactttggaaatccaagttctccccggaaaacacgcggaaggagctcttctacaaggcagatggagaatcatgttcggcctcgatgatgtaccaagaaggaaagttccgctaccgcagagtcgccgaaggcacccaggtgctggagttgccgttcaagggagatgacatcactatggtcctcattctgccgaagccggagaagtccctggccaaggtggagaaggagctgaccccagaagtgcttcaggagtggctcgatgaactggaagaaatgatgctggttgtgcacatgcctcgcttccgcatcgaggacggatttagcctcaaggaacagctccaggacatgggactcgtggacctgttttcacccgaaaagtcgaaactgcctggaatcgtggccgaaggccgcgatgacctttacgtttccgacgcattccataaggcattccttgaagttaacgaagagggctccgaagccgcggcctcgaccgccgtcgtcatcgcgggtcggtcgctcaaccctaatcgcgtgaccttcaaggcgaataggccctttctggtgttcatccgggaagtgcctttgaataccatcatctttatgggacgagtcgcgaacccgtgtgttaag

SEQ ID NO: 9494 - DNA, 1392 bp, Artificial Sequence
  derived and/or modified sequence
atgtactctaatgtaataggcactgtcacttccggtaaacggaaggtctatctgctatctctgttgctcatcggcttctgggactgcgtcacctgccacgggtctccagtggacatctgcaccgccaagcctagagatatccctatgaaccccatgtgtatctaccgctctcctgagaagaaagccacagaggacgagggtagcgaacagaaaatccccgaggccaccaacagacgggtatgggagctcagcaaggctaatagtagattcgcaacgacgttttatcagcacctggctgatagcaagaatgacaacgataacattttcctgtcacccctgagtatatcaacggcatttgccatgaccaagttgggcgcatgtaatgacaccttgcagcagttgatggaagtcttcaaattcgatacgatctccgaaaagacatcagaccaaatccacttcttcttcgcgaagttgaactgccgtttgtatcgcaaggccaacaaatcttccaagctcgtgagcgccaatcggctgtttggggacaagtctttaacatttaatgaaacctaccaagacatttctgaacttgtctatggcgcaaaacttcagcccttagatttcaaagagaatgccgagcagtcccgcgctgcaattaataagtgggtcagcaataagaccgaaggccggattaccgacgtgatcccttctgaggccattaatgaactgactgtcttggtgttggtcaacaccatttacttcaagggcttgtggaagtctaagttttcaccagagaacacaaggaaagaattgttttataaagccgacggggagtcttgttctgcaagcatgatgtaccaagagggaaaattccgctatcgtagagtggctgagggaactcaagttctcgagctgccctttaagggggacgacattactatggtgcttatcttgcctaaacctgaaaaatcattggcaaaggtggagaaagagttaaccccggaggttctccaggagtggctggatgaactcgaggagatgatgctcgtagtccatatgccccggtttcgtattgaggatggattttcgctgaaggagcagttgcaagatatgggcctggtggacctgttttctcccgagaagtcaaagcttccgggcattgttgccgaaggccgagacgatctctacgtatcagatgccttccacaaggcattcctggaagtgaacgaggaaggaagcgaggcagcagcctctaccgccgtcgtaatagcagggaggtccctcaatcctaatcgcgtgacattcaaggccaaccgaccgtttcttgtcttcattagagaggttcccctcaacaccataatcttcatgggcagagtagccaatccttgcgtgaag

SEQ ID NO: 9495 - DNA, 1392 bp, Artificial Sequence
  derived and/or modified sequence
atgtactccaacgtgatcggcaccgtcacaagcgggaagcgaaaggtctatctcctgtctctgttactgataggtttttgggactgcgtgacgtgtcacgggtctcctgttgacatttgcacggcaaaaccaagggacatcccaatgaacccaatgtgcatctatagatcccccgaaaagaaggccaccgaggacgaaggctcagaacagaagatccccgaagctaccaaccggagagtgtgggaactgtcaaaagcgaactcccggttcgcgaccactttttatcagcacttggccgatagtaaaaatgacaatgacaatatctttctatcacccctcagcatttcgaccgcattcgccatgactaagctcggggcttgtaacgacaccttacagcagttgatggaagtgtttaaattcgacacgatttcagaaaagactagcgatcaaattcacttttttttcgctaagttgaactgccgactgtatcgcaaggcgaacaagtcctccaaattagtctcagccaacaggctttttggagacaaatctctgacttttaatgagacataccaggacatctcagagctggtctacggagctaagctgcagcccttggattttaaagagaacgctgagcaaagcagggcagcaatcaacaaatgggttagcaacaagactgaaggccgaatcaccgacgttattcctagtgaggcgattaatgaactgaccgttctggttctggtgaatacgatctattttaaaggattgtggaagagcaaattctcacccgaaaataccaggaaagaattgttctacaaagccgacggcgaaagctgtagcgcaagcatgatgtaccaggagggtaagtttcgctatcggagggtggccgagggtacccaggtgctggagcttcctttcaaaggcgacgacattacgatggtccttatcctgcccaagcctgaaaaatctctggccaaggttgaaaaagaacttacaccagaagtactgcaggagtggttggatgagttggaagaaatgatgctagttgtccacatgccccgtttcaggatagaagatgggttcagtctgaaggaacagctacaagacatggggctggtagacctcttttcacccgagaaatccaagctgcccgggatcgtcgccgagggccgagacgacctgtatgtctctgacgcatttcacaaggcctttcttgaagtgaacgaagaagggagcgaggctgccgcctctacagcagtggtgatcgccggcaggtcactcaatcctaacagggttacatttaaggccaatagaccattccttgttttcatccgggaggtgccgcttaataccattatttttatggggagggtggccaacccttgcgttaaa

SEQ ID NO: 9496 - DNA, 1392 bp, Artificial Sequence
  derived and/or modified sequence
atgtattctaatgttatcggcacagttacatccggcaaaaggaaggtgtacctcttgagtctgctgctcattggcttctgggattgcgtgacttgtcacggctcccctgtggacatctgcacggcaaagccccgcgatattccgatgaaccctatgtgtatctacaggagccccgaaaagaaagccacagaagatgagggctctgagcagaaaataccagaagccaccaacaggcgagtgtgggagctgagcaaagcaaatagccggttcgcgacgacattttatcagcacctggccgattctaagaacgacaatgataacatatttttgtctcctctaagcatctccacggcctttgccatgactaaactgggggcctgcaacgacaccctgcagcaacttatggaagtatttaaattcgatacaatttccgaaaagacatccgaccagatccacttcttcttcgccaagctgaactgtagactatacaggaaggccaataaatcctcgaagttggttagcgcgaatcgattgttcggagacaaatctttaactttcaacgaaacttaccaagacatatctgagctggtttacggagccaagctgcagccactggattttaaagagaatgccgagcagagtcgcgctgccataaacaagtgggtgtccaataagactgagggtaggattaccgacgtcatacccagcgaggccatcaatgaactaaccgtgctggtgctcgtgaacactatttatttcaaaggactttggaagagcaaattctcacccgagaatacacgtaaggaactgttctataaagccgacggagaatcgtgtagtgcaagtatgatgtatcaggagggtaaatttaggtataggagggttgcggagggaacacaagttctggaactcccattcaagggagatgacattaccatggtactaatcctacctaagcccgaaaaatcactggccaaagtagagaaggagctgacacctgaggtcctgcaggaatggctcgatgagttggaagaaatgatgctggtcgtccatatgcctagatttaggatcgaggacggcttcagccttaaggaacagctccaggatatgggattggttgatctgttctcccccgagaaatcaaagttgccaggaattgtcgcggagggtcgtgacgacctatatgtgtcagacgctttccataaggcctttctagaagtgaacgaagaaggttcggaggctgctgcctcgaccgcggtagtgatcgcaggacggagcctcaatccaaacagagtgactttcaaagcaaatagacctttccttgtgtttatccgcgaggtccccttaaacacaatcatatttatgggcagagttgctaacccctgtgtcaaa

SEQ ID NO: 9497 - DNA, 1392 bp, Artificial Sequence
  derived and/or modified sequence
atgtattctaatgtgataggcacggtcacaagcggcaaaagaaaggtgtacttgctgtctcttctcctgattggattttgggattgtgtaacttgccacggaagccccgtggatatctgcactgcaaaacccagggacattcctatgaacccaatgtgcatctaccgaagccccgaaaaaaaggcaaccgaagacgaagggtctgagcaaaagattcctgaagcaactaataggagggtgtgggagctgtcgaaagctaatagtaggtttgcaaccaccttttatcagcatctagccgactcaaagaatgacaacgacaacatcttcctgtccccactcagtatatccaccgccttcgccatgaccaaattgggggcttgcaatgatacactacaacagcttatggaggtgttcaagttcgacactatttctgaaaaaacatcagatcagatccatttcttctttgcaaaactgaattgccgcttgtacagaaaggctaacaagtcgtctaaacttgtgagcgcgaaccgactttttggggataaatctcttaccttcaacgaaacatatcaggacatctccgaattggtgtatggggcgaagttgcaacctctggacttcaaggagaacgcagagcagagccgagccgctattaataaatgggtatctaacaagactgagggtcgaatcactgacgtgataccgtccgaggccatcaatgagttgaccgtgcttgtgctggtcaacaccatatacttcaaaggtttatggaagtccaagttctctcccgagaatacgcggaaagaactgttttacaaagcagatggcgaaagttgctctgcctccatgatgtaccaggagggcaaatttaggtataggcgtgtggccgaagggacccaggtcttagaactgccattcaaaggcgatgatataaccatggtgttgatactgcccaagcccgaaaagtccctggcgaaagtggagaaagaactgactcccgaagtactccaggagtggctggacgagcttgaggaaatgatgctggttgtccacatgcccaggttccgaatcgaggacggtttttccttaaaagaacagcttcaggatatggggcttgtggacctgttctccccagaaaaaagcaagctgcccgggatcgttgcggaaggccgagacgacctgtacgtgagcgacgcattccataaggcctttctcgaagtcaacgaagaaggtagcgaagctgcagccagtacagcagtggtgatagccggccgatcactcaatcctaacagagttactttcaaggcaaaccgtccgttcctggttttcatcagagaggtgcctctgaatacaattatcttcatgggacgtgtcgctaacccttgcgtgaag

SEQ ID NO: 9498 - DNA, 1392 bp, Artificial Sequence
  derived and/or modified sequence
atgtatagtaatgttattggtacggtgacaagcggcaaacgaaaagtgtatttgctgtctctgctccttattggattttgggactgcgttacttgtcatggcagccccgtagacatttgtacggctaaaccgagggatatcccgatgaacccgatgtgcatttatagatcccctgagaaaaaagctaccgaagacgagggatctgaacagaaaatcccagaggcgactaatagaagagtgtgggagctgtctaaagcaaattcgaggtttgccacaacattttaccagcatttagccgactcaaaaaatgacaatgataatatttttctttcgccgttatctatctccacggcttttgctatgacaaaattaggggcctgcaatgacactttacagcaactgatggaggtcttcaaatttgatacgatttctgaaaaaacatcagatcaaatccatttctttttcgctaaactgaattgtcgattgtacaggaaagcgaataaatcaagcaaactggtgtctgcgaatagactctttggtgacaagtcattgacttttaatgagacgtatcaagatatttcggaacttgtgtatggagcgaaactccaaccgctggacttcaaagaaaatgcagaacagagcagggcagctatcaataaatgggtctcaaataagactgagggcagaataacagacgtaattccatcagaagcgatcaacgaactgaccgtcctggttcttgttaatacgatttattttaaaggactgtggaagtcgaaattctcaccggagaacactcgaaaggaactgttttataaagcggatggagaaagttgctccgcatctatgatgtaccaggaaggcaagttccgataccgcagagttgcggaagggacacaagttctggagttaccgtttaaaggagatgatattacgatggtcctgatcctccccaaacctgaaaaatcattagcgaaagtggagaaggagctaacaccagaagttcttcaagagtggctggatgagctcgaggaaatgatgctggtcgtacatatgccaagattcagaatcgaagatggcttttctctcaaggagcagcttcaggatatggggttggtagatctgttttcacctgaaaaatctaagctgccgggaatcgttgcggaaggtcgagacgacttatatgtgtccgatgcgtttcacaaagcctttcttgaagtcaacgaagagggcagtgaggctgcggcatcaaccgctgtggtcatcgctgggcgatcattaaaccctaatcgtgtgaccttcaaggcgaaccgtccgttcctggtttttattcgggaagtaccactaaacacaatcatttttatgggtagagtcgctaacccctgtgtgaag

SEQ ID NO: 9499 - DNA, 1392 bp, Artificial Sequence
  derived and/or modified sequence
atgtactccaatgtcattggaacggtgaccagtggaaagaggaaggtgtacctgctctcactccttctgatcggattttgggactgtgtgacttgtcatggcagcccagtggacatttgcaccgccaagccacgggatatcccaatgaaccctatgtgcatctaccggtcgccagaaaagaaggcaacggaagatgagggttcggaacagaagattcctgaggcaactaatcgacgggtctgggagctctcaaaggcaaactccagattcgccactaccttctaccaacacctggcagacagtaagaacgataatgataacatttttctgagccctcttagcatctccactgcatttgctatgaccaagctgggtgcatgcaacgatacgctccagcaacttatggaggtgttcaaatttgataccatttcagaaaagacctccgatcagatacacttctttttcgcaaagctgaactgtaggctttatcgtaaggcaaataagtcgtccaaactggtgtccgcaaatcggctcttcggtgacaagtcgttgacctttaacgaaacctaccaagatatttcggaacttgtgtacggagcgaagctgcaacctctggatttcaaagagaatgctgagcaatccagagcagcaattaacaaatgggtgtcgaataagaccgagggccgcatcacggatgtcattccaagcgaggccatcaatgaactgactgtccttgtgctcgtcaataccatctacttcaagggactttggaagtctaagttttcccctgagaacactcgaaaagagttgttctacaaggcagacggcgaaagctgttccgcctccatgatgtaccaagaggggaaatttcgttaccgtcgggtggctgagggaacccaggtgcttgaactgccctttaagggcgatgacatcaccatggtgttgattctgccaaagccggaaaagtcccttgcgaaggttgaaaaggaacttacgcccgaagtgctgcaggaatggcttgacgaacttgaagagatgatgctggtcgtgcacatgcctagattccgcatcgaggatggattctctctgaaggaacaactccaggacatgggactggtggaccttttttcgcccgagaaaagcaagttgcctggtatcgtcgccgaaggtcgcgacgatctctacgtcagcgatgcgttccacaaagcctttcttgaagtcaacgaagaaggaagcgaagcggccgcatccaccgcagtggtgattgcgggtcgctcccttaaccctaacagagtcaccttcaaggcgaatcgccccttccttgtgttcatccgagaagtgcccctgaataccatcatattcatgggccgcgtcgcaaacccttgcgtgaaa

SEQ ID NO: 9500 - DNA, 1392 bp, Artificial Sequence
  derived and/or modified sequence
atgtattcgaacgtcatcggtacggtcacgtcgggcaaacgtaaggtgtacctgctgtccctcttgctgatcggcttttgggactgtgtcacctgccatggcagtccagtggatatctgcacggcgaagccgcgagatatcccaatgaaccctatgtgtatctatcggagccctgagaagaaggctacggaagatgaaggttctgagcaaaagattccagaagccacgaaccgtcgcgtttgggaactctccaaagccaattccaggtttgccaccaccttctaccaacaccttgcggactcgaagaacgacaacgacaatatcttcctcagccctctgtccatcagcacggctttcgcaatgactaagctgggagcctgcaatgataccttgcaacagctaatggaagtgtttaaatttgacaccattagcgagaagacctcggatcagatccactttttctttgccaagctcaactgccgtctctatcggaaagccaacaagtcgtccaagttggtctcagcgaataggctgttcggtgacaagtctctgaccttcaacgaaacctaccaggacatctcagagctcgtctacggcgcaaagctgcagcctttggacttcaaggagaacgctgagcagtcccgcgccgccatcaataagtgggttagtaacaagaccgagggcaggatcaccgatgttattccatccgaggctatcaacgagttgaccgtcctagtccttgtcaacaccatctactttaagggactctggaaatcgaagttctctccggagaatacgagaaaggagctcttctacaaggccgacggcgagagctgctccgctagcatgatgtatcaagaggggaagttccgatatagacgcgtcgctgagggtacccaagtgctggagcttcctttcaagggggacgacatcaccatggtcctaatcctcccgaaacctgagaagagcctcgccaaggtcgagaaggagctgactcccgaggtcctccaggagtggttggatgaactcgaggaaatgatgttggtcgttcacatgccgcgtttccgcattgaggatggcttcagcctgaaggagcaactgcaagatatgggccttgttgacctgttcagccccgaaaagtccaagctgccaggtatcgtcgctgagggaagggatgacctttacgttagcgacgccttccacaaggcctttctggaggtcaacgaggagggttccgaggccgcagccagcactgcagtcgtcatcgccggccgctctctgaacccgaacagagtcactttcaaggcgaaccgccctttcctggttttcattcgggaagtcccgctcaacaccataatcttcatgggtcgggtggcgaacccatgtgtcaag

SEQ ID NO: 9501 - DNA, 1392 bp, Artificial Sequence
  derived and/or modified sequence
atgtacagcaacgtgatcggcactgtgacttcgggtaagagaaaggtgtacctgctgtctcttttgctgattggcttctgggactgtgtgacctgccatggaagcccagtcgatatatgtacggccaagccacgcgatatcccaatgaaccctatgtgtatctaccgctcgccggaaaagaaggccactgaagatgagggttctgaacaaaagatcccggaggcaactaaccggcgcgtgtgggaactgagcaaggcaaattccagattcgcaaccaccttttaccagcacctcgccgactctaagaacgataacgacaacatctttcttagccctctttcgattagcactgcgtttgcaatgacgaaacttggagcctgtaacgataccctccaacaactcatggaagtgttcaaattcgacacgatttcagaaaaaacctccgatcagatacatttcttttttgcaaagctcaattgcagactttaccggaaggcgaataagtcgtcgaagctggtgtcagctaatcggctgttcggggataagtcactgacgtttaacgagacttaccaagacatctccgagcttgtgtacggggcaaagctccagccactcgatttcaaggaaaacgctgagcagtcccgcgcagcgattaacaagtgggttagcaacaagaccgaaggaaggattaccgacgtgattccctccgaggccattaatgaacttactgtccttgtgcttgtgaatactatctactttaaaggtctttggaaatctaaattctcacctgagaatacccggaaggagctgttctacaaggccgatggagaatcctgtagcgcatcgatgatgtaccaggaaggcaagtttcgatatagacgggtcgcggagggcactcaagtcctcgaactgccgtttaaaggagatgatattaccatggtgctcatcctcccaaaacccgaaaagtcgctggcaaaggtggaaaaggaacttactcctgaagtactgcaagaatggctcgacgagttggaggaaatgatgctcgtggtgcacatgcctcggttcaggatcgaagatgggtttagcttgaaggagcaacttcaggatatgggacttgtggatctgttttcaccggagaaatcgaagctccccggaattgtggcggagggtagagacgacttgtatgtgtcggatgcctttcataaagcatttttggaagtgaacgaagaagggtcggaagccgcagcctccactgcagtcgtgattgccggacggtcacttaaccccaatagggtcacttttaaggcaaataggccctttctggtgttcattagggaggtgccgctgaataccattatctttatgggacgtgtggcgaacccctgcgtgaaa

SEQ ID NO: 9502 - DNA, 1392 bp, Artificial Sequence
  derived and/or modified sequence
atgtactcaaatgtgatcggcactgtcacttcgggcaagcgcaaagtgtacctcctgagcctgttgctgattgggttctgggactgcgtgacctgccacgggagcccagtggatatttgcaccgcgaaacctagagacatcccaatgaacccaatgtgtatctatcgctccccagaaaagaaggcgactgaggacgaaggctcggagcagaaaatcccggaggctaccaatcggcgcgtgtgggaactctccaaggccaattcacgcttcgccactaccttctaccagcacctggcagattccaaaaatgacaatgacaacatctttctgagcccattgagcatctcgaccgctttcgcaatgactaagctcggcgcatgcaacgacaccctccagcagctgatggaggtgttcaagtttgatactattagcgaaaagactagcgatcagatccatttcttcttcgccaaactgaattgccggctctaccgcaaggccaataagtcctcgaagctggtgtcagccaaccggttgttcggagataagagcctcaccttcaacgaaacctaccaggacattagcgaactggtgtacggagccaagctccaacctctggatttcaaggagaacgcggaacaatcccgggcggcaatcaataagtgggtgtccaacaagacggaaggccggatcacggacgtgatcccgagcgaggccattaatgaactcactgtgctggtcctggttaacaccatctacttcaagggactgtggaagtccaaattctcgccggagaataccaggaaagagctcttctacaaggcggatggcgaatcatgctcggcctcgatgatgtaccaggagggaaagttccgctaccgcagagtcgccgaggggacccaagtcctggagctgccctttaagggagacgacatcactatggtcctcatcctgccaaaacctgaaaagagcttggccaaagtggagaaggagctcactcctgaggtgcttcaagaatggctggatgagctggaggaaatgatgctggttgtgcacatgccgcggtttcgcatcgaggacggtttctcattgaaagaacaacttcaggacatgggactggtcgacctgttttcgccggaaaaatcaaaacttccgggaatcgtggcggagggacgcgacgacctgtacgtgtcagatgccttccacaaggccttcctggaagtgaacgaggaaggtagcgaggccgcggcaagcaccgcagtggtgattgcagggcgctccctcaacccaaatagagtgacgttcaaggccaatcgcccatttttggtctttatcagagaggtgccgctgaacacgataatcttcatgggaagagtcgccaatccatgcgtaaag

SEQ ID NO: 9503 - DNA, 1392 bp, Artificial Sequence
  derived and/or modified sequence
atgtactccaacgtgattggaactgtgacttcaggaaaacggaaagtctacctgttgtccctcctgttgatcggattctgggactgcgtgacttgtcacggaagtccagtagacatctgtactgctaagccacgcgacatccccatgaacccaatgtgcatttacaggtcgccagagaagaaggccactgaagatgagggatcagaacaaaagatcccagaagccaccaatcggcgtgtctgggagttgtcgaaggcgaactcacgcttcgccactaccttttaccagcatttggccgattccaagaacgataatgataacatctttctctcaccgctgtctatctcgaccgcctttgcgatgaccaagctcggcgcctgtaatgatacgctgcagcaactcatggaggtgttcaagttcgacacgatctcggagaaaacttcagatcagattcactttttcttcgccaaactcaactgcagactgtacaggaaggcgaataagagctccaagctggtgtcggcaaatcggttgttcggggacaaatcgctgacgtttaacgaaacctaccaggatatctctgaactcgtgtacggcgctaagctgcaacctctggatttcaaagaaaacgccgagcagtcacgcgcggccatcaacaaatgggtgtccaacaagactgaaggacgcatcaccgacgtcattccctccgaagccatcaacgagctgactgttctggtgctggtgaatacgatttacttcaagggactgtggaagtcgaagttttcgccagaaaacacccgcaaagagctgttctacaaagcggacggcgaatcgtgctcggcgagcatgatgtatcaagaagggaagttcagataccggagggtggcagagggtacccaagtcctggaacttccgttcaagggagacgacatcaccatggtgttgatcctccctaagccagaaaagtccctggcaaaggtcgaaaaggaactgaccccggaagtgttgcaggagtggctggatgaactggaggaaatgatgctggtcgtgcatatgccgcggttccggatcgaggacgggttctccctcaaggaacagttgcaggacatgggccttgtggatctgttttcgccggaaaagagcaagttgcctggaatcgtggctgaaggacgggacgacctctacgtctccgacgccttccataaggctttcctggaagtgaacgaggaaggatctgaagcagcagcctcaaccgccgtcgtcatagccggcagatcgctcaacccgaaccgggtgaccttcaaggccaacaggccattccttgtattcatccgggaggtgccgctcaacactatcatctttatgggccgggtcgctaacccgtgcgtgaaa

SEQ ID NO: 9504 - DNA, 1392 bp, Artificial Sequence
  derived and/or modified sequence
atgtacagcaacgtgataggcactgtgacctctggcaaacgtaaggtttacctgctctccctcctccttattggcttctgggactgcgttacatgccacggcagtcctgtggacatctgcacagccaaacctcgtgacatccccatgaatccaatgtgtatctacaggtctccagagaagaaggctaccgaagatgagggatctgaacagaagatcccagaagctacaaacagaagagtgtgggaactcagcaaggctaactctaggttcgctactacattctaccagcacctggccgattctaaaaacgacaacgacaacatcttcctgtcccccttgtccatctcaaccgctttcgccatgactaaactgggtgcttgcaatgacacccttcaacagctgatggaggtttttaagttcgatactatctccgagaagacatccgatcagatccacttcttcttcgccaaattgaactgcaggctctaccgtaaggctaacaagagctcaaagttggtgagcgcaaatagactgttcggagataagtcactgacattcaatgagacctaccaagacatctccgagttggtctacggtgccaagctgcaacccctggattttaaagagaatgctgagcaatccagagccgctatcaataagtgggtgtccaataagaccgagggccgtataaccgacgtcatcccttctgaagccatcaacgagctcacagtgcttgtgctggtaaacacaatctacttcaagggtttgtggaagtctaagtttagcccagaaaacacacgcaaggaactcttctataaggcagacggagagtcttgctcagcttccatgatgtatcaggaaggtaagttccgttacagaagagtggccgagggcacccaagttctggaacttccattcaaaggagacgacatcacaatggtgttgattctccccaagcccgaaaagagcttggcaaaggtagagaaggagcttacaccagaggttctgcaggaatggctggacgagctggaggagatgatgttggtagtccatatgcctcgttttaggatcgaagacggtttctctcttaaggagcagctccaggatatgggattggtggatttgttctctcccgagaagtcaaagctgcccggcattgtggccgagggtcgcgatgacctgtatgtgagcgacgctttccataaggcttttctggaggtgaatgaagagggtagcgaggccgcagcatctacagctgtagtgatcgccggtcgcagcctgaatcctaaccgcgttaccttcaaggctaataggccatttttggtctttattcgcgaagtgcccctgaataccattattttcatgggcagagtggcaaacccttgtgtgaag

SEQ ID NO: 9505 - DNA, 1392 bp, Artificial Sequence
  derived and/or modified sequence
atgtactcaaacgtcatcggaaccgtgactagtggtaagaggaaagtctacctcttgtcattgttgctgatagggttctgggactgtgtcacatgtcacgggtcacctgtggacatatgtaccgcaaagccacgcgatattcccatgaatcctatgtgtatctaccgatccccagagaaaaaggcaacagaagatgaagggagtgaacaaaagatccccgaggccactaacagaagggtgtgggagctcagcaaagctaatagtaggtttgccacaactttctatcagcacctcgctgattccaagaacgacaatgataacatttttcttagcccactcagtattagtacagcttttgctatgactaagttaggagcctgtaatgatacccttcagcaacttatggaggtttttaagttcgatactatatcggaaaagacctccgaccaaatacacttcttctttgcaaaattgaactgccgcctgtacaggaaagctaacaagagttcgaaactcgtgagcgccaaccgactctttggcgataaatccctgacctttaatgagacataccaggacatatccgagctagtgtacggagccaagctgcaacccctcgattttaaggaaaacgccgagcagagtcgggcagcgattaataaatgggtgtctaataagactgaggggcgcatcactgatgtgattccaagtgaggccatcaacgaactgacggtgctggtactcgtcaatacaatttattttaagggcctatggaaatcaaagttcagtccggagaacacacggaaggagcttttctacaaggcagatggcgaatcttgctctgctagtatgatgtaccaggaaggaaagttcagataccggcgagtggcggaaggcacgcaggttcttgaactgcctttcaagggggacgatattaccatggttctcattctgcctaaaccagaaaagtcactcgccaaagtggaaaaagagctcacccctgaagtattgcaggagtggcttgacgaattagaggagatgatgctcgtagttcacatgcctagattccgaatagaggatggcttctccctcaaggagcagttacaggacatggggctggtggacttattttcccccgaaaaatccaagcttcctggcatagtggctgagggccgggatgacctgtacgttagtgacgcgttccataaggcattcctggaagtaaatgaggagggatcagaagcggccgcttccacggccgtggtcatagcaggccgctcgcttaacccaaatcgagtgacatttaaggccaataggccattcttagtgttcattagagaggtgcccttgaacactattatctttatgggcagggtcgcgaatccatgcgtgaag

SEQ ID NO: 9506 - DNA, 1392 bp, Artificial Sequence
  derived and/or modified sequence
atgtactcgaatgtgattggaaccgttacgtctggaaagcggaaggtctaccttttgtcactgcttcttatcggcttttgggactgtgtcacctgtcatggatcccccgtggatatttgcaccgctaagccacgtgacataccaatgaaccctatgtgcatctataggtcccccgaaaagaaggcaaccgaggatgagggtagtgaacaaaagattcctgaagccacgaaccgtcgcgtatgggagctctcgaaggcaaatagcagatttgcaactaccttctaccagcacttggcagatagtaagaatgacaacgataacatttttctgtcacccctctcaatttccaccgcctttgcaatgaccaaacttggcgcgtgtaatgacactctgcagcaactgatggaggttttcaagtttgataccataagcgaaaaaactagcgatcagatccatttcttctttgcaaaactgaactgtcggctctacagaaaagctaataagtcgagcaaacttgtgtccgcgaatcgcctgtttggtgacaagtcactgacgtttaacgaaacttatcaagacatcagcgagctcgtctacggagcaaaactgcaaccacttgacttcaaagagaacgcagaacagtcgcgcgcagcaattaacaagtgggtgagtaacaaaactgaaggtcgcatcactgatgtcattccttcagaagcgattaatgagcttaccgtcctggtgcttgtcaacactatctactttaaaggattgtggaaaagcaagttttcgccagaaaacaccaggaaggaacttttctacaaggccgatggtgaatcatgctcggcatccatgatgtaccaagaggggaagttcagatacagacgagtcgccgaagggacgcaggtgctggaactgcctttcaaaggtgatgatatcaccatggtcctcattcttcctaagccggagaagagtctggccaaggtggagaaggagctgaccccagaagtactgcaggaatggcttgacgagctggaagaaatgatgctcgtggtgcatatgcctcggttccgtattgaagatggattctccctgaaggaacaactgcaagatatgggactcgtggatcttttttccccggaaaagtcaaagctcccagggatcgtggccgagggaagggacgatctttacgtgagcgacgcctttcacaaagcatttcttgaagtgaacgaagaggggtcggaagctgcggcatcgacggcagtggtgattgcgggccggtccctcaatcccaatagggttactttcaaggccaacagacctttccttgtgtttattcgcgaagttccactcaacaccatcatattcatgggcagagtcgcaaacccttgtgtgaag

SEQ ID NO: 9507 - DNA, 1392 bp, Artificial Sequence
  derived and/or modified sequence
atgtactccaacgtcattggtaccgtcacgtccggaaaaagaaaagtttacctgctttcgctcctcttgataggtttttgggattgcgtgacctgtcatggttcacctgtggatatctgcaccgcaaagccaagagatattcctatgaatccaatgtgcatttaccggagccctgagaaaaaagccactgaggatgaaggctccgagcaaaagattcccgaggctaccaacagacgagtgtgggaacttagcaaggcgaactcgcggttcgcaaccaccttttaccaacatctggcggactccaaaaacgacaatgacaacatatttctgagcccccttagcatttccactgcattcgcgatgaccaaactgggcgcctgtaatgacactcttcaacaactgatggaagtgttcaagtttgatactatatcggaaaagacctcagaccagatccatttcttttttgcaaaacttaattgtagactctacagaaaggcaaataagtcctccaagctggtgtccgctaacaggcttttcggcgataagagcttgacctttaacgagacttatcaggatatctcagaattggtctatggagcaaagctccaacctcttgactttaaggaaaacgccgaacaatccagagccgcaatcaataagtgggtcagcaacaagactgaaggaaggatcaccgatgtgattccatcggaggcaatcaacgagctgacggtccttgtgcttgtgaatactatatacttcaaggggttgtggaagagcaagttctcgcctgaaaacacgcgcaaggagttgttttacaaggcggatggcgaatcatgctcagcatcgatgatgtaccaggaagggaagttccgttacaggcgggtcgcagaggggactcaggtccttgaactgccctttaaaggtgacgatataactatggtcctgattcttcccaagccagaaaagtcgcttgcgaaggtggaaaaagaactgaccccagaagtcctgcaagaatggctggacgaattggaagaaatgatgctggtggtccatatgccgagatttagaatcgaagatggctttagcctgaaagaacagctgcaagatatgggtcttgtcgaccttttttcaccagagaaatctaagctgcctggtatcgtagcagagggtcgcgacgacttgtacgtgtcggacgcatttcataaggcgtttcttgaagttaatgaagagggttccgaagcagcagcatcaaccgctgtggtgatcgcaggtcgctcacttaaccctaatcgggtcacttttaaggcaaaccgccctttcctggtgtttattcgggaagtgcccctgaatacgatcatctttatgggaagggttgcaaatccttgcgttaaa

SEQ ID NO: 9508 - DNA, 1392 bp, Artificial Sequence
  derived and/or modified sequence
atgtactccaatgttattggcactgttacttctggaaagaggaaggtttatttgctttctcttctcctcattggattttgggattgcgtgacctgtcacggtagtcctgtagatatctgcacagccaagccgcgtgatattccaatgaacccaatgtgtatatatcgcagccctgagaagaaggccacagaagatgaaggttcagagcaaaagattccagaggcaactaatcgcagggtttgggagctttctaaggcaaattcccgtttcgctactacattttatcagcacctcgctgactcaaagaatgacaacgataacatatttctgagccctttaagtatctctactgcctttgccatgactaagctaggtgcctgcaacgacacgcttcaacagctaatggaggtttttaagttcgatactatttcagagaaaacctcagatcaaattcatttcttctttgcaaagttgaactgcaggctgtacagaaaggcgaacaagagttcaaagctggtttcagctaatcgtctatttggtgataaatctctcactttcaacgaaacgtatcaagatatatccgaattggtttacggagcaaagctgcagcctctggattttaaggaaaatgccgaacagtcaagggccgctataaacaaatgggttagcaacaaaacggaaggtaggataactgacgttatcccttcagaagctataaatgagttgactgttttggtcctggttaacacaatttatttcaaaggtctttggaagtccaagttttctccggagaatactcgtaaggagcttttctataaagccgacggtgagtcctgctcagcttccatgatgtaccaagagggtaagttcagatatcgcagggtcgctgaagggactcaggtgcttgagttaccttttaagggagacgatatcaccatggttctgatcctcccaaagcctgagaaaagccttgctaaagtggaaaaagaactaacccctgaggttcttcaggagtggctcgatgaacttgaagaaatgatgctcgttgtgcatatgcccagattcaggatcgaggatggattctccctgaaggaacaattgcaggatatgggtttggtggacctcttcagtcctgagaaatctaagttgccaggaatagtggccgagggtcgagatgacttgtatgtgagtgatgcctttcacaaagctttcttggaggtgaacgaggagggtagcgaagcagcggccagtacggcagtggtaatcgctggtcgttctctgaatcctaaccgtgttacgttcaaagccaaccgaccgtttttggtttttatcagggaagtacctcttaacactattattttcatgggtagagttgcgaatccttgtgtcaag

SEQ ID NO: 9509 - DNA, 1392 bp, Artificial Sequence
  derived and/or modified sequence
atgtactcaaacgtcatcggtaccgtcacttccggtaaacgaaaggtgtaccttctgtcgcttctgcttatcggtttctgggactgtgtgacctgccatggatccccggtcgatatctgcactgcaaagcctagagacatacccatgaatccaatgtgtatttacagatctcccgaaaagaaagcgaccgaagatgagggaagcgagcagaagattccagaagcaactaatcgcagggtgtgggaactctccaaggcaaactcccggtttgcaaccactttctaccaacatcttgccgactccaaaaacgataacgataacattttcttgtcgcctctcagcatttcaaccgcctttgcaatgaccaaactcggcgcatgcaacgatacgcttcagcagctcatggaggtgtttaagttcgatactattagtgaaaaaaccagcgaccagattcatttcttttttgcaaaactcaattgtcggctctatcggaaggcaaacaagagctcgaagctggtgtctgcaaacagactttttggtgataagtcccttacctttaacgaaacttaccaggatataagcgagctggtgtacggagccaaacttcaaccgctcgacttcaaggaaaatgcagagcagtctagggcggcaatcaacaagtgggtgtcaaacaagaccgagggacgcatcactgatgtgatcccctccgaggctatcaatgaacttactgtgctcgtgctggttaacactatctactttaagggtttgtggaagagtaagttcagcccagaaaatactagaaaggaattgttttacaaggcagacggagaatcatgttcggccagcatgatgtaccaagaagggaagtttcggtacagacgtgtggcggagggcacccaggtccttgaactgccctttaagggagatgacataaccatggtgctgatccttcccaagccagaaaaaagcctggcaaaggtcgagaaggaattgaccccagaagtgctgcaggaatggttggatgaacttgaagaaatgatgctcgtggtgcatatgcctcgctttagaatagaagatggatttagcctgaaggaacaactgcaggacatgggactcgtcgatcttttctcacctgagaaatcgaagctgcccggtattgtagcagaaggacgggatgatctgtatgtctcagatgcatttcataaggcattcctggaagtgaacgaggagggctccgaggctgcagcgtcgaccgcagtggtgatagcaggacgctcacttaatcccaatagagtcactttcaaggcgaatagaccctttctcgtctttattcgcgaggtgccactgaacactatcatctttatggggagggtggccaacccatgtgtcaaa

SEQ ID NO: 9510 - DNA, 1392 bp, Artificial Sequence
  derived and/or modified sequence
atgtatagcaacgtaatcggaaccgtgacttctggaaagagaaaagtctacctgctctccctgctgcttattggtttttgggactgtgtgacgtgccacggttcccccgtagacatatgcacagcaaaaccacgcgatataccgatgaacccaatgtgtatatataggagtcctgagaagaaagctaccgaggacgaaggtagcgagcagaaaatccccgaggcaacgaatcgcagggtgtgggagctctctaaagccaattctaggttcgcaaccactttttatcaacacctggcggattccaaaaatgacaacgacaatatctttctttcccctttgtctatctcaactgcctttgccatgacaaagctcggagcttgtaatgatacgcttcagcaacttatggaggtattcaaatttgatactatctccgagaagactagcgatcagattcacttcttcttcgctaaacttaattgtcgcctctacaggaaggcaaacaagagcagcaaacttgtctctgccaacaggcttttcggcgataagtccctgacttttaatgagacttaccaagacattagtgagcttgtgtacggcgcgaagctccagccactggacttcaaggaaaacgctgagcagtcaagagcggctatcaataaatgggttagtaacaagaccgagggaaggattaccgatgttatcccctccgaagctattaacgagctcaccgtgctggtgctggttaacaccatctattttaagggtctttggaagtcaaagttctctcccgagaatactagaaaggaattgttctacaaagcagacggcgagtcatgtagcgccagtatgatgtaccaagagggaaagttcaggtacaggcgcgtcgccgagggtactcaagtcttggagcttccattcaagggcgacgacatcactatggtactgatcctccccaagcctgagaagtccctggctaaagtcgagaaggagctgacgcccgaggttctccaggagtggcttgatgaattggaggagatgatgctcgtcgtacacatgcccagatttcgcatcgaggatggattctcacttaaggaacagctgcaggacatgggactggtagacttgttcagccccgagaaatcaaagcttcctggaattgttgctgaaggtagggacgatctctacgtttcagacgcttttcacaaggccttcctcgaggtaaacgaggagggatcagaggctgcggcttccacggccgtggtgatcgcgggaagatcccttaaccccaacagggtaacgttcaaagcaaatagacccttccttgtgttcatcagagaggtccccttgaatactatcatattcatgggccgcgtggcaaatccatgcgtaaag

SEQ ID NO: 9511 - DNA, 1392 bp, Artificial Sequence
  derived and/or modified sequence
atgtactcgaatgtgatcggcactgtcaccagcggaaagagaaaagtgtacctgctctcgctgctcttgatcggcttttgggactgtgtgacctgccacggatcgccggtagatatttgcactgcaaagcctagagatatccctatgaatcctatgtgcatctaccgctcacccgaaaagaaggcgaccgaggacgaaggatccgagcaaaagatcccagaggcaaccaacaggcgggtgtgggaactcagcaaggcgaactcgaggtttgcaactactttctaccaacacctggccgattccaagaacgacaacgacaatatcttcctctcgcccctctcaatcagcacggcctttgcaatgaccaagttgggcgcttgcaatgacactctgcagcaactgatggaagtgttcaagttcgacactatctccgagaaaactagcgaccaaattcacttcttctttgccaagttgaactgtaggctgtaccgaaaagcgaataagtcctccaagctggtgtcagccaatagactctttggagataaaagcctgaccttcaacgagacttaccaggacatctcggagctggtgtacggcgctaaactccaaccattggacttcaaagaaaatgccgaacagagcagggcggccattaacaagtgggtgtccaacaagactgagggccgcatcactgatgtgatcccgtcagaggcaatcaatgaactcactgtgttggtcctggttaacaccatctacttcaaaggcttgtggaagtcgaagttctcgccggaaaacactagaaaagagctgttctataaggccgatggagagtcctgcagcgcgtcgatgatgtaccaggaaggaaagttccgctataggagggttgccgaaggaacccaggtcctggaactgccgtttaaaggtgacgatatcaccatggtgctgatccttccaaagccggagaaatccctggccaaggtggaaaaggagctgaccccagaggtcctgcaggaatggcttgatgaactcgaggagatgatgcttgtcgtccatatgccgcgcttccggatcgaggacggcttctccctgaaggagcagctgcaggatatgggcctggtggacctgtttagtccagagaagtcgaagctgccgggcatagtggcggaagggcgggacgatctgtacgtctccgacgcctttcataaggctttcctggaagttaacgaagagggatcggaagccgcggcctcaactgcggtcgtaattgccgggcgctcgctgaacccaaaccgagtgacgttcaaggccaacaggccttttctggtgtttatcagagaggtgcctcttaacactatcatcttcatggggcgcgtcgctaatccgtgcgtcaag

SEQ ID NO: 9512 - DNA, 1392 bp, Artificial Sequence
  derived and/or modified sequence
atgtacagcaacgtaatcggtaccgtgacctcaggaaagcggaaagtgtacctgctgtccctgctcctgatcggattttgggattgcgtcacttgccatggcagcccggtcgatatctgcactgctaaaccgcgggacatcccaatgaacccgatgtgcatctaccgttctccggaaaagaaggcgactgaggacgagggttccgaacaaaagattccagaagccactaacaggagagtgtgggaactctccaaggctaacagcagattcgcaaccaccttctatcaacacctggcagactccaagaacgacaacgataacatcttcctgagccccctgtcgatctcgaccgcctttgcgatgactaagctcggggcatgcaacgacacgctgcaacaactgatggaagtgttcaagtttgacaccatctccgaaaagacgtccgaccaaatccacttcttttttgcgaaactgaactgtcggctctacagaaaggccaacaaatcctccaagttggtcagtgccaatcgcctctttggcgataagtccttgactttcaatgagacgtaccaggacatctcggaactcgtctacggagccaaacttcaaccacttgactttaaggagaacgcagagcagtcccgcgccgccatcaacaaatgggtttcgaacaagactgagggtcgcatcactgacgtgatcccttcggaggcgatcaacgaactgacggtgctggtgctcgtgaacaccatctacttcaagggactctggaaaagcaagttctcgcccgaaaatactcgcaaagagctcttctacaaagcggacggagagtcatgttcggcttcgatgatgtaccaggaaggaaagttcagataccgccgcgtggctgagggtacccaggtgctcgagctccctttcaaaggagatgatatcactatggtgctgatcctgccgaagcctgagaagtccttggccaaagtggaaaaggagttgactccggaggtgctgcaggaatggttggatgaactcgaagaaatgatgctggtggtgcacatgccacggttccggattgaagatggattttccttgaaagagcaacttcaggacatgggactcgtggacctgttttcgccggagaagtctaagctgccgggaatcgtggcggaaggcagagacgatctctacgtgagcgacgcttttcataaggcgttcctggaagtgaacgaagaaggatcggaagccgccgcatcgactgccgtggtcatcgcgggacggtccctcaacccaaatcgcgtgaccttcaaggcaaaccgcccatttctcgtgtttatcagagaagtgccactgaacaccatcatcttcatgggaagggtcgcaaacccgtgcgttaag

SEQ ID NO: 9513 - DNA, 1392 bp, Artificial Sequence
  derived and/or modified sequence
atgtattctaatgtaattggaactgttacatctggaaaacgtaaagtttatttattatctcttttgttaattggattttgggattgtgttacatgtcatggatcaccagttgatatttgtactgctaaaccaagagatattcctatgaaccctatgtgtatatatagatcacctgaaaagaaagcaactgaagatgagggttcagaacaaaaaattccagaagcaactaataggagagtatgggagttatctaaagctaattccagatttgctactacattctatcaacacttagcagattccaaaaatgataacgataatattttcttatcaccactttctatttctactgcatttgcaatgacaaagttaggagcatgtaatgatactcttcaacaacttatggaagtttttaaatttgatacaatttcagaaaaaacaagtgatcaaattcattttttctttgctaaattaaattgtagattatatagaaaagctaataaaagttctaaacttgttagtgcaaatagattatttggtgataaaagtttaacttttaatgagacttatcaagatatttcagaattagtatatggagcaaaacttcaaccacttgattttaaagagaatgctgaacaatcaagagcagcaattaataagtgggtttctaataaaacagaaggaagaattactgatgttataccaagtgaggctattaatgaacttactgttcttgttttagttaatactatttacttcaaaggtttatggaagagtaagtttagcccagaaaatactagaaaagaacttttttataaagcagatggtgaatcttgttccgcatcaatgatgtatcaagaaggaaaatttagatatagaagagtagcagaaggaactcaagtcttggaactaccatttaaaggagatgatattacaatggtattaattttaccaaagccagaaaaatctcttgcaaaagtggaaaaagaattaactccagaagttcttcaagaatggttagatgaattagaagaaatgatgttagtggttcatatgccaagatttagaattgaagatggatttagtttaaaagagcaattacaagacatgggactagttgatttattttcaccagaaaaatcaaaacttccaggaattgttgcagaagggagagatgatttgtatgtatcagatgcattccataaggcatttttagaagttaatgaagagggatctgaggctgcagcatctactgcagtagttatagctggaagatctttaaatcctaatcgagttacatttaaagctaatagaccatttttagtttttattagagaagttccattaaatacaattattttcatgggtagagtagcaaacccatgtgtaaaa

SEQ ID NO: 9514 - DNA, 1392 bp, Artificial Sequence
  derived and/or modified sequence
atgtactccaacgtgatcggaactgtcacttcaggcaagcgcaaggtctacctcttgagcctcctgttgattggtttctgggactgcgtgacctgccacggatcccccgtggacatttgcactgcgaaaccgcgcgatattccaatgaacccaatgtgcatctaccgctccccggaaaagaaagcgaccgaggacgagggctcagaacaaaagatccctgaagctactaacagaagagtctgggaactctcaaaagccaacagccgattcgcgactacgttctaccagcacctcgcagacagcaagaatgacaatgacaacatctttctctcgccgctttcgatttccaccgcctttgccatgaccaaactcggcgcgtgcaacgatactcttcagcaactgatggaggtgttcaagtttgacaccatctcagaaaagactagcgatcagatccacttcttcttcgccaagctgaactgccggctgtaccgcaaagccaacaagtcctcgaagctggtgtcagccaaccgcctgttcggagacaagagcttgacttttaacgaaacctatcaggatatctcagagttggtttatggagccaaactgcagcccctggacttcaaggaaaacgcagaacagtcacgcgcggccatcaataagtgggtcagcaacaagaccgaaggacggatcactgacgtgatcccgtccgaggccatcaatgaactgaccgtgctcgtgctcgtgaatactatctacttcaagggcttgtggaagagcaagttcagcccggagaatacccggaaagaactcttttacaaggctgacggggaatcatgttcagcgtccatgatgtaccaggagggaaagtttagatatagacgggtggcagaagggacgcaagtgttggaactgccattcaagggtgacgacattaccatggtcctcatcctcccaaagccggagaaatcattggccaaggtggagaaggagctcacccctgaagtcctgcaggaatggttggacgaactggaggaaatgatgcttgtggttcatatgccgagattccgcatcgaggatggattctcacttaaagaacagcttcaagacatgggcctggtggacctcttctctccagaaaaatccaaactcccaggcatcgtcgccgaggggcgcgacgatctgtacgtgtcagatgcgttccacaaggcatttctggaagtgaacgaagaaggatccgaagcagcggcctcaaccgctgtggtcattgcaggccggtcactgaaccctaaccgcgttactttcaaggccaatcggcccttcctggtgttcattcgggaagtgccactgaacacgatcatctttatgggaagagtggccaacccgtgcgtcaag

SEQ ID NO: 9515 - DNA, 1392 bp, Artificial Sequence
  derived and/or modified sequence
atgtattcaaacgtgatcggcacagttactagcggtaaacggaaagtttatctgttaagcttgctcctgattggattctgggactgcgtcacatgtcacggaagtcctgtggatatctgtactgccaaaccccgggacattccaatgaatcccatgtgtatctaccgctccccagagaagaaagccacggaagacgagggctctgaacagaaaattccggaagccactaatagacgggtgtgggagctctctaaagccaactcccgctttgccacaaccttttaccaacaccttgctgactctaaaaatgacaatgataacatcttcctgagccctctctcaatttctactgcctttgcaatgacaaaactaggcgcatgcaatgacaccctgcagcagctcatggaagttttcaagttcgatactatatccgaaaaaacgtccgaccagatccatttcttctttgccaaattgaattgtagattgtatcggaaagccaataaatcctccaagctggtctcggctaatcgtctgtttggcgataaatcactgacattcaatgaaacctaccaagacatttccgaactggtctacggggccaagctgcagccactggactttaaggagaatgcggaacaatcccgggccgctatcaacaagtgggtttcaaacaaaacagaaggaagaattaccgatgtgataccctccgaagccattaacgagctgaccgtactcgttctggtgaacacaatttattttaagggtctatggaaatctaagttttccccagagaatacgcggaaagagctgttctacaaggctgacggggagtcctgttcagcctccatgatgtaccaggaagggaagttccgttatcgaagagtcgctgaagggacccaagttctggagttgccatttaagggcgatgatatcacaatggtgctgatactgccaaagccggagaagtctctcgctaaagtcgagaaggagcttacaccggaggtcctacaggagtggttggacgaactcgaagagatgatgctcgtggtacacatgcccagattcagaatcgaagatgggttttctttaaaggagcagcttcaggacatgggcttggtggaccttttttctccggagaaatcaaagctgccagggatcgtcgccgaagggagggatgacctgtacgtcagtgatgccttccacaaagcattcttggaggttaacgaggagggatccgaagcggccgcgtcaacagccgtagtgattgccggaaggtccctaaaccccaatagagtgacatttaaggctaatcgcccatttctggtctttatacgggaagtgcctcttaatactattattttcatgggacgagttgcaaatccttgcgtaaag

SEQ ID NO: 9516 - DNA, 1392 bp, Artificial Sequence
  derived and/or modified sequence
atgtacagcaacgtcatcgggaccgtgacttccgggaaaaggaaggtgtacttattaagccttttgctcatcggtttttgggactgcgtcacctgccacggatccccagtggacatttgcaccgccaagccgcgggatatccctatgaatcccatgtgtatatatcggagtcccgaaaagaaggccacagaggatgaaggttctgaacagaagatcccagaagctacaaatcgcagagtatgggagctatccaaagcaaatagccgctttgcaactaccttctaccaacatctcgccgactccaaaaatgacaacgacaatattttccttagcccgttgtctatcagtactgcgtttgccatgacaaaactgggggcttgcaacgataccctgcaacagctcatggaagtgtttaaattcgatacaatttcagagaaaacctcagaccagatccatttctttttcgccaaacttaattgcaggctttatcgcaaagctaataaaagttcgaagctcgttagcgccaatcggctgttcggggacaaatccttgacgttcaacgagacctatcaggacattagtgagctggtatacggggcaaaactgcaacccctggacttcaaggaaaacgccgaacagtcccgcgcagctatcaacaagtgggtgagtaacaaaacggaggggcgcattaccgacgtgatccccagcgaagccataaatgaactgaccgtgctggtccttgtaaacacaatctacttcaaagggctgtggaagtccaagttttcccctgagaatactcgcaaagaactgttttacaaggctgacggtgagtcatgctctgcatctatgatgtaccaagagggaaagttccgctacaggcgcgtcgccgagggcacccaagtgctggaattgccatttaaaggggatgatattacaatggtgttgattctccccaagcccgaaaagagccttgcaaaggtggagaaagaactgactcccgaagtactccaggagtggctggacgagctcgaagagatgatgttggtagttcatatgcctcggttccgaattgaggacgggtttagccttaaggagcagttgcaggatatgggacttgtggatctgttctcccccgagaagtccaagttacccgggattgttgctgaggggcgggacgacctgtacgttagcgacgcattccataaagctttccttgaggtcaatgaggaaggctcggaggccgctgcatctactgcagtcgttattgccgggcggagcctgaatcccaatagagtgacttttaaggccaatcggccctttctagtgtttatccgagaagtaccactgaataccataattttcatgggacgggtggcgaacccctgtgtaaag

SEQ ID NO: 9517 - DNA, 1392 bp, Artificial Sequence
  derived and/or modified sequence
atgtactcaaatgtgatcggaaccgtgacgtcgggaaagcgcaaagtgtacctgctttcattgctgctcatcggattttgggactgcgtgacctgccacgggtcaccggtcgacatctgcacggctaaaccccgagacatcccaatgaacccgatgtgcatctaccggtcaccagagaagaaagcaacggaagatgaaggcagcgagcagaaaatcccggaagcaactaatcgacgcgtctgggaactgtccaaagccaacagcagattcgcaacgaccttttaccagcacctcgcagactcaaagaatgacaatgataacatcttcctctcgccgttgagcatttccactgcgttcgcaatgaccaagctcggggcgtgtaatgatactctgcagcaactgatggaggtgttcaagtttgacaccatctccgaaaagacctcggaccaaatccactttttctttgctaaactcaactgtagactgtatcgcaaagccaacaagtcgtccaagctggtgtccgcaaatcggctcttcggggacaagtcgctgactttcaatgaaacctaccaagacatctccgaactggtctatggtgccaagctccagccgctggacttcaaagagaacgcggaacagagccgcgcagctataaacaagtgggtgtcgaacaagaccgagggacgcatcaccgacgtgattccttcggaagccatcaacgagctcactgtgctcgtgctcgtcaatactatctactttaagggactttggaagtcgaagttctccccggagaataccaggaaagaactcttttacaaagcagacggcgaatcgtgtagcgcgtccatgatgtaccaggaaggcaagtttaggtaccgcagagtggccgaaggaacccaggtcctggagctccccttcaagggggacgatatcactatggtgctgatacttccgaagccggaaaagagccttgcaaaggtggaaaaggagctgacccccgaagttcttcaggagtggctggatgaactggaagaaatgatgctggtggtccatatgcctcgcttcaggatcgaagatggattctccctgaaggaacagctgcaagatatgggcctggtggacttgttctcacctgagaagtctaaactgcccggaattgtcgccgaagggcgagatgacctgtacgtcagcgatgcgtttcacaaagccttcctggaagtgaacgaagaaggttcggaggccgcggcttctacggctgtggttatcgccggaagatccctgaacccaaatcgtgtgaccttcaaggccaaccgaccattcctggttttcatcagggaggtgcctctgaacactattatctttatggggcgtgtcgcgaatccatgcgtgaag

SEQ ID NO: 9518 - DNA, 1392 bp, Artificial Sequence
  derived and/or modified sequence
atgtactcaaacgtcattggcacagttacctccggtaaacgcaaggtctatctgttgagcctgctgctgattggcttttgggattgcgtgacctgccacggtagcccggtcgatatctgcaccgctaaaccgcgtgacatcccgatgaacccaatgtgtatctacaggagcccggagaagaaggcaactgaggatgagggttctgagcaaaaaatacctgaagcgacgaatcgccgcgtgtgggagctgtccaaggctaacagccgctttgccacgactttttaccagcacctggcggattccaagaacgataatgacaatattttcctgtcccctctgtccatcagtaccgcatttgcgatgacaaagctcggcgcttgtaacgataccctgcagcaactgatggaggtgtttaaattcgataccattagcgaaaaaacctccgaccagatccatttcttttttgctaagctgaactgtcgtttgtacagaaaagccaacaagagctccaagctggtgagcgcgaaccgcctgttcggtgacaagagcctgacctttaatgaaacttaccaggacatctcagaactggtttatggcgcaaagctgcaaccactagatttcaaggagaacgccgagcagtcccgcgcggccataaataaatgggttagcaataagactgaaggacgcatcacggatgtgattccgtctgaggcaataaacgagttgaccgtgctggttctcgtgaatactatctacttcaaaggcctttggaaaagcaaattctctccagaaaacacccgtaaagagctgttctataaagcggatggcgaatcttgcagcgccagcatgatgtaccaggaaggtaaattccggtatagacgcgtggcggagggcacgcaggtgctggagttaccattcaagggcgatgatatcaccatggttctgattctgccgaagccggagaaaagtttagcaaaagtggagaaagaactgaccccagaagtgttacaggaatggttggacgagctggaggagatgatgctggtggtccacatgccccgtttccgtattgaggacggcttcagcctcaaggagcaattgcaagacatgggcctggttgacctgttcagcccggagaaaagcaagctgccaggtatcgtcgcggagggtcgcgacgatctttatgttagcgatgcgtttcacaaggcgttcctggaggtgaacgaggagggtagcgaggcggctgcgtctacggcggtcgtcattgctggtcgctcccttaacccaaaccgtgtcacctttaaagcgaacaggcctttcctggtgttcatccgcgaagtacctctgaatactatcattttcatgggtcgcgttgcaaatccctgtgtcaag

SEQ ID NO: 9519 - DNA, 1392 bp, Artificial Sequence
  derived and/or modified sequence
atgtatagcaatgtgataggaaccgtgaccagcggaaagaggaaagtctacctgctgtcgttgctgctcatcggcttttgggactgcgtcacctgccacgggtccccagtggatatctgtaccgcaaagcctagggatattccgatgaatcctatgtgtatctacagatcccctgagaaaaaagcaaccgaagatgagggtagcgaacaaaagattccggaagctactaacagaagagtgtgggaactgtccaaggctaattcacggtttgccactaccttttatcagcatctggcagattcgaagaatgataatgacaacatctttctgtcgccactctcgatctcaactgccttcgccatgacgaagctgggcgcatgtaatgacaccctgcaacagcttatggaagtgtttaagtttgatactataagcgaaaaaacctcagatcagattcatttcttcttcgcaaaacttaactgcagactctaccgcaaagcaaacaagtcaagcaaacttgtgtccgccaaccgactgtttggagacaagtccctgaccttcaatgaaacgtaccaggatattagtgaacttgtgtatggagcaaagctgcagccacttgatttcaaagagaacgctgaacagtcacgcgcagccatcaataagtgggtgtcgaacaagactgaaggtcgaattaccgacgtcattccctccgaagcgatcaatgagttgaccgtgttggtgttggttaacacgatatacttcaagggcctttggaagtccaagttctcgcccgaaaatactcgaaaggagctcttctacaaggccgatggcgagtcgtgtagcgcgtccatgatgtaccaagagggaaagttcagatacagaagggtcgcagaggggacccaagtgttggaactccctttcaagggcgacgatattacgatggtcctgattcttccaaagcctgaaaagtctctggcgaaagtggagaaagaacttactcctgaagtgcttcaggaatggcttgacgaactcgaggagatgatgctcgtcgtgcatatgccaagatttcggattgaggatggattcagtctgaaagaacaactccaagatatgggattggtagatctgttttcgcccgaaaagtcgaagctgcctggtattgtggctgaaggaagagatgacctgtacgtctctgatgcctttcacaaagcctttcttgaggtgaacgaggaaggctccgaggcagctgcatccactgctgtggtaattgcgggacgcagcctcaacccaaacagagttacctttaaagcgaaccgcccttttctggtctttatccgcgaggtccctcttaatacgatcattttcatgggccgtgtcgccaacccctgcgtgaaa

SEQ ID NO: 9520 - DNA, 1392 bp, Artificial Sequence
  derived and/or modified sequence
atgtatagcaacgtcatcgggaccgtcacaagtggtaagaggaaagtgtatctcctttccttgctgttaatcggattttgggattgcgtcacctgccacggatctcccgtggacatttgcactgccaagccaagagatatcccgatgaaccctatgtgtatttaccggtccccagagaagaaagccacggaagacgagggctccgagcagaaaatcccggaagctaccaaccgtagagtgtgggagctctctaaggcgaattcacggttcgccacaacattttaccagcatctcgcagattctaagaacgacaacgacaatatattcctttcccctctgtcaatcagtacagccttcgctatgacgaagctcggtgcatgtaacgacacgctacagcaattgatggaagtgtttaaatttgacactatctccgaaaaaaccagtgaccagatccactttttttttgcaaaactgaattgcaggctatacaggaaggccaacaagtctagcaagctggtttcggccaacaggctgttcggcgacaagtcattgacatttaatgagacctaccaggatatcagcgaattggtatacggggccaagttgcaaccattggattttaaggaaaatgccgaacagagtcgagctgctattaataaatgggtgtcaaataagactgagggtcgaatcactgacgttatcccaagcgaagccataaatgagctgacagtcctggttctcgtaaataccatctacttcaaaggcctttggaaatctaagtttagcccggagaacactaggaaggagctattctataaagccgatggcgagtcatgcagcgcctcgatgatgtatcaggaaggtaaattcaggtacaggagggtggcagagggcactcaggtactggagcttcccttcaaaggcgacgacatcactatggttctcatactgccaaagcctgagaaatcgctggccaaagtggaaaaggagctgactccagaagtgcttcaggagtggctcgacgaattagaagaaatgatgctggtggttcacatgccgcggttcaggatagaagatggcttctccttaaaagaacaactgcaggacatgggactcgttgacttgttcagccccgagaagtctaaattaccgggcatagtagccgaaggccgggacgacctgtacgttagcgacgccttccataaggcctttctggaggtgaacgaggagggatccgaggctgctgcatccaccgcagtggtcattgcgggaagatccctgaaccctaatcgcgttacgttcaaggcgaatcgcccgttcctggtcttcattcgtgaagtgcccctgaacacaattatctttatgggacgcgtggctaacccatgtgtgaaa

SEQ ID NO: 9521 - DNA, 1392 bp, Artificial Sequence
  derived and/or modified sequence
atgtatagcaacgttatcggcacagtaaccagcgggaaaaggaaagtctatctgttgagcctgctcctaataggattctgggactgcgtaacttgtcatgggtccccagtggatatctgcacagccaaaccccgtgacattcctatgaacccgatgtgtatatatagaagcccagaaaagaaggctaccgaagacgaaggcagtgagcagaagattcccgaggctacaaaccggagagtctgggagctttctaaggccaactctcgattcgccaccacattttatcagcaccttgcggactctaaaaacgataatgacaatatatttctctcacctcttagcatttcgacggccttcgcaatgacgaaattgggagcctgtaacgatacccttcaacagctcatggaggtcttcaagttcgacaccatctctgaaaagacatctgaccagattcacttttttttcgcaaagttgaactgcagattatataggaaagccaacaaatctagtaagttagtctcagcaaataggctctttggggataagtctctgaccttcaatgagacctatcaagacattagcgaactcgtgtacggcgcaaaacttcagcctctggactttaaagagaatgctgagcagagccgggccgcaatcaataaatgggtgtcaaataaaacagagggacgtatcacagacgtgattcccagcgaggccattaacgagctgaccgtgctcgtgctagtgaacacaatctactttaagggcctgtggaagtctaagttctcccccgaaaatactcggaaagagttattctataaggccgatggcgagagctgtagcgctagcatgatgtatcaggaagggaagtttagatatcggcgcgtcgcagaagggacacaggtgctggagctccccttcaagggtgacgatattactatggtcctcatcctaccgaagcctgagaagtctttagccaaggtggagaaagaactgactcctgaagtgctccaagagtggctggacgagcttgaagaaatgatgcttgtggtgcatatgccgcggttcaggatcgaagacgggttctcactgaaagagcagctgcaggacatgggcctggttgacctgttcagtcccgaaaagtctaagctacctggcattgtagccgaaggccgcgacgatctctacgtcagcgatgcctttcataaagcatttctggaagtgaacgaagaaggcagcgaagctgctgcctcaaccgcagtcgtcattgctggccgttctctgaaccccaatagggtaacctttaaagccaatcgacctttcttggttttcattcgcgaagtgcctctcaacacgattattttcatgggccgcgttgcgaacccctgcgtcaaa

SEQ ID NO: 9522 - DNA, 1392 bp, Artificial Sequence
  derived and/or modified sequence
atgtactcaaacgtcatcggcaccgtcacctctggaaagcggaaggtttatctgctgagcctgctcctgattggcttctgggattgcgtcacatgccatggttctcctgtcgatatatgcacggccaaaccacgagatattccgatgaaccccatgtgcatttaccggagccccgagaagaaggcaacggaggacgaggggtcggaacagaaaatccccgaggccaccaatcgaagggtttgggagctcagtaaggccaatagcagatttgccaccactttctaccaacacctggccgactctaagaacgacaatgacaacatctttctgagccctctctctatctcgacagcatttgccatgactaagttaggcgcgtgtaatgataccctgcagcagttgatggaagttttcaaatttgacacaattagtgagaagacctccgaccagatacactttttcttcgccaagttgaattgtcggctgtaccggaaggccaacaagtctagcaagctagtcagtgcaaaccgcctgtttggcgataagtctctaacctttaatgagacataccaggacatcagcgagttagtctacggagctaaactgcaaccgttagatttcaaggagaatgctgaacagtctagggcagctatcaataagtgggtgagtaacaagactgaaggacggatcaccgacgtgatcccctctgaagccataaacgagctgaccgtactcgtactcgttaacacgatctattttaagggcctgtggaaaagcaaattctcccccgaaaataccagaaaggagctgttctacaaagccgatggggaatcctgtagcgcttccatgatgtatcaagaaggcaagttcagatatcgacgcgtggctgagggtacccaggtccttgagctgccgttcaagggcgacgatataacgatggtactgatcttaccaaaacccgagaagagtctggccaaagtggagaaagagctgactcccgaagtcttgcaagagtggctcgacgagctggaggagatgatgcttgtggtgcacatgcctagatttcgcatcgaggatggcttcagcctgaaggagcagctgcaggacatgggtctggtcgatctgttttcccctgaaaaatctaagctgccaggaatcgtggccgagggcagggatgacctatatgtgagtgacgcattccacaaagccttcctggaagtgaacgaggagggatcggaggcggccgcgtctacagcggtagtgatcgctgggaggagccttaaccccaacagagttaccttcaaagccaacaggccatttctggtgtttatccgggaggtaccactgaacacgataatcttcatgggccgtgtggccaacccctgcgtgaag

SEQ ID NO: 9523 - DNA, 1392 bp, Artificial Sequence
  derived and/or modified sequence
atgtattctaatgtgatcgggaccgtgacctcgggaaagcgcaaagtctacctcttgtctttattgctaattggattttgggattgcgtgacttgccacggaagtccggtcgacatttgtaccgccaagccccgtgacatcccaatgaatcccatgtgcatttatagatcacccgaaaaaaaggccactgaggatgaaggcagcgagcagaagattccagaggcgactaaccgcagagtatgggagctgtcaaaagccaattctcgatttgcgacgacattctaccagcatctcgccgactctaagaacgacaacgataacatcttcctctctcctctcagcatttctacggcgttcgccatgacaaaattgggagcctgcaatgacactttgcagcagttgatggaagttttcaaatttgatactattagtgagaaaacatctgatcagatccactttttctttgcaaagctgaactgccggctgtaccggaaggctaacaaaagcagtaagctggtgtccgccaatagacttttcggagacaagagcctcactttcaacgagacctaccaagatatttctgaactggtatacggcgccaaactccaacccctcgatttcaaagagaacgccgagcaaagcagggcagccataaataagtgggtgtccaataaaacagaagggaggattacagatgtcattccgtcagaagctatcaacgaattaaccgtactggttctcgtgaacaccatatattttaagggattgtggaagagtaaattctctccagagaacaccaggaaggagctgttttataaagcggatggggaatcatgttccgcatctatgatgtatcaggaaggcaaattcaggtacaggcgagtcgctgaaggcactcaggtgctagagctgccttttaagggggacgacatcacaatggtcctaattctcccaaagcctgaaaagtccctggcaaaggtggagaaagaacttacgcccgaagtgctgcaggagtggcttgatgagctcgaggaaatgatgctcgttgtacatatgccaagatttagaatcgaagacggcttctctcttaaggagcagctgcaagacatgggcctggtggacctgtttagccctgaaaagtccaagcttccaggaatcgtagcagagggccgggacgatctgtacgtctccgatgcttttcacaaggcctttttggaggtgaatgaggaaggcagcgaagcagccgcgagcaccgcggttgtaatagcaggtcgatctttgaacccaaacagagtgacctttaaagctaaccgcccatttttggtcttcatcagagaggtccccctaaatacaattatttttatgggtagggttgccaacccttgcgtgaag

SEQ ID NO: 9524 - DNA, 1392 bp, Artificial Sequence
  derived and/or modified sequence
atgtatagcaacgttattggaaccgtaaccagcggtaagaggaaggtgtatttgttatccctgttgttaatcggcttctgggactgcgtgacctgccacggtagccctgtagacatttgtacagccaagccccgtgatataccgatgaatcctatgtgtatttaccgcagtcccgagaagaaggccaccgaggatgagggttcggagcagaaaattcctgaggccaccaatcgccgcgtatgggagcttagtaaggctaattcacgattcgccaccaccttttaccagcaccttgccgacagtaagaatgacaatgataacatcttcttgagcccattgagcatctccactgcctttgcaatgacaaagctaggcgcctgtaatgatactttgcagcagctgatggaggtgttcaagttcgataccatttcggagaaaacatcagatcaaatccacttcttctttgctaaactgaattgcagactgtacaggaaggccaacaaatcgagcaagttggtatcagccaaccggttgttcggcgataagagcttgacgttcaacgaaacctaccaagatatatcggagctggtgtatggtgcgaagctccaaccattggactttaaagagaatgcggaacaatcacgtgcggccataaataagtgggtgtccaataaaaccgaaggccgcatcaccgatgtcattccaagcgaggccattaatgaactgaccgtgttggtgctggtgaacaccatttattttaagggcttgtggaagtcgaaattctcccccgagaacacgcgtaaggaacttttctacaaggccgacggtgagagctgctctgcatccatgatgtaccaggagggaaaattccggtaccgccgagtagccgaaggcactcaggttctggaactgcccttcaagggagatgacatcaccatggtactgattctgccaaaaccagaaaaaagcctggccaaggttgagaaggagctcactcctgaggtcctgcaggagtggttggacgagctggaggagatgatgctggttgtccacatgccgcgcttcagaatagaggatggatttagcctaaaagagcagttgcaggacatgggtctagttgacctgttttctccagagaagtccaagcttccaggcattgtggccgaaggacgcgatgacctctatgtgagcgatgcatttcataaggccttcctggaagtgaatgaggagggaagtgaggcagccgcatccactgcggtggtgattgccggcagaagcctgaacccaaaccgtgtaaccttcaaggcaaataggccttttctcgtgttcattcgggaagtcccgcttaacacgattatcttcatgggacgtgtggccaatccatgcgtgaag

SEQ ID NO: 9525 - DNA, 1392 bp, Artificial Sequence
  derived and/or modified sequence
atgtactccaacgttatcggcactgtgacgtccgggaagcggaaagtgtatctcctctccctcctccttatcggcttttgggactgcgttacctgtcacgggtcgccagttgatatctgcacggcgaagccacgcgacatccccatgaaccccatgtgcatataccggtctccggagaagaaggcaaccgaagacgagggttccgagcagaagattcccgaggccacgaatcgcagagtatgggaactgtccaaggctaattcccgctttgctaccaccttttaccagcacttagctgactctaaaaacgacaacgataatattttcctctcccccctttctatctcaaccgcctttgctatgacaaagcttggtgcctgtaacgataccctacagcagctgatggaggtgttcaaattcgatactatatcagagaaaacctcagatcagattcatttttttttcgccaagcttaattgtcgcttgtatcgcaaggccaacaagagcagcaagctcgttagcgcgaatcgcctgtttggagataagagcctgacatttaatgaaacataccaggatatctcagaactggtgtacggcgctaagctccagcccctcgatttcaaggagaacgcagaacaatcgcgagctgccatcaacaagtgggtcagtaacaagacggaggggagaatcactgatgttataccctccgaagctatcaatgaactgacggtacttgtgctagtgaacacaatctattttaaaggtctatggaagtctaaattctcccctgagaatacacggaaagagcttttctataaggcagacggcgaaagttgcagcgcatcgatgatgtatcaggaggggaagtttaggtatcggcgtgtggccgagggtacccaggtgctagagttgccctttaagggagacgacatcactatggtgcttattctgcccaaaccagagaagagcttggcaaaagtcgagaaggaacttactcccgaggtgctacaagagtggctggacgagctcgaggagatgatgctggtggtgcacatgcctagatttcgcatagaggacggcttctcacttaaggaacaactacaggacatggggctggtcgatctgttctcccctgaaaagtccaaacttcctggaatcgtcgctgagggacgagacgatctgtatgtttctgatgccttccacaaagcttttttagaggtgaatgaggagggaagcgaggcagctgcttcaaccgccgtggtgattgcagggaggtccctgaaccctaaccgcgtgactttcaaggctaacagaccctttctcgtttttattagggaagtgcctcttaacaccataattttcatgggcagagtggccaatccctgcgtcaag

SEQ ID NO: 9526 - DNA, 1392 bp, Artificial Sequence
  derived and/or modified sequence
atgtattctaacgtcatcggtaccgtcacaagcggaaagcggaaggtctacttgctgtccctactgctcatcggcttttgggactgcgttacatgtcacggaagccctgtcgacatttgtaccgcaaagccccgggacattcctatgaaccctatgtgtatttaccggtcgcctgaaaaaaaagctactgaggacgaaggcagcgagcagaagatacctgaggccactaaccggagagtgtgggaattgtcaaaggctaacagccggttcgccacaacattttaccaacacttagccgactctaagaatgacaatgacaacatttttctctccccactgtcaatttctaccgccttcgcaatgacgaagctcggcgcttgcaatgatacattgcagcaattgatggaagtcttcaagttcgacacgatcagtgagaaaactagcgaccagatccacttcttttttgcgaaactcaactgccgactgtaccgaaaagcaaataaatcctccaagctcgtgagcgccaacagattgttcggagataagtctctgaccttcaatgaaacctatcaggacatcagcgagctggtctatggagccaaattgcagccgcttgacttcaaggaaaacgccgagcagtctagggctgctattaacaaatgggtcagcaacaaaacagaaggaaggatcaccgacgtgatcccttccgaggccatcaatgagctgacggtgctggtgctggtgaacaccatctattttaagggactgtggaagagcaaattcagtcccgagaacactagaaaagaactgttttacaaagctgatggggagtcttgttcggcctcgatgatgtaccaggagggaaagttccgttatcgacgcgttgccgaagggactcaagttcttgagttaccttttaaaggagacgacatcacgatggttctgattctgccaaagcctgaaaagtcactggctaaggtcgagaaggagctcactcctgaggtgctgcaggagtggctggatgagctggaggagatgatgttagtcgtgcatatgcctagattccgtatcgaagatggtttctcactgaaggagcagttgcaggatatgggccttgtggacctcttctctcctgagaagagcaagcttccaggcattgtggccgaaggtcgggatgatctgtacgtcagtgacgctttccacaaagccttcctggaagtcaacgaggagggatccgaggccgcggctagcaccgctgtcgttatagccgggcgatcgcttaaccccaatagggtaacatttaaggccaaccgcccatttctggttttcatacgagaagtgcctctcaataccattattttcatggggcgggtagcgaacccctgcgtaaaa

SEQ ID NO: 9527 - DNA, 1392 bp, Artificial Sequence
  derived and/or modified sequence
atgtacagtaatgtgataggcactgttaccagcggaaagcggaaggtgtatctcctgtctctcctcctgatcggcttctgggattgtgtcacctgccatggcagtccggttgatatttgtactgccaaaccccgcgatatccctatgaacccaatgtgtatctataggtctccagaaaagaaggccacagaagatgaggggtccgaacagaagattcctgaggccaccaacaggagggtttgggagctgtctaaggccaattctagatttgccaccacgttctaccagcatctcgctgactctaagaacgataatgataatatcttcctgtctcccctgtctatcagcactgcgttcgctatgaccaagctgggggcctgcaatgacacacttcagcaacttatggaggtgttcaaattcgacacgatatccgagaagacaagcgaccagattcacttcttctttgctaagctgaattgccgcctttacaggaaggctaacaagagtagtaagttggtaagcgctaatagactgttcggcgataagtcacttacgtttaatgagacgtatcaagacatttcagagctggtttacggcgctaaattgcaacccctggacttcaaggaaaatgcggaacagtcacgcgcggccattaacaaatgggtcagcaacaaaaccgaagggagaataacggatgttatacccagtgaagccatcaatgaactgacagtgcttgtccttgtgaacaccatttatttcaagggcctttggaaatcaaagtttagcccagaaaatacaagaaaggagctcttctacaaggctgacggcgagagctgctccgcaagcatgatgtaccaggagggcaagttccgctacaggagagtggccgagggcactcaagtgctggagctgccttttaagggggacgacataacaatggtgctgatcctgcctaagccggaaaagtccctggctaaagtagagaaagaacttacacccgaggtcctgcaggaatggctggatgaattggaggaaatgatgcttgttgttcatatgcccagattcagaatcgaggacggatttagcctcaaagagcaactgcaggatatgggcctcgtggatctctttagtcccgagaagagcaaactgccagggattgtggctgaggggagggatgacctctatgtctctgatgcttttcacaaggcattcttggaggtgaacgaggaggggtctgaggcggcagcttcaacagctgtagtgatagccggccggagtctgaaccctaatcgggtgacatttaaggccaatagaccatttctggtgtttatcagggaggtgccccttaacaccatcatcttcatgggtcgggtggccaacccgtgcgtgaag

SEQ ID NO: 9528 - DNA, 1392 bp, Artificial Sequence
  derived and/or modified sequence
atgtactctaacgtaattggaacagtgacctccggtaaacgaaaggtttatttgttgagcctgctgctgataggcttttgggactgtgtgacctgccatggctcacctgtcgatatctgcactgcgaagcctcgcgacatccccatgaaccccatgtgtatttaccgatctcccgagaagaaggctaccgaagatgagggatctgagcagaagatcccagaggccacaaatcgaagagtgtgggaactgtcaaaggccaattcccgcttcgcaaccaccttctatcaacacttagccgattcgaaaaacgataacgataatatattcttatctcccttatccatcagtacagcttttgcaatgactaaactgggtgcctgcaacgatacgttacagcagctgatggaggtatttaagttcgacaccatcagcgaaaaaaccagtgaccagattcacttcttcttcgctaagctgaactgtagattgtatagaaaagccaataaatcttccaaactggtgagcgctaatcgtctgtttggggacaagtcactgaccttcaacgaaacttaccaggatatttcagagttagtgtatggggctaaactccagcctctggactttaaagaaaatgcagagcaaagccgcgcagccattaataagtgggtgtctaacaagacagaagggcggataactgacgtaattccctccgaggccatcaacgagttgacggtcttggtgctggtgaataccatttatttcaaaggactttggaagagcaagttttctcccgagaacacccgcaaagaactattctataaagcagacggcgagtcctgtagcgcttcaatgatgtatcaggaggggaagtttagataccggagggttgccgagggaacccaggttctggaactccccttcaaaggggacgatatcactatggttctaattcttcccaagccagagaagtctttagccaaggtggagaaggagctcacaccggaagtcctgcaggaatggttggatgagctggaggagatgatgctcgtggtccacatgccccgatttcgaatcgaagacgggttctctttgaaggaacagttgcaggacatgggcttggtggatctcttctctcctgaaaagtccaaactgccggggattgtcgcggaagggagggatgatctgtacgtatccgatgcctttcacaaggcctttctggaggtgaatgaggagggtagcgaggccgcagcatctactgctgttgtgatcgccggacggtcgttgaaccctaatcgcgtcacattcaaagctaatcgcccttttttagtgttcatccgagaagtccccttaaacactattatttttatgggtcgagtcgctaatccctgtgtgaag

SEQ ID NO: 9529 - DNA, 1392 bp, Artificial Sequence
  derived and/or modified sequence
atgtacagtaacgtgatcgggacagtcacctctggtaaaagaaaagtctaccttctgtcacttctgcttattggattttgggactgtgtcacctgccatgggagccccgttgacatctgcactgcaaaaccacgggatatcccgatgaaccctatgtgcatataccgaagcccagagaagaaggcaaccgaagacgagggaagcgaacagaaaattcccgaagcaacaaacagacgagtctgggaattgagcaaagccaactctcgcttcgcgactacattctatcaacacctggctgactccaaaaacgataacgataacatctttttgtcccccctcagcattagtactgcctttgctatgaccaaacttggagcttgcaacgacacactgcagcagcttatggaggtcttcaagtttgatactatcagcgaaaagaccagcgatcagatccacttcttttttgctaaattgaattgtagactctatcgcaaggccaacaagtcctccaaattggttagtgcaaacagattgtttggtgataaatctctcacctttaacgagacataccaggacatttccgagctggtctatggcgctaagctgcaacctctcgattttaaggagaacgccgaacaatctcgtgccgctatcaataagtgggtaagcaacaagactgagggcaggataacagacgtgatcccgtcggaggctatcaacgaactcaccgtcctcgtgctggtgaacacaatttatttcaagggcctctggaaatcaaagttcagccccgagaatacgcggaaagagctgttctacaaagctgacggtgaaagttgtagtgcctctatgatgtaccaagagggaaaattccgttaccgcagggtggcggagggaactcaggtgctggagctgccatttaaaggggatgatataaccatggtccttatcttaccaaagccggaaaaaagtcttgccaaggtcgaaaaagagttgactcccgaagtgctacaagagtggctcgatgagctggaggagatgatgcttgtggtgcacatgcctaggttcaggatcgaggacgggttcagccttaaagagcaacttcaggatatgggactggtggacctctttagccccgagaaatctaagctgcctggcatagtagctgaaggtcgtgacgacctttacgtttcagatgcgtttcataaggcctttctggaggtgaatgaagaaggatccgaggctgcagccagcacagcagtcgttatagctggcagaagcctgaaccctaacagggtgacatttaaggccaacaggccctttttggtttttatcagggaagtgccactgaacacaatcatctttatgggcagggtggctaacccatgcgtgaaa

SEQ ID NO: 9530 - DNA, 1392 bp, Artificial Sequence
  derived and/or modified sequence
atgtacagcaatgtgattgggaccgtgacctcgggaaagcggaaagtttatttgctttctttgctcctgattgggttctgggattgcgtgacgtgccatgggagccccgtggatatttgtacggccaaaccacgggacattcctatgaacccaatgtgcatctacagatcaccagagaagaaagctaccgaggacgagggttctgaacagaagattccggaggccaccaataggcgagtttgggaacttagtaaggcgaactcacggttcgctacaaccttttatcagcacctggccgactctaaaaacgacaatgacaacatattcctgagcccactttctatttccacagcctttgcaatgacgaagttgggggcgtgtaatgacaccttgcagcagttgatggaggtttttaaatttgatacaatcagcgagaaaacatctgaccaaattcacttttttttcgcaaagctgaactgcagactgtaccgcaaggctaacaagagctctaaactggtctctgctaaccggttattcggggataagtcgctgacgttcaatgagacctatcaggatatcagcgagttggtctatggagcgaagcttcagccactggactttaaagaaaacgcagaacagtcgcgtgcagccatcaacaagtgggtaagcaataaaaccgagggccggatcaccgatgttatcccgtcagaagccatcaacgaacttacagtactggtgttggtgaacaccatatattttaaaggtctgtggaagtctaaattctcacccgaaaatactcggaaggaattattttacaaagccgacggggagtcctgcagcgcctctatgatgtaccaggaagggaaatttcggtatcggcgggtggctgagggcactcaagtgctcgagctaccattcaagggcgacgacatcacaatggtgttgatcctgcctaaacccgagaaatccctggccaaagtggagaaagagctaacgcccgaagttctgcaagaatggctggacgaactggaggaaatgatgctggtcgtccatatgcctaggtttagaatcgaagatggtttctctctgaaggagcagttgcaagatatggggctcgtcgatcttttctcccccgaaaagtccaagctaccaggcatcgtagcagagggcagagacgacctatatgtgagcgatgctttccacaaggccttccttgaggtaaatgaggagggtagtgaggccgctgcttccaccgctgttgtgattgctggccgtagtctgaatcccaatcgggtgacatttaaagcaaatagaccttttctggtgtttattcgagaggtcccattgaatactatcatctttatgggacgggtagccaacccttgtgtgaaa

SEQ ID NO: 9531 - DNA, 1392 bp, Artificial Sequence
  derived and/or modified sequence
atgtattcaaacgtgattggaactgtaacttctggtaagcgaaaagtctatttgcttagcctgcttttaatcgggttttgggattgtgtcacatgtcacggctccccggtggatatctgcaccgccaagccccgagatatcccaatgaatccgatgtgcatctataggagtcccgagaagaaggctaccgaagacgagggctctgagcagaagatcccagaggctacaaatcgacgggtatgggagctgagcaaggccaattcacgcttcgcaaccaccttctatcagcatctcgccgacagtaagaacgacaacgacaatatcttcctgtcacctctgtccatatctaccgccttcgctatgacgaaactgggtgcatgcaacgataccttacagcagctgatggaggttttcaaatttgacaccatcagcgagaagacgtccgatcagatccattttttttttgctaaactgaactgccgtctctaccggaaagccaacaagtctagtaaactggtttctgctaatcgtctttttggcgataaatcattgacgtttaacgagacctaccaggacatatcagaattggtctacggggctaagttgcagcctctggattttaaggagaacgcagagcagagccgcgccgctataaataagtgggtgagtaacaagacagaaggaaggatcaccgacgttataccatccgaagccataaatgagctgacagtcctcgtgctggtgaatactatctactttaagggtctgtggaaatcgaagttttctcccgagaacacaagaaaagaattattttataaagctgacggcgaatcatgcagcgcatccatgatgtaccaggaagggaagttccgctataggagggtggccgagggcacccaggtcctggaactgccgtttaaaggagatgacataaccatggtgctgatcttaccaaagcccgaaaaaagtcttgccaaggtggaaaaggagctcacgccagaagttctgcaagaatggctggacgaactggaagaaatgatgctggtggtccacatgccccggttccggatagaggatgggttttctctcaaagagcagctacaggacatgggcctcgtggatctgttttccccagaaaagtcgaaattgcccggaattgttgccgagggaagagatgacctatatgtgtctgatgctttccataaagccttcctagaggtcaacgaggaagggtccgaggcagcggcctcgactgcagtggtaattgccggcaggtcgctcaatcctaacagggtaacattcaaggccaatcgtccttttttggtgtttatccgagaagtgcccttaaatacaataattttcatgggccgggtggctaatccctgcgtgaaa

SEQ ID NO: 9532 - DNA, 1392 bp, Artificial Sequence
  derived and/or modified sequence
atgtactccaatgtcatcgggactgtgacctcaggaaagagaaaggtttaccttctgtccctgttgctcatcggattctgggactgcgtgacgtgccacggatctcctgtggacatctgtaccgccaaaccacgggatatccccatgaacccaatgtgcatttatcgctctcctgagaaaaaggcgaccgaggatgagggatcagagcagaaaatcccggaggccaccaaccggagagtatgggaactgtccaaggccaacagcagatttgctacgaccttctatcagcatctggccgactccaagaacgataacgacaatatcttcttgtcgccgctctctatctcgactgcattcgccatgaccaagctgggggcgtgcaacgacactcttcagcagcttatggaagtgttcaagttcgacactatcagcgaaaagacttcggatcagatccatttctttttcgcaaaactgaattgccggctgtacaggaaggctaacaaaagctcgaagctggtgtctgcaaaccgcctctttggagacaagtctctgactttcaacgaaacttaccaggatatttcagagctcgtgtacggagcaaaacttcaaccgctggactttaaagaaaacgctgagcagtcgcgggcggcgatcaacaagtgggtcagcaataagactgaaggacgcattaccgatgtgatcccttcggaggccatcaacgagctgaccgtcctggtgctcgtcaatacgatttacttcaaaggactttggaagtcgaagttcagccctgagaatacccgcaaagaactgttctacaaggctgacggagagagctgcagcgcatccatgatgtaccaagaagggaagtttcgctacagacgagttgctgaagggacccaggtcctggagctcccctttaagggcgacgatatcaccatggtgctgattctcccgaagccggagaaatccctcgccaaagtagagaaagagctcactcctgaggttcttcaggaatggctggacgaactggaggaaatgatgctcgtcgtccatatgccgaggttcagaatcgaagatggctttagcctcaaggagcaactgcaggacatgggcctcgtggacttgttcagccccgaaaagtccaagctgccgggaatcgtggcggagggtcgggacgatctgtacgtctcggacgccttccacaaagcattcctggaagtgaacgaggaaggatcagaagccgccgcgtccaccgccgttgtgatcgccggccggtcacttaatccgaacagagtcactttcaaggcgaatagaccgttcctggtgttcatccgcgaggtgccactcaatactatcatctttatgggacgggtggcgaacccctgcgtgaaa

SEQ ID NO: 9533 - DNA, 1392 bp, Artificial Sequence
  derived and/or modified sequence
atgtatagtaatgtgattgggacggtcacaagcggtaagaggaaagtgtatctgttgtcattgctcttaatcgggttttgggattgtgtcacatgccatgggtcacccgtggatatttgcaccgcaaagcccagggatatccccatgaacccaatgtgcatttataggtcacctgagaaaaaagctactgaggacgaaggaagcgagcagaagatccccgaggccacaaatcgacgggtgtgggaactgtcgaaggctaacagtcgctttgccacaaccttttatcaacatctggccgactcaaagaatgacaatgacaatatcttccttagccccttgagcatcagtaccgccttcgccatgacgaagctcggcgcgtgtaatgacactttgcaacagttgatggaggtgtttaagtttgatacgatctcagagaaaacgagtgaccagattcattttttctttgccaaattaaattgtcgcctctacaggaaagctaacaaatcctcaaaactcgtgagcgccaatagattgtttggtgataagagccttacatttaacgagacctaccaagacatcagtgaactcgtttacggcgccaagttgcagccattggacttcaaggagaacgccgagcagtcacgggccgcaatcaataagtgggtgagtaataaaaccgaagggcgcatcacagatgtaattcctagtgaggcaataaatgaacttaccgttctagtgctcgttaatacgatttactttaagggtctgtggaagtccaagtttagccctgagaatacacggaaggagctattctacaaagcagacggtgaatcctgcagtgcctcgatgatgtatcaggagggaaaattcagatataggagagtggccgagggcacccaggtcctcgaactaccctttaaaggtgatgatattacaatggtgcttatattgcccaaaccagaaaagtcccttgcgaaggtggagaaagagctgactccagaagtccttcaggagtggctcgacgagttagaagaaatgatgttggtggttcacatgccaagattccgcattgaagacgggttctccctgaaggagcaactgcaggatatgggattggtggacttgttctcgcccgaaaagtcaaagctacccgggatcgttgctgaaggccgtgatgatctgtatgttagtgacgccttccacaaggccttccttgaagtaaatgaggaaggctccgaggcagccgcctcaacagcggttgttatagctggacgctcgttgaaccccaaccgcgtaacttttaaagcaaataggccattcctggtctttattagggaagtaccccttaatacgataatattcatgggacgggtggccaatccttgtgtcaaa

SEQ ID NO: 9534 - DNA, 1392 bp, Artificial Sequence
  derived and/or modified sequence
atgtactcgaatgtgattggtactgtgacttctggaaaacggaaggtgtatcttttgtcactgttgctcatcgggttttgggattgtgtgacttgccacggctctcctgtcgacatctgtaccgctaagcctagggatattcccatgaatcctatgtgtatttaccgatcacccgaaaagaaggccacggaagatgagggatcagaacagaaaattccagaagcgaccaatagacgcgtttgggaactgtccaaagcaaacagccgattcgccaccactttctaccagcatcttgctgatagcaagaatgacaatgataacatattcctttcacctttgtccatctctaccgcgtttgcgatgaccaaactgggcgcatgcaacgatactcttcaacaactgatggaggtgttcaagtttgataccatttccgaaaaaacgagcgatcagatccatttcttctttgcgaaacttaattgtagactctacagaaaggcaaataagtcctcgaaactggtgtcggcaaaccgcctcttcggagacaagtcgttgaccttcaacgaaacctaccaagacatctcggagcttgtgtacggtgcaaagttgcagccgctggatttcaaggaaaacgcagagcaaagccgagcagcaattaacaaatgggtgtccaataagactgaggggcggattactgatgtcatcccttccgaggcgattaacgagctcactgtgctcgtccttgtgaatactatctactttaagggtctgtggaagtcaaagttttcgcccgaaaacacgagaaaggagttgttttacaaggccgatggagaaagctgctccgcaagcatgatgtaccaagaaggaaagttcagatacaggcgtgtggcagaaggtactcaggtcctggagttgccgtttaagggagacgacatcactatggttctgattctgccaaagccagaaaagtcgctcgcaaaggtggagaaggaactgactcccgaagttctgcaagagtggctggatgaacttgaagagatgatgctggtcgtccatatgcctaggttcagaatagaagatggattttcactcaaggaacagctgcaagatatgggactcgtcgatttgtttagccccgagaaatcaaaattgcctggtatcgtggcagaaggccgggacgacctgtatgtctccgacgcatttcacaaggcatttcttgaagtgaacgaagaagggtcagaagccgccgcctctaccgctgtggtcatagcaggacggtcgcttaatcccaaccgggtcacctttaaggcaaatcgaccattcctggtgtttatacgagaggtgcctctgaataccattatctttatgggtagagtggctaatccatgtgtgaag

SEQ ID NO: 9535 - DNA, 1392 bp, Artificial Sequence
  derived and/or modified sequence
atgtactctaatgtgatcgggactgtcacctccggcaagagaaaggtgtacctgttgtcccttctccttattggattttgggattgtgttacttgccatggatcccccgtggacatctgtactgccaagccacgcgatataccaatgaatcctatgtgtatatacagatcaccagagaaaaaggctaccgaagatgaagggtccgagcagaagataccagaagcgactaaccggcgggtctgggaactgtcaaaggcaaacagccgatttgcgactaccttctaccagcatcttgcagattccaagaatgacaatgacaacatcttcctttcccctctttcaatttcaactgccttcgcaatgaccaagttgggagcgtgtaacgacaccctccagcagttgatggaggtctttaagttcgacaccatatccgagaaaacttcagatcagatccatttcttctttgccaaattgaattgtcgtctctacagaaaagcaaacaaatcgtctaaacttgtctcggcgaataggctgtttggggacaagagccttacgtttaatgagacttaccaagatatctcggaactcgtgtacggagccaaacttcagcccctggacttcaaggaaaacgcagaacagtcgcgcgcagcaattaacaagtgggtgtccaataagaccgaaggcaggatcaccgacgtgattccttcggaggcaattaacgaacttaccgtgctggtgctggtgaatactatttactttaagggactgtggaagtcgaagtttagccccgaaaatactcgcaaagaacttttctacaaggcggacggggagtcctgctctgcctccatgatgtaccaggaaggaaagtttcgttaccgacgggtggcagagggaacccaagtgctggagctgccttttaagggggatgacattactatggtcctgattctgccaaaacctgaaaagtctcttgcaaaagtggaaaaggaattgactcccgaagtgcttcaagaatggctggatgaactggaagaaatgatgcttgtggtgcacatgccgagattcagaattgaagatggtttttcgttgaaggaacaactgcaagatatgggtcttgtggacctgttttcacctgagaagtccaaactcccaggaattgtggccgaaggacgcgacgatctctacgtctcggacgcatttcacaaggcatttttggaagttaacgaagaaggaagcgaagcagcggcaagcaccgcagtggtcatcgcagggagatcgttgaacccgaacagggtcaccttcaaggcaaatcggcccttcctggtgttcatcagagaggtgcctctgaataccatcattttcatgggtcgcgtggccaacccatgtgttaag

SEQ ID NO: 9536 - DNA, 1392 bp, Artificial Sequence
  derived and/or modified sequence
atgtactcgaatgtgatcggtactgttacctcaggaaagagaaaggtgtacctgctgtcacttctgctcatcggcttctgggactgtgtcacgtgccatggatctccagtggacatctgcactgctaagccgcgcgatatcccaatgaacccgatgtgcatctacaggtcgcccgagaagaaggctacggaagatgaaggctcagaacagaaaattccggaggctactaaccgccgggtgtgggagctgtcgaaggcaaattcacggttcgcaactactttttaccaacaccttgccgactccaagaacgacaacgacaacattttcctctcccctctgtccatcagcacggccttcgcaatgactaagttgggagcctgcaacgataccctgcaacagctgatggaagtctttaagttcgacaccatctcggaaaagaccagcgaccagatccatttcttcttcgcgaagttgaattgccggctttaccgcaaggcaaacaaatccagcaagctcgtgtccgcgaacaggttgttcggagataagtccctgactttcaatgaaacctaccaggacattagcgaacttgtctacggtgcaaagctccagccgctcgatttcaaagagaacgcagaacagtcacgggccgcaatcaataagtgggtgtccaacaagaccgagggaagaattactgacgtgatcccgtctgaggccatcaacgagctcacggtcctcgtccttgtcaacactatctatttcaagggcctgtggaaaagcaaattctcgccggaaaacaccagaaaagagctcttctataaggccgacggagagtcttgctcggcgagcatgatgtaccaggagggaaagttcaggtacaggcgcgtggcggagggaacccaggtgctggaattgcccttcaagggagacgatatcaccatggttctcatcctgccgaagcccgaaaagtcgctcgccaaagttgagaaagagctgaccccggaagtgctgcaggaatggctggatgagctggaggagatgatgctggtggtgcacatgccacggttccgcatcgaggacgggttctctctgaaggagcaactccaagatatgggactggtggatctcttcagtccagaaaaatctaagctgccggggattgtcgcagaaggacgcgacgatctgtacgtcagcgacgcttttcataaagcgttcctcgaagtcaatgaagagggatccgaggcggctgccagcaccgccgtggtgattgccggacggtcgctgaatccaaaccgggtgacgttcaaagcgaatcgcccgtttctggtgttcatcagggaggtccctctgaatacgatcatcttcatgggtcgggtcgcgaacccatgtgtgaaa

SEQ ID NO: 9537 - DNA, 1392 bp, Artificial Sequence
  derived and/or modified sequence
atgtactccaacgtgattggaaccgtgaccagcgggaaaagaaaagtctacctccttagtttgcttctcatcggattttgggattgtgtgacttgccatggcagccctgtcgatatttgtactgccaagcccagggatattcccatgaatccaatgtgtatttacagatcgcctgaaaagaaggcgaccgaagatgagggaagcgagcaaaagatcccagaagctaccaaccggagagtttgggaactctcgaaagcaaactcccgctttgcaacgaccttttaccagcatttggcggattccaaaaacgacaacgacaatatcttcctttccccactgtcaatttcaaccgcgttcgcgatgactaaacttggtgcatgcaatgacactcttcaacaattgatggaagtgttcaagtttgacaccatttccgaaaagacctccgaccaaattcacttcttttttgctaagctgaactgtagactctacagaaaagcaaacaagtcatccaaactggtgtccgcaaaccgactcttcggtgacaagagcctgacctttaacgaaacgtaccaagacatctcagagcttgtctacggcgcaaaactgcagcccttggactttaaggaaaacgctgagcaatcgcgtgcagccatcaacaagtgggtgtcgaacaagactgaaggacgcattactgacgtcattccctcggaagcaatcaacgagctgaccgtgctggtgcttgtcaacaccatttactttaaaggactctggaagtcaaagttctcacctgaaaacaccagaaaggaactgttctacaaggcagatggagaaagctgttcggcatccatgatgtaccaggaaggcaagtttcgctaccgcagagtggcagaaggtacccaagtgctggaactgcctttcaagggagatgatattactatggtgctgattcttccaaagcccgagaaatcgcttgcgaaagtcgaaaaggagctgactccagaggtgctgcaagaatggcttgatgaacttgaagaaatgatgctggtagtgcatatgccacggtttcgcatagaggatgggttctcactcaaagaacaactgcaagatatgggcctcgtggatctgttttcgccggagaagtcgaaacttccgggaattgtggccgaaggaagggacgacctttacgttagcgatgcgtttcataaggctttccttgaagtgaacgaggaagggtccgaggcagcagcgtcgaccgcagtcgtgatcgcagggcggagcttgaatccaaaccgggtgaccttcaaagcaaacagaccttttttggtgtttatccgcgaagtgcctctgaacactatcatctttatgggcagagtcgcgaacccatgcgtgaag

SEQ ID NO: 9538 - DNA, 1392 bp, Artificial Sequence
  derived and/or modified sequence
atgtactccaatgttatcggaactgtgacgagcggaaagcggaaagtgtaccttttgtcgctgctgctgatcggtttttgggactgcgttacctgccacggatcgcccgtggacatctgcaccgcgaagccccgcgacatccccatgaacccaatgtgtatctaccggagccccgagaaaaaggccactgaggatgaaggatctgaacagaagattccggaagctactaatagacgggtctgggagctctcgaaggcaaactcaaggttcgctaccactttttaccaacatctggccgattccaagaatgataacgacaacatatttctgtcgcctctgagcatcagcaccgcatttgccatgaccaaacttggagcgtgcaacgacacccttcagcaattgatggaagtgttcaaatttgacactatctcggagaaaacctctgaccaaatccacttctttttcgcaaaactgaactgtcgcctctaccgcaaagcgaacaagagctcgaagctcgtgagcgccaaccgcctgttcggcgataagtccctcaccttcaacgagacttatcaggacatctccgagctcgtctacggcgctaaacttcagccgctggatttcaaggaaaatgccgaacaatcacgcgcggccataaacaagtgggtgtctaacaagaccgagggacggattactgacgtcatccctagcgaagctattaacgagctgactgtgttggtgctggtcaataccatttacttcaagggtctgtggaagtcaaagttttccccggagaataccaggaaagaactcttttacaaggccgatggcgaatcctgctccgcatccatgatgtaccaggaaggcaagttccggtataggagggtcgctgaaggaacgcaggtgctggaactgccgtttaagggcgatgacatcacgatggtgctcatcctgccaaagccagagaaatccctggccaaggtcgagaaggagctgaccccggaagtgctccaagaatggctggacgaattggaagaaatgatgttggtcgtgcatatgccacggttccgcatcgaagatggattctcacttaaggagcagctgcaggacatgggactggtcgatctgttctcaccggagaagtcaaaactgccgggaatcgtggccgagggtagagacgatttgtacgtgtcggacgcattccacaaggccttcctcgaagtgaacgaagagggatcggaggccgccgcgagcactgcggtggtcatcgctgggcgatcgctcaatccgaaccgcgtgaccttcaaggcaaaccggcctttcctggtgttcatccgggaagtgcctctcaatacgatcatattcatgggacgagtggcaaatccctgcgttaag

SEQ ID NO: 9539 - DNA, 1392 bp, Artificial Sequence
  derived and/or modified sequence
atgtattccaacgtcattggaacagtcacgtcaggtaagagaaaggtctacctcctgtctcttctgttgatcggcttctgggactgcgtgacctgccacggttccccagttgacatctgtacagcaaagcctcgcgatatccccatgaatcccatgtgcatatacaggagccccgagaaaaaagccaccgaagatgagggatctgaacagaagattccggaggccactaatcgacgtgtctgggagttgtccaaggctaacagtagatttgctaccaccttttaccagcatttggctgattccaaaaatgataatgataatatcttcttgtcccctctgtccatcagcaccgccttcgcgatgacaaaactgggggcatgtaacgataccctccaacaactgatggaggtcttcaaattcgataccatcagtgagaaaacttccgaccagattcactttttctttgccaagctgaattgccggctctatcgtaaggccaacaagtccagtaagctcgtcagcgctaataggctatttggcgacaagtctctcacattcaatgaaacctatcaggatatttcggagctcgtatatggagccaaactacaacctttagatttcaaggaaaacgccgagcagtctcgagccgcgataaataaatgggtgtccaataagacggagggccgaatcactgatgttataccctccgaggccattaatgaattgacagtcctggtactggtcaatactatctacttcaagggactctggaagtcaaaattttctcccgaaaatacaaggaaagaacttttctataaggcggatggggaaagctgctcggcttctatgatgtaccaggaagggaaattccgttaccgacgtgtggcggagggaacccaagtattggagctccccttcaaaggcgacgatataactatggtgctgattctgccgaagccagaaaaaagtctagcgaaggtggagaaggagctgacacccgaggtgttacaggagtggttggatgagctcgaagagatgatgctggtagtgcacatgccgaggtttcgaatagaagacggctttagcctgaaggaacagcttcaggatatggggttggtcgatctctttagtcctgagaagtcgaagctgccgggcatagtcgccgagggcagagacgacttgtacgtttcggatgctttccataaagccttcctggaagttaacgaagaaggctcagaagctgccgcgtctaccgccgtggtcattgcagggaggagcttgaaccccaaccgagtcacttttaaagctaaccggcccttccttgtttttatcagagaagtgcccctgaacacgataatttttatgggtagggtcgccaatccatgtgtcaaa

SEQ ID NO: 9540 - DNA, 1392 bp, Artificial Sequence
  derived and/or modified sequence
atgtacagcaacgtgatcggcactgtgacgtctgggaaacgcaaagtgtacctcttgtcgctgctgctgattggtttctgggactgcgtgacgtgccatggctcgccggtcgacatctgcactgcaaagccacgagacatcccgatgaacccgatgtgcatttaccgctcacccgagaagaaggctaccgaagatgaaggatcggagcagaaaatccccgaagcgactaatcggcgcgtgtgggagctctcgaaggcgaattcacggttcgcgaccactttctaccagcatcttgccgatagcaaaaatgataacgacaacatctttctctctccgctgtccatctcgaccgcctttgccatgaccaagttgggcgcgtgtaatgacaccctgcagcagcttatggaagtctttaagttcgacactattagcgaaaaaacctctgaccagatccacttcttctttgcgaagttgaactgccgcctgtacaggaaagccaacaagtcctcgaaactcgtgtcagcaaaccggctgttcggagacaaatccttgaccttcaatgagacgtaccaggatatctcggaactggtgtacggagcaaaattgcaaccactggactttaaggagaatgcagaacagtcccgcgcagccatcaataagtgggtgtcgaacaagacggaaggccggataactgatgtgatcccgtcggaagccataaatgagctcaccgtgctggtactggttaatacgatctactttaaggggctctggaagagcaagttcagcccagaaaacactcgcaaagagctgttttacaaggctgatggagaatcctgcagtgccagcatgatgtatcaagaaggaaagttcagatacagacgggtggcggaaggtactcaggtccttgaacttccattcaagggcgatgatatcaccatggtcctgatcctgccgaagcctgagaaatccctggcgaaggtggaaaaagagctgacccctgaggtcctgcaagaatggctggacgaactggaggaaatgatgctcgtggtgcacatgcctcgctttagaattgaggacggattctccctcaaggagcaactccaagatatgggattggtggacttgttctcaccggagaagtccaagctgccgggaatcgtggctgaaggtagagacgacttgtacgtcagcgatgctttccacaaggcattccttgaggtaaacgaggaggggtcagaggctgccgcttcaactgctgtcgtaattgcaggaaggagcctcaacccgaatagggttaccttcaaggccaacaggcctttcctcgtgttcatccgcgaagtccctctgaacactatcatcttcatgggacgtgtcgccaacccttgtgtgaag

SEQ ID NO: 9541 - DNA, 1392 bp, Artificial Sequence
  derived and/or modified sequence
atgtattcgaatgtaataggtacggtaacgtcgggtaaacgaaaagtatatttactatcgctactactaataggtttttgggattgtgttacgtgtcatggttcgccggtagatatatgtacggcgaaaccgcgagatataccgatgaatccgatgtgtatatatcgatcgccggaaaaaaaagcgacggaagatgaaggttcggaacaaaaaataccggaagcgacgaatcgtcgtgtttgggaattatcgaaagcgaattcgcgttttgcgacgacgttttatcaacatctagcggattcgaaaaatgataatgataatatatttctatcgccgctatcgatatcgacggcgtttgcgatgacgaaattaggtgcgtgtaatgatacgttacaacaactaatggaagtttttaaatttgatacgatatcggaaaaaacgtcggatcaaatacattttttttttgcgaaattaaattgtcgactatatcgtaaagcgaataaatcgtcgaaactagtttcggcgaatcgactatttggtgataaatcgttaacgtttaatgaaacgtatcaagatatatcggaattagtatatggtgcgaaattacaaccgttagattttaaagaaaatgcggaacaatcgcgagcggcgataaataaatgggtatcgaataaaacggaaggtcgtataacggatgtaataccgtcggaagcgataaatgaactaacggttttagtactagttaatacgatatattttaaaggtttatggaaatcgaaattttcgccggaaaatacgcgtaaagaattattttataaagcggatggtgaatcgtgttcggcgtcgatgatgtatcaagaaggtaaatttcgttatcgacgagttgcggaaggtacgcaagtattagaattaccgtttaaaggtgatgatataacgatggtattaatattaccgaaaccggaaaaatcgttagcgaaagtagaaaaagaattaacgccggaagtattacaagaatggctagatgaattagaagaaatgatgttagtagtacatatgccgcgatttcgaatagaagatggtttttcgctaaaagaacaactacaagatatgggtttagtagatctattttcgccggaaaaatcgaaactaccgggtatagtagcggaaggtcgtgatgatttatatgtatcggatgcgtttcataaagcgtttctagaagtaaatgaagaaggttcggaagcggcggcgtcgacggcggtagtaatagcgggtcgatcgctaaatccgaatcgagtaacgtttaaagcgaatcgtccgtttttagtttttatacgagaagtaccgctaaatacgataatatttatgggtcgtgtagcgaatccgtgtgttaaa

SEQ ID NO: 9542 - DNA, 1392 bp, Artificial Sequence
  derived and/or modified sequence
atgtactcgaacgtgattggaaccgtgacctctggtaagcgcaaggtctacctcctgtcgctgcttttgatcggattttgggactgcgtgacctgccatggttcccccgtggatatttgtacggcaaagcctcgagatatcccgatgaatcctatgtgcatttacagatcacctgaaaagaaggccactgaagatgagggatcggagcaaaagatcccagaggccactaatcggagagtctgggaactgtcgaaggcgaacagccgctttgccactacgttctaccaacatttggcggactcaaagaatgacaacgataacatttttctctccccgctgtccatttccactgcatttgccatgaccaagctcggcgcttgtaacgatacccttcagcagctgatggaagtgttcaaatttgatacgatctctgagaaaacgtccgatcagattcacttctttttcgcaaagttgaactgccggctgtaccggaaggcaaacaagagctcaaaacttgtctcagcaaatcgactttttggagataagtcgctgacgtttaatgaaacctaccaggatatatcggaactggtgtacggagcaaaattgcaacctctggatttcaaagagaatgcagagcaatccagggctgcaattaacaagtgggtgtcgaacaagactgaaggtcgcatcaccgatgtcatcccatcggaggcgatcaacgagctgaccgtgctggtgcttgttaatactatttactttaaaggcctgtggaaatcgaaattcagcccggagaacactaggaaggaacttttctacaaggcggatggggaaagctgctcggcatccatgatgtatcaggagggcaagtttcgatacaggagagttgccgagggaactcaggtccttgaactgcctttcaagggagacgatattaccatggtgcttatactgccaaagcccgaaaagtcgctggccaaggtcgaaaaagaactgaccccagaagtgctccaagaatggcttgacgaacttgaagaaatgatgcttgtggtgcacatgcctaggttcaggattgaggatggcttttctcttaaagaacagcttcaagatatgggactcgtggacctcttctcacccgagaagtcaaagctgccagggattgtggcggaaggaagagacgatctttacgtctcggatgcatttcataaggcatttctggaggtaaatgaagaaggatcggaggcagccgcgtcaaccgcagtggtgattgcaggcaggagtcttaaccctaatagggtgacctttaaggcaaaccggcctttcctggtgttcattagagaagtccccctcaacaccatcattttcatgggcagggtcgctaacccgtgtgtgaaa

SEQ ID NO: 9543 - DNA, 1392 bp, Artificial Sequence
  derived and/or modified sequence
atgtacagcaacgtgatcggaaccgtcactagcggcaagagaaaggtgtacctgctctcactgctcctcatcggtttctgggattgtgtgacctgccacggaagcccggtcgatatctgcactgctaagccccgcgatatccctatgaaccccatgtgcatctaccggtcaccggaaaagaaagcgaccgaggacgagggctcggagcagaagatccccgaggctactaaccgaagagtgtgggaactctccaaggctaactccaggttcgcgacgaccttctaccagcatctggccgattccaaaaatgacaacgacaacattttcctttccccgttgagcatctctaccgccttcgcaatgacgaagctcggagcctgcaatgacaccctgcaacagctcatggaagtgtttaaatttgacactatttcggaaaaaacctcggaccaaattcacttcttcttcgcaaagctgaattgccggctgtaccgcaaagccaataagtcatcaaagctggtgtccgctaaccggctcttcggagataagagtctgacctttaatgaaacctaccaagacattagcgagctggtgtacggagccaaacttcaaccactcgacttcaaagagaacgcggaacagtcgcgcgcagctatcaataagtgggtgtcgaataagactgaagggcgcatcactgacgtgatcccttccgaggcaatcaacgagctgaccgtgctggttctggtgaatactatctacttcaaaggactgtggaagtccaaattctcaccagagaacactagaaaggaactgttttacaaggccgatggagaatcgtgcagcgcgagcatgatgtaccaggagggtaagttccggtacaggcgcgtggccgaggggacccaagtactggaattgccattcaagggtgacgatatcactatggtccttatcctgccgaagccggagaagtcccttgccaaggtggaaaaagaactgaccccggaggtgctccaggaatggctcgacgaacttgaagagatgatgctggtggtccacatgcctaggtttcgcattgaggacgggtttagcctgaaggagcagttgcaggatatgggactggtcgatctgttctcgccagaaaagtcgaaactcccgggaatcgtcgctgaaggacgggatgacttgtatgtctcggacgcatttcataaggccttcctggaggtcaacgaagaaggctcagaagcggcggcgtcgacggccgtggtgatcgccggccgctccttgaacccgaaccgggttactttcaaggcaaaccgtcctttcctggtgttcatcagagaagtgccgctcaacaccatcatctttatgggccgggtggccaatccatgtgtcaaa

SEQ ID NO: 9544 - DNA, 1392 bp, Artificial Sequence
  derived and/or modified sequence
atgtactccaatgtgatcggcacggtcactagtggaaagagaaaagtgtaccttttgtcactgctcttaattgggttctgggactgtgtgacctgccatggatccccggtggacatttgcaccgcaaagccccgagatataccgatgaaccctatgtgcatttatcgcagtcccgagaagaaggcaactgaggacgaagggtcagaacagaaaattcctgaagccacaaatagacgagtttgggagctgtcaaaggccaactcaaggttcgcaacaacattctaccagcatttggccgattcgaagaacgataatgataatatattcttgtctcccctgagcatttcgacggcttttgcaatgaccaagttaggagcttgcaatgataccttgcagcaactaatggaggttttcaaattcgataccatcagtgagaaaaccagcgatcagattcacttctttttcgcaaagctgaactgtagattataccggaaagcaaacaaatcttccaagttagtgagcgcaaaccgcctgtttggagataagtcactgacatttaacgagacatatcaagacatatctgagcttgtgtacggagctaagttacagcctctcgattttaaggagaatgctgagcagtcccgggcggctatcaacaagtgggtcagcaataaaacagaaggccgtattaccgacgtgatcccctctgaggctataaacgaattgaccgtgctggtgcttgtgaacacaatttatttcaagggactgtggaagagtaagttttcacccgagaacacaaggaaagagctcttttataaggcggatggcgagtcttgttccgcatcaatgatgtaccaggaagggaagtttaggtacagacgggtggccgaaggcactcaggtgctggagcttccttttaaaggtgacgacatcacaatggtgctgattctccctaagccagagaagtcactcgccaaagtggagaaggagcttactcctgaggtgctgcaggagtggttggacgagctggaggagatgatgcttgtggtccacatgccaagatttagaatcgaagacggattttccctgaaggaacagctgcaggacatggggctcgtggatcttttctctcccgagaagtcaaaactccctggcatcgtggctgagggaagggatgacctatatgtgtcagacgcctttcataaggctttcctggaagtgaacgaagaaggtagcgaagcagccgcttctactgccgttgtgattgccggccggtctctaaaccctaatagagtgacatttaaggccaaccggccatttctagtgtttatcagggaggtacccctgaacacaattatctttatgggccgggtggcaaatccctgtgtcaag

SEQ ID NO: 9545 - DNA, 1392 bp, Artificial Sequence
  derived and/or modified sequence
atgtattcaaacgtgataggaactgtcacttccggaaagcgaaaggtctaccttctctcgctgctgctgatcggcttctgggactgtgtgacatgccacggatctccagtagatatttgcactgccaagcctagggatatcccaatgaaccctatgtgtatctacagaagtccagaaaaaaaggctactgaggatgaggggagtgaacagaagataccagaggccactaaccgccgagtgtgggagctgtccaaggccaactcaaggtttgcgaccaccttctaccagcatctagccgattctaagaacgataatgacaatatctttttgagtcccctgtctatcagcaccgcttttgcaatgaccaaactgggcgcctgtaatgacacgctgcaacagcttatggaggtattcaaatttgacaccatctccgagaaaacctctgaccagatacatttcttctttgcaaagcttaattgtcgcttatataggaaggccaataaatcctcgaagttagtgtccgccaacagactgttcggagacaaatccctgaccttcaatgaaacgtaccaggatataagtgaactcgtgtatggcgcaaaattgcagcctctggatttcaaagagaatgcggaacagtctcgtgccgctatcaacaagtgggtgtctaacaaaaccgagggaagaattacagatgttataccgtccgaggcaattaacgagttgactgtgctcgtcctagtcaatactatttattttaaggggctctggaagagcaaattcagccctgagaatacccggaaggagctgttctataaagccgacggcgaatcctgctcagcctctatgatgtatcaggaggggaagttcaggtaccgaagggtggccgaaggaacccaggtcctggaacttccattcaagggagacgatattactatggtactgatcctgcctaagcccgagaaaagcctggcaaaggttgaaaaagaacttaccccggaggtcctccaagagtggctggacgagctggaagaaatgatgctagtggtccatatgccaagattcaggatcgaggatggcttctccctgaaggaacagctgcaggatatgggcctagtggacctgttcagtcctgaaaagtctaagctacctggaatcgtcgcagaaggccgcgatgatctctacgtcagtgatgcctttcacaaggcctttcttgaagtcaatgaggaaggctcagaagcggcggcgagtactgccgtcgtcatcgccggccgcagcctgaacccaaatcgggtgacttttaaggccaatagaccgttcttagtattcataagagaggttcccctgaacactatcatattcatgggcagggtcgccaacccctgcgtaaag

SEQ ID NO: 9546 - DNA, 1392 bp, Artificial Sequence
  derived and/or modified sequence
atgtattccaatgtcattggaacagtgaccagcggtaagcgcaaggtctatctgctgagcctgttattaattggattctgggactgcgttacctgccacggatctcccgtcgacatctgtaccgctaagcccagagatatccctatgaatcccatgtgcatctacaggagcccagagaaaaaggccactgaagatgagggctccgaacaaaagattccagaagccaccaatcggcgagtttgggaactgtctaaggctaacagtcgatttgccaccacgttttaccagcacttggccgactccaaaaatgataatgacaacattttcctgagccccctgagtatttcaacagccttcgccatgaccaagttgggtgcatgcaacgatactctgcagcagctaatggaggtcttcaaatttgacaccatcagtgaaaagaccagcgaccagattcacttcttttttgcaaaactgaactgcagattgtatcgcaaagccaacaaatcttcaaagctggtttcagctaatagattgtttggcgacaaatcactaaccttcaatgagacataccaggatatttctgagctggtgtatggtgccaagctgcagcctctcgattttaaagagaatgccgagcagtctcgagccgcgatcaataagtgggtctctaataagacagagggccgcattacagatgtaattccttccgaagcaataaacgagctgaccgtgcttgtacttgtaaacacgatctactttaaagggctttggaaaagcaagttttcacctgaaaatacgaggaaagaacttttctataaagctgacggggaatcctgctctgcctccatgatgtaccaagagggaaagttcaggtaccgtagggtcgccgagggcacacaggttttagaactgcccttcaaaggcgacgacattaccatggtgctgattttacctaaacctgaaaagtcattagccaaggttgaaaaggagctgaccccagaggtgctgcaggaatggcttgatgaactggaggagatgatgcttgtagtgcatatgcctcgatttcggattgaagacggcttttcactgaaggaacaactgcaagatatgggcctggtagatctcttctcccccgagaagtcaaaactaccagggattgttgcagagggaagggacgatttgtacgtgtctgatgctttccacaaggcttttctagaggtgaacgaggaggggagcgaagcagctgccagcactgctgtggtaatcgccggccggagcttgaaccctaacagggtgacattcaaagccaacaggccttttctcgtgtttatccgagaggtaccgctgaataccataatctttatggggagagtcgcaaacccatgcgttaag

SEQ ID NO: 9547 - DNA, 1392 bp, Artificial Sequence
  derived and/or modified sequence
atgtactcgaatgtgatcggcactgtgaccagtggtaagcggaaggtgtacctcctgagcctgctgctgatcggtttttgggactgcgtcacttgtcacggatcaccagtggacatatgcactgccaagccaagagatattccgatgaatcccatgtgcatctacagatcgcctgaaaagaaagcaaccgaggacgagggaagcgagcaaaagatcccggaggcgaccaacagacgggtgtgggagctctcgaaggcgaactcgcgatttgcgaccactttctatcaacatctggccgacagcaagaacgataacgacaacatattcctgtcgccgttgtcaatctccacggctttcgcgatgaccaaacttggtgcctgcaacgataccctgcagcagctcatggaggtgttcaaattcgacaccatctctgagaaaacttccgaccagatccatttcttctttgcgaaacttaactgccggctgtaccggaaggcgaacaagtcgtcgaagctggtgagcgccaacagactgttcggcgataagtcgctgactttcaatgaaacctatcaggatatctccgaactggtctacggagcaaagctccagcccctggatttcaaggagaatgccgaacaatcccgggcagcaatcaacaaatgggtgtcaaataagaccgaaggccgcattactgatgtaatcccatccgaggccattaacgaactgactgttctggtcctcgtgaatactatttacttcaagggtttgtggaaatcaaagttttccccggagaacaccagaaaagagctgttctacaaggcggacggggaaagctgtagcgcaagcatgatgtatcaagaaggaaagttccggtatcgccgggtggcggagggcacccaggtgctggaactgcctttcaaaggagatgacatcactatggtcctgatcttgccgaagccggaaaagtcgctggcgaaggtcgaaaaagagttgaccccggaagtcctgcaagaatggttggatgaactcgaggaaatgatgctcgtggttcatatgcctcggttccgcatcgaggacggattctccctgaaggaacagctgcaggacatgggcctggtcgacctcttctcgccagaaaagtcgaagttgccgggaatcgtggcagaaggtcgggacgacctctacgtgtcagatgcgtttcataaggctttcctcgaggttaacgaagaaggcagcgaggcagcggcttccactgccgtggtcatcgccggccgctcgctgaaccctaacagggtgaccttcaaagctaaccgcccattcctggtctttatcagggaagtcccactgaacaccatcatcttcatgggaagagtggctaacccttgtgtgaag

SEQ ID NO: 9548 - DNA, 1392 bp, Artificial Sequence
  derived and/or modified sequence
atgtattccaacgtgatcggaactgtgacctcgggtaaaaggaaggtctatctcctcagccttctcctgatcggattctgggactgcgtcacgtgccatggatctcctgtggatatttgcaccgctaagccgcgcgatatccccatgaatccgatgtgtatctaccgatcgccggaaaagaaagccaccgaggacgagggatcggaacagaagatcccagaagccactaaccgtcgggtctgggaactgtcaaaggcgaacagccgattcgccacgactttctaccagcacttggccgattcgaaaaacgataacgacaatatcttcctgtcgccgctctcgatctccaccgcgttcgccatgactaaactgggggcctgcaacgacaccctgcaacagctgatggaggtgttcaagttcgacaccatttctgaaaagacctcagatcaaattcacttctttttcgctaagctcaactgtcgcctttacaggaaagcgaataagtcgtcaaaattggtttcagccaatagattgttcggcgacaaatcccttactttcaacgagacttaccaagacatttctgaactggtgtacggtgcaaagctgcagccgctggactttaaagagaacgcagaacagtctcgcgcggctatcaacaagtgggtgtcaaacaagaccgaggggagaatcaccgacgtgataccatccgaagcaatcaacgagctgaccgtccttgtcctggtgaataccatctactttaagggcttgtggaagtcgaagttcagccctgagaacacccggaaagagctcttctacaaggccgacggagaatcctgctcggcaagtatgatgtaccaggaaggcaagtttcggtaccggagagtcgcggagggcactcaggtgctcgaactccctttcaagggggacgatatcactatggtgctcatcctgcctaaaccggaaaagtcgctggcgaaggtggagaaggaactgaccccagaagtgctccaagaatggttggacgaactcgaagagatgatgctcgtcgtccatatgccgcgctttcgcatagaggatggtttcagtctgaaagaacaactccaggacatgggactggtcgatctcttcagtcccgaaaagtcgaaattgcctggaattgtcgctgaagggagagatgatctgtacgtgtcggacgcctttcacaaggcattcctggaggtaaatgaggagggttcagaggcggccgcatcaaccgccgtagtgatcgcgggacgcagcctgaacccgaatagagtgactttcaaggccaaccgcccgtttctcgtgtttatcagggaagtgccgctgaacactatcatcttcatgggaagggtggccaatccatgcgtgaaa

SEQ ID NO: 9549 - DNA, 1392 bp, Artificial Sequence
  derived and/or modified sequence
atgtactctaatgtcattggcaccgttacatccggaaagagaaaggtatatctcttgtcattgttattaatcggattctgggactgcgtgacttgccatggcagtccagtggatatctgcactgccaaacccagggatatccccatgaaccccatgtgcatataccggagccctgagaaaaaagcgacagaagatgaaggcagcgagcaaaagatccccgaggccaccaataggcgtgtgtgggagttgtcaaaggccaatagccggttcgctacaactttttaccagcatctggctgatagcaagaacgataatgacaacatcttccttagcccactgagcatcagcaccgcatttgctatgactaagctcggagcatgcaatgataccctgcaacagcttatggaggtgttcaaattcgataccatttcagaaaagacttcagaccagatccacttttttttcgccaaattgaattgtaggctctaccgcaaagccaacaagtcaagcaaactggttagtgccaaccgtctgttcggtgacaaaagcttgaccttcaatgagacctaccaggacatcagcgagttagtgtacggcgctaagcttcagccactcgatttcaaggagaacgcggagcagtcgcgcgccgctattaacaagtgggttagtaataaaaccgaaggtcgcatcacagatgtcatcccttccgaggcaatcaacgaactgacagtcctggtactcgtcaacacaatctatttcaagggcctttggaagtcaaagtttagcccagagaatacaagaaaggagctcttttataaagccgacggcgaaagctgctctgcatccatgatgtaccaggaagggaagttccgatatcggagggtggccgagggaacccaggtacttgaactcccgttcaaaggagatgatatcacaatggtgttgattcttcccaagccagagaagtctttagctaaagtggagaaggaactcacaccagaggtgctccaggaatggctggacgagttggaagaaatgatgctcgtagtacacatgccacgcttcaggattgaggatggttttagcttaaaagagcagctgcaagatatgggacttgtcgatctcttcagcccagagaaaagcaagctcccaggcattgtggcagaaggccgcgacgatctctacgtgtcagacgctttccacaaggccttcctggaagtcaatgaggagggaagcgaggcagccgccagtactgccgtggtcatcgccggcaggagcctcaaccctaaccgggtcacattcaaggcaaatcgtcctttcctggtattcatccgggaggtaccgctgaacactatcatttttatgggcagagtggcgaatccatgcgtgaag

SEQ ID NO: 9550 - DNA, 1392 bp, Artificial Sequence
  derived and/or modified sequence
atgtactcgaatgtgatcggaactgtcacttccggtaagcgtaaggtgtatctgctcagtctccttctcattggtttttgggattgtgtgacttgtcatggcagcccagtggatatttgcactgcgaagccgagagacatccctatgaacccaatgtgtatctaccggtcacctgaaaagaaagctaccgaagatgaaggatctgaacaaaagattcctgaagcaacgaaccgacgagtgtgggagctgagcaaggcaaactccagattcgcaaccactttttaccaacatcttgcagactcgaagaatgataacgataacatatttctgtcgcccctttcgatcagcactgctttcgcaatgactaagttgggtgcatgcaatgataccttgcagcaacttatggaagtgtttaagtttgacactatatcggagaaaacttcggaccagattcatttcttctttgcaaaactgaattgcagactgtaccgaaaggcaaataagtcctcgaaactggtttcggcaaacagattgtttggtgataaatccctgacctttaacgaaacctaccaggatatatccgaattggtgtacggagcgaagctgcagcctctggacttcaaagaaaatgcagagcagtcgcgcgcagctattaacaagtgggtgtccaataagaccgaaggacggattaccgatgtgatcccgtctgaggcaatcaacgaactgaccgtccttgttctcgtgaacaccatctactttaagggcctttggaaaagcaagtttagccctgaaaacacgaggaaagagcttttctacaaggccgatggagaatcatgttcagcatcgatgatgtaccaagaaggcaaatttcgatatcgacgagtggctgagggaacgcaagtgcttgaactcccatttaagggagacgatatcaccatggtcctcatcctgcctaaacctgaaaaatcgctcgcaaaggtggaaaaggagcttactccagaagtgcttcaagagtggctggatgagctggaggagatgatgcttgtggtgcacatgccacgatttcgtattgaggacggtttttccctgaaggaacagctccaggatatggggctcgtggatctcttctcacccgaaaagtccaaactgccaggaatcgtcgcagaagggagggatgacctgtacgtttccgatgccttccacaaggcatttcttgaagtgaatgaagagggttcggaagcggcagcaagcacggcagtcgtgatcgcaggacgtagcttgaacccgaacagagtaaccttcaaagcaaaccgcccctttcttgtctttatccgggaagtcccactcaacactatcattttcatgggtcgagtggccaacccctgcgtgaaa

SEQ ID NO: 9551 - DNA, 1392 bp, Artificial Sequence
  derived and/or modified sequence
atgtacagtaatgtgatcggaacagtcacatctgggaagcgaaaggtatacctgttgagcttattattgatcggtttttgggactgcgtcacttgccatgggtctccggtcgatatttgcacagccaagccgagggatatacctatgaacccaatgtgcatttatcgctccccagaaaagaaagccactgaggatgaaggatcagagcagaagatccctgaagccaccaatcgacgggtctgggaactgtctaaagcaaactccagattcgctactactttttaccagcacctcgcggattccaagaacgataacgataatatcttcctctcgccactcagtatcagtacagcctttgccatgacaaagctgggggcctgcaatgacacgttgcagcaactcatggaggtcttcaaattcgatacaatcagcgagaagacctcggatcaaattcacttttttttcgccaagctgaactgcagattgtaccggaaggcgaacaaatcctcgaagcttgttagtgctaatcgactctttggcgataaatcccttacgttcaatgaaacgtaccaggacataagcgagctggtgtacggtgctaagctgcaacctctcgactttaaagagaacgcagagcaatctagagcagccatcaacaagtgggtttcgaacaagacagagggtcgaattacagatgtcattcccagcgaagcaattaatgaactcaccgtgcttgtgttggttaataccatctattttaagggtttatggaaatccaagttcagcccagagaacaccagaaaagaattattctataaagccgatggagagagttgctccgcatctatgatgtaccaagaaggtaagttcagatatcgcagggttgccgaaggcacacaggtccttgagttaccttttaaaggtgatgacatcacgatggttcttatcctcccaaagccggagaagtccctcgcaaaggttgagaaggagctaacgccggaagtgctacaagagtggctagacgagttagaggaaatgatgcttgtggttcatatgcctaggttcaggattgaagacggtttttcgcttaaggagcagctccaggacatgggccttgtggatcttttctctcctgaaaagtcaaaattgccaggtatcgtcgcggaagggcgcgacgacctttacgtctccgatgcattccataaggctttccttgaagtaaatgaggaaggaagtgaggccgctgcttccaccgccgtggttatagccggtcgtagtctgaatcccaaccgagtcacattcaaggcgaatcgacctttcttggtcttcattcgggaagtcccactgaataccattatcttcatgggacgtgtggcaaatccatgtgtgaag

SEQ ID NO: 9552 - DNA, 1392 bp, Artificial Sequence
  derived and/or modified sequence
atgtactccaacgtgatcgggacggtgacctccggaaagcgaaaggtgtacctgttgtcgctgcttctgattggattctgggactgcgtcacctgtcacggaagcccggtggacatctgcactgcaaagccccgcgacataccgatgaatcccatgtgcatctaccgctctccagagaagaaagctaccgaggatgagggatcggaacagaagatcccggaggcgactaaccgacgggtctgggaactttcaaaggcaaactccagatttgccactactttctaccaacatctggcggattcaaagaatgacaacgataacattttcctgagcccgctgagcatctccaccgctttcgctatgaccaagctgggtgcttgcaacgatactctgcaacagttgatggaagtgttcaagtttgataccatctccgaaaagacctcggaccagatccacttcttcttcgccaagctgaactgccgcttgtaccggaaagcaaacaaatcatccaaactcgtgtccgccaatcggctgttcggggataagtctctcacgtttaacgagacttatcaggacatctcggaactcgtgtacggcgccaagttgcagccactggacttcaaggaaaacgcggaacagtcgcgggcggccatcaacaagtgggtttccaacaaaactgagggtcgaatcactgatgtcatcccgtcggaagccattaatgaactgaccgtgctcgtgctggtcaataccatctacttcaagggcctgtggaagagcaaattctcaccagagaatactcgcaaagagctgttctacaaggccgacggagagtcatgctcggcgtcgatgatgtaccaggagggaaagtttcggtatcgccgcgtcgcggagggcactcaggtgctcgaacttcccttcaaaggcgatgacatcactatggtgctcatccttcctaaaccggagaagtctttggcgaaagtcgagaaggaattgacccccgaggtccttcaggaatggctggatgagctcgaagaaatgatgctcgtggtccacatgccacgcttccggattgaggacgggttttccctcaaggaacagctccaagacatgggtcttgtggatctgttttcgccggaaaagagcaagctgccgggaatcgttgcagaaggacgcgacgacctgtacgtgtcggacgcatttcataaggccttcctggaagtcaacgaagaaggcagcgaagcggcggcatcgactgccgtggtcattgcgggacgctcgctgaacccgaatcgcgtgaccttcaaggccaacagaccttttcttgtgttcatccgggaagtgcctctgaacaccatcatctttatggggagagtcgccaacccatgcgtgaag

SEQ ID NO: 9553 - DNA, 1392 bp, Artificial Sequence
  derived and/or modified sequence
atgtactctaatgtaatcggcaccgtgacctccggaaaacgcaaggtttatctgctcagcttactgctgattggtttttgggactgcgttacgtgtcacgggtcccccgtggatatctgcactgcaaagcctcgagacatccccatgaaccccatgtgcatatatcgaagtcctgaaaaaaaggcaaccgaggacgaggggagcgagcaaaagatcccggaggcaacaaaccgtagagtgtgggaactttctaaggcgaatagtcgatttgccacaacattctaccagcacctggctgacagtaagaatgataacgacaacatattcctgtcaccgctcagcatctccacagcatttgccatgacaaagctaggagcttgcaacgataccttgcagcaactaatggaggttttcaagttcgacaccataagtgaaaaaacgtccgatcaaatacactttttctttgccaagctgaattgccggctttacaggaaagctaacaaaagctcaaagctcgtctccgctaaccggttgttcggcgacaagagtttaaccttcaacgagacctaccaggacatttcggaattggtgtacggggccaagttgcaacctctcgatttcaaggagaatgccgaacagagtcgggccgccatcaacaagtgggtatcgaataagacggaaggtcgaatcaccgatgttattccctcagaggccattaacgagctcaccgtgctagtattggtgaacactatctacttcaaaggcctttggaagagcaaattctcaccggaaaacacgagaaaggagctcttctacaaggccgatggagagtcttgctctgcttcgatgatgtatcaggagggcaaattccgctatcgtagggttgccgagggaacccaagtcctggaacttccttttaagggcgacgacatcacgatggtcttaatcctgcctaagcctgaaaagtcactggctaaagtggaaaaggaacttactcctgaggttctccaggagtggctggacgaacttgaagaaatgatgctcgtcgtgcatatgcctagatttcggattgaagacggtttctcactgaaagaacaactgcaggacatggggcttgtggacttgttctcccccgagaagtcgaagctgcccggcatagtcgctgaggggcgcgacgacctctatgtcagtgatgcctttcacaaagcctttctggaagttaacgaggaggggagcgaggccgccgcctcaactgcagtcgtgatcgcaggcaggtccttaaacccaaaccgggttacgtttaaagccaacagaccttttctggtcttcattcgggaggtacccctgaacactataatttttatgggaagggtcgctaacccctgtgtgaaa

SEQ ID NO: 9554 - DNA, 1392 bp, Artificial Sequence
  derived and/or modified sequence
atgtactcgaacgtgataggaaccgtcacgtctggaaagcggaaagtctacctgctgtcactgctgcttatagggttttgggattgtgtcacctgccatggctcacctgtggatatttgtaccgccaagccacgagatattcccatgaatcctatgtgtatctacagatccccggaaaagaaggcaactgaagatgaaggttcggaacagaaaattccagaggcaactaataggagggtctgggagctttccaaagcaaactcgaggtttgcaactaccttctaccaacatcttgcagattcgaaaaacgataatgataacatatttctgtcacctctgtcaatctcgaccgcatttgctatgacgaaacttggtgcctgcaatgacactctgcagcagcttatggaagtctttaagttcgataccatttcggaaaagacctcggatcagattcatttcttttttgcgaagttgaattgcagactttacagaaaggcaaacaagtcctccaaacttgtgtcggcaaacagactgttcggagataagtcattgacctttaacgaaacttaccaggatatttcagaactggtctacggtgcaaaactgcagccacttgactttaaggaaaacgccgagcagtccagagcagcaatcaataagtgggtttctaataagactgaagggcgcattacggacgtgattccgtccgaggctatcaatgagcttaccgtcctggtgctcgtgaataccatctacttcaaggggctctggaagtccaaattctcgcctgaaaacactcgcaaagaactgttttacaaggcagatggtgaaagctgctcagcgtccatgatgtaccaagagggtaagtttcgctacagaagagtggcagagggtacccaagttctggaactgcccttcaagggtgatgatattaccatggtgcttattctgcctaaaccagagaagtcgcttgcaaaggttgaaaaggaacttactccggaagtgctgcaagagtggcttgacgagctcgaagaaatgatgctggtggtgcatatgcctagattcaggatcgaagatggattctcacttaaagagcaactccaggatatgggattggtggatctcttttcccccgaaaagtcaaaactgcccggaatcgtggccgaaggcagagacgatctctacgtctctgatgcatttcataaggcctttctggaggttaacgaagaagggtccgaagcagcggcaagcaccgcggtggtgatagcaggccgctcccttaaccctaacagagtgacttttaaggcaaacagaccatttctcgtgttcattcgtgaagtccccctcaacactatcattttcatgggacgtgtggcaaatccttgtgtgaag

SEQ ID NO: 9555 - DNA, 1392 bp, Artificial Sequence
  derived and/or modified sequence
atgtacagcaatgtgatcggaaccgtgacttccgggaagcggaaggtctacctgctgtccctccttcttatcggtttctgggactgcgtgacttgtcatggctccccggtcgatatctgtaccgccaagccgcgagatatcccaatgaacccgatgtgcatctaccggagcccggaaaagaaggcgaccgaagatgagggctccgaacaaaagatcccagaggctactaatcgcagagtttgggagctcagcaaggctaacagcagatttgccacgaccttctaccagcacctcgccgattccaaaaacgataatgataacatttttctttccccactgtcgatttcgactgccttcgcaatgactaagctgggggcatgcaacgacacgctccagcaactcatggaggtgtttaagttcgacactatttcagaaaaaacttcagaccaaatccactttttctttgcgaaacttaactgcagactgtatcgcaaggccaacaaatcgtccaagctggtgagcgctaatcgcctgttcggagataaatctctgacgttcaatgaaacttaccaggatatctcggagctggtctacggtgcaaaactgcagccgctcgactttaaggaaaatgccgaacaatcgagagcggcgatcaacaaatgggtatcgaataagaccgaggggagaatcactgacgtcatcccaagcgaggcaatcaacgagcttacggttctggtcctcgtcaacaccatttacttcaagggactttggaagtccaagttctccccagagaacactcggaaggagctgttttacaaggccgatggagagagttgctccgcttctatgatgtaccaggagggaaagttccggtaccgccgggtggccgagggaacccaagtgctggaactgccattcaagggagatgacatcaccatggtgttgatcctgccaaagcctgagaagagcctcgccaaagtggagaaggaactgactcccgaagttctgcaagagtggctggatgaattggaggaaatgatgctcgtggtgcacatgccgcggttccgcattgaggacggtttctcattgaaggaacagctccaggacatgggactcgtcgacctcttttcgcctgaaaaatcgaaacttccggggattgtggctgaaggacgcgacgacttgtacgtctcagatgcattccataaggccttcctggaagtgaatgaagaaggcagcgaagctgccgcctcaactgccgtggtgattgctgggcgatcactcaatcccaaccgcgtaaccttcaaggcgaaccgacctttccttgtgttcatcagagaagtgccgctgaacactatcattttcatgggacgcgttgctaacccatgcgtgaaa

SEQ ID NO: 9556 - DNA, 1392 bp, Artificial Sequence
  derived and/or modified sequence
atgtattccaacgtcatcggtaccgtcacaagcggaaagcgaaaagtctatctcctttctctcctgttaatcggattctgggactgtgtgacttgccatggaagtccggttgatatttgcaccgccaagcctagggacatacccatgaatcctatgtgtatttatcggtctccggagaaaaaggctactgaagacgaggggtccgagcagaaaatcccggaggccacaaataggcgggtctgggaactctccaaagccaacagccgattcgctacaaccttttaccaacatctggccgacagcaagaacgataacgacaacatcttcctgagcccattgagcatatccactgccttcgcgatgacaaaactgggggcttgcaacgatactctccagcagctcatggaggtctttaagttcgataccattagtgaaaagacctccgatcagatccactttttttttgctaagctgaattgccgactgtacagaaaagcaaacaagtcatcaaaactcgtctctgctaacagactcttcggcgataaaagcctcacttttaacgagacctatcaggatatttctgagctagtttacggggcgaagttacagcctctggacttcaaggagaacgccgaacagagtagagccgccattaataaatgggtgtcaaataaaacagaaggacggattactgacgtgataccaagcgaagccataaacgagctgaccgttctagtcctggttaacactatctattttaaaggactgtggaagtcaaagttctccccagaaaatacacgaaaagagctcttttacaaagccgatggagaatcctgcagtgcctccatgatgtatcaggagggaaagttcagatatcgcagagtggccgagggaacccaggtacttgaactgcctttcaaaggagacgatattaccatggtgttgatattgccaaagcctgagaaatctctggccaaagtggagaaagagctcacacccgaagtgcttcaagaatggctggatgaattagaagagatgatgctggttgttcacatgcctagattccggatcgaggacggcttctcccttaaagagcagctgcaggatatggggctcgttgatctcttctccccggaaaaaagcaaactgcctggtatagtcgctgagggtcgtgatgacttatatgtgtcggatgccttccacaaggctttcttggaggtgaatgaggagggatccgaagctgccgcctccactgccgtggtaattgccggtaggagcttgaacccaaatagagtgaccttcaaagccaataggccctttctcgtcttcatcagagaggtaccgctgaacactatcatttttatgggaagagtggccaacccatgtgttaaa

SEQ ID NO: 9557 - DNA, 1392 bp, Artificial Sequence
  derived and/or modified sequence
atgtactccaacgtcatcggaaccgttacctccggtaagcgcaaagtgtaccttctgtcgctgctgctgatcgggttctgggactgcgtgacgtgccatggaagcccggtggatatctgtactgcgaagccgcgagacattccgatgaacccgatgtgcatctatcggtcgcctgaaaagaaagctaccgaggacgaggggagcgagcaaaagatcccagaagctactaatagaagggtgtgggagttgagcaaggccaattcaagattcgctactacgttctaccagcacctggccgattcaaagaacgacaatgataacatctttctctctcctttgtcgatctcgactgccttcgcaatgacgaagctcggagcttgcaatgacacccttcagcagctcatggaggtattcaagttcgataccatctcggagaaaacttccgaccagattcacttcttcttcgcgaaactgaattgtagactgtaccgtaaagcgaacaagtcctctaagctcgtgtcagcaaaccgcttgtttggcgacaagtcgctcacctttaacgaaacctaccaggatattagcgaactggtgtacggcgccaaacttcaaccgctcgatttcaaggaaaacgcggagcagtcccgggctgccatcaataagtgggtttctaataagactgagggacggatcactgacgtgatcccgtccgaagccatcaacgaattgactgtcctcgtgctggtgaataccatctatttcaagggcctgtggaaatcgaaattctccccagaaaacactagaaaggagctcttttacaaggctgatggcgaatcatgtagcgcatcgatgatgtaccaagaaggcaagtttcgctaccggagagtggccgaaggaacccaagtccttgagcttccattcaaaggtgacgatattacgatggtgctgatcctcccaaagccggagaagtcgctggccaaggtcgaaaaggaactcactccggaagtgcttcaggaatggctggacgaactcgaggaaatgatgctcgtggtccacatgccgcgcttccggatcgaggacggattttctctcaaagagcaactccaggacatgggattggtcgatctgttcagcccggagaagtcaaagttgccaggaatcgtggccgagggcagagacgacctgtacgtgagcgatgcgttccataaggcgttcctggaagtgaacgaggagggatcggaagctgctgcatcaactgctgtggttatcgccggacgctccctcaatccaaaccgggtcaccttcaaggcaaacagacctttcctcgtgttcatccgcgaagtaccgctcaataccatcatattcatgggacgggttgcaaacccatgcgtcaaa

SEQ ID NO: 9558 - DNA, 1392 bp, Artificial Sequence
  derived and/or modified sequence
atgtatagcaatgtgataggcactgtaacttctggcaagagaaaagtgtacttactatctctgctgcttatcgggttttgggattgtgtcacttgccatggctccccagtggatatatgtacagccaaacctcgcgatatacctatgaacccaatgtgcatttaccgtagccccgagaaaaaggctaccgaggatgaaggatctgaacaaaagatccctgaggccactaaccgacgggtgtgggagctgagcaaggctaattcccgttttgccactaccttctaccagcacttagccgactctaaaaacgataacgacaatatttttctgagtcctctgtccatctctaccgcctttgctatgaccaagctgggagcctgcaatgacactcttcaacaactgatggaggtgtttaagtttgacaccataagcgaaaagacttcagatcagattcatttctttttcgctaagttaaactgcaggttatacagaaaagcaaacaagagcagtaagctcgtatccgccaatcgcctatttggcgacaagtcattaacatttaacgagacataccaagatataagcgagctggtgtacggcgctaaactacagcccttagacttcaaggaaaacgccgagcagtctcgggctgctattaacaaatgggtttcaaacaaaaccgagggcagaataaccgatgtgataccaagcgaagctatcaatgagctgaccgtgctagttctggtgaacacaatttattttaagggactgtggaagtctaaattctcaccagaaaatacaaggaaagagctattttacaaggctgatggcgagagttgctccgcttctatgatgtaccaagaaggcaagttcaggtaccgacgagttgccgaaggcacacaggtgctggagttaccctttaaaggcgatgacatcactatggttctaatattacccaagccagagaaatctctcgctaaagtggaaaaagaattgactccagaggtgctccaggagtggctggacgagttagaagagatgatgctcgtggttcacatgccacgcttcaggatagaggacggattttctctgaaggaacagctgcaggatatgggcctcgttgacctgtttagtcccgagaaatcaaaactgccaggtattgtggctgaaggccgggatgacctctatgtctctgatgccttccataaggctttcctggaggtgaacgaggagggatccgaggctgccgctagtacagccgtggttatagcaggccggagcctgaaccccaatcgtgttacctttaaggccaacagacctttcttggtgttcatacgcgaggtgcctcttaacaccattatctttatgggccgtgtagctaatccctgtgttaag

SEQ ID NO: 9559 - DNA, 1392 bp, Artificial Sequence
  derived and/or modified sequence
atgtatagcaacgtgattggtacagtgacctctgggaagcgcaaagtgtacctgctgtccctgctgctgatcggcttttgggactgcgtgacctgccacggatcacctgtcgacatctgtacagcaaagcccagggacatccctatgaacccgatgtgcatttatcgcagtcccgaaaaaaaggctaccgaagatgaaggcagcgaacaaaagattcccgaggccaccaaccgcagagtgtgggaactctcaaaggccaattccaggttcgcgacaaccttttaccagcatctggctgactccaagaacgacaacgacaacatcttcctctccccattgtctataagtacagcgtttgccatgaccaagctcggggcctgcaatgacactctacagcaactcatggaagtctttaagtttgataccatcagcgagaaaaccagcgaccagatccacttttttttcgcaaaactcaattgtagactttaccgcaaggccaacaaatcaagcaaattagtatcggcaaatcgactgtttggagataagtcgttgacgttcaacgaaacgtaccaggatatttccgaactggtttatggggccaaactgcagccacttgacttcaaggaaaacgccgaacaaagccgagccgctatcaataaatgggtgagtaacaaaaccgagggcagaatcaccgatgtcattccatcagaggctattaatgaactgaccgtgttagtgttggtaaacacgatctactttaagggtttgtggaagtctaagttctcgcctgagaacacacgcaaggagttgttttacaaggctgacggcgaatcctgtagtgcgtctatgatgtaccaggaggggaagtttaggtatagacgggtggccgagggcacgcaggttttggaactccctttcaagggcgacgacatcacaatggtcctcatcttgcccaaacctgaaaagtccctggccaaggtggaaaaagaactcactcccgaggtcctgcaggaatggctggacgaattggaggagatgatgcttgtcgtgcacatgcctcggttcaggatagaggatgggtttagcctgaaagaacagctgcaggacatgggactggtcgacctgttctctcccgagaaatccaaactgccagggattgtggccgaaggacgcgacgacctctacgtctccgatgcctttcataaggccttcctggaggtgaacgaagaaggctcagaagctgccgcatccacagctgtggttatcgccggccgttccctgaatccaaaccgggttaccttcaaagccaaccgcccctttctggtttttattcgggaagttcccctgaacactatcattttcatgggtcgggtggccaatccctgtgttaaa

SEQ ID NO: 9560 - DNA, 1392 bp, Artificial Sequence
  derived and/or modified sequence
atgtatagcaacgtgattggaaccgtaacttctggaaaacggaaggtgtacttgttgtcactcctgctcattggattctgggactgtgtgacttgtcatggcagtccagtggacatctgtactgcgaaacctagggacatccctatgaatcctatgtgcatctatagatctccagagaaaaaggcgacagaggacgagggatccgagcagaaaattcccgaagccactaaccgcagggtgtgggaacttagcaaagctaacagtaggtttgcgactactttttaccagcacctggccgacagtaagaacgataacgacaatatctttctttcccccctttctatatcaaccgcattcgctatgacaaagctgggggcctgtaatgatacgctgcagcagctcatggaggtcttcaaattcgataccatttccgagaaaacctctgatcagattcacttctttttcgccaagttgaactgccggctgtacagaaaagctaacaaatcctccaagctggtctccgcgaaccgccttttcggcgacaaaagtctgacattcaacgaaacctatcaggatatttcagaactggtgtatggggctaagctgcaacctctggactttaaagaaaacgctgaacagtcacgggccgcaatcaacaagtgggtgtccaataaaaccgaagggcgcataaccgacgttatcccaagcgaagcaattaatgagttgaccgttcttgtgctggttaacacaatttacttcaagggattgtggaaatctaaattctccccggaaaacaccagaaaagagttgttctacaaagccgatggggagtcctgttctgcatccatgatgtaccaggaaggtaaatttagatatagaagagtagcggagggcacgcaggtgctcgaactgccattcaagggcgatgacattacaatggtcttgatcctgcctaaacccgagaaaagcctagccaaggtcgagaaagagcttacaccggaggtgctgcaggagtggctcgacgagctagaggaaatgatgctagtcgtgcatatgccacggtttcgaatagaagatggttttagcctgaaggagcaactgcaggatatggggctggtagacctgtttagccccgagaaatcaaaactgcctggaattgtggccgagggccgggacgatctgtacgtctccgatgcttttcacaaggcttttttagaggtaaacgaggaaggcagcgaggccgcagcctcgactgcagttgtcatagctgggcgaagcctcaatcccaatagagtgacattcaaagcgaacagacccttcttggtctttattcgcgaggtgcccctgaatacaatcatattcatgggccgtgtggccaacccctgtgtcaaa

SEQ ID NO: 9561 - DNA, 1392 bp, Artificial Sequence
  derived and/or modified sequence
atgtacagcaatgtcatcggcacggtaacttctggcaagcggaaggtgtacctgctgtcactgttgctgataggattttgggactgtgtcacctgccacggctctccagtggacatatgcaccgccaaaccaagggatatcccgatgaatccaatgtgtatctaccgctcaccggagaaaaaagctacagaggatgagggcagtgagcaaaagatacccgaagcgacaaaccgaagagtgtgggagctgtctaaagctaacagccgattcgcaactactttttatcagcatctggccgatagcaaaaacgataacgacaacatcttcctgagtcctttgtctatctctaccgcctttgccatgacgaagcttggcgcctgcaacgacacactgcagcagcttatggaagtgttcaagtttgatacgattagcgagaagacgtcagaccagatccacttttttttcgccaaactgaattgccgcttgtaccgcaaggccaacaagtcttctaagcttgtgtctgccaacaggctgttcggtgacaagtctctcacatttaacgagacatatcaggatatttcagagctggtgtatggagccaagctccagcctctggacttcaaggagaatgctgagcagtccagggcagccatcaacaagtgggtaagcaacaaaactgagggcagaattacagatgtgataccctccgaggctattaacgaacttacagtcctggttttggtcaacacaatttactttaagggcctgtggaagtctaagttttcccccgaaaacacacgcaaggagttgttctacaaggctgatggggagtcttgttctgccagcatgatgtatcaggagggaaaattcaggtatcgacgcgttgctgaagggacccaggttctcgagctccctttcaaaggggatgatatcaccatggtgttgatcttgcctaagccagaaaaatccctggcgaaagtggaaaaggagctcacgcctgaggtgcttcaggaatggcttgacgagctggaagaaatgatgctggtcgtgcacatgcctaggtttagaatcgaggatggcttctccctcaaggagcagctgcaggacatggggctcgtagacctgttctctcccgaaaagagcaaactccccggcattgtagctgagggacgcgacgacctttatgtgtccgacgctttccacaaagcttttttggaagtcaatgaagaaggatccgaagccgccgccagtactgccgttgtgattgctggccgctccctgaatcccaaccgagtgacatttaaggcgaatcggccatttctggttttcattagggaggtgccattgaacaccatcattttcatgggtcgggtggccaacccatgcgtgaag

SEQ ID NO: 9562 - DNA, 1392 bp, Artificial Sequence
  derived and/or modified sequence
atgtattcaaacgtcatcgggacagtgacaagtggaaaaaggaaagtgtatcttctgtctttgcttctcatcggattctgggattgtgtcacctgccacggttccccagtcgacatctgcaccgcaaaaccgcgcgacatccctatgaacccaatgtgcatctaccgttcccctgagaaaaaggccacagaggatgaggggtcagagcagaagataccagaagccacaaatcgtagagtgtgggagctctcaaaagccaattctaggtttgcgacaacattttatcagcaccttgcagatagcaaaaatgataacgataatatttttctgtcccctttaagcatcagcactgccttcgccatgacgaaactgggtgcctgcaatgacactttgcagcagctgatggaggtatttaaattcgacaccatttctgagaaaactagcgatcagatccactttttcttcgccaagctgaattgtcgtctctaccggaaagctaataagtcctccaagctcgtgtcggccaacaggctctttggtgacaagtccttgacttttaacgagacttatcaggatatatccgagttagtgtacggcgccaaacttcagccactggactttaaggaaaacgcggagcagagtagagcggccataaacaagtgggtgtcaaacaagacggagggcagaatcacagatgtgataccaagtgaggcaataaatgagttaactgtgttggttttagtgaatactatttacttcaaaggcctgtggaagagcaaattctcaccggagaacaccagaaaagagctgttttataaggccgatggtgagagctgcagcgcttcaatgatgtaccaagaaggtaaatttaggtaccgccgcgtggcggaaggaacacaagttctcgagcttcccttcaagggcgatgatatcacaatggtgctcattttgcccaagcctgagaagtcattggctaaggtagaaaaggaactcacccctgaagtgctgcaagagtggctagacgaattagaggagatgatgctggtcgtgcacatgccccgctttaggatcgaggacggcttttctctcaaggaacagctacaggatatgggcctcgtggacctgtttagccccgaaaaatccaagttaccaggcattgtcgccgaggggcgtgatgatctgtacgtgagcgacgcattccataaagccttcctggaagtgaacgaggaagggtcagaggccgccgcctctacggctgtagtcattgctggccggtctctgaacccgaaccgggttaccttcaaagccaatcgtccctttttggtttttatcagagaggtacctctgaacaccattatctttatggggagggtggcaaacccttgtgttaaa

SEQ ID NO: 9563 - DNA, 1392 bp, Artificial Sequence
  derived and/or modified sequence
atgtactcgaacgtcatcggaaccgtgacctcaggaaagagaaaggtatacctgttgtcactcctcctgattggattctgggactgcgtgacctgccatggatcgccggttgacatttgtactgcgaagccgagagacatcccgatgaacccaatgtgcatctaccggtcaccggagaagaaagcaacggaagatgagggatcggagcagaaaatccccgaagccactaatcggagagtgtgggaacttagcaaggctaattcccgcttcgcgactaccttctaccagcacttggcggactcgaagaacgataacgataacatctttctctctccattgtcgatctcaaccgccttcgctatgaccaagctgggagcatgtaacgacactctccaacagcttatggaggtctttaagttcgacaccatctcagaaaagactagcgaccagatccactttttcttcgccaaactgaattgcagactttacagaaaggccaacaagtcgtccaagctggtcagcgcgaacaggctgttcggtgataaatctctgacgtttaatgagacttaccaggacatcagcgaactggtctacggggcaaagctccagcctctcgatttcaaagagaatgcagagcaatcacgggctgccatcaacaaatgggtgtcaaataagaccgaaggtcgcatcactgacgtcatcccgtcagaggccatcaatgagctgaccgtgctggtgctcgttaacactatatactttaaaggactttggaagtctaagttctcgccagaaaacacccggaaggaactgttctataaagcagacggagaatcctgctccgcgtcaatgatgtaccaagaaggcaaattcagatacagaagggttgccgaaggaacccaagtcttggaactgccattcaagggagacgatattactatggtgttgatacttccaaaaccggagaagagcttggccaaggtggagaaagagctcacgcccgaggtcctccaagaatggctcgatgagctggaggagatgatgctggtggtgcatatgcctcgcttcaggattgaggacggcttttccctgaaggaacagcttcaggacatgggattggtggacctgttctcgcccgagaagtcgaagctcccgggcatcgtcgcagaagggagggacgatctctatgtgtcggacgcctttcacaaggcgtttctcgaggtgaacgaagagggatccgaagccgcggcaagtacggctgtcgtgatcgcaggccgctcattgaatccgaatagagtgactttcaaagccaatcggccatttctcgtgttcatcagagaagtgccccttaacaccatcatcttcatgggcagggtcgccaacccctgcgtgaag

SEQ ID NO: 9564 - DNA, 1392 bp, Artificial Sequence
  derived and/or modified sequence
atgtattccaacgtgattggaaccgtgaccagcggtaaacgaaaggtgtatctgctctcacttttgctgattggcttttgggattgtgtgacttgccacgggtcccctgtggatatctgtaccgcaaaaccgcgggacattcctatgaaccctatgtgtatttacagaagccccgaaaagaaagcgaccgaagatgaaggatcagaacagaaaatacccgaagccaccaacagacgtgtctgggaattgtccaaggcaaacagccgatttgcaactaccttctaccaacatcttgctgactcgaagaacgataatgacaacatcttcctttcccccctgtcaatctcaaccgcgttcgcgatgactaagctgggggcatgcaacgacacgcttcaacagctcatggaggtgttcaagttcgacactatctcggaaaagacgagcgaccagatccatttcttttttgctaaacttaactgtagactgtaccggaaagccaacaaaagctccaagttggtgtcggcaaaccggctgttcggcgataagtcgctgacctttaacgagacttaccaggatatttcggaactggtgtacggggccaagctgcaacctcttgatttcaaggaaaatgctgaacaatcccgtgcagccatcaacaagtgggtgagcaacaagactgaaggcagaattaccgacgtcatcccatccgaagctatcaatgagctcaccgtcctggtgctggtgaataccatctactttaagggtctttggaagagcaagtttagcccagaaaataccagaaaggagttgttttacaaggcggatggagaatcgtgttccgcatccatgatgtaccaggagggtaagtttaggtaccgtcgcgtggcagaaggaacccaagtgcttgaactgccgtttaaaggtgacgatattactatggtcttgattcttccaaagcctgaaaaatcactggccaaagtggaaaaggagctcacccccgaagtcctgcaagaatggctggacgagctcgaagaaatgatgttggtggtgcatatgcctaggttccggatcgaggacggattctcactcaaggagcagctgcaggacatgggtctggtcgacttgttttcacctgaaaagtcgaagctgcccggtattgtcgcggaagggagagacgacctgtacgtgtcggatgcatttcataaggcatttctcgaagtcaacgaagaagggtccgaggcagcagcgtccaccgcagtggtcattgcaggtcgttcgcttaaccccaaccgcgtcacgtttaaagcaaaccggcccttcctcgtgtttattcgcgaggtgccgctgaataccataatctttatgggtcgagtggcgaacccttgtgtcaag

SEQ ID NO: 9565 - DNA, 1392 bp, Artificial Sequence
  derived and/or modified sequence
atgtacagcaacgtgattggtaccgtgaccagtggcaagaggaaggtgtatctgctgagccttctcctgattggtttttgggattgtgtgacctgtcacggttcacccgtggatatttgtacggcaaagccacgagacattccaatgaatcccatgtgtatttacagatcgcctgaaaagaaggcaaccgaagatgaaggctccgagcagaaaattccagaagctactaaccgcagagtgtgggagctgtccaaggcaaacagccgatttgccactactttctaccaacatctggcagacagcaagaacgataatgataacatatttctgtcgcccctgtcgatctccactgcattcgcgatgaccaagctgggagcatgtaatgacactcttcaacagcttatggaggttttcaagtttgataccatctctgagaaaacgtcagaccaaattcatttcttctttgcaaaacttaactgtcggctgtaccgtaaggcgaataagtcctctaaactcgtgtcggcaaataggctctttggggacaagtcattgactttcaacgaaacctaccaggacatatcagaacttgtctacggagccaaacttcaaccattggatttcaaggagaacgcagaacagtcccgcgcagcaattaacaaatgggtgtcgaacaaaaccgaaggcagaattactgacgtgattccctcggaggcaattaacgaactgaccgtgcttgtcttggtgaacaccatctactttaaaggtctttggaaatcaaagttttcgcctgaaaacactcgaaaggaacttttctataaggctgacggagaatcctgctctgcaagcatgatgtaccaagaagggaagtttcggtaccggcgagtcgccgaaggtactcaagtcctcgagctgccctttaagggcgatgatattaccatggtgcttatcctgccgaaacctgaaaaaagccttgcaaaagttgagaaggaacttactccagaggttctgcaagaatggcttgacgaattggaggaaatgatgctggtcgttcacatgcctcgttttaggatcgaagatgggttctccctgaaggagcagcttcaagatatgggtctggtggacctcttttcaccagagaagagcaaacttcctggtatcgtggcggagggcagagatgacctgtacgtgagcgatgcgtttcataaggcatttttggaagtgaatgaagaaggtagcgaagcagcggcatccaccgctgttgtgattgcaggacgttctctgaacccaaatcgggtgacgtttaaagcgaacagaccctttcttgtgttcatccgcgaagtgccattgaataccattatcttcatgggcagggtggctaatccctgcgttaag

SEQ ID NO: 9566 - DNA, 1392 bp, Artificial Sequence
  derived and/or modified sequence
atgtacagcaacgtgatcggaaccgtcacctcgggaaagaggaaggtgtacctgctgtcactgttgctcatcggcttctgggactgcgtgacttgtcatggctcgccggtggacatctgtactgcaaagccgcgcgatatcccgatgaaccccatgtgcatctacaggtcaccggaaaagaaagcgaccgaggacgaggggtcagagcaaaagatccctgaggcgaccaatcgccgggtgtgggaactgtctaaggcgaactcccggtttgccaccaccttctatcagcacctggcggactctaagaatgataacgacaatatctttctctcccccctctcgatctccactgccttcgccatgactaaacttggcgcgtgcaacgatactctccagcagctcatggaggtgttcaaatttgacaccatctcggagaagacctccgatcagatccacttcttcttcgcaaaactcaactgtcggctgtacagaaaggcaaacaaaagctctaaactcgtcagcgccaaccgcctgtttggggacaaatcgctgactttcaacgagacttaccaggacatctcagaacttgtgtacggagcgaagttgcaacccttggacttcaaagagaatgcagagcagagccgggcagcgatcaataagtgggtttcgaacaaaaccgagggacggatcaccgacgtgatacccagcgaggcaatcaacgaattgactgtgctggtccttgtcaatacgatctacttcaaagggctgtggaaatctaagtttagcccggaaaatactcgcaaggaactcttctacaaggccgacggtgaatcctgctcggcctcgatgatgtaccaggaaggaaagttcagataccgcagagtggcagaaggcactcaggtgctggaactgccttttaaaggagacgacattacgatggtgctgatcctgccgaaaccggagaagagcttggccaaggtggaaaaggagctcacccccgaagtgctgcaagagtggctcgacgaactggaagaaatgatgctcgtggtccacatgccgcgcttccggatcgaagatggtttctccttgaaggagcagctgcaagacatgggtcttgtggacctgttttccccggaaaaaagcaagctgccaggcattgtcgctgagggcagagacgatctttacgtctcagacgctttccataaggcattcctggaagtgaatgaagaaggcagcgaggctgcggcaagcaccgctgtcgtcatcgcgggacggtcgctcaatccaaaccgcgtgaccttcaaagctaacagaccctttctcgtcttcatccgggaagtccctctgaataccatcatcttcatggggcgggttgccaacccgtgcgtgaag

SEQ ID NO: 9567 - DNA, 1392 bp, Artificial Sequence
  derived and/or modified sequence
atgtactctaacgtgatcggcaccgtgacatctgggaaacgcaaagtctatcttttgtctctgctgctgatcggcttctgggattgcgttacctgtcacggttcccccgtcgatatctgtacagctaagccccgcgatattcccatgaatcccatgtgtatctacaggtcacccgaaaagaaggcaacagaggacgagggatcagaacagaagatccccgaagccacaaatcgccgggtgtgggagctcagcaaggccaactcgcgatttgcgaccacgttttaccagcacctcgcggactccaagaacgacaacgacaacattttcctgtctccgttatccatcagtacggcctttgcaatgacgaaactcggggcgtgcaacgatactttgcagcagctgatggaagtatttaaattcgacacaatttctgagaaaaccagtgatcagatccatttctttttcgcaaagctgaactgtcggctgtaccggaaagcgaataagtcgtctaagcttgtgtcagcaaacaggctgttcggggataaaagcctgacattcaatgaaacataccaggacatcagcgagcttgtgtatggagccaaactgcagccactggacttcaaggagaacgcagagcagagcagggccgcgatcaacaaatgggtgtccaacaaaactgagggacggatcactgatgtaatcccttctgaagcaatcaacgagttgacagttctggtcctcgtcaatacaatctattttaaaggtctttggaagtccaaattctcccctgaaaacacccggaaagagttattctacaaggcagatggtgaaagctgttctgcctctatgatgtaccaggaaggcaagttccggtatagacgggtcgcggagggaacacaggtgttggaacttcctttcaagggtgacgatattaccatggtcctgattttgcccaagccggagaagagtctcgctaaggtggaaaaggagctgaccccggaagttctgcaagagtggctcgacgaactggaggaaatgatgctcgtggttcacatgcctcgattccgtatagaggacggattttcccttaaggagcagttgcaggacatggggttggtggacttattctcccccgagaagtctaagctccctggaatcgtcgcggaggggcgggacgacctgtacgtgtccgacgcctttcacaaagcctttctcgaagttaacgaagagggaagtgaggcagctgcttccacggcagttgtcatcgccggaaggtcactgaatcctaatcgggttacatttaaggctaaccggccgttcttggtctttattcgggaggtaccgctgaacacaattatctttatgggcagggttgcgaatccatgtgtgaag

SEQ ID NO: 9568 - DNA, 1392 bp, Artificial Sequence
  derived and/or modified sequence
atgtactctaatgtgatcggcacggttacctcaggaaagcgaaaagtgtatctactgagcctattgctcataggtttttgggattgtgtgacttgtcacggatctcctgtggatatatgtactgcaaagcccagagacatccctatgaaccctatgtgcatttatcgtagtcctgagaagaaagcaacggaagatgaagggagtgaacagaaaatccccgaagccaccaaccggcgggtttgggaactgtctaaagctaatagtcgttttgcgaccactttttatcaacatctggcagactctaaaaacgataatgataacatcttcttgtcacccttgagcatctcaactgcctttgctatgaccaaactgggcgcatgcaacgataccttgcagcaactgatggaggtgttcaagtttgacactatctcggagaagacatctgatcaaattcacttctttttcgccaaactgaattgcaggctttatagaaaagccaacaaatctagtaagcttgtgtccgcaaaccgcttgttcggggacaagagtctcacatttaatgaaacttaccaagatatttcagagttagtctatggagcaaagctgcagccgttagatttcaaggaaaatgctgagcagagccgggcagcaatcaataagtgggtgtccaataaaaccgaaggacggattaccgacgtgatcccttcagaggccataaacgagctgacggttttggtccttgtcaataccatttacttcaaggggctctggaaaagtaaattctcccctgaaaacaccagaaaagagctattctacaaagccgacggtgaaagttgctcagccagtatgatgtaccaggaaggcaagtttcggtacagaagggtggcagaaggaacacaggttctggaactgcctttcaagggagatgacattacgatggtactgatcctcccgaaaccggaaaaatctttggcaaaggttgaaaaagaattgacgcctgaagtgttacaggaatggcttgatgaacttgaggagatgatgctggtagtacacatgcctcgatttcgcatcgaggacggtttctctctgaaagaacaactgcaggatatggggttggtggaccttttctcgccagagaagagcaaactgcctggtatcgttgcagaaggtagagacgatctgtacgtgagcgacgctttccacaaggctttcctagaagtcaatgaggaggggtcagaggcagcagcatctacagccgtcgtcatcgctggtaggagcctgaatcctaatcgagtcacgttcaaggcaaaccgtccatttctcgtgttcatccgcgaggtccccctgaatacgatcatattcatggggcgcgtagccaacccttgcgtaaag

SEQ ID NO: 9569 - DNA, 1392 bp, Artificial Sequence
  derived and/or modified sequence
atgtatagcaacgtgatcgggacggtgacctcaggaaagcgaaaggtgtacctcctttccctgctactaattggtttttgggactgcgtaacgtgtcacggctcacccgtcgatatctgtaccgctaagccacgcgatattccaatgaaccccatgtgtatctaccggagcccagaaaagaaagctaccgaagatgagggctctgagcagaagatccccgaagcaaccaatagaagggtatgggaactgtccaaggctaatagtcgcttcgccacaaccttttaccagcacttagccgattccaagaacgataatgacaacatcttcctatcacctctgagtatttcaaccgcgtttgcgatgacaaagttgggagcttgtaacgataccttacagcaactgatggaggtgttcaagtttgacacaatttctgagaaaacttcggatcagatccattttttcttcgctaagcttaattgtcgtctgtataggaaagcgaataaaagttcaaaactggtctcagccaatagactgtttggtgacaagtcgctaacattcaacgagacatatcaggatatctccgagcttgtgtacggcgccaagctacagccactcgacttcaaggagaacgcagagcagagtcgggctgccatcaacaagtgggtgtctaataagaccgaggggaggattacagacgtcatacccagtgaggccattaatgagctgactgtgttggttctcgtgaatacgatatacttcaagggactttggaagtccaagttttctcccgaaaatacgcggaaggaactattttacaaggctgacggtgagagctgtagtgcatcgatgatgtaccaggagggtaagtttaggtaccgcagagtggctgaaggcactcaagtgttagagctaccttttaagggagacgacatcaccatggtcttgatactgcccaagccagagaagagcctcgctaaggtggagaaagagctgactcccgaggtgcttcaggagtggcttgatgaattggaagaaatgatgctggtggttcatatgccaagattccgcatcgaagatggcttttccctgaaagaacagctgcaggatatggggctggtggaccttttcagccccgaaaaatccaagcttcccggaattgtcgcagagggccgcgacgacctgtacgtgtctgacgcattccataaggcctttctggaggtgaatgaagaaggctcagaggccgcggcatccacggccgtggtcatcgcggggcgatccctcaacccgaacagggtaaccttcaaggctaaccgaccctttctggtgttcatccgggaagtgcccctcaataccattatttttatgggtagagtggcaaacccatgtgtcaaa

SEQ ID NO: 9570 - DNA, 1392 bp, Artificial Sequence
  derived and/or modified sequence
atgtattctaacgtcattggcaccgtgacctcaggcaagcgcaaagtgtatctgctcagtttactgttaattggattctgggactgcgtaacttgtcatggatcccccgtggacatttgcactgccaagccgagggacattcccatgaacccaatgtgcatatacagatcccccgaaaagaaagcgacagaggatgagggatctgagcagaaaattcccgaagctacaaaccgtcgagtctgggagttgagcaaggctaactctaggttcgctacaacattctatcagcacctggcggattccaaaaacgacaatgataacatatttcttagcccgctcagcatcagcacggctttcgccatgactaagctgggagcctgtaatgatacacttcagcagttgatggaggtctttaagtttgataccatctcagaaaagacatccgatcagatccatttcttttttgccaagctgaattgtaggttatatcggaaagcaaacaagtcgtcaaagctggtgtccgcaaacaggctgttcggtgacaaatcacttactttcaacgagacatatcaggatatctcagagttagtgtatggagctaagctccagccactggactttaaagaaaatgccgagcaaagccgggctgccattaacaaatgggtctctaataagaccgagggcaggatcactgatgtaatcccttccgaggccattaacgagttgaccgtgctggtgttggtcaataccatttatttcaaaggactgtggaagagtaagtttagccccgagaacacccgcaaggaactgttttataaggcagatggtgagagttgctccgcgtccatgatgtatcaggagggcaaatttcggtataggcgcgtcgcggaaggaacccaggtgctggagttgccattcaaaggcgatgacatcacaatggtgctgattctgcctaaacctgagaagtcgctggcgaaagtagagaaggaattgactcctgaggttctgcaggagtggcttgacgagctcgaggaaatgatgctcgtcgtccacatgccacgcttccgcattgaggatggatttagcctgaaagagcagctgcaagacatggggcttgtggaccttttctctcctgaaaaatccaaacttccagggatagtcgcagaagggagggatgatctttatgtgtctgacgcctttcataaagcatttttggaggtgaatgaagagggctctgaggccgccgcctccacggcagtcgtgatagcgggtcgatccctgaatcccaaccgggtgacttttaaggctaaccgtccctttctggtattcattagagaggtgccattgaatacaatcatattcatgggtagagtagccaacccttgtgtcaag

SEQ ID NO: 9571 - DNA, 1392 bp, Artificial Sequence
  derived and/or modified sequence
atgtattcaaacgtcatagggactgttacaagtgggaaacgcaaggtctacctcctgagtttactgctgatcggattttgggattgtgtaacatgtcatggatcacccgtggatatctgcactgctaaaccaagggatatacccatgaacccaatgtgtatttatcggagtcccgaaaaaaaggctacagaagatgagggatcagaacagaaaatacccgaagcaacgaatcggcgcgtgtgggagctttctaaagctaatagtaggttcgctactactttctatcagcacctagccgactctaaaaatgataatgataatatcttcctttcgcccttatccatctctacagcatttgcaatgactaaactcggggcttgcaatgacactcttcagcagctcatggaggtttttaaattcgatacaataagtgagaaaacttctgaccagatacatttctttttcgcgaaattgaattgtcggttatataggaaagctaacaagtcttccaaactagtttccgctaaccgactatttggagacaagtcactcacttttaatgaaacataccaggatatctccgaactagtgtatggggcaaagctacagcccctagatttcaaagaaaatgctgaacagtcccgtgctgctataaacaaatgggtgtcaaataaaactgaagggagaattactgatgttattccttctgaggcaataaacgagctaactgttttagtgctcgtaaatactatctacttcaaagggctctggaaatcaaagttttctcccgaaaatactagaaaggaactattctacaaggcagatggagaatcgtgttccgcttccatgatgtatcaggaaggaaaatttcgatatcggcgcgtagccgagggaacacaggtccttgagctccctttcaagggagatgatatcacaatggtgctcatcctgccaaaacccgagaaaagtctggctaaagtggaaaaagagctaacacctgaagtgctacaagagtggcttgatgaactggaagaaatgatgctggtcgtacacatgccccggttcaggatcgaagacgggttttcactgaaagaacagctccaggacatggggttagttgatctgttctcacctgagaaatctaaactgccaggaatagtggccgagggaagagatgatctctacgtgtctgatgcctttcataaggcttttttggaagtaaacgaagaagggtctgaagccgctgcttccactgcagtggtaatagccgggcggtccctcaacccaaatcgagtaacgtttaaagccaaccgaccctttctggtgtttatcagagaagtaccactaaacacaataatatttatgggaagggtagcaaacccctgtgtaaaa

SEQ ID NO: 9572 - DNA, 1392 bp, Artificial Sequence
  derived and/or modified sequence
atgtactcaaacgtcattggaactgtcacctcgggcaagagaaaagtttacctcctgagcctgctgctgatcggtttttgggactgcgtgacctgtcatggttcgccagtcgatatctgtacggcaaaacctcgagatattcctatgaacccaatgtgcatttaccggtccccagaaaagaaggcaaccgaagatgaaggctcggagcagaagatccctgaagcaactaaccgaagggtgtgggaactttcaaaagcaaattcccgcttcgccaccaccttctaccaacaccttgcggactccaagaatgacaacgacaacatcttcctgtcgcccctgtcgatttcaaccgcttttgccatgaccaagttgggtgcatgtaacgacaccttgcaacagctgatggaagtgtttaagttcgatacgatctccgaaaaaactagcgatcagatacatttcttttttgcaaaattgaattgtaggctttacagaaaggcaaataagtcgtcgaagctggtcagcgccaacagactgtttggagataaatccctgaccttcaacgaaacgtatcaggatatatctgaactcgtgtacggcgctaaactgcaacctctggatttcaaggaaaacgctgaacaaagccgggctgccattaacaagtgggtgagcaataagaccgaggggcgtattaccgacgtgattccctccgaagcgataaatgagctgaccgtcctcgtccttgttaacacgatctactttaaaggcctctggaagagcaaattctcaccggaaaatactagaaaagaattgttttacaaggcagacggagagtcctgtagcgcttccatgatgtatcaagaaggaaagttcaggtaccggcgggtggccgagggaacccaagtcctggagctccctttcaagggagacgatatcactatggtgctgatcctccccaagcccgaaaaatccctcgcaaaagtggagaaggaacttactcccgaagtgctgcaagagtggttggacgaacttgaagagatgatgctggtcgtccatatgcctcgctttagaatcgaggacggattctcgctgaaggagcagctgcaggatatgggattggtggacctttttagcccagagaagtcgaagctgccgggcattgtggcagagggacgggacgatctctacgtgagcgatgcgtttcataaggcgtttctggaggtgaacgaggagggatccgaagcagccgcatcaactgcagtcgtcatcgcaggtcgcagccttaatccaaaccgggtcaccttcaaagcaaaccgcccatttctggtgtttatccgggaagtcccacttaacactatcatctttatggggagagttgcaaacccttgtgtcaag

SEQ ID NO: 9573 - DNA, 1392 bp, Artificial Sequence
  derived and/or modified sequence
atgtatagtaatgtgattgggacagtgacttctgggaaaagaaaagtgtatcttcttagtctgctcctcatagggttctgggactgtgttacatgccatgggtctccagtcgatatctgtacagccaagccaagggatatccctatgaaccccatgtgtatatatcgatctcccgagaagaaagccacagaagatgaaggatctgaacagaaaatccccgaagcaactaacaggcgggtttgggaactgtctaaagctaactcgagatttgctactacattctaccagcatttagcggattctaaaaatgataacgataacatcttcctatctcccctgtctatttcgacagcctttgctatgacaaaattgggggcctgtaacgatacactgcagcagttgatggaagttttcaaatttgatacaatctcagaaaaaacttctgatcagatccactttttcttcgctaaactcaactgccgcctctaccggaaggcaaacaaatcatctaagctggtcagtgcaaatagactcttcggagataaatccctcactttcaacgaaacataccaggatatatcagaactcgtgtacggggcaaaactccagccactagacttcaaagaaaacgctgagcagtcacgcgccgctataaataaatgggtgtctaacaaaacagaagggagaataacagacgttataccctccgaagcgataaatgaacttacagtgctcgtgcttgtcaatacaatttattttaaaggactctggaaatcaaagttttctcccgaaaacacaaggaaagaactgttttataaagccgacggggaatcttgctcggcgtcaatgatgtatcaggagggaaaattccggtaccggagggtcgctgaagggacacaggttctagagctgccattcaaaggggatgatataactatggtcctgattctccccaaaccagaaaaatcattggccaaggtggaaaaagaacttactcccgaggtgctccaggaatggttagatgaactagaagaaatgatgctagtagtccatatgcctcggtttcggatcgaagatggattctcccttaaagaacagcttcaagatatgggactagtggatctattttccccagaaaaatctaagctacctgggatcgtcgccgaggggagagatgacctttacgtgtccgatgcctttcacaaagcattccttgaagtgaacgaggaagggagtgaagcggctgcaagtactgccgttgttatagccggaagatctctgaatcctaatagggtcactttcaaagctaatcgacctttccttgtattcatcagggaagtgcccttaaacactattatcttcatggggagggtagcgaatccctgcgtcaaa

SEQ ID NO: 9574 - DNA, 1392 bp, Artificial Sequence
  derived and/or modified sequence
atgtattctaacgtcattggaactgttacttcaggcaagcgaaaggtatacctcttgtcgcttctgctaattggattttgggactgtgtgacatgtcatggatccccggtcgatatttgcacagcaaagccgcgggatattccaatgaatcctatgtgtatttaccggtcaccggagaagaaggccactgaggacgagggatcggaacaaaaaattccagaggcaacaaatagacgagtatgggagttgtcaaaagcgaattcccgcttcgctactacattttatcaacacctggcagattccaaaaatgacaatgataatatattcttaagtccattgtccatatcaaccgccttcgctatgaccaagttaggagcatgtaatgatactttgcaacagcttatggaagtgtttaagtttgacactatctcagaaaagacttcggatcaaatccattttttctttgctaaactcaattgccgactctaccggaaggctaacaaatcgagtaaacttgtcagcgcaaaccgattgtttggcgacaaatctctcacatttaacgagacttatcaagatatatcagaacttgtctatggagctaaattgcaaccactcgactttaaagaaaacgccgagcaaagtcgggctgctattaataagtgggtttccaataagactgaaggtagaattacagacgtcattcccagcgaagctataaatgaattgactgtactcgtgttggtcaacactatctacttcaagggactgtggaagtcgaagttcagccctgaaaatacccgtaaggaactcttctataaggctgatggggaatcgtgcagtgcatcaatgatgtatcaagaaggaaaattcagatatcgacgggttgctgaagggacccaagtgttagagctaccattcaaaggagacgatatcactatggttcttatcctgccaaaaccggagaaatcactggctaaagtggagaaggaacttaccccagaagttctgcaagaatggttggatgagctagaagaaatgatgcttgtggtccacatgccaagattccgcattgaagatggattttcgcttaaagaacagctacaagatatgggactggtcgatctattctctccagaaaaatccaaacttcctggaatcgttgctgaaggcagagacgacctatatgtttcagacgcttttcacaaagcattcttggaagtgaacgaggaaggatcggaggcggccgctagcactgccgttgtaattgcaggacgttctctgaacccaaatcgagtaacattcaaggcaaatcgcccttttctcgtctttattcgtgaagtcccattgaacacaataatcttcatggggcgagttgcaaatccttgcgttaaa

SEQ ID NO: 9575 - DNA, 1392 bp, Artificial Sequence
  derived and/or modified sequence
atgtattcaaatgttatcggtaccgtgacgagcggcaagcgaaaagtgtacctgctgagtctgctgctcataggcttctgggattgcgttacatgccacggttcacctgtagacatttgtacagcaaagccaagggatattccaatgaatccaatgtgcatttataggagcccggagaaaaaggccacagaagatgaggggtctgagcagaagatacccgaggctactaataggagggtgtgggaactgtcaaaagcaaatagcagattcgccacaacgttctatcagcatctcgcagactctaagaatgacaacgataacattttcctgagcccgctctccattagcactgcgtttgctatgacaaaactgggcgcctgcaatgatactttgcagcagctcatggaggtgttcaagtttgatacaatcagtgagaagaccagtgatcaaatccacttctttttcgctaagctgaactgccgattgtatcgaaaggctaacaagtccagcaagctcgtgtctgcaaaccgcttgttcggggacaagagcctgacattcaatgagacctatcaggacatcagcgaactggtgtacggcgcaaagcttcagcccctggatttcaaggagaacgccgagcagtcacgcgctgctataaacaagtgggtctccaacaaaactgagggaagaattactgacgtgatcccatcagaagccattaatgaactgaccgttctggtgctggtgaatacgatatactttaagggactttggaagagcaagttttcccccgagaacacgcggaaagaactgttttacaaggctgatggggaaagctgtagcgcaagtatgatgtaccaggaaggaaaatttcggtatcggagggtagccgagggtactcaagtcctcgagcttcctttcaaaggagacgacattacaatggtgctgatactccctaagcccgagaaaagtctggccaaagtggaaaaagaactgacccctgaagtgctgcaagagtggctggatgagctcgaggaaatgatgctggtagtgcacatgcctcggttccgaattgaggatggcttcagccttaaggagcagttgcaagacatggggctcgtggacctgttctccccagaaaagtccaagctgcctggtatcgtagcggagggacgcgatgacctctacgtttctgacgcctttcataaagcttttcttgaagtgaacgaggaggggtccgaggccgctgcttctacggccgtggtgatcgcaggtagaagcctgaatccaaatagagtgacattcaaagctaatagacccttcttggtgtttatccgcgaagtacctctgaatacaattatctttatgggacgggtcgctaatccatgtgtgaaa

SEQ ID NO: 9576 - DNA, 1392 bp, Artificial Sequence
  derived and/or modified sequence
atgtacagtaacgtcattggaactgttacaagcggcaagcggaaagtgtacctgctgagtctgctactcattggcttctgggactgcgtcacgtgtcacggttcccccgtggatatatgtacagcaaagccaagagacatccccatgaaccccatgtgtatctacaggtcccccgagaagaaggcaactgaggatgagggcagtgagcagaagatacccgaagccacaaataggcgggtatgggagctttccaaggctaacagtcgcttcgccaccacattttaccagcacttagccgattcgaaaaatgataacgacaacatcttcctgagccctcttagcataagcactgcctttgctatgacgaagctgggtgcttgcaatgacaccctgcagcagctcatggaggtgttcaaatttgacacaatttcagaaaaaacttctgaccagattcacttctttttcgctaaattgaattgtcgattgtatcggaaggctaacaagtcctcaaagttggtgagtgctaacaggctgttcggcgacaaatctctgactttcaacgagacctatcaggacatcagcgaactcgtgtatggagctaaattacagcccctggactttaaagagaatgcggagcagtcacgggccgccattaacaaatgggtctctaataagacagaggggagaattaccgatgtgatcccatccgaggcaatcaacgagttaacagtgctggtcctagttaataccatctactttaaagggctttggaaatccaagtttagtccagagaacactcgcaaagagctgttttataaagccgacggagagagctgcagtgctagcatgatgtaccaggagggaaaatttcgctacaggagagtggctgaaggaacccaggtcctggaactaccatttaaaggagacgatatcactatggttctgatcttgcctaaaccggagaaatcattggctaaggtggagaaagaactgaccccagaggtgttacaagagtggctggatgaactggaagaaatgatgctagtggtgcatatgcctcgttttcgaatagaggacggcttctccttgaaagaacagctgcaggacatgggactagtggacctgtttagtcctgagaaaagtaagttgcctggaatcgtggccgagggtagagatgacctatatgtgtccgacgctttccacaaagccttccttgaagtcaacgaggaaggaagtgaggcagcggccagtactgccgtagtgattgccggccggtcactcaacccaaatagagtgacattcaaagccaatagaccgttcctcgtatttattagggaagtcccactcaatacaattatcttcatggggcgcgtggctaatccctgcgtcaag

SEQ ID NO: 9577 - DNA, 1392 bp, Artificial Sequence
  derived and/or modified sequence
atgtacagcaatgtgatcgggactgtgacgagcgggaagcgcaaggtttaccttttaagtctgctgcttatcggtttttgggattgcgtcacttgccacggttcccccgttgatatttgcacggctaaaccgcgtgacatcccgatgaaccccatgtgcatctaccgctccccagagaagaaggccacagaagatgagggttccgagcagaagatcccggaggcgactaatcggcgtgtctgggagttgtctaaggctaactctagatttgccactactttctaccaacacctcgctgactccaagaatgacaacgataacatcttcctttcccccctgtccatttcaaccgcgttcgccatgaccaaactcggggcttgcaacgatactcttcaacaactgatggaagtgttcaagttcgataccatctccgagaagacctccgatcaaatccacttcttcttcgccaagctgaactgtcgcctttaccgtaaggctaacaaatcgtcgaagctcgtttcagctaacagactgttcggcgacaagtccctcacctttaacgaaacataccaggatatctccgagttggtctacggtgcgaagttgcaacctctcgactttaaggagaatgctgagcagagccgggccgctatcaacaagtgggtctccaacaagaccgagggcaggattacagatgttattccgtcggaggccatcaatgagctcacggtcctcgttctggtcaacacgatttacttcaagggtttgtggaagtctaagttcagccctgagaatactaggaaggagctcttttataaggccgacggagagtcgtgttcagctagcatgatgtatcaagagggtaagttccggtaccgccgtgtcgccgagggtactcaggtactcgaacttccctttaaaggtgacgacattaccatggtcttgattcttcccaagcctgagaagagcctcgccaaggtcgagaaggagttgacccccgaagttctccaggagtggcttgacgagctggaagagatgatgcttgtggtgcacatgccccgtttccgtatcgaagatgggttctccctgaaggagcagcttcaggatatgggtctcgtagacctgtttagcccggagaagtcaaagctccccggtatcgtcgccgaaggtcgcgacgacttgtatgtctctgacgctttccacaaggctttcctggaggttaatgaggaggggtctgaggcagcggcgtccaccgcagtagtcatcgctggacgcagcttgaatcccaacagagttacgttcaaggccaaccgcccttttctcgtctttatccgcgaagtcccgctgaacaccatcatctttatgggccgcgttgctaatccgtgcgtcaag

SEQ ID NO: 9578 - DNA, 1392 bp, Artificial Sequence
  derived and/or modified sequence
atgtactctaacgtcatcggcacagttaccagcggcaagcggaaagtttatctactgtctctcctccttattggattttgggattgtgtgacctgccatggatcacccgttgatatatgtacagccaaaccgagggatattccaatgaatcccatgtgtatatataggagtccagaaaaaaaggccaccgaggacgaaggttctgaacaaaaaatccccgaggcgacaaacagaagagtgtgggaactcagcaaggcgaatagcaggttcgctactaccttttaccagcaccttgctgactctaaaaacgataatgataacatattcctctccccactctctatatctactgccttcgctatgaccaaactgggcgcgtgcaacgacaccttacagcaactgatggaggtatttaagtttgatacgatctccgaaaagacatctgatcagatccactttttttttgctaagctcaactgcaggttgtatcggaaagcaaacaaatccagcaagttggtgtccgccaacagactgttcggagacaagtccctgacctttaatgagacataccaagacatcagcgagctggtatacggagccaagcttcagcccttggacttcaaggagaatgccgaacagtctcgtgccgcaatcaacaagtgggtttccaacaagactgagggccgcataacagatgtcattcccagcgaagctataaacgaactgacagttctcgtactcgtcaacacaatctacttcaagggactgtggaaatcaaaattctccccggaaaacacacgcaaggagcttttctataaggcagatggtgagagctgctccgcgtcgatgatgtaccaggagggcaaattccggtaccggcgggtcgctgaaggcactcaggtcctggaactgccattcaaaggcgacgacatcacaatggttttgatattgccgaagccggagaaatccctcgcgaaggttgagaaagagttgacccctgaagtgctgcaagaatggctggacgagcttgaggagatgatgctggtggtccacatgccccgctttagaatagaggacggcttcagccttaaggagcagctccaagacatgggtttagttgatcttttctcgccggagaagtctaagctgccaggtatagtggcagagggaagggatgatctctatgtgagtgacgcttttcacaaagcgttcctggaggtaaacgaggaagggagtgaggccgcagccagcaccgctgtggtaatcgcgggtcgatctttgaatcccaatcgcgtgacatttaaggccaacagacctttcttggtgttcatcagagaggttccacttaatactatcatctttatggggagggttgccaacccgtgtgtgaaa

SEQ ID NO: 9579 - DNA, 1392 bp, Artificial Sequence
  derived and/or modified sequence
atgtactctaacgtcattggcaccgttactagcgggaagcgcaaggtatacttgttgtccctgctactaattggcttctgggattgtgttacctgtcacggcagcccggtggatatctgtaccgctaagcctagagatatccctatgaaccctatgtgtatttatagatccccggagaagaaggcaaccgaggacgagggttcggagcagaaaatcccagaagctaccaatcgacgggtctgggaactgagcaaagccaatagtaggttcgctaccaccttctatcaacatctggctgactctaaaaacgacaatgataatatctttctcagtcctctgtctattagcaccgcattcgcaatgaccaagctgggagcctgtaacgacacactccagcagctcatggaggtctttaagttcgacaccatctccgaaaagaccagtgatcagatccactttttctttgccaagttgaactgcagattatatagaaaggcaaataagagcagcaagctggtctcggctaacaggctattcggggacaaatcattgacattcaacgaaacctatcaagacattagcgaactcgtatacggcgcaaaactgcagcctcttgattttaaggagaacgccgagcagagtcgggcagctattaataaatgggtgagcaacaagaccgagggccggataactgatgtcatcccttccgaagcaatcaacgaacttaccgtgctagtgcttgttaacaccatttacttcaagggactttggaaatcaaaattttctccggagaatactcgaaaagagctcttctacaaagcagacggtgagagctgtagcgcatctatgatgtaccaagagggaaagtttagataccgccgggtggccgagggcactcaggttttggagctcccttttaagggcgatgatatcactatggtgctgattctcccgaagccagaaaagagtctggctaaagtagagaaagagttgactcccgaggttctccaggaatggttggacgaactggaggaaatgatgttggttgtgcatatgcctaggttccggatcgaggacggattttctcttaaggagcagctccaggatatgggcctggtggacctattctcacccgaaaaaagtaaactcccaggaattgtcgccgaaggaagggacgatctatatgtctcagatgctttccataaagcattccttgaggttaatgaggagggatccgaggcagccgcctctaccgccgtggtgattgcagggagatcccttaaccccaatcgggtgaccttcaaggcaaaccggccattcttagtgtttatcagggaagtgccactaaataccataatcttcatgggaagggtcgccaatccatgtgttaaa

SEQ ID NO: 9580 - DNA, 1392 bp, Artificial Sequence
  derived and/or modified sequence
atgtattcgaacgttatcggaaccgtcacatcgggcaagcggaaggtgtacttgttgtctttgcttcttattggcttttgggactgtgtgacttgtcacggaagccccgtggacatctgcacggcaaagcctagagatatccctatgaaccctatgtgtatctacaggagcccggagaagaaagctacggaggatgaaggatccgagcagaaaatcccagaggctaccaaccggcgagtctgggagctaagtaaagcaaattcgcgcttcgcaaccactttctatcaacacctcgccgatagcaaaaacgacaacgataatatttttttgagcccattgtccataagcaccgcttttgccatgactaaactgggggcttgcaatgacactctgcagcaacttatggaggtgtttaagttcgatacgatctccgaaaaaacgtctgaccaaatccattttttcttcgccaagctcaattgtagactgtaccgtaaggcaaataaatcgtctaaactggtcagcgccaatcggttattcggggataagtctttgacttttaatgaaacctatcaagatatcagtgaactcgtttacggcgctaagctccagcccctcgactttaaggagaatgcagaacagtcccgggctgcgatcaataagtgggtgagtaataaaacagaaggacggataactgacgtgatccccagcgaggctatcaacgagctcacagtcttagttctggttaacactatctacttcaaagggctttggaagagcaagttttcgcctgaaaacaccagaaaagaactcttctataaggcagatggtgagtcctgctcagcttccatgatgtaccaagaggggaaattccgctatagacgggtagccgagggaactcaggtgctcgaattgccatttaaaggagatgatatcactatggtgctgattctgcccaaaccggaaaaatcattggctaaggtcgaaaaggagctcacaccagaggtccttcaagaatggctagacgaactggaggagatgatgctggttgtgcacatgccaaggtttcgtattgaggatggcttcagtcttaaagagcagctccaggacatgggcctggtcgacctcttttcccccgaaaaaagtaagctgcccggcatcgttgccgagggaagagacgacttatacgtatcagacgcattccataaagccttccttgaggtcaacgaggaggggagcgaagccgcagccagcaccgctgtagtgatcgctgggcgcagcctgaacccaaaccgagtaaccttcaaggcgaataggccttttctggtgttcatccgagaggtgcctcttaacacaattatttttatgggaagagtcgctaacccatgcgtgaag

SEQ ID NO: 9581 - DNA, 1392 bp, Artificial Sequence
  derived and/or modified sequence
atgtactccaatgtgattggcacagtgacatctgggaaacggaaggtttatctgctcagccttctgctgatagggttctgggattgcgtcacatgccatggtagccctgtagatatttgtaccgctaagccgagggacatccctatgaacccgatgtgtatttatagatcacccgaaaaaaaggcgacagaggatgaaggcagcgagcagaaaattcctgaagctaccaaccgacgtgtttgggagctgtctaaagctaatagtagattcgccacaaccttttatcaacatttggctgactctaagaacgacaacgacaatatctttttgagcccattgagcatcagcaccgctttcgccatgactaagctgggcgcctgcaatgacacccttcagcagcttatggaagtcttcaaattcgatacaatctctgagaaaacatccgatcaaatacactttttcttcgccaaacttaactgcaggctttacaggaaggctaataaatcgtccaaacttgtgagcgcaaatcggttgtttggagacaaatctctgacctttaacgagacctaccaggatatctccgagctcgtatatggcgccaagttacagcctctcgactttaaggagaatgccgaacaatccagagcggcaattaacaaatgggtttctaacaagacggaagggagaatcactgacgttattccgagtgaagcgattaatgaacttactgtcttagtcctcgtcaatacaatatacttcaaaggcctgtggaaaagcaagttcagccccgagaatacccggaaggagcttttctataaggcagatggcgaaagctgttctgcctccatgatgtatcaggaaggaaaatttcggtaccgacgagtagctgagggaactcaggtcttggagctgcctttcaaaggcgatgacatcaccatggtcctgatcctgccgaaacctgagaagagccttgcaaaggtggagaaagagctaactcccgaagttttacaggagtggttggatgagctggaggagatgatgttggtggttcacatgcccaggtttaggattgaagatggcttttccctgaaggagcagctccaggacatgggactggttgatctgtttagtccagagaagagtaaactccctgggatcgttgccgagggccgtgacgatttgtacgtgtcagacgccttccacaaggctttccttgaggtcaacgaagagggatctgaggcagcggccagtacagcagtcgtaatcgctgggaggtctttgaatcccaatcgcgtgaccttcaaagcaaacaggccctttctggtattcatccgagaagtccctctaaacacaatcatcttcatggggcgggtggcaaatccatgcgtaaaa

SEQ ID NO: 9582 - DNA, 1392 bp, Artificial Sequence
  derived and/or modified sequence
atgtactcaaacgtcatcggcaccgtgaccagcggcaaaagaaaagtttacctgctgagcctccttctgatcggtttctgggactgtgtgacttgtcatggaagcccagtggacatttgtacagccaaaccgagagatatccctatgaaccctatgtgcatctataggagccctgagaaaaaagccactgaagatgaaggctctgagcagaagattcccgaagctactaataggagagtgtgggaactatcaaaggctaattctaggtttgctactaccttctaccaacatctggcagacagcaaaaacgataatgataatatattcctttcacctctttctatctctacagccttcgccatgaccaagcttggagcgtgcaacgacaccctgcaacagctgatggaagtcttcaaatttgacacgatcagtgaaaaaaccagtgatcaaatccattttttttttgcaaagcttaactgcaggttataccgcaaagccaacaagtcatctaagctggtgagtgccaatagactgtttggagataagagtctgactttcaatgagacctaccaggatatctcagagcttgtttacggcgccaagttacagccgttagactttaaagagaacgccgaacaatcgcgtgctgccatcaacaagtgggtgagcaacaaaaccgaaggacgcatcacagacgtgattccctctgaagctataaatgaactcacagttttggttctcgtgaacaccatttactttaaaggtctttggaagagtaaatttagccctgaaaacacccgtaaggaattgttttacaaggcagacggcgagagctgctcggccagtatgatgtaccaagagggcaaattccggtatagacgggtcgcggaaggcacacaagtgctggaactgccttttaaaggagacgacattacaatggtcctgatcttgcctaaacccgagaaaagcctggctaaagtagaaaaggagctgacccctgaggtgctccaagagtggctcgacgagttggaggagatgatgttagttgtccacatgcccagatttcggatcgaggacggtttctcacttaaagagcagcttcaggatatgggcctggttgatcttttttccccagagaagagcaagctgcctggcatcgtcgctgagggacgggacgatctttacgtcagtgatgcttttcacaaagcttttctcgaagttaacgaggagggctccgaggcagcagcctccaccgcagtggtgatcgctggaaggagtctgaacccaaacagagtgacattcaaggcgaatcgccccttccttgtgttcataagagaggtcccactgaataccattatctttatgggaagggttgcaaatccttgtgtgaag

SEQ ID NO: 9583 - DNA, 1392 bp, Artificial Sequence
  derived and/or modified sequence
atgtattctaacgtcatcggaacggttactagtgggaagcgaaaagtctacttgttgtccctcctgcttataggattttgggactgcgtgacatgtcacggatccccagtcgacatatgcaccgccaagccgcgggatattcctatgaatcctatgtgcatttataggtcgccagagaaaaaagcaacagaggatgaggggagcgaacagaagatcccagaagccacaaacagacgcgtgtgggaactgagcaaagctaatagtcggtttgccactactttttatcagcacctggcggattcgaagaatgacaacgataatatctttttgtctcctctgtctattagcactgccttcgcgatgacgaagctgggagcgtgtaacgacacactgcagcagctaatggaggtctttaaatttgataccatctccgagaaaacctccgaccaaattcattttttctttgcaaaactcaactgccggctctacaggaaagccaataaaagctccaaattagtgtccgctaaccgactttttggggataagtcattgacttttaatgaaacctatcaagacatcagtgaactggtatatggggccaagctccagcccttagactttaaggagaacgccgagcagtctagagcagctattaacaagtgggtgtctaacaagactgaaggtaggataacggacgtgattccgtccgaagccatcaatgagctgactgtgctggttctcgtaaatacaatttacttcaaggggctttggaagagtaaattttcaccagaaaacacgaggaaagagctcttctataaggcagacggcgaaagctgctcggctagtatgatgtaccaagaggggaagttccgctatcgcagggtggctgaggggactcaggttttggagctgcctttcaaaggcgacgacatcacaatggtgctcatcctccccaagccggagaagtcactagctaaggtggaaaaggaacttacacctgaggtgctgcaggaatggctggacgaactggaggagatgatgcttgtggtgcacatgcctcgcttcagaatcgaggacggatttagcctgaaggaacagttacaggatatgggactcgttgacctgttcagccccgagaaatcaaaacttccaggaattgtggccgaaggaagagatgacctgtacgtttctgatgcattccacaaggcatttcttgaggtcaacgaagagggttccgaagccgcagccagtacagccgtggttatcgcggggcgttcgttaaatcccaatagggttacatttaaggctaataggcccttcctcgtctttatccgggaagtccctttaaacaccatcatcttcatgggccgcgtcgcaaatccatgtgtgaaa

SEQ ID NO: 9584 - DNA, 1392 bp, Artificial Sequence
  derived and/or modified sequence
atgtactccaacgttatcggaacagttacctctggcaaacgcaaagtgtaccttctgtctttgctgctgatcggattttgggactgcgtcacatgtcacggcagccccgtcgacatctgcacagccaagcctagagatattcccatgaatcctatgtgtatttacaggagccccgagaagaaggcgaccgaggatgaaggttcagagcagaaaattcctgaagctaccaacagaagggtgtgggaactcagtaaagctaactctaggtttgcaaccacattctaccagcatctggcggattctaagaacgataacgataacatcttcctctccccactttctatctcaactgcattcgctatgactaaactcggtgcctgcaatgacaccctgcagcagctgatggaagtgttcaagttcgacacaatcagcgagaagacgagcgaccagatccacttcttttttgccaagcttaactgtaggttgtaccgcaaggctaacaagtcttccaaattggtgagcgctaaccgccttttcggagataagtcactcaccttcaatgagacctaccaggatatatcagaactggtatacggcgccaagctgcagccgctggacttcaaggaaaacgcggaacagtctagggctgctataaacaaatgggtgtcaaacaagactgagggcaggatcacagacgtcatcccttcagaggccatcaatgagctgaccgtgctcgtccttgtgaacaccatttatttcaagggtctgtggaagtcaaagttttccccagaaaacacccgcaaagagctgttttataaagctgacggagagagctgcagcgcctccatgatgtaccaggagggcaagtttagataccgcagggtggctgaaggaacccaggtcctcgaattgccgtttaaaggagatgatatcacaatggttctcatcctcccaaagccagaaaagtcattggcgaaagtggaaaaagagctgaccccggaggttctgcaagaatggctggatgagctggaagaaatgatgcttgttgtgcatatgcccaggttcaggatcgaggacggtttctccttgaaggaacaactccaggacatgggtctggtcgacctctttagccctgagaagtcaaagctcccgggcatcgtggcagagggtagagatgatctgtacgtatccgatgccttccacaaagccttcctcgaggtgaatgaagaaggctccgaggccgcggcttctactgccgtggtcatcgccggcagaagcttgaatccaaaccgcgtgacttttaaagccaataggcctttcctcgtgtttataagggaggtccccctgaacacaattattttcatgggacgcgtcgccaacccatgtgtaaag

SEQ ID NO: 9585 - DNA, 1392 bp, Artificial Sequence
  derived and/or modified sequence
atgtactccaatgtgattggaaccgtgacgtctgggaaacgaaaagtgtacttgcttagccttttgctgatcggtttttgggactgtgtgacctgtcacgggagcccggtcgacatctgtactgctaaacccagggatatcccaatgaatccgatgtgtatctacaggagtccggagaagaaggcaacagaggacgaaggaagtgagcagaaaatcccagaagctacaaatcgaagagtttgggagctttccaaggcaaattcacgattcgctacaacgttttatcaacacctggccgattccaagaatgacaacgacaacattttcctatccccactgtcaatcagcactgctttcgccatgaccaaactgggcgcatgtaacgacacgctgcaacagcttatggaagtctttaaattcgatacaattagcgagaagacttcggaccagatccacttcttctttgctaagctcaactgcaggctttataggaaggcaaataagagctctaagctcgtgtccgccaatagattattcggtgataagtccctgacatttaatgagacctaccaggacattagcgaattagtgtatggcgccaaattacagccactggatttcaaggagaacgctgaacagtccagagcggccataaataaatgggtgtcgaataaaaccgaaggcagaatcacagacgtgatcccatccgaggcgattaatgagctaacagtgctggttttggtgaatacaatctacttcaaggggctgtggaagtctaagttcagtcccgaaaacactcgaaaagaactgttctataaagcggacggggagtcatgttcggcctccatgatgtatcaggaaggaaaattccgttatagacgtgtcgcagagggaacgcaagttctagagctgcccttcaagggtgatgacatcacgatggtgcttatcctgccaaagcccgaaaaaagccttgccaaggtcgagaaagagctgacacctgaagtactgcaagagtggttagatgaattagaggaaatgatgctggtggtacatatgcctaggtttagaattgaagatgggttctcactcaaggaacagctccaggatatgggtctggttgacctcttttccccagaaaagtctaaacttccagggatcgtggcagaaggaagggacgatttgtatgtgagcgacgcctttcacaaggctttcctggaagtgaatgaggagggaagtgaagccgctgcatcgaccgcagtcgtaatcgctggcaggagtctcaatcccaatagagtaacctttaaagctaaccggccatttctcgtttttatacgagaggtccccctgaatacgatcatttttatgggccgggtagctaatccttgtgtgaaa

SEQ ID NO: 9586 - DNA, 1392 bp, Artificial Sequence
  derived and/or modified sequence
atgtattcaaatgtgatcgggactgtgacttccggaaaacggaaagtgtatctgttgagtttactgctcatcgggttttgggattgcgtaacatgtcatggatctcccgtggatatatgtacagccaaacccagggacattcccatgaaccctatgtgtatatatcggtcccctgaaaaaaaagccactgaggacgaaggatccgaacaaaaaattcccgaagccactaaccgcagagtgtgggaactctccaaggccaactcccggtttgctacaacattctatcagcacctggcagattctaagaatgataatgataatatatttttatcccctttgtcaatctctactgcgttcgcgatgacaaaacttggggcttgcaatgatacgttacagcagctgatggaggtgttcaaatttgatacaatttctgaaaaaactagtgatcagatacatttttttttcgccaaactgaattgccgcctatacagaaaagccaataaatcctcaaagctcgtcagtgccaacagactttttggagataaatcattaacattcaacgaaacataccaggatatctcagaactcgtgtatggggccaaactccaacccctcgattttaaagaaaatgcagaacagtcaagagctgccatcaataaatgggtgtcaaataagactgaagggcggatcacagatgttataccttcagaagccataaacgagttaacagtactcgttctggtcaacacaatttattttaaaggactttggaaatccaaatttagtcccgaaaatacacgaaaagagctattctataaagcagatggagaatcctgttctgcctccatgatgtatcaggaaggaaaattcaggtatagacgggtagcagaaggaactcaagttctcgaactacctttcaaaggggatgatatcactatggtgctgatacttcctaaacccgagaaatccctagctaaagtcgagaaggagctaacacctgaggttctgcaggagtggcttgacgaactcgaggaaatgatgctcgtcgtgcatatgcctcgcttcaggatcgaagatggatttagtctaaaagaacagttacaggatatgggacttgtcgatctgttttctcccgaaaaaagtaaactccctgggatagttgctgaagggagggatgatctctatgtttctgatgcctttcacaaagcttttctcgaagtcaatgaagaggggtctgaagctgcagcgtctactgcagtggttatagccgggcggtccctgaaccctaaccgggtcacattcaaagctaatcgaccctttctggtgttcatacgagaagtgccattgaatacaattatatttatgggacgcgttgccaacccctgtgtgaaa

SEQ ID NO: 9587 - DNA, 1392 bp, Artificial Sequence
  derived and/or modified sequence
atgtactcaaatgttattggcactgtgacgtccggcaagagaaaggtctacttgctttccttgctgctcattggattttgggactgcgtcacttgtcatgggagccccgtcgatatctgtacagcgaagccaagagacattcctatgaatcctatgtgcatataccgctcacccgagaagaaggcaactgaagacgaagggtcagagcaaaagattcccgaggccaccaacaggcgcgtttgggaactcagcaaagctaacagcaggtttgccacaacattttaccagcacctcgccgactccaagaatgacaatgacaacatctttctctcaccactttccatttccaccgcattcgcgatgaccaaactgggcgcttgcaacgataccctgcaacaactgatggaggtgttcaaattcgacaccatctccgagaagacctccgaccagattcattttttctttgcaaagctgaattgccgcttgtaccgcaaggccaacaagtctagtaagctggtcagtgctaataggctctttggggataagtctctgacctttaatgaaacttatcaggatatctctgagctggtttatggagccaagctgcagcctcttgattttaaagagaatgccgaacagtctagagctgcaatcaacaagtgggtgtcaaacaagacggaaggtcggataacagatgtaatcccttctgaggcgatcaacgaactcaccgtgctcgttctcgtgaatactatatactttaaggggctgtggaaaagcaagttctccccagagaatacgcggaaagagctcttctacaaagccgatggcgagagttgctcagcctcaatgatgtatcaagaaggaaagtttcggtacagaagagtggcagaagggacacaggtattggagctccccttcaaaggagatgacataaccatggttctgattctccccaaacctgagaaatccttggctaaggtggaaaaagaactgacccccgaagtgctccaggaatggcttgacgaactcgaggagatgatgctggtggtgcacatgccgagattcagaatcgaggatggattttcactgaaggagcaattgcaagatatggggctcgttgacttgtttagcccagaaaagtctaagctgccaggaattgtcgcagaaggtcgggacgatctgtacgttagcgatgctttccacaaagctttcctggaggtgaacgaggaagggtcagaggctgctgcgtctacagcagtagtcatcgctggccggtctcttaacccaaatagggtgacatttaaagccaacaggccctttctggtgtttattagggaggtccctctgaatacaataatcttcatgggccgggtcgccaacccatgcgtgaag

SEQ ID NO: 9588 - DNA, 1392 bp, Artificial Sequence
  derived and/or modified sequence
atgtactctaatgtaatcgggactgttacttccggtaaacgaaaagtttatctcctctctcttctcttgattggattttgggattgcgttacttgccatggttcgcctgtcgatatttgtacagcaaagccgcgtgatatacctatgaatcctatgtgcatctatagatcgcctgaaaagaaagccaccgaagatgagggctctgaacagaagattcctgaagccactaaccgcagggtttgggaactcagcaaggctaactctcgctttgctacgacattttatcagcatcttgctgattcaaaaaatgataacgataacattttcttatcacctctttctataagtacggctttcgccatgacgaagctaggcgcatgtaacgataccttacagcagcttatggaggtgttcaagttcgatacgatctctgaaaagacctcggatcagatacacttcttcttcgccaagctaaactgtagattataccgtaaagccaacaagagctcgaaactcgtgtcagctaacagacttttcggtgacaaatccctgacattcaatgaaacataccaggatatttctgaacttgtgtatggggcgaaattgcagcctttggacttcaaggagaacgccgaacaatcgcgtgcggctatcaataaatgggttagtaataagaccgaaggtaggattaccgatgttattccctctgaggccatcaacgagcttactgttttggtcctggtgaacaccatttatttcaagggactttggaagtccaaattttctcccgagaacacacgaaaggagctcttctataaagctgatggtgagagttgttcagcctcaatgatgtatcaagagggtaagttccgataccgtcgtgttgctgaagggacccaggtccttgagttgcctttcaaaggtgatgatattacaatggttcttatactcccaaagcctgagaagagcttggcgaaagttgaaaaagaactaactccagaggttctccaagaatggctcgacgagcttgaggaaatgatgcttgtagtccatatgcccaggttcaggattgaggatgggtttagtctcaaagaacagcttcaggatatgggactcgttgacctattctctcccgagaagagcaagctcccggggatagttgcagagggtagggatgatttgtatgtgtccgatgcctttcacaaagcctttctcgaggtgaatgaggaaggttccgaggcggcggcctcgacagctgttgttatcgctggtcggtctctcaatccaaacagggttaccttcaaggcaaatcgcccctttcttgtgtttatccgagaggtaccactgaacacgatcattttcatgggaagagtggctaatccttgtgtgaaa

SEQ ID NO: 9589 - DNA, 1392 bp, Artificial Sequence
  derived and/or modified sequence
atgtactcaaacgtaattggaaccgtgacttccggtaagcgaaaggtttacctattgtcacttctgctgatcggattttgggactgcgtaacatgccacggcagccccgtggacatctgcaccgctaagccccgtgacatccctatgaacccaatgtgtatttataggagtccagaaaaaaaagccacggaggatgagggaagcgaacagaaaattcccgaagctacgaaccgtagggtttgggaactgtctaaggccaactcaagattcgccaccactttttaccagcatctcgctgatagcaagaatgataatgacaatatcttcctgagtccgctgagtatttccaccgcattcgcgatgacgaagctgggcgcctgtaacgatacacttcaacagctaatggaggtcttcaagttcgataccattagcgagaaaacttccgatcagattcacttctttttcgccaaactgaattgtaggctgtatagaaaggccaataagtccagtaagctcgtgtctgcaaatagattgtttggcgataagtcccttactttcaatgagacgtaccaggacatctcagaattggtgtatggggctaagttgcagcccctggacttcaaagagaacgcagagcagtctcgggcggccattaacaagtgggtgtccaataagactgaaggccgaatcacagatgtaatcccctccgaggctatcaacgaactgaccgtactggttctcgtcaacactatttacttcaaggggctctggaagtcaaagttctcaccggaaaataccaggaaagagcttttttacaaggccgacggcgagtcctgctccgcatccatgatgtatcaggaggggaaatttagatatcggagggtggctgagggcacacaggtgctggagctgcccttcaaaggcgatgacatcacgatggtactaatcctgcccaagcctgaaaagtcactggccaaagtggagaaagagcttactcctgaggttctgcaggagtggctggacgaattagaggagatgatgctcgtcgtccatatgccacgcttcaggatcgaggatggattcagtttgaaggagcaactgcaggatatgggcctggttgatctattttccccagaaaagtcaaagctgcctgggatcgtcgcagagggccgggatgatctatatgtatccgacgcgttccataaggcattcttggaagtgaatgaggaaggaagcgaagccgctgcatccactgccgtcgtaattgcaggacgctcactgaaccctaatcgtgtcacctttaaggccaaccgcccttttcttgtttttatccgggaggtgccacttaataccataatctttatgggacgagttgccaatccctgcgtgaag

SEQ ID NO: 9590 - DNA, 1392 bp, Artificial Sequence
  derived and/or modified sequence
atgtattcaaacgtgattggaaccgtcacaagcggcaagagaaaggtttacctactgagcctgctcctgattggtttctgggattgtgtcacgtgccatgggtctcccgtggacatctgcaccgccaagccacgggacatcccaatgaatccaatgtgtatctacagatcacccgagaagaaggccacagaggatgaaggttcagagcagaagatccccgaagcaaccaatagacgggtgtgggagctgtcgaaagcgaatagtaggtttgcaacgacattttaccagcacttggccgatagcaaaaacgataacgacaacatctttcttagtcctctgtctatctctaccgcatttgcgatgacaaagctcggtgcgtgcaatgatacactacagcaactcatggaggtgttcaaatttgacacgatctctgagaagacatccgaccaaatccatttcttcttcgcaaagcttaactgtcggctttaccggaaagcaaacaagtccagtaaattggtgagtgcaaacagactttttggcgataagagtctaactttcaatgagacttatcaggacatcagtgagttagtatatggggccaaacttcagccgttggattttaaggaaaatgccgagcaatcacgagctgcgatcaacaagtgggtgagtaacaagaccgaagggagaatcaccgacgtgattccttctgaagctataaacgagctgaccgttctggtccttgtgaatactatttatttcaagggattgtggaaaagtaaattctcccctgaaaacacccggaaggaacttttttataaagctgacggtgagtcctgctctgcttcaatgatgtaccaggaggggaagtttcgctataggcgggttgctgagggaacccaggttttggagctccccttcaagggcgacgatatcaccatggttctgatcctccctaaaccggaaaagtccctggccaaagttgagaaggagctcacaccagaagtgctgcaagagtggcttgatgaattagaggagatgatgcttgtggtccatatgcccagattcaggatagaagacgggtttagtctgaaagagcaactacaggacatgggacttgttgacctgtttagccctgagaaatctaagttgcctggaatcgttgccgagggtagggatgatctctacgtgagcgatgccttccacaaggcatttttggaagtgaatgaagaaggttccgaggccgccgcctcgaccgctgtggtgatagctggtagatctttaaaccccaaccgcgtgacttttaaagctaacaggccattccttgtcttcatacgggaagtcccactgaacacgataatttttatgggaagggtggccaacccctgtgtaaag

SEQ ID NO: 9591 - DNA, 1392 bp, Artificial Sequence
  derived and/or modified sequence
atgtactccaatgtcatcggaacagtgacatcaggcaaaagaaaagtgtacttactgtctctcctactcatcggcttctgggattgcgtcacctgccacggctcccctgtcgacatttgtactgctaagccccgtgacatccccatgaaccccatgtgtatctatagatcccccgagaaaaaagctaccgaagacgaggggagcgaacaaaaaattccagaggccactaatagacgagtttgggagctgtcaaaggctaacagccgcttcgccaccactttctatcaacacctagcggacagcaagaatgataatgataacattttcttgagccctctgagcatcagcaccgcattcgcaatgacaaaactgggcgcctgcaatgacaccctccaacagctcatggaggtctttaagttcgacacgatttccgagaagaccagtgatcaaatccactttttctttgccaagcttaactgtcgcctgtaccgcaaggccaacaagtcaagcaagctagttagcgccaatagactttttggagacaagagtcttacctttaacgaaacctaccaggatataagtgagctcgtgtatggagctaaacttcagcctctggacttcaaggagaatgccgaacagagtagagctgcgatcaacaagtgggtatctaacaagactgaggggagaatcaccgatgtcatcccttcggaggctatcaatgagctgacagtgctggtgctagttaacactatctactttaagggcctttggaagtcaaaattttccccggagaatactcgtaaggagctcttctacaaggccgacggggaatcttgttcagcctccatgatgtatcaagagggaaagttcaggtatcggcgcgtcgccgaaggaacccaggttctggagctccctttcaagggagatgacattacgatggtcctgatcctcccaaaacctgaaaagtcacttgccaaggtcgaaaaagagctgaccccagaggtgttgcaggagtggttggacgagcttgaggagatgatgctggtcgtgcatatgccccgatttcggatcgaagacggcttcagcctcaaggaacagctacaggacatgggcctggttgacctattttcgccagagaaaagcaagttgcccggtatcgtcgctgagggaagggatgatctgtacgtgagcgacgccttccataaagccttccttgaggtcaacgaggaaggctctgaggctgcggcctcaactgctgttgttatcgcagggaggagtctcaaccctaaccgggtcactttcaaggcaaatcggcctttcttggttttcatccgtgaagtgccactcaacacaataattttcatgggcagagtcgccaacccatgtgtgaag

SEQ ID NO: 9592 - DNA, 1392 bp, Artificial Sequence
  derived and/or modified sequence
atgtattcgaatgtaataggtacggtaacgtcgggtaaacgaaaagtatatttattatcgttattactaataggtttttgggattgtgtaacgtgtcatggttcgccggttgatatatgtacggcgaaaccgcgagatataccgatgaatccgatgtgtatatatcgatcgccggaaaaaaaagcgacggaagatgaaggttcggaacaaaaaataccggaagcgacgaatcgacgtgtttgggaactatcgaaagcgaattcgcgttttgcgacgacgttttatcaacatctagcggattcgaaaaatgataatgataatatatttttatcgccgctatcgatatcgacggcgtttgcgatgacgaaactaggtgcgtgtaatgatacgctacaacaattaatggaagtatttaaatttgatacgatatcggaaaaaacgtcggatcaaatacattttttttttgcgaaattaaattgtcgactatatcgtaaagcgaataaatcgtcgaaactagtatcggcgaatcgtttatttggtgataaatcgctaacgtttaatgaaacgtatcaagatatatcggaactagtatatggtgcgaaactacaaccgttagattttaaagaaaatgcggaacaatcgcgagcggcgataaataaatgggtatcgaataaaacggaaggtcgtataacggatgttataccgtcggaagcgataaatgaactaacggttttagttctagtaaatacgatatattttaaaggtctatggaaatcgaaattttcgccggaaaatacgcgaaaagaattattttataaagcggatggtgaatcgtgttcggcgtcgatgatgtatcaagaaggtaaatttcgatatcgtcgagttgcggaaggtacgcaagtattagaattaccgtttaaaggtgatgatataacgatggtactaatactaccgaaaccggaaaaatcgctagcgaaagtagaaaaagaattaacgccggaagtattacaagaatggctagatgaactagaagaaatgatgttagtagtacatatgccgcgttttcgtatagaagatggtttttcgctaaaagaacaactacaagatatgggtttagtagatttattttcgccggaaaaatcgaaactaccgggtatagtagcggaaggtcgtgatgatctatatgtttcggatgcgtttcataaagcgtttttagaagtaaatgaagaaggttcggaagcggcggcgtcgacggcggttgtaatagcgggtcgatcgttaaatccgaatcgtgtaacgtttaaagcgaatcgaccgtttctagtatttatacgtgaagtaccgctaaatacgataatatttatgggtcgtgtagcgaatccgtgtgtaaaa

SEQ ID NO: 9593 - DNA, 1392 bp, Artificial Sequence
  derived and/or modified sequence
atgtactcgaacgtcattggcacagttacctccggcaaacggaaggtttacttgctgtccctgcttctgatagggttttgggattgtgtgacctgccatggatcccccgtagacatttgtaccgctaaacccagggacatccctatgaacccgatgtgcatataccggtcccccgagaaaaaagccaccgaggacgagggcagcgaacaaaagatacccgaggccaccaaccggcgggtgtgggaactgagcaaagcaaacagcaggtttgctaccaccttttaccagcatcttgctgactccaaaaacgacaatgacaacattttcctgtccccactttccatttctaccgcttttgccatgactaagctgggcgcttgcaacgacaccctccagcagctgatggaggtttttaaattcgataccatttccgagaaaacaagcgatcagatacacttcttctttgcaaagctcaattgcagactgtatcggaaggcaaataaatcgtctaagctggtctctgccaacaggcttttcggtgacaagtcactcacgttcaatgagacttaccaggacatatctgaactggtgtacggggctaagctgcagcctttggatttcaaagagaatgctgagcagtctagggcggctataaacaaatgggtctccaacaaaacagagggccgcattaccgacgtaattccttctgaggctatcaatgagctgaccgtgctggttctggtgaacacgatctattttaagggcctgtggaagtctaaattcagtcctgaaaacaccaggaaggagctgttctacaaagccgatggggagtcctgttctgcatctatgatgtaccaggaagggaaattccggtacagacgagtggctgaaggcacccaggtgctggaactgcccttcaagggcgatgacattaccatggtgttaatcctacccaagccggagaaatcgctggcgaaagtggaaaaggagctgactcctgaggtgcttcaggagtggctggatgagctggaggagatgatgttggtcgtacacatgcctagatttcggatagaggacggcttttcccttaaagagcagctccaagatatgggattagtggacctctttagtccagagaaatctaaattgccaggtatagtggcggagggcagagacgacctgtacgtgtccgatgcttttcacaaagcttttctcgaagttaacgaggagggctcggaggcagccgccagcacagccgtggtcatagcggggaggtcactgaacccgaaccgggtgacattcaaggcgaacagaccgttcctcgtcttcatccgcgaagtgcctctgaatacaattatttttatgggtagagtcgccaatccatgtgttaag

SEQ ID NO: 9594 - DNA, 1392 bp, Artificial Sequence
  derived and/or modified sequence
atgtattcaaatgtcataggcaccgttaccagcggaaaaagaaaagtgtatctactgtccctgctgctcattgggttctgggactgcgtgacatgccatggtagccccgttgacatatgtacagcaaaaccccgagatatacctatgaacccaatgtgtatatataggtcccctgagaagaaagctactgaggacgaagggagcgaacagaaaattcccgaggctacaaaccggcgggtgtgggagctatccaaggccaacagccggttcgccactactttttatcagcacctggccgattctaaaaatgacaatgacaatatctttctgagcccactgtcaatctctactgctttcgcaatgactaagttgggtgcctgtaacgataccttacagcaactaatggaagttttcaaatttgacacaatatctgaaaagacatctgaccaaattcatttctttttcgccaaattaaactgtcgtttatataggaaagctaacaagtcttctaaactggtgtccgctaatagactgttcggggacaaaagtcttacctttaatgaaacatatcaggacatttccgaactagtctacggcgctaaattgcagccactggacttcaaagagaatgctgagcagagtcgagccgccatcaataagtgggtgtccaacaagacagaaggtcgcattaccgacgttataccatctgaagcaataaatgagctcaccgttcttgttctggttaacactatatatttcaagggactgtggaagagtaagttttctcccgaaaatactcgcaaggagctgttttacaaagcagatggagagtcatgttctgccagcatgatgtaccaagaagggaagttccgctataggagggtggccgaggggacacaggtgctggagctgccctttaagggggacgacatcaccatggtgctaattctccccaagcccgagaaatccctcgcaaaagtagaaaaggaattaacacctgaagtgctgcaggaatggctcgacgaactagaagagatgatgctcgtggtccatatgcccagatttagaatagaggatggcttctccctgaaagaacagctgcaggacatgggcttggtggacctgttcagtccagagaagagtaaactgcctggcattgttgccgagggtcgcgacgacctgtatgtttccgatgcattccacaaagccttcctggaagtaaatgaagagggcagcgaagcagcagcttcaactgctgttgttattgctggccggtctctgaaccctaatcgcgtgacttttaaagcaaacagacctttcctagtcttcattcgcgaggtgcctctgaacactattattttcatggggagggtcgcaaatccatgcgtgaaa

SEQ ID NO: 9595 - DNA, 1392 bp, Artificial Sequence
  derived and/or modified sequence
atgtacagcaacgtgatcgggaccgtgactagcggaaagagaaaagtgtacctcctgagcctgttgctaatcggtttttgggattgcgtcacgtgccacgggtcgccagtagatatatgcactgccaagccacgagatattcccatgaacccaatgtgcatttacagaagccccgagaagaaagctactgaggacgaggggtctgagcaaaaaatcccagaggccactaatagacgcgtctgggaactctctaaggccaactcccgatttgcaacaaccttttaccaacacctagctgacagtaagaatgacaatgacaacatcttcctgtcccccctcagtatcagtacagcttttgctatgaccaaactcggcgcatgtaatgataccctgcagcaacttatggaagtgtttaagtttgatacaattagcgaaaagaccagcgatcagatccatttcttctttgccaagctaaattgccggctgtatcgtaaggctaacaaaagttcgaaactcgtgagcgccaacagactgttcggagacaaaagtttgaccttcaacgagacataccaagatatatcagagctggtctatggagcgaaactgcagccactcgattttaaagaaaacgccgagcaatctcgagctgcaatcaacaagtgggtgagcaacaagaccgagggccgcatcactgatgtgattccgagcgaagccatcaacgaactgacagtgctggtgttggtgaacacgatctactttaaaggattatggaaaagcaaattctcaccggagaacacaaggaaagagctgttttataaggctgacggcgaaagttgcagtgcatcaatgatgtatcaagaagggaagttcagatatcgtcgagtcgccgaaggtactcaagtcttggagctaccatttaagggggacgatattaccatggtgttgatccttcccaaaccggagaagtccctggccaaagtcgagaaagagctgactcctgaggtcctccaggagtggctcgacgagctcgaggaaatgatgcttgttgttcatatgccacgattccggatcgaagatggcttttccctgaaggagcagctccaggatatgggcttggtggatctctttagccccgaaaagagcaaattaccaggcatcgtggcagagggaagggacgacctgtacgtttctgacgccttccacaaggcttttttggaagtgaatgaggagggcagtgaggctgccgcaagtactgcagtagtgatagccggccgcagtcttaacccaaatcgggtgacctttaaggccaataggccttttctcgtgttcatccgtgaggttcccctgaatacaattatcttcatgggcagggtcgcaaacccttgtgtcaag

SEQ ID NO: 9596 - DNA, 1392 bp, Artificial Sequence
  derived and/or modified sequence
atgtacagcaacgttattggaactgtcacatccggcaaaagaaaggtttatctgctgtccctgcttctgatcggtttctgggattgcgtcacctgccatggttcaccggtagacatctgtaccgccaagccgagagacatcccaatgaacccgatgtgcatttaccggagccccgagaaaaaagctaccgaggacgaagggtcagagcagaagattccagaggcgaccaatcgccgcgtttgggagctgtctaaagcaaacagccgattcgccacgacattttatcagcatctggcagattccaaaaatgataatgacaacatattcctgagccccctgtctatttcaactgcgtttgccatgactaagctcggcgcctgtaatgatacactccagcagcttatggaagtattcaaatttgacacgatctctgaaaagaccagtgatcaaatacattttttctttgctaagctgaactgcagactgtacagaaaagcaaacaaatcttccaagctcgtgtccgccaatcgccttttcggagataaatctctcacgtttaacgagacttatcaggatattagcgagctggtgtacggcgctaaactccagcctctggactttaaagagaatgctgaacagtctagggctgccataaataagtgggtgtccaataaaaccgagggcaggattaccgatgttataccctccgaggctattaacgagctgacggtcctcgtgctggtgaataccatatactttaagggcctttggaagtcaaagttctcccccgaaaacactaggaaggagctcttttataaagctgatggggagagttgctccgcttcaatgatgtatcaggaaggcaaattccgctacaggagggtggcggaagggacgcaggttctggaactgccctttaagggcgacgatatcacgatggtcttgatcctgcctaagccggagaaatccctggctaaagtagagaaggagcttactcctgaggttctccaggagtggcttgatgaactcgaggaaatgatgttggtggtccatatgccgagattccgaatcgaggacgggttcagcctcaaagaacaactccaggacatgggcttggtggaccttttttctcccgaaaaaagcaaactgcctggaatcgtcgctgaggggcgggatgacctgtacgtgagcgacgcctttcacaaagcctttctggaagtcaacgaggaggggtctgaagctgcggcctccacagccgtggtgattgcagggaggtccctgaaccccaacagagttacatttaaggccaacagaccgttcctcgtgtttatacgcgaagtgcccctgaacaccattatatttatggggagagttgctaacccctgcgtgaaa

SEQ ID NO: 9597 - DNA, 1392 bp, Artificial Sequence
  derived and/or modified sequence
atgtatagtaatgttattggtactgtaaccagtggaaaaagaaaagtttacttattgtctttattacttataggtttctgggattgtgttacctgtcacggatcaccagtagatatttgtacagcaaaaccaagagatattccaatgaatccaatgtgtatttatagatcacctgaaaaaaaagctactgaagatgaaggttctgaacaaaagattccagaagctacgaatcgaagagtttgggaattaagtaaagcaaattcaagatttgctacaacattttatcaacatttagctgattcaaaaaatgataatgataatattttcttaagtccacttagtatttctacagcttttgctatgacaaagttaggagcatgtaatgatacattacaacaattaatggaagtatttaaatttgatacaatttcagaaaaaaccagtgatcaaattcatttcttttttgctaaattgaactgtaggctttatagaaaagcaaacaaatcatcaaaattagttagtgcaaacagattatttggagataagtcacttactttcaacgaaacttaccaagatatttcagaattagtttatggagctaaattgcaaccactagatttcaaagaaaatgcagaacaatcaagagcagcaataaataaatgggttagtaataaaactgaaggacgtattactgatgtaattccttctgaagctattaatgaattaacagttttagttttagttaatacaatttattttaagggtctttggaaatctaaattttcaccagaaaatactcgtaaagaattattttataaagcagatggtgaatcttgttcagcttctatgatgtatcaggaaggaaaatttagatatagacgagttgcagaaggaacacaagtgttagaattaccttttaagggagatgatattacaatggtattaatattaccaaagccagaaaaatctttagctaaagtagaaaaagaacttacaccagaagttttgcaagagtggcttgatgaacttgaagaaatgatgttagttgttcatatgccaagatttagaattgaagatggattttcacttaaagaacaattacaagatatgggtttagtagatcttttttcaccagaaaaatcaaaacttccaggaattgttgcagaaggaagagacgatctttacgtgtcagatgctttccataaagcatttttggaagttaatgaagaaggatcagaagcagcagcaagtactgcagttgtaattgcaggaagaagtttaaatccaaatagagtaacatttaaagctaatcgtccatttcttgttttcattagagaagttccattaaatactattatttttatgggacgagttgctaatccttgtgttaaa

SEQ ID NO: 9598 - DNA, 1392 bp, Artificial Sequence
  derived and/or modified sequence
atgtatagcaacgtaattggcaccgtgaccagcggcaagagaaaagtatatctgctatcccttctcctcatcgggttctgggactgcgttacgtgccacggcagtcccgtcgacatctgtaccgccaagcctcgggacatccctatgaaccctatgtgtatttatcgctccccggaaaagaaggcaacagaagatgaaggctcagagcaaaagattccagaagccaccaatcgtagggtgtgggaactctcaaaggctaacagcagatttgcgacgacattttaccaacatctagctgattctaaaaacgacaacgacaatatcttcctttcccctctgagtatctccaccgcctttgctatgaccaagctcggcgcgtgtaacgacaccctccaacagcttatggaggtcttcaagtttgacaccatctctgaaaagactagcgatcagattcacttcttcttcgcgaagctgaactgccggctgtacaggaaggcaaacaagagctccaagttggtctccgccaataggttgttcggagataagtctctgaccttcaacgagacctatcaagacatctcagagctggtatacggcgcaaaacttcaaccactggattttaaagagaacgcagagcagtcgagggccgcaattaacaaatgggtcagcaacaaaacagagggtagaataacagacgtgatccctagcgaggccatcaatgagcttacagtcttagtgttggtgaacactatatactttaaaggattgtggaagagcaaattttctcctgagaacactcggaaggaacttttctataaagctgacggggagtcctgctcggcctctatgatgtaccaggaggggaaatttcgataccgtcgggttgcagaaggcacccaagtcttggagctccccttcaaaggagacgacatcacaatggtgctgattcttcctaaacccgagaagagcttggcaaaagtcgagaaggagctcacacccgaagtgctgcaggagtggcttgatgaactggaggagatgatgctagtggtgcacatgccacggtttcggatagaagatggattttctctcaaagagcaactgcaggacatgggcctcgtggacctttttagcccggagaagtccaaactgccaggtatagttgccgaaggcagagatgatctttatgtgagcgatgcatttcataaggccttcttggaagtaaacgaggagggatcagaggcggctgctagtacagctgtggtcatcgcaggcagaagcctcaaccccaaccgggtgaccttcaaagctaacaggccatttttagttttcatccgcgaggtgccactcaataccatcatctttatgggcagggtggctaacccttgcgtgaaa

SEQ ID NO: 9599 - DNA, 1392 bp, Artificial Sequence
  derived and/or modified sequence
atgtacagcaatgttattggaactgttactagcgggaaacgaaaagtttatcttctatcacttcttctgatcggcttctgggattgtgtgacttgccatgggtctccggttgacatctgtaccgctaaacccagagatattcctatgaaccctatgtgtatttaccgttcccccgaaaaaaaagccacagaagatgaaggctctgaacagaagataccagaagcaaccaacaggcgcgtctgggagctgagcaaagcgaactctcgatttgcaaccacattctaccagcatttggcagacagcaagaacgacaacgacaacatatttctatcccccttgtccatctctacagcatttgctatgacgaaactgggggcctgtaatgacactttgcagcagctgatggaggtgtttaagtttgatactatttccgagaaaacctctgaccagatccacttcttcttcgccaagctgaattgtcgcctgtataggaaagctaataaatctagtaaactggtgtcagcaaaccgcctgtttggcgacaaatcactgacattcaacgaaacttaccaggatatatctgagttagtttacggcgctaaactgcaaccactggacttcaaagagaatgcagagcagtctagggccgccattaacaagtgggtgagcaataaaactgaagggcggataactgacgtgatcccatcagaggccataaacgaactgaccgtcctggtgctggtgaataccatctacttcaagggcctctggaagtctaaatttagcccagagaatacgcgcaaggagctgttttacaaggccgatggcgagtcttgctccgcgtctatgatgtatcaagaagggaaattccggtaccggagagttgcagagggtacccaagtgctagagctacccttcaagggggacgacattacaatggtgcttattctgccgaagccagaaaagagccttgcaaaggtagagaaggaactcacgccagaggtcctccaagagtggcttgatgaactggaagaaatgatgctggtggtccacatgccacggtttcgaattgaggatggatttagtttgaaggagcaactacaggatatgggtttggtggacttattctctcccgaaaagagcaagctacccgggatcgtcgctgagggcagggacgatctgtacgtgtctgacgcctttcataaagcttttttggaggtgaacgaagaggggagcgaggccgccgcctcaactgctgtcgtgatcgctgggcgcagcctgaaccccaatagggtgacattcaaagctaatcggccatttctggtgtttatccgtgaggttccactgaatacaatcatattcatgggaagggtggccaacccatgtgtcaaa

SEQ ID NO: 9600 - DNA, 1392 bp, Artificial Sequence
  derived and/or modified sequence
atgtattctaacgtgattggcacggttaccagtggaaagagaaaagtttacttactatctcttctgttaatcggtttttgggattgcgtcacctgtcacggctctcccgtggatatttgtaccgcaaagcctcgagacattcctatgaatcctatgtgtatttaccgctcacctgaaaaaaaggcgactgaagacgagggttccgaacaaaagattcctgaagcgacgaatcgtcgcgtatgggaactgagcaaagctaattctcgttttgcgacgacattttatcagcatttagccgattcaaaaaatgacaacgataacatttttttatcgccgctttccatcagcaccgcgttcgcgatgactaaacttggagcttgtaatgatacacttcagcaattgatggaagtctttaagtttgacacaattagcgaaaaaacttctgatcaaattcatttctttttcgcaaagttaaactgtcgactttatcgtaaagctaacaaatcatcaaaactcgtgtcagctaaccgcctgttcggagataaatctctgacgttcaatgaaacgtaccaagacatttcagaacttgtttatggagccaaactgcagcctttagattttaaagagaacgctgaacaatcacgagctgcgataaataaatgggtttcaaataaaacggaagggagaatcacagacgttatcccctcagaggcgatcaacgagctaacagtcctggtacttgttaacaccatctattttaaaggcttatggaaatcaaaattttccccagaaaacactagaaaagaactgttttataaagcagatggcgagagttgtagcgcatcaatgatgtaccaagaaggaaaatttcgttaccgtcgcgtagcggaaggcactcaggttttggagcttccgtttaaaggtgacgacattacgatggttctaatcttaccgaaaccagagaaatctcttgcaaaagttgaaaaagaactcacaccggaagttcttcaggaatggttggacgagttggaagaaatgatgttagttgtacatatgcctagattccgcatcgaagacggattttcattaaaagaacagcttcaggacatgggattagtggatttgttttctccggaaaaatcaaaactgcccggtatcgtcgcggagggcagagacgatctttatgtcagtgatgcgttccacaaagcgtttctggaagtgaacgaagaaggaagcgaggcggcagcgtcaacagcggtagtcattgcaggcagaagtttaaatccgaatcgtgttacatttaaagcgaaccgcccgtttttagtgtttatccgtgaggtgccactgaatacaattatttttatgggtcgtgtggctaatccgtgtgttaaa

SEQ ID NO: 9601 - DNA, 1392 bp, Artificial Sequence
  derived and/or modified sequence
atgtactctaacgtcatagggaccgtcacctctgggaaaaggaaagtgtatctactgtctctgctgctcatagggttctgggactgtgtgacctgccatggtagccccgtcgacatatgcaccgccaagcccagggacattcctatgaaccctatgtgtatatataggtccccggaaaagaaagctactgaggacgagggcagcgaacaaaagattcctgaagcgaccaataggcgggtatgggagctttcaaaggctaattctaggttcgccacaactttttaccaacatctggctgatagcaaaaacgataacgataacatcttcttgtcacccctcagcataagcaccgcttttgctatgaccaagcttggcgcttgtaatgacacattgcagcagttgatggaagtctttaagtttgacacaattagcgaaaaaacgtcagaccagatacatttcttctttgctaagctgaattgtaggctgtaccgtaaggcaaacaaatcatctaaactcgtgtccgccaaccggctctttggcgataagtcactgacatttaacgaaacttaccaagatatttcagagctcgtatacggcgcaaaactccagcccctcgatttcaaagagaatgctgaacaatctagggcagccattaacaaatgggtttccaataaaacggaggggcgcatcacagacgtgatccccagtgaggccatcaacgaattgaccgttctagtgctggtcaacacaatctacttcaagggcctttggaaatcaaaattctcgcccgaaaacacacgaaaggagttgttttacaaggcggatggcgagtcctgctctgcctcgatgatgtaccaagagggcaaatttaggtaccgtcgggtggctgagggaacccaggtgctggagctccctttcaagggagatgatatcactatggtgttaatcctcccaaaaccagagaagagtctagcgaaggtggagaaagagttgaccccggaagtgttacaggagtggctggatgaactggaagagatgatgctggtagtgcacatgccccgttttcgaatcgaagacggcttttcacttaaagagcagctccaagacatgggactcgtcgaccttttttcccctgagaagtctaaactgcctggtatcgtggctgaggggcgcgacgacctctacgtgagcgatgcttttcataaggcctttctcgaagtaaatgaggaagggagtgaagctgctgcctcaacggcggtagtgatcgcaggtcggtccttaaatccgaaccgggtaacctttaaggcgaaccgaccttttttggtgtttataagggaggtgccactgaacactatcatctttatgggacgagtggccaacccatgcgttaag

SEQ ID NO: 9602 - DNA, 1392 bp, Artificial Sequence
  derived and/or modified sequence
atgtacagcaacgtaatcggaactgtgacctctggcaagcgtaaggtgtacctgctgtcattgttgctgatcggattttgggattgtgtcacctgtcacggcagcccagtcgacatttgcacagctaagccaagggacatcccaatgaatccaatgtgtatctacaggtccccagaaaagaaggccaccgaggatgaaggatctgagcaaaaaatccctgaggctactaaccgtcgtgtgtgggagcttagcaaagctaactctcgcttcgcaactaccttctaccaacacttggccgactctaagaacgataacgataacatcttcctctcccccctgtctattagtaccgctttcgcaatgaccaagcttggagcctgcaacgacaccctgcagcagctgatggaggtattcaagttcgataccatttctgagaaaactagcgaccagatacacttttttttcgccaagctcaactgccgtttgtaccgtaaagccaacaagtcctcaaagctggtgtctgctaacaggttgttcggcgacaagtccctgaccttcaatgaaacatatcaggatatttcagaactggtctatggagctaaactgcaacctctcgattttaaggaaaatgcagaacagagtagagccgctataaataagtgggtttcaaacaagacagagggtagaattacagacgtgataccatccgaggccatcaacgagctgaccgttctggtacttgtgaacaccatctactttaagggcttgtggaagtcaaagttctctcctgagaatacccgcaaggaattgttctacaaggccgatggcgagtcttgctcagcttctatgatgtaccaagagggcaagtttaggtacagaagagtagcagagggaacacaggtgctcgagctgccttttaagggcgacgacatcaccatggtcctcatcttgccaaagcccgaaaaaagcttggctaaggtcgagaaggaactcacaccagaggtcctccaggagtggcttgatgaactggaggaaatgatgctggtggtgcatatgcctaggttcaggatagaggatggcttctccctgaaggagcaactgcaagacatgggactggtcgatctgttctctccagaaaagtccaagctgccaggcatagttgctgaaggcagggatgatctgtatgtttccgatgccttccacaaggcttttcttgaagtgaacgaggagggttccgaggctgccgcttctaccgcagtagtgattgccggacgtagtctcaacccaaacagggtgacattcaaagcaaatcgccctttcctcgtgttcattagggaggtgcccctcaacaccatcatcttcatgggacgtgtggcaaacccttgtgtgaag

SEQ ID NO: 9603 - DNA, 1392 bp, Artificial Sequence
  derived and/or modified sequence
atgtactccaacgttatcggcacagtcaccagcggtaagagaaaagtctatctgctcagcctgctactcatcggtttctgggactgcgtgacctgtcatggcagccctgtagacatctgcaccgccaagccacgggatattccaatgaacccgatgtgcatctaccggagtcccgaaaaaaaggctacagaagatgaggggtctgagcaaaaaatcccggaggcaaccaacaggagggtttgggaactaagcaaggcgaatagccggttcgcgacaaccttctaccaacatttggcagactctaagaatgacaatgacaatatctttctgagtcccctgagtatcagtaccgcgttcgctatgacgaagttgggtgcgtgcaacgatacactacagcagttgatggaggtgtttaaattcgacacaattagtgagaaaacaagtgatcaaatccatttttttttcgccaagcttaactgccggctttaccgcaaagccaacaagtcgtccaagctggtcagcgcgaatcggttgttcggcgacaagagtttaacatttaatgagacctatcaggacatttctgaactagtgtacggagcaaaactgcaacctctagatttcaaggaaaatgctgaacagagccgcgcagccatcaataagtgggtgtcaaacaagaccgagggtagaataaccgatgtcattccaagcgaggcgatcaatgagttaacggtgctggtactggtgaacacaatttacttcaaaggcctgtggaaatctaagttctccccagagaacactaggaaagaattgttctataaggccgatggtgagtcttgctcagcaagtatgatgtaccaggaagggaagttccggtacagacgcgttgccgagggcacccaagtgttggagctgccttttaagggggatgatatcactatggttctgattctgcccaagcccgagaagtctctggccaaagtagaaaaggagcttacccctgaagtgctgcaggagtggctagacgagctggaggagatgatgctcgtggtgcacatgccacgcttcaggatcgaggacggattttccctgaaggagcagctgcaggacatggggctcgttgatctctttagcccagagaagtcgaagttgcctggaattgtggcagaggggcgagacgacctgtacgtaagtgatgccttccacaaagccttcctagaagtgaacgaagaaggatccgaggcagccgcctccacagctgtagtcatcgcaggaaggtccttgaatccaaatcgggtaactttcaaggcaaatcgacctttcctagtgtttatcagggaagtgccactcaatacaataattttcatggggcgggtggcaaatccgtgcgtaaaa

SEQ ID NO: 9604 - DNA, 1392 bp, Artificial Sequence
  derived and/or modified sequence
atgtacagcaatgtcatcggaacagtaacctcgggcaaacgcaaggtttatctcttgagcctactgctaattggcttttgggactgtgtgacgtgtcatggctctcctgtcgacatttgtactgccaagccgcgtgatatccctatgaaccctatgtgcatttatagatccccggagaagaaggccacggaagacgagggcagcgaacaaaaaatccccgaagcgactaatcgacgagtttgggaactatccaaagcaaattcgcgattcgccaccaccttctaccaacacttggctgattcgaaaaacgacaatgataacatatttctctcgccgctctcaatttccacggctttcgccatgactaagctgggcgcgtgtaacgacactctccagcaactcatggaagtcttcaaatttgacacgatttcagaaaaaaccagcgatcagatccatttttttttcgcgaaactgaattgccggctttatagaaaggctaacaaatccagcaagcttgtttcagccaataggctgtttggagacaagtctctgacttttaacgagacttatcaggatatcagtgaactagtgtatggcgctaagctacaacccttggacttcaaggagaatgcggaacagtcccgggcggcaataaacaagtgggtgagtaacaagacagagggccgtatcactgatgtgatcccttccgaagctattaatgagttgaccgttttagtccttgttaacactatctattttaaggggttgtggaaatccaaattcagccctgagaatactcggaaggagctcttttacaaagcggatggcgagagttgcagtgctagcatgatgtaccaagagggaaagtttcggtataggcgcgtcgcagaaggaacgcaagttttggaactgcccttcaaaggagatgatatcactatggttttgatactccctaagccagagaagtctcttgcaaaggtagaaaaggaattgactcccgaggttctccaggagtggcttgacgaactggaagagatgatgttggtcgtccacatgccccgcttccgcatcgaggacgggttttcccttaaggagcagctgcaagatatgggtttggttgatctgttcagccccgagaagagtaaactcccgggcattgtggctgagggccgcgatgacttatacgtctctgacgcctttcataaagcgttcctggaagtcaacgaagagggttctgaggccgcagcatccacggcagttgttattgccggtcgcagccttaacccaaaccgtgtgacgtttaaggcaaatcgtccgttcttggtcttcattagggaggtcccattgaacacgattatttttatgggtagggttgcaaatccctgcgtcaag

SEQ ID NO: 9605 - DNA, 1392 bp, Artificial Sequence
  derived and/or modified sequence
atgtactctaacgtaatcggaacagtgacttcaggaaaacgaaaggtgtatctccttagtttacttctcatcggattctgggattgtgttacatgccatgggtcgcctgtggatatatgtacagccaagcctcgggatatccctatgaatccaatgtgcatctacaggtcgcccgaaaaaaaagccacagaggacgagggatcagagcagaaaatacctgaagccactaaccggcgcgtatgggaactctcaaaagcaaattcccggttcgctacaacattttatcaacatcttgcggattctaaaaatgataatgataatatatttctttcaccactgtcaatatcgacagcttttgccatgacgaaactcggagcatgtaatgatactttacagcagcttatggaagtcttcaaatttgatacaatctctgaaaaaacatcagatcagatccatttctttttcgcaaaactcaattgtagactctatagaaaagcgaacaagtcatcgaaacttgtgtccgccaaccgactcttcggagataaaagtctgactttcaatgagacgtatcaggacatcagtgagcttgtgtatggggcgaaattacagcccctcgattttaaggaaaatgccgagcagtctcgggccgccatcaataaatgggtgtccaacaaaacagaaggaagaattactgatgtgataccatccgaagcaataaacgaattgactgtgctcgtgttagtcaatactatatacttcaaaggattgtggaagtccaaattcagtcctgagaatacaaggaaagaacttttctataaagctgacggggaatcgtgttctgcttctatgatgtatcaggaggggaaatttcggtatcggcgggtcgcagaaggaactcaggtactggaattgcctttcaaaggggacgatatcacaatggtactaatattgccgaaacccgagaagtctctcgctaaagtggaaaaagagctcacacccgaagtgctccaggaatggctggatgaactggaagaaatgatgttagtggtgcacatgccacggttcagaattgaagatgggtttagtttaaaagaacagctacaggatatgggacttgttgatctgttcagtcccgaaaaatccaaactacccgggatagtcgctgaagggcgcgatgatctctacgtctctgatgcatttcataaagcatttcttgaagttaacgaggaaggatctgaggctgcagcttctactgccgtagtaatcgctggaagaagtctcaatcctaatcgcgtgacatttaaagccaatcggcctttcctggtctttatcagggaagtacctctcaacacaataatctttatggggagagtggccaacccctgtgtgaaa

SEQ ID NO: 9606 - DNA, 1392 bp, Artificial Sequence
  derived and/or modified sequence
atgtacagcaatgttattggcacagtcaccagcggaaaacgcaaggtgtatctgctgagcctgcttctcattggtttttgggattgtgtcacctgccacggtagccctgtcgatatctgcacggcaaaacctcgtgacatccctatgaacccgatgtgcatttaccgctcccctgagaagaaagctacagaggacgagggttccgaacagaaaatcccagaggccactaaccgccgagtttgggaactgagcaaagcgaatagccggtttgcgaccacgttctatcagcacctggcggacagcaagaatgacaacgataacatttttctgagcccgctgagtattagcacggccttcgccatgacgaaactgggggcgtgcaacgataccctccaacagctcatggaagtttttaaatttgatacgatcagcgaaaaaaccagcgaccagattcattttttctttgctaaactgaactgccgactgtaccgcaaagcaaataaaagctctaaactggtttctgccaatcggttgtttggtgacaagtccctgacctttaacgagacctatcaggacatttctgagctggtttacggtgccaaacttcaacctttggattttaaggagaacgctgagcaatcacgcgccgcaatcaacaagtgggttagcaacaaaaccgagggtaggattacggacgtcattccgagcgaggcgatcaatgagctgactgtgcttgtcctggtgaacaccatctatttcaagggcctttggaaatcaaaattcagcccggaaaacacgcgcaaagagctgttttacaaagccgatggagagtcctgctccgcgtccatgatgtaccaggaggggaagtttcgctaccggcgcgtcgctgagggtacgcaggtgctggaactgcctttcaagggtgatgatatcaccatggtgctgatcctaccaaaaccagagaagtcactggcgaaggttgaaaaagagctgaccccagaggtgctccaggagtggctggacgagctggaggaaatgatgctggtcgtgcacatgcctcgctttcgcatagaagacggcttttcgctgaaggagcagctgcaggatatgggcctggtggacctgtttagtcctgaaaaatctaagctgccaggcatcgtagctgagggtagagacgacctgtacgtcagcgatgcattccacaaagcgtttctggaggtcaatgaagaaggttctgaggcagccgcaagtaccgcggtggttattgccggccgttcgctgaatcctaaccgtgtcacttttaaagcaaaccgaccttttctggtgtttatacgtgaagtgccactgaatacgatcatcttcatgggtcgcgtggccaacccttgtgtaaag

SEQ ID NO: 9607 - DNA, 1392 bp, Artificial Sequence
  derived and/or modified sequence
atgtacagcaatgttatcggcactgtgaccagcgggaaaagaaaggtgtacctgctaagtctacttctaatcggcttctgggactgtgttacctgtcacggcagcccagtggacatttgcacggctaaaccacgcgatataccgatgaatccaatgtgtatctatagatctcccgaaaagaaagcaactgaggacgaaggctctgagcagaaaatccctgaggcgaccaacaggagagtgtgggaactctctaaggccaacagccggtttgccacaaccttctatcaacacctcgccgattcaaaaaacgacaatgacaatatattcttgtcaccgctaagtattagcaccgcctttgctatgacaaagcttggcgcgtgtaatgacacgttacagcagttaatggaggtgtttaagtttgatacaatcagcgaaaagacctcggatcaaatacactttttctttgccaaattaaactgtcggctgtaccgtaaggctaacaaaagctccaagttggtgtcggcaaacaggctgtttggggataagagcttaacatttaatgaaacctatcaggacatctccgaactggtgtacggcgccaagctacagcctttggatttcaaggaaaacgcggaacagtcacgagcggctatcaacaaatgggtgtctaataagactgagggcagaattacagatgtcatcccctcggaggcgataaacgaactcacggttctggtgctggtgaatacgatctacttcaaggggctttggaagtctaagtttagccctgaaaacactcggaaagaacttttttacaaagccgacggcgaatcatgctcagcaagtatgatgtaccaagagggcaaattccgctaccgccgtgttgctgaaggcacacaggtactagaactcccattcaagggcgacgatatcacaatggtactgatcctcccgaagcctgagaagagtcttgcaaaggtagaaaaagaactgaccccggaagtgttgcaggagtggcttgacgagctggaggagatgatgttggtggtgcacatgccccgttttaggatagaggatggtttttctcttaaggagcagcttcaggacatgggcctagtggatctgttcagcccagagaagtccaagctccctggcatcgtggccgaaggcagggacgatctgtacgtatccgatgcctttcataaggcgtttctggaggtgaacgaagaagggagcgaagctgctgcctccaccgcggttgtaatcgcaggccgttctctaaacccaaatcgcgtgacattcaaagcgaataggccgtttctggtgttcatccgagaggtacctctgaataccataatctttatgggacgcgtggcaaacccctgtgtgaaa

SEQ ID NO: 9608 - DNA, 1392 bp, Artificial Sequence
  derived and/or modified sequence
atgtatagtaacgtcatcgggactgtgacatccggcaaaaggaaggtatatcttctcagcctgctgctgattgggttttgggactgtgtaacctgccacggctcacccgtggatatttgtaccgccaagcctcgggacatccccatgaaccccatgtgtatctaccgatcccctgagaagaaggcaactgaggacgaggggagcgaacagaagatccccgaagcaaccaaccggagagtgtgggagctcagcaaggcaaattccaggtttgccacgaccttctaccagcatctggccgacagcaagaatgataacgataatattttccttagccctctgagcatcagtacagccttcgcgatgacaaagctcggagcgtgcaatgacactttacagcagcttatggaagttttcaaattcgatacaatttctgaaaagacttccgaccagatccatttctttttcgccaaattaaattgtcgcctctacaggaaggcaaataaatccagcaagctggtttccgccaaccgcctgttcggggacaaatccctgacatttaacgaaacttaccaggacatcagcgaactcgtctacggcgcaaaattacagccgttagatttcaaggagaatgcagaacagtctagagcggcaattaataagtgggtgagtaacaagacagaagggcggatcaccgatgtgatcccctctgaagcaatcaatgagctcactgtgctcgtgttggtcaacacaatctatttcaagggactttggaaatccaaattctctcctgagaatactcgtaaggagctcttttataaggccgacggtgagagttgctccgcctctatgatgtaccaagaagggaagttccgctatcggcgtgtggctgaaggtactcaggtgttggagctaccttttaaaggggatgatatcactatggttcttattctgccgaagcccgagaagagtctggccaaagtcgagaaggaactgacccccgaggtcctacaagagtggctggatgaactagaagaaatgatgctagttgtccacatgcctcgtttcaggattgaagacgggttttcccttaaggagcagctgcaagatatgggccttgtggacttgttcagcccagaaaagtccaaactgccaggcattgtagcagaaggaagggatgatctgtacgtgtcagacgcctttcataaagctttcctggaagtaaacgaggaaggctctgaagccgccgcctcgacagcagtggtcattgcgggccggtctttgaaccctaacagagtaaccttcaaagctaaccggccattcctggtgttcatccgcgaagtaccccttaacacgatcattttcatggggcgcgtggcaaacccctgtgtcaaa

SEQ ID NO: 9609 - DNA, 1392 bp, Artificial Sequence
  derived and/or modified sequence
atgtattccaacgttattggtactgtgaccagcggcaagcgcaaggtctacttgctgtcgctactgctgatcggcttttgggactgcgtgacctgccacggatcgcctgttgacatctgcactgcgaagccgagggatatccccatgaatcccatgtgcatctacaggtcccccgagaagaaggcgaccgaggacgagggcagtgaacagaagatccccgaagctacaaatcgccgagtgtgggagctgtccaaagccaatagcagattcgccactaccttctaccagcacttggccgactccaagaatgataacgacaatatctttctcagccccctatctatcagcactgctttcgccatgacaaaactcggtgcttgcaatgacactctccagcaactgatggaggtgttcaagtttgatacaatttctgaaaagactagcgaccagatccacttcttcttcgcaaagctgaattgccgcctgtacagaaaagctaacaagagttccaaacttgtgagcgcgaatcgattgtttggcgacaagagtctcactttcaacgaaacttatcaggacattagcgaactggtgtacggcgcgaagctgcagccactggatttcaaggagaatgctgagcagagtcgggccgccattaacaaatgggtcagcaacaaaacagaagggagaataacagacgtgattcccagcgaggccatcaatgagctgaccgttctggttcttgtcaacacaatctacttcaaaggtctgtggaagtccaaattttcacctgagaacacccggaaggagctgttctacaaggccgatggggaaagctgcagtgctagtatgatgtaccaggaaggcaagttcaggtaccgtcgagtggcagaaggaacccaagtgctggaactcccatttaaaggcgacgacattacaatggttctgattctcccgaaacctgaaaagtctctggccaaagtggaaaaagaactcacccctgaagtgctgcaggagtggctggatgaactggaggaaatgatgctggtcgtgcacatgccccggttccggattgaagatggcttctcccttaaagagcaactgcaagatatggggttggttgatttgtttagcccggaaaaatcaaagcttcctggaattgtagcggagggcagagacgacctgtacgtgagcgacgctttccataaggcttttctagaggttaatgaagagggcagcgaagctgccgcctcaacagccgtggtcattgctggtaggtctctaaatcctaaccgagtgaccttcaaggccaacagaccattcctcgtgttcatccgtgaggttccattgaatacaatcattttcatgggaagagtggccaatccttgtgtaaaa

SEQ ID NO: 9610 - DNA, 1392 bp, Artificial Sequence
  derived and/or modified sequence
atgtactccaacgtgataggtacggtgactagtggcaagaggaaggtgtatctgctgtccctgctactgataggtttctgggattgcgtgacgtgtcatgggagcccggttgatatctgtactgccaaaccccgggatattcctatgaatccaatgtgcatctacagatcgccagaaaaaaaggccacagaggacgaaggctctgagcaaaaaatccctgaagcgacaaacaggagagtttgggagttatctaaagccaacagccgcttcgcaactaccttttaccagcatctggctgattccaagaacgacaatgataatatttttttgtcgcctttgtctatctctaccgccttcgccatgacgaagttgggggcgtgcaatgacaccttgcagcagctgatggaggtgtttaaattcgacaccatctccgagaagacatccgaccagattcacttcttcttcgcgaagctgaattgccggttatacaggaaggccaataagagcagcaagctggtgtcagccaaccggctatttggcgataaaagcctgaccttcaacgagacatatcaggacatttccgaacttgtctacggggcaaaattgcaaccgctcgacttcaaagagaacgcagaacagtctagagccgctataaacaagtgggtgtcaaataaaacagaggggcgcatcaccgacgtgattccaagcgaggccattaatgaacttacggtgcttgttctcgttaataccatatacttcaaaggcctgtggaagagcaaattcagtcccgagaatacgcggaaagaactcttttataaagcagacggcgagtcatgtagcgcctctatgatgtatcaggaagggaaattccggtatagaagggttgccgagggaacacaggtgttggagcttccatttaagggagatgacatcaccatggtcctcattttgcccaagccggagaagtctctggctaaagtcgagaaagaactaacacccgaggtgctgcaggagtggctggacgagctggaggaaatgatgctggttgtccacatgccgaggttcaggatcgaggatggttttagtctgaaggaacaattgcaagacatgggactggttgatctctttagcccagagaagtctaagcttcccggaattgtcgcagagggacgtgatgatctgtacgtatcagatgcctttcataaggcatttctggaagtcaacgaggaagggagtgaggccgcagctagtacggcagtggttattgctggcaggtctttgaatccgaacagggtgaccttcaaagccaataggcctttcctggtgtttattagggaagttcctctcaataccatcattttcatgggccgtgtggctaacccttgcgttaaa

SEQ ID NO: 9611 - DNA, 1392 bp, Artificial Sequence
  derived and/or modified sequence
atgtactccaatgtaatcgggaccgttacaagcggcaaacgaaaagtctacctgctatctcttttactcatcggtttctgggattgtgtgacatgtcacggttcgccagtggatatatgcactgccaaaccacgagacatacctatgaatcctatgtgtatataccggagcccagagaagaaagcaactgaggatgaaggctcagagcagaagattccggaagctacgaatcggcgcgtgtgggagctctcaaaagccaacagcaggtttgccaccacgttttatcaacacctggccgatagcaagaatgacaacgacaacatcttcttatcaccactgtctatctctactgccttcgcaatgactaagctgggggcttgtaacgacacactgcaacagctgatggaggtgttcaagttcgacaccatcagcgaaaagacctccgaccagattcacttcttcttcgctaaattaaactgcaggctctaccgcaaggcgaacaagagtagtaagttggtttctgcaaaccgcctatttggggataagtctctgacattcaatgaaacgtaccaggacattagtgaattggtgtacggagccaagcttcagccactcgatttcaaggaaaacgcggaacaatctagggccgctatcaataagtgggttagcaacaagaccgaaggccgcataacagatgttatcccaagtgaagcaatcaacgaacttacagtgctggtgttagttaatactatctatttcaagggcctgtggaaatcgaaattttctcccgagaacacacggaaagagctgttctataaggctgacggtgaatcgtgctcagctagcatgatgtaccaagagggcaagttccgctatagacgagtcgctgaggggacgcaggtgcttgaactgccattcaagggagacgatatcacaatggtgctgattttacctaaaccggaaaaatccctagcaaaggtcgaaaaggaactcacccctgaggtgctgcaagaatggctcgacgaactggaagagatgatgctggtcgtgcacatgccgcgatttagaatcgaagatggttttagtctgaaggagcagttgcaggacatggggctggtggatttgttttctcccgaaaagtcaaaactccctggaatcgtggccgagggacgggacgacctctatgtgtcagacgcgttccacaaggcattccttgaggtgaatgaggaagggtctgaagcggctgctagcacagctgtggtgatagctggtcgttccttgaacccaaatagggtgaccttcaaggcgaaccgtccctttctcgtatttattcgcgaagttcccctgaatacgatcatcttcatgggacgagtggccaacccttgtgtcaaa

SEQ ID NO: 9612 - DNA, 1392 bp, Artificial Sequence
  derived and/or modified sequence
atgtactccaacgtaataggcacagtgacatccggcaagagaaaggtgtacctgttgtcgttattgctgatcggcttctgggattgtgtgacgtgccacggatcgcccgtcgacatttgcacggctaagccccgcgatattccaatgaatccgatgtgtatctatagatcccctgagaaaaaggctaccgaggacgagggcagtgaacagaagatcccagaagcaacaaatcggcgcgtctgggagttatcaaaggcgaacagccgttttgcgacgaccttctatcagcacctggccgactccaaaaatgataacgataacatattcctctcgccactgagcatttcgacggcctttgccatgactaagctgggcgcctgcaacgataccttgcagcaactgatggaagtgttcaagttcgacactatttcagagaaaacgagcgaccagattcacttttttttcgctaagttgaattgtcggttgtaccgcaaggcgaataagtcctcaaagcttgtgtcggcaaaccgactgttcggcgacaagagcctgacgttcaatgagacgtaccaagatatctccgagctcgtatacggcgccaagctccagccgttggactttaaagagaacgcggagcagagtcgcgctgcaataaataaatgggtctcaaataagaccgagggacgcattacggatgttatacctagtgaggcgatcaacgagttgactgtgctggtgctagtcaataccatctacttcaagggtttatggaagtcgaagttcagccctgagaacacgcggaaggaacttttctacaaggctgatggcgagtcgtgctccgcgtccatgatgtaccaagagggcaagttcagataccgacgcgtggcggagggcacgcaggttctggaactgcctttcaagggagatgacatcaccatggtcctgatcttgcctaaaccagagaagtccttggctaaagtcgagaaggagctgactccggaggtccttcaagagtggcttgacgagctcgaagaaatgatgcttgttgtccatatgccgcgtttccgtattgaagacggttttagtcttaaggagcagttgcaggacatgggtctggtcgacctcttcagccccgaaaagtcgaaactcccaggcatcgtcgccgaaggaagggatgatttgtacgtgagtgacgcatttcataaagcatttctggaagtgaacgaggagggcagtgaagctgctgcctcaaccgccgtcgtcattgccggaaggtcgcttaacccgaatcgtgtaacttttaaagctaatcgcccattcctggtctttatccgagaggtaccgctgaacaccatcatcttcatgggacgtgtggcaaacccgtgcgtaaaa

SEQ ID NO: 9613 - DNA, 1392 bp, Artificial Sequence
  derived and/or modified sequence
atgtattctaacgtcatagggacggtgacaagtggcaagcgaaaagtgtatctgctctctttgctactgataggcttctgggactgcgttacgtgtcacggaagtccagtggatatctgtacagccaaacctcgtgatatccctatgaaccccatgtgtatttatagatctccagagaagaaggccaccgaagatgaagggtccgagcagaagattccagaggcaacaaatcgtagagtttgggagctgtccaaagcgaatagccgcttcgcaacgacgttctaccagcatctcgccgattctaaaaacgataatgacaacattttcctttcgcccctgagcatctccaccgccttcgcaatgacgaagctaggagcatgtaacgatacgctgcagcaactgatggaggtatttaaatttgatactatcagtgaaaaaacatccgatcaaatacacttctttttcgcaaaactgaattgccggttgtacagaaaggcaaacaagagctccaagctcgtgtcagccaatagattgttcggtgataagtctctgacgtttaacgaaacatatcaggacatctctgagttagtgtatggcgcaaagttgcagcccctcgactttaaagagaacgcggagcagtccagagccgcgatcaataagtgggtgagcaacaaaacagagggcaggattaccgatgttattccatcagaagccatcaacgaacttacggtcctcgtgttagtaaacacgatatactttaaggggctctggaaatctaagttctcaccagaaaacactagaaaagagctgttctataaggccgacggtgagtcatgtagtgcaagtatgatgtatcaagaggggaaattcagatacaggcgggtagccgaaggcactcaagtactagagcttcccttcaagggtgacgatataaccatggtgttgattcttccgaagcccgagaagtctttggctaaagtggagaaggaattgacccctgaggttcttcaggaatggttggatgagctagaggagatgatgctagtggtgcacatgccacgcttccggatcgaagacgggttctctctaaaggagcaactccaggacatgggcttagtggacctgttttccccagagaaaagcaagctgccggggatcgtggctgaaggacgcgacgatctctacgtatctgatgcatttcataaggcctttttggaggtgaatgaggagggttcagaagctgccgcgagtaccgccgtcgtgatcgccggcagatcattgaaccctaacagagtgaccttcaaggctaacaggccttttttagttttcattagagaggtgcctttaaatactattatattcatgggcagggtcgccaatccgtgtgtgaag

SEQ ID NO: 9614 - DNA, 1392 bp, Artificial Sequence
  derived and/or modified sequence
atgtacagcaatgtgatcgggactgtgacttcaggcaagcgcaaagtttacctgctgtcactgctcttgatcggattttgggattgtgtgacatgccatggatctccagtcgacatatgcaccgctaagcctcgagatatcccaatgaacccaatgtgtatctataggagccccgagaaaaaggccacagaggatgagggtagcgagcagaagattccagaggccacaaatagacgcgtctgggagctctctaaagctaatagtcgtttcgccactactttctatcagcacctcgccgacagtaagaatgataacgacaatattttcctcagtcctctgtccatatcgacagcctttgctatgacaaagctcggggcatgcaacgacaccctgcagcagctgatggaagtctttaagttcgataccatttccgaaaaaactagtgaccaaatccattttttttttgccaagctgaactgcaggctgtatagaaaggctaataaaagttctaagttggtaagcgcaaaccggctcttcggggacaaaagcctgacattcaatgagacatatcaggacatctccgaactagtctacggggccaaactgcaacccctggactttaaagagaacgccgaacagtcaagagcggcaatcaataaatgggtttctaacaagacagagggaaggatcaccgacgtcataccaagtgaagctattaatgagctgacagtcctagtgttggtaaatactatctacttcaaaggcctgtggaaaagtaaattctctccagagaacacgagaaaagaattgttttacaaggcggacggagagtcctgttcggcatccatgatgtatcaagaaggcaagttccggtatagaagagtggccgaaggaacccaggtgctggaattaccgttcaagggtgatgatataacaatggtcttgatattgcccaagcctgagaaatcgcttgccaaggtggagaaggaactgacaccagaagtgttacaggagtggctcgacgagctggaggaaatgatgctagtggtgcacatgcctcggtttagaattgaggacggttttagtctgaaagagcagctgcaggatatgggcctggtggacctgtttagtcccgagaagtctaagttaccaggtattgtggcagagggccgcgacgacttatatgttagtgatgcattccacaaggcctttcttgaagtcaatgaggaggggtctgaggccgcagcaagtacagcagttgtcattgcagggcggtccctgaaccccaatagagttactttcaaggctaatcgacccttccttgtattcatcagggaagtgcccctaaacaccatcattttcatggggcgggtggcaaatccctgtgtgaag

SEQ ID NO: 9615 - DNA, 1392 bp, Artificial Sequence
  derived and/or modified sequence
atgtatagcaacgttattgggactgtgacgagcgggaagcggaaagtgtatctcctgagcctgctgctcatcgggttttgggattgcgtgacatgtcacggaagcccagtcgacatatgtacagccaaaccccgggatattccaatgaaccccatgtgtatttatagatctcctgagaaaaaggcaaccgaggatgaaggttcagagcagaagattcccgaagctacaaaccgtcgggtttgggaactcagcaaggctaatagccgatttgcaactacattctatcaacatctcgcagacagtaagaatgataatgacaatatattcctctcacctctgagcatttctacggcctttgccatgacaaagctgggggcttgcaatgacacgctgcagcagttgatggaagtgttcaagtttgatacaataagtgagaaaacgtctgaccaaatccacttttttttcgcgaaacttaactgcagactgtacagaaaagccaacaagtcttcaaaactggtgtccgctaataggctgttcggggacaaatcgttgacttttaacgagacatatcaggatattagtgaactggtgtacggggccaaactgcagccgttggatttcaaggagaacgcggaacagtcccgcgctgctatcaataagtgggtctcgaataagactgaagggagaattacggatgtcatcccctcagaagcgataaacgagctgacggtgctcgtacttgtgaatacgatttattttaaaggcctatggaaaagcaagttttcacctgagaacacaaggaaagagcttttctataaagccgacggggagtcctgctccgcatccatgatgtaccaagagggtaaatttagataccggagggtcgctgaagggactcaggtgctggaactgccctttaagggcgacgatataaccatggtgttgattctgccgaaaccagagaaatccctggcaaaagtcgagaaggaactgactccagaagtgcttcaggagtggttagacgagctcgaagaaatgatgttagttgttcacatgccccgattcaggatcgaagatgggtttagtctgaaggagcagctgcaagacatgggactcgtggatctgtttagtcccgaaaagtcgaaactgccgggcattgtcgctgagggacgcgatgacctgtatgtgagcgatgctttccacaaggcatttttggaagtaaatgaggaaggctctgaagccgcagccagcacagccgtggtgatcgccggtcgatctctgaaccccaatagagttacattcaaagccaatcgccctttcttggtgtttataagggaggtgccgctgaacaccatcattttcatgggtcgcgtggccaatccttgtgtgaag

SEQ ID NO: 9616 - DNA, 1392 bp, Artificial Sequence
  derived and/or modified sequence
atgtacagcaacgtcatcgggaccgtaacaagtggtaaacgaaaagtgtaccttctgtccctcctcctcattggcttctgggattgcgtgacttgccacggctctccagtggatatatgtacggccaagcccagggacatccctatgaatccgatgtgcatttacagatctcctgaaaagaaggccaccgaggatgaaggcagcgaacagaagattcctgaagctacaaatagacgcgtttgggaactgagcaaggcgaatagtagattcgcaaccaccttctatcagcatctggccgatagcaaaaacgacaacgataatatcttcctgagcccgctgagcatttcaactgcctttgccatgacaaaactgggggcatgcaatgacactctgcagcaattgatggaggtgtttaagttcgacactatctcagaaaagacgagcgaccagatacacttctttttcgcaaagctgaattgtagactgtacagaaaggcaaacaagagttcaaagcttgtgtccgcgaaccgtctcttcggggacaagagcctgacttttaatgaaacttatcaagacatcagcgaactcgtctacggcgctaaactgcagcctctcgattttaaggaaaacgctgagcagtcccgagctgccatcaacaagtgggttagtaataagaccgagggtcgaatcacggacgtgatcccaagcgaagccatcaacgagctgaccgtgttggtgctcgtcaataccatctacttcaagggtctctggaagtctaaattcagccctgaaaacacaaggaaggagctattctacaaagcagacggcgaaagttgtagcgcaagcatgatgtaccaggagggtaagtttcggtaccgccgtgtggcagaaggtactcaggtcctcgaactgcctttcaaaggcgacgacatcaccatggtgctcatactgccgaaacccgaaaagagtctggccaaagtagaaaaagagctgacccccgaggtcctgcaagaatggctagacgaactcgaagagatgatgctcgtggtccacatgcctcggttccggatcgaggacggatttagtttgaaggagcagctacaggacatgggcctggttgatctgttcagccccgagaagtccaaacttccaggcatcgtggcagaggggagagacgatctgtatgtaagcgacgcattccacaaagccttcctggaggtgaacgaagagggctctgaggcagccgcatccaccgctgtggttattgcgggaagatctcttaaccctaatagagtcaccttcaaggctaacaggcccttcctggtctttattcgagaggtgccgctgaatacaatcatttttatgggccgggttgcaaatccctgtgtgaaa

SEQ ID NO: 9617 - DNA, 1392 bp, Artificial Sequence
  derived and/or modified sequence
atgtactcaaatgtcatagggactgttacatctggcaaacgcaaagtgtacctgttgtcacttctgctgattggattttgggactgcgtaacatgtcatggcagtcccgtcgatatctgtactgctaaacccagagatattccgatgaacccaatgtgcatatacaggtcacctgagaagaaagcgaccgaggacgaaggctctgagcaaaagatccctgaggccacgaataggcgggtatgggaattaagcaaggcgaattccagattcgctactactttctatcaacacctggccgactccaaaaacgataacgataacattttcctctctcccctttccataagcaccgcgttcgctatgacgaagttgggtgcttgtaatgacaccctccagcagctcatggaggtgttcaaattcgacaccataagcgaaaaaaccagtgaccaaatacacttcttctttgctaaactcaattgtcggctgtaccgaaaggctaataagtcgtcaaaattagtgagcgcgaatcggcttttcggcgacaagagcctgacctttaatgagacttaccaggacatttccgaactggtgtatggcgcaaagctccagccattggactttaaggaaaatgctgagcagtcaagggccgccataaacaagtgggtgagcaacaagactgaagggcgcataacagacgtcattccatccgaggccataaatgagcttaccgtcctcgtgttggtgaacaccatttacttcaaggggctgtggaagtctaaattcagccccgagaacaccagaaaggaactgttttataaagcagacggcgaaagttgctccgcctccatgatgtatcaggagggaaagttcaggtaccgtcgagtcgccgagggcacccaggtgttagaactgcctttcaagggcgacgatatcaccatggtgctgattctaccgaaaccggagaagagtctggcaaaagtggagaaggagttaacacctgaggtccttcaggaatggttggatgagctggaggaaatgatgctagttgtgcatatgccaaggttccgaatcgaagacgggttctcactgaaggagcagctccaggacatgggactggtggatctcttcagcccagagaaatcaaagttgcctggtatcgtggccgaaggacgggacgatctgtatgtgagtgacgcctttcataaagcatttttggaggtgaacgaagagggcagtgaagcagccgccagtaccgcagtcgtgatagccggaaggagtctgaaccctaaccgagtaaccttcaaggctaacaggccattcctggtctttattcgcgaagtgccacttaatactatcatttttatgggcagagtagccaacccttgcgtgaag

SEQ ID NO: 9618 - DNA, 1392 bp, Artificial Sequence
  derived and/or modified sequence
atgtactccaatgtaatcgggacagtgacatccgggaaacggaaggtctatttgctctccctgttactcattggattttgggattgcgtgacttgtcacggttctccagtagatatctgtactgccaagcctagagatatacctatgaatcctatgtgtatctaccggtccccagaaaagaaagcaactgaggacgaagggagcgagcaaaagatcccagaagccactaaccgtcgcgtgtgggagctgtcgaaggcaaattctcgatttgcgactaccttctatcaacacctggccgatagcaagaacgacaacgacaatatttttctaagtccgctgtcgatcagtaccgcattcgcaatgacgaaattgggagcatgcaatgacaccctgcagcagctgatggaagtgttcaagttcgacaccattagcgaaaaaacctctgatcagatccactttttctttgctaaactgaattgtcggttgtatcgaaaagcgaacaagtcctctaaattagtctctgccaaccggttgtttggtgacaagtccttaacgttcaatgaaacataccaggacatttctgaactcgtgtacggggccaaactgcagcccctcgattttaaagaaaacgctgaacaaagtcgcgccgcgatcaataaatgggtgtcaaataaaactgagggccgcattaccgacgtaataccgagtgaggccattaacgaattgaccgttcttgtcctagtcaatacaatttactttaaaggcctgtggaagtccaagttctctcctgaaaacacccgtaaggagctgttctacaaggccgatggtgagtcgtgttcagcatccatgatgtaccaagagggaaagtttcgataccgccgtgtagctgaaggtacccaggttcttgagctgccttttaagggagacgatataactatggtactcatcctaccaaagcctgaaaaatccctggcaaaagtcgaaaaggagttgactcccgaggtccttcaggagtggctcgacgaactcgaagagatgatgctcgtcgttcacatgccacggttcaggattgaagacgggttttctcttaaggagcagctgcaggatatgggcctggtggacctgttttccccagagaaaagtaagctgccggggatagtggcagaaggacgagatgatctttatgtcagcgatgctttccataaggcgtttttagaggtcaatgaagaaggcagcgaggcggcagcctccaccgctgtggtcatcgcaggacgttctctgaaccccaatcgagttacctttaaagccaataggccatttcttgtgtttatcagggaggtgcccctgaataccattattttcatggggcgcgtggctaatccctgtgtaaag

SEQ ID NO: 9619 - DNA, 1392 bp, Artificial Sequence
  derived and/or modified sequence
atgtattcaaatgtgatcgggaccgtgacttctgggaaaagaaaagtgtacctcctgtctctcctgctcattgggttctgggattgcgtgacctgccacggtagccccgtagacatctgcacagccaagccgcgcgacatccccatgaatccgatgtgtatttaccggtcccctgaaaagaaggccaccgaggatgaagggtccgagcagaagattcccgaggctacgaacaggagagtgtgggaactgtccaaggcgaatagcaggttcgctacgaccttctaccagcacctcgctgactcaaagaacgataacgacaacatcttcctgtccccgctatccatttctactgcctttgccatgacaaaattaggcgcttgtaacgatacccttcaacagctaatggaggtcttcaagttcgacacgatttccgagaagacctctgaccagatacattttttctttgccaagcttaactgcagactctatcgcaaggcaaataaatcctctaaactggtgtccgccaatcgcctgtttggtgacaagtctctcacattcaacgagacgtaccaggatattagcgagttagtctatggggcaaagctgcaacctcttgatttcaaagaaaatgcagagcagtcacgagcggcaattaataaatgggtgtcaaacaagaccgagggcaggatcacggatgtgattcccagcgaagcgatcaacgagttaacggttctcgtactggtgaacaccatttattttaagggcctgtggaaatctaaatttagccccgagaacacacgaaaagagctgttctacaaggctgacggtgaaagctgttctgcttccatgatgtaccaagagggcaaattccgctatcgaagagtcgctgagggcacccaagtgctggaactgccctttaagggagatgacattacgatggttctgattctgccaaagcctgaaaagtctctcgccaaagtggaaaaggaattgacccccgaggttctgcaagaatggctggacgaactggaagagatgatgctcgttgtgcatatgccaaggtttcggatcgaggatggctttagtttaaaggagcagctccaggacatgggattggtggaccttttcagtccagagaagtcaaagctacctggcatcgtggctgagggtcgcgatgacctatacgtcagtgacgcctttcataaggcgttcttggaagtcaatgaggagggttctgaggcagccgctagcacagctgtggtcattgccggcaggtcattgaaccccaatagagtgacgtttaaggctaatcgccctttcctcgtgttcatccgcgaagtgccgctcaacacgattatcttcatgggacgtgtggcaaacccttgcgtgaaa

SEQ ID NO: 9620 - DNA, 1392 bp, Artificial Sequence
  derived and/or modified sequence
atgtattcaaacgtgatcggtactgtcacgtcgggaaagcgtaaggtgtacctgctgagcctgttgcttatcggattttgggattgcgtgacctgtcatggaagcccggtcgatatctgcactgccaagccaagagacatccctatgaatccgatgtgcatttacaggtcgcccgagaaaaaggcaaccgaggacgaaggcagcgaacagaaaattccagaagccaccaacagacgagtgtgggaactttctaaggccaattcgcggttcgccactaccttctaccagcacctggctgattcaaagaacgataacgacaacattttcctcagccctctgtccatcagcaccgccttcgccatgactaagttgggagcctgcaacgacactcttcaacaactcatggaggtattcaagttcgacactatatctgaaaagacctcggaccagatccatttctttttcgccaaactcaactgccgcctgtaccgcaaagcaaataagtcgtccaagctcgtgtcggccaaccggctgtttggagataaatcactgacgttcaatgaaacctaccaagacatctccgaacttgtctacggagcgaaactccagccgctggatttcaaagaaaatgccgaacaaagccgggctgctatcaacaagtgggtttcaaacaagacggaggggcgcatcaccgatgtcatcccgtccgaggcgatcaatgaactgaccgttctggtgctggtgaacaccatctacttcaagggtttgtggaaaagtaaattctccccagaaaatactcggaaggagctgttctacaaggcagacggcgaatcgtgctcggcgtcgatgatgtaccaggaaggcaagttcagatacagaagagtggcggaagggacccaagtgctggaactcccgtttaagggagacgatatcactatggtgttgatcctgccaaaacctgagaagtccctcgccaaggtggaaaaggagctgacccccgaagtgctccaggaatggctcgacgaactcgaggagatgatgctggtggtgcacatgccgcggttccgcatcgaggacggattttccctcaaggaacagctgcaggatatgggactggtggatctgttctcaccagagaaatccaaattgccgggcattgtcgcagaggggcgcgacgacctctacgtgtcagacgcgtttcacaaggcgtttcttgaagtcaacgaggagggcagcgaggcagccgcgtccaccgctgtggtcattgctggacggagcctgaaccccaatcgcgtgactttcaaggctaacaggccgttcctcgtctttatccgcgaggtgcctctgaacactatcatcttcatgggtagggtcgcaaatccgtgtgtgaag

SEQ ID NO: 9621 - DNA, 1392 bp, Artificial Sequence
  derived and/or modified sequence
atgtattcaaatgtgattgggaccgtcactagcggcaaacgaaaagtctaccttctgagcctcctgctgattggattttgggattgcgtgacatgccacgggtctcccgttgacatttgtacggccaagccaagggacattcccatgaacccaatgtgtatttatcggtctccagaaaagaaggcaacagaggatgagggttccgagcaaaaaattccagaagccaccaatcggcgggtttgggagctatccaaggccaattcccggttcgctacaactttctatcagcacctggctgacagcaaaaatgataacgacaacattttcttatcccccctttcaattagcacggcctttgctatgactaaactgggcgcttgcaatgacaccctgcagcagctgatggaagtgtttaagttcgacacgatcagcgagaagacaagtgatcaaatccacttctttttcgccaaacttaactgtaggctgtataggaaagcgaataagtcatcaaaactcgtgagcgctaacagactctttggcgacaagtcactaaccttcaatgaaacttaccaggatatctccgagctagtgtatggcgcgaaacttcagcctctggactttaaagagaatgctgagcaaagcagggcagcaataaataagtgggtttctaacaagactgaaggaaggataaccgacgtcataccgagtgaggcgatcaatgaactgaccgttctggtgctagttaataccatttatttcaaggggttgtggaaaagtaaattcagcccagagaacactaggaaggagctattttataaagcagatggcgagagctgcagtgcatctatgatgtaccaggaggggaagtttaggtatcgtcgggtcgccgaaggaacccaggtgctggaactcccattcaagggggatgacatcaccatggtactcatccttccaaaacctgaaaaatcgttagccaaggtcgagaaagaactcacaccggaggtgctgcaggaatggctggacgagctggaggagatgatgctcgtggtccatatgccaaggtttcggatcgaggacggcttttcactcaaggaacagctccaagacatgggattggtcgaccttttcagccctgaaaagtctaagctgcccggcattgtcgccgagggccgcgatgatctgtacgtttcagacgccttccataaggccttcctcgaggtgaacgaggaggggtccgaggccgccgcttcaactgccgtcgtcattgccggtaggtcactgaaccctaacagggtgacttttaaggcaaacagaccctttctggtgttcattagagaggttcccctgaacaccattatttttatgggtcgtgtagccaatccgtgtgtaaaa

SEQ ID NO: 9622 - DNA, 1392 bp, Artificial Sequence
  derived and/or modified sequence
atgtacagcaacgtaatcggcacagtgacgagcggtaaaaggaaagtttaccttctgtccctgcttcttataggattttgggactgcgtgacatgtcacggcagcccggtcgacatttgcacagcaaagcccagagacattcccatgaatccaatgtgtatttataggagtccagagaagaaagcaacggaagatgagggctcggagcagaaaataccagaggccactaacaggagggtgtgggagctgtcgaaggcgaactcccgttttgccacaaccttctatcaacacctggctgatagcaaaaatgacaacgataacattttcctgtctccattatcgatcagtacagccttcgctatgactaagttgggagcttgtaatgacaccctgcagcagctgatggaggtatttaagttcgataccatttcagagaagacttcggatcagattcacttcttctttgccaaactgaattgtcggttgtaccggaaggcgaacaaatcttctaagctggtaagcgcgaaccgcctgttcggggataagtccctgactttcaacgagacttaccaagacatcagtgagctggtttacggggcaaaactccagcctctggatttcaaggagaacgcagagcaatccagggctgctatcaacaagtgggtgtctaacaagaccgagggcagaatcaccgacgtcattccatcagaagcgatcaacgagttgacggtgttggttctagtgaataccatctacttcaaaggcctctggaagagcaagttttcccccgagaataccaggaaggaactgttttataaggctgacggggagtcttgctctgccagcatgatgtatcaggaaggcaagtttcggtacagacgagtggcagagggcacccaggtgctagagctcccctttaagggggacgatattactatggtgctgatcctgcccaaaccagaaaagtccctggcgaaggtcgaaaaagagctcacccccgaagtgctacaggaatggctggacgagctcgaagaaatgatgcttgtagtccatatgcccagattccggattgaagacggattctcgctcaaggaacaactgcaggatatggggctagtggatctcttcagcccggaaaaatccaaattgcccgggatcgtggccgaaggacgcgacgacctgtatgtgagcgatgccttccataaggcattccttgaagtgaatgaagaagggagcgaggccgccgcctccacagcggttgtgatcgcaggtaggagtcttaatcctaaccgagttacctttaaggctaatcggccctttctggttttcatcagggaggttccgcttaacacaataatttttatggggagggtggcaaacccctgcgtaaag

SEQ ID NO: 9623 - DNA, 1392 bp, Artificial Sequence
  derived and/or modified sequence
atgtattctaatgtgattggcactgtgacatcaggtaaaaggaaggtctacttgctcagtctcttgctgattggtttttgggattgcgtgacatgccatgggagtccggtggacatctgtactgcaaaaccacgggatatccccatgaacccgatgtgcatataccgatcccccgagaagaaggctaccgaagatgagggttcagaacagaaaattccagaagcaaccaataggagagtctgggaactgagtaaagctaactcacgctttgccaccacgttctaccagcacctcgcagacagcaaaaatgataacgataatatcttcttgtcgcccctgtctatatctactgccttcgccatgactaagctgggagcttgcaacgacacactgcagcagttgatggaagtcttcaagttcgataccatttcagagaaaaccagcgaccaaatccattttttctttgccaagctcaattgcaggctgtaccggaaggcaaacaaatctagcaaacttgtgtctgccaataggctgtttggagacaagtcgctgacgtttaacgagacttaccaggatatctcggagctcgtctatggtgcaaagctgcagcccctggatttcaaggaaaatgctgaacagtctcgcgccgccattaacaaatgggtgagtaataagaccgaaggccggatcacggacgtaatcccgtccgaagcaattaacgagcttaccgtgctggtacttgtgaatacaatctacttcaaaggcctctggaagtcaaagttttcccccgaaaataccagaaaagaactgttctacaaagcggacggcgaaagctgctctgcctccatgatgtaccaggagggtaagtttagatatcgacgggttgcagaaggcacgcaggtccttgaactccccttcaaaggagacgacattactatggtactaattctgccaaaaccagaaaagtccttagcaaaggtggagaaggagctcacaccagaggtccttcaggagtggttggacgagctggaggaaatgatgctcgtggtgcatatgccacggttccggattgaggacggtttttcactcaaagagcagctccaggatatgggtctggtggaccttttttcaccagagaagtcaaaacttcccgggatcgtggccgaggggagggatgacttatatgtgagcgacgcctttcacaaggctttcctggaggtgaatgaagaaggcagcgaagcggccgctagcaccgctgtggtgatcgcgggccgctctctcaatcctaaccgcgttacattcaaggccaacagaccctttctggtgtttattagggaagtccccctgaacacaatcatcttcatggggcgcgttgctaacccgtgtgtgaaa

SEQ ID NO: 9624 - DNA, 1392 bp, Artificial Sequence
  derived and/or modified sequence
atgtactctaatgtgataggcacagtgacttccggcaagcgcaaggtttacctgttgagcttgctgctgattggattctgggattgcgtgacgtgtcatggctcgcctgtggacatctgcaccgctaaaccaagagacattcctatgaatccgatgtgcatatataggagccccgagaaaaaagccacagaagatgaaggttccgaacagaaaattcccgaggccaccaaccgtcgcgtgtgggaactttctaaggcgaacagtagattcgccaccactttttatcagcacctggcagatagcaagaatgacaatgacaacatattcctgagtccactctccatctcgaccgctttcgctatgaccaaacttggcgcttgcaacgacacgctacagcagttgatggaagtgtttaagttcgataccatctcggaaaagacaagcgaccagattcacttcttttttgctaagctgaactgccgactgtacaggaaagcgaacaagagtagcaagctcgtctccgccaaccggctgttcggggacaaatcgcttaccttcaacgagacataccaagacatcagtgaactggtgtatggcgcaaagctgcagcctctggacttcaaggagaatgccgagcaatccagggctgccatcaacaagtgggtgtccaataagactgaggggcgcattacggacgtcattccgtccgaggcaattaacgagcttacagttctggtgttggtaaacaccatctactttaagggcctgtggaagtctaaattctctccagagaacaccagaaaggagctattttacaaagccgatggcgagtcctgttccgcctcgatgatgtaccaagaggggaagtttaggtacagacgcgtcgccgaaggaacacaagtcctggagctgccattcaaaggagacgatatcacaatggtgcttatcctgccaaagcctgaaaagagtctagcgaaggtggagaaggaactaacgccagaggtcctacaggagtggctggatgaactagaggagatgatgctagtcgtacacatgccacgtttcagaatcgaggatgggttcagtctgaaagaacagctgcaagatatggggctcgtcgaccttttcagtcccgagaagtccaagttgcctggcattgtagcggaggggcgagatgatctgtacgtcagtgacgctttccataaggcatttctcgaagtgaacgaagaggggtctgaggctgccgctagtactgctgtggtcatcgcgggccggtccttgaatcctaatagggtgaccttcaaggcaaatcggccgtttttagtttttattagagaggtccctctcaacactatcatatttatggggagggtcgccaacccctgcgtcaag

SEQ ID NO: 9625 - DNA, 780 bp, Artificial Sequence
  derived and/or modified sequence
atgtacagcaacgtgatcggcaccgtgaccagcggcaagagaaaggtgtacctgctgagcctgctgctgatcggcttctgggactgcgtgacctgccacggcagccccgtggacatctgcaccgccaagcccagagacatccccatgaaccccatgtgcatctacagaagccccgagaagaaggccaccgaggacgagggcagcgagcagaagatccccgaggccaccaacagaagagtgtgggagctgagcaaggccaacagcagattcgccaccaccttctaccagcacctggccgacagcaagaacgacaacgacaacatcttcctgagccccctgagcatcagcaccgccttcgccatgaccaagctgggcgcctgcaacgacaccctgcagcagctgatggaggtgttcaagttcgacaccatcagcgagaagaccagcgaccagatccacttcttcttcgccaagctgaactgcagactgtacagaaaggccaacaagagcagcaagctggtgagcgccaacagactgttcggcgacaagagcctgaccttcaacgacctgtacgtgagcgacgccttccacaaggccttcctggaggtgaacgaggagggcagcgaggccgccgccagcaccgccgtggtgatcgccggcagaagcctgaaccccaacagagtgaccttcaaggccaacagacccttcctggtgttcatcagagaggtgcccctgaacaccatcatcttcatgggcagagtggccaacccctgcgtgaagtag

SEQ ID NO: 9626 - DNA, 1395 bp, Artificial Sequence
  derived and/or modified sequence
atgtacagcaacgtgatcggcaccgtgaccagcggcaagagaaaggtgtacctgctgagcctgctgctgatcggcttctgggactgcgtgacctgccacggcagccccgtggacatctgcaccgccaagcccagagacatccccatgaaccccatgtgcatctacagaagccccgagaagaaggccaccgaggacgagggcagcgagcagaagatccccgaggccaccaacagaagagtgtgggagctgagcaaggccaacagcagattcgccaccaccttctaccagcacctggccgacagcaagaacgacaacgacaacatcttcctgagccccctgagcatcagcaccgccttcgccatgaccaagctgggcgcctgcaacgacaccctgcagcagctgatggaggtgttcaagttcgacaccatcagcgagaagaccagcgaccagatccacttcttcttcgccaagctgaactgcagactgtacagaaaggccaacaagagcagcaagctggtgagcgccaacagactgttcggcgacaagagcctgaccttcaacgagacctaccaggacatcagcgagctggtgtacggcgccaagctgcagcccctggacttcaaggagaacgccgagcagagcagagccgccatcaacaagtgggtgagcaacaagaccgagggcagaatcaccgacgtgatccccagcgaggccatcaacgagctgaccgtgctggtgctggtgaacaccatctacttcaagggcctgtggaagagcaagttcagccccgagaacaccagaaaggagctgttctacaaggccgacggcgagagctgcagcgccagcatgatgtaccaggagggcaagttcagatacagaagagtggccgagggcacccaggtgctggagctgcccttcaagggcgacgacatcaccatggtgctgatcctgcccaagcccgagaagagcctggccaaggtggagaaggagctgacccccgaggtgctgcaggagtggctggacgagctggaggagatgatgctggtggtgcacatgcccagattcagaatcgaggacggcttcagcctgaaggagcagctgcaggacatgggcctggtggacctgttcagccccgagaagagcaagctgcccggcatcgtggccgagggcagagacgacctgtacgtgagcgacgccttccacaaggccttcctggaggtgaacgaggagggcagcgaggccgccgccagcaccgccgtggtgatcgccggcagaagcctgaaccccaacagagtgaccttcaaggccaacagacccttcctggtgttcatcagagaggtgcccctgaacaccatcatcttcatgggcagagtggccaacccctgcgtgaagtag

SEQ ID NO: 9627 - DNA, 780 bp, Artificial Sequence
  derived and/or modified sequence
atgtacagcaacgtcattgggactgtgacctccggaaaaaggaaggtatacctgctgtcgctgctcttgattgggttttgggattgtgttacatgccacggcagtccagtcgacatatgcactgctaaaccacgcgacatacccatgaacccgatgtgcatatacagaagtcctgagaagaaggcgacggaggacgagggaagtgagcagaaaatccctgaggcaacaaatcgccgcgtgtgggaactgagcaaagcaaatagcaggtttgcaactacattttaccagcacctggccgacagtaagaacgataacgataacatcttcctgtcccccttgtccataagcacagctttcgcaatgacaaagttaggcgcttgcaacgacactctgcagcaattgatggaggtctttaagtttgacacgatctctgagaagacctccgaccagatccactttttcttcgctaagttaaattgtagactatataggaaggcaaacaagtccagtaaactggtaagcgctaatagattgttcggtgacaagagccttacgtttaatgatttgtatgtcagcgatgcattccacaaggcctttctcgaagtgaacgaggaggggtccgaagccgccgcctccactgccgtcgtaatcgccggtcgcagcctgaaccccaatcgagtgaccttcaaagctaatcgtccctttctcgtcttcatcagggaagttccactcaataccatcatcttcatgggaagagttgctaacccatgcgtaaaatag

SEQ ID NO: 9628 - DNA, 1395 bp, Artificial Sequence
  derived and/or modified sequence
atgtactctaacgtcatcggtacagttacgtctggtaaacggaaagtttatctactgtctctcctcctcattggcttctgggattgtgtgacctgccatggaagccctgtggatatctgtaccgctaaacccagagacattcccatgaaccccatgtgcatttaccggagccctgaaaaaaaggctacggaagatgaaggtagtgagcaaaaaattccagaggcaacaaatcgccgcgtatgggaactctctaaagcaaattctcgcttcgccaccactttttatcagcacctggcagattcaaaaaatgacaatgacaatattttcttgtccccgttgagcatttcaaccgcctttgccatgaccaagctgggcgcctgtaatgacactctgcaacagctcatggaggtatttaagttcgacaccattagcgaaaaaacgagcgatcaaattcacttcttctttgcaaaactgaactgtcgcttgtataggaaagcaaacaagtccagcaagctggtcagtgctaacaggctctttggagacaagagcctgacctttaatgaaacttaccaggacatatccgagttggtgtatggggcgaaattgcaacccctcgacttcaaggagaatgccgagcagagcagggccgctatcaacaagtgggtttccaataagacagaggggagaattactgatgtgataccttccgaggcgatcaatgaattaactgtgctggtcctcgtcaataccatatattttaagggactgtggaaaagcaagttttctcccgagaacacacgcaaggagttattctacaaggctgacggtgaatcttgctccgcgtcaatgatgtatcaggagggcaaatttcgatataggcgggttgctgaggggactcaggtactcgagctgcctttcaagggcgatgatattacgatggttctgatccttccaaagcccgagaagtccctggccaaggttgagaaagagctgactcccgaagtacttcaggaatggctcgatgagctggaagagatgatgctagttgtgcacatgccccggtttagaatcgaagacggcttctccctcaaagagcagctccaggatatggggctggttgatctcttcagcccagagaagtctaagctgccgggaatcgtggctgagggccgcgatgacctctatgtatcagacgctttccacaaggccttcctagaggtcaatgaagagggctcagaggctgctgcctctaccgctgtggtaattgctggaaggagcttgaaccccaaccgtgtgacgtttaaggccaaccgtccctttctcgtattcatccgcgaagtaccactcaacaccattattttcatggggcgtgtggccaatccctgtgtcaaatag

SEQ ID NO: 9629 - DNA, 780 bp, Artificial Sequence
  derived and/or modified sequence
atgtacagcaatgtcatcggcaccgtgaccagcggcaagaggaaggtgtacctgctgagcctgctgctgattggcttctgggactgtgtgacctgccacggcagccctgtggacatctgcacagccaagccccgggacatccccatgaaccccatgtgcatctaccgcagccctgagaagaaggccacagaagatgagggcagcgagcagaagatccctgaggccaccaacagaagagtgtgggagctgagcaaggccaacagcagatttgccaccaccttctaccagcacctggccgacagcaagaatgacaatgacaacatcttcctgagccccctgagcatcagcacagcctttgccatgaccaagctgggcgcctgcaatgacaccctgcagcagctgatggaggtgttcaagtttgacaccatcagcgagaagaccagtgaccagatccacttcttctttgccaagctgaactgccgcctgtacaggaaggccaacaagagcagcaagctggtgtctgccaaccggctgtttggagacaagagcctgaccttcaatgacctgtatgtgtctgatgccttccacaaggccttcctggaggtgaatgaggagggcagcgaggccgccgccagcacagctgtggtgattgctggccgcagcctgaaccccaacagagtgaccttcaaggccaaccggcccttcctggtgttcatccgggaggtgcccctgaacaccatcatcttcatgggccgggtggccaacccctgtgtgaagtag

SEQ ID NO: 9630 - DNA, 1395 bp, Artificial Sequence
  derived and/or modified sequence
atgtacagcaatgtcatcggcaccgtgaccagcggcaagaggaaggtgtacctgctgagcctgctgctgattggcttctgggactgtgtgacctgccacggcagccctgtggacatctgcacagccaagccccgggacatccccatgaaccccatgtgcatctaccgcagccctgagaagaaggccacagaagatgagggcagcgagcagaagatccctgaggccaccaacagaagagtgtgggagctgagcaaggccaacagcagatttgccaccaccttctaccagcacctggccgacagcaagaatgacaatgacaacatcttcctgagccccctgagcatcagcacagcctttgccatgaccaagctgggcgcctgcaatgacaccctgcagcagctgatggaggtgttcaagtttgacaccatcagcgagaagaccagtgaccagatccacttcttctttgccaagctgaactgccgcctgtacaggaaggccaacaagagcagcaagctggtgtctgccaaccggctgtttggagacaagagcctgaccttcaatgagacctaccaggacatcagcgagctggtgtatggagccaagctgcagcccctggacttcaaggaaaatgctgagcagagccgggccgccatcaacaagtgggtgagcaacaagacagagggccgcatcacagatgtgatccccagcgaggccatcaatgagctgactgtgctggtgctggtgaacaccatctacttcaagggcctgtggaagagcaagttcagccctgagaacaccaggaaggagctgttctacaaggcagatggagagagctgcagcgcctccatgatgtaccaggagggcaagttccgctacagaagagtggccgagggcacccaggtgctggagctgcccttcaagggagatgacatcaccatggtgctgatcctgcccaagccagagaagagcctggccaaggtggagaaggagctgaccccagaggtgctgcaggagtggctggatgagctggaggagatgatgctggtggtgcacatgccccgcttcagaattgaagatggcttcagcctgaaggagcagctgcaggacatgggcctggtggacctcttcagccctgagaagagcaagctgcccggcatcgtggccgagggcagagatgacctgtatgtgtctgatgccttccacaaggccttcctggaggtgaatgaggagggcagcgaggccgccgccagcacagctgtggtgattgctggccgcagcctgaaccccaacagagtgaccttcaaggccaaccggcccttcctggtgttcatccgggaggtgcccctgaacaccatcatcttcatgggccgggtggccaacccctgtgtgaagtag

SEQ ID NO: 9631 - DNA, 780 bp, Artificial Sequence
  derived and/or modified sequence
atgtacagcaacgtgatcggcaccgtgaccagcggcaagcggaaggtatatctcctgagccttctgctaatcggattctgggattgtgtgacttgtcacggtagtcctgtagatatctgcaccgctaaacccagagatatcccgatgaatccaatgtgtatctaccggtctccagaaaaaaaggcaacggaagatgaaggaagtgaacaaaagatccctgaggctactaatcgacgagtctgggagctctcaaaagccaatagccgctttgcaaccaccttttatcaacacctggcagattctaagaacgacaacgataacattttcctgtcccctctcagtatcagcacagccttcgcgatgaccaagctgggcgcatgcaacgatactcttcaacagttaatggaggtcttcaagtttgacactatctctgagaagacatccgatcagatccattttttttttgcaaaattgaattgcaggttataccggaaggccaacaagagctctaaactggtcagcgctaacaggctgttcggagataagagcctgactttcaacgatttatatgtgtctgacgcttttcacaaggctttcctagaagtcaacgaggaaggttctgaagctgccgccagcacagctgtcgtgatcgcagggagaagcctgaatccgaatcgcgtcaccttcaaggcaaatcgtcctttccttgtctttattagggaagtgccactcaacacaatcatcttcatgggacgggttgccaatccttgcgtgaaatag

SEQ ID NO: 9632 - DNA, 1395 bp, Artificial Sequence
  derived and/or modified sequence
atgtacagcaacgtgatcggcaccgtgaccagcggcaagcggaaggtgtacctgctgtccctcctactaattgggttttgggactgcgtcacctgtcacggcagcccagtggacatctgcacagcaaaacctagggatatccccatgaacccaatgtgcatataccgttccccagagaagaaggcaaccgaggacgaaggcagtgagcagaaaatacctgaagctactaaccggagagtgtgggagctgtccaaagcgaacagtcgtttcgctactacattttatcagcaccttgccgactcaaaaaatgataatgataacatttttttatcccctctgagtatttcgacggcctttgctatgactaagctcggggcttgcaacgacactctccagcagttaatggaggtgtttaagtttgatactataagtgaaaagacctccgatcagatccatttttttttcgctaagctgaactgcagactctaccgaaaggcgaacaagtctagcaagctggtgtcagcaaatagactgtttggcgataagtccctcacatttaatgagacataccaggacatctctgagctggtgtatggcgcgaaactacagcccctggatttcaaggagaatgccgaacagtcccgagccgccattaacaagtgggttagtaataaaacagagggaaggatcaccgacgtgatcccctcggaagcgatcaatgaacttacggtgctggttctggtcaacacaatctactttaaagggctgtggaagtcgaagttctctccggagaatacaagaaaagaattgttttacaaggcagatggggagtcttgcagtgcctccatgatgtatcaagagggaaaatttaggtaccgcagagtggctgagggtactcaagttctggagcttcctttcaagggcgatgatatcaccatggtgttaattcttcccaagcctgagaagagcctggcaaaagtggagaaggagttaactccagaggtgctgcaagagtggctggacgaacttgaagagatgatgctcgtagttcatatgcccagattcaggatcgaggacgggttctcactgaaagaacagttgcaggacatgggactcgtcgaccttttttccccagaaaaatcaaaactgccgggtatagttgccgagggcagagacgatctgtacgtgagtgatgcatttcacaaggctttcttagaagtgaacgaagagggctctgaagctgcggctagtacagcggtggtcatcgctggacgatcccttaatccaaatagagtgaccttcaaagctaaccggccgtttcttgtcttcatccgcgaagtccccctgaacacaatcatctttatggggagggtggccaacccctgcgtgaaatag

SEQ ID NO: 9633 - DNA, 780 bp, Artificial Sequence
  derived and/or modified sequence
atgtattccaacgtgattggaacagttacatccggtaaaagaaaggtgtacctacttagtctcttgctgattggcttttgggattgtgtgacctgccacggtagtcctgtcgatatttgcaccgccaaacctcgtgacatacccatgaaccctatgtgtatttatcgatctccggagaagaaagcaacagaagacgaggggtctgagcagaagatacctgaggcaacaaatcggagggtgtgggagctgtcaaaagcgaattctagattcgcaaccacattttatcagcatcttgccgattccaagaacgataacgacaacatcttcctaagtccactcagtattagcaccgcctttgccatgactaagcttggcgcatgcaatgataccctccagcagttaatggaagtgttcaagtttgacactatctccgaaaagaccagcgaccagatccacttcttctttgccaagctgaattgcagactatatcgcaaagccaataagtctagcaagcttgtcagtgcaaaccgcctgtttggcgacaagtcactgactttcaacgacctgtatgtgtctgacgcttttcataaggcgtttcttgaagtgaatgaagagggctcggaagccgcagcttccactgcagtcgtgattgccggacggagcctcaatcccaatcgagtcacattcaaggctaataggccatttcttgtttttattcgagaggtcccccttaatactatcatcttcatgggacgggtggcaaacccctgcgtgaagtag

SEQ ID NO: 9634 - DNA, 1395 bp, Artificial Sequence
  derived and/or modified sequence
atgtatagcaacgtcatcggcaccgtcacttccgggaagcggaaagtctacctgctctccttgttgctgattgggttttgggattgtgtaacatgccacgggagtccggtcgatatttgcaccgctaagcctagggacatcccaatgaatcctatgtgcatctataggagtccggaaaaaaaggcgaccgaggatgagggatctgagcaaaagattccagaggccactaatagacgtgtatgggagcttagcaaagcaaattctaggtttgccaccactttctatcagcatctggcagattctaagaatgataacgacaacattttcttatctccattaagcattagcacggccttcgccatgactaaactcggagcttgtaacgacaccctgcagcaacttatggaggtgttcaagtttgacacaatttctgagaaaacatccgaccagatccacttcttctttgccaagctgaactgtaggttgtatcggaaggctaataagtcttccaaactcgttagcgccaatcggctatttggagacaagtctttaaccttcaatgagacttaccaggatatctcggagctggtatatggcgcaaagttacagcctctcgactttaaggaaaacgccgagcagagtagagcggcaattaacaagtgggtgtccaacaagacagagggcagaatcactgacgtaatcccaagtgaagcgattaacgaactcaccgtgctcgtcttagttaatacaatctatttcaaaggcctctggaagtcgaaatttagcccggaaaacaccagaaaggaactgttctataaagccgacggagaatcatgttccgcttctatgatgtaccaggagggaaaattccgatatcgcagggtggccgagggcactcaagttcttgagctgcccttcaagggcgacgacattacgatggtgctaattctgcccaaaccagaaaaatctcttgccaaggttgaaaaggagctaacacccgaagtgcttcaggaatggctcgacgaactggaggaaatgatgctggtcgtccatatgcccagattccgaatagaggatggtttctctctgaaagagcagctgcaagacatggggttagtggacctcttttcacctgagaaaagtaagcttcccggtattgtggccgagggtcgggatgacctttatgttagcgatgcctttcacaaggcatttttggaagtcaacgaggaaggcagtgaggccgcagcctccactgcagtggtcatcgctggacgttctttaaacccaaatcgtgtaacatttaaggctaataggcctttcttggtgttcattagagaggtcccgctgaatactattatttttatgggcagggtggcaaatccatgtgtgaagtag

SEQ ID NO: 9635 - DNA, 780 bp, Artificial Sequence
  derived and/or modified sequence
atgtacagtaacgttatcggaaccgtaacaagtggaaagaggaaagtctatctgctaagcctcctgctaatcggattctgggattgcgttacttgccacggcagccccgtcgatatttgcaccgcaaagccacgcgacatacccatgaacccaatgtgtatataccggagtccagaaaagaaagcgacagaggacgaggggtccgaacaaaaaatacctgaagccactaaccgcagagtctgggagctgagtaaggcaaactctcgattcgccacaaccttctatcaacatctggccgacagtaaaaacgataatgataacatattcctgtccccactttccatctcaacagcttttgccatgaccaaactgggagcatgtaatgacacccttcaacaattgatggaagtgttcaagtttgacaccattagtgaaaaaacctccgatcagattcacttcttttttgccaagctgaactgccgcttatatagaaaggccaacaagagttccaaactagtaagcgccaatcgcctgtttggtgataaaagcctgacattcaacgacctatacgtgtccgacgccttccataaggcctttctcgaagtaaacgaggaagggtctgaagctgccgcctccacggccgtagtgattgctggccggagtcttaatcctaaccgcgtcacttttaaagcaaaccggccattcctcgtcttcattcgggaggtgcccctaaatacaattattttcatgggcagagtagctaacccctgtgtcaaatag

SEQ ID NO: 9636 - DNA, 1395 bp, Artificial Sequence
  derived and/or modified sequence
atgtatagcaacgttattggtaccgtgacatccggcaaaaggaaagtctacctgctgtctctgttattgatagggttttgggactgcgtaacctgccacggaagcccagtagatatctgtaccgcaaaacctcgcgacatccctatgaaccccatgtgcatctatcggagtcctgagaaaaaagcaacagaggacgagggttccgagcagaagattcccgaagctacaaaccggcgagtatgggagctgtccaaggctaactcaagatttgctacgacattctaccaacacctcgccgactccaagaacgataatgataacatttttctctctcctttgagcatatcaacagcctttgccatgaccaagttgggtgcctgcaacgatactcttcaacagctgatggaggtgtttaaattcgacaccatatccgagaagaccagcgatcagattcatttctttttcgctaaactcaactgtagattgtaccgcaaggccaataaatcctctaagctcgtgtcagcgaatcgattgtttggcgataaaagcctcacctttaacgagacatatcaggacatttctgaactagtctatggtgcgaagctccagcccctagacttcaaggagaacgctgagcagtctagggccgctatcaacaaatgggttagtaataagacagaaggcagaatcaccgatgttataccgtcagaggccatcaacgaattaaccgttttagtgctggtgaataccatctactttaaaggactgtggaagagcaagttttcacccgaaaacacccggaaagaactcttttataaagctgatggagagagctgttcagcttcgatgatgtatcaggagggaaaattccgctatcgtcgagtcgctgagggtactcaagtactggaattgccttttaaaggcgatgatatcacaatggtgctcatactcccaaagcctgagaagtcactggccaaggtcgagaaggagttaaccccagaagtgttgcaagagtggctggatgaactcgaagaaatgatgctggtggtgcacatgccccgtttccgcattgaggacgggttttcacttaaagagcaattacaggacatgggcctagtagacctcttcagccccgagaagtcaaagctgcctggcatagtggctgaaggcagggacgacttgtacgtctcggacgcctttcacaaagcattcctcgaagtgaatgaagaaggttccgaagcggcagccagcaccgctgtggtgatcgctggacggagcctgaatccgaatcgtgtgaccttcaaagctaataggcctttcctcgttttcatcagggaggtccctctgaacaccattatctttatggggagggtcgctaatccctgcgtcaaatag
